United States Patent Application Publication US 2008/0113351 A1 - sequence listing, part 31

SEQ ID NO: 760226 - DNA, 19 bp, Mus musculus
  siRNA target sequence for 2500001K11Rik (NM_146103.1,1096-1114).
ggctctcattactgacttt

SEQ ID NO: 760227 - DNA, 19 bp, Mus musculus
  siRNA target sequence for 2500001K11Rik (NM_146103.1,1133-1151).
gcggaaagggggcaatcat

SEQ ID NO: 760228 - DNA, 19 bp, Mus musculus
  siRNA target sequence for 2500001K11Rik (NM_146103.1,1134-1152).
cggaaagggggcaatcatt

SEQ ID NO: 760229 - DNA, 19 bp, Mus musculus
  siRNA target sequence for 2500001K11Rik (NM_146103.1,1163-1181).
gattcgcagggatttctgt

SEQ ID NO: 760230 - DNA, 19 bp, Mus musculus
  siRNA target sequence for 2500001K11Rik (NM_146103.1,1172-1190).
ggatttctgtcagtttcta

SEQ ID NO: 760231 - DNA, 19 bp, Mus musculus
  siRNA target sequence for 2500001K11Rik (NM_146103.1,1180-1198).
gtcagtttctactagaagt

SEQ ID NO: 760232 - DNA, 19 bp, Mus musculus
  siRNA target sequence for 2500001K11Rik (NM_146103.1,1280-1298).
gtcagaagctccgaaaatt

SEQ ID NO: 760233 - DNA, 19 bp, Mus musculus
  siRNA target sequence for 2500001K11Rik (NM_146103.1,1362-1380).
ccacctcccaagttaaaca

SEQ ID NO: 760234 - DNA, 19 bp, Mus musculus
  siRNA target sequence for 2500001K11Rik (NM_146103.1,1368-1386).
cccaagttaaacattgata

SEQ ID NO: 760235 - DNA, 19 bp, Mus musculus
  siRNA target sequence for 2500001K11Rik (NM_146103.1,1369-1387).
ccaagttaaacattgatat

SEQ ID NO: 760236 - DNA, 19 bp, Mus musculus
  siRNA target sequence for 9630058J23Rik (NM_146105.3,152-170).
cgaccctcctacatacagt

SEQ ID NO: 760237 - DNA, 19 bp, Mus musculus
  siRNA target sequence for 9630058J23Rik (NM_146105.3,163-181).
catacagtctgcagataga

SEQ ID NO: 760238 - DNA, 19 bp, Mus musculus
  siRNA target sequence for 9630058J23Rik (NM_146105.3,238-256).
cttctgtctcagacgaaaa

SEQ ID NO: 760239 - DNA, 19 bp, Mus musculus
  siRNA target sequence for 9630058J23Rik (NM_146105.3,392-410).
ggagaacgcagaaaacact

SEQ ID NO: 760240 - DNA, 19 bp, Mus musculus
  siRNA target sequence for 9630058J23Rik (NM_146105.3,446-464).
gggacaggaccaaaaacta

SEQ ID NO: 760241 - DNA, 19 bp, Mus musculus
  siRNA target sequence for 9630058J23Rik (NM_146105.3,475-493).
gaagtccaagggccaaaaa

SEQ ID NO: 760242 - DNA, 19 bp, Mus musculus
  siRNA target sequence for 9630058J23Rik (NM_146105.3,758-776).
gcttgaaaggctgtatcat

SEQ ID NO: 760243 - DNA, 19 bp, Mus musculus
  siRNA target sequence for 9630058J23Rik (NM_146105.3,766-784).
ggctgtatcatgagcaatt

SEQ ID NO: 760244 - DNA, 19 bp, Mus musculus
  siRNA target sequence for 9630058J23Rik (NM_146105.3,770-788).
gtatcatgagcaattgctt

SEQ ID NO: 760245 - DNA, 19 bp, Mus musculus
  siRNA target sequence for 9630058J23Rik (NM_146105.3,779-797).
gcaattgcttgcaaatctt

SEQ ID NO: 760246 - DNA, 19 bp, Mus musculus
  siRNA target sequence for 9630058J23Rik (NM_146105.3,850-868).
cagtgacgcctctgagaaa

SEQ ID NO: 760247 - DNA, 19 bp, Mus musculus
  siRNA target sequence for 9630058J23Rik (NM_146105.3,854-872).
gacgcctctgagaaattca

SEQ ID NO: 760248 - DNA, 19 bp, Mus musculus
  siRNA target sequence for 9630058J23Rik (NM_146105.3,856-874).
cgcctctgagaaattcaga

SEQ ID NO: 760249 - DNA, 19 bp, Mus musculus
  siRNA target sequence for 9630058J23Rik (NM_146105.3,878-896).
gggatttaatggtgaagat

SEQ ID NO: 760250 - DNA, 19 bp, Mus musculus
  siRNA target sequence for 9630058J23Rik (NM_146105.3,879-897).
ggatttaatggtgaagatt

SEQ ID NO: 760251 - DNA, 19 bp, Mus musculus
  siRNA target sequence for 9630058J23Rik (NM_146105.3,880-898).
gatttaatggtgaagattt

SEQ ID NO: 760252 - DNA, 19 bp, Mus musculus
  siRNA target sequence for 9630058J23Rik (NM_146105.3,900-918).
gaacagcttgctaaaattt

SEQ ID NO: 760253 - DNA, 19 bp, Mus musculus
  siRNA target sequence for 9630058J23Rik (NM_146105.3,991-1009).
gccttgcaagggcgataat

SEQ ID NO: 760254 - DNA, 19 bp, Mus musculus
  siRNA target sequence for 9630058J23Rik (NM_146105.3,993-1011).
cttgcaagggcgataatgt

SEQ ID NO: 760255 - DNA, 19 bp, Mus musculus
  siRNA target sequence for 9630058J23Rik (NM_146105.3,1361-1379).
ggtggctcctcctagtgaa

SEQ ID NO: 760256 - DNA, 19 bp, Mus musculus
  siRNA target sequence for 9630058J23Rik (NM_146105.3,1362-1380).
gtggctcctcctagtgaat

SEQ ID NO: 760257 - DNA, 19 bp, Mus musculus
  siRNA target sequence for 9630058J23Rik (NM_146105.3,1364-1382).
ggctcctcctagtgaatca

SEQ ID NO: 760258 - DNA, 19 bp, Mus musculus
  siRNA target sequence for 9630058J23Rik (NM_146105.3,1366-1384).
ctcctcctagtgaatcagt

SEQ ID NO: 760259 - DNA, 19 bp, Mus musculus
  siRNA target sequence for 9630058J23Rik (NM_146105.3,1453-1471).
cacaggcacaccgaaaaga

SEQ ID NO: 760260 - DNA, 19 bp, Mus musculus
  siRNA target sequence for 9630058J23Rik (NM_146105.3,1705-1723).
gtgaagaccgagtgagtaa

SEQ ID NO: 760261 - DNA, 19 bp, Mus musculus
  siRNA target sequence for 9630058J23Rik (NM_146105.3,1710-1728).
gaccgagtgagtaaggaaa

SEQ ID NO: 760262 - DNA, 19 bp, Mus musculus
  siRNA target sequence for 9630058J23Rik (NM_146105.3,1720-1738).
gtaaggaaacggaagacta

SEQ ID NO: 760263 - DNA, 19 bp, Mus musculus
  siRNA target sequence for 9630058J23Rik (NM_146105.3,1951-1969).
ggctggtgtccatactgaa

SEQ ID NO: 760264 - DNA, 19 bp, Mus musculus
  siRNA target sequence for 9630058J23Rik (NM_146105.3,2032-2050).
gagtgcgattccaggaaat

SEQ ID NO: 760265 - DNA, 19 bp, Mus musculus
  siRNA target sequence for 9630058J23Rik (NM_146105.3,2207-2225).
cgtggacttctattacact

SEQ ID NO: 760266 - DNA, 19 bp, Mus musculus
  siRNA target sequence for 9630058J23Rik (NM_146105.3,2208-2226).
gtggacttctattacacta

SEQ ID NO: 760267 - DNA, 19 bp, Mus musculus
  siRNA target sequence for Aamp (NM_146110.1,221-239).
gacatgcgctggtttcagt

SEQ ID NO: 760268 - DNA, 19 bp, Mus musculus
  siRNA target sequence for Aamp (NM_146110.1,265-283).
gggacatgagtggtctttt

SEQ ID NO: 760269 - DNA, 19 bp, Mus musculus
  siRNA target sequence for Aamp (NM_146110.1,267-285).
gacatgagtggtcttttga

SEQ ID NO: 760270 - DNA, 19 bp, Mus musculus
  siRNA target sequence for Aamp (NM_146110.1,554-572).
ccccatccatgtactaaaa

SEQ ID NO: 760271 - DNA, 19 bp, Mus musculus
  siRNA target sequence for Aamp (NM_146110.1,824-842).
cggaaccttggccatctat

SEQ ID NO: 760272 - DNA, 19 bp, Mus musculus
  siRNA target sequence for Aamp (NM_146110.1,826-844).
gaaccttggccatctatga

SEQ ID NO: 760273 - DNA, 19 bp, Mus musculus
  siRNA target sequence for Aamp (NM_146110.1,878-896).
gcaccagtcgggcattgtt

SEQ ID NO: 760274 - DNA, 19 bp, Mus musculus
  siRNA target sequence for Tnrc15 (NM_146112.2,273-291).
gatatggccgagaagaaat

SEQ ID NO: 760275 - DNA, 19 bp, Mus musculus
  siRNA target sequence for Tnrc15 (NM_146112.2,304-322).
ccttaaagactacaagata

SEQ ID NO: 760276 - DNA, 19 bp, Mus musculus
  siRNA target sequence for Tnrc15 (NM_146112.2,376-394).
gccaccattggctctagta

SEQ ID NO: 760277 - DNA, 19 bp, Mus musculus
  siRNA target sequence for Tnrc15 (NM_146112.2,445-463).
cgctgtcctgcgattgaca

SEQ ID NO: 760278 - DNA, 19 bp, Mus musculus
  siRNA target sequence for Tnrc15 (NM_146112.2,500-518).
cctagaggtcgaagttctt

SEQ ID NO: 760279 - DNA, 19 bp, Mus musculus
  siRNA target sequence for Tnrc15 (NM_146112.2,540-558).
gaggtgaatgtggtttcta

SEQ ID NO: 760280 - DNA, 19 bp, Mus musculus
  siRNA target sequence for Tnrc15 (NM_146112.2,644-662).
ggtgacaggcgctttgaaa

SEQ ID NO: 760281 - DNA, 19 bp, Mus musculus
  siRNA target sequence for Tnrc15 (NM_146112.2,645-663).
gtgacaggcgctttgaaaa

SEQ ID NO: 760282 - DNA, 19 bp, Mus musculus
  siRNA target sequence for Tnrc15 (NM_146112.2,649-667).
caggcgctttgaaaaacca

SEQ ID NO: 760283 - DNA, 19 bp, Mus musculus
  siRNA target sequence for Tnrc15 (NM_146112.2,677-695).
gatgtagggagaccaaatt

SEQ ID NO: 760284 - DNA, 19 bp, Mus musculus
  siRNA target sequence for Tnrc15 (NM_146112.2,721-739).
ggggagaaagcatgaattt

SEQ ID NO: 760285 - DNA, 19 bp, Mus musculus
  siRNA target sequence for Tnrc15 (NM_146112.2,722-740).
gggagaaagcatgaattta

SEQ ID NO: 760286 - DNA, 19 bp, Mus musculus
  siRNA target sequence for Tnrc15 (NM_146112.2,723-741).
ggagaaagcatgaatttat

SEQ ID NO: 760287 - DNA, 19 bp, Mus musculus
  siRNA target sequence for Tnrc15 (NM_146112.2,734-752).
gaatttatacggtcagaaa

SEQ ID NO: 760288 - DNA, 19 bp, Mus musculus
  siRNA target sequence for Tnrc15 (NM_146112.2,753-771).
gtgaaaactggcgaatctt

SEQ ID NO: 760289 - DNA, 19 bp, Mus musculus
  siRNA target sequence for Tnrc15 (NM_146112.2,811-829).
gcggttagctggatcaaga

SEQ ID NO: 760290 - DNA, 19 bp, Mus musculus
  siRNA target sequence for Tnrc15 (NM_146112.2,879-897).
caggctggcgggaacacat

SEQ ID NO: 760291 - DNA, 19 bp, Mus musculus
  siRNA target sequence for Tnrc15 (NM_146112.2,903-921).
gccgtcggaggtttgagtt

SEQ ID NO: 760292 - DNA, 19 bp, Mus musculus
  siRNA target sequence for Tnrc15 (NM_146112.2,904-922).
ccgtcggaggtttgagttt

SEQ ID NO: 760293 - DNA, 19 bp, Mus musculus
  siRNA target sequence for Tnrc15 (NM_146112.2,1064-1082).
gcattcctctctctaaaaa

SEQ ID NO: 760294 - DNA, 19 bp, Mus musculus
  siRNA target sequence for Tnrc15 (NM_146112.2,1184-1202).
gccaaagaaccggataaga

SEQ ID NO: 760295 - DNA, 19 bp, Mus musculus
  siRNA target sequence for Tnrc15 (NM_146112.2,1186-1204).
caaagaaccggataagaca

SEQ ID NO: 760296 - DNA, 19 bp, Mus musculus
  siRNA target sequence for Tnrc15 (NM_146112.2,1262-1280).
cctcagacgtcattgtcat

SEQ ID NO: 760297 - DNA, 19 bp, Mus musculus
  siRNA target sequence for Tnrc15 (NM_146112.2,1382-1400).
gagaatcggtcagaaaata

SEQ ID NO: 760298 - DNA, 19 bp, Mus musculus
  siRNA target sequence for Tnrc15 (NM_146112.2,1384-1402).
gaatcggtcagaaaatagt

SEQ ID NO: 760299 - DNA, 19 bp, Mus musculus
  siRNA target sequence for Tnrc15 (NM_146112.2,1667-1685).
gcactagacgacgaaagat

SEQ ID NO: 760300 - DNA, 19 bp, Mus musculus
  siRNA target sequence for Tnrc15 (NM_146112.2,1668-1686).
cactagacgacgaaagatt

SEQ ID NO: 760301 - DNA, 19 bp, Mus musculus
  siRNA target sequence for Tnrc15 (NM_146112.2,1670-1688).
ctagacgacgaaagattga

SEQ ID NO: 760302 - DNA, 19 bp, Mus musculus
  siRNA target sequence for Tnrc15 (NM_146112.2,1673-1691).
gacgacgaaagattgacat

SEQ ID NO: 760303 - DNA, 19 bp, Mus musculus
  siRNA target sequence for Tnrc15 (NM_146112.2,1676-1694).
gacgaaagattgacatcaa

SEQ ID NO: 760304 - DNA, 19 bp, Mus musculus
  siRNA target sequence for Tnrc15 (NM_146112.2,1678-1696).
cgaaagattgacatcaaaa

SEQ ID NO: 760305 - DNA, 19 bp, Mus musculus
  siRNA target sequence for Tnrc15 (NM_146112.2,1731-1749).
cactgatgcatgaagcaat

SEQ ID NO: 760306 - DNA, 19 bp, Mus musculus
  siRNA target sequence for Tnrc15 (NM_146112.2,1771-1789).
ccctcagggggagattcaa

SEQ ID NO: 760307 - DNA, 19 bp, Mus musculus
  siRNA target sequence for Tnrc15 (NM_146112.2,1863-1881).
gagcatgtgatgaaagctt

SEQ ID NO: 760308 - DNA, 19 bp, Mus musculus
  siRNA target sequence for Tnrc15 (NM_146112.2,1886-1904).
ccccttggtgatatcatga

SEQ ID NO: 760309 - DNA, 19 bp, Mus musculus
  siRNA target sequence for Tnrc15 (NM_146112.2,1887-1905).
cccttggtgatatcatgaa

SEQ ID NO: 760310 - DNA, 19 bp, Mus musculus
  siRNA target sequence for Tnrc15 (NM_146112.2,1888-1906).
ccttggtgatatcatgaaa

SEQ ID NO: 760311 - DNA, 19 bp, Mus musculus
  siRNA target sequence for Tnrc15 (NM_146112.2,1892-1910).
ggtgatatcatgaaaatgt

SEQ ID NO: 760312 - DNA, 19 bp, Mus musculus
  siRNA target sequence for Tnrc15 (NM_146112.2,1947-1965).
ctcctcatatgggagaatt

SEQ ID NO: 760313 - DNA, 19 bp, Mus musculus
  siRNA target sequence for Tnrc15 (NM_146112.2,1950-1968).
ctcatatgggagaattgga

SEQ ID NO: 760314 - DNA, 19 bp, Mus musculus
  siRNA target sequence for Tnrc15 (NM_146112.2,2041-2059).
cttaatccaacaacagtat

SEQ ID NO: 760315 - DNA, 19 bp, Mus musculus
  siRNA target sequence for Tnrc15 (NM_146112.2,2207-2225).
ccagatactggctctatct

SEQ ID NO: 760316 - DNA, 19 bp, Mus musculus
  siRNA target sequence for Tnrc15 (NM_146112.2,2538-2556).
gccaacgggagcaagagat

SEQ ID NO: 760317 - DNA, 19 bp, Mus musculus
  siRNA target sequence for Tnrc15 (NM_146112.2,2539-2557).
ccaacgggagcaagagatt

SEQ ID NO: 760318 - DNA, 19 bp, Mus musculus
  siRNA target sequence for Tnrc15 (NM_146112.2,2934-2952).
cgtggggtcagcagtctaa

SEQ ID NO: 760319 - DNA, 19 bp, Mus musculus
  siRNA target sequence for Tnrc15 (NM_146112.2,2938-2956).
gggtcagcagtctaacaca

SEQ ID NO: 760320 - DNA, 19 bp, Mus musculus
  siRNA target sequence for Tnrc15 (NM_146112.2,2947-2965).
gtctaacacagcaacatgt

SEQ ID NO: 760321 - DNA, 19 bp, Mus musculus
  siRNA target sequence for Tnrc15 (NM_146112.2,3150-3168).
ccaagtctctactagagat

SEQ ID NO: 760322 - DNA, 19 bp, Mus musculus
  siRNA target sequence for Tnrc15 (NM_146112.2,3251-3269).
gcccggaacagcacacatt

SEQ ID NO: 760323 - DNA, 19 bp, Mus musculus
  siRNA target sequence for Tnrc15 (NM_146112.2,3297-3315).
ctgtatggggctctataaa

SEQ ID NO: 760324 - DNA, 19 bp, Mus musculus
  siRNA target sequence for Tnrc15 (NM_146112.2,3342-3360).
ctgagctagtcagtagtat

SEQ ID NO: 760325 - DNA, 19 bp, Mus musculus
  siRNA target sequence for Tnrc15 (NM_146112.2,3344-3362).
gagctagtcagtagtatct

SEQ ID NO: 760326 - DNA, 19 bp, Mus musculus
  siRNA target sequence for Tnrc15 (NM_146112.2,3352-3370).
cagtagtatctggagtaat

SEQ ID NO: 760327 - DNA, 19 bp, Mus musculus
  siRNA target sequence for Tnrc15 (NM_146112.2,3419-3437).
gaggtgggacctagaaatt

SEQ ID NO: 760328 - DNA, 19 bp, Mus musculus
  siRNA target sequence for Tnrc15 (NM_146112.2,3421-3439).
ggtgggacctagaaattca

SEQ ID NO: 760329 - DNA, 19 bp, Mus musculus
  siRNA target sequence for Tnrc15 (NM_146112.2,3424-3442).
gggacctagaaattcaaca

SEQ ID NO: 760330 - DNA, 19 bp, Mus musculus
  siRNA target sequence for Tnrc15 (NM_146112.2,3428-3446).
cctagaaattcaacaaata

SEQ ID NO: 760331 - DNA, 19 bp, Mus musculus
  siRNA target sequence for Tnrc15 (NM_146112.2,3429-3447).
ctagaaattcaacaaataa

SEQ ID NO: 760332 - DNA, 19 bp, Mus musculus
  siRNA target sequence for Tnrc15 (NM_146112.2,3485-3503).
gtgtctaaccggcagaata

SEQ ID NO: 760333 - DNA, 19 bp, Mus musculus
  siRNA target sequence for Tnrc15 (NM_146112.2,3489-3507).
ctaaccggcagaataagaa

SEQ ID NO: 760334 - DNA, 19 bp, Mus musculus
  siRNA target sequence for Tnrc15 (NM_146112.2,3493-3511).
ccggcagaataagaaagta

SEQ ID NO: 760335 - DNA, 19 bp, Mus musculus
  siRNA target sequence for Tnrc15 (NM_146112.2,3535-3553).
gctctttcagggagtaaat

SEQ ID NO: 760336 - DNA, 19 bp, Mus musculus
  siRNA target sequence for Tnrc15 (NM_146112.2,3536-3554).
ctctttcagggagtaaata

SEQ ID NO: 760337 - DNA, 19 bp, Mus musculus
  siRNA target sequence for Tnrc15 (NM_146112.2,3599-3617).
gcccttaatacggcaaata

SEQ ID NO: 760338 - DNA, 19 bp, Mus musculus
  siRNA target sequence for Tnrc15 (NM_146112.2,3600-3618).
cccttaatacggcaaataa

SEQ ID NO: 760339 - DNA, 19 bp, Mus musculus
  siRNA target sequence for Tnrc15 (NM_146112.2,3602-3620).
cttaatacggcaaataact

SEQ ID NO: 760340 - DNA, 19 bp, Mus musculus
  siRNA target sequence for Tnrc15 (NM_146112.2,3622-3640).
ggatgttcccacgtttgtt

SEQ ID NO: 760341 - DNA, 19 bp, Mus musculus
  siRNA target sequence for Tnrc15 (NM_146112.2,3623-3641).
gatgttcccacgtttgttt

SEQ ID NO: 760342 - DNA, 19 bp, Mus musculus
  siRNA target sequence for Tnrc15 (NM_146112.2,3666-3684).
cttatgaagtccatgacta

SEQ ID NO: 760343 - DNA, 19 bp, Mus musculus
  siRNA target sequence for Tnrc15 (NM_146112.2,3671-3689).
gaagtccatgactatacca

SEQ ID NO: 760344 - DNA, 19 bp, Mus musculus
  siRNA target sequence for Tnrc15 (NM_146112.2,3682-3700).
ctataccagggcctattta

SEQ ID NO: 760345 - DNA, 19 bp, Mus musculus
  siRNA target sequence for Tnrc15 (NM_146112.2,3692-3710).
gcctatttaggagatactt

SEQ ID NO: 760346 - DNA, 19 bp, Mus musculus
  siRNA target sequence for Tnrc15 (NM_146112.2,3743-3761).
gaacgccgtgccaaacaga

SEQ ID NO: 760347 - DNA, 19 bp, Mus musculus
  siRNA target sequence for Tnrc15 (NM_146112.2,3747-3765).
gccgtgccaaacagaaagt

SEQ ID NO: 760348 - DNA, 19 bp, Mus musculus
  siRNA target sequence for Tnrc15 (NM_146112.2,3815-3833).
gtctgggggatgaaccata

SEQ ID NO: 760349 - DNA, 19 bp, Mus musculus
  siRNA target sequence for Tnrc15 (NM_146112.2,3820-3838).
ggggatgaaccatagtaca

SEQ ID NO: 760350 - DNA, 19 bp, Mus musculus
  siRNA target sequence for Tnrc15 (NM_146112.2,3839-3857).
ctccattcggtatttcaga

SEQ ID NO: 760351 - DNA, 19 bp, Mus musculus
  siRNA target sequence for Tnrc15 (NM_146112.2,3847-3865).
ggtatttcagaccaatcaa

SEQ ID NO: 760352 - DNA, 19 bp, Mus musculus
  siRNA target sequence for Tnrc15 (NM_146112.2,3935-3953).
cgagcagatcccagtttat

SEQ ID NO: 760353 - DNA, 19 bp, Mus musculus
  siRNA target sequence for Tnrc15 (NM_146112.2,3946-3964).
cagtttattagggttttca

SEQ ID NO: 760354 - DNA, 19 bp, Mus musculus
  siRNA target sequence for Tnrc15 (NM_146112.2,3975-3993).
cgtcagagcgactgaacat

SEQ ID NO: 760355 - DNA, 19 bp, Mus musculus
  siRNA target sequence for Dclre1c (NM_146114.1,88-106).
cagatggcggagtatccaa

SEQ ID NO: 760356 - DNA, 19 bp, Mus musculus
  siRNA target sequence for Dclre1c (NM_146114.1,145-163).
gcccgtgcctacttccttt

SEQ ID NO: 760357 - DNA, 19 bp, Mus musculus
  siRNA target sequence for Dclre1c (NM_146114.1,281-299).
ctagcccaaagtacagatt

SEQ ID NO: 760358 - DNA, 19 bp, Mus musculus
  siRNA target sequence for Dclre1c (NM_146114.1,331-349).
gaaactcctacgcagatat

SEQ ID NO: 760359 - DNA, 19 bp, Mus musculus
  siRNA target sequence for Dclre1c (NM_146114.1,338-356).
ctacgcagatatctttagt

SEQ ID NO: 760360 - DNA, 19 bp, Mus musculus
  siRNA target sequence for Dclre1c (NM_146114.1,341-359).
cgcagatatctttagttga

SEQ ID NO: 760361 - DNA, 19 bp, Mus musculus
  siRNA target sequence for Dclre1c (NM_146114.1,573-591).
ctgtgacccaaggttttat

SEQ ID NO: 760362 - DNA, 19 bp, Mus musculus
  siRNA target sequence for Dclre1c (NM_146114.1,577-595).
gacccaaggttttatcaga

SEQ ID NO: 760363 - DNA, 19 bp, Mus musculus
  siRNA target sequence for Dclre1c (NM_146114.1,599-617).
caagtcgtgagcagtgttt

SEQ ID NO: 760364 - DNA, 19 bp, Mus musculus
  siRNA target sequence for Dclre1c (NM_146114.1,681-699).
gaactgtaaagcagcttat

SEQ ID NO: 760365 - DNA, 19 bp, Mus musculus
  siRNA target sequence for Dclre1c (NM_146114.1,694-712).
gcttatggctacgagtatt

SEQ ID NO: 760366 - DNA, 19 bp, Mus musculus
  siRNA target sequence for Dclre1c (NM_146114.1,695-713).
cttatggctacgagtattt

SEQ ID NO: 760367 - DNA, 19 bp, Mus musculus
  siRNA target sequence for Dclre1c (NM_146114.1,886-904).
ggtataacttcccaaaaca

SEQ ID NO: 760368 - DNA, 19 bp, Mus musculus
  siRNA target sequence for Dclre1c (NM_146114.1,887-905).
gtataacttcccaaaacaa

SEQ ID NO: 760369 - DNA, 19 bp, Mus musculus
  siRNA target sequence for Dclre1c (NM_146114.1,1029-1047).
ctccttcagtgagattaaa

SEQ ID NO: 760370 - DNA, 19 bp, Mus musculus
  siRNA target sequence for Dclre1c (NM_146114.1,1048-1066).
gattttttgagctacatct

SEQ ID NO: 760371 - DNA, 19 bp, Mus musculus
  siRNA target sequence for Dclre1c (NM_146114.1,1145-1163).
gccggtctccccaaagtgt

SEQ ID NO: 760372 - DNA, 19 bp, Mus musculus
  siRNA target sequence for Dclre1c (NM_146114.1,1197-1215).
gagagccagaacaatccat

SEQ ID NO: 760373 - DNA, 19 bp, Mus musculus
  siRNA target sequence for Dclre1c (NM_146114.1,1202-1220).
ccagaacaatccatcttga

SEQ ID NO: 760374 - DNA, 19 bp, Mus musculus
  siRNA target sequence for Dclre1c (NM_146114.1,1251-1269).
ccctctaccgacaccttta

SEQ ID NO: 760375 - DNA, 19 bp, Mus musculus
  siRNA target sequence for Dclre1c (NM_146114.1,1391-1409).
gcccttctttggctaactt

SEQ ID NO: 760376 - DNA, 19 bp, Mus musculus
  siRNA target sequence for Dclre1c (NM_146114.1,1393-1411).
ccttctttggctaacttca

SEQ ID NO: 760377 - DNA, 19 bp, Mus musculus
  siRNA target sequence for Dclre1c (NM_146114.1,1394-1412).
cttctttggctaacttcat

SEQ ID NO: 760378 - DNA, 19 bp, Mus musculus
  siRNA target sequence for Dclre1c (NM_146114.1,1397-1415).
ctttggctaacttcataga

SEQ ID NO: 760379 - DNA, 19 bp, Mus musculus
  siRNA target sequence for Dclre1c (NM_146114.1,1493-1511).
cgacactcgtccagcaaaa

SEQ ID NO: 760380 - DNA, 19 bp, Mus musculus
  siRNA target sequence for Dclre1c (NM_146114.1,1699-1717).
gactccacccatatctctt

SEQ ID NO: 760381 - DNA, 19 bp, Mus musculus
  siRNA target sequence for Dclre1c (NM_146114.1,1777-1795).
cagtgtgatactgttttgt

SEQ ID NO: 760382 - DNA, 19 bp, Mus musculus
  siRNA target sequence for Dclre1c (NM_146114.1,1794-1812).
gttatcttcccaagagaaa

SEQ ID NO: 760383 - DNA, 19 bp, Mus musculus
  siRNA target sequence for Dclre1c (NM_146114.1,1819-1837).
ggggatagtacctctttaa

SEQ ID NO: 760384 - DNA, 19 bp, Mus musculus
  siRNA target sequence for Dclre1c (NM_146114.1,1820-1838).
gggatagtacctctttaaa

SEQ ID NO: 760385 - DNA, 19 bp, Mus musculus
  siRNA target sequence for Dclre1c (NM_146114.1,1847-1865).
cctacaaaccaaaactcaa

SEQ ID NO: 760386 - DNA, 19 bp, Mus musculus
  siRNA target sequence for Dclre1c (NM_146114.1,1848-1866).
ctacaaaccaaaactcaaa

SEQ ID NO: 760387 - DNA, 19 bp, Mus musculus
  siRNA target sequence for Dclre1c (NM_146114.1,1877-1895).
ctgcctctcaaatagaaca

SEQ ID NO: 760388 - DNA, 19 bp, Mus musculus
  siRNA target sequence for Dclre1c (NM_146114.1,1955-1973).
gagccccttgtcttgtaga

SEQ ID NO: 760389 - DNA, 19 bp, Mus musculus
  siRNA target sequence for Dclre1c (NM_146114.1,1959-1977).
cccttgtcttgtagaacta

SEQ ID NO: 760390 - DNA, 19 bp, Mus musculus
  siRNA target sequence for Dclre1c (NM_146114.1,2000-2018).
ctccacctgagaagacatt

SEQ ID NO: 760391 - DNA, 19 bp, Mus musculus
  siRNA target sequence for Dclre1c (NM_146114.1,2048-2066).
gctcctctgactttgaaat

SEQ ID NO: 760392 - DNA, 19 bp, Mus musculus
  siRNA target sequence for Dclre1c (NM_146114.1,2093-2111).
ctacgccagagcatttgca

SEQ ID NO: 760393 - DNA, 19 bp, Mus musculus
  siRNA target sequence for Dclre1c (NM_146114.1,2101-2119).
gagcatttgcagtgcttat

SEQ ID NO: 760394 - DNA, 19 bp, Mus musculus
  siRNA target sequence for Dclre1c (NM_146114.1,2128-2146).
ctggcaacaggtcaaagta

SEQ ID NO: 760395 - DNA, 19 bp, Mus musculus
  siRNA target sequence for Dclre1c (NM_146114.1,2130-2148).
ggcaacaggtcaaagtata

SEQ ID NO: 760396 - DNA, 19 bp, Mus musculus
  siRNA target sequence for Dclre1c (NM_146114.1,2132-2150).
caacaggtcaaagtatagt

SEQ ID NO: 760397 - DNA, 19 bp, Mus musculus
  siRNA target sequence for Dclre1c (NM_146114.1,2135-2153).
caggtcaaagtatagttgt

SEQ ID NO: 760398 - DNA, 19 bp, Mus musculus
  siRNA target sequence for BC004853 (NM_146117.1,133-151).
ggaactgccccttctaaat

SEQ ID NO: 760399 - DNA, 19 bp, Mus musculus
  siRNA target sequence for BC004853 (NM_146117.1,171-189).
ccccgaggcatgttcatgt

SEQ ID NO: 760400 - DNA, 19 bp, Mus musculus
  siRNA target sequence for BC004853 (NM_146117.1,172-190).
cccgaggcatgttcatgtt

SEQ ID NO: 760401 - DNA, 19 bp, Mus musculus
  siRNA target sequence for BC004853 (NM_146117.1,174-192).
cgaggcatgttcatgttca

SEQ ID NO: 760402 - DNA, 19 bp, Mus musculus
  siRNA target sequence for BC004853 (NM_146117.1,391-409).
ggtctgggagtgttgcaat

SEQ ID NO: 760403 - DNA, 19 bp, Mus musculus
  siRNA target sequence for BC004853 (NM_146117.1,558-576).
cagcctgcaggacaattca

SEQ ID NO: 760404 - DNA, 19 bp, Mus musculus
  siRNA target sequence for BC004853 (NM_146117.1,560-578).
gcctgcaggacaattcact

SEQ ID NO: 760405 - DNA, 19 bp, Mus musculus
  siRNA target sequence for BC004853 (NM_146117.1,562-580).
ctgcaggacaattcactat

SEQ ID NO: 760406 - DNA, 19 bp, Mus musculus
  siRNA target sequence for BC004853 (NM_146117.1,589-607).
gaggcgggtttgctgaata

SEQ ID NO: 760407 - DNA, 19 bp, Mus musculus
  siRNA target sequence for BC004853 (NM_146117.1,592-610).
gcgggtttgctgaataact

SEQ ID NO: 760408 - DNA, 19 bp, Mus musculus
  siRNA target sequence for BC004853 (NM_146117.1,700-718).
ccgcgtccagcctcagaaa

SEQ ID NO: 760409 - DNA, 19 bp, Mus musculus
  siRNA target sequence for BC004853 (NM_146117.1,779-797).
cggatgccgccttcaaaca

SEQ ID NO: 760410 - DNA, 19 bp, Mus musculus
  siRNA target sequence for BC004853 (NM_146117.1,941-959).
ccacggtgcgccacttact

SEQ ID NO: 760411 - DNA, 19 bp, Mus musculus
  siRNA target sequence for BC004853 (NM_146117.1,942-960).
cacggtgcgccacttacta

SEQ ID NO: 760412 - DNA, 19 bp, Mus musculus
  siRNA target sequence for 9130404D14Rik (NM_146119.1,179-197).
cagcacatcgcagagaaaa

SEQ ID NO: 760413 - DNA, 19 bp, Mus musculus
  siRNA target sequence for 9130404D14Rik (NM_146119.1,329-347).
ctggatgaacgcatcatct

SEQ ID NO: 760414 - DNA, 19 bp, Mus musculus
  siRNA target sequence for 9130404D14Rik (NM_146119.1,343-361).
catcttctccggaaacctt

SEQ ID NO: 760415 - DNA, 19 bp, Mus musculus
  siRNA target sequence for 9130404D14Rik (NM_146119.1,405-423).
gcctggtgccccataacta

SEQ ID NO: 760416 - DNA, 19 bp, Mus musculus
  siRNA target sequence for 9130404D14Rik (NM_146119.1,406-424).
cctggtgccccataactat

SEQ ID NO: 760417 - DNA, 19 bp, Mus musculus
  siRNA target sequence for 9130404D14Rik (NM_146119.1,425-443).
gggctggtgctatatgaga

SEQ ID NO: 760418 - DNA, 19 bp, Mus musculus
  siRNA target sequence for 9130404D14Rik (NM_146119.1,426-444).
ggctggtgctatatgagaa

SEQ ID NO: 760419 - DNA, 19 bp, Mus musculus
  siRNA target sequence for 9130404D14Rik (NM_146119.1,553-571).
gccagggaccacatcgaaa

SEQ ID NO: 760420 - DNA, 19 bp, Mus musculus
  siRNA target sequence for 9130404D14Rik (NM_146119.1,554-572).
ccagggaccacatcgaaat

SEQ ID NO: 760421 - DNA, 19 bp, Mus musculus
  siRNA target sequence for 9130404D14Rik (NM_146119.1,629-647).
ccttacgcccgacactatt

SEQ ID NO: 760422 - DNA, 19 bp, Mus musculus
  siRNA target sequence for 9130404D14Rik (NM_146119.1,630-648).
cttacgcccgacactatta

SEQ ID NO: 760423 - DNA, 19 bp, Mus musculus
  siRNA target sequence for 9130404D14Rik (NM_146119.1,635-653).
gcccgacactattacttct

SEQ ID NO: 760424 - DNA, 19 bp, Mus musculus
  siRNA target sequence for 9130404D14Rik (NM_146119.1,726-744).
ggatcccggagaactcaaa

SEQ ID NO: 760425 - DNA, 19 bp, Mus musculus
  siRNA target sequence for 9130404D14Rik (NM_146119.1,748-766).
ggagggccctgcattcaca

SEQ ID NO: 760426 - DNA, 19 bp, Mus musculus
  siRNA target sequence for 9130404D14Rik (NM_146119.1,777-795).
gcatgtaccgccagtcaaa

SEQ ID NO: 760427 - DNA, 19 bp, Mus musculus
  siRNA target sequence for 9130404D14Rik (NM_146119.1,957-975).
ctgtgtaccgcctggtatt

SEQ ID NO: 760428 - DNA, 19 bp, Mus musculus
  siRNA target sequence for 9130404D14Rik (NM_146119.1,961-979).
gtaccgcctggtatttgaa

SEQ ID NO: 760429 - DNA, 19 bp, Mus musculus
  siRNA target sequence for 9130404D14Rik (NM_146119.1,1212-1230).
ccgaggtgcgggatgtctt

SEQ ID NO: 760430 - DNA, 19 bp, Mus musculus
  siRNA target sequence for 9130404D14Rik (NM_146119.1,1323-1341).
cataccaccccctgaagat

SEQ ID NO: 760431 - DNA, 19 bp, Mus musculus
  siRNA target sequence for 9130404D14Rik (NM_146119.1,1407-1425).
ctagcacttccgtgttcaa

SEQ ID NO: 760432 - DNA, 19 bp, Mus musculus
  siRNA target sequence for 9130404D14Rik (NM_146119.1,1466-1484).
gctgtgtacaccttcgaaa

SEQ ID NO: 760433 - DNA, 19 bp, Mus musculus
  siRNA target sequence for 9130404D14Rik (NM_146119.1,1556-1574).
gagcgcgtgctgaagaaat

SEQ ID NO: 760434 - DNA, 19 bp, Mus musculus
  siRNA target sequence for 9130404D14Rik (NM_146119.1,1806-1824).
cagtgcagcgcaaacacaa

SEQ ID NO: 760435 - DNA, 19 bp, Mus musculus
  siRNA target sequence for 9130404D14Rik (NM_146119.1,1840-1858).
catggttctgcacaatagt

SEQ ID NO: 760436 - DNA, 19 bp, Mus musculus
  siRNA target sequence for Rabgap1 (NM_146121.1,297-315).
gcgatttgagcgggaaaat

SEQ ID NO: 760437 - DNA, 19 bp, Mus musculus
  siRNA target sequence for Rabgap1 (NM_146121.1,298-316).
cgatttgagcgggaaaata

SEQ ID NO: 760438 - DNA, 19 bp, Mus musculus
  siRNA target sequence for Rabgap1 (NM_146121.1,317-335).
ggcggctgcaagaagctaa

SEQ ID NO: 760439 - DNA, 19 bp, Mus musculus
  siRNA target sequence for Rabgap1 (NM_146121.1,508-526).
gaggagtctgcacagttaa

SEQ ID NO: 760440 - DNA, 19 bp, Mus musculus
  siRNA target sequence for Rabgap1 (NM_146121.1,595-613).
gactataagcagatttgtt

SEQ ID NO: 760441 - DNA, 19 bp, Mus musculus
  siRNA target sequence for Rabgap1 (NM_146121.1,606-624).
gatttgttctcaattgagt

SEQ ID NO: 760442 - DNA, 19 bp, Mus musculus
  siRNA target sequence for Rabgap1 (NM_146121.1,614-632).
ctcaattgagtgaaagact

SEQ ID NO: 760443 - DNA, 19 bp, Mus musculus
  siRNA target sequence for Rabgap1 (NM_146121.1,669-687).
gaaaatccggcaaaaggta

SEQ ID NO: 760444 - DNA, 19 bp, Mus musculus
  siRNA target sequence for Rabgap1 (NM_146121.1,700-718).
cgctgccgagacttcttca

SEQ ID NO: 760445 - DNA, 19 bp, Mus musculus
  siRNA target sequence for Rabgap1 (NM_146121.1,701-719).
gctgccgagacttcttcaa

SEQ ID NO: 760446 - DNA, 19 bp, Mus musculus
  siRNA target sequence for Rabgap1 (NM_146121.1,704-722).
gccgagacttcttcaacaa

SEQ ID NO: 760447 - DNA, 19 bp, Mus musculus
  siRNA target sequence for Rabgap1 (NM_146121.1,747-765).
ctcagccaagggagtttca

SEQ ID NO: 760448 - DNA, 19 bp, Mus musculus
  siRNA target sequence for Rabgap1 (NM_146121.1,943-961).
cgaacactgagctccataa

SEQ ID NO: 760449 - DNA, 19 bp, Mus musculus
  siRNA target sequence for 6030446I19Rik (NM_146122.2,222-240).
ggctccaggatcaagcaaa

SEQ ID NO: 760450 - DNA, 19 bp, Mus musculus
  siRNA target sequence for 6030446I19Rik (NM_146122.2,223-241).
gctccaggatcaagcaaaa

SEQ ID NO: 760451 - DNA, 19 bp, Mus musculus
  siRNA target sequence for 6030446I19Rik (NM_146122.2,393-411).
gtggacagcctcacagtta

SEQ ID NO: 760452 - DNA, 19 bp, Mus musculus
  siRNA target sequence for 6030446I19Rik (NM_146122.2,470-488).
cgggttctgccgcttatct

SEQ ID NO: 760453 - DNA, 19 bp, Mus musculus
  siRNA target sequence for 6030446I19Rik (NM_146122.2,471-489).
gggttctgccgcttatctt

SEQ ID NO: 760454 - DNA, 19 bp, Mus musculus
  siRNA target sequence for 6030446I19Rik (NM_146122.2,473-491).
gttctgccgcttatcttca

SEQ ID NO: 760455 - DNA, 19 bp, Mus musculus
  siRNA target sequence for 6030446I19Rik (NM_146122.2,495-513).
gccaagagctgcttctgta

SEQ ID NO: 760456 - DNA, 19 bp, Mus musculus
  siRNA target sequence for 6030446I19Rik (NM_146122.2,496-514).
ccaagagctgcttctgtat

SEQ ID NO: 760457 - DNA, 19 bp, Mus musculus
  siRNA target sequence for 6030446I19Rik (NM_146122.2,500-518).
gagctgcttctgtatctta

SEQ ID NO: 760458 - DNA, 19 bp, Mus musculus
  siRNA target sequence for 6030446I19Rik (NM_146122.2,528-546).
ccctggttcgaggtattct

SEQ ID NO: 760459 - DNA, 19 bp, Mus musculus
  siRNA target sequence for 6030446I19Rik (NM_146122.2,529-547).
cctggttcgaggtattcta

SEQ ID NO: 760460 - DNA, 19 bp, Mus musculus
  siRNA target sequence for 6030446I19Rik (NM_146122.2,530-548).
ctggttcgaggtattctat

SEQ ID NO: 760461 - DNA, 19 bp, Mus musculus
  siRNA target sequence for 6030446I19Rik (NM_146122.2,532-550).
ggttcgaggtattctataa

SEQ ID NO: 760462 - DNA, 19 bp, Mus musculus
  siRNA target sequence for 6030446I19Rik (NM_146122.2,580-598).
cgaaacgacaggaaagtca

SEQ ID NO: 760463 - DNA, 19 bp, Mus musculus
  siRNA target sequence for 6030446I19Rik (NM_146122.2,602-620).
gaatgaacttcttgaaact

SEQ ID NO: 760464 - DNA, 19 bp, Mus musculus
  siRNA target sequence for 6030446I19Rik (NM_146122.2,713-731).
catacctgagaatagaaat

SEQ ID NO: 760465 - DNA, 19 bp, Mus musculus
  siRNA target sequence for 6030446I19Rik (NM_146122.2,801-819).
cgccggatcctcatcatct

SEQ ID NO: 760466 - DNA, 19 bp, Mus musculus
  siRNA target sequence for 6030446I19Rik (NM_146122.2,953-971).
cctcataggaatccattta

SEQ ID NO: 760467 - DNA, 19 bp, Mus musculus
  siRNA target sequence for 6030446I19Rik (NM_146122.2,954-972).
ctcataggaatccatttaa

SEQ ID NO: 760468 - DNA, 19 bp, Mus musculus
  siRNA target sequence for 6030446I19Rik (NM_146122.2,1000-1018).
ccctcgatgatgttgtgat

SEQ ID NO: 760469 - DNA, 19 bp, Mus musculus
  siRNA target sequence for 6030446I19Rik (NM_146122.2,1005-1023).
gatgatgttgtgatcttga

SEQ ID NO: 760470 - DNA, 19 bp, Mus musculus
  siRNA target sequence for 6030446I19Rik (NM_146122.2,1189-1207).
ggaatgcactgaaaattga

SEQ ID NO: 760471 - DNA, 19 bp, Mus musculus
  siRNA target sequence for 6030446I19Rik (NM_146122.2,1327-1345).
gccgactagaccttctcaa

SEQ ID NO: 760472 - DNA, 19 bp, Mus musculus
  siRNA target sequence for 6030446I19Rik (NM_146122.2,1328-1346).
ccgactagaccttctcaat

SEQ ID NO: 760473 - DNA, 19 bp, Mus musculus
  siRNA target sequence for 6030446I19Rik (NM_146122.2,1329-1347).
cgactagaccttctcaatt

SEQ ID NO: 760474 - DNA, 19 bp, Mus musculus
  siRNA target sequence for 6030446I19Rik (NM_146122.2,1357-1375).
gtttcagcgatgtctttga

SEQ ID NO: 760475 - DNA, 19 bp, Mus musculus
  siRNA target sequence for 6030446I19Rik (NM_146122.2,1395-1413).
gagtatgccggcagtgata

SEQ ID NO: 760476 - DNA, 19 bp, Mus musculus
  siRNA target sequence for 6030446I19Rik (NM_146122.2,1397-1415).
gtatgccggcagtgataaa

SEQ ID NO: 760477 - DNA, 19 bp, Mus musculus
  siRNA target sequence for 6030446I19Rik (NM_146122.2,1401-1419).
gccggcagtgataaactgt

SEQ ID NO: 760478 - DNA, 19 bp, Mus musculus
  siRNA target sequence for 6030446I19Rik (NM_146122.2,1449-1467).
ggaagtggtgcgattctga

SEQ ID NO: 760479 - DNA, 19 bp, Mus musculus
  siRNA target sequence for 6030446I19Rik (NM_146122.2,1456-1474).
gtgcgattctgaatactgt

SEQ ID NO: 760480 - DNA, 19 bp, Mus musculus
  siRNA target sequence for 6030446I19Rik (NM_146122.2,1485-1503).
gctaacccagccatgaaga

SEQ ID NO: 760481 - DNA, 19 bp, Mus musculus
  siRNA target sequence for 6030446I19Rik (NM_146122.2,1508-1526).
ctacaagtttgcaaaagat

SEQ ID NO: 760482 - DNA, 19 bp, Mus musculus
  siRNA target sequence for 6030446I19Rik (NM_146122.2,1527-1545).
catgcaaaaatgggaataa

SEQ ID NO: 760483 - DNA, 19 bp, Mus musculus
  siRNA target sequence for 6030446I19Rik (NM_146122.2,1804-1822).
cataccggacattgaaaga

SEQ ID NO: 760484 - DNA, 19 bp, Mus musculus
  siRNA target sequence for 6030446I19Rik (NM_146122.2,1810-1828).
ggacattgaaagaatcaga

SEQ ID NO: 760485 - DNA, 19 bp, Mus musculus
  siRNA target sequence for 6030446I19Rik (NM_146122.2,2035-2053).
cagggagctttgattacca

SEQ ID NO: 760486 - DNA, 19 bp, Mus musculus
  siRNA target sequence for 6030446I19Rik (NM_146122.2,2074-2092).
gtgagaggggccttagcat

SEQ ID NO: 760487 - DNA, 19 bp, Mus musculus
  siRNA target sequence for 6030446I19Rik (NM_146122.2,2105-2123).
gaagcttgctcatccatat

SEQ ID NO: 760488 - DNA, 19 bp, Mus musculus
  siRNA target sequence for 6030446I19Rik (NM_146122.2,2586-2604).
ctcctggatccacttaaca

SEQ ID NO: 760489 - DNA, 19 bp, Mus musculus
  siRNA target sequence for 6030446I19Rik (NM_146122.2,2588-2606).
cctggatccacttaacaca

SEQ ID NO: 760490 - DNA, 19 bp, Mus musculus
  siRNA target sequence for 6030446I19Rik (NM_146122.2,2650-2668).
gtgcagccaccccattcat

SEQ ID NO: 760491 - DNA, 19 bp, Mus musculus
  siRNA target sequence for 6030446I19Rik (NM_146122.2,2696-2714).
gacacccaccccttttgta

SEQ ID NO: 760492 - DNA, 19 bp, Mus musculus
  siRNA target sequence for 6030446I19Rik (NM_146122.2,2840-2858).
cattctattgtctagttct

SEQ ID NO: 760493 - DNA, 19 bp, Mus musculus
  siRNA target sequence for 6030446I19Rik (NM_146122.2,2986-3004).
cctccaggatccgaacatt

SEQ ID NO: 760494 - DNA, 19 bp, Mus musculus
  siRNA target sequence for 6030446I19Rik (NM_146122.2,3145-3163).
gagacccctttgaggattt

SEQ ID NO: 760495 - DNA, 19 bp, Mus musculus
  siRNA target sequence for B230365D05Rik (NM_146124.2,967-985).
ctcgccaagtgctcaagta

SEQ ID NO: 760496 - DNA, 19 bp, Mus musculus
  siRNA target sequence for B230365D05Rik (NM_146124.2,970-988).
gccaagtgctcaagtatga

SEQ ID NO: 760497 - DNA, 19 bp, Mus musculus
  siRNA target sequence for B230365D05Rik (NM_146124.2,971-989).
ccaagtgctcaagtatgat

SEQ ID NO: 760498 - DNA, 19 bp, Mus musculus
  siRNA target sequence for 5430432M24Rik (NM_146127.1,806-824).
gggcagcagccgatcttga

SEQ ID NO: 760499 - DNA, 19 bp, Mus musculus
  siRNA target sequence for 5430432M24Rik (NM_146127.1,820-838).
cttgagcgcttttttaact

SEQ ID NO: 760500 - DNA, 19 bp, Mus musculus
  siRNA target sequence for F730014I05Rik (NM_146129.2,347-365).
gagcctcccttctaagtca

SEQ ID NO: 760501 - DNA, 19 bp, Mus musculus
  siRNA target sequence for F730014I05Rik (NM_146129.2,481-499).
gagagccgtccctactact

SEQ ID NO: 760502 - DNA, 19 bp, Mus musculus
  siRNA target sequence for F730014I05Rik (NM_146129.2,485-503).
gccgtccctactacttcaa

SEQ ID NO: 760503 - DNA, 19 bp, Mus musculus
  siRNA target sequence for F730014I05Rik (NM_146129.2,674-692).
gtggcaacggagtgaagaa

SEQ ID NO: 760504 - DNA, 19 bp, Mus musculus
  siRNA target sequence for F730014I05Rik (NM_146129.2,781-799).
ggttcatccactgaagata

SEQ ID NO: 760505 - DNA, 19 bp, Mus musculus
  siRNA target sequence for F730014I05Rik (NM_146129.2,899-917).
cacaccctgatgttgagtt

SEQ ID NO: 760506 - DNA, 19 bp, Mus musculus
  siRNA target sequence for F730014I05Rik (NM_146129.2,922-940).
cgctcgcagctcatcttga

SEQ ID NO: 760507 - DNA, 19 bp, Mus musculus
  siRNA target sequence for F730014I05Rik (NM_146129.2,923-941).
gctcgcagctcatcttgaa

SEQ ID NO: 760508 - DNA, 19 bp, Mus musculus
  siRNA target sequence for F730014I05Rik (NM_146129.2,1091-1109).
catccatgtttcgtgaaat

SEQ ID NO: 760509 - DNA, 19 bp, Mus musculus
  siRNA target sequence for F730014I05Rik (NM_146129.2,1094-1112).
ccatgtttcgtgaaattat

SEQ ID NO: 760510 - DNA, 19 bp, Mus musculus
  siRNA target sequence for F730014I05Rik (NM_146129.2,1098-1116).
gtttcgtgaaattatgaat

SEQ ID NO: 760511 - DNA, 19 bp, Mus musculus
  siRNA target sequence for F730014I05Rik (NM_146129.2,1102-1120).
cgtgaaattatgaatgaca

SEQ ID NO: 760512 - DNA, 19 bp, Mus musculus
  siRNA target sequence for F730014I05Rik (NM_146129.2,1117-1135).
gacattcccatcaggttat

SEQ ID NO: 760513 - DNA, 19 bp, Mus musculus
  siRNA target sequence for F730014I05Rik (NM_146129.2,1130-1148).
ggttatcccgaatcaagtt

SEQ ID NO: 760514 - DNA, 19 bp, Mus musculus
  siRNA target sequence for F730014I05Rik (NM_146129.2,1160-1178).
ccaaacgcctgctctttaa

SEQ ID NO: 760515 - DNA, 19 bp, Mus musculus
  siRNA target sequence for F730014I05Rik (NM_146129.2,1161-1179).
caaacgcctgctctttaaa

SEQ ID NO: 760516 - DNA, 19 bp, Mus musculus
  siRNA target sequence for F730014I05Rik (NM_146129.2,1192-1210).
gccaggcggctcattgagt

SEQ ID NO: 760517 - DNA, 19 bp, Mus musculus
  siRNA target sequence for F730014I05Rik (NM_146129.2,1294-1312).
gcctccaaggaggattaca

SEQ ID NO: 760518 - DNA, 19 bp, Mus musculus
  siRNA target sequence for F730014I05Rik (NM_146129.2,1295-1313).
cctccaaggaggattacat

SEQ ID NO: 760519 - DNA, 19 bp, Mus musculus
  siRNA target sequence for F730014I05Rik (NM_146129.2,1404-1422).
ccacatctccctggaatat

SEQ ID NO: 760520 - DNA, 19 bp, Mus musculus
  siRNA target sequence for F730014I05Rik (NM_146129.2,1407-1425).
catctccctggaatatgtt

SEQ ID NO: 760521 - DNA, 19 bp, Mus musculus
  siRNA target sequence for F730014I05Rik (NM_146129.2,1624-1642).
gtcagccgcagctacttca

SEQ ID NO: 760522 - DNA, 19 bp, Mus musculus
  siRNA target sequence for F730014I05Rik (NM_146129.2,1654-1672).
ctcctctaccgctatagct

SEQ ID NO: 760523 - DNA, 19 bp, Mus musculus
  siRNA target sequence for F730014I05Rik (NM_146129.2,1678-1696).
gatgactctgcctttgaga

SEQ ID NO: 760524 - DNA, 19 bp, Mus musculus
  siRNA target sequence for F730014I05Rik (NM_146129.2,1718-1736).
gtcttctccgccgatatca

SEQ ID NO: 760525 - DNA, 19 bp, Mus musculus
  siRNA target sequence for F730014I05Rik (NM_146129.2,1720-1738).
cttctccgccgatatcaga

SEQ ID NO: 760526 - DNA, 19 bp, Mus musculus
  siRNA target sequence for F730014I05Rik (NM_146129.2,1726-1744).
cgccgatatcagatgatgt

SEQ ID NO: 760527 - DNA, 19 bp, Mus musculus
  siRNA target sequence for F730014I05Rik (NM_146129.2,1727-1745).
gccgatatcagatgatgtt

SEQ ID NO: 760528 - DNA, 19 bp, Mus musculus
  siRNA target sequence for F730014I05Rik (NM_146129.2,1728-1746).
ccgatatcagatgatgttt

SEQ ID NO: 760529 - DNA, 19 bp, Mus musculus
  siRNA target sequence for F730014I05Rik (NM_146129.2,1784-1802).
cactgccagtgcatgtctt

SEQ ID NO: 760530 - DNA, 19 bp, Mus musculus
  siRNA target sequence for F730014I05Rik (NM_146129.2,1789-1807).
ccagtgcatgtctttgaga

SEQ ID NO: 760531 - DNA, 19 bp, Mus musculus
  siRNA target sequence for F730014I05Rik (NM_146129.2,1806-1824).
gaccctccaccgactcttt

SEQ ID NO: 760532 - DNA, 19 bp, Mus musculus
  siRNA target sequence for F730014I05Rik (NM_146129.2,1941-1959).
cccgctgagtggttccttt

SEQ ID NO: 760533 - DNA, 19 bp, Mus musculus
  siRNA target sequence for F730014I05Rik (NM_146129.2,2106-2124).
ggagcagagccgcttcaaa

SEQ ID NO: 760534 - DNA, 19 bp, Mus musculus
  siRNA target sequence for 2010204I15Rik (NM_146133.2,185-203).
gacaacattaactcataga

SEQ ID NO: 760535 - DNA, 19 bp, Mus musculus
  siRNA target sequence for 2010204I15Rik (NM_146133.2,206-224).
ccgtcgaactgaagtaagt

SEQ ID NO: 760536 - DNA, 19 bp, Mus musculus
  siRNA target sequence for 2010204I15Rik (NM_146133.2,207-225).
cgtcgaactgaagtaagta

SEQ ID NO: 760537 - DNA, 19 bp, Mus musculus
  siRNA target sequence for 2010204I15Rik (NM_146133.2,208-226).
gtcgaactgaagtaagtaa

SEQ ID NO: 760538 - DNA, 19 bp, Mus musculus
  siRNA target sequence for 2010204I15Rik (NM_146133.2,210-228).
cgaactgaagtaagtaaga

SEQ ID NO: 760539 - DNA, 19 bp, Mus musculus
  siRNA target sequence for 2010204I15Rik (NM_146133.2,309-327).
gatatccgcctcactctta

SEQ ID NO: 760540 - DNA, 19 bp, Mus musculus
  siRNA target sequence for 2010204I15Rik (NM_146133.2,342-360).
ctcctggggctaaaagata

SEQ ID NO: 760541 - DNA, 19 bp, Mus musculus
  siRNA target sequence for 2010204I15Rik (NM_146133.2,344-362).
cctggggctaaaagataaa

SEQ ID NO: 760542 - DNA, 19 bp, Mus musculus
  siRNA target sequence for 2010204I15Rik (NM_146133.2,363-381).
gagggctacacatctttct

SEQ ID NO: 760543 - DNA, 19 bp, Mus musculus
  siRNA target sequence for 2010204I15Rik (NM_146133.2,407-425).
gcgaggaggcattctgata

SEQ ID NO: 760544 - DNA, 19 bp, Mus musculus
  siRNA target sequence for 2010204I15Rik (NM_146133.2,409-427).
gaggaggcattctgataga

SEQ ID NO: 760545 - DNA, 19 bp, Mus musculus
  siRNA target sequence for 2010204I15Rik (NM_146133.2,434-452).
catgcggggtcgaatctat

SEQ ID NO: 760546 - DNA, 19 bp, Mus musculus
  siRNA target sequence for 2010204I15Rik (NM_146133.2,460-478).
ctcccaccatgcgtaagaa

SEQ ID NO: 760547 - DNA, 19 bp, Mus musculus
  siRNA target sequence for 2010204I15Rik (NM_146133.2,517-535).
gcccaacaggtgatgtttt

SEQ ID NO: 760548 - DNA, 19 bp, Mus musculus
  siRNA target sequence for 2010204I15Rik (NM_146133.2,543-561).
gagacgctcaaacacatta

SEQ ID NO: 760549 - DNA, 19 bp, Mus musculus
  siRNA target sequence for 2010204I15Rik (NM_146133.2,548-566).
gctcaaacacattaaagca

SEQ ID NO: 760550 - DNA, 19 bp, Mus musculus
  siRNA target sequence for 2010204I15Rik (NM_146133.2,619-637).
catggaaccctttcaaatt

SEQ ID NO: 760551 - DNA, 19 bp, Mus musculus
  siRNA target sequence for 2010204I15Rik (NM_146133.2,622-640).
ggaaccctttcaaattaca

SEQ ID NO: 760552 - DNA, 19 bp, Mus musculus
  siRNA target sequence for 2010204I15Rik (NM_146133.2,652-670).
gaaatgtacgagaacgaat

SEQ ID NO: 760553 - DNA, 19 bp, Mus musculus
  siRNA target sequence for 2010204I15Rik (NM_146133.2,683-701).
ggtggaaaagggcattcta

SEQ ID NO: 760554 - DNA, 19 bp, Mus musculus
  siRNA target sequence for 2010204I15Rik (NM_146133.2,744-762).
catccagtgaccaatacga

SEQ ID NO: 760555 - DNA, 19 bp, Mus musculus
  siRNA target sequence for 2010204I15Rik (NM_146133.2,763-781).
cagagaaacagcgactaat

SEQ ID NO: 760556 - DNA, 19 bp, Mus musculus
  siRNA target sequence for 2010204I15Rik (NM_146133.2,765-783).
gagaaacagcgactaatga

SEQ ID NO: 760557 - DNA, 19 bp, Mus musculus
  siRNA target sequence for 2010204I15Rik (NM_146133.2,767-785).
gaaacagcgactaatgaaa

SEQ ID NO: 760558 - DNA, 19 bp, Mus musculus
  siRNA target sequence for 2010204I15Rik (NM_146133.2,773-791).
gcgactaatgaaaaagctt

SEQ ID NO: 760559 - DNA, 19 bp, Mus musculus
  siRNA target sequence for 2010204I15Rik (NM_146133.2,803-821).
gctagaacggtgggtaaat

SEQ ID NO: 760560 - DNA, 19 bp, Mus musculus
  siRNA target sequence for 2010204I15Rik (NM_146133.2,904-922).
gtctgacagatgataagta

SEQ ID NO: 760561 - DNA, 19 bp, Mus musculus
  siRNA target sequence for 2010204I15Rik (NM_146133.2,920-938).
gtatgatgtggcaatgaat

SEQ ID NO: 760562 - DNA, 19 bp, Mus musculus
  siRNA target sequence for 2010204I15Rik (NM_146133.2,1020-1038).
gcagccttcaacaaatcct

SEQ ID NO: 760563 - DNA, 19 bp, Mus musculus
  siRNA target sequence for Slc16a4 (NM_146136.1,260-278).
gggaatgaccaagacattt

SEQ ID NO: 760564 - DNA, 19 bp, Mus musculus
  siRNA target sequence for Slc16a4 (NM_146136.1,317-335).
cacttcagagcaaattggt

SEQ ID NO: 760565 - DNA, 19 bp, Mus musculus
  siRNA target sequence for Slc16a4 (NM_146136.1,333-351).
ggttggattggatccatta

SEQ ID NO: 760566 - DNA, 19 bp, Mus musculus
  siRNA target sequence for Slc16a4 (NM_146136.1,334-352).
gttggattggatccattat

SEQ ID NO: 760567 - DNA, 19 bp, Mus musculus
  siRNA target sequence for Slc16a4 (NM_146136.1,338-356).
gattggatccattatgtca

SEQ ID NO: 760568 - DNA, 19 bp, Mus musculus
  siRNA target sequence for Slc16a4 (NM_146136.1,353-371).
gtcatcactccgtttctct

SEQ ID NO: 760569 - DNA, 19 bp, Mus musculus
  siRNA target sequence for Slc16a4 (NM_146136.1,640-658).
caccctttacaaaattcct

SEQ ID NO: 760570 - DNA, 19 bp, Mus musculus
  siRNA target sequence for Slc16a4 (NM_146136.1,649-667).
caaaattcctcatagatct

SEQ ID NO: 760571 - DNA, 19 bp, Mus musculus
  siRNA target sequence for Slc16a4 (NM_146136.1,674-692).
ctggacaggcgctcttatt

SEQ ID NO: 760572 - DNA, 19 bp, Mus musculus
  siRNA target sequence for Slc16a4 (NM_146136.1,676-694).
ggacaggcgctcttatttt

SEQ ID NO: 760573 - DNA, 19 bp, Mus musculus
  siRNA target sequence for Slc16a4 (NM_146136.1,679-697).
caggcgctcttattttatt

SEQ ID NO: 760574 - DNA, 19 bp, Mus musculus
  siRNA target sequence for Slc16a4 (NM_146136.1,700-718).
gagcaattatattgaactt

SEQ ID NO: 760575 - DNA, 19 bp, Mus musculus
  siRNA target sequence for Slc16a4 (NM_146136.1,755-773).
ccaatcaaacaacaattct

SEQ ID NO: 760576 - DNA, 19 bp, Mus musculus
  siRNA target sequence for Slc16a4 (NM_146136.1,785-803).
caaaggtagcattttgtct

SEQ ID NO: 760577 - DNA, 19 bp, Mus musculus
  siRNA target sequence for Slc16a4 (NM_146136.1,813-831).
ccagaggcatcatacaaga

SEQ ID NO: 760578 - DNA, 19 bp, Mus musculus
  siRNA target sequence for Slc16a4 (NM_146136.1,856-874).
cacaggagcctttcatcaa

SEQ ID NO: 760579 - DNA, 19 bp, Mus musculus
  siRNA target sequence for Slc16a4 (NM_146136.1,880-898).
gtactatgaagaaatctga

SEQ ID NO: 760580 - DNA, 19 bp, Mus musculus
  siRNA target sequence for Slc16a4 (NM_146136.1,964-982).
ggaacaggccgttacttat

SEQ ID NO: 760581 - DNA, 19 bp, Mus musculus
  siRNA target sequence for Slc16a4 (NM_146136.1,1032-1050).
caaaaacttttagatatct

SEQ ID NO: 760582 - DNA, 19 bp, Mus musculus
  siRNA target sequence for Slc16a4 (NM_146136.1,1097-1115).
cctgagccaattagcatat

SEQ ID NO: 760583 - DNA, 19 bp, Mus musculus
  siRNA target sequence for Slc16a4 (NM_146136.1,1098-1116).
ctgagccaattagcatatt

SEQ ID NO: 760584 - DNA, 19 bp, Mus musculus
  siRNA target sequence for Slc16a4 (NM_146136.1,1102-1120).
gccaattagcatatttcat

SEQ ID NO: 760585 - DNA, 19 bp, Mus musculus
  siRNA target sequence for Slc16a4 (NM_146136.1,1103-1121).
ccaattagcatatttcatt

SEQ ID NO: 760586 - DNA, 19 bp, Mus musculus
  siRNA target sequence for Slc16a4 (NM_146136.1,1133-1151).
cctagtagccagagcaaaa

SEQ ID NO: 760587 - DNA, 19 bp, Mus musculus
  siRNA target sequence for Slc16a4 (NM_146136.1,1134-1152).
ctagtagccagagcaaaaa

SEQ ID NO: 760588 - DNA, 19 bp, Mus musculus
  siRNA target sequence for Slc16a4 (NM_146136.1,1153-1171).
cacttgggattgacgtaat

SEQ ID NO: 760589 - DNA, 19 bp, Mus musculus
  siRNA target sequence for Slc16a4 (NM_146136.1,1190-1208).
gtctgtagctggtatcact

SEQ ID NO: 760590 - DNA, 19 bp, Mus musculus
  siRNA target sequence for Slc16a4 (NM_146136.1,1233-1251).
ggatggattgctgatcaaa

SEQ ID NO: 760591 - DNA, 19 bp, Mus musculus
  siRNA target sequence for Slc16a4 (NM_146136.1,1349-1367).
ggcctataccatccttttt

SEQ ID NO: 760592 - DNA, 19 bp, Mus musculus
  siRNA target sequence for Slc16a4 (NM_146136.1,1381-1399).
gtggctacctggcactaat

SEQ ID NO: 760593 - DNA, 19 bp, Mus musculus
  siRNA target sequence for Slc16a4 (NM_146136.1,1384-1402).
gctacctggcactaatact

SEQ ID NO: 760594 - DNA, 19 bp, Mus musculus
  siRNA target sequence for Slc16a4 (NM_146136.1,1393-1411).
cactaatactgccagtatt

SEQ ID NO: 760595 - DNA, 19 bp, Mus musculus
  siRNA target sequence for Slc16a4 (NM_146136.1,1412-1430).
ggttgacctatctaagaat

SEQ ID NO: 760596 - DNA, 19 bp, Mus musculus
  siRNA target sequence for Slc16a4 (NM_146136.1,1413-1431).
gttgacctatctaagaatt

SEQ ID NO: 760597 - DNA, 19 bp, Mus musculus
  siRNA target sequence for Slc16a4 (NM_146136.1,1416-1434).
gacctatctaagaattcta

SEQ ID NO: 760598 - DNA, 19 bp, Mus musculus
  siRNA target sequence for Slc16a4 (NM_146136.1,1418-1436).
cctatctaagaattctaga

SEQ ID NO: 760599 - DNA, 19 bp, Mus musculus
  siRNA target sequence for Slc16a4 (NM_146136.1,1451-1469).
gggatatgccagtttcttt

SEQ ID NO: 760600 - DNA, 19 bp, Mus musculus
  siRNA target sequence for Slc16a4 (NM_146136.1,1470-1488).
gccgggatagctgtacttt

SEQ ID NO: 760601 - DNA, 19 bp, Mus musculus
  siRNA target sequence for Slc16a4 (NM_146136.1,1498-1516).
caatagcaggctggatata

SEQ ID NO: 760602 - DNA, 19 bp, Mus musculus
  siRNA target sequence for Slc16a4 (NM_146136.1,1506-1524).
ggctggatatatgattaca

SEQ ID NO: 760603 - DNA, 19 bp, Mus musculus
  siRNA target sequence for Slc16a4 (NM_146136.1,1518-1536).
gattacacacagacttaca

SEQ ID NO: 760604 - DNA, 19 bp, Mus musculus
  siRNA target sequence for Slc16a4 (NM_146136.1,1555-1573).
ctggcacctgctatatcct

SEQ ID NO: 760605 - DNA, 19 bp, Mus musculus
  siRNA target sequence for Slc16a4 (NM_146136.1,1596-1614).
gtaccactggctgaaagat

SEQ ID NO: 760606 - DNA, 19 bp, Mus musculus
  siRNA target sequence for Slc16a4 (NM_146136.1,1632-1650).
gaccttctgaggactacaa

SEQ ID NO: 760607 - DNA, 19 bp, Mus musculus
  siRNA target sequence for A830091N21Rik (NM_146140.2,121-139).
gtgttgagccacgaattca

SEQ ID NO: 760608 - DNA, 19 bp, Mus musculus
  siRNA target sequence for A830091N21Rik (NM_146140.2,300-318).
ccattatggggtcaaagat

SEQ ID NO: 760609 - DNA, 19 bp, Mus musculus
  siRNA target sequence for A830091N21Rik (NM_146140.2,322-340).
gccacagtgttcttctaca

SEQ ID NO: 760610 - DNA, 19 bp, Mus musculus
  siRNA target sequence for A830091N21Rik (NM_146140.2,373-391).
caggagtacgtgctagata

SEQ ID NO: 760611 - DNA, 19 bp, Mus musculus
  siRNA target sequence for A830091N21Rik (NM_146140.2,449-467).
ggcagctgagtgtgttcta

SEQ ID NO: 760612 - DNA, 19 bp, Mus musculus
  siRNA target sequence for A830091N21Rik (NM_146140.2,451-469).
cagctgagtgtgttctata

SEQ ID NO: 760613 - DNA, 19 bp, Mus musculus
  siRNA target sequence for A830091N21Rik (NM_146140.2,478-496).
gggatctggggcatgatca

SEQ ID NO: 760614 - DNA, 19 bp, Mus musculus
  siRNA target sequence for A830091N21Rik (NM_146140.2,479-497).
ggatctggggcatgatcat

SEQ ID NO: 760615 - DNA, 19 bp, Mus musculus
  siRNA target sequence for A830091N21Rik (NM_146140.2,480-498).
gatctggggcatgatcatt

SEQ ID NO: 760616 - DNA, 19 bp, Mus musculus
  siRNA target sequence for A830091N21Rik (NM_146140.2,597-615).
gttggcttactggtttcat

SEQ ID NO: 760617 - DNA, 19 bp, Mus musculus
  siRNA target sequence for A830091N21Rik (NM_146140.2,617-635).
gctttccggagctttactt

SEQ ID NO: 760618 - DNA, 19 bp, Mus musculus
  siRNA target sequence for A830091N21Rik (NM_146140.2,662-680).
cgggtcagctcatctacat

SEQ ID NO: 760619 - DNA, 19 bp, Mus musculus
  siRNA target sequence for A830091N21Rik (NM_146140.2,663-681).
gggtcagctcatctacatt

SEQ ID NO: 760620 - DNA, 19 bp, Mus musculus
  siRNA target sequence for A830091N21Rik (NM_146140.2,707-725).
gggcctatctcttgtactt

SEQ ID NO: 760621 - DNA, 19 bp, Mus musculus
  siRNA target sequence for A830091N21Rik (NM_146140.2,709-727).
gcctatctcttgtacttga

SEQ ID NO: 760622 - DNA, 19 bp, Mus musculus
  siRNA target sequence for A830091N21Rik (NM_146140.2,837-855).
gtggcctatcgtgtttata

SEQ ID NO: 760623 - DNA, 19 bp, Mus musculus
  siRNA target sequence for A830091N21Rik (NM_146140.2,857-875).
ccgggagactcgtgacatt

SEQ ID NO: 760624 - DNA, 19 bp, Mus musculus
  siRNA target sequence for A830091N21Rik (NM_146140.2,859-877).
gggagactcgtgacattga

SEQ ID NO: 760625 - DNA, 19 bp, Mus musculus
  siRNA target sequence for A830091N21Rik (NM_146140.2,860-878).
ggagactcgtgacattgat

SEQ ID NO: 760626 - DNA, 19 bp, Mus musculus
  siRNA target sequence for A830091N21Rik (NM_146140.2,863-881).
gactcgtgacattgattgt

SEQ ID NO: 760627 - DNA, 19 bp, Mus musculus
  siRNA target sequence for A830091N21Rik (NM_146140.2,865-883).
ctcgtgacattgattgtct

SEQ ID NO: 760628 - DNA, 19 bp, Mus musculus
  siRNA target sequence for A830091N21Rik (NM_146140.2,1035-1053).
gcttcagagatggttagaa

SEQ ID NO: 760629 - DNA, 19 bp, Mus musculus
  siRNA target sequence for A830091N21Rik (NM_146140.2,1056-1074).
cgcgaaccttcatgtttgt

SEQ ID NO: 760630 - DNA, 19 bp, Mus musculus
  siRNA target sequence for A830091N21Rik (NM_146140.2,1122-1140).
ggagaatccgaatagaata

SEQ ID NO: 760631 - DNA, 19 bp, Mus musculus
  siRNA target sequence for A830091N21Rik (NM_146140.2,1141-1159).
gactctccaccaaagaaga

SEQ ID NO: 760632 - DNA, 19 bp, Mus musculus
  siRNA target sequence for C8a (NM_146148.1,158-176).
gttgagtgactggtacaaa

SEQ ID NO: 760633 - DNA, 19 bp, Mus musculus
  siRNA target sequence for C8a (NM_146148.1,193-211).
catgtcaggataaaaagta

SEQ ID NO: 760634 - DNA, 19 bp, Mus musculus
  siRNA target sequence for C8a (NM_146148.1,227-245).
cttgcagccaagcaagttt

SEQ ID NO: 760635 - DNA, 19 bp, Mus musculus
  siRNA target sequence for C8a (NM_146148.1,457-475).
gccatcagtatgaaccaat

SEQ ID NO: 760636 - DNA, 19 bp, Mus musculus
  siRNA target sequence for C8a (NM_146148.1,492-510).
gcagccttggggtacaaca

SEQ ID NO: 760637 - DNA, 19 bp, Mus musculus
  siRNA target sequence for C8a (NM_146148.1,493-511).
cagccttggggtacaacat

SEQ ID NO: 760638 - DNA, 19 bp, Mus musculus
  siRNA target sequence for C8a (NM_146148.1,535-553).
gtgtttacgatgctaagta

SEQ ID NO: 760639 - DNA, 19 bp, Mus musculus
  siRNA target sequence for C8a (NM_146148.1,537-555).
gtttacgatgctaagtatt

SEQ ID NO: 760640 - DNA, 19 bp, Mus musculus
  siRNA target sequence for C8a (NM_146148.1,617-635).
ctgtgagcgcctctactat

SEQ ID NO: 760641 - DNA, 19 bp, Mus musculus
  siRNA target sequence for C8a (NM_146148.1,637-655).
gggaggatgagaaatactt

SEQ ID NO: 760642 - DNA, 19 bp, Mus musculus
  siRNA target sequence for C8a (NM_146148.1,638-656).
ggaggatgagaaatacttt

SEQ ID NO: 760643 - DNA, 19 bp, Mus musculus
  siRNA target sequence for C8a (NM_146148.1,663-681).
ccctacaacttccttaagt

SEQ ID NO: 760644 - DNA, 19 bp, Mus musculus
  siRNA target sequence for C8a (NM_146148.1,664-682).
cctacaacttccttaagta

SEQ ID NO: 760645 - DNA, 19 bp, Mus musculus
  siRNA target sequence for C8a (NM_146148.1,690-708).
gaagccctggcggatactt

SEQ ID NO: 760646 - DNA, 19 bp, Mus musculus
  siRNA target sequence for C8a (NM_146148.1,693-711).
gccctggcggatacttcaa

SEQ ID NO: 760647 - DNA, 19 bp, Mus musculus
  siRNA target sequence for C8a (NM_146148.1,696-714).
ctggcggatacttcaatct

SEQ ID NO: 760648 - DNA, 19 bp, Mus musculus
  siRNA target sequence for C8a (NM_146148.1,709-727).
caatctcctcagagtttta

SEQ ID NO: 760649 - DNA, 19 bp, Mus musculus
  siRNA target sequence for C8a (NM_146148.1,732-750).
gatgcgaatgatctttttt

SEQ ID NO: 760650 - DNA, 19 bp, Mus musculus
  siRNA target sequence for C8a (NM_146148.1,795-813).
ggcgtagccccagtaaaaa

SEQ ID NO: 760651 - DNA, 19 bp, Mus musculus
  siRNA target sequence for C8a (NM_146148.1,797-815).
cgtagccccagtaaaaagt

SEQ ID NO: 760652 - DNA, 19 bp, Mus musculus
  siRNA target sequence for C8a (NM_146148.1,837-855).
ggatccgggtccaaagcat

SEQ ID NO: 760653 - DNA, 19 bp, Mus musculus
  siRNA target sequence for C8a (NM_146148.1,842-860).
cgggtccaaagcatcttca

SEQ ID NO: 760654 - DNA, 19 bp, Mus musculus
  siRNA target sequence for C8a (NM_146148.1,843-861).
gggtccaaagcatcttcat

SEQ ID NO: 760655 - DNA, 19 bp, Mus musculus
  siRNA target sequence for C8a (NM_146148.1,844-862).
ggtccaaagcatcttcatt

SEQ ID NO: 760656 - DNA, 19 bp, Mus musculus
  siRNA target sequence for C8a (NM_146148.1,859-877).
cattcctgaacaagttaaa

SEQ ID NO: 760657 - DNA, 19 bp, Mus musculus
  siRNA target sequence for C8a (NM_146148.1,866-884).
gaacaagttaaacaagtat

SEQ ID NO: 760658 - DNA, 19 bp, Mus musculus
  siRNA target sequence for C8a (NM_146148.1,869-887).
caagttaaacaagtataat

SEQ ID NO: 760659 - DNA, 19 bp, Mus musculus
  siRNA target sequence for C8a (NM_146148.1,1104-1122).
gtgcttgacaaagagaaaa

SEQ ID NO: 760660 - DNA, 19 bp, Mus musculus
  siRNA target sequence for C8a (NM_146148.1,1170-1188).
ggtggcattggcataggaa

SEQ ID NO: 760661 - DNA, 19 bp, Mus musculus
  siRNA target sequence for C8a (NM_146148.1,1171-1189).
gtggcattggcataggaat

SEQ ID NO: 760662 - DNA, 19 bp, Mus musculus
  siRNA target sequence for C8a (NM_146148.1,1174-1192).
gcattggcataggaattaa

SEQ ID NO: 760663 - DNA, 19 bp, Mus musculus
  siRNA target sequence for C8a (NM_146148.1,1186-1204).
gaattaaggatagtacaat

SEQ ID NO: 760664 - DNA, 19 bp, Mus musculus
  siRNA target sequence for C8a (NM_146148.1,1215-1233).
ggtatatcaggagagtttt

SEQ ID NO: 760665 - DNA, 19 bp, Mus musculus
  siRNA target sequence for C8a (NM_146148.1,1251-1269).
ggtgaccgtgacataagga

SEQ ID NO: 760666 - DNA, 19 bp, Mus musculus
  siRNA target sequence for C8a (NM_146148.1,1252-1270).
gtgaccgtgacataaggaa

SEQ ID NO: 760667 - DNA, 19 bp, Mus musculus
  siRNA target sequence for C8a (NM_146148.1,1304-1322).
ggtgcaaggtggaagttct

SEQ ID NO: 760668 - DNA, 19 bp, Mus musculus
  siRNA target sequence for C8a (NM_146148.1,1346-1364).
caacagcagtgccattaca

SEQ ID NO: 760669 - DNA, 19 bp, Mus musculus
  siRNA target sequence for C8a (NM_146148.1,1349-1367).
cagcagtgccattacatat

SEQ ID NO: 760670 - DNA, 19 bp, Mus musculus
  siRNA target sequence for C8a (NM_146148.1,1372-1390).
cctgggggagatcgttaaa

SEQ ID NO: 760671 - DNA, 19 bp, Mus musculus
  siRNA target sequence for C8a (NM_146148.1,1375-1393).
gggggagatcgttaaagta

SEQ ID NO: 760672 - DNA, 19 bp, Mus musculus
  siRNA target sequence for C8a (NM_146148.1,1376-1394).
ggggagatcgttaaagtat

SEQ ID NO: 760673 - DNA, 19 bp, Mus musculus
  siRNA target sequence for C8a (NM_146148.1,1378-1396).
ggagatcgttaaagtataa

SEQ ID NO: 760674 - DNA, 19 bp, Mus musculus
  siRNA target sequence for C8a (NM_146148.1,1397-1415).
ccctgttgttatcgatttt

SEQ ID NO: 760675 - DNA, 19 bp, Mus musculus
  siRNA target sequence for C8a (NM_146148.1,1399-1417).
ctgttgttatcgattttga

SEQ ID NO: 760676 - DNA, 19 bp, Mus musculus
  siRNA target sequence for C8a (NM_146148.1,1437-1455).
ctactgcggcacacaaact

SEQ ID NO: 760677 - DNA, 19 bp, Mus musculus
  siRNA target sequence for C8a (NM_146148.1,1500-1518).
gaccagtacctgatggaat

SEQ ID NO: 760678 - DNA, 19 bp, Mus musculus
  siRNA target sequence for C8a (NM_146148.1,1505-1523).
gtacctgatggaatttaat

SEQ ID NO: 760679 - DNA, 19 bp, Mus musculus
  siRNA target sequence for C8a (NM_146148.1,1582-1600).
gccggtgtcagtgtagtat

SEQ ID NO: 760680 - DNA, 19 bp, Mus musculus
  siRNA target sequence for C8a (NM_146148.1,1621-1639).
gtgaacgcacggtgataga

SEQ ID NO: 760681 - DNA, 19 bp, Mus musculus
  siRNA target sequence for BC026682 (NM_146149.1,120-138).
gtgttggccatttcattga

SEQ ID NO: 760682 - DNA, 19 bp, Mus musculus
  siRNA target sequence for BC026682 (NM_146149.1,175-193).
gctgtgagaacgatgcaat

SEQ ID NO: 760683 - DNA, 19 bp, Mus musculus
  siRNA target sequence for BC026682 (NM_146149.1,176-194).
ctgtgagaacgatgcaatt

SEQ ID NO: 760684 - DNA, 19 bp, Mus musculus
  siRNA target sequence for BC026682 (NM_146149.1,313-331).
ccctaaacagcgatgtcat

SEQ ID NO: 760685 - DNA, 19 bp, Mus musculus
  siRNA target sequence for BC026682 (NM_146149.1,322-340).
gcgatgtcatggtcttaga

SEQ ID NO: 760686 - DNA, 19 bp, Mus musculus
  siRNA target sequence for BC026682 (NM_146149.1,323-341).
cgatgtcatggtcttagaa

SEQ ID NO: 760687 - DNA, 19 bp, Mus musculus
  siRNA target sequence for BC026682 (NM_146149.1,466-484).
ctcagaagggcatcaaact

SEQ ID NO: 760688 - DNA, 19 bp, Mus musculus
  siRNA target sequence for BC026682 (NM_146149.1,599-617).
caatgtgcccatctcaatt

SEQ ID NO: 760689 - DNA, 19 bp, Mus musculus
  siRNA target sequence for BC026682 (NM_146149.1,603-621).
gtgcccatctcaattgaga

SEQ ID NO: 760690 - DNA, 19 bp, Mus musculus
  siRNA target sequence for BC026682 (NM_146149.1,607-625).
ccatctcaattgagatcaa

SEQ ID NO: 760691 - DNA, 19 bp, Mus musculus
  siRNA target sequence for BC026682 (NM_146149.1,608-626).
catctcaattgagatcaat

SEQ ID NO: 760692 - DNA, 19 bp, Mus musculus
  siRNA target sequence for BC026682 (NM_146149.1,895-913).
ccgtgtcagtagaagatct

SEQ ID NO: 760693 - DNA, 19 bp, Mus musculus
  siRNA target sequence for BC026682 (NM_146149.1,934-952).
gtgccgctcaccaaatcta

SEQ ID NO: 760694 - DNA, 19 bp, Mus musculus
  siRNA target sequence for BC026682 (NM_146149.1,937-955).
ccgctcaccaaatctacta

SEQ ID NO: 760695 - DNA, 19 bp, Mus musculus
  siRNA target sequence for BC026682 (NM_146149.1,938-956).
cgctcaccaaatctactat

SEQ ID NO: 760696 - DNA, 19 bp, Mus musculus
  siRNA target sequence for BC026682 (NM_146149.1,940-958).
ctcaccaaatctactatga

SEQ ID NO: 760697 - DNA, 19 bp, Mus musculus
  siRNA target sequence for BC026682 (NM_146149.1,969-987).
cctgtcttgtcgcagttta

SEQ ID NO: 760698 - DNA, 19 bp, Mus musculus
  siRNA target sequence for BC026682 (NM_146149.1,970-988).
ctgtcttgtcgcagtttaa

SEQ ID NO: 760699 - DNA, 19 bp, Mus musculus
  siRNA target sequence for BC026682 (NM_146149.1,1011-1029).
cggaagcgaacctactaca

SEQ ID NO: 760700 - DNA, 19 bp, Mus musculus
  siRNA target sequence for BC026682 (NM_146149.1,1091-1109).
gctagttctggaagtgaat

SEQ ID NO: 760701 - DNA, 19 bp, Mus musculus
  siRNA target sequence for BC026682 (NM_146149.1,1282-1300).
gctggggcatccatgtgaa

SEQ ID NO: 760702 - DNA, 19 bp, Mus musculus
  siRNA target sequence for BC026682 (NM_146149.1,1285-1303).
ggggcatccatgtgaacat

SEQ ID NO: 760703 - DNA, 19 bp, Mus musculus
  siRNA target sequence for BC026682 (NM_146149.1,1396-1414).
cagtctcacatggtagttt

SEQ ID NO: 760704 - DNA, 19 bp, Mus musculus
  siRNA target sequence for BC026682 (NM_146149.1,1508-1526).
gatgctggacagtggttat

SEQ ID NO: 760705 - DNA, 19 bp, Mus musculus
  siRNA target sequence for BC026682 (NM_146149.1,1530-1548).
gagcagatggtcacagata

SEQ ID NO: 760706 - DNA, 19 bp, Mus musculus
  siRNA target sequence for BC026682 (NM_146149.1,1693-1711).
ggaacagccatgtggattt

SEQ ID NO: 760707 - DNA, 19 bp, Mus musculus
  siRNA target sequence for BC026682 (NM_146149.1,1752-1770).
cgagtctattacaggatat

SEQ ID NO: 760708 - DNA, 19 bp, Mus musculus
  siRNA target sequence for BC026682 (NM_146149.1,1814-1832).
ccgaccatccagtaggatt

SEQ ID NO: 760709 - DNA, 19 bp, Mus musculus
  siRNA target sequence for 6330548N22Rik (NM_146154.1,67-85).
cccgacttgggcaggtaaa

SEQ ID NO: 760710 - DNA, 19 bp, Mus musculus
  siRNA target sequence for 6330548N22Rik (NM_146154.1,70-88).
gacttgggcaggtaaacca

SEQ ID NO: 760711 - DNA, 19 bp, Mus musculus
  siRNA target sequence for 6330548N22Rik (NM_146154.1,113-131).
gtgaaaggagacaagctaa

SEQ ID NO: 760712 - DNA, 19 bp, Mus musculus
  siRNA target sequence for 6330548N22Rik (NM_146154.1,139-157).
gctgattattgatgagaaa

SEQ ID NO: 760713 - DNA, 19 bp, Mus musculus
  siRNA target sequence for 6330548N22Rik (NM_146154.1,185-203).
gatctgtgtgacttcacta

SEQ ID NO: 760714 - DNA, 19 bp, Mus musculus
  siRNA target sequence for 6330548N22Rik (NM_146154.1,237-255).
cgctggtgtaccacaaaca

SEQ ID NO: 760715 - DNA, 19 bp, Mus musculus
  siRNA target sequence for 6330548N22Rik (NM_146154.1,338-356).
caacagattcccatcgatt

SEQ ID NO: 760716 - DNA, 19 bp, Mus musculus
  siRNA target sequence for 6330548N22Rik (NM_146154.1,352-370).
cgattctacggtctcattt

SEQ ID NO: 760717 - DNA, 19 bp, Mus musculus
  siRNA target sequence for 6330548N22Rik (NM_146154.1,376-394).
gtccacgagggcatacact

SEQ ID NO: 760718 - DNA, 19 bp, Mus musculus
  siRNA target sequence for 6330548N22Rik (NM_146154.1,547-565).
gatttcaaccctcactatt

SEQ ID NO: 760719 - DNA, 19 bp, Mus musculus
  siRNA target sequence for 6330548N22Rik (NM_146154.1,630-648).
gtgaggatgacgagatcat

SEQ ID NO: 760720 - DNA, 19 bp, Mus musculus
  siRNA target sequence for 6330548N22Rik (NM_146154.1,847-865).
ccagccgcatggcattcat

SEQ ID NO: 760721 - DNA, 19 bp, Mus musculus
  siRNA target sequence for 6330548N22Rik (NM_146154.1,942-960).
catcagcagtggccataaa

SEQ ID NO: 760722 - DNA, 19 bp, Mus musculus
  siRNA target sequence for 6330548N22Rik (NM_146154.1,968-986).
ccaaaccctgcagtctata

SEQ ID NO: 760723 - DNA, 19 bp, Mus musculus
  siRNA target sequence for D030015G18Rik (NM_146155.2,778-796).
cctgacaaggccttttcca

SEQ ID NO: 760724 - DNA, 19 bp, Mus musculus
  siRNA target sequence for D030015G18Rik (NM_146155.2,994-1012).
gtagtgcagctgattgaca

SEQ ID NO: 760725 - DNA, 19 bp, Mus musculus
  siRNA target sequence for D030015G18Rik (NM_146155.2,1000-1018).
cagctgattgacatcatga

SEQ ID NO: 760726 - DNA, 19 bp, Mus musculus
  siRNA target sequence for D030015G18Rik (NM_146155.2,1324-1342).
ccagatgggcctgattact

SEQ ID NO: 760727 - DNA, 19 bp, Mus musculus
  siRNA target sequence for D030015G18Rik (NM_146155.2,1780-1798).
gccttgaggcgcactgata

SEQ ID NO: 760728 - DNA, 19 bp, Mus musculus
  siRNA target sequence for D030015G18Rik (NM_146155.2,2094-2112).
gaacaagaccacgtacaaa

SEQ ID NO: 760729 - DNA, 19 bp, Mus musculus
  siRNA target sequence for D030015G18Rik (NM_146155.2,2240-2258).
gtgagatgcccatcattct

SEQ ID NO: 760730 - DNA, 19 bp, Mus musculus
  siRNA target sequence for D030015G18Rik (NM_146155.2,2415-2433).
gtctccgcagccatcgtat

SEQ ID NO: 760731 - DNA, 19 bp, Mus musculus
  siRNA target sequence for D030015G18Rik (NM_146155.2,2434-2452).
gcagcagacgccaatgaca

SEQ ID NO: 760732 - DNA, 19 bp, Mus musculus
  siRNA target sequence for D030015G18Rik (NM_146155.2,2686-2704).
gcagcccgctgttccttta

SEQ ID NO: 760733 - DNA, 19 bp, Mus musculus
  siRNA target sequence for D030015G18Rik (NM_146155.2,2853-2871).
gaggcggtcccgaaagaat

SEQ ID NO: 760734 - DNA, 19 bp, Mus musculus
  siRNA target sequence for D030015G18Rik (NM_146155.2,2983-3001).
gggcaagctggcagaaact

SEQ ID NO: 760735 - DNA, 19 bp, Mus musculus
  siRNA target sequence for D030015G18Rik (NM_146155.2,3150-3168).
gtccctgcttgattcagat

SEQ ID NO: 760736 - DNA, 19 bp, Mus musculus
  siRNA target sequence for D030015G18Rik (NM_146155.2,3522-3540).
cacctacccacctcagtat

SEQ ID NO: 760737 - DNA, 19 bp, Mus musculus
  siRNA target sequence for D030015G18Rik (NM_146155.2,3975-3993).
ggcctcagaggcctttagt

SEQ ID NO: 760738 - DNA, 19 bp, Mus musculus
  siRNA target sequence for D030015G18Rik (NM_146155.2,3986-4004).
cctttagtcagctctacaa

SEQ ID NO: 760739 - DNA, 19 bp, Mus musculus
  siRNA target sequence for D030015G18Rik (NM_146155.2,3987-4005).
ctttagtcagctctacaat

SEQ ID NO: 760740 - DNA, 19 bp, Mus musculus
  siRNA target sequence for D030015G18Rik (NM_146155.2,4025-4043).
gcagcgaacccaatgtgat

SEQ ID NO: 760741 - DNA, 19 bp, Mus musculus
  siRNA target sequence for D030015G18Rik (NM_146155.2,4354-4372).
catctgggcttttcaacat

SEQ ID NO: 760742 - DNA, 19 bp, Mus musculus
  siRNA target sequence for D030015G18Rik (NM_146155.2,4487-4505).
cggccaaagccaagttcat

SEQ ID NO: 760743 - DNA, 19 bp, Mus musculus
  siRNA target sequence for D030015G18Rik (NM_146155.2,4631-4649).
gcgatccctgtgacttcat

SEQ ID NO: 760744 - DNA, 19 bp, Mus musculus
  siRNA target sequence for D030015G18Rik (NM_146155.2,4738-4756).
gagcttgatggcaagcatt

SEQ ID NO: 760745 - DNA, 19 bp, Mus musculus
  siRNA target sequence for D030015G18Rik (NM_146155.2,4965-4983).
gggccagcctcactatgat

SEQ ID NO: 760746 - DNA, 19 bp, Mus musculus
  siRNA target sequence for D030015G18Rik (NM_146155.2,5034-5052).
ccgtagcccaccctatgaa

SEQ ID NO: 760747 - DNA, 19 bp, Mus musculus
  siRNA target sequence for D030015G18Rik (NM_146155.2,5389-5407).
caccctgaggacacattta

SEQ ID NO: 760748 - DNA, 19 bp, Mus musculus
  siRNA target sequence for C230096C10Rik (NM_146157.2,130-148).
cagtatgttgggaagatca

SEQ ID NO: 760749 - DNA, 19 bp, Mus musculus
  siRNA target sequence for C230096C10Rik (NM_146157.2,211-229).
gtgattgcggcgttaaatt

SEQ ID NO: 760750 - DNA, 19 bp, Mus musculus
  siRNA target sequence for C230096C10Rik (NM_146157.2,213-231).
gattgcggcgttaaattct

SEQ ID NO: 760751 - DNA, 19 bp, Mus musculus
  siRNA target sequence for C230096C10Rik (NM_146157.2,230-248).
ctcggactggagagatctt

SEQ ID NO: 760752 - DNA, 19 bp, Mus musculus
  siRNA target sequence for C230096C10Rik (NM_146157.2,249-267).
gtggcgccatgttgacaaa

SEQ ID NO: 760753 - DNA, 19 bp, Mus musculus
  siRNA target sequence for C230096C10Rik (NM_146157.2,297-315).
gctggtccatggacaagat

SEQ ID NO: 760754 - DNA, 19 bp, Mus musculus
  siRNA target sequence for C230096C10Rik (NM_146157.2,375-393).
cctgaactgggagataact

SEQ ID NO: 760755 - DNA, 19 bp, Mus musculus
  siRNA target sequence for C230096C10Rik (NM_146157.2,438-456).
ggagtcagtgaggtacatt

SEQ ID NO: 760756 - DNA, 19 bp, Mus musculus
  siRNA target sequence for C230096C10Rik (NM_146157.2,449-467).
ggtacattgcagttctgaa

SEQ ID NO: 760757 - DNA, 19 bp, Mus musculus
  siRNA target sequence for C230096C10Rik (NM_146157.2,547-565).
ctctaccagatggtgtatt

SEQ ID NO: 760758 - DNA, 19 bp, Mus musculus
  siRNA target sequence for C230096C10Rik (NM_146157.2,952-970).
gccgtgactctgcttaaga

SEQ ID NO: 760759 - DNA, 19 bp, Mus musculus
  siRNA target sequence for C230096C10Rik (NM_146157.2,953-971).
ccgtgactctgcttaagaa

SEQ ID NO: 760760 - DNA, 19 bp, Mus musculus
  siRNA target sequence for C230096C10Rik (NM_146157.2,955-973).
gtgactctgcttaagaact

SEQ ID NO: 760761 - DNA, 19 bp, Mus musculus
  siRNA target sequence for C230096C10Rik (NM_146157.2,1040-1058).
gtcgcactgaagtgcaaaa

SEQ ID NO: 760762 - DNA, 19 bp, Mus musculus
  siRNA target sequence for C230096C10Rik (NM_146157.2,1182-1200).
gctcctagacacttccatt

SEQ ID NO: 760763 - DNA, 19 bp, Mus musculus
  siRNA target sequence for C230096C10Rik (NM_146157.2,1183-1201).
ctcctagacacttccattt

SEQ ID NO: 760764 - DNA, 19 bp, Mus musculus
  siRNA target sequence for C230096C10Rik (NM_146157.2,1186-1204).
ctagacacttccatttcct

SEQ ID NO: 760765 - DNA, 19 bp, Mus musculus
  siRNA target sequence for C230096C10Rik (NM_146157.2,1229-1247).
gacctgagcagctgtacat

SEQ ID NO: 760766 - DNA, 19 bp, Mus musculus
  siRNA target sequence for C230096C10Rik (NM_146157.2,1571-1589).
cccgaagccagattaagaa

SEQ ID NO: 760767 - DNA, 19 bp, Mus musculus
  siRNA target sequence for C230096C10Rik (NM_146157.2,1572-1590).
ccgaagccagattaagaat

SEQ ID NO: 760768 - DNA, 19 bp, Mus musculus
  siRNA target sequence for C230096C10Rik (NM_146157.2,1574-1592).
gaagccagattaagaatga

SEQ ID NO: 760769 - DNA, 19 bp, Mus musculus
  siRNA target sequence for C230096C10Rik (NM_146157.2,1710-1728).
gcagtatctgcccaatgtt

SEQ ID NO: 760770 - DNA, 19 bp, Mus musculus
  siRNA target sequence for C230096C10Rik (NM_146157.2,1711-1729).
cagtatctgcccaatgtta

SEQ ID NO: 760771 - DNA, 19 bp, Mus musculus
  siRNA target sequence for C230096C10Rik (NM_146157.2,1826-1844).
gaatgagctctctgtttgt

SEQ ID NO: 760772 - DNA, 19 bp, Mus musculus
  siRNA target sequence for C230096C10Rik (NM_146157.2,1925-1943).
cagtcatggatcaagacta

SEQ ID NO: 760773 - DNA, 19 bp, Mus musculus
  siRNA target sequence for C230096C10Rik (NM_146157.2,1993-2011).
ccagctacgcggaatgtct

SEQ ID NO: 760774 - DNA, 19 bp, Mus musculus
  siRNA target sequence for C230096C10Rik (NM_146157.2,1994-2012).
cagctacgcggaatgtctt

SEQ ID NO: 760775 - DNA, 19 bp, Mus musculus
  siRNA target sequence for C230096C10Rik (NM_146157.2,2081-2099).
gtgggtatcagcttcgaaa

SEQ ID NO: 760776 - DNA, 19 bp, Mus musculus
  siRNA target sequence for C230096C10Rik (NM_146157.2,2221-2239).
cgaagtgtgctctacaaga

SEQ ID NO: 760777 - DNA, 19 bp, Mus musculus
  siRNA target sequence for C230096C10Rik (NM_146157.2,2287-2305).
caccacgagcgcaccttta

SEQ ID NO: 760778 - DNA, 19 bp, Mus musculus
  siRNA target sequence for C230096C10Rik (NM_146157.2,2412-2430).
gtaccagtactggaattct

SEQ ID NO: 760779 - DNA, 19 bp, Mus musculus
  siRNA target sequence for C230096C10Rik (NM_146157.2,2536-2554).
ctccagcagtcctacatct

SEQ ID NO: 760780 - DNA, 19 bp, Mus musculus
  siRNA target sequence for C230096C10Rik (NM_146157.2,2724-2742).
cccatattctccagatgtt

SEQ ID NO: 760781 - DNA, 19 bp, Mus musculus
  siRNA target sequence for C230096C10Rik (NM_146157.2,2749-2767).
catgcagagcgattcatca

SEQ ID NO: 760782 - DNA, 19 bp, Mus musculus
  siRNA target sequence for C230096C10Rik (NM_146157.2,2752-2770).
gcagagcgattcatcaact

SEQ ID NO: 760783 - DNA, 19 bp, Mus musculus
  siRNA target sequence for C230096C10Rik (NM_146157.2,2759-2777).
gattcatcaactataacca

SEQ ID NO: 760784 - DNA, 19 bp, Mus musculus
  siRNA target sequence for C230096C10Rik (NM_146157.2,2788-2806).
cgaatgcgaggcatctata

SEQ ID NO: 760785 - DNA, 19 bp, Mus musculus
  siRNA target sequence for C230096C10Rik (NM_146157.2,2823-2841).
ggagtccacttgtttggtt

SEQ ID NO: 760786 - DNA, 19 bp, Mus musculus
  siRNA target sequence for C230096C10Rik (NM_146157.2,2842-2860).
gtggcctacggtttggata

SEQ ID NO: 760787 - DNA, 19 bp, Mus musculus
  siRNA target sequence for C230096C10Rik (NM_146157.2,2850-2868).
cggtttggatatttaccaa

SEQ ID NO: 760788 - DNA, 19 bp, Mus musculus
  siRNA target sequence for C230096C10Rik (NM_146157.2,2953-2971).
gtttttgccaccatgatca

SEQ ID NO: 760789 - DNA, 19 bp, Mus musculus
  siRNA target sequence for C230096C10Rik (NM_146157.2,2978-2996).
ggctggcacaggtgaaact

SEQ ID NO: 760790 - DNA, 19 bp, Mus musculus
  siRNA target sequence for BC023882 (NM_146159.1,183-201).
gtttgtggaaacattgaaa

SEQ ID NO: 760791 - DNA, 19 bp, Mus musculus
  siRNA target sequence for BC023882 (NM_146159.1,265-283).
gttgaagatgagtcattct

SEQ ID NO: 760792 - DNA, 19 bp, Mus musculus
  siRNA target sequence for BC023882 (NM_146159.1,268-286).
gaagatgagtcattcttga

SEQ ID NO: 760793 - DNA, 19 bp, Mus musculus
  siRNA target sequence for BC023882 (NM_146159.1,274-292).
gagtcattcttgaaatggt

SEQ ID NO: 760794 - DNA, 19 bp, Mus musculus
  siRNA target sequence for BC023882 (NM_146159.1,296-314).
gtgggaatgtgaatgaaca

SEQ ID NO: 760795 - DNA, 19 bp, Mus musculus
  siRNA target sequence for BC023882 (NM_146159.1,391-409).
gcattggatgaagttctta

SEQ ID NO: 760796 - DNA, 19 bp, Mus musculus
  siRNA target sequence for BC023882 (NM_146159.1,403-421).
gttcttaggacctgtaaaa

SEQ ID NO: 760797 - DNA, 19 bp, Mus musculus
  siRNA target sequence for BC023882 (NM_146159.1,523-541).
cggaataaataccagttaa

SEQ ID NO: 760798 - DNA, 19 bp, Mus musculus
  siRNA target sequence for BC023882 (NM_146159.1,524-542).
ggaataaataccagttaat

SEQ ID NO: 760799 - DNA, 19 bp, Mus musculus
  siRNA target sequence for BC023882 (NM_146159.1,564-582).
gtttctggcattaaatgct

SEQ ID NO: 760800 - DNA, 19 bp, Mus musculus
  siRNA target sequence for BC023882 (NM_146159.1,570-588).
ggcattaaatgctaaacaa

SEQ ID NO: 760801 - DNA, 19 bp, Mus musculus
  siRNA target sequence for BC023882 (NM_146159.1,613-631).
cagaagcaaggattcctaa

SEQ ID NO: 760802 - DNA, 19 bp, Mus musculus
  siRNA target sequence for BC023882 (NM_146159.1,628-646).
ctaaattctgtgaatacta

SEQ ID NO: 760803 - DNA, 19 bp, Mus musculus
  siRNA target sequence for BC023882 (NM_146159.1,667-685).
ggtcttactgaggaagtta

SEQ ID NO: 760804 - DNA, 19 bp, Mus musculus
  siRNA target sequence for BC023882 (NM_146159.1,722-740).
gtgaaagaacaaatccaat

SEQ ID NO: 760805 - DNA, 19 bp, Mus musculus
  siRNA target sequence for BC023882 (NM_146159.1,731-749).
caaatccaatggtgttttt

SEQ ID NO: 760806 - DNA, 19 bp, Mus musculus
  siRNA target sequence for BC023882 (NM_146159.1,741-759).
ggtgtttttatctcagttt

SEQ ID NO: 760807 - DNA, 19 bp, Mus musculus
  siRNA target sequence for BC023882 (NM_146159.1,760-778).
cccttgggaaaatacataa

SEQ ID NO: 760808 - DNA, 19 bp, Mus musculus
  siRNA target sequence for BC023882 (NM_146159.1,790-808).
cagagcacagcagcattaa

SEQ ID NO: 760809 - DNA, 19 bp, Mus musculus
  siRNA target sequence for BC023882 (NM_146159.1,799-817).
gcagcattaaccttataca

SEQ ID NO: 760810 - DNA, 19 bp, Mus musculus
  siRNA target sequence for BC023882 (NM_146159.1,802-820).
gcattaaccttatacacaa

SEQ ID NO: 760811 - DNA, 19 bp, Mus musculus
  siRNA target sequence for BC023882 (NM_146159.1,809-827).
ccttatacacaaaaaagca

SEQ ID NO: 760812 - DNA, 19 bp, Mus musculus
  siRNA target sequence for BC023882 (NM_146159.1,816-834).
cacaaaaaagcaattcttt

SEQ ID NO: 760813 - DNA, 19 bp, Mus musculus
  siRNA target sequence for BC023882 (NM_146159.1,837-855).
gggcatgcacgaagtagtt

SEQ ID NO: 760814 - DNA, 19 bp, Mus musculus
  siRNA target sequence for BC023882 (NM_146159.1,839-857).
gcatgcacgaagtagttga

SEQ ID NO: 760815 - DNA, 19 bp, Mus musculus
  siRNA target sequence for BC023882 (NM_146159.1,840-858).
catgcacgaagtagttgaa

SEQ ID NO: 760816 - DNA, 19 bp, Mus musculus
  siRNA target sequence for BC023882 (NM_146159.1,843-861).
gcacgaagtagttgaaagt

SEQ ID NO: 760817 - DNA, 19 bp, Mus musculus
  siRNA target sequence for BC023882 (NM_146159.1,844-862).
cacgaagtagttgaaagtt

SEQ ID NO: 760818 - DNA, 19 bp, Mus musculus
  siRNA target sequence for BC023882 (NM_146159.1,846-864).
cgaagtagttgaaagttca

SEQ ID NO: 760819 - DNA, 19 bp, Mus musculus
  siRNA target sequence for BC023882 (NM_146159.1,899-917).
caccgtctatttgtgataa

SEQ ID NO: 760820 - DNA, 19 bp, Mus musculus
  siRNA target sequence for BC023882 (NM_146159.1,956-974).
gactgcagatggcatgtat

SEQ ID NO: 760821 - DNA, 19 bp, Mus musculus
  siRNA target sequence for BC023882 (NM_146159.1,960-978).
gcagatggcatgtatttgt

SEQ ID NO: 760822 - DNA, 19 bp, Mus musculus
  siRNA target sequence for BC023882 (NM_146159.1,982-1000).
cagaaacagatcatatact

SEQ ID NO: 760823 - DNA, 19 bp, Mus musculus
  siRNA target sequence for BC023882 (NM_146159.1,1017-1035).
gagcatgaagtcgagtata

SEQ ID NO: 760824 - DNA, 19 bp, Mus musculus
  siRNA target sequence for BC023882 (NM_146159.1,1019-1037).
gcatgaagtcgagtataaa

SEQ ID NO: 760825 - DNA, 19 bp, Mus musculus
  siRNA target sequence for BC023882 (NM_146159.1,1020-1038).
catgaagtcgagtataaaa

SEQ ID NO: 760826 - DNA, 19 bp, Mus musculus
  siRNA target sequence for BC023882 (NM_146159.1,1040-1058).
gggcggaagagaatcttaa

SEQ ID NO: 760827 - DNA, 19 bp, Mus musculus
  siRNA target sequence for BC023882 (NM_146159.1,1041-1059).
ggcggaagagaatcttaat

SEQ ID NO: 760828 - DNA, 19 bp, Mus musculus
  siRNA target sequence for BC023882 (NM_146159.1,1042-1060).
gcggaagagaatcttaata

SEQ ID NO: 760829 - DNA, 19 bp, Mus musculus
  siRNA target sequence for BC023882 (NM_146159.1,1061-1079).
gactaaccaatgaggttat

SEQ ID NO: 760830 - DNA, 19 bp, Mus musculus
  siRNA target sequence for BC023882 (NM_146159.1,1068-1086).
caatgaggttattgataaa

SEQ ID NO: 760831 - DNA, 19 bp, Mus musculus
  siRNA target sequence for BC023882 (NM_146159.1,1099-1117).
gcagaaatttctagcttaa

SEQ ID NO: 760832 - DNA, 19 bp, Mus musculus
  siRNA target sequence for BC023882 (NM_146159.1,1100-1118).
cagaaatttctagcttaaa

SEQ ID NO: 760833 - DNA, 19 bp, Mus musculus
  siRNA target sequence for BC023882 (NM_146159.1,1121-1139).
gtgagattctaaaacttga

SEQ ID NO: 760834 - DNA, 19 bp, Mus musculus
  siRNA target sequence for BC023882 (NM_146159.1,1138-1156).
gaagaacaaatcactcata

SEQ ID NO: 760835 - DNA, 19 bp, Mus musculus
  siRNA target sequence for BC023882 (NM_146159.1,1151-1169).
ctcatataaaagacaaagt

SEQ ID NO: 760836 - DNA, 19 bp, Mus musculus
  siRNA target sequence for BC023882 (NM_146159.1,1189-1207).
gaatatgctcagctattga

SEQ ID NO: 760837 - DNA, 19 bp, Mus musculus
  siRNA target sequence for BC023882 (NM_146159.1,1246-1264).
gctaaacaagattattata

SEQ ID NO: 760838 - DNA, 19 bp, Mus musculus
  siRNA target sequence for BC023882 (NM_146159.1,1265-1283).
cggcaagacaagagttagt

SEQ ID NO: 760839 - DNA, 19 bp, Mus musculus
  siRNA target sequence for BC023882 (NM_146159.1,1267-1285).
gcaagacaagagttagtgt

SEQ ID NO: 760840 - DNA, 19 bp, Mus musculus
  siRNA target sequence for BC023882 (NM_146159.1,1271-1289).
gacaagagttagtgttaaa

SEQ ID NO: 760841 - DNA, 19 bp, Mus musculus
  siRNA target sequence for BC023882 (NM_146159.1,1282-1300).
gtgttaaatgagttgataa

SEQ ID NO: 760842 - DNA, 19 bp, Mus musculus
  siRNA target sequence for BC023882 (NM_146159.1,1318-1336).
gagcttgtccagttatcat

SEQ ID NO: 760843 - DNA, 19 bp, Mus musculus
  siRNA target sequence for BC023882 (NM_146159.1,1320-1338).
gcttgtccagttatcatat

SEQ ID NO: 760844 - DNA, 19 bp, Mus musculus
  siRNA target sequence for BC023882 (NM_146159.1,1324-1342).
gtccagttatcatatgaga

SEQ ID NO: 760845 - DNA, 19 bp, Mus musculus
  siRNA target sequence for BC023882 (NM_146159.1,1352-1370).
gaaaacattgggatacata

SEQ ID NO: 760846 - DNA, 19 bp, Mus musculus
  siRNA target sequence for BC023882 (NM_146159.1,1390-1408).
gttcaacaactcagtcaaa

SEQ ID NO: 760847 - DNA, 19 bp, Mus musculus
  siRNA target sequence for BC023882 (NM_146159.1,1428-1446).
gcacttggcagtgttatca

SEQ ID NO: 760848 - DNA, 19 bp, Mus musculus
  siRNA target sequence for BC023882 (NM_146159.1,1434-1452).
ggcagtgttatcagacata

SEQ ID NO: 760849 - DNA, 19 bp, Mus musculus
  siRNA target sequence for BC023882 (NM_146159.1,1456-1474).
gcatctgagcagttaacct

SEQ ID NO: 760850 - DNA, 19 bp, Mus musculus
  siRNA target sequence for BC023882 (NM_146159.1,1484-1502).
ccatcgacaccaaagatca

SEQ ID NO: 760851 - DNA, 19 bp, Mus musculus
  siRNA target sequence for BC023882 (NM_146159.1,1505-1523).
ccactcataggctttatga

SEQ ID NO: 760852 - DNA, 19 bp, Mus musculus
  siRNA target sequence for BC023882 (NM_146159.1,1508-1526).
ctcataggctttatgaact

SEQ ID NO: 760853 - DNA, 19 bp, Mus musculus
  siRNA target sequence for BC023882 (NM_146159.1,1514-1532).
ggctttatgaacttctaga

SEQ ID NO: 760854 - DNA, 19 bp, Mus musculus
  siRNA target sequence for BC023882 (NM_146159.1,1528-1546).
ctagaaggagacaataaga

SEQ ID NO: 760855 - DNA, 19 bp, Mus musculus
  siRNA target sequence for BC023882 (NM_146159.1,1613-1631).
ctgtaatacaagatcagtt

SEQ ID NO: 760856 - DNA, 19 bp, Mus musculus
  siRNA target sequence for BC023882 (NM_146159.1,1624-1642).
gatcagttggcagtatcta

SEQ ID NO: 760857 - DNA, 19 bp, Mus musculus
  siRNA target sequence for BC023882 (NM_146159.1,1640-1658).
ctactcaagagcatttttt

SEQ ID NO: 760858 - DNA, 19 bp, Mus musculus
  siRNA target sequence for BC023882 (NM_146159.1,1665-1683).
gtccaaactgaataatgat

SEQ ID NO: 760859 - DNA, 19 bp, Mus musculus
  siRNA target sequence for BC023882 (NM_146159.1,1712-1730).
gtggagggaatcagctatt

SEQ ID NO: 760860 - DNA, 19 bp, Mus musculus
  siRNA target sequence for BC023882 (NM_146159.1,1717-1735).
gggaatcagctattgcttt

SEQ ID NO: 760861 - DNA, 19 bp, Mus musculus
  siRNA target sequence for BC023882 (NM_146159.1,1732-1750).
ctttgtgatcaggagttaa

SEQ ID NO: 760862 - DNA, 19 bp, Mus musculus
  siRNA target sequence for BC023882 (NM_146159.1,1758-1776).
ctttcatcaagttgaatct

SEQ ID NO: 760863 - DNA, 19 bp, Mus musculus
  siRNA target sequence for BC023882 (NM_146159.1,1845-1863).
ggcaactaataaattgcat

SEQ ID NO: 760864 - DNA, 19 bp, Mus musculus
  siRNA target sequence for BC025600 (NM_146162.1,317-335).
gaagggatcatggatttct

SEQ ID NO: 760865 - DNA, 19 bp, Mus musculus
  siRNA target sequence for Myo1h (NM_146163.2,416-434).
ccatgatgcagcaaaaggt

SEQ ID NO: 760866 - DNA, 19 bp, Mus musculus
  siRNA target sequence for Myo1h (NM_146163.2,433-451).
gtggtcacgagcgagatat

SEQ ID NO: 760867 - DNA, 19 bp, Mus musculus
  siRNA target sequence for Myo1h (NM_146163.2,511-529).
ctggatgaaagcaacataa

SEQ ID NO: 760868 - DNA, 19 bp, Mus musculus
  siRNA target sequence for Myo1h (NM_146163.2,574-592).
ggcgtcccggtcatcaagt

SEQ ID NO: 760869 - DNA, 19 bp, Mus musculus
  siRNA target sequence for Myo1h (NM_146163.2,575-593).
gcgtcccggtcatcaagta

SEQ ID NO: 760870 - DNA, 19 bp, Mus musculus
  siRNA target sequence for Myo1h (NM_146163.2,576-594).
cgtcccggtcatcaagtat

SEQ ID NO: 760871 - DNA, 19 bp, Mus musculus
  siRNA target sequence for 2810008P14Rik (NM_146164.1,310-328).
ctgagcctctaccacaatt

SEQ ID NO: 760872 - DNA, 19 bp, Mus musculus
  siRNA target sequence for 2810008P14Rik (NM_146164.1,433-451).
ccccttcgagtgcttatca

SEQ ID NO: 760873 - DNA, 19 bp, Mus musculus
  siRNA target sequence for 2810008P14Rik (NM_146164.1,503-521).
gcctgcggcagcttgatgt

SEQ ID NO: 760874 - DNA, 19 bp, Mus musculus
  siRNA target sequence for 2810008P14Rik (NM_146164.1,569-587).
gttccctgcgggatctcaa

SEQ ID NO: 760875 - DNA, 19 bp, Mus musculus
  siRNA target sequence for 2810008P14Rik (NM_146164.1,573-591).
cctgcgggatctcaatgtt

SEQ ID NO: 760876 - DNA, 19 bp, Mus musculus
  siRNA target sequence for 2810008P14Rik (NM_146164.1,638-656).
ctctggtccgcctggattt

SEQ ID NO: 760877 - DNA, 19 bp, Mus musculus
  siRNA target sequence for 2810008P14Rik (NM_146164.1,868-886).
ccttgccctgccgaagatt

SEQ ID NO: 760878 - DNA, 19 bp, Mus musculus
  siRNA target sequence for 2810008P14Rik (NM_146164.1,872-890).
gccctgccgaagatttatt

SEQ ID NO: 760879 - DNA, 19 bp, Mus musculus
  siRNA target sequence for 2810008P14Rik (NM_146164.1,951-969).
caagaggtggtcaggaaat

SEQ ID NO: 760880 - DNA, 19 bp, Mus musculus
  siRNA target sequence for 2810008P14Rik (NM_146164.1,1141-1159).
gagcagctgccttctgaat

SEQ ID NO: 760881 - DNA, 19 bp, Mus musculus
  siRNA target sequence for 2810008P14Rik (NM_146164.1,1752-1770).
ccgctctgtacccttcatt

SEQ ID NO: 760882 - DNA, 19 bp, Mus musculus
  siRNA target sequence for 2810008P14Rik (NM_146164.1,1757-1775).
ctgtacccttcattcatgt

SEQ ID NO: 760883 - DNA, 19 bp, Mus musculus
  siRNA target sequence for 2810008P14Rik (NM_146164.1,1821-1839).
gaatgtcgagagtttccta

SEQ ID NO: 760884 - DNA, 19 bp, Mus musculus
  siRNA target sequence for Jtv1 (NM_146165.1,161-179).
gaatctcgccaagatgata

SEQ ID NO: 760885 - DNA, 19 bp, Mus musculus
  siRNA target sequence for Jtv1 (NM_146165.1,165-183).
ctcgccaagatgatatttt

SEQ ID NO: 760886 - DNA, 19 bp, Mus musculus
  siRNA target sequence for Jtv1 (NM_146165.1,212-230).
gtcgatggcctttcaaaga

SEQ ID NO: 760887 - DNA, 19 bp, Mus musculus
  siRNA target sequence for Jtv1 (NM_146165.1,583-601).
gatgaagttcagtgtacaa

SEQ ID NO: 760888 - DNA, 19 bp, Mus musculus
  siRNA target sequence for Jtv1 (NM_146165.1,653-671).
ctgtttggccagaagcata

SEQ ID NO: 760889 - DNA, 19 bp, Mus musculus
  siRNA target sequence for Jtv1 (NM_146165.1,703-721).
ggtggatatcgccatgttt

SEQ ID NO: 760890 - DNA, 19 bp, Mus musculus
  siRNA target sequence for Jtv1 (NM_146165.1,755-773).
gccgtgttccgctctatga

SEQ ID NO: 760891 - DNA, 19 bp, Mus musculus
  siRNA target sequence for Jtv1 (NM_146165.1,756-774).
ccgtgttccgctctatgaa

SEQ ID NO: 760892 - DNA, 19 bp, Mus musculus
  siRNA target sequence for Jtv1 (NM_146165.1,795-813).
cgtggctggttggaaatga

SEQ ID NO: 760893 - DNA, 19 bp, Mus musculus
  siRNA target sequence for Jtv1 (NM_146165.1,900-918).
ggcttaagtcctgtgaaaa

SEQ ID NO: 760894 - DNA, 19 bp, Mus musculus
  siRNA target sequence for Ian3 (NM_146167.2,262-280).
gagacctcctggttgttga

SEQ ID NO: 760895 - DNA, 19 bp, Mus musculus
  siRNA target sequence for Ian3 (NM_146167.2,291-309).
ctcttcgacaccaaggtaa

SEQ ID NO: 760896 - DNA, 19 bp, Mus musculus
  siRNA target sequence for Ian3 (NM_146167.2,293-311).
cttcgacaccaaggtaaaa

SEQ ID NO: 760897 - DNA, 19 bp, Mus musculus
  siRNA target sequence for Ian3 (NM_146167.2,315-333).
gaaaccacctgccttgaaa

SEQ ID NO: 760898 - DNA, 19 bp, Mus musculus
  siRNA target sequence for Ian3 (NM_146167.2,411-429).
gaagagcaagaaactgtta

SEQ ID NO: 760899 - DNA, 19 bp, Mus musculus
  siRNA target sequence for Ian3 (NM_146167.2,512-530).
gagcttaagcgacttcatt

SEQ ID NO: 760900 - DNA, 19 bp, Mus musculus
  siRNA target sequence for Ian3 (NM_146167.2,527-545).
cattgctgactcagataca

SEQ ID NO: 760901 - DNA, 19 bp, Mus musculus
  siRNA target sequence for Ian3 (NM_146167.2,638-656).
gctgatggggcttgtagaa

SEQ ID NO: 760902 - DNA, 19 bp, Mus musculus
  siRNA target sequence for Ian3 (NM_146167.2,639-657).
ctgatggggcttgtagaaa

SEQ ID NO: 760903 - DNA, 19 bp, Mus musculus
  siRNA target sequence for Ian3 (NM_146167.2,712-730).
cggagcgaaggctgaagaa

SEQ ID NO: 760904 - DNA, 19 bp, Mus musculus
  siRNA target sequence for Ian3 (NM_146167.2,765-783).
ctaccagagaaggagatta

SEQ ID NO: 760905 - DNA, 19 bp, Mus musculus
  siRNA target sequence for Ian3 (NM_146167.2,798-816).
gagtatgctcttaggaaat

SEQ ID NO: 760906 - DNA, 19 bp, Mus musculus
  siRNA target sequence for Ian3 (NM_146167.2,800-818).
gtatgctcttaggaaattt

SEQ ID NO: 760907 - DNA, 19 bp, Mus musculus
  siRNA target sequence for Ian3 (NM_146167.2,850-868).
ccattagggaaaattacaa

SEQ ID NO: 760908 - DNA, 19 bp, Mus musculus
  siRNA target sequence for Ian3 (NM_146167.2,856-874).
gggaaaattacaatctgaa

SEQ ID NO: 760909 - DNA, 19 bp, Mus musculus
  siRNA target sequence for AW146242 (NM_146168.1,236-254).
ggactctatcccacatact

SEQ ID NO: 760910 - DNA, 19 bp, Mus musculus
  siRNA target sequence for AW146242 (NM_146168.1,253-271).
ctatatatgccgttcctat

SEQ ID NO: 760911 - DNA, 19 bp, Mus musculus
  siRNA target sequence for AW146242 (NM_146168.1,366-384).
gctgtggtgccggtttctt

SEQ ID NO: 760912 - DNA, 19 bp, Mus musculus
  siRNA target sequence for AW146242 (NM_146168.1,369-387).
gtggtgccggtttcttcat

SEQ ID NO: 760913 - DNA, 19 bp, Mus musculus
  siRNA target sequence for AW146242 (NM_146168.1,400-418).
gtatccgccaccactcatt

SEQ ID NO: 760914 - DNA, 19 bp, Mus musculus
  siRNA target sequence for AW146242 (NM_146168.1,625-643).
gcctccacccccctatgaa

SEQ ID NO: 760915 - DNA, 19 bp, Mus musculus
  siRNA target sequence for BC017133 (NM_146169.1,82-100).
ccgcaagaatctccataat

SEQ ID NO: 760916 - DNA, 19 bp, Mus musculus
  siRNA target sequence for BC017133 (NM_146169.1,110-128).
cagtgtggcaagtacatca

SEQ ID NO: 760917 - DNA, 19 bp, Mus musculus
  siRNA target sequence for BC017133 (NM_146169.1,341-359).
ggctgtggggcacttacaa

SEQ ID NO: 760918 - DNA, 19 bp, Mus musculus
  siRNA target sequence for BC017133 (NM_146169.1,343-361).
ctgtggggcacttacaaca

SEQ ID NO: 760919 - DNA, 19 bp, Mus musculus
  siRNA target sequence for 2810406C15Rik (NM_146171.1,226-244).
cagcttagagcatttcagt

SEQ ID NO: 760920 - DNA, 19 bp, Mus musculus
  siRNA target sequence for 2810406C15Rik (NM_146171.1,418-436).
gctctgagtggatcagata

SEQ ID NO: 760921 - DNA, 19 bp, Mus musculus
  siRNA target sequence for 2810406C15Rik (NM_146171.1,421-439).
ctgagtggatcagatagaa

SEQ ID NO: 760922 - DNA, 19 bp, Mus musculus
  siRNA target sequence for 2810406C15Rik (NM_146171.1,543-561).
cggtgggaagggtaagaga

SEQ ID NO: 760923 - DNA, 19 bp, Mus musculus
  siRNA target sequence for 2810406C15Rik (NM_146171.1,662-680).
ggaaccactcagcaattga

SEQ ID NO: 760924 - DNA, 19 bp, Mus musculus
  siRNA target sequence for 2810406C15Rik (NM_146171.1,710-728).
gttgctaccgccttttgga

SEQ ID NO: 760925 - DNA, 19 bp, Mus musculus
  siRNA target sequence for 2810406C15Rik (NM_146171.1,726-744).
ggagaatcccaccattagt

SEQ ID NO: 760926 - DNA, 19 bp, Mus musculus
  siRNA target sequence for 2810406C15Rik (NM_146171.1,926-944).
gcatagtgggagagattgt

SEQ ID NO: 760927 - DNA, 19 bp, Mus musculus
  siRNA target sequence for 2810406C15Rik (NM_146171.1,1104-1122).
gatgcgcaatgctgtgtta

SEQ ID NO: 760928 - DNA, 19 bp, Mus musculus
  siRNA target sequence for 2810406C15Rik (NM_146171.1,1184-1202).
gagaaaccagagatcagtt

SEQ ID NO: 760929 - DNA, 19 bp, Mus musculus
  siRNA target sequence for 2810406C15Rik (NM_146171.1,1225-1243).
ggccatgatgtgaactctt

SEQ ID NO: 760930 - DNA, 19 bp, Mus musculus
  siRNA target sequence for 2810406C15Rik (NM_146171.1,1226-1244).
gccatgatgtgaactcttt

SEQ ID NO: 760931 - DNA, 19 bp, Mus musculus
  siRNA target sequence for 2810406C15Rik (NM_146171.1,1227-1245).
ccatgatgtgaactctttt

SEQ ID NO: 760932 - DNA, 19 bp, Mus musculus
  siRNA target sequence for 2810406C15Rik (NM_146171.1,1356-1374).
gtcagtgctagtgtgtaaa

SEQ ID NO: 760933 - DNA, 19 bp, Mus musculus
  siRNA target sequence for 2810406C15Rik (NM_146171.1,1395-1413).
cagctttctagccaataat

SEQ ID NO: 760934 - DNA, 19 bp, Mus musculus
  siRNA target sequence for 2810406C15Rik (NM_146171.1,1549-1567).
gccatgttgccagaattga

SEQ ID NO: 760935 - DNA, 19 bp, Mus musculus
  siRNA target sequence for 2810406C15Rik (NM_146171.1,1608-1626).
gggagatcatcaaattgct

SEQ ID NO: 760936 - DNA, 19 bp, Mus musculus
  siRNA target sequence for 2810406C15Rik (NM_146171.1,1685-1703).
gttacaaacaggctattgt

SEQ ID NO: 760937 - DNA, 19 bp, Mus musculus
  siRNA target sequence for 2810406C15Rik (NM_146171.1,1962-1980).
cggcttctcccagaagatt

SEQ ID NO: 760938 - DNA, 19 bp, Mus musculus
  siRNA target sequence for 2810406C15Rik (NM_146171.1,2013-2031).
gtatgagaacacaactaca

SEQ ID NO: 760939 - DNA, 19 bp, Mus musculus
  siRNA target sequence for 2810406C15Rik (NM_146171.1,2055-2073).
cttcgtgatggtattccaa

SEQ ID NO: 760940 - DNA, 19 bp, Mus musculus
  siRNA target sequence for 2810406C15Rik (NM_146171.1,2058-2076).
cgtgatggtattccaattt

SEQ ID NO: 760941 - DNA, 19 bp, Mus musculus
  siRNA target sequence for 2810406C15Rik (NM_146171.1,2145-2163).
ccgggaagccgtgcttaat

SEQ ID NO: 760942 - DNA, 19 bp, Mus musculus
  siRNA target sequence for 2810406C15Rik (NM_146171.1,2210-2228).
ccaaggcgcagactttgat

SEQ ID NO: 760943 - DNA, 19 bp, Mus musculus
  siRNA target sequence for 2810406C15Rik (NM_146171.1,2211-2229).
caaggcgcagactttgatt

SEQ ID NO: 760944 - DNA, 19 bp, Mus musculus
  siRNA target sequence for 2810406C15Rik (NM_146171.1,2215-2233).
gcgcagactttgattcaca

SEQ ID NO: 760945 - DNA, 19 bp, Mus musculus
  siRNA target sequence for 2810406C15Rik (NM_146171.1,2216-2234).
cgcagactttgattcacaa

SEQ ID NO: 760946 - DNA, 19 bp, Mus musculus
  siRNA target sequence for 2810406C15Rik (NM_146171.1,2232-2250).
caacctctcgctgttgtta

SEQ ID NO: 760947 - DNA, 19 bp, Mus musculus
  siRNA target sequence for 2810406C15Rik (NM_146171.1,2286-2304).
ggaaattctttgtgagttt

SEQ ID NO: 760948 - DNA, 19 bp, Mus musculus
  siRNA target sequence for 2810406C15Rik (NM_146171.1,2386-2404).
gagcgctgctcctctgtta

SEQ ID NO: 760949 - DNA, 19 bp, Mus musculus
  siRNA target sequence for 2810406C15Rik (NM_146171.1,2521-2539).
gtgtgccttgccattgcta

SEQ ID NO: 760950 - DNA, 19 bp, Mus musculus
  siRNA target sequence for 2810406C15Rik (NM_146171.1,2527-2545).
cttgccattgctaacatct

SEQ ID NO: 760951 - DNA, 19 bp, Mus musculus
  siRNA target sequence for 2810406C15Rik (NM_146171.1,2669-2687).
ggatcccattcaaagaagt

SEQ ID NO: 760952 - DNA, 19 bp, Mus musculus
  siRNA target sequence for 2810406C15Rik (NM_146171.1,2670-2688).
gatcccattcaaagaagta

SEQ ID NO: 760953 - DNA, 19 bp, Mus musculus
  siRNA target sequence for 2810406C15Rik (NM_146171.1,2763-2781).
gcaagtcttggagaaactt

SEQ ID NO: 760954 - DNA, 19 bp, Mus musculus
  siRNA target sequence for 2810406C15Rik (NM_146171.1,3105-3123).
ggtactagctgcctttgtt

SEQ ID NO: 760955 - DNA, 19 bp, Mus musculus
  siRNA target sequence for 2810406C15Rik (NM_146171.1,3124-3142).
ccactgctacttaaagtct

SEQ ID NO: 760956 - DNA, 19 bp, Mus musculus
  siRNA target sequence for 2810406C15Rik (NM_146171.1,3130-3148).
ctacttaaagtctgtaaca

SEQ ID NO: 760957 - DNA, 19 bp, Mus musculus
  siRNA target sequence for 2810406C15Rik (NM_146171.1,3237-3255).
ctcccagcttcgtcttcta

SEQ ID NO: 760958 - DNA, 19 bp, Mus musculus
  siRNA target sequence for 2810406C15Rik (NM_146171.1,3522-3540).
ggccaagaatttcttcaat

SEQ ID NO: 760959 - DNA, 19 bp, Mus musculus
  siRNA target sequence for 2810406C15Rik (NM_146171.1,3548-3566).
cccacaagggcaatgctat

SEQ ID NO: 760960 - DNA, 19 bp, Mus musculus
  siRNA target sequence for 2810406C15Rik (NM_146171.1,3557-3575).
gcaatgctatctataatct

SEQ ID NO: 760961 - DNA, 19 bp, Mus musculus
  siRNA target sequence for 2810406C15Rik (NM_146171.1,3574-3592).
ctactccccgatatcatca

SEQ ID NO: 760962 - DNA, 19 bp, Mus musculus
  siRNA target sequence for 2810406C15Rik (NM_146171.1,3748-3766).
cgagacctagcctactgta

SEQ ID NO: 760963 - DNA, 19 bp, Mus musculus
  siRNA target sequence for 2810406C15Rik (NM_146171.1,3749-3767).
gagacctagcctactgtat

SEQ ID NO: 760964 - DNA, 19 bp, Mus musculus
  siRNA target sequence for 2810406C15Rik (NM_146171.1,3751-3769).
gacctagcctactgtatgt

SEQ ID NO: 760965 - DNA, 19 bp, Mus musculus
  siRNA target sequence for 2810406C15Rik (NM_146171.1,3904-3922).
cctgagggcaaggctataa

SEQ ID NO: 760966 - DNA, 19 bp, Mus musculus
  siRNA target sequence for 2810406C15Rik (NM_146171.1,3905-3923).
ctgagggcaaggctataat

SEQ ID NO: 760967 - DNA, 19 bp, Mus musculus
  siRNA target sequence for 2810406C15Rik (NM_146171.1,3909-3927).
gggcaaggctataatagat

SEQ ID NO: 760968 - DNA, 19 bp, Mus musculus
  siRNA target sequence for 2810406C15Rik (NM_146171.1,3911-3929).
gcaaggctataatagatga

SEQ ID NO: 760969 - DNA, 19 bp, Mus musculus
  siRNA target sequence for 2810406C15Rik (NM_146171.1,3915-3933).
ggctataatagatgaattt

SEQ ID NO: 760970 - DNA, 19 bp, Mus musculus
  siRNA target sequence for 2810406C15Rik (NM_146171.1,4118-4136).
ctggtcgtccacaaactca

SEQ ID NO: 760971 - DNA, 19 bp, Mus musculus
  siRNA target sequence for 2810406C15Rik (NM_146171.1,4191-4209).
cagtgaggacgaactttca

SEQ ID NO: 760972 - DNA, 19 bp, Mus musculus
  siRNA target sequence for Cnot3 (NM_146176.1,359-377).
gtggagcagtttgaagata

SEQ ID NO: 760973 - DNA, 19 bp, Mus musculus
  siRNA target sequence for Cnot3 (NM_146176.1,402-420).
ccaacgcgaaccagaaaga

SEQ ID NO: 760974 - DNA, 19 bp, Mus musculus
  siRNA target sequence for Cnot3 (NM_146176.1,403-421).
caacgcgaaccagaaagaa

SEQ ID NO: 760975 - DNA, 19 bp, Mus musculus
  siRNA target sequence for Cnot3 (NM_146176.1,407-425).
gcgaaccagaaagaaaagt

SEQ ID NO: 760976 - DNA, 19 bp, Mus musculus
  siRNA target sequence for Cnot3 (NM_146176.1,514-532).
caaaaggcagcttattgaa

SEQ ID NO: 760977 - DNA, 19 bp, Mus musculus
  siRNA target sequence for Cnot3 (NM_146176.1,544-562).
cattgagacgcaaatggaa

SEQ ID NO: 760978 - DNA, 19 bp, Mus musculus
  siRNA target sequence for Cnot3 (NM_146176.1,746-764).
gtacagacacgcaagaaga

SEQ ID NO: 760979 - DNA, 19 bp, Mus musculus
  siRNA target sequence for Cnot3 (NM_146176.1,798-816).
gcttgaagcggcatatcga

SEQ ID NO: 760980 - DNA, 19 bp, Mus musculus
  siRNA target sequence for Cnot3 (NM_146176.1,937-955).
ccaggaccccgactttgaa

SEQ ID NO: 760981 - DNA, 19 bp, Mus musculus
  siRNA target sequence for Cnot3 (NM_146176.1,947-965).
gactttgaagagaacgaat

SEQ ID NO: 760982 - DNA, 19 bp, Mus musculus
  siRNA target sequence for Cnot3 (NM_146176.1,1123-1141).
ctgcactacggaaaactct

SEQ ID NO: 760983 - DNA, 19 bp, Mus musculus
  siRNA target sequence for Cnot3 (NM_146176.1,1131-1149).
cggaaaactctgaagatga

SEQ ID NO: 760984 - DNA, 19 bp, Mus musculus
  siRNA target sequence for Cnot3 (NM_146176.1,1162-1180).
ccgatctacagatagtgaa

SEQ ID NO: 760985 - DNA, 19 bp, Mus musculus
  siRNA target sequence for Cnot3 (NM_146176.1,1185-1203).
gccagtctccagccaaaaa

SEQ ID NO: 760986 - DNA, 19 bp, Mus musculus
  siRNA target sequence for Cnot3 (NM_146176.1,1505-1523).
ggagggagcagcagcaata

SEQ ID NO: 760987 - DNA, 19 bp, Mus musculus
  siRNA target sequence for Cnot3 (NM_146176.1,1558-1576).
gaacggtgccacaagctat

SEQ ID NO: 760988 - DNA, 19 bp, Mus musculus
  siRNA target sequence for Cnot3 (NM_146176.1,1561-1579).
cggtgccacaagctatagt

SEQ ID NO: 760989 - DNA, 19 bp, Mus musculus
  siRNA target sequence for Cnot3 (NM_146176.1,1562-1580).
ggtgccacaagctatagtt

SEQ ID NO: 760990 - DNA, 19 bp, Mus musculus
  siRNA target sequence for Cnot3 (NM_146176.1,1780-1798).
ggtgccactgcctgtaaat

SEQ ID NO: 760991 - DNA, 19 bp, Mus musculus
  siRNA target sequence for Cnot3 (NM_146176.1,1941-1959).
ctatcagctctggtattga

SEQ ID NO: 760992 - DNA, 19 bp, Mus musculus
  siRNA target sequence for Cnot3 (NM_146176.1,1971-1989).
caacgttacacctaactga

SEQ ID NO: 760993 - DNA, 19 bp, Mus musculus
  siRNA target sequence for Cnot3 (NM_146176.1,2055-2073).
cagaggtgaacataccatt

SEQ ID NO: 760994 - DNA, 19 bp, Mus musculus
  siRNA target sequence for Cnot3 (NM_146176.1,2259-2277).
cggacactgtggagttcta

SEQ ID NO: 760995 - DNA, 19 bp, Mus musculus
  siRNA target sequence for Cnot3 (NM_146176.1,2289-2307).
caactgagacgctcttctt

SEQ ID NO: 760996 - DNA, 19 bp, Mus musculus
  siRNA target sequence for Cnot3 (NM_146176.1,2292-2310).
ctgagacgctcttcttcat

SEQ ID NO: 760997 - DNA, 19 bp, Mus musculus
  siRNA target sequence for Cnot3 (NM_146176.1,2328-2346).
gaaccaaggcacagtactt

SEQ ID NO: 760998 - DNA, 19 bp, Mus musculus
  siRNA target sequence for Cnot3 (NM_146176.1,2379-2397).
gattccacaccaagtatat

SEQ ID NO: 760999 - DNA, 19 bp, Mus musculus
  siRNA target sequence for Cnot3 (NM_146176.1,2384-2402).
cacaccaagtatatgatgt

SEQ ID NO: 761000 - DNA, 19 bp, Mus musculus
  siRNA target sequence for Cnot3 (NM_146176.1,2450-2468).
cagggcacctacatctact

SEQ ID NO: 761001 - DNA, 19 bp, Mus musculus
  siRNA target sequence for Cnot3 (NM_146176.1,2454-2472).
gcacctacatctactttga

SEQ ID NO: 761002 - DNA, 19 bp, Mus musculus
  siRNA target sequence for Cnot3 (NM_146176.1,2457-2475).
cctacatctactttgacta

SEQ ID NO: 761003 - DNA, 19 bp, Mus musculus
  siRNA target sequence for BC024816 (NM_146177.1,899-917).
gaccaaagcccctagacaa

SEQ ID NO: 761004 - DNA, 19 bp, Mus musculus
  siRNA target sequence for BC024816 (NM_146177.1,902-920).
caaagcccctagacaagta

SEQ ID NO: 761005 - DNA, 19 bp, Mus musculus
  siRNA target sequence for BC024816 (NM_146177.1,1017-1035).
gcgccctgacccattctgt

SEQ ID NO: 761006 - DNA, 19 bp, Mus musculus
  siRNA target sequence for BC024816 (NM_146177.1,1066-1084).
gccagcccccacatggatt

SEQ ID NO: 761007 - DNA, 19 bp, Mus musculus
  siRNA target sequence for BC024816 (NM_146177.1,1351-1369).
gtggggcgtgtggaactta

SEQ ID NO: 761008 - DNA, 19 bp, Mus musculus
  siRNA target sequence for BC024816 (NM_146177.1,1506-1524).
cagtcatggttctattgat

SEQ ID NO: 761009 - DNA, 19 bp, Mus musculus
  siRNA target sequence for BC024816 (NM_146177.1,1508-1526).
gtcatggttctattgatct

SEQ ID NO: 761010 - DNA, 19 bp, Mus musculus
  siRNA target sequence for BC024816 (NM_146177.1,1517-1535).
ctattgatctggacatcaa

SEQ ID NO: 761011 - DNA, 19 bp, Mus musculus
  siRNA target sequence for BC018462 (NM_146178.1,544-562).
gagtccgtctcggagaaat

SEQ ID NO: 761012 - DNA, 19 bp, Mus musculus
  siRNA target sequence for BC018462 (NM_146178.1,546-564).
gtccgtctcggagaaatgt

SEQ ID NO: 761013 - DNA, 19 bp, Mus musculus
  siRNA target sequence for BC018462 (NM_146178.1,549-567).
cgtctcggagaaatgttga

SEQ ID NO: 761014 - DNA, 19 bp, Mus musculus
  siRNA target sequence for BC018462 (NM_146178.1,599-617).
gccctgatgagcagtgtta

SEQ ID NO: 761015 - DNA, 19 bp, Mus musculus
  siRNA target sequence for BC018462 (NM_146178.1,600-618).
ccctgatgagcagtgttaa

SEQ ID NO: 761016 - DNA, 19 bp, Mus musculus
  siRNA target sequence for BC018462 (NM_146178.1,701-719).
cggtgtcagctggacaaat

SEQ ID NO: 761017 - DNA, 19 bp, Mus musculus
  siRNA target sequence for BC018462 (NM_146178.1,974-992).
gtcctctgccgctacaaga

SEQ ID NO: 761018 - DNA, 19 bp, Mus musculus
  siRNA target sequence for BC018462 (NM_146178.1,1083-1101).
ccatcgcagagctactcat

SEQ ID NO: 761019 - DNA, 19 bp, Mus musculus
  siRNA target sequence for BC018462 (NM_146178.1,1084-1102).
catcgcagagctactcatt

SEQ ID NO: 761020 - DNA, 19 bp, Mus musculus
  siRNA target sequence for BC018462 (NM_146178.1,1150-1168).
ggagcgcctgctagagtat

SEQ ID NO: 761021 - DNA, 19 bp, Mus musculus
  siRNA target sequence for BC018462 (NM_146178.1,1151-1169).
gagcgcctgctagagtatt

SEQ ID NO: 761022 - DNA, 19 bp, Mus musculus
  siRNA target sequence for 2410005H09Rik (NM_146183.1,536-554).
ggtgaaacagcgaataggt

SEQ ID NO: 761023 - DNA, 19 bp, Mus musculus
  siRNA target sequence for 2410005H09Rik (NM_146183.1,844-862).
gtgaggactcctttgacaa

SEQ ID NO: 761024 - DNA, 19 bp, Mus musculus
  siRNA target sequence for Mybpc2 (NM_146189.1,80-98).
ggcctccaaaggcaaagat

SEQ ID NO: 761025 - DNA, 19 bp, Mus musculus
  siRNA target sequence for Mybpc2 (NM_146189.1,339-357).
ggagcccggttcatcttca

SEQ ID NO: 761026 - DNA, 19 bp, Mus musculus
  siRNA target sequence for Mybpc2 (NM_146189.1,340-358).
gagcccggttcatcttcaa

SEQ ID NO: 761027 - DNA, 19 bp, Mus musculus
  siRNA target sequence for Mybpc2 (NM_146189.1,345-363).
cggttcatcttcaaggaat

SEQ ID NO: 761028 - DNA, 19 bp, Mus musculus
  siRNA target sequence for Mybpc2 (NM_146189.1,433-451).
gggattaccgtctagagat

SEQ ID NO: 761029 - DNA, 19 bp, Mus musculus
  siRNA target sequence for Mybpc2 (NM_146189.1,953-971).
cgttgggaagaaacgaatt

SEQ ID NO: 761030 - DNA, 19 bp, Mus musculus
  siRNA target sequence for Mybpc2 (NM_146189.1,957-975).
gggaagaaacgaattctta

SEQ ID NO: 761031 - DNA, 19 bp, Mus musculus
  siRNA target sequence for Mybpc2 (NM_146189.1,1023-1041).
gtccaagatgagaagtgtt

SEQ ID NO: 761032 - DNA, 19 bp, Mus musculus
  siRNA target sequence for Mybpc2 (NM_146189.1,1065-1083).
cccccagtcttgattgtca

SEQ ID NO: 761033 - DNA, 19 bp, Mus musculus
  siRNA target sequence for Mybpc2 (NM_146189.1,1094-1112).
ggaccagcaggtattcgta

SEQ ID NO: 761034 - DNA, 19 bp, Mus musculus
  siRNA target sequence for Mybpc2 (NM_146189.1,1287-1305).
cgctaccaggtcataacca

SEQ ID NO: 761035 - DNA, 19 bp, Mus musculus
  siRNA target sequence for Mybpc2 (NM_146189.1,1288-1306).
gctaccaggtcataaccaa

SEQ ID NO: 761036 - DNA, 19 bp, Mus musculus
  siRNA target sequence for Mybpc2 (NM_146189.1,1438-1456).
caggcaaatggtacaagaa

SEQ ID NO: 761037 - DNA, 19 bp, Mus musculus
  siRNA target sequence for Mybpc2 (NM_146189.1,1511-1529).
ccacaagctggtgattgat

SEQ ID NO: 761038 - DNA, 19 bp, Mus musculus
  siRNA target sequence for Mybpc2 (NM_146189.1,1598-1616).
caagctcaactttttggaa

SEQ ID NO: 761039 - DNA, 19 bp, Mus musculus
  siRNA target sequence for Mybpc2 (NM_146189.1,1674-1692).
gggaagacctcagataact

SEQ ID NO: 761040 - DNA, 19 bp, Mus musculus
  siRNA target sequence for Mybpc2 (NM_146189.1,1679-1697).
gacctcagataactcaatt

SEQ ID NO: 761041 - DNA, 19 bp, Mus musculus
  siRNA target sequence for Mybpc2 (NM_146189.1,1681-1699).
cctcagataactcaattgt

SEQ ID NO: 761042 - DNA, 19 bp, Mus musculus
  siRNA target sequence for Mybpc2 (NM_146189.1,1684-1702).
cagataactcaattgttgt

SEQ ID NO: 761043 - DNA, 19 bp, Mus musculus
  siRNA target sequence for Mybpc2 (NM_146189.1,2012-2030).
ggagccacccaagtatgat

SEQ ID NO: 761044 - DNA, 19 bp, Mus musculus
  siRNA target sequence for Mybpc2 (NM_146189.1,2041-2059).
cagtgactgggtacttgat

SEQ ID NO: 761045 - DNA, 19 bp, Mus musculus
  siRNA target sequence for Mybpc2 (NM_146189.1,2080-2098).
cccagcgctggatgaagat

SEQ ID NO: 761046 - DNA, 19 bp, Mus musculus
  siRNA target sequence for Mybpc2 (NM_146189.1,2086-2104).
gctggatgaagatcaactt

SEQ ID NO: 761047 - DNA, 19 bp, Mus musculus
  siRNA target sequence for Mybpc2 (NM_146189.1,2087-2105).
ctggatgaagatcaacttt

SEQ ID NO: 761048 - DNA, 19 bp, Mus musculus
  siRNA target sequence for Mybpc2 (NM_146189.1,2144-2162).
gatcgagggcgtcctttat

SEQ ID NO: 761049 - DNA, 19 bp, Mus musculus
  siRNA target sequence for Mybpc2 (NM_146189.1,2511-2529).
cttcagccagtcactatca

SEQ ID NO: 761050 - DNA, 19 bp, Mus musculus
  siRNA target sequence for Mybpc2 (NM_146189.1,2566-2584).
gccatcttcgtcagactta

SEQ ID NO: 761051 - DNA, 19 bp, Mus musculus
  siRNA target sequence for Mybpc2 (NM_146189.1,2567-2585).
ccatcttcgtcagacttat

SEQ ID NO: 761052 - DNA, 19 bp, Mus musculus
  siRNA target sequence for Mybpc2 (NM_146189.1,2568-2586).
catcttcgtcagacttata

SEQ ID NO: 761053 - DNA, 19 bp, Mus musculus
  siRNA target sequence for Mybpc2 (NM_146189.1,2579-2597).
gacttatatccgaaaagtt

SEQ ID NO: 761054 - DNA, 19 bp, Mus musculus
  siRNA target sequence for Mybpc2 (NM_146189.1,2678-2696).
ggatacctcccgtgtgaat

SEQ ID NO: 761055 - DNA, 19 bp, Mus musculus
  siRNA target sequence for Mybpc2 (NM_146189.1,2747-2765).
ctctgactccggagagtat

SEQ ID NO: 761056 - DNA, 19 bp, Mus musculus
  siRNA target sequence for Mybpc2 (NM_146189.1,2773-2791).
gtgtgcagattgaaaacat

SEQ ID NO: 761057 - DNA, 19 bp, Mus musculus
  siRNA target sequence for Mybpc2 (NM_146189.1,2861-2879).
ggaggtgtggggcacaaat

SEQ ID NO: 761058 - DNA, 19 bp, Mus musculus
  siRNA target sequence for Mybpc2 (NM_146189.1,2864-2882).
ggtgtggggcacaaatgct

SEQ ID NO: 761059 - DNA, 19 bp, Mus musculus
  siRNA target sequence for Mybpc2 (NM_146189.1,3027-3045).
gtgggtaatgagtactact

SEQ ID NO: 761060 - DNA, 19 bp, Mus musculus
  siRNA target sequence for Mybpc2 (NM_146189.1,3049-3067).
gtatcttcagcgagaacat

SEQ ID NO: 761061 - DNA, 19 bp, Mus musculus
  siRNA target sequence for Mybpc2 (NM_146189.1,3098-3116).
caagaacacagctcgaatt

SEQ ID NO: 761062 - DNA, 19 bp, Mus musculus
  siRNA target sequence for Mybpc2 (NM_146189.1,3359-3377).
ccgaccgtcaccctttgat

SEQ ID NO: 761063 - DNA, 19 bp, Mus musculus
  siRNA target sequence for Tubgcp5 (NM_146190.1,143-161).
ggaaatggccccataccta

SEQ ID NO: 761064 - DNA, 19 bp, Mus musculus
  siRNA target sequence for Tubgcp5 (NM_146190.1,144-162).
gaaatggccccatacctaa

SEQ ID NO: 761065 - DNA, 19 bp, Mus musculus
  siRNA target sequence for Tubgcp5 (NM_146190.1,170-188).
cctgacgctccctttagaa

SEQ ID NO: 761066 - DNA, 19 bp, Mus musculus
  siRNA target sequence for Tubgcp5 (NM_146190.1,209-227).
gccctctacaaatacttca

SEQ ID NO: 761067 - DNA, 19 bp, Mus musculus
  siRNA target sequence for Tubgcp5 (NM_146190.1,276-294).
gtgatacaaccataacact

SEQ ID NO: 761068 - DNA, 19 bp, Mus musculus
  siRNA target sequence for Tubgcp5 (NM_146190.1,285-303).
ccataacacttgcaatagt

SEQ ID NO: 761069 - DNA, 19 bp, Mus musculus
  siRNA target sequence for Tubgcp5 (NM_146190.1,321-339).
ctcgattggcgcagctaaa

SEQ ID NO: 761070 - DNA, 19 bp, Mus musculus
  siRNA target sequence for Tubgcp5 (NM_146190.1,324-342).
gattggcgcagctaaaggt

SEQ ID NO: 761071 - DNA, 19 bp, Mus musculus
  siRNA target sequence for Tubgcp5 (NM_146190.1,341-359).
gtcctggacaaagtgttta

SEQ ID NO: 761072 - DNA, 19 bp, Mus musculus
  siRNA target sequence for Tubgcp5 (NM_146190.1,343-361).
cctggacaaagtgtttagt

SEQ ID NO: 761073 - DNA, 19 bp, Mus musculus
  siRNA target sequence for Tubgcp5 (NM_146190.1,405-423).
gggcatctcacctgcttaa

SEQ ID NO: 761074 - DNA, 19 bp, Mus musculus
  siRNA target sequence for Tubgcp5 (NM_146190.1,461-479).
ggcgaagcctctgaacaaa

SEQ ID NO: 761075 - DNA, 19 bp, Mus musculus
  siRNA target sequence for Tubgcp5 (NM_146190.1,569-587).
gacggcgcaagggagttta

SEQ ID NO: 761076 - DNA, 19 bp, Mus musculus
  siRNA target sequence for Tubgcp5 (NM_146190.1,572-590).
ggcgcaagggagtttatca

SEQ ID NO: 761077 - DNA, 19 bp, Mus musculus
  siRNA target sequence for Tubgcp5 (NM_146190.1,573-591).
gcgcaagggagtttatcat

SEQ ID NO: 761078 - DNA, 19 bp, Mus musculus
  siRNA target sequence for Tubgcp5 (NM_146190.1,574-592).
cgcaagggagtttatcata

SEQ ID NO: 761079 - DNA, 19 bp, Mus musculus
  siRNA target sequence for Tubgcp5 (NM_146190.1,638-656).
gcaacgtacacactctata

SEQ ID NO: 761080 - DNA, 19 bp, Mus musculus
  siRNA target sequence for Tubgcp5 (NM_146190.1,648-666).
cactctatagcgtatctga

SEQ ID NO: 761081 - DNA, 19 bp, Mus musculus
  siRNA target sequence for Tubgcp5 (NM_146190.1,945-963).
cacacattgttaatgaaga

SEQ ID NO: 761082 - DNA, 19 bp, Mus musculus
  siRNA target sequence for Tubgcp5 (NM_146190.1,972-990).
ccaaagagaaccttataaa

SEQ ID NO: 761083 - DNA, 19 bp, Mus musculus
  siRNA target sequence for Tubgcp5 (NM_146190.1,1012-1030).
gcaccttgagctagatgat

SEQ ID NO: 761084 - DNA, 19 bp, Mus musculus
  siRNA target sequence for Tubgcp5 (NM_146190.1,1013-1031).
caccttgagctagatgata

SEQ ID NO: 761085 - DNA, 19 bp, Mus musculus
  siRNA target sequence for Tubgcp5 (NM_146190.1,1040-1058).
ccactgttggccatcaact

SEQ ID NO: 761086 - DNA, 19 bp, Mus musculus
  siRNA target sequence for Tubgcp5 (NM_146190.1,1083-1101).
gcgactttcacgagaagtt

SEQ ID NO: 761087 - DNA, 19 bp, Mus musculus
  siRNA target sequence for Tubgcp5 (NM_146190.1,1084-1102).
cgactttcacgagaagttt

SEQ ID NO: 761088 - DNA, 19 bp, Mus musculus
  siRNA target sequence for Tubgcp5 (NM_146190.1,1112-1130).
gacatatgcgtggatagat

SEQ ID NO: 761089 - DNA, 19 bp, Mus musculus
  siRNA target sequence for Tubgcp5 (NM_146190.1,1114-1132).
catatgcgtggatagatca

SEQ ID NO: 761090 - DNA, 19 bp, Mus musculus
  siRNA target sequence for Tubgcp5 (NM_146190.1,1146-1164).
cctgccagacttttgaatt

SEQ ID NO: 761091 - DNA, 19 bp, Mus musculus
  siRNA target sequence for Tubgcp5 (NM_146190.1,1150-1168).
ccagacttttgaattaaca

SEQ ID NO: 761092 - DNA, 19 bp, Mus musculus
  siRNA target sequence for Tubgcp5 (NM_146190.1,1179-1197).
gcctctatcctcacattga

SEQ ID NO: 761093 - DNA, 19 bp, Mus musculus
  siRNA target sequence for Tubgcp5 (NM_146190.1,1181-1199).
ctctatcctcacattgata

SEQ ID NO: 761094 - DNA, 19 bp, Mus musculus
  siRNA target sequence for Tubgcp5 (NM_146190.1,1192-1210).
cattgataagcagtatcta

SEQ ID NO: 761095 - DNA, 19 bp, Mus musculus
  siRNA target sequence for Tubgcp5 (NM_146190.1,1222-1240).
gaatctcatgcaaacctta

SEQ ID NO: 761096 - DNA, 19 bp, Mus musculus
  siRNA target sequence for Tubgcp5 (NM_146190.1,1312-1330).
catgtatgacttctatact

SEQ ID NO: 761097 - DNA, 19 bp, Mus musculus
  siRNA target sequence for Tubgcp5 (NM_146190.1,1366-1384).
gcagaatgtgtcttttctt

SEQ ID NO: 761098 - DNA, 19 bp, Mus musculus
  siRNA target sequence for Tubgcp5 (NM_146190.1,1422-1440).
ctgaagacagtttacgttt

SEQ ID NO: 761099 - DNA, 19 bp, Mus musculus
  siRNA target sequence for Tubgcp5 (NM_146190.1,1424-1442).
gaagacagtttacgtttat

SEQ ID NO: 761100 - DNA, 19 bp, Mus musculus
  siRNA target sequence for Tubgcp5 (NM_146190.1,1427-1445).
gacagtttacgtttatcta

SEQ ID NO: 761101 - DNA, 19 bp, Mus musculus
  siRNA target sequence for Tubgcp5 (NM_146190.1,1437-1455).
gtttatctatatcttttga

SEQ ID NO: 761102 - DNA, 19 bp, Mus musculus
  siRNA target sequence for Tubgcp5 (NM_146190.1,1618-1636).
cagcctggatgttctacta

SEQ ID NO: 761103 - DNA, 19 bp, Mus musculus
  siRNA target sequence for Tubgcp5 (NM_146190.1,1620-1638).
gcctggatgttctactatt

SEQ ID NO: 761104 - DNA, 19 bp, Mus musculus
  siRNA target sequence for Tubgcp5 (NM_146190.1,1659-1677).
ctgaaagatcccaagcaaa

SEQ ID NO: 761105 - DNA, 19 bp, Mus musculus
  siRNA target sequence for Tubgcp5 (NM_146190.1,1719-1737).
gaccaccaaaagagtcatt

SEQ ID NO: 761106 - DNA, 19 bp, Mus musculus
  siRNA target sequence for Tubgcp5 (NM_146190.1,1744-1762).
gcagattcatcgcatgttt

SEQ ID NO: 761107 - DNA, 19 bp, Mus musculus
  siRNA target sequence for Tubgcp5 (NM_146190.1,1751-1769).
catcgcatgtttctcttaa

SEQ ID NO: 761108 - DNA, 19 bp, Mus musculus
  siRNA target sequence for Tubgcp5 (NM_146190.1,1797-1815).
gtttacacaactacatcat

SEQ ID NO: 761109 - DNA, 19 bp, Mus musculus
  siRNA target sequence for Tubgcp5 (NM_146190.1,1869-1887).
ccaaagatttagatcagtt

SEQ ID NO: 761110 - DNA, 19 bp, Mus musculus
  siRNA target sequence for Tubgcp5 (NM_146190.1,1874-1892).
gatttagatcagttgatta

SEQ ID NO: 761111 - DNA, 19 bp, Mus musculus
  siRNA target sequence for Tubgcp5 (NM_146190.1,1898-1916).
cactacaggtatttgtcaa

SEQ ID NO: 761112 - DNA, 19 bp, Mus musculus
  siRNA target sequence for Tubgcp5 (NM_146190.1,1948-1966).
ggtcagcttcgtgaaagaa

SEQ ID NO: 761113 - DNA, 19 bp, Mus musculus
  siRNA target sequence for Tubgcp5 (NM_146190.1,2027-2045).
ggggcttggcaaatggaat

SEQ ID NO: 761114 - DNA, 19 bp, Mus musculus
  siRNA target sequence for Tubgcp5 (NM_146190.1,2030-2048).
gcttggcaaatggaatcta

SEQ ID NO: 761115 - DNA, 19 bp, Mus musculus
  siRNA target sequence for Tubgcp5 (NM_146190.1,2031-2049).
cttggcaaatggaatctat

SEQ ID NO: 761116 - DNA, 19 bp, Mus musculus
  siRNA target sequence for Tubgcp5 (NM_146190.1,2036-2054).
caaatggaatctatagaga

SEQ ID NO: 761117 - DNA, 19 bp, Mus musculus
  siRNA target sequence for Tubgcp5 (NM_146190.1,2086-2104).
gtttctggtaaccatctta

SEQ ID NO: 761118 - DNA, 19 bp, Mus musculus
  siRNA target sequence for Tubgcp5 (NM_146190.1,2090-2108).
ctggtaaccatcttaaata

SEQ ID NO: 761119 - DNA, 19 bp, Mus musculus
  siRNA target sequence for Tubgcp5 (NM_146190.1,2092-2110).
ggtaaccatcttaaataaa

SEQ ID NO: 761120 - DNA, 19 bp, Mus musculus
  siRNA target sequence for Picalm (NM_146194.2,394-412).
ctggctccgcggtatctaa

SEQ ID NO: 761121 - DNA, 19 bp, Mus musculus
  siRNA target sequence for Picalm (NM_146194.2,396-414).
ggctccgcggtatctaaga

SEQ ID NO: 761122 - DNA, 19 bp, Mus musculus
  siRNA target sequence for Picalm (NM_146194.2,398-416).
ctccgcggtatctaagaca

SEQ ID NO: 761123 - DNA, 19 bp, Mus musculus
  siRNA target sequence for Picalm (NM_146194.2,402-420).
gcggtatctaagacagtat

SEQ ID NO: 761124 - DNA, 19 bp, Mus musculus
  siRNA target sequence for Picalm (NM_146194.2,465-483).
ctggactacttaattcagt

SEQ ID NO: 761125 - DNA, 19 bp, Mus musculus
  siRNA target sequence for Picalm (NM_146194.2,513-531).
cagttggcggacagtttgt

SEQ ID NO: 761126 - DNA, 19 bp, Mus musculus
  siRNA target sequence for Picalm (NM_146194.2,518-536).
ggcggacagtttgtttgaa

SEQ ID NO: 761127 - DNA, 19 bp, Mus musculus
  siRNA target sequence for Picalm (NM_146194.2,519-537).
gcggacagtttgtttgaaa

SEQ ID NO: 761128 - DNA, 19 bp, Mus musculus
  siRNA target sequence for Picalm (NM_146194.2,521-539).
ggacagtttgtttgaaaga

SEQ ID NO: 761129 - DNA, 19 bp, Mus musculus
  siRNA target sequence for Picalm (NM_146194.2,534-552).
gaaagaactactaacagta

SEQ ID NO: 761130 - DNA, 19 bp, Mus musculus
  siRNA target sequence for Picalm (NM_146194.2,569-587).
caaatcactcattacaact

SEQ ID NO: 761131 - DNA, 19 bp, Mus musculus
  siRNA target sequence for Picalm (NM_146194.2,607-625).
gaaatgagcgtttcattca

SEQ ID NO: 761132 - DNA, 19 bp, Mus musculus
  siRNA target sequence for Picalm (NM_146194.2,646-664).
cattgtttaacttaagcaa

SEQ ID NO: 761133 - DNA, 19 bp, Mus musculus
  siRNA target sequence for Picalm (NM_146194.2,671-689).
ggataaaagtggattgcaa

SEQ ID NO: 761134 - DNA, 19 bp, Mus musculus
  siRNA target sequence for Picalm (NM_146194.2,681-699).
ggattgcaaggatatgata

SEQ ID NO: 761135 - DNA, 19 bp, Mus musculus
  siRNA target sequence for Picalm (NM_146194.2,682-700).
gattgcaaggatatgatat

SEQ ID NO: 761136 - DNA, 19 bp, Mus musculus
  siRNA target sequence for Picalm (NM_146194.2,696-714).
gatatgtctacatttatta

SEQ ID NO: 761137 - DNA, 19 bp, Mus musculus
  siRNA target sequence for Picalm (NM_146194.2,715-733).
gacggtatagtagatactt

SEQ ID NO: 761138 - DNA, 19 bp, Mus musculus
  siRNA target sequence for Picalm (NM_146194.2,717-735).
cggtatagtagatacttaa

SEQ ID NO: 761139 - DNA, 19 bp, Mus musculus
  siRNA target sequence for Picalm (NM_146194.2,718-736).
ggtatagtagatacttaaa

SEQ ID NO: 761140 - DNA, 19 bp, Mus musculus
  siRNA target sequence for Picalm (NM_146194.2,719-737).
gtatagtagatacttaaat

SEQ ID NO: 761141 - DNA, 19 bp, Mus musculus
  siRNA target sequence for Picalm (NM_146194.2,751-769).
catacagacaagttgcatt

SEQ ID NO: 761142 - DNA, 19 bp, Mus musculus
  siRNA target sequence for Picalm (NM_146194.2,755-773).
cagacaagttgcattcgat

SEQ ID NO: 761143 - DNA, 19 bp, Mus musculus
  siRNA target sequence for Picalm (NM_146194.2,757-775).
gacaagttgcattcgattt

SEQ ID NO: 761144 - DNA, 19 bp, Mus musculus
  siRNA target sequence for Picalm (NM_146194.2,759-777).
caagttgcattcgatttca

SEQ ID NO: 761145 - DNA, 19 bp, Mus musculus
  siRNA target sequence for Picalm (NM_146194.2,762-780).
gttgcattcgatttcacaa

SEQ ID NO: 761146 - DNA, 19 bp, Mus musculus
  siRNA target sequence for Picalm (NM_146194.2,798-816).
gatggagttatgagaacaa

SEQ ID NO: 761147 - DNA, 19 bp, Mus musculus
  siRNA target sequence for Picalm (NM_146194.2,833-851).
cttaaaaactgtaccaatt

SEQ ID NO: 761148 - DNA, 19 bp, Mus musculus
  siRNA target sequence for Picalm (NM_146194.2,841-859).
ctgtaccaattatccaaaa

SEQ ID NO: 761149 - DNA, 19 bp, Mus musculus
  siRNA target sequence for Picalm (NM_146194.2,866-884).
ggatgcacttcttgatttt

SEQ ID NO: 761150 - DNA, 19 bp, Mus musculus
  siRNA target sequence for Picalm (NM_146194.2,871-889).
cacttcttgattttaatgt

SEQ ID NO: 761151 - DNA, 19 bp, Mus musculus
  siRNA target sequence for Picalm (NM_146194.2,903-921).
cttacaaatggggtaataa

SEQ ID NO: 761152 - DNA, 19 bp, Mus musculus
  siRNA target sequence for Picalm (NM_146194.2,944-962).
caaagatgccattagacta

SEQ ID NO: 761153 - DNA, 19 bp, Mus musculus
  siRNA target sequence for Picalm (NM_146194.2,958-976).
gactatttgcagcatacaa

SEQ ID NO: 761154 - DNA, 19 bp, Mus musculus
  siRNA target sequence for Picalm (NM_146194.2,967-985).
cagcatacaatgaaggaat

SEQ ID NO: 761155 - DNA, 19 bp, Mus musculus
  siRNA target sequence for Picalm (NM_146194.2,1030-1048).
gcaaagaaggtcttgacat

SEQ ID NO: 761156 - DNA, 19 bp, Mus musculus
  siRNA target sequence for Picalm (NM_146194.2,1073-1091).
gacaagaatctcagagttt

SEQ ID NO: 761157 - DNA, 19 bp, Mus musculus
  siRNA target sequence for Picalm (NM_146194.2,1125-1143).
ggagatattccagatcttt

SEQ ID NO: 761158 - DNA, 19 bp, Mus musculus
  siRNA target sequence for Picalm (NM_146194.2,1151-1169).
ccccagcagtcttcttgat

SEQ ID NO: 761159 - DNA, 19 bp, Mus musculus
  siRNA target sequence for Picalm (NM_146194.2,1167-1185).
gatgctttagaacaacatt

SEQ ID NO: 761160 - DNA, 19 bp, Mus musculus
  siRNA target sequence for Picalm (NM_146194.2,1235-1253).
ggctacaacactttccaat

SEQ ID NO: 761161 - DNA, 19 bp, Mus musculus
  siRNA target sequence for Picalm (NM_146194.2,1329-1347).
gaagaacaggctcgtttaa

SEQ ID NO: 761162 - DNA, 19 bp, Mus musculus
  siRNA target sequence for Picalm (NM_146194.2,1335-1353).
caggctcgtttaaaagcat

SEQ ID NO: 761163 - DNA, 19 bp, Mus musculus
  siRNA target sequence for Picalm (NM_146194.2,1337-1355).
ggctcgtttaaaagcatta

SEQ ID NO: 761164 - DNA, 19 bp, Mus musculus
  siRNA target sequence for Picalm (NM_146194.2,1338-1356).
gctcgtttaaaagcattaa

SEQ ID NO: 761165 - DNA, 19 bp, Mus musculus
  siRNA target sequence for Picalm (NM_146194.2,1389-1407).
ccgcatacctctctaacaa

SEQ ID NO: 761166 - DNA, 19 bp, Mus musculus
  siRNA target sequence for Picalm (NM_146194.2,1391-1409).
gcatacctctctaacaact

SEQ ID NO: 761167 - DNA, 19 bp, Mus musculus
  siRNA target sequence for Picalm (NM_146194.2,1429-1447).
cctcagcagggggaataat

SEQ ID NO: 761168 - DNA, 19 bp, Mus musculus
  siRNA target sequence for Picalm (NM_146194.2,1453-1471).
caccagccatcgacatatt

SEQ ID NO: 761169 - DNA, 19 bp, Mus musculus
  siRNA target sequence for Picalm (NM_146194.2,1455-1473).
ccagccatcgacatatttt

SEQ ID NO: 761170 - DNA, 19 bp, Mus musculus
  siRNA target sequence for Picalm (NM_146194.2,1458-1476).
gccatcgacatattttcta

SEQ ID NO: 761171 - DNA, 19 bp, Mus musculus
  siRNA target sequence for Picalm (NM_146194.2,1474-1492).
ctacccctagttcttctaa

SEQ ID NO: 761172 - DNA, 19 bp, Mus musculus
  siRNA target sequence for Picalm (NM_146194.2,1486-1504).
cttctaacagcacatctaa

SEQ ID NO: 761173 - DNA, 19 bp, Mus musculus
  siRNA target sequence for Picalm (NM_146194.2,1510-1528).
caaatgacctgcttgactt

SEQ ID NO: 761174 - DNA, 19 bp, Mus musculus
  siRNA target sequence for Picalm (NM_146194.2,1526-1544).
cttgcagcagccaaccttt

SEQ ID NO: 761175 - DNA, 19 bp, Mus musculus
  siRNA target sequence for Picalm (NM_146194.2,1575-1593).
cctcagggagcgagtacat

SEQ ID NO: 761176 - DNA, 19 bp, Mus musculus
  siRNA target sequence for Picalm (NM_146194.2,1588-1606).
gtacatggggagatccttt

SEQ ID NO: 761177 - DNA, 19 bp, Mus musculus
  siRNA target sequence for Picalm (NM_146194.2,1631-1649).
ggatgccattccaagctta

SEQ ID NO: 761178 - DNA, 19 bp, Mus musculus
  siRNA target sequence for Picalm (NM_146194.2,1632-1650).
gatgccattccaagcttaa

SEQ ID NO: 761179 - DNA, 19 bp, Mus musculus
  siRNA target sequence for Picalm (NM_146194.2,1652-1670).
ccctttcctcacaaaaagt

SEQ ID NO: 761180 - DNA, 19 bp, Mus musculus
  siRNA target sequence for Picalm (NM_146194.2,1701-1719).
gatgtatccacttttacta

SEQ ID NO: 761181 - DNA, 19 bp, Mus musculus
  siRNA target sequence for Picalm (NM_146194.2,1704-1722).
gtatccacttttactacta

SEQ ID NO: 761182 - DNA, 19 bp, Mus musculus
  siRNA target sequence for Picalm (NM_146194.2,1729-1747).
ctactcatgagatgtttgt

SEQ ID NO: 761183 - DNA, 19 bp, Mus musculus
  siRNA target sequence for Picalm (NM_146194.2,1739-1757).
gatgtttgttggattcagt

SEQ ID NO: 761184 - DNA, 19 bp, Mus musculus
  siRNA target sequence for Picalm (NM_146194.2,1783-1801).
cttcagctggccttaatgt

SEQ ID NO: 761185 - DNA, 19 bp, Mus musculus
  siRNA target sequence for Picalm (NM_146194.2,1786-1804).
cagctggccttaatgttga

SEQ ID NO: 761186 - DNA, 19 bp, Mus musculus
  siRNA target sequence for Picalm (NM_146194.2,1809-1827).
gaatctgtgtttggaaata

SEQ ID NO: 761187 - DNA, 19 bp, Mus musculus
  siRNA target sequence for Picalm (NM_146194.2,1872-1890).
ggtggacttctcaaaccaa

SEQ ID NO: 761188 - DNA, 19 bp, Mus musculus
  siRNA target sequence for Picalm (NM_146194.2,1924-1942).
ccaaacttccgcctaacaa

SEQ ID NO: 761189 - DNA, 19 bp, Mus musculus
  siRNA target sequence for Picalm (NM_146194.2,1925-1943).
caaacttccgcctaacaaa

SEQ ID NO: 761190 - DNA, 19 bp, Mus musculus
  siRNA target sequence for Picalm (NM_146194.2,1932-1950).
ccgcctaacaaattagtgt

SEQ ID NO: 761191 - DNA, 19 bp, Mus musculus
  siRNA target sequence for Picalm (NM_146194.2,1947-1965).
gtgtctgacgacttggatt

SEQ ID NO: 761192 - DNA, 19 bp, Mus musculus
  siRNA target sequence for Picalm (NM_146194.2,1953-1971).
gacgacttggattcatctt

SEQ ID NO: 761193 - DNA, 19 bp, Mus musculus
  siRNA target sequence for Picalm (NM_146194.2,1955-1973).
cgacttggattcatcttta

SEQ ID NO: 761194 - DNA, 19 bp, Mus musculus
  siRNA target sequence for Picalm (NM_146194.2,1976-1994).
caaccttgtgggcaatctt

SEQ ID NO: 761195 - DNA, 19 bp, Mus musculus
  siRNA target sequence for Picalm (NM_146194.2,1986-2004).
ggcaatcttggcattggaa

SEQ ID NO: 761196 - DNA, 19 bp, Mus musculus
  siRNA target sequence for Picalm (NM_146194.2,2032-2050).
ggagtcaaccaggtgaaaa

SEQ ID NO: 761197 - DNA, 19 bp, Mus musculus
  siRNA target sequence for Picalm (NM_146194.2,2065-2083).
gatctaactggcaaccaaa

SEQ ID NO: 761198 - DNA, 19 bp, Mus musculus
  siRNA target sequence for Picalm (NM_146194.2,2105-2123).
gagcgctgcaacaatgaat

SEQ ID NO: 761199 - DNA, 19 bp, Mus musculus
  siRNA target sequence for Picalm (NM_146194.2,2116-2134).
caatgaatggcatgcattt

SEQ ID NO: 761200 - DNA, 19 bp, Mus musculus
  siRNA target sequence for Picalm (NM_146194.2,2178-2196).
ccaacgggcatgataggat

SEQ ID NO: 761201 - DNA, 19 bp, Mus musculus
  siRNA target sequence for Picalm (NM_146194.2,2179-2197).
caacgggcatgataggata

SEQ ID NO: 761202 - DNA, 19 bp, Mus musculus
  siRNA target sequence for Picalm (NM_146194.2,2183-2201).
gggcatgataggatatgga

SEQ ID NO: 761203 - DNA, 19 bp, Mus musculus
  siRNA target sequence for Picalm (NM_146194.2,2185-2203).
gcatgataggatatggaat

SEQ ID NO: 761204 - DNA, 19 bp, Mus musculus
  siRNA target sequence for Picalm (NM_146194.2,2186-2204).
catgataggatatggaatt

SEQ ID NO: 761205 - DNA, 19 bp, Mus musculus
  siRNA target sequence for Picalm (NM_146194.2,2189-2207).
gataggatatggaattcct

SEQ ID NO: 761206 - DNA, 19 bp, Mus musculus
  siRNA target sequence for Picalm (NM_146194.2,2217-2235).
ggaagtgtacctgtaatga

SEQ ID NO: 761207 - DNA, 19 bp, Mus musculus
  siRNA target sequence for Picalm (NM_146194.2,2302-2320).
gagcacagatacagtttat

SEQ ID NO: 761208 - DNA, 19 bp, Mus musculus
  siRNA target sequence for BC026401 (NM_146201.1,102-120).
gggatggcccagagatcaa

SEQ ID NO: 761209 - DNA, 19 bp, Mus musculus
  siRNA target sequence for BC026401 (NM_146201.1,274-292).
gtggggacagggcagtaat

SEQ ID NO: 761210 - DNA, 19 bp, Mus musculus
  siRNA target sequence for BC026401 (NM_146201.1,421-439).
cagctcagcccgaatcaaa

SEQ ID NO: 761211 - DNA, 19 bp, Mus musculus
  siRNA target sequence for BC026401 (NM_146201.1,663-681).
gttcagcccgaataaagca

SEQ ID NO: 761212 - DNA, 19 bp, Mus musculus
  siRNA target sequence for BC026401 (NM_146201.1,777-795).
cccaggacaagccgtatat

SEQ ID NO: 761213 - DNA, 19 bp, Mus musculus
  siRNA target sequence for BC026401 (NM_146201.1,844-862).
ccaccaacggagtcactta

SEQ ID NO: 761214 - DNA, 19 bp, Mus musculus
  siRNA target sequence for BC026401 (NM_146201.1,868-886).
caaacccttcggttgtgat

SEQ ID NO: 761215 - DNA, 19 bp, Mus musculus
  siRNA target sequence for BC026401 (NM_146201.1,1055-1073).
gagtgtaaccgtagcttta

SEQ ID NO: 761216 - DNA, 19 bp, Mus musculus
  siRNA target sequence for BC026401 (NM_146201.1,1441-1459).
cagttctgcccgagtcaaa

SEQ ID NO: 761217 - DNA, 19 bp, Mus musculus
  siRNA target sequence for BC026401 (NM_146201.1,1443-1461).
gttctgcccgagtcaaaca

SEQ ID NO: 761218 - DNA, 19 bp, Mus musculus
  siRNA target sequence for BC026401 (NM_146201.1,1634-1652).
cggagctcagatttagtca

SEQ ID NO: 761219 - DNA, 19 bp, Mus musculus
  siRNA target sequence for BC026401 (NM_146201.1,1635-1653).
ggagctcagatttagtcaa

SEQ ID NO: 761220 - DNA, 19 bp, Mus musculus
  siRNA target sequence for BC026401 (NM_146201.1,1638-1656).
gctcagatttagtcaaaca

SEQ ID NO: 761221 - DNA, 19 bp, Mus musculus
  siRNA target sequence for BC026401 (NM_146201.1,1746-1764).
gtgggcatctggccttaaa

SEQ ID NO: 761222 - DNA, 19 bp, Mus musculus
  siRNA target sequence for BC025546 (NM_146215.2,122-140).
gagcaagcgcagaaagctt

SEQ ID NO: 761223 - DNA, 19 bp, Mus musculus
  siRNA target sequence for BC025546 (NM_146215.2,175-193).
gcccagacgtcctcaatga

SEQ ID NO: 761224 - DNA, 19 bp, Mus musculus
  siRNA target sequence for BC025546 (NM_146215.2,227-245).
ccgtaagccactcgataat

SEQ ID NO: 761225 - DNA, 19 bp, Mus musculus
  siRNA target sequence for BC025546 (NM_146215.2,293-311).
cgagttcagggctcttcta

SEQ ID NO: 761226 - DNA, 19 bp, Mus musculus
  siRNA target sequence for BC025546 (NM_146215.2,304-322).
ctcttctagacttgaagaa

SEQ ID NO: 761227 - DNA, 19 bp, Mus musculus
  siRNA target sequence for BC025546 (NM_146215.2,500-518).
cattccgcaggaagctttt

SEQ ID NO: 761228 - DNA, 19 bp, Mus musculus
  siRNA target sequence for BC025546 (NM_146215.2,504-522).
ccgcaggaagcttttcaga

SEQ ID NO: 761229 - DNA, 19 bp, Mus musculus
  siRNA target sequence for BC025546 (NM_146215.2,578-596).
cctcaaccattacttaaaa

SEQ ID NO: 761230 - DNA, 19 bp, Mus musculus
  siRNA target sequence for BC025546 (NM_146215.2,579-597).
ctcaaccattacttaaaat

SEQ ID NO: 761231 - DNA, 19 bp, Mus musculus
  siRNA target sequence for BC025546 (NM_146215.2,581-599).
caaccattacttaaaatct

SEQ ID NO: 761232 - DNA, 19 bp, Mus musculus
  siRNA target sequence for BC025546 (NM_146215.2,600-618).
caccggttcccctgtgaat

SEQ ID NO: 761233 - DNA, 19 bp, Mus musculus
  siRNA target sequence for BC025546 (NM_146215.2,630-648).
gcgaacagcctgaatccat

SEQ ID NO: 761234 - DNA, 19 bp, Mus musculus
  siRNA target sequence for BC025546 (NM_146215.2,631-649).
cgaacagcctgaatccata

SEQ ID NO: 761235 - DNA, 19 bp, Mus musculus
  siRNA target sequence for BC025546 (NM_146215.2,653-671).
cgaggcaaacgacaatctt

SEQ ID NO: 761236 - DNA, 19 bp, Mus musculus
  siRNA target sequence for BC025546 (NM_146215.2,658-676).
caaacgacaatcttaggat

SEQ ID NO: 761237 - DNA, 19 bp, Mus musculus
  siRNA target sequence for BC025546 (NM_146215.2,662-680).
cgacaatcttaggatgatt

SEQ ID NO: 761238 - DNA, 19 bp, Mus musculus
  siRNA target sequence for BC025546 (NM_146215.2,718-736).
ggtacttcggcccagataa

SEQ ID NO: 761239 - DNA, 19 bp, Mus musculus
  siRNA target sequence for BC025546 (NM_146215.2,719-737).
gtacttcggcccagataat

SEQ ID NO: 761240 - DNA, 19 bp, Mus musculus
  siRNA target sequence for BC025546 (NM_146215.2,829-847).
gcttcgattgccaaggaaa

SEQ ID NO: 761241 - DNA, 19 bp, Mus musculus
  siRNA target sequence for BC025546 (NM_146215.2,855-873).
gaacaggaagccttagtgt

SEQ ID NO: 761242 - DNA, 19 bp, Mus musculus
  siRNA target sequence for BC025546 (NM_146215.2,866-884).
cttagtgtcgtctttgcat

SEQ ID NO: 761243 - DNA, 19 bp, Mus musculus
  siRNA target sequence for BC025546 (NM_146215.2,977-995).
cctcatgtacctgctaaat

SEQ ID NO: 761244 - DNA, 19 bp, Mus musculus
  siRNA target sequence for BC025546 (NM_146215.2,978-996).
ctcatgtacctgctaaatt

SEQ ID NO: 761245 - DNA, 19 bp, Mus musculus
  siRNA target sequence for BC025546 (NM_146215.2,983-1001).
gtacctgctaaattgttct

SEQ ID NO: 761246 - DNA, 19 bp, Mus musculus
  siRNA target sequence for BC025546 (NM_146215.2,986-1004).
cctgctaaattgttctttt

SEQ ID NO: 761247 - DNA, 19 bp, Mus musculus
  siRNA target sequence for BC025546 (NM_146215.2,1005-1023).
gaccaagttcatgttttca

SEQ ID NO: 761248 - DNA, 19 bp, Mus musculus
  siRNA target sequence for BC025546 (NM_146215.2,1045-1063).
gaaactcagaagtctatgt

SEQ ID NO: 761249 - DNA, 19 bp, Mus musculus
  siRNA target sequence for BC025546 (NM_146215.2,1151-1169).
ggcgctctttcctcatcat

SEQ ID NO: 761250 - DNA, 19 bp, Mus musculus
  siRNA target sequence for BC025546 (NM_146215.2,1194-1212).
cgacacgaagagtgttgta

SEQ ID NO: 761251 - DNA, 19 bp, Mus musculus
  siRNA target sequence for BC025546 (NM_146215.2,1205-1223).
gtgttgtacgttctttcat

SEQ ID NO: 761252 - DNA, 19 bp, Mus musculus
  siRNA target sequence for BC025546 (NM_146215.2,1221-1239).
catagataccagttagaga

SEQ ID NO: 761253 - DNA, 19 bp, Mus musculus
  siRNA target sequence for BC025546 (NM_146215.2,1225-1243).
gataccagttagagactat

SEQ ID NO: 761254 - DNA, 19 bp, Mus musculus
  siRNA target sequence for BC025546 (NM_146215.2,1246-1264).
ctgagaacattcgtctttt

SEQ ID NO: 761255 - DNA, 19 bp, Mus musculus
  siRNA target sequence for BC025546 (NM_146215.2,1315-1333).
gcgctgtacaatattttat

SEQ ID NO: 761256 - DNA, 19 bp, Mus musculus
  siRNA target sequence for BC025546 (NM_146215.2,1347-1365).
ctgaagcctctttcaagaa

SEQ ID NO: 761257 - DNA, 19 bp, Mus musculus
  siRNA target sequence for BC025546 (NM_146215.2,1349-1367).
gaagcctctttcaagaaat

SEQ ID NO: 761258 - DNA, 19 bp, Mus musculus
  siRNA target sequence for BC025546 (NM_146215.2,1374-1392).
ctcgttaaaaagtccaata

SEQ ID NO: 761259 - DNA, 19 bp, Mus musculus
  siRNA target sequence for BC025546 (NM_146215.2,1376-1394).
cgttaaaaagtccaatatt

SEQ ID NO: 761260 - DNA, 19 bp, Mus musculus
  siRNA target sequence for BC025546 (NM_146215.2,1385-1403).
gtccaatattggttgtagt

SEQ ID NO: 761261 - DNA, 19 bp, Mus musculus
  siRNA target sequence for BC025546 (NM_146215.2,1387-1405).
ccaatattggttgtagtat

SEQ ID NO: 761262 - DNA, 19 bp, Mus musculus
  siRNA target sequence for BC025546 (NM_146215.2,1422-1440).
ggacagagaaacaagtatt

SEQ ID NO: 761263 - DNA, 19 bp, Mus musculus
  siRNA target sequence for BC025546 (NM_146215.2,1425-1443).
cagagaaacaagtatttta

SEQ ID NO: 761264 - DNA, 19 bp, Mus musculus
  siRNA target sequence for BC025546 (NM_146215.2,1494-1512).
gtagccaaaggatacttca

SEQ ID NO: 761265 - DNA, 19 bp, Mus musculus
  siRNA target sequence for BC025546 (NM_146215.2,1497-1515).
gccaaaggatacttcaata

SEQ ID NO: 761266 - DNA, 19 bp, Mus musculus
  siRNA target sequence for BC025546 (NM_146215.2,1526-1544).
ggaacacaccgtctatcat

SEQ ID NO: 761267 - DNA, 19 bp, Mus musculus
  siRNA target sequence for BC025546 (NM_146215.2,1592-1610).
ccagtcgtggcaagtctta

SEQ ID NO: 761268 - DNA, 19 bp, Mus musculus
  siRNA target sequence for BC025546 (NM_146215.2,1595-1613).
gtcgtggcaagtcttagaa

SEQ ID NO: 761269 - DNA, 19 bp, Mus musculus
  siRNA target sequence for BC025546 (NM_146215.2,1623-1641).
ctgccgaaggtaaagtgtt

SEQ ID NO: 761270 - DNA, 19 bp, Mus musculus
  siRNA target sequence for BC025546 (NM_146215.2,1649-1667).
ctgtgatggtgaaatttta

SEQ ID NO: 761271 - DNA, 19 bp, Mus musculus
  siRNA target sequence for BC025546 (NM_146215.2,1749-1767).
cgctgttgtcccgtctttt

SEQ ID NO: 761272 - DNA, 19 bp, Mus musculus
  siRNA target sequence for BC025546 (NM_146215.2,1777-1795).
cagtattatccgagttgtt

SEQ ID NO: 761273 - DNA, 19 bp, Mus musculus
  siRNA target sequence for BC025546 (NM_146215.2,1779-1797).
gtattatccgagttgttga

SEQ ID NO: 761274 - DNA, 19 bp, Mus musculus
  siRNA target sequence for BC025546 (NM_146215.2,1974-1992).
ccagcctaccagcatttgt

SEQ ID NO: 761275 - DNA, 19 bp, Mus musculus
  siRNA target sequence for BC025546 (NM_146215.2,2062-2080).
cttgcttcacgaggtttat

SEQ ID NO: 761276 - DNA, 19 bp, Mus musculus
  siRNA target sequence for BC025546 (NM_146215.2,2096-2114).
cgtcctccacggctgtttt

SEQ ID NO: 761277 - DNA, 19 bp, Mus musculus
  siRNA target sequence for BC025546 (NM_146215.2,2099-2117).
cctccacggctgttttaga

SEQ ID NO: 761278 - DNA, 19 bp, Mus musculus
  siRNA target sequence for BC025546 (NM_146215.2,2100-2118).
ctccacggctgttttagat

SEQ ID NO: 761279 - DNA, 19 bp, Mus musculus
  siRNA target sequence for BC025546 (NM_146215.2,2103-2121).
cacggctgttttagattta

SEQ ID NO: 761280 - DNA, 19 bp, Mus musculus
  siRNA target sequence for BC025546 (NM_146215.2,2106-2124).
ggctgttttagatttatca

SEQ ID NO: 761281 - DNA, 19 bp, Mus musculus
  siRNA target sequence for BC025546 (NM_146215.2,2263-2281).
gtgcccctcggcagatttt

SEQ ID NO: 761282 - DNA, 19 bp, Mus musculus
  siRNA target sequence for BC025546 (NM_146215.2,2266-2284).
cccctcggcagattttaca

SEQ ID NO: 761283 - DNA, 19 bp, Mus musculus
  siRNA target sequence for BC025546 (NM_146215.2,2314-2332).
ggacgctgcttgacttttt

SEQ ID NO: 761284 - DNA, 19 bp, Mus musculus
  siRNA target sequence for BC025546 (NM_146215.2,2342-2360).
gaacgctgccattgctaaa

SEQ ID NO: 761285 - DNA, 19 bp, Mus musculus
  siRNA target sequence for BC025546 (NM_146215.2,2356-2374).
ctaaaaggcatctgcattt

SEQ ID NO: 761286 - DNA, 19 bp, Mus musculus
  siRNA target sequence for D8Wsu151e (NM_146216.2,280-298).
ctcactcccaacatcgtaa

SEQ ID NO: 761287 - DNA, 19 bp, Mus musculus
  siRNA target sequence for D8Wsu151e (NM_146216.2,294-312).
cgtaagggccctgaatgat

SEQ ID NO: 761288 - DNA, 19 bp, Mus musculus
  siRNA target sequence for D8Wsu151e (NM_146216.2,295-313).
gtaagggccctgaatgata

SEQ ID NO: 761289 - DNA, 19 bp, Mus musculus
  siRNA target sequence for D8Wsu151e (NM_146216.2,542-560).
cagtgctgacctgctttaa

SEQ ID NO: 761290 - DNA, 19 bp, Mus musculus
  siRNA target sequence for D8Wsu151e (NM_146216.2,590-608).
cttgtgaggccctctacaa

SEQ ID NO: 761291 - DNA, 19 bp, Mus musculus
  siRNA target sequence for D8Wsu151e (NM_146216.2,593-611).
gtgaggccctctacaatat

SEQ ID NO: 761292 - DNA, 19 bp, Mus musculus
  siRNA target sequence for D8Wsu151e (NM_146216.2,632-650).
ccgtgctgccgcacttcaa

SEQ ID NO: 761293 - DNA, 19 bp, Mus musculus
  siRNA target sequence for D8Wsu151e (NM_146216.2,633-651).
cgtgctgccgcacttcaat

SEQ ID NO: 761294 - DNA, 19 bp, Mus musculus
  siRNA target sequence for D8Wsu151e (NM_146216.2,636-654).
gctgccgcacttcaatgtt

SEQ ID NO: 761295 - DNA, 19 bp, Mus musculus
  siRNA target sequence for D8Wsu151e (NM_146216.2,858-876).
ggtgtcggtgccagacatt

SEQ ID NO: 761296 - DNA, 19 bp, Mus musculus
  siRNA target sequence for D8Wsu151e (NM_146216.2,859-877).
gtgtcggtgccagacatta

SEQ ID NO: 761297 - DNA, 19 bp, Mus musculus
  siRNA target sequence for D8Wsu151e (NM_146216.2,863-881).
cggtgccagacattaacct

SEQ ID NO: 761298 - DNA, 19 bp, Mus musculus
  siRNA target sequence for D8Wsu151e (NM_146216.2,938-956).
gcaaggagattcggaaaat

SEQ ID NO: 761299 - DNA, 19 bp, Mus musculus
  siRNA target sequence for D8Wsu151e (NM_146216.2,942-960).
ggagattcggaaaatgtgt

SEQ ID NO: 761300 - DNA, 19 bp, Mus musculus
  siRNA target sequence for D8Wsu151e (NM_146216.2,1169-1187).
catgcttggcctatgatga

SEQ ID NO: 761301 - DNA, 19 bp, Mus musculus
  siRNA target sequence for D8Wsu151e (NM_146216.2,1183-1201).
gatgaccgcaagaaaagta

SEQ ID NO: 761302 - DNA, 19 bp, Mus musculus
  siRNA target sequence for D8Wsu151e (NM_146216.2,1186-1204).
gaccgcaagaaaagtatca

SEQ ID NO: 761303 - DNA, 19 bp, Mus musculus
  siRNA target sequence for D8Wsu151e (NM_146216.2,1382-1400).
gaagtggcatcaatgtctt

SEQ ID NO: 761304 - DNA, 19 bp, Mus musculus
  siRNA target sequence for D8Wsu151e (NM_146216.2,1437-1455).
gcacctggacgggattgtt

SEQ ID NO: 761305 - DNA, 19 bp, Mus musculus
  siRNA target sequence for D8Wsu151e (NM_146216.2,1473-1491).
ccttagtgacacaaccatt

SEQ ID NO: 761306 - DNA, 19 bp, Mus musculus
  siRNA target sequence for D8Wsu151e (NM_146216.2,1523-1541).
ggctctaccatctctacat

SEQ ID NO: 761307 - DNA, 19 bp, Mus musculus
  siRNA target sequence for D8Wsu151e (NM_146216.2,1530-1548).
ccatctctacatcaaaact

SEQ ID NO: 761308 - DNA, 19 bp, Mus musculus
  siRNA target sequence for D8Wsu151e (NM_146216.2,1575-1593).
cagcctcttccccatctta

SEQ ID NO: 761309 - DNA, 19 bp, Mus musculus
  siRNA target sequence for D8Wsu151e (NM_146216.2,1779-1797).
cagtaccaaaggcttagaa

SEQ ID NO: 761310 - DNA, 19 bp, Mus musculus
  siRNA target sequence for D8Wsu151e (NM_146216.2,1826-1844).
cctacttttacaagttcat

SEQ ID NO: 761311 - DNA, 19 bp, Mus musculus
  siRNA target sequence for D8Wsu151e (NM_146216.2,1891-1909).
gccagaggcccgttcatca

SEQ ID NO: 761312 - DNA, 19 bp, Mus musculus
  siRNA target sequence for D8Wsu151e (NM_146216.2,2254-2272).
ctcgtgcagctaattgagt

SEQ ID NO: 761313 - DNA, 19 bp, Mus musculus
  siRNA target sequence for D8Wsu151e (NM_146216.2,2271-2289).
gtgccccatctttacatat

SEQ ID NO: 761314 - DNA, 19 bp, Mus musculus
  siRNA target sequence for D8Wsu151e (NM_146216.2,2433-2451).
gactgaagactgtctgaaa

SEQ ID NO: 761315 - DNA, 19 bp, Mus musculus
  siRNA target sequence for BC024479 (NM_146222.1,206-224).
gtttcaaagagaacgttaa

SEQ ID NO: 761316 - DNA, 19 bp, Mus musculus
  siRNA target sequence for BC024479 (NM_146222.1,267-285).
ccatgcagaatattgtaca

SEQ ID NO: 761317 - DNA, 19 bp, Mus musculus
  siRNA target sequence for BC024479 (NM_146222.1,272-290).
cagaatattgtacagattt

SEQ ID NO: 761318 - DNA, 19 bp, Mus musculus
  siRNA target sequence for BC024479 (NM_146222.1,304-322).
gttgaaatgggaactgttt

SEQ ID NO: 761319 - DNA, 19 bp, Mus musculus
  siRNA target sequence for BC024479 (NM_146222.1,345-363).
ggctccatctttccaataa

SEQ ID NO: 761320 - DNA, 19 bp, Mus musculus
  siRNA target sequence for BC024479 (NM_146222.1,393-411).
cccgctggaaagaggatat

SEQ ID NO: 761321 - DNA, 19 bp, Mus musculus
  siRNA target sequence for BC024479 (NM_146222.1,394-412).
ccgctggaaagaggatatt

SEQ ID NO: 761322 - DNA, 19 bp, Mus musculus
  siRNA target sequence for BC024479 (NM_146222.1,397-415).
ctggaaagaggatattcgt

SEQ ID NO: 761323 - DNA, 19 bp, Mus musculus
  siRNA target sequence for BC024479 (NM_146222.1,399-417).
ggaaagaggatattcgtta

SEQ ID NO: 761324 - DNA, 19 bp, Mus musculus
  siRNA target sequence for BC024479 (NM_146222.1,404-422).
gaggatattcgttaccatt

SEQ ID NO: 761325 - DNA, 19 bp, Mus musculus
  siRNA target sequence for BC024479 (NM_146222.1,458-476).
cgtcttcgcgagtatttca

SEQ ID NO: 761326 - DNA, 19 bp, Mus musculus
  siRNA target sequence for BC024479 (NM_146222.1,459-477).
gtcttcgcgagtatttcaa

SEQ ID NO: 761327 - DNA, 19 bp, Mus musculus
  siRNA target sequence for BC024479 (NM_146222.1,461-479).
cttcgcgagtatttcaact

SEQ ID NO: 761328 - DNA, 19 bp, Mus musculus
  siRNA target sequence for BC024479 (NM_146222.1,488-506).
cctgagggacggatcatta

SEQ ID NO: 761329 - DNA, 19 bp, Mus musculus
  siRNA target sequence for BC024479 (NM_146222.1,489-507).
ctgagggacggatcattat

SEQ ID NO: 761330 - DNA, 19 bp, Mus musculus
  siRNA target sequence for BC024479 (NM_146222.1,491-509).
gagggacggatcattatga

SEQ ID NO: 761331 - DNA, 19 bp, Mus musculus
  siRNA target sequence for BC024479 (NM_146222.1,510-528).
cccgggtgcaaaaaatgaa

SEQ ID NO: 761332 - DNA, 19 bp, Mus musculus
  siRNA target sequence for BC024479 (NM_146222.1,512-530).
cgggtgcaaaaaatgaact

SEQ ID NO: 761333 - DNA, 19 bp, Mus musculus
  siRNA target sequence for BC024479 (NM_146222.1,641-659).
ggcaatgttgttcagtatt

SEQ ID NO: 761334 - DNA, 19 bp, Mus musculus
  siRNA target sequence for BC024479 (NM_146222.1,642-660).
gcaatgttgttcagtattt

SEQ ID NO: 761335 - DNA, 19 bp, Mus musculus
  siRNA target sequence for BC024479 (NM_146222.1,664-682).
gccaggaggcattcctaaa

SEQ ID NO: 761336 - DNA, 19 bp, Mus musculus
  siRNA target sequence for BC024479 (NM_146222.1,799-817).
ctcagcacaagcctcatta

SEQ ID NO: 761337 - DNA, 19 bp, Mus musculus
  siRNA target sequence for BC024479 (NM_146222.1,801-819).
cagcacaagcctcattaca

SEQ ID NO: 761338 - DNA, 19 bp, Mus musculus
  siRNA target sequence for BC024479 (NM_146222.1,830-848).
gaacccacccggatcatct

SEQ ID NO: 761339 - DNA, 19 bp, Mus musculus
  siRNA target sequence for BC024479 (NM_146222.1,883-901).
gcagcagtgcttgttttta

SEQ ID NO: 761340 - DNA, 19 bp, Mus musculus
  siRNA target sequence for BC024479 (NM_146222.1,886-904).
gcagtgcttgtttttacat

SEQ ID NO: 761341 - DNA, 19 bp, Mus musculus
  siRNA target sequence for BC024479 (NM_146222.1,887-905).
cagtgcttgtttttacatt

SEQ ID NO: 761342 - DNA, 19 bp, Mus musculus
  siRNA target sequence for BC024479 (NM_146222.1,1000-1018).
gtccatctacatcaaattt

SEQ ID NO: 761343 - DNA, 19 bp, Mus musculus
  siRNA target sequence for BC024479 (NM_146222.1,1003-1021).
catctacatcaaatttgta

SEQ ID NO: 761344 - DNA, 19 bp, Mus musculus
  siRNA target sequence for BC024479 (NM_146222.1,1006-1024).
ctacatcaaatttgtagaa

SEQ ID NO: 761345 - DNA, 19 bp, Mus musculus
  siRNA target sequence for BC024479 (NM_146222.1,1009-1027).
catcaaatttgtagaagta

SEQ ID NO: 761346 - DNA, 19 bp, Mus musculus
  siRNA target sequence for BC024479 (NM_146222.1,1044-1062).
ctgccggctcattagttga

SEQ ID NO: 761347 - DNA, 19 bp, Mus musculus
  siRNA target sequence for BC024479 (NM_146222.1,1077-1095).
ccattggataccccttaaa

SEQ ID NO: 761348 - DNA, 19 bp, Mus musculus
  siRNA target sequence for BC024479 (NM_146222.1,1078-1096).
cattggataccccttaaaa

SEQ ID NO: 761349 - DNA, 19 bp, Mus musculus
  siRNA target sequence for Lman1l (NM_146223.2,215-233).
gagtacgaggagtatcaga

SEQ ID NO: 761350 - DNA, 19 bp, Mus musculus
  siRNA target sequence for Lman1l (NM_146223.2,309-327).
gtcacttcagagacaaata

SEQ ID NO: 761351 - DNA, 19 bp, Mus musculus
  siRNA target sequence for Lman1l (NM_146223.2,329-347).
cgtctgcccaagaacgaaa

SEQ ID NO: 761352 - DNA, 19 bp, Mus musculus
  siRNA target sequence for Lman1l (NM_146223.2,521-539).
ctaggggacctcaagcaat

SEQ ID NO: 761353 - DNA, 19 bp, Mus musculus
  siRNA target sequence for Lman1l (NM_146223.2,542-560).
gctgagaagtgccatatca

SEQ ID NO: 761354 - DNA, 19 bp, Mus musculus
  siRNA target sequence for Lman1l (NM_146223.2,545-563).
gagaagtgccatatcatgt

SEQ ID NO: 761355 - DNA, 19 bp, Mus musculus
  siRNA target sequence for BC027163 (NM_146224.2,112-130).
gacagttctttcaaccaaa

SEQ ID NO: 761356 - DNA, 19 bp, Mus musculus
  siRNA target sequence for BC027163 (NM_146224.2,146-164).
ggcagaactctttatggaa

SEQ ID NO: 761357 - DNA, 19 bp, Mus musculus
  siRNA target sequence for BC027163 (NM_146224.2,316-334).
gaggaataaagaatggtat

SEQ ID NO: 761358 - DNA, 19 bp, Mus musculus
  siRNA target sequence for BC027163 (NM_146224.2,343-361).
gaggttttactgcttcatt

SEQ ID NO: 761359 - DNA, 19 bp, Mus musculus
  siRNA target sequence for BC027163 (NM_146224.2,412-430).
ccttgccagtaaattttca

SEQ ID NO: 761360 - DNA, 19 bp, Mus musculus
  siRNA target sequence for BC027163 (NM_146224.2,413-431).
cttgccagtaaattttcat

SEQ ID NO: 761361 - DNA, 19 bp, Mus musculus
  siRNA target sequence for BC027163 (NM_146224.2,529-547).
cagagttactgtttgactt

SEQ ID NO: 761362 - DNA, 19 bp, Mus musculus
  siRNA target sequence for BC027163 (NM_146224.2,554-572).
ggatacaggattatcacat

SEQ ID NO: 761363 - DNA, 19 bp, Mus musculus
  siRNA target sequence for BC027163 (NM_146224.2,555-573).
gatacaggattatcacatt

SEQ ID NO: 761364 - DNA, 19 bp, Mus musculus
  siRNA target sequence for BC027163 (NM_146224.2,559-577).
caggattatcacattacca

SEQ ID NO: 761365 - DNA, 19 bp, Mus musculus
  siRNA target sequence for BC027163 (NM_146224.2,579-597).
gggggaccgacactttcta

SEQ ID NO: 761366 - DNA, 19 bp, Mus musculus
  siRNA target sequence for BC027163 (NM_146224.2,580-598).
ggggaccgacactttctat

SEQ ID NO: 761367 - DNA, 19 bp, Mus musculus
  siRNA target sequence for BC027163 (NM_146224.2,581-599).
gggaccgacactttctatt

SEQ ID NO: 761368 - DNA, 19 bp, Mus musculus
  siRNA target sequence for BC027163 (NM_146224.2,604-622).
gtttgaatgaaacttcatt

SEQ ID NO: 761369 - DNA, 19 bp, Mus musculus
  siRNA target sequence for BC027163 (NM_146224.2,674-692).
gcctaaacccagtgaaaat

SEQ ID NO: 761370 - DNA, 19 bp, Mus musculus
  siRNA target sequence for BC027163 (NM_146224.2,734-752).
gtccccatcagtgatatct

SEQ ID NO: 761371 - DNA, 19 bp, Mus musculus
  siRNA target sequence for BC027163 (NM_146224.2,764-782).
gccatcgcaaggtgcaaat

SEQ ID NO: 761372 - DNA, 19 bp, Mus musculus
  siRNA target sequence for BC027163 (NM_146224.2,765-783).
ccatcgcaaggtgcaaatt

SEQ ID NO: 761373 - DNA, 19 bp, Mus musculus
  siRNA target sequence for BC027163 (NM_146224.2,774-792).
ggtgcaaattgttcatcaa

SEQ ID NO: 761374 - DNA, 19 bp, Mus musculus
  siRNA target sequence for BC027163 (NM_146224.2,784-802).
gttcatcaagtcaatctaa

SEQ ID NO: 761375 - DNA, 19 bp, Mus musculus
  siRNA target sequence for BC027163 (NM_146224.2,836-854).
gtgtgatattcacttcaat

SEQ ID NO: 761376 - DNA, 19 bp, Mus musculus
  siRNA target sequence for BC027163 (NM_146224.2,838-856).
gtgatattcacttcaatct

SEQ ID NO: 761377 - DNA, 19 bp, Mus musculus
  siRNA target sequence for BC027163 (NM_146224.2,855-873).
cttttggatcctctaaaaa

SEQ ID NO: 761378 - DNA, 19 bp, Mus musculus
  siRNA target sequence for BC027163 (NM_146224.2,911-929).
ctttttgggattgactaaa

SEQ ID NO: 761379 - DNA, 19 bp, Mus musculus
  siRNA target sequence for BC027163 (NM_146224.2,923-941).
gactaaagcagacaattta

SEQ ID NO: 761380 - DNA, 19 bp, Mus musculus
  siRNA target sequence for BC027163 (NM_146224.2,954-972).
gaagctaagactcttgaat

SEQ ID NO: 761381 - DNA, 19 bp, Mus musculus
  siRNA target sequence for BC027163 (NM_146224.2,958-976).
ctaagactcttgaatcaga

SEQ ID NO: 761382 - DNA, 19 bp, Mus musculus
  siRNA target sequence for BC027163 (NM_146224.2,1243-1261).
cccacactcctcatgagtt

SEQ ID NO: 761383 - DNA, 19 bp, Mus musculus
  siRNA target sequence for BC027163 (NM_146224.2,1280-1298).
ctgtgagctatcatttgaa

SEQ ID NO: 761384 - DNA, 19 bp, Mus musculus
  siRNA target sequence for BC027163 (NM_146224.2,1286-1304).
gctatcatttgaaactgaa

SEQ ID NO: 761385 - DNA, 19 bp, Mus musculus
  siRNA target sequence for BC027163 (NM_146224.2,1365-1383).
caggtttgcaattacagat

SEQ ID NO: 761386 - DNA, 19 bp, Mus musculus
  siRNA target sequence for BC027163 (NM_146224.2,1368-1386).
gtttgcaattacagatcat

SEQ ID NO: 761387 - DNA, 19 bp, Mus musculus
  siRNA target sequence for BC027163 (NM_146224.2,1400-1418).
ggtagagtctcattttaga

SEQ ID NO: 761388 - DNA, 19 bp, Mus musculus
  siRNA target sequence for BC027163 (NM_146224.2,1406-1424).
gtctcattttagaacatca

SEQ ID NO: 761389 - DNA, 19 bp, Mus musculus
  siRNA target sequence for BC027163 (NM_146224.2,1453-1471).
cattctgcctcaaagttat

SEQ ID NO: 761390 - DNA, 19 bp, Mus musculus
  siRNA target sequence for BC027163 (NM_146224.2,1478-1496).
cgccacgccctatatgcat

SEQ ID NO: 761391 - DNA, 19 bp, Mus musculus
  siRNA target sequence for BC027163 (NM_146224.2,1483-1501).
cgccctatatgcatcatta

SEQ ID NO: 761392 - DNA, 19 bp, Mus musculus
  siRNA target sequence for BC027163 (NM_146224.2,1527-1545).
catcgttgcaccaaatgca

SEQ ID NO: 761393 - DNA, 19 bp, Mus musculus
  siRNA target sequence for BC027163 (NM_146224.2,1682-1700).
gtcaggatcttcagttaca

SEQ ID NO: 761394 - DNA, 19 bp, Mus musculus
  siRNA target sequence for BC027163 (NM_146224.2,1752-1770).
gacaatgtaactgctaaaa

SEQ ID NO: 761395 - DNA, 19 bp, Mus musculus
  siRNA target sequence for BC027163 (NM_146224.2,1827-1845).
gctaatgagaccaagtcta

SEQ ID NO: 761396 - DNA, 19 bp, Mus musculus
  siRNA target sequence for BC027163 (NM_146224.2,1828-1846).
ctaatgagaccaagtctaa

SEQ ID NO: 761397 - DNA, 19 bp, Mus musculus
  siRNA target sequence for BC027163 (NM_146224.2,1838-1856).
caagtctaatggcagtaaa

SEQ ID NO: 761398 - DNA, 19 bp, Mus musculus
  siRNA target sequence for BC027163 (NM_146224.2,1841-1859).
gtctaatggcagtaaatct

SEQ ID NO: 761399 - DNA, 19 bp, Mus musculus
  siRNA target sequence for BC027163 (NM_146224.2,1843-1861).
ctaatggcagtaaatctaa

SEQ ID NO: 761400 - DNA, 19 bp, Mus musculus
  siRNA target sequence for BC027163 (NM_146224.2,1892-1910).
gaaacaaagcacattgtct

SEQ ID NO: 761401 - DNA, 19 bp, Mus musculus
  siRNA target sequence for BC027163 (NM_146224.2,1896-1914).
caaagcacattgtctagta

SEQ ID NO: 761402 - DNA, 19 bp, Mus musculus
  siRNA target sequence for BC027163 (NM_146224.2,1901-1919).
cacattgtctagtagtaat

SEQ ID NO: 761403 - DNA, 19 bp, Mus musculus
  siRNA target sequence for BC027163 (NM_146224.2,1903-1921).
cattgtctagtagtaataa

SEQ ID NO: 761404 - DNA, 19 bp, Mus musculus
  siRNA target sequence for BC027163 (NM_146224.2,1907-1925).
gtctagtagtaataaaaaa

SEQ ID NO: 761405 - DNA, 19 bp, Mus musculus
  siRNA target sequence for BC027163 (NM_146224.2,1937-1955).
cacagcactaaggaactta

SEQ ID NO: 761406 - DNA, 19 bp, Mus musculus
  siRNA target sequence for BC027163 (NM_146224.2,1966-1984).
ggggtgttcacgagtgtat

SEQ ID NO: 761407 - DNA, 19 bp, Mus musculus
  siRNA target sequence for BC027163 (NM_146224.2,1967-1985).
gggtgttcacgagtgtatt

SEQ ID NO: 761408 - DNA, 19 bp, Mus musculus
  siRNA target sequence for BC027163 (NM_146224.2,1969-1987).
gtgttcacgagtgtattga

SEQ ID NO: 761409 - DNA, 19 bp, Mus musculus
  siRNA target sequence for BC027163 (NM_146224.2,1971-1989).
gttcacgagtgtattgagt

SEQ ID NO: 761410 - DNA, 19 bp, Mus musculus
  siRNA target sequence for BC027163 (NM_146224.2,2029-2047).
catatgtccactgtagttt

SEQ ID NO: 761411 - DNA, 19 bp, Mus musculus
  siRNA target sequence for BC027163 (NM_146224.2,2068-2086).
gtagcaaagcctatgtaaa

SEQ ID NO: 761412 - DNA, 19 bp, Mus musculus
  siRNA target sequence for BC027163 (NM_146224.2,2076-2094).
gcctatgtaaatcatatga

SEQ ID NO: 761413 - DNA, 19 bp, Mus musculus
  siRNA target sequence for BC027163 (NM_146224.2,2088-2106).
catatgatgagctttcata

SEQ ID NO: 761414 - DNA, 19 bp, Mus musculus
  siRNA target sequence for BC027163 (NM_146224.2,2119-2137).
gtaaaagatactgtatatt

SEQ ID NO: 761415 - DNA, 19 bp, Mus musculus
  siRNA target sequence for BC027163 (NM_146224.2,2241-2259).
cagcatgaaactcattctt

SEQ ID NO: 761416 - DNA, 19 bp, Mus musculus
  siRNA target sequence for BC027163 (NM_146224.2,2257-2275).
cttgccgagttctagtaga

SEQ ID NO: 761417 - DNA, 19 bp, Mus musculus
  siRNA target sequence for BC022645 (NM_146228.2,415-433).
gaggccgtgctgttactga

SEQ ID NO: 761418 - DNA, 19 bp, Mus musculus
  siRNA target sequence for BC022645 (NM_146228.2,451-469).
ctacaagcccacatggaat

SEQ ID NO: 761419 - DNA, 19 bp, Mus musculus
  siRNA target sequence for BC022645 (NM_146228.2,458-476).
cccacatggaatacatcaa

SEQ ID NO: 761420 - DNA, 19 bp, Mus musculus
  siRNA target sequence for BC022645 (NM_146228.2,643-661).
cagcacgtgcagaaatact

SEQ ID NO: 761421 - DNA, 19 bp, Mus musculus
  siRNA target sequence for BC022645 (NM_146228.2,943-961).
ctgttgcagggccacaata

SEQ ID NO: 761422 - DNA, 19 bp, Mus musculus
  siRNA target sequence for BC022645 (NM_146228.2,1186-1204).
cgctgtgtggcctatacct

SEQ ID NO: 761423 - DNA, 19 bp, Mus musculus
  siRNA target sequence for BC022645 (NM_146228.2,1302-1320).
gaaccacgtggggactttt

SEQ ID NO: 761424 - DNA, 19 bp, Mus musculus
  siRNA target sequence for BC022645 (NM_146228.2,1365-1383).
ggcctctgaggacaagttt

SEQ ID NO: 761425 - DNA, 19 bp, Mus musculus
  siRNA target sequence for BC022645 (NM_146228.2,1445-1463).
gcactgacgaggtgtacaa

SEQ ID NO: 761426 - DNA, 19 bp, Mus musculus
  siRNA target sequence for BC022645 (NM_146228.2,1455-1473).
ggtgtacaagggctatttt

SEQ ID NO: 761427 - DNA, 19 bp, Mus musculus
  siRNA target sequence for BC022645 (NM_146228.2,1599-1617).
caggggcgagcgctacatt

SEQ ID NO: 761428 - DNA, 19 bp, Mus musculus
  siRNA target sequence for BC022645 (NM_146228.2,1680-1698).
ctatcagggcacattccaa

SEQ ID NO: 761429 - DNA, 19 bp, Mus musculus
  siRNA target sequence for BC022645 (NM_146228.2,1745-1763).
ctctgtacgaaggtacttt

SEQ ID NO: 761430 - DNA, 19 bp, Mus musculus
  siRNA target sequence for BC022645 (NM_146228.2,1747-1765).
ctgtacgaaggtactttta

SEQ ID NO: 761431 - DNA, 19 bp, Mus musculus
  siRNA target sequence for BC022645 (NM_146228.2,1798-1816).
gtcaccttccccaatggtt

SEQ ID NO: 761432 - DNA, 19 bp, Mus musculus
  siRNA target sequence for BC022645 (NM_146228.2,1836-1854).
cagcagtgggacagataaa

SEQ ID NO: 761433 - DNA, 19 bp, Mus musculus
  siRNA target sequence for BC022645 (NM_146228.2,1839-1857).
cagtgggacagataaagga

SEQ ID NO: 761434 - DNA, 19 bp, Mus musculus
  siRNA target sequence for BC022645 (NM_146228.2,2250-2268).
cttccaggccacatattca

SEQ ID NO: 761435 - DNA, 19 bp, Mus musculus
  siRNA target sequence for BC022645 (NM_146228.2,2644-2662).
ctggtccgggacaagtgtt

SEQ ID NO: 761436 - DNA, 19 bp, Mus musculus
  siRNA target sequence for BC022645 (NM_146228.2,2775-2793).
gctgggctgcaaatacaaa

SEQ ID NO: 761437 - DNA, 19 bp, Mus musculus
  siRNA target sequence for BC022645 (NM_146228.2,2809-2827).
ctattgccactgcttatct

SEQ ID NO: 761438 - DNA, 19 bp, Mus musculus
  siRNA target sequence for BC022645 (NM_146228.2,2832-2850).
ggtgtcccgagctcgaatt

SEQ ID NO: 761439 - DNA, 19 bp, Mus musculus
  siRNA target sequence for BC022645 (NM_146228.2,2997-3015).
gcactgggacgctagagaa

SEQ ID NO: 761440 - DNA, 19 bp, Mus musculus
  siRNA target sequence for BC032271 (NM_146234.2,128-146).
ctgcgcagcatcgttctta

SEQ ID NO: 761441 - DNA, 19 bp, Mus musculus
  siRNA target sequence for BC032271 (NM_146234.2,130-148).
gcgcagcatcgttcttata

SEQ ID NO: 761442 - DNA, 19 bp, Mus musculus
  siRNA target sequence for BC032271 (NM_146234.2,131-149).
cgcagcatcgttcttatat

SEQ ID NO: 761443 - DNA, 19 bp, Mus musculus
  siRNA target sequence for BC032271 (NM_146234.2,143-161).
cttatatgcgactaacaga

SEQ ID NO: 761444 - DNA, 19 bp, Mus musculus
  siRNA target sequence for BC032271 (NM_146234.2,166-184).
gaagatgaatcattaccaa

SEQ ID NO: 761445 - DNA, 19 bp, Mus musculus
  siRNA target sequence for BC032271 (NM_146234.2,176-194).
cattaccaatagatatagt

SEQ ID NO: 761446 - DNA, 19 bp, Mus musculus
  siRNA target sequence for BC032271 (NM_146234.2,213-231).
ctttgcagttacctgttat

SEQ ID NO: 761447 - DNA, 19 bp, Mus musculus
  siRNA target sequence for BC032271 (NM_146234.2,224-242).
cctgttatggcatagttca

SEQ ID NO: 761448 - DNA, 19 bp, Mus musculus
  siRNA target sequence for BC032271 (NM_146234.2,225-243).
ctgttatggcatagttcat

SEQ ID NO: 761449 - DNA, 19 bp, Mus musculus
  siRNA target sequence for BC032271 (NM_146234.2,354-372).
gctgttccggccttcagat

SEQ ID NO: 761450 - DNA, 19 bp, Mus musculus
  siRNA target sequence for BC032271 (NM_146234.2,363-381).
gccttcagatgcaacaaat

SEQ ID NO: 761451 - DNA, 19 bp, Mus musculus
  siRNA target sequence for BC032271 (NM_146234.2,370-388).
gatgcaacaaattcttcaa

SEQ ID NO: 761452 - DNA, 19 bp, Mus musculus
  siRNA target sequence for BC032271 (NM_146234.2,383-401).
cttcaaacctagatgcatt

SEQ ID NO: 761453 - DNA, 19 bp, Mus musculus
  siRNA target sequence for BC032271 (NM_146234.2,394-412).
gatgcattgtcctctaata

SEQ ID NO: 761454 - DNA, 19 bp, Mus musculus
  siRNA target sequence for BC032271 (NM_146234.2,397-415).
gcattgtcctctaatacat

SEQ ID NO: 761455 - DNA, 19 bp, Mus musculus
  siRNA target sequence for BC032271 (NM_146234.2,407-425).
ctaatacatcgttgaagtt

SEQ ID NO: 761456 - DNA, 19 bp, Mus musculus
  siRNA target sequence for BC032271 (NM_146234.2,413-431).
catcgttgaagttacgaaa

SEQ ID NO: 761457 - DNA, 19 bp, Mus musculus
  siRNA target sequence for BC032271 (NM_146234.2,416-434).
cgttgaagttacgaaagtt

SEQ ID NO: 761458 - DNA, 19 bp, Mus musculus
  siRNA target sequence for BC011290 (NM_146236.1,60-78).
cacgcgcagtgaaaatgaa

SEQ ID NO: 761459 - DNA, 19 bp, Mus musculus
  siRNA target sequence for BC011290 (NM_146236.1,62-80).
cgcgcagtgaaaatgaaga

SEQ ID NO: 761460 - DNA, 19 bp, Mus musculus
  siRNA target sequence for BC011290 (NM_146236.1,338-356).
gcggggtgggcaaacacaa

SEQ ID NO: 761461 - DNA, 19 bp, Mus musculus
  siRNA target sequence for BC011290 (NM_146236.1,389-407).
cccgtatccgccctcaatt

SEQ ID NO: 761462 - DNA, 19 bp, Mus musculus
  siRNA target sequence for BC011290 (NM_146236.1,391-409).
cgtatccgccctcaattca

SEQ ID NO: 761463 - DNA, 19 bp, Mus musculus
  siRNA target sequence for BC011290 (NM_146236.1,392-410).
gtatccgccctcaattcat

SEQ ID NO: 761464 - DNA, 19 bp, Mus musculus
  siRNA target sequence for BC011290 (NM_146236.1,461-479).
cggatgagttggaagagat

SEQ ID NO: 761465 - DNA, 19 bp, Mus musculus
  siRNA target sequence for BC011290 (NM_146236.1,480-498).
gaagagagtacgaaacaaa

SEQ ID NO: 761466 - DNA, 19 bp, Mus musculus
  siRNA target sequence for BC011290 (NM_146236.1,485-503).
gagtacgaaacaaactgat

SEQ ID NO: 761467 - DNA, 19 bp, Mus musculus
  siRNA target sequence for BC011290 (NM_146236.1,490-508).
cgaaacaaactgatgataa

SEQ ID NO: 761468 - DNA, 19 bp, Mus musculus
  siRNA target sequence for BC011290 (NM_146236.1,495-513).
caaactgatgataatgcat

SEQ ID NO: 761469 - DNA, 19 bp, Mus musculus
  siRNA target sequence for BC023488 (NM_146238.2,220-238).
ggctagtgcatcttggtat

SEQ ID NO: 761470 - DNA, 19 bp, Mus musculus
  siRNA target sequence for BC023488 (NM_146238.2,221-239).
gctagtgcatcttggtatt

SEQ ID NO: 761471 - DNA, 19 bp, Mus musculus
  siRNA target sequence for BC023488 (NM_146238.2,225-243).
gtgcatcttggtattctca

SEQ ID NO: 761472 - DNA, 19 bp, Mus musculus
  siRNA target sequence for BC023488 (NM_146238.2,234-252).
ggtattctcacccagtata

SEQ ID NO: 761473 - DNA, 19 bp, Mus musculus
  siRNA target sequence for BC023488 (NM_146238.2,255-273).
caagatactggcaacatta

SEQ ID NO: 761474 - DNA, 19 bp, Mus musculus
  siRNA target sequence for BC023488 (NM_146238.2,258-276).
gatactggcaacattatca

SEQ ID NO: 761475 - DNA, 19 bp, Mus musculus
  siRNA target sequence for BC023488 (NM_146238.2,302-320).
caccagaatgcctacagaa

SEQ ID NO: 761476 - DNA, 19 bp, Mus musculus
  siRNA target sequence for BC023488 (NM_146238.2,325-343).
cagggattcctatttcaca

SEQ ID NO: 761477 - DNA, 19 bp, Mus musculus
  siRNA target sequence for BC023488 (NM_146238.2,488-506).
ctgcgtaatagcagtagaa

SEQ ID NO: 761478 - DNA, 19 bp, Mus musculus
  siRNA target sequence for BC023488 (NM_146238.2,683-701).
gcagagcgcctgaatgact

SEQ ID NO: 761479 - DNA, 19 bp, Mus musculus
  siRNA target sequence for BC023488 (NM_146238.2,684-702).
cagagcgcctgaatgacta

SEQ ID NO: 761480 - DNA, 19 bp, Mus musculus
  siRNA target sequence for BC023488 (NM_146238.2,691-709).
cctgaatgactatgtgaat

SEQ ID NO: 761481 - DNA, 19 bp, Mus musculus
  siRNA target sequence for BC023488 (NM_146238.2,786-804).
cagagatgaagcgcttata

SEQ ID NO: 761482 - DNA, 19 bp, Mus musculus
  siRNA target sequence for Lrrc10 (NM_146242.1,109-127).
ccgaccgctgccagagtta

SEQ ID NO: 761483 - DNA, 19 bp, Mus musculus
  siRNA target sequence for Lrrc10 (NM_146242.1,110-128).
cgaccgctgccagagttat

SEQ ID NO: 761484 - DNA, 19 bp, Mus musculus
  siRNA target sequence for Lrrc10 (NM_146242.1,310-328).
ccttggatttcaacaactt

SEQ ID NO: 761485 - DNA, 19 bp, Mus musculus
  siRNA target sequence for Lrrc10 (NM_146242.1,490-508).
gtgagctgagtctccttaa

SEQ ID NO: 761486 - DNA, 19 bp, Mus musculus
  siRNA target sequence for Lrrc10 (NM_146242.1,654-672).
gacgtggatcggaacagta

SEQ ID NO: 761487 - DNA, 19 bp, Mus musculus
  siRNA target sequence for Lrrc10 (NM_146242.1,689-707).
cctggcccacttgacaaat

SEQ ID NO: 761488 - DNA, 19 bp, Mus musculus
  siRNA target sequence for Lrrc10 (NM_146242.1,693-711).
gcccacttgacaaatctga

SEQ ID NO: 761489 - DNA, 19 bp, Mus musculus
  siRNA target sequence for Lrrc10 (NM_146242.1,806-824).
gcctgaccccagaaaagct

SEQ ID NO: 761490 - DNA, 19 bp, Mus musculus
  siRNA target sequence for Hcr (NM_146248.1,373-391).
ctccggccagccaagatgt

SEQ ID NO: 761491 - DNA, 19 bp, Mus musculus
  siRNA target sequence for Hcr (NM_146248.1,376-394).
cggccagccaagatgtctt

SEQ ID NO: 761492 - DNA, 19 bp, Mus musculus
  siRNA target sequence for Hcr (NM_146248.1,377-395).
ggccagccaagatgtctta

SEQ ID NO: 761493 - DNA, 19 bp, Mus musculus
  siRNA target sequence for Hcr (NM_146248.1,379-397).
ccagccaagatgtcttaga

SEQ ID NO: 761494 - DNA, 19 bp, Mus musculus
  siRNA target sequence for Hcr (NM_146248.1,430-448).
ccacgtggggacaggattt

SEQ ID NO: 761495 - DNA, 19 bp, Mus musculus
  siRNA target sequence for Hcr (NM_146248.1,538-556).
cacggcagctccaagagtt

SEQ ID NO: 761496 - DNA, 19 bp, Mus musculus
  siRNA target sequence for Hcr (NM_146248.1,700-718).
ccttggccggagctgaaat

SEQ ID NO: 761497 - DNA, 19 bp, Mus musculus
  siRNA target sequence for Hcr (NM_146248.1,1262-1280).
ctggcgggagaaggtattt

SEQ ID NO: 761498 - DNA, 19 bp, Mus musculus
  siRNA target sequence for Hcr (NM_146248.1,1406-1424).
gcgtgccctgcaagacaaa

SEQ ID NO: 761499 - DNA, 19 bp, Mus musculus
  siRNA target sequence for Hcr (NM_146248.1,1407-1425).
cgtgccctgcaagacaaaa

SEQ ID NO: 761500 - DNA, 19 bp, Mus musculus
  siRNA target sequence for Hcr (NM_146248.1,1659-1677).
cggaaggtccacaccatta

SEQ ID NO: 761501 - DNA, 19 bp, Mus musculus
  siRNA target sequence for Hcr (NM_146248.1,1660-1678).
ggaaggtccacaccattaa

SEQ ID NO: 761502 - DNA, 19 bp, Mus musculus
  siRNA target sequence for Hcr (NM_146248.1,1883-1901).
cgagcgccgacggttgata

SEQ ID NO: 761503 - DNA, 19 bp, Mus musculus
  siRNA target sequence for Hcr (NM_146248.1,2038-2056).
cacagcagcaggaaatcta

SEQ ID NO: 761504 - DNA, 19 bp, Mus musculus
  siRNA target sequence for Hcr (NM_146248.1,2337-2355).
cttccctcgggagtgaata

SEQ ID NO: 761505 - DNA, 19 bp, Mus musculus
  siRNA target sequence for Hcr (NM_146248.1,2340-2358).
ccctcgggagtgaataaga

SEQ ID NO: 761506 - DNA, 19 bp, Mus musculus
  siRNA target sequence for Hcr (NM_146248.1,2439-2457).
ctgaccgtcctgcttgata

SEQ ID NO: 761507 - DNA, 19 bp, Mus musculus
  siRNA target sequence for Hcr (NM_146248.1,2477-2495).
ggccatttccagagatgaa

SEQ ID NO: 761508 - DNA, 19 bp, Mus musculus
  siRNA target sequence for BC031441 (NM_146249.2,1394-1412).
cacgtaaaagatatcttca

SEQ ID NO: 761509 - DNA, 19 bp, Mus musculus
  siRNA target sequence for BC025586 (NM_146252.1,121-139).
cttcgagaactcagtttta

SEQ ID NO: 761510 - DNA, 19 bp, Mus musculus
  siRNA target sequence for BC025586 (NM_146252.1,402-420).
gctactccagattgacaaa

SEQ ID NO: 761511 - DNA, 19 bp, Mus musculus
  siRNA target sequence for BC025586 (NM_146252.1,428-446).
ggaggttgtgcccagatat

SEQ ID NO: 761512 - DNA, 19 bp, Mus musculus
  siRNA target sequence for BC025586 (NM_146252.1,429-447).
gaggttgtgcccagatata

SEQ ID NO: 761513 - DNA, 19 bp, Mus musculus
  siRNA target sequence for BC025586 (NM_146252.1,486-504).
catcctggacccgcaaaat

SEQ ID NO: 761514 - DNA, 19 bp, Mus musculus
  siRNA target sequence for BC025586 (NM_146252.1,490-508).
ctggacccgcaaaatgagt

SEQ ID NO: 761515 - DNA, 19 bp, Mus musculus
  siRNA target sequence for BC025586 (NM_146252.1,492-510).
ggacccgcaaaatgagttt

SEQ ID NO: 761516 - DNA, 19 bp, Mus musculus
  siRNA target sequence for BC025586 (NM_146252.1,496-514).
ccgcaaaatgagtttgaga

SEQ ID NO: 761517 - DNA, 19 bp, Mus musculus
  siRNA target sequence for BC025586 (NM_146252.1,571-589).
cgaagcggggttacaaata

SEQ ID NO: 761518 - DNA, 19 bp, Mus musculus
  siRNA target sequence for BC025586 (NM_146252.1,572-590).
gaagcggggttacaaatat

SEQ ID NO: 761519 - DNA, 19 bp, Mus musculus
  siRNA target sequence for BC025586 (NM_146252.1,679-697).
gagcgcatcctgttcatct

SEQ ID NO: 761520 - DNA, 19 bp, Mus musculus
  siRNA target sequence for BC025586 (NM_146252.1,681-699).
gcgcatcctgttcatctat

SEQ ID NO: 761521 - DNA, 19 bp, Mus musculus
  siRNA target sequence for BC025586 (NM_146252.1,845-863).
ctgagatccgggacaactt

SEQ ID NO: 761522 - DNA, 19 bp, Mus musculus
  siRNA target sequence for BC025586 (NM_146252.1,847-865).
gagatccgggacaacttca

SEQ ID NO: 761523 - DNA, 19 bp, Mus musculus
  siRNA target sequence for BC025586 (NM_146252.1,890-908).
gcggtatcacctacaagat

SEQ ID NO: 761524 - DNA, 19 bp, Mus musculus
  siRNA target sequence for BC025586 (NM_146252.1,923-941).
ccaccttgaaggataagga

SEQ ID NO: 761525 - DNA, 19 bp, Mus musculus
  siRNA target sequence for BC025586 (NM_146252.1,1075-1093).
gatggcaaccgattcgatt

SEQ ID NO: 761526 - DNA, 19 bp, Mus musculus
  siRNA target sequence for BC025586 (NM_146252.1,1079-1097).
gcaaccgattcgatttcct

SEQ ID NO: 761527 - DNA, 19 bp, Mus musculus
  siRNA target sequence for BC025586 (NM_146252.1,1112-1130).
gtgctatgctcatactgat

SEQ ID NO: 761528 - DNA, 19 bp, Mus musculus
  siRNA target sequence for BC025586 (NM_146252.1,1151-1169).
gggacttcactgtcaacat

SEQ ID NO: 761529 - DNA, 19 bp, Mus musculus
  siRNA target sequence for BC025586 (NM_146252.1,1203-1221).
ctgccagatcctacagaaa

SEQ ID NO: 761530 - DNA, 19 bp, Mus musculus
  siRNA target sequence for BC028975 (NM_146254.1,148-166).
gctttattaacccatcaaa

SEQ ID NO: 761531 - DNA, 19 bp, Mus musculus
  siRNA target sequence for BC028975 (NM_146254.1,206-224).
caaattggccgtatcaaga

SEQ ID NO: 761532 - DNA, 19 bp, Mus musculus
  siRNA target sequence for BC028975 (NM_146254.1,226-244).
ctatgggttttttaactga

SEQ ID NO: 761533 - DNA, 19 bp, Mus musculus
  siRNA target sequence for BC028975 (NM_146254.1,253-271).
cggcagaaaaactaaacgt

SEQ ID NO: 761534 - DNA, 19 bp, Mus musculus
  siRNA target sequence for BC028975 (NM_146254.1,254-272).
ggcagaaaaactaaacgtt

SEQ ID NO: 761535 - DNA, 19 bp, Mus musculus
  siRNA target sequence for BC028975 (NM_146254.1,269-287).
cgttcctagcgctaaaaca

SEQ ID NO: 761536 - DNA, 19 bp, Mus musculus
  siRNA target sequence for BC028975 (NM_146254.1,288-306).
gtacaggtgcttgattcaa

SEQ ID NO: 761537 - DNA, 19 bp, Mus musculus
  siRNA target sequence for BC028975 (NM_146254.1,293-311).
ggtgcttgattcaaaagga

SEQ ID NO: 761538 - DNA, 19 bp, Mus musculus
  siRNA target sequence for BC028975 (NM_146254.1,369-387).
ccaaacaaactcttgacat

SEQ ID NO: 761539 - DNA, 19 bp, Mus musculus
  siRNA target sequence for BC028975 (NM_146254.1,400-418).
cgcttggatcagattatat

SEQ ID NO: 761540 - DNA, 19 bp, Mus musculus
  siRNA target sequence for BC028975 (NM_146254.1,405-423).
ggatcagattatatttctt

SEQ ID NO: 761541 - DNA, 19 bp, Mus musculus
  siRNA target sequence for BC028975 (NM_146254.1,424-442).
cctatagcctctatcagaa

SEQ ID NO: 761542 - DNA, 19 bp, Mus musculus
  siRNA target sequence for BC028975 (NM_146254.1,431-449).
cctctatcagaatacacta

SEQ ID NO: 761543 - DNA, 19 bp, Mus musculus
  siRNA target sequence for BC028975 (NM_146254.1,546-564).
cttgaagattcctcttaca

SEQ ID NO: 761544 - DNA, 19 bp, Mus musculus
  siRNA target sequence for BC028975 (NM_146254.1,578-596).
ggccagttttacagatgta

SEQ ID NO: 761545 - DNA, 19 bp, Mus musculus
  siRNA target sequence for BC028975 (NM_146254.1,616-634).
ctgaggcagccatatcaaa

SEQ ID NO: 761546 - DNA, 19 bp, Mus musculus
  siRNA target sequence for BC028975 (NM_146254.1,676-694).
cggaaacactgagattctt

SEQ ID NO: 761547 - DNA, 19 bp, Mus musculus
  siRNA target sequence for BC028975 (NM_146254.1,699-717).
ctgccaacagtcatgttct

SEQ ID NO: 761548 - DNA, 19 bp, Mus musculus
  siRNA target sequence for BC028975 (NM_146254.1,772-790).
ccctttgtagaaatagatt

SEQ ID NO: 761549 - DNA, 19 bp, Mus musculus
  siRNA target sequence for BC028975 (NM_146254.1,852-870).
gaggttcagtgtgaaaaaa

SEQ ID NO: 761550 - DNA, 19 bp, Mus musculus
  siRNA target sequence for BC028975 (NM_146254.1,897-915).
gccactacctgggatttgt

SEQ ID NO: 761551 - DNA, 19 bp, Mus musculus
  siRNA target sequence for BC028975 (NM_146254.1,899-917).
cactacctgggatttgtat

SEQ ID NO: 761552 - DNA, 19 bp, Mus musculus
  siRNA target sequence for BC028975 (NM_146254.1,901-919).
ctacctgggatttgtatga

SEQ ID NO: 761553 - DNA, 19 bp, Mus musculus
  siRNA target sequence for BC028975 (NM_146254.1,914-932).
gtatgattcttacaacatt

SEQ ID NO: 761554 - DNA, 19 bp, Mus musculus
  siRNA target sequence for BC028975 (NM_146254.1,957-975).
cgatctggatattcaagta

SEQ ID NO: 761555 - DNA, 19 bp, Mus musculus
  siRNA target sequence for BC028975 (NM_146254.1,1098-1116).
gcaatattaaagtctgata

SEQ ID NO: 761556 - DNA, 19 bp, Mus musculus
  siRNA target sequence for BC028975 (NM_146254.1,1099-1117).
caatattaaagtctgataa

SEQ ID NO: 761557 - DNA, 19 bp, Mus musculus
  siRNA target sequence for BC028975 (NM_146254.1,1191-1209).
cgtcaactccctgtttata

SEQ ID NO: 761558 - DNA, 19 bp, Mus musculus
  siRNA target sequence for BC028975 (NM_146254.1,1192-1210).
gtcaactccctgtttataa

SEQ ID NO: 761559 - DNA, 19 bp, Mus musculus
  siRNA target sequence for BC028975 (NM_146254.1,1229-1247).
gcctgaagaaactttgcaa

SEQ ID NO: 761560 - DNA, 19 bp, Mus musculus
  siRNA target sequence for BC028975 (NM_146254.1,1330-1348).
ctacggaacagtcaacaat

SEQ ID NO: 761561 - DNA, 19 bp, Mus musculus
  siRNA target sequence for BC028975 (NM_146254.1,1342-1360).
caacaataccggctaattt

SEQ ID NO: 761562 - DNA, 19 bp, Mus musculus
  siRNA target sequence for BC028975 (NM_146254.1,1345-1363).
caataccggctaatttgga

SEQ ID NO: 761563 - DNA, 19 bp, Mus musculus
  siRNA target sequence for BC028975 (NM_146254.1,1379-1397).
ctcctgtgacttaacgaaa

SEQ ID NO: 761564 - DNA, 19 bp, Mus musculus
  siRNA target sequence for BC028975 (NM_146254.1,1466-1484).
ctttggatttagagaacaa

SEQ ID NO: 761565 - DNA, 19 bp, Mus musculus
  siRNA target sequence for BC028975 (NM_146254.1,1501-1519).
gctgctggtcaataaagaa

SEQ ID NO: 761566 - DNA, 19 bp, Mus musculus
  siRNA target sequence for BC028975 (NM_146254.1,1528-1546).
ggccagagcgtatttatca

SEQ ID NO: 761567 - DNA, 19 bp, Mus musculus
  siRNA target sequence for BC028975 (NM_146254.1,1530-1548).
ccagagcgtatttatcaga

SEQ ID NO: 761568 - DNA, 19 bp, Mus musculus
  siRNA target sequence for BC028975 (NM_146254.1,1547-1565).
gagttcatatggagttact

SEQ ID NO: 761569 - DNA, 19 bp, Mus musculus
  siRNA target sequence for BC028975 (NM_146254.1,1579-1597).
caaacagctcacctaatct

SEQ ID NO: 761570 - DNA, 19 bp, Mus musculus
  siRNA target sequence for BC028975 (NM_146254.1,1620-1638).
ggcaccgttgcgatttaca

SEQ ID NO: 761571 - DNA, 19 bp, Mus musculus
  siRNA target sequence for BC028975 (NM_146254.1,1621-1639).
gcaccgttgcgatttacaa

SEQ ID NO: 761572 - DNA, 19 bp, Mus musculus
  siRNA target sequence for BC028975 (NM_146254.1,1622-1640).
caccgttgcgatttacaat

SEQ ID NO: 761573 - DNA, 19 bp, Mus musculus
  siRNA target sequence for BC028975 (NM_146254.1,1624-1642).
ccgttgcgatttacaatgt

SEQ ID NO: 761574 - DNA, 19 bp, Mus musculus
  siRNA target sequence for BC028975 (NM_146254.1,1665-1683).
gttctggacagtagtgaat

SEQ ID NO: 761575 - DNA, 19 bp, Mus musculus
  siRNA target sequence for BC028975 (NM_146254.1,1675-1693).
gtagtgaatcacctcaaaa

SEQ ID NO: 761576 - DNA, 19 bp, Mus musculus
  siRNA target sequence for BC028975 (NM_146254.1,1873-1891).
cttattcacaagtgttctt

SEQ ID NO: 761577 - DNA, 19 bp, Mus musculus
  siRNA target sequence for BC034099 (NM_146256.2,394-412).
cggggacgctgtctttcta

SEQ ID NO: 761578 - DNA, 19 bp, Mus musculus
  siRNA target sequence for BC034099 (NM_146256.2,396-414).
gggacgctgtctttctagt

SEQ ID NO: 761579 - DNA, 19 bp, Mus musculus
  siRNA target sequence for BC034099 (NM_146256.2,400-418).
cgctgtctttctagtgaat

SEQ ID NO: 761580 - DNA, 19 bp, Mus musculus
  siRNA target sequence for BC034099 (NM_146256.2,402-420).
ctgtctttctagtgaatga

SEQ ID NO: 761581 - DNA, 19 bp, Mus musculus
  siRNA target sequence for BC034099 (NM_146256.2,612-630).
gctctccggctggtaatct

SEQ ID NO: 761582 - DNA, 19 bp, Mus musculus
  siRNA target sequence for BC034099 (NM_146256.2,613-631).
ctctccggctggtaatcta

SEQ ID NO: 761583 - DNA, 19 bp, Mus musculus
  siRNA target sequence for BC034099 (NM_146256.2,624-642).
gtaatctaagccttacgtt

SEQ ID NO: 761584 - DNA, 19 bp, Mus musculus
  siRNA target sequence for BC034099 (NM_146256.2,757-775).
cggcagctcccctatgctt

SEQ ID NO: 761585 - DNA, 19 bp, Mus musculus
  siRNA target sequence for BC034099 (NM_146256.2,759-777).
gcagctcccctatgcttat

SEQ ID NO: 761586 - DNA, 19 bp, Mus musculus
  siRNA target sequence for BC034099 (NM_146256.2,790-808).
cgactgcctaggctttcat

SEQ ID NO: 761587 - DNA, 19 bp, Mus musculus
  siRNA target sequence for BC034099 (NM_146256.2,898-916).
gcagactccgccgaataat

SEQ ID NO: 761588 - DNA, 19 bp, Mus musculus
  siRNA target sequence for BC034099 (NM_146256.2,899-917).
cagactccgccgaataata

SEQ ID NO: 761589 - DNA, 19 bp, Mus musculus
  siRNA target sequence for BC034099 (NM_146256.2,901-919).
gactccgccgaataatact

SEQ ID NO: 761590 - DNA, 19 bp, Mus musculus
  siRNA target sequence for BC034099 (NM_146256.2,903-921).
ctccgccgaataatactgt

SEQ ID NO: 761591 - DNA, 19 bp, Mus musculus
  siRNA target sequence for BC034099 (NM_146256.2,973-991).
ccaggtagagcaatttcta

SEQ ID NO: 761592 - DNA, 19 bp, Mus musculus
  siRNA target sequence for BC034099 (NM_146256.2,1028-1046).
ctgtacactcctaacatca

SEQ ID NO: 761593 - DNA, 19 bp, Mus musculus
  siRNA target sequence for BC034099 (NM_146256.2,1030-1048).
gtacactcctaacatcata

SEQ ID NO: 761594 - DNA, 19 bp, Mus musculus
  siRNA target sequence for BC034099 (NM_146256.2,1033-1051).
cactcctaacatcatagat

SEQ ID NO: 761595 - DNA, 19 bp, Mus musculus
  siRNA target sequence for BC034099 (NM_146256.2,1193-1211).
ggtgataaagacgaatttt

SEQ ID NO: 761596 - DNA, 19 bp, Mus musculus
  siRNA target sequence for BC034099 (NM_146256.2,1290-1308).
gctttggccagaacaacat

SEQ ID NO: 761597 - DNA, 19 bp, Mus musculus
  siRNA target sequence for BC031748 (NM_146261.1,259-277).
gtcggccaccacttcctat

SEQ ID NO: 761598 - DNA, 19 bp, Mus musculus
  siRNA target sequence for BC031748 (NM_146261.1,263-281).
gccaccacttcctatgaga

SEQ ID NO: 761599 - DNA, 19 bp, Mus musculus
  siRNA target sequence for BC031748 (NM_146261.1,416-434).
ccgctccaccggtttcaca

SEQ ID NO: 761600 - DNA, 19 bp, Mus musculus
  siRNA target sequence for BC031748 (NM_146261.1,451-469).
cacttcgtgtggtacaagt

SEQ ID NO: 761601 - DNA, 19 bp, Mus musculus
  siRNA target sequence for BC031748 (NM_146261.1,470-488).
gtcgcaagctctgaatgta

SEQ ID NO: 761602 - DNA, 19 bp, Mus musculus
  siRNA target sequence for BC031748 (NM_146261.1,472-490).
cgcaagctctgaatgtagt

SEQ ID NO: 761603 - DNA, 19 bp, Mus musculus
  siRNA target sequence for BC031748 (NM_146261.1,499-517).
gttctcatccgtttctgtt

SEQ ID NO: 761604 - DNA, 19 bp, Mus musculus
  siRNA target sequence for BC031748 (NM_146261.1,534-552).
gctactccctgttagatga

SEQ ID NO: 761605 - DNA, 19 bp, Mus musculus
  siRNA target sequence for BC031748 (NM_146261.1,538-556).
ctccctgttagatgatcaa

SEQ ID NO: 761606 - DNA, 19 bp, Mus musculus
  siRNA target sequence for BC031748 (NM_146261.1,548-566).
gatgatcaagacttcactt

SEQ ID NO: 761607 - DNA, 19 bp, Mus musculus
  siRNA target sequence for BC031748 (NM_146261.1,602-620).
gatgtctcctcatctatca

SEQ ID NO: 761608 - DNA, 19 bp, Mus musculus
  siRNA target sequence for BC031748 (NM_146261.1,628-646).
ctgggattggtcagatagt

SEQ ID NO: 761609 - DNA, 19 bp, Mus musculus
  siRNA target sequence for BC031748 (NM_146261.1,687-705).
gaagcgatgtgctttctga

SEQ ID NO: 761610 - DNA, 19 bp, Mus musculus
  siRNA target sequence for BC031748 (NM_146261.1,729-747).
caccttgcctggtttctaa

SEQ ID NO: 761611 - DNA, 19 bp, Mus musculus
  siRNA target sequence for BC031748 (NM_146261.1,757-775).
caaacaccggaatctagat

SEQ ID NO: 761612 - DNA, 19 bp, Mus musculus
  siRNA target sequence for BC031748 (NM_146261.1,783-801).
cttggagtgcgatgacaaa

SEQ ID NO: 761613 - DNA, 19 bp, Mus musculus
  siRNA target sequence for BC031748 (NM_146261.1,809-827).
caggtggaatatattgagt

SEQ ID NO: 761614 - DNA, 19 bp, Mus musculus
  siRNA target sequence for BC031748 (NM_146261.1,811-829).
ggtggaatatattgagtat

SEQ ID NO: 761615 - DNA, 19 bp, Mus musculus
  siRNA target sequence for BC031748 (NM_146261.1,864-882).
gggagcaacttgacattat

SEQ ID NO: 761616 - DNA, 19 bp, Mus musculus
  siRNA target sequence for BC031748 (NM_146261.1,868-886).
gcaacttgacattattaaa

SEQ ID NO: 761617 - DNA, 19 bp, Mus musculus
  siRNA target sequence for BC031748 (NM_146261.1,918-936).
cagacagtgagttcattat

SEQ ID NO: 761618 - DNA, 19 bp, Mus musculus
  siRNA target sequence for BC031748 (NM_146261.1,924-942).
gtgagttcattattgaact

SEQ ID NO: 761619 - DNA, 19 bp, Mus musculus
  siRNA target sequence for BC031748 (NM_146261.1,967-985).
gaagcaggtcagaaactat

SEQ ID NO: 761620 - DNA, 19 bp, Mus musculus
  siRNA target sequence for BC031748 (NM_146261.1,971-989).
caggtcagaaactatatca

SEQ ID NO: 761621 - DNA, 19 bp, Mus musculus
  siRNA target sequence for BC031748 (NM_146261.1,1135-1153).
ctccagtgttggaaactct

SEQ ID NO: 761622 - DNA, 19 bp, Mus musculus
  siRNA target sequence for BC031748 (NM_146261.1,1220-1238).
gagcggattcgggattcaa

SEQ ID NO: 761623 - DNA, 19 bp, Mus musculus
  siRNA target sequence for BC031748 (NM_146261.1,1222-1240).
gcggattcgggattcaaaa

SEQ ID NO: 761624 - DNA, 19 bp, Mus musculus
  siRNA target sequence for BC031748 (NM_146261.1,1223-1241).
cggattcgggattcaaaaa

SEQ ID NO: 761625 - DNA, 19 bp, Mus musculus
  siRNA target sequence for BC031748 (NM_146261.1,1224-1242).
ggattcgggattcaaaaaa

SEQ ID NO: 761626 - DNA, 19 bp, Mus musculus
  siRNA target sequence for BC031748 (NM_146261.1,1388-1406).
gcagatgttgatgttttga

SEQ ID NO: 761627 - DNA, 19 bp, Mus musculus
  siRNA target sequence for GA_x5J8B7W6HFP-2821674-2820736 (NM_146267.1,55-73).
ccaaaactacaggttctaa

SEQ ID NO: 761628 - DNA, 19 bp, Mus musculus
  siRNA target sequence for GA_x5J8B7W6HFP-2821674-2820736 (NM_146267.1,142-160).
cttttggatccacatctta

SEQ ID NO: 761629 - DNA, 19 bp, Mus musculus
  siRNA target sequence for GA_x5J8B7W6HFP-2821674-2820736 (NM_146267.1,443-461).
gtgctggcctgttgatcat

SEQ ID NO: 761630 - DNA, 19 bp, Mus musculus
  siRNA target sequence for GA_x5J8B7W6HFP-2821674-2820736 (NM_146267.1,541-559).
cccattctacagataacct

SEQ ID NO: 761631 - DNA, 19 bp, Mus musculus
  siRNA target sequence for GA_x5J8B7W6HFP-2821674-2820736 (NM_146267.1,561-579).
ctcagacacggcctttata

SEQ ID NO: 761632 - DNA, 19 bp, Mus musculus
  siRNA target sequence for GA_x5J8B7W6HFP-2821674-2820736 (NM_146267.1,563-581).
cagacacggcctttataga

SEQ ID NO: 761633 - DNA, 19 bp, Mus musculus
  siRNA target sequence for GA_x5J8B7W6HFP-2821674-2820736 (NM_146267.1,565-583).
gacacggcctttatagaga

SEQ ID NO: 761634 - DNA, 19 bp, Mus musculus
  siRNA target sequence for GA_x5J8B7W6HFP-2821674-2820736 (NM_146267.1,567-585).
cacggcctttatagagaaa

SEQ ID NO: 761635 - DNA, 19 bp, Mus musculus
  siRNA target sequence for GA_x5J8B7W6HFP-2821674-2820736 (NM_146267.1,569-587).
cggcctttatagagaaaat

SEQ ID NO: 761636 - DNA, 19 bp, Mus musculus
  siRNA target sequence for GA_x5J8B7W6HFP-2821674-2820736 (NM_146267.1,580-598).
gagaaaattgtcttagctt

SEQ ID NO: 761637 - DNA, 19 bp, Mus musculus
  siRNA target sequence for GA_x5J8B7W6HFP-2821674-2820736 (NM_146267.1,660-678).
caagaccattttaaagttt

SEQ ID NO: 761638 - DNA, 19 bp, Mus musculus
  siRNA target sequence for GA_x5J8B7W6HFP-2821674-2820736 (NM_146267.1,790-808).
gaaggggtggctatcaata

SEQ ID NO: 761639 - DNA, 19 bp, Mus musculus
  siRNA target sequence for GA_x5J8B7W6HFP-2821674-2820736 (NM_146267.1,794-812).
gggtggctatcaataaggt

SEQ ID NO: 761640 - DNA, 19 bp, Mus musculus
  siRNA target sequence for GA_x5J8B7W6HFP-2821674-2820736 (NM_146267.1,897-915).
caaagacactgtaaaacga

SEQ ID NO: 761641 - DNA, 19 bp, Mus musculus
  siRNA target sequence for GA_x5J8B7W6HFP-2821674-2820736 (NM_146267.1,914-932).
gaattgtctttctcactaa

SEQ ID NO: 761642 - DNA, 19 bp, Mus musculus
  siRNA target sequence for MOR265-1 (NM_146269.1,60-78).
ggtggccttttcttctcta

SEQ ID NO: 761643 - DNA, 19 bp, Mus musculus
  siRNA target sequence for MOR265-1 (NM_146269.1,277-295).
gtacagctcaagaccataa

SEQ ID NO: 761644 - DNA, 19 bp, Mus musculus
  siRNA target sequence for MOR265-1 (NM_146269.1,310-328).
gcagctcagatgtatgtat

SEQ ID NO: 761645 - DNA, 19 bp, Mus musculus
  siRNA target sequence for MOR265-1 (NM_146269.1,313-331).
gctcagatgtatgtattca

SEQ ID NO: 761646 - DNA, 19 bp, Mus musculus
  siRNA target sequence for MOR265-1 (NM_146269.1,431-449).
cttctgtctgtctgaagtt

SEQ ID NO: 761647 - DNA, 19 bp, Mus musculus
  siRNA target sequence for MOR265-1 (NM_146269.1,524-542).
gtggagcaggaacaattca

SEQ ID NO: 761648 - DNA, 19 bp, Mus musculus
  siRNA target sequence for MOR265-1 (NM_146269.1,654-672).
cttcattctatgctcttat

SEQ ID NO: 761649 - DNA, 19 bp, Mus musculus
  siRNA target sequence for MOR265-1 (NM_146269.1,666-684).
ctcttatgtccgcattatt

SEQ ID NO: 761650 - DNA, 19 bp, Mus musculus
  siRNA target sequence for MOR265-1 (NM_146269.1,775-793).
ggcactgccttattcactt

SEQ ID NO: 761651 - DNA, 19 bp, Mus musculus
  siRNA target sequence for MOR265-1 (NM_146269.1,776-794).
gcactgccttattcactta

SEQ ID NO: 761652 - DNA, 19 bp, Mus musculus
  siRNA target sequence for MOR265-1 (NM_146269.1,835-853).
gttactgctctcatgtaca

SEQ ID NO: 761653 - DNA, 19 bp, Mus musculus
  siRNA target sequence for MOR267-16 (NM_146270.1,151-169).
ctagacagagcccttcata

SEQ ID NO: 761654 - DNA, 19 bp, Mus musculus
  siRNA target sequence for MOR267-16 (NM_146270.1,283-301).
ctcggctgcgccatccaaa

SEQ ID NO: 761655 - DNA, 19 bp, Mus musculus
  siRNA target sequence for MOR267-16 (NM_146270.1,501-519).
cttccgctcttccaatcaa

SEQ ID NO: 761656 - DNA, 19 bp, Mus musculus
  siRNA target sequence for MOR267-16 (NM_146270.1,608-626).
gcgcgctggtcttggttat

SEQ ID NO: 761657 - DNA, 19 bp, Mus musculus
  siRNA target sequence for MOR267-16 (NM_146270.1,639-657).
gatcctggtatcatatatt

SEQ ID NO: 761658 - DNA, 19 bp, Mus musculus
  siRNA target sequence for MOR267-16 (NM_146270.1,643-661).
ctggtatcatatattcaca

SEQ ID NO: 761659 - DNA, 19 bp, Mus musculus
  siRNA target sequence for MOR267-16 (NM_146270.1,742-760).
gtcatagtgcactatggat

SEQ ID NO: 761660 - DNA, 19 bp, Mus musculus
  siRNA target sequence for MOR267-16 (NM_146270.1,758-776).
gatgtgcctcttttatcta

SEQ ID NO: 761661 - DNA, 19 bp, Mus musculus
  siRNA target sequence for MOR267-16 (NM_146270.1,807-825).
ccaggatgcgctgatatca

SEQ ID NO: 761662 - DNA, 19 bp, Mus musculus
  siRNA target sequence for MOR267-16 (NM_146270.1,810-828).
ggatgcgctgatatcagta

SEQ ID NO: 761663 - DNA, 19 bp, Mus musculus
  siRNA target sequence for MOR267-16 (NM_146270.1,815-833).
cgctgatatcagtatccta

SEQ ID NO: 761664 - DNA, 19 bp, Mus musculus
  siRNA target sequence for MOR267-16 (NM_146270.1,836-854).
ctatcctaactccgttatt

SEQ ID NO: 761665 - DNA, 19 bp, Mus musculus
  siRNA target sequence for MOR267-16 (NM_146270.1,840-858).
cctaactccgttattcaat

SEQ ID NO: 761666 - DNA, 19 bp, Mus musculus
  siRNA target sequence for MOR267-16 (NM_146270.1,901-919).
cttcatagggtaataggaa

SEQ ID NO: 761667 - DNA, 19 bp, Mus musculus
  siRNA target sequence for MOR223-9 (NM_146271.1,247-265).
gttcctcggattatattaa

SEQ ID NO: 761668 - DNA, 19 bp, Mus musculus
  siRNA target sequence for MOR223-9 (NM_146271.1,250-268).
cctcggattatattaaact

SEQ ID NO: 761669 - DNA, 19 bp, Mus musculus
  siRNA target sequence for MOR223-9 (NM_146271.1,428-446).
ggaagttgtgcacaattct

SEQ ID NO: 761670 - DNA, 19 bp, Mus musculus
  siRNA target sequence for MOR223-9 (NM_146271.1,429-447).
gaagttgtgcacaattcta

SEQ ID NO: 761671 - DNA, 19 bp, Mus musculus
  siRNA target sequence for MOR171-46 (NM_146272.1,444-462).
cttcaccctaggccttttt

SEQ ID NO: 761672 - DNA, 19 bp, Mus musculus
  siRNA target sequence for MOR171-46 (NM_146272.1,512-530).
cctacatcataagtcatta

SEQ ID NO: 761673 - DNA, 19 bp, Mus musculus
  siRNA target sequence for MOR171-46 (NM_146272.1,901-919).
ctgggcagattctctgtaa

SEQ ID NO: 761674 - DNA, 19 bp, Mus musculus
  siRNA target sequence for MOR261-13 (NM_146273.1,193-211).
ctggccatcgtcgatattt

SEQ ID NO: 761675 - DNA, 19 bp, Mus musculus
  siRNA target sequence for MOR261-13 (NM_146273.1,195-213).
ggccatcgtcgatatttca

SEQ ID NO: 761676 - DNA, 19 bp, Mus musculus
  siRNA target sequence for MOR261-13 (NM_146273.1,196-214).
gccatcgtcgatatttcat

SEQ ID NO: 761677 - DNA, 19 bp, Mus musculus
  siRNA target sequence for MOR261-13 (NM_146273.1,197-215).
ccatcgtcgatatttcata

SEQ ID NO: 761678 - DNA, 19 bp, Mus musculus
  siRNA target sequence for MOR261-13 (NM_146273.1,201-219).
cgtcgatatttcatatgct

SEQ ID NO: 761679 - DNA, 19 bp, Mus musculus
  siRNA target sequence for MOR261-13 (NM_146273.1,378-396).
ccaacccttacaatactct

SEQ ID NO: 761680 - DNA, 19 bp, Mus musculus
  siRNA target sequence for MOR261-13 (NM_146273.1,464-482).
ccctggtccacgttgttct

SEQ ID NO: 761681 - DNA, 19 bp, Mus musculus
  siRNA target sequence for MOR261-13 (NM_146273.1,465-483).
cctggtccacgttgttctt

SEQ ID NO: 761682 - DNA, 19 bp, Mus musculus
  siRNA target sequence for MOR261-13 (NM_146273.1,466-484).
ctggtccacgttgttctta

SEQ ID NO: 761683 - DNA, 19 bp, Mus musculus
  siRNA target sequence for MOR261-13 (NM_146273.1,525-543).
cttcttctgtgaaatatta

SEQ ID NO: 761684 - DNA, 19 bp, Mus musculus
  siRNA target sequence for MOR261-13 (NM_146273.1,598-616).
gcaggttctgtatttatct

SEQ ID NO: 761685 - DNA, 19 bp, Mus musculus
  siRNA target sequence for MOR245-21 (NM_146274.1,189-207).
ggccaatctctcatttctt

SEQ ID NO: 761686 - DNA, 19 bp, Mus musculus
  siRNA target sequence for MOR245-21 (NM_146274.1,210-228).
ccttggagtttgctctatt

SEQ ID NO: 761687 - DNA, 19 bp, Mus musculus
  siRNA target sequence for MOR245-21 (NM_146274.1,276-294).
ctcatttggaggttgtata

SEQ ID NO: 761688 - DNA, 19 bp, Mus musculus
  siRNA target sequence for MOR245-21 (NM_146274.1,329-347).
cggaaatggtgcttctcat

SEQ ID NO: 761689 - DNA, 19 bp, Mus musculus
  siRNA target sequence for MOR245-21 (NM_146274.1,499-517).
cccttctgcggacctaata

SEQ ID NO: 761690 - DNA, 19 bp, Mus musculus
  siRNA target sequence for MOR245-21 (NM_146274.1,500-518).
ccttctgcggacctaatat

SEQ ID NO: 761691 - DNA, 19 bp, Mus musculus
  siRNA target sequence for MOR245-21 (NM_146274.1,501-519).
cttctgcggacctaatata

SEQ ID NO: 761692 - DNA, 19 bp, Mus musculus
  siRNA target sequence for MOR245-21 (NM_146274.1,506-524).
gcggacctaatatattgga

SEQ ID NO: 761693 - DNA, 19 bp, Mus musculus
  siRNA target sequence for MOR245-21 (NM_146274.1,566-584).
gcacagagaccagtaaatt

SEQ ID NO: 761694 - DNA, 19 bp, Mus musculus
  siRNA target sequence for MOR245-21 (NM_146274.1,569-587).
cagagaccagtaaattggt

SEQ ID NO: 761695 - DNA, 19 bp, Mus musculus
  siRNA target sequence for MOR245-21 (NM_146274.1,575-593).
ccagtaaattggtgttcat

SEQ ID NO: 761696 - DNA, 19 bp, Mus musculus
  siRNA target sequence for MOR245-21 (NM_146274.1,757-775).
ccactaatcttcttctaca

SEQ ID NO: 761697 - DNA, 19 bp, Mus musculus
  siRNA target sequence for MOR245-21 (NM_146274.1,788-806).
cttcatcacacttagacaa

SEQ ID NO: 761698 - DNA, 19 bp, Mus musculus
  siRNA target sequence for MOR245-21 (NM_146274.1,791-809).
catcacacttagacaaatt

SEQ ID NO: 761699 - DNA, 19 bp, Mus musculus
  siRNA target sequence for MOR245-21 (NM_146274.1,905-923).
gctcccagcttgtgaatta

SEQ ID NO: 761700 - DNA, 19 bp, Mus musculus
  siRNA target sequence for MOR217-1 (NM_146275.1,131-149).
ggaacacactcatgatagt

SEQ ID NO: 761701 - DNA, 19 bp, Mus musculus
  siRNA target sequence for MOR217-1 (NM_146275.1,245-263).
cagtcatgctagtgaactt

SEQ ID NO: 761702 - DNA, 19 bp, Mus musculus
  siRNA target sequence for MOR217-1 (NM_146275.1,335-353).
gaactgaatgtgtcttgtt

SEQ ID NO: 761703 - DNA, 19 bp, Mus musculus
  siRNA target sequence for MOR217-1 (NM_146275.1,459-477).
ctgtggcttggtgaattct

SEQ ID NO: 761704 - DNA, 19 bp, Mus musculus
  siRNA target sequence for MOR217-1 (NM_146275.1,461-479).
gtggcttggtgaattctgt

SEQ ID NO: 761705 - DNA, 19 bp, Mus musculus
  siRNA target sequence for MOR217-1 (NM_146275.1,478-496).
gtgactcacacagtattga

SEQ ID NO: 761706 - DNA, 19 bp, Mus musculus
  siRNA target sequence for MOR217-1 (NM_146275.1,650-668).
ctgcaggctcctatatact

SEQ ID NO: 761707 - DNA, 19 bp, Mus musculus
  siRNA target sequence for MOR217-1 (NM_146275.1,652-670).
gcaggctcctatatactga

SEQ ID NO: 761708 - DNA, 19 bp, Mus musculus
  siRNA target sequence for MOR217-1 (NM_146275.1,653-671).
caggctcctatatactgat

SEQ ID NO: 761709 - DNA, 19 bp, Mus musculus
  siRNA target sequence for MOR217-1 (NM_146275.1,656-674).
gctcctatatactgatcat

SEQ ID NO: 761710 - DNA, 19 bp, Mus musculus
  siRNA target sequence for MOR217-1 (NM_146275.1,770-788).
cagccaacttcaactatgt

SEQ ID NO: 761711 - DNA, 19 bp, Mus musculus
  siRNA target sequence for MOR217-1 (NM_146275.1,809-827).
ccctggacatgggcatatt

SEQ ID NO: 761712 - DNA, 19 bp, Mus musculus
  siRNA target sequence for MOR217-1 (NM_146275.1,810-828).
cctggacatgggcatatta

SEQ ID NO: 761713 - DNA, 19 bp, Mus musculus
  siRNA target sequence for MOR217-1 (NM_146275.1,814-832).
gacatgggcatattagtgt

SEQ ID NO: 761714 - DNA, 19 bp, Mus musculus
  siRNA target sequence for MOR217-1 (NM_146275.1,847-865).
gttgtgacccccctgttta

SEQ ID NO: 761715 - DNA, 19 bp, Mus musculus
  siRNA target sequence for MOR217-1 (NM_146275.1,904-922).
ggtgcgctgagaaaactga

SEQ ID NO: 761716 - DNA, 19 bp, Mus musculus
  siRNA target sequence for MOR217-1 (NM_146275.1,921-939).
gactggagtgccttcctta

SEQ ID NO: 761717 - DNA, 19 bp, Mus musculus
  siRNA target sequence for MOR217-1 (NM_146275.1,925-943).
ggagtgccttccttaacaa

SEQ ID NO: 761718 - DNA, 19 bp, Mus musculus
  siRNA target sequence for MOR217-1 (NM_146275.1,926-944).
gagtgccttccttaacaat

SEQ ID NO: 761719 - DNA, 19 bp, Mus musculus
  siRNA target sequence for MOR280-1 (NM_146276.1,57-75).
gttcggccactcaccttat

SEQ ID NO: 761720 - DNA, 19 bp, Mus musculus
  siRNA target sequence for MOR280-1 (NM_146276.1,61-79).
ggccactcaccttatgact

SEQ ID NO: 761721 - DNA, 19 bp, Mus musculus
  siRNA target sequence for MOR280-1 (NM_146276.1,68-86).
caccttatgactctttctt

SEQ ID NO: 761722 - DNA, 19 bp, Mus musculus
  siRNA target sequence for MOR280-1 (NM_146276.1,116-134).
ctgctgtggttggtaacat

SEQ ID NO: 761723 - DNA, 19 bp, Mus musculus
  siRNA target sequence for MOR280-1 (NM_146276.1,128-146).
gtaacatcctcctcttgat

SEQ ID NO: 761724 - DNA, 19 bp, Mus musculus
  siRNA target sequence for MOR280-1 (NM_146276.1,210-228).
catggacttgactatgaca

SEQ ID NO: 761725 - DNA, 19 bp, Mus musculus
  siRNA target sequence for MOR280-1 (NM_146276.1,306-324).
gatcttctttgtagttact

SEQ ID NO: 761726 - DNA, 19 bp, Mus musculus
  siRNA target sequence for MOR280-1 (NM_146276.1,398-416).
ggtaccctgtactgatgaa

SEQ ID NO: 761727 - DNA, 19 bp, Mus musculus
  siRNA target sequence for MOR280-1 (NM_146276.1,484-502).
gtgggtgtggtctttagct

SEQ ID NO: 761728 - DNA, 19 bp, Mus musculus
  siRNA target sequence for MOR280-1 (NM_146276.1,495-513).
ctttagctttccctattgt

SEQ ID NO: 761729 - DNA, 19 bp, Mus musculus
  siRNA target sequence for MOR280-1 (NM_146276.1,575-593).
cagacacctcactatttga

SEQ ID NO: 761730 - DNA, 19 bp, Mus musculus
  siRNA target sequence for MOR280-1 (NM_146276.1,592-610).
gaggacctcatctatgcat

SEQ ID NO: 761731 - DNA, 19 bp, Mus musculus
  siRNA target sequence for MOR280-1 (NM_146276.1,597-615).
cctcatctatgcatgttgt

SEQ ID NO: 761732 - DNA, 19 bp, Mus musculus
  siRNA target sequence for MOR280-1 (NM_146276.1,608-626).
catgttgtgtggtgatgtt

SEQ ID NO: 761733 - DNA, 19 bp, Mus musculus
  siRNA target sequence for MOR280-1 (NM_146276.1,611-629).
gttgtgtggtgatgttact

SEQ ID NO: 761734 - DNA, 19 bp, Mus musculus
  siRNA target sequence for MOR280-1 (NM_146276.1,642-660).
ggtcattgtggcatcctat

SEQ ID NO: 761735 - DNA, 19 bp, Mus musculus
  siRNA target sequence for MOR280-1 (NM_146276.1,743-761).
ccgtggtgggcctctacta

SEQ ID NO: 761736 - DNA, 19 bp, Mus musculus
  siRNA target sequence for MOR280-1 (NM_146276.1,764-782).
ggggagccatatttagcta

SEQ ID NO: 761737 - DNA, 19 bp, Mus musculus
  siRNA target sequence for MOR280-1 (NM_146276.1,789-807).
gcgagcctcggctagaaca

SEQ ID NO: 761738 - DNA, 19 bp, Mus musculus
  siRNA target sequence for MOR246-6 (NM_146278.1,230-248).
ctacacctaaaatgattgt

SEQ ID NO: 761739 - DNA, 19 bp, Mus musculus
  siRNA target sequence for MOR246-6 (NM_146278.1,258-276).
gagtgaacacaagactata

SEQ ID NO: 761740 - DNA, 19 bp, Mus musculus
  siRNA target sequence for MOR246-6 (NM_146278.1,265-283).
cacaagactatatcattca

SEQ ID NO: 761741 - DNA, 19 bp, Mus musculus
  siRNA target sequence for MOR246-6 (NM_146278.1,422-440).
gtactgccttggtagtaat

SEQ ID NO: 761742 - DNA, 19 bp, Mus musculus
  siRNA target sequence for MOR246-6 (NM_146278.1,454-472).
ggcttggtacacacattga

SEQ ID NO: 761743 - DNA, 19 bp, Mus musculus
  siRNA target sequence for MOR246-6 (NM_146278.1,463-481).
cacacattgagccagttat

SEQ ID NO: 761744 - DNA, 19 bp, Mus musculus
  siRNA target sequence for MOR246-6 (NM_146278.1,473-491).
gccagttatcatttactgt

SEQ ID NO: 761745 - DNA, 19 bp, Mus musculus
  siRNA target sequence for MOR246-6 (NM_146278.1,567-585).
cattgactcatacattact

SEQ ID NO: 761746 - DNA, 19 bp, Mus musculus
  siRNA target sequence for MOR246-6 (NM_146278.1,600-618).
ggtaaacagtggaattctt

SEQ ID NO: 761747 - DNA, 19 bp, Mus musculus
  siRNA target sequence for MOR246-6 (NM_146278.1,601-619).
gtaaacagtggaattcttt

SEQ ID NO: 761748 - DNA, 19 bp, Mus musculus
  siRNA target sequence for MOR246-6 (NM_146278.1,694-712).
gccatggccaaggcatttt

SEQ ID NO: 761749 - DNA, 19 bp, Mus musculus
  siRNA target sequence for MOR246-6 (NM_146278.1,791-809).
cctatcctgtggataaaat

SEQ ID NO: 761750 - DNA, 19 bp, Mus musculus
  siRNA target sequence for MOR246-6 (NM_146278.1,829-847).
gttttcactccgatcctta

SEQ ID NO: 761751 - DNA, 19 bp, Mus musculus
  siRNA target sequence for MOR246-6 (NM_146278.1,927-945).
caaagtagctgaaatgtca

SEQ ID NO: 761752 - DNA, 19 bp, Mus musculus
  siRNA target sequence for MOR160-4 (NM_146281.1,14-32).
gcgctgtccatgagtttgt

SEQ ID NO: 761753 - DNA, 19 bp, Mus musculus
  siRNA target sequence for MOR160-4 (NM_146281.1,15-33).
cgctgtccatgagtttgtt

SEQ ID NO: 761754 - DNA, 19 bp, Mus musculus
  siRNA target sequence for MOR160-4 (NM_146281.1,60-78).
cattcaacctgcactcttt

SEQ ID NO: 761755 - DNA, 19 bp, Mus musculus
  siRNA target sequence for MOR160-4 (NM_146281.1,122-140).
ccctgatgttgcttgtgat

SEQ ID NO: 761756 - DNA, 19 bp, Mus musculus
  siRNA target sequence for MOR160-4 (NM_146281.1,454-472).
gtggatgctctcctcaata

SEQ ID NO: 761757 - DNA, 19 bp, Mus musculus
  siRNA target sequence for MOR160-4 (NM_146281.1,477-495).
cccggctgtcagtttagat

SEQ ID NO: 761758 - DNA, 19 bp, Mus musculus
  siRNA target sequence for MOR160-4 (NM_146281.1,478-496).
ccggctgtcagtttagatt

SEQ ID NO: 761759 - DNA, 19 bp, Mus musculus
  siRNA target sequence for MOR160-4 (NM_146281.1,479-497).
cggctgtcagtttagattt

SEQ ID NO: 761760 - DNA, 19 bp, Mus musculus
  siRNA target sequence for MOR160-4 (NM_146281.1,498-516).
ctgtgaggaccaaacgatt

SEQ ID NO: 761761 - DNA, 19 bp, Mus musculus
  siRNA target sequence for MOR160-4 (NM_146281.1,600-618).
ctccgtcgtgcatttcttt

SEQ ID NO: 761762 - DNA, 19 bp, Mus musculus
  siRNA target sequence for MOR160-4 (NM_146281.1,604-622).
gtcgtgcatttctttggaa

SEQ ID NO: 761763 - DNA, 19 bp, Mus musculus
  siRNA target sequence for MOR160-4 (NM_146281.1,620-638).
gaacgcttgtcatgattgt

SEQ ID NO: 761764 - DNA, 19 bp, Mus musculus
  siRNA target sequence for MOR160-4 (NM_146281.1,751-769).
ggctcggggtttatcagtt

SEQ ID NO: 761765 - DNA, 19 bp, Mus musculus
  siRNA target sequence for MOR160-4 (NM_146281.1,752-770).
gctcggggtttatcagtta

SEQ ID NO: 761766 - DNA, 19 bp, Mus musculus
  siRNA target sequence for MOR160-4 (NM_146281.1,753-771).
ctcggggtttatcagttat

SEQ ID NO: 761767 - DNA, 19 bp, Mus musculus
  siRNA target sequence for MOR160-4 (NM_146281.1,755-773).
cggggtttatcagttatct

SEQ ID NO: 761768 - DNA, 19 bp, Mus musculus
  siRNA target sequence for MOR160-4 (NM_146281.1,758-776).
ggtttatcagttatctctt

SEQ ID NO: 761769 - DNA, 19 bp, Mus musculus
  siRNA target sequence for MOR160-4 (NM_146281.1,759-777).
gtttatcagttatctctta

SEQ ID NO: 761770 - DNA, 19 bp, Mus musculus
  siRNA target sequence for MOR160-4 (NM_146281.1,886-904).
gcgctgggaagaatgatca

SEQ ID NO: 761771 - DNA, 19 bp, Mus musculus
  siRNA target sequence for MOR149-3 (NM_146282.1,65-83).
caatggagctcctcatatt

SEQ ID NO: 761772 - DNA, 19 bp, Mus musculus
  siRNA target sequence for MOR149-3 (NM_146282.1,216-234).
cctaagcacaactaccatt

SEQ ID NO: 761773 - DNA, 19 bp, Mus musculus
  siRNA target sequence for MOR149-3 (NM_146282.1,445-463).
ctgatcattagtattgtga

SEQ ID NO: 761774 - DNA, 19 bp, Mus musculus
  siRNA target sequence for MOR149-3 (NM_146282.1,455-473).
gtattgtgaacagcttatt

SEQ ID NO: 761775 - DNA, 19 bp, Mus musculus
  siRNA target sequence for MOR149-3 (NM_146282.1,483-501).
gatgatactgcgactatca

SEQ ID NO: 761776 - DNA, 19 bp, Mus musculus
  siRNA target sequence for MOR149-3 (NM_146282.1,486-504).
gatactgcgactatcattt

SEQ ID NO: 761777 - DNA, 19 bp, Mus musculus
  siRNA target sequence for MOR149-3 (NM_146282.1,761-779).
caggagttggagtttatat

SEQ ID NO: 761778 - DNA, 19 bp, Mus musculus
  siRNA target sequence for MOR130-2 (NM_146283.1,66-84).
gcatcaagggcttctcttt

SEQ ID NO: 761779 - DNA, 19 bp, Mus musculus
  siRNA target sequence for MOR130-2 (NM_146283.1,93-111).
cctatgtctctatttaaca

SEQ ID NO: 761780 - DNA, 19 bp, Mus musculus
  siRNA target sequence for MOR130-2 (NM_146283.1,102-120).
ctatttaacaggactattt

SEQ ID NO: 761781 - DNA, 19 bp, Mus musculus
  siRNA target sequence for MOR130-2 (NM_146283.1,294-312).
ggctcagatgtatttctgt

SEQ ID NO: 761782 - DNA, 19 bp, Mus musculus
  siRNA target sequence for MOR130-2 (NM_146283.1,311-329).
gtatgatgtttgctaacat

SEQ ID NO: 761783 - DNA, 19 bp, Mus musculus
  siRNA target sequence for MOR130-2 (NM_146283.1,569-587).
ctgataccagtctcaatca

SEQ ID NO: 761784 - DNA, 19 bp, Mus musculus
  siRNA target sequence for MOR130-2 (NM_146283.1,571-589).
gataccagtctcaatcagt

SEQ ID NO: 761785 - DNA, 19 bp, Mus musculus
  siRNA target sequence for MOR130-2 (NM_146283.1,575-593).
ccagtctcaatcagttgat

SEQ ID NO: 761786 - DNA, 19 bp, Mus musculus
  siRNA target sequence for MOR130-2 (NM_146283.1,622-640).
gtggtaccatcagtttgta

SEQ ID NO: 761787 - DNA, 19 bp, Mus musculus
  siRNA target sequence for MOR130-2 (NM_146283.1,625-643).
gtaccatcagtttgtatct

SEQ ID NO: 761788 - DNA, 19 bp, Mus musculus
  siRNA target sequence for MOR130-2 (NM_146283.1,728-746).
cccaccttgctttggttat

SEQ ID NO: 761789 - DNA, 19 bp, Mus musculus
  siRNA target sequence for MOR130-2 (NM_146283.1,729-747).
ccaccttgctttggttatt

SEQ ID NO: 761790 - DNA, 19 bp, Mus musculus
  siRNA target sequence for MOR130-2 (NM_146283.1,791-809).
ccaaccattccactgaaaa

SEQ ID NO: 761791 - DNA, 19 bp, Mus musculus
  siRNA target sequence for MOR130-2 (NM_146283.1,817-835).
gctgcatcagtaattttta

SEQ ID NO: 761792 - DNA, 19 bp, Mus musculus
  siRNA target sequence for MOR130-2 (NM_146283.1,821-839).
catcagtaatttttatggt

SEQ ID NO: 761793 - DNA, 19 bp, Mus musculus
  siRNA target sequence for MOR130-2 (NM_146283.1,849-867).
cgtattgaatcctttcatt

SEQ ID NO: 761794 - DNA, 19 bp, Mus musculus
  siRNA target sequence for MOR130-2 (NM_146283.1,916-934).
ggccagagcaaaatatgtt

SEQ ID NO: 761795 - DNA, 19 bp, Mus musculus
  siRNA target sequence for MOR114-12 (NM_146284.1,61-79).
ctgcaggtcttgcttttta

SEQ ID NO: 761796 - DNA, 19 bp, Mus musculus
  siRNA target sequence for MOR114-12 (NM_146284.1,96-114).
ctacctattgagtgtaact

SEQ ID NO: 761797 - DNA, 19 bp, Mus musculus
  siRNA target sequence for MOR114-12 (NM_146284.1,105-123).
gagtgtaactggtaactta

SEQ ID NO: 761798 - DNA, 19 bp, Mus musculus
  siRNA target sequence for MOR114-12 (NM_146284.1,109-127).
gtaactggtaacttaacta

SEQ ID NO: 761799 - DNA, 19 bp, Mus musculus
  siRNA target sequence for MOR114-12 (NM_146284.1,143-161).
cagtggatccctaccttaa

SEQ ID NO: 761800 - DNA, 19 bp, Mus musculus
  siRNA target sequence for MOR114-12 (NM_146284.1,147-165).
ggatccctaccttaaaact

SEQ ID NO: 761801 - DNA, 19 bp, Mus musculus
  siRNA target sequence for MOR114-12 (NM_146284.1,220-238).
gcctgtgtcccaagattct

SEQ ID NO: 761802 - DNA, 19 bp, Mus musculus
  siRNA target sequence for MOR114-12 (NM_146284.1,222-240).
ctgtgtcccaagattctta

SEQ ID NO: 761803 - DNA, 19 bp, Mus musculus
  siRNA target sequence for MOR114-12 (NM_146284.1,224-242).
gtgtcccaagattcttata

SEQ ID NO: 761804 - DNA, 19 bp, Mus musculus
  siRNA target sequence for MOR114-12 (NM_146284.1,230-248).
caagattcttatacagtat

SEQ ID NO: 761805 - DNA, 19 bp, Mus musculus
  siRNA target sequence for MOR114-12 (NM_146284.1,237-255).
cttatacagtatttcaact

SEQ ID NO: 761806 - DNA, 19 bp, Mus musculus
  siRNA target sequence for MOR114-12 (NM_146284.1,411-429).
ggtgtgcagaataatggtt

SEQ ID NO: 761807 - DNA, 19 bp, Mus musculus
  siRNA target sequence for MOR114-12 (NM_146284.1,412-430).
gtgtgcagaataatggtta

SEQ ID NO: 761808 - DNA, 19 bp, Mus musculus
  siRNA target sequence for MOR114-12 (NM_146284.1,437-455).
gttggatggcagcattcat

SEQ ID NO: 761809 - DNA, 19 bp, Mus musculus
  siRNA target sequence for MOR114-12 (NM_146284.1,441-459).
gatggcagcattcatgatt

SEQ ID NO: 761810 - DNA, 19 bp, Mus musculus
  siRNA target sequence for MOR114-12 (NM_146284.1,532-550).
gatgcaaaccctattttga

SEQ ID NO: 761811 - DNA, 19 bp, Mus musculus
  siRNA target sequence for MOR114-12 (NM_146284.1,561-579).
ctcagacacgtggttaatt

SEQ ID NO: 761812 - DNA, 19 bp, Mus musculus
  siRNA target sequence for MOR114-12 (NM_146284.1,563-581).
cagacacgtggttaattga

SEQ ID NO: 761813 - DNA, 19 bp, Mus musculus
  siRNA target sequence for MOR114-12 (NM_146284.1,602-620).
cagtattgaccttcatcat

SEQ ID NO: 761814 - DNA, 19 bp, Mus musculus
  siRNA target sequence for MOR114-12 (NM_146284.1,604-622).
gtattgaccttcatcatta

SEQ ID NO: 761815 - DNA, 19 bp, Mus musculus
  siRNA target sequence for MOR114-12 (NM_146284.1,612-630).
cttcatcattactcttcta

SEQ ID NO: 761816 - DNA, 19 bp, Mus musculus
  siRNA target sequence for MOR114-12 (NM_146284.1,632-650).
gtgtagtcttttcatacat

SEQ ID NO: 761817 - DNA, 19 bp, Mus musculus
  siRNA target sequence for MOR114-12 (NM_146284.1,657-675).
cataaggacagttctaaaa

SEQ ID NO: 761818 - DNA, 19 bp, Mus musculus
  siRNA target sequence for MOR114-12 (NM_146284.1,771-789).
cgtcaaaccgtctgcaaaa

SEQ ID NO: 761819 - DNA, 19 bp, Mus musculus
  siRNA target sequence for MOR114-12 (NM_146284.1,790-808).
gaagcggtgaccattaata

SEQ ID NO: 761820 - DNA, 19 bp, Mus musculus
  siRNA target sequence for MOR223-8 (NM_146286.1,224-242).
ctgctattgtcccaaagat

SEQ ID NO: 761821 - DNA, 19 bp, Mus musculus
  siRNA target sequence for MOR223-8 (NM_146286.1,250-268).
ggctttcttttggatagta

SEQ ID NO: 761822 - DNA, 19 bp, Mus musculus
  siRNA target sequence for MOR223-8 (NM_146286.1,410-428).
ctcgcagcgtctgtaacta

SEQ ID NO: 761823 - DNA, 19 bp, Mus musculus
  siRNA target sequence for MOR223-8 (NM_146286.1,454-472).
gggactatccactcacttt

SEQ ID NO: 761824 - DNA, 19 bp, Mus musculus
  siRNA target sequence for MOR223-8 (NM_146286.1,455-473).
ggactatccactcactttt

SEQ ID NO: 761825 - DNA, 19 bp, Mus musculus
  siRNA target sequence for MOR223-8 (NM_146286.1,475-493).
caaacgagtttcatattca

SEQ ID NO: 761826 - DNA, 19 bp, Mus musculus
  siRNA target sequence for MOR223-8 (NM_146286.1,509-527).
gcccaaaccgagttgacta

SEQ ID NO: 761827 - DNA, 19 bp, Mus musculus
  siRNA target sequence for MOR223-8 (NM_146286.1,512-530).
caaaccgagttgactactt

SEQ ID NO: 761828 - DNA, 19 bp, Mus musculus
  siRNA target sequence for MOR223-8 (NM_146286.1,809-827).
gggtggtagctgtcttcta

SEQ ID NO: 761829 - DNA, 19 bp, Mus musculus
  siRNA target sequence for MOR223-8 (NM_146286.1,832-850).
gtcattactcccttactta

SEQ ID NO: 761830 - DNA, 19 bp, Mus musculus
  siRNA target sequence for MOR218-10 (NM_146287.1,471-489).
cctatatctagcaaccata

SEQ ID NO: 761831 - DNA, 19 bp, Mus musculus
  siRNA target sequence for MOR218-10 (NM_146287.1,472-490).
ctatatctagcaaccatat

SEQ ID NO: 761832 - DNA, 19 bp, Mus musculus
  siRNA target sequence for MOR218-10 (NM_146287.1,598-616).
gctgacttcctgtcagtaa

SEQ ID NO: 761833 - DNA, 19 bp, Mus musculus
  siRNA target sequence for MOR218-8 (NM_146290.1,42-60).
ctctgatgagcgtaacctt

SEQ ID NO: 761834 - DNA, 19 bp, Mus musculus
  siRNA target sequence for MOR218-8 (NM_146290.1,49-67).
gagcgtaaccttcagattt

SEQ ID NO: 761835 - DNA, 19 bp, Mus musculus
  siRNA target sequence for MOR218-8 (NM_146290.1,51-69).
gcgtaaccttcagatttta

SEQ ID NO: 761836 - DNA, 19 bp, Mus musculus
  siRNA target sequence for MOR218-8 (NM_146290.1,53-71).
gtaaccttcagattttaca

SEQ ID NO: 761837 - DNA, 19 bp, Mus musculus
  siRNA target sequence for MOR218-8 (NM_146290.1,76-94).
gtgctctttttgatcacat

SEQ ID NO: 761838 - DNA, 19 bp, Mus musculus
  siRNA target sequence for MOR218-8 (NM_146290.1,207-225).
cttcatctctgttactgtt

SEQ ID NO: 761839 - DNA, 19 bp, Mus musculus
  siRNA target sequence for MOR218-8 (NM_146290.1,317-335).
catcagaagtagctattct

SEQ ID NO: 761840 - DNA, 19 bp, Mus musculus
  siRNA target sequence for MOR218-8 (NM_146290.1,373-391).
cggccactgcagtatgaga

SEQ ID NO: 761841 - DNA, 19 bp, Mus musculus
  siRNA target sequence for MOR218-8 (NM_146290.1,379-397).
ctgcagtatgagacaatta

SEQ ID NO: 761842 - DNA, 19 bp, Mus musculus
  siRNA target sequence for MOR218-8 (NM_146290.1,422-440).
cagtgatagctgtatggat

SEQ ID NO: 761843 - DNA, 19 bp, Mus musculus
  siRNA target sequence for MOR218-8 (NM_146290.1,438-456).
gatggctggaggactatct

SEQ ID NO: 761844 - DNA, 19 bp, Mus musculus
  siRNA target sequence for MOR218-8 (NM_146290.1,466-484).
cacacaggtgttaatttct

SEQ ID NO: 761845 - DNA, 19 bp, Mus musculus
  siRNA target sequence for MOR218-8 (NM_146290.1,544-562).
ctaaaactagcttgttctt

SEQ ID NO: 761846 - DNA, 19 bp, Mus musculus
  siRNA target sequence for MOR218-8 (NM_146290.1,620-638).
gtttaatagccatagtctt

SEQ ID NO: 761847 - DNA, 19 bp, Mus musculus
  siRNA target sequence for MOR218-8 (NM_146290.1,749-767).
cagctgcaggctttgaatt

SEQ ID NO: 761848 - DNA, 19 bp, Mus musculus
  siRNA target sequence for MOR218-8 (NM_146290.1,769-787).
ctaagacctccttcagatt

SEQ ID NO: 761849 - DNA, 19 bp, Mus musculus
  siRNA target sequence for MOR218-8 (NM_146290.1,794-812).
cagcaatggacctcatatt

SEQ ID NO: 761850 - DNA, 19 bp, Mus musculus
  siRNA target sequence for MOR218-8 (NM_146290.1,796-814).
gcaatggacctcatattct

SEQ ID NO: 761851 - DNA, 19 bp, Mus musculus
  siRNA target sequence for MOR218-8 (NM_146290.1,802-820).
gacctcatattctccatat

SEQ ID NO: 761852 - DNA, 19 bp, Mus musculus
  siRNA target sequence for MOR218-8 (NM_146290.1,816-834).
catattctacactgtgata

SEQ ID NO: 761853 - DNA, 19 bp, Mus musculus
  siRNA target sequence for MOR218-8 (NM_146290.1,831-849).
gatacctccaacactcaat

SEQ ID NO: 761854 - DNA, 19 bp, Mus musculus
  siRNA target sequence for MOR218-8 (NM_146290.1,925-943).
cggagaatggtatatgtta

SEQ ID NO: 761855 - DNA, 19 bp, Mus musculus
  siRNA target sequence for MOR174-16 (NM_146294.1,406-424).
gttgtaatgcctatacaat

SEQ ID NO: 761856 - DNA, 19 bp, Mus musculus
  siRNA target sequence for MOR174-16 (NM_146294.1,409-427).
gtaatgcctatacaattct

SEQ ID NO: 761857 - DNA, 19 bp, Mus musculus
  siRNA target sequence for MOR174-16 (NM_146294.1,597-615).
gatatgcttagtcatatct

SEQ ID NO: 761858 - DNA, 19 bp, Mus musculus
  siRNA target sequence for MOR264-20 (NM_146297.1,31-49).
gcaaacaaatttaaaatca

SEQ ID NO: 761859 - DNA, 19 bp, Mus musculus
  siRNA target sequence for MOR264-20 (NM_146297.1,56-74).
caaatcttagtgtacctat

SEQ ID NO: 761860 - DNA, 19 bp, Mus musculus
  siRNA target sequence for MOR264-20 (NM_146297.1,109-127).
caattgcactggtttctct

SEQ ID NO: 761861 - DNA, 19 bp, Mus musculus
  siRNA target sequence for MOR264-20 (NM_146297.1,240-258).
cctttctttcctagaaatt

SEQ ID NO: 761862 - DNA, 19 bp, Mus musculus
  siRNA target sequence for MOR264-20 (NM_146297.1,273-291).
cactcttcctagaatgctt

SEQ ID NO: 761863 - DNA, 19 bp, Mus musculus
  siRNA target sequence for MOR264-20 (NM_146297.1,275-293).
ctcttcctagaatgcttat

SEQ ID NO: 761864 - DNA, 19 bp, Mus musculus
  siRNA target sequence for MOR264-20 (NM_146297.1,294-312).
ggatctcttcacactgaaa

SEQ ID NO: 761865 - DNA, 19 bp, Mus musculus
  siRNA target sequence for MOR264-20 (NM_146297.1,516-534).
ggggcagacatatcagatt

SEQ ID NO: 761866 - DNA, 19 bp, Mus musculus
  siRNA target sequence for MOR264-20 (NM_146297.1,517-535).
gggcagacatatcagattt

SEQ ID NO: 761867 - DNA, 19 bp, Mus musculus
  siRNA target sequence for MOR264-20 (NM_146297.1,520-538).
cagacatatcagattttgt

SEQ ID NO: 761868 - DNA, 19 bp, Mus musculus
  siRNA target sequence for MOR264-20 (NM_146297.1,522-540).
gacatatcagattttgtct

SEQ ID NO: 761869 - DNA, 19 bp, Mus musculus
  siRNA target sequence for MOR264-20 (NM_146297.1,551-569).
gtgaatctaaccaaattaa

SEQ ID NO: 761870 - DNA, 19 bp, Mus musculus
  siRNA target sequence for MOR264-20 (NM_146297.1,664-682).
gtcactatcccattcatgt

SEQ ID NO: 761871 - DNA, 19 bp, Mus musculus
  siRNA target sequence for MOR264-20 (NM_146297.1,666-684).
cactatcccattcatgtta

SEQ ID NO: 761872 - DNA, 19 bp, Mus musculus
  siRNA target sequence for MOR264-20 (NM_146297.1,668-686).
ctatcccattcatgttaat

SEQ ID NO: 761873 - DNA, 19 bp, Mus musculus
  siRNA target sequence for MOR264-20 (NM_146297.1,701-719).
gcaggatcatctcaactat

SEQ ID NO: 761874 - DNA, 19 bp, Mus musculus
  siRNA target sequence for MOR264-20 (NM_146297.1,806-824).
cagctagtatcacctattt

SEQ ID NO: 761875 - DNA, 19 bp, Mus musculus
  siRNA target sequence for MOR264-20 (NM_146297.1,808-826).
gctagtatcacctatttaa

SEQ ID NO: 761876 - DNA, 19 bp, Mus musculus
  siRNA target sequence for MOR106-12 (NM_146298.1,15-33).
gggatccacggtgacatat

SEQ ID NO: 761877 - DNA, 19 bp, Mus musculus
  siRNA target sequence for MOR106-12 (NM_146298.1,16-34).
ggatccacggtgacatatt

SEQ ID NO: 761878 - DNA, 19 bp, Mus musculus
  siRNA target sequence for MOR106-12 (NM_146298.1,17-35).
gatccacggtgacatattt

SEQ ID NO: 761879 - DNA, 19 bp, Mus musculus
  siRNA target sequence for MOR106-12 (NM_146298.1,55-73).
ggtccctggaagattcaaa

SEQ ID NO: 761880 - DNA, 19 bp, Mus musculus
  siRNA target sequence for MOR106-12 (NM_146298.1,58-76).
ccctggaagattcaaatca

SEQ ID NO: 761881 - DNA, 19 bp, Mus musculus
  siRNA target sequence for MOR106-12 (NM_146298.1,102-120).
ctacatgataactttgact

SEQ ID NO: 761882 - DNA, 19 bp, Mus musculus
  siRNA target sequence for MOR106-12 (NM_146298.1,123-141).
gaatatggccatcatttgt

SEQ ID NO: 761883 - DNA, 19 bp, Mus musculus
  siRNA target sequence for MOR106-12 (NM_146298.1,256-274).
ctttccaaaactaagacta

SEQ ID NO: 761884 - DNA, 19 bp, Mus musculus
  siRNA target sequence for MOR106-12 (NM_146298.1,415-433).
caattctgcagtattctga

SEQ ID NO: 761885 - DNA, 19 bp, Mus musculus
  siRNA target sequence for MOR106-12 (NM_146298.1,602-620).
ctataagtactcttatcat

SEQ ID NO: 761886 - DNA, 19 bp, Mus musculus
  siRNA target sequence for MOR106-12 (NM_146298.1,700-718).
cgtcaaaaggccttctcaa

SEQ ID NO: 761887 - DNA, 19 bp, Mus musculus
  siRNA target sequence for MOR106-12 (NM_146298.1,761-779).
ccataatggtgatgtatgt

SEQ ID NO: 761888 - DNA, 19 bp, Mus musculus
  siRNA target sequence for MOR106-12 (NM_146298.1,794-812).
gcaactcagttgacatgaa

SEQ ID NO: 761889 - DNA, 19 bp, Mus musculus
  siRNA target sequence for MOR106-12 (NM_146298.1,802-820).
gttgacatgaataaaatta

SEQ ID NO: 761890 - DNA, 19 bp, Mus musculus
  siRNA target sequence for MOR106-12 (NM_146298.1,850-868).
gctttaaatcctttcatct

SEQ ID NO: 761891 - DNA, 19 bp, Mus musculus
  siRNA target sequence for MOR106-12 (NM_146298.1,919-937).
gggaatagcattatgcaaa

SEQ ID NO: 761892 - DNA, 19 bp, Mus musculus
  siRNA target sequence for MOR106-12 (NM_146298.1,920-938).
ggaatagcattatgcaaaa

SEQ ID NO: 761893 - DNA, 19 bp, Mus musculus
  siRNA target sequence for MOR106-11 (NM_146299.1,40-58).
gctttcggatccaagaaca

SEQ ID NO: 761894 - DNA, 19 bp, Mus musculus
  siRNA target sequence for MOR106-11 (NM_146299.1,106-124).
cagggggagatgcaaagtt

SEQ ID NO: 761895 - DNA, 19 bp, Mus musculus
  siRNA target sequence for MOR106-11 (NM_146299.1,110-128).
gggagatgcaaagtttctt

SEQ ID NO: 761896 - DNA, 19 bp, Mus musculus
  siRNA target sequence for MOR106-11 (NM_146299.1,134-152).
gttcaattctgattcttta

SEQ ID NO: 761897 - DNA, 19 bp, Mus musculus
  siRNA target sequence for MOR106-11 (NM_146299.1,168-186).
ggggaatggaactattgtt

SEQ ID NO: 761898 - DNA, 19 bp, Mus musculus
  siRNA target sequence for MOR106-11 (NM_146299.1,169-187).
gggaatggaactattgttt

SEQ ID NO: 761899 - DNA, 19 bp, Mus musculus
  siRNA target sequence for MOR106-11 (NM_146299.1,297-315).
caatattctctctgagaat

SEQ ID NO: 761900 - DNA, 19 bp, Mus musculus
  siRNA target sequence for MOR106-11 (NM_146299.1,468-486).
ctgtgtcatcctgatttgt

SEQ ID NO: 761901 - DNA, 19 bp, Mus musculus
  siRNA target sequence for MOR106-11 (NM_146299.1,470-488).
gtgtcatcctgatttgtat

SEQ ID NO: 761902 - DNA, 19 bp, Mus musculus
  siRNA target sequence for MOR106-11 (NM_146299.1,584-602).
gtgacccaggaccattgtt

SEQ ID NO: 761903 - DNA, 19 bp, Mus musculus
  siRNA target sequence for MOR106-11 (NM_146299.1,640-658).
ctctgttataccttcaact

SEQ ID NO: 761904 - DNA, 19 bp, Mus musculus
  siRNA target sequence for MOR106-11 (NM_146299.1,687-705).
catcctgggatcctatact

SEQ ID NO: 761905 - DNA, 19 bp, Mus musculus
  siRNA target sequence for MOR106-11 (NM_146299.1,690-708).
cctgggatcctatactcta

SEQ ID NO: 761906 - DNA, 19 bp, Mus musculus
  siRNA target sequence for MOR106-11 (NM_146299.1,693-711).
gggatcctatactctagta

SEQ ID NO: 761907 - DNA, 19 bp, Mus musculus
  siRNA target sequence for MOR106-11 (NM_146299.1,695-713).
gatcctatactctagtact

SEQ ID NO: 761908 - DNA, 19 bp, Mus musculus
  siRNA target sequence for MOR106-11 (NM_146299.1,737-755).
ctggtgctggtcgaactaa

SEQ ID NO: 761909 - DNA, 19 bp, Mus musculus
  siRNA target sequence for MOR106-11 (NM_146299.1,742-760).
gctggtcgaactaaagctt

SEQ ID NO: 761910 - DNA, 19 bp, Mus musculus
  siRNA target sequence for MOR106-11 (NM_146299.1,743-761).
ctggtcgaactaaagcttt

SEQ ID NO: 761911 - DNA, 19 bp, Mus musculus
  siRNA target sequence for MOR106-11 (NM_146299.1,811-829).
cttatggtgatgtatgtga

SEQ ID NO: 761912 - DNA, 19 bp, Mus musculus
  siRNA target sequence for MOR106-11 (NM_146299.1,886-904).
gccttgacccccctcttaa

SEQ ID NO: 761913 - DNA, 19 bp, Mus musculus
  siRNA target sequence for MOR106-11 (NM_146299.1,888-906).
cttgacccccctcttaaat

SEQ ID NO: 761914 - DNA, 19 bp, Mus musculus
  siRNA target sequence for MOR210-5 (NM_146300.1,167-185).
gcatgattggcatcatagt

SEQ ID NO: 761915 - DNA, 19 bp, Mus musculus
  siRNA target sequence for MOR210-5 (NM_146300.1,227-245).
gcaacctctccgtgattga

SEQ ID NO: 761916 - DNA, 19 bp, Mus musculus
  siRNA target sequence for MOR210-5 (NM_146300.1,252-270).
ctactccacggttattgta

SEQ ID NO: 761917 - DNA, 19 bp, Mus musculus
  siRNA target sequence for MOR210-5 (NM_146300.1,258-276).
cacggttattgtacctaaa

SEQ ID NO: 761918 - DNA, 19 bp, Mus musculus
  siRNA target sequence for MOR210-5 (NM_146300.1,268-286).
gtacctaaagccatggtaa

SEQ ID NO: 761919 - DNA, 19 bp, Mus musculus
  siRNA target sequence for MOR210-5 (NM_146300.1,271-289).
cctaaagccatggtaaaca

SEQ ID NO: 761920 - DNA, 19 bp, Mus musculus
  siRNA target sequence for MOR210-5 (NM_146300.1,507-525).
cctccaaatcagtgtaaca

SEQ ID NO: 761921 - DNA, 19 bp, Mus musculus
  siRNA target sequence for MOR210-5 (NM_146300.1,508-526).
ctccaaatcagtgtaacat

SEQ ID NO: 761922 - DNA, 19 bp, Mus musculus
  siRNA target sequence for MOR210-5 (NM_146300.1,520-538).
gtaacattctccatgtctt

SEQ ID NO: 761923 - DNA, 19 bp, Mus musculus
  siRNA target sequence for MOR210-5 (NM_146300.1,542-560).
gtgcctctagggtcattga

SEQ ID NO: 761924 - DNA, 19 bp, Mus musculus
  siRNA target sequence for MOR210-5 (NM_146300.1,551-569).
gggtcattgatcacttcta

SEQ ID NO: 761925 - DNA, 19 bp, Mus musculus
  siRNA target sequence for MOR210-5 (NM_146300.1,574-592).
gattctaatccaatcgaaa

SEQ ID NO: 761926 - DNA, 19 bp, Mus musculus
  siRNA target sequence for MOR210-5 (NM_146300.1,589-607).
gaaaagatctcctgttcta

SEQ ID NO: 761927 - DNA, 19 bp, Mus musculus
  siRNA target sequence for MOR210-5 (NM_146300.1,679-697).
gtagtatcttacatgtata

SEQ ID NO: 761928 - DNA, 19 bp, Mus musculus
  siRNA target sequence for MOR210-5 (NM_146300.1,765-783).
ccacttgggggttgtaagt

SEQ ID NO: 761929 - DNA, 19 bp, Mus musculus
  siRNA target sequence for MOR210-5 (NM_146300.1,771-789).
gggggttgtaagtttgctt

SEQ ID NO: 761930 - DNA, 19 bp, Mus musculus
  siRNA target sequence for MOR210-5 (NM_146300.1,772-790).
ggggttgtaagtttgcttt

SEQ ID NO: 761931 - DNA, 19 bp, Mus musculus
  siRNA target sequence for MOR210-5 (NM_146300.1,773-791).
gggttgtaagtttgcttta

SEQ ID NO: 761932 - DNA, 19 bp, Mus musculus
  siRNA target sequence for MOR210-5 (NM_146300.1,810-828).
gtatctcacacctccaaat

SEQ ID NO: 761933 - DNA, 19 bp, Mus musculus
  siRNA target sequence for MOR210-5 (NM_146300.1,816-834).
cacacctccaaataatcct

SEQ ID NO: 761934 - DNA, 19 bp, Mus musculus
  siRNA target sequence for MOR210-5 (NM_146300.1,841-859).
cgtaaaattgcttcagtat

SEQ ID NO: 761935 - DNA, 19 bp, Mus musculus
  siRNA target sequence for MOR210-5 (NM_146300.1,892-910).
ctaatctattctttacgaa

SEQ ID NO: 761936 - DNA, 19 bp, Mus musculus
  siRNA target sequence for MOR210-5 (NM_146300.1,947-965).
gcaagcaaaaggttttact

SEQ ID NO: 761937 - DNA, 19 bp, Mus musculus
  siRNA target sequence for MOR202-36 (NM_146301.1,580-598).
gagattacagtccttatct

SEQ ID NO: 761938 - DNA, 19 bp, Mus musculus
  siRNA target sequence for MOR202-36 (NM_146301.1,631-649).
gttatcttaaacacttact

SEQ ID NO: 761939 - DNA, 19 bp, Mus musculus
  siRNA target sequence for MOR202-36 (NM_146301.1,904-922).
gttgttggaaaattaatga

SEQ ID NO: 761940 - DNA, 19 bp, Mus musculus
  siRNA target sequence for MOR202-36 (NM_146301.1,907-925).
gttggaaaattaatgactt

SEQ ID NO: 761941 - DNA, 19 bp, Mus musculus
  siRNA target sequence for MOR202-34 (NM_146303.1,20-38).
gcactaaggtgactacatt

SEQ ID NO: 761942 - DNA, 19 bp, Mus musculus
  siRNA target sequence for MOR202-34 (NM_146303.1,132-150).
gggcattatcgtgttgata

SEQ ID NO: 761943 - DNA, 19 bp, Mus musculus
  siRNA target sequence for MOR202-34 (NM_146303.1,133-151).
ggcattatcgtgttgatat

SEQ ID NO: 761944 - DNA, 19 bp, Mus musculus
  siRNA target sequence for MOR202-34 (NM_146303.1,509-527).
gtgctaatgtggttcatca

SEQ ID NO: 761945 - DNA, 19 bp, Mus musculus
  siRNA target sequence for MOR202-34 (NM_146303.1,592-610).
gtgctctttatcttagctt

SEQ ID NO: 761946 - DNA, 19 bp, Mus musculus
  siRNA target sequence for MOR202-34 (NM_146303.1,608-626).
cttcattcaatgtcttctt

SEQ ID NO: 761947 - DNA, 19 bp, Mus musculus
  siRNA target sequence for MOR202-34 (NM_146303.1,651-669).
ctatgcattcatatttatt

SEQ ID NO: 761948 - DNA, 19 bp, Mus musculus
  siRNA target sequence for MOR202-34 (NM_146303.1,655-673).
gcattcatatttattgcta

SEQ ID NO: 761949 - DNA, 19 bp, Mus musculus
  siRNA target sequence for MOR258-6 (NM_146304.1,139-157).
ctcattgttaccctgatta

SEQ ID NO: 761950 - DNA, 19 bp, Mus musculus
  siRNA target sequence for MOR258-6 (NM_146304.1,249-267).
gatgttggctcatctagta

SEQ ID NO: 761951 - DNA, 19 bp, Mus musculus
  siRNA target sequence for MOR258-6 (NM_146304.1,259-277).
catctagtaagcaagacta

SEQ ID NO: 761952 - DNA, 19 bp, Mus musculus
  siRNA target sequence for MOR258-6 (NM_146304.1,262-280).
ctagtaagcaagactaaga

SEQ ID NO: 761953 - DNA, 19 bp, Mus musculus
  siRNA target sequence for MOR258-6 (NM_146304.1,265-283).
gtaagcaagactaagacta

SEQ ID NO: 761954 - DNA, 19 bp, Mus musculus
  siRNA target sequence for MOR258-6 (NM_146304.1,293-311).
ctgggtgtgtgattcagat

SEQ ID NO: 761955 - DNA, 19 bp, Mus musculus
  siRNA target sequence for MOR258-6 (NM_146304.1,296-314).
ggtgtgtgattcagatgta

SEQ ID NO: 761956 - DNA, 19 bp, Mus musculus
  siRNA target sequence for MOR258-6 (NM_146304.1,299-317).
gtgtgattcagatgtatat

SEQ ID NO: 761957 - DNA, 19 bp, Mus musculus
  siRNA target sequence for MOR258-6 (NM_146304.1,301-319).
gtgattcagatgtatattt

SEQ ID NO: 761958 - DNA, 19 bp, Mus musculus
  siRNA target sequence for MOR258-6 (NM_146304.1,336-354).
cactgagacctggattttt

SEQ ID NO: 761959 - DNA, 19 bp, Mus musculus
  siRNA target sequence for MOR258-6 (NM_146304.1,417-435).
gagccaaaccctatgcata

SEQ ID NO: 761960 - DNA, 19 bp, Mus musculus
  siRNA target sequence for MOR258-6 (NM_146304.1,481-499).
gtctacacagtctttgcaa

SEQ ID NO: 761961 - DNA, 19 bp, Mus musculus
  siRNA target sequence for MOR258-6 (NM_146304.1,488-506).
cagtctttgcaatgaatct

SEQ ID NO: 761962 - DNA, 19 bp, Mus musculus
  siRNA target sequence for MOR258-6 (NM_146304.1,659-677).
catatgttcggatcttcat

SEQ ID NO: 761963 - DNA, 19 bp, Mus musculus
  siRNA target sequence for MOR258-6 (NM_146304.1,669-687).
gatcttcatagccattcta

SEQ ID NO: 761964 - DNA, 19 bp, Mus musculus
  siRNA target sequence for MOR105-10 (NM_146305.1,246-264).
ctctagcctgcttagtgaa

SEQ ID NO: 761965 - DNA, 19 bp, Mus musculus
  siRNA target sequence for MOR105-10 (NM_146305.1,262-280).
gaacgaaggagtattacgt

SEQ ID NO: 761966 - DNA, 19 bp, Mus musculus
  siRNA target sequence for MOR105-10 (NM_146305.1,323-341).
gcatcagtgaggtttgtct

SEQ ID NO: 761967 - DNA, 19 bp, Mus musculus
  siRNA target sequence for MOR105-10 (NM_146305.1,517-535).
caccttgagcatatcttct

SEQ ID NO: 761968 - DNA, 19 bp, Mus musculus
  siRNA target sequence for MOR105-10 (NM_146305.1,576-594).
ccacaccatcgtcatgatt

SEQ ID NO: 761969 - DNA, 19 bp, Mus musculus
  siRNA target sequence for MOR105-10 (NM_146305.1,612-630).
ccatgctgtggagataatt

SEQ ID NO: 761970 - DNA, 19 bp, Mus musculus
  siRNA target sequence for MOR105-10 (NM_146305.1,613-631).
catgctgtggagataatta

SEQ ID NO: 761971 - DNA, 19 bp, Mus musculus
  siRNA target sequence for MOR105-10 (NM_146305.1,651-669).
catgtcctatgttggtatt

SEQ ID NO: 761972 - DNA, 19 bp, Mus musculus
  siRNA target sequence for MOR105-10 (NM_146305.1,732-750).
ctcgcaccttactgtcttt

SEQ ID NO: 761973 - DNA, 19 bp, Mus musculus
  siRNA target sequence for MOR105-10 (NM_146305.1,796-814).
gctacctactccttgttct

SEQ ID NO: 761974 - DNA, 19 bp, Mus musculus
  siRNA target sequence for MOR105-10 (NM_146305.1,922-940).
ggtcaagctggcatcttaa

SEQ ID NO: 761975 - DNA, 19 bp, Mus musculus
  siRNA target sequence for MOR268-5 (NM_146306.1,445-463).
ctgtcttaccctatgatta

SEQ ID NO: 761976 - DNA, 19 bp, Mus musculus
  siRNA target sequence for MOR142-1 (NM_146308.1,85-103).
gggttgcttctttctatgt

SEQ ID NO: 761977 - DNA, 19 bp, Mus musculus
  siRNA target sequence for MOR142-1 (NM_146308.1,86-104).
ggttgcttctttctatgta

SEQ ID NO: 761978 - DNA, 19 bp, Mus musculus
  siRNA target sequence for MOR142-1 (NM_146308.1,247-265).
cagaatatccgcacacaaa

SEQ ID NO: 761979 - DNA, 19 bp, Mus musculus
  siRNA target sequence for MOR142-1 (NM_146308.1,256-274).
cgcacacaaagcaaattca

SEQ ID NO: 761980 - DNA, 19 bp, Mus musculus
  siRNA target sequence for MOR142-1 (NM_146308.1,262-280).
caaagcaaattcatctctt

SEQ ID NO: 761981 - DNA, 19 bp, Mus musculus
  siRNA target sequence for MOR142-1 (NM_146308.1,380-398).
gccatcccttgcactatgt

SEQ ID NO: 761982 - DNA, 19 bp, Mus musculus
  siRNA target sequence for MOR142-1 (NM_146308.1,397-415).
gtggtcatcatgaattctt

SEQ ID NO: 761983 - DNA, 19 bp, Mus musculus
  siRNA target sequence for MOR142-1 (NM_146308.1,436-454).
cttggatcatggatagtca

SEQ ID NO: 761984 - DNA, 19 bp, Mus musculus
  siRNA target sequence for MOR142-1 (NM_146308.1,477-495).
gaccttgactgtgttaaga

SEQ ID NO: 761985 - DNA, 19 bp, Mus musculus
  siRNA target sequence for MOR142-1 (NM_146308.1,504-522).
ctgtacaaacatggaaatt

SEQ ID NO: 761986 - DNA, 19 bp, Mus musculus
  siRNA target sequence for MOR142-1 (NM_146308.1,575-593).
cccttgttaataacattgt

SEQ ID NO: 761987 - DNA, 19 bp, Mus musculus
  siRNA target sequence for MOR142-1 (NM_146308.1,594-612).
gacatattctataaccata

SEQ ID NO: 761988 - DNA, 19 bp, Mus musculus
  siRNA target sequence for MOR142-1 (NM_146308.1,637-655).
gggattctattgtcttatt

SEQ ID NO: 761989 - DNA, 19 bp, Mus musculus
  siRNA target sequence for MOR142-1 (NM_146308.1,666-684).
ctcctccatcctaagaatt

SEQ ID NO: 761990 - DNA, 19 bp, Mus musculus
  siRNA target sequence for MOR142-1 (NM_146308.1,669-687).
ctccatcctaagaattcct

SEQ ID NO: 761991 - DNA, 19 bp, Mus musculus
  siRNA target sequence for MOR142-1 (NM_146308.1,763-781).
ggtctaggggtctacctta

SEQ ID NO: 761992 - DNA, 19 bp, Mus musculus
  siRNA target sequence for MOR142-1 (NM_146308.1,791-809).
ccacatcatcttctagaat

SEQ ID NO: 761993 - DNA, 19 bp, Mus musculus
  siRNA target sequence for MOR204-34 (NM_146311.1,198-216).
gagtcacttggcttccatt

SEQ ID NO: 761994 - DNA, 19 bp, Mus musculus
  siRNA target sequence for MOR204-34 (NM_146311.1,267-285).
ggtggagaggagcagtata

SEQ ID NO: 761995 - DNA, 19 bp, Mus musculus
  siRNA target sequence for MOR204-34 (NM_146311.1,271-289).
gagaggagcagtatatcct

SEQ ID NO: 761996 - DNA, 19 bp, Mus musculus
  siRNA target sequence for MOR204-34 (NM_146311.1,276-294).
gagcagtatatcctacatt

SEQ ID NO: 761997 - DNA, 19 bp, Mus musculus
  siRNA target sequence for MOR204-34 (NM_146311.1,580-598).
gataatagtgtcctcataa

SEQ ID NO: 761998 - DNA, 19 bp, Mus musculus
  siRNA target sequence for MOR204-34 (NM_146311.1,614-632).
ctactggcactattattgt

SEQ ID NO: 761999 - DNA, 19 bp, Mus musculus
  siRNA target sequence for MOR204-34 (NM_146311.1,617-635).
ctggcactattattgtaat

SEQ ID NO: 762000 - DNA, 19 bp, Mus musculus
  siRNA target sequence for MOR204-34 (NM_146311.1,619-637).
ggcactattattgtaatca

SEQ ID NO: 762001 - DNA, 19 bp, Mus musculus
  siRNA target sequence for MOR40-13 (NM_146312.1,9-27).
gtctctcaaagccttcaat

SEQ ID NO: 762002 - DNA, 19 bp, Mus musculus
  siRNA target sequence for MOR40-13 (NM_146312.1,96-114).
gctctccctaccatttact

SEQ ID NO: 762003 - DNA, 19 bp, Mus musculus
  siRNA target sequence for MOR40-13 (NM_146312.1,137-155).
ggacaaacgtgctcattct

SEQ ID NO: 762004 - DNA, 19 bp, Mus musculus
  siRNA target sequence for MOR40-13 (NM_146312.1,140-158).
caaacgtgctcattctcat

SEQ ID NO: 762005 - DNA, 19 bp, Mus musculus
  siRNA target sequence for MOR40-13 (NM_146312.1,403-421).
cctctccgctattcatcaa

SEQ ID NO: 762006 - DNA, 19 bp, Mus musculus
  siRNA target sequence for MOR40-13 (NM_146312.1,404-422).
ctctccgctattcatcaat

SEQ ID NO: 762007 - DNA, 19 bp, Mus musculus
  siRNA target sequence for MOR40-13 (NM_146312.1,406-424).
ctccgctattcatcaatta

SEQ ID NO: 762008 - DNA, 19 bp, Mus musculus
  siRNA target sequence for MOR40-13 (NM_146312.1,408-426).
ccgctattcatcaattatt

SEQ ID NO: 762009 - DNA, 19 bp, Mus musculus
  siRNA target sequence for MOR40-13 (NM_146312.1,409-427).
cgctattcatcaattatta

SEQ ID NO: 762010 - DNA, 19 bp, Mus musculus
  siRNA target sequence for MOR40-13 (NM_146312.1,441-459).
cttaaaagccacactgttt

SEQ ID NO: 762011 - DNA, 19 bp, Mus musculus
  siRNA target sequence for MOR40-13 (NM_146312.1,505-523).
gcagcccagcggaattatt

SEQ ID NO: 762012 - DNA, 19 bp, Mus musculus
  siRNA target sequence for MOR40-13 (NM_146312.1,508-526).
gcccagcggaattattgtt

SEQ ID NO: 762013 - DNA, 19 bp, Mus musculus
  siRNA target sequence for MOR40-13 (NM_146312.1,511-529).
cagcggaattattgttcaa

SEQ ID NO: 762014 - DNA, 19 bp, Mus musculus
  siRNA target sequence for MOR40-13 (NM_146312.1,513-531).
gcggaattattgttcaaga

SEQ ID NO: 762015 - DNA, 19 bp, Mus musculus
  siRNA target sequence for MOR40-13 (NM_146312.1,570-588).
cacaagcctggcatgtgat

SEQ ID NO: 762016 - DNA, 19 bp, Mus musculus
  siRNA target sequence for MOR40-13 (NM_146312.1,586-604).
gatgataggaggccaaata

SEQ ID NO: 762017 - DNA, 19 bp, Mus musculus
  siRNA target sequence for MOR40-13 (NM_146312.1,589-607).
gataggaggccaaatagca

SEQ ID NO: 762018 - DNA, 19 bp, Mus musculus
  siRNA target sequence for MOR40-13 (NM_146312.1,605-623).
gcatttgccagttaatcct

SEQ ID NO: 762019 - DNA, 19 bp, Mus musculus
  siRNA target sequence for MOR40-13 (NM_146312.1,644-662).
gtgacctgggtctcataat

SEQ ID NO: 762020 - DNA, 19 bp, Mus musculus
  siRNA target sequence for MOR40-13 (NM_146312.1,655-673).
ctcataatattgtcatata

SEQ ID NO: 762021 - DNA, 19 bp, Mus musculus
  siRNA target sequence for MOR40-13 (NM_146312.1,781-799).
gttgtagtgatttcagtaa

SEQ ID NO: 762022 - DNA, 19 bp, Mus musculus
  siRNA target sequence for MOR40-13 (NM_146312.1,824-842).
ccttgatcccagttttgct

SEQ ID NO: 762023 - DNA, 19 bp, Mus musculus
  siRNA target sequence for MOR40-13 (NM_146312.1,832-850).
ccagttttgctcaatgtga

SEQ ID NO: 762024 - DNA, 19 bp, Mus musculus
  siRNA target sequence for MOR40-13 (NM_146312.1,833-851).
cagttttgctcaatgtgat

SEQ ID NO: 762025 - DNA, 19 bp, Mus musculus
  siRNA target sequence for MOR40-13 (NM_146312.1,938-956).
gtcggagcttacaagaaaa

SEQ ID NO: 762026 - DNA, 19 bp, Mus musculus
  siRNA target sequence for MOR24-3 (NM_146314.1,62-80).
gcctagaacaccttcatgt

SEQ ID NO: 762027 - DNA, 19 bp, Mus musculus
  siRNA target sequence for MOR24-3 (NM_146314.1,261-279).
ctggatggcagctcatgat

SEQ ID NO: 762028 - DNA, 19 bp, Mus musculus
  siRNA target sequence for MOR24-3 (NM_146314.1,263-281).
ggatggcagctcatgatat

SEQ ID NO: 762029 - DNA, 19 bp, Mus musculus
  siRNA target sequence for MOR24-3 (NM_146314.1,264-282).
gatggcagctcatgatatt

SEQ ID NO: 762030 - DNA, 19 bp, Mus musculus
  siRNA target sequence for MOR24-3 (NM_146314.1,268-286).
gcagctcatgatattacct

SEQ ID NO: 762031 - DNA, 19 bp, Mus musculus
  siRNA target sequence for MOR24-3 (NM_146314.1,397-415).
cgccatgccacaattctca

SEQ ID NO: 762032 - DNA, 19 bp, Mus musculus
  siRNA target sequence for MOR24-3 (NM_146314.1,650-668).
ccatctcctatgttctgat

SEQ ID NO: 762033 - DNA, 19 bp, Mus musculus
  siRNA target sequence for MOR24-3 (NM_146314.1,696-714).
ccgagaagcaagtcttaaa

SEQ ID NO: 762034 - DNA, 19 bp, Mus musculus
  siRNA target sequence for MOR24-3 (NM_146314.1,815-833).
cccgaactcatattctcat

SEQ ID NO: 762035 - DNA, 19 bp, Mus musculus
  siRNA target sequence for MOR24-3 (NM_146314.1,816-834).
ccgaactcatattctcata

SEQ ID NO: 762036 - DNA, 19 bp, Mus musculus
  siRNA target sequence for MOR24-3 (NM_146314.1,829-847).
ctcatagccaatatgtatt

SEQ ID NO: 762037 - DNA, 19 bp, Mus musculus
  siRNA target sequence for MOR24-3 (NM_146314.1,836-854).
ccaatatgtatttattggt

SEQ ID NO: 762038 - DNA, 19 bp, Mus musculus
  siRNA target sequence for MOR24-3 (NM_146314.1,893-911).
ccaagaaaattcgagatta

SEQ ID NO: 762039 - DNA, 19 bp, Mus musculus
  siRNA target sequence for MOR24-3 (NM_146314.1,897-915).
gaaaattcgagattatgtt

SEQ ID NO: 762040 - DNA, 19 bp, Mus musculus
  siRNA target sequence for MOR24-3 (NM_146314.1,904-922).
cgagattatgttcttaata

SEQ ID NO: 762041 - DNA, 19 bp, Mus musculus
  siRNA target sequence for MOR115-4 (NM_146318.1,66-84).
ggtggcagttttcactttt

SEQ ID NO: 762042 - DNA, 19 bp, Mus musculus
  siRNA target sequence for MOR115-4 (NM_146318.1,234-252).
ggtcctggtcagcattaca

SEQ ID NO: 762043 - DNA, 19 bp, Mus musculus
  siRNA target sequence for MOR115-4 (NM_146318.1,245-263).
gcattacaacgggaaacaa

SEQ ID NO: 762044 - DNA, 19 bp, Mus musculus
  siRNA target sequence for MOR115-4 (NM_146318.1,251-269).
caacgggaaacaagagtat

SEQ ID NO: 762045 - DNA, 19 bp, Mus musculus
  siRNA target sequence for MOR115-4 (NM_146318.1,256-274).
ggaaacaagagtattagct

SEQ ID NO: 762046 - DNA, 19 bp, Mus musculus
  siRNA target sequence for MOR115-4 (NM_146318.1,446-464).
gtgggttgatggccattat

SEQ ID NO: 762047 - DNA, 19 bp, Mus musculus
  siRNA target sequence for MOR115-4 (NM_146318.1,450-468).
gttgatggccattatacct

SEQ ID NO: 762048 - DNA, 19 bp, Mus musculus
  siRNA target sequence for MOR115-4 (NM_146318.1,503-521).
catccaacaggctaaatca

SEQ ID NO: 762049 - DNA, 19 bp, Mus musculus
  siRNA target sequence for MOR115-4 (NM_146318.1,506-524).
ccaacaggctaaatcatta

SEQ ID NO: 762050 - DNA, 19 bp, Mus musculus
  siRNA target sequence for MOR115-4 (NM_146318.1,507-525).
caacaggctaaatcattat

SEQ ID NO: 762051 - DNA, 19 bp, Mus musculus
  siRNA target sequence for MOR115-4 (NM_146318.1,567-585).
cacaagcctcattgaaaaa

SEQ ID NO: 762052 - DNA, 19 bp, Mus musculus
  siRNA target sequence for MOR115-4 (NM_146318.1,569-587).
caagcctcattgaaaaagt

SEQ ID NO: 762053 - DNA, 19 bp, Mus musculus
  siRNA target sequence for MOR115-4 (NM_146318.1,611-629).
ccctggtggtgactctaat

SEQ ID NO: 762054 - DNA, 19 bp, Mus musculus
  siRNA target sequence for MOR115-4 (NM_146318.1,790-808).
gtagggggcacattcgata

SEQ ID NO: 762055 - DNA, 19 bp, Mus musculus
  siRNA target sequence for MOR115-4 (NM_146318.1,795-813).
gggcacattcgataaagga

SEQ ID NO: 762056 - DNA, 19 bp, Mus musculus
  siRNA target sequence for MOR264-19 (NM_146320.1,7-25).
cagactccgactaaatcct

SEQ ID NO: 762057 - DNA, 19 bp, Mus musculus
  siRNA target sequence for MOR264-19 (NM_146320.1,9-27).
gactccgactaaatccttt

SEQ ID NO: 762058 - DNA, 19 bp, Mus musculus
  siRNA target sequence for MOR264-19 (NM_146320.1,14-32).
cgactaaatcctttctaca

SEQ ID NO: 762059 - DNA, 19 bp, Mus musculus
  siRNA target sequence for MOR264-19 (NM_146320.1,17-35).
ctaaatcctttctacagat

SEQ ID NO: 762060 - DNA, 19 bp, Mus musculus
  siRNA target sequence for MOR264-19 (NM_146320.1,23-41).
cctttctacagatgaaaca

SEQ ID NO: 762061 - DNA, 19 bp, Mus musculus
  siRNA target sequence for MOR264-19 (NM_146320.1,52-70).
gaggcagaagtcaacattt

SEQ ID NO: 762062 - DNA, 19 bp, Mus musculus
  siRNA target sequence for MOR264-19 (NM_146320.1,54-72).
ggcagaagtcaacatttct

SEQ ID NO: 762063 - DNA, 19 bp, Mus musculus
  siRNA target sequence for MOR264-19 (NM_146320.1,55-73).
gcagaagtcaacatttcta

SEQ ID NO: 762064 - DNA, 19 bp, Mus musculus
  siRNA target sequence for MOR264-19 (NM_146320.1,172-190).
ggcaattgcctcattatat

SEQ ID NO: 762065 - DNA, 19 bp, Mus musculus
  siRNA target sequence for MOR264-19 (NM_146320.1,180-198).
cctcattatattaataact

SEQ ID NO: 762066 - DNA, 19 bp, Mus musculus
  siRNA target sequence for MOR264-19 (NM_146320.1,181-199).
ctcattatattaataacta

SEQ ID NO: 762067 - DNA, 19 bp, Mus musculus
  siRNA target sequence for MOR264-19 (NM_146320.1,197-215).
ctaggcttgaccatacatt

SEQ ID NO: 762068 - DNA, 19 bp, Mus musculus
  siRNA target sequence for MOR264-19 (NM_146320.1,201-219).
gcttgaccatacattgcat

SEQ ID NO: 762069 - DNA, 19 bp, Mus musculus
  siRNA target sequence for MOR264-19 (NM_146320.1,202-220).
cttgaccatacattgcata

SEQ ID NO: 762070 - DNA, 19 bp, Mus musculus
  siRNA target sequence for MOR264-19 (NM_146320.1,308-326).
ggacacaggatagaaacat

SEQ ID NO: 762071 - DNA, 19 bp, Mus musculus
  siRNA target sequence for MOR264-19 (NM_146320.1,497-515).
ggctaagtggcattccaat

SEQ ID NO: 762072 - DNA, 19 bp, Mus musculus
  siRNA target sequence for MOR264-19 (NM_146320.1,498-516).
gctaagtggcattccaatt

SEQ ID NO: 762073 - DNA, 19 bp, Mus musculus
  siRNA target sequence for MOR264-19 (NM_146320.1,669-687).
ggctgcattcccctttata

SEQ ID NO: 762074 - DNA, 19 bp, Mus musculus
  siRNA target sequence for MOR264-19 (NM_146320.1,809-827).
ggtctggcaccattacata

SEQ ID NO: 762075 - DNA, 19 bp, Mus musculus
  siRNA target sequence for MOR264-19 (NM_146320.1,812-830).
ctggcaccattacatactt

SEQ ID NO: 762076 - DNA, 19 bp, Mus musculus
  siRNA target sequence for MOR264-19 (NM_146320.1,845-863).
cgcattcccctggaattga

SEQ ID NO: 762077 - DNA, 19 bp, Mus musculus
  siRNA target sequence for MOR264-19 (NM_146320.1,846-864).
gcattcccctggaattgat

SEQ ID NO: 762078 - DNA, 19 bp, Mus musculus
  siRNA target sequence for MOR264-19 (NM_146320.1,847-865).
cattcccctggaattgata

SEQ ID NO: 762079 - DNA, 19 bp, Mus musculus
  siRNA target sequence for MOR264-19 (NM_146320.1,851-869).
cccctggaattgataaatt

SEQ ID NO: 762080 - DNA, 19 bp, Mus musculus
  siRNA target sequence for MOR264-19 (NM_146320.1,854-872).
ctggaattgataaattgct

SEQ ID NO: 762081 - DNA, 19 bp, Mus musculus
  siRNA target sequence for MOR264-19 (NM_146320.1,939-957).
ggtggttgttgctctaaga

SEQ ID NO: 762082 - DNA, 19 bp, Mus musculus
  siRNA target sequence for MOR183-9 (NM_146321.1,4-22).
gaagacgggaatacaacat

SEQ ID NO: 762083 - DNA, 19 bp, Mus musculus
  siRNA target sequence for MOR183-9 (NM_146321.1,44-62).
cagggctcacagatcatca

SEQ ID NO: 762084 - DNA, 19 bp, Mus musculus
  siRNA target sequence for MOR183-9 (NM_146321.1,84-102).
cctactattcttgatgata

SEQ ID NO: 762085 - DNA, 19 bp, Mus musculus
  siRNA target sequence for MOR183-9 (NM_146321.1,85-103).
ctactattcttgatgatat

SEQ ID NO: 762086 - DNA, 19 bp, Mus musculus
  siRNA target sequence for MOR183-9 (NM_146321.1,226-244).
gcagtgactcctaatatgt

SEQ ID NO: 762087 - DNA, 19 bp, Mus musculus
  siRNA target sequence for MOR183-9 (NM_146321.1,229-247).
gtgactcctaatatgttgt

SEQ ID NO: 762088 - DNA, 19 bp, Mus musculus
  siRNA target sequence for MOR183-9 (NM_146321.1,231-249).
gactcctaatatgttgttt

SEQ ID NO: 762089 - DNA, 19 bp, Mus musculus
  siRNA target sequence for MOR183-9 (NM_146321.1,233-251).
ctcctaatatgttgtttga

SEQ ID NO: 762090 - DNA, 19 bp, Mus musculus
  siRNA target sequence for MOR183-9 (NM_146321.1,235-253).
cctaatatgttgtttgact

SEQ ID NO: 762091 - DNA, 19 bp, Mus musculus
  siRNA target sequence for MOR183-9 (NM_146321.1,320-338).
gcgggaccacagaatgctt

SEQ ID NO: 762092 - DNA, 19 bp, Mus musculus
  siRNA target sequence for MOR183-9 (NM_146321.1,423-441).
catccgcctactagtttca

SEQ ID NO: 762093 - DNA, 19 bp, Mus musculus
  siRNA target sequence for MOR183-9 (NM_146321.1,426-444).
ccgcctactagtttcagta

SEQ ID NO: 762094 - DNA, 19 bp, Mus musculus
  siRNA target sequence for MOR183-9 (NM_146321.1,427-445).
cgcctactagtttcagtat

SEQ ID NO: 762095 - DNA, 19 bp, Mus musculus
  siRNA target sequence for MOR183-9 (NM_146321.1,430-448).
ctactagtttcagtattca

SEQ ID NO: 762096 - DNA, 19 bp, Mus musculus
  siRNA target sequence for MOR183-9 (NM_146321.1,463-481).
cattccttgtttcatgtat

SEQ ID NO: 762097 - DNA, 19 bp, Mus musculus
  siRNA target sequence for MOR183-9 (NM_146321.1,536-554).
gtgatattataccattgta

SEQ ID NO: 762098 - DNA, 19 bp, Mus musculus
  siRNA target sequence for MOR183-9 (NM_146321.1,580-598).
cttaatctcctattagtat

SEQ ID NO: 762099 - DNA, 19 bp, Mus musculus
  siRNA target sequence for MOR183-9 (NM_146321.1,650-668).
catatacactcgtactgtt

SEQ ID NO: 762100 - DNA, 19 bp, Mus musculus
  siRNA target sequence for MOR183-9 (NM_146321.1,656-674).
cactcgtactgttcacaat

SEQ ID NO: 762101 - DNA, 19 bp, Mus musculus
  siRNA target sequence for MOR183-9 (NM_146321.1,658-676).
ctcgtactgttcacaattt

SEQ ID NO: 762102 - DNA, 19 bp, Mus musculus
  siRNA target sequence for MOR183-9 (NM_146321.1,660-678).
cgtactgttcacaatttta

SEQ ID NO: 762103 - DNA, 19 bp, Mus musculus
  siRNA target sequence for MOR183-9 (NM_146321.1,684-702).
gaagtctctccaaggtata

SEQ ID NO: 762104 - DNA, 19 bp, Mus musculus
  siRNA target sequence for MOR183-9 (NM_146321.1,781-799).
cttcctgcatctcaacaaa

SEQ ID NO: 762105 - DNA, 19 bp, Mus musculus
  siRNA target sequence for MOR108-4 (NM_146324.1,279-297).
gtttttggtcagcatctta

SEQ ID NO: 762106 - DNA, 19 bp, Mus musculus
  siRNA target sequence for MOR108-4 (NM_146324.1,304-322).
gacaaatcgatctcctata

SEQ ID NO: 762107 - DNA, 19 bp, Mus musculus
  siRNA target sequence for MOR108-4 (NM_146324.1,306-324).
caaatcgatctcctataat

SEQ ID NO: 762108 - DNA, 19 bp, Mus musculus
  siRNA target sequence for MOR108-4 (NM_146324.1,326-344).
cttgtgctgcccaactatt

SEQ ID NO: 762109 - DNA, 19 bp, Mus musculus
  siRNA target sequence for MOR108-4 (NM_146324.1,362-380).
gctcaacagagtttttcct

SEQ ID NO: 762110 - DNA, 19 bp, Mus musculus
  siRNA target sequence for MOR108-4 (NM_146324.1,945-963).
ggatctcgtgcgaaaaaaa

SEQ ID NO: 762111 - DNA, 19 bp, Mus musculus
  siRNA target sequence for MOR25-1 (NM_146325.1,64-82).
ctggagaccttgcacatat

SEQ ID NO: 762112 - DNA, 19 bp, Mus musculus
  siRNA target sequence for MOR25-1 (NM_146325.1,217-235).
ctggttctgtctacttcta

SEQ ID NO: 762113 - DNA, 19 bp, Mus musculus
  siRNA target sequence for MOR25-1 (NM_146325.1,242-260).
ccaaacttctggcgatttt

SEQ ID NO: 762114 - DNA, 19 bp, Mus musculus
  siRNA target sequence for MOR25-1 (NM_146325.1,293-311).
cctgcttatgccaaatgtt

SEQ ID NO: 762115 - DNA, 19 bp, Mus musculus
  siRNA target sequence for MOR25-1 (NM_146325.1,475-493).
ggacccctaccacttatga

SEQ ID NO: 762116 - DNA, 19 bp, Mus musculus
  siRNA target sequence for MOR25-1 (NM_146325.1,476-494).
gacccctaccacttatgat

SEQ ID NO: 762117 - DNA, 19 bp, Mus musculus
  siRNA target sequence for MOR25-1 (NM_146325.1,501-519).
gcggttgcctctttacaaa

SEQ ID NO: 762118 - DNA, 19 bp, Mus musculus
  siRNA target sequence for MOR25-1 (NM_146325.1,502-520).
cggttgcctctttacaaaa

SEQ ID NO: 762119 - DNA, 19 bp, Mus musculus
  siRNA target sequence for MOR25-1 (NM_146325.1,575-593).
gtggtgacagcagagttaa

SEQ ID NO: 762120 - DNA, 19 bp, Mus musculus
  siRNA target sequence for MOR25-1 (NM_146325.1,585-603).
cagagttaacaatgtctat

SEQ ID NO: 762121 - DNA, 19 bp, Mus musculus
  siRNA target sequence for MOR25-1 (NM_146325.1,655-673).
gcctcctatgtgatgattt

SEQ ID NO: 762122 - DNA, 19 bp, Mus musculus
  siRNA target sequence for MOR25-1 (NM_146325.1,698-716).
ctcccgaggctagacttaa

SEQ ID NO: 762123 - DNA, 19 bp, Mus musculus
  siRNA target sequence for MOR25-1 (NM_146325.1,739-757).
catatctgcgccattctga

SEQ ID NO: 762124 - DNA, 19 bp, Mus musculus
  siRNA target sequence for MOR25-1 (NM_146325.1,746-764).
gcgccattctgattttcta

SEQ ID NO: 762125 - DNA, 19 bp, Mus musculus
  siRNA target sequence for MOR224-9 (NM_146330.1,110-128).
gtaccctagtgggaaatgt

SEQ ID NO: 762126 - DNA, 19 bp, Mus musculus
  siRNA target sequence for MOR224-9 (NM_146330.1,120-138).
gggaaatgtatctatcctt

SEQ ID NO: 762127 - DNA, 19 bp, Mus musculus
  siRNA target sequence for MOR224-9 (NM_146330.1,189-207).
ggggaacttgtccgtattt

SEQ ID NO: 762128 - DNA, 19 bp, Mus musculus
  siRNA target sequence for MOR224-9 (NM_146330.1,259-277).
ggacttagcagacttatct

SEQ ID NO: 762129 - DNA, 19 bp, Mus musculus
  siRNA target sequence for MOR224-9 (NM_146330.1,326-344).
gcattgagtgctttctgta

SEQ ID NO: 762130 - DNA, 19 bp, Mus musculus
  siRNA target sequence for MOR224-9 (NM_146330.1,438-456).
gggcacatggctattagga

SEQ ID NO: 762131 - DNA, 19 bp, Mus musculus
  siRNA target sequence for MOR224-9 (NM_146330.1,439-457).
ggcacatggctattaggat

SEQ ID NO: 762132 - DNA, 19 bp, Mus musculus
  siRNA target sequence for MOR224-9 (NM_146330.1,443-461).
catggctattaggatgttt

SEQ ID NO: 762133 - DNA, 19 bp, Mus musculus
  siRNA target sequence for MOR224-9 (NM_146330.1,462-480).
ccactccagcgtcttaact

SEQ ID NO: 762134 - DNA, 19 bp, Mus musculus
  siRNA target sequence for MOR224-9 (NM_146330.1,463-481).
cactccagcgtcttaactt

SEQ ID NO: 762135 - DNA, 19 bp, Mus musculus
  siRNA target sequence for MOR224-9 (NM_146330.1,586-604).
cagagagtgagcttcacta

SEQ ID NO: 762136 - DNA, 19 bp, Mus musculus
  siRNA target sequence for MOR224-9 (NM_146330.1,588-606).
gagagtgagcttcactaat

SEQ ID NO: 762137 - DNA, 19 bp, Mus musculus
  siRNA target sequence for MOR224-9 (NM_146330.1,590-608).
gagtgagcttcactaatgt

SEQ ID NO: 762138 - DNA, 19 bp, Mus musculus
  siRNA target sequence for MOR224-9 (NM_146330.1,650-668).
cctatacacgaatcacaat

SEQ ID NO: 762139 - DNA, 19 bp, Mus musculus
  siRNA target sequence for MOR224-9 (NM_146330.1,753-771).
ctatggacctataatcact

SEQ ID NO: 762140 - DNA, 19 bp, Mus musculus
  siRNA target sequence for MOR224-9 (NM_146330.1,804-822).
gggaactgtcgtgcaaatt

SEQ ID NO: 762141 - DNA, 19 bp, Mus musculus
  siRNA target sequence for MOR224-9 (NM_146330.1,814-832).
gtgcaaattctgatgaact

SEQ ID NO: 762142 - DNA, 19 bp, Mus musculus
  siRNA target sequence for MOR224-9 (NM_146330.1,888-906).
gatagccctgaaaaagata

SEQ ID NO: 762143 - DNA, 19 bp, Mus musculus
  siRNA target sequence for MOR256-48 (NM_146332.1,750-768).
gttctatggcccaggtatt

SEQ ID NO: 762144 - DNA, 19 bp, Mus musculus
  siRNA target sequence for MOR256-48 (NM_146332.1,757-775).
ggcccaggtattagtatgt

SEQ ID NO: 762145 - DNA, 19 bp, Mus musculus
  siRNA target sequence for MOR256-48 (NM_146332.1,758-776).
gcccaggtattagtatgta

SEQ ID NO: 762146 - DNA, 19 bp, Mus musculus
  siRNA target sequence for MOR256-48 (NM_146332.1,759-777).
cccaggtattagtatgtat

SEQ ID NO: 762147 - DNA, 19 bp, Mus musculus
  siRNA target sequence for MOR170-11 (NM_146336.1,144-162).
ggttcttatttgtctgaat

SEQ ID NO: 762148 - DNA, 19 bp, Mus musculus
  siRNA target sequence for MOR170-11 (NM_146336.1,384-402).
ctgtaagccattggtatat

SEQ ID NO: 762149 - DNA, 19 bp, Mus musculus
  siRNA target sequence for MOR170-11 (NM_146336.1,426-444).
gtgttccctgctaatgatt

SEQ ID NO: 762150 - DNA, 19 bp, Mus musculus
  siRNA target sequence for MOR170-11 (NM_146336.1,481-499).
catactggctgcatgatta

SEQ ID NO: 762151 - DNA, 19 bp, Mus musculus
  siRNA target sequence for MOR170-11 (NM_146336.1,491-509).
gcatgattaggctcaagtt

SEQ ID NO: 762152 - DNA, 19 bp, Mus musculus
  siRNA target sequence for MOR130-1 (NM_146338.1,20-38).
gtggggtgtccgagttctt

SEQ ID NO: 762153 - DNA, 19 bp, Mus musculus
  siRNA target sequence for MOR130-1 (NM_146338.1,487-505).
ctgactcgcctcttgttct

SEQ ID NO: 762154 - DNA, 19 bp, Mus musculus
  siRNA target sequence for MOR130-1 (NM_146338.1,607-625).
ggcgcattgcccatcatca

SEQ ID NO: 762155 - DNA, 19 bp, Mus musculus
  siRNA target sequence for MOR130-1 (NM_146338.1,761-779).
cactgattggggtgtactt

SEQ ID NO: 762156 - DNA, 19 bp, Mus musculus
  siRNA target sequence for MOR130-1 (NM_146338.1,763-781).
ctgattggggtgtacttca

SEQ ID NO: 762157 - DNA, 19 bp, Mus musculus
  siRNA target sequence for MOR228-2 (NM_146343.1,395-413).
gcattatgaaccgaaatgt

SEQ ID NO: 762158 - DNA, 19 bp, Mus musculus
  siRNA target sequence for MOR228-2 (NM_146343.1,573-591).
ccttattggcctactgatt

SEQ ID NO: 762159 - DNA, 19 bp, Mus musculus
  siRNA target sequence for MOR266-9 (NM_146344.1,65-83).
ccaatgttccggaatttca

SEQ ID NO: 762160 - DNA, 19 bp, Mus musculus
  siRNA target sequence for MOR266-9 (NM_146344.1,66-84).
caatgttccggaatttcaa

SEQ ID NO: 762161 - DNA, 19 bp, Mus musculus
  siRNA target sequence for MOR266-9 (NM_146344.1,133-151).
ggcaataccaccattatct

SEQ ID NO: 762162 - DNA, 19 bp, Mus musculus
  siRNA target sequence for MOR266-9 (NM_146344.1,206-224).
gtctgtcatttgtggaaat

SEQ ID NO: 762163 - DNA, 19 bp, Mus musculus
  siRNA target sequence for MOR266-9 (NM_146344.1,484-502).
gagcttactgcctttactt

SEQ ID NO: 762164 - DNA, 19 bp, Mus musculus
  siRNA target sequence for MOR266-9 (NM_146344.1,487-505).
cttactgcctttactttca

SEQ ID NO: 762165 - DNA, 19 bp, Mus musculus
  siRNA target sequence for MOR266-9 (NM_146344.1,518-536).
gtagacaccgccttgaaat

SEQ ID NO: 762166 - DNA, 19 bp, Mus musculus
  siRNA target sequence for MOR266-9 (NM_146344.1,521-539).
gacaccgccttgaaatcaa

SEQ ID NO: 762167 - DNA, 19 bp, Mus musculus
  siRNA target sequence for MOR266-9 (NM_146344.1,551-569).
gtgatgtggctcctattat

SEQ ID NO: 762168 - DNA, 19 bp, Mus musculus
  siRNA target sequence for MOR266-9 (NM_146344.1,607-625).
gtcctctatgtagttagta

SEQ ID NO: 762169 - DNA, 19 bp, Mus musculus
  siRNA target sequence for MOR266-9 (NM_146344.1,763-781).
ctacaatatggctgttgta

SEQ ID NO: 762170 - DNA, 19 bp, Mus musculus
  siRNA target sequence for MOR266-9 (NM_146344.1,773-791).
gctgttgtagcctagtgta

SEQ ID NO: 762171 - DNA, 19 bp, Mus musculus
  siRNA target sequence for MOR266-9 (NM_146344.1,852-870).
ctttggtactccattacta

SEQ ID NO: 762172 - DNA, 19 bp, Mus musculus
  siRNA target sequence for MOR266-9 (NM_146344.1,910-928).
gatgctttgaggaactctt

SEQ ID NO: 762173 - DNA, 19 bp, Mus musculus
  siRNA target sequence for MOR266-9 (NM_146344.1,914-932).
ctttgaggaactctttctt

SEQ ID NO: 762174 - DNA, 19 bp, Mus musculus
  siRNA target sequence for MOR135-28 (NM_146346.1,42-60).
cctgggcttgcctattgaa

SEQ ID NO: 762175 - DNA, 19 bp, Mus musculus
  siRNA target sequence for MOR135-28 (NM_146346.1,62-80).
cacaccagcaagacctttt

SEQ ID NO: 762176 - DNA, 19 bp, Mus musculus
  siRNA target sequence for MOR135-28 (NM_146346.1,66-84).
ccagcaagaccttttctat

SEQ ID NO: 762177 - DNA, 19 bp, Mus musculus
  siRNA target sequence for MOR135-28 (NM_146346.1,381-399).
cttccccctacactatact

SEQ ID NO: 762178 - DNA, 19 bp, Mus musculus
  siRNA target sequence for MOR135-28 (NM_146346.1,498-516).
ctccttctgtgctaacaat

SEQ ID NO: 762179 - DNA, 19 bp, Mus musculus
  siRNA target sequence for MOR135-28 (NM_146346.1,543-561).
gtcagctcttctgaagtta

SEQ ID NO: 762180 - DNA, 19 bp, Mus musculus
  siRNA target sequence for MOR135-28 (NM_146346.1,569-587).
ctgacattcagatcaataa

SEQ ID NO: 762181 - DNA, 19 bp, Mus musculus
  siRNA target sequence for MOR135-28 (NM_146346.1,579-597).
gatcaataagttgatgata

SEQ ID NO: 762182 - DNA, 19 bp, Mus musculus
  siRNA target sequence for MOR135-28 (NM_146346.1,603-621).
cttgggaggacttgtcatt

SEQ ID NO: 762183 - DNA, 19 bp, Mus musculus
  siRNA target sequence for MOR135-28 (NM_146346.1,606-624).
gggaggacttgtcattatt

SEQ ID NO: 762184 - DNA, 19 bp, Mus musculus
  siRNA target sequence for MOR135-28 (NM_146346.1,628-646).
ccattcctgctgatatttt

SEQ ID NO: 762185 - DNA, 19 bp, Mus musculus
  siRNA target sequence for MOR135-28 (NM_146346.1,636-654).
gctgatattttcatcctat

SEQ ID NO: 762186 - DNA, 19 bp, Mus musculus
  siRNA target sequence for MOR135-28 (NM_146346.1,647-665).
catcctatgcacgaatagt

SEQ ID NO: 762187 - DNA, 19 bp, Mus musculus
  siRNA target sequence for MOR135-28 (NM_146346.1,678-696).
caaggtcccctcttctaga

SEQ ID NO: 762188 - DNA, 19 bp, Mus musculus
  siRNA target sequence for MOR135-28 (NM_146346.1,921-939).
gcagatggctaacttttct

SEQ ID NO: 762189 - DNA, 19 bp, Mus musculus
  siRNA target sequence for MOR264-18 (NM_146348.1,120-138).
gtacttgattatgctaatt

SEQ ID NO: 762190 - DNA, 19 bp, Mus musculus
  siRNA target sequence for MOR264-18 (NM_146348.1,123-141).
cttgattatgctaattgca

SEQ ID NO: 762191 - DNA, 19 bp, Mus musculus
  siRNA target sequence for MOR264-18 (NM_146348.1,165-183).
caagcttgaccctacacta

SEQ ID NO: 762192 - DNA, 19 bp, Mus musculus
  siRNA target sequence for MOR264-18 (NM_146348.1,259-277).
gttctgtacagcatttgga

SEQ ID NO: 762193 - DNA, 19 bp, Mus musculus
  siRNA target sequence for MOR264-18 (NM_146348.1,340-358).
gcagccactgaaagtattt

SEQ ID NO: 762194 - DNA, 19 bp, Mus musculus
  siRNA target sequence for MOR264-18 (NM_146348.1,420-438).
ggtcatgagtccaagaaaa

SEQ ID NO: 762195 - DNA, 19 bp, Mus musculus
  siRNA target sequence for MOR264-18 (NM_146348.1,596-614).
ctgttattgagatgtatgt

SEQ ID NO: 762196 - DNA, 19 bp, Mus musculus
  siRNA target sequence for MOR264-18 (NM_146348.1,598-616).
gttattgagatgtatgtct

SEQ ID NO: 762197 - DNA, 19 bp, Mus musculus
  siRNA target sequence for MOR264-18 (NM_146348.1,640-658).
gcaatcccttttatactaa

SEQ ID NO: 762198 - DNA, 19 bp, Mus musculus
  siRNA target sequence for MOR264-18 (NM_146348.1,718-736).
cgatcgaaagccttcttca

SEQ ID NO: 762199 - DNA, 19 bp, Mus musculus
  siRNA target sequence for MOR264-18 (NM_146348.1,776-794).
cccctgcatctattaccta

SEQ ID NO: 762200 - DNA, 19 bp, Mus musculus
  siRNA target sequence for MOR264-18 (NM_146348.1,812-830).
ctcattctgcagtaagtga

SEQ ID NO: 762201 - DNA, 19 bp, Mus musculus
  siRNA target sequence for MOR264-18 (NM_146348.1,821-839).
cagtaagtgacaaattcct

SEQ ID NO: 762202 - DNA, 19 bp, Mus musculus
  siRNA target sequence for MOR264-18 (NM_146348.1,867-885).
cgtgttcaatcccatgata

SEQ ID NO: 762203 - DNA, 19 bp, Mus musculus
  siRNA target sequence for MOR176-3 (NM_146349.1,10-28).
gagatcatcactgttttta

SEQ ID NO: 762204 - DNA, 19 bp, Mus musculus
  siRNA target sequence for MOR176-3 (NM_146349.1,586-604).
gaaatactgctctttatat

SEQ ID NO: 762205 - DNA, 19 bp, Mus musculus
  siRNA target sequence for MOR176-3 (NM_146349.1,754-772).
catggaactcttttcatgt

SEQ ID NO: 762206 - DNA, 19 bp, Mus musculus
  siRNA target sequence for MOR264-17 (NM_146350.1,55-73).
gcctcttcgctgattgaat

SEQ ID NO: 762207 - DNA, 19 bp, Mus musculus
  siRNA target sequence for MOR264-17 (NM_146350.1,59-77).
cttcgctgattgaatttat

SEQ ID NO: 762208 - DNA, 19 bp, Mus musculus
  siRNA target sequence for MOR264-17 (NM_146350.1,62-80).
cgctgattgaatttatcct

SEQ ID NO: 762209 - DNA, 19 bp, Mus musculus
  siRNA target sequence for MOR264-17 (NM_146350.1,63-81).
gctgattgaatttatccta

SEQ ID NO: 762210 - DNA, 19 bp, Mus musculus
  siRNA target sequence for MOR264-17 (NM_146350.1,154-172).
ctgatgtgcaacagtacta

SEQ ID NO: 762211 - DNA, 19 bp, Mus musculus
  siRNA target sequence for MOR264-17 (NM_146350.1,156-174).
gatgtgcaacagtactata

SEQ ID NO: 762212 - DNA, 19 bp, Mus musculus
  siRNA target sequence for MOR264-17 (NM_146350.1,244-262).
gtggagatatgttatgtaa

SEQ ID NO: 762213 - DNA, 19 bp, Mus musculus
  siRNA target sequence for MOR264-17 (NM_146350.1,303-321).
gaaaggaaatatctctata

SEQ ID NO: 762214 - DNA, 19 bp, Mus musculus
  siRNA target sequence for MOR264-17 (NM_146350.1,331-349).
gccactcaaatgtgtttta

SEQ ID NO: 762215 - DNA, 19 bp, Mus musculus
  siRNA target sequence for MOR264-17 (NM_146350.1,332-350).
ccactcaaatgtgttttat

SEQ ID NO: 762216 - DNA, 19 bp, Mus musculus
  siRNA target sequence for MOR264-17 (NM_146350.1,427-445).
ctacactattctttagtca

SEQ ID NO: 762217 - DNA, 19 bp, Mus musculus
  siRNA target sequence for MOR264-17 (NM_146350.1,453-471).
caggatctgtacacagtta

SEQ ID NO: 762218 - DNA, 19 bp, Mus musculus
  siRNA target sequence for MOR264-17 (NM_146350.1,455-473).
ggatctgtacacagttagt

SEQ ID NO: 762219 - DNA, 19 bp, Mus musculus
  siRNA target sequence for MOR264-17 (NM_146350.1,491-509).
gtgtcataccagttgtaat

SEQ ID NO: 762220 - DNA, 19 bp, Mus musculus
  siRNA target sequence for MOR264-17 (NM_146350.1,495-513).
cataccagttgtaattgga

SEQ ID NO: 762221 - DNA, 19 bp, Mus musculus
  siRNA target sequence for MOR264-17 (NM_146350.1,502-520).
gttgtaattggacaaacat

SEQ ID NO: 762222 - DNA, 19 bp, Mus musculus
  siRNA target sequence for MOR264-17 (NM_146350.1,582-600).
cccaccagtactcaaactt

SEQ ID NO: 762223 - DNA, 19 bp, Mus musculus
  siRNA target sequence for MOR264-17 (NM_146350.1,639-657).
cgtagttgcgatggtattt

SEQ ID NO: 762224 - DNA, 19 bp, Mus musculus
  siRNA target sequence for MOR264-17 (NM_146350.1,643-661).
gttgcgatggtatttgtca

SEQ ID NO: 762225 - DNA, 19 bp, Mus musculus
  siRNA target sequence for MOR264-17 (NM_146350.1,668-686).
cctttatgctgatcatttt

SEQ ID NO: 762226 - DNA, 19 bp, Mus musculus
  siRNA target sequence for MOR264-17 (NM_146350.1,681-699).
cattttctcctattgcaaa

SEQ ID NO: 762227 - DNA, 19 bp, Mus musculus
  siRNA target sequence for MOR264-17 (NM_146350.1,721-739).
ctgtcatcagccaaaggaa

SEQ ID NO: 762228 - DNA, 19 bp, Mus musculus
  siRNA target sequence for MOR264-17 (NM_146350.1,762-780).
ctcctctcacctcatagtt

SEQ ID NO: 762229 - DNA, 19 bp, Mus musculus
  siRNA target sequence for MOR283-11 (NM_146353.1,791-809).
cattgcacagtgcaaaaca

SEQ ID NO: 762230 - DNA, 19 bp, Mus musculus
  siRNA target sequence for MOR12-5 (NM_146354.1,14-32).
gtcaattcaccccaaaata

SEQ ID NO: 762231 - DNA, 19 bp, Mus musculus
  siRNA target sequence for MOR12-5 (NM_146354.1,68-86).
ggtacccttggctgatctt

SEQ ID NO: 762232 - DNA, 19 bp, Mus musculus
  siRNA target sequence for MOR12-5 (NM_146354.1,79-97).
ctgatcttcccattctgtt

SEQ ID NO: 762233 - DNA, 19 bp, Mus musculus
  siRNA target sequence for MOR12-5 (NM_146354.1,87-105).
cccattctgtttcacatat

SEQ ID NO: 762234 - DNA, 19 bp, Mus musculus
  siRNA target sequence for MOR12-5 (NM_146354.1,256-274).
ctgctcggtgccaataaaa

SEQ ID NO: 762235 - DNA, 19 bp, Mus musculus
  siRNA target sequence for MOR12-5 (NM_146354.1,330-348).
ggagtcaggagttcttcta

SEQ ID NO: 762236 - DNA, 19 bp, Mus musculus
  siRNA target sequence for MOR12-5 (NM_146354.1,431-449).
ccagtcttacacttggatt

SEQ ID NO: 762237 - DNA, 19 bp, Mus musculus
  siRNA target sequence for MOR12-5 (NM_146354.1,434-452).
gtcttacacttggattgaa

SEQ ID NO: 762238 - DNA, 19 bp, Mus musculus
  siRNA target sequence for MOR12-5 (NM_146354.1,436-454).
cttacacttggattgaaga

SEQ ID NO: 762239 - DNA, 19 bp, Mus musculus
  siRNA target sequence for MOR12-5 (NM_146354.1,592-610).
ctggggctctgcatcgtaa

SEQ ID NO: 762240 - DNA, 19 bp, Mus musculus
  siRNA target sequence for MOR12-5 (NM_146354.1,664-682).
ctgtacacggtactaaaca

SEQ ID NO: 762241 - DNA, 19 bp, Mus musculus
  siRNA target sequence for MOR12-5 (NM_146354.1,666-684).
gtacacggtactaaacatt

SEQ ID NO: 762242 - DNA, 19 bp, Mus musculus
  siRNA target sequence for MOR12-5 (NM_146354.1,700-718).
cggaggaaagctctcaata

SEQ ID NO: 762243 - DNA, 19 bp, Mus musculus
  siRNA target sequence for MOR12-5 (NM_146354.1,737-755).
gtgcagttcttgtgtacta

SEQ ID NO: 762244 - DNA, 19 bp, Mus musculus
  siRNA target sequence for MOR12-5 (NM_146354.1,740-758).
cagttcttgtgtactatgt

SEQ ID NO: 762245 - DNA, 19 bp, Mus musculus
  siRNA target sequence for MOR12-5 (NM_146354.1,776-794).
ctctggtgcatcgattcat

SEQ ID NO: 762246 - DNA, 19 bp, Mus musculus
  siRNA target sequence for MOR12-5 (NM_146354.1,778-796).
ctggtgcatcgattcatga

SEQ ID NO: 762247 - DNA, 19 bp, Mus musculus
  siRNA target sequence for MOR12-5 (NM_146354.1,894-912).
gattcgccaggggttaata

SEQ ID NO: 762248 - DNA, 19 bp, Mus musculus
  siRNA target sequence for MOR12-5 (NM_146354.1,899-917).
gccaggggttaatacaact

SEQ ID NO: 762249 - DNA, 19 bp, Mus musculus
  siRNA target sequence for MOR12-5 (NM_146354.1,903-921).
ggggttaatacaactcttt

SEQ ID NO: 762250 - DNA, 19 bp, Mus musculus
  siRNA target sequence for MOR36-1 (NM_146355.1,34-52).
gaaagttcgcagtccaatt

SEQ ID NO: 762251 - DNA, 19 bp, Mus musculus
  siRNA target sequence for MOR36-1 (NM_146355.1,154-172).
gccctactaggcaatgcaa

SEQ ID NO: 762252 - DNA, 19 bp, Mus musculus
  siRNA target sequence for MOR36-1 (NM_146355.1,253-271).
ctgggcttagccacatcta

SEQ ID NO: 762253 - DNA, 19 bp, Mus musculus
  siRNA target sequence for MOR36-1 (NM_146355.1,255-273).
gggcttagccacatctata

SEQ ID NO: 762254 - DNA, 19 bp, Mus musculus
  siRNA target sequence for MOR36-1 (NM_146355.1,304-322).
ggaccccaacctgtacaat

SEQ ID NO: 762255 - DNA, 19 bp, Mus musculus
  siRNA target sequence for MOR36-1 (NM_146355.1,358-376).
gcactgactgctatggaat

SEQ ID NO: 762256 - DNA, 19 bp, Mus musculus
  siRNA target sequence for MOR36-1 (NM_146355.1,438-456).
ccctatcttggtaactaaa

SEQ ID NO: 762257 - DNA, 19 bp, Mus musculus
  siRNA target sequence for MOR36-1 (NM_146355.1,492-510).
gaaagtcctggctgttata

SEQ ID NO: 762258 - DNA, 19 bp, Mus musculus
  siRNA target sequence for MOR36-1 (NM_146355.1,521-539).
ctctgctggtagtacgatt

SEQ ID NO: 762259 - DNA, 19 bp, Mus musculus
  siRNA target sequence for MOR36-1 (NM_146355.1,523-541).
ctgctggtagtacgattta

SEQ ID NO: 762260 - DNA, 19 bp, Mus musculus
  siRNA target sequence for MOR36-1 (NM_146355.1,544-562).
cactttcatgccaagatca

SEQ ID NO: 762261 - DNA, 19 bp, Mus musculus
  siRNA target sequence for MOR36-1 (NM_146355.1,546-564).
ctttcatgccaagatcata

SEQ ID NO: 762262 - DNA, 19 bp, Mus musculus
  siRNA target sequence for MOR36-1 (NM_146355.1,601-619).
ctggtagttggtaacacat

SEQ ID NO: 762263 - DNA, 19 bp, Mus musculus
  siRNA target sequence for MOR36-1 (NM_146355.1,611-629).
gtaacacatgggtcaacaa

SEQ ID NO: 762264 - DNA, 19 bp, Mus musculus
  siRNA target sequence for MOR36-1 (NM_146355.1,633-651).
gtatgggctagcactttca

SEQ ID NO: 762265 - DNA, 19 bp, Mus musculus
  siRNA target sequence for MOR36-1 (NM_146355.1,702-720).
cattgcccatgcagtactt

SEQ ID NO: 762266 - DNA, 19 bp, Mus musculus
  siRNA target sequence for MOR36-1 (NM_146355.1,925-943).
gtccgcaccaagcagatta

SEQ ID NO: 762267 - DNA, 19 bp, Mus musculus
  siRNA target sequence for MOR36-1 (NM_146355.1,939-957).
gattagggaccgattctta

SEQ ID NO: 762268 - DNA, 19 bp, Mus musculus
  siRNA target sequence for MOR36-1 (NM_146355.1,944-962).
gggaccgattcttagaaat

SEQ ID NO: 762269 - DNA, 19 bp, Mus musculus
  siRNA target sequence for MOR101-2 (NM_146356.1,510-528).
gatggcgtttgacaacatt

SEQ ID NO: 762270 - DNA, 19 bp, Mus musculus
  siRNA target sequence for MOR101-2 (NM_146356.1,675-693).
catcctgtcctcagtactt

SEQ ID NO: 762271 - DNA, 19 bp, Mus musculus
  siRNA target sequence for MOR101-2 (NM_146356.1,911-929).
cggccatcactaaaatgat

SEQ ID NO: 762272 - DNA, 19 bp, Mus musculus
  siRNA target sequence for MOR101-2 (NM_146356.1,913-931).
gccatcactaaaatgatgt

SEQ ID NO: 762273 - DNA, 19 bp, Mus musculus
  siRNA target sequence for MOR101-2 (NM_146356.1,936-954).
ccaggatccaaagagtatt

SEQ ID NO: 762274 - DNA, 19 bp, Mus musculus
  siRNA target sequence for MOR271-1 (NM_146357.1,65-83).
ctggcctactacttatgat

SEQ ID NO: 762275 - DNA, 19 bp, Mus musculus
  siRNA target sequence for MOR271-1 (NM_146357.1,287-305).
gtggtgtgcagtctttttt

SEQ ID NO: 762276 - DNA, 19 bp, Mus musculus
  siRNA target sequence for MOR271-1 (NM_146357.1,289-307).
ggtgtgcagtcttttttct

SEQ ID NO: 762277 - DNA, 19 bp, Mus musculus
  siRNA target sequence for MOR32-11 (NM_146358.1,127-145).
ggaaacatcaccattctct

SEQ ID NO: 762278 - DNA, 19 bp, Mus musculus
  siRNA target sequence for MOR32-11 (NM_146358.1,128-146).
gaaacatcaccattctctt

SEQ ID NO: 762279 - DNA, 19 bp, Mus musculus
  siRNA target sequence for MOR32-11 (NM_146358.1,193-211).
ctagccacattgtcgataa

SEQ ID NO: 762280 - DNA, 19 bp, Mus musculus
  siRNA target sequence for MOR32-11 (NM_146358.1,197-215).
ccacattgtcgataattga

SEQ ID NO: 762281 - DNA, 19 bp, Mus musculus
  siRNA target sequence for MOR32-11 (NM_146358.1,198-216).
cacattgtcgataattgat

SEQ ID NO: 762282 - DNA, 19 bp, Mus musculus
  siRNA target sequence for MOR32-11 (NM_146358.1,200-218).
cattgtcgataattgatct

SEQ ID NO: 762283 - DNA, 19 bp, Mus musculus
  siRNA target sequence for MOR32-11 (NM_146358.1,217-235).
ctgtgtctatccacatcta

SEQ ID NO: 762284 - DNA, 19 bp, Mus musculus
  siRNA target sequence for MOR32-11 (NM_146358.1,219-237).
gtgtctatccacatctact

SEQ ID NO: 762285 - DNA, 19 bp, Mus musculus
  siRNA target sequence for MOR32-11 (NM_146358.1,312-330).
cttcatccacgtgtttaca

SEQ ID NO: 762286 - DNA, 19 bp, Mus musculus
  siRNA target sequence for MOR32-11 (NM_146358.1,469-487).
ctcgtgactccgtttgtgt

SEQ ID NO: 762287 - DNA, 19 bp, Mus musculus
  siRNA target sequence for MOR32-11 (NM_146358.1,471-489).
cgtgactccgtttgtgttt

SEQ ID NO: 762288 - DNA, 19 bp, Mus musculus
  siRNA target sequence for MOR32-11 (NM_146358.1,476-494).
ctccgtttgtgtttctcat

SEQ ID NO: 762289 - DNA, 19 bp, Mus musculus
  siRNA target sequence for MOR32-11 (NM_146358.1,552-570).
gggtctggcccgattagct

SEQ ID NO: 762290 - DNA, 19 bp, Mus musculus
  siRNA target sequence for MOR32-11 (NM_146358.1,553-571).
ggtctggcccgattagctt

SEQ ID NO: 762291 - DNA, 19 bp, Mus musculus
  siRNA target sequence for MOR32-11 (NM_146358.1,568-586).
gcttgtgcacccatcaaga

SEQ ID NO: 762292 - DNA, 19 bp, Mus musculus
  siRNA target sequence for MOR32-11 (NM_146358.1,572-590).
gtgcacccatcaagatcaa

SEQ ID NO: 762293 - DNA, 19 bp, Mus musculus
  siRNA target sequence for MOR32-11 (NM_146358.1,574-592).
gcacccatcaagatcaaca

SEQ ID NO: 762294 - DNA, 19 bp, Mus musculus
  siRNA target sequence for MOR32-11 (NM_146358.1,597-615).
ctatggactcgtagtgatt

SEQ ID NO: 762295 - DNA, 19 bp, Mus musculus
  siRNA target sequence for MOR32-11 (NM_146358.1,681-699).
ccgaattccctctcaagat

SEQ ID NO: 762296 - DNA, 19 bp, Mus musculus
  siRNA target sequence for MOR32-11 (NM_146358.1,692-710).
ctcaagatgcccgattgaa

SEQ ID NO: 762297 - DNA, 19 bp, Mus musculus
  siRNA target sequence for MOR32-11 (NM_146358.1,703-721).
cgattgaaggcgctaaaca

SEQ ID NO: 762298 - DNA, 19 bp, Mus musculus
  siRNA target sequence for MOR32-11 (NM_146358.1,819-837).
ccacattcttttagctaat

SEQ ID NO: 762299 - DNA, 19 bp, Mus musculus
  siRNA target sequence for MOR14-10 (NM_146359.1,399-417).
gtatgcttcggtcttaact

SEQ ID NO: 762300 - DNA, 19 bp, Mus musculus
  siRNA target sequence for MOR14-10 (NM_146359.1,431-449).
ctcagattggagtagcaat

SEQ ID NO: 762301 - DNA, 19 bp, Mus musculus
  siRNA target sequence for MOR14-10 (NM_146359.1,435-453).
gattggagtagcaattgtt

SEQ ID NO: 762302 - DNA, 19 bp, Mus musculus
  siRNA target sequence for MOR14-10 (NM_146359.1,468-486).
gatactgactcctatggtt

SEQ ID NO: 762303 - DNA, 19 bp, Mus musculus
  siRNA target sequence for MOR14-10 (NM_146359.1,490-508).
cttcttaaaagattatcct

SEQ ID NO: 762304 - DNA, 19 bp, Mus musculus
  siRNA target sequence for MOR14-9 (NM_146360.1,83-101).
cggccttccctggattaga

SEQ ID NO: 762305 - DNA, 19 bp, Mus musculus
  siRNA target sequence for MOR14-9 (NM_146360.1,84-102).
ggccttccctggattagaa

SEQ ID NO: 762306 - DNA, 19 bp, Mus musculus
  siRNA target sequence for MOR14-9 (NM_146360.1,151-169).
gcactcttaggaaacagta

SEQ ID NO: 762307 - DNA, 19 bp, Mus musculus
  siRNA target sequence for MOR14-9 (NM_146360.1,308-326).
gggagatcagcattaaagt

SEQ ID NO: 762308 - DNA, 19 bp, Mus musculus
  siRNA target sequence for MOR14-9 (NM_146360.1,309-327).
ggagatcagcattaaagta

SEQ ID NO: 762309 - DNA, 19 bp, Mus musculus
  siRNA target sequence for MOR14-9 (NM_146360.1,325-343).
gtatgcctcattcaaatgt

SEQ ID NO: 762310 - DNA, 19 bp, Mus musculus
  siRNA target sequence for MOR14-9 (NM_146360.1,466-484).
gtgatcggactgatcatct

SEQ ID NO: 762311 - DNA, 19 bp, Mus musculus
  siRNA target sequence for MOR14-9 (NM_146360.1,471-489).
cggactgatcatctgtata

SEQ ID NO: 762312 - DNA, 19 bp, Mus musculus
  siRNA target sequence for MOR14-9 (NM_146360.1,556-574).
gagctttcccatccatttt

SEQ ID NO: 762313 - DNA, 19 bp, Mus musculus
  siRNA target sequence for MOR14-9 (NM_146360.1,575-593).
gcttccatccagatataat

SEQ ID NO: 762314 - DNA, 19 bp, Mus musculus
  siRNA target sequence for MOR14-9 (NM_146360.1,579-597).
ccatccagatataatcaaa

SEQ ID NO: 762315 - DNA, 19 bp, Mus musculus
  siRNA target sequence for MOR14-9 (NM_146360.1,580-598).
catccagatataatcaaat

SEQ ID NO: 762316 - DNA, 19 bp, Mus musculus
  siRNA target sequence for MOR14-9 (NM_146360.1,654-672).
cctgaacggcactgactta

SEQ ID NO: 762317 - DNA, 19 bp, Mus musculus
  siRNA target sequence for MOR14-9 (NM_146360.1,655-673).
ctgaacggcactgacttat

SEQ ID NO: 762318 - DNA, 19 bp, Mus musculus
  siRNA target sequence for MOR14-9 (NM_146360.1,661-679).
ggcactgacttattgttca

SEQ ID NO: 762319 - DNA, 19 bp, Mus musculus
  siRNA target sequence for MOR14-9 (NM_146360.1,662-680).
gcactgacttattgttcat

SEQ ID NO: 762320 - DNA, 19 bp, Mus musculus
  siRNA target sequence for MOR14-9 (NM_146360.1,720-738).
catcgtggctcctcaaaaa

SEQ ID NO: 762321 - DNA, 19 bp, Mus musculus
  siRNA target sequence for MOR14-9 (NM_146360.1,820-838).
gcacaccgtctcttcagtt

SEQ ID NO: 762322 - DNA, 19 bp, Mus musculus
  siRNA target sequence for MOR14-9 (NM_146360.1,823-841).
caccgtctcttcagttcta

SEQ ID NO: 762323 - DNA, 19 bp, Mus musculus
  siRNA target sequence for MOR14-9 (NM_146360.1,844-862).
cccagggtgatctgtagta

SEQ ID NO: 762324 - DNA, 19 bp, Mus musculus
  siRNA target sequence for MOR14-9 (NM_146360.1,889-907).
ccgcctgtgctgaatccta

SEQ ID NO: 762325 - DNA, 19 bp, Mus musculus
  siRNA target sequence for MOR18-3 (NM_146361.1,24-42).
catcgccaccccaaatgga

SEQ ID NO: 762326 - DNA, 19 bp, Mus musculus
  siRNA target sequence for MOR18-3 (NM_146361.1,48-66).
ggcccatccagcctatttt

SEQ ID NO: 762327 - DNA, 19 bp, Mus musculus
  siRNA target sequence for MOR18-3 (NM_146361.1,81-99).
ccctggcctaggatctaaa

SEQ ID NO: 762328 - DNA, 19 bp, Mus musculus
  siRNA target sequence for MOR18-3 (NM_146361.1,82-100).
cctggcctaggatctaaaa

SEQ ID NO: 762329 - DNA, 19 bp, Mus musculus
  siRNA target sequence for MOR18-3 (NM_146361.1,86-104).
gcctaggatctaaaatcca

SEQ ID NO: 762330 - DNA, 19 bp, Mus musculus
  siRNA target sequence for MOR18-3 (NM_146361.1,120-138).
ccccttatgctttatgtat

SEQ ID NO: 762331 - DNA, 19 bp, Mus musculus
  siRNA target sequence for MOR18-3 (NM_146361.1,447-465).
gactactgtcgccaagatt

SEQ ID NO: 762332 - DNA, 19 bp, Mus musculus
  siRNA target sequence for MOR18-3 (NM_146361.1,569-587).
gtctccatcaagacattat

SEQ ID NO: 762333 - DNA, 19 bp, Mus musculus
  siRNA target sequence for MOR18-3 (NM_146361.1,571-589).
ctccatcaagacattatga

SEQ ID NO: 762334 - DNA, 19 bp, Mus musculus
  siRNA target sequence for MOR18-3 (NM_146361.1,594-612).
gtcctgtactgataccaaa

SEQ ID NO: 762335 - DNA, 19 bp, Mus musculus
  siRNA target sequence for MOR18-3 (NM_146361.1,597-615).
ctgtactgataccaaagtt

SEQ ID NO: 762336 - DNA, 19 bp, Mus musculus
  siRNA target sequence for MOR18-3 (NM_146361.1,599-617).
gtactgataccaaagttaa

SEQ ID NO: 762337 - DNA, 19 bp, Mus musculus
  siRNA target sequence for MOR18-3 (NM_146361.1,602-620).
ctgataccaaagttaatgt

SEQ ID NO: 762338 - DNA, 19 bp, Mus musculus
  siRNA target sequence for MOR18-3 (NM_146361.1,794-812).
ccctcattgggctatcagt

SEQ ID NO: 762339 - DNA, 19 bp, Mus musculus
  siRNA target sequence for MOR18-3 (NM_146361.1,802-820).
gggctatcagtggtacata

SEQ ID NO: 762340 - DNA, 19 bp, Mus musculus
  siRNA target sequence for MOR18-3 (NM_146361.1,876-894).
gctaccacctgtagtcaat

SEQ ID NO: 762341 - DNA, 19 bp, Mus musculus
  siRNA target sequence for MOR18-3 (NM_146361.1,886-904).
gtagtcaatcccattgtgt

SEQ ID NO: 762342 - DNA, 19 bp, Mus musculus
  siRNA target sequence for MOR18-3 (NM_146361.1,932-950).
caagggttatccgtatgtt

SEQ ID NO: 762343 - DNA, 19 bp, Mus musculus
  siRNA target sequence for MOR18-3 (NM_146361.1,936-954).
ggttatccgtatgttttca

SEQ ID NO: 762344 - DNA, 19 bp, Mus musculus
  siRNA target sequence for MOR18-3 (NM_146361.1,942-960).
ccgtatgttttcacaagat

SEQ ID NO: 762345 - DNA, 19 bp, Mus musculus
  siRNA target sequence for MOR245-20 (NM_146362.1,33-51).
cctgggactcaccaattct

SEQ ID NO: 762346 - DNA, 19 bp, Mus musculus
  siRNA target sequence for MOR245-20 (NM_146362.1,40-58).
ctcaccaattcttggaata

SEQ ID NO: 762347 - DNA, 19 bp, Mus musculus
  siRNA target sequence for MOR245-20 (NM_146362.1,61-79).
caactattcctttttgtgt

SEQ ID NO: 762348 - DNA, 19 bp, Mus musculus
  siRNA target sequence for MOR245-20 (NM_146362.1,112-130).
ggaaactcactgattgtgt

SEQ ID NO: 762349 - DNA, 19 bp, Mus musculus
  siRNA target sequence for MOR245-20 (NM_146362.1,113-131).
gaaactcactgattgtgtt

SEQ ID NO: 762350 - DNA, 19 bp, Mus musculus
  siRNA target sequence for MOR245-20 (NM_146362.1,462-480).
ggttcaactggctttcgta

SEQ ID NO: 762351 - DNA, 19 bp, Mus musculus
  siRNA target sequence for MOR245-20 (NM_146362.1,466-484).
caactggctttcgtagtaa

SEQ ID NO: 762352 - DNA, 19 bp, Mus musculus
  siRNA target sequence for MOR245-20 (NM_146362.1,560-578).
cagatacatacaaattgga

SEQ ID NO: 762353 - DNA, 19 bp, Mus musculus
  siRNA target sequence for MOR245-20 (NM_146362.1,562-580).
gatacatacaaattggaat

SEQ ID NO: 762354 - DNA, 19 bp, Mus musculus
  siRNA target sequence for MOR245-20 (NM_146362.1,577-595).
gaattactggtctcaatca

SEQ ID NO: 762355 - DNA, 19 bp, Mus musculus
  siRNA target sequence for MOR245-20 (NM_146362.1,664-682).
gttcagaagcactcttcaa

SEQ ID NO: 762356 - DNA, 19 bp, Mus musculus
  siRNA target sequence for MOR245-20 (NM_146362.1,696-714).
ggctctgtccacactttca

SEQ ID NO: 762357 - DNA, 19 bp, Mus musculus
  siRNA target sequence for MOR245-20 (NM_146362.1,721-739).
gttactgtggtggtcttat

SEQ ID NO: 762358 - DNA, 19 bp, Mus musculus
  siRNA target sequence for MOR245-20 (NM_146362.1,762-780).
ctatacatggccttcttct

SEQ ID NO: 762359 - DNA, 19 bp, Mus musculus
  siRNA target sequence for MOR245-20 (NM_146362.1,910-928).
ggttgtaggcaaattttta

SEQ ID NO: 762360 - DNA, 19 bp, Mus musculus
  siRNA target sequence for MOR245-20 (NM_146362.1,914-932).
gtaggcaaatttttaaaca

SEQ ID NO: 762361 - DNA, 19 bp, Mus musculus
  siRNA target sequence for MOR246-5 (NM_146363.1,20-38).
ccagagtgccggaattcgt

SEQ ID NO: 762362 - DNA, 19 bp, Mus musculus
  siRNA target sequence for MOR246-5 (NM_146363.1,27-45).
gccggaattcgtgttactt

SEQ ID NO: 762363 - DNA, 19 bp, Mus musculus
  siRNA target sequence for MOR246-5 (NM_146363.1,61-79).
cctgagcttcagatattct

SEQ ID NO: 762364 - DNA, 19 bp, Mus musculus
  siRNA target sequence for MOR246-5 (NM_146363.1,102-120).
ctacttaatgacaatgctt

SEQ ID NO: 762365 - DNA, 19 bp, Mus musculus
  siRNA target sequence for MOR246-5 (NM_146363.1,224-242).
cctttgcaacaccaaagat

SEQ ID NO: 762366 - DNA, 19 bp, Mus musculus
  siRNA target sequence for MOR246-5 (NM_146363.1,259-277).
gctcatcacaagaccattt

SEQ ID NO: 762367 - DNA, 19 bp, Mus musculus
  siRNA target sequence for MOR246-5 (NM_146363.1,283-301).
gagggatgcatttctcaaa

SEQ ID NO: 762368 - DNA, 19 bp, Mus musculus
  siRNA target sequence for MOR246-5 (NM_146363.1,331-349).
gaaattgtactgctgattt

SEQ ID NO: 762369 - DNA, 19 bp, Mus musculus
  siRNA target sequence for MOR246-5 (NM_146363.1,388-406).
ctctactattcaacaatta

SEQ ID NO: 762370 - DNA, 19 bp, Mus musculus
  siRNA target sequence for MOR246-5 (NM_146363.1,465-483).
cacaatgagtcaactagtt

SEQ ID NO: 762371 - DNA, 19 bp, Mus musculus
  siRNA target sequence for MOR246-5 (NM_146363.1,473-491).
gtcaactagtttttatcct

SEQ ID NO: 762372 - DNA, 19 bp, Mus musculus
  siRNA target sequence for MOR246-5 (NM_146363.1,541-559).
cttcctttggtgatccaat

SEQ ID NO: 762373 - DNA, 19 bp, Mus musculus
  siRNA target sequence for MOR246-5 (NM_146363.1,552-570).
gatccaattggcttgtata

SEQ ID NO: 762374 - DNA, 19 bp, Mus musculus
  siRNA target sequence for MOR246-5 (NM_146363.1,555-573).
ccaattggcttgtatagat

SEQ ID NO: 762375 - DNA, 19 bp, Mus musculus
  siRNA target sequence for MOR246-5 (NM_146363.1,556-574).
caattggcttgtatagata

SEQ ID NO: 762376 - DNA, 19 bp, Mus musculus
  siRNA target sequence for MOR246-5 (NM_146363.1,610-628).
ggtgttattgctcttataa

SEQ ID NO: 762377 - DNA, 19 bp, Mus musculus
  siRNA target sequence for MOR246-5 (NM_146363.1,678-696).
gggccactcctcaattgga

SEQ ID NO: 762378 - DNA, 19 bp, Mus musculus
  siRNA target sequence for MOR246-5 (NM_146363.1,679-697).
ggccactcctcaattggat

SEQ ID NO: 762379 - DNA, 19 bp, Mus musculus
  siRNA target sequence for MOR246-5 (NM_146363.1,755-773).
gaccatgcattctcattta

SEQ ID NO: 762380 - DNA, 19 bp, Mus musculus
  siRNA target sequence for MOR246-5 (NM_146363.1,777-795).
gtggcctttcacaaacttt

SEQ ID NO: 762381 - DNA, 19 bp, Mus musculus
  siRNA target sequence for MOR246-5 (NM_146363.1,779-797).
ggcctttcacaaactttct

SEQ ID NO: 762382 - DNA, 19 bp, Mus musculus
  siRNA target sequence for MOR246-5 (NM_146363.1,908-926).
gtaaccaatatttctcttt

SEQ ID NO: 762383 - DNA, 19 bp, Mus musculus
  siRNA target sequence for MOR179-7 (NM_146365.1,20-38).
gttacactgtacgaagaat

SEQ ID NO: 762384 - DNA, 19 bp, Mus musculus
  siRNA target sequence for MOR179-7 (NM_146365.1,54-72).
gacagacaccaccatgttt

SEQ ID NO: 762385 - DNA, 19 bp, Mus musculus
  siRNA target sequence for MOR179-7 (NM_146365.1,60-78).
caccaccatgtttatacta

SEQ ID NO: 762386 - DNA, 19 bp, Mus musculus
  siRNA target sequence for MOR179-7 (NM_146365.1,63-81).
caccatgtttatactaaca

SEQ ID NO: 762387 - DNA, 19 bp, Mus musculus
  siRNA target sequence for MOR179-7 (NM_146365.1,100-118).
gacctgcaagtcttgttat

SEQ ID NO: 762388 - DNA, 19 bp, Mus musculus
  siRNA target sequence for MOR179-7 (NM_146365.1,157-175).
ggcaacttaggacttgttt

SEQ ID NO: 762389 - DNA, 19 bp, Mus musculus
  siRNA target sequence for MOR179-7 (NM_146365.1,162-180).
cttaggacttgttttgctt

SEQ ID NO: 762390 - DNA, 19 bp, Mus musculus
  siRNA target sequence for MOR179-7 (NM_146365.1,188-206).
gagattcccggcttcacaa

SEQ ID NO: 762391 - DNA, 19 bp, Mus musculus
  siRNA target sequence for MOR179-7 (NM_146365.1,339-357).
gtttctctttgttacgttt

SEQ ID NO: 762392 - DNA, 19 bp, Mus musculus
  siRNA target sequence for MOR179-7 (NM_146365.1,459-477).
catacctctcattatagct

SEQ ID NO: 762393 - DNA, 19 bp, Mus musculus
  siRNA target sequence for MOR179-7 (NM_146365.1,464-482).
ctctcattatagcttgtta

SEQ ID NO: 762394 - DNA, 19 bp, Mus musculus
  siRNA target sequence for MOR179-7 (NM_146365.1,700-718).
ctctttgcaattcttaaga

SEQ ID NO: 762395 - DNA, 19 bp, Mus musculus
  siRNA target sequence for MOR159-3 (NM_146368.1,250-268).
cacacactttctgtaaaca

SEQ ID NO: 762396 - DNA, 19 bp, Mus musculus
  siRNA target sequence for MOR159-3 (NM_146368.1,323-341).
gcagtatggaagttcactt

SEQ ID NO: 762397 - DNA, 19 bp, Mus musculus
  siRNA target sequence for MOR159-3 (NM_146368.1,616-634).
gtggtaagccccattttct

SEQ ID NO: 762398 - DNA, 19 bp, Mus musculus
  siRNA target sequence for MOR159-3 (NM_146368.1,619-637).
gtaagccccattttcttta

SEQ ID NO: 762399 - DNA, 19 bp, Mus musculus
  siRNA target sequence for MOR159-3 (NM_146368.1,719-737).
gtagctctcatgttcttgt

SEQ ID NO: 762400 - DNA, 19 bp, Mus musculus
  siRNA target sequence for MOR159-3 (NM_146368.1,725-743).
ctcatgttcttgttgtgat

SEQ ID NO: 762401 - DNA, 19 bp, Mus musculus
  siRNA target sequence for MOR159-3 (NM_146368.1,755-773).
gttctttggttcacatgta

SEQ ID NO: 762402 - DNA, 19 bp, Mus musculus
  siRNA target sequence for MOR159-3 (NM_146368.1,785-803).
catccagctacaatctaga

SEQ ID NO: 762403 - DNA, 19 bp, Mus musculus
  siRNA target sequence for MOR159-3 (NM_146368.1,788-806).
ccagctacaatctagaaca

SEQ ID NO: 762404 - DNA, 19 bp, Mus musculus
  siRNA target sequence for MOR159-3 (NM_146368.1,825-843).
cttttacacactcatttct

SEQ ID NO: 762405 - DNA, 19 bp, Mus musculus
  siRNA target sequence for MOR261-10 (NM_146369.1,939-957).
gtggtgttcggaccataaa

SEQ ID NO: 762406 - DNA, 19 bp, Mus musculus
  siRNA target sequence for MOR261-10 (NM_146369.1,942-960).
gtgttcggaccataaatct

SEQ ID NO: 762407 - DNA, 19 bp, Mus musculus
  siRNA target sequence for MOR202-33 (NM_146371.1,20-38).
gtagaatgaatgcattcat

SEQ ID NO: 762408 - DNA, 19 bp, Mus musculus
  siRNA target sequence for MOR202-33 (NM_146371.1,23-41).
gaatgaatgcattcatact

SEQ ID NO: 762409 - DNA, 19 bp, Mus musculus
  siRNA target sequence for MOR202-33 (NM_146371.1,77-95).
ccctgttcatcatattcaa

SEQ ID NO: 762410 - DNA, 19 bp, Mus musculus
  siRNA target sequence for MOR202-33 (NM_146371.1,450-468).
gttcagtttagctgaatct

SEQ ID NO: 762411 - DNA, 19 bp, Mus musculus
  siRNA target sequence for MOR202-33 (NM_146371.1,474-492).
ctatactgggtttatcttt

SEQ ID NO: 762412 - DNA, 19 bp, Mus musculus
  siRNA target sequence for MOR202-33 (NM_146371.1,506-524).
gccattctaatgtgattca

SEQ ID NO: 762413 - DNA, 19 bp, Mus musculus
  siRNA target sequence for MOR202-33 (NM_146371.1,507-525).
ccattctaatgtgattcat

SEQ ID NO: 762414 - DNA, 19 bp, Mus musculus
  siRNA target sequence for MOR202-33 (NM_146371.1,932-950).
ctcaacaccaagttctaat

SEQ ID NO: 762415 - DNA, 19 bp, Mus musculus
  siRNA target sequence for MOR267-14 (NM_146372.1,12-30).
caccacagtgaatatgttt

SEQ ID NO: 762416 - DNA, 19 bp, Mus musculus
  siRNA target sequence for MOR267-14 (NM_146372.1,233-251).
gcctgttagtggacttgat

SEQ ID NO: 762417 - DNA, 19 bp, Mus musculus
  siRNA target sequence for MOR267-14 (NM_146372.1,234-252).
cctgttagtggacttgata

SEQ ID NO: 762418 - DNA, 19 bp, Mus musculus
  siRNA target sequence for MOR267-14 (NM_146372.1,237-255).
gttagtggacttgatatca

SEQ ID NO: 762419 - DNA, 19 bp, Mus musculus
  siRNA target sequence for MOR267-14 (NM_146372.1,241-259).
gtggacttgatatcaaaga

SEQ ID NO: 762420 - DNA, 19 bp, Mus musculus
  siRNA target sequence for MOR267-14 (NM_146372.1,320-338).
gcaataactgctttatctt

SEQ ID NO: 762421 - DNA, 19 bp, Mus musculus
  siRNA target sequence for MOR267-14 (NM_146372.1,372-390).
ccacaaccctctgcattat

SEQ ID NO: 762422 - DNA, 19 bp, Mus musculus
  siRNA target sequence for MOR267-14 (NM_146372.1,479-497).
caatattcaacttgtcttt

SEQ ID NO: 762423 - DNA, 19 bp, Mus musculus
  siRNA target sequence for MOR267-14 (NM_146372.1,547-565).
gtctccctggcctgtaatt

SEQ ID NO: 762424 - DNA, 19 bp, Mus musculus
  siRNA target sequence for MOR267-14 (NM_146372.1,549-567).
ctccctggcctgtaattta

SEQ ID NO: 762425 - DNA, 19 bp, Mus musculus
  siRNA target sequence for MOR267-14 (NM_146372.1,555-573).
ggcctgtaatttaaccttt

SEQ ID NO: 762426 - DNA, 19 bp, Mus musculus
  siRNA target sequence for MOR267-14 (NM_146372.1,556-574).
gcctgtaatttaacctttt

SEQ ID NO: 762427 - DNA, 19 bp, Mus musculus
  siRNA target sequence for MOR267-14 (NM_146372.1,610-628).
gtgttggtaggcagcttta

SEQ ID NO: 762428 - DNA, 19 bp, Mus musculus
  siRNA target sequence for MOR267-14 (NM_146372.1,691-709).
ggaaggtataagacctttt

SEQ ID NO: 762429 - DNA, 19 bp, Mus musculus
  siRNA target sequence for MOR267-14 (NM_146372.1,731-749).
cagtggtgttcatacatta

SEQ ID NO: 762430 - DNA, 19 bp, Mus musculus
  siRNA target sequence for MOR267-14 (NM_146372.1,735-753).
ggtgttcatacattatgga

SEQ ID NO: 762431 - DNA, 19 bp, Mus musculus
  siRNA target sequence for MOR267-14 (NM_146372.1,738-756).
gttcatacattatggattt

SEQ ID NO: 762432 - DNA, 19 bp, Mus musculus
  siRNA target sequence for MOR267-14 (NM_146372.1,783-801).
gaacagctactcttttaga

SEQ ID NO: 762433 - DNA, 19 bp, Mus musculus
  siRNA target sequence for MOR267-14 (NM_146372.1,811-829).
ctgttggcagtgacataca

SEQ ID NO: 762434 - DNA, 19 bp, Mus musculus
  siRNA target sequence for MOR267-14 (NM_146372.1,904-922).
gatataggcaacataatca

SEQ ID NO: 762435 - DNA, 19 bp, Mus musculus
  siRNA target sequence for MOR231-18 (NM_146373.1,407-425).
gacgggtatgtattctttt

SEQ ID NO: 762436 - DNA, 19 bp, Mus musculus
  siRNA target sequence for MOR231-18 (NM_146373.1,409-427).
cgggtatgtattcttttct

SEQ ID NO: 762437 - DNA, 19 bp, Mus musculus
  siRNA target sequence for MOR231-18 (NM_146373.1,627-645).
catcttactcctactttct

SEQ ID NO: 762438 - DNA, 19 bp, Mus musculus
  siRNA target sequence for MOR231-18 (NM_146373.1,630-648).
cttactcctactttcttat

SEQ ID NO: 762439 - DNA, 19 bp, Mus musculus
  siRNA target sequence for MOR231-18 (NM_146373.1,637-655).
ctactttcttatgcaataa

SEQ ID NO: 762440 - DNA, 19 bp, Mus musculus
  siRNA target sequence for MOR231-18 (NM_146373.1,796-814).
gataaatccatcactgtaa

SEQ ID NO: 762441 - DNA, 19 bp, Mus musculus
  siRNA target sequence for MOR164-3 (NM_146375.1,14-32).
gtctgcccagattttcaat

SEQ ID NO: 762442 - DNA, 19 bp, Mus musculus
  siRNA target sequence for MOR164-3 (NM_146375.1,16-34).
ctgcccagattttcaataa

SEQ ID NO: 762443 - DNA, 19 bp, Mus musculus
  siRNA target sequence for MOR164-3 (NM_146375.1,250-268).
ctttgctactcttctgtat

SEQ ID NO: 762444 - DNA, 19 bp, Mus musculus
  siRNA target sequence for MOR164-3 (NM_146375.1,468-486).
gctatcatttgcttcttat

SEQ ID NO: 762445 - DNA, 19 bp, Mus musculus
  siRNA target sequence for MOR164-3 (NM_146375.1,552-570).
caatgtcatcaacttttat

SEQ ID NO: 762446 - DNA, 19 bp, Mus musculus
  siRNA target sequence for MOR164-3 (NM_146375.1,955-973).
gttcacagcagattcatat

SEQ ID NO: 762447 - DNA, 19 bp, Mus musculus
  siRNA target sequence for MOR107-1 (NM_146376.1,20-38).
ccaaggtcacggagtttca

SEQ ID NO: 762448 - DNA, 19 bp, Mus musculus
  siRNA target sequence for MOR107-1 (NM_146376.1,47-65).
gattccagaaccttcttga

SEQ ID NO: 762449 - DNA, 19 bp, Mus musculus
  siRNA target sequence for MOR107-1 (NM_146376.1,422-440).
gcgctgctctggtaacagt

SEQ ID NO: 762450 - DNA, 19 bp, Mus musculus
  siRNA target sequence for MOR107-1 (NM_146376.1,608-626).
ccatcgctgtgctatgtat

SEQ ID NO: 762451 - DNA, 19 bp, Mus musculus
  siRNA target sequence for MOR107-1 (NM_146376.1,641-659).
ccctggtgtcctacgtttt

SEQ ID NO: 762452 - DNA, 19 bp, Mus musculus
  siRNA target sequence for MOR107-1 (NM_146376.1,697-715).
ggcaggatgaagacgtttt

SEQ ID NO: 762453 - DNA, 19 bp, Mus musculus
  siRNA target sequence for MOR114-11 (NM_146378.1,16-34).
gtaatgacaacattcatct

SEQ ID NO: 762454 - DNA, 19 bp, Mus musculus
  siRNA target sequence for MOR114-11 (NM_146378.1,56-74).
caggtctccaacttctgtt

SEQ ID NO: 762455 - DNA, 19 bp, Mus musculus
  siRNA target sequence for MOR114-11 (NM_146378.1,237-255).
cctgtacagtatatcaact

SEQ ID NO: 762456 - DNA, 19 bp, Mus musculus
  siRNA target sequence for MOR114-11 (NM_146378.1,251-269).
caactggggttaataccat

SEQ ID NO: 762457 - DNA, 19 bp, Mus musculus
  siRNA target sequence for MOR114-11 (NM_146378.1,256-274).
ggggttaataccataacat

SEQ ID NO: 762458 - DNA, 19 bp, Mus musculus
  siRNA target sequence for MOR114-11 (NM_146378.1,257-275).
gggttaataccataacata

SEQ ID NO: 762459 - DNA, 19 bp, Mus musculus
  siRNA target sequence for MOR114-11 (NM_146378.1,532-550).
gatgcatcgcctcttatca

SEQ ID NO: 762460 - DNA, 19 bp, Mus musculus
  siRNA target sequence for MOR114-11 (NM_146378.1,535-553).
gcatcgcctcttatcaaaa

SEQ ID NO: 762461 - DNA, 19 bp, Mus musculus
  siRNA target sequence for MOR114-11 (NM_146378.1,536-554).
catcgcctcttatcaaaat

SEQ ID NO: 762462 - DNA, 19 bp, Mus musculus
  siRNA target sequence for MOR114-11 (NM_146378.1,784-802).
gccaaagaacaggtagata

SEQ ID NO: 762463 - DNA, 19 bp, Mus musculus
  siRNA target sequence for MOR114-11 (NM_146378.1,790-808).
gaacaggtagatatcaata

SEQ ID NO: 762464 - DNA, 19 bp, Mus musculus
  siRNA target sequence for MOR114-11 (NM_146378.1,795-813).
ggtagatatcaataaagga

SEQ ID NO: 762465 - DNA, 19 bp, Mus musculus
  siRNA target sequence for MOR114-11 (NM_146378.1,811-829).
ggagtatctatgctcaata

SEQ ID NO: 762466 - DNA, 19 bp, Mus musculus
  siRNA target sequence for MOR114-11 (NM_146378.1,919-937).
catacctcttacaccaata

SEQ ID NO: 762467 - DNA, 19 bp, Mus musculus
  siRNA target sequence for MOR114-11 (NM_146378.1,926-944).
cttacaccaataagaacat

SEQ ID NO: 762468 - DNA, 19 bp, Mus musculus
  siRNA target sequence for MOR38-2 (NM_146379.1,24-42).
cccttcaggtactttacca

SEQ ID NO: 762469 - DNA, 19 bp, Mus musculus
  siRNA target sequence for MOR38-2 (NM_146379.1,275-293).
ctacgaccaccattcctaa

SEQ ID NO: 762470 - DNA, 19 bp, Mus musculus
  siRNA target sequence for MOR38-2 (NM_146379.1,445-463).
cgttattccaccattcttt

SEQ ID NO: 762471 - DNA, 19 bp, Mus musculus
  siRNA target sequence for MOR38-2 (NM_146379.1,453-471).
caccattctttccaatagt

SEQ ID NO: 762472 - DNA, 19 bp, Mus musculus
  siRNA target sequence for MOR38-2 (NM_146379.1,502-520).
gttagagcaatcctcttta

SEQ ID NO: 762473 - DNA, 19 bp, Mus musculus
  siRNA target sequence for MOR38-2 (NM_146379.1,506-524).
gagcaatcctctttattct

SEQ ID NO: 762474 - DNA, 19 bp, Mus musculus
  siRNA target sequence for MOR38-2 (NM_146379.1,620-638).
gtgtcgataccacattcaa

SEQ ID NO: 762475 - DNA, 19 bp, Mus musculus
  siRNA target sequence for MOR38-2 (NM_146379.1,622-640).
gtcgataccacattcaata

SEQ ID NO: 762476 - DNA, 19 bp, Mus musculus
  siRNA target sequence for MOR38-2 (NM_146379.1,625-643).
gataccacattcaatagga

SEQ ID NO: 762477 - DNA, 19 bp, Mus musculus
  siRNA target sequence for MOR38-2 (NM_146379.1,629-647).
ccacattcaataggatata

SEQ ID NO: 762478 - DNA, 19 bp, Mus musculus
  siRNA target sequence for MOR38-2 (NM_146379.1,630-648).
cacattcaataggatatat

SEQ ID NO: 762479 - DNA, 19 bp, Mus musculus
  siRNA target sequence for MOR38-2 (NM_146379.1,689-707).
cagctattgcctcatctta

SEQ ID NO: 762480 - DNA, 19 bp, Mus musculus
  siRNA target sequence for MOR38-2 (NM_146379.1,806-824).
cctacacccccagtctttt

SEQ ID NO: 762481 - DNA, 19 bp, Mus musculus
  siRNA target sequence for MOR38-2 (NM_146379.1,931-949).
ggagtaaaaaccaaggaat

SEQ ID NO: 762482 - DNA, 19 bp, Mus musculus
  siRNA target sequence for MOR38-2 (NM_146379.1,932-950).
gagtaaaaaccaaggaatt

SEQ ID NO: 762483 - DNA, 19 bp, Mus musculus
  siRNA target sequence for MOR38-2 (NM_146379.1,952-970).
cgggacaaaattactaaat

SEQ ID NO: 762484 - DNA, 19 bp, Mus musculus
  siRNA target sequence for MOR38-2 (NM_146379.1,1004-1022).
ctcacaatcagaaacttgt

SEQ ID NO: 762485 - DNA, 19 bp, Mus musculus
  siRNA target sequence for MOR24-2 (NM_146380.1,12-30).
gctaagacatttaacagtt

SEQ ID NO: 762486 - DNA, 19 bp, Mus musculus
  siRNA target sequence for MOR24-2 (NM_146380.1,28-46).
gttgttatgtctatctaca

SEQ ID NO: 762487 - DNA, 19 bp, Mus musculus
  siRNA target sequence for MOR24-2 (NM_146380.1,31-49).
gttatgtctatctacaata

SEQ ID NO: 762488 - DNA, 19 bp, Mus musculus
  siRNA target sequence for MOR24-2 (NM_146380.1,58-76).
gtccatccctcaaccttta

SEQ ID NO: 762489 - DNA, 19 bp, Mus musculus
  siRNA target sequence for MOR24-2 (NM_146380.1,135-153).
catggtctacgttttagca

SEQ ID NO: 762490 - DNA, 19 bp, Mus musculus
  siRNA target sequence for MOR24-2 (NM_146380.1,138-156).
ggtctacgttttagcatta

SEQ ID NO: 762491 - DNA, 19 bp, Mus musculus
  siRNA target sequence for MOR24-2 (NM_146380.1,139-157).
gtctacgttttagcattaa

SEQ ID NO: 762492 - DNA, 19 bp, Mus musculus
  siRNA target sequence for MOR24-2 (NM_146380.1,167-185).
gctcacttcttttcatcat

SEQ ID NO: 762493 - DNA, 19 bp, Mus musculus
  siRNA target sequence for MOR24-2 (NM_146380.1,297-315).
gtttcacgatggagagatt

SEQ ID NO: 762494 - DNA, 19 bp, Mus musculus
  siRNA target sequence for MOR24-2 (NM_146380.1,337-355).
cagatcttcctgattcact

SEQ ID NO: 762495 - DNA, 19 bp, Mus musculus
  siRNA target sequence for MOR24-2 (NM_146380.1,453-471).
cactgtaactggaggaata

SEQ ID NO: 762496 - DNA, 19 bp, Mus musculus
  siRNA target sequence for MOR24-2 (NM_146380.1,582-600).
catggccctcatcaagatt

SEQ ID NO: 762497 - DNA, 19 bp, Mus musculus
  siRNA target sequence for MOR24-2 (NM_146380.1,656-674).
caggcggagtagacttcat

SEQ ID NO: 762498 - DNA, 19 bp, Mus musculus
  siRNA target sequence for MOR24-2 (NM_146380.1,658-676).
ggcggagtagacttcatat

SEQ ID NO: 762499 - DNA, 19 bp, Mus musculus
  siRNA target sequence for MOR24-2 (NM_146380.1,659-677).
gcggagtagacttcatatt

SEQ ID NO: 762500 - DNA, 19 bp, Mus musculus
  siRNA target sequence for MOR24-2 (NM_146380.1,661-679).
ggagtagacttcatattga

SEQ ID NO: 762501 - DNA, 19 bp, Mus musculus
  siRNA target sequence for MOR24-2 (NM_146380.1,843-861).
ggctccccaagtgcatata

SEQ ID NO: 762502 - DNA, 19 bp, Mus musculus
  siRNA target sequence for MOR24-2 (NM_146380.1,844-862).
gctccccaagtgcatatat

SEQ ID NO: 762503 - DNA, 19 bp, Mus musculus
  siRNA target sequence for MOR24-2 (NM_146380.1,845-863).
ctccccaagtgcatatatt

SEQ ID NO: 762504 - DNA, 19 bp, Mus musculus
  siRNA target sequence for MOR24-2 (NM_146380.1,949-967).
ctcaaagttttcaggtttt

SEQ ID NO: 762505 - DNA, 19 bp, Mus musculus
  siRNA target sequence for MOR24-2 (NM_146380.1,962-980).
ggttttcaaagcacacaaa

SEQ ID NO: 762506 - DNA, 19 bp, Mus musculus
  siRNA target sequence for MOR245-13 (NM_146381.1,90-108).
cttctctttgctctatgta

SEQ ID NO: 762507 - DNA, 19 bp, Mus musculus
  siRNA target sequence for MOR245-13 (NM_146381.1,566-584).
gcacggatagagacacatt

SEQ ID NO: 762508 - DNA, 19 bp, Mus musculus
  siRNA target sequence for MOR245-13 (NM_146381.1,571-589).
gatagagacacatttgagt

SEQ ID NO: 762509 - DNA, 19 bp, Mus musculus
  siRNA target sequence for MOR120-3 (NM_146382.1,15-33).
ctctagtgccacgaaattt

SEQ ID NO: 762510 - DNA, 19 bp, Mus musculus
  siRNA target sequence for MOR120-3 (NM_146382.1,17-35).
ctagtgccacgaaattttt

SEQ ID NO: 762511 - DNA, 19 bp, Mus musculus
  siRNA target sequence for MOR120-3 (NM_146382.1,20-38).
gtgccacgaaattttttct

SEQ ID NO: 762512 - DNA, 19 bp, Mus musculus
  siRNA target sequence for MOR120-3 (NM_146382.1,22-40).
gccacgaaattttttctgt

SEQ ID NO: 762513 - DNA, 19 bp, Mus musculus
  siRNA target sequence for MOR120-3 (NM_146382.1,24-42).
cacgaaattttttctgtta

SEQ ID NO: 762514 - DNA, 19 bp, Mus musculus
  siRNA target sequence for MOR120-3 (NM_146382.1,82-100).
gcgaccttccttcttttgt

SEQ ID NO: 762515 - DNA, 19 bp, Mus musculus
  siRNA target sequence for MOR120-3 (NM_146382.1,83-101).
cgaccttccttcttttgta

SEQ ID NO: 762516 - DNA, 19 bp, Mus musculus
  siRNA target sequence for MOR120-3 (NM_146382.1,106-124).
gtgacggtcttgggaaata

SEQ ID NO: 762517 - DNA, 19 bp, Mus musculus
  siRNA target sequence for MOR120-3 (NM_146382.1,202-220).
ctggagatcctcatcacat

SEQ ID NO: 762518 - DNA, 19 bp, Mus musculus
  siRNA target sequence for MOR120-3 (NM_146382.1,253-271).
cttcgacagacgcagataa

SEQ ID NO: 762519 - DNA, 19 bp, Mus musculus
  siRNA target sequence for MOR120-3 (NM_146382.1,259-277).
cagacgcagataatatctt

SEQ ID NO: 762520 - DNA, 19 bp, Mus musculus
  siRNA target sequence for MOR120-3 (NM_146382.1,281-299).
ctgcttgttgcgtacaact

SEQ ID NO: 762521 - DNA, 19 bp, Mus musculus
  siRNA target sequence for MOR120-3 (NM_146382.1,284-302).
cttgttgcgtacaactgta

SEQ ID NO: 762522 - DNA, 19 bp, Mus musculus
  siRNA target sequence for MOR120-3 (NM_146382.1,287-305).
gttgcgtacaactgtattt

SEQ ID NO: 762523 - DNA, 19 bp, Mus musculus
  siRNA target sequence for MOR120-3 (NM_146382.1,318-336).
ggggagttcagagttaata

SEQ ID NO: 762524 - DNA, 19 bp, Mus musculus
  siRNA target sequence for MOR120-3 (NM_146382.1,320-338).
ggagttcagagttaatatt

SEQ ID NO: 762525 - DNA, 19 bp, Mus musculus
  siRNA target sequence for MOR120-3 (NM_146382.1,501-519).
ctgcaagacaaacctatta

SEQ ID NO: 762526 - DNA, 19 bp, Mus musculus
  siRNA target sequence for MOR120-3 (NM_146382.1,503-521).
gcaagacaaacctattaga

SEQ ID NO: 762527 - DNA, 19 bp, Mus musculus
  siRNA target sequence for MOR120-3 (NM_146382.1,504-522).
caagacaaacctattagat

SEQ ID NO: 762528 - DNA, 19 bp, Mus musculus
  siRNA target sequence for MOR120-3 (NM_146382.1,533-551).
gtgacctgggacagttgtt

SEQ ID NO: 762529 - DNA, 19 bp, Mus musculus
  siRNA target sequence for MOR120-3 (NM_146382.1,541-559).
ggacagttgttcaagctat

SEQ ID NO: 762530 - DNA, 19 bp, Mus musculus
  siRNA target sequence for MOR120-3 (NM_146382.1,579-597).
cacagagttgattctgttt

SEQ ID NO: 762531 - DNA, 19 bp, Mus musculus
  siRNA target sequence for MOR120-3 (NM_146382.1,622-640).
ggttccatgatccttacaa

SEQ ID NO: 762532 - DNA, 19 bp, Mus musculus
  siRNA target sequence for MOR120-3 (NM_146382.1,623-641).
gttccatgatccttacaat

SEQ ID NO: 762533 - DNA, 19 bp, Mus musculus
  siRNA target sequence for MOR120-3 (NM_146382.1,626-644).
ccatgatccttacaattat

SEQ ID NO: 762534 - DNA, 19 bp, Mus musculus
  siRNA target sequence for MOR120-3 (NM_146382.1,630-648).
gatccttacaattatctct

SEQ ID NO: 762535 - DNA, 19 bp, Mus musculus
  siRNA target sequence for MOR120-3 (NM_146382.1,634-652).
cttacaattatctcttaca

SEQ ID NO: 762536 - DNA, 19 bp, Mus musculus
  siRNA target sequence for MOR120-3 (NM_146382.1,638-656).
caattatctcttacacata

SEQ ID NO: 762537 - DNA, 19 bp, Mus musculus
  siRNA target sequence for MOR120-3 (NM_146382.1,835-853).
gtggtggaaccctttctga

SEQ ID NO: 762538 - DNA, 19 bp, Mus musculus
  siRNA target sequence for MOR120-2 (NM_146383.1,17-35).
ctagtgccactgaatttta

SEQ ID NO: 762539 - DNA, 19 bp, Mus musculus
  siRNA target sequence for MOR120-2 (NM_146383.1,43-61).
ggttttcctggctctgtaa

SEQ ID NO: 762540 - DNA, 19 bp, Mus musculus
  siRNA target sequence for MOR120-2 (NM_146383.1,136-154).
gtgatcgtctgtgttgata

SEQ ID NO: 762541 - DNA, 19 bp, Mus musculus
  siRNA target sequence for MOR120-2 (NM_146383.1,287-305).
ggtgtgttgcccaactttt

SEQ ID NO: 762542 - DNA, 19 bp, Mus musculus
  siRNA target sequence for MOR120-2 (NM_146383.1,319-337).
ctggggaccacggagtttt

SEQ ID NO: 762543 - DNA, 19 bp, Mus musculus
  siRNA target sequence for MOR120-2 (NM_146383.1,322-340).
gggaccacggagttttctt

SEQ ID NO: 762544 - DNA, 19 bp, Mus musculus
  siRNA target sequence for MOR120-2 (NM_146383.1,323-341).
ggaccacggagttttcttt

SEQ ID NO: 762545 - DNA, 19 bp, Mus musculus
  siRNA target sequence for MOR120-2 (NM_146383.1,354-372).
ggccgtggatcgttatgta

SEQ ID NO: 762546 - DNA, 19 bp, Mus musculus
  siRNA target sequence for MOR120-2 (NM_146383.1,422-440).
gcaactctgtggtaattgt

SEQ ID NO: 762547 - DNA, 19 bp, Mus musculus
  siRNA target sequence for MOR120-2 (NM_146383.1,484-502).
gccacatttcaccttaact

SEQ ID NO: 762548 - DNA, 19 bp, Mus musculus
  siRNA target sequence for MOR120-2 (NM_146383.1,495-513).
ccttaactactgcaaatca

SEQ ID NO: 762549 - DNA, 19 bp, Mus musculus
  siRNA target sequence for MOR120-2 (NM_146383.1,496-514).
cttaactactgcaaatcaa

SEQ ID NO: 762550 - DNA, 19 bp, Mus musculus
  siRNA target sequence for MOR120-2 (NM_146383.1,512-530).
caaatgtggtggataattt

SEQ ID NO: 762551 - DNA, 19 bp, Mus musculus
  siRNA target sequence for MOR120-2 (NM_146383.1,563-581).
cctgcaataatactatttt

SEQ ID NO: 762552 - DNA, 19 bp, Mus musculus
  siRNA target sequence for MOR120-2 (NM_146383.1,566-584).
gcaataatactattttcat

SEQ ID NO: 762553 - DNA, 19 bp, Mus musculus
  siRNA target sequence for MOR120-2 (NM_146383.1,795-813).
ccaggcagccgactacaat

SEQ ID NO: 762554 - DNA, 19 bp, Mus musculus
  siRNA target sequence for MOR120-2 (NM_146383.1,796-814).
caggcagccgactacaata

SEQ ID NO: 762555 - DNA, 19 bp, Mus musculus
  siRNA target sequence for MOR120-2 (NM_146383.1,815-833).
gggtggtttccttgatgat

SEQ ID NO: 762556 - DNA, 19 bp, Mus musculus
  siRNA target sequence for MOR120-2 (NM_146383.1,816-834).
ggtggtttccttgatgatt

SEQ ID NO: 762557 - DNA, 19 bp, Mus musculus
  siRNA target sequence for MOR120-2 (NM_146383.1,817-835).
gtggtttccttgatgattt

SEQ ID NO: 762558 - DNA, 19 bp, Mus musculus
  siRNA target sequence for MOR120-2 (NM_146383.1,874-892).
ctccgtaatgacaaagtca

SEQ ID NO: 762559 - DNA, 19 bp, Mus musculus
  siRNA target sequence for MOR120-2 (NM_146383.1,876-894).
ccgtaatgacaaagtcata

SEQ ID NO: 762560 - DNA, 19 bp, Mus musculus
  siRNA target sequence for MOR120-2 (NM_146383.1,919-937).
cgctgctaccacttcttca

SEQ ID NO: 762561 - DNA, 19 bp, Mus musculus
  siRNA target sequence for MOR182-6 (NM_146384.1,426-444).
gttcataggtgtatcctat

SEQ ID NO: 762562 - DNA, 19 bp, Mus musculus
  siRNA target sequence for MOR182-6 (NM_146384.1,441-459).
ctatctaattggacttcta

SEQ ID NO: 762563 - DNA, 19 bp, Mus musculus
  siRNA target sequence for MOR182-6 (NM_146384.1,475-493).
gtaggattgttatttaggt

SEQ ID NO: 762564 - DNA, 19 bp, Mus musculus
  siRNA target sequence for MOR182-6 (NM_146384.1,566-584).
ctgacccatctatcaatgt

SEQ ID NO: 762565 - DNA, 19 bp, Mus musculus
  siRNA target sequence for MOR182-6 (NM_146384.1,623-641).
gtacctttatgagtattat

SEQ ID NO: 762566 - DNA, 19 bp, Mus musculus
  siRNA target sequence for MOR182-6 (NM_146384.1,626-644).
cctttatgagtattatagt

SEQ ID NO: 762567 - DNA, 19 bp, Mus musculus
  siRNA target sequence for MOR182-6 (NM_146384.1,635-653).
gtattatagtctcctatat

SEQ ID NO: 762568 - DNA, 19 bp, Mus musculus
  siRNA target sequence for MOR182-6 (NM_146384.1,796-814).
gataattatcagggtaaaa

SEQ ID NO: 762569 - DNA, 19 bp, Mus musculus
  siRNA target sequence for MOR182-6 (NM_146384.1,886-904).
gtcatcggtgccttgagaa

SEQ ID NO: 762570 - DNA, 19 bp, Mus musculus
  siRNA target sequence for MOR222-3 (NM_146389.1,72-90).
gagcatggccatctttctt

SEQ ID NO: 762571 - DNA, 19 bp, Mus musculus
  siRNA target sequence for MOR222-3 (NM_146389.1,106-124).
gcggttctggggaatgtct

SEQ ID NO: 762572 - DNA, 19 bp, Mus musculus
  siRNA target sequence for MOR222-3 (NM_146389.1,115-133).
gggaatgtctctatcatga

SEQ ID NO: 762573 - DNA, 19 bp, Mus musculus
  siRNA target sequence for MOR222-3 (NM_146389.1,116-134).
ggaatgtctctatcatgat

SEQ ID NO: 762574 - DNA, 19 bp, Mus musculus
  siRNA target sequence for MOR222-3 (NM_146389.1,253-271).
gcagacaccaaagagatat

SEQ ID NO: 762575 - DNA, 19 bp, Mus musculus
  siRNA target sequence for MOR222-3 (NM_146389.1,276-294).
cccagcctgtgcatctcaa

SEQ ID NO: 762576 - DNA, 19 bp, Mus musculus
  siRNA target sequence for MOR222-3 (NM_146389.1,290-308).
ctcaactctttgcttttgt

SEQ ID NO: 762577 - DNA, 19 bp, Mus musculus
  siRNA target sequence for MOR222-3 (NM_146389.1,358-376).
cgctgtctagccatctaca

SEQ ID NO: 762578 - DNA, 19 bp, Mus musculus
  siRNA target sequence for MOR222-3 (NM_146389.1,372-390).
ctacagacccctgacatat

SEQ ID NO: 762579 - DNA, 19 bp, Mus musculus
  siRNA target sequence for MOR222-3 (NM_146389.1,638-656).
gcctgtcttatgttcttat

SEQ ID NO: 762580 - DNA, 19 bp, Mus musculus
  siRNA target sequence for MOR216-1 (NM_146390.1,17-35).
catctacagggactaaatt

SEQ ID NO: 762581 - DNA, 19 bp, Mus musculus
  siRNA target sequence for MOR216-1 (NM_146390.1,20-38).
ctacagggactaaattcat

SEQ ID NO: 762582 - DNA, 19 bp, Mus musculus
  siRNA target sequence for MOR216-1 (NM_146390.1,127-145).
ctagggcttgtggtactaa

SEQ ID NO: 762583 - DNA, 19 bp, Mus musculus
  siRNA target sequence for MOR216-1 (NM_146390.1,131-149).
ggcttgtggtactaattca

SEQ ID NO: 762584 - DNA, 19 bp, Mus musculus
  siRNA target sequence for MOR216-1 (NM_146390.1,228-246).
cacaaccccaaagacttta

SEQ ID NO: 762585 - DNA, 19 bp, Mus musculus
  siRNA target sequence for MOR216-1 (NM_146390.1,233-251).
ccccaaagactttagtcaa

SEQ ID NO: 762586 - DNA, 19 bp, Mus musculus
  siRNA target sequence for MOR216-1 (NM_146390.1,322-340).
gcttctgctgaatgtaaca

SEQ ID NO: 762587 - DNA, 19 bp, Mus musculus
  siRNA target sequence for MOR216-1 (NM_146390.1,323-341).
cttctgctgaatgtaacat

SEQ ID NO: 762588 - DNA, 19 bp, Mus musculus
  siRNA target sequence for MOR216-1 (NM_146390.1,380-398).
gtcggccattgctttacca

SEQ ID NO: 762589 - DNA, 19 bp, Mus musculus
  siRNA target sequence for MOR216-1 (NM_146390.1,382-400).
cggccattgctttaccata

SEQ ID NO: 762590 - DNA, 19 bp, Mus musculus
  siRNA target sequence for MOR216-1 (NM_146390.1,383-401).
ggccattgctttaccatat

SEQ ID NO: 762591 - DNA, 19 bp, Mus musculus
  siRNA target sequence for MOR216-1 (NM_146390.1,432-450).
ggtagcaggatgttacctt

SEQ ID NO: 762592 - DNA, 19 bp, Mus musculus
  siRNA target sequence for MOR216-1 (NM_146390.1,622-640).
gtcacctctgttatggtaa

SEQ ID NO: 762593 - DNA, 19 bp, Mus musculus
  siRNA target sequence for MOR216-1 (NM_146390.1,624-642).
cacctctgttatggtaatt

SEQ ID NO: 762594 - DNA, 19 bp, Mus musculus
  siRNA target sequence for MOR216-1 (NM_146390.1,626-644).
cctctgttatggtaattct

SEQ ID NO: 762595 - DNA, 19 bp, Mus musculus
  siRNA target sequence for MOR216-1 (NM_146390.1,627-645).
ctctgttatggtaattctt

SEQ ID NO: 762596 - DNA, 19 bp, Mus musculus
  siRNA target sequence for MOR216-1 (NM_146390.1,629-647).
ctgttatggtaattcttgt

SEQ ID NO: 762597 - DNA, 19 bp, Mus musculus
  siRNA target sequence for MOR216-1 (NM_146390.1,659-677).
ctatattcatgactatcat

SEQ ID NO: 762598 - DNA, 19 bp, Mus musculus
  siRNA target sequence for MOR216-1 (NM_146390.1,764-782).
ctatgtacacgtatttgca

SEQ ID NO: 762599 - DNA, 19 bp, Mus musculus
  siRNA target sequence for MOR216-1 (NM_146390.1,805-823).
gcaggaaatcggatgatct

SEQ ID NO: 762600 - DNA, 19 bp, Mus musculus
  siRNA target sequence for MOR216-1 (NM_146390.1,814-832).
cggatgatctcggtgtttt

SEQ ID NO: 762601 - DNA, 19 bp, Mus musculus
  siRNA target sequence for MOR216-1 (NM_146390.1,878-896).
gaaatcaggaagtgaaagt

SEQ ID NO: 762602 - DNA, 19 bp, Mus musculus
  siRNA target sequence for MOR216-1 (NM_146390.1,891-909).
gaaagttgccctacagaaa

SEQ ID NO: 762603 - DNA, 19 bp, Mus musculus
  siRNA target sequence for MOR190-2 (NM_146391.1,64-82).
gaactgcagcctccattat

SEQ ID NO: 762604 - DNA, 19 bp, Mus musculus
  siRNA target sequence for MOR190-2 (NM_146391.1,93-111).
cctcataatctatctgata

SEQ ID NO: 762605 - DNA, 19 bp, Mus musculus
  siRNA target sequence for MOR190-2 (NM_146391.1,96-114).
cataatctatctgatatct

SEQ ID NO: 762606 - DNA, 19 bp, Mus musculus
  siRNA target sequence for MOR190-2 (NM_146391.1,102-120).
ctatctgatatctctgatt

SEQ ID NO: 762607 - DNA, 19 bp, Mus musculus
  siRNA target sequence for MOR190-2 (NM_146391.1,433-451).
gtagtaatcccttatgtct

SEQ ID NO: 762608 - DNA, 19 bp, Mus musculus
  siRNA target sequence for MOR190-2 (NM_146391.1,442-460).
ccttatgtctactgtacaa

SEQ ID NO: 762609 - DNA, 19 bp, Mus musculus
  siRNA target sequence for MOR190-2 (NM_146391.1,443-461).
cttatgtctactgtacaat

SEQ ID NO: 762610 - DNA, 19 bp, Mus musculus
  siRNA target sequence for MOR190-2 (NM_146391.1,465-483).
ggctcttttaatcacaatt

SEQ ID NO: 762611 - DNA, 19 bp, Mus musculus
  siRNA target sequence for MOR190-2 (NM_146391.1,466-484).
gctcttttaatcacaatta

SEQ ID NO: 762612 - DNA, 19 bp, Mus musculus
  siRNA target sequence for MOR190-2 (NM_146391.1,467-485).
ctcttttaatcacaattaa

SEQ ID NO: 762613 - DNA, 19 bp, Mus musculus
  siRNA target sequence for MOR190-2 (NM_146391.1,469-487).
cttttaatcacaattaaga

SEQ ID NO: 762614 - DNA, 19 bp, Mus musculus
  siRNA target sequence for MOR190-2 (NM_146391.1,577-595).
caagaaattgaggtgatat

SEQ ID NO: 762615 - DNA, 19 bp, Mus musculus
  siRNA target sequence for MOR190-2 (NM_146391.1,580-598).
gaaattgaggtgatattgt

SEQ ID NO: 762616 - DNA, 19 bp, Mus musculus
  siRNA target sequence for MOR190-2 (NM_146391.1,597-615).
gttgtacttatcagctttt

SEQ ID NO: 762617 - DNA, 19 bp, Mus musculus
  siRNA target sequence for MOR274-2 (NM_146392.1,33-51).
cacctttgtgggactcttt

SEQ ID NO: 762618 - DNA, 19 bp, Mus musculus
  siRNA target sequence for MOR274-2 (NM_146392.1,44-62).
gactctttactcacaacaa

SEQ ID NO: 762619 - DNA, 19 bp, Mus musculus
  siRNA target sequence for MOR274-2 (NM_146392.1,98-116).
cgttcttcatggccatatt

SEQ ID NO: 762620 - DNA, 19 bp, Mus musculus
  siRNA target sequence for MOR274-2 (NM_146392.1,118-136).
gcaaatggggttatgatct

SEQ ID NO: 762621 - DNA, 19 bp, Mus musculus
  siRNA target sequence for MOR274-2 (NM_146392.1,222-240).
cactattgtgcctaagatt

SEQ ID NO: 762622 - DNA, 19 bp, Mus musculus
  siRNA target sequence for MOR274-2 (NM_146392.1,224-242).
ctattgtgcctaagatttt

SEQ ID NO: 762623 - DNA, 19 bp, Mus musculus
  siRNA target sequence for MOR274-2 (NM_146392.1,233-251).
ctaagattttggttgatta

SEQ ID NO: 762624 - DNA, 19 bp, Mus musculus
  siRNA target sequence for MOR274-2 (NM_146392.1,284-302).
cctgtacagcccagtactt

SEQ ID NO: 762625 - DNA, 19 bp, Mus musculus
  siRNA target sequence for MOR274-2 (NM_146392.1,287-305).
gtacagcccagtactttct

SEQ ID NO: 762626 - DNA, 19 bp, Mus musculus
  siRNA target sequence for MOR274-2 (NM_146392.1,409-427).
cggagggtctgctggttta

SEQ ID NO: 762627 - DNA, 19 bp, Mus musculus
  siRNA target sequence for MOR274-2 (NM_146392.1,411-429).
gagggtctgctggtttatt

SEQ ID NO: 762628 - DNA, 19 bp, Mus musculus
  siRNA target sequence for MOR274-2 (NM_146392.1,449-467).
gtggggctttggacagttt

SEQ ID NO: 762629 - DNA, 19 bp, Mus musculus
  siRNA target sequence for MOR274-2 (NM_146392.1,510-528).
ccacaagattaatcacttt

SEQ ID NO: 762630 - DNA, 19 bp, Mus musculus
  siRNA target sequence for MOR274-2 (NM_146392.1,566-584).
gtgacaaagccatatatga

SEQ ID NO: 762631 - DNA, 19 bp, Mus musculus
  siRNA target sequence for MOR274-2 (NM_146392.1,644-662).
catcttatgcccagatact

SEQ ID NO: 762632 - DNA, 19 bp, Mus musculus
  siRNA target sequence for MOR274-2 (NM_146392.1,663-681).
ggtcacagtacatcacata

SEQ ID NO: 762633 - DNA, 19 bp, Mus musculus
  siRNA target sequence for MOR274-2 (NM_146392.1,757-775).
gctgctttgtacacctata

SEQ ID NO: 762634 - DNA, 19 bp, Mus musculus
  siRNA target sequence for MOR274-2 (NM_146392.1,758-776).
ctgctttgtacacctatat

SEQ ID NO: 762635 - DNA, 19 bp, Mus musculus
  siRNA target sequence for MOR274-2 (NM_146392.1,761-779).
ctttgtacacctatatgct

SEQ ID NO: 762636 - DNA, 19 bp, Mus musculus
  siRNA target sequence for MOR274-2 (NM_146392.1,778-796).
cttccccaagcctatcaca

SEQ ID NO: 762637 - DNA, 19 bp, Mus musculus
  siRNA target sequence for MOR274-2 (NM_146392.1,799-817).
ccactcaaagataaaatct

SEQ ID NO: 762638 - DNA, 19 bp, Mus musculus
  siRNA target sequence for MOR274-2 (NM_146392.1,883-901).
gatgtggcaggggctttaa

SEQ ID NO: 762639 - DNA, 19 bp, Mus musculus
  siRNA target sequence for MOR274-2 (NM_146392.1,886-904).
gtggcaggggctttaaaga

SEQ ID NO: 762640 - DNA, 19 bp, Mus musculus
  siRNA target sequence for MOR245-12 (NM_146393.1,3-21).
gccgatggatcaactaaat

SEQ ID NO: 762641 - DNA, 19 bp, Mus musculus
  siRNA target sequence for MOR245-12 (NM_146393.1,68-86).
gggaaactaaagtttttct

SEQ ID NO: 762642 - DNA, 19 bp, Mus musculus
  siRNA target sequence for MOR245-12 (NM_146393.1,79-97).
gtttttctcatggtaacat

SEQ ID NO: 762643 - DNA, 19 bp, Mus musculus
  siRNA target sequence for MOR245-12 (NM_146393.1,85-103).
ctcatggtaacattctcta

SEQ ID NO: 762644 - DNA, 19 bp, Mus musculus
  siRNA target sequence for MOR245-12 (NM_146393.1,105-123).
gctctacatcggaatcatt

SEQ ID NO: 762645 - DNA, 19 bp, Mus musculus
  siRNA target sequence for MOR245-12 (NM_146393.1,106-124).
ctctacatcggaatcattt

SEQ ID NO: 762646 - DNA, 19 bp, Mus musculus
  siRNA target sequence for MOR245-12 (NM_146393.1,157-175).
gctgactctcacttacatt

SEQ ID NO: 762647 - DNA, 19 bp, Mus musculus
  siRNA target sequence for MOR245-12 (NM_146393.1,222-240).
ggtttcctccactacagtt

SEQ ID NO: 762648 - DNA, 19 bp, Mus musculus
  siRNA target sequence for MOR245-12 (NM_146393.1,879-897).
caaagatataagaatagca

SEQ ID NO: 762649 - DNA, 19 bp, Mus musculus
  siRNA target sequence for MOR245-11 (NM_146394.1,46-64).
ggactttcatcatctagaa

SEQ ID NO: 762650 - DNA, 19 bp, Mus musculus
  siRNA target sequence for MOR245-11 (NM_146394.1,47-65).
gactttcatcatctagaaa

SEQ ID NO: 762651 - DNA, 19 bp, Mus musculus
  siRNA target sequence for MOR245-11 (NM_146394.1,413-431).
caagaatgtgccttatgct

SEQ ID NO: 762652 - DNA, 19 bp, Mus musculus
  siRNA target sequence for MOR245-11 (NM_146394.1,471-489).
gacccaattagcgtttatt

SEQ ID NO: 762653 - DNA, 19 bp, Mus musculus
  siRNA target sequence for MOR245-11 (NM_146394.1,473-491).
cccaattagcgtttattat

SEQ ID NO: 762654 - DNA, 19 bp, Mus musculus
  siRNA target sequence for MOR245-11 (NM_146394.1,475-493).
caattagcgtttattatca

SEQ ID NO: 762655 - DNA, 19 bp, Mus musculus
  siRNA target sequence for MOR245-11 (NM_146394.1,498-516).
gaatttttgtggtcctaat

SEQ ID NO: 762656 - DNA, 19 bp, Mus musculus
  siRNA target sequence for MOR245-11 (NM_146394.1,566-584).
gcatagaccccaagaaaat

SEQ ID NO: 762657 - DNA, 19 bp, Mus musculus
  siRNA target sequence for MOR245-11 (NM_146394.1,625-643).
ggcacctttttgttattga

SEQ ID NO: 762658 - DNA, 19 bp, Mus musculus
  siRNA target sequence for MOR245-11 (NM_146394.1,902-920).
gactgattactcagctatt

SEQ ID NO: 762659 - DNA, 19 bp, Mus musculus
  siRNA target sequence for MOR245-11 (NM_146394.1,904-922).
ctgattactcagctattca

SEQ ID NO: 762660 - DNA, 19 bp, Mus musculus
  siRNA target sequence for MOR245-10 (NM_146395.1,191-209).
gaaacctctcatttattga

SEQ ID NO: 762661 - DNA, 19 bp, Mus musculus
  siRNA target sequence for MOR245-10 (NM_146395.1,413-431).
cacggatgtgcctattgct

SEQ ID NO: 762662 - DNA, 19 bp, Mus musculus
  siRNA target sequence for MOR245-10 (NM_146395.1,500-518).
gattttgtggacctaataa

SEQ ID NO: 762663 - DNA, 19 bp, Mus musculus
  siRNA target sequence for MOR245-10 (NM_146395.1,620-638).
ctattggcaccttcttctt

SEQ ID NO: 762664 - DNA, 19 bp, Mus musculus
  siRNA target sequence for MOR245-10 (NM_146395.1,901-919).
ctgagttatcagttcttga

SEQ ID NO: 762665 - DNA, 19 bp, Mus musculus
  siRNA target sequence for MOR245-10 (NM_146395.1,903-921).
gagttatcagttcttgaat

SEQ ID NO: 762666 - DNA, 19 bp, Mus musculus
  siRNA target sequence for MOR248-11 (NM_146396.1,15-33).
ccactctgagatatctgaa

SEQ ID NO: 762667 - DNA, 19 bp, Mus musculus
  siRNA target sequence for MOR248-11 (NM_146396.1,87-105).
gatctttacttcactttat

SEQ ID NO: 762668 - DNA, 19 bp, Mus musculus
  siRNA target sequence for MOR248-11 (NM_146396.1,90-108).
ctttacttcactttattta

SEQ ID NO: 762669 - DNA, 19 bp, Mus musculus
  siRNA target sequence for MOR248-11 (NM_146396.1,111-129).
caccatttttggcaacata

SEQ ID NO: 762670 - DNA, 19 bp, Mus musculus
  siRNA target sequence for MOR248-11 (NM_146396.1,249-267).
cgacttcctcaaggaaata

SEQ ID NO: 762671 - DNA, 19 bp, Mus musculus
  siRNA target sequence for MOR248-11 (NM_146396.1,262-280).
gaaataaagacgatctctt

SEQ ID NO: 762672 - DNA, 19 bp, Mus musculus
  siRNA target sequence for MOR248-11 (NM_146396.1,435-453).
gatggcgtcatggatgatt

SEQ ID NO: 762673 - DNA, 19 bp, Mus musculus
  siRNA target sequence for MOR248-11 (NM_146396.1,467-485).
caataagccaactggttat

SEQ ID NO: 762674 - DNA, 19 bp, Mus musculus
  siRNA target sequence for MOR248-11 (NM_146396.1,473-491).
gccaactggttataattgt

SEQ ID NO: 762675 - DNA, 19 bp, Mus musculus
  siRNA target sequence for MOR248-11 (NM_146396.1,512-530).
ccagagttttggacagttt

SEQ ID NO: 762676 - DNA, 19 bp, Mus musculus
  siRNA target sequence for MOR248-11 (NM_146396.1,534-552).
ctgcgatattccattggta

SEQ ID NO: 762677 - DNA, 19 bp, Mus musculus
  siRNA target sequence for MOR248-11 (NM_146396.1,536-554).
gcgatattccattggtaat

SEQ ID NO: 762678 - DNA, 19 bp, Mus musculus
  siRNA target sequence for MOR248-11 (NM_146396.1,566-584).
gcttggacatctatgttct

SEQ ID NO: 762679 - DNA, 19 bp, Mus musculus
  siRNA target sequence for MOR183-4 (NM_146397.1,234-252).
gatgttactcgatttctta

SEQ ID NO: 762680 - DNA, 19 bp, Mus musculus
  siRNA target sequence for MOR183-4 (NM_146397.1,243-261).
cgatttcttacagatgaat

SEQ ID NO: 762681 - DNA, 19 bp, Mus musculus
  siRNA target sequence for MOR183-4 (NM_146397.1,402-420).
gactaagagactatgtata

SEQ ID NO: 762682 - DNA, 19 bp, Mus musculus
  siRNA target sequence for MOR183-4 (NM_146397.1,474-492).
gggatttctattactacta

SEQ ID NO: 762683 - DNA, 19 bp, Mus musculus
  siRNA target sequence for MOR183-4 (NM_146397.1,532-550).
gacatcgttccattgctaa

SEQ ID NO: 762684 - DNA, 19 bp, Mus musculus
  siRNA target sequence for MOR183-4 (NM_146397.1,572-590).
ctcttaattttcaactgat

SEQ ID NO: 762685 - DNA, 19 bp, Mus musculus
  siRNA target sequence for MOR183-4 (NM_146397.1,644-662).
cctatacactagtgctatt

SEQ ID NO: 762686 - DNA, 19 bp, Mus musculus
  siRNA target sequence for MOR183-4 (NM_146397.1,677-695).
ggaagtctgtccaaagcat

SEQ ID NO: 762687 - DNA, 19 bp, Mus musculus
  siRNA target sequence for MOR183-4 (NM_146397.1,683-701).
ctgtccaaagcatgaagaa

SEQ ID NO: 762688 - DNA, 19 bp, Mus musculus
  siRNA target sequence for MOR102-1 (NM_146398.1,12-30).
gaattaccaggaaattgga

SEQ ID NO: 762689 - DNA, 19 bp, Mus musculus
  siRNA target sequence for MOR102-1 (NM_146398.1,107-125).
cactgatgtttctctatat

SEQ ID NO: 762690 - DNA, 19 bp, Mus musculus
  siRNA target sequence for MOR102-1 (NM_146398.1,137-155).
caggaaacagtttgattat

SEQ ID NO: 762691 - DNA, 19 bp, Mus musculus
  siRNA target sequence for MOR102-1 (NM_146398.1,163-181).
gtaggaggcaactctcaat

SEQ ID NO: 762692 - DNA, 19 bp, Mus musculus
  siRNA target sequence for MOR102-1 (NM_146398.1,167-185).
gaggcaactctcaattgca

SEQ ID NO: 762693 - DNA, 19 bp, Mus musculus
  siRNA target sequence for MOR102-1 (NM_146398.1,218-236).
ctttactggatcttctatt

SEQ ID NO: 762694 - DNA, 19 bp, Mus musculus
  siRNA target sequence for MOR102-1 (NM_146398.1,245-263).
gtgttgtacccttgatcat

SEQ ID NO: 762695 - DNA, 19 bp, Mus musculus
  siRNA target sequence for MOR102-1 (NM_146398.1,253-271).
cccttgatcatggtgaatt

SEQ ID NO: 762696 - DNA, 19 bp, Mus musculus
  siRNA target sequence for MOR102-1 (NM_146398.1,428-446).
cttctcgagtatgtatttt

SEQ ID NO: 762697 - DNA, 19 bp, Mus musculus
  siRNA target sequence for MOR102-1 (NM_146398.1,485-503).
ctgttctgcccattctaat

SEQ ID NO: 762698 - DNA, 19 bp, Mus musculus
  siRNA target sequence for MOR102-1 (NM_146398.1,494-512).
ccattctaatctttccaat

SEQ ID NO: 762699 - DNA, 19 bp, Mus musculus
  siRNA target sequence for MOR102-1 (NM_146398.1,515-533).
gtttctgtgggcagaatgt

SEQ ID NO: 762700 - DNA, 19 bp, Mus musculus
  siRNA target sequence for MOR102-1 (NM_146398.1,524-542).
ggcagaatgtagtcaatca

SEQ ID NO: 762701 - DNA, 19 bp, Mus musculus
  siRNA target sequence for MOR102-1 (NM_146398.1,570-588).
caaattgctctgttctaat

SEQ ID NO: 762702 - DNA, 19 bp, Mus musculus
  siRNA target sequence for MOR102-1 (NM_146398.1,577-595).
ctctgttctaataccattt

SEQ ID NO: 762703 - DNA, 19 bp, Mus musculus
  siRNA target sequence for MOR102-1 (NM_146398.1,596-614).
ctttacagattatgatgat

SEQ ID NO: 762704 - DNA, 19 bp, Mus musculus
  siRNA target sequence for MOR102-1 (NM_146398.1,612-630).
gatagcttgtgctgtcatt

SEQ ID NO: 762705 - DNA, 19 bp, Mus musculus
  siRNA target sequence for MOR102-1 (NM_146398.1,632-650).
caatgccagtacctttaat

SEQ ID NO: 762706 - DNA, 19 bp, Mus musculus
  siRNA target sequence for MOR102-1 (NM_146398.1,678-696).
cctcaaggctgttttaaga

SEQ ID NO: 762707 - DNA, 19 bp, Mus musculus
  siRNA target sequence for MOR102-1 (NM_146398.1,765-783).
ctactttggcacactaata

SEQ ID NO: 762708 - DNA, 19 bp, Mus musculus
  siRNA target sequence for MOR102-1 (NM_146398.1,772-790).
ggcacactaatatatattt

SEQ ID NO: 762709 - DNA, 19 bp, Mus musculus
  siRNA target sequence for MOR102-1 (NM_146398.1,815-833).
ctcacaatggggacaaaat

SEQ ID NO: 762710 - DNA, 19 bp, Mus musculus
  siRNA target sequence for MOR102-1 (NM_146398.1,824-842).
gggacaaaattgtctcaat

SEQ ID NO: 762711 - DNA, 19 bp, Mus musculus
  siRNA target sequence for MOR245-9 (NM_146400.1,44-62).
cttctgctctacctgaatt

SEQ ID NO: 762712 - DNA, 19 bp, Mus musculus
  siRNA target sequence for MOR245-9 (NM_146400.1,47-65).
ctgctctacctgaatttgt

SEQ ID NO: 762713 - DNA, 19 bp, Mus musculus
  siRNA target sequence for MOR245-9 (NM_146400.1,72-90).
gggacttgcacaatcgttt

SEQ ID NO: 762714 - DNA, 19 bp, Mus musculus
  siRNA target sequence for MOR245-9 (NM_146400.1,76-94).
cttgcacaatcgtttggaa

SEQ ID NO: 762715 - DNA, 19 bp, Mus musculus
  siRNA target sequence for MOR245-9 (NM_146400.1,86-104).
cgtttggaacacagatttt

SEQ ID NO: 762716 - DNA, 19 bp, Mus musculus
  siRNA target sequence for MOR245-9 (NM_146400.1,165-183).
gttcatagtgattgttgat

SEQ ID NO: 762717 - DNA, 19 bp, Mus musculus
  siRNA target sequence for MOR245-9 (NM_146400.1,168-186).
catagtgattgttgattct

SEQ ID NO: 762718 - DNA, 19 bp, Mus musculus
  siRNA target sequence for MOR245-9 (NM_146400.1,174-192).
gattgttgattctcattta

SEQ ID NO: 762719 - DNA, 19 bp, Mus musculus
  siRNA target sequence for MOR245-9 (NM_146400.1,178-196).
gttgattctcatttacact

SEQ ID NO: 762720 - DNA, 19 bp, Mus musculus
  siRNA target sequence for MOR245-9 (NM_146400.1,243-261).
cctttcatctacaacaatt

SEQ ID NO: 762721 - DNA, 19 bp, Mus musculus
  siRNA target sequence for MOR245-9 (NM_146400.1,429-447).
gatcatgaatcccaaaaaa

SEQ ID NO: 762722 - DNA, 19 bp, Mus musculus
  siRNA target sequence for MOR245-9 (NM_146400.1,432-450).
catgaatcccaaaaaatgt

SEQ ID NO: 762723 - DNA, 19 bp, Mus musculus
  siRNA target sequence for MOR245-9 (NM_146400.1,473-491).
gggtcatagggatgattca

SEQ ID NO: 762724 - DNA, 19 bp, Mus musculus
  siRNA target sequence for MOR245-9 (NM_146400.1,474-492).
ggtcatagggatgattcat

SEQ ID NO: 762725 - DNA, 19 bp, Mus musculus
  siRNA target sequence for MOR245-9 (NM_146400.1,660-678).
cttttttctgattacatca

SEQ ID NO: 762726 - DNA, 19 bp, Mus musculus
  siRNA target sequence for MOR245-9 (NM_146400.1,674-692).
catcatacatttttatcct

SEQ ID NO: 762727 - DNA, 19 bp, Mus musculus
  siRNA target sequence for MOR245-9 (NM_146400.1,693-711).
ggccagtgtacgacaacat

SEQ ID NO: 762728 - DNA, 19 bp, Mus musculus
  siRNA target sequence for MOR245-9 (NM_146400.1,694-712).
gccagtgtacgacaacatt

SEQ ID NO: 762729 - DNA, 19 bp, Mus musculus
  siRNA target sequence for MOR245-9 (NM_146400.1,696-714).
cagtgtacgacaacattct

SEQ ID NO: 762730 - DNA, 19 bp, Mus musculus
  siRNA target sequence for MOR245-9 (NM_146400.1,814-832).
ccgaccaagtcacttgata

SEQ ID NO: 762731 - DNA, 19 bp, Mus musculus
  siRNA target sequence for MOR245-9 (NM_146400.1,815-833).
cgaccaagtcacttgataa

SEQ ID NO: 762732 - DNA, 19 bp, Mus musculus
  siRNA target sequence for MOR245-9 (NM_146400.1,816-834).
gaccaagtcacttgataat

SEQ ID NO: 762733 - DNA, 19 bp, Mus musculus
  siRNA target sequence for MOR245-9 (NM_146400.1,818-836).
ccaagtcacttgataattt

SEQ ID NO: 762734 - DNA, 19 bp, Mus musculus
  siRNA target sequence for MOR245-9 (NM_146400.1,868-886).
gtcttaaatcctactatct

SEQ ID NO: 762735 - DNA, 19 bp, Mus musculus
  siRNA target sequence for MOR245-9 (NM_146400.1,916-934).
gccatcagaaggctaagta

SEQ ID NO: 762736 - DNA, 19 bp, Mus musculus
  siRNA target sequence for MOR245-9 (NM_146400.1,926-944).
ggctaagtagacaggtttt

SEQ ID NO: 762737 - DNA, 19 bp, Mus musculus
  siRNA target sequence for MOR245-9 (NM_146400.1,927-945).
gctaagtagacaggtttta

SEQ ID NO: 762738 - DNA, 19 bp, Mus musculus
  siRNA target sequence for MOR245-8 (NM_146401.1,39-57).
gctgttggggctctcaaat

SEQ ID NO: 762739 - DNA, 19 bp, Mus musculus
  siRNA target sequence for MOR245-8 (NM_146401.1,40-58).
ctgttggggctctcaaatt

SEQ ID NO: 762740 - DNA, 19 bp, Mus musculus
  siRNA target sequence for MOR245-8 (NM_146401.1,59-77).
cctgggagatccaggtttt

SEQ ID NO: 762741 - DNA, 19 bp, Mus musculus
  siRNA target sequence for MOR245-8 (NM_146401.1,87-105).
ctttacttgtctgttctat

SEQ ID NO: 762742 - DNA, 19 bp, Mus musculus
  siRNA target sequence for MOR245-8 (NM_146401.1,126-144).
cttcatcatagttgttaca

SEQ ID NO: 762743 - DNA, 19 bp, Mus musculus
  siRNA target sequence for MOR245-8 (NM_146401.1,187-205).
ctggctaatctctctgtta

SEQ ID NO: 762744 - DNA, 19 bp, Mus musculus
  siRNA target sequence for MOR245-8 (NM_146401.1,413-431).
cacggatgtgcctgctaat

SEQ ID NO: 762745 - DNA, 19 bp, Mus musculus
  siRNA target sequence for MOR245-8 (NM_146401.1,420-438).
gtgcctgctaatattagtt

SEQ ID NO: 762746 - DNA, 19 bp, Mus musculus
  siRNA target sequence for MOR245-8 (NM_146401.1,506-524).
gtggccctaacatactaga

SEQ ID NO: 762747 - DNA, 19 bp, Mus musculus
  siRNA target sequence for MOR245-8 (NM_146401.1,516-534).
catactagacagcttttat

SEQ ID NO: 762748 - DNA, 19 bp, Mus musculus
  siRNA target sequence for MOR245-8 (NM_146401.1,681-699).
gcagtcctcaggatgttca

SEQ ID NO: 762749 - DNA, 19 bp, Mus musculus
  siRNA target sequence for MOR245-8 (NM_146401.1,713-731).
ctactctgttggctcatat

SEQ ID NO: 762750 - DNA, 19 bp, Mus musculus
  siRNA target sequence for MOR245-8 (NM_146401.1,720-738).
gttggctcatattacagtt

SEQ ID NO: 762751 - DNA, 19 bp, Mus musculus
  siRNA target sequence for MOR245-8 (NM_146401.1,780-798).
cccttctccttcaacacat

SEQ ID NO: 762752 - DNA, 19 bp, Mus musculus
  siRNA target sequence for MOR245-8 (NM_146401.1,787-805).
ccttcaacacatgtagata

SEQ ID NO: 762753 - DNA, 19 bp, Mus musculus
  siRNA target sequence for MOR245-8 (NM_146401.1,788-806).
cttcaacacatgtagataa

SEQ ID NO: 762754 - DNA, 19 bp, Mus musculus
  siRNA target sequence for MOR245-8 (NM_146401.1,791-809).
caacacatgtagataaatt

SEQ ID NO: 762755 - DNA, 19 bp, Mus musculus
  siRNA target sequence for MOR245-7 (NM_146402.1,97-115).
gtgctctacatattaagca

SEQ ID NO: 762756 - DNA, 19 bp, Mus musculus
  siRNA target sequence for MOR245-7 (NM_146402.1,147-165).
gaccattgaccctcactta

SEQ ID NO: 762757 - DNA, 19 bp, Mus musculus
  siRNA target sequence for MOR245-7 (NM_146402.1,149-167).
ccattgaccctcacttaca

SEQ ID NO: 762758 - DNA, 19 bp, Mus musculus
  siRNA target sequence for MOR245-7 (NM_146402.1,198-216).
ctccttcattgatttggta

SEQ ID NO: 762759 - DNA, 19 bp, Mus musculus
  siRNA target sequence for MOR245-7 (NM_146402.1,214-232).
gtagcctgctctgttactt

SEQ ID NO: 762760 - DNA, 19 bp, Mus musculus
  siRNA target sequence for MOR245-7 (NM_146402.1,243-261).
ggtttatgacttgtttaga

SEQ ID NO: 762761 - DNA, 19 bp, Mus musculus
  siRNA target sequence for MOR245-7 (NM_146402.1,244-262).
gtttatgacttgtttagaa

SEQ ID NO: 762762 - DNA, 19 bp, Mus musculus
  siRNA target sequence for MOR245-7 (NM_146402.1,454-472).
ggcattagccactcattgt

SEQ ID NO: 762763 - DNA, 19 bp, Mus musculus
  siRNA target sequence for MOR245-7 (NM_146402.1,620-638).
gtgttggctctttcttgtt

SEQ ID NO: 762764 - DNA, 19 bp, Mus musculus
  siRNA target sequence for MOR245-7 (NM_146402.1,755-773).
gtcctactctgtttatata

SEQ ID NO: 762765 - DNA, 19 bp, Mus musculus
  siRNA target sequence for MOR245-7 (NM_146402.1,886-904).
gtagcaataaggagagttt

SEQ ID NO: 762766 - DNA, 19 bp, Mus musculus
  siRNA target sequence for MOR245-6 (NM_146404.1,20-38).
gggaacttcagatctttct

SEQ ID NO: 762767 - DNA, 19 bp, Mus musculus
  siRNA target sequence for MOR245-6 (NM_146404.1,64-82).
gtaggcattgtgtttggaa

SEQ ID NO: 762768 - DNA, 19 bp, Mus musculus
  siRNA target sequence for MOR245-6 (NM_146404.1,80-98).
gaaaccttcttattgtcat

SEQ ID NO: 762769 - DNA, 19 bp, Mus musculus
  siRNA target sequence for MOR245-6 (NM_146404.1,84-102).
ccttcttattgtcataact

SEQ ID NO: 762770 - DNA, 19 bp, Mus musculus
  siRNA target sequence for MOR245-6 (NM_146404.1,223-241).
cgcaaagtcatctctgtta

SEQ ID NO: 762771 - DNA, 19 bp, Mus musculus
  siRNA target sequence for MOR245-6 (NM_146404.1,361-379).
gttatgcgtggcaatgtat

SEQ ID NO: 762772 - DNA, 19 bp, Mus musculus
  siRNA target sequence for MOR245-6 (NM_146404.1,366-384).
gcgtggcaatgtatgtgtt

SEQ ID NO: 762773 - DNA, 19 bp, Mus musculus
  siRNA target sequence for MOR245-6 (NM_146404.1,367-385).
cgtggcaatgtatgtgtta

SEQ ID NO: 762774 - DNA, 19 bp, Mus musculus
  siRNA target sequence for MOR245-6 (NM_146404.1,371-389).
gcaatgtatgtgttagcat

SEQ ID NO: 762775 - DNA, 19 bp, Mus musculus
  siRNA target sequence for MOR245-6 (NM_146404.1,431-449).
gccaattggcctttgctat

SEQ ID NO: 762776 - DNA, 19 bp, Mus musculus
  siRNA target sequence for MOR245-6 (NM_146404.1,477-495).
ggttgacagcttttattgt

SEQ ID NO: 762777 - DNA, 19 bp, Mus musculus
  siRNA target sequence for MOR245-6 (NM_146404.1,494-512).
gtgaccttcctagagtaat

SEQ ID NO: 762778 - DNA, 19 bp, Mus musculus
  siRNA target sequence for MOR245-6 (NM_146404.1,529-547).
gagacatataggttagaca

SEQ ID NO: 762779 - DNA, 19 bp, Mus musculus
  siRNA target sequence for MOR245-6 (NM_146404.1,608-626).
cctatggtattattctaat

SEQ ID NO: 762780 - DNA, 19 bp, Mus musculus
  siRNA target sequence for MOR245-6 (NM_146404.1,643-661).
ccttctgataggtcatcta

SEQ ID NO: 762781 - DNA, 19 bp, Mus musculus
  siRNA target sequence for MOR245-6 (NM_146404.1,644-662).
cttctgataggtcatctaa

SEQ ID NO: 762782 - DNA, 19 bp, Mus musculus
  siRNA target sequence for MOR245-6 (NM_146404.1,690-708).
cacagtagttcttttgttt

SEQ ID NO: 762783 - DNA, 19 bp, Mus musculus
  siRNA target sequence for MOR245-6 (NM_146404.1,740-758).
cctttcccatcaagtcatt

SEQ ID NO: 762784 - DNA, 19 bp, Mus musculus
  siRNA target sequence for MOR245-6 (NM_146404.1,745-763).
cccatcaagtcattagata

SEQ ID NO: 762785 - DNA, 19 bp, Mus musculus
  siRNA target sequence for MOR245-6 (NM_146404.1,746-764).
ccatcaagtcattagataa

SEQ ID NO: 762786 - DNA, 19 bp, Mus musculus
  siRNA target sequence for MOR245-6 (NM_146404.1,753-771).
gtcattagataaattcctt

SEQ ID NO: 762787 - DNA, 19 bp, Mus musculus
  siRNA target sequence for MOR245-6 (NM_146404.1,854-872).
gacgcctgagacaatggaa

SEQ ID NO: 762788 - DNA, 19 bp, Mus musculus
  siRNA target sequence for MOR245-6 (NM_146404.1,856-874).
cgcctgagacaatggaatt

SEQ ID NO: 762789 - DNA, 19 bp, Mus musculus
  siRNA target sequence for MOR245-6 (NM_146404.1,859-877).
ctgagacaatggaatttaa

SEQ ID NO: 762790 - DNA, 19 bp, Mus musculus
  siRNA target sequence for MOR245-6 (NM_146404.1,863-881).
gacaatggaatttaagctt

SEQ ID NO: 762791 - DNA, 19 bp, Mus musculus
  siRNA target sequence for MOR189-2 (NM_146406.1,290-308).
gtgctgtccaattgtcttt

SEQ ID NO: 762792 - DNA, 19 bp, Mus musculus
  siRNA target sequence for MOR189-2 (NM_146406.1,293-311).
ctgtccaattgtctttctt

SEQ ID NO: 762793 - DNA, 19 bp, Mus musculus
  siRNA target sequence for MOR189-2 (NM_146406.1,295-313).
gtccaattgtctttcttca

SEQ ID NO: 762794 - DNA, 19 bp, Mus musculus
  siRNA target sequence for MOR189-2 (NM_146406.1,432-450).
ggtggcaatcccatacctt

SEQ ID NO: 762795 - DNA, 19 bp, Mus musculus
  siRNA target sequence for MOR266-4 (NM_146410.1,20-38).
ctgccaaggtacaattctt

SEQ ID NO: 762796 - DNA, 19 bp, Mus musculus
  siRNA target sequence for MOR266-4 (NM_146410.1,22-40).
gccaaggtacaattcttct

SEQ ID NO: 762797 - DNA, 19 bp, Mus musculus
  siRNA target sequence for MOR266-4 (NM_146410.1,23-41).
ccaaggtacaattcttctt

SEQ ID NO: 762798 - DNA, 19 bp, Mus musculus
  siRNA target sequence for MOR266-4 (NM_146410.1,136-154).
gctgtgattgtccatatta

SEQ ID NO: 762799 - DNA, 19 bp, Mus musculus
  siRNA target sequence for MOR266-4 (NM_146410.1,241-259).
gccttggcaaaccttcttt

SEQ ID NO: 762800 - DNA, 19 bp, Mus musculus
  siRNA target sequence for MOR266-4 (NM_146410.1,416-434).
ggtccttgtgtgtagagat

SEQ ID NO: 762801 - DNA, 19 bp, Mus musculus
  siRNA target sequence for MOR266-4 (NM_146410.1,466-484).
ctgtcactgcccctaacta

SEQ ID NO: 762802 - DNA, 19 bp, Mus musculus
  siRNA target sequence for MOR266-4 (NM_146410.1,468-486).
gtcactgcccctaactatt

SEQ ID NO: 762803 - DNA, 19 bp, Mus musculus
  siRNA target sequence for MOR266-4 (NM_146410.1,470-488).
cactgcccctaactatttt

SEQ ID NO: 762804 - DNA, 19 bp, Mus musculus
  siRNA target sequence for MOR266-4 (NM_146410.1,472-490).
ctgcccctaactattttaa

SEQ ID NO: 762805 - DNA, 19 bp, Mus musculus
  siRNA target sequence for MOR266-4 (NM_146410.1,571-589).
ggagacacgcatgttcata

SEQ ID NO: 762806 - DNA, 19 bp, Mus musculus
  siRNA target sequence for MOR266-4 (NM_146410.1,586-604).
cataggactgccctgtata

SEQ ID NO: 762807 - DNA, 19 bp, Mus musculus
  siRNA target sequence for MOR266-4 (NM_146410.1,611-629).
gcttcattgtcctaagcat

SEQ ID NO: 762808 - DNA, 19 bp, Mus musculus
  siRNA target sequence for MOR266-4 (NM_146410.1,631-649).
cccctaactctgatctcta

SEQ ID NO: 762809 - DNA, 19 bp, Mus musculus
  siRNA target sequence for MOR266-4 (NM_146410.1,632-650).
ccctaactctgatctctat

SEQ ID NO: 762810 - DNA, 19 bp, Mus musculus
  siRNA target sequence for MOR266-4 (NM_146410.1,634-652).
ctaactctgatctctatct

SEQ ID NO: 762811 - DNA, 19 bp, Mus musculus
  siRNA target sequence for MOR266-4 (NM_146410.1,663-681).
catcatcacagcgatttta

SEQ ID NO: 762812 - DNA, 19 bp, Mus musculus
  siRNA target sequence for MOR266-4 (NM_146410.1,756-774).
gtatggctgcaccagtttt

SEQ ID NO: 762813 - DNA, 19 bp, Mus musculus
  siRNA target sequence for MOR266-4 (NM_146410.1,760-778).
ggctgcaccagttttatat

SEQ ID NO: 762814 - DNA, 19 bp, Mus musculus
  siRNA target sequence for MOR240-3 (NM_146411.1,411-429).
cactcaacactgtgtagta

SEQ ID NO: 762815 - DNA, 19 bp, Mus musculus
  siRNA target sequence for MOR240-3 (NM_146411.1,413-431).
ctcaacactgtgtagtact

SEQ ID NO: 762816 - DNA, 19 bp, Mus musculus
  siRNA target sequence for MOR240-3 (NM_146411.1,909-927).
gcatctgctagtttgtaga

SEQ ID NO: 762817 - DNA, 19 bp, Mus musculus
  siRNA target sequence for MOR240-1 (NM_146413.1,380-398).
cccgacctctccactatgt

SEQ ID NO: 762818 - DNA, 19 bp, Mus musculus
  siRNA target sequence for MOR214-5 (NM_146414.1,23-41).
ccacaataacccagttcat

SEQ ID NO: 762819 - DNA, 19 bp, Mus musculus
  siRNA target sequence for MOR162-7 (NM_146418.1,14-32).
gaatggctttaggaaatga

SEQ ID NO: 762820 - DNA, 19 bp, Mus musculus
  siRNA target sequence for MOR162-7 (NM_146418.1,105-123).
cttcttgggagtctatata

SEQ ID NO: 762821 - DNA, 19 bp, Mus musculus
  siRNA target sequence for MOR162-7 (NM_146418.1,486-504).
gcatactgccagtatggta

SEQ ID NO: 762822 - DNA, 19 bp, Mus musculus
  siRNA target sequence for MOR162-7 (NM_146418.1,497-515).
gtatggtacacctgatctt

SEQ ID NO: 762823 - DNA, 19 bp, Mus musculus
  siRNA target sequence for MOR162-7 (NM_146418.1,898-916).
gtccatatcgcccttaaaa

SEQ ID NO: 762824 - DNA, 19 bp, Mus musculus
  siRNA target sequence for MOR162-6 (NM_146419.1,382-400).
cctctactttaccaagtta

SEQ ID NO: 762825 - DNA, 19 bp, Mus musculus
  siRNA target sequence for MOR162-6 (NM_146419.1,472-490).
cacactggtagtatggtaa

SEQ ID NO: 762826 - DNA, 19 bp, Mus musculus
  siRNA target sequence for MOR106-3 (NM_146420.1,598-616).
gagatgactagctctactt

SEQ ID NO: 762827 - DNA, 19 bp, Mus musculus
  siRNA target sequence for MOR106-3 (NM_146420.1,600-618).
gatgactagctctacttta

SEQ ID NO: 762828 - DNA, 19 bp, Mus musculus
  siRNA target sequence for MOR106-3 (NM_146420.1,657-675).
ggggtcttatgctctagta

SEQ ID NO: 762829 - DNA, 19 bp, Mus musculus
  siRNA target sequence for MOR106-3 (NM_146420.1,658-676).
gggtcttatgctctagtaa

SEQ ID NO: 762830 - DNA, 19 bp, Mus musculus
  siRNA target sequence for MOR106-3 (NM_146420.1,659-677).
ggtcttatgctctagtaat

SEQ ID NO: 762831 - DNA, 19 bp, Mus musculus
  siRNA target sequence for MOR106-3 (NM_146420.1,896-914).
gagatatgaaacatgcaat

SEQ ID NO: 762832 - DNA, 19 bp, Mus musculus
  siRNA target sequence for MOR218-3 (NM_146427.1,17-35).
ccaacacaacagaatacat

SEQ ID NO: 762833 - DNA, 19 bp, Mus musculus
  siRNA target sequence for MOR218-3 (NM_146427.1,80-98).
cattgtgtgccacactttt

SEQ ID NO: 762834 - DNA, 19 bp, Mus musculus
  siRNA target sequence for MOR218-3 (NM_146427.1,116-134).
gagcactagtgggaaactt

SEQ ID NO: 762835 - DNA, 19 bp, Mus musculus
  siRNA target sequence for MOR218-3 (NM_146427.1,198-216).
gaatttgtccctgattgat

SEQ ID NO: 762836 - DNA, 19 bp, Mus musculus
  siRNA target sequence for MOR218-3 (NM_146427.1,204-222).
gtccctgattgatatctgt

SEQ ID NO: 762837 - DNA, 19 bp, Mus musculus
  siRNA target sequence for MOR218-3 (NM_146427.1,206-224).
ccctgattgatatctgtta

SEQ ID NO: 762838 - DNA, 19 bp, Mus musculus
  siRNA target sequence for MOR218-3 (NM_146427.1,208-226).
ctgattgatatctgttata

SEQ ID NO: 762839 - DNA, 19 bp, Mus musculus
  siRNA target sequence for MOR218-3 (NM_146427.1,232-250).
gtcactgttcccaaatcca

SEQ ID NO: 762840 - DNA, 19 bp, Mus musculus
  siRNA target sequence for MOR218-3 (NM_146427.1,238-256).
gttcccaaatccatcatga

SEQ ID NO: 762841 - DNA, 19 bp, Mus musculus
  siRNA target sequence for MOR218-3 (NM_146427.1,241-259).
cccaaatccatcatgaact

SEQ ID NO: 762842 - DNA, 19 bp, Mus musculus
  siRNA target sequence for MOR218-3 (NM_146427.1,512-530).
gtggtccaaatgtagtgta

SEQ ID NO: 762843 - DNA, 19 bp, Mus musculus
  siRNA target sequence for MOR218-3 (NM_146427.1,515-533).
gtccaaatgtagtgtatca

SEQ ID NO: 762844 - DNA, 19 bp, Mus musculus
  siRNA target sequence for MOR218-3 (NM_146427.1,517-535).
ccaaatgtagtgtatcaat

SEQ ID NO: 762845 - DNA, 19 bp, Mus musculus
  siRNA target sequence for MOR218-3 (NM_146427.1,518-536).
caaatgtagtgtatcaatt

SEQ ID NO: 762846 - DNA, 19 bp, Mus musculus
  siRNA target sequence for MOR218-3 (NM_146427.1,544-562).
gatatcccatcacttctta

SEQ ID NO: 762847 - DNA, 19 bp, Mus musculus
  siRNA target sequence for MOR218-3 (NM_146427.1,549-567).
cccatcacttcttagactt

SEQ ID NO: 762848 - DNA, 19 bp, Mus musculus
  siRNA target sequence for MOR218-3 (NM_146427.1,572-590).
gttttggagaccaaattct

SEQ ID NO: 762849 - DNA, 19 bp, Mus musculus
  siRNA target sequence for MOR218-3 (NM_146427.1,625-643).
gccttcatgtgttttatat

SEQ ID NO: 762850 - DNA, 19 bp, Mus musculus
  siRNA target sequence for MOR218-3 (NM_146427.1,657-675).
ctatgttcacattttcact

SEQ ID NO: 762851 - DNA, 19 bp, Mus musculus
  siRNA target sequence for MOR218-3 (NM_146427.1,666-684).
cattttcactataatccta

SEQ ID NO: 762852 - DNA, 19 bp, Mus musculus
  siRNA target sequence for MOR218-3 (NM_146427.1,739-757).
cttactgtggtgaccttat

SEQ ID NO: 762853 - DNA, 19 bp, Mus musculus
  siRNA target sequence for MOR218-3 (NM_146427.1,901-919).
gtggccctacataacattt

SEQ ID NO: 762854 - DNA, 19 bp, Mus musculus
  siRNA target sequence for MOR205-1 (NM_146428.1,122-140).
ggaacctggtcatgttctt

SEQ ID NO: 762855 - DNA, 19 bp, Mus musculus
  siRNA target sequence for MOR205-1 (NM_146428.1,123-141).
gaacctggtcatgttcttt

SEQ ID NO: 762856 - DNA, 19 bp, Mus musculus
  siRNA target sequence for MOR205-1 (NM_146428.1,196-214).
ctttcgctcctggatttct

SEQ ID NO: 762857 - DNA, 19 bp, Mus musculus
  siRNA target sequence for MOR205-1 (NM_146428.1,259-277).
gttgagagaaaagtaatct

SEQ ID NO: 762858 - DNA, 19 bp, Mus musculus
  siRNA target sequence for MOR205-1 (NM_146428.1,266-284).
gaaaagtaatctcttactt

SEQ ID NO: 762859 - DNA, 19 bp, Mus musculus
  siRNA target sequence for MOR205-1 (NM_146428.1,326-344).
ccagcgagtgctatctcat

SEQ ID NO: 762860 - DNA, 19 bp, Mus musculus
  siRNA target sequence for MOR205-1 (NM_146428.1,327-345).
cagcgagtgctatctcatt

SEQ ID NO: 762861 - DNA, 19 bp, Mus musculus
  siRNA target sequence for MOR205-1 (NM_146428.1,391-409).
ctctatccgaccatagtgt

SEQ ID NO: 762862 - DNA, 19 bp, Mus musculus
  siRNA target sequence for MOR205-1 (NM_146428.1,454-472).
gggtttctcaattctctta

SEQ ID NO: 762863 - DNA, 19 bp, Mus musculus
  siRNA target sequence for MOR205-1 (NM_146428.1,455-473).
ggtttctcaattctcttat

SEQ ID NO: 762864 - DNA, 19 bp, Mus musculus
  siRNA target sequence for MOR205-1 (NM_146428.1,514-532).
cacgtggtcactcatttct

SEQ ID NO: 762865 - DNA, 19 bp, Mus musculus
  siRNA target sequence for MOR205-1 (NM_146428.1,584-602).
gtgagatcttgctcttcat

SEQ ID NO: 762866 - DNA, 19 bp, Mus musculus
  siRNA target sequence for MOR205-1 (NM_146428.1,607-625).
gccggcttcaaccttttga

SEQ ID NO: 762867 - DNA, 19 bp, Mus musculus
  siRNA target sequence for MOR205-1 (NM_146428.1,629-647).
gtactctcaccatcttgat

SEQ ID NO: 762868 - DNA, 19 bp, Mus musculus
  siRNA target sequence for MOR205-1 (NM_146428.1,815-833).
gcacagttgccgtgatcta

SEQ ID NO: 762869 - DNA, 19 bp, Mus musculus
  siRNA target sequence for MOR256-30 (NM_146429.1,30-48).
gagtttccccgacacattt

SEQ ID NO: 762870 - DNA, 19 bp, Mus musculus
  siRNA target sequence for MOR256-30 (NM_146429.1,248-266).
cacagttgctagtcaatct

SEQ ID NO: 762871 - DNA, 19 bp, Mus musculus
  siRNA target sequence for MOR256-30 (NM_146429.1,392-410).
gctgtcccctccgatatgt

SEQ ID NO: 762872 - DNA, 19 bp, Mus musculus
  siRNA target sequence for MOR256-30 (NM_146429.1,462-480).
cagtggcctggccaattct

SEQ ID NO: 762873 - DNA, 19 bp, Mus musculus
  siRNA target sequence for MOR256-30 (NM_146429.1,464-482).
gtggcctggccaattctct

SEQ ID NO: 762874 - DNA, 19 bp, Mus musculus
  siRNA target sequence for MOR256-30 (NM_146429.1,552-570).
ggtgcctgctttgattaaa

SEQ ID NO: 762875 - DNA, 19 bp, Mus musculus
  siRNA target sequence for MOR256-30 (NM_146429.1,564-582).
gattaaactggcatgtagt

SEQ ID NO: 762876 - DNA, 19 bp, Mus musculus
  siRNA target sequence for MOR256-30 (NM_146429.1,606-624).
cctagccttgggagctatt

SEQ ID NO: 762877 - DNA, 19 bp, Mus musculus
  siRNA target sequence for MOR256-30 (NM_146429.1,620-638).
ctattccttttggaatagt

SEQ ID NO: 762878 - DNA, 19 bp, Mus musculus
  siRNA target sequence for MOR256-30 (NM_146429.1,652-670).
gtgctcatctcttacatct

SEQ ID NO: 762879 - DNA, 19 bp, Mus musculus
  siRNA target sequence for MOR223-6 (NM_146431.1,243-261).
cattgttcctcgacttatt

SEQ ID NO: 762880 - DNA, 19 bp, Mus musculus
  siRNA target sequence for MOR223-6 (NM_146431.1,247-265).
gttcctcgacttattttaa

SEQ ID NO: 762881 - DNA, 19 bp, Mus musculus
  siRNA target sequence for MOR223-6 (NM_146431.1,250-268).
cctcgacttattttaaact

SEQ ID NO: 762882 - DNA, 19 bp, Mus musculus
  siRNA target sequence for MOR223-6 (NM_146431.1,251-269).
ctcgacttattttaaactt

SEQ ID NO: 762883 - DNA, 19 bp, Mus musculus
  siRNA target sequence for MOR223-6 (NM_146431.1,523-541).
gggcccaaccaaatagatt

SEQ ID NO: 762884 - DNA, 19 bp, Mus musculus
  siRNA target sequence for MOR223-6 (NM_146431.1,524-542).
ggcccaaccaaatagatta

SEQ ID NO: 762885 - DNA, 19 bp, Mus musculus
  siRNA target sequence for MOR223-6 (NM_146431.1,525-543).
gcccaaccaaatagattat

SEQ ID NO: 762886 - DNA, 19 bp, Mus musculus
  siRNA target sequence for MOR223-6 (NM_146431.1,526-544).
cccaaccaaatagattatt

SEQ ID NO: 762887 - DNA, 19 bp, Mus musculus
  siRNA target sequence for MOR223-6 (NM_146431.1,527-545).
ccaaccaaatagattattt

SEQ ID NO: 762888 - DNA, 19 bp, Mus musculus
  siRNA target sequence for MOR223-5 (NM_146432.1,71-89).
ggacattcctgtttgtgtt

SEQ ID NO: 762889 - DNA, 19 bp, Mus musculus
  siRNA target sequence for MOR223-5 (NM_146432.1,406-424).
ctcatgtctgctaagttga

SEQ ID NO: 762890 - DNA, 19 bp, Mus musculus
  siRNA target sequence for MOR223-5 (NM_146432.1,413-431).
ctgctaagttgagtatctt

SEQ ID NO: 762891 - DNA, 19 bp, Mus musculus
  siRNA target sequence for MOR223-5 (NM_146432.1,511-529).
ggtcccaatcaggtagatt

SEQ ID NO: 762892 - DNA, 19 bp, Mus musculus
  siRNA target sequence for MOR223-5 (NM_146432.1,514-532).
cccaatcaggtagattact

SEQ ID NO: 762893 - DNA, 19 bp, Mus musculus
  siRNA target sequence for MOR223-5 (NM_146432.1,515-533).
ccaatcaggtagattactt

SEQ ID NO: 762894 - DNA, 19 bp, Mus musculus
  siRNA target sequence for MOR223-5 (NM_146432.1,706-724).
cgaagggccttctcaacat

SEQ ID NO: 762895 - DNA, 19 bp, Mus musculus
  siRNA target sequence for MOR223-5 (NM_146432.1,725-743).
gtggagctcatgtgactat

SEQ ID NO: 762896 - DNA, 19 bp, Mus musculus
  siRNA target sequence for MOR223-5 (NM_146432.1,740-758).
ctattgttactgtgtacta

SEQ ID NO: 762897 - DNA, 19 bp, Mus musculus
  siRNA target sequence for MOR223-5 (NM_146432.1,913-931).
ggaagtcaaagcactaaga

SEQ ID NO: 762898 - DNA, 19 bp, Mus musculus
  siRNA target sequence for MOR203-3 (NM_146434.1,74-92).
gtatcctcttcgttgtatt

SEQ ID NO: 762899 - DNA, 19 bp, Mus musculus
  siRNA target sequence for MOR203-3 (NM_146434.1,139-157).
ctcctcattaacactaact

SEQ ID NO: 762900 - DNA, 19 bp, Mus musculus
  siRNA target sequence for MOR203-3 (NM_146434.1,512-530).
ccaaaaatatcaatcactt

SEQ ID NO: 762901 - DNA, 19 bp, Mus musculus
  siRNA target sequence for MOR203-3 (NM_146434.1,536-554).
gtgatgttgtcccaatcat

SEQ ID NO: 762902 - DNA, 19 bp, Mus musculus
  siRNA target sequence for MOR203-3 (NM_146434.1,566-584).
gctccaacattgatattaa

SEQ ID NO: 762903 - DNA, 19 bp, Mus musculus
  siRNA target sequence for MOR203-3 (NM_146434.1,569-587).
ccaacattgatattaatat

SEQ ID NO: 762904 - DNA, 19 bp, Mus musculus
  siRNA target sequence for MOR203-3 (NM_146434.1,588-606).
catgcttcttgttattttt

SEQ ID NO: 762905 - DNA, 19 bp, Mus musculus
  siRNA target sequence for MOR203-3 (NM_146434.1,629-647).
ctgtgttggtcattatctt

SEQ ID NO: 762906 - DNA, 19 bp, Mus musculus
  siRNA target sequence for MOR203-3 (NM_146434.1,639-657).
cattatcttctcctacata

SEQ ID NO: 762907 - DNA, 19 bp, Mus musculus
  siRNA target sequence for MOR203-3 (NM_146434.1,912-930).
gagcagaaggttcttaaga

SEQ ID NO: 762908 - DNA, 19 bp, Mus musculus
  siRNA target sequence for MOR203-2 (NM_146435.1,53-71).
gagtccaacatgatattca

SEQ ID NO: 762909 - DNA, 19 bp, Mus musculus
  siRNA target sequence for MOR203-2 (NM_146435.1,94-112).
cttatcatttacatgacat

SEQ ID NO: 762910 - DNA, 19 bp, Mus musculus
  siRNA target sequence for MOR203-2 (NM_146435.1,126-144).
cactgggatgattcttcta

SEQ ID NO: 762911 - DNA, 19 bp, Mus musculus
  siRNA target sequence for MOR203-2 (NM_146435.1,131-149).
ggatgattcttctaatcca

SEQ ID NO: 762912 - DNA, 19 bp, Mus musculus
  siRNA target sequence for MOR203-2 (NM_146435.1,213-231).
ctgttatacatctgctatt

SEQ ID NO: 762913 - DNA, 19 bp, Mus musculus
  siRNA target sequence for MOR203-2 (NM_146435.1,240-258).
gatgctacaaacctttgta

SEQ ID NO: 762914 - DNA, 19 bp, Mus musculus
  siRNA target sequence for MOR203-2 (NM_146435.1,256-274).
gtagtagaagacagataca

SEQ ID NO: 762915 - DNA, 19 bp, Mus musculus
  siRNA target sequence for MOR203-2 (NM_146435.1,267-285).
cagatacatatcatttgga

SEQ ID NO: 762916 - DNA, 19 bp, Mus musculus
  siRNA target sequence for MOR203-2 (NM_146435.1,287-305).
gatgtgtagtgcaattact

SEQ ID NO: 762917 - DNA, 19 bp, Mus musculus
  siRNA target sequence for MOR203-2 (NM_146435.1,290-308).
gtgtagtgcaattactgat

SEQ ID NO: 762918 - DNA, 19 bp, Mus musculus
  siRNA target sequence for MOR203-2 (NM_146435.1,312-330).
cgcaatctttgctacttgt

SEQ ID NO: 762919 - DNA, 19 bp, Mus musculus
  siRNA target sequence for MOR203-2 (NM_146435.1,323-341).
ctacttgtgactgttatct

SEQ ID NO: 762920 - DNA, 19 bp, Mus musculus
  siRNA target sequence for MOR203-2 (NM_146435.1,388-406).
cttcgttatcccatactca

SEQ ID NO: 762921 - DNA, 19 bp, Mus musculus
  siRNA target sequence for MOR203-2 (NM_146435.1,403-421).
ctcatgtcccgaaaagtct

SEQ ID NO: 762922 - DNA, 19 bp, Mus musculus
  siRNA target sequence for MOR203-2 (NM_146435.1,433-451).
gtagctggctcctatctca

SEQ ID NO: 762923 - DNA, 19 bp, Mus musculus
  siRNA target sequence for MOR203-2 (NM_146435.1,439-457).
ggctcctatctcattggat

SEQ ID NO: 762924 - DNA, 19 bp, Mus musculus
  siRNA target sequence for MOR203-2 (NM_146435.1,506-524).
gtaaatctaatcacatcaa

SEQ ID NO: 762925 - DNA, 19 bp, Mus musculus
  siRNA target sequence for MOR203-2 (NM_146435.1,538-556).
gatgtgcccccaattatta

SEQ ID NO: 762926 - DNA, 19 bp, Mus musculus
  siRNA target sequence for MOR203-2 (NM_146435.1,629-647).
ctgtgctggttgttatctt

SEQ ID NO: 762927 - DNA, 19 bp, Mus musculus
  siRNA target sequence for MOR203-2 (NM_146435.1,631-649).
gtgctggttgttatcttct

SEQ ID NO: 762928 - DNA, 19 bp, Mus musculus
  siRNA target sequence for MOR175-5 (NM_146436.1,20-38).
ctattgtaatggagttttt

SEQ ID NO: 762929 - DNA, 19 bp, Mus musculus
  siRNA target sequence for MOR175-5 (NM_146436.1,42-60).
cctgggcctaacagatcat

SEQ ID NO: 762930 - DNA, 19 bp, Mus musculus
  siRNA target sequence for MOR175-5 (NM_146436.1,47-65).
gcctaacagatcatctcta

SEQ ID NO: 762931 - DNA, 19 bp, Mus musculus
  siRNA target sequence for MOR175-5 (NM_146436.1,48-66).
cctaacagatcatctctat

SEQ ID NO: 762932 - DNA, 19 bp, Mus musculus
  siRNA target sequence for MOR175-5 (NM_146436.1,84-102).
catcacgatcctctttgtt

SEQ ID NO: 762933 - DNA, 19 bp, Mus musculus
  siRNA target sequence for MOR175-5 (NM_146436.1,381-399).
caagcccttactgtatact

SEQ ID NO: 762934 - DNA, 19 bp, Mus musculus
  siRNA target sequence for MOR175-5 (NM_146436.1,433-451).
gttgtagggccatatgtct

SEQ ID NO: 762935 - DNA, 19 bp, Mus musculus
  siRNA target sequence for MOR175-5 (NM_146436.1,440-458).
ggccatatgtctttgctat

SEQ ID NO: 762936 - DNA, 19 bp, Mus musculus
  siRNA target sequence for MOR175-5 (NM_146436.1,541-559).
gtctctccacttttatcat

SEQ ID NO: 762937 - DNA, 19 bp, Mus musculus
  siRNA target sequence for MOR175-5 (NM_146436.1,573-591).
ctcttgggttaataaggtt

SEQ ID NO: 762938 - DNA, 19 bp, Mus musculus
  siRNA target sequence for MOR175-5 (NM_146436.1,627-645).
cagtggtctgatcatcata

SEQ ID NO: 762939 - DNA, 19 bp, Mus musculus
  siRNA target sequence for MOR175-5 (NM_146436.1,631-649).
ggtctgatcatcatagtct

SEQ ID NO: 762940 - DNA, 19 bp, Mus musculus
  siRNA target sequence for MOR175-5 (NM_146436.1,781-799).
cgacccagtgcaagttttt

SEQ ID NO: 762941 - DNA, 19 bp, Mus musculus
  siRNA target sequence for MOR175-5 (NM_146436.1,786-804).
cagtgcaagtttttcctta

SEQ ID NO: 762942 - DNA, 19 bp, Mus musculus
  siRNA target sequence for MOR175-5 (NM_146436.1,790-808).
gcaagtttttccttaaaca

SEQ ID NO: 762943 - DNA, 19 bp, Mus musculus
  siRNA target sequence for MOR175-4 (NM_146437.1,22-40).
gtcatgcctgagtttctct

SEQ ID NO: 762944 - DNA, 19 bp, Mus musculus
  siRNA target sequence for MOR175-4 (NM_146437.1,413-431).
cacatctctctgtgttatt

SEQ ID NO: 762945 - DNA, 19 bp, Mus musculus
  siRNA target sequence for MOR175-4 (NM_146437.1,443-461).
cttatgccattgctcttat

SEQ ID NO: 762946 - DNA, 19 bp, Mus musculus
  siRNA target sequence for MOR175-4 (NM_146437.1,571-589).
gacacccacataaataagt

SEQ ID NO: 762947 - DNA, 19 bp, Mus musculus
  siRNA target sequence for MOR175-4 (NM_146437.1,622-640).
gtgctcagtggactgataa

SEQ ID NO: 762948 - DNA, 19 bp, Mus musculus
  siRNA target sequence for MOR175-4 (NM_146437.1,916-934).
gagaagaagcacttcctaa

SEQ ID NO: 762949 - DNA, 19 bp, Mus musculus
  siRNA target sequence for MOR171-23 (NM_146440.1,238-256).
gttattaccccgaagatgt

SEQ ID NO: 762950 - DNA, 19 bp, Mus musculus
  siRNA target sequence for MOR171-22 (NM_146441.1,894-912).
gaaagcattgggcaaatgt

SEQ ID NO: 762951 - DNA, 19 bp, Mus musculus
  siRNA target sequence for MOR224-6 (NM_146442.1,382-400).
ctaaggtactcaataatca

SEQ ID NO: 762952 - DNA, 19 bp, Mus musculus
  siRNA target sequence for MOR224-6 (NM_146442.1,806-824).
cagttcaagtcttgaataa

SEQ ID NO: 762953 - DNA, 19 bp, Mus musculus
  siRNA target sequence for MOR224-6 (NM_146442.1,910-928).
gggcctattctgtctaaaa

SEQ ID NO: 762954 - DNA, 19 bp, Mus musculus
  siRNA target sequence for MOR224-6 (NM_146442.1,911-929).
ggcctattctgtctaaaaa

SEQ ID NO: 762955 - DNA, 19 bp, Mus musculus
  siRNA target sequence for MOR135-14 (NM_146443.1,436-454).
gtgttatcctgggtattta

SEQ ID NO: 762956 - DNA, 19 bp, Mus musculus
  siRNA target sequence for MOR135-14 (NM_146443.1,620-638).
gcatcatcccattcttact

SEQ ID NO: 762957 - DNA, 19 bp, Mus musculus
  siRNA target sequence for MOR135-14 (NM_146443.1,692-710).
ctcatgttttacacaagat

SEQ ID NO: 762958 - DNA, 19 bp, Mus musculus
  siRNA target sequence for MOR135-14 (NM_146443.1,697-715).
gttttacacaagatcttct

SEQ ID NO: 762959 - DNA, 19 bp, Mus musculus
  siRNA target sequence for MOR119-2 (NM_146446.1,104-122).
cctccatcaccggaaatgt

SEQ ID NO: 762960 - DNA, 19 bp, Mus musculus
  siRNA target sequence for MOR119-2 (NM_146446.1,113-131).
ccggaaatgtcgtcattgt

SEQ ID NO: 762961 - DNA, 19 bp, Mus musculus
  siRNA target sequence for MOR119-2 (NM_146446.1,194-212).
cctttggggagtcttgttt

SEQ ID NO: 762962 - DNA, 19 bp, Mus musculus
  siRNA target sequence for MOR119-2 (NM_146446.1,315-333).
cggggcattcggttttttt

SEQ ID NO: 762963 - DNA, 19 bp, Mus musculus
  siRNA target sequence for MOR119-2 (NM_146446.1,354-372).
ggacaggtgtgtagctatt

SEQ ID NO: 762964 - DNA, 19 bp, Mus musculus
  siRNA target sequence for MOR119-2 (NM_146446.1,410-428).
ggacctgcatccttctaat

SEQ ID NO: 762965 - DNA, 19 bp, Mus musculus
  siRNA target sequence for MOR119-2 (NM_146446.1,411-429).
gacctgcatccttctaatt

SEQ ID NO: 762966 - DNA, 19 bp, Mus musculus
  siRNA target sequence for MOR119-2 (NM_146446.1,413-431).
cctgcatccttctaattat

SEQ ID NO: 762967 - DNA, 19 bp, Mus musculus
  siRNA target sequence for MOR119-2 (NM_146446.1,479-497).
cggtatcacggttatcctt

SEQ ID NO: 762968 - DNA, 19 bp, Mus musculus
  siRNA target sequence for MOR119-2 (NM_146446.1,590-608).
cgttcgcccttgctttgat

SEQ ID NO: 762969 - DNA, 19 bp, Mus musculus
  siRNA target sequence for MOR119-2 (NM_146446.1,651-669).
caacatagtcatcacaatt

SEQ ID NO: 762970 - DNA, 19 bp, Mus musculus
  siRNA target sequence for MOR119-2 (NM_146446.1,901-919).
gagactctgagcagaataa

SEQ ID NO: 762971 - DNA, 19 bp, Mus musculus
  siRNA target sequence for MOR245-5 (NM_146447.1,12-30).
gatgtcggaagcaatgtat

SEQ ID NO: 762972 - DNA, 19 bp, Mus musculus
  siRNA target sequence for MOR245-5 (NM_146447.1,22-40).
gcaatgtatggaatgaact

SEQ ID NO: 762973 - DNA, 19 bp, Mus musculus
  siRNA target sequence for MOR245-5 (NM_146447.1,61-79).
gtgttcctcgggatcacta

SEQ ID NO: 762974 - DNA, 19 bp, Mus musculus
  siRNA target sequence for MOR245-5 (NM_146447.1,63-81).
gttcctcgggatcactaat

SEQ ID NO: 762975 - DNA, 19 bp, Mus musculus
  siRNA target sequence for MOR245-5 (NM_146447.1,66-84).
cctcgggatcactaatata

SEQ ID NO: 762976 - DNA, 19 bp, Mus musculus
  siRNA target sequence for MOR245-5 (NM_146447.1,67-85).
ctcgggatcactaatatat

SEQ ID NO: 762977 - DNA, 19 bp, Mus musculus
  siRNA target sequence for MOR245-5 (NM_146447.1,86-104).
gggaggttcagtttttact

SEQ ID NO: 762978 - DNA, 19 bp, Mus musculus
  siRNA target sequence for MOR245-5 (NM_146447.1,88-106).
gaggttcagtttttacttt

SEQ ID NO: 762979 - DNA, 19 bp, Mus musculus
  siRNA target sequence for MOR245-5 (NM_146447.1,126-144).
ctactttgcaagtatgatt

SEQ ID NO: 762980 - DNA, 19 bp, Mus musculus
  siRNA target sequence for MOR245-5 (NM_146447.1,220-238).
ctctcagtcattgatatga

SEQ ID NO: 762981 - DNA, 19 bp, Mus musculus
  siRNA target sequence for MOR245-5 (NM_146447.1,224-242).
cagtcattgatatgatatt

SEQ ID NO: 762982 - DNA, 19 bp, Mus musculus
  siRNA target sequence for MOR245-5 (NM_146447.1,248-266).
cgattacagctcctaagat

SEQ ID NO: 762983 - DNA, 19 bp, Mus musculus
  siRNA target sequence for MOR245-5 (NM_146447.1,300-318).
ctccttctggggatgtata

SEQ ID NO: 762984 - DNA, 19 bp, Mus musculus
  siRNA target sequence for MOR245-5 (NM_146447.1,437-455).
cacgagtgtgtctgttctt

SEQ ID NO: 762985 - DNA, 19 bp, Mus musculus
  siRNA target sequence for MOR245-5 (NM_146447.1,491-509).
cagtggtacaattagtgtt

SEQ ID NO: 762986 - DNA, 19 bp, Mus musculus
  siRNA target sequence for MOR245-5 (NM_146447.1,811-829).
cctacatcacaccttgata

SEQ ID NO: 762987 - DNA, 19 bp, Mus musculus
  siRNA target sequence for MOR245-5 (NM_146447.1,812-830).
ctacatcacaccttgataa

SEQ ID NO: 762988 - DNA, 19 bp, Mus musculus
  siRNA target sequence for MOR245-5 (NM_146447.1,818-836).
cacaccttgataaatatct

SEQ ID NO: 762989 - DNA, 19 bp, Mus musculus
  siRNA target sequence for MOR245-5 (NM_146447.1,838-856).
gctatcttcgatgcattta

SEQ ID NO: 762990 - DNA, 19 bp, Mus musculus
  siRNA target sequence for MOR245-5 (NM_146447.1,839-857).
ctatcttcgatgcatttat

SEQ ID NO: 762991 - DNA, 19 bp, Mus musculus
  siRNA target sequence for MOR245-5 (NM_146447.1,910-928).
gtggcaatggggagactat

SEQ ID NO: 762992 - DNA, 19 bp, Mus musculus
  siRNA target sequence for MOR245-5 (NM_146447.1,921-939).
gagactatggggctatctt

SEQ ID NO: 762993 - DNA, 19 bp, Mus musculus
  siRNA target sequence for MOR245-4 (NM_146448.1,24-42).
ggtatcagaatttttgtta

SEQ ID NO: 762994 - DNA, 19 bp, Mus musculus
  siRNA target sequence for MOR245-4 (NM_146448.1,43-61).
ctaggcctcaccaattcat

SEQ ID NO: 762995 - DNA, 19 bp, Mus musculus
  siRNA target sequence for MOR245-4 (NM_146448.1,51-69).
caccaattcatggagaatt

SEQ ID NO: 762996 - DNA, 19 bp, Mus musculus
  siRNA target sequence for MOR245-4 (NM_146448.1,53-71).
ccaattcatggagaattca

SEQ ID NO: 762997 - DNA, 19 bp, Mus musculus
  siRNA target sequence for MOR245-4 (NM_146448.1,85-103).
ctgttcttcacagtatttt

SEQ ID NO: 762998 - DNA, 19 bp, Mus musculus
  siRNA target sequence for MOR245-4 (NM_146448.1,224-242).
gcatcgctactccaaagat

SEQ ID NO: 762999 - DNA, 19 bp, Mus musculus
  siRNA target sequence for MOR245-4 (NM_146448.1,506-524).
gtggagctaataaaatgga

SEQ ID NO: 763000 - DNA, 19 bp, Mus musculus
  siRNA target sequence for MOR245-4 (NM_146448.1,552-570).
catcaaactcgcatgtaca

SEQ ID NO: 763001 - DNA, 19 bp, Mus musculus
  siRNA target sequence for MOR245-4 (NM_146448.1,667-685).
gtcacagttcgtaaacact

SEQ ID NO: 763002 - DNA, 19 bp, Mus musculus
  siRNA target sequence for MOR245-4 (NM_146448.1,755-773).
gtccttgcattattgtcta

SEQ ID NO: 763003 - DNA, 19 bp, Mus musculus
  siRNA target sequence for MOR245-4 (NM_146448.1,786-804).
cccgactttacccatagat

SEQ ID NO: 763004 - DNA, 19 bp, Mus musculus
  siRNA target sequence for MOR245-4 (NM_146448.1,787-805).
ccgactttacccatagata

SEQ ID NO: 763005 - DNA, 19 bp, Mus musculus
  siRNA target sequence for MOR245-4 (NM_146448.1,791-809).
ctttacccatagataaatt

SEQ ID NO: 763006 - DNA, 19 bp, Mus musculus
  siRNA target sequence for MOR245-4 (NM_146448.1,815-833).
caattttcgatgccattat

SEQ ID NO: 763007 - DNA, 19 bp, Mus musculus
  siRNA target sequence for MOR245-4 (NM_146448.1,827-845).
ccattatcactccttctat

SEQ ID NO: 763008 - DNA, 19 bp, Mus musculus
  siRNA target sequence for MOR245-4 (NM_146448.1,901-919).
ctctttgctagggctttaa

SEQ ID NO: 763009 - DNA, 19 bp, Mus musculus
  siRNA target sequence for MOR245-4 (NM_146448.1,903-921).
ctttgctagggctttaagt

SEQ ID NO: 763010 - DNA, 19 bp, Mus musculus
  siRNA target sequence for MOR245-4 (NM_146448.1,907-925).
gctagggctttaagtttca

SEQ ID NO: 763011 - DNA, 19 bp, Mus musculus
  siRNA target sequence for MOR245-4 (NM_146448.1,908-926).
ctagggctttaagtttcat

SEQ ID NO: 763012 - DNA, 19 bp, Mus musculus
  siRNA target sequence for MOR245-4 (NM_146448.1,911-929).
gggctttaagtttcattga

SEQ ID NO: 763013 - DNA, 19 bp, Mus musculus
  siRNA target sequence for MOR245-4 (NM_146448.1,928-946).
gacagcttaagagattcaa

SEQ ID NO: 763014 - DNA, 19 bp, Mus musculus
  siRNA target sequence for MOR245-4 (NM_146448.1,930-948).
cagcttaagagattcaaat

SEQ ID NO: 763015 - DNA, 19 bp, Mus musculus
  siRNA target sequence for MOR245-3 (NM_146449.1,150-168).
ctcagaccctcagttacaa

SEQ ID NO: 763016 - DNA, 19 bp, Mus musculus
  siRNA target sequence for MOR245-3 (NM_146449.1,575-593).
catacacactggggtttat

SEQ ID NO: 763017 - DNA, 19 bp, Mus musculus
  siRNA target sequence for MOR245-3 (NM_146449.1,669-687).
gactgttcaaaagaaatct

SEQ ID NO: 763018 - DNA, 19 bp, Mus musculus
  siRNA target sequence for MOR245-3 (NM_146449.1,681-699).
gaaatctttgggtagttta

SEQ ID NO: 763019 - DNA, 19 bp, Mus musculus
  siRNA target sequence for MOR245-3 (NM_146449.1,727-745).
catgtcattgtggtagttt

SEQ ID NO: 763020 - DNA, 19 bp, Mus musculus
  siRNA target sequence for MOR245-3 (NM_146449.1,788-806).
caacatcacatctggataa

SEQ ID NO: 763021 - DNA, 19 bp, Mus musculus
  siRNA target sequence for MOR245-3 (NM_146449.1,819-837).
ctttgatgcagttattact

SEQ ID NO: 763022 - DNA, 19 bp, Mus musculus
  siRNA target sequence for MOR245-3 (NM_146449.1,886-904).
gtagcaatgagaagactat

SEQ ID NO: 763023 - DNA, 19 bp, Mus musculus
  siRNA target sequence for MOR245-3 (NM_146449.1,905-923).
gcagtcagtttgttaatta

SEQ ID NO: 763024 - DNA, 19 bp, Mus musculus
  siRNA target sequence for MOR245-2 (NM_146450.1,66-84).
gatgcaagtgcttctcttt

SEQ ID NO: 763025 - DNA, 19 bp, Mus musculus
  siRNA target sequence for MOR245-2 (NM_146450.1,85-103).
gtgtttgcttcggtgtttt

SEQ ID NO: 763026 - DNA, 19 bp, Mus musculus
  siRNA target sequence for MOR245-2 (NM_146450.1,467-485).
ctctggttcaatttgttta

SEQ ID NO: 763027 - DNA, 19 bp, Mus musculus
  siRNA target sequence for MOR245-2 (NM_146450.1,475-493).
caatttgtttacatagtaa

SEQ ID NO: 763028 - DNA, 19 bp, Mus musculus
  siRNA target sequence for MOR245-2 (NM_146450.1,566-584).
gtgtagataccaaccaatt

SEQ ID NO: 763029 - DNA, 19 bp, Mus musculus
  siRNA target sequence for MOR245-2 (NM_146450.1,571-589).
gataccaaccaattagaat

SEQ ID NO: 763030 - DNA, 19 bp, Mus musculus
  siRNA target sequence for MOR245-2 (NM_146450.1,633-651).
cttcatactagtcatatct

SEQ ID NO: 763031 - DNA, 19 bp, Mus musculus
  siRNA target sequence for MOR245-2 (NM_146450.1,643-661).
gtcatatcttacattgtca

SEQ ID NO: 763032 - DNA, 19 bp, Mus musculus
  siRNA target sequence for MOR245-2 (NM_146450.1,645-663).
catatcttacattgtcata

SEQ ID NO: 763033 - DNA, 19 bp, Mus musculus
  siRNA target sequence for MOR245-2 (NM_146450.1,650-668).
cttacattgtcataatagt

SEQ ID NO: 763034 - DNA, 19 bp, Mus musculus
  siRNA target sequence for MOR245-2 (NM_146450.1,802-820).
gataagtacctggctatat

SEQ ID NO: 763035 - DNA, 19 bp, Mus musculus
  siRNA target sequence for MOR245-2 (NM_146450.1,885-903).
gacagctatgaaaagagtt

SEQ ID NO: 763036 - DNA, 19 bp, Mus musculus
  siRNA target sequence for MOR245-2 (NM_146450.1,901-919).
gtttgcagacagctattaa

SEQ ID NO: 763037 - DNA, 19 bp, Mus musculus
  siRNA target sequence for MOR279-2 (NM_146451.1,95-113).
ccctaattctgggtatctt

SEQ ID NO: 763038 - DNA, 19 bp, Mus musculus
  siRNA target sequence for MOR279-2 (NM_146451.1,553-571).
cctgccttactcacacttt

SEQ ID NO: 763039 - DNA, 19 bp, Mus musculus
  siRNA target sequence for MOR279-2 (NM_146451.1,562-580).
ctcacactttcatgtagta

SEQ ID NO: 763040 - DNA, 19 bp, Mus musculus
  siRNA target sequence for MOR279-2 (NM_146451.1,564-582).
cacactttcatgtagtaat

SEQ ID NO: 763041 - DNA, 19 bp, Mus musculus
  siRNA target sequence for MOR279-2 (NM_146451.1,659-677).
cctatactcgtgtgattct

SEQ ID NO: 763042 - DNA, 19 bp, Mus musculus
  siRNA target sequence for MOR279-2 (NM_146451.1,676-694).
ctgaccgttcttcatatga

SEQ ID NO: 763043 - DNA, 19 bp, Mus musculus
  siRNA target sequence for MOR279-2 (NM_146451.1,809-827).
ctcccacccaggacaaaat

SEQ ID NO: 763044 - DNA, 19 bp, Mus musculus
  siRNA target sequence for MOR279-2 (NM_146451.1,845-863).
ctatccttacgccaatgtt

SEQ ID NO: 763045 - DNA, 19 bp, Mus musculus
  siRNA target sequence for MOR283-8 (NM_146453.1,78-96).
gctctgtgctacaattgct

SEQ ID NO: 763046 - DNA, 19 bp, Mus musculus
  siRNA target sequence for MOR283-8 (NM_146453.1,142-160).
gtcatcacaatggatattt

SEQ ID NO: 763047 - DNA, 19 bp, Mus musculus
  siRNA target sequence for MOR283-8 (NM_146453.1,211-229).
cttcttctcgcctcagtta

SEQ ID NO: 763048 - DNA, 19 bp, Mus musculus
  siRNA target sequence for MOR283-8 (NM_146453.1,385-403).
ccattgaactacatgatat

SEQ ID NO: 763049 - DNA, 19 bp, Mus musculus
  siRNA target sequence for MOR283-8 (NM_146453.1,845-863).
cgccagctctgaatccttt

SEQ ID NO: 763050 - DNA, 19 bp, Mus musculus
  siRNA target sequence for MOR283-8 (NM_146453.1,846-864).
gccagctctgaatccttta

SEQ ID NO: 763051 - DNA, 19 bp, Mus musculus
  siRNA target sequence for MOR283-8 (NM_146453.1,913-931).
ctaggaaaacggttgttgt

SEQ ID NO: 763052 - DNA, 19 bp, Mus musculus
  siRNA target sequence for MOR283-8 (NM_146453.1,916-934).
ggaaaacggttgttgtcaa

SEQ ID NO: 763053 - DNA, 19 bp, Mus musculus
  siRNA target sequence for MOR256-29 (NM_146456.1,421-439).
cagttggcaggtatagctt

SEQ ID NO: 763054 - DNA, 19 bp, Mus musculus
  siRNA target sequence for MOR256-29 (NM_146456.1,509-527).
ggcagatagacaactttct

SEQ ID NO: 763055 - DNA, 19 bp, Mus musculus
  siRNA target sequence for MOR256-29 (NM_146456.1,511-529).
cagatagacaactttctgt

SEQ ID NO: 763056 - DNA, 19 bp, Mus musculus
  siRNA target sequence for MOR256-29 (NM_146456.1,593-611).
ctgttgctagtatcttcat

SEQ ID NO: 763057 - DNA, 19 bp, Mus musculus
  siRNA target sequence for MOR232-7 (NM_146462.1,49-67).
cagaatctgcacttgcaaa

SEQ ID NO: 763058 - DNA, 19 bp, Mus musculus
  siRNA target sequence for MOR232-7 (NM_146462.1,51-69).
gaatctgcacttgcaaaaa

SEQ ID NO: 763059 - DNA, 19 bp, Mus musculus
  siRNA target sequence for MOR232-6 (NM_146463.1,237-255).
gcttgctgatactttccat

SEQ ID NO: 763060 - DNA, 19 bp, Mus musculus
  siRNA target sequence for MOR232-6 (NM_146463.1,238-256).
cttgctgatactttccata

SEQ ID NO: 763061 - DNA, 19 bp, Mus musculus
  siRNA target sequence for MOR225-5 (NM_146464.1,68-86).
ggcagaatagacaaataga

SEQ ID NO: 763062 - DNA, 19 bp, Mus musculus
  siRNA target sequence for MOR225-5 (NM_146464.1,116-134).
gctatctggctatcttaat

SEQ ID NO: 763063 - DNA, 19 bp, Mus musculus
  siRNA target sequence for MOR225-5 (NM_146464.1,136-154).
gggaactctgtcatcctat

SEQ ID NO: 763064 - DNA, 19 bp, Mus musculus
  siRNA target sequence for MOR225-5 (NM_146464.1,181-199).
gaacaaccaatgtattatt

SEQ ID NO: 763065 - DNA, 19 bp, Mus musculus
  siRNA target sequence for MOR225-5 (NM_146464.1,281-299).
gaaaaaacatttcctataa

SEQ ID NO: 763066 - DNA, 19 bp, Mus musculus
  siRNA target sequence for MOR225-5 (NM_146464.1,337-355).
gcaggtgtggaaatcttca

SEQ ID NO: 763067 - DNA, 19 bp, Mus musculus
  siRNA target sequence for MOR225-5 (NM_146464.1,434-452).
gatgtgatatgttgattgt

SEQ ID NO: 763068 - DNA, 19 bp, Mus musculus
  siRNA target sequence for MOR225-5 (NM_146464.1,476-494).
ggcactccattgctttact

SEQ ID NO: 763069 - DNA, 19 bp, Mus musculus
  siRNA target sequence for MOR225-5 (NM_146464.1,579-597).
ctgtaaagacgttcatgtt

SEQ ID NO: 763070 - DNA, 19 bp, Mus musculus
  siRNA target sequence for MOR225-5 (NM_146464.1,581-599).
gtaaagacgttcatgttgt

SEQ ID NO: 763071 - DNA, 19 bp, Mus musculus
  siRNA target sequence for MOR225-5 (NM_146464.1,586-604).
gacgttcatgttgtaagta

SEQ ID NO: 763072 - DNA, 19 bp, Mus musculus
  siRNA target sequence for MOR225-5 (NM_146464.1,589-607).
gttcatgttgtaagtatct

SEQ ID NO: 763073 - DNA, 19 bp, Mus musculus
  siRNA target sequence for MOR225-5 (NM_146464.1,595-613).
gttgtaagtatcttagcaa

SEQ ID NO: 763074 - DNA, 19 bp, Mus musculus
  siRNA target sequence for MOR225-5 (NM_146464.1,625-643).
gggatggtgctttttgcta

SEQ ID NO: 763075 - DNA, 19 bp, Mus musculus
  siRNA target sequence for MOR225-5 (NM_146464.1,641-659).
ctatttttattgtactact

SEQ ID NO: 763076 - DNA, 19 bp, Mus musculus
  siRNA target sequence for MOR225-5 (NM_146464.1,652-670).
gtactacttgcctcttaca

SEQ ID NO: 763077 - DNA, 19 bp, Mus musculus
  siRNA target sequence for MOR225-5 (NM_146464.1,658-676).
cttgcctcttacatactca

SEQ ID NO: 763078 - DNA, 19 bp, Mus musculus
  siRNA target sequence for MOR225-5 (NM_146464.1,797-815).
ccgcaggaagtgagaacaa

SEQ ID NO: 763079 - DNA, 19 bp, Mus musculus
  siRNA target sequence for MOR225-5 (NM_146464.1,842-860).
ctgtgattgccccaatgtt

SEQ ID NO: 763080 - DNA, 19 bp, Mus musculus
  siRNA target sequence for MOR225-5 (NM_146464.1,846-864).
gattgccccaatgttgaat

SEQ ID NO: 763081 - DNA, 19 bp, Mus musculus
  siRNA target sequence for MOR156-5 (NM_146465.1,4-22).
caaatttcatcttcaataa

SEQ ID NO: 763082 - DNA, 19 bp, Mus musculus
  siRNA target sequence for MOR156-5 (NM_146465.1,251-269).
ccacagctcctaaaacact

SEQ ID NO: 763083 - DNA, 19 bp, Mus musculus
  siRNA target sequence for MOR156-5 (NM_146465.1,338-356).
gtgtttttgcagatatgga

SEQ ID NO: 763084 - DNA, 19 bp, Mus musculus
  siRNA target sequence for MOR279-1 (NM_146466.1,89-107).
ctctcatcctggctatctt

SEQ ID NO: 763085 - DNA, 19 bp, Mus musculus
  siRNA target sequence for MOR279-1 (NM_146466.1,415-433).
cacaaaatctgtagtctaa

SEQ ID NO: 763086 - DNA, 19 bp, Mus musculus
  siRNA target sequence for MOR279-1 (NM_146466.1,462-480).
ccttgatggtataatcgat

SEQ ID NO: 763087 - DNA, 19 bp, Mus musculus
  siRNA target sequence for MOR279-1 (NM_146466.1,477-495).
cgatgttgcagctgtacta

SEQ ID NO: 763088 - DNA, 19 bp, Mus musculus
  siRNA target sequence for MOR279-1 (NM_146466.1,478-496).
gatgttgcagctgtactat

SEQ ID NO: 763089 - DNA, 19 bp, Mus musculus
  siRNA target sequence for MOR279-1 (NM_146466.1,481-499).
gttgcagctgtactatctt

SEQ ID NO: 763090 - DNA, 19 bp, Mus musculus
  siRNA target sequence for MOR279-1 (NM_146466.1,484-502).
gcagctgtactatcttttt

SEQ ID NO: 763091 - DNA, 19 bp, Mus musculus
  siRNA target sequence for MOR279-1 (NM_146466.1,555-573).
gctaactatttcatgtagt

SEQ ID NO: 763092 - DNA, 19 bp, Mus musculus
  siRNA target sequence for MOR279-1 (NM_146466.1,639-657).
cattgttattgcatcctat

SEQ ID NO: 763093 - DNA, 19 bp, Mus musculus
  siRNA target sequence for MOR279-1 (NM_146466.1,664-682).
gtgattcttgctgtcatta

SEQ ID NO: 763094 - DNA, 19 bp, Mus musculus
  siRNA target sequence for MOR279-1 (NM_146466.1,735-753).
cgtcatggtggtggtaata

SEQ ID NO: 763095 - DNA, 19 bp, Mus musculus
  siRNA target sequence for MOR279-1 (NM_146466.1,736-754).
gtcatggtggtggtaatat

SEQ ID NO: 763096 - DNA, 19 bp, Mus musculus
  siRNA target sequence for MOR279-1 (NM_146466.1,800-818).
gttctcccaatcaagacaa

SEQ ID NO: 763097 - DNA, 19 bp, Mus musculus
  siRNA target sequence for MOR256-28 (NM_146467.1,85-103).
gtcgccatttcaattttct

SEQ ID NO: 763098 - DNA, 19 bp, Mus musculus
  siRNA target sequence for MOR256-28 (NM_146467.1,413-431).
cccagctgtgtcatacact

SEQ ID NO: 763099 - DNA, 19 bp, Mus musculus
  siRNA target sequence for MOR256-28 (NM_146467.1,602-620).
cccgaacaatagttttggt

SEQ ID NO: 763100 - DNA, 19 bp, Mus musculus
  siRNA target sequence for MOR256-28 (NM_146467.1,623-641).
gccctgcggcacttatcct

SEQ ID NO: 763101 - DNA, 19 bp, Mus musculus
  siRNA target sequence for MOR256-28 (NM_146467.1,643-661).
ggttcctatgctcatatca

SEQ ID NO: 763102 - DNA, 19 bp, Mus musculus
  siRNA target sequence for MOR256-28 (NM_146467.1,754-772).
ggttcagccatttacacat

SEQ ID NO: 763103 - DNA, 19 bp, Mus musculus
  siRNA target sequence for MOR256-28 (NM_146467.1,755-773).
gttcagccatttacacata

SEQ ID NO: 763104 - DNA, 19 bp, Mus musculus
  siRNA target sequence for MOR256-27 (NM_146468.1,59-77).
ggcctcaattagaactcat

SEQ ID NO: 763105 - DNA, 19 bp, Mus musculus
  siRNA target sequence for MOR256-27 (NM_146468.1,62-80).
ctcaattagaactcattct

SEQ ID NO: 763106 - DNA, 19 bp, Mus musculus
  siRNA target sequence for MOR256-27 (NM_146468.1,70-88).
gaactcattctttttatct

SEQ ID NO: 763107 - DNA, 19 bp, Mus musculus
  siRNA target sequence for MOR256-27 (NM_146468.1,146-164).
cacaactggacattcgatt

SEQ ID NO: 763108 - DNA, 19 bp, Mus musculus
  siRNA target sequence for MOR256-27 (NM_146468.1,257-275).
ctgcacaggatcataccat

SEQ ID NO: 763109 - DNA, 19 bp, Mus musculus
  siRNA target sequence for MOR256-27 (NM_146468.1,329-347).
cagagagtatgcttctagt

SEQ ID NO: 763110 - DNA, 19 bp, Mus musculus
  siRNA target sequence for MOR256-27 (NM_146468.1,418-436).
ctgtgccaggctttagcta

SEQ ID NO: 763111 - DNA, 19 bp, Mus musculus
  siRNA target sequence for MOR256-27 (NM_146468.1,504-522).
ctgcaggtatcgactgaat

SEQ ID NO: 763112 - DNA, 19 bp, Mus musculus
  siRNA target sequence for MOR256-27 (NM_146468.1,506-524).
gcaggtatcgactgaatca

SEQ ID NO: 763113 - DNA, 19 bp, Mus musculus
  siRNA target sequence for MOR256-27 (NM_146468.1,598-616).
gtggcgagagccataatct

SEQ ID NO: 763114 - DNA, 19 bp, Mus musculus
  siRNA target sequence for MOR256-27 (NM_146468.1,619-637).
gtattcccagcaacattga

SEQ ID NO: 763115 - DNA, 19 bp, Mus musculus
  siRNA target sequence for MOR256-27 (NM_146468.1,624-642).
cccagcaacattgattcta

SEQ ID NO: 763116 - DNA, 19 bp, Mus musculus
  siRNA target sequence for MOR256-27 (NM_146468.1,727-745).
cacctccttgtagtttcta

SEQ ID NO: 763117 - DNA, 19 bp, Mus musculus
  siRNA target sequence for MOR256-27 (NM_146468.1,730-748).
ctccttgtagtttctatgt

SEQ ID NO: 763118 - DNA, 19 bp, Mus musculus
  siRNA target sequence for MOR256-27 (NM_146468.1,768-786).
cacgtacttgcaaccaaat

SEQ ID NO: 763119 - DNA, 19 bp, Mus musculus
  siRNA target sequence for MOR256-27 (NM_146468.1,770-788).
cgtacttgcaaccaaatga

SEQ ID NO: 763120 - DNA, 19 bp, Mus musculus
  siRNA target sequence for MOR256-25 (NM_146470.1,146-164).
cccgaatggaccttcaact

SEQ ID NO: 763121 - DNA, 19 bp, Mus musculus
  siRNA target sequence for MOR256-24 (NM_146471.1,294-312).
ggcccagctgtttatattt

SEQ ID NO: 763122 - DNA, 19 bp, Mus musculus
  siRNA target sequence for MOR256-22 (NM_146473.1,20-38).
gtacacaagagagtttcat

SEQ ID NO: 763123 - DNA, 19 bp, Mus musculus
  siRNA target sequence for MOR256-22 (NM_146473.1,135-153).
cattgttcttgcaagacta

SEQ ID NO: 763124 - DNA, 19 bp, Mus musculus
  siRNA target sequence for MOR256-22 (NM_146473.1,500-518).
gactctgtggccatcaaat

SEQ ID NO: 763125 - DNA, 19 bp, Mus musculus
  siRNA target sequence for MOR256-22 (NM_146473.1,621-639).
gtgccctgcagtactgata

SEQ ID NO: 763126 - DNA, 19 bp, Mus musculus
  siRNA target sequence for MOR256-22 (NM_146473.1,623-641).
gccctgcagtactgatact

SEQ ID NO: 763127 - DNA, 19 bp, Mus musculus
  siRNA target sequence for MOR256-22 (NM_146473.1,624-642).
ccctgcagtactgatacta

SEQ ID NO: 763128 - DNA, 19 bp, Mus musculus
  siRNA target sequence for MOR256-22 (NM_146473.1,636-654).
gatactaggctcctatgtt

SEQ ID NO: 763129 - DNA, 19 bp, Mus musculus
  siRNA target sequence for MOR256-22 (NM_146473.1,662-680).
ctaaggctgtactgaaagt

SEQ ID NO: 763130 - DNA, 19 bp, Mus musculus
  siRNA target sequence for MOR256-22 (NM_146473.1,756-774).
ctcaggtatttatacatat

SEQ ID NO: 763131 - DNA, 19 bp, Mus musculus
  siRNA target sequence for MOR256-22 (NM_146473.1,761-779).
gtatttatacatatcttca

SEQ ID NO: 763132 - DNA, 19 bp, Mus musculus
  siRNA target sequence for MOR256-22 (NM_146473.1,775-793).
cttcaaccagtccatagat

SEQ ID NO: 763133 - DNA, 19 bp, Mus musculus
  siRNA target sequence for MOR256-22 (NM_146473.1,778-796).
caaccagtccatagatatt

SEQ ID NO: 763134 - DNA, 19 bp, Mus musculus
  siRNA target sequence for MOR256-22 (NM_146473.1,782-800).
cagtccatagatattctga

SEQ ID NO: 763135 - DNA, 19 bp, Mus musculus
  siRNA target sequence for MOR170-9 (NM_146478.1,3-21).
ggcaacggggaatcactat

SEQ ID NO: 763136 - DNA, 19 bp, Mus musculus
  siRNA target sequence for MOR170-9 (NM_146478.1,4-22).
gcaacggggaatcactatt

SEQ ID NO: 763137 - DNA, 19 bp, Mus musculus
  siRNA target sequence for MOR170-9 (NM_146478.1,8-26).
cggggaatcactattctgt

SEQ ID NO: 763138 - DNA, 19 bp, Mus musculus
  siRNA target sequence for MOR170-9 (NM_146478.1,90-108).
gttcttggtgaactgttta

SEQ ID NO: 763139 - DNA, 19 bp, Mus musculus
  siRNA target sequence for MOR170-9 (NM_146478.1,96-114).
ggtgaactgtttaatcact

SEQ ID NO: 763140 - DNA, 19 bp, Mus musculus
  siRNA target sequence for MOR170-9 (NM_146478.1,235-253).
cccaaaacactaatgagtt

SEQ ID NO: 763141 - DNA, 19 bp, Mus musculus
  siRNA target sequence for MOR170-9 (NM_146478.1,242-260).
cactaatgagttttgtctt

SEQ ID NO: 763142 - DNA, 19 bp, Mus musculus
  siRNA target sequence for MOR170-9 (NM_146478.1,312-330).
gtgcctttttgccaattca

SEQ ID NO: 763143 - DNA, 19 bp, Mus musculus
  siRNA target sequence for MOR170-9 (NM_146478.1,314-332).
gcctttttgccaattcaga

SEQ ID NO: 763144 - DNA, 19 bp, Mus musculus
  siRNA target sequence for MOR170-9 (NM_146478.1,323-341).
ccaattcagagtgctattt

SEQ ID NO: 763145 - DNA, 19 bp, Mus musculus
  siRNA target sequence for MOR170-9 (NM_146478.1,380-398).
gtcaacccctgctgtacat

SEQ ID NO: 763146 - DNA, 19 bp, Mus musculus
  siRNA target sequence for MOR170-9 (NM_146478.1,419-437).
catgttccctgatgatgtt

SEQ ID NO: 763147 - DNA, 19 bp, Mus musculus
  siRNA target sequence for MOR170-9 (NM_146478.1,447-465).
cttgatgggaggtattggt

SEQ ID NO: 763148 - DNA, 19 bp, Mus musculus
  siRNA target sequence for MOR170-9 (NM_146478.1,472-490).
gtccatacagggtgtatga

SEQ ID NO: 763149 - DNA, 19 bp, Mus musculus
  siRNA target sequence for MOR170-9 (NM_146478.1,660-678).
gattctttttaatatcact

SEQ ID NO: 763150 - DNA, 19 bp, Mus musculus
  siRNA target sequence for MOR170-9 (NM_146478.1,755-773).
gatttgctatgcttacaca

SEQ ID NO: 763151 - DNA, 19 bp, Mus musculus
  siRNA target sequence for MOR170-7 (NM_146480.1,384-402).
catctgtaagcctttatta

SEQ ID NO: 763152 - DNA, 19 bp, Mus musculus
  siRNA target sequence for MOR170-7 (NM_146480.1,389-407).
gtaagcctttattatacca

SEQ ID NO: 763153 - DNA, 19 bp, Mus musculus
  siRNA target sequence for MOR170-7 (NM_146480.1,431-449).
gttgtcttctaatgtttat

SEQ ID NO: 763154 - DNA, 19 bp, Mus musculus
  siRNA target sequence for MOR170-7 (NM_146480.1,638-656).
gtagccttcttatcttaat

SEQ ID NO: 763155 - DNA, 19 bp, Mus musculus
  siRNA target sequence for MOR170-7 (NM_146480.1,643-661).
cttcttatcttaatgtctt

SEQ ID NO: 763156 - DNA, 19 bp, Mus musculus
  siRNA target sequence for MOR170-7 (NM_146480.1,848-866).
gtctggtacctgtactgaa

SEQ ID NO: 763157 - DNA, 19 bp, Mus musculus
  siRNA target sequence for MOR162-2 (NM_146482.1,798-816).
ggatgaagagaaattatca

SEQ ID NO: 763158 - DNA, 19 bp, Mus musculus
  siRNA target sequence for MOR162-2 (NM_146482.1,805-823).
gagaaattatcaaccattt

SEQ ID NO: 763159 - DNA, 19 bp, Mus musculus
  siRNA target sequence for MOR183-3 (NM_146484.1,191-209).
ggtgtttagctcttgttga

SEQ ID NO: 763160 - DNA, 19 bp, Mus musculus
  siRNA target sequence for MOR183-3 (NM_146484.1,192-210).
gtgtttagctcttgttgat

SEQ ID NO: 763161 - DNA, 19 bp, Mus musculus
  siRNA target sequence for MOR183-3 (NM_146484.1,257-275).
cagctaagagcaaactgat

SEQ ID NO: 763162 - DNA, 19 bp, Mus musculus
  siRNA target sequence for MOR183-3 (NM_146484.1,747-765).
cttatattatggttctctt

SEQ ID NO: 763163 - DNA, 19 bp, Mus musculus
  siRNA target sequence for MOR182-5 (NM_146486.1,17-35).
ccctggtgactgcgtttat

SEQ ID NO: 763164 - DNA, 19 bp, Mus musculus
  siRNA target sequence for MOR182-5 (NM_146486.1,18-36).
cctggtgactgcgtttatt

SEQ ID NO: 763165 - DNA, 19 bp, Mus musculus
  siRNA target sequence for MOR182-5 (NM_146486.1,236-254).
ggatgcttgttaatatctt

SEQ ID NO: 763166 - DNA, 19 bp, Mus musculus
  siRNA target sequence for MOR182-5 (NM_146486.1,287-305).
gcatggcccaatattatgt

SEQ ID NO: 763167 - DNA, 19 bp, Mus musculus
  siRNA target sequence for MOR182-5 (NM_146486.1,417-435).
gtgcacttgcctgataagt

SEQ ID NO: 763168 - DNA, 19 bp, Mus musculus
  siRNA target sequence for MOR182-5 (NM_146486.1,426-444).
cctgataagtggctcatat

SEQ ID NO: 763169 - DNA, 19 bp, Mus musculus
  siRNA target sequence for MOR182-5 (NM_146486.1,427-445).
ctgataagtggctcatata

SEQ ID NO: 763170 - DNA, 19 bp, Mus musculus
  siRNA target sequence for MOR182-5 (NM_146486.1,459-477).
gcatccacttattcatgta

SEQ ID NO: 763171 - DNA, 19 bp, Mus musculus
  siRNA target sequence for MOR182-5 (NM_146486.1,472-490).
catgtaggtctactattta

SEQ ID NO: 763172 - DNA, 19 bp, Mus musculus
  siRNA target sequence for MOR182-5 (NM_146486.1,478-496).
ggtctactatttagattaa

SEQ ID NO: 763173 - DNA, 19 bp, Mus musculus
  siRNA target sequence for MOR182-5 (NM_146486.1,481-499).
ctactatttagattaacct

SEQ ID NO: 763174 - DNA, 19 bp, Mus musculus
  siRNA target sequence for MOR182-5 (NM_146486.1,567-585).
cgacccatctattaatgca

SEQ ID NO: 763175 - DNA, 19 bp, Mus musculus
  siRNA target sequence for MOR182-5 (NM_146486.1,568-586).
gacccatctattaatgcat

SEQ ID NO: 763176 - DNA, 19 bp, Mus musculus
  siRNA target sequence for MOR182-5 (NM_146486.1,570-588).
cccatctattaatgcattt

SEQ ID NO: 763177 - DNA, 19 bp, Mus musculus
  siRNA target sequence for MOR182-5 (NM_146486.1,583-601).
gcatttgtggtcttcattt

SEQ ID NO: 763178 - DNA, 19 bp, Mus musculus
  siRNA target sequence for MOR256-19 (NM_146487.1,725-743).
cgcacatgctggtagtagt

SEQ ID NO: 763179 - DNA, 19 bp, Mus musculus
  siRNA target sequence for MOR256-19 (NM_146487.1,729-747).
catgctggtagtagtacta

SEQ ID NO: 763180 - DNA, 19 bp, Mus musculus
  siRNA target sequence for MOR256-18 (NM_146488.1,79-97).
gttctctttgtggtgatat

SEQ ID NO: 763181 - DNA, 19 bp, Mus musculus
  siRNA target sequence for MOR256-18 (NM_146488.1,91-109).
gtgatattgatattctaca

SEQ ID NO: 763182 - DNA, 19 bp, Mus musculus
  siRNA target sequence for MOR256-18 (NM_146488.1,132-150).
cttcatcataattttgtca

SEQ ID NO: 763183 - DNA, 19 bp, Mus musculus
  siRNA target sequence for MOR256-18 (NM_146488.1,205-223).
gctttggatctctgttata

SEQ ID NO: 763184 - DNA, 19 bp, Mus musculus
  siRNA target sequence for MOR256-18 (NM_146488.1,235-253).
gtcccccagctgctattta

SEQ ID NO: 763185 - DNA, 19 bp, Mus musculus
  siRNA target sequence for MOR256-18 (NM_146488.1,239-257).
cccagctgctatttaacct

SEQ ID NO: 763186 - DNA, 19 bp, Mus musculus
  siRNA target sequence for MOR256-18 (NM_146488.1,406-424).
cttatgaatcctcgttttt

SEQ ID NO: 763187 - DNA, 19 bp, Mus musculus
  siRNA target sequence for MOR256-18 (NM_146488.1,472-490).
gcccttcactcttccttta

SEQ ID NO: 763188 - DNA, 19 bp, Mus musculus
  siRNA target sequence for MOR256-18 (NM_146488.1,507-525).
gtgtggccatcgcaaagta

SEQ ID NO: 763189 - DNA, 19 bp, Mus musculus
  siRNA target sequence for MOR256-18 (NM_146488.1,518-536).
gcaaagtagaccacttctt

SEQ ID NO: 763190 - DNA, 19 bp, Mus musculus
  siRNA target sequence for MOR256-18 (NM_146488.1,564-582).
gtcctgtgttgatatccat

SEQ ID NO: 763191 - DNA, 19 bp, Mus musculus
  siRNA target sequence for MOR256-18 (NM_146488.1,625-643).
gtcataccacttattctca

SEQ ID NO: 763192 - DNA, 19 bp, Mus musculus
  siRNA target sequence for MOR256-18 (NM_146488.1,676-694).
gtcctggaaatgcaatcaa

SEQ ID NO: 763193 - DNA, 19 bp, Mus musculus
  siRNA target sequence for MOR256-18 (NM_146488.1,695-713).
ccactcgacttcagaaagt

SEQ ID NO: 763194 - DNA, 19 bp, Mus musculus
  siRNA target sequence for MOR122-2 (NM_146489.1,6-24).
gaccttatcctgggaaaat

SEQ ID NO: 763195 - DNA, 19 bp, Mus musculus
  siRNA target sequence for MOR122-2 (NM_146489.1,29-47).
cggtgatagtggagtttgt

SEQ ID NO: 763196 - DNA, 19 bp, Mus musculus
  siRNA target sequence for MOR122-2 (NM_146489.1,76-94).
ctgaatatttccctcttta

SEQ ID NO: 763197 - DNA, 19 bp, Mus musculus
  siRNA target sequence for MOR122-2 (NM_146489.1,249-267).
gatgttgctgattattata

SEQ ID NO: 763198 - DNA, 19 bp, Mus musculus
  siRNA target sequence for MOR122-2 (NM_146489.1,252-270).
gttgctgattattatagct

SEQ ID NO: 763199 - DNA, 19 bp, Mus musculus
  siRNA target sequence for MOR122-2 (NM_146489.1,299-317).
gcttggcacaattctactt

SEQ ID NO: 763200 - DNA, 19 bp, Mus musculus
  siRNA target sequence for MOR122-2 (NM_146489.1,490-508).
gtcctgctgtgtagacaaa

SEQ ID NO: 763201 - DNA, 19 bp, Mus musculus
  siRNA target sequence for MOR122-2 (NM_146489.1,580-598).
gatacttcactgattgaga

SEQ ID NO: 763202 - DNA, 19 bp, Mus musculus
  siRNA target sequence for MOR122-2 (NM_146489.1,634-652).
gtcccatttttccttatca

SEQ ID NO: 763203 - DNA, 19 bp, Mus musculus
  siRNA target sequence for MOR122-2 (NM_146489.1,904-922).
gaagctttgaagaaatgct

SEQ ID NO: 763204 - DNA, 19 bp, Mus musculus
  siRNA target sequence for MOR122-2 (NM_146489.1,930-948).
gaagtcagactttctcata

SEQ ID NO: 763205 - DNA, 19 bp, Mus musculus
  siRNA target sequence for MOR208-2 (NM_146491.1,527-545).
gcagctccaactacattga

SEQ ID NO: 763206 - DNA, 19 bp, Mus musculus
  siRNA target sequence for MOR208-2 (NM_146491.1,537-555).
ctacattgactacttcttt

SEQ ID NO: 763207 - DNA, 19 bp, Mus musculus
  siRNA target sequence for MOR208-2 (NM_146491.1,623-641).
gcatttgtggcttcatcat

SEQ ID NO: 763208 - DNA, 19 bp, Mus musculus
  siRNA target sequence for MOR208-2 (NM_146491.1,778-796).
ggaactggctttgttatat

SEQ ID NO: 763209 - DNA, 19 bp, Mus musculus
  siRNA target sequence for MOR208-2 (NM_146491.1,838-856).
gtggtctccacaatctaca

SEQ ID NO: 763210 - DNA, 19 bp, Mus musculus
  siRNA target sequence for MOR247-1 (NM_146493.1,111-129).
ggcaacaatggtgagtaat

SEQ ID NO: 763211 - DNA, 19 bp, Mus musculus
  siRNA target sequence for MOR247-1 (NM_146493.1,112-130).
gcaacaatggtgagtaata

SEQ ID NO: 763212 - DNA, 19 bp, Mus musculus
  siRNA target sequence for MOR247-1 (NM_146493.1,116-134).
caatggtgagtaatagcat

SEQ ID NO: 763213 - DNA, 19 bp, Mus musculus
  siRNA target sequence for MOR247-1 (NM_146493.1,120-138).
ggtgagtaatagcatgata

SEQ ID NO: 763214 - DNA, 19 bp, Mus musculus
  siRNA target sequence for MOR247-1 (NM_146493.1,246-264).
gatcatagattatctaact

SEQ ID NO: 763215 - DNA, 19 bp, Mus musculus
  siRNA target sequence for MOR247-1 (NM_146493.1,253-271).
gattatctaactgatcata

SEQ ID NO: 763216 - DNA, 19 bp, Mus musculus
  siRNA target sequence for MOR247-1 (NM_146493.1,259-277).
ctaactgatcataaaacaa

SEQ ID NO: 763217 - DNA, 19 bp, Mus musculus
  siRNA target sequence for MOR247-1 (NM_146493.1,324-342).
cactggtactgagattatt

SEQ ID NO: 763218 - DNA, 19 bp, Mus musculus
  siRNA target sequence for MOR247-1 (NM_146493.1,391-409).
ctgcgctatgcctcaatca

SEQ ID NO: 763219 - DNA, 19 bp, Mus musculus
  siRNA target sequence for MOR247-1 (NM_146493.1,393-411).
gcgctatgcctcaatcata

SEQ ID NO: 763220 - DNA, 19 bp, Mus musculus
  siRNA target sequence for MOR247-1 (NM_146493.1,394-412).
cgctatgcctcaatcataa

SEQ ID NO: 763221 - DNA, 19 bp, Mus musculus
  siRNA target sequence for MOR247-1 (NM_146493.1,555-573).
gttccagctgtcttgtgta

SEQ ID NO: 763222 - DNA, 19 bp, Mus musculus
  siRNA target sequence for MOR247-1 (NM_146493.1,564-582).
gtcttgtgtagatacttat

SEQ ID NO: 763223 - DNA, 19 bp, Mus musculus
  siRNA target sequence for MOR247-1 (NM_146493.1,583-601).
gttcttggtctctttatga

SEQ ID NO: 763224 - DNA, 19 bp, Mus musculus
  siRNA target sequence for MOR247-1 (NM_146493.1,586-604).
cttggtctctttatgattt

SEQ ID NO: 763225 - DNA, 19 bp, Mus musculus
  siRNA target sequence for MOR247-1 (NM_146493.1,608-626).
caagtggcattattgcatt

SEQ ID NO: 763226 - DNA, 19 bp, Mus musculus
  siRNA target sequence for MOR247-1 (NM_146493.1,795-813).
ctttgtgatagaaaagata

SEQ ID NO: 763227 - DNA, 19 bp, Mus musculus
  siRNA target sequence for MOR247-1 (NM_146493.1,830-848).
ctatatttactcccattat

SEQ ID NO: 763228 - DNA, 19 bp, Mus musculus
  siRNA target sequence for MOR247-1 (NM_146493.1,843-861).
cattatgaacccagtgata

SEQ ID NO: 763229 - DNA, 19 bp, Mus musculus
  siRNA target sequence for MOR247-1 (NM_146493.1,904-922).
ctgagaagtaagttcctaa

SEQ ID NO: 763230 - DNA, 19 bp, Mus musculus
  siRNA target sequence for MOR247-1 (NM_146493.1,906-924).
gagaagtaagttcctaaat

SEQ ID NO: 763231 - DNA, 19 bp, Mus musculus
  siRNA target sequence for MOR204-20 (NM_146495.1,20-38).
ccagcatgacagagttatt

SEQ ID NO: 763232 - DNA, 19 bp, Mus musculus
  siRNA target sequence for MOR204-20 (NM_146495.1,23-41).
gcatgacagagttattcat

SEQ ID NO: 763233 - DNA, 19 bp, Mus musculus
  siRNA target sequence for MOR204-19 (NM_146496.1,468-486).
ccttaacgcttcatttgta

SEQ ID NO: 763234 - DNA, 19 bp, Mus musculus
  siRNA target sequence for MOR204-19 (NM_146496.1,658-676).
ccttacttctatatcttca

SEQ ID NO: 763235 - DNA, 19 bp, Mus musculus
  siRNA target sequence for MOR204-18 (NM_146497.1,464-482).
ggattcttaatgcttcttt

SEQ ID NO: 763236 - DNA, 19 bp, Mus musculus
  siRNA target sequence for MOR204-18 (NM_146497.1,589-607).
gtttctgtagtcattacca

SEQ ID NO: 763237 - DNA, 19 bp, Mus musculus
  siRNA target sequence for MOR204-18 (NM_146497.1,595-613).
gtagtcattaccacaattt

SEQ ID NO: 763238 - DNA, 19 bp, Mus musculus
  siRNA target sequence for MOR204-17 (NM_146498.1,233-251).
cgtctgttactcccaatat

SEQ ID NO: 763239 - DNA, 19 bp, Mus musculus
  siRNA target sequence for MOR204-17 (NM_146498.1,441-459).
gattgtaggatcctacatt

SEQ ID NO: 763240 - DNA, 19 bp, Mus musculus
  siRNA target sequence for MOR204-17 (NM_146498.1,794-812).
ctaagtccagctattcaat

SEQ ID NO: 763241 - DNA, 19 bp, Mus musculus
  siRNA target sequence for MOR285-2 (NM_146500.1,267-285).
caaggccatttccgtttta

SEQ ID NO: 763242 - DNA, 19 bp, Mus musculus
  siRNA target sequence for MOR285-2 (NM_146500.1,270-288).
ggccatttccgttttagga

SEQ ID NO: 763243 - DNA, 19 bp, Mus musculus
  siRNA target sequence for MOR285-2 (NM_146500.1,271-289).
gccatttccgttttaggat

SEQ ID NO: 763244 - DNA, 19 bp, Mus musculus
  siRNA target sequence for MOR285-2 (NM_146500.1,290-308).
gtgagatccaagtctttat

SEQ ID NO: 763245 - DNA, 19 bp, Mus musculus
  siRNA target sequence for MOR285-2 (NM_146500.1,292-310).
gagatccaagtctttatgt

SEQ ID NO: 763246 - DNA, 19 bp, Mus musculus
  siRNA target sequence for MOR285-2 (NM_146500.1,294-312).
gatccaagtctttatgttt

SEQ ID NO: 763247 - DNA, 19 bp, Mus musculus
  siRNA target sequence for MOR285-2 (NM_146500.1,579-597).
ccaatatgagcatatgatt

SEQ ID NO: 763248 - DNA, 19 bp, Mus musculus
  siRNA target sequence for MOR171-21 (NM_146503.1,115-133).
gttgttggaaacttaggaa

SEQ ID NO: 763249 - DNA, 19 bp, Mus musculus
  siRNA target sequence for MOR224-5 (NM_146504.1,141-159).
cactacctccccaagacta

SEQ ID NO: 763250 - DNA, 19 bp, Mus musculus
  siRNA target sequence for MOR224-5 (NM_146504.1,185-203).
gaaacctctccatctttga

SEQ ID NO: 763251 - DNA, 19 bp, Mus musculus
  siRNA target sequence for MOR224-5 (NM_146504.1,260-278).
gtggagggatctcttttca

SEQ ID NO: 763252 - DNA, 19 bp, Mus musculus
  siRNA target sequence for Olfr148 (NM_146505.1,105-123).
caccttgctcggaaattca

SEQ ID NO: 763253 - DNA, 19 bp, Mus musculus
  siRNA target sequence for Olfr148 (NM_146505.1,183-201).
gggacttctatccgttttt

SEQ ID NO: 763254 - DNA, 19 bp, Mus musculus
  siRNA target sequence for Olfr148 (NM_146505.1,185-203).
gacttctatccgtttttga

SEQ ID NO: 763255 - DNA, 19 bp, Mus musculus
  siRNA target sequence for Olfr148 (NM_146505.1,187-205).
cttctatccgtttttgaca

SEQ ID NO: 763256 - DNA, 19 bp, Mus musculus
  siRNA target sequence for Olfr148 (NM_146505.1,414-432).
gtgtgtgagcttggtaata

SEQ ID NO: 763257 - DNA, 19 bp, Mus musculus
  siRNA target sequence for Olfr148 (NM_146505.1,416-434).
gtgtgagcttggtaataat

SEQ ID NO: 763258 - DNA, 19 bp, Mus musculus
  siRNA target sequence for Olfr148 (NM_146505.1,420-438).
gagcttggtaataatagct

SEQ ID NO: 763259 - DNA, 19 bp, Mus musculus
  siRNA target sequence for Olfr148 (NM_146505.1,426-444).
ggtaataatagcttggtta

SEQ ID NO: 763260 - DNA, 19 bp, Mus musculus
  siRNA target sequence for Olfr148 (NM_146505.1,894-912).
gagagttttccagaatata

SEQ ID NO: 763261 - DNA, 19 bp, Mus musculus
  siRNA target sequence for Olfr148 (NM_146505.1,898-916).
gttttccagaatataacat

SEQ ID NO: 763262 - DNA, 19 bp, Mus musculus
  siRNA target sequence for MOR171-20 (NM_146506.1,634-652).
gctccaacattgatcatta

SEQ ID NO: 763263 - DNA, 19 bp, Mus musculus
  siRNA target sequence for MOR171-20 (NM_146506.1,637-655).
ccaacattgatcattatta

SEQ ID NO: 763264 - DNA, 19 bp, Mus musculus
  siRNA target sequence for MOR171-20 (NM_146506.1,790-808).
caaccatcacgagtgaatt

SEQ ID NO: 763265 - DNA, 19 bp, Mus musculus
  siRNA target sequence for MOR171-20 (NM_146506.1,793-811).
ccatcacgagtgaattcga

SEQ ID NO: 763266 - DNA, 19 bp, Mus musculus
  siRNA target sequence for MOR171-20 (NM_146506.1,794-812).
catcacgagtgaattcgat

SEQ ID NO: 763267 - DNA, 19 bp, Mus musculus
  siRNA target sequence for MOR171-19 (NM_146507.1,705-723).
caaagggtttagtacttgt

SEQ ID NO: 763268 - DNA, 19 bp, Mus musculus
  siRNA target sequence for MOR171-19 (NM_146507.1,709-727).
gggtttagtacttgtagta

SEQ ID NO: 763269 - DNA, 19 bp, Mus musculus
  siRNA target sequence for MOR122-1 (NM_146509.1,110-128).
caacggttggtggcaatat

SEQ ID NO: 763270 - DNA, 19 bp, Mus musculus
  siRNA target sequence for MOR122-1 (NM_146509.1,232-250).
gtgcctcggctgttacaga

SEQ ID NO: 763271 - DNA, 19 bp, Mus musculus
  siRNA target sequence for MOR122-1 (NM_146509.1,515-533).
gcagggtgattgatcacta

SEQ ID NO: 763272 - DNA, 19 bp, Mus musculus
  siRNA target sequence for MOR122-1 (NM_146509.1,518-536).
gggtgattgatcactactt

SEQ ID NO: 763273 - DNA, 19 bp, Mus musculus
  siRNA target sequence for MOR122-1 (NM_146509.1,740-758).
gtgtggtcgcggtattcta

SEQ ID NO: 763274 - DNA, 19 bp, Mus musculus
  siRNA target sequence for MOR122-1 (NM_146509.1,764-782).
ctctcatcgtggtctatgt

SEQ ID NO: 763275 - DNA, 19 bp, Mus musculus
  siRNA target sequence for MOR156-4 (NM_146510.1,560-578).
ctgatacatacctcaatga

SEQ ID NO: 763276 - DNA, 19 bp, Mus musculus
  siRNA target sequence for MOR156-3 (NM_146511.1,63-81).
gcagcccctctttaatatt

SEQ ID NO: 763277 - DNA, 19 bp, Mus musculus
  siRNA target sequence for MOR156-3 (NM_146511.1,377-395).
ccctgttctacccatttct

SEQ ID NO: 763278 - DNA, 19 bp, Mus musculus
  siRNA target sequence for MOR156-3 (NM_146511.1,458-476).
ctctgttctataccttatt

SEQ ID NO: 763279 - DNA, 19 bp, Mus musculus
  siRNA target sequence for MOR263-6 (NM_146513.1,283-301).
ggctgcgctctgcaaatgt

SEQ ID NO: 763280 - DNA, 19 bp, Mus musculus
  siRNA target sequence for MOR263-6 (NM_146513.1,284-302).
gctgcgctctgcaaatgtt

SEQ ID NO: 763281 - DNA, 19 bp, Mus musculus
  siRNA target sequence for MOR263-6 (NM_146513.1,287-305).
gcgctctgcaaatgttctt

SEQ ID NO: 763282 - DNA, 19 bp, Mus musculus
  siRNA target sequence for MOR263-6 (NM_146513.1,470-488).
gccacacctccttcatctt

SEQ ID NO: 763283 - DNA, 19 bp, Mus musculus
  siRNA target sequence for MOR263-6 (NM_146513.1,655-673).
cggatcctggtcaccattt

SEQ ID NO: 763284 - DNA, 19 bp, Mus musculus
  siRNA target sequence for MOR121-1 (NM_146514.1,207-225).
cttcatagagattgtctat

SEQ ID NO: 763285 - DNA, 19 bp, Mus musculus
  siRNA target sequence for MOR121-1 (NM_146514.1,230-248).
ccacagtggtgcccaaaat

SEQ ID NO: 763286 - DNA, 19 bp, Mus musculus
  siRNA target sequence for MOR121-1 (NM_146514.1,368-386).
gatatctcgcaatttgtca

SEQ ID NO: 763287 - DNA, 19 bp, Mus musculus
  siRNA target sequence for MOR121-1 (NM_146514.1,509-527).
gtggccccaacttagttga

SEQ ID NO: 763288 - DNA, 19 bp, Mus musculus
  siRNA target sequence for MOR121-1 (NM_146514.1,512-530).
gccccaacttagttgatca

SEQ ID NO: 763289 - DNA, 19 bp, Mus musculus
  siRNA target sequence for MOR121-1 (NM_146514.1,587-605).
cccaggtgactacatttgt

SEQ ID NO: 763290 - DNA, 19 bp, Mus musculus
  siRNA target sequence for MOR121-1 (NM_146514.1,632-650).
cctttgggctggttctgat

SEQ ID NO: 763291 - DNA, 19 bp, Mus musculus
  siRNA target sequence for MOR121-1 (NM_146514.1,764-782).
cactcatggtattgtacat

SEQ ID NO: 763292 - DNA, 19 bp, Mus musculus
  siRNA target sequence for MOR121-1 (NM_146514.1,891-909).
ggtgcagcaggcactaaga

SEQ ID NO: 763293 - DNA, 19 bp, Mus musculus
  siRNA target sequence for MOR121-1 (NM_146514.1,913-931).
cttctctactgcaaaccaa

SEQ ID NO: 763294 - DNA, 19 bp, Mus musculus
  siRNA target sequence for MOR156-1 (NM_146515.1,9-27).
cagtcaggctcctacatta

SEQ ID NO: 763295 - DNA, 19 bp, Mus musculus
  siRNA target sequence for MOR156-1 (NM_146515.1,354-372).
caggtatgccgctatctgt

SEQ ID NO: 763296 - DNA, 19 bp, Mus musculus
  siRNA target sequence for MOR156-1 (NM_146515.1,391-409).
gctctcatgactcctttta

SEQ ID NO: 763297 - DNA, 19 bp, Mus musculus
  siRNA target sequence for MOR156-1 (NM_146515.1,560-578).
cagatactcacctcaataa

SEQ ID NO: 763298 - DNA, 19 bp, Mus musculus
  siRNA target sequence for MOR156-1 (NM_146515.1,562-580).
gatactcacctcaataaaa

SEQ ID NO: 763299 - DNA, 19 bp, Mus musculus
  siRNA target sequence for MOR156-1 (NM_146515.1,831-849).
cgtaactcccactctgaat

SEQ ID NO: 763300 - DNA, 19 bp, Mus musculus
  siRNA target sequence for MOR156-1 (NM_146515.1,890-908).
cattgaggagaatcctaaa

SEQ ID NO: 763301 - DNA, 19 bp, Mus musculus
  siRNA target sequence for MOR126-2 (NM_146516.1,609-627).
gggaaccttgtttctcttt

SEQ ID NO: 763302 - DNA, 19 bp, Mus musculus
  siRNA target sequence for MOR126-2 (NM_146516.1,765-783).
gacgattctggggatctat

SEQ ID NO: 763303 - DNA, 19 bp, Mus musculus
  siRNA target sequence for MOR252-2 (NM_146519.1,583-601).
gacatcatgactgttatta

SEQ ID NO: 763304 - DNA, 19 bp, Mus musculus
  siRNA target sequence for MOR252-2 (NM_146519.1,755-773).
ccactgttctctatactta

SEQ ID NO: 763305 - DNA, 19 bp, Mus musculus
  siRNA target sequence for MOR252-2 (NM_146519.1,756-774).
cactgttctctatacttat

SEQ ID NO: 763306 - DNA, 19 bp, Mus musculus
  siRNA target sequence for MOR147-3 (NM_146522.1,130-148).
gggaacatgcttatagtgt

SEQ ID NO: 763307 - DNA, 19 bp, Mus musculus
  siRNA target sequence for MOR147-3 (NM_146522.1,131-149).
ggaacatgcttatagtgtt

SEQ ID NO: 763308 - DNA, 19 bp, Mus musculus
  siRNA target sequence for MOR147-3 (NM_146522.1,139-157).
cttatagtgttgatttcta

SEQ ID NO: 763309 - DNA, 19 bp, Mus musculus
  siRNA target sequence for MOR147-3 (NM_146522.1,488-506).
gcctgatggtgctaagact

SEQ ID NO: 763310 - DNA, 19 bp, Mus musculus
  siRNA target sequence for MOR147-3 (NM_146522.1,588-606).
cattgataacattctgatt

SEQ ID NO: 763311 - DNA, 19 bp, Mus musculus
  siRNA target sequence for MOR147-3 (NM_146522.1,592-610).
gataacattctgatttata

SEQ ID NO: 763312 - DNA, 19 bp, Mus musculus
  siRNA target sequence for MOR147-3 (NM_146522.1,637-655).
cctctctccggaattgttt

SEQ ID NO: 763313 - DNA, 19 bp, Mus musculus
  siRNA target sequence for MOR147-3 (NM_146522.1,667-685).
catatcatgtcctctattt

SEQ ID NO: 763314 - DNA, 19 bp, Mus musculus
  siRNA target sequence for MOR147-2 (NM_146523.1,453-471).
cctgctcattagtgttgtt

SEQ ID NO: 763315 - DNA, 19 bp, Mus musculus
  siRNA target sequence for MOR147-2 (NM_146523.1,496-514).
gtgctccgactgtcattct

SEQ ID NO: 763316 - DNA, 19 bp, Mus musculus
  siRNA target sequence for MOR147-2 (NM_146523.1,584-602).
ctctcattgataacatatt

SEQ ID NO: 763317 - DNA, 19 bp, Mus musculus
  siRNA target sequence for MOR147-2 (NM_146523.1,606-624).
ctatctttctgcatgcata

SEQ ID NO: 763318 - DNA, 19 bp, Mus musculus
  siRNA target sequence for MOR147-2 (NM_146523.1,907-925).
gctatggggaaattcttca

SEQ ID NO: 763319 - DNA, 19 bp, Mus musculus
  siRNA target sequence for MOR147-2 (NM_146523.1,924-942).
cagtcggatggcttctttt

SEQ ID NO: 763320 - DNA, 19 bp, Mus musculus
  siRNA target sequence for MOR148-1 (NM_146524.1,4-22).
gagccccaaaacaaaacgt

SEQ ID NO: 763321 - DNA, 19 bp, Mus musculus
  siRNA target sequence for MOR148-1 (NM_146524.1,94-112).
ctgttcatatacttagtca

SEQ ID NO: 763322 - DNA, 19 bp, Mus musculus
  siRNA target sequence for MOR148-1 (NM_146524.1,129-147).
gctcataattctgtgtata

SEQ ID NO: 763323 - DNA, 19 bp, Mus musculus
  siRNA target sequence for MOR148-1 (NM_146524.1,382-400).
cacccattaaggtataata

SEQ ID NO: 763324 - DNA, 19 bp, Mus musculus
  siRNA target sequence for MOR148-1 (NM_146524.1,422-440).
gtgttctactctcactaaa

SEQ ID NO: 763325 - DNA, 19 bp, Mus musculus
  siRNA target sequence for MOR148-1 (NM_146524.1,424-442).
gttctactctcactaaatt

SEQ ID NO: 763326 - DNA, 19 bp, Mus musculus
  siRNA target sequence for MOR148-1 (NM_146524.1,434-452).
cactaaattctctgttcat

SEQ ID NO: 763327 - DNA, 19 bp, Mus musculus
  siRNA target sequence for MOR148-1 (NM_146524.1,566-584).
gttctgacacccgaattga

SEQ ID NO: 763328 - DNA, 19 bp, Mus musculus
  siRNA target sequence for MOR148-1 (NM_146524.1,569-587).
ctgacacccgaattgacaa

SEQ ID NO: 763329 - DNA, 19 bp, Mus musculus
  siRNA target sequence for MOR148-1 (NM_146524.1,594-612).
gctctttgttgcaacttgt

SEQ ID NO: 763330 - DNA, 19 bp, Mus musculus
  siRNA target sequence for MOR148-1 (NM_146524.1,597-615).
ctttgttgcaacttgtgta

SEQ ID NO: 763331 - DNA, 19 bp, Mus musculus
  siRNA target sequence for MOR148-1 (NM_146524.1,635-653).
gtggaatcatttattctta

SEQ ID NO: 763332 - DNA, 19 bp, Mus musculus
  siRNA target sequence for MOR148-1 (NM_146524.1,757-775).
ggggcaggttctatggtat

SEQ ID NO: 763333 - DNA, 19 bp, Mus musculus
  siRNA target sequence for MOR148-1 (NM_146524.1,910-928).
ctttttagcaggaccattt

SEQ ID NO: 763334 - DNA, 19 bp, Mus musculus
  siRNA target sequence for MOR146-3 (NM_146526.1,553-571).
gtaaaacttgcttgttcta

SEQ ID NO: 763335 - DNA, 19 bp, Mus musculus
  siRNA target sequence for MOR146-3 (NM_146526.1,559-577).
cttgcttgttctaacacta

SEQ ID NO: 763336 - DNA, 19 bp, Mus musculus
  siRNA target sequence for MOR146-3 (NM_146526.1,562-580).
gcttgttctaacactacta

SEQ ID NO: 763337 - DNA, 19 bp, Mus musculus
  siRNA target sequence for MOR146-3 (NM_146526.1,563-581).
cttgttctaacactactat

SEQ ID NO: 763338 - DNA, 19 bp, Mus musculus
  siRNA target sequence for MOR146-3 (NM_146526.1,566-584).
gttctaacactactatcaa

SEQ ID NO: 763339 - DNA, 19 bp, Mus musculus
  siRNA target sequence for MOR146-3 (NM_146526.1,898-916).
gccctctggaaaattgtct

SEQ ID NO: 763340 - DNA, 19 bp, Mus musculus
  siRNA target sequence for MOR146-3 (NM_146526.1,905-923).
ggaaaattgtctgtaagat

SEQ ID NO: 763341 - DNA, 19 bp, Mus musculus
  siRNA target sequence for MOR146-3 (NM_146526.1,906-924).
gaaaattgtctgtaagata

SEQ ID NO: 763342 - DNA, 19 bp, Mus musculus
  siRNA target sequence for MOR151-1 (NM_146527.1,8-26).
ctgtgaatcaaacaatcat

SEQ ID NO: 763343 - DNA, 19 bp, Mus musculus
  siRNA target sequence for MOR151-1 (NM_146527.1,215-233).
gtttaatcaatactacaat

SEQ ID NO: 763344 - DNA, 19 bp, Mus musculus
  siRNA target sequence for MOR151-1 (NM_146527.1,262-280).
gaggatcacaccatcacat

SEQ ID NO: 763345 - DNA, 19 bp, Mus musculus
  siRNA target sequence for MOR151-1 (NM_146527.1,287-305).
catgcctctctcaagtcta

SEQ ID NO: 763346 - DNA, 19 bp, Mus musculus
  siRNA target sequence for MOR151-1 (NM_146527.1,296-314).
ctcaagtctatctcatctt

SEQ ID NO: 763347 - DNA, 19 bp, Mus musculus
  siRNA target sequence for MOR151-1 (NM_146527.1,298-316).
caagtctatctcatcttga

SEQ ID NO: 763348 - DNA, 19 bp, Mus musculus
  siRNA target sequence for MOR151-1 (NM_146527.1,301-319).
gtctatctcatcttgaatt

SEQ ID NO: 763349 - DNA, 19 bp, Mus musculus
  siRNA target sequence for MOR151-1 (NM_146527.1,467-485).
ctttgttccacactttgat

SEQ ID NO: 763350 - DNA, 19 bp, Mus musculus
  siRNA target sequence for MOR151-1 (NM_146527.1,763-781).
ggttttggggtacacataa

SEQ ID NO: 763351 - DNA, 19 bp, Mus musculus
  siRNA target sequence for MOR151-1 (NM_146527.1,824-842).
cagtgatgtacactatcat

SEQ ID NO: 763352 - DNA, 19 bp, Mus musculus
  siRNA target sequence for MOR151-1 (NM_146527.1,912-930).
cactagtaagataccattt

SEQ ID NO: 763353 - DNA, 19 bp, Mus musculus
  siRNA target sequence for MOR151-1 (NM_146527.1,914-932).
ctagtaagataccatttct

SEQ ID NO: 763354 - DNA, 19 bp, Mus musculus
  siRNA target sequence for MOR230-6 (NM_146529.1,3-21).
gcataactatagtgttact

SEQ ID NO: 763355 - DNA, 19 bp, Mus musculus
  siRNA target sequence for MOR230-6 (NM_146529.1,9-27).
ctatagtgttactgagttt

SEQ ID NO: 763356 - DNA, 19 bp, Mus musculus
  siRNA target sequence for MOR230-6 (NM_146529.1,121-139).
ctcatcgtgatgaccatta

SEQ ID NO: 763357 - DNA, 19 bp, Mus musculus
  siRNA target sequence for MOR230-6 (NM_146529.1,221-239).
cagcacctagattgatcat

SEQ ID NO: 763358 - DNA, 19 bp, Mus musculus
  siRNA target sequence for MOR230-6 (NM_146529.1,241-259).
gacgccctctcgcagaaaa

SEQ ID NO: 763359 - DNA, 19 bp, Mus musculus
  siRNA target sequence for MOR230-6 (NM_146529.1,243-261).
cgccctctcgcagaaaaaa

SEQ ID NO: 763360 - DNA, 19 bp, Mus musculus
  siRNA target sequence for MOR230-6 (NM_146529.1,246-264).
cctctcgcagaaaaaaatt

SEQ ID NO: 763361 - DNA, 19 bp, Mus musculus
  siRNA target sequence for MOR230-6 (NM_146529.1,247-265).
ctctcgcagaaaaaaatta

SEQ ID NO: 763362 - DNA, 19 bp, Mus musculus
  siRNA target sequence for MOR230-5 (NM_146530.1,10-28).
catacgatgactgaattca

SEQ ID NO: 763363 - DNA, 19 bp, Mus musculus
  siRNA target sequence for MOR230-5 (NM_146530.1,241-259).
gatgccctattgcagaaaa

SEQ ID NO: 763364 - DNA, 19 bp, Mus musculus
  siRNA target sequence for MOR230-5 (NM_146530.1,611-629).
gtacggtaagtttcatagt

SEQ ID NO: 763365 - DNA, 19 bp, Mus musculus
  siRNA target sequence for MOR230-5 (NM_146530.1,614-632).
cggtaagtttcatagtact

SEQ ID NO: 763366 - DNA, 19 bp, Mus musculus
  siRNA target sequence for MOR174-12 (NM_146532.1,406-424).
gttgtgatgccttttcaat

SEQ ID NO: 763367 - DNA, 19 bp, Mus musculus
  siRNA target sequence for MOR174-12 (NM_146532.1,498-516).
gcaactctcctattgtgaa

SEQ ID NO: 763368 - DNA, 19 bp, Mus musculus
  siRNA target sequence for MOR174-12 (NM_146532.1,499-517).
caactctcctattgtgaat

SEQ ID NO: 763369 - DNA, 19 bp, Mus musculus
  siRNA target sequence for MOR174-12 (NM_146532.1,739-757).
ctgactgccatatcaatct

SEQ ID NO: 763370 - DNA, 19 bp, Mus musculus
  siRNA target sequence for MOR256-16 (NM_146533.1,31-49).
ccagaagatttcattctta

SEQ ID NO: 763371 - DNA, 19 bp, Mus musculus
  siRNA target sequence for MOR256-16 (NM_146533.1,32-50).
cagaagatttcattcttat

SEQ ID NO: 763372 - DNA, 19 bp, Mus musculus
  siRNA target sequence for MOR256-16 (NM_146533.1,97-115).
ctcctgacctcctacatgt

SEQ ID NO: 763373 - DNA, 19 bp, Mus musculus
  siRNA target sequence for MOR256-16 (NM_146533.1,124-142).
ctgggaaacattgctatta

SEQ ID NO: 763374 - DNA, 19 bp, Mus musculus
  siRNA target sequence for MOR256-16 (NM_146533.1,126-144).
gggaaacattgctattatt

SEQ ID NO: 763375 - DNA, 19 bp, Mus musculus
  siRNA target sequence for MOR256-16 (NM_146533.1,127-145).
ggaaacattgctattattt

SEQ ID NO: 763376 - DNA, 19 bp, Mus musculus
  siRNA target sequence for MOR256-16 (NM_146533.1,137-155).
ctattattttggtttctca

SEQ ID NO: 763377 - DNA, 19 bp, Mus musculus
  siRNA target sequence for MOR256-16 (NM_146533.1,233-251).
cgactgtccctcaaatgtt

SEQ ID NO: 763378 - DNA, 19 bp, Mus musculus
  siRNA target sequence for MOR256-16 (NM_146533.1,269-287).
ccaacaagaacatcactta

SEQ ID NO: 763379 - DNA, 19 bp, Mus musculus
  siRNA target sequence for MOR256-16 (NM_146533.1,300-318).
ggcccaggcctatgtgttt

SEQ ID NO: 763380 - DNA, 19 bp, Mus musculus
  siRNA target sequence for MOR256-16 (NM_146533.1,302-320).
cccaggcctatgtgtttca

SEQ ID NO: 763381 - DNA, 19 bp, Mus musculus
  siRNA target sequence for MOR256-16 (NM_146533.1,304-322).
caggcctatgtgtttcatt

SEQ ID NO: 763382 - DNA, 19 bp, Mus musculus
  siRNA target sequence for MOR256-16 (NM_146533.1,308-326).
cctatgtgtttcattggtt

SEQ ID NO: 763383 - DNA, 19 bp, Mus musculus
  siRNA target sequence for MOR256-16 (NM_146533.1,309-327).
ctatgtgtttcattggtta

SEQ ID NO: 763384 - DNA, 19 bp, Mus musculus
  siRNA target sequence for MOR256-16 (NM_146533.1,394-412).
ctgaggtactctgtcatta

SEQ ID NO: 763385 - DNA, 19 bp, Mus musculus
  siRNA target sequence for MOR256-16 (NM_146533.1,398-416).
ggtactctgtcattatgga

SEQ ID NO: 763386 - DNA, 19 bp, Mus musculus
  siRNA target sequence for MOR256-16 (NM_146533.1,456-474).
cactggcctggctaactca

SEQ ID NO: 763387 - DNA, 19 bp, Mus musculus
  siRNA target sequence for MOR256-16 (NM_146533.1,475-493).
ctactacagtctacactta

SEQ ID NO: 763388 - DNA, 19 bp, Mus musculus
  siRNA target sequence for MOR256-16 (NM_146533.1,485-503).
ctacacttaccatacagtt

SEQ ID NO: 763389 - DNA, 19 bp, Mus musculus
  siRNA target sequence for MOR256-16 (NM_146533.1,544-562).
gagctgcctgggcttatta

SEQ ID NO: 763390 - DNA, 19 bp, Mus musculus
  siRNA target sequence for MOR256-16 (NM_146533.1,575-593).
gggacaccacagtcaatga

SEQ ID NO: 763391 - DNA, 19 bp, Mus musculus
  siRNA target sequence for MOR256-16 (NM_146533.1,584-602).
cagtcaatgaggttacttt

SEQ ID NO: 763392 - DNA, 19 bp, Mus musculus
  siRNA target sequence for MOR256-16 (NM_146533.1,609-627).
ggtggccacattcttcata

SEQ ID NO: 763393 - DNA, 19 bp, Mus musculus
  siRNA target sequence for MOR256-16 (NM_146533.1,610-628).
gtggccacattcttcataa

SEQ ID NO: 763394 - DNA, 19 bp, Mus musculus
  siRNA target sequence for MOR256-16 (NM_146533.1,630-648).
gggtcccctctccatgata

SEQ ID NO: 763395 - DNA, 19 bp, Mus musculus
  siRNA target sequence for MOR256-16 (NM_146533.1,632-650).
gtcccctctccatgatact

SEQ ID NO: 763396 - DNA, 19 bp, Mus musculus
  siRNA target sequence for MOR256-16 (NM_146533.1,637-655).
ctctccatgatacttgtat

SEQ ID NO: 763397 - DNA, 19 bp, Mus musculus
  siRNA target sequence for MOR256-16 (NM_146533.1,642-660).
catgatacttgtatcatat

SEQ ID NO: 763398 - DNA, 19 bp, Mus musculus
  siRNA target sequence for MOR256-16 (NM_146533.1,645-663).
gatacttgtatcatatagt

SEQ ID NO: 763399 - DNA, 19 bp, Mus musculus
  siRNA target sequence for MOR256-16 (NM_146533.1,704-722).
ggaggctcaaggctttcaa

SEQ ID NO: 763400 - DNA, 19 bp, Mus musculus
  siRNA target sequence for MOR256-16 (NM_146533.1,764-782).
gaccagggatctacatcta

SEQ ID NO: 763401 - DNA, 19 bp, Mus musculus
  siRNA target sequence for MOR256-16 (NM_146533.1,803-821).
gctcccaagaccttatcaa

SEQ ID NO: 763402 - DNA, 19 bp, Mus musculus
  siRNA target sequence for MOR256-16 (NM_146533.1,851-869).
ctcccatggctaatccatt

SEQ ID NO: 763403 - DNA, 19 bp, Mus musculus
  siRNA target sequence for MOR256-16 (NM_146533.1,858-876).
ggctaatccattcatctat

SEQ ID NO: 763404 - DNA, 19 bp, Mus musculus
  siRNA target sequence for MOR256-16 (NM_146533.1,859-877).
gctaatccattcatctata

SEQ ID NO: 763405 - DNA, 19 bp, Mus musculus
  siRNA target sequence for MOR256-16 (NM_146533.1,923-941).
ggaaggccatttcaactaa

SEQ ID NO: 763406 - DNA, 19 bp, Mus musculus
  siRNA target sequence for MOR256-14 (NM_146535.1,3-21).
gaacctaggtaatgaaagt

SEQ ID NO: 763407 - DNA, 19 bp, Mus musculus
  siRNA target sequence for MOR256-14 (NM_146535.1,26-44).
caaagatcttcattctttt

SEQ ID NO: 763408 - DNA, 19 bp, Mus musculus
  siRNA target sequence for MOR256-14 (NM_146535.1,70-88).
gaaatgcccctcttcataa

SEQ ID NO: 763409 - DNA, 19 bp, Mus musculus
  siRNA target sequence for MOR256-14 (NM_146535.1,111-129).
cacagtgctgggaaatata

SEQ ID NO: 763410 - DNA, 19 bp, Mus musculus
  siRNA target sequence for MOR256-14 (NM_146535.1,238-256).
cagctgcttcggaatcttt

SEQ ID NO: 763411 - DNA, 19 bp, Mus musculus
  siRNA target sequence for MOR256-14 (NM_146535.1,354-372).
gtctttggatcgttacatt

SEQ ID NO: 763412 - DNA, 19 bp, Mus musculus
  siRNA target sequence for MOR256-14 (NM_146535.1,450-468).
gagtggcttggctaactct

SEQ ID NO: 763413 - DNA, 19 bp, Mus musculus
  siRNA target sequence for MOR256-14 (NM_146535.1,460-478).
gctaactctttgcttcaat

SEQ ID NO: 763414 - DNA, 19 bp, Mus musculus
  siRNA target sequence for MOR256-14 (NM_146535.1,499-517).
ccattttgtggaaacaaca

SEQ ID NO: 763415 - DNA, 19 bp, Mus musculus
  siRNA target sequence for MOR256-14 (NM_146535.1,500-518).
cattttgtggaaacaacaa

SEQ ID NO: 763416 - DNA, 19 bp, Mus musculus
  siRNA target sequence for MOR256-14 (NM_146535.1,536-554).
gcgaggtcccggtgatgat

SEQ ID NO: 763417 - DNA, 19 bp, Mus musculus
  siRNA target sequence for MOR256-14 (NM_146535.1,541-559).
gtcccggtgatgatcaaga

SEQ ID NO: 763418 - DNA, 19 bp, Mus musculus
  siRNA target sequence for MOR256-14 (NM_146535.1,544-562).
ccggtgatgatcaagatgt

SEQ ID NO: 763419 - DNA, 19 bp, Mus musculus
  siRNA target sequence for MOR256-14 (NM_146535.1,558-576).
gatgtcctgtgctaacact

SEQ ID NO: 763420 - DNA, 19 bp, Mus musculus
  siRNA target sequence for MOR256-14 (NM_146535.1,566-584).
gtgctaacactgcattcaa

SEQ ID NO: 763421 - DNA, 19 bp, Mus musculus
  siRNA target sequence for MOR256-14 (NM_146535.1,569-587).
ctaacactgcattcaatat

SEQ ID NO: 763422 - DNA, 19 bp, Mus musculus
  siRNA target sequence for MOR256-14 (NM_146535.1,575-593).
ctgcattcaatatagctat

SEQ ID NO: 763423 - DNA, 19 bp, Mus musculus
  siRNA target sequence for MOR256-14 (NM_146535.1,624-642).
ggttcccttgtcacttatt

SEQ ID NO: 763424 - DNA, 19 bp, Mus musculus
  siRNA target sequence for MOR256-14 (NM_146535.1,628-646).
cccttgtcacttattctta

SEQ ID NO: 763425 - DNA, 19 bp, Mus musculus
  siRNA target sequence for MOR256-14 (NM_146535.1,722-740).
gtggttctcatgttgttgt

SEQ ID NO: 763426 - DNA, 19 bp, Mus musculus
  siRNA target sequence for MOR256-14 (NM_146535.1,736-754).
gttgtcgtgactcttttct

SEQ ID NO: 763427 - DNA, 19 bp, Mus musculus
  siRNA target sequence for MOR256-14 (NM_146535.1,794-812).
ctaattcccaggacaagaa

SEQ ID NO: 763428 - DNA, 19 bp, Mus musculus
  siRNA target sequence for MOR256-14 (NM_146535.1,908-926).
gacttcttgtctcattgta

SEQ ID NO: 763429 - DNA, 19 bp, Mus musculus
  siRNA target sequence for MOR222-2 (NM_146536.1,598-616).
gtcagtagttgcattgtca

SEQ ID NO: 763430 - DNA, 19 bp, Mus musculus
  siRNA target sequence for MOR222-1 (NM_146537.1,595-613).
gctgtcattggctgcatta

SEQ ID NO: 763431 - DNA, 19 bp, Mus musculus
  siRNA target sequence for MOR222-1 (NM_146537.1,598-616).
gtcattggctgcattatca

SEQ ID NO: 763432 - DNA, 19 bp, Mus musculus
  siRNA target sequence for MOR282-1 (NM_146539.1,93-111).
ggccaccgtgttcatcatt

SEQ ID NO: 763433 - DNA, 19 bp, Mus musculus
  siRNA target sequence for MOR282-1 (NM_146539.1,215-233).
gcttcccactggttaccat

SEQ ID NO: 763434 - DNA, 19 bp, Mus musculus
  siRNA target sequence for MOR282-1 (NM_146539.1,256-274).
ctgcaaggacagaatgtca

SEQ ID NO: 763435 - DNA, 19 bp, Mus musculus
  siRNA target sequence for MOR282-1 (NM_146539.1,399-417).
ggtgctcatgagaaaccaa

SEQ ID NO: 763436 - DNA, 19 bp, Mus musculus
  siRNA target sequence for MOR282-1 (NM_146539.1,603-621).
ctctggggtgctgatctta

SEQ ID NO: 763437 - DNA, 19 bp, Mus musculus
  siRNA target sequence for MOR111-7 (NM_146545.1,279-297).
caactgtttgactcaatta

SEQ ID NO: 763438 - DNA, 19 bp, Mus musculus
  siRNA target sequence for MOR111-7 (NM_146545.1,317-335).
gagtgtctgagttctttct

SEQ ID NO: 763439 - DNA, 19 bp, Mus musculus
  siRNA target sequence for MOR111-7 (NM_146545.1,458-476).
gcatcttccctttaatcat

SEQ ID NO: 763440 - DNA, 19 bp, Mus musculus
  siRNA target sequence for MOR111-7 (NM_146545.1,467-485).
ctttaatcatgcttatcca

SEQ ID NO: 763441 - DNA, 19 bp, Mus musculus
  siRNA target sequence for MOR111-7 (NM_146545.1,477-495).
gcttatccacaagttagat

SEQ ID NO: 763442 - DNA, 19 bp, Mus musculus
  siRNA target sequence for MOR111-7 (NM_146545.1,478-496).
cttatccacaagttagatt

SEQ ID NO: 763443 - DNA, 19 bp, Mus musculus
  siRNA target sequence for MOR111-7 (NM_146545.1,561-579).
ctcagatacgaggctttta

SEQ ID NO: 763444 - DNA, 19 bp, Mus musculus
  siRNA target sequence for MOR111-7 (NM_146545.1,592-610).
ctttattgtgcctccatta

SEQ ID NO: 763445 - DNA, 19 bp, Mus musculus
  siRNA target sequence for MOR111-7 (NM_146545.1,628-646).
gctctagtgatcttgtcat

SEQ ID NO: 763446 - DNA, 19 bp, Mus musculus
  siRNA target sequence for MOR111-7 (NM_146545.1,629-647).
ctctagtgatcttgtcata

SEQ ID NO: 763447 - DNA, 19 bp, Mus musculus
  siRNA target sequence for MOR111-7 (NM_146545.1,813-831).
ggtggctgttctcaatact

SEQ ID NO: 763448 - DNA, 19 bp, Mus musculus
  siRNA target sequence for MOR111-7 (NM_146545.1,814-832).
gtggctgttctcaatactt

SEQ ID NO: 763449 - DNA, 19 bp, Mus musculus
  siRNA target sequence for MOR111-7 (NM_146545.1,870-888).
gagaaatcaacaagtaaaa

SEQ ID NO: 763450 - DNA, 19 bp, Mus musculus
  siRNA target sequence for MOR111-6 (NM_146546.1,14-32).
ctatggttaccgagttttt

SEQ ID NO: 763451 - DNA, 19 bp, Mus musculus
  siRNA target sequence for MOR111-6 (NM_146546.1,916-934).
gtaatgtttaatagaaaca

SEQ ID NO: 763452 - DNA, 19 bp, Mus musculus
  siRNA target sequence for MOR111-5 (NM_146549.1,177-195).
cttccttaggaattttgca

SEQ ID NO: 763453 - DNA, 19 bp, Mus musculus
  siRNA target sequence for MOR111-5 (NM_146549.1,185-203).
ggaattttgcaacattaga

SEQ ID NO: 763454 - DNA, 19 bp, Mus musculus
  siRNA target sequence for MOR111-5 (NM_146549.1,621-639).
cactttggcattagtattt

SEQ ID NO: 763455 - DNA, 19 bp, Mus musculus
  siRNA target sequence for MOR111-5 (NM_146549.1,883-901).
gtccggcaagcgtttatga

SEQ ID NO: 763456 - DNA, 19 bp, Mus musculus
  siRNA target sequence for MOR111-5 (NM_146549.1,886-904).
cggcaagcgtttatgaaca

SEQ ID NO: 763457 - DNA, 19 bp, Mus musculus
  siRNA target sequence for MOR113-4 (NM_146550.1,633-651).
ggtgatcgtatcctacatt

SEQ ID NO: 763458 - DNA, 19 bp, Mus musculus
  siRNA target sequence for MOR113-4 (NM_146550.1,634-652).
gtgatcgtatcctacattt

SEQ ID NO: 763459 - DNA, 19 bp, Mus musculus
  siRNA target sequence for MOR111-4 (NM_146551.1,3-21).
gaatcacacagaaattaca

SEQ ID NO: 763460 - DNA, 19 bp, Mus musculus
  siRNA target sequence for MOR111-4 (NM_146551.1,113-131).
gaaacctgactatcattgt

SEQ ID NO: 763461 - DNA, 19 bp, Mus musculus
  siRNA target sequence for MOR111-4 (NM_146551.1,130-148).
gttttgaccttcatagaca

SEQ ID NO: 763462 - DNA, 19 bp, Mus musculus
  siRNA target sequence for MOR111-4 (NM_146551.1,141-159).
catagacacccatctacaa

SEQ ID NO: 763463 - DNA, 19 bp, Mus musculus
  siRNA target sequence for MOR111-4 (NM_146551.1,230-248).
gatttctggggtctattgt

SEQ ID NO: 763464 - DNA, 19 bp, Mus musculus
  siRNA target sequence for MOR111-4 (NM_146551.1,247-265).
gtcacccggaataagacaa

SEQ ID NO: 763465 - DNA, 19 bp, Mus musculus
  siRNA target sequence for MOR111-4 (NM_146551.1,480-498).
gctccagcaggattactgt

SEQ ID NO: 763466 - DNA, 19 bp, Mus musculus
  siRNA target sequence for MOR111-4 (NM_146551.1,566-584).
cattgtttctagaagtaat

SEQ ID NO: 763467 - DNA, 19 bp, Mus musculus
  siRNA target sequence for MOR111-4 (NM_146551.1,680-698).
ctaccagccagcggaaaaa

SEQ ID NO: 763468 - DNA, 19 bp, Mus musculus
  siRNA target sequence for MOR111-4 (NM_146551.1,808-826).
ggcgtggcaattctcaata

SEQ ID NO: 763469 - DNA, 19 bp, Mus musculus
  siRNA target sequence for MOR111-4 (NM_146551.1,828-846).
ctctgttgtccccatgtta

SEQ ID NO: 763470 - DNA, 19 bp, Mus musculus
  siRNA target sequence for MOR111-4 (NM_146551.1,901-919).
gcagtacacaaactagtat

SEQ ID NO: 763471 - DNA, 19 bp, Mus musculus
  siRNA target sequence for MOR111-4 (NM_146551.1,902-920).
cagtacacaaactagtatt

SEQ ID NO: 763472 - DNA, 19 bp, Mus musculus
  siRNA target sequence for MOR110-6 (NM_146552.1,6-24).
gaaccaatcattgaagata

SEQ ID NO: 763473 - DNA, 19 bp, Mus musculus
  siRNA target sequence for MOR110-6 (NM_146552.1,107-125).
gcctcatggggaactacat

SEQ ID NO: 763474 - DNA, 19 bp, Mus musculus
  siRNA target sequence for MOR110-6 (NM_146552.1,450-468).
gttcttagttgtatttcca

SEQ ID NO: 763475 - DNA, 19 bp, Mus musculus
  siRNA target sequence for MOR111-3 (NM_146554.1,12-30).
cactataattacagagttt

SEQ ID NO: 763476 - DNA, 19 bp, Mus musculus
  siRNA target sequence for MOR111-3 (NM_146554.1,56-74).
gagagcttcaggtagtaat

SEQ ID NO: 763477 - DNA, 19 bp, Mus musculus
  siRNA target sequence for MOR111-3 (NM_146554.1,67-85).
gtagtaattttcgtctttt

SEQ ID NO: 763478 - DNA, 19 bp, Mus musculus
  siRNA target sequence for MOR111-3 (NM_146554.1,231-249).
cagattcctggcatcaata

SEQ ID NO: 763479 - DNA, 19 bp, Mus musculus
  siRNA target sequence for MOR111-3 (NM_146554.1,233-251).
gattcctggcatcaataat

SEQ ID NO: 763480 - DNA, 19 bp, Mus musculus
  siRNA target sequence for MOR111-3 (NM_146554.1,312-330).
catgggggtgacagagttt

SEQ ID NO: 763481 - DNA, 19 bp, Mus musculus
  siRNA target sequence for MOR111-3 (NM_146554.1,348-366).
gtcttacgatcgttatgtt

SEQ ID NO: 763482 - DNA, 19 bp, Mus musculus
  siRNA target sequence for MOR111-3 (NM_146554.1,472-490).
cttatgctggtcctaaagt

SEQ ID NO: 763483 - DNA, 19 bp, Mus musculus
  siRNA target sequence for MOR111-3 (NM_146554.1,607-625).
gttactctactgttcacat

SEQ ID NO: 763484 - DNA, 19 bp, Mus musculus
  siRNA target sequence for MOR145-5 (NM_146558.1,81-99).
gcttctcctctttggatta

SEQ ID NO: 763485 - DNA, 19 bp, Mus musculus
  siRNA target sequence for MOR145-5 (NM_146558.1,198-216).
gtccaacttatctttgatt

SEQ ID NO: 763486 - DNA, 19 bp, Mus musculus
  siRNA target sequence for MOR145-5 (NM_146558.1,217-235).
gatatcttattcatctcta

SEQ ID NO: 763487 - DNA, 19 bp, Mus musculus
  siRNA target sequence for MOR145-5 (NM_146558.1,335-353).
gtatggatgacatgattct

SEQ ID NO: 763488 - DNA, 19 bp, Mus musculus
  siRNA target sequence for MOR145-5 (NM_146558.1,512-530).
gcttccgggatgtggaaat

SEQ ID NO: 763489 - DNA, 19 bp, Mus musculus
  siRNA target sequence for MOR145-5 (NM_146558.1,561-579).
ccttaatcttgcttgtact

SEQ ID NO: 763490 - DNA, 19 bp, Mus musculus
  siRNA target sequence for MOR145-5 (NM_146558.1,562-580).
cttaatcttgcttgtacta

SEQ ID NO: 763491 - DNA, 19 bp, Mus musculus
  siRNA target sequence for MOR145-5 (NM_146558.1,590-608).
gcagtaacatagtaatata

SEQ ID NO: 763492 - DNA, 19 bp, Mus musculus
  siRNA target sequence for MOR145-5 (NM_146558.1,621-639).
catacttggcatttttcct

SEQ ID NO: 763493 - DNA, 19 bp, Mus musculus
  siRNA target sequence for MOR145-5 (NM_146558.1,646-664).
ggaatcattttatcatact

SEQ ID NO: 763494 - DNA, 19 bp, Mus musculus
  siRNA target sequence for MOR145-5 (NM_146558.1,696-714).
ctcctcaagtgggaaatat

SEQ ID NO: 763495 - DNA, 19 bp, Mus musculus
  siRNA target sequence for MOR145-5 (NM_146558.1,698-716).
cctcaagtgggaaatataa

SEQ ID NO: 763496 - DNA, 19 bp, Mus musculus
  siRNA target sequence for MOR145-5 (NM_146558.1,734-752).
gttcacatctgttagtagt

SEQ ID NO: 763497 - DNA, 19 bp, Mus musculus
  siRNA target sequence for MOR145-5 (NM_146558.1,848-866).
cagtgagccctatgcttaa

SEQ ID NO: 763498 - DNA, 19 bp, Mus musculus
  siRNA target sequence for MOR145-5 (NM_146558.1,902-920).
gtaatgccctgaagagatt

SEQ ID NO: 763499 - DNA, 19 bp, Mus musculus
  siRNA target sequence for MOR145-4 (NM_146559.1,29-47).
catatgtttcacaatttta

SEQ ID NO: 763500 - DNA, 19 bp, Mus musculus
  siRNA target sequence for MOR145-4 (NM_146559.1,301-319).
ctcactcagatgtctcttt

SEQ ID NO: 763501 - DNA, 19 bp, Mus musculus
  siRNA target sequence for MOR145-4 (NM_146559.1,305-323).
ctcagatgtctctttttat

SEQ ID NO: 763502 - DNA, 19 bp, Mus musculus
  siRNA target sequence for MOR145-4 (NM_146559.1,393-411).
cccattgcgttatgcaata

SEQ ID NO: 763503 - DNA, 19 bp, Mus musculus
  siRNA target sequence for MOR145-4 (NM_146559.1,394-412).
ccattgcgttatgcaataa

SEQ ID NO: 763504 - DNA, 19 bp, Mus musculus
  siRNA target sequence for MOR145-4 (NM_146559.1,400-418).
cgttatgcaataatcatga

SEQ ID NO: 763505 - DNA, 19 bp, Mus musculus
  siRNA target sequence for MOR145-4 (NM_146559.1,406-424).
gcaataatcatgaatcctt

SEQ ID NO: 763506 - DNA, 19 bp, Mus musculus
  siRNA target sequence for MOR145-4 (NM_146559.1,427-445).
cgctgtggcatcttagttt

SEQ ID NO: 763507 - DNA, 19 bp, Mus musculus
  siRNA target sequence for MOR145-4 (NM_146559.1,428-446).
gctgtggcatcttagtttt

SEQ ID NO: 763508 - DNA, 19 bp, Mus musculus
  siRNA target sequence for MOR145-4 (NM_146559.1,429-447).
ctgtggcatcttagtttta

SEQ ID NO: 763509 - DNA, 19 bp, Mus musculus
  siRNA target sequence for MOR145-4 (NM_146559.1,431-449).
gtggcatcttagttttaat

SEQ ID NO: 763510 - DNA, 19 bp, Mus musculus
  siRNA target sequence for MOR145-4 (NM_146559.1,472-490).
gagtccctgcttcacaatt

SEQ ID NO: 763511 - DNA, 19 bp, Mus musculus
  siRNA target sequence for MOR145-4 (NM_146559.1,476-494).
ccctgcttcacaatttggt

SEQ ID NO: 763512 - DNA, 19 bp, Mus musculus
  siRNA target sequence for MOR145-4 (NM_146559.1,477-495).
cctgcttcacaatttggtt

SEQ ID NO: 763513 - DNA, 19 bp, Mus musculus
  siRNA target sequence for MOR145-4 (NM_146559.1,493-511).
gttgccttacaacttaagt

SEQ ID NO: 763514 - DNA, 19 bp, Mus musculus
  siRNA target sequence for MOR145-4 (NM_146559.1,547-565).
cacccttctcaacttctaa

SEQ ID NO: 763515 - DNA, 19 bp, Mus musculus
  siRNA target sequence for MOR145-4 (NM_146559.1,572-590).
gttgcaacaacacatttaa

SEQ ID NO: 763516 - DNA, 19 bp, Mus musculus
  siRNA target sequence for MOR145-4 (NM_146559.1,638-656).
ccttatcagggatccttat

SEQ ID NO: 763517 - DNA, 19 bp, Mus musculus
  siRNA target sequence for MOR145-4 (NM_146559.1,639-657).
cttatcagggatccttatt

SEQ ID NO: 763518 - DNA, 19 bp, Mus musculus
  siRNA target sequence for MOR145-4 (NM_146559.1,698-716).
cttcaagtgggaggtataa

SEQ ID NO: 763519 - DNA, 19 bp, Mus musculus
  siRNA target sequence for MOR145-4 (NM_146559.1,704-722).
gtgggaggtataaagcttt

SEQ ID NO: 763520 - DNA, 19 bp, Mus musculus
  siRNA target sequence for MOR145-4 (NM_146559.1,742-760).
ctcgcagtggtatgcttat

SEQ ID NO: 763521 - DNA, 19 bp, Mus musculus
  siRNA target sequence for MOR145-4 (NM_146559.1,744-762).
cgcagtggtatgcttattt

SEQ ID NO: 763522 - DNA, 19 bp, Mus musculus
  siRNA target sequence for MOR145-4 (NM_146559.1,790-808).
ggctcacttttgtctcatt

SEQ ID NO: 763523 - DNA, 19 bp, Mus musculus
  siRNA target sequence for MOR145-4 (NM_146559.1,887-905).
ggaatcaggacattagtga

SEQ ID NO: 763524 - DNA, 19 bp, Mus musculus
  siRNA target sequence for MOR145-4 (NM_146559.1,897-915).
cattagtgattcccttaaa

SEQ ID NO: 763525 - DNA, 19 bp, Mus musculus
  siRNA target sequence for MOR146-1 (NM_146562.1,27-45).
cttggaattcctgttactt

SEQ ID NO: 763526 - DNA, 19 bp, Mus musculus
  siRNA target sequence for MOR146-1 (NM_146562.1,256-274).
cagacccataacaaatcga

SEQ ID NO: 763527 - DNA, 19 bp, Mus musculus
  siRNA target sequence for MOR146-1 (NM_146562.1,258-276).
gacccataacaaatcgata

SEQ ID NO: 763528 - DNA, 19 bp, Mus musculus
  siRNA target sequence for MOR146-1 (NM_146562.1,262-280).
cataacaaatcgataacgt

SEQ ID NO: 763529 - DNA, 19 bp, Mus musculus
  siRNA target sequence for MOR146-1 (NM_146562.1,425-443).
gacgtttggtcctcatgtt

SEQ ID NO: 763530 - DNA, 19 bp, Mus musculus
  siRNA target sequence for MOR146-1 (NM_146562.1,427-445).
cgtttggtcctcatgttat

SEQ ID NO: 763531 - DNA, 19 bp, Mus musculus
  siRNA target sequence for MOR146-1 (NM_146562.1,467-485).
cactggtacactacttcat

SEQ ID NO: 763532 - DNA, 19 bp, Mus musculus
  siRNA target sequence for MOR146-1 (NM_146562.1,472-490).
gtacactacttcatagttt

SEQ ID NO: 763533 - DNA, 19 bp, Mus musculus
  siRNA target sequence for MOR146-1 (NM_146562.1,480-498).
cttcatagtttcacaacta

SEQ ID NO: 763534 - DNA, 19 bp, Mus musculus
  siRNA target sequence for MOR146-1 (NM_146562.1,487-505).
gtttcacaactaaaattct

SEQ ID NO: 763535 - DNA, 19 bp, Mus musculus
  siRNA target sequence for MOR146-1 (NM_146562.1,496-514).
ctaaaattctgcactaata

SEQ ID NO: 763536 - DNA, 19 bp, Mus musculus
  siRNA target sequence for MOR146-1 (NM_146562.1,571-589).
gacacctctatcaataatt

SEQ ID NO: 763537 - DNA, 19 bp, Mus musculus
  siRNA target sequence for MOR146-1 (NM_146562.1,573-591).
cacctctatcaataattta

SEQ ID NO: 763538 - DNA, 19 bp, Mus musculus
  siRNA target sequence for MOR146-1 (NM_146562.1,763-781).
ggtcttgaagcatacctta

SEQ ID NO: 763539 - DNA, 19 bp, Mus musculus
  siRNA target sequence for MOR146-1 (NM_146562.1,766-784).
cttgaagcataccttagtt

SEQ ID NO: 763540 - DNA, 19 bp, Mus musculus
  siRNA target sequence for MOR146-1 (NM_146562.1,769-787).
gaagcataccttagttcaa

SEQ ID NO: 763541 - DNA, 19 bp, Mus musculus
  siRNA target sequence for MOR146-1 (NM_146562.1,772-790).
gcataccttagttcaacta

SEQ ID NO: 763542 - DNA, 19 bp, Mus musculus
  siRNA target sequence for MOR146-1 (NM_146562.1,773-791).
cataccttagttcaactat

SEQ ID NO: 763543 - DNA, 19 bp, Mus musculus
  siRNA target sequence for MOR146-1 (NM_146562.1,816-834).
gctggcttcagtaatatat

SEQ ID NO: 763544 - DNA, 19 bp, Mus musculus
  siRNA target sequence for MOR146-1 (NM_146562.1,837-855).
catgagagttcccatgata

SEQ ID NO: 763545 - DNA, 19 bp, Mus musculus
  siRNA target sequence for MOR152-3 (NM_146564.1,433-451).
gttattctgactcttatct

SEQ ID NO: 763546 - DNA, 19 bp, Mus musculus
  siRNA target sequence for MOR152-3 (NM_146564.1,439-457).
ctgactcttatctctctat

SEQ ID NO: 763547 - DNA, 19 bp, Mus musculus
  siRNA target sequence for MOR152-3 (NM_146564.1,925-943).
ggtaggaagcttcttttct

SEQ ID NO: 763548 - DNA, 19 bp, Mus musculus
  siRNA target sequence for MOR152-2 (NM_146565.1,800-818).
caccgaaggaaattgctat

SEQ ID NO: 763549 - DNA, 19 bp, Mus musculus
  siRNA target sequence for MOR152-2 (NM_146565.1,906-924).
gaaggtaattggtagaaca

SEQ ID NO: 763550 - DNA, 19 bp, Mus musculus
  siRNA target sequence for MOR152-2 (NM_146565.1,910-928).
gtaattggtagaacagttt

SEQ ID NO: 763551 - DNA, 19 bp, Mus musculus
  siRNA target sequence for MOR152-1 (NM_146566.1,3-21).
gtctaacatggaagttgaa

SEQ ID NO: 763552 - DNA, 19 bp, Mus musculus
  siRNA target sequence for MOR152-1 (NM_146566.1,123-141).
cgtttctggaaatcttctt

SEQ ID NO: 763553 - DNA, 19 bp, Mus musculus
  siRNA target sequence for MOR152-1 (NM_146566.1,161-179).
gtgacttccatcttcacaa

SEQ ID NO: 763554 - DNA, 19 bp, Mus musculus
  siRNA target sequence for MOR152-1 (NM_146566.1,306-324).
ccaggcctgctttgttgta

SEQ ID NO: 763555 - DNA, 19 bp, Mus musculus
  siRNA target sequence for MOR152-1 (NM_146566.1,309-327).
ggcctgctttgttgtagtt

SEQ ID NO: 763556 - DNA, 19 bp, Mus musculus
  siRNA target sequence for MOR152-1 (NM_146566.1,319-337).
gttgtagtttgtacaatat

SEQ ID NO: 763557 - DNA, 19 bp, Mus musculus
  siRNA target sequence for MOR152-1 (NM_146566.1,412-430).
cttatgaaccccagtttct

SEQ ID NO: 763558 - DNA, 19 bp, Mus musculus
  siRNA target sequence for MOR152-1 (NM_146566.1,420-438).
ccccagtttctgtgttatt

SEQ ID NO: 763559 - DNA, 19 bp, Mus musculus
  siRNA target sequence for MOR152-1 (NM_146566.1,631-649).
ggtcttcctctgtttgcaa

SEQ ID NO: 763560 - DNA, 19 bp, Mus musculus
  siRNA target sequence for MOR155-2 (NM_146567.1,42-60).
cactggactgacatattct

SEQ ID NO: 763561 - DNA, 19 bp, Mus musculus
  siRNA target sequence for MOR155-2 (NM_146567.1,90-108).
gttcctgtctatatatttt

SEQ ID NO: 763562 - DNA, 19 bp, Mus musculus
  siRNA target sequence for MOR155-2 (NM_146567.1,243-261).
gctgttgaacattgaaaca

SEQ ID NO: 763563 - DNA, 19 bp, Mus musculus
  siRNA target sequence for MOR155-2 (NM_146567.1,262-280).
cagaatcagagcattacct

SEQ ID NO: 763564 - DNA, 19 bp, Mus musculus
  siRNA target sequence for MOR155-2 (NM_146567.1,264-282).
gaatcagagcattacctat

SEQ ID NO: 763565 - DNA, 19 bp, Mus musculus
  siRNA target sequence for MOR155-2 (NM_146567.1,296-314).
cccaggtgtgttttgtatt

SEQ ID NO: 763566 - DNA, 19 bp, Mus musculus
  siRNA target sequence for MOR155-2 (NM_146567.1,327-345).
cttagaaagttgtctactt

SEQ ID NO: 763567 - DNA, 19 bp, Mus musculus
  siRNA target sequence for MOR155-2 (NM_146567.1,363-381).
ccgttacttggccatagtt

SEQ ID NO: 763568 - DNA, 19 bp, Mus musculus
  siRNA target sequence for MOR155-2 (NM_146567.1,365-383).
gttacttggccatagttca

SEQ ID NO: 763569 - DNA, 19 bp, Mus musculus
  siRNA target sequence for MOR155-2 (NM_146567.1,379-397).
gttcatcctctgaggtata

SEQ ID NO: 763570 - DNA, 19 bp, Mus musculus
  siRNA target sequence for MOR155-2 (NM_146567.1,420-438).
ctgtgtactgctcgtttta

SEQ ID NO: 763571 - DNA, 19 bp, Mus musculus
  siRNA target sequence for MOR155-2 (NM_146567.1,422-440).
gtgtactgctcgttttact

SEQ ID NO: 763572 - DNA, 19 bp, Mus musculus
  siRNA target sequence for MOR155-2 (NM_146567.1,424-442).
gtactgctcgttttacttt

SEQ ID NO: 763573 - DNA, 19 bp, Mus musculus
  siRNA target sequence for MOR155-2 (NM_146567.1,427-445).
ctgctcgttttactttcat

SEQ ID NO: 763574 - DNA, 19 bp, Mus musculus
  siRNA target sequence for MOR155-2 (NM_146567.1,430-448).
ctcgttttactttcattgt

SEQ ID NO: 763575 - DNA, 19 bp, Mus musculus
  siRNA target sequence for MOR155-2 (NM_146567.1,439-457).
ctttcattgtttatcagta

SEQ ID NO: 763576 - DNA, 19 bp, Mus musculus
  siRNA target sequence for MOR155-2 (NM_146567.1,447-465).
gtttatcagtaccattaat

SEQ ID NO: 763577 - DNA, 19 bp, Mus musculus
  siRNA target sequence for MOR155-2 (NM_146567.1,475-493).
catagtctgatgttgttaa

SEQ ID NO: 763578 - DNA, 19 bp, Mus musculus
  siRNA target sequence for MOR155-2 (NM_146567.1,479-497).
gtctgatgttgttaaaact

SEQ ID NO: 763579 - DNA, 19 bp, Mus musculus
  siRNA target sequence for MOR155-2 (NM_146567.1,579-597).
catcaatacccttcttatt

SEQ ID NO: 763580 - DNA, 19 bp, Mus musculus
  siRNA target sequence for MOR155-2 (NM_146567.1,666-684).
gtcctccattcttaagata

SEQ ID NO: 763581 - DNA, 19 bp, Mus musculus
  siRNA target sequence for MOR155-2 (NM_146567.1,689-707).
cagtccagggacggaataa

SEQ ID NO: 763582 - DNA, 19 bp, Mus musculus
  siRNA target sequence for MOR155-2 (NM_146567.1,915-933).
ctttcctgtggtcttatca

SEQ ID NO: 763583 - DNA, 19 bp, Mus musculus
  siRNA target sequence for MOR175-3 (NM_146572.1,3-21).
ggcggatgagaactataca

SEQ ID NO: 763584 - DNA, 19 bp, Mus musculus
  siRNA target sequence for MOR175-3 (NM_146572.1,4-22).
gcggatgagaactatacaa

SEQ ID NO: 763585 - DNA, 19 bp, Mus musculus
  siRNA target sequence for MOR175-3 (NM_146572.1,262-280).
gataaaaaagctatctctt

SEQ ID NO: 763586 - DNA, 19 bp, Mus musculus
  siRNA target sequence for MOR175-3 (NM_146572.1,569-587).
ctgacatacggatcaacaa

SEQ ID NO: 763587 - DNA, 19 bp, Mus musculus
  siRNA target sequence for MOR175-3 (NM_146572.1,604-622).
gtggcaggcgctgtattga

SEQ ID NO: 763588 - DNA, 19 bp, Mus musculus
  siRNA target sequence for MOR175-3 (NM_146572.1,606-624).
ggcaggcgctgtattgatt

SEQ ID NO: 763589 - DNA, 19 bp, Mus musculus
  siRNA target sequence for MOR175-3 (NM_146572.1,608-626).
caggcgctgtattgattgt

SEQ ID NO: 763590 - DNA, 19 bp, Mus musculus
  siRNA target sequence for MOR175-3 (NM_146572.1,610-628).
ggcgctgtattgattgtca

SEQ ID NO: 763591 - DNA, 19 bp, Mus musculus
  siRNA target sequence for MOR175-3 (NM_146572.1,627-645).
cagtagtaccaccatcata

SEQ ID NO: 763592 - DNA, 19 bp, Mus musculus
  siRNA target sequence for MOR175-3 (NM_146572.1,780-798).
gaggccaagcgccatttct

SEQ ID NO: 763593 - DNA, 19 bp, Mus musculus
  siRNA target sequence for MOR175-3 (NM_146572.1,903-921).
gggcaggacagttgctaaa

SEQ ID NO: 763594 - DNA, 19 bp, Mus musculus
  siRNA target sequence for MOR175-3 (NM_146572.1,922-940).
gccaaagttttcctcaaaa

SEQ ID NO: 763595 - DNA, 19 bp, Mus musculus
  siRNA target sequence for MOR120-1 (NM_146576.1,210-228).
cctggttacaactacaatt

SEQ ID NO: 763596 - DNA, 19 bp, Mus musculus
  siRNA target sequence for MOR120-1 (NM_146576.1,213-231).
ggttacaactacaattgtt

SEQ ID NO: 763597 - DNA, 19 bp, Mus musculus
  siRNA target sequence for MOR120-1 (NM_146576.1,258-276).
ccctggaaagcagacaata

SEQ ID NO: 763598 - DNA, 19 bp, Mus musculus
  siRNA target sequence for MOR120-1 (NM_146576.1,267-285).
gcagacaatatctctgaat

SEQ ID NO: 763599 - DNA, 19 bp, Mus musculus
  siRNA target sequence for MOR120-1 (NM_146576.1,506-524).
gcaaatcaaatctcttaga

SEQ ID NO: 763600 - DNA, 19 bp, Mus musculus
  siRNA target sequence for MOR120-1 (NM_146576.1,626-644).
gatccttgatccctacaat

SEQ ID NO: 763601 - DNA, 19 bp, Mus musculus
  siRNA target sequence for MOR120-1 (NM_146576.1,629-647).
ccttgatccctacaattgt

SEQ ID NO: 763602 - DNA, 19 bp, Mus musculus
  siRNA target sequence for MOR120-1 (NM_146576.1,872-890).
cacttcgaaatgataaagt

SEQ ID NO: 763603 - DNA, 19 bp, Mus musculus
  siRNA target sequence for MOR185-7 (NM_146577.1,5-23).
ccaaaagcaaccattcagt

SEQ ID NO: 763604 - DNA, 19 bp, Mus musculus
  siRNA target sequence for MOR185-7 (NM_146577.1,111-129).
cagtgtcatgagtaaccta

SEQ ID NO: 763605 - DNA, 19 bp, Mus musculus
  siRNA target sequence for MOR185-7 (NM_146577.1,126-144).
cctagggttggttgtgtta

SEQ ID NO: 763606 - DNA, 19 bp, Mus musculus
  siRNA target sequence for MOR185-7 (NM_146577.1,127-145).
ctagggttggttgtgttaa

SEQ ID NO: 763607 - DNA, 19 bp, Mus musculus
  siRNA target sequence for MOR185-7 (NM_146577.1,131-149).
ggttggttgtgttaataca

SEQ ID NO: 763608 - DNA, 19 bp, Mus musculus
  siRNA target sequence for MOR185-7 (NM_146577.1,136-154).
gttgtgttaatacaaatca

SEQ ID NO: 763609 - DNA, 19 bp, Mus musculus
  siRNA target sequence for MOR185-7 (NM_146577.1,235-253).
ccaaatgcgctggtgaatt

SEQ ID NO: 763610 - DNA, 19 bp, Mus musculus
  siRNA target sequence for MOR185-7 (NM_146577.1,236-254).
caaatgcgctggtgaattt

SEQ ID NO: 763611 - DNA, 19 bp, Mus musculus
  siRNA target sequence for MOR185-7 (NM_146577.1,249-267).
gaattttttgcgtgagatt

SEQ ID NO: 763612 - DNA, 19 bp, Mus musculus
  siRNA target sequence for MOR185-7 (NM_146577.1,264-282).
gattaaaagcatatcgttt

SEQ ID NO: 763613 - DNA, 19 bp, Mus musculus
  siRNA target sequence for MOR185-7 (NM_146577.1,295-313).
gctcaagtgtgtttcttca

SEQ ID NO: 763614 - DNA, 19 bp, Mus musculus
  siRNA target sequence for MOR185-7 (NM_146577.1,380-398).
gtaaccctttgctctatgt

SEQ ID NO: 763615 - DNA, 19 bp, Mus musculus
  siRNA target sequence for MOR185-7 (NM_146577.1,412-430).
cggagactctgcattcaga

SEQ ID NO: 763616 - DNA, 19 bp, Mus musculus
  siRNA target sequence for MOR185-7 (NM_146577.1,433-451).
gccattaccacgtacattt

SEQ ID NO: 763617 - DNA, 19 bp, Mus musculus
  siRNA target sequence for MOR185-7 (NM_146577.1,435-453).
cattaccacgtacatttat

SEQ ID NO: 763618 - DNA, 19 bp, Mus musculus
  siRNA target sequence for MOR185-7 (NM_146577.1,460-478).
gtcacagcacttattcaga

SEQ ID NO: 763619 - DNA, 19 bp, Mus musculus
  siRNA target sequence for MOR185-7 (NM_146577.1,483-501).
gaccacattcattttgtct

SEQ ID NO: 763620 - DNA, 19 bp, Mus musculus
  siRNA target sequence for MOR185-7 (NM_146577.1,724-742).
gcttctcacttgtcttcta

SEQ ID NO: 763621 - DNA, 19 bp, Mus musculus
  siRNA target sequence for MOR185-7 (NM_146577.1,794-812).
gccattccctaaatacaga

SEQ ID NO: 763622 - DNA, 19 bp, Mus musculus
  siRNA target sequence for MOR185-7 (NM_146577.1,800-818).
ccctaaatacagacaagtt

SEQ ID NO: 763623 - DNA, 19 bp, Mus musculus
  siRNA target sequence for MOR199-1 (NM_146579.1,237-255).
gctagaaaacttattgtca

SEQ ID NO: 763624 - DNA, 19 bp, Mus musculus
  siRNA target sequence for MOR199-1 (NM_146579.1,911-929).
gccgaaagggcttaactaa

SEQ ID NO: 763625 - DNA, 19 bp, Mus musculus
  siRNA target sequence for MOR201-1 (NM_146581.1,4-22).
gtccgaaccatgaaaggaa

SEQ ID NO: 763626 - DNA, 19 bp, Mus musculus
  siRNA target sequence for MOR201-1 (NM_146581.1,87-105).
cctacaaggtgttctcttt

SEQ ID NO: 763627 - DNA, 19 bp, Mus musculus
  siRNA target sequence for MOR201-1 (NM_146581.1,779-797).
gttcaattctctttatgta

SEQ ID NO: 763628 - DNA, 19 bp, Mus musculus
  siRNA target sequence for MOR201-1 (NM_146581.1,795-813).
gtacttgcgacctactact

SEQ ID NO: 763629 - DNA, 19 bp, Mus musculus
  siRNA target sequence for MOR194-1 (NM_146582.1,26-44).
ggatccaggtcactgaatt

SEQ ID NO: 763630 - DNA, 19 bp, Mus musculus
  siRNA target sequence for MOR194-1 (NM_146582.1,27-45).
gatccaggtcactgaattt

SEQ ID NO: 763631 - DNA, 19 bp, Mus musculus
  siRNA target sequence for MOR194-1 (NM_146582.1,30-48).
ccaggtcactgaatttatt

SEQ ID NO: 763632 - DNA, 19 bp, Mus musculus
  siRNA target sequence for MOR194-1 (NM_146582.1,82-100).
gcaccactctttgtaatat

SEQ ID NO: 763633 - DNA, 19 bp, Mus musculus
  siRNA target sequence for MOR194-1 (NM_146582.1,144-162).
ggttatcctgactcatgta

SEQ ID NO: 763634 - DNA, 19 bp, Mus musculus
  siRNA target sequence for MOR194-1 (NM_146582.1,160-178).
gtagactcgaaactacata

SEQ ID NO: 763635 - DNA, 19 bp, Mus musculus
  siRNA target sequence for MOR194-1 (NM_146582.1,196-214).
ctgagacatttatcaatca

SEQ ID NO: 763636 - DNA, 19 bp, Mus musculus
  siRNA target sequence for MOR194-1 (NM_146582.1,220-238).
cttggctactctacagtta

SEQ ID NO: 763637 - DNA, 19 bp, Mus musculus
  siRNA target sequence for MOR194-1 (NM_146582.1,225-243).
ctactctacagttataggt

SEQ ID NO: 763638 - DNA, 19 bp, Mus musculus
  siRNA target sequence for MOR194-1 (NM_146582.1,235-253).
gttataggtccaaaaatga

SEQ ID NO: 763639 - DNA, 19 bp, Mus musculus
  siRNA target sequence for MOR194-1 (NM_146582.1,265-283).
gtaatgcagcagaatatca

SEQ ID NO: 763640 - DNA, 19 bp, Mus musculus
  siRNA target sequence for MOR194-1 (NM_146582.1,301-319).
gctgtgcaactgacattct

SEQ ID NO: 763641 - DNA, 19 bp, Mus musculus
  siRNA target sequence for MOR194-1 (NM_146582.1,397-415).
cttctctatgtgatcatca

SEQ ID NO: 763642 - DNA, 19 bp, Mus musculus
  siRNA target sequence for MOR194-1 (NM_146582.1,445-463).
ctggtaccctatctctata

SEQ ID NO: 763643 - DNA, 19 bp, Mus musculus
  siRNA target sequence for MOR194-1 (NM_146582.1,484-502).
ctcacagttaagttattca

SEQ ID NO: 763644 - DNA, 19 bp, Mus musculus
  siRNA target sequence for MOR194-1 (NM_146582.1,547-565).
gactgtgtccctctgatat

SEQ ID NO: 763645 - DNA, 19 bp, Mus musculus
  siRNA target sequence for MOR194-1 (NM_146582.1,549-567).
ctgtgtccctctgatatct

SEQ ID NO: 763646 - DNA, 19 bp, Mus musculus
  siRNA target sequence for MOR194-1 (NM_146582.1,573-591).
ctgttctgacacacatgaa

SEQ ID NO: 763647 - DNA, 19 bp, Mus musculus
  siRNA target sequence for MOR194-1 (NM_146582.1,793-811).
cccaaatctagtcatactt

SEQ ID NO: 763648 - DNA, 19 bp, Mus musculus
  siRNA target sequence for MOR194-1 (NM_146582.1,794-812).
ccaaatctagtcatacttt

SEQ ID NO: 763649 - DNA, 19 bp, Mus musculus
  siRNA target sequence for MOR194-1 (NM_146582.1,803-821).
gtcatacttttgaaattga

SEQ ID NO: 763650 - DNA, 19 bp, Mus musculus
  siRNA target sequence for MOR194-1 (NM_146582.1,907-925).
gcccttaagagaactctta

SEQ ID NO: 763651 - DNA, 19 bp, Mus musculus
  siRNA target sequence for MOR194-1 (NM_146582.1,909-927).
ccttaagagaactcttact

SEQ ID NO: 763652 - DNA, 19 bp, Mus musculus
  siRNA target sequence for MOR196-4 (NM_146584.1,227-245).
ctgttgcccctcagatgtt

SEQ ID NO: 763653 - DNA, 19 bp, Mus musculus
  siRNA target sequence for MOR196-4 (NM_146584.1,294-312).
cattcaattccactttttt

SEQ ID NO: 763654 - DNA, 19 bp, Mus musculus
  siRNA target sequence for MOR196-4 (NM_146584.1,384-402).
gcccttgttatatactagt

SEQ ID NO: 763655 - DNA, 19 bp, Mus musculus
  siRNA target sequence for MOR196-4 (NM_146584.1,386-404).
ccttgttatatactagtaa

SEQ ID NO: 763656 - DNA, 19 bp, Mus musculus
  siRNA target sequence for MOR196-4 (NM_146584.1,447-465).
catttacggctttgtaaat

SEQ ID NO: 763657 - DNA, 19 bp, Mus musculus
  siRNA target sequence for MOR196-4 (NM_146584.1,453-471).
cggctttgtaaatggttta

SEQ ID NO: 763658 - DNA, 19 bp, Mus musculus
  siRNA target sequence for MOR196-4 (NM_146584.1,486-504).
gatgcttcgtttaaccttt

SEQ ID NO: 763659 - DNA, 19 bp, Mus musculus
  siRNA target sequence for MOR196-4 (NM_146584.1,791-809).
ctgagacatctgtagaaca

SEQ ID NO: 763660 - DNA, 19 bp, Mus musculus
  siRNA target sequence for MOR185-5 (NM_146585.1,4-22).
gatgaagataacaattcaa

SEQ ID NO: 763661 - DNA, 19 bp, Mus musculus
  siRNA target sequence for MOR185-5 (NM_146585.1,96-114).
ggtcatctacttaactact

SEQ ID NO: 763662 - DNA, 19 bp, Mus musculus
  siRNA target sequence for MOR185-5 (NM_146585.1,121-139).
ggtaacctaggactgatta

SEQ ID NO: 763663 - DNA, 19 bp, Mus musculus
  siRNA target sequence for MOR185-5 (NM_146585.1,122-140).
gtaacctaggactgattat

SEQ ID NO: 763664 - DNA, 19 bp, Mus musculus
  siRNA target sequence for MOR185-5 (NM_146585.1,126-144).
cctaggactgattatgcta

SEQ ID NO: 763665 - DNA, 19 bp, Mus musculus
  siRNA target sequence for MOR185-5 (NM_146585.1,127-145).
ctaggactgattatgctaa

SEQ ID NO: 763666 - DNA, 19 bp, Mus musculus
  siRNA target sequence for MOR185-5 (NM_146585.1,193-211).
cacttggcattcgttgatt

SEQ ID NO: 763667 - DNA, 19 bp, Mus musculus
  siRNA target sequence for MOR185-5 (NM_146585.1,227-245).
cagtcactccaaacacaat

SEQ ID NO: 763668 - DNA, 19 bp, Mus musculus
  siRNA target sequence for MOR185-5 (NM_146585.1,229-247).
gtcactccaaacacaatta

SEQ ID NO: 763669 - DNA, 19 bp, Mus musculus
  siRNA target sequence for MOR185-5 (NM_146585.1,231-249).
cactccaaacacaattata

SEQ ID NO: 763670 - DNA, 19 bp, Mus musculus
  siRNA target sequence for MOR185-5 (NM_146585.1,267-285).
caaaagtataaccttctat

SEQ ID NO: 763671 - DNA, 19 bp, Mus musculus
  siRNA target sequence for MOR185-5 (NM_146585.1,322-340).
gctgtttgtgaaatgtact

SEQ ID NO: 763672 - DNA, 19 bp, Mus musculus
  siRNA target sequence for MOR185-5 (NM_146585.1,323-341).
ctgtttgtgaaatgtactt

SEQ ID NO: 763673 - DNA, 19 bp, Mus musculus
  siRNA target sequence for MOR185-5 (NM_146585.1,380-398).
ggaaccccctcctctatgt

SEQ ID NO: 763674 - DNA, 19 bp, Mus musculus
  siRNA target sequence for MOR185-5 (NM_146585.1,586-604).
gagctgatgttgctaatca

SEQ ID NO: 763675 - DNA, 19 bp, Mus musculus
  siRNA target sequence for MOR185-5 (NM_146585.1,640-658).
gtggttatttcttacatct

SEQ ID NO: 763676 - DNA, 19 bp, Mus musculus
  siRNA target sequence for MOR185-5 (NM_146585.1,826-844).
gtgttttacgtggtagtaa

SEQ ID NO: 763677 - DNA, 19 bp, Mus musculus
  siRNA target sequence for MOR185-5 (NM_146585.1,828-846).
gttttacgtggtagtaatt

SEQ ID NO: 763678 - DNA, 19 bp, Mus musculus
  siRNA target sequence for MOR185-5 (NM_146585.1,837-855).
ggtagtaattcccatgtta

SEQ ID NO: 763679 - DNA, 19 bp, Mus musculus
  siRNA target sequence for MOR185-5 (NM_146585.1,899-917).
ccctgaagcgatttactga

SEQ ID NO: 763680 - DNA, 19 bp, Mus musculus
  siRNA target sequence for MOR185-5 (NM_146585.1,900-918).
cctgaagcgatttactgaa

SEQ ID NO: 763681 - DNA, 19 bp, Mus musculus
  siRNA target sequence for MOR185-5 (NM_146585.1,901-919).
ctgaagcgatttactgaaa

SEQ ID NO: 763682 - DNA, 19 bp, Mus musculus
  siRNA target sequence for MOR185-5 (NM_146585.1,903-921).
gaagcgatttactgaaaaa

SEQ ID NO: 763683 - DNA, 19 bp, Mus musculus
  siRNA target sequence for MOR196-3 (NM_146587.1,539-557).
cagacccccctctgatcat

SEQ ID NO: 763684 - DNA, 19 bp, Mus musculus
  siRNA target sequence for MOR196-3 (NM_146587.1,623-641).
caagttcccttgctatcat

SEQ ID NO: 763685 - DNA, 19 bp, Mus musculus
  siRNA target sequence for MOR196-3 (NM_146587.1,635-653).
ctatcattcttctatctta

SEQ ID NO: 763686 - DNA, 19 bp, Mus musculus
  siRNA target sequence for MOR196-3 (NM_146587.1,800-818).
ctgtagaagagtcaaaagt

SEQ ID NO: 763687 - DNA, 19 bp, Mus musculus
  siRNA target sequence for MOR196-3 (NM_146587.1,802-820).
gtagaagagtcaaaagtaa

SEQ ID NO: 763688 - DNA, 19 bp, Mus musculus
  siRNA target sequence for MOR196-3 (NM_146587.1,899-917).
ccatgaaacaggttgttaa

SEQ ID NO: 763689 - DNA, 19 bp, Mus musculus
  siRNA target sequence for MOR196-1 (NM_146589.1,20-38).
ctgcagtgatggatttcat

SEQ ID NO: 763690 - DNA, 19 bp, Mus musculus
  siRNA target sequence for MOR196-1 (NM_146589.1,94-112).
ctggtcatttatcttataa

SEQ ID NO: 763691 - DNA, 19 bp, Mus musculus
  siRNA target sequence for MOR196-1 (NM_146589.1,96-114).
ggtcatttatcttataaca

SEQ ID NO: 763692 - DNA, 19 bp, Mus musculus
  siRNA target sequence for MOR196-1 (NM_146589.1,604-622).
gttgctggattcactctaa

SEQ ID NO: 763693 - DNA, 19 bp, Mus musculus
  siRNA target sequence for MOR196-1 (NM_146589.1,607-625).
gctggattcactctaataa

SEQ ID NO: 763694 - DNA, 19 bp, Mus musculus
  siRNA target sequence for MOR196-1 (NM_146589.1,610-628).
ggattcactctaataagtt

SEQ ID NO: 763695 - DNA, 19 bp, Mus musculus
  siRNA target sequence for MOR196-1 (NM_146589.1,651-669).
ctacctgtacatttttgca

SEQ ID NO: 763696 - DNA, 19 bp, Mus musculus
  siRNA target sequence for MOR196-1 (NM_146589.1,912-930).
gatcaaggggaatttctgt

SEQ ID NO: 763697 - DNA, 19 bp, Mus musculus
  siRNA target sequence for MOR191-1 (NM_146590.1,87-105).
gctgctcttcattatctat

SEQ ID NO: 763698 - DNA, 19 bp, Mus musculus
  siRNA target sequence for MOR191-1 (NM_146590.1,121-139).
ggtaatttaggcatcatca

SEQ ID NO: 763699 - DNA, 19 bp, Mus musculus
  siRNA target sequence for MOR191-1 (NM_146590.1,265-283).
cataattcagtctcctatt

SEQ ID NO: 763700 - DNA, 19 bp, Mus musculus
  siRNA target sequence for MOR191-1 (NM_146590.1,416-434).
gaatatgttgggtacttgt

SEQ ID NO: 763701 - DNA, 19 bp, Mus musculus
  siRNA target sequence for MOR191-1 (NM_146590.1,580-598).
gaggttgaagtgataatta

SEQ ID NO: 763702 - DNA, 19 bp, Mus musculus
  siRNA target sequence for MOR191-1 (NM_146590.1,583-601).
gttgaagtgataattaggt

SEQ ID NO: 763703 - DNA, 19 bp, Mus musculus
  siRNA target sequence for MOR191-1 (NM_146590.1,599-617).
ggttctttgcaacatttga

SEQ ID NO: 763704 - DNA, 19 bp, Mus musculus
  siRNA target sequence for MOR179-3 (NM_146591.1,85-103).
ctaatgatttatcttttca

SEQ ID NO: 763705 - DNA, 19 bp, Mus musculus
  siRNA target sequence for MOR179-3 (NM_146591.1,423-441).
catcattgcctccaatgtt

SEQ ID NO: 763706 - DNA, 19 bp, Mus musculus
  siRNA target sequence for MOR179-3 (NM_146591.1,434-452).
ccaatgttggtggtatttt

SEQ ID NO: 763707 - DNA, 19 bp, Mus musculus
  siRNA target sequence for MOR179-3 (NM_146591.1,554-572).
cttgctctgatactaaaat

SEQ ID NO: 763708 - DNA, 19 bp, Mus musculus
  siRNA target sequence for MOR179-3 (NM_146591.1,558-576).
ctctgatactaaaatgaat

SEQ ID NO: 763709 - DNA, 19 bp, Mus musculus
  siRNA target sequence for MOR179-3 (NM_146591.1,613-631).
gtagtcactatcttaatca

SEQ ID NO: 763710 - DNA, 19 bp, Mus musculus
  siRNA target sequence for MOR179-3 (NM_146591.1,724-742).
ctcactggcgtgtccatat

SEQ ID NO: 763711 - DNA, 19 bp, Mus musculus
  siRNA target sequence for MOR179-3 (NM_146591.1,726-744).
cactggcgtgtccatatat

SEQ ID NO: 763712 - DNA, 19 bp, Mus musculus
  siRNA target sequence for MOR179-3 (NM_146591.1,728-746).
ctggcgtgtccatatatta

SEQ ID NO: 763713 - DNA, 19 bp, Mus musculus
  siRNA target sequence for MOR179-3 (NM_146591.1,732-750).
cgtgtccatatattatgga

SEQ ID NO: 763714 - DNA, 19 bp, Mus musculus
  siRNA target sequence for MOR179-3 (NM_146591.1,779-797).
gttccagctacacattaga

SEQ ID NO: 763715 - DNA, 19 bp, Mus musculus
  siRNA target sequence for MOR179-3 (NM_146591.1,791-809).
cattagagcatgacatgat

SEQ ID NO: 763716 - DNA, 19 bp, Mus musculus
  siRNA target sequence for MOR179-3 (NM_146591.1,818-836).
cattttatgccgttgtcat

SEQ ID NO: 763717 - DNA, 19 bp, Mus musculus
  siRNA target sequence for MOR179-3 (NM_146591.1,913-931).
gtgtttatgtccatacgat

SEQ ID NO: 763718 - DNA, 19 bp, Mus musculus
  siRNA target sequence for MOR206-4 (NM_146594.1,8-26).
cctggaattacacaaaaga

SEQ ID NO: 763719 - DNA, 19 bp, Mus musculus
  siRNA target sequence for MOR206-4 (NM_146594.1,51-69).
gactgattccaaagagata

SEQ ID NO: 763720 - DNA, 19 bp, Mus musculus
  siRNA target sequence for MOR206-4 (NM_146594.1,59-77).
ccaaagagatacaactagt

SEQ ID NO: 763721 - DNA, 19 bp, Mus musculus
  siRNA target sequence for MOR206-4 (NM_146594.1,256-274).
ctgacttccacaaaagtca

SEQ ID NO: 763722 - DNA, 19 bp, Mus musculus
  siRNA target sequence for MOR206-4 (NM_146594.1,294-312).
cactcagatgtatgctttt

SEQ ID NO: 763723 - DNA, 19 bp, Mus musculus
  siRNA target sequence for MOR206-4 (NM_146594.1,433-451).
ctcactggttcctatatga

SEQ ID NO: 763724 - DNA, 19 bp, Mus musculus
  siRNA target sequence for MOR206-4 (NM_146594.1,435-453).
cactggttcctatatgatt

SEQ ID NO: 763725 - DNA, 19 bp, Mus musculus
  siRNA target sequence for MOR206-4 (NM_146594.1,504-522).
ctgcagaaccaaggtaatt

SEQ ID NO: 763726 - DNA, 19 bp, Mus musculus
  siRNA target sequence for MOR206-4 (NM_146594.1,506-524).
gcagaaccaaggtaattca

SEQ ID NO: 763727 - DNA, 19 bp, Mus musculus
  siRNA target sequence for MOR206-4 (NM_146594.1,507-525).
cagaaccaaggtaattcat

SEQ ID NO: 763728 - DNA, 19 bp, Mus musculus
  siRNA target sequence for MOR206-4 (NM_146594.1,566-584).
gcagtgatacacgtaacat

SEQ ID NO: 763729 - DNA, 19 bp, Mus musculus
  siRNA target sequence for MOR206-4 (NM_146594.1,569-587).
gtgatacacgtaacattca

SEQ ID NO: 763730 - DNA, 19 bp, Mus musculus
  siRNA target sequence for MOR206-4 (NM_146594.1,575-593).
cacgtaacattcaaatcat

SEQ ID NO: 763731 - DNA, 19 bp, Mus musculus
  siRNA target sequence for MOR206-4 (NM_146594.1,577-595).
cgtaacattcaaatcatta

SEQ ID NO: 763732 - DNA, 19 bp, Mus musculus
  siRNA target sequence for MOR206-4 (NM_146594.1,617-635).
ctctagtggtgtctcttat

SEQ ID NO: 763733 - DNA, 19 bp, Mus musculus
  siRNA target sequence for MOR206-4 (NM_146594.1,619-637).
ctagtggtgtctcttatca

SEQ ID NO: 763734 - DNA, 19 bp, Mus musculus
  siRNA target sequence for MOR206-4 (NM_146594.1,622-640).
gtggtgtctcttatcacaa

SEQ ID NO: 763735 - DNA, 19 bp, Mus musculus
  siRNA target sequence for MOR206-4 (NM_146594.1,758-776).
gtactttgatttttactta

SEQ ID NO: 763736 - DNA, 19 bp, Mus musculus
  siRNA target sequence for MOR206-4 (NM_146594.1,784-802).
ccaagtaattcctactact

SEQ ID NO: 763737 - DNA, 19 bp, Mus musculus
  siRNA target sequence for MOR206-4 (NM_146594.1,896-914).
gtgctatccatagagttat

SEQ ID NO: 763738 - DNA, 19 bp, Mus musculus
  siRNA target sequence for MOR206-4 (NM_146594.1,898-916).
gctatccatagagttatca

SEQ ID NO: 763739 - DNA, 19 bp, Mus musculus
  siRNA target sequence for MOR206-4 (NM_146594.1,945-963).
cagagtggcactaagtgat

SEQ ID NO: 763740 - DNA, 19 bp, Mus musculus
  siRNA target sequence for MOR283-7 (NM_146596.1,26-44).
gcaatggcttcatcttagt

SEQ ID NO: 763741 - DNA, 19 bp, Mus musculus
  siRNA target sequence for MOR283-7 (NM_146596.1,426-444).
gttcatagttggtactata

SEQ ID NO: 763742 - DNA, 19 bp, Mus musculus
  siRNA target sequence for MOR283-7 (NM_146596.1,458-476).
cagtgatagccctaggatt

SEQ ID NO: 763743 - DNA, 19 bp, Mus musculus
  siRNA target sequence for MOR283-7 (NM_146596.1,460-478).
gtgatagccctaggattta

SEQ ID NO: 763744 - DNA, 19 bp, Mus musculus
  siRNA target sequence for MOR283-7 (NM_146596.1,575-593).
catccacatacgagttgat

SEQ ID NO: 763745 - DNA, 19 bp, Mus musculus
  siRNA target sequence for MOR283-7 (NM_146596.1,581-599).
catacgagttgatggttta

SEQ ID NO: 763746 - DNA, 19 bp, Mus musculus
  siRNA target sequence for MOR283-7 (NM_146596.1,645-663).
ggcctcctatgtacgaatt

SEQ ID NO: 763747 - DNA, 19 bp, Mus musculus
  siRNA target sequence for MOR283-7 (NM_146596.1,936-954).
ccactttctaggtagttct

SEQ ID NO: 763748 - DNA, 19 bp, Mus musculus
  siRNA target sequence for MOR283-5 (NM_146599.1,4-22).
gagttcaggaattcaactt

SEQ ID NO: 763749 - DNA, 19 bp, Mus musculus
  siRNA target sequence for MOR283-5 (NM_146599.1,300-318).
gatgttcattgaattggta

SEQ ID NO: 763750 - DNA, 19 bp, Mus musculus
  siRNA target sequence for MOR283-5 (NM_146599.1,483-501).
caacacaatgcattattct

SEQ ID NO: 763751 - DNA, 19 bp, Mus musculus
  siRNA target sequence for MOR283-5 (NM_146599.1,507-525).
caaatcgaggcatatcaga

SEQ ID NO: 763752 - DNA, 19 bp, Mus musculus
  siRNA target sequence for MOR283-5 (NM_146599.1,568-586).
gcagacacctctagttata

SEQ ID NO: 763753 - DNA, 19 bp, Mus musculus
  siRNA target sequence for MOR283-5 (NM_146599.1,569-587).
cagacacctctagttataa

SEQ ID NO: 763754 - DNA, 19 bp, Mus musculus
  siRNA target sequence for MOR283-5 (NM_146599.1,573-591).
cacctctagttataagctt

SEQ ID NO: 763755 - DNA, 19 bp, Mus musculus
  siRNA target sequence for MOR283-5 (NM_146599.1,629-647).
ctcttactgccatcttttt

SEQ ID NO: 763756 - DNA, 19 bp, Mus musculus
  siRNA target sequence for MOR283-5 (NM_146599.1,650-668).
cttatgcacggattttgtt

SEQ ID NO: 763757 - DNA, 19 bp, Mus musculus
  siRNA target sequence for MOR283-5 (NM_146599.1,737-755).
ctgttgtaggcatgtacta

SEQ ID NO: 763758 - DNA, 19 bp, Mus musculus
  siRNA target sequence for MOR283-5 (NM_146599.1,929-947).
gccaccaccccatacattt

SEQ ID NO: 763759 - DNA, 19 bp, Mus musculus
  siRNA target sequence for MOR283-5 (NM_146599.1,934-952).
caccccatacatttaaggt

SEQ ID NO: 763760 - DNA, 19 bp, Mus musculus
  siRNA target sequence for MOR283-4 (NM_146600.1,64-82).
ggctctccagaaatactct

SEQ ID NO: 763761 - DNA, 19 bp, Mus musculus
  siRNA target sequence for MOR283-4 (NM_146600.1,458-476).
ctctgagtgcagtaggata

SEQ ID NO: 763762 - DNA, 19 bp, Mus musculus
  siRNA target sequence for MOR283-4 (NM_146600.1,601-619).
gtgatgggtgtgatcttct

SEQ ID NO: 763763 - DNA, 19 bp, Mus musculus
  siRNA target sequence for MOR283-4 (NM_146600.1,637-655).
gccatcctttcctcttata

SEQ ID NO: 763764 - DNA, 19 bp, Mus musculus
  siRNA target sequence for MOR283-4 (NM_146600.1,639-657).
catcctttcctcttataca

SEQ ID NO: 763765 - DNA, 19 bp, Mus musculus
  siRNA target sequence for MOR283-4 (NM_146600.1,642-660).
cctttcctcttatacacta

SEQ ID NO: 763766 - DNA, 19 bp, Mus musculus
  siRNA target sequence for MOR283-4 (NM_146600.1,643-661).
ctttcctcttatacactaa

SEQ ID NO: 763767 - DNA, 19 bp, Mus musculus
  siRNA target sequence for MOR283-4 (NM_146600.1,647-665).
cctcttatacactaatcct

SEQ ID NO: 763768 - DNA, 19 bp, Mus musculus
  siRNA target sequence for MOR283-4 (NM_146600.1,931-949).
ccagaacactctacattct

SEQ ID NO: 763769 - DNA, 19 bp, Mus musculus
  siRNA target sequence for MOR260-3 (NM_146601.1,243-261).
cttatctgacggagttcat

SEQ ID NO: 763770 - DNA, 19 bp, Mus musculus
  siRNA target sequence for MOR260-3 (NM_146601.1,308-326).
gtggtatttctcatcatct

SEQ ID NO: 763771 - DNA, 19 bp, Mus musculus
  siRNA target sequence for MOR260-3 (NM_146601.1,444-462).
ctacaacaattgttccaaa

SEQ ID NO: 763772 - DNA, 19 bp, Mus musculus
  siRNA target sequence for MOR260-3 (NM_146601.1,463-481).
gatgctagtccactttcta

SEQ ID NO: 763773 - DNA, 19 bp, Mus musculus
  siRNA target sequence for MOR260-3 (NM_146601.1,482-500).
ggtgtcagaaagaccattt

SEQ ID NO: 763774 - DNA, 19 bp, Mus musculus
  siRNA target sequence for MOR260-3 (NM_146601.1,621-639).
ccaccatcatgacacataa

SEQ ID NO: 763775 - DNA, 19 bp, Mus musculus
  siRNA target sequence for MOR260-3 (NM_146601.1,666-684).
cctggactagtggaatatt

SEQ ID NO: 763776 - DNA, 19 bp, Mus musculus
  siRNA target sequence for MOR260-3 (NM_146601.1,695-713).
gtagatacctcatttactt

SEQ ID NO: 763777 - DNA, 19 bp, Mus musculus
  siRNA target sequence for MOR260-3 (NM_146601.1,721-739).
gacgtaccggggaccaaat

SEQ ID NO: 763778 - DNA, 19 bp, Mus musculus
  siRNA target sequence for MOR260-3 (NM_146601.1,724-742).
gtaccggggaccaaatata

SEQ ID NO: 763779 - DNA, 19 bp, Mus musculus
  siRNA target sequence for MOR260-3 (NM_146601.1,765-783).
ctcctgcactcttaaagct

SEQ ID NO: 763780 - DNA, 19 bp, Mus musculus
  siRNA target sequence for MOR260-3 (NM_146601.1,829-847).
gggtataataattctctta

SEQ ID NO: 763781 - DNA, 19 bp, Mus musculus
  siRNA target sequence for MOR260-3 (NM_146601.1,889-907).
ctccactgtggttcaaata

SEQ ID NO: 763782 - DNA, 19 bp, Mus musculus
  siRNA target sequence for MOR260-3 (NM_146601.1,1040-1058).
gtaatctcggtattctact

SEQ ID NO: 763783 - DNA, 19 bp, Mus musculus
  siRNA target sequence for MOR260-3 (NM_146601.1,1045-1063).
ctcggtattctactcaata

SEQ ID NO: 763784 - DNA, 19 bp, Mus musculus
  siRNA target sequence for MOR260-3 (NM_146601.1,1047-1065).
cggtattctactcaatagt

SEQ ID NO: 763785 - DNA, 19 bp, Mus musculus
  siRNA target sequence for MOR260-3 (NM_146601.1,1048-1066).
ggtattctactcaatagta

SEQ ID NO: 763786 - DNA, 19 bp, Mus musculus
  siRNA target sequence for MOR260-3 (NM_146601.1,1049-1067).
gtattctactcaatagtaa

SEQ ID NO: 763787 - DNA, 19 bp, Mus musculus
  siRNA target sequence for MOR260-3 (NM_146601.1,1121-1139).
gcattaaagaaagtactta

SEQ ID NO: 763788 - DNA, 19 bp, Mus musculus
  siRNA target sequence for MOR260-3 (NM_146601.1,1133-1151).
gtacttaaaagagagataa

SEQ ID NO: 763789 - DNA, 19 bp, Mus musculus
  siRNA target sequence for MOR283-3 (NM_146602.1,506-524).
gcaaaaatcgtcagatcaa

SEQ ID NO: 763790 - DNA, 19 bp, Mus musculus
  siRNA target sequence for MOR283-3 (NM_146602.1,507-525).
caaaaatcgtcagatcaat

SEQ ID NO: 763791 - DNA, 19 bp, Mus musculus
  siRNA target sequence for MOR283-3 (NM_146602.1,606-624).
gggggttattgtgctaatt

SEQ ID NO: 763792 - DNA, 19 bp, Mus musculus
  siRNA target sequence for MOR283-3 (NM_146602.1,608-626).
gggttattgtgctaattct

SEQ ID NO: 763793 - DNA, 19 bp, Mus musculus
  siRNA target sequence for MOR283-3 (NM_146602.1,912-930).
cctgggaaaacgattgtca

SEQ ID NO: 763794 - DNA, 19 bp, Mus musculus
  siRNA target sequence for MOR262-9 (NM_146607.1,86-104).
gcctcatcatgtacttgat

SEQ ID NO: 763795 - DNA, 19 bp, Mus musculus
  siRNA target sequence for MOR262-9 (NM_146607.1,87-105).
cctcatcatgtacttgata

SEQ ID NO: 763796 - DNA, 19 bp, Mus musculus
  siRNA target sequence for MOR262-9 (NM_146607.1,115-133).
ggaaacagtctgctcatta

SEQ ID NO: 763797 - DNA, 19 bp, Mus musculus
  siRNA target sequence for MOR262-9 (NM_146607.1,116-134).
gaaacagtctgctcattat

SEQ ID NO: 763798 - DNA, 19 bp, Mus musculus
  siRNA target sequence for MOR262-9 (NM_146607.1,120-138).
cagtctgctcattatcatt

SEQ ID NO: 763799 - DNA, 19 bp, Mus musculus
  siRNA target sequence for MOR262-9 (NM_146607.1,221-239).
catccattcctcaaatgct

SEQ ID NO: 763800 - DNA, 19 bp, Mus musculus
  siRNA target sequence for MOR262-9 (NM_146607.1,237-255).
gctcatcatgtttatgtca

SEQ ID NO: 763801 - DNA, 19 bp, Mus musculus
  siRNA target sequence for MOR262-9 (NM_146607.1,276-294).
ccttggttgtgctctacaa

SEQ ID NO: 763802 - DNA, 19 bp, Mus musculus
  siRNA target sequence for MOR262-9 (NM_146607.1,277-295).
cttggttgtgctctacaaa

SEQ ID NO: 763803 - DNA, 19 bp, Mus musculus
  siRNA target sequence for MOR262-9 (NM_146607.1,281-299).
gttgtgctctacaaatggt

SEQ ID NO: 763804 - DNA, 19 bp, Mus musculus
  siRNA target sequence for MOR262-9 (NM_146607.1,284-302).
gtgctctacaaatggttat

SEQ ID NO: 763805 - DNA, 19 bp, Mus musculus
  siRNA target sequence for MOR262-9 (NM_146607.1,286-304).
gctctacaaatggttatct

SEQ ID NO: 763806 - DNA, 19 bp, Mus musculus
  siRNA target sequence for MOR262-9 (NM_146607.1,392-410).
ctataatcatgaacaaagt

SEQ ID NO: 763807 - DNA, 19 bp, Mus musculus
  siRNA target sequence for MOR262-9 (NM_146607.1,399-417).
catgaacaaagtattatat

SEQ ID NO: 763808 - DNA, 19 bp, Mus musculus
  siRNA target sequence for MOR262-9 (NM_146607.1,541-559).
gctcttcttaaacttgtat

SEQ ID NO: 763809 - DNA, 19 bp, Mus musculus
  siRNA target sequence for MOR262-9 (NM_146607.1,561-579).
ctcagatatcaccatgaat

SEQ ID NO: 763810 - DNA, 19 bp, Mus musculus
  siRNA target sequence for MOR262-9 (NM_146607.1,563-581).
cagatatcaccatgaatgt

SEQ ID NO: 763811 - DNA, 19 bp, Mus musculus
  siRNA target sequence for MOR262-9 (NM_146607.1,615-633).
gatgatccctctgatgtta

SEQ ID NO: 763812 - DNA, 19 bp, Mus musculus
  siRNA target sequence for MOR262-9 (NM_146607.1,727-745).
ctaaccgtggtcatcttat

SEQ ID NO: 763813 - DNA, 19 bp, Mus musculus
  siRNA target sequence for MOR262-9 (NM_146607.1,747-765).
ctatggttcagcccttttt

SEQ ID NO: 763814 - DNA, 19 bp, Mus musculus
  siRNA target sequence for MOR262-9 (NM_146607.1,752-770).
gttcagccctttttatgta

SEQ ID NO: 763815 - DNA, 19 bp, Mus musculus
  siRNA target sequence for MOR262-9 (NM_146607.1,755-773).
cagccctttttatgtacat

SEQ ID NO: 763816 - DNA, 19 bp, Mus musculus
  siRNA target sequence for MOR262-9 (NM_146607.1,813-831).
cattggactgtcttatgga

SEQ ID NO: 763817 - DNA, 19 bp, Mus musculus
  siRNA target sequence for MOR262-9 (NM_146607.1,830-848).
gagttgtgacgccaatgtt

SEQ ID NO: 763818 - DNA, 19 bp, Mus musculus
  siRNA target sequence for MOR262-9 (NM_146607.1,892-910).
gccgtgaagaaaattttga

SEQ ID NO: 763819 - DNA, 19 bp, Mus musculus
  siRNA target sequence for MOR262-9 (NM_146607.1,917-935).
gtttgtacctgcggaaaat

SEQ ID NO: 763820 - DNA, 19 bp, Mus musculus
  siRNA target sequence for MOR239-6 (NM_146608.1,62-80).
gggagcttcggttcctatt

SEQ ID NO: 763821 - DNA, 19 bp, Mus musculus
  siRNA target sequence for MOR239-6 (NM_146608.1,64-82).
gagcttcggttcctattct

SEQ ID NO: 763822 - DNA, 19 bp, Mus musculus
  siRNA target sequence for MOR239-6 (NM_146608.1,67-85).
cttcggttcctattcttca

SEQ ID NO: 763823 - DNA, 19 bp, Mus musculus
  siRNA target sequence for MOR239-6 (NM_146608.1,113-131).
ctgtcactggcaatcttct

SEQ ID NO: 763824 - DNA, 19 bp, Mus musculus
  siRNA target sequence for MOR239-6 (NM_146608.1,157-175).
ccgcgtttgcacacaacta

SEQ ID NO: 763825 - DNA, 19 bp, Mus musculus
  siRNA target sequence for MOR239-6 (NM_146608.1,158-176).
cgcgtttgcacacaactat

SEQ ID NO: 763826 - DNA, 19 bp, Mus musculus
  siRNA target sequence for MOR239-6 (NM_146608.1,160-178).
cgtttgcacacaactatgt

SEQ ID NO: 763827 - DNA, 19 bp, Mus musculus
  siRNA target sequence for MOR239-6 (NM_146608.1,184-202).
ctcttaggcaacctttcat

SEQ ID NO: 763828 - DNA, 19 bp, Mus musculus
  siRNA target sequence for MOR239-6 (NM_146608.1,323-341).
gaggcatcaagatattcct

SEQ ID NO: 763829 - DNA, 19 bp, Mus musculus
  siRNA target sequence for MOR239-6 (NM_146608.1,365-383).
gttacatagccatttctca

SEQ ID NO: 763830 - DNA, 19 bp, Mus musculus
  siRNA target sequence for MOR239-6 (NM_146608.1,388-406).
ctacgctacacactaatta

SEQ ID NO: 763831 - DNA, 19 bp, Mus musculus
  siRNA target sequence for MOR239-6 (NM_146608.1,416-434).
cagtctgtgggatcttcat

SEQ ID NO: 763832 - DNA, 19 bp, Mus musculus
  siRNA target sequence for MOR239-6 (NM_146608.1,446-464).
gggtgggtggttttatcca

SEQ ID NO: 763833 - DNA, 19 bp, Mus musculus
  siRNA target sequence for MOR239-6 (NM_146608.1,477-495).
ggttggactgactatccat

SEQ ID NO: 763834 - DNA, 19 bp, Mus musculus
  siRNA target sequence for MOR239-6 (NM_146608.1,513-531).
cgacaaactggacaacttt

SEQ ID NO: 763835 - DNA, 19 bp, Mus musculus
  siRNA target sequence for MOR239-6 (NM_146608.1,541-559).
gttccacagctgatcaaat

SEQ ID NO: 763836 - DNA, 19 bp, Mus musculus
  siRNA target sequence for MOR239-6 (NM_146608.1,566-584).
gtaccgatacctttgtctt

SEQ ID NO: 763837 - DNA, 19 bp, Mus musculus
  siRNA target sequence for MOR239-6 (NM_146608.1,615-633).
ggtcactctcatgtgtttt

SEQ ID NO: 763838 - DNA, 19 bp, Mus musculus
  siRNA target sequence for MOR239-6 (NM_146608.1,672-690).
gctccgaagtcactcaaaa

SEQ ID NO: 763839 - DNA, 19 bp, Mus musculus
  siRNA target sequence for MOR239-6 (NM_146608.1,886-904).
gtagccatgaaaaagctat

SEQ ID NO: 763840 - DNA, 19 bp, Mus musculus
  siRNA target sequence for MOR171-14 (NM_146613.1,10-28).
ggaaaccattcaatggtaa

SEQ ID NO: 763841 - DNA, 19 bp, Mus musculus
  siRNA target sequence for MOR171-14 (NM_146613.1,312-330).
ccttgttttcgcaattgca

SEQ ID NO: 763842 - DNA, 19 bp, Mus musculus
  siRNA target sequence for MOR171-14 (NM_146613.1,481-499).
ggctttatgttaaaattaa

SEQ ID NO: 763843 - DNA, 19 bp, Mus musculus
  siRNA target sequence for MOR171-13 (NM_146614.1,15-33).
cctttcgatgataatcgaa

SEQ ID NO: 763844 - DNA, 19 bp, Mus musculus
  siRNA target sequence for MOR171-13 (NM_146614.1,16-34).
ctttcgatgataatcgaat

SEQ ID NO: 763845 - DNA, 19 bp, Mus musculus
  siRNA target sequence for MOR171-13 (NM_146614.1,297-315).
ccagctctactttttctct

SEQ ID NO: 763846 - DNA, 19 bp, Mus musculus
  siRNA target sequence for MOR171-13 (NM_146614.1,481-499).
ggacttatgttaaaattgt

SEQ ID NO: 763847 - DNA, 19 bp, Mus musculus
  siRNA target sequence for MOR171-13 (NM_146614.1,885-903).
ggatgtcaaatcttccata

SEQ ID NO: 763848 - DNA, 19 bp, Mus musculus
  siRNA target sequence for MOR104-3 (NM_146615.1,67-85).
gcccttctcttcatagtga

SEQ ID NO: 763849 - DNA, 19 bp, Mus musculus
  siRNA target sequence for MOR104-3 (NM_146615.1,68-86).
cccttctcttcatagtgat

SEQ ID NO: 763850 - DNA, 19 bp, Mus musculus
  siRNA target sequence for MOR104-3 (NM_146615.1,113-131).
cgggcaatggactcattat

SEQ ID NO: 763851 - DNA, 19 bp, Mus musculus
  siRNA target sequence for MOR104-3 (NM_146615.1,230-248).
caaaattgctagaaacctt

SEQ ID NO: 763852 - DNA, 19 bp, Mus musculus
  siRNA target sequence for MOR104-3 (NM_146615.1,241-259).
gaaacctttgtagtatcaa

SEQ ID NO: 763853 - DNA, 19 bp, Mus musculus
  siRNA target sequence for MOR104-3 (NM_146615.1,317-335).
gtaccactgagttcttgat

SEQ ID NO: 763854 - DNA, 19 bp, Mus musculus
  siRNA target sequence for MOR104-3 (NM_146615.1,381-399).
cctccgttacccaaccatt

SEQ ID NO: 763855 - DNA, 19 bp, Mus musculus
  siRNA target sequence for MOR104-3 (NM_146615.1,450-468).
cttcaccattgtcttttgt

SEQ ID NO: 763856 - DNA, 19 bp, Mus musculus
  siRNA target sequence for MOR104-3 (NM_146615.1,467-485).
gtcagacaatgctgattgt

SEQ ID NO: 763857 - DNA, 19 bp, Mus musculus
  siRNA target sequence for MOR104-3 (NM_146615.1,473-491).
caatgctgattgtacagtt

SEQ ID NO: 763858 - DNA, 19 bp, Mus musculus
  siRNA target sequence for MOR104-3 (NM_146615.1,532-550).
gacgtgggtcccatcttga

SEQ ID NO: 763859 - DNA, 19 bp, Mus musculus
  siRNA target sequence for MOR104-3 (NM_146615.1,563-581).
cggacaccagcatattgga

SEQ ID NO: 763860 - DNA, 19 bp, Mus musculus
  siRNA target sequence for MOR104-3 (NM_146615.1,588-606).
gggtctcctggcaacgatt

SEQ ID NO: 763861 - DNA, 19 bp, Mus musculus
  siRNA target sequence for MOR104-3 (NM_146615.1,747-765).
ctacggagctgtcttgttt

SEQ ID NO: 763862 - DNA, 19 bp, Mus musculus
  siRNA target sequence for MOR104-3 (NM_146615.1,782-800).
cagcacactcctcctttaa

SEQ ID NO: 763863 - DNA, 19 bp, Mus musculus
  siRNA target sequence for MOR104-3 (NM_146615.1,784-802).
gcacactcctcctttaaga

SEQ ID NO: 763864 - DNA, 19 bp, Mus musculus
  siRNA target sequence for MOR104-3 (NM_146615.1,787-805).
cactcctcctttaagatta

SEQ ID NO: 763865 - DNA, 19 bp, Mus musculus
  siRNA target sequence for MOR104-3 (NM_146615.1,789-807).
ctcctcctttaagattaat

SEQ ID NO: 763866 - DNA, 19 bp, Mus musculus
  siRNA target sequence for MOR104-3 (NM_146615.1,794-812).
cctttaagattaataaggt

SEQ ID NO: 763867 - DNA, 19 bp, Mus musculus
  siRNA target sequence for MOR104-3 (NM_146615.1,811-829).
gtggtgtctgtactaaaca

SEQ ID NO: 763868 - DNA, 19 bp, Mus musculus
  siRNA target sequence for MOR104-3 (NM_146615.1,853-871).
ccctttatttacaccatta

SEQ ID NO: 763869 - DNA, 19 bp, Mus musculus
  siRNA target sequence for MOR219-2 (NM_146616.1,19-37).
gtaactggattcatactta

SEQ ID NO: 763870 - DNA, 19 bp, Mus musculus
  siRNA target sequence for MOR219-2 (NM_146616.1,34-52).
cttatgggtttctctgata

SEQ ID NO: 763871 - DNA, 19 bp, Mus musculus
  siRNA target sequence for MOR219-2 (NM_146616.1,39-57).
gggtttctctgatatccat

SEQ ID NO: 763872 - DNA, 19 bp, Mus musculus
  siRNA target sequence for MOR219-2 (NM_146616.1,66-84).
gattctatgtggagtgtta

SEQ ID NO: 763873 - DNA, 19 bp, Mus musculus
  siRNA target sequence for MOR219-2 (NM_146616.1,70-88).
ctatgtggagtgttatttt

SEQ ID NO: 763874 - DNA, 19 bp, Mus musculus
  siRNA target sequence for MOR219-2 (NM_146616.1,216-234).
gtctgttacaattccaaat

SEQ ID NO: 763875 - DNA, 19 bp, Mus musculus
  siRNA target sequence for MOR219-2 (NM_146616.1,218-236).
ctgttacaattccaaattt

SEQ ID NO: 763876 - DNA, 19 bp, Mus musculus
  siRNA target sequence for MOR219-2 (NM_146616.1,250-268).
cttatgcacaaaaattcca

SEQ ID NO: 763877 - DNA, 19 bp, Mus musculus
  siRNA target sequence for MOR219-2 (NM_146616.1,258-276).
caaaaattccatttccata

SEQ ID NO: 763878 - DNA, 19 bp, Mus musculus
  siRNA target sequence for MOR219-2 (NM_146616.1,312-330).
ccttggatcaggagaagta

SEQ ID NO: 763879 - DNA, 19 bp, Mus musculus
  siRNA target sequence for MOR219-2 (NM_146616.1,394-412).
gtcattatgaatagtgtta

SEQ ID NO: 763880 - DNA, 19 bp, Mus musculus
  siRNA target sequence for MOR219-2 (NM_146616.1,511-529).
gtgatcccacagattttct

SEQ ID NO: 763881 - DNA, 19 bp, Mus musculus
  siRNA target sequence for MOR219-2 (NM_146616.1,532-550).
gatgttccatcactcttaa

SEQ ID NO: 763882 - DNA, 19 bp, Mus musculus
  siRNA target sequence for MOR219-2 (NM_146616.1,560-578).
gctctggatcactcatgat

SEQ ID NO: 763883 - DNA, 19 bp, Mus musculus
  siRNA target sequence for MOR219-2 (NM_146616.1,569-587).
cactcatgatcatttatat

SEQ ID NO: 763884 - DNA, 19 bp, Mus musculus
  siRNA target sequence for MOR219-2 (NM_146616.1,576-594).
gatcatttatataagtctt

SEQ ID NO: 763885 - DNA, 19 bp, Mus musculus
  siRNA target sequence for MOR219-2 (NM_146616.1,608-626).
gtctaggcatgtcttgttt

SEQ ID NO: 763886 - DNA, 19 bp, Mus musculus
  siRNA target sequence for MOR219-2 (NM_146616.1,610-628).
ctaggcatgtcttgtttta

SEQ ID NO: 763887 - DNA, 19 bp, Mus musculus
  siRNA target sequence for MOR219-2 (NM_146616.1,794-812).
catcacttacagatagact

SEQ ID NO: 763888 - DNA, 19 bp, Mus musculus
  siRNA target sequence for MOR219-2 (NM_146616.1,844-862).
gcactcaatcctgtaatct

SEQ ID NO: 763889 - DNA, 19 bp, Mus musculus
  siRNA target sequence for MOR219-2 (NM_146616.1,902-920).
gactgcttcaaaatctcta

SEQ ID NO: 763890 - DNA, 19 bp, Mus musculus
  siRNA target sequence for MOR219-1 (NM_146617.1,228-246).
cccaaagttcgttgttaat

SEQ ID NO: 763891 - DNA, 19 bp, Mus musculus
  siRNA target sequence for MOR219-1 (NM_146617.1,229-247).
ccaaagttcgttgttaata

SEQ ID NO: 763892 - DNA, 19 bp, Mus musculus
  siRNA target sequence for MOR219-1 (NM_146617.1,237-255).
cgttgttaatagcctaatt

SEQ ID NO: 763893 - DNA, 19 bp, Mus musculus
  siRNA target sequence for MOR219-1 (NM_146617.1,241-259).
gttaatagcctaattcata

SEQ ID NO: 763894 - DNA, 19 bp, Mus musculus
  siRNA target sequence for MOR219-1 (NM_146617.1,250-268).
ctaattcataataattcta

SEQ ID NO: 763895 - DNA, 19 bp, Mus musculus
  siRNA target sequence for MOR219-1 (NM_146617.1,438-456).
ctgggctactggaatgctt

SEQ ID NO: 763896 - DNA, 19 bp, Mus musculus
  siRNA target sequence for MOR219-1 (NM_146617.1,440-458).
gggctactggaatgctttt

SEQ ID NO: 763897 - DNA, 19 bp, Mus musculus
  siRNA target sequence for MOR219-1 (NM_146617.1,454-472).
ctttttggagccatataca

SEQ ID NO: 763898 - DNA, 19 bp, Mus musculus
  siRNA target sequence for MOR219-1 (NM_146617.1,511-529).
gtgataccacaatttttct

SEQ ID NO: 763899 - DNA, 19 bp, Mus musculus
  siRNA target sequence for MOR219-1 (NM_146617.1,532-550).
gatgttccctcattgctaa

SEQ ID NO: 763900 - DNA, 19 bp, Mus musculus
  siRNA target sequence for MOR219-1 (NM_146617.1,555-573).
ctcctgctctgaaacactt

SEQ ID NO: 763901 - DNA, 19 bp, Mus musculus
  siRNA target sequence for MOR219-1 (NM_146617.1,576-594).
ggccatttactcatgtctt

SEQ ID NO: 763902 - DNA, 19 bp, Mus musculus
  siRNA target sequence for MOR219-1 (NM_146617.1,716-734).
gtattccccacctaactgt

SEQ ID NO: 763903 - DNA, 19 bp, Mus musculus
  siRNA target sequence for MOR219-1 (NM_146617.1,777-795).
gccattcacaaatacacta

SEQ ID NO: 763904 - DNA, 19 bp, Mus musculus
  siRNA target sequence for MOR219-1 (NM_146617.1,778-796).
ccattcacaaatacactat

SEQ ID NO: 763905 - DNA, 19 bp, Mus musculus
  siRNA target sequence for MOR219-1 (NM_146617.1,834-852).
gttgcctccagcactaaat

SEQ ID NO: 763906 - DNA, 19 bp, Mus musculus
  siRNA target sequence for MOR219-1 (NM_146617.1,897-915).
caggaggttgcagcaaaat

SEQ ID NO: 763907 - DNA, 19 bp, Mus musculus
  siRNA target sequence for MOR219-1 (NM_146617.1,900-918).
gaggttgcagcaaaatctt

SEQ ID NO: 763908 - DNA, 19 bp, Mus musculus
  siRNA target sequence for MOR219-1 (NM_146617.1,920-938).
gcttgagaaggttacttat

SEQ ID NO: 763909 - DNA, 19 bp, Mus musculus
  siRNA target sequence for MOR219-1 (NM_146617.1,921-939).
cttgagaaggttacttatt

SEQ ID NO: 763910 - DNA, 19 bp, Mus musculus
  siRNA target sequence for MOR104-2 (NM_146619.1,27-45).
gaccgagtttatttttcta

SEQ ID NO: 763911 - DNA, 19 bp, Mus musculus
  siRNA target sequence for MOR104-2 (NM_146619.1,65-83).
cactgcagctcccattgtt

SEQ ID NO: 763912 - DNA, 19 bp, Mus musculus
  siRNA target sequence for MOR104-2 (NM_146619.1,511-529).
ccgcagaaaatcaaccatt

SEQ ID NO: 763913 - DNA, 19 bp, Mus musculus
  siRNA target sequence for MOR104-2 (NM_146619.1,538-556).
gactctgaccccatcttta

SEQ ID NO: 763914 - DNA, 19 bp, Mus musculus
  siRNA target sequence for MOR104-2 (NM_146619.1,613-631).
gtggtgattctcagttctt

SEQ ID NO: 763915 - DNA, 19 bp, Mus musculus
  siRNA target sequence for MOR104-2 (NM_146619.1,705-723).
gaaaacattctcaacttgt

SEQ ID NO: 763916 - DNA, 19 bp, Mus musculus
  siRNA target sequence for MOR104-2 (NM_146619.1,737-755).
cagtagtgaccatctacta

SEQ ID NO: 763917 - DNA, 19 bp, Mus musculus
  siRNA target sequence for MOR104-2 (NM_146619.1,784-802).
cctccagctaagtacaact

SEQ ID NO: 763918 - DNA, 19 bp, Mus musculus
  siRNA target sequence for MOR104-2 (NM_146619.1,836-854).
gcgtgatcacccctttagt

SEQ ID NO: 763919 - DNA, 19 bp, Mus musculus
  siRNA target sequence for MOR104-2 (NM_146619.1,913-931).
ctatcccaaaagaagtttt

SEQ ID NO: 763920 - DNA, 19 bp, Mus musculus
  siRNA target sequence for MOR159-1 (NM_146622.1,120-138).
gggcaatactctactaata

SEQ ID NO: 763921 - DNA, 19 bp, Mus musculus
  siRNA target sequence for MOR159-1 (NM_146622.1,122-140).
gcaatactctactaatact

SEQ ID NO: 763922 - DNA, 19 bp, Mus musculus
  siRNA target sequence for MOR159-1 (NM_146622.1,123-141).
caatactctactaatactt

SEQ ID NO: 763923 - DNA, 19 bp, Mus musculus
  siRNA target sequence for MOR159-1 (NM_146622.1,215-233).
ctttaacaaccatcactat

SEQ ID NO: 763924 - DNA, 19 bp, Mus musculus
  siRNA target sequence for MOR159-1 (NM_146622.1,262-280).
gtaaatcggagcatttcct

SEQ ID NO: 763925 - DNA, 19 bp, Mus musculus
  siRNA target sequence for MOR159-1 (NM_146622.1,270-288).
gagcatttcctataatcgt

SEQ ID NO: 763926 - DNA, 19 bp, Mus musculus
  siRNA target sequence for MOR159-1 (NM_146622.1,572-590).
cagtgcttaatgaaatgct

SEQ ID NO: 763927 - DNA, 19 bp, Mus musculus
  siRNA target sequence for MOR159-1 (NM_146622.1,577-595).
cttaatgaaatgctaatct

SEQ ID NO: 763928 - DNA, 19 bp, Mus musculus
  siRNA target sequence for MOR159-1 (NM_146622.1,616-634).
gtgggtagccccttcttct

SEQ ID NO: 763929 - DNA, 19 bp, Mus musculus
  siRNA target sequence for MOR159-1 (NM_146622.1,641-659).
ggggttcttatgttcgaat

SEQ ID NO: 763930 - DNA, 19 bp, Mus musculus
  siRNA target sequence for MOR159-1 (NM_146622.1,642-660).
gggttcttatgttcgaata

SEQ ID NO: 763931 - DNA, 19 bp, Mus musculus
  siRNA target sequence for MOR159-1 (NM_146622.1,755-773).
gcactttggctagaatgta

SEQ ID NO: 763932 - DNA, 19 bp, Mus musculus
  siRNA target sequence for MOR138-3 (NM_146623.1,40-58).
ctcttgggtatctctacta

SEQ ID NO: 763933 - DNA, 19 bp, Mus musculus
  siRNA target sequence for MOR138-3 (NM_146623.1,119-137).
ctggcaatttttttatcgt

SEQ ID NO: 763934 - DNA, 19 bp, Mus musculus
  siRNA target sequence for MOR138-3 (NM_146623.1,232-250).
gttcccaagatgttacaaa

SEQ ID NO: 763935 - DNA, 19 bp, Mus musculus
  siRNA target sequence for MOR138-3 (NM_146623.1,237-255).
caagatgttacaaaacatt

SEQ ID NO: 763936 - DNA, 19 bp, Mus musculus
  siRNA target sequence for MOR138-3 (NM_146623.1,263-281).
ctacaaaggtcatttccta

SEQ ID NO: 763937 - DNA, 19 bp, Mus musculus
  siRNA target sequence for MOR138-3 (NM_146623.1,286-304).
ggctgcttagcccaaacat

SEQ ID NO: 763938 - DNA, 19 bp, Mus musculus
  siRNA target sequence for MOR138-3 (NM_146623.1,287-305).
gctgcttagcccaaacata

SEQ ID NO: 763939 - DNA, 19 bp, Mus musculus
  siRNA target sequence for MOR138-3 (NM_146623.1,317-335).
gctttgcagccatggaaaa

SEQ ID NO: 763940 - DNA, 19 bp, Mus musculus
  siRNA target sequence for MOR138-3 (NM_146623.1,391-409).
cgttactcctcaatactga

SEQ ID NO: 763941 - DNA, 19 bp, Mus musculus
  siRNA target sequence for MOR138-3 (NM_146623.1,429-447).
gatggtggctctatgtcat

SEQ ID NO: 763942 - DNA, 19 bp, Mus musculus
  siRNA target sequence for MOR138-3 (NM_146623.1,483-501).
cctcatgggcagactgata

SEQ ID NO: 763943 - DNA, 19 bp, Mus musculus
  siRNA target sequence for MOR138-3 (NM_146623.1,625-643).
ggagctctggctttcatca

SEQ ID NO: 763944 - DNA, 19 bp, Mus musculus
  siRNA target sequence for MOR138-3 (NM_146623.1,763-781).
ctcacatgggtctatttca

SEQ ID NO: 763945 - DNA, 19 bp, Mus musculus
  siRNA target sequence for MOR134-1 (NM_146624.1,85-103).
ggcatctttttggtcatat

SEQ ID NO: 763946 - DNA, 19 bp, Mus musculus
  siRNA target sequence for MOR134-1 (NM_146624.1,202-220).
ctcactgacatgtgtttat

SEQ ID NO: 763947 - DNA, 19 bp, Mus musculus
  siRNA target sequence for MOR134-1 (NM_146624.1,235-253).
cctaggatgctggtaaaca

SEQ ID NO: 763948 - DNA, 19 bp, Mus musculus
  siRNA target sequence for MOR134-1 (NM_146624.1,236-254).
ctaggatgctggtaaacat

SEQ ID NO: 763949 - DNA, 19 bp, Mus musculus
  siRNA target sequence for MOR134-1 (NM_146624.1,290-308).
gcctgtctcaaatctattt

SEQ ID NO: 763950 - DNA, 19 bp, Mus musculus
  siRNA target sequence for MOR134-1 (NM_146624.1,445-463).
ctattccttgcccattcat

SEQ ID NO: 763951 - DNA, 19 bp, Mus musculus
  siRNA target sequence for MOR134-1 (NM_146624.1,538-556).
gaactgcttcccatgttga

SEQ ID NO: 763952 - DNA, 19 bp, Mus musculus
  siRNA target sequence for MOR134-1 (NM_146624.1,600-618).
ctactggggaggagcatta

SEQ ID NO: 763953 - DNA, 19 bp, Mus musculus
  siRNA target sequence for MOR134-1 (NM_146624.1,630-648).
ccctttgttaatcattgtt

SEQ ID NO: 763954 - DNA, 19 bp, Mus musculus
  siRNA target sequence for MOR134-1 (NM_146624.1,636-654).
gttaatcattgtttcatat

SEQ ID NO: 763955 - DNA, 19 bp, Mus musculus
  siRNA target sequence for MOR134-1 (NM_146624.1,763-781).
gctattggggtgtatttca

SEQ ID NO: 763956 - DNA, 19 bp, Mus musculus
  siRNA target sequence for MOR134-1 (NM_146624.1,764-782).
ctattggggtgtatttcat

SEQ ID NO: 763957 - DNA, 19 bp, Mus musculus
  siRNA target sequence for MOR134-1 (NM_146624.1,769-787).
ggggtgtatttcattccat

SEQ ID NO: 763958 - DNA, 19 bp, Mus musculus
  siRNA target sequence for MOR134-1 (NM_146624.1,800-818).
cagctagcagggataggat

SEQ ID NO: 763959 - DNA, 19 bp, Mus musculus
  siRNA target sequence for MOR138-2 (NM_146625.1,4-22).
gaaggagttaaccaaacta

SEQ ID NO: 763960 - DNA, 19 bp, Mus musculus
  siRNA target sequence for MOR138-2 (NM_146625.1,15-33).
ccaaactaggtttgtttct

SEQ ID NO: 763961 - DNA, 19 bp, Mus musculus
  siRNA target sequence for MOR138-2 (NM_146625.1,59-77).
ctcggcctgaggaccaaaa

SEQ ID NO: 763962 - DNA, 19 bp, Mus musculus
  siRNA target sequence for MOR138-2 (NM_146625.1,69-87).
ggaccaaaaaccactgttt

SEQ ID NO: 763963 - DNA, 19 bp, Mus musculus
  siRNA target sequence for MOR138-2 (NM_146625.1,70-88).
gaccaaaaaccactgttta

SEQ ID NO: 763964 - DNA, 19 bp, Mus musculus
  siRNA target sequence for MOR138-2 (NM_146625.1,201-219).
gtctttaactgacatttgt

SEQ ID NO: 763965 - DNA, 19 bp, Mus musculus
  siRNA target sequence for MOR138-2 (NM_146625.1,211-229).
gacatttgtttcactacaa

SEQ ID NO: 763966 - DNA, 19 bp, Mus musculus
  siRNA target sequence for MOR138-2 (NM_146625.1,315-333).
ctatgctttgggtaacagt

SEQ ID NO: 763967 - DNA, 19 bp, Mus musculus
  siRNA target sequence for MOR138-2 (NM_146625.1,319-337).
gctttgggtaacagtgata

SEQ ID NO: 763968 - DNA, 19 bp, Mus musculus
  siRNA target sequence for MOR138-2 (NM_146625.1,383-401).
gcaaccccttccactatgt

SEQ ID NO: 763969 - DNA, 19 bp, Mus musculus
  siRNA target sequence for MOR138-2 (NM_146625.1,430-448).
ctactggtgaccttctctt

SEQ ID NO: 763970 - DNA, 19 bp, Mus musculus
  siRNA target sequence for MOR138-2 (NM_146625.1,477-495).
gcacacacttttacttaat

SEQ ID NO: 763971 - DNA, 19 bp, Mus musculus
  siRNA target sequence for MOR138-2 (NM_146625.1,541-559).
gacctcagtcctctgttaa

SEQ ID NO: 763972 - DNA, 19 bp, Mus musculus
  siRNA target sequence for MOR138-2 (NM_146625.1,544-562).
ctcagtcctctgttaaaat

SEQ ID NO: 763973 - DNA, 19 bp, Mus musculus
  siRNA target sequence for MOR138-2 (NM_146625.1,546-564).
cagtcctctgttaaaatta

SEQ ID NO: 763974 - DNA, 19 bp, Mus musculus
  siRNA target sequence for MOR138-2 (NM_146625.1,570-588).
ctcctccacatttgtcaat

SEQ ID NO: 763975 - DNA, 19 bp, Mus musculus
  siRNA target sequence for MOR138-2 (NM_146625.1,744-762).
ggtaaccctcttttatgga

SEQ ID NO: 763976 - DNA, 19 bp, Mus musculus
  siRNA target sequence for MOR138-2 (NM_146625.1,764-782).
gcatcttctatgtgtattt

SEQ ID NO: 763977 - DNA, 19 bp, Mus musculus
  siRNA target sequence for MOR138-2 (NM_146625.1,765-783).
catcttctatgtgtattta

SEQ ID NO: 763978 - DNA, 19 bp, Mus musculus
  siRNA target sequence for MOR138-2 (NM_146625.1,784-802).
cagcctgtgtctacttata

SEQ ID NO: 763979 - DNA, 19 bp, Mus musculus
  siRNA target sequence for MOR138-2 (NM_146625.1,786-804).
gcctgtgtctacttatact

SEQ ID NO: 763980 - DNA, 19 bp, Mus musculus
  siRNA target sequence for MOR138-2 (NM_146625.1,792-810).
gtctacttatactgtcaaa

SEQ ID NO: 763981 - DNA, 19 bp, Mus musculus
  siRNA target sequence for MOR138-2 (NM_146625.1,814-832).
catatagcaacaattgtct

SEQ ID NO: 763982 - DNA, 19 bp, Mus musculus
  siRNA target sequence for MOR138-2 (NM_146625.1,824-842).
caattgtctacacagtttt

SEQ ID NO: 763983 - DNA, 19 bp, Mus musculus
  siRNA target sequence for MOR138-2 (NM_146625.1,829-847).
gtctacacagttttgtcat

SEQ ID NO: 763984 - DNA, 19 bp, Mus musculus
  siRNA target sequence for MOR136-13 (NM_146627.1,288-306).
gtgtatagcacagatgtat

SEQ ID NO: 763985 - DNA, 19 bp, Mus musculus
  siRNA target sequence for MOR136-13 (NM_146627.1,321-339).
cactgatctggacaacttt

SEQ ID NO: 763986 - DNA, 19 bp, Mus musculus
  siRNA target sequence for MOR136-13 (NM_146627.1,422-440).
gtatcttactcgtagctat

SEQ ID NO: 763987 - DNA, 19 bp, Mus musculus
  siRNA target sequence for MOR136-13 (NM_146627.1,666-684).
ggccaccattctgaaagtt

SEQ ID NO: 763988 - DNA, 19 bp, Mus musculus
  siRNA target sequence for MOR136-13 (NM_146627.1,742-760).
gtgtctctgtattatggta

SEQ ID NO: 763989 - DNA, 19 bp, Mus musculus
  siRNA target sequence for MOR136-12 (NM_146628.1,58-76).
cgaccagagaaccaagtta

SEQ ID NO: 763990 - DNA, 19 bp, Mus musculus
  siRNA target sequence for MOR136-12 (NM_146628.1,59-77).
gaccagagaaccaagttat

SEQ ID NO: 763991 - DNA, 19 bp, Mus musculus
  siRNA target sequence for MOR136-12 (NM_146628.1,64-82).
gagaaccaagttatttact

SEQ ID NO: 763992 - DNA, 19 bp, Mus musculus
  siRNA target sequence for MOR136-12 (NM_146628.1,575-593).
ccaccatcaatgatcttat

SEQ ID NO: 763993 - DNA, 19 bp, Mus musculus
  siRNA target sequence for MOR218-2 (NM_146632.1,323-341).
cctggggtgaggtagctat

SEQ ID NO: 763994 - DNA, 19 bp, Mus musculus
  siRNA target sequence for MOR218-2 (NM_146632.1,324-342).
ctggggtgaggtagctatt

SEQ ID NO: 763995 - DNA, 19 bp, Mus musculus
  siRNA target sequence for MOR218-2 (NM_146632.1,426-444).
gtgggcagtgacaagtgta

SEQ ID NO: 763996 - DNA, 19 bp, Mus musculus
  siRNA target sequence for MOR218-2 (NM_146632.1,583-601).
gtagtaatagggatggtta

SEQ ID NO: 763997 - DNA, 19 bp, Mus musculus
  siRNA target sequence for MOR218-2 (NM_146632.1,586-604).
gtaatagggatggttagtt

SEQ ID NO: 763998 - DNA, 19 bp, Mus musculus
  siRNA target sequence for MOR218-2 (NM_146632.1,592-610).
gggatggttagtttcatga

SEQ ID NO: 763999 - DNA, 19 bp, Mus musculus
  siRNA target sequence for MOR177-10 (NM_146637.1,4-22).
gacaaggaaaactgttctt

SEQ ID NO: 764000 - DNA, 19 bp, Mus musculus
  siRNA target sequence for MOR177-10 (NM_146637.1,6-24).
caaggaaaactgttcttca

SEQ ID NO: 764001 - DNA, 19 bp, Mus musculus
  siRNA target sequence for MOR177-10 (NM_146637.1,93-111).
cttagctattaatcttatt

SEQ ID NO: 764002 - DNA, 19 bp, Mus musculus
  siRNA target sequence for MOR177-10 (NM_146637.1,98-116).
ctattaatcttattgttct

SEQ ID NO: 764003 - DNA, 19 bp, Mus musculus
  siRNA target sequence for MOR177-10 (NM_146637.1,233-251).
ggtccaagatgttgataga

SEQ ID NO: 764004 - DNA, 19 bp, Mus musculus
  siRNA target sequence for MOR177-10 (NM_146637.1,250-268).
gacattttcagcaagtaca

SEQ ID NO: 764005 - DNA, 19 bp, Mus musculus
  siRNA target sequence for MOR177-10 (NM_146637.1,272-290).
ccatcccattgttgtttgt

SEQ ID NO: 764006 - DNA, 19 bp, Mus musculus
  siRNA target sequence for MOR177-10 (NM_146637.1,335-353).
gtgtgttgccagcagtaat

SEQ ID NO: 764007 - DNA, 19 bp, Mus musculus
  siRNA target sequence for MOR177-10 (NM_146637.1,387-405).
cgtgatatatgccatagat

SEQ ID NO: 764008 - DNA, 19 bp, Mus musculus
  siRNA target sequence for MOR177-10 (NM_146637.1,388-406).
gtgatatatgccatagata

SEQ ID NO: 764009 - DNA, 19 bp, Mus musculus
  siRNA target sequence for MOR177-10 (NM_146637.1,397-415).
gccatagatatgtccaata

SEQ ID NO: 764010 - DNA, 19 bp, Mus musculus
  siRNA target sequence for MOR177-10 (NM_146637.1,399-417).
catagatatgtccaataga

SEQ ID NO: 764011 - DNA, 19 bp, Mus musculus
  siRNA target sequence for MOR177-10 (NM_146637.1,416-434).
gagtatgctaccaattcct

SEQ ID NO: 764012 - DNA, 19 bp, Mus musculus
  siRNA target sequence for MOR177-10 (NM_146637.1,506-524).
gtgagtcacatgagattaa

SEQ ID NO: 764013 - DNA, 19 bp, Mus musculus
  siRNA target sequence for MOR177-10 (NM_146637.1,544-562).
cctcctatactgttactgt

SEQ ID NO: 764014 - DNA, 19 bp, Mus musculus
  siRNA target sequence for MOR177-10 (NM_146637.1,577-595).
cagttcaatgagttaatga

SEQ ID NO: 764015 - DNA, 19 bp, Mus musculus
  siRNA target sequence for MOR177-10 (NM_146637.1,586-604).
gagttaatgatattcacta

SEQ ID NO: 764016 - DNA, 19 bp, Mus musculus
  siRNA target sequence for MOR177-10 (NM_146637.1,656-674).
gctctattatcttatcagt

SEQ ID NO: 764017 - DNA, 19 bp, Mus musculus
  siRNA target sequence for MOR177-10 (NM_146637.1,819-837).
gacctccttgttttatact

SEQ ID NO: 764018 - DNA, 19 bp, Mus musculus
  siRNA target sequence for MOR177-10 (NM_146637.1,900-918).
cttgcaaaacctggaaaat

SEQ ID NO: 764019 - DNA, 19 bp, Mus musculus
  siRNA target sequence for MOR177-9 (NM_146638.1,36-54).
cattttcttagggattact

SEQ ID NO: 764020 - DNA, 19 bp, Mus musculus
  siRNA target sequence for MOR177-9 (NM_146638.1,75-93).
ggccctgttcaccacattt

SEQ ID NO: 764021 - DNA, 19 bp, Mus musculus
  siRNA target sequence for MOR177-9 (NM_146638.1,78-96).
cctgttcaccacatttcta

SEQ ID NO: 764022 - DNA, 19 bp, Mus musculus
  siRNA target sequence for MOR177-9 (NM_146638.1,81-99).
gttcaccacatttctagtt

SEQ ID NO: 764023 - DNA, 19 bp, Mus musculus
  siRNA target sequence for MOR177-9 (NM_146638.1,84-102).
caccacatttctagttgtt

SEQ ID NO: 764024 - DNA, 19 bp, Mus musculus
  siRNA target sequence for MOR177-9 (NM_146638.1,89-107).
catttctagttgtttacct

SEQ ID NO: 764025 - DNA, 19 bp, Mus musculus
  siRNA target sequence for MOR177-9 (NM_146638.1,118-136).
cttgcgaatcttggaatta

SEQ ID NO: 764026 - DNA, 19 bp, Mus musculus
  siRNA target sequence for MOR177-9 (NM_146638.1,121-139).
gcgaatcttggaattatca

SEQ ID NO: 764027 - DNA, 19 bp, Mus musculus
  siRNA target sequence for MOR177-9 (NM_146638.1,455-473).
caacaacagatggtttgat

SEQ ID NO: 764028 - DNA, 19 bp, Mus musculus
  siRNA target sequence for MOR177-7 (NM_146640.1,39-57).
ctgttcagccactgagttt

SEQ ID NO: 764029 - DNA, 19 bp, Mus musculus
  siRNA target sequence for MOR177-7 (NM_146640.1,74-92).
ccaataatcctgtgatcaa

SEQ ID NO: 764030 - DNA, 19 bp, Mus musculus
  siRNA target sequence for MOR177-7 (NM_146640.1,121-139).
gtttatctcataattctta

SEQ ID NO: 764031 - DNA, 19 bp, Mus musculus
  siRNA target sequence for MOR177-7 (NM_146640.1,127-145).
ctcataattcttattgaaa

SEQ ID NO: 764032 - DNA, 19 bp, Mus musculus
  siRNA target sequence for MOR177-7 (NM_146640.1,225-243).
ctctgatatctgttattct

SEQ ID NO: 764033 - DNA, 19 bp, Mus musculus
  siRNA target sequence for MOR177-7 (NM_146640.1,268-286).
gtgggccttatattcaaga

SEQ ID NO: 764034 - DNA, 19 bp, Mus musculus
  siRNA target sequence for MOR177-7 (NM_146640.1,316-334).
gtgcagttctttatcttct

SEQ ID NO: 764035 - DNA, 19 bp, Mus musculus
  siRNA target sequence for MOR177-7 (NM_146640.1,429-447).
gtccagagtggtatgctat

SEQ ID NO: 764036 - DNA, 19 bp, Mus musculus
  siRNA target sequence for MOR177-7 (NM_146640.1,571-589).
ctcctattactatcttgtt

SEQ ID NO: 764037 - DNA, 19 bp, Mus musculus
  siRNA target sequence for MOR177-7 (NM_146640.1,596-614).
cagaggtcaatgaactagt

SEQ ID NO: 764038 - DNA, 19 bp, Mus musculus
  siRNA target sequence for MOR177-7 (NM_146640.1,600-618).
ggtcaatgaactagttata

SEQ ID NO: 764039 - DNA, 19 bp, Mus musculus
  siRNA target sequence for MOR177-7 (NM_146640.1,601-619).
gtcaatgaactagttatat

SEQ ID NO: 764040 - DNA, 19 bp, Mus musculus
  siRNA target sequence for MOR177-7 (NM_146640.1,623-641).
ccctatttgggtttattga

SEQ ID NO: 764041 - DNA, 19 bp, Mus musculus
  siRNA target sequence for MOR177-7 (NM_146640.1,840-858).
gacctcattattctatact

SEQ ID NO: 764042 - DNA, 19 bp, Mus musculus
  siRNA target sequence for MOR177-7 (NM_146640.1,906-924).
ggatgttaaagcaagtgta

SEQ ID NO: 764043 - DNA, 19 bp, Mus musculus
  siRNA target sequence for MOR174-11 (NM_146641.1,10-28).
gtggtatcttctaacagaa

SEQ ID NO: 764044 - DNA, 19 bp, Mus musculus
  siRNA target sequence for MOR174-11 (NM_146641.1,78-96).
gttggccttttcagaattt

SEQ ID NO: 764045 - DNA, 19 bp, Mus musculus
  siRNA target sequence for MOR174-11 (NM_146641.1,124-142).
gtattcttgatcatgtaca

SEQ ID NO: 764046 - DNA, 19 bp, Mus musculus
  siRNA target sequence for MOR174-11 (NM_146641.1,279-297).
gttagacctcttgattgta

SEQ ID NO: 764047 - DNA, 19 bp, Mus musculus
  siRNA target sequence for MOR174-11 (NM_146641.1,303-321).
caaatcaatctcctttgaa

SEQ ID NO: 764048 - DNA, 19 bp, Mus musculus
  siRNA target sequence for MOR174-11 (NM_146641.1,323-341).
gatgcatggctcaatattt

SEQ ID NO: 764049 - DNA, 19 bp, Mus musculus
  siRNA target sequence for MOR174-11 (NM_146641.1,343-361).
cttgggtgtacatttgtga

SEQ ID NO: 764050 - DNA, 19 bp, Mus musculus
  siRNA target sequence for MOR174-11 (NM_146641.1,458-476).
gctccctcctggttgtaat

SEQ ID NO: 764051 - DNA, 19 bp, Mus musculus
  siRNA target sequence for MOR174-11 (NM_146641.1,459-477).
ctccctcctggttgtaatt

SEQ ID NO: 764052 - DNA, 19 bp, Mus musculus
  siRNA target sequence for MOR174-11 (NM_146641.1,462-480).
cctcctggttgtaattact

SEQ ID NO: 764053 - DNA, 19 bp, Mus musculus
  siRNA target sequence for MOR174-11 (NM_146641.1,468-486).
ggttgtaattacttacata

SEQ ID NO: 764054 - DNA, 19 bp, Mus musculus
  siRNA target sequence for MOR174-11 (NM_146641.1,483-501).
catatgggctgggatattt

SEQ ID NO: 764055 - DNA, 19 bp, Mus musculus
  siRNA target sequence for MOR174-11 (NM_146641.1,504-522).
ctcaactctcacatatatt

SEQ ID NO: 764056 - DNA, 19 bp, Mus musculus
  siRNA target sequence for MOR174-11 (NM_146641.1,523-541).
cttttgcagctctcttact

SEQ ID NO: 764057 - DNA, 19 bp, Mus musculus
  siRNA target sequence for MOR174-11 (NM_146641.1,628-646).
gcatgcctggtcatttcca

SEQ ID NO: 764058 - DNA, 19 bp, Mus musculus
  siRNA target sequence for MOR174-11 (NM_146641.1,662-680).
gttgcctcttgatcatcat

SEQ ID NO: 764059 - DNA, 19 bp, Mus musculus
  siRNA target sequence for MOR174-11 (NM_146641.1,733-751).
gccttccgaaaagcatttt

SEQ ID NO: 764060 - DNA, 19 bp, Mus musculus
  siRNA target sequence for MOR174-11 (NM_146641.1,788-806).
gtcatgggatcgttcttct

SEQ ID NO: 764061 - DNA, 19 bp, Mus musculus
  siRNA target sequence for MOR174-11 (NM_146641.1,793-811).
gggatcgttcttctactat

SEQ ID NO: 764062 - DNA, 19 bp, Mus musculus
  siRNA target sequence for MOR174-11 (NM_146641.1,794-812).
ggatcgttcttctactata

SEQ ID NO: 764063 - DNA, 19 bp, Mus musculus
  siRNA target sequence for MOR174-11 (NM_146641.1,827-845).
ccaaaagttcactgtttct

SEQ ID NO: 764064 - DNA, 19 bp, Mus musculus
  siRNA target sequence for MOR174-11 (NM_146641.1,945-963).
gttaatctacctgaaatgt

SEQ ID NO: 764065 - DNA, 19 bp, Mus musculus
  siRNA target sequence for MOR174-10 (NM_146643.1,79-97).
gttcccctcttcttgttgt

SEQ ID NO: 764066 - DNA, 19 bp, Mus musculus
  siRNA target sequence for MOR174-10 (NM_146643.1,127-145).
gggaacatagggatgatga

SEQ ID NO: 764067 - DNA, 19 bp, Mus musculus
  siRNA target sequence for MOR174-10 (NM_146643.1,128-146).
ggaacatagggatgatgat

SEQ ID NO: 764068 - DNA, 19 bp, Mus musculus
  siRNA target sequence for MOR174-10 (NM_146643.1,129-147).
gaacatagggatgatgata

SEQ ID NO: 764069 - DNA, 19 bp, Mus musculus
  siRNA target sequence for MOR174-10 (NM_146643.1,141-159).
gatgataatcatcaagatt

SEQ ID NO: 764070 - DNA, 19 bp, Mus musculus
  siRNA target sequence for MOR174-10 (NM_146643.1,255-273).
gaaccttgttgtagaagat

SEQ ID NO: 764071 - DNA, 19 bp, Mus musculus
  siRNA target sequence for MOR174-10 (NM_146643.1,265-283).
gtagaagataggaccattt

SEQ ID NO: 764072 - DNA, 19 bp, Mus musculus
  siRNA target sequence for MOR174-10 (NM_146643.1,293-311).
gatgtataatgcagttctt

SEQ ID NO: 764073 - DNA, 19 bp, Mus musculus
  siRNA target sequence for MOR174-10 (NM_146643.1,331-349).
gtgactgaactaattctat

SEQ ID NO: 764074 - DNA, 19 bp, Mus musculus
  siRNA target sequence for MOR174-10 (NM_146643.1,333-351).
gactgaactaattctattt

SEQ ID NO: 764075 - DNA, 19 bp, Mus musculus
  siRNA target sequence for MOR174-10 (NM_146643.1,435-453).
gctagtgcttggatcatat

SEQ ID NO: 764076 - DNA, 19 bp, Mus musculus
  siRNA target sequence for MOR174-10 (NM_146643.1,483-501).
cacctgttctgccctaaat

SEQ ID NO: 764077 - DNA, 19 bp, Mus musculus
  siRNA target sequence for MOR174-10 (NM_146643.1,485-503).
cctgttctgccctaaattt

SEQ ID NO: 764078 - DNA, 19 bp, Mus musculus
  siRNA target sequence for MOR174-10 (NM_146643.1,486-504).
ctgttctgccctaaattta

SEQ ID NO: 764079 - DNA, 19 bp, Mus musculus
  siRNA target sequence for MOR174-10 (NM_146643.1,488-506).
gttctgccctaaatttata

SEQ ID NO: 764080 - DNA, 19 bp, Mus musculus
  siRNA target sequence for MOR174-10 (NM_146643.1,511-529).
cggggtttcaacacaatca

SEQ ID NO: 764081 - DNA, 19 bp, Mus musculus
  siRNA target sequence for MOR174-10 (NM_146643.1,513-531).
gggtttcaacacaatcaat

SEQ ID NO: 764082 - DNA, 19 bp, Mus musculus
  siRNA target sequence for MOR174-10 (NM_146643.1,515-533).
gtttcaacacaatcaatca

SEQ ID NO: 764083 - DNA, 19 bp, Mus musculus
  siRNA target sequence for MOR174-10 (NM_146643.1,591-609).
ccagttactgctttttatt

SEQ ID NO: 764084 - DNA, 19 bp, Mus musculus
  siRNA target sequence for MOR174-10 (NM_146643.1,642-660).
catcattcttacatcgtat

SEQ ID NO: 764085 - DNA, 19 bp, Mus musculus
  siRNA target sequence for MOR174-10 (NM_146643.1,670-688).
gttgtcactgccctgaaaa

SEQ ID NO: 764086 - DNA, 19 bp, Mus musculus
  siRNA target sequence for MOR174-10 (NM_146643.1,698-716).
ctagtggacaccgaaaagt

SEQ ID NO: 764087 - DNA, 19 bp, Mus musculus
  siRNA target sequence for MOR174-10 (NM_146643.1,701-719).
gtggacaccgaaaagtctt

SEQ ID NO: 764088 - DNA, 19 bp, Mus musculus
  siRNA target sequence for MOR174-10 (NM_146643.1,763-781).
ggaaccatattatttctct

SEQ ID NO: 764089 - DNA, 19 bp, Mus musculus
  siRNA target sequence for MOR174-10 (NM_146643.1,764-782).
gaaccatattatttctcta

SEQ ID NO: 764090 - DNA, 19 bp, Mus musculus
  siRNA target sequence for MOR174-10 (NM_146643.1,815-833).
ccgtcaaagtggcttcttt

SEQ ID NO: 764091 - DNA, 19 bp, Mus musculus
  siRNA target sequence for MOR174-10 (NM_146643.1,901-919).
gacacagtcagtaaattaa

SEQ ID NO: 764092 - DNA, 19 bp, Mus musculus
  siRNA target sequence for MOR181-1 (NM_146646.1,30-48).
caccttggtcaccgaattt

SEQ ID NO: 764093 - DNA, 19 bp, Mus musculus
  siRNA target sequence for MOR181-1 (NM_146646.1,108-126).
gacgttatatggcatgatt

SEQ ID NO: 764094 - DNA, 19 bp, Mus musculus
  siRNA target sequence for MOR181-1 (NM_146646.1,142-160).
ggcttgatgttgttaatta

SEQ ID NO: 764095 - DNA, 19 bp, Mus musculus
  siRNA target sequence for MOR181-1 (NM_146646.1,217-235).
gtagacctttgttattcct

SEQ ID NO: 764096 - DNA, 19 bp, Mus musculus
  siRNA target sequence for MOR181-1 (NM_146646.1,425-443).
ggagcctctgcatatggtt

SEQ ID NO: 764097 - DNA, 19 bp, Mus musculus
  siRNA target sequence for MOR181-1 (NM_146646.1,522-540).
caaaaatatcattaatcat

SEQ ID NO: 764098 - DNA, 19 bp, Mus musculus
  siRNA target sequence for MOR181-1 (NM_146646.1,578-596).
gtacggacacatccattaa

SEQ ID NO: 764099 - DNA, 19 bp, Mus musculus
  siRNA target sequence for MOR181-1 (NM_146646.1,631-649).
gagattatctgcttcttca

SEQ ID NO: 764100 - DNA, 19 bp, Mus musculus
  siRNA target sequence for MOR181-1 (NM_146646.1,690-708).
gaagattcgctctacaagt

SEQ ID NO: 764101 - DNA, 19 bp, Mus musculus
  siRNA target sequence for MOR181-1 (NM_146646.1,749-767).
cctccgtggccatctatca

SEQ ID NO: 764102 - DNA, 19 bp, Mus musculus
  siRNA target sequence for MOR181-1 (NM_146646.1,812-830).
cccccaacactgataaaat

SEQ ID NO: 764103 - DNA, 19 bp, Mus musculus
  siRNA target sequence for MOR181-1 (NM_146646.1,918-936).
gaaagctctaaggtctaaa

SEQ ID NO: 764104 - DNA, 19 bp, Mus musculus
  siRNA target sequence for MOR173-2 (NM_146647.1,895-913).
gcgtttaggaaaattatga

SEQ ID NO: 764105 - DNA, 19 bp, Mus musculus
  siRNA target sequence for MOR174-7 (NM_146648.1,46-64).
ctttcgggattttcagaat

SEQ ID NO: 764106 - DNA, 19 bp, Mus musculus
  siRNA target sequence for MOR174-7 (NM_146648.1,105-123).
gatatatacagttactcta

SEQ ID NO: 764107 - DNA, 19 bp, Mus musculus
  siRNA target sequence for MOR174-7 (NM_146648.1,239-257).
cacctaaactgctagaaat

SEQ ID NO: 764108 - DNA, 19 bp, Mus musculus
  siRNA target sequence for MOR174-7 (NM_146648.1,268-286).
gaggacaggacaatctctt

SEQ ID NO: 764109 - DNA, 19 bp, Mus musculus
  siRNA target sequence for MOR174-7 (NM_146648.1,397-415).
ctctacacagtttcaatgt

SEQ ID NO: 764110 - DNA, 19 bp, Mus musculus
  siRNA target sequence for MOR174-7 (NM_146648.1,435-453).
ccttgtagctggaacatat

SEQ ID NO: 764111 - DNA, 19 bp, Mus musculus
  siRNA target sequence for MOR174-7 (NM_146648.1,544-562).
gagtactctgccattctgt

SEQ ID NO: 764112 - DNA, 19 bp, Mus musculus
  siRNA target sequence for MOR174-7 (NM_146648.1,595-613).
gtggtatgtttaaccattt

SEQ ID NO: 764113 - DNA, 19 bp, Mus musculus
  siRNA target sequence for MOR174-7 (NM_146648.1,598-616).
gtatgtttaaccatttcta

SEQ ID NO: 764114 - DNA, 19 bp, Mus musculus
  siRNA target sequence for MOR174-7 (NM_146648.1,695-713).
ctaagggtggactccaaaa

SEQ ID NO: 764115 - DNA, 19 bp, Mus musculus
  siRNA target sequence for MOR174-7 (NM_146648.1,699-717).
gggtggactccaaaaagct

SEQ ID NO: 764116 - DNA, 19 bp, Mus musculus
  siRNA target sequence for MOR174-7 (NM_146648.1,700-718).
ggtggactccaaaaagctt

SEQ ID NO: 764117 - DNA, 19 bp, Mus musculus
  siRNA target sequence for MOR174-7 (NM_146648.1,787-805).
gtacccaattccaaaaact

SEQ ID NO: 764118 - DNA, 19 bp, Mus musculus
  siRNA target sequence for MOR174-7 (NM_146648.1,914-932).
gactcatgcacttgaaact

SEQ ID NO: 764119 - DNA, 19 bp, Mus musculus
  siRNA target sequence for MOR174-7 (NM_146648.1,927-945).
gaaacttcaagctcattca

SEQ ID NO: 764120 - DNA, 19 bp, Mus musculus
  siRNA target sequence for MOR173-1 (NM_146649.1,693-711).
ggccatttgtaaaataggt

SEQ ID NO: 764121 - DNA, 19 bp, Mus musculus
  siRNA target sequence for MOR267-8 (NM_146651.1,20-38).
cagtgataagtgagtttgt

SEQ ID NO: 764122 - DNA, 19 bp, Mus musculus
  siRNA target sequence for MOR267-8 (NM_146651.1,22-40).
gtgataagtgagtttgttt

SEQ ID NO: 764123 - DNA, 19 bp, Mus musculus
  siRNA target sequence for MOR267-8 (NM_146651.1,121-139).
ggcaatgccattattatga

SEQ ID NO: 764124 - DNA, 19 bp, Mus musculus
  siRNA target sequence for MOR267-8 (NM_146651.1,138-156).
gataattatcggtattgat

SEQ ID NO: 764125 - DNA, 19 bp, Mus musculus
  siRNA target sequence for MOR267-8 (NM_146651.1,454-472).
gggctgcttgtggcaataa

SEQ ID NO: 764126 - DNA, 19 bp, Mus musculus
  siRNA target sequence for MOR267-8 (NM_146651.1,512-530).
gagaagtagcccactattt

SEQ ID NO: 764127 - DNA, 19 bp, Mus musculus
  siRNA target sequence for MOR267-8 (NM_146651.1,573-591).
cactctgcatgacatagtt

SEQ ID NO: 764128 - DNA, 19 bp, Mus musculus
  siRNA target sequence for MOR267-8 (NM_146651.1,575-593).
ctctgcatgacatagttaa

SEQ ID NO: 764129 - DNA, 19 bp, Mus musculus
  siRNA target sequence for MOR267-8 (NM_146651.1,580-598).
catgacatagttaacttta

SEQ ID NO: 764130 - DNA, 19 bp, Mus musculus
  siRNA target sequence for MOR267-8 (NM_146651.1,600-618).
catcagctcactggttatt

SEQ ID NO: 764131 - DNA, 19 bp, Mus musculus
  siRNA target sequence for MOR267-8 (NM_146651.1,631-649).
ggcttggttttcatctctt

SEQ ID NO: 764132 - DNA, 19 bp, Mus musculus
  siRNA target sequence for MOR267-8 (NM_146651.1,810-828).
ccagctgatctcagtaact

SEQ ID NO: 764133 - DNA, 19 bp, Mus musculus
  siRNA target sequence for MOR267-8 (NM_146651.1,859-877).
gtggtgtataccttgagaa

SEQ ID NO: 764134 - DNA, 19 bp, Mus musculus
  siRNA target sequence for Olfr13 (NM_146652.1,9-27).
caatatgacattaatcaca

SEQ ID NO: 764135 - DNA, 19 bp, Mus musculus
  siRNA target sequence for Olfr13 (NM_146652.1,17-35).
cattaatcacagagttcat

SEQ ID NO: 764136 - DNA, 19 bp, Mus musculus
  siRNA target sequence for Olfr13 (NM_146652.1,240-258).
gctggtgaaccttttagat

SEQ ID NO: 764137 - DNA, 19 bp, Mus musculus
  siRNA target sequence for Olfr13 (NM_146652.1,451-469).
ggtgttctgctgtctttga

SEQ ID NO: 764138 - DNA, 19 bp, Mus musculus
  siRNA target sequence for Olfr13 (NM_146652.1,468-486).
gatccacctcgtgttactt

SEQ ID NO: 764139 - DNA, 19 bp, Mus musculus
  siRNA target sequence for Olfr13 (NM_146652.1,621-639).
ggggccattctcctcaatt

SEQ ID NO: 764140 - DNA, 19 bp, Mus musculus
  siRNA target sequence for Olfr13 (NM_146652.1,875-893).
ggaattctgacgtgaagaa

SEQ ID NO: 764141 - DNA, 19 bp, Mus musculus
  siRNA target sequence for Olfr13 (NM_146652.1,876-894).
gaattctgacgtgaagaat

SEQ ID NO: 764142 - DNA, 19 bp, Mus musculus
  siRNA target sequence for Olfr13 (NM_146652.1,881-899).
ctgacgtgaagaatacatt

SEQ ID NO: 764143 - DNA, 19 bp, Mus musculus
  siRNA target sequence for Olfr13 (NM_146652.1,883-901).
gacgtgaagaatacattga

SEQ ID NO: 764144 - DNA, 19 bp, Mus musculus
  siRNA target sequence for Olfr13 (NM_146652.1,885-903).
cgtgaagaatacattgaaa

SEQ ID NO: 764145 - DNA, 19 bp, Mus musculus
  siRNA target sequence for MOR261-5 (NM_146653.1,288-306).
catgatgcagacttaccta

SEQ ID NO: 764146 - DNA, 19 bp, Mus musculus
  siRNA target sequence for MOR261-5 (NM_146653.1,291-309).
gatgcagacttacctattt

SEQ ID NO: 764147 - DNA, 19 bp, Mus musculus
  siRNA target sequence for MOR261-3 (NM_146655.1,275-293).
ccttcattccatgtataat

SEQ ID NO: 764148 - DNA, 19 bp, Mus musculus
  siRNA target sequence for MOR261-3 (NM_146655.1,323-341).
ccatagagtgcctgatttt

SEQ ID NO: 764149 - DNA, 19 bp, Mus musculus
  siRNA target sequence for MOR261-2 (NM_146656.1,275-293).
ccttcattctgtgcataat

SEQ ID NO: 764150 - DNA, 19 bp, Mus musculus
  siRNA target sequence for MOR177-3 (NM_146659.1,81-99).
gttcatagtgtttctcatt

SEQ ID NO: 764151 - DNA, 19 bp, Mus musculus
  siRNA target sequence for MOR177-3 (NM_146659.1,127-145).
gtaggaatgatcacattga

SEQ ID NO: 764152 - DNA, 19 bp, Mus musculus
  siRNA target sequence for MOR177-3 (NM_146659.1,259-277).
gaagataataatccaattt

SEQ ID NO: 764153 - DNA, 19 bp, Mus musculus
  siRNA target sequence for MOR177-3 (NM_146659.1,295-313).
ctccaactcctgattgtct

SEQ ID NO: 764154 - DNA, 19 bp, Mus musculus
  siRNA target sequence for MOR177-3 (NM_146659.1,397-415).
gctgtggacatgtctagta

SEQ ID NO: 764155 - DNA, 19 bp, Mus musculus
  siRNA target sequence for MOR177-3 (NM_146659.1,418-436).
gtttgttaccagtttttaa

SEQ ID NO: 764156 - DNA, 19 bp, Mus musculus
  siRNA target sequence for MOR177-3 (NM_146659.1,458-476).
ctatagatggtttcataca

SEQ ID NO: 764157 - DNA, 19 bp, Mus musculus
  siRNA target sequence for MOR177-3 (NM_146659.1,506-524).
gccactctactcagatcaa

SEQ ID NO: 764158 - DNA, 19 bp, Mus musculus
  siRNA target sequence for MOR177-3 (NM_146659.1,673-691).
gtcttaaagattagttcta

SEQ ID NO: 764159 - DNA, 19 bp, Mus musculus
  siRNA target sequence for MOR177-3 (NM_146659.1,811-829).
gataaaatgacatccatat

SEQ ID NO: 764160 - DNA, 19 bp, Mus musculus
  siRNA target sequence for MOR177-2 (NM_146660.1,253-271).
ctaatggtcaagcagaaaa

SEQ ID NO: 764161 - DNA, 19 bp, Mus musculus
  siRNA target sequence for MOR177-2 (NM_146660.1,408-426).
gtccagtaaattttgctat

SEQ ID NO: 764162 - DNA, 19 bp, Mus musculus
  siRNA target sequence for MOR177-2 (NM_146660.1,448-466).
ctagtaggaatgatagata

SEQ ID NO: 764163 - DNA, 19 bp, Mus musculus
  siRNA target sequence for MOR177-2 (NM_146660.1,469-487).
gtgatacacactataatga

SEQ ID NO: 764164 - DNA, 19 bp, Mus musculus
  siRNA target sequence for MOR177-2 (NM_146660.1,575-593).
cacagaccaatgagttaat

SEQ ID NO: 764165 - DNA, 19 bp, Mus musculus
  siRNA target sequence for MOR177-2 (NM_146660.1,586-604).
gagttaatcacctttgtta

SEQ ID NO: 764166 - DNA, 19 bp, Mus musculus
  siRNA target sequence for MOR177-2 (NM_146660.1,588-606).
gttaatcacctttgttatt

SEQ ID NO: 764167 - DNA, 19 bp, Mus musculus
  siRNA target sequence for MOR264-6 (NM_146661.1,79-97).
gttcccaacttgcaagaat

SEQ ID NO: 764168 - DNA, 19 bp, Mus musculus
  siRNA target sequence for MOR264-6 (NM_146661.1,111-129).
gtttttgatggtctatcta

SEQ ID NO: 764169 - DNA, 19 bp, Mus musculus
  siRNA target sequence for MOR264-6 (NM_146661.1,117-135).
gatggtctatctaattatt

SEQ ID NO: 764170 - DNA, 19 bp, Mus musculus
  siRNA target sequence for MOR264-6 (NM_146661.1,144-162).
caatagcctcattatcata

SEQ ID NO: 764171 - DNA, 19 bp, Mus musculus
  siRNA target sequence for MOR264-6 (NM_146661.1,150-168).
cctcattatcataattata

SEQ ID NO: 764172 - DNA, 19 bp, Mus musculus
  siRNA target sequence for MOR264-6 (NM_146661.1,255-273).
gccaaggttattaacagat

SEQ ID NO: 764173 - DNA, 19 bp, Mus musculus
  siRNA target sequence for MOR264-6 (NM_146661.1,260-278).
ggttattaacagatctcta

SEQ ID NO: 764174 - DNA, 19 bp, Mus musculus
  siRNA target sequence for MOR264-6 (NM_146661.1,345-363).
ggccactgagtgctttatt

SEQ ID NO: 764175 - DNA, 19 bp, Mus musculus
  siRNA target sequence for MOR264-6 (NM_146661.1,412-430).
ctctatcctctcattatga

SEQ ID NO: 764176 - DNA, 19 bp, Mus musculus
  siRNA target sequence for MOR264-6 (NM_146661.1,429-447).
gaacaatagtctctgtata

SEQ ID NO: 764177 - DNA, 19 bp, Mus musculus
  siRNA target sequence for MOR264-6 (NM_146661.1,454-472).
gcagctggctgttggataa

SEQ ID NO: 764178 - DNA, 19 bp, Mus musculus
  siRNA target sequence for MOR264-6 (NM_146661.1,487-505).
catatagggttcacatact

SEQ ID NO: 764179 - DNA, 19 bp, Mus musculus
  siRNA target sequence for MOR264-6 (NM_146661.1,506-524).
ggatcttctctctaccatt

SEQ ID NO: 764180 - DNA, 19 bp, Mus musculus
  siRNA target sequence for MOR264-6 (NM_146661.1,530-548).
gatcaaatcagctgaatca

SEQ ID NO: 764181 - DNA, 19 bp, Mus musculus
  siRNA target sequence for MOR264-6 (NM_146661.1,587-605).
gtggggacacttttatgat

SEQ ID NO: 764182 - DNA, 19 bp, Mus musculus
  siRNA target sequence for MOR264-6 (NM_146661.1,607-625).
gagatgctaatttatgtga

SEQ ID NO: 764183 - DNA, 19 bp, Mus musculus
  siRNA target sequence for MOR264-6 (NM_146661.1,668-686).
catcttatgtgaaaataat

SEQ ID NO: 764184 - DNA, 19 bp, Mus musculus
  siRNA target sequence for MOR264-6 (NM_146661.1,753-771).
ccttatagttgtagcttta

SEQ ID NO: 764185 - DNA, 19 bp, Mus musculus
  siRNA target sequence for MOR264-6 (NM_146661.1,821-839).
cagcaggagtagacaaatt

SEQ ID NO: 764186 - DNA, 19 bp, Mus musculus
  siRNA target sequence for MOR241-2 (NM_146663.1,119-137).
ctggaaatgtcttcatcat

SEQ ID NO: 764187 - DNA, 19 bp, Mus musculus
  siRNA target sequence for MOR241-2 (NM_146663.1,829-847).
gtaatatttcccttattga

SEQ ID NO: 764188 - DNA, 19 bp, Mus musculus
  siRNA target sequence for MOR241-2 (NM_146663.1,900-918).
gttatttattcgtcaagta

SEQ ID NO: 764189 - DNA, 19 bp, Mus musculus
  siRNA target sequence for MOR242-1 (NM_146664.1,20-38).
ccaccgtgaccgaatttat

SEQ ID NO: 764190 - DNA, 19 bp, Mus musculus
  siRNA target sequence for MOR242-1 (NM_146664.1,23-41).
ccgtgaccgaatttattct

SEQ ID NO: 764191 - DNA, 19 bp, Mus musculus
  siRNA target sequence for MOR242-1 (NM_146664.1,69-87).
gcagctagtcttgtttgtt

SEQ ID NO: 764192 - DNA, 19 bp, Mus musculus
  siRNA target sequence for MOR242-1 (NM_146664.1,70-88).
cagctagtcttgtttgtta

SEQ ID NO: 764193 - DNA, 19 bp, Mus musculus
  siRNA target sequence for MOR242-1 (NM_146664.1,119-137).
cagtgaatatccttattat

SEQ ID NO: 764194 - DNA, 19 bp, Mus musculus
  siRNA target sequence for MOR242-1 (NM_146664.1,130-148).
cttattatctgcacaatca

SEQ ID NO: 764195 - DNA, 19 bp, Mus musculus
  siRNA target sequence for MOR242-1 (NM_146664.1,196-214).
ctagccttccttgatattt

SEQ ID NO: 764196 - DNA, 19 bp, Mus musculus
  siRNA target sequence for MOR242-1 (NM_146664.1,224-242).
ctatcacagcgcctaagat

SEQ ID NO: 764197 - DNA, 19 bp, Mus musculus
  siRNA target sequence for MOR242-1 (NM_146664.1,287-305).
ggtgtattgctcaactctt

SEQ ID NO: 764198 - DNA, 19 bp, Mus musculus
  siRNA target sequence for MOR242-1 (NM_146664.1,456-474).
cttcgtacattctataata

SEQ ID NO: 764199 - DNA, 19 bp, Mus musculus
  siRNA target sequence for MOR242-1 (NM_146664.1,510-528).
gcccaatgaactagacaat

SEQ ID NO: 764200 - DNA, 19 bp, Mus musculus
  siRNA target sequence for MOR242-1 (NM_146664.1,512-530).
ccaatgaactagacaatta

SEQ ID NO: 764201 - DNA, 19 bp, Mus musculus
  siRNA target sequence for MOR242-1 (NM_146664.1,513-531).
caatgaactagacaattat

SEQ ID NO: 764202 - DNA, 19 bp, Mus musculus
  siRNA target sequence for MOR242-1 (NM_146664.1,547-565).
caggttgtccggattgctt

SEQ ID NO: 764203 - DNA, 19 bp, Mus musculus
  siRNA target sequence for MOR242-1 (NM_146664.1,583-601).
gaagaaatggtcatgatct

SEQ ID NO: 764204 - DNA, 19 bp, Mus musculus
  siRNA target sequence for MOR242-1 (NM_146664.1,710-728).
gggctatatccacttgtta

SEQ ID NO: 764205 - DNA, 19 bp, Mus musculus
  siRNA target sequence for MOR242-1 (NM_146664.1,711-729).
ggctatatccacttgttat

SEQ ID NO: 764206 - DNA, 19 bp, Mus musculus
  siRNA target sequence for MOR242-1 (NM_146664.1,784-802).
cgcccatttgactcgtttt

SEQ ID NO: 764207 - DNA, 19 bp, Mus musculus
  siRNA target sequence for MOR242-1 (NM_146664.1,786-804).
cccatttgactcgttttct

SEQ ID NO: 764208 - DNA, 19 bp, Mus musculus
  siRNA target sequence for MOR242-1 (NM_146664.1,793-811).
gactcgttttctctagata

SEQ ID NO: 764209 - DNA, 19 bp, Mus musculus
  siRNA target sequence for MOR242-1 (NM_146664.1,797-815).
cgttttctctagataaggt

SEQ ID NO: 764210 - DNA, 19 bp, Mus musculus
  siRNA target sequence for MOR242-1 (NM_146664.1,835-853).
gtgatattccctttactca

SEQ ID NO: 764211 - DNA, 19 bp, Mus musculus
  siRNA target sequence for MOR242-1 (NM_146664.1,900-918).
gagaaagctggtgaataga

SEQ ID NO: 764212 - DNA, 19 bp, Mus musculus
  siRNA target sequence for MOR241-1 (NM_146665.1,119-137).
ctggaaatatcctgatcat

SEQ ID NO: 764213 - DNA, 19 bp, Mus musculus
  siRNA target sequence for MOR241-1 (NM_146665.1,326-344).
ggggtgaagggttacttct

SEQ ID NO: 764214 - DNA, 19 bp, Mus musculus
  siRNA target sequence for MOR241-1 (NM_146665.1,335-353).
ggttacttctggttgtgat

SEQ ID NO: 764215 - DNA, 19 bp, Mus musculus
  siRNA target sequence for MOR241-1 (NM_146665.1,615-633).
gcttaccctcctttgtttt

SEQ ID NO: 764216 - DNA, 19 bp, Mus musculus
  siRNA target sequence for MOR241-1 (NM_146665.1,906-924).
catccggcatattatttgt

SEQ ID NO: 764217 - DNA, 19 bp, Mus musculus
  siRNA target sequence for MOR106-5 (NM_146666.1,57-75).
cccttgccgcagagaaata

SEQ ID NO: 764218 - DNA, 19 bp, Mus musculus
  siRNA target sequence for MOR106-5 (NM_146666.1,59-77).
cttgccgcagagaaataca

SEQ ID NO: 764219 - DNA, 19 bp, Mus musculus
  siRNA target sequence for MOR106-5 (NM_146666.1,70-88).
gaaatacagatcttccttt

SEQ ID NO: 764220 - DNA, 19 bp, Mus musculus
  siRNA target sequence for MOR106-5 (NM_146666.1,127-145).
ggaaatatggcaattgtgt

SEQ ID NO: 764221 - DNA, 19 bp, Mus musculus
  siRNA target sequence for MOR106-5 (NM_146666.1,262-280).
ctctccacgaccaaaacca

SEQ ID NO: 764222 - DNA, 19 bp, Mus musculus
  siRNA target sequence for MOR106-5 (NM_146666.1,293-311).
gatgcctactccagttgta

SEQ ID NO: 764223 - DNA, 19 bp, Mus musculus
  siRNA target sequence for MOR106-5 (NM_146666.1,327-345).
gggcacaactgaatgtcta

SEQ ID NO: 764224 - DNA, 19 bp, Mus musculus
  siRNA target sequence for MOR106-5 (NM_146666.1,330-348).
cacaactgaatgtctattt

SEQ ID NO: 764225 - DNA, 19 bp, Mus musculus
  siRNA target sequence for MOR106-5 (NM_146666.1,407-425).
ctgtcatgaccactatgtt

SEQ ID NO: 764226 - DNA, 19 bp, Mus musculus
  siRNA target sequence for MOR106-5 (NM_146666.1,480-498).
cccagtgatactcattact

SEQ ID NO: 764227 - DNA, 19 bp, Mus musculus
  siRNA target sequence for MOR106-5 (NM_146666.1,515-533).
ggccaaatgtgatagatga

SEQ ID NO: 764228 - DNA, 19 bp, Mus musculus
  siRNA target sequence for MOR106-5 (NM_146666.1,601-619).
ctcatctgtggcactatga

SEQ ID NO: 764229 - DNA, 19 bp, Mus musculus
  siRNA target sequence for MOR106-5 (NM_146666.1,603-621).
catctgtggcactatgagt

SEQ ID NO: 764230 - DNA, 19 bp, Mus musculus
  siRNA target sequence for MOR106-5 (NM_146666.1,627-645).
cctcatctttggcacattt

SEQ ID NO: 764231 - DNA, 19 bp, Mus musculus
  siRNA target sequence for MOR106-5 (NM_146666.1,745-763).
ctggctgttgtatttctat

SEQ ID NO: 764232 - DNA, 19 bp, Mus musculus
  siRNA target sequence for MOR106-5 (NM_146666.1,770-788).
gttcagtcatgataacata

SEQ ID NO: 764233 - DNA, 19 bp, Mus musculus
  siRNA target sequence for MOR106-5 (NM_146666.1,773-791).
cagtcatgataacatatgt

SEQ ID NO: 764234 - DNA, 19 bp, Mus musculus
  siRNA target sequence for MOR106-5 (NM_146666.1,817-835).
ggcatgcagaagttcacaa

SEQ ID NO: 764235 - DNA, 19 bp, Mus musculus
  siRNA target sequence for MOR106-5 (NM_146666.1,823-841).
cagaagttcacaactttat

SEQ ID NO: 764236 - DNA, 19 bp, Mus musculus
  siRNA target sequence for MOR106-5 (NM_146666.1,850-868).
gttatgactcctttcttca

SEQ ID NO: 764237 - DNA, 19 bp, Mus musculus
  siRNA target sequence for MOR106-4 (NM_146667.1,134-152).
gcaacacttgcatcatctt

SEQ ID NO: 764238 - DNA, 19 bp, Mus musculus
  siRNA target sequence for MOR106-4 (NM_146667.1,611-629).
caattataacatctcttat

SEQ ID NO: 764239 - DNA, 19 bp, Mus musculus
  siRNA target sequence for MOR113-3 (NM_146670.1,32-50).
caagacagatagagtttat

SEQ ID NO: 764240 - DNA, 19 bp, Mus musculus
  siRNA target sequence for MOR113-3 (NM_146670.1,63-81).
gacagataatcctcagtta

SEQ ID NO: 764241 - DNA, 19 bp, Mus musculus
  siRNA target sequence for MOR113-3 (NM_146670.1,123-141).
gagtatgctcgggaattta

SEQ ID NO: 764242 - DNA, 19 bp, Mus musculus
  siRNA target sequence for MOR113-3 (NM_146670.1,160-178).
ctgctagatcccattctca

SEQ ID NO: 764243 - DNA, 19 bp, Mus musculus
  siRNA target sequence for MOR113-3 (NM_146670.1,210-228).
ctctttcttggaaatttta

SEQ ID NO: 764244 - DNA, 19 bp, Mus musculus
  siRNA target sequence for MOR113-3 (NM_146670.1,251-269).
gatttttaatctctattgt

SEQ ID NO: 764245 - DNA, 19 bp, Mus musculus
  siRNA target sequence for MOR113-3 (NM_146670.1,268-286).
gtaacacaggagaagacaa

SEQ ID NO: 764246 - DNA, 19 bp, Mus musculus
  siRNA target sequence for MOR113-3 (NM_146670.1,302-320).
gtgtttgtcaattattctt

SEQ ID NO: 764247 - DNA, 19 bp, Mus musculus
  siRNA target sequence for MOR113-3 (NM_146670.1,420-438).
gaacagtaaagtttgtcat

SEQ ID NO: 764248 - DNA, 19 bp, Mus musculus
  siRNA target sequence for MOR113-3 (NM_146670.1,490-508).
ctgattattggccttgatt

SEQ ID NO: 764249 - DNA, 19 bp, Mus musculus
  siRNA target sequence for MOR113-3 (NM_146670.1,620-638).
ctctcatgacactcattgt

SEQ ID NO: 764250 - DNA, 19 bp, Mus musculus
  siRNA target sequence for MOR113-3 (NM_146670.1,629-647).
cactcattgtcacattagt

SEQ ID NO: 764251 - DNA, 19 bp, Mus musculus
  siRNA target sequence for MOR113-3 (NM_146670.1,637-655).
gtcacattagtaatagtga

SEQ ID NO: 764252 - DNA, 19 bp, Mus musculus
  siRNA target sequence for MOR113-3 (NM_146670.1,670-688).
cacattgccaagacaatta

SEQ ID NO: 764253 - DNA, 19 bp, Mus musculus
  siRNA target sequence for MOR113-3 (NM_146670.1,676-694).
gccaagacaattatgaaat

SEQ ID NO: 764254 - DNA, 19 bp, Mus musculus
  siRNA target sequence for MOR113-3 (NM_146670.1,803-821).
caaatgaaagagtgacttt

SEQ ID NO: 764255 - DNA, 19 bp, Mus musculus
  siRNA target sequence for MOR113-3 (NM_146670.1,910-928).
gcctgtggtgtagtactta

SEQ ID NO: 764256 - DNA, 19 bp, Mus musculus
  siRNA target sequence for MOR113-3 (NM_146670.1,912-930).
ctgtggtgtagtacttaga

SEQ ID NO: 764257 - DNA, 19 bp, Mus musculus
  siRNA target sequence for MOR113-3 (NM_146670.1,914-932).
gtggtgtagtacttagaaa

SEQ ID NO: 764258 - DNA, 19 bp, Mus musculus
  siRNA target sequence for MOR113-2 (NM_146671.1,569-587).
cacagctcatagagacaat

SEQ ID NO: 764259 - DNA, 19 bp, Mus musculus
  siRNA target sequence for MOR113-2 (NM_146671.1,573-591).
gctcatagagacaattgca

SEQ ID NO: 764260 - DNA, 19 bp, Mus musculus
  siRNA target sequence for MOR113-2 (NM_146671.1,580-598).
gagacaattgcattcatct

SEQ ID NO: 764261 - DNA, 19 bp, Mus musculus
  siRNA target sequence for MOR210-4 (NM_146673.1,10-28).
gagcagagcaggaactata

SEQ ID NO: 764262 - DNA, 19 bp, Mus musculus
  siRNA target sequence for MOR210-4 (NM_146673.1,82-100).
gttcccttattcttactgt

SEQ ID NO: 764263 - DNA, 19 bp, Mus musculus
  siRNA target sequence for MOR210-4 (NM_146673.1,330-348).
cgttggaacagaaggtttt

SEQ ID NO: 764264 - DNA, 19 bp, Mus musculus
  siRNA target sequence for MOR210-4 (NM_146673.1,417-435).
gtctcagccagcttgtatt

SEQ ID NO: 764265 - DNA, 19 bp, Mus musculus
  siRNA target sequence for MOR210-4 (NM_146673.1,444-462).
ggctggctcctatatctgt

SEQ ID NO: 764266 - DNA, 19 bp, Mus musculus
  siRNA target sequence for MOR210-4 (NM_146673.1,467-485).
gcatcaactccatgataca

SEQ ID NO: 764267 - DNA, 19 bp, Mus musculus
  siRNA target sequence for MOR210-4 (NM_146673.1,468-486).
catcaactccatgatacaa

SEQ ID NO: 764268 - DNA, 19 bp, Mus musculus
  siRNA target sequence for MOR210-4 (NM_146673.1,561-579).
gatcaagatctcatgtgtt

SEQ ID NO: 764269 - DNA, 19 bp, Mus musculus
  siRNA target sequence for MOR210-4 (NM_146673.1,572-590).
catgtgttgacacttttgt

SEQ ID NO: 764270 - DNA, 19 bp, Mus musculus
  siRNA target sequence for MOR210-4 (NM_146673.1,745-763).
gcagtggtgagtttattct

SEQ ID NO: 764271 - DNA, 19 bp, Mus musculus
  siRNA target sequence for MOR210-4 (NM_146673.1,746-764).
cagtggtgagtttattcta

SEQ ID NO: 764272 - DNA, 19 bp, Mus musculus
  siRNA target sequence for MOR210-3 (NM_146674.1,76-94).
gcacaggttcccttattct

SEQ ID NO: 764273 - DNA, 19 bp, Mus musculus
  siRNA target sequence for MOR210-3 (NM_146674.1,77-95).
cacaggttcccttattctt

SEQ ID NO: 764274 - DNA, 19 bp, Mus musculus
  siRNA target sequence for MOR210-3 (NM_146674.1,138-156).
cagcatgctaactgtcatt

SEQ ID NO: 764275 - DNA, 19 bp, Mus musculus
  siRNA target sequence for MOR210-3 (NM_146674.1,141-159).
catgctaactgtcattaaa

SEQ ID NO: 764276 - DNA, 19 bp, Mus musculus
  siRNA target sequence for MOR210-3 (NM_146674.1,144-162).
gctaactgtcattaaaata

SEQ ID NO: 764277 - DNA, 19 bp, Mus musculus
  siRNA target sequence for MOR210-3 (NM_146674.1,237-255).
cattgcacccaaaactcta

SEQ ID NO: 764278 - DNA, 19 bp, Mus musculus
  siRNA target sequence for MOR210-3 (NM_146674.1,246-264).
caaaactctagctactatt

SEQ ID NO: 764279 - DNA, 19 bp, Mus musculus
  siRNA target sequence for MOR210-1 (NM_146677.1,572-590).
cctgttctgacattttcat

SEQ ID NO: 764280 - DNA, 19 bp, Mus musculus
  siRNA target sequence for MOR210-1 (NM_146677.1,573-591).
ctgttctgacattttcata

SEQ ID NO: 764281 - DNA, 19 bp, Mus musculus
  siRNA target sequence for MOR210-1 (NM_146677.1,938-956).
gttcgtttttcccattcta

SEQ ID NO: 764282 - DNA, 19 bp, Mus musculus
  siRNA target sequence for MOR239-4 (NM_146679.1,61-79).
caagaactgagcttactct

SEQ ID NO: 764283 - DNA, 19 bp, Mus musculus
  siRNA target sequence for MOR239-4 (NM_146679.1,64-82).
gaactgagcttactcttat

SEQ ID NO: 764284 - DNA, 19 bp, Mus musculus
  siRNA target sequence for MOR239-4 (NM_146679.1,221-239).
cctccattactgttccaaa

SEQ ID NO: 764285 - DNA, 19 bp, Mus musculus
  siRNA target sequence for MOR239-4 (NM_146679.1,230-248).
ctgttccaaaggtcttagt

SEQ ID NO: 764286 - DNA, 19 bp, Mus musculus
  siRNA target sequence for MOR239-4 (NM_146679.1,247-265).
gtggaccttctctcaagaa

SEQ ID NO: 764287 - DNA, 19 bp, Mus musculus
  siRNA target sequence for MOR239-4 (NM_146679.1,618-636).
cactacgctatggtttgtt

SEQ ID NO: 764288 - DNA, 19 bp, Mus musculus
  siRNA target sequence for MOR239-4 (NM_146679.1,815-833).
caatcaccctaaatataat

SEQ ID NO: 764289 - DNA, 19 bp, Mus musculus
  siRNA target sequence for MOR239-4 (NM_146679.1,839-857).
ctgtcctgaacccaatgat

SEQ ID NO: 764290 - DNA, 19 bp, Mus musculus
  siRNA target sequence for MOR239-4 (NM_146679.1,841-859).
gtcctgaacccaatgatct

SEQ ID NO: 764291 - DNA, 19 bp, Mus musculus
  siRNA target sequence for MOR239-4 (NM_146679.1,903-921).
ccggaaaagactcatactt

SEQ ID NO: 764292 - DNA, 19 bp, Mus musculus
  siRNA target sequence for MOR239-4 (NM_146679.1,904-922).
cggaaaagactcatacttt

SEQ ID NO: 764293 - DNA, 19 bp, Mus musculus
  siRNA target sequence for MOR239-4 (NM_146679.1,906-924).
gaaaagactcatactttct

SEQ ID NO: 764294 - DNA, 19 bp, Mus musculus
  siRNA target sequence for MOR239-2 (NM_146681.1,249-267).
ggatcttacctcaaacaga

SEQ ID NO: 764295 - DNA, 19 bp, Mus musculus
  siRNA target sequence for MOR239-2 (NM_146681.1,250-268).
gatcttacctcaaacagaa

SEQ ID NO: 764296 - DNA, 19 bp, Mus musculus
  siRNA target sequence for MOR239-2 (NM_146681.1,563-581).
cttgcacagacattgttgt

SEQ ID NO: 764297 - DNA, 19 bp, Mus musculus
  siRNA target sequence for MOR239-2 (NM_146681.1,610-628).
ggaatgctcaccacactat

SEQ ID NO: 764298 - DNA, 19 bp, Mus musculus
  siRNA target sequence for MOR239-2 (NM_146681.1,615-633).
gctcaccacactatggttt

SEQ ID NO: 764299 - DNA, 19 bp, Mus musculus
  siRNA target sequence for MOR239-2 (NM_146681.1,651-669).
ctacatggtcatattatta

SEQ ID NO: 764300 - DNA, 19 bp, Mus musculus
  siRNA target sequence for MOR239-2 (NM_146681.1,901-919).
ctcaggaaaaaatttcgat

SEQ ID NO: 764301 - DNA, 19 bp, Mus musculus
  siRNA target sequence for MOR239-2 (NM_146681.1,903-921).
caggaaaaaatttcgattt

SEQ ID NO: 764302 - DNA, 19 bp, Mus musculus
  siRNA target sequence for MOR215-2 (NM_146683.1,18-36).
cattagcgtggtgactaat

SEQ ID NO: 764303 - DNA, 19 bp, Mus musculus
  siRNA target sequence for MOR215-2 (NM_146683.1,23-41).
gcgtggtgactaatttcat

SEQ ID NO: 764304 - DNA, 19 bp, Mus musculus
  siRNA target sequence for MOR215-2 (NM_146683.1,62-80).
gtccccagctgcagattgt

SEQ ID NO: 764305 - DNA, 19 bp, Mus musculus
  siRNA target sequence for MOR215-2 (NM_146683.1,125-143).
gaaacttgggcctcattgt

SEQ ID NO: 764306 - DNA, 19 bp, Mus musculus
  siRNA target sequence for MOR215-2 (NM_146683.1,270-288).
gaagtctatcacctttata

SEQ ID NO: 764307 - DNA, 19 bp, Mus musculus
  siRNA target sequence for MOR215-2 (NM_146683.1,293-311).
gtgctatacagcttttctt

SEQ ID NO: 764308 - DNA, 19 bp, Mus musculus
  siRNA target sequence for MOR215-2 (NM_146683.1,430-448).
gggatggccatcacagtat

SEQ ID NO: 764309 - DNA, 19 bp, Mus musculus
  siRNA target sequence for MOR215-2 (NM_146683.1,486-504).
ctccatattccgacttcat

SEQ ID NO: 764310 - DNA, 19 bp, Mus musculus
  siRNA target sequence for MOR215-2 (NM_146683.1,488-506).
ccatattccgacttcattt

SEQ ID NO: 764311 - DNA, 19 bp, Mus musculus
  siRNA target sequence for MOR215-2 (NM_146683.1,541-559).
gacttgccacccctaatgt

SEQ ID NO: 764312 - DNA, 19 bp, Mus musculus
  siRNA target sequence for MOR215-2 (NM_146683.1,675-693).
cgtcatgaggattcattca

SEQ ID NO: 764313 - DNA, 19 bp, Mus musculus
  siRNA target sequence for MOR215-2 (NM_146683.1,676-694).
gtcatgaggattcattcaa

SEQ ID NO: 764314 - DNA, 19 bp, Mus musculus
  siRNA target sequence for MOR215-2 (NM_146683.1,717-735).
caacacctgtgcctcttat

SEQ ID NO: 764315 - DNA, 19 bp, Mus musculus
  siRNA target sequence for MOR215-2 (NM_146683.1,740-758).
ctacagtgatccttttcta

SEQ ID NO: 764316 - DNA, 19 bp, Mus musculus
  siRNA target sequence for MOR215-2 (NM_146683.1,774-792).
ctcatacctccattctaat

SEQ ID NO: 764317 - DNA, 19 bp, Mus musculus
  siRNA target sequence for MOR215-2 (NM_146683.1,797-815).
gatactcacaggacaaaaa

SEQ ID NO: 764318 - DNA, 19 bp, Mus musculus
  siRNA target sequence for MOR215-1 (NM_146684.1,227-245).
catctacaacccctaaaat

SEQ ID NO: 764319 - DNA, 19 bp, Mus musculus
  siRNA target sequence for MOR215-1 (NM_146684.1,258-276).
cttccagaagtctaaatct

SEQ ID NO: 764320 - DNA, 19 bp, Mus musculus
  siRNA target sequence for MOR215-1 (NM_146684.1,262-280).
cagaagtctaaatctatct

SEQ ID NO: 764321 - DNA, 19 bp, Mus musculus
  siRNA target sequence for MOR215-1 (NM_146684.1,301-319).
cagtacttcatcttctcaa

SEQ ID NO: 764322 - DNA, 19 bp, Mus musculus
  siRNA target sequence for MOR215-1 (NM_146684.1,435-453).
ggtggttggagcctatagt

SEQ ID NO: 764323 - DNA, 19 bp, Mus musculus
  siRNA target sequence for MOR215-1 (NM_146684.1,436-454).
gtggttggagcctatagta

SEQ ID NO: 764324 - DNA, 19 bp, Mus musculus
  siRNA target sequence for MOR215-1 (NM_146684.1,455-473).
ctggtctcttgggttcatt

SEQ ID NO: 764325 - DNA, 19 bp, Mus musculus
  siRNA target sequence for MOR215-1 (NM_146684.1,462-480).
cttgggttcattgattcaa

SEQ ID NO: 764326 - DNA, 19 bp, Mus musculus
  siRNA target sequence for MOR215-1 (NM_146684.1,474-492).
gattcaactgtgtgctata

SEQ ID NO: 764327 - DNA, 19 bp, Mus musculus
  siRNA target sequence for MOR215-1 (NM_146684.1,543-561).
cctgcctcagctattagtt

SEQ ID NO: 764328 - DNA, 19 bp, Mus musculus
  siRNA target sequence for MOR215-1 (NM_146684.1,546-564).
gcctcagctattagttctt

SEQ ID NO: 764329 - DNA, 19 bp, Mus musculus
  siRNA target sequence for MOR215-1 (NM_146684.1,584-602).
ccctgcaagtcttgaaatt

SEQ ID NO: 764330 - DNA, 19 bp, Mus musculus
  siRNA target sequence for MOR215-1 (NM_146684.1,740-758).
cagcagtcaccctcttttt

SEQ ID NO: 764331 - DNA, 19 bp, Mus musculus
  siRNA target sequence for MOR215-1 (NM_146684.1,761-779).
gatcaggactctttgtcta

SEQ ID NO: 764332 - DNA, 19 bp, Mus musculus
  siRNA target sequence for MOR215-1 (NM_146684.1,800-818).
gttcccagggttatgacaa

SEQ ID NO: 764333 - DNA, 19 bp, Mus musculus
  siRNA target sequence for MOR215-1 (NM_146684.1,803-821).
cccagggttatgacaagat

SEQ ID NO: 764334 - DNA, 19 bp, Mus musculus
  siRNA target sequence for MOR214-1 (NM_146688.1,56-74).
cagatttacccataataat

SEQ ID NO: 764335 - DNA, 19 bp, Mus musculus
  siRNA target sequence for MOR214-1 (NM_146688.1,99-117).
gctcatctacattacaact

SEQ ID NO: 764336 - DNA, 19 bp, Mus musculus
  siRNA target sequence for MOR214-1 (NM_146688.1,125-143).
ggaatctgtccctcattgt

SEQ ID NO: 764337 - DNA, 19 bp, Mus musculus
  siRNA target sequence for MOR214-1 (NM_146688.1,132-150).
gtccctcattgtgttaata

SEQ ID NO: 764338 - DNA, 19 bp, Mus musculus
  siRNA target sequence for MOR214-1 (NM_146688.1,238-256).
ccaaaaatgctctcaaact

SEQ ID NO: 764339 - DNA, 19 bp, Mus musculus
  siRNA target sequence for MOR214-1 (NM_146688.1,239-257).
caaaaatgctctcaaactt

SEQ ID NO: 764340 - DNA, 19 bp, Mus musculus
  siRNA target sequence for MOR214-1 (NM_146688.1,298-316).
gttcagaatttcatctttt

SEQ ID NO: 764341 - DNA, 19 bp, Mus musculus
  siRNA target sequence for MOR214-1 (NM_146688.1,391-409).
cttctgtatgcatcgatta

SEQ ID NO: 764342 - DNA, 19 bp, Mus musculus
  siRNA target sequence for MOR214-1 (NM_146688.1,394-412).
ctgtatgcatcgattatgt

SEQ ID NO: 764343 - DNA, 19 bp, Mus musculus
  siRNA target sequence for MOR214-1 (NM_146688.1,396-414).
gtatgcatcgattatgtca

SEQ ID NO: 764344 - DNA, 19 bp, Mus musculus
  siRNA target sequence for MOR214-1 (NM_146688.1,436-454).
gtgctggcatcctatctct

SEQ ID NO: 764345 - DNA, 19 bp, Mus musculus
  siRNA target sequence for MOR214-1 (NM_146688.1,458-476).
ggctcactgcttctttact

SEQ ID NO: 764346 - DNA, 19 bp, Mus musculus
  siRNA target sequence for MOR214-1 (NM_146688.1,459-477).
gctcactgcttctttacta

SEQ ID NO: 764347 - DNA, 19 bp, Mus musculus
  siRNA target sequence for MOR214-1 (NM_146688.1,501-519).
ccatttttgtggaactaat

SEQ ID NO: 764348 - DNA, 19 bp, Mus musculus
  siRNA target sequence for MOR214-1 (NM_146688.1,543-561).
catgccacagttgttagtt

SEQ ID NO: 764349 - DNA, 19 bp, Mus musculus
  siRNA target sequence for MOR214-1 (NM_146688.1,592-610).
gtcctaactgccatattaa

SEQ ID NO: 764350 - DNA, 19 bp, Mus musculus
  siRNA target sequence for MOR214-1 (NM_146688.1,594-612).
cctaactgccatattaaca

SEQ ID NO: 764351 - DNA, 19 bp, Mus musculus
  siRNA target sequence for MOR214-1 (NM_146688.1,595-613).
ctaactgccatattaacaa

SEQ ID NO: 764352 - DNA, 19 bp, Mus musculus
  siRNA target sequence for MOR214-1 (NM_146688.1,602-620).
ccatattaacaatgatctt

SEQ ID NO: 764353 - DNA, 19 bp, Mus musculus
  siRNA target sequence for MOR214-1 (NM_146688.1,636-654).
gctagttatcatgatatct

SEQ ID NO: 764354 - DNA, 19 bp, Mus musculus
  siRNA target sequence for MOR214-1 (NM_146688.1,637-655).
ctagttatcatgatatctt

SEQ ID NO: 764355 - DNA, 19 bp, Mus musculus
  siRNA target sequence for MOR202-17 (NM_146689.1,88-106).
ctcctcatctatactgtta

SEQ ID NO: 764356 - DNA, 19 bp, Mus musculus
  siRNA target sequence for MOR202-17 (NM_146689.1,393-411).
caccaccatgacaaaacgt

SEQ ID NO: 764357 - DNA, 19 bp, Mus musculus
  siRNA target sequence for MOR202-17 (NM_146689.1,535-553).
gttttggcaatcatgacta

SEQ ID NO: 764358 - DNA, 19 bp, Mus musculus
  siRNA target sequence for MOR202-17 (NM_146689.1,683-701).
cagcttcaggatattgtaa

SEQ ID NO: 764359 - DNA, 19 bp, Mus musculus
  siRNA target sequence for MOR202-17 (NM_146689.1,689-707).
caggatattgtaaagctat

SEQ ID NO: 764360 - DNA, 19 bp, Mus musculus
  siRNA target sequence for MOR202-16 (NM_146690.1,669-687).
cctgagaatgcgttcagtt

SEQ ID NO: 764361 - DNA, 19 bp, Mus musculus
  siRNA target sequence for MOR202-15 (NM_146691.1,192-210).
cttatctctggtagacttt

SEQ ID NO: 764362 - DNA, 19 bp, Mus musculus
  siRNA target sequence for MOR202-15 (NM_146691.1,417-435).
gtgtacgtggctgatcatt

SEQ ID NO: 764363 - DNA, 19 bp, Mus musculus
  siRNA target sequence for MOR202-15 (NM_146691.1,440-458).
cttatgtcattggtttcat

SEQ ID NO: 764364 - DNA, 19 bp, Mus musculus
  siRNA target sequence for MOR202-15 (NM_146691.1,479-497).
gagatacatttcaccttta

SEQ ID NO: 764365 - DNA, 19 bp, Mus musculus
  siRNA target sequence for MOR202-15 (NM_146691.1,604-622).
gtgagcttccacatatttt

SEQ ID NO: 764366 - DNA, 19 bp, Mus musculus
  siRNA target sequence for MOR202-15 (NM_146691.1,606-624).
gagcttccacatatttttt

SEQ ID NO: 764367 - DNA, 19 bp, Mus musculus
  siRNA target sequence for MOR202-15 (NM_146691.1,625-643).
gcctttatagttatttgga

SEQ ID NO: 764368 - DNA, 19 bp, Mus musculus
  siRNA target sequence for MOR202-15 (NM_146691.1,627-645).
ctttatagttatttggata

SEQ ID NO: 764369 - DNA, 19 bp, Mus musculus
  siRNA target sequence for MOR202-15 (NM_146691.1,750-768).
ctatggaactagtattttt

SEQ ID NO: 764370 - DNA, 19 bp, Mus musculus
  siRNA target sequence for MOR202-15 (NM_146691.1,782-800).
caagttccaatcactctat

SEQ ID NO: 764371 - DNA, 19 bp, Mus musculus
  siRNA target sequence for MOR202-13 (NM_146693.1,407-425).
cacacttatgtgtttttct

SEQ ID NO: 764372 - DNA, 19 bp, Mus musculus
  siRNA target sequence for MOR202-13 (NM_146693.1,424-442).
ctagttattggctgttaca

SEQ ID NO: 764373 - DNA, 19 bp, Mus musculus
  siRNA target sequence for MOR202-13 (NM_146693.1,557-575).
ctcgctctgacaaatatat

SEQ ID NO: 764374 - DNA, 19 bp, Mus musculus
  siRNA target sequence for MOR202-13 (NM_146693.1,559-577).
cgctctgacaaatatatta

SEQ ID NO: 764375 - DNA, 19 bp, Mus musculus
  siRNA target sequence for MOR202-13 (NM_146693.1,598-616).
gtagccagtttcaatatta

SEQ ID NO: 764376 - DNA, 19 bp, Mus musculus
  siRNA target sequence for MOR202-13 (NM_146693.1,601-619).
gccagtttcaatattattt

SEQ ID NO: 764377 - DNA, 19 bp, Mus musculus
  siRNA target sequence for MOR202-11 (NM_146695.1,246-264).
catgactgggctaatagga

SEQ ID NO: 764378 - DNA, 19 bp, Mus musculus
  siRNA target sequence for MOR202-11 (NM_146695.1,430-448).
ctttgtataggttcctata

SEQ ID NO: 764379 - DNA, 19 bp, Mus musculus
  siRNA target sequence for MOR202-11 (NM_146695.1,591-609).
ggttcttgtttatgtagta

SEQ ID NO: 764380 - DNA, 19 bp, Mus musculus
  siRNA target sequence for MOR202-11 (NM_146695.1,687-705).
ctcaagttctggatatcga

SEQ ID NO: 764381 - DNA, 19 bp, Mus musculus
  siRNA target sequence for MOR202-11 (NM_146695.1,697-715).
ggatatcgaaaggctatat

SEQ ID NO: 764382 - DNA, 19 bp, Mus musculus
  siRNA target sequence for MOR202-11 (NM_146695.1,730-748).
cacttcattgcggtatcaa

SEQ ID NO: 764383 - DNA, 19 bp, Mus musculus
  siRNA target sequence for MOR202-11 (NM_146695.1,732-750).
cttcattgcggtatcaatt

SEQ ID NO: 764384 - DNA, 19 bp, Mus musculus
  siRNA target sequence for MOR202-7 (NM_146699.1,601-619).
gtgggtttcaatgatatct

SEQ ID NO: 764385 - DNA, 19 bp, Mus musculus
  siRNA target sequence for MOR202-7 (NM_146699.1,630-648).
ggtcatcccgatatcctat

SEQ ID NO: 764386 - DNA, 19 bp, Mus musculus
  siRNA target sequence for MOR202-7 (NM_146699.1,636-654).
cccgatatcctatctgttt

SEQ ID NO: 764387 - DNA, 19 bp, Mus musculus
  siRNA target sequence for MOR202-7 (NM_146699.1,637-655).
ccgatatcctatctgttta

SEQ ID NO: 764388 - DNA, 19 bp, Mus musculus
  siRNA target sequence for MOR202-7 (NM_146699.1,729-747).
cacagtagtcttcatcttt

SEQ ID NO: 764389 - DNA, 19 bp, Mus musculus
  siRNA target sequence for MOR202-7 (NM_146699.1,731-749).
cagtagtcttcatctttta

SEQ ID NO: 764390 - DNA, 19 bp, Mus musculus
  siRNA target sequence for MOR202-7 (NM_146699.1,912-930).
gaaagccaaaatttctcta

SEQ ID NO: 764391 - DNA, 19 bp, Mus musculus
  siRNA target sequence for MOR202-7 (NM_146699.1,917-935).
ccaaaatttctctagcatt

SEQ ID NO: 764392 - DNA, 19 bp, Mus musculus
  siRNA target sequence for MOR202-1 (NM_146705.1,90-108).
cctcatttacctcattgat

SEQ ID NO: 764393 - DNA, 19 bp, Mus musculus
  siRNA target sequence for MOR202-1 (NM_146705.1,139-157).
gttcttatggactctcatt

SEQ ID NO: 764394 - DNA, 19 bp, Mus musculus
  siRNA target sequence for MOR202-1 (NM_146705.1,225-243).
cactcccatggtcatttct

SEQ ID NO: 764395 - DNA, 19 bp, Mus musculus
  siRNA target sequence for MOR202-1 (NM_146705.1,227-245).
ctcccatggtcatttctga

SEQ ID NO: 764396 - DNA, 19 bp, Mus musculus
  siRNA target sequence for MOR202-1 (NM_146705.1,396-414).
caggatgacaacaagtgtt

SEQ ID NO: 764397 - DNA, 19 bp, Mus musculus
  siRNA target sequence for MOR202-1 (NM_146705.1,422-440).
gtttgaacattgtctctta

SEQ ID NO: 764398 - DNA, 19 bp, Mus musculus
  siRNA target sequence for MOR202-1 (NM_146705.1,449-467).
gtttcttgaatgccatttt

SEQ ID NO: 764399 - DNA, 19 bp, Mus musculus
  siRNA target sequence for MOR202-1 (NM_146705.1,541-559).
gcagtcttggctctatctt

SEQ ID NO: 764400 - DNA, 19 bp, Mus musculus
  siRNA target sequence for MOR202-1 (NM_146705.1,630-648).
gatcatctcagtttcctat

SEQ ID NO: 764401 - DNA, 19 bp, Mus musculus
  siRNA target sequence for MOR202-1 (NM_146705.1,783-801).
ctccagccattctatggat

SEQ ID NO: 764402 - DNA, 19 bp, Mus musculus
  siRNA target sequence for MOR202-1 (NM_146705.1,805-823).
gataaagtagcatctatgt

SEQ ID NO: 764403 - DNA, 19 bp, Mus musculus
  siRNA target sequence for MOR202-1 (NM_146705.1,843-861).
cacactaaaccctttggtt

SEQ ID NO: 764404 - DNA, 19 bp, Mus musculus
  siRNA target sequence for MOR202-1 (NM_146705.1,906-924).
ggttgagagggcaaaaatt

SEQ ID NO: 764405 - DNA, 19 bp, Mus musculus
  siRNA target sequence for MOR255-5 (NM_146707.1,767-785).
gtgctggcatctttaacta

SEQ ID NO: 764406 - DNA, 19 bp, Mus musculus
  siRNA target sequence for MOR255-4 (NM_146708.1,6-24).
gacaaagcctagaatcaat

SEQ ID NO: 764407 - DNA, 19 bp, Mus musculus
  siRNA target sequence for MOR255-4 (NM_146708.1,260-278).
ggctcttggtccaaaagca

SEQ ID NO: 764408 - DNA, 19 bp, Mus musculus
  siRNA target sequence for MOR157-1 (NM_146710.1,165-183).
gtgctcccccatgtattat

SEQ ID NO: 764409 - DNA, 19 bp, Mus musculus
  siRNA target sequence for MOR157-1 (NM_146710.1,516-534).
cccagtgcgccacttcttt

SEQ ID NO: 764410 - DNA, 19 bp, Mus musculus
  siRNA target sequence for MOR157-1 (NM_146710.1,517-535).
ccagtgcgccacttctttt

SEQ ID NO: 764411 - DNA, 19 bp, Mus musculus
  siRNA target sequence for MOR157-1 (NM_146710.1,736-754).
gtggtagtgtcacttttct

SEQ ID NO: 764412 - DNA, 19 bp, Mus musculus
  siRNA target sequence for MOR157-1 (NM_146710.1,847-865).
ccgaccttgaaccctttta

SEQ ID NO: 764413 - DNA, 19 bp, Mus musculus
  siRNA target sequence for MOR157-1 (NM_146710.1,848-866).
cgaccttgaacccttttat

SEQ ID NO: 764414 - DNA, 19 bp, Mus musculus
  siRNA target sequence for MOR258-4P (NM_146712.1,168-186).
cacgccacctacgtacttt

SEQ ID NO: 764415 - DNA, 19 bp, Mus musculus
  siRNA target sequence for MOR258-4P (NM_146712.1,170-188).
cgccacctacgtacttttt

SEQ ID NO: 764416 - DNA, 19 bp, Mus musculus
  siRNA target sequence for MOR258-4P (NM_146712.1,357-375).
gtctgtggacaggtatata

SEQ ID NO: 764417 - DNA, 19 bp, Mus musculus
  siRNA target sequence for MOR258-4P (NM_146712.1,476-494).
gctgtaccttctttgctat

SEQ ID NO: 764418 - DNA, 19 bp, Mus musculus
  siRNA target sequence for MOR258-4P (NM_146712.1,600-618).
cttcatcataggcttcaat

SEQ ID NO: 764419 - DNA, 19 bp, Mus musculus
  siRNA target sequence for MOR267-7 (NM_146714.1,45-63).
ctcagcttacccacttgta

SEQ ID NO: 764420 - DNA, 19 bp, Mus musculus
  siRNA target sequence for MOR267-7 (NM_146714.1,123-141).
gaccatcatgggtttgact

SEQ ID NO: 764421 - DNA, 19 bp, Mus musculus
  siRNA target sequence for MOR267-7 (NM_146714.1,138-156).
gacttgggcagacagatat

SEQ ID NO: 764422 - DNA, 19 bp, Mus musculus
  siRNA target sequence for MOR267-7 (NM_146714.1,140-158).
cttgggcagacagatatct

SEQ ID NO: 764423 - DNA, 19 bp, Mus musculus
  siRNA target sequence for MOR267-7 (NM_146714.1,209-227).
gctacaccctgactatcat

SEQ ID NO: 764424 - DNA, 19 bp, Mus musculus
  siRNA target sequence for MOR267-7 (NM_146714.1,261-279).
caaccgcatttcagacata

SEQ ID NO: 764425 - DNA, 19 bp, Mus musculus
  siRNA target sequence for MOR267-7 (NM_146714.1,287-305).
gcttgcagatgtgtttctt

SEQ ID NO: 764426 - DNA, 19 bp, Mus musculus
  siRNA target sequence for MOR267-7 (NM_146714.1,375-393).
caatgccctcaaatatcct

SEQ ID NO: 764427 - DNA, 19 bp, Mus musculus
  siRNA target sequence for MOR267-7 (NM_146714.1,441-459).
ggttggaggcttccttatt

SEQ ID NO: 764428 - DNA, 19 bp, Mus musculus
  siRNA target sequence for MOR267-7 (NM_146714.1,465-483).
cattgagacaacactgata

SEQ ID NO: 764429 - DNA, 19 bp, Mus musculus
  siRNA target sequence for MOR267-7 (NM_146714.1,520-538).
cacttcttctgccatatga

SEQ ID NO: 764430 - DNA, 19 bp, Mus musculus
  siRNA target sequence for MOR267-7 (NM_146714.1,576-594).
cacagaattcattgtaaca

SEQ ID NO: 764431 - DNA, 19 bp, Mus musculus
  siRNA target sequence for MOR267-7 (NM_146714.1,610-628).
ggtttgctgggtacattct

SEQ ID NO: 764432 - DNA, 19 bp, Mus musculus
  siRNA target sequence for MOR267-7 (NM_146714.1,792-810).
gggagatgacacactcata

SEQ ID NO: 764433 - DNA, 19 bp, Mus musculus
  siRNA target sequence for MOR267-7 (NM_146714.1,836-854).
cattcctcagtccaatcat

SEQ ID NO: 764434 - DNA, 19 bp, Mus musculus
  siRNA target sequence for MOR267-7 (NM_146714.1,843-861).
cagtccaatcatattcaca

SEQ ID NO: 764435 - DNA, 19 bp, Mus musculus
  siRNA target sequence for MOR267-7 (NM_146714.1,905-923).
gaaagacagtagtcttgaa

SEQ ID NO: 764436 - DNA, 19 bp, Mus musculus
  siRNA target sequence for MOR267-6 (NM_146715.1,378-396).
ctgtgccccacttcattat

SEQ ID NO: 764437 - DNA, 19 bp, Mus musculus
  siRNA target sequence for MOR267-6 (NM_146715.1,450-468).
gagtggatacctttttgga

SEQ ID NO: 764438 - DNA, 19 bp, Mus musculus
  siRNA target sequence for MOR267-6 (NM_146715.1,477-495).
gactctagtcatttttcgt

SEQ ID NO: 764439 - DNA, 19 bp, Mus musculus
  siRNA target sequence for MOR267-6 (NM_146715.1,517-535).
gaaatccagcactttttct

SEQ ID NO: 764440 - DNA, 19 bp, Mus musculus
  siRNA target sequence for MOR267-6 (NM_146715.1,619-637).
ctcttggtctcgttcttct

SEQ ID NO: 764441 - DNA, 19 bp, Mus musculus
  siRNA target sequence for MOR267-6 (NM_146715.1,621-639).
cttggtctcgttcttctta

SEQ ID NO: 764442 - DNA, 19 bp, Mus musculus
  siRNA target sequence for MOR267-6 (NM_146715.1,624-642).
ggtctcgttcttcttaatt

SEQ ID NO: 764443 - DNA, 19 bp, Mus musculus
  siRNA target sequence for MOR267-6 (NM_146715.1,625-643).
gtctcgttcttcttaatta

SEQ ID NO: 764444 - DNA, 19 bp, Mus musculus
  siRNA target sequence for MOR267-6 (NM_146715.1,629-647).
cgttcttcttaattagtgt

SEQ ID NO: 764445 - DNA, 19 bp, Mus musculus
  siRNA target sequence for MOR267-6 (NM_146715.1,650-668).
cctatgcctatattttggt

SEQ ID NO: 764446 - DNA, 19 bp, Mus musculus
  siRNA target sequence for MOR267-6 (NM_146715.1,651-669).
ctatgcctatattttggta

SEQ ID NO: 764447 - DNA, 19 bp, Mus musculus
  siRNA target sequence for MOR267-6 (NM_146715.1,656-674).
cctatattttggtagcaat

SEQ ID NO: 764448 - DNA, 19 bp, Mus musculus
  siRNA target sequence for MOR267-6 (NM_146715.1,693-711).
cgagggacggagaaaagct

SEQ ID NO: 764449 - DNA, 19 bp, Mus musculus
  siRNA target sequence for MOR267-6 (NM_146715.1,737-755).
cagtggtcgtgattcacta

SEQ ID NO: 764450 - DNA, 19 bp, Mus musculus
  siRNA target sequence for MOR123-2 (NM_146716.1,417-435).
ggtacagaaacagttagtt

SEQ ID NO: 764451 - DNA, 19 bp, Mus musculus
  siRNA target sequence for MOR123-2 (NM_146716.1,427-445).
cagttagttggggttacat

SEQ ID NO: 764452 - DNA, 19 bp, Mus musculus
  siRNA target sequence for MOR123-2 (NM_146716.1,486-504).
cactgcctctttaccttat

SEQ ID NO: 764453 - DNA, 19 bp, Mus musculus
  siRNA target sequence for MOR123-2 (NM_146716.1,490-508).
gcctctttaccttattgtt

SEQ ID NO: 764454 - DNA, 19 bp, Mus musculus
  siRNA target sequence for MOR123-2 (NM_146716.1,514-532).
gaggtggcccattactttt

SEQ ID NO: 764455 - DNA, 19 bp, Mus musculus
  siRNA target sequence for MOR123-2 (NM_146716.1,516-534).
ggtggcccattacttttgt

SEQ ID NO: 764456 - DNA, 19 bp, Mus musculus
  siRNA target sequence for MOR123-2 (NM_146716.1,576-594).
ctggcatgctcggctttat

SEQ ID NO: 764457 - DNA, 19 bp, Mus musculus
  siRNA target sequence for MOR123-2 (NM_146716.1,578-596).
ggcatgctcggctttatat

SEQ ID NO: 764458 - DNA, 19 bp, Mus musculus
  siRNA target sequence for MOR123-2 (NM_146716.1,579-597).
gcatgctcggctttatatt

SEQ ID NO: 764459 - DNA, 19 bp, Mus musculus
  siRNA target sequence for MOR123-2 (NM_146716.1,612-630).
gatcaatacatgcaatctt

SEQ ID NO: 764460 - DNA, 19 bp, Mus musculus
  siRNA target sequence for MOR123-2 (NM_146716.1,620-638).
catgcaatcttactttcat

SEQ ID NO: 764461 - DNA, 19 bp, Mus musculus
  siRNA target sequence for MOR123-2 (NM_146716.1,813-831).
gcttattgccttggtatat

SEQ ID NO: 764462 - DNA, 19 bp, Mus musculus
  siRNA target sequence for MOR123-2 (NM_146716.1,814-832).
cttattgccttggtatata

SEQ ID NO: 764463 - DNA, 19 bp, Mus musculus
  siRNA target sequence for MOR123-2 (NM_146716.1,909-927).
cacacagaggattaatgct

SEQ ID NO: 764464 - DNA, 19 bp, Mus musculus
  siRNA target sequence for MOR105-5P (NM_146718.1,146-164).
ctttcttggagttatggta

SEQ ID NO: 764465 - DNA, 19 bp, Mus musculus
  siRNA target sequence for MOR105-5P (NM_146718.1,150-168).
cttggagttatggtataca

SEQ ID NO: 764466 - DNA, 19 bp, Mus musculus
  siRNA target sequence for MOR105-5P (NM_146718.1,332-350).
ccctccactacccttcaat

SEQ ID NO: 764467 - DNA, 19 bp, Mus musculus
  siRNA target sequence for MOR105-5P (NM_146718.1,333-351).
cctccactacccttcaatt

SEQ ID NO: 764468 - DNA, 19 bp, Mus musculus
  siRNA target sequence for MOR105-5P (NM_146718.1,359-377).
cagcactctgtgtaaagat

SEQ ID NO: 764469 - DNA, 19 bp, Mus musculus
  siRNA target sequence for MOR105-5P (NM_146718.1,413-431).
ctatttctgaggttatcct

SEQ ID NO: 764470 - DNA, 19 bp, Mus musculus
  siRNA target sequence for MOR105-5P (NM_146718.1,513-531).
caaagacacatccactaat

SEQ ID NO: 764471 - DNA, 19 bp, Mus musculus
  siRNA target sequence for MOR105-5P (NM_146718.1,547-565).
gctgtcaatgccttcatta

SEQ ID NO: 764472 - DNA, 19 bp, Mus musculus
  siRNA target sequence for MOR105-5P (NM_146718.1,730-748).
ctaaagaagagctactcat

SEQ ID NO: 764473 - DNA, 19 bp, Mus musculus
  siRNA target sequence for MOR105-5P (NM_146718.1,735-753).
gaagagctactcattgact

SEQ ID NO: 764474 - DNA, 19 bp, Mus musculus
  siRNA target sequence for MOR105-5P (NM_146718.1,761-779).
gcactctagccgtagtcta

SEQ ID NO: 764475 - DNA, 19 bp, Mus musculus
  siRNA target sequence for MOR105-5P (NM_146718.1,880-898).
gctagtccaactcatcatt

SEQ ID NO: 764476 - DNA, 19 bp, Mus musculus
  siRNA target sequence for MOR105-4 (NM_146719.1,28-46).
caaactatggtgattgagt

SEQ ID NO: 764477 - DNA, 19 bp, Mus musculus
  siRNA target sequence for MOR105-4 (NM_146719.1,109-127).
cttgtctatgcattcatta

SEQ ID NO: 764478 - DNA, 19 bp, Mus musculus
  siRNA target sequence for MOR105-4 (NM_146719.1,228-246).
gtataccacgactaccatt

SEQ ID NO: 764479 - DNA, 19 bp, Mus musculus
  siRNA target sequence for MOR105-4 (NM_146719.1,478-496).
gtactccctgagattgcat

SEQ ID NO: 764480 - DNA, 19 bp, Mus musculus
  siRNA target sequence for MOR105-4 (NM_146719.1,611-629).
ccatccatgcagtagagat

SEQ ID NO: 764481 - DNA, 19 bp, Mus musculus
  siRNA target sequence for MOR105-4 (NM_146719.1,646-664).
gtaattgccctgtcctata

SEQ ID NO: 764482 - DNA, 19 bp, Mus musculus
  siRNA target sequence for MOR105-3 (NM_146720.1,216-234).
gtatacaacagctaccata

SEQ ID NO: 764483 - DNA, 19 bp, Mus musculus
  siRNA target sequence for MOR105-3 (NM_146720.1,292-310).
ctcttgcagatgtacttct

SEQ ID NO: 764484 - DNA, 19 bp, Mus musculus
  siRNA target sequence for MOR105-3 (NM_146720.1,386-404).
cactccgctacccaaacat

SEQ ID NO: 764485 - DNA, 19 bp, Mus musculus
  siRNA target sequence for MOR105-3 (NM_146720.1,429-447).
gctcactgctggttcttgt

SEQ ID NO: 764486 - DNA, 19 bp, Mus musculus
  siRNA target sequence for MOR105-3 (NM_146720.1,432-450).
cactgctggttcttgtgta

SEQ ID NO: 764487 - DNA, 19 bp, Mus musculus
  siRNA target sequence for MOR105-3 (NM_146720.1,462-480).
catccttctacctgagatt

SEQ ID NO: 764488 - DNA, 19 bp, Mus musculus
  siRNA target sequence for MOR105-3 (NM_146720.1,477-495).
gattgtgtggatttctact

SEQ ID NO: 764489 - DNA, 19 bp, Mus musculus
  siRNA target sequence for MOR105-3 (NM_146720.1,588-606).
ggttcaagatgtgatacat

SEQ ID NO: 764490 - DNA, 19 bp, Mus musculus
  siRNA target sequence for MOR105-3 (NM_146720.1,619-637).
ctgatcacaagtctgatta

SEQ ID NO: 764491 - DNA, 19 bp, Mus musculus
  siRNA target sequence for MOR105-3 (NM_146720.1,621-639).
gatcacaagtctgattatt

SEQ ID NO: 764492 - DNA, 19 bp, Mus musculus
  siRNA target sequence for MOR105-3 (NM_146720.1,624-642).
cacaagtctgattatttct

SEQ ID NO: 764493 - DNA, 19 bp, Mus musculus
  siRNA target sequence for MOR105-3 (NM_146720.1,778-796).
cgattctctgccacctata

SEQ ID NO: 764494 - DNA, 19 bp, Mus musculus
  siRNA target sequence for MOR105-3 (NM_146720.1,810-828).
caacaccattgctcttaca

SEQ ID NO: 764495 - DNA, 19 bp, Mus musculus
  siRNA target sequence for MOR105-3 (NM_146720.1,837-855).
gtttgcccctcttttcaat

SEQ ID NO: 764496 - DNA, 19 bp, Mus musculus
  siRNA target sequence for MOR105-3 (NM_146720.1,841-859).
gcccctcttttcaatccta

SEQ ID NO: 764497 - DNA, 19 bp, Mus musculus
  siRNA target sequence for MOR105-3 (NM_146720.1,847-865).
cttttcaatcctattatat

SEQ ID NO: 764498 - DNA, 19 bp, Mus musculus
  siRNA target sequence for MOR105-3 (NM_146720.1,895-913).
gcaattaacaaactcattt

SEQ ID NO: 764499 - DNA, 19 bp, Mus musculus
  siRNA target sequence for MOR105-2 (NM_146721.1,105-123).
catattcattgttattgga

SEQ ID NO: 764500 - DNA, 19 bp, Mus musculus
  siRNA target sequence for MOR105-2 (NM_146721.1,215-233).
ggtataccactgcaactat

SEQ ID NO: 764501 - DNA, 19 bp, Mus musculus
  siRNA target sequence for MOR105-2 (NM_146721.1,216-234).
gtataccactgcaactatt

SEQ ID NO: 764502 - DNA, 19 bp, Mus musculus
  siRNA target sequence for MOR105-2 (NM_146721.1,334-352).
ggtattttactgacaacaa

SEQ ID NO: 764503 - DNA, 19 bp, Mus musculus
  siRNA target sequence for MOR105-2 (NM_146721.1,386-404).
ctctccggtacccaactat

SEQ ID NO: 764504 - DNA, 19 bp, Mus musculus
  siRNA target sequence for MOR105-2 (NM_146721.1,388-406).
ctccggtacccaactatca

SEQ ID NO: 764505 - DNA, 19 bp, Mus musculus
  siRNA target sequence for MOR105-2 (NM_146721.1,569-587).
cggacacctccatgattct

SEQ ID NO: 764506 - DNA, 19 bp, Mus musculus
  siRNA target sequence for MOR105-2 (NM_146721.1,640-658).
gccatctcttacatgagaa

SEQ ID NO: 764507 - DNA, 19 bp, Mus musculus
  siRNA target sequence for MOR105-2 (NM_146721.1,641-659).
ccatctcttacatgagaat

SEQ ID NO: 764508 - DNA, 19 bp, Mus musculus
  siRNA target sequence for MOR105-2 (NM_146721.1,734-752).
gtgtcttcttgatgttcta

SEQ ID NO: 764509 - DNA, 19 bp, Mus musculus
  siRNA target sequence for MOR105-2 (NM_146721.1,787-805).
gctactttcccaccaattt

SEQ ID NO: 764510 - DNA, 19 bp, Mus musculus
  siRNA target sequence for MOR105-2 (NM_146721.1,788-806).
ctactttcccaccaatttt

SEQ ID NO: 764511 - DNA, 19 bp, Mus musculus
  siRNA target sequence for MOR105-2 (NM_146721.1,812-830).
cagctattgcactaatgtt

SEQ ID NO: 764512 - DNA, 19 bp, Mus musculus
  siRNA target sequence for MOR105-1 (NM_146722.1,17-35).
ggagccaagtaatagaatt

SEQ ID NO: 764513 - DNA, 19 bp, Mus musculus
  siRNA target sequence for MOR105-1 (NM_146722.1,67-85).
gtccagatttacctgtttt

SEQ ID NO: 764514 - DNA, 19 bp, Mus musculus
  siRNA target sequence for MOR105-1 (NM_146722.1,121-139).
ggaaacttgctgatattct

SEQ ID NO: 764515 - DNA, 19 bp, Mus musculus
  siRNA target sequence for MOR105-1 (NM_146722.1,168-186).
cacgcccatgtacagattt

SEQ ID NO: 764516 - DNA, 19 bp, Mus musculus
  siRNA target sequence for MOR105-1 (NM_146722.1,172-190).
cccatgtacagatttgtca

SEQ ID NO: 764517 - DNA, 19 bp, Mus musculus
  siRNA target sequence for MOR105-1 (NM_146722.1,267-285).
gaagacgatttccttttct

SEQ ID NO: 764518 - DNA, 19 bp, Mus musculus
  siRNA target sequence for MOR105-1 (NM_146722.1,354-372).
ggcatatgacaggtactta

SEQ ID NO: 764519 - DNA, 19 bp, Mus musculus
  siRNA target sequence for MOR105-1 (NM_146722.1,391-409).
cactatcccaccctaatga

SEQ ID NO: 764520 - DNA, 19 bp, Mus musculus
  siRNA target sequence for MOR105-1 (NM_146722.1,403-421).
ctaatgacccagtcacttt

SEQ ID NO: 764521 - DNA, 19 bp, Mus musculus
  siRNA target sequence for MOR105-1 (NM_146722.1,412-430).
cagtcactttgtatcaaga

SEQ ID NO: 764522 - DNA, 19 bp, Mus musculus
  siRNA target sequence for MOR105-1 (NM_146722.1,580-598).
gtcaatgtcctagtagatt

SEQ ID NO: 764523 - DNA, 19 bp, Mus musculus
  siRNA target sequence for MOR105-1 (NM_146722.1,582-600).
caatgtcctagtagatttt

SEQ ID NO: 764524 - DNA, 19 bp, Mus musculus
  siRNA target sequence for MOR105-1 (NM_146722.1,586-604).
gtcctagtagattttatta

SEQ ID NO: 764525 - DNA, 19 bp, Mus musculus
  siRNA target sequence for MOR105-1 (NM_146722.1,666-684).
ccgcacagttctcaagatt

SEQ ID NO: 764526 - DNA, 19 bp, Mus musculus
  siRNA target sequence for MOR105-1 (NM_146722.1,838-856).
gtgattactccctttctca

SEQ ID NO: 764527 - DNA, 19 bp, Mus musculus
  siRNA target sequence for MOR268-3 (NM_146724.1,19-37).
cagggttccaatattgtaa

SEQ ID NO: 764528 - DNA, 19 bp, Mus musculus
  siRNA target sequence for MOR268-3 (NM_146724.1,22-40).
ggttccaatattgtaatga

SEQ ID NO: 764529 - DNA, 19 bp, Mus musculus
  siRNA target sequence for MOR268-3 (NM_146724.1,452-470).
gagtgttcatgaaattagt

SEQ ID NO: 764530 - DNA, 19 bp, Mus musculus
  siRNA target sequence for MOR268-3 (NM_146724.1,855-873).
gatgtcattggcgtatata

SEQ ID NO: 764531 - DNA, 19 bp, Mus musculus
  siRNA target sequence for MOR268-1 (NM_146726.1,287-305).
gttttgcgcagacatattt

SEQ ID NO: 764532 - DNA, 19 bp, Mus musculus
  siRNA target sequence for MOR268-1 (NM_146726.1,293-311).
cgcagacatatttcattct

SEQ ID NO: 764533 - DNA, 19 bp, Mus musculus
  siRNA target sequence for MOR268-1 (NM_146726.1,497-515).
ccttctgtggtcctagtaa

SEQ ID NO: 764534 - DNA, 19 bp, Mus musculus
  siRNA target sequence for MOR268-1 (NM_146726.1,498-516).
cttctgtggtcctagtaaa

SEQ ID NO: 764535 - DNA, 19 bp, Mus musculus
  siRNA target sequence for MOR268-1 (NM_146726.1,508-526).
cctagtaaaattaatcata

SEQ ID NO: 764536 - DNA, 19 bp, Mus musculus
  siRNA target sequence for MOR268-1 (NM_146726.1,509-527).
ctagtaaaattaatcatat

SEQ ID NO: 764537 - DNA, 19 bp, Mus musculus
  siRNA target sequence for MOR268-1 (NM_146726.1,761-779).
catgcatgacttatctaca

SEQ ID NO: 764538 - DNA, 19 bp, Mus musculus
  siRNA target sequence for MOR15-1 (NM_146727.1,84-102).
gatagccataccattctgt

SEQ ID NO: 764539 - DNA, 19 bp, Mus musculus
  siRNA target sequence for MOR15-1 (NM_146727.1,156-174).
gcatgagcagactcttcat

SEQ ID NO: 764540 - DNA, 19 bp, Mus musculus
  siRNA target sequence for MOR15-1 (NM_146727.1,333-351).
ccttgaatcagctattatt

SEQ ID NO: 764541 - DNA, 19 bp, Mus musculus
  siRNA target sequence for MOR15-1 (NM_146727.1,492-510).
cttgaggaggctctacttt

SEQ ID NO: 764542 - DNA, 19 bp, Mus musculus
  siRNA target sequence for MOR15-1 (NM_146727.1,495-513).
gaggaggctctacttttgt

SEQ ID NO: 764543 - DNA, 19 bp, Mus musculus
  siRNA target sequence for MOR15-1 (NM_146727.1,581-599).
ctactgtcaacagtatctt

SEQ ID NO: 764544 - DNA, 19 bp, Mus musculus
  siRNA target sequence for MOR15-1 (NM_146727.1,783-801).
catgctgcatcgttttggt

SEQ ID NO: 764545 - DNA, 19 bp, Mus musculus
  siRNA target sequence for MOR15-1 (NM_146727.1,807-825).
gcttccctcacatgtctat

SEQ ID NO: 764546 - DNA, 19 bp, Mus musculus
  siRNA target sequence for MOR15-1 (NM_146727.1,834-852).
ggccaacatgcactttcta

SEQ ID NO: 764547 - DNA, 19 bp, Mus musculus
  siRNA target sequence for MOR15-1 (NM_146727.1,836-854).
ccaacatgcactttctaat

SEQ ID NO: 764548 - DNA, 19 bp, Mus musculus
  siRNA target sequence for MOR15-1 (NM_146727.1,949-967).
gctcaggctgcatctataa

SEQ ID NO: 764549 - DNA, 19 bp, Mus musculus
  siRNA target sequence for MOR15-1 (NM_146727.1,952-970).
caggctgcatctataacat

SEQ ID NO: 764550 - DNA, 19 bp, Mus musculus
  siRNA target sequence for MOR114-6 (NM_146728.1,261-279).
gtccattacctatattgct

SEQ ID NO: 764551 - DNA, 19 bp, Mus musculus
  siRNA target sequence for MOR114-6 (NM_146728.1,456-474).
cattctcccaccaattggt

SEQ ID NO: 764552 - DNA, 19 bp, Mus musculus
  siRNA target sequence for MOR114-6 (NM_146728.1,810-828).
gatttcacttcttatcata

SEQ ID NO: 764553 - DNA, 19 bp, Mus musculus
  siRNA target sequence for MOR114-6 (NM_146728.1,817-835).
cttcttatcatatcaattt

SEQ ID NO: 764554 - DNA, 19 bp, Mus musculus
  siRNA target sequence for MOR110-3 (NM_146729.1,904-922).
gtgcttcacagaatgtgtt

SEQ ID NO: 764555 - DNA, 19 bp, Mus musculus
  siRNA target sequence for MOR110-3 (NM_146729.1,906-924).
gcttcacagaatgtgttat

SEQ ID NO: 764556 - DNA, 19 bp, Mus musculus
  siRNA target sequence for MOR179-1 (NM_146730.1,185-203).
gtgcattgtcttttgtaga

SEQ ID NO: 764557 - DNA, 19 bp, Mus musculus
  siRNA target sequence for MOR179-1 (NM_146730.1,199-217).
gtagatgcttgctattctt

SEQ ID NO: 764558 - DNA, 19 bp, Mus musculus
  siRNA target sequence for MOR179-1 (NM_146730.1,206-224).
cttgctattcttcagatat

SEQ ID NO: 764559 - DNA, 19 bp, Mus musculus
  siRNA target sequence for MOR23-1 (NM_146731.1,5-23).
gctataccaacttgtcata

SEQ ID NO: 764560 - DNA, 19 bp, Mus musculus
  siRNA target sequence for MOR23-1 (NM_146731.1,69-87).
gcatgtgcagttttggatt

SEQ ID NO: 764561 - DNA, 19 bp, Mus musculus
  siRNA target sequence for MOR23-1 (NM_146731.1,73-91).
gtgcagttttggattggat

SEQ ID NO: 764562 - DNA, 19 bp, Mus musculus
  siRNA target sequence for MOR23-1 (NM_146731.1,133-151).
ctcttcctgctaatcatta

SEQ ID NO: 764563 - DNA, 19 bp, Mus musculus
  siRNA target sequence for MOR23-1 (NM_146731.1,232-250).
gccattgcccctaagatgt

SEQ ID NO: 764564 - DNA, 19 bp, Mus musculus
  siRNA target sequence for MOR23-1 (NM_146731.1,406-424).
gccgtccttacacctttat

SEQ ID NO: 764565 - DNA, 19 bp, Mus musculus
  siRNA target sequence for MOR23-1 (NM_146731.1,408-426).
cgtccttacacctttattt

SEQ ID NO: 764566 - DNA, 19 bp, Mus musculus
  siRNA target sequence for MOR23-1 (NM_146731.1,409-427).
gtccttacacctttatttt

SEQ ID NO: 764567 - DNA, 19 bp, Mus musculus
  siRNA target sequence for MOR23-1 (NM_146731.1,411-429).
ccttacacctttattttta

SEQ ID NO: 764568 - DNA, 19 bp, Mus musculus
  siRNA target sequence for MOR23-1 (NM_146731.1,438-456).
cgttctggtggttgcaatt

SEQ ID NO: 764569 - DNA, 19 bp, Mus musculus
  siRNA target sequence for MOR23-1 (NM_146731.1,510-528).
gttccactctgttgtgatt

SEQ ID NO: 764570 - DNA, 19 bp, Mus musculus
  siRNA target sequence for MOR23-1 (NM_146731.1,513-531).
ccactctgttgtgattgtt

SEQ ID NO: 764571 - DNA, 19 bp, Mus musculus
  siRNA target sequence for MOR23-1 (NM_146731.1,520-538).
gttgtgattgttcattctt

SEQ ID NO: 764572 - DNA, 19 bp, Mus musculus
  siRNA target sequence for MOR23-1 (NM_146731.1,619-637).
gcaattctaggttttgaca

SEQ ID NO: 764573 - DNA, 19 bp, Mus musculus
  siRNA target sequence for MOR23-1 (NM_146731.1,620-638).
caattctaggttttgacat

SEQ ID NO: 764574 - DNA, 19 bp, Mus musculus
  siRNA target sequence for MOR23-1 (NM_146731.1,625-643).
ctaggttttgacatgatat

SEQ ID NO: 764575 - DNA, 19 bp, Mus musculus
  siRNA target sequence for MOR23-1 (NM_146731.1,723-741).
cacttgtacggctcatatt

SEQ ID NO: 764576 - DNA, 19 bp, Mus musculus
  siRNA target sequence for MOR23-1 (NM_146731.1,725-743).
cttgtacggctcatattgt

SEQ ID NO: 764577 - DNA, 19 bp, Mus musculus
  siRNA target sequence for MOR23-1 (NM_146731.1,728-746).
gtacggctcatattgttgt

SEQ ID NO: 764578 - DNA, 19 bp, Mus musculus
  siRNA target sequence for MOR23-1 (NM_146731.1,809-827).
caccgtatgtccacatctt

SEQ ID NO: 764579 - DNA, 19 bp, Mus musculus
  siRNA target sequence for MOR23-1 (NM_146731.1,811-829).
ccgtatgtccacatcttat

SEQ ID NO: 764580 - DNA, 19 bp, Mus musculus
  siRNA target sequence for MOR23-1 (NM_146731.1,812-830).
cgtatgtccacatcttatt

SEQ ID NO: 764581 - DNA, 19 bp, Mus musculus
  siRNA target sequence for MOR23-1 (NM_146731.1,817-835).
gtccacatcttattgtcta

SEQ ID NO: 764582 - DNA, 19 bp, Mus musculus
  siRNA target sequence for MOR23-1 (NM_146731.1,903-921).
caaatgggttgtccaaatt

SEQ ID NO: 764583 - DNA, 19 bp, Mus musculus
  siRNA target sequence for MOR23-1 (NM_146731.1,908-926).
gggttgtccaaatttttgt

SEQ ID NO: 764584 - DNA, 19 bp, Mus musculus
  siRNA target sequence for MOR204-15 (NM_146732.1,475-493).
gattcctgctacatccttt

SEQ ID NO: 764585 - DNA, 19 bp, Mus musculus
  siRNA target sequence for MOR204-15 (NM_146732.1,907-925).
gctctgaagaagcaatttt

SEQ ID NO: 764586 - DNA, 19 bp, Mus musculus
  siRNA target sequence for MOR204-12 (NM_146735.1,479-497).
ccctcatcgtcacagttta

SEQ ID NO: 764587 - DNA, 19 bp, Mus musculus
  siRNA target sequence for MOR204-12 (NM_146735.1,481-499).
ctcatcgtcacagtttact

SEQ ID NO: 764588 - DNA, 19 bp, Mus musculus
  siRNA target sequence for MOR204-12 (NM_146735.1,483-501).
catcgtcacagtttacttt

SEQ ID NO: 764589 - DNA, 19 bp, Mus musculus
  siRNA target sequence for MOR204-9 (NM_146738.1,267-285).
gattgagagaaataccatt

SEQ ID NO: 764590 - DNA, 19 bp, Mus musculus
  siRNA target sequence for MOR204-8 (NM_146739.1,370-388).
gaccgatttatagcaattt

SEQ ID NO: 764591 - DNA, 19 bp, Mus musculus
  siRNA target sequence for MOR204-8 (NM_146739.1,510-528).
gttttgtggaccaaacaga

SEQ ID NO: 764592 - DNA, 19 bp, Mus musculus
  siRNA target sequence for MOR204-8 (NM_146739.1,545-563).
gcgattttgccccattagt

SEQ ID NO: 764593 - DNA, 19 bp, Mus musculus
  siRNA target sequence for MOR204-8 (NM_146739.1,546-564).
cgattttgccccattagta

SEQ ID NO: 764594 - DNA, 19 bp, Mus musculus
  siRNA target sequence for MOR204-8 (NM_146739.1,547-565).
gattttgccccattagtaa

SEQ ID NO: 764595 - DNA, 19 bp, Mus musculus
  siRNA target sequence for MOR204-8 (NM_146739.1,553-571).
gccccattagtaaaactat

SEQ ID NO: 764596 - DNA, 19 bp, Mus musculus
  siRNA target sequence for MOR204-8 (NM_146739.1,595-613).
gcagttgttccctcattca

SEQ ID NO: 764597 - DNA, 19 bp, Mus musculus
  siRNA target sequence for MOR204-8 (NM_146739.1,636-654).
gaccatatttgtaatagct

SEQ ID NO: 764598 - DNA, 19 bp, Mus musculus
  siRNA target sequence for MOR266-3 (NM_146740.1,98-116).
gcctagaacttcgtatgtt

SEQ ID NO: 764599 - DNA, 19 bp, Mus musculus
  siRNA target sequence for MOR266-3 (NM_146740.1,100-118).
ctagaacttcgtatgttct

SEQ ID NO: 764600 - DNA, 19 bp, Mus musculus
  siRNA target sequence for MOR266-3 (NM_146740.1,114-132).
gttctgcttccttggaata

SEQ ID NO: 764601 - DNA, 19 bp, Mus musculus
  siRNA target sequence for MOR266-3 (NM_146740.1,189-207).
gacagaaacacgtctacat

SEQ ID NO: 764602 - DNA, 19 bp, Mus musculus
  siRNA target sequence for MOR266-3 (NM_146740.1,230-248).
gcagcctatcaggaataga

SEQ ID NO: 764603 - DNA, 19 bp, Mus musculus
  siRNA target sequence for MOR266-3 (NM_146740.1,241-259).
ggaatagagctatgttaca

SEQ ID NO: 764604 - DNA, 19 bp, Mus musculus
  siRNA target sequence for MOR266-3 (NM_146740.1,263-281).
cagtggtggtgccacatat

SEQ ID NO: 764605 - DNA, 19 bp, Mus musculus
  siRNA target sequence for MOR266-3 (NM_146740.1,291-309).
caccctgaagtcagagaaa

SEQ ID NO: 764606 - DNA, 19 bp, Mus musculus
  siRNA target sequence for MOR266-3 (NM_146740.1,436-454).
cctctcatcatgactgtaa

SEQ ID NO: 764607 - DNA, 19 bp, Mus musculus
  siRNA target sequence for MOR266-3 (NM_146740.1,441-459).
catcatgactgtaacactt

SEQ ID NO: 764608 - DNA, 19 bp, Mus musculus
  siRNA target sequence for MOR266-3 (NM_146740.1,605-623).
gtgccacaagtcatatcca

SEQ ID NO: 764609 - DNA, 19 bp, Mus musculus
  siRNA target sequence for MOR245-1 (NM_146742.1,236-254).
cctcacccaagatgattta

SEQ ID NO: 764610 - DNA, 19 bp, Mus musculus
  siRNA target sequence for MOR245-1 (NM_146742.1,284-302).
cctttacaggttgtgttat

SEQ ID NO: 764611 - DNA, 19 bp, Mus musculus
  siRNA target sequence for MOR245-1 (NM_146742.1,290-308).
caggttgtgttattcagat

SEQ ID NO: 764612 - DNA, 19 bp, Mus musculus
  siRNA target sequence for MOR245-1 (NM_146742.1,428-446).
gtctcttctttgtagttat

SEQ ID NO: 764613 - DNA, 19 bp, Mus musculus
  siRNA target sequence for MOR245-1 (NM_146742.1,568-586).
gcttgtgtagatactcata

SEQ ID NO: 764614 - DNA, 19 bp, Mus musculus
  siRNA target sequence for MOR245-1 (NM_146742.1,569-587).
cttgtgtagatactcataa

SEQ ID NO: 764615 - DNA, 19 bp, Mus musculus
  siRNA target sequence for MOR245-1 (NM_146742.1,572-590).
gtgtagatactcataaact

SEQ ID NO: 764616 - DNA, 19 bp, Mus musculus
  siRNA target sequence for MOR245-1 (NM_146742.1,635-653).
ccttcttcatattgatagt

SEQ ID NO: 764617 - DNA, 19 bp, Mus musculus
  siRNA target sequence for MOR245-1 (NM_146742.1,639-657).
cttcatattgatagtttca

SEQ ID NO: 764618 - DNA, 19 bp, Mus musculus
  siRNA target sequence for MOR245-1 (NM_146742.1,795-813).
ctccgtacacctggataaa

SEQ ID NO: 764619 - DNA, 19 bp, Mus musculus
  siRNA target sequence for MOR245-1 (NM_146742.1,797-815).
ccgtacacctggataaatt

SEQ ID NO: 764620 - DNA, 19 bp, Mus musculus
  siRNA target sequence for MOR245-1 (NM_146742.1,798-816).
cgtacacctggataaattt

SEQ ID NO: 764621 - DNA, 19 bp, Mus musculus
  siRNA target sequence for MOR245-1 (NM_146742.1,896-914).
caatgaagagagtgttcaa

SEQ ID NO: 764622 - DNA, 19 bp, Mus musculus
  siRNA target sequence for MOR245-1 (NM_146742.1,919-937).
ctactgagttatagaaaga

SEQ ID NO: 764623 - DNA, 19 bp, Mus musculus
  siRNA target sequence for MOR204-7 (NM_146743.1,925-943).
cagcttagtaaaaaaacat

SEQ ID NO: 764624 - DNA, 19 bp, Mus musculus
  siRNA target sequence for MOR256-8 (NM_146744.1,12-30).
caacgacagctctgagtat

SEQ ID NO: 764625 - DNA, 19 bp, Mus musculus
  siRNA target sequence for MOR256-8 (NM_146744.1,16-34).
gacagctctgagtatggtt

SEQ ID NO: 764626 - DNA, 19 bp, Mus musculus
  siRNA target sequence for MOR256-8 (NM_146744.1,27-45).
gtatggtttcatcttagaa

SEQ ID NO: 764627 - DNA, 19 bp, Mus musculus
  siRNA target sequence for MOR256-8 (NM_146744.1,69-87).
ggagatggtactcttcata

SEQ ID NO: 764628 - DNA, 19 bp, Mus musculus
  siRNA target sequence for MOR256-8 (NM_146744.1,75-93).
ggtactcttcatagtaaat

SEQ ID NO: 764629 - DNA, 19 bp, Mus musculus
  siRNA target sequence for MOR256-8 (NM_146744.1,81-99).
cttcatagtaaattttact

SEQ ID NO: 764630 - DNA, 19 bp, Mus musculus
  siRNA target sequence for MOR256-8 (NM_146744.1,132-150).
cattatcctggtgtgtata

SEQ ID NO: 764631 - DNA, 19 bp, Mus musculus
  siRNA target sequence for MOR256-8 (NM_146744.1,515-533).
ggagaattaatcatttcct

SEQ ID NO: 764632 - DNA, 19 bp, Mus musculus
  siRNA target sequence for MOR256-8 (NM_146744.1,516-534).
gagaattaatcatttcctt

SEQ ID NO: 764633 - DNA, 19 bp, Mus musculus
  siRNA target sequence for MOR256-8 (NM_146744.1,586-604).
gaaatgttgtccttcactt

SEQ ID NO: 764634 - DNA, 19 bp, Mus musculus
  siRNA target sequence for MOR256-8 (NM_146744.1,602-620).
ctttggccatccttattgt

SEQ ID NO: 764635 - DNA, 19 bp, Mus musculus
  siRNA target sequence for MOR40-3 (NM_146750.1,99-117).
cttgcctatggctctactt

SEQ ID NO: 764636 - DNA, 19 bp, Mus musculus
  siRNA target sequence for MOR40-3 (NM_146750.1,133-151).
ggtgctaatttccttatct

SEQ ID NO: 764637 - DNA, 19 bp, Mus musculus
  siRNA target sequence for MOR40-3 (NM_146750.1,136-154).
gctaatttccttatcttga

SEQ ID NO: 764638 - DNA, 19 bp, Mus musculus
  siRNA target sequence for MOR40-3 (NM_146750.1,173-191).
ctaacctgcatcagtcaat

SEQ ID NO: 764639 - DNA, 19 bp, Mus musculus
  siRNA target sequence for MOR40-3 (NM_146750.1,181-199).
catcagtcaatgtatcagt

SEQ ID NO: 764640 - DNA, 19 bp, Mus musculus
  siRNA target sequence for MOR40-3 (NM_146750.1,186-204).
gtcaatgtatcagtttctt

SEQ ID NO: 764641 - DNA, 19 bp, Mus musculus
  siRNA target sequence for MOR40-3 (NM_146750.1,213-231).
ggctgtagtggatattggt

SEQ ID NO: 764642 - DNA, 19 bp, Mus musculus
  siRNA target sequence for MOR40-3 (NM_146750.1,214-232).
gctgtagtggatattggtt

SEQ ID NO: 764643 - DNA, 19 bp, Mus musculus
  siRNA target sequence for MOR40-3 (NM_146750.1,346-364).
gagtcaggcgtctttctat

SEQ ID NO: 764644 - DNA, 19 bp, Mus musculus
  siRNA target sequence for MOR40-3 (NM_146750.1,350-368).
caggcgtctttctatgcat

SEQ ID NO: 764645 - DNA, 19 bp, Mus musculus
  siRNA target sequence for MOR40-3 (NM_146750.1,361-379).
ctatgcatggcaatagata

SEQ ID NO: 764646 - DNA, 19 bp, Mus musculus
  siRNA target sequence for MOR40-3 (NM_146750.1,369-387).
ggcaatagatagatatgta

SEQ ID NO: 764647 - DNA, 19 bp, Mus musculus
  siRNA target sequence for MOR40-3 (NM_146750.1,402-420).
cctccagtatccttccata

SEQ ID NO: 764648 - DNA, 19 bp, Mus musculus
  siRNA target sequence for MOR40-3 (NM_146750.1,406-424).
cagtatccttccatagtca

SEQ ID NO: 764649 - DNA, 19 bp, Mus musculus
  siRNA target sequence for MOR40-3 (NM_146750.1,421-439).
gtcactgaagcttttgtaa

SEQ ID NO: 764650 - DNA, 19 bp, Mus musculus
  siRNA target sequence for MOR40-3 (NM_146750.1,463-481).
ctcaggagtggcctgttaa

SEQ ID NO: 764651 - DNA, 19 bp, Mus musculus
  siRNA target sequence for MOR40-3 (NM_146750.1,467-485).
ggagtggcctgttaaccat

SEQ ID NO: 764652 - DNA, 19 bp, Mus musculus
  siRNA target sequence for MOR40-3 (NM_146750.1,499-517).
ctagctgcccagagacaat

SEQ ID NO: 764653 - DNA, 19 bp, Mus musculus
  siRNA target sequence for MOR40-3 (NM_146750.1,541-559).
cactgcctttgctctaact

SEQ ID NO: 764654 - DNA, 19 bp, Mus musculus
  siRNA target sequence for MOR40-3 (NM_146750.1,572-590).
gtctggcctgtgatgatat

SEQ ID NO: 764655 - DNA, 19 bp, Mus musculus
  siRNA target sequence for MOR40-3 (NM_146750.1,576-594).
ggcctgtgatgatatcact

SEQ ID NO: 764656 - DNA, 19 bp, Mus musculus
  siRNA target sequence for MOR40-3 (NM_146750.1,602-620).
ggaactgccagttgacatt

SEQ ID NO: 764657 - DNA, 19 bp, Mus musculus
  siRNA target sequence for MOR40-3 (NM_146750.1,623-641).
cctggttgatacttggaat

SEQ ID NO: 764658 - DNA, 19 bp, Mus musculus
  siRNA target sequence for MOR40-3 (NM_146750.1,704-722).
ccactgaggcagtatctaa

SEQ ID NO: 764659 - DNA, 19 bp, Mus musculus
  siRNA target sequence for MOR40-3 (NM_146750.1,754-772).
ctcattatgttttactaca

SEQ ID NO: 764660 - DNA, 19 bp, Mus musculus
  siRNA target sequence for MOR40-3 (NM_146750.1,835-853).
ctcctcaatgtgatgcata

SEQ ID NO: 764661 - DNA, 19 bp, Mus musculus
  siRNA target sequence for MOR40-3 (NM_146750.1,840-858).
caatgtgatgcatattgtt

SEQ ID NO: 764662 - DNA, 19 bp, Mus musculus
  siRNA target sequence for MOR31-12 (NM_146751.1,267-285).
gggggctcgagaaatcaca

SEQ ID NO: 764663 - DNA, 19 bp, Mus musculus
  siRNA target sequence for MOR31-12 (NM_146751.1,268-286).
ggggctcgagaaatcacat

SEQ ID NO: 764664 - DNA, 19 bp, Mus musculus
  siRNA target sequence for MOR31-12 (NM_146751.1,269-287).
gggctcgagaaatcacatt

SEQ ID NO: 764665 - DNA, 19 bp, Mus musculus
  siRNA target sequence for MOR31-12 (NM_146751.1,419-437).
ccaagactatcgtcaagat

SEQ ID NO: 764666 - DNA, 19 bp, Mus musculus
  siRNA target sequence for MOR31-12 (NM_146751.1,420-438).
caagactatcgtcaagatt

SEQ ID NO: 764667 - DNA, 19 bp, Mus musculus
  siRNA target sequence for MOR31-12 (NM_146751.1,654-672).
ctcttatactctcatctta

SEQ ID NO: 764668 - DNA, 19 bp, Mus musculus
  siRNA target sequence for MOR31-12 (NM_146751.1,835-853).
gccaatctctacattgtta

SEQ ID NO: 764669 - DNA, 19 bp, Mus musculus
  siRNA target sequence for MOR31-12 (NM_146751.1,836-854).
ccaatctctacattgttat

SEQ ID NO: 764670 - DNA, 19 bp, Mus musculus
  siRNA target sequence for MOR31-12 (NM_146751.1,907-925).
gaaaaggtcatccttctat

SEQ ID NO: 764671 - DNA, 19 bp, Mus musculus
  siRNA target sequence for MOR31-12 (NM_146751.1,912-930).
ggtcatccttctattctct

SEQ ID NO: 764672 - DNA, 19 bp, Mus musculus
  siRNA target sequence for MOR172-6 (NM_146752.1,363-381).
ccgttatgtggccattgta

SEQ ID NO: 764673 - DNA, 19 bp, Mus musculus
  siRNA target sequence for MOR172-6 (NM_146752.1,398-416).
cagtggttatgacaaaatt

SEQ ID NO: 764674 - DNA, 19 bp, Mus musculus
  siRNA target sequence for MOR172-6 (NM_146752.1,443-461).
cgtgcttaggaggtactat

SEQ ID NO: 764675 - DNA, 19 bp, Mus musculus
  siRNA target sequence for MOR172-6 (NM_146752.1,447-465).
cttaggaggtactatcaca

SEQ ID NO: 764676 - DNA, 19 bp, Mus musculus
  siRNA target sequence for MOR172-6 (NM_146752.1,451-469).
ggaggtactatcacatcat

SEQ ID NO: 764677 - DNA, 19 bp, Mus musculus
  siRNA target sequence for MOR172-6 (NM_146752.1,458-476).
ctatcacatcattaacaca

SEQ ID NO: 764678 - DNA, 19 bp, Mus musculus
  siRNA target sequence for MOR172-6 (NM_146752.1,473-491).
cacatacaattggattaat

SEQ ID NO: 764679 - DNA, 19 bp, Mus musculus
  siRNA target sequence for MOR172-6 (NM_146752.1,475-493).
catacaattggattaataa

SEQ ID NO: 764680 - DNA, 19 bp, Mus musculus
  siRNA target sequence for MOR172-6 (NM_146752.1,610-628).
ggagtcattgccataacta

SEQ ID NO: 764681 - DNA, 19 bp, Mus musculus
  siRNA target sequence for MOR172-6 (NM_146752.1,615-633).
cattgccataactacactt

SEQ ID NO: 764682 - DNA, 19 bp, Mus musculus
  siRNA target sequence for MOR172-6 (NM_146752.1,638-656).
ccgtggttctctcttatat

SEQ ID NO: 764683 - DNA, 19 bp, Mus musculus
  siRNA target sequence for MOR172-6 (NM_146752.1,757-775).
ggttctataagtttcagtt

SEQ ID NO: 764684 - DNA, 19 bp, Mus musculus
  siRNA target sequence for MOR172-6 (NM_146752.1,758-776).
gttctataagtttcagtta

SEQ ID NO: 764685 - DNA, 19 bp, Mus musculus
  siRNA target sequence for MOR172-6 (NM_146752.1,910-928).
gttatggagatcaaacatt

SEQ ID NO: 764686 - DNA, 19 bp, Mus musculus
  siRNA target sequence for MOR41-1 (NM_146754.1,11-29).
catcctacaaccacacaat

SEQ ID NO: 764687 - DNA, 19 bp, Mus musculus
  siRNA target sequence for MOR41-1 (NM_146754.1,31-49).
gaatcccctggcactttct

SEQ ID NO: 764688 - DNA, 19 bp, Mus musculus
  siRNA target sequence for MOR41-1 (NM_146754.1,64-82).
ccagggtttcagtcttctt

SEQ ID NO: 764689 - DNA, 19 bp, Mus musculus
  siRNA target sequence for MOR41-1 (NM_146754.1,65-83).
cagggtttcagtcttctta

SEQ ID NO: 764690 - DNA, 19 bp, Mus musculus
  siRNA target sequence for MOR41-1 (NM_146754.1,103-121).
ctgagtaccatgtatagca

SEQ ID NO: 764691 - DNA, 19 bp, Mus musculus
  siRNA target sequence for MOR41-1 (NM_146754.1,105-123).
gagtaccatgtatagcata

SEQ ID NO: 764692 - DNA, 19 bp, Mus musculus
  siRNA target sequence for MOR41-1 (NM_146754.1,173-191).
ctctacaagagcctatgta

SEQ ID NO: 764693 - DNA, 19 bp, Mus musculus
  siRNA target sequence for MOR41-1 (NM_146754.1,236-254).
cttctgtggtacctaagat

SEQ ID NO: 764694 - DNA, 19 bp, Mus musculus
  siRNA target sequence for MOR41-1 (NM_146754.1,291-309).
ctttaatgcctgtttcact

SEQ ID NO: 764695 - DNA, 19 bp, Mus musculus
  siRNA target sequence for MOR41-1 (NM_146754.1,398-416).
ccttacattacatgagaat

SEQ ID NO: 764696 - DNA, 19 bp, Mus musculus
  siRNA target sequence for MOR41-1 (NM_146754.1,399-417).
cttacattacatgagaatt

SEQ ID NO: 764697 - DNA, 19 bp, Mus musculus
  siRNA target sequence for MOR41-1 (NM_146754.1,458-476).
ccgttagagctgttatttt

SEQ ID NO: 764698 - DNA, 19 bp, Mus musculus
  siRNA target sequence for MOR41-1 (NM_146754.1,491-509).
gttggatgttgagtcattt

SEQ ID NO: 764699 - DNA, 19 bp, Mus musculus
  siRNA target sequence for MOR41-1 (NM_146754.1,529-547).
gtagttcctcattcctatt

SEQ ID NO: 764700 - DNA, 19 bp, Mus musculus
  siRNA target sequence for MOR41-1 (NM_146754.1,596-614).
gcagtctctacagtttgat

SEQ ID NO: 764701 - DNA, 19 bp, Mus musculus
  siRNA target sequence for MOR41-1 (NM_146754.1,597-615).
cagtctctacagtttgatt

SEQ ID NO: 764702 - DNA, 19 bp, Mus musculus
  siRNA target sequence for MOR41-1 (NM_146754.1,828-846).
cactcaagtgctattagct

SEQ ID NO: 764703 - DNA, 19 bp, Mus musculus
  siRNA target sequence for MOR41-1 (NM_146754.1,870-888).
caccttaaaccctatcatt

SEQ ID NO: 764704 - DNA, 19 bp, Mus musculus
  siRNA target sequence for MOR41-1 (NM_146754.1,879-897).
ccctatcatttatggtatt

SEQ ID NO: 764705 - DNA, 19 bp, Mus musculus
  siRNA target sequence for MOR41-1 (NM_146754.1,880-898).
cctatcatttatggtatta

SEQ ID NO: 764706 - DNA, 19 bp, Mus musculus
  siRNA target sequence for MOR41-1 (NM_146754.1,893-911).
gtattaggaccagacaaat

SEQ ID NO: 764707 - DNA, 19 bp, Mus musculus
  siRNA target sequence for MOR41-1 (NM_146754.1,929-947).
gtctgctgacacattgctt

SEQ ID NO: 764708 - DNA, 19 bp, Mus musculus
  siRNA target sequence for MOR29-1 (NM_146755.1,64-82).
ctggaggcgtcccactttt

SEQ ID NO: 764709 - DNA, 19 bp, Mus musculus
  siRNA target sequence for MOR29-1 (NM_146755.1,67-85).
gaggcgtcccacttttgga

SEQ ID NO: 764710 - DNA, 19 bp, Mus musculus
  siRNA target sequence for MOR29-1 (NM_146755.1,74-92).
cccacttttggattgcatt

SEQ ID NO: 764711 - DNA, 19 bp, Mus musculus
  siRNA target sequence for MOR29-1 (NM_146755.1,195-213).
gtgcatgctgtccactatt

SEQ ID NO: 764712 - DNA, 19 bp, Mus musculus
  siRNA target sequence for MOR29-1 (NM_146755.1,197-215).
gcatgctgtccactattga

SEQ ID NO: 764713 - DNA, 19 bp, Mus musculus
  siRNA target sequence for MOR29-1 (NM_146755.1,341-359).
ccggtatcctgctatcaat

SEQ ID NO: 764714 - DNA, 19 bp, Mus musculus
  siRNA target sequence for MOR29-1 (NM_146755.1,351-369).
gctatcaatggcctttgat

SEQ ID NO: 764715 - DNA, 19 bp, Mus musculus
  siRNA target sequence for MOR29-1 (NM_146755.1,789-807).
gcgctttggtcaacatgta

SEQ ID NO: 764716 - DNA, 19 bp, Mus musculus
  siRNA target sequence for MOR29-1 (NM_146755.1,908-926).
gagcactccgactactcaa

SEQ ID NO: 764717 - DNA, 19 bp, Mus musculus
  siRNA target sequence for MOR26-3 (NM_146756.1,17-35).
cacatcactacatttcatt

SEQ ID NO: 764718 - DNA, 19 bp, Mus musculus
  siRNA target sequence for MOR26-3 (NM_146756.1,416-434).
cagccatggttattaagct

SEQ ID NO: 764719 - DNA, 19 bp, Mus musculus
  siRNA target sequence for MOR26-3 (NM_146756.1,455-473).
gagctctgctgatggtttt

SEQ ID NO: 764720 - DNA, 19 bp, Mus musculus
  siRNA target sequence for MOR26-3 (NM_146756.1,503-521).
cctactacacaggctatat

SEQ ID NO: 764721 - DNA, 19 bp, Mus musculus
  siRNA target sequence for MOR26-3 (NM_146756.1,603-621).
ctcagcagccctttcagta

SEQ ID NO: 764722 - DNA, 19 bp, Mus musculus
  siRNA target sequence for MOR26-3 (NM_146756.1,607-625).
gcagccctttcagtaataa

SEQ ID NO: 764723 - DNA, 19 bp, Mus musculus
  siRNA target sequence for MOR26-3 (NM_146756.1,610-628).
gccctttcagtaataacat

SEQ ID NO: 764724 - DNA, 19 bp, Mus musculus
  siRNA target sequence for MOR26-3 (NM_146756.1,638-656).
ggctcatagccgcatctta

SEQ ID NO: 764725 - DNA, 19 bp, Mus musculus
  siRNA target sequence for MOR26-3 (NM_146756.1,646-664).
gccgcatcttacataaaaa

SEQ ID NO: 764726 - DNA, 19 bp, Mus musculus
  siRNA target sequence for MOR26-3 (NM_146756.1,647-665).
ccgcatcttacataaaaat

SEQ ID NO: 764727 - DNA, 19 bp, Mus musculus
  siRNA target sequence for MOR26-3 (NM_146756.1,811-829).
ccaagtgtccacatcatct

SEQ ID NO: 764728 - DNA, 19 bp, Mus musculus
  siRNA target sequence for MOR14-6 (NM_146757.1,702-720).
cctcaatattgctttctct

SEQ ID NO: 764729 - DNA, 19 bp, Mus musculus
  siRNA target sequence for MOR32-5 (NM_146758.1,99-117).
ctttgcagtgtatttaata

SEQ ID NO: 764730 - DNA, 19 bp, Mus musculus
  siRNA target sequence for MOR32-5 (NM_146758.1,302-320).
ctcagatgtatataatcca

SEQ ID NO: 764731 - DNA, 19 bp, Mus musculus
  siRNA target sequence for MOR32-5 (NM_146758.1,363-381).
catagatcgatatattgct

SEQ ID NO: 764732 - DNA, 19 bp, Mus musculus
  siRNA target sequence for MOR32-5 (NM_146758.1,391-409).
ccactgaggtacagtatga

SEQ ID NO: 764733 - DNA, 19 bp, Mus musculus
  siRNA target sequence for MOR32-5 (NM_146758.1,430-448).
gctattctgggtataatca

SEQ ID NO: 764734 - DNA, 19 bp, Mus musculus
  siRNA target sequence for MOR32-5 (NM_146758.1,431-449).
ctattctgggtataatcat

SEQ ID NO: 764735 - DNA, 19 bp, Mus musculus
  siRNA target sequence for MOR32-5 (NM_146758.1,439-457).
ggtataatcatcatagtca

SEQ ID NO: 764736 - DNA, 19 bp, Mus musculus
  siRNA target sequence for MOR32-5 (NM_146758.1,450-468).
catagtcaggactttgata

SEQ ID NO: 764737 - DNA, 19 bp, Mus musculus
  siRNA target sequence for MOR32-5 (NM_146758.1,510-528).
ctgtggtgtccggattatt

SEQ ID NO: 764738 - DNA, 19 bp, Mus musculus
  siRNA target sequence for MOR32-5 (NM_146758.1,575-593).
ccaatatcaaggtcaatgt

SEQ ID NO: 764739 - DNA, 19 bp, Mus musculus
  siRNA target sequence for MOR32-5 (NM_146758.1,585-603).
ggtcaatgttatttatgga

SEQ ID NO: 764740 - DNA, 19 bp, Mus musculus
  siRNA target sequence for MOR32-5 (NM_146758.1,586-604).
gtcaatgttatttatggat

SEQ ID NO: 764741 - DNA, 19 bp, Mus musculus
  siRNA target sequence for MOR32-5 (NM_146758.1,615-633).
ctcagtgggatacattgat

SEQ ID NO: 764742 - DNA, 19 bp, Mus musculus
  siRNA target sequence for MOR32-5 (NM_146758.1,740-758).
gtgtcatgttggcatttta

SEQ ID NO: 764743 - DNA, 19 bp, Mus musculus
  siRNA target sequence for MOR32-5 (NM_146758.1,908-926).
gagtactaagaatgcttaa

SEQ ID NO: 764744 - DNA, 19 bp, Mus musculus
  siRNA target sequence for MOR32-5 (NM_146758.1,917-935).
gaatgcttaaccctaagat

SEQ ID NO: 764745 - DNA, 19 bp, Mus musculus
  siRNA target sequence for MOR119-1 (NM_146759.1,270-288).
ggcgatctttctttttgga

SEQ ID NO: 764746 - DNA, 19 bp, Mus musculus
  siRNA target sequence for MOR119-1 (NM_146759.1,280-298).
ctttttggagacagaacaa

SEQ ID NO: 764747 - DNA, 19 bp, Mus musculus
  siRNA target sequence for MOR119-1 (NM_146759.1,286-304).
ggagacagaacaattcatt

SEQ ID NO: 764748 - DNA, 19 bp, Mus musculus
  siRNA target sequence for MOR119-1 (NM_146759.1,287-305).
gagacagaacaattcattt

SEQ ID NO: 764749 - DNA, 19 bp, Mus musculus
  siRNA target sequence for MOR119-1 (NM_146759.1,289-307).
gacagaacaattcatttca

SEQ ID NO: 764750 - DNA, 19 bp, Mus musculus
  siRNA target sequence for MOR119-1 (NM_146759.1,301-319).
catttcactccctgtatca

SEQ ID NO: 764751 - DNA, 19 bp, Mus musculus
  siRNA target sequence for MOR119-1 (NM_146759.1,318-336).
catccaagcgttttctttt

SEQ ID NO: 764752 - DNA, 19 bp, Mus musculus
  siRNA target sequence for MOR119-1 (NM_146759.1,486-504).
cctagtaaccggtgtgatt

SEQ ID NO: 764753 - DNA, 19 bp, Mus musculus
  siRNA target sequence for MOR119-1 (NM_146759.1,511-529).
ctttccaggctgtctttct

SEQ ID NO: 764754 - DNA, 19 bp, Mus musculus
  siRNA target sequence for MOR119-1 (NM_146759.1,599-617).
ccaaatctcttgaaagcat

SEQ ID NO: 764755 - DNA, 19 bp, Mus musculus
  siRNA target sequence for MOR119-1 (NM_146759.1,653-671).
ctgtccttgcggctatatt

SEQ ID NO: 764756 - DNA, 19 bp, Mus musculus
  siRNA target sequence for MOR119-1 (NM_146759.1,665-683).
ctatatttgcatatagcaa

SEQ ID NO: 764757 - DNA, 19 bp, Mus musculus
  siRNA target sequence for MOR119-1 (NM_146759.1,674-692).
catatagcaacatactaat

SEQ ID NO: 764758 - DNA, 19 bp, Mus musculus
  siRNA target sequence for MOR119-1 (NM_146759.1,695-713).
caatcatgcgtcttccatt

SEQ ID NO: 764759 - DNA, 19 bp, Mus musculus
  siRNA target sequence for MOR119-1 (NM_146759.1,714-732).
ggccaaggatcgacagaaa

SEQ ID NO: 764760 - DNA, 19 bp, Mus musculus
  siRNA target sequence for MOR119-1 (NM_146759.1,839-857).
gagaggccgctctcgtaaa

SEQ ID NO: 764761 - DNA, 19 bp, Mus musculus
  siRNA target sequence for MOR119-1 (NM_146759.1,841-859).
gaggccgctctcgtaaaca

SEQ ID NO: 764762 - DNA, 19 bp, Mus musculus
  siRNA target sequence for MOR119-1 (NM_146759.1,935-953).
cactatccagggtgaactt

SEQ ID NO: 764763 - DNA, 19 bp, Mus musculus
  siRNA target sequence for MOR32-4 (NM_146760.1,859-877).
gctcttaaccctcttattt

SEQ ID NO: 764764 - DNA, 19 bp, Mus musculus
  siRNA target sequence for MOR32-4 (NM_146760.1,901-919).
cgagatcgtgtggtgatat

SEQ ID NO: 764765 - DNA, 19 bp, Mus musculus
  siRNA target sequence for MOR32-4 (NM_146760.1,902-920).
gagatcgtgtggtgatatt

SEQ ID NO: 764766 - DNA, 19 bp, Mus musculus
  siRNA target sequence for MOR32-4 (NM_146760.1,904-922).
gatcgtgtggtgatatttt

SEQ ID NO: 764767 - DNA, 19 bp, Mus musculus
  siRNA target sequence for MOR32-4 (NM_146760.1,907-925).
cgtgtggtgatattttttt

SEQ ID NO: 764768 - DNA, 19 bp, Mus musculus
  siRNA target sequence for MOR172-5 (NM_146766.1,240-258).
gatgctcatcaatatcgta

SEQ ID NO: 764769 - DNA, 19 bp, Mus musculus
  siRNA target sequence for MOR172-5 (NM_146766.1,246-264).
catcaatatcgtatcagaa

SEQ ID NO: 764770 - DNA, 19 bp, Mus musculus
  siRNA target sequence for MOR172-5 (NM_146766.1,255-273).
cgtatcagaacacaaatct

SEQ ID NO: 764771 - DNA, 19 bp, Mus musculus
  siRNA target sequence for MOR172-5 (NM_146766.1,408-426).
gacattcagcatctgtatt

SEQ ID NO: 764772 - DNA, 19 bp, Mus musculus
  siRNA target sequence for MOR207-1 (NM_146767.1,39-57).
gttcagtggattttcagat

SEQ ID NO: 764773 - DNA, 19 bp, Mus musculus
  siRNA target sequence for MOR207-1 (NM_146767.1,130-148).
gggttaatcttgttaatta

SEQ ID NO: 764774 - DNA, 19 bp, Mus musculus
  siRNA target sequence for MOR207-1 (NM_146767.1,132-150).
gttaatcttgttaattaga

SEQ ID NO: 764775 - DNA, 19 bp, Mus musculus
  siRNA target sequence for MOR207-1 (NM_146767.1,191-209).
gcaatttagcattcattga

SEQ ID NO: 764776 - DNA, 19 bp, Mus musculus
  siRNA target sequence for MOR207-1 (NM_146767.1,199-217).
gcattcattgacatatttt

SEQ ID NO: 764777 - DNA, 19 bp, Mus musculus
  siRNA target sequence for MOR207-1 (NM_146767.1,267-285).
gaaatcaatatcctttgta

SEQ ID NO: 764778 - DNA, 19 bp, Mus musculus
  siRNA target sequence for MOR207-1 (NM_146767.1,381-399).
caatcccttactatattct

SEQ ID NO: 764779 - DNA, 19 bp, Mus musculus
  siRNA target sequence for MOR207-1 (NM_146767.1,422-440).
gcaactggctggcagtaat

SEQ ID NO: 764780 - DNA, 19 bp, Mus musculus
  siRNA target sequence for MOR207-1 (NM_146767.1,428-446).
ggctggcagtaataccata

SEQ ID NO: 764781 - DNA, 19 bp, Mus musculus
  siRNA target sequence for MOR207-1 (NM_146767.1,433-451).
gcagtaataccatacatga

SEQ ID NO: 764782 - DNA, 19 bp, Mus musculus
  siRNA target sequence for MOR207-1 (NM_146767.1,434-452).
cagtaataccatacatgat

SEQ ID NO: 764783 - DNA, 19 bp, Mus musculus
  siRNA target sequence for MOR207-1 (NM_146767.1,450-468).
gataggcttcacaaattct

SEQ ID NO: 764784 - DNA, 19 bp, Mus musculus
  siRNA target sequence for MOR207-1 (NM_146767.1,456-474).
cttcacaaattctctgata

SEQ ID NO: 764785 - DNA, 19 bp, Mus musculus
  siRNA target sequence for MOR207-1 (NM_146767.1,508-526).
gatccctacatcaatcatt

SEQ ID NO: 764786 - DNA, 19 bp, Mus musculus
  siRNA target sequence for MOR207-1 (NM_146767.1,511-529).
ccctacatcaatcatttct

SEQ ID NO: 764787 - DNA, 19 bp, Mus musculus
  siRNA target sequence for MOR207-1 (NM_146767.1,572-590).
ccttcagcacggaattggt

SEQ ID NO: 764788 - DNA, 19 bp, Mus musculus
  siRNA target sequence for MOR207-1 (NM_146767.1,578-596).
gcacggaattggtgatctt

SEQ ID NO: 764789 - DNA, 19 bp, Mus musculus
  siRNA target sequence for MOR207-1 (NM_146767.1,663-681).
ctcagccatccttaggata

SEQ ID NO: 764790 - DNA, 19 bp, Mus musculus
  siRNA target sequence for MOR207-1 (NM_146767.1,747-765).
cttctatggctctttgatt

SEQ ID NO: 764791 - DNA, 19 bp, Mus musculus
  siRNA target sequence for MOR206-3 (NM_146768.1,3-21).
gaataccttgaattataca

SEQ ID NO: 764792 - DNA, 19 bp, Mus musculus
  siRNA target sequence for MOR206-3 (NM_146768.1,255-273).
gctgacttccactaagaat

SEQ ID NO: 764793 - DNA, 19 bp, Mus musculus
  siRNA target sequence for MOR206-3 (NM_146768.1,433-451).
cttactgggtcatatgtgt

SEQ ID NO: 764794 - DNA, 19 bp, Mus musculus
  siRNA target sequence for MOR206-3 (NM_146768.1,470-488).
ctgtcaatatgttatgcat

SEQ ID NO: 764795 - DNA, 19 bp, Mus musculus
  siRNA target sequence for MOR206-3 (NM_146768.1,485-503).
gcatgggtacactggattt

SEQ ID NO: 764796 - DNA, 19 bp, Mus musculus
  siRNA target sequence for MOR206-3 (NM_146768.1,566-584).
gcagcaacacacatgatat

SEQ ID NO: 764797 - DNA, 19 bp, Mus musculus
  siRNA target sequence for MOR206-3 (NM_146768.1,567-585).
cagcaacacacatgatatt

SEQ ID NO: 764798 - DNA, 19 bp, Mus musculus
  siRNA target sequence for MOR206-3 (NM_146768.1,610-628).
ggttccactctactgttat

SEQ ID NO: 764799 - DNA, 19 bp, Mus musculus
  siRNA target sequence for MOR206-3 (NM_146768.1,614-632).
ccactctactgttatctct

SEQ ID NO: 764800 - DNA, 19 bp, Mus musculus
  siRNA target sequence for MOR206-3 (NM_146768.1,622-640).
ctgttatctcttatcacaa

SEQ ID NO: 764801 - DNA, 19 bp, Mus musculus
  siRNA target sequence for MOR206-3 (NM_146768.1,765-783).
gatcttcacccatttaaaa

SEQ ID NO: 764802 - DNA, 19 bp, Mus musculus
  siRNA target sequence for MOR206-3 (NM_146768.1,896-914).
gtgctattgatagaattat

SEQ ID NO: 764803 - DNA, 19 bp, Mus musculus
  siRNA target sequence for MOR206-3 (NM_146768.1,898-916).
gctattgatagaattataa

SEQ ID NO: 764804 - DNA, 19 bp, Mus musculus
  siRNA target sequence for MOR172-3 (NM_146770.1,36-54).
catactgatcggcttaaca

SEQ ID NO: 764805 - DNA, 19 bp, Mus musculus
  siRNA target sequence for MOR172-3 (NM_146770.1,757-775).
ggatctttgacatttaact

SEQ ID NO: 764806 - DNA, 19 bp, Mus musculus
  siRNA target sequence for MOR172-3 (NM_146770.1,758-776).
gatctttgacatttaacta

SEQ ID NO: 764807 - DNA, 19 bp, Mus musculus
  siRNA target sequence for MOR174-5 (NM_146771.1,21-39).
gagtactggagtcgtattt

SEQ ID NO: 764808 - DNA, 19 bp, Mus musculus
  siRNA target sequence for MOR174-5 (NM_146771.1,23-41).
gtactggagtcgtatttgt

SEQ ID NO: 764809 - DNA, 19 bp, Mus musculus
  siRNA target sequence for MOR174-5 (NM_146771.1,54-72).
ctcagagtatccgaactta

SEQ ID NO: 764810 - DNA, 19 bp, Mus musculus
  siRNA target sequence for MOR174-5 (NM_146771.1,108-126).
caccatcactgttttggaa

SEQ ID NO: 764811 - DNA, 19 bp, Mus musculus
  siRNA target sequence for MOR174-5 (NM_146771.1,244-262).
ctgttagaccttctgataa

SEQ ID NO: 764812 - DNA, 19 bp, Mus musculus
  siRNA target sequence for MOR174-5 (NM_146771.1,246-264).
gttagaccttctgataaca

SEQ ID NO: 764813 - DNA, 19 bp, Mus musculus
  siRNA target sequence for MOR174-5 (NM_146771.1,279-297).
gtccctcaaaggatgcata

SEQ ID NO: 764814 - DNA, 19 bp, Mus musculus
  siRNA target sequence for MOR174-5 (NM_146771.1,282-300).
cctcaaaggatgcataatt

SEQ ID NO: 764815 - DNA, 19 bp, Mus musculus
  siRNA target sequence for MOR174-5 (NM_146771.1,323-341).
gtgtggttacccaaaactt

SEQ ID NO: 764816 - DNA, 19 bp, Mus musculus
  siRNA target sequence for MOR174-5 (NM_146771.1,325-343).
gtggttacccaaaacttca

SEQ ID NO: 764817 - DNA, 19 bp, Mus musculus
  siRNA target sequence for MOR174-5 (NM_146771.1,328-346).
gttacccaaaacttcatgt

SEQ ID NO: 764818 - DNA, 19 bp, Mus musculus
  siRNA target sequence for MOR174-5 (NM_146771.1,436-454).
gtaactggaacttacctat

SEQ ID NO: 764819 - DNA, 19 bp, Mus musculus
  siRNA target sequence for MOR174-5 (NM_146771.1,496-514).
gcattatcttactgtagat

SEQ ID NO: 764820 - DNA, 19 bp, Mus musculus
  siRNA target sequence for MOR174-5 (NM_146771.1,507-525).
ctgtagatcttccatcatt

SEQ ID NO: 764821 - DNA, 19 bp, Mus musculus
  siRNA target sequence for MOR174-5 (NM_146771.1,541-559).
gagtactctgccataattt

SEQ ID NO: 764822 - DNA, 19 bp, Mus musculus
  siRNA target sequence for MOR174-5 (NM_146771.1,543-561).
gtactctgccataatttct

SEQ ID NO: 764823 - DNA, 19 bp, Mus musculus
  siRNA target sequence for MOR174-5 (NM_146771.1,588-606).
ccagatagcgtgcttgtta

SEQ ID NO: 764824 - DNA, 19 bp, Mus musculus
  siRNA target sequence for MOR174-5 (NM_146771.1,589-607).
cagatagcgtgcttgttaa

SEQ ID NO: 764825 - DNA, 19 bp, Mus musculus
  siRNA target sequence for MOR174-5 (NM_146771.1,591-609).
gatagcgtgcttgttaatt

SEQ ID NO: 764826 - DNA, 19 bp, Mus musculus
  siRNA target sequence for MOR174-5 (NM_146771.1,595-613).
gcgtgcttgttaatttgca

SEQ ID NO: 764827 - DNA, 19 bp, Mus musculus
  siRNA target sequence for MOR174-5 (NM_146771.1,596-614).
cgtgcttgttaatttgcat

SEQ ID NO: 764828 - DNA, 19 bp, Mus musculus
  siRNA target sequence for MOR174-5 (NM_146771.1,629-647).
gtagcctccttatcatcat

SEQ ID NO: 764829 - DNA, 19 bp, Mus musculus
  siRNA target sequence for MOR174-5 (NM_146771.1,649-667).
gtctcatatgttgtcatat

SEQ ID NO: 764830 - DNA, 19 bp, Mus musculus
  siRNA target sequence for MOR174-5 (NM_146771.1,661-679).
gtcatattcaccactgtta

SEQ ID NO: 764831 - DNA, 19 bp, Mus musculus
  siRNA target sequence for MOR174-5 (NM_146771.1,681-699).
caagatccccactaaagga

SEQ ID NO: 764832 - DNA, 19 bp, Mus musculus
  siRNA target sequence for MOR174-5 (NM_146771.1,690-708).
cactaaaggagcactacaa

SEQ ID NO: 764833 - DNA, 19 bp, Mus musculus
  siRNA target sequence for MOR174-5 (NM_146771.1,808-826).
cttcttgttaagatagtca

SEQ ID NO: 764834 - DNA, 19 bp, Mus musculus
  siRNA target sequence for MOR174-5 (NM_146771.1,902-920).
ctgtgaggaaattaatcca

SEQ ID NO: 764835 - DNA, 19 bp, Mus musculus
  siRNA target sequence for MOR174-5 (NM_146771.1,904-922).
gtgaggaaattaatccata

SEQ ID NO: 764836 - DNA, 19 bp, Mus musculus
  siRNA target sequence for MOR237-2 (NM_146772.1,58-76).
gagctgaggaaaatattgt

SEQ ID NO: 764837 - DNA, 19 bp, Mus musculus
  siRNA target sequence for MOR237-2 (NM_146772.1,96-114).
gtatatggccacagtcttt

SEQ ID NO: 764838 - DNA, 19 bp, Mus musculus
  siRNA target sequence for MOR237-2 (NM_146772.1,104-122).
ccacagtctttggaaatct

SEQ ID NO: 764839 - DNA, 19 bp, Mus musculus
  siRNA target sequence for MOR237-2 (NM_146772.1,107-125).
cagtctttggaaatctact

SEQ ID NO: 764840 - DNA, 19 bp, Mus musculus
  siRNA target sequence for MOR237-2 (NM_146772.1,207-225).
cacttactcttctgtcatt

SEQ ID NO: 764841 - DNA, 19 bp, Mus musculus
  siRNA target sequence for MOR237-2 (NM_146772.1,249-267).
cctttctgagaggactatt

SEQ ID NO: 764842 - DNA, 19 bp, Mus musculus
  siRNA target sequence for MOR237-2 (NM_146772.1,291-309).
ccagctatttgcagaacat

SEQ ID NO: 764843 - DNA, 19 bp, Mus musculus
  siRNA target sequence for MOR237-2 (NM_146772.1,380-398).
ctctgcactacgtgaaaat

SEQ ID NO: 764844 - DNA, 19 bp, Mus musculus
  siRNA target sequence for MOR237-2 (NM_146772.1,382-400).
ctgcactacgtgaaaatga

SEQ ID NO: 764845 - DNA, 19 bp, Mus musculus
  siRNA target sequence for MOR237-2 (NM_146772.1,385-403).
cactacgtgaaaatgatga

SEQ ID NO: 764846 - DNA, 19 bp, Mus musculus
  siRNA target sequence for MOR237-2 (NM_146772.1,576-594).
cttgggtctcttagtcatt

SEQ ID NO: 764847 - DNA, 19 bp, Mus musculus
  siRNA target sequence for MOR237-2 (NM_146772.1,660-678).
ctgctcccttaagtcttat

SEQ ID NO: 764848 - DNA, 19 bp, Mus musculus
  siRNA target sequence for MOR237-2 (NM_146772.1,802-820).
gcaatggctgtgtcattta

SEQ ID NO: 764849 - DNA, 19 bp, Mus musculus
  siRNA target sequence for MOR237-2 (NM_146772.1,809-827).
ctgtgtcatttactattgt

SEQ ID NO: 764850 - DNA, 19 bp, Mus musculus
  siRNA target sequence for MOR204-5 (NM_146774.1,810-828).
gaacaaggtgatctcttta

SEQ ID NO: 764851 - DNA, 19 bp, Mus musculus
  siRNA target sequence for MOR204-4 (NM_146775.1,651-669).
ctacatttacattcttatt

SEQ ID NO: 764852 - DNA, 19 bp, Mus musculus
  siRNA target sequence for MOR109-1 (NM_146776.1,10-28).
cacacaacggtgacagtat

SEQ ID NO: 764853 - DNA, 19 bp, Mus musculus
  siRNA target sequence for MOR109-1 (NM_146776.1,41-59).
gattaacagatgatctaca

SEQ ID NO: 764854 - DNA, 19 bp, Mus musculus
  siRNA target sequence for MOR109-1 (NM_146776.1,289-307).
gctcaactatttttcacta

SEQ ID NO: 764855 - DNA, 19 bp, Mus musculus
  siRNA target sequence for MOR109-1 (NM_146776.1,290-308).
ctcaactatttttcactat

SEQ ID NO: 764856 - DNA, 19 bp, Mus musculus
  siRNA target sequence for MOR109-1 (NM_146776.1,416-434).
gcaacttgttggtctttgt

SEQ ID NO: 764857 - DNA, 19 bp, Mus musculus
  siRNA target sequence for MOR109-1 (NM_146776.1,444-462).
gtctggttttctgatcatt

SEQ ID NO: 764858 - DNA, 19 bp, Mus musculus
  siRNA target sequence for MOR109-1 (NM_146776.1,615-633).
cttggttacactggtatta

SEQ ID NO: 764859 - DNA, 19 bp, Mus musculus
  siRNA target sequence for MOR109-1 (NM_146776.1,672-690).
gagaatcccatcttctcaa

SEQ ID NO: 764860 - DNA, 19 bp, Mus musculus
  siRNA target sequence for MOR110-2 (NM_146777.1,16-34).
ctggaggtagtgttcgttt

SEQ ID NO: 764861 - DNA, 19 bp, Mus musculus
  siRNA target sequence for MOR110-2 (NM_146777.1,21-39).
ggtagtgttcgttttgctt

SEQ ID NO: 764862 - DNA, 19 bp, Mus musculus
  siRNA target sequence for MOR110-2 (NM_146777.1,280-298).
gcttgtgtggctcagttat

SEQ ID NO: 764863 - DNA, 19 bp, Mus musculus
  siRNA target sequence for MOR110-2 (NM_146777.1,506-524).
ccaaaactgttgatcactt

SEQ ID NO: 764864 - DNA, 19 bp, Mus musculus
  siRNA target sequence for MOR183-1 (NM_146779.1,578-596).
ctctcaattacctaatgct

SEQ ID NO: 764865 - DNA, 19 bp, Mus musculus
  siRNA target sequence for MOR183-1 (NM_146779.1,612-630).
ctcaattcaggtattcagt

SEQ ID NO: 764866 - DNA, 19 bp, Mus musculus
  siRNA target sequence for MOR183-1 (NM_146779.1,614-632).
caattcaggtattcagtat

SEQ ID NO: 764867 - DNA, 19 bp, Mus musculus
  siRNA target sequence for MOR183-1 (NM_146779.1,627-645).
cagtattttgactattctt

SEQ ID NO: 764868 - DNA, 19 bp, Mus musculus
  siRNA target sequence for MOR183-1 (NM_146779.1,636-654).
gactattcttatctcttat

SEQ ID NO: 764869 - DNA, 19 bp, Mus musculus
  siRNA target sequence for MOR167-4 (NM_146785.1,90-108).
ctttctagtgatgtatgtt

SEQ ID NO: 764870 - DNA, 19 bp, Mus musculus
  siRNA target sequence for MOR167-4 (NM_146785.1,589-607).
ctggaggtttttgttgtaa

SEQ ID NO: 764871 - DNA, 19 bp, Mus musculus
  siRNA target sequence for MOR167-4 (NM_146785.1,601-619).
gttgtaataggcatcaaca

SEQ ID NO: 764872 - DNA, 19 bp, Mus musculus
  siRNA target sequence for MOR167-4 (NM_146785.1,604-622).
gtaataggcatcaacatta

SEQ ID NO: 764873 - DNA, 19 bp, Mus musculus
  siRNA target sequence for MOR165-7 (NM_146786.1,108-126).
gataacagcatttggaaat

SEQ ID NO: 764874 - DNA, 19 bp, Mus musculus
  siRNA target sequence for MOR165-7 (NM_146786.1,475-493).
cacacaggttgtgtaatga

SEQ ID NO: 764875 - DNA, 19 bp, Mus musculus
  siRNA target sequence for MOR165-7 (NM_146786.1,917-935).
gcagaatgtttagtcataa

SEQ ID NO: 764876 - DNA, 19 bp, Mus musculus
  siRNA target sequence for MOR165-7 (NM_146786.1,929-947).
gtcataacctaatctcatt

SEQ ID NO: 764877 - DNA, 19 bp, Mus musculus
  siRNA target sequence for MOR231-12 (NM_146788.1,406-424).
cgaagggtttgcatcactt

SEQ ID NO: 764878 - DNA, 19 bp, Mus musculus
  siRNA target sequence for MOR231-12 (NM_146788.1,440-458).
ggactggtggttttacaca

SEQ ID NO: 764879 - DNA, 19 bp, Mus musculus
  siRNA target sequence for MOR231-12 (NM_146788.1,770-788).
cccgaccagtttacaactt

SEQ ID NO: 764880 - DNA, 19 bp, Mus musculus
  siRNA target sequence for MOR231-12 (NM_146788.1,771-789).
ccgaccagtttacaacttt

SEQ ID NO: 764881 - DNA, 19 bp, Mus musculus
  siRNA target sequence for MOR237-1 (NM_146789.1,51-69).
gattccagagctgagaata

SEQ ID NO: 764882 - DNA, 19 bp, Mus musculus
  siRNA target sequence for MOR237-1 (NM_146789.1,55-73).
ccagagctgagaatactat

SEQ ID NO: 764883 - DNA, 19 bp, Mus musculus
  siRNA target sequence for MOR237-1 (NM_146789.1,58-76).
gagctgagaatactattct

SEQ ID NO: 764884 - DNA, 19 bp, Mus musculus
  siRNA target sequence for MOR237-1 (NM_146789.1,60-78).
gctgagaatactattctct

SEQ ID NO: 764885 - DNA, 19 bp, Mus musculus
  siRNA target sequence for MOR237-1 (NM_146789.1,120-138).
cctactgatcattgtaact

SEQ ID NO: 764886 - DNA, 19 bp, Mus musculus
  siRNA target sequence for MOR237-1 (NM_146789.1,124-142).
ctgatcattgtaactgtaa

SEQ ID NO: 764887 - DNA, 19 bp, Mus musculus
  siRNA target sequence for MOR237-1 (NM_146789.1,385-403).
cactacacgaccattgtta

SEQ ID NO: 764888 - DNA, 19 bp, Mus musculus
  siRNA target sequence for MOR237-1 (NM_146789.1,387-405).
ctacacgaccattgttagt

SEQ ID NO: 764889 - DNA, 19 bp, Mus musculus
  siRNA target sequence for MOR237-1 (NM_146789.1,570-588).
ccatatcctagctctctta

SEQ ID NO: 764890 - DNA, 19 bp, Mus musculus
  siRNA target sequence for MOR237-1 (NM_146789.1,576-594).
cctagctctcttagtcatt

SEQ ID NO: 764891 - DNA, 19 bp, Mus musculus
  siRNA target sequence for MOR237-1 (NM_146789.1,636-654).
catcacttcctatgtagta

SEQ ID NO: 764892 - DNA, 19 bp, Mus musculus
  siRNA target sequence for MOR237-1 (NM_146789.1,748-766).
gtaccttgtattatcttgt

SEQ ID NO: 764893 - DNA, 19 bp, Mus musculus
  siRNA target sequence for MOR237-1 (NM_146789.1,751-769).
ccttgtattatcttgtaca

SEQ ID NO: 764894 - DNA, 19 bp, Mus musculus
  siRNA target sequence for MOR237-1 (NM_146789.1,776-794).
ctgtggtcacttatcctat

SEQ ID NO: 764895 - DNA, 19 bp, Mus musculus
  siRNA target sequence for MOR237-1 (NM_146789.1,780-798).
ggtcacttatcctatagat

SEQ ID NO: 764896 - DNA, 19 bp, Mus musculus
  siRNA target sequence for MOR237-1 (NM_146789.1,808-826).
gctctgtgtgctacaattt

SEQ ID NO: 764897 - DNA, 19 bp, Mus musculus
  siRNA target sequence for MOR237-1 (NM_146789.1,809-827).
ctctgtgtgctacaatttt

SEQ ID NO: 764898 - DNA, 19 bp, Mus musculus
  siRNA target sequence for MOR237-1 (NM_146789.1,818-836).
ctacaatttttgaaccaat

SEQ ID NO: 764899 - DNA, 19 bp, Mus musculus
  siRNA target sequence for MOR237-1 (NM_146789.1,821-839).
caatttttgaaccaatgtt

SEQ ID NO: 764900 - DNA, 19 bp, Mus musculus
  siRNA target sequence for MOR237-1 (NM_146789.1,880-898).
catgctctgaggaaactgt

SEQ ID NO: 764901 - DNA, 19 bp, Mus musculus
  siRNA target sequence for MOR231-11 (NM_146790.1,56-74).
cagctggacagaaagcatt

SEQ ID NO: 764902 - DNA, 19 bp, Mus musculus
  siRNA target sequence for MOR231-11 (NM_146790.1,244-262).
gacttactctccgacaaaa

SEQ ID NO: 764903 - DNA, 19 bp, Mus musculus
  siRNA target sequence for MOR231-11 (NM_146790.1,255-273).
cgacaaaaagactatctca

SEQ ID NO: 764904 - DNA, 19 bp, Mus musculus
  siRNA target sequence for MOR231-11 (NM_146790.1,405-423).
ccggcagatttgcattctt

SEQ ID NO: 764905 - DNA, 19 bp, Mus musculus
  siRNA target sequence for MOR231-11 (NM_146790.1,441-459).
ggttggtgggtttgtacat

SEQ ID NO: 764906 - DNA, 19 bp, Mus musculus
  siRNA target sequence for MOR231-11 (NM_146790.1,461-479).
ctgtgattcaacttgcttt

SEQ ID NO: 764907 - DNA, 19 bp, Mus musculus
  siRNA target sequence for MOR231-11 (NM_146790.1,607-625).
gcaatctgtatggtcattt

SEQ ID NO: 764908 - DNA, 19 bp, Mus musculus
  siRNA target sequence for MOR231-11 (NM_146790.1,608-626).
caatctgtatggtcatttt

SEQ ID NO: 764909 - DNA, 19 bp, Mus musculus
  siRNA target sequence for MOR231-11 (NM_146790.1,637-655).
ctaatctcttatgtattca

SEQ ID NO: 764910 - DNA, 19 bp, Mus musculus
  siRNA target sequence for MOR231-11 (NM_146790.1,769-787).
gttaggccagtgtctaact

SEQ ID NO: 764911 - DNA, 19 bp, Mus musculus
  siRNA target sequence for MOR231-11 (NM_146790.1,790-808).
cccattgataagtcgataa

SEQ ID NO: 764912 - DNA, 19 bp, Mus musculus
  siRNA target sequence for MOR231-11 (NM_146790.1,792-810).
cattgataagtcgataagt

SEQ ID NO: 764913 - DNA, 19 bp, Mus musculus
  siRNA target sequence for MOR231-11 (NM_146790.1,801-819).
gtcgataagtgtagttttt

SEQ ID NO: 764914 - DNA, 19 bp, Mus musculus
  siRNA target sequence for MOR231-11 (NM_146790.1,804-822).
gataagtgtagtttttaca

SEQ ID NO: 764915 - DNA, 19 bp, Mus musculus
  siRNA target sequence for MOR231-11 (NM_146790.1,910-928).
gcaactacaggcagagtaa

SEQ ID NO: 764916 - DNA, 19 bp, Mus musculus
  siRNA target sequence for MOR231-9 (NM_146792.1,198-216).
cctggacattgtttattca

SEQ ID NO: 764917 - DNA, 19 bp, Mus musculus
  siRNA target sequence for MOR231-9 (NM_146792.1,199-217).
ctggacattgtttattcaa

SEQ ID NO: 764918 - DNA, 19 bp, Mus musculus
  siRNA target sequence for MOR231-9 (NM_146792.1,243-261).
ggacttgctgtgtgatgaa

SEQ ID NO: 764919 - DNA, 19 bp, Mus musculus
  siRNA target sequence for MOR231-9 (NM_146792.1,250-268).
ctgtgtgatgaaaagtcta

SEQ ID NO: 764920 - DNA, 19 bp, Mus musculus
  siRNA target sequence for MOR231-9 (NM_146792.1,723-741).
catcatggtagttacactt

SEQ ID NO: 764921 - DNA, 19 bp, Mus musculus
  siRNA target sequence for MOR231-9 (NM_146792.1,769-787).
gccagacctgtttataact

SEQ ID NO: 764922 - DNA, 19 bp, Mus musculus
  siRNA target sequence for MOR231-9 (NM_146792.1,909-927).
gttaactatggatagaata

SEQ ID NO: 764923 - DNA, 19 bp, Mus musculus
  siRNA target sequence for MOR231-9 (NM_146792.1,923-941).
gaataagattgtcttgtta

SEQ ID NO: 764924 - DNA, 19 bp, Mus musculus
  siRNA target sequence for MOR110-1 (NM_146795.1,506-524).
ctggagcaatggaccattt

SEQ ID NO: 764925 - DNA, 19 bp, Mus musculus
  siRNA target sequence for MOR110-1 (NM_146795.1,511-529).
gcaatggaccattttcttt

SEQ ID NO: 764926 - DNA, 19 bp, Mus musculus
  siRNA target sequence for MOR110-1 (NM_146795.1,571-589).
cagttaatagaattgatga

SEQ ID NO: 764927 - DNA, 19 bp, Mus musculus
  siRNA target sequence for MOR110-1 (NM_146795.1,785-803).
cgaaagagagagtgacttt

SEQ ID NO: 764928 - DNA, 19 bp, Mus musculus
  siRNA target sequence for MOR110-1 (NM_146795.1,786-804).
gaaagagagagtgacttta

SEQ ID NO: 764929 - DNA, 19 bp, Mus musculus
  siRNA target sequence for MOR110-1 (NM_146795.1,833-851).
ccgtggctcccttgctaaa

SEQ ID NO: 764930 - DNA, 19 bp, Mus musculus
  siRNA target sequence for MOR211-2 (NM_146796.1,68-86).
gggaggttcctcttttcct

SEQ ID NO: 764931 - DNA, 19 bp, Mus musculus
  siRNA target sequence for MOR211-2 (NM_146796.1,87-105).
ggtatttctctgcttctat

SEQ ID NO: 764932 - DNA, 19 bp, Mus musculus
  siRNA target sequence for MOR211-2 (NM_146796.1,269-287).
cagtcatctcctataatca

SEQ ID NO: 764933 - DNA, 19 bp, Mus musculus
  siRNA target sequence for MOR211-2 (NM_146796.1,271-289).
gtcatctcctataatcatt

SEQ ID NO: 764934 - DNA, 19 bp, Mus musculus
  siRNA target sequence for MOR211-2 (NM_146796.1,312-330).
caccttctgtgcaagtaca

SEQ ID NO: 764935 - DNA, 19 bp, Mus musculus
  siRNA target sequence for MOR211-2 (NM_146796.1,315-333).
cttctgtgcaagtacagaa

SEQ ID NO: 764936 - DNA, 19 bp, Mus musculus
  siRNA target sequence for MOR211-2 (NM_146796.1,402-420).
ggccatgagtcctaaaaaa

SEQ ID NO: 764937 - DNA, 19 bp, Mus musculus
  siRNA target sequence for MOR211-2 (NM_146796.1,403-421).
gccatgagtcctaaaaaat

SEQ ID NO: 764938 - DNA, 19 bp, Mus musculus
  siRNA target sequence for MOR211-2 (NM_146796.1,432-450).
ggtactggtggcctatgta

SEQ ID NO: 764939 - DNA, 19 bp, Mus musculus
  siRNA target sequence for MOR211-2 (NM_146796.1,444-462).
ctatgtatgtgggttatct

SEQ ID NO: 764940 - DNA, 19 bp, Mus musculus
  siRNA target sequence for MOR211-2 (NM_146796.1,511-529).
gataataagatcaacttct

SEQ ID NO: 764941 - DNA, 19 bp, Mus musculus
  siRNA target sequence for MOR211-2 (NM_146796.1,768-786).
cttcatgtatataagaagt

SEQ ID NO: 764942 - DNA, 19 bp, Mus musculus
  siRNA target sequence for MOR211-1 (NM_146797.1,36-54).
catcctaataggctttaat

SEQ ID NO: 764943 - DNA, 19 bp, Mus musculus
  siRNA target sequence for MOR211-1 (NM_146797.1,68-86).
gggagattccactattgct

SEQ ID NO: 764944 - DNA, 19 bp, Mus musculus
  siRNA target sequence for MOR211-1 (NM_146797.1,85-103).
ctggtatttcttagctttt

SEQ ID NO: 764945 - DNA, 19 bp, Mus musculus
  siRNA target sequence for MOR211-1 (NM_146797.1,87-105).
ggtatttcttagcttttat

SEQ ID NO: 764946 - DNA, 19 bp, Mus musculus
  siRNA target sequence for MOR211-1 (NM_146797.1,138-156).
cattcttatccatgtagat

SEQ ID NO: 764947 - DNA, 19 bp, Mus musculus
  siRNA target sequence for MOR211-1 (NM_146797.1,403-421).
gccatgggccctagaaaat

SEQ ID NO: 764948 - DNA, 19 bp, Mus musculus
  siRNA target sequence for MOR211-1 (NM_146797.1,433-451).
gtagtaggagcatatatct

SEQ ID NO: 764949 - DNA, 19 bp, Mus musculus
  siRNA target sequence for MOR211-1 (NM_146797.1,566-584).
gtagtgacacaacaaatat

SEQ ID NO: 764950 - DNA, 19 bp, Mus musculus
  siRNA target sequence for MOR211-1 (NM_146797.1,569-587).
gtgacacaacaaatattga

SEQ ID NO: 764951 - DNA, 19 bp, Mus musculus
  siRNA target sequence for MOR211-1 (NM_146797.1,578-596).
caaatattgaaattatcat

SEQ ID NO: 764952 - DNA, 19 bp, Mus musculus
  siRNA target sequence for MOR211-1 (NM_146797.1,631-649).
gccttagtcatcctcattt

SEQ ID NO: 764953 - DNA, 19 bp, Mus musculus
  siRNA target sequence for MOR211-1 (NM_146797.1,670-688).
gctgtcatgagaatgaagt

SEQ ID NO: 764954 - DNA, 19 bp, Mus musculus
  siRNA target sequence for MOR211-1 (NM_146797.1,684-702).
gaagtcttcaggtagaaga

SEQ ID NO: 764955 - DNA, 19 bp, Mus musculus
  siRNA target sequence for MOR211-1 (NM_146797.1,695-713).
gtagaagagcaaagacttt

SEQ ID NO: 764956 - DNA, 19 bp, Mus musculus
  siRNA target sequence for MOR211-1 (NM_146797.1,777-795).
catacgtagtggttcaaaa

SEQ ID NO: 764957 - DNA, 19 bp, Mus musculus
  siRNA target sequence for MOR163-1 (NM_146798.1,102-120).
cgtcttcttaggtatctat

SEQ ID NO: 764958 - DNA, 19 bp, Mus musculus
  siRNA target sequence for MOR163-1 (NM_146798.1,117-135).
ctatgtgctgactgttata

SEQ ID NO: 764959 - DNA, 19 bp, Mus musculus
  siRNA target sequence for MOR163-1 (NM_146798.1,153-171).
caccttaattgggttgaat

SEQ ID NO: 764960 - DNA, 19 bp, Mus musculus
  siRNA target sequence for MOR163-1 (NM_146798.1,168-186).
gaattccagtcttcatact

SEQ ID NO: 764961 - DNA, 19 bp, Mus musculus
  siRNA target sequence for MOR163-1 (NM_146798.1,524-542).
ccaatatgatccaccatta

SEQ ID NO: 764962 - DNA, 19 bp, Mus musculus
  siRNA target sequence for MOR163-1 (NM_146798.1,525-543).
caatatgatccaccattat

SEQ ID NO: 764963 - DNA, 19 bp, Mus musculus
  siRNA target sequence for MOR163-1 (NM_146798.1,672-690).
gattctctccaacattctt

SEQ ID NO: 764964 - DNA, 19 bp, Mus musculus
  siRNA target sequence for MOR163-1 (NM_146798.1,678-696).
ctccaacattcttaagatt

SEQ ID NO: 764965 - DNA, 19 bp, Mus musculus
  siRNA target sequence for MOR163-1 (NM_146798.1,775-793).
ggggcattcacctatttaa

SEQ ID NO: 764966 - DNA, 19 bp, Mus musculus
  siRNA target sequence for MOR163-1 (NM_146798.1,797-815).
cctctttccctggttcaat

SEQ ID NO: 764967 - DNA, 19 bp, Mus musculus
  siRNA target sequence for MOR163-1 (NM_146798.1,822-840).
gggaaggtttgcttcagta

SEQ ID NO: 764968 - DNA, 19 bp, Mus musculus
  siRNA target sequence for MOR163-1 (NM_146798.1,823-841).
ggaaggtttgcttcagtat

SEQ ID NO: 764969 - DNA, 19 bp, Mus musculus
  siRNA target sequence for MOR169-1 (NM_146802.1,36-54).
ccttctagtaggattaaca

SEQ ID NO: 764970 - DNA, 19 bp, Mus musculus
  siRNA target sequence for MOR169-1 (NM_146802.1,265-283).
cagaatgccatttcctata

SEQ ID NO: 764971 - DNA, 19 bp, Mus musculus
  siRNA target sequence for MOR169-1 (NM_146802.1,413-431).
ctcaagtgtgtttaaacct

SEQ ID NO: 764972 - DNA, 19 bp, Mus musculus
  siRNA target sequence for MOR169-1 (NM_146802.1,418-436).
gtgtgtttaaacctaatga

SEQ ID NO: 764973 - DNA, 19 bp, Mus musculus
  siRNA target sequence for MOR169-1 (NM_146802.1,420-438).
gtgtttaaacctaatgatt

SEQ ID NO: 764974 - DNA, 19 bp, Mus musculus
  siRNA target sequence for MOR169-1 (NM_146802.1,483-501).
gtgtatgctgacattgact

SEQ ID NO: 764975 - DNA, 19 bp, Mus musculus
  siRNA target sequence for MOR169-1 (NM_146802.1,585-603).
gcttgtagcttatgtcata

SEQ ID NO: 764976 - DNA, 19 bp, Mus musculus
  siRNA target sequence for MOR169-1 (NM_146802.1,600-618).
catagtggtcatcaacata

SEQ ID NO: 764977 - DNA, 19 bp, Mus musculus
  siRNA target sequence for MOR169-1 (NM_146802.1,666-684).
cagcatcttccgcataagt

SEQ ID NO: 764978 - DNA, 19 bp, Mus musculus
  siRNA target sequence for MOR169-1 (NM_146802.1,761-779).
gagcatttgtgtatttcaa

SEQ ID NO: 764979 - DNA, 19 bp, Mus musculus
  siRNA target sequence for MOR169-1 (NM_146802.1,797-815).
ctatggaatgggcaaaaat

SEQ ID NO: 764980 - DNA, 19 bp, Mus musculus
  siRNA target sequence for MOR167-2 (NM_146803.1,10-28).
ggaaataggtcttttgtga

SEQ ID NO: 764981 - DNA, 19 bp, Mus musculus
  siRNA target sequence for MOR167-2 (NM_146803.1,97-115).
gtaatgtatatagtaacta

SEQ ID NO: 764982 - DNA, 19 bp, Mus musculus
  siRNA target sequence for MOR167-2 (NM_146803.1,120-138).
cgggaatttgggtttggta

SEQ ID NO: 764983 - DNA, 19 bp, Mus musculus
  siRNA target sequence for MOR167-2 (NM_146803.1,121-139).
gggaatttgggtttggtaa

SEQ ID NO: 764984 - DNA, 19 bp, Mus musculus
  siRNA target sequence for MOR167-2 (NM_146803.1,129-147).
gggtttggtaattctaatt

SEQ ID NO: 764985 - DNA, 19 bp, Mus musculus
  siRNA target sequence for MOR167-2 (NM_146803.1,333-351).
gtgttatgtgttaatgtca

SEQ ID NO: 764986 - DNA, 19 bp, Mus musculus
  siRNA target sequence for MOR167-1 (NM_146804.1,127-145).
cagggtttgattagcttaa

SEQ ID NO: 764987 - DNA, 19 bp, Mus musculus
  siRNA target sequence for MOR167-1 (NM_146804.1,426-444).
gatccttatgtttagttca

SEQ ID NO: 764988 - DNA, 19 bp, Mus musculus
  siRNA target sequence for MOR167-1 (NM_146804.1,812-830).
gcaaaatctcctctatctt

SEQ ID NO: 764989 - DNA, 19 bp, Mus musculus
  siRNA target sequence for MOR167-1 (NM_146804.1,813-831).
caaaatctcctctatcttt

SEQ ID NO: 764990 - DNA, 19 bp, Mus musculus
  siRNA target sequence for MOR165-5 (NM_146805.1,42-60).
gatggggttaacaaacaga

SEQ ID NO: 764991 - DNA, 19 bp, Mus musculus
  siRNA target sequence for MOR165-5 (NM_146805.1,130-148).
gctttgatcatgctgatta

SEQ ID NO: 764992 - DNA, 19 bp, Mus musculus
  siRNA target sequence for MOR165-5 (NM_146805.1,131-149).
ctttgatcatgctgattat

SEQ ID NO: 764993 - DNA, 19 bp, Mus musculus
  siRNA target sequence for MOR165-5 (NM_146805.1,141-159).
gctgattattctgaattct

SEQ ID NO: 764994 - DNA, 19 bp, Mus musculus
  siRNA target sequence for MOR165-5 (NM_146805.1,198-216).
gtcctgcatagaccttttt

SEQ ID NO: 764995 - DNA, 19 bp, Mus musculus
  siRNA target sequence for MOR165-5 (NM_146805.1,200-218).
cctgcatagacctttttta

SEQ ID NO: 764996 - DNA, 19 bp, Mus musculus
  siRNA target sequence for MOR165-5 (NM_146805.1,201-219).
ctgcatagaccttttttat

SEQ ID NO: 764997 - DNA, 19 bp, Mus musculus
  siRNA target sequence for MOR165-5 (NM_146805.1,403-421).
gtaatgtctcctaagttgt

SEQ ID NO: 764998 - DNA, 19 bp, Mus musculus
  siRNA target sequence for MOR165-5 (NM_146805.1,410-428).
ctcctaagttgtgttctta

SEQ ID NO: 764999 - DNA, 19 bp, Mus musculus
  siRNA target sequence for MOR165-5 (NM_146805.1,430-448).
cttatgatgggtacatatt

SEQ ID NO: 765000 - DNA, 19 bp, Mus musculus
  siRNA target sequence for MOR165-5 (NM_146805.1,494-512).
gactgacattctgtgataa

SEQ ID NO: 765001 - DNA, 19 bp, Mus musculus
  siRNA target sequence for MOR165-5 (NM_146805.1,844-862).
gtccccctgatgaatccat

SEQ ID NO: 765002 - DNA, 19 bp, Mus musculus
  siRNA target sequence for MOR165-5 (NM_146805.1,846-864).
ccccctgatgaatccatta

SEQ ID NO: 765003 - DNA, 19 bp, Mus musculus
  siRNA target sequence for MOR170-6 (NM_146806.1,276-294).
gaataccatctcttttgga

SEQ ID NO: 765004 - DNA, 19 bp, Mus musculus
  siRNA target sequence for MOR170-6 (NM_146806.1,389-407).
gtaaaccactaacatacaa

SEQ ID NO: 765005 - DNA, 19 bp, Mus musculus
  siRNA target sequence for MOR170-6 (NM_146806.1,394-412).
ccactaacatacaaagtta

SEQ ID NO: 765006 - DNA, 19 bp, Mus musculus
  siRNA target sequence for MOR170-6 (NM_146806.1,395-413).
cactaacatacaaagttat

SEQ ID NO: 765007 - DNA, 19 bp, Mus musculus
  siRNA target sequence for MOR170-6 (NM_146806.1,397-415).
ctaacatacaaagttatta

SEQ ID NO: 765008 - DNA, 19 bp, Mus musculus
  siRNA target sequence for MOR170-6 (NM_146806.1,669-687).
gatacttttcaatattatt

SEQ ID NO: 765009 - DNA, 19 bp, Mus musculus
  siRNA target sequence for MOR4-1 (NM_146812.1,18-36).
cacaaactacactagttct

SEQ ID NO: 765010 - DNA, 19 bp, Mus musculus
  siRNA target sequence for MOR4-1 (NM_146812.1,24-42).
ctacactagttctaggttt

SEQ ID NO: 765011 - DNA, 19 bp, Mus musculus
  siRNA target sequence for MOR4-1 (NM_146812.1,84-102).
gatatctgtcccattcttt

SEQ ID NO: 765012 - DNA, 19 bp, Mus musculus
  siRNA target sequence for MOR4-1 (NM_146812.1,91-109).
gtcccattctttataatct

SEQ ID NO: 765013 - DNA, 19 bp, Mus musculus
  siRNA target sequence for MOR4-1 (NM_146812.1,93-111).
cccattctttataatctat

SEQ ID NO: 765014 - DNA, 19 bp, Mus musculus
  siRNA target sequence for MOR4-1 (NM_146812.1,95-113).
cattctttataatctatgt

SEQ ID NO: 765015 - DNA, 19 bp, Mus musculus
  siRNA target sequence for MOR4-1 (NM_146812.1,123-141).
cctgggaaattgtatggta

SEQ ID NO: 765016 - DNA, 19 bp, Mus musculus
  siRNA target sequence for MOR4-1 (NM_146812.1,128-146).
gaaattgtatggtacttca

SEQ ID NO: 765017 - DNA, 19 bp, Mus musculus
  siRNA target sequence for MOR4-1 (NM_146812.1,134-152).
gtatggtacttcatgtgat

SEQ ID NO: 765018 - DNA, 19 bp, Mus musculus
  siRNA target sequence for MOR4-1 (NM_146812.1,243-261).
cacggtaatgggtatcctt

SEQ ID NO: 765019 - DNA, 19 bp, Mus musculus
  siRNA target sequence for MOR4-1 (NM_146812.1,397-415).
cgctattcctccatcctaa

SEQ ID NO: 765020 - DNA, 19 bp, Mus musculus
  siRNA target sequence for MOR4-1 (NM_146812.1,438-456).
cggagtggccatcttatgt

SEQ ID NO: 765021 - DNA, 19 bp, Mus musculus
  siRNA target sequence for MOR4-1 (NM_146812.1,439-457).
ggagtggccatcttatgta

SEQ ID NO: 765022 - DNA, 19 bp, Mus musculus
  siRNA target sequence for MOR4-1 (NM_146812.1,468-486).
gctcattcctccagttatt

SEQ ID NO: 765023 - DNA, 19 bp, Mus musculus
  siRNA target sequence for MOR4-1 (NM_146812.1,490-508).
cgcctgaagttcttaaatt

SEQ ID NO: 765024 - DNA, 19 bp, Mus musculus
  siRNA target sequence for MOR4-1 (NM_146812.1,491-509).
gcctgaagttcttaaatta

SEQ ID NO: 765025 - DNA, 19 bp, Mus musculus
  siRNA target sequence for MOR4-1 (NM_146812.1,574-592).
ggagatatccgcttcaata

SEQ ID NO: 765026 - DNA, 19 bp, Mus musculus
  siRNA target sequence for MOR4-1 (NM_146812.1,577-595).
gatatccgcttcaatagca

SEQ ID NO: 765027 - DNA, 19 bp, Mus musculus
  siRNA target sequence for MOR4-1 (NM_146812.1,610-628).
ctggtgatcagcaacttgt

SEQ ID NO: 765028 - DNA, 19 bp, Mus musculus
  siRNA target sequence for MOR4-1 (NM_146812.1,612-630).
ggtgatcagcaacttgtta

SEQ ID NO: 765029 - DNA, 19 bp, Mus musculus
  siRNA target sequence for MOR4-1 (NM_146812.1,631-649).
gtggactcagtgctaatat

SEQ ID NO: 765030 - DNA, 19 bp, Mus musculus
  siRNA target sequence for MOR4-1 (NM_146812.1,633-651).
ggactcagtgctaatatta

SEQ ID NO: 765031 - DNA, 19 bp, Mus musculus
  siRNA target sequence for MOR4-1 (NM_146812.1,634-652).
gactcagtgctaatattaa

SEQ ID NO: 765032 - DNA, 19 bp, Mus musculus
  siRNA target sequence for MOR4-1 (NM_146812.1,835-853).
ggcaatgtctacatccttt

SEQ ID NO: 765033 - DNA, 19 bp, Mus musculus
  siRNA target sequence for MOR4-1 (NM_146812.1,872-890).
ccattatatacagtatcaa

SEQ ID NO: 765034 - DNA, 19 bp, Mus musculus
  siRNA target sequence for MOR4-1 (NM_146812.1,911-929).
gaattcagcggttgttctt

SEQ ID NO: 765035 - DNA, 19 bp, Mus musculus
  siRNA target sequence for MOR34-7 (NM_146814.1,23-41).
gcctgacaccaagatactt

SEQ ID NO: 765036 - DNA, 19 bp, Mus musculus
  siRNA target sequence for MOR34-7 (NM_146814.1,24-42).
cctgacaccaagatacttt

SEQ ID NO: 765037 - DNA, 19 bp, Mus musculus
  siRNA target sequence for MOR34-7 (NM_146814.1,25-43).
ctgacaccaagatacttta

SEQ ID NO: 765038 - DNA, 19 bp, Mus musculus
  siRNA target sequence for MOR34-7 (NM_146814.1,89-107).
ctctgccattcttcattat

SEQ ID NO: 765039 - DNA, 19 bp, Mus musculus
  siRNA target sequence for MOR34-7 (NM_146814.1,214-232).
gatatttctgggtgtaata

SEQ ID NO: 765040 - DNA, 19 bp, Mus musculus
  siRNA target sequence for MOR34-7 (NM_146814.1,233-251).
caattgtccccagtatgtt

SEQ ID NO: 765041 - DNA, 19 bp, Mus musculus
  siRNA target sequence for MOR34-7 (NM_146814.1,238-256).
gtccccagtatgttatgca

SEQ ID NO: 765042 - DNA, 19 bp, Mus musculus
  siRNA target sequence for MOR34-7 (NM_146814.1,271-289).
gtcaaggagattgatttca

SEQ ID NO: 765043 - DNA, 19 bp, Mus musculus
  siRNA target sequence for MOR34-7 (NM_146814.1,273-291).
caaggagattgatttcaat

SEQ ID NO: 765044 - DNA, 19 bp, Mus musculus
  siRNA target sequence for MOR34-7 (NM_146814.1,416-434).
ccaacactatgattaccaa

SEQ ID NO: 765045 - DNA, 19 bp, Mus musculus
  siRNA target sequence for MOR34-7 (NM_146814.1,420-438).
cactatgattaccaagatt

SEQ ID NO: 765046 - DNA, 19 bp, Mus musculus
  siRNA target sequence for MOR34-7 (NM_146814.1,439-457).
ggattggcagcacttgtta

SEQ ID NO: 765047 - DNA, 19 bp, Mus musculus
  siRNA target sequence for MOR34-7 (NM_146814.1,454-472).
gttagaagtgtgttactca

SEQ ID NO: 765048 - DNA, 19 bp, Mus musculus
  siRNA target sequence for MOR34-7 (NM_146814.1,495-513).
caagcgtcttccatactgt

SEQ ID NO: 765049 - DNA, 19 bp, Mus musculus
  siRNA target sequence for MOR34-7 (NM_146814.1,569-587).
cctgtggcaatattaagat

SEQ ID NO: 765050 - DNA, 19 bp, Mus musculus
  siRNA target sequence for MOR34-7 (NM_146814.1,570-588).
ctgtggcaatattaagatt

SEQ ID NO: 765051 - DNA, 19 bp, Mus musculus
  siRNA target sequence for MOR34-7 (NM_146814.1,592-610).
gctatctatggtcttataa

SEQ ID NO: 765052 - DNA, 19 bp, Mus musculus
  siRNA target sequence for MOR34-7 (NM_146814.1,601-619).
ggtcttataattgctatat

SEQ ID NO: 765053 - DNA, 19 bp, Mus musculus
  siRNA target sequence for MOR34-7 (NM_146814.1,602-620).
gtcttataattgctatatt

SEQ ID NO: 765054 - DNA, 19 bp, Mus musculus
  siRNA target sequence for MOR34-7 (NM_146814.1,696-714).
ggcagatgctcgccataaa

SEQ ID NO: 765055 - DNA, 19 bp, Mus musculus
  siRNA target sequence for MOR34-7 (NM_146814.1,706-724).
cgccataaagccttcagta

SEQ ID NO: 765056 - DNA, 19 bp, Mus musculus
  siRNA target sequence for MOR34-7 (NM_146814.1,806-824).
ccactataccccatcatat

SEQ ID NO: 765057 - DNA, 19 bp, Mus musculus
  siRNA target sequence for MOR34-7 (NM_146814.1,814-832).
ccccatcatatccacatta

SEQ ID NO: 765058 - DNA, 19 bp, Mus musculus
  siRNA target sequence for MOR34-7 (NM_146814.1,840-858).
caacctgtatctattgcta

SEQ ID NO: 765059 - DNA, 19 bp, Mus musculus
  siRNA target sequence for MOR34-7 (NM_146814.1,855-873).
gctacctcccaccttgaat

SEQ ID NO: 765060 - DNA, 19 bp, Mus musculus
  siRNA target sequence for MOR34-7 (NM_146814.1,863-881).
ccaccttgaatccaattgt

SEQ ID NO: 765061 - DNA, 19 bp, Mus musculus
  siRNA target sequence for MOR34-7 (NM_146814.1,866-884).
ccttgaatccaattgtata

SEQ ID NO: 765062 - DNA, 19 bp, Mus musculus
  siRNA target sequence for MOR34-7 (NM_146814.1,867-885).
cttgaatccaattgtatat

SEQ ID NO: 765063 - DNA, 19 bp, Mus musculus
  siRNA target sequence for MOR34-7 (NM_146814.1,908-926).
gtgaaggtgtgatcaaact

SEQ ID NO: 765064 - DNA, 19 bp, Mus musculus
  siRNA target sequence for MOR34-7 (NM_146814.1,910-928).
gaaggtgtgatcaaactgt

SEQ ID NO: 765065 - DNA, 19 bp, Mus musculus
  siRNA target sequence for MOR171-8 (NM_146815.1,126-144).
gatcctcttaatcaacatt

SEQ ID NO: 765066 - DNA, 19 bp, Mus musculus
  siRNA target sequence for MOR171-8 (NM_146815.1,129-147).
cctcttaatcaacattagt

SEQ ID NO: 765067 - DNA, 19 bp, Mus musculus
  siRNA target sequence for MOR171-8 (NM_146815.1,402-420).
ccacaaggtctgttccata

SEQ ID NO: 765068 - DNA, 19 bp, Mus musculus
  siRNA target sequence for MOR171-8 (NM_146815.1,403-421).
cacaaggtctgttccataa

SEQ ID NO: 765069 - DNA, 19 bp, Mus musculus
  siRNA target sequence for MOR171-8 (NM_146815.1,465-483).
ccatacaacccgtatgaca

SEQ ID NO: 765070 - DNA, 19 bp, Mus musculus
  siRNA target sequence for MOR171-8 (NM_146815.1,466-484).
catacaacccgtatgacaa

SEQ ID NO: 765071 - DNA, 19 bp, Mus musculus
  siRNA target sequence for MOR171-8 (NM_146815.1,470-488).
caacccgtatgacaatgtt

SEQ ID NO: 765072 - DNA, 19 bp, Mus musculus
  siRNA target sequence for MOR171-8 (NM_146815.1,505-523).
catattatcaggcactatt

SEQ ID NO: 765073 - DNA, 19 bp, Mus musculus
  siRNA target sequence for MOR171-8 (NM_146815.1,566-584).
cccatatcaacgaagtact

SEQ ID NO: 765074 - DNA, 19 bp, Mus musculus
  siRNA target sequence for MOR171-8 (NM_146815.1,627-645).
ggctgtcatcatctcttat

SEQ ID NO: 765075 - DNA, 19 bp, Mus musculus
  siRNA target sequence for MOR171-8 (NM_146815.1,749-767).
gatcaattactttcatgta

SEQ ID NO: 765076 - DNA, 19 bp, Mus musculus
  siRNA target sequence for MOR171-8 (NM_146815.1,904-922).
gttggtagaaggcagttat

SEQ ID NO: 765077 - DNA, 19 bp, Mus musculus
  siRNA target sequence for MOR171-8 (NM_146815.1,907-925).
ggtagaaggcagttatcct

SEQ ID NO: 765078 - DNA, 19 bp, Mus musculus
  siRNA target sequence for MOR164-2 (NM_146816.1,139-157).
gcaaatctgggcttaatta

SEQ ID NO: 765079 - DNA, 19 bp, Mus musculus
  siRNA target sequence for MOR164-2 (NM_146816.1,305-323).
gctgcttgactcaactcta

SEQ ID NO: 765080 - DNA, 19 bp, Mus musculus
  siRNA target sequence for MOR164-2 (NM_146816.1,330-348).
ctgctttttcgtcattaca

SEQ ID NO: 765081 - DNA, 19 bp, Mus musculus
  siRNA target sequence for MOR164-2 (NM_146816.1,332-350).
gctttttcgtcattacaga

SEQ ID NO: 765082 - DNA, 19 bp, Mus musculus
  siRNA target sequence for MOR164-2 (NM_146816.1,339-357).
cgtcattacagaatgttat

SEQ ID NO: 765083 - DNA, 19 bp, Mus musculus
  siRNA target sequence for MOR164-2 (NM_146816.1,399-417).
caagccactgctatataat

SEQ ID NO: 765084 - DNA, 19 bp, Mus musculus
  siRNA target sequence for MOR164-2 (NM_146816.1,402-420).
gccactgctatataatgtt

SEQ ID NO: 765085 - DNA, 19 bp, Mus musculus
  siRNA target sequence for MOR164-2 (NM_146816.1,524-542).
gtgatgccaaccttgtcaa

SEQ ID NO: 765086 - DNA, 19 bp, Mus musculus
  siRNA target sequence for MOR164-2 (NM_146816.1,531-549).
caaccttgtcaatcattat

SEQ ID NO: 765087 - DNA, 19 bp, Mus musculus
  siRNA target sequence for MOR164-2 (NM_146816.1,645-663).
gtctaccagtaccactttt

SEQ ID NO: 765088 - DNA, 19 bp, Mus musculus
  siRNA target sequence for MOR164-2 (NM_146816.1,647-665).
ctaccagtaccacttttat

SEQ ID NO: 765089 - DNA, 19 bp, Mus musculus
  siRNA target sequence for MOR164-2 (NM_146816.1,792-810).
gtacatgcaaccttctgat

SEQ ID NO: 765090 - DNA, 19 bp, Mus musculus
  siRNA target sequence for MOR164-2 (NM_146816.1,840-858).
ctcggtattttacacaaat

SEQ ID NO: 765091 - DNA, 19 bp, Mus musculus
  siRNA target sequence for MOR164-2 (NM_146816.1,842-860).
cggtattttacacaaatgt

SEQ ID NO: 765092 - DNA, 19 bp, Mus musculus
  siRNA target sequence for MOR174-3 (NM_146817.1,60-78).
cccagagctggcaatcttt

SEQ ID NO: 765093 - DNA, 19 bp, Mus musculus
  siRNA target sequence for MOR174-3 (NM_146817.1,64-82).
gagctggcaatctttctct

SEQ ID NO: 765094 - DNA, 19 bp, Mus musculus
  siRNA target sequence for MOR174-3 (NM_146817.1,106-124).
ggagtgacagtcatagcaa

SEQ ID NO: 765095 - DNA, 19 bp, Mus musculus
  siRNA target sequence for MOR174-3 (NM_146817.1,235-253).
ccaaagatgttcactgata

SEQ ID NO: 765096 - DNA, 19 bp, Mus musculus
  siRNA target sequence for MOR174-3 (NM_146817.1,236-254).
caaagatgttcactgatat

SEQ ID NO: 765097 - DNA, 19 bp, Mus musculus
  siRNA target sequence for MOR174-3 (NM_146817.1,261-279).
ccaggatcaagttatttct

SEQ ID NO: 765098 - DNA, 19 bp, Mus musculus
  siRNA target sequence for MOR174-3 (NM_146817.1,282-300).
cctggaatgcatgttacaa

SEQ ID NO: 765099 - DNA, 19 bp, Mus musculus
  siRNA target sequence for MOR174-3 (NM_146817.1,283-301).
ctggaatgcatgttacaat

SEQ ID NO: 765100 - DNA, 19 bp, Mus musculus
  siRNA target sequence for MOR174-3 (NM_146817.1,291-309).
catgttacaattttattta

SEQ ID NO: 765101 - DNA, 19 bp, Mus musculus
  siRNA target sequence for MOR174-3 (NM_146817.1,411-429).
cccaaagctccgtcttgta

SEQ ID NO: 765102 - DNA, 19 bp, Mus musculus
  siRNA target sequence for MOR174-3 (NM_146817.1,413-431).
caaagctccgtcttgtact

SEQ ID NO: 765103 - DNA, 19 bp, Mus musculus
  siRNA target sequence for MOR174-3 (NM_146817.1,567-585).
ctctgatgttagtacaaat

SEQ ID NO: 765104 - DNA, 19 bp, Mus musculus
  siRNA target sequence for MOR174-3 (NM_146817.1,571-589).
gatgttagtacaaatgagt

SEQ ID NO: 765105 - DNA, 19 bp, Mus musculus
  siRNA target sequence for MOR174-3 (NM_146817.1,578-596).
gtacaaatgagtttttcct

SEQ ID NO: 765106 - DNA, 19 bp, Mus musculus
  siRNA target sequence for MOR174-3 (NM_146817.1,595-613).
ctgttcatcattgtcaatt

SEQ ID NO: 765107 - DNA, 19 bp, Mus musculus
  siRNA target sequence for MOR174-3 (NM_146817.1,753-771).
ccatggaacgatccttttt

SEQ ID NO: 765108 - DNA, 19 bp, Mus musculus
  siRNA target sequence for MOR174-3 (NM_146817.1,754-772).
catggaacgatccttttta

SEQ ID NO: 765109 - DNA, 19 bp, Mus musculus
  siRNA target sequence for MOR174-3 (NM_146817.1,758-776).
gaacgatcctttttattta

SEQ ID NO: 765110 - DNA, 19 bp, Mus musculus
  siRNA target sequence for MOR174-3 (NM_146817.1,783-801).
gcccaactctggtaacagt

SEQ ID NO: 765111 - DNA, 19 bp, Mus musculus
  siRNA target sequence for MOR174-3 (NM_146817.1,789-807).
ctctggtaacagtctagat

SEQ ID NO: 765112 - DNA, 19 bp, Mus musculus
  siRNA target sequence for MOR174-3 (NM_146817.1,912-930).
gttaggctctaaaaagaat

SEQ ID NO: 765113 - DNA, 19 bp, Mus musculus
  siRNA target sequence for MOR209-1 (NM_146819.1,21-39).
ctcagagtttattctactt

SEQ ID NO: 765114 - DNA, 19 bp, Mus musculus
  siRNA target sequence for MOR209-1 (NM_146819.1,52-70).
ggtcctggtatacaaatgt

SEQ ID NO: 765115 - DNA, 19 bp, Mus musculus
  siRNA target sequence for MOR209-1 (NM_146819.1,53-71).
gtcctggtatacaaatgtt

SEQ ID NO: 765116 - DNA, 19 bp, Mus musculus
  siRNA target sequence for MOR209-1 (NM_146819.1,58-76).
ggtatacaaatgttgctat

SEQ ID NO: 765117 - DNA, 19 bp, Mus musculus
  siRNA target sequence for MOR209-1 (NM_146819.1,227-245).
ctcctagagctctgataaa

SEQ ID NO: 765118 - DNA, 19 bp, Mus musculus
  siRNA target sequence for MOR209-1 (NM_146819.1,229-247).
cctagagctctgataaact

SEQ ID NO: 765119 - DNA, 19 bp, Mus musculus
  siRNA target sequence for MOR209-1 (NM_146819.1,252-270).
gaaacaggatcatacaata

SEQ ID NO: 765120 - DNA, 19 bp, Mus musculus
  siRNA target sequence for MOR209-1 (NM_146819.1,259-277).
gatcatacaatatccttta

SEQ ID NO: 765121 - DNA, 19 bp, Mus musculus
  siRNA target sequence for MOR209-1 (NM_146819.1,278-296).
gtgggtgtgccacacaatt

SEQ ID NO: 765122 - DNA, 19 bp, Mus musculus
  siRNA target sequence for MOR209-1 (NM_146819.1,280-298).
gggtgtgccacacaattct

SEQ ID NO: 765123 - DNA, 19 bp, Mus musculus
  siRNA target sequence for MOR209-1 (NM_146819.1,281-299).
ggtgtgccacacaattctt

SEQ ID NO: 765124 - DNA, 19 bp, Mus musculus
  siRNA target sequence for MOR209-1 (NM_146819.1,282-300).
gtgtgccacacaattcttt

SEQ ID NO: 765125 - DNA, 19 bp, Mus musculus
  siRNA target sequence for MOR209-1 (NM_146819.1,317-335).
gtaccacagaagcatttct

SEQ ID NO: 765126 - DNA, 19 bp, Mus musculus
  siRNA target sequence for MOR209-1 (NM_146819.1,412-430).
gtctgtggattgttggtat

SEQ ID NO: 765127 - DNA, 19 bp, Mus musculus
  siRNA target sequence for MOR209-1 (NM_146819.1,426-444).
ggtatcagggtcctattca

SEQ ID NO: 765128 - DNA, 19 bp, Mus musculus
  siRNA target sequence for MOR209-1 (NM_146819.1,427-445).
gtatcagggtcctattcat

SEQ ID NO: 765129 - DNA, 19 bp, Mus musculus
  siRNA target sequence for MOR209-1 (NM_146819.1,463-481).
gtcacgcaaaccacaatga

SEQ ID NO: 765130 - DNA, 19 bp, Mus musculus
  siRNA target sequence for MOR209-1 (NM_146819.1,473-491).
ccacaatgaccttcacttt

SEQ ID NO: 765131 - DNA, 19 bp, Mus musculus
  siRNA target sequence for MOR209-1 (NM_146819.1,503-521).
ggtccaatgagatcaatga

SEQ ID NO: 765132 - DNA, 19 bp, Mus musculus
  siRNA target sequence for MOR209-1 (NM_146819.1,532-550).
gacgtcccaccactcttat

SEQ ID NO: 765133 - DNA, 19 bp, Mus musculus
  siRNA target sequence for MOR209-1 (NM_146819.1,546-564).
cttatccctctcatgttca

SEQ ID NO: 765134 - DNA, 19 bp, Mus musculus
  siRNA target sequence for MOR209-1 (NM_146819.1,651-669).
ctatatcatttcaacaata

SEQ ID NO: 765135 - DNA, 19 bp, Mus musculus
  siRNA target sequence for MOR38-1 (NM_146820.1,130-148).
gctatcctcttcttggtta

SEQ ID NO: 765136 - DNA, 19 bp, Mus musculus
  siRNA target sequence for MOR38-1 (NM_146820.1,135-153).
cctcttcttggttatcaca

SEQ ID NO: 765137 - DNA, 19 bp, Mus musculus
  siRNA target sequence for MOR38-1 (NM_146820.1,385-403).
ccactacgctacaacacaa

SEQ ID NO: 765138 - DNA, 19 bp, Mus musculus
  siRNA target sequence for MOR38-1 (NM_146820.1,386-404).
cactacgctacaacacaat

SEQ ID NO: 765139 - DNA, 19 bp, Mus musculus
  siRNA target sequence for MOR38-1 (NM_146820.1,388-406).
ctacgctacaacacaattt

SEQ ID NO: 765140 - DNA, 19 bp, Mus musculus
  siRNA target sequence for MOR38-1 (NM_146820.1,401-419).
caattttaagccattctct

SEQ ID NO: 765141 - DNA, 19 bp, Mus musculus
  siRNA target sequence for MOR38-1 (NM_146820.1,449-467).
ccaagggtgtcatccttat

SEQ ID NO: 765142 - DNA, 19 bp, Mus musculus
  siRNA target sequence for MOR38-1 (NM_146820.1,537-555).
ccatatggctgtggtaaaa

SEQ ID NO: 765143 - DNA, 19 bp, Mus musculus
  siRNA target sequence for MOR38-1 (NM_146820.1,572-590).
ccagaccaaatcggattta

SEQ ID NO: 765144 - DNA, 19 bp, Mus musculus
  siRNA target sequence for MOR38-1 (NM_146820.1,573-591).
cagaccaaatcggatttat

SEQ ID NO: 765145 - DNA, 19 bp, Mus musculus
  siRNA target sequence for MOR38-1 (NM_146820.1,783-801).
ccgcatcggccaccatatt

SEQ ID NO: 765146 - DNA, 19 bp, Mus musculus
  siRNA target sequence for MOR38-1 (NM_146820.1,786-804).
catcggccaccatattcca

SEQ ID NO: 765147 - DNA, 19 bp, Mus musculus
  siRNA target sequence for MOR38-1 (NM_146820.1,803-821).
cacctcatgctcacattat

SEQ ID NO: 765148 - DNA, 19 bp, Mus musculus
  siRNA target sequence for MOR38-1 (NM_146820.1,806-824).
ctcatgctcacattattct

SEQ ID NO: 765149 - DNA, 19 bp, Mus musculus
  siRNA target sequence for MOR38-1 (NM_146820.1,851-869).
cggtgttcaacccaattat

SEQ ID NO: 765150 - DNA, 19 bp, Mus musculus
  siRNA target sequence for MOR38-1 (NM_146820.1,862-880).
ccaattatctacggtatta

SEQ ID NO: 765151 - DNA, 19 bp, Mus musculus
  siRNA target sequence for MOR38-1 (NM_146820.1,863-881).
caattatctacggtattaa

SEQ ID NO: 765152 - DNA, 19 bp, Mus musculus
  siRNA target sequence for MOR38-1 (NM_146820.1,898-916).
gacagagtggccaaatgct

SEQ ID NO: 765153 - DNA, 19 bp, Mus musculus
  siRNA target sequence for MOR26-2 (NM_146821.1,3-21).
ggcaggcaatgctacacat

SEQ ID NO: 765154 - DNA, 19 bp, Mus musculus
  siRNA target sequence for MOR26-2 (NM_146821.1,7-25).
ggcaatgctacacatcata

SEQ ID NO: 765155 - DNA, 19 bp, Mus musculus
  siRNA target sequence for MOR26-2 (NM_146821.1,8-26).
gcaatgctacacatcatat

SEQ ID NO: 765156 - DNA, 19 bp, Mus musculus
  siRNA target sequence for MOR26-2 (NM_146821.1,9-27).
caatgctacacatcatatt

SEQ ID NO: 765157 - DNA, 19 bp, Mus musculus
  siRNA target sequence for MOR26-2 (NM_146821.1,53-71).
ctgggttggaaaactttca

SEQ ID NO: 765158 - DNA, 19 bp, Mus musculus
  siRNA target sequence for MOR26-2 (NM_146821.1,121-139).
gggaacagcataatcctta

SEQ ID NO: 765159 - DNA, 19 bp, Mus musculus
  siRNA target sequence for MOR26-2 (NM_146821.1,449-467).
gccgagctatacttatgat

SEQ ID NO: 765160 - DNA, 19 bp, Mus musculus
  siRNA target sequence for MOR26-2 (NM_146821.1,496-514).
ctgttgtactacaccaaat

SEQ ID NO: 765161 - DNA, 19 bp, Mus musculus
  siRNA target sequence for MOR26-2 (NM_146821.1,606-624).
ggccctttcagtgacaata

SEQ ID NO: 765162 - DNA, 19 bp, Mus musculus
  siRNA target sequence for MOR26-2 (NM_146821.1,643-661).
gtcacatcctacataaaaa

SEQ ID NO: 765163 - DNA, 19 bp, Mus musculus
  siRNA target sequence for MOR26-2 (NM_146821.1,645-663).
cacatcctacataaaaatt

SEQ ID NO: 765164 - DNA, 19 bp, Mus musculus
  siRNA target sequence for MOR26-2 (NM_146821.1,808-826).
gcaagtatccacataatct

SEQ ID NO: 765165 - DNA, 19 bp, Mus musculus
  siRNA target sequence for MOR13-4 (NM_146822.1,247-265).
gtacttgctaccttctgtt

SEQ ID NO: 765166 - DNA, 19 bp, Mus musculus
  siRNA target sequence for MOR13-4 (NM_146822.1,254-272).
ctaccttctgtttcaatta

SEQ ID NO: 765167 - DNA, 19 bp, Mus musculus
  siRNA target sequence for MOR13-4 (NM_146822.1,336-354).
ggaatcgggcatactactt

SEQ ID NO: 765168 - DNA, 19 bp, Mus musculus
  siRNA target sequence for MOR13-4 (NM_146822.1,440-458).
gtctgggtatccttgcaaa

SEQ ID NO: 765169 - DNA, 19 bp, Mus musculus
  siRNA target sequence for MOR13-4 (NM_146822.1,444-462).
gggtatccttgcaaaaagt

SEQ ID NO: 765170 - DNA, 19 bp, Mus musculus
  siRNA target sequence for MOR13-4 (NM_146822.1,523-541).
gtgctacaccattcatatt

SEQ ID NO: 765171 - DNA, 19 bp, Mus musculus
  siRNA target sequence for MOR13-4 (NM_146822.1,542-560).
gcctccatccagatctgat

SEQ ID NO: 765172 - DNA, 19 bp, Mus musculus
  siRNA target sequence for MOR13-4 (NM_146822.1,574-592).
ggagacatccatgttaaca

SEQ ID NO: 765173 - DNA, 19 bp, Mus musculus
  siRNA target sequence for MOR13-4 (NM_146822.1,577-595).
gacatccatgttaacaata

SEQ ID NO: 765174 - DNA, 19 bp, Mus musculus
  siRNA target sequence for MOR13-4 (NM_146822.1,582-600).
ccatgttaacaatatctat

SEQ ID NO: 765175 - DNA, 19 bp, Mus musculus
  siRNA target sequence for MOR13-4 (NM_146822.1,602-620).
ggctctttgtggtaatttt

SEQ ID NO: 765176 - DNA, 19 bp, Mus musculus
  siRNA target sequence for MOR13-4 (NM_146822.1,676-694).
gctgtgttggttattgcat

SEQ ID NO: 765177 - DNA, 19 bp, Mus musculus
  siRNA target sequence for MOR13-4 (NM_146822.1,714-732).
ggcactcaacacctgtata

SEQ ID NO: 765178 - DNA, 19 bp, Mus musculus
  siRNA target sequence for MOR13-4 (NM_146822.1,715-733).
gcactcaacacctgtatat

SEQ ID NO: 765179 - DNA, 19 bp, Mus musculus
  siRNA target sequence for MOR13-4 (NM_146822.1,743-761).
gtgcagtactggcatttta

SEQ ID NO: 765180 - DNA, 19 bp, Mus musculus
  siRNA target sequence for MOR13-4 (NM_146822.1,789-807).
ccaccgcttctggaaaagt

SEQ ID NO: 765181 - DNA, 19 bp, Mus musculus
  siRNA target sequence for MOR13-4 (NM_146822.1,806-824).
gtgctccagctgttgttca

SEQ ID NO: 765182 - DNA, 19 bp, Mus musculus
  siRNA target sequence for MOR13-4 (NM_146822.1,826-844).
gttatgatgtccaatgtct

SEQ ID NO: 765183 - DNA, 19 bp, Mus musculus
  siRNA target sequence for MOR13-4 (NM_146822.1,831-849).
gatgtccaatgtctatcta

SEQ ID NO: 765184 - DNA, 19 bp, Mus musculus
  siRNA target sequence for MOR225-3 (NM_146823.1,45-63).
gtcttctaagcggaacatt

SEQ ID NO: 765185 - DNA, 19 bp, Mus musculus
  siRNA target sequence for MOR225-3 (NM_146823.1,47-65).
cttctaagcggaacattga

SEQ ID NO: 765186 - DNA, 19 bp, Mus musculus
  siRNA target sequence for MOR225-3 (NM_146823.1,55-73).
cggaacattgaggtgtttt

SEQ ID NO: 765187 - DNA, 19 bp, Mus musculus
  siRNA target sequence for MOR225-3 (NM_146823.1,130-148).
cttatctccattagatgta

SEQ ID NO: 765188 - DNA, 19 bp, Mus musculus
  siRNA target sequence for MOR225-3 (NM_146823.1,250-268).
ctagtgagaagaaaaacta

SEQ ID NO: 765189 - DNA, 19 bp, Mus musculus
  siRNA target sequence for MOR225-3 (NM_146823.1,469-487).
cagttttgtttgctaatct

SEQ ID NO: 765190 - DNA, 19 bp, Mus musculus
  siRNA target sequence for MOR225-3 (NM_146823.1,602-620).
caggactgattgctttagt

SEQ ID NO: 765191 - DNA, 19 bp, Mus musculus
  siRNA target sequence for MOR225-3 (NM_146823.1,604-622).
ggactgattgctttagtaa

SEQ ID NO: 765192 - DNA, 19 bp, Mus musculus
  siRNA target sequence for MOR225-3 (NM_146823.1,614-632).
ctttagtaacctttgttgt

SEQ ID NO: 765193 - DNA, 19 bp, Mus musculus
  siRNA target sequence for MOR225-3 (NM_146823.1,639-657).
cgggtcatatgtggttata

SEQ ID NO: 765194 - DNA, 19 bp, Mus musculus
  siRNA target sequence for MOR225-3 (NM_146823.1,641-659).
ggtcatatgtggttatact

SEQ ID NO: 765195 - DNA, 19 bp, Mus musculus
  siRNA target sequence for MOR225-3 (NM_146823.1,663-681).
cacattaaggaattactct

SEQ ID NO: 765196 - DNA, 19 bp, Mus musculus
  siRNA target sequence for MOR225-3 (NM_146823.1,895-913).
gtttggtgtcaaaacatgt

SEQ ID NO: 765197 - DNA, 19 bp, Mus musculus
  siRNA target sequence for MOR224-2 (NM_146828.1,34-52).
ctggtgggaatcccatata

SEQ ID NO: 765198 - DNA, 19 bp, Mus musculus
  siRNA target sequence for MOR224-2 (NM_146828.1,190-208).
ctgtcagtgctcgatatct

SEQ ID NO: 765199 - DNA, 19 bp, Mus musculus
  siRNA target sequence for MOR224-2 (NM_146828.1,245-263).
ccctcactggacatagtca

SEQ ID NO: 765200 - DNA, 19 bp, Mus musculus
  siRNA target sequence for MOR224-2 (NM_146828.1,256-274).
catagtcacacgatctctt

SEQ ID NO: 765201 - DNA, 19 bp, Mus musculus
  siRNA target sequence for MOR224-2 (NM_146828.1,507-525).
caatgaagtggataacttt

SEQ ID NO: 765202 - DNA, 19 bp, Mus musculus
  siRNA target sequence for MOR224-2 (NM_146828.1,577-595).
gcacaagctgtaagtttca

SEQ ID NO: 765203 - DNA, 19 bp, Mus musculus
  siRNA target sequence for MOR224-2 (NM_146828.1,580-598).
caagctgtaagtttcatca

SEQ ID NO: 765204 - DNA, 19 bp, Mus musculus
  siRNA target sequence for MOR224-2 (NM_146828.1,652-670).
cgcatcgtcatctccatat

SEQ ID NO: 765205 - DNA, 19 bp, Mus musculus
  siRNA target sequence for MOR224-2 (NM_146828.1,751-769).
ggcccagtggtcctcattt

SEQ ID NO: 765206 - DNA, 19 bp, Mus musculus
  siRNA target sequence for MOR224-2 (NM_146828.1,752-770).
gcccagtggtcctcattta

SEQ ID NO: 765207 - DNA, 19 bp, Mus musculus
  siRNA target sequence for MOR224-2 (NM_146828.1,807-825).
ggttcaagtgttgaataat

SEQ ID NO: 765208 - DNA, 19 bp, Mus musculus
  siRNA target sequence for MOR256-5 (NM_146832.1,905-923).
gtaacctgttcaagaacat

SEQ ID NO: 765209 - DNA, 19 bp, Mus musculus
  siRNA target sequence for MOR250-2 (NM_146834.1,10-28).
caaacctcagtcactgaat

SEQ ID NO: 765210 - DNA, 19 bp, Mus musculus
  siRNA target sequence for MOR250-2 (NM_146834.1,39-57).
gggagtaacagatatacaa

SEQ ID NO: 765211 - DNA, 19 bp, Mus musculus
  siRNA target sequence for MOR250-2 (NM_146834.1,47-65).
cagatatacaagaattaaa

SEQ ID NO: 765212 - DNA, 19 bp, Mus musculus
  siRNA target sequence for MOR250-2 (NM_146834.1,58-76).
gaattaaaccctattctct

SEQ ID NO: 765213 - DNA, 19 bp, Mus musculus
  siRNA target sequence for MOR250-2 (NM_146834.1,890-908).
ggagtgcattgaatagaaa

SEQ ID NO: 765214 - DNA, 19 bp, Mus musculus
  siRNA target sequence for MOR250-1 (NM_146835.1,11-29).
ccacttcagtggatgagtt

SEQ ID NO: 765215 - DNA, 19 bp, Mus musculus
  siRNA target sequence for MOR250-1 (NM_146835.1,14-32).
cttcagtggatgagtttct

SEQ ID NO: 765216 - DNA, 19 bp, Mus musculus
  siRNA target sequence for MOR250-1 (NM_146835.1,138-156).
cgtcactctggaaagaaga

SEQ ID NO: 765217 - DNA, 19 bp, Mus musculus
  siRNA target sequence for MOR250-1 (NM_146835.1,194-212).
cttgcctggatatttgtta

SEQ ID NO: 765218 - DNA, 19 bp, Mus musculus
  siRNA target sequence for MOR250-1 (NM_146835.1,255-273).
gaggcgtagggccatatca

SEQ ID NO: 765219 - DNA, 19 bp, Mus musculus
  siRNA target sequence for MOR250-1 (NM_146835.1,257-275).
ggcgtagggccatatcatt

SEQ ID NO: 765220 - DNA, 19 bp, Mus musculus
  siRNA target sequence for MOR250-1 (NM_146835.1,387-405).
ctacactgctatcatgaat

SEQ ID NO: 765221 - DNA, 19 bp, Mus musculus
  siRNA target sequence for MOR250-1 (NM_146835.1,441-459).
gttcacaagcttcttctat

SEQ ID NO: 765222 - DNA, 19 bp, Mus musculus
  siRNA target sequence for MOR250-1 (NM_146835.1,555-573).
ggcctgtggcaatacagtt

SEQ ID NO: 765223 - DNA, 19 bp, Mus musculus
  siRNA target sequence for MOR250-1 (NM_146835.1,560-578).
gtggcaatacagttctcaa

SEQ ID NO: 765224 - DNA, 19 bp, Mus musculus
  siRNA target sequence for MOR250-1 (NM_146835.1,576-594).
caaccaatggcttctttct

SEQ ID NO: 765225 - DNA, 19 bp, Mus musculus
  siRNA target sequence for MOR250-1 (NM_146835.1,595-613).
gttgtcacaggcagtatat

SEQ ID NO: 765226 - DNA, 19 bp, Mus musculus
  siRNA target sequence for MOR250-1 (NM_146835.1,598-616).
gtcacaggcagtatatcca

SEQ ID NO: 765227 - DNA, 19 bp, Mus musculus
  siRNA target sequence for MOR250-1 (NM_146835.1,661-679).
gcctttcttctgttcaaga

SEQ ID NO: 765228 - DNA, 19 bp, Mus musculus
  siRNA target sequence for MOR250-1 (NM_146835.1,754-772).
ggtcctgttggtttcacat

SEQ ID NO: 765229 - DNA, 19 bp, Mus musculus
  siRNA target sequence for MOR250-1 (NM_146835.1,755-773).
gtcctgttggtttcacata

SEQ ID NO: 765230 - DNA, 19 bp, Mus musculus
  siRNA target sequence for MOR250-1 (NM_146835.1,817-835).
cgggtggtggccatcatct

SEQ ID NO: 765231 - DNA, 19 bp, Mus musculus
  siRNA target sequence for MOR250-1 (NM_146835.1,891-909).
ggtgatgttggctctgaaa

SEQ ID NO: 765232 - DNA, 19 bp, Mus musculus
  siRNA target sequence for MOR250-1 (NM_146835.1,892-910).
gtgatgttggctctgaaaa

SEQ ID NO: 765233 - DNA, 19 bp, Mus musculus
  siRNA target sequence for MOR177-1 (NM_146836.1,84-102).
caccacactcctacttgtt

SEQ ID NO: 765234 - DNA, 19 bp, Mus musculus
  siRNA target sequence for MOR177-1 (NM_146836.1,86-104).
ccacactcctacttgttta

SEQ ID NO: 765235 - DNA, 19 bp, Mus musculus
  siRNA target sequence for MOR177-1 (NM_146836.1,89-107).
cactcctacttgtttatct

SEQ ID NO: 765236 - DNA, 19 bp, Mus musculus
  siRNA target sequence for MOR177-1 (NM_146836.1,121-139).
gccaaccttgggatgatca

SEQ ID NO: 765237 - DNA, 19 bp, Mus musculus
  siRNA target sequence for MOR177-1 (NM_146836.1,126-144).
ccttgggatgatcatctta

SEQ ID NO: 765238 - DNA, 19 bp, Mus musculus
  siRNA target sequence for MOR177-1 (NM_146836.1,130-148).
gggatgatcatcttaatta

SEQ ID NO: 765239 - DNA, 19 bp, Mus musculus
  siRNA target sequence for MOR177-1 (NM_146836.1,240-258).
gatgttggtggatctttta

SEQ ID NO: 765240 - DNA, 19 bp, Mus musculus
  siRNA target sequence for MOR177-1 (NM_146836.1,898-916).
gctgtggtaaaattaaaga

SEQ ID NO: 765241 - DNA, 19 bp, Mus musculus
  siRNA target sequence for MOR264-4 (NM_146838.1,274-292).
gctactcaagagagaaaga

SEQ ID NO: 765242 - DNA, 19 bp, Mus musculus
  siRNA target sequence for MOR264-4 (NM_146838.1,275-293).
ctactcaagagagaaagat

SEQ ID NO: 765243 - DNA, 19 bp, Mus musculus
  siRNA target sequence for MOR42-1 (NM_146840.1,610-628).
ctcattattcgaaccttta

SEQ ID NO: 765244 - DNA, 19 bp, Mus musculus
  siRNA target sequence for MOR31-10 (NM_146841.1,137-155).
caggcaatgcactgctatt

SEQ ID NO: 765245 - DNA, 19 bp, Mus musculus
  siRNA target sequence for MOR31-10 (NM_146841.1,140-158).
gcaatgcactgctattatt

SEQ ID NO: 765246 - DNA, 19 bp, Mus musculus
  siRNA target sequence for MOR31-10 (NM_146841.1,151-169).
ctattattcctgatcatca

SEQ ID NO: 765247 - DNA, 19 bp, Mus musculus
  siRNA target sequence for MOR31-10 (NM_146841.1,216-234).
ggcactcgctgatatcttt

SEQ ID NO: 765248 - DNA, 19 bp, Mus musculus
  siRNA target sequence for MOR31-10 (NM_146841.1,218-236).
cactcgctgatatctttct

SEQ ID NO: 765249 - DNA, 19 bp, Mus musculus
  siRNA target sequence for MOR31-10 (NM_146841.1,251-269).
caccaaaaatgttagcaat

SEQ ID NO: 765250 - DNA, 19 bp, Mus musculus
  siRNA target sequence for MOR31-10 (NM_146841.1,666-684).
ctcatatgcccttatcctt

SEQ ID NO: 765251 - DNA, 19 bp, Mus musculus
  siRNA target sequence for MOR31-10 (NM_146841.1,811-829).
gggggtcacagtataccat

SEQ ID NO: 765252 - DNA, 19 bp, Mus musculus
  siRNA target sequence for MOR31-10 (NM_146841.1,812-830).
ggggtcacagtataccatt

SEQ ID NO: 765253 - DNA, 19 bp, Mus musculus
  siRNA target sequence for MOR31-10 (NM_146841.1,927-945).
ggttatccaagtcttttct

SEQ ID NO: 765254 - DNA, 19 bp, Mus musculus
  siRNA target sequence for MOR31-10 (NM_146841.1,928-946).
gttatccaagtcttttctt

SEQ ID NO: 765255 - DNA, 19 bp, Mus musculus
  siRNA target sequence for MOR188-5 (NM_146846.1,102-120).
ctacttgagctcaatgttt

SEQ ID NO: 765256 - DNA, 19 bp, Mus musculus
  siRNA target sequence for MOR188-5 (NM_146846.1,256-274).
gttgtagatttgaacataa

SEQ ID NO: 765257 - DNA, 19 bp, Mus musculus
  siRNA target sequence for MOR188-5 (NM_146846.1,259-277).
gtagatttgaacataatct

SEQ ID NO: 765258 - DNA, 19 bp, Mus musculus
  siRNA target sequence for MOR188-5 (NM_146846.1,267-285).
gaacataatctcctataat

SEQ ID NO: 765259 - DNA, 19 bp, Mus musculus
  siRNA target sequence for MOR188-5 (NM_146846.1,436-454).
gcaatcccctatttgtact

SEQ ID NO: 765260 - DNA, 19 bp, Mus musculus
  siRNA target sequence for MOR188-5 (NM_146846.1,479-497).
ccataaagatttttacatt

SEQ ID NO: 765261 - DNA, 19 bp, Mus musculus
  siRNA target sequence for MOR188-5 (NM_146846.1,798-816).
ctcttttgacacggataaa

SEQ ID NO: 765262 - DNA, 19 bp, Mus musculus
  siRNA target sequence for MOR188-5 (NM_146846.1,800-818).
cttttgacacggataaagt

SEQ ID NO: 765263 - DNA, 19 bp, Mus musculus
  siRNA target sequence for MOR188-5 (NM_146846.1,837-855).
cctgattatacccatgtta

SEQ ID NO: 765264 - DNA, 19 bp, Mus musculus
  siRNA target sequence for MOR188-4 (NM_146847.1,36-54).
catcctaatgggtatcagt

SEQ ID NO: 765265 - DNA, 19 bp, Mus musculus
  siRNA target sequence for MOR188-4 (NM_146847.1,108-126).
gacctcaatggtaggtaat

SEQ ID NO: 765266 - DNA, 19 bp, Mus musculus
  siRNA target sequence for MOR188-4 (NM_146847.1,110-128).
cctcaatggtaggtaattt

SEQ ID NO: 765267 - DNA, 19 bp, Mus musculus
  siRNA target sequence for MOR188-4 (NM_146847.1,326-344).
gtagtgagctattcattct

SEQ ID NO: 765268 - DNA, 19 bp, Mus musculus
  siRNA target sequence for MOR188-4 (NM_146847.1,422-440).
gttgggttcttatgtcaat

SEQ ID NO: 765269 - DNA, 19 bp, Mus musculus
  siRNA target sequence for MOR188-4 (NM_146847.1,448-466).
ctctactgcacatttgtgt

SEQ ID NO: 765270 - DNA, 19 bp, Mus musculus
  siRNA target sequence for MOR188-4 (NM_146847.1,643-661).
ctggtatcctacatgttta

SEQ ID NO: 765271 - DNA, 19 bp, Mus musculus
  siRNA target sequence for MOR188-4 (NM_146847.1,785-803).
ctcagtccagtcattctga

SEQ ID NO: 765272 - DNA, 19 bp, Mus musculus
  siRNA target sequence for MOR188-4 (NM_146847.1,811-829).
gataaggtgtcttcaattt

SEQ ID NO: 765273 - DNA, 19 bp, Mus musculus
  siRNA target sequence for MOR188-4 (NM_146847.1,904-922).
cataggacttggagaaata

SEQ ID NO: 765274 - DNA, 19 bp, Mus musculus
  siRNA target sequence for MOR188-4 (NM_146847.1,914-932).
ggagaaatatttgtaagat

SEQ ID NO: 765275 - DNA, 19 bp, Mus musculus
  siRNA target sequence for MOR174-2 (NM_146848.1,3-21).
gttactgacatatggaaat

SEQ ID NO: 765276 - DNA, 19 bp, Mus musculus
  siRNA target sequence for MOR174-2 (NM_146848.1,7-25).
ctgacatatggaaataaca

SEQ ID NO: 765277 - DNA, 19 bp, Mus musculus
  siRNA target sequence for MOR174-2 (NM_146848.1,9-27).
gacatatggaaataacagt

SEQ ID NO: 765278 - DNA, 19 bp, Mus musculus
  siRNA target sequence for MOR174-2 (NM_146848.1,29-47).
gggccatgttcatcctatt

SEQ ID NO: 765279 - DNA, 19 bp, Mus musculus
  siRNA target sequence for MOR174-2 (NM_146848.1,247-265).
ctggtgaatctttttataa

SEQ ID NO: 765280 - DNA, 19 bp, Mus musculus
  siRNA target sequence for MOR174-2 (NM_146848.1,249-267).
ggtgaatctttttataaaa

SEQ ID NO: 765281 - DNA, 19 bp, Mus musculus
  siRNA target sequence for MOR174-2 (NM_146848.1,272-290).
gagccatctcatttttaga

SEQ ID NO: 765282 - DNA, 19 bp, Mus musculus
  siRNA target sequence for MOR174-2 (NM_146848.1,274-292).
gccatctcatttttagaat

SEQ ID NO: 765283 - DNA, 19 bp, Mus musculus
  siRNA target sequence for MOR174-2 (NM_146848.1,451-469).
gcatggggactcatatgtt

SEQ ID NO: 765284 - DNA, 19 bp, Mus musculus
  siRNA target sequence for MOR174-2 (NM_146848.1,460-478).
ctcatatgttccttgacaa

SEQ ID NO: 765285 - DNA, 19 bp, Mus musculus
  siRNA target sequence for MOR174-2 (NM_146848.1,488-506).
ctattatccagttatcttt

SEQ ID NO: 765286 - DNA, 19 bp, Mus musculus
  siRNA target sequence for MOR174-2 (NM_146848.1,512-530).
gtatcaacacaattgatca

SEQ ID NO: 765287 - DNA, 19 bp, Mus musculus
  siRNA target sequence for MOR174-2 (NM_146848.1,578-596).
ctcatgttaatcaaatact

SEQ ID NO: 765288 - DNA, 19 bp, Mus musculus
  siRNA target sequence for MOR174-2 (NM_146848.1,618-636).
gaatgctcttagtactcta

SEQ ID NO: 765289 - DNA, 19 bp, Mus musculus
  siRNA target sequence for MOR174-2 (NM_146848.1,623-641).
ctcttagtactctactcat

SEQ ID NO: 765290 - DNA, 19 bp, Mus musculus
  siRNA target sequence for MOR174-2 (NM_146848.1,736-754).
ctgactaccatcactatct

SEQ ID NO: 765291 - DNA, 19 bp, Mus musculus
  siRNA target sequence for MOR174-2 (NM_146848.1,760-778).
ggtactatcctgtttctct

SEQ ID NO: 765292 - DNA, 19 bp, Mus musculus
  siRNA target sequence for MOR174-2 (NM_146848.1,939-957).
cccccatttatcctctaaa

SEQ ID NO: 765293 - DNA, 19 bp, Mus musculus
  siRNA target sequence for MOR174-2 (NM_146848.1,942-960).
ccatttatcctctaaagta

SEQ ID NO: 765294 - DNA, 19 bp, Mus musculus
  siRNA target sequence for MOR220-1 (NM_146851.1,592-610).
cttctgactgccattgttt

SEQ ID NO: 765295 - DNA, 19 bp, Mus musculus
  siRNA target sequence for MOR258-2 (NM_146852.1,8-26).
gctcctcctatgagaatca

SEQ ID NO: 765296 - DNA, 19 bp, Mus musculus
  siRNA target sequence for MOR258-2 (NM_146852.1,393-411).
cccactcagatataaggtt

SEQ ID NO: 765297 - DNA, 19 bp, Mus musculus
  siRNA target sequence for MOR258-2 (NM_146852.1,394-412).
ccactcagatataaggtta

SEQ ID NO: 765298 - DNA, 19 bp, Mus musculus
  siRNA target sequence for MOR258-2 (NM_146852.1,395-413).
cactcagatataaggttat

SEQ ID NO: 765299 - DNA, 19 bp, Mus musculus
  siRNA target sequence for MOR258-2 (NM_146852.1,397-415).
ctcagatataaggttatca

SEQ ID NO: 765300 - DNA, 19 bp, Mus musculus
  siRNA target sequence for MOR258-2 (NM_146852.1,435-453).
ggcaatggtagtcttttgt

SEQ ID NO: 765301 - DNA, 19 bp, Mus musculus
  siRNA target sequence for MOR258-2 (NM_146852.1,591-609).
caatgaccggatagacttt

SEQ ID NO: 765302 - DNA, 19 bp, Mus musculus
  siRNA target sequence for MOR258-2 (NM_146852.1,597-615).
ccggatagactttatccta

SEQ ID NO: 765303 - DNA, 19 bp, Mus musculus
  siRNA target sequence for MOR258-2 (NM_146852.1,657-675).
ctcttacgtctgcatcttt

SEQ ID NO: 765304 - DNA, 19 bp, Mus musculus
  siRNA target sequence for MOR258-1 (NM_146853.1,10-28).
cccaatcagacctttgtga

SEQ ID NO: 765305 - DNA, 19 bp, Mus musculus
  siRNA target sequence for MOR258-1 (NM_146853.1,16-34).
cagacctttgtgacagaat

SEQ ID NO: 765306 - DNA, 19 bp, Mus musculus
  siRNA target sequence for MOR258-1 (NM_146853.1,94-112).
ctgataatttacttgttga

SEQ ID NO: 765307 - DNA, 19 bp, Mus musculus
  siRNA target sequence for MOR258-1 (NM_146853.1,284-302).
ccaattgtgtggctcaaat

SEQ ID NO: 765308 - DNA, 19 bp, Mus musculus
  siRNA target sequence for MOR258-1 (NM_146853.1,294-312).
ggctcaaatgtacattttt

SEQ ID NO: 765309 - DNA, 19 bp, Mus musculus
  siRNA target sequence for MOR258-1 (NM_146853.1,422-440).
gtggggtaatggctatttt

SEQ ID NO: 765310 - DNA, 19 bp, Mus musculus
  siRNA target sequence for MOR258-1 (NM_146853.1,424-442).
ggggtaatggctattttct

SEQ ID NO: 765311 - DNA, 19 bp, Mus musculus
  siRNA target sequence for MOR258-1 (NM_146853.1,463-481).
gctgctcttgtctatacca

SEQ ID NO: 765312 - DNA, 19 bp, Mus musculus
  siRNA target sequence for MOR258-1 (NM_146853.1,464-482).
ctgctcttgtctataccat

SEQ ID NO: 765313 - DNA, 19 bp, Mus musculus
  siRNA target sequence for MOR258-1 (NM_146853.1,597-615).
cttcatacttgggtttagt

SEQ ID NO: 765314 - DNA, 19 bp, Mus musculus
  siRNA target sequence for MOR223-4 (NM_146854.1,7-25).
gagaggatgcagtacctta

SEQ ID NO: 765315 - DNA, 19 bp, Mus musculus
  siRNA target sequence for MOR223-4 (NM_146854.1,11-29).
ggatgcagtaccttaacca

SEQ ID NO: 765316 - DNA, 19 bp, Mus musculus
  siRNA target sequence for MOR223-4 (NM_146854.1,131-149).
gtggcaatctcctcattct

SEQ ID NO: 765317 - DNA, 19 bp, Mus musculus
  siRNA target sequence for MOR223-4 (NM_146854.1,223-241).
gcgtgtctgtctacagtaa

SEQ ID NO: 765318 - DNA, 19 bp, Mus musculus
  siRNA target sequence for MOR223-4 (NM_146854.1,225-243).
gtgtctgtctacagtaaca

SEQ ID NO: 765319 - DNA, 19 bp, Mus musculus
  siRNA target sequence for MOR223-4 (NM_146854.1,294-312).
cttccaaggctgtgcttta

SEQ ID NO: 765320 - DNA, 19 bp, Mus musculus
  siRNA target sequence for MOR223-4 (NM_146854.1,341-359).
gcactgagtgttttttata

SEQ ID NO: 765321 - DNA, 19 bp, Mus musculus
  siRNA target sequence for MOR223-4 (NM_146854.1,529-547).
cagcatattgcctacttct

SEQ ID NO: 765322 - DNA, 19 bp, Mus musculus
  siRNA target sequence for MOR223-4 (NM_146854.1,635-653).
ctgcgggctgcctcattct

SEQ ID NO: 765323 - DNA, 19 bp, Mus musculus
  siRNA target sequence for MOR223-4 (NM_146854.1,637-655).
gcgggctgcctcattctca

SEQ ID NO: 765324 - DNA, 19 bp, Mus musculus
  siRNA target sequence for MOR223-4 (NM_146854.1,641-659).
gctgcctcattctcatcat

SEQ ID NO: 765325 - DNA, 19 bp, Mus musculus
  siRNA target sequence for MOR223-4 (NM_146854.1,752-770).
ccgtggtgctcctgtatta

SEQ ID NO: 765326 - DNA, 19 bp, Mus musculus
  siRNA target sequence for MOR223-4 (NM_146854.1,833-851).
cagtcttctacacaatagt

SEQ ID NO: 765327 - DNA, 19 bp, Mus musculus
  siRNA target sequence for MOR223-4 (NM_146854.1,903-921).
gcgggctctgagaaggtta

SEQ ID NO: 765328 - DNA, 19 bp, Mus musculus
  siRNA target sequence for MOR171-4 (NM_146855.1,98-116).
ggatttacatagtcacaat

SEQ ID NO: 765329 - DNA, 19 bp, Mus musculus
  siRNA target sequence for MOR171-4 (NM_146855.1,265-283).
gataaggctatctcgtatt

SEQ ID NO: 765330 - DNA, 19 bp, Mus musculus
  siRNA target sequence for MOR171-4 (NM_146855.1,270-288).
ggctatctcgtattctgat

SEQ ID NO: 765331 - DNA, 19 bp, Mus musculus
  siRNA target sequence for MOR171-4 (NM_146855.1,271-289).
gctatctcgtattctgatt

SEQ ID NO: 765332 - DNA, 19 bp, Mus musculus
  siRNA target sequence for MOR171-4 (NM_146855.1,444-462).
cttttcagtgggctttact

SEQ ID NO: 765333 - DNA, 19 bp, Mus musculus
  siRNA target sequence for MOR171-4 (NM_146855.1,471-489).
gattcatgggggatgtata

SEQ ID NO: 765334 - DNA, 19 bp, Mus musculus
  siRNA target sequence for MOR171-4 (NM_146855.1,475-493).
catgggggatgtatattaa

SEQ ID NO: 765335 - DNA, 19 bp, Mus musculus
  siRNA target sequence for MOR171-4 (NM_146855.1,478-496).
gggggatgtatattaaggt

SEQ ID NO: 765336 - DNA, 19 bp, Mus musculus
  siRNA target sequence for MOR171-4 (NM_146855.1,479-497).
ggggatgtatattaaggtt

SEQ ID NO: 765337 - DNA, 19 bp, Mus musculus
  siRNA target sequence for MOR171-4 (NM_146855.1,480-498).
gggatgtatattaaggtta

SEQ ID NO: 765338 - DNA, 19 bp, Mus musculus
  siRNA target sequence for MOR171-4 (NM_146855.1,481-499).
ggatgtatattaaggttat

SEQ ID NO: 765339 - DNA, 19 bp, Mus musculus
  siRNA target sequence for MOR171-4 (NM_146855.1,536-554).
gtgacattgttccacttat

SEQ ID NO: 765340 - DNA, 19 bp, Mus musculus
  siRNA target sequence for MOR171-4 (NM_146855.1,566-584).
gctccagcacttacattga

SEQ ID NO: 765341 - DNA, 19 bp, Mus musculus
  siRNA target sequence for MOR171-4 (NM_146855.1,633-651).
cctgacaatagtcatttca

SEQ ID NO: 765342 - DNA, 19 bp, Mus musculus
  siRNA target sequence for MOR171-4 (NM_146855.1,675-693).
cctccgcatccactctaaa

SEQ ID NO: 765343 - DNA, 19 bp, Mus musculus
  siRNA target sequence for MOR171-4 (NM_146855.1,729-747).
ccacctgacagctgttctt

SEQ ID NO: 765344 - DNA, 19 bp, Mus musculus
  siRNA target sequence for MOR171-4 (NM_146855.1,759-777).
ctctctcatgtccatgtat

SEQ ID NO: 765345 - DNA, 19 bp, Mus musculus
  siRNA target sequence for MOR171-4 (NM_146855.1,780-798).
gaaacccgcttctaatggt

SEQ ID NO: 765346 - DNA, 19 bp, Mus musculus
  siRNA target sequence for MOR224-1 (NM_146856.1,270-288).
ctcttacagaggctgtatt

SEQ ID NO: 765347 - DNA, 19 bp, Mus musculus
  siRNA target sequence for MOR224-1 (NM_146856.1,418-436).
ctgggcttggtcatagtat

SEQ ID NO: 765348 - DNA, 19 bp, Mus musculus
  siRNA target sequence for MOR224-1 (NM_146856.1,429-447).
catagtatcctggttgata

SEQ ID NO: 765349 - DNA, 19 bp, Mus musculus
  siRNA target sequence for MOR224-1 (NM_146856.1,433-451).
gtatcctggttgataggat

SEQ ID NO: 765350 - DNA, 19 bp, Mus musculus
  siRNA target sequence for MOR224-1 (NM_146856.1,459-477).
gtctggcatcctgacattt

SEQ ID NO: 765351 - DNA, 19 bp, Mus musculus
  siRNA target sequence for MOR224-1 (NM_146856.1,463-481).
ggcatcctgacatttttta

SEQ ID NO: 765352 - DNA, 19 bp, Mus musculus
  siRNA target sequence for MOR224-1 (NM_146856.1,893-911).
gaagggtgtttcacagttt

SEQ ID NO: 765353 - DNA, 19 bp, Mus musculus
  siRNA target sequence for MOR262-3 (NM_146857.1,65-83).
gccttgagcatctcttttt

SEQ ID NO: 765354 - DNA, 19 bp, Mus musculus
  siRNA target sequence for MOR262-3 (NM_146857.1,121-139).
ggcaatggcacccttatta

SEQ ID NO: 765355 - DNA, 19 bp, Mus musculus
  siRNA target sequence for MOR262-3 (NM_146857.1,122-140).
gcaatggcacccttattat

SEQ ID NO: 765356 - DNA, 19 bp, Mus musculus
  siRNA target sequence for MOR262-3 (NM_146857.1,258-276).
ctcagaaagaaaaacgatt

SEQ ID NO: 765357 - DNA, 19 bp, Mus musculus
  siRNA target sequence for MOR262-3 (NM_146857.1,460-478).
gccaactctgcagtacaaa

SEQ ID NO: 765358 - DNA, 19 bp, Mus musculus
  siRNA target sequence for MOR262-3 (NM_146857.1,506-524).
gtggaaatgtcatcaatca

SEQ ID NO: 765359 - DNA, 19 bp, Mus musculus
  siRNA target sequence for MOR262-3 (NM_146857.1,575-593).
caggcaatgaattcatcat

SEQ ID NO: 765360 - DNA, 19 bp, Mus musculus
  siRNA target sequence for MOR262-3 (NM_146857.1,626-644).
cactggtcctcattgtcat

SEQ ID NO: 765361 - DNA, 19 bp, Mus musculus
  siRNA target sequence for MOR262-3 (NM_146857.1,727-745).
cactttactgtggtgataa

SEQ ID NO: 765362 - DNA, 19 bp, Mus musculus
  siRNA target sequence for MOR262-3 (NM_146857.1,786-804).
gtctaaagacaaattcgat

SEQ ID NO: 765363 - DNA, 19 bp, Mus musculus
  siRNA target sequence for MOR262-3 (NM_146857.1,824-842).
cagacaaacttatatccat

SEQ ID NO: 765364 - DNA, 19 bp, Mus musculus
  siRNA target sequence for MOR262-3 (NM_146857.1,906-924).
gaaagaggccataaaaaat

SEQ ID NO: 765365 - DNA, 19 bp, Mus musculus
  siRNA target sequence for MOR262-2 (NM_146858.1,53-71).
cgcactaccccagaattga

SEQ ID NO: 765366 - DNA, 19 bp, Mus musculus
  siRNA target sequence for MOR262-2 (NM_146858.1,54-72).
gcactaccccagaattgaa

SEQ ID NO: 765367 - DNA, 19 bp, Mus musculus
  siRNA target sequence for MOR262-2 (NM_146858.1,113-131).
ccttgctgggaaatactat

SEQ ID NO: 765368 - DNA, 19 bp, Mus musculus
  siRNA target sequence for MOR262-2 (NM_146858.1,118-136).
ctgggaaatactattctga

SEQ ID NO: 765369 - DNA, 19 bp, Mus musculus
  siRNA target sequence for MOR262-2 (NM_146858.1,141-159).
catcactatccttgattct

SEQ ID NO: 765370 - DNA, 19 bp, Mus musculus
  siRNA target sequence for MOR262-2 (NM_146858.1,144-162).
cactatccttgattctcat

SEQ ID NO: 765371 - DNA, 19 bp, Mus musculus
  siRNA target sequence for MOR262-2 (NM_146858.1,243-261).
gctggcaaactttgtttca

SEQ ID NO: 765372 - DNA, 19 bp, Mus musculus
  siRNA target sequence for MOR262-2 (NM_146858.1,474-492).
ggaaactggacctgtgatt

SEQ ID NO: 765373 - DNA, 19 bp, Mus musculus
  siRNA target sequence for MOR262-2 (NM_146858.1,678-696).
gaggatcagctcaatggat

SEQ ID NO: 765374 - DNA, 19 bp, Mus musculus
  siRNA target sequence for MOR262-2 (NM_146858.1,783-801).
gccctcatctgtaaactca

SEQ ID NO: 765375 - DNA, 19 bp, Mus musculus
  siRNA target sequence for MOR262-2 (NM_146858.1,811-829).
gataaatttatggcattaa

SEQ ID NO: 765376 - DNA, 19 bp, Mus musculus
  siRNA target sequence for MOR262-2 (NM_146858.1,838-856).
ggactaacaccaatgctaa

SEQ ID NO: 765377 - DNA, 19 bp, Mus musculus
  siRNA target sequence for MOR262-2 (NM_146858.1,839-857).
gactaacaccaatgctaaa

SEQ ID NO: 765378 - DNA, 19 bp, Mus musculus
  siRNA target sequence for MOR262-2 (NM_146858.1,924-942).
ccccttcagtgctatctta

SEQ ID NO: 765379 - DNA, 19 bp, Mus musculus
  siRNA target sequence for MOR262-2 (NM_146858.1,925-943).
cccttcagtgctatcttaa

SEQ ID NO: 765380 - DNA, 19 bp, Mus musculus
  siRNA target sequence for MOR262-2 (NM_146858.1,927-945).
cttcagtgctatcttaact

SEQ ID NO: 765381 - DNA, 19 bp, Mus musculus
  siRNA target sequence for MOR131-1 (NM_146860.1,228-246).
caccactgtccctaaggta

SEQ ID NO: 765382 - DNA, 19 bp, Mus musculus
  siRNA target sequence for MOR131-1 (NM_146860.1,247-265).
ctggccattcacatactaa

SEQ ID NO: 765383 - DNA, 19 bp, Mus musculus
  siRNA target sequence for MOR131-1 (NM_146860.1,249-267).
ggccattcacatactaaga

SEQ ID NO: 765384 - DNA, 19 bp, Mus musculus
  siRNA target sequence for MOR131-1 (NM_146860.1,250-268).
gccattcacatactaagaa

SEQ ID NO: 765385 - DNA, 19 bp, Mus musculus
  siRNA target sequence for MOR131-1 (NM_146860.1,251-269).
ccattcacatactaagaaa

SEQ ID NO: 765386 - DNA, 19 bp, Mus musculus
  siRNA target sequence for MOR131-1 (NM_146860.1,578-596).
cacatctcaatgagttgat

SEQ ID NO: 765387 - DNA, 19 bp, Mus musculus
  siRNA target sequence for MOR131-1 (NM_146860.1,605-623).
ctgttgcagggctgataat

SEQ ID NO: 765388 - DNA, 19 bp, Mus musculus
  siRNA target sequence for MOR131-1 (NM_146860.1,651-669).
gtcttatatccttattgct

SEQ ID NO: 765389 - DNA, 19 bp, Mus musculus
  siRNA target sequence for MOR131-1 (NM_146860.1,668-686).
cttgtgccatcctgaaaat

SEQ ID NO: 765390 - DNA, 19 bp, Mus musculus
  siRNA target sequence for MOR131-1 (NM_146860.1,761-779).
ctatcatatccctgtattt

SEQ ID NO: 765391 - DNA, 19 bp, Mus musculus
  siRNA target sequence for MOR131-1 (NM_146860.1,910-928).
gtgcttaccatgagattta

SEQ ID NO: 765392 - DNA, 19 bp, Mus musculus
  siRNA target sequence for MOR131-1 (NM_146860.1,912-930).
gcttaccatgagatttata

SEQ ID NO: 765393 - DNA, 19 bp, Mus musculus
  siRNA target sequence for Olfr9 (NM_146861.1,804-822).
gaacacagaccagattctt

SEQ ID NO: 765394 - DNA, 19 bp, Mus musculus
  siRNA target sequence for MOR269-2 (NM_146862.1,802-820).
ggggacactgaccaaatta

SEQ ID NO: 765395 - DNA, 19 bp, Mus musculus
  siRNA target sequence for MOR269-2 (NM_146862.1,803-821).
gggacactgaccaaattat

SEQ ID NO: 765396 - DNA, 19 bp, Mus musculus
  siRNA target sequence for MOR269-2 (NM_146862.1,805-823).
gacactgaccaaattatca

SEQ ID NO: 765397 - DNA, 19 bp, Mus musculus
  siRNA target sequence for MOR114-4 (NM_146864.1,36-54).
ggtaggactaaccaatgat

SEQ ID NO: 765398 - DNA, 19 bp, Mus musculus
  siRNA target sequence for MOR114-4 (NM_146864.1,88-106).
ctcttaacctacttattga

SEQ ID NO: 765399 - DNA, 19 bp, Mus musculus
  siRNA target sequence for MOR114-4 (NM_146864.1,96-114).
ctacttattgagcgtaatt

SEQ ID NO: 765400 - DNA, 19 bp, Mus musculus
  siRNA target sequence for MOR114-4 (NM_146864.1,99-117).
cttattgagcgtaattggt

SEQ ID NO: 765401 - DNA, 19 bp, Mus musculus
  siRNA target sequence for MOR114-4 (NM_146864.1,194-212).
cccttttggaagtctcatt

SEQ ID NO: 765402 - DNA, 19 bp, Mus musculus
  siRNA target sequence for MOR114-4 (NM_146864.1,196-214).
cttttggaagtctcattca

SEQ ID NO: 765403 - DNA, 19 bp, Mus musculus
  siRNA target sequence for MOR114-4 (NM_146864.1,230-248).
ccagattcctctacacaat

SEQ ID NO: 765404 - DNA, 19 bp, Mus musculus
  siRNA target sequence for MOR114-4 (NM_146864.1,250-268).
gcgtctggggacaatacca

SEQ ID NO: 765405 - DNA, 19 bp, Mus musculus
  siRNA target sequence for MOR114-4 (NM_146864.1,251-269).
cgtctggggacaataccat

SEQ ID NO: 765406 - DNA, 19 bp, Mus musculus
  siRNA target sequence for MOR114-4 (NM_146864.1,252-270).
gtctggggacaataccatt

SEQ ID NO: 765407 - DNA, 19 bp, Mus musculus
  siRNA target sequence for MOR114-4 (NM_146864.1,460-478).
gtcatcccaccttatagca

SEQ ID NO: 765408 - DNA, 19 bp, Mus musculus
  siRNA target sequence for MOR114-4 (NM_146864.1,462-480).
catcccaccttatagcata

SEQ ID NO: 765409 - DNA, 19 bp, Mus musculus
  siRNA target sequence for MOR114-4 (NM_146864.1,466-484).
ccaccttatagcataagct

SEQ ID NO: 765410 - DNA, 19 bp, Mus musculus
  siRNA target sequence for MOR114-4 (NM_146864.1,467-485).
caccttatagcataagctt

SEQ ID NO: 765411 - DNA, 19 bp, Mus musculus
  siRNA target sequence for MOR114-4 (NM_146864.1,536-554).
ctgctcccatcctgaagat

SEQ ID NO: 765412 - DNA, 19 bp, Mus musculus
  siRNA target sequence for MOR114-4 (NM_146864.1,580-598).
gagcggtttgtgttgatct

SEQ ID NO: 765413 - DNA, 19 bp, Mus musculus
  siRNA target sequence for MOR114-4 (NM_146864.1,790-808).
gaaggagtggctgtaaata

SEQ ID NO: 765414 - DNA, 19 bp, Mus musculus
  siRNA target sequence for MOR114-4 (NM_146864.1,794-812).
gagtggctgtaaataaggt

SEQ ID NO: 765415 - DNA, 19 bp, Mus musculus
  siRNA target sequence for MOR114-4 (NM_146864.1,833-851).
cggttgctccagttatgaa

SEQ ID NO: 765416 - DNA, 19 bp, Mus musculus
  siRNA target sequence for MOR114-4 (NM_146864.1,914-932).
ggattgcctctatcataaa

SEQ ID NO: 765417 - DNA, 19 bp, Mus musculus
  siRNA target sequence for MOR187-3 (NM_146866.1,261-279).
ggatgaaaaaaacatttct

SEQ ID NO: 765418 - DNA, 19 bp, Mus musculus
  siRNA target sequence for MOR187-3 (NM_146866.1,433-451).
gtggacatcccatatctct

SEQ ID NO: 765419 - DNA, 19 bp, Mus musculus
  siRNA target sequence for MOR187-3 (NM_146866.1,469-487).
ctgctattcaccagtaaaa

SEQ ID NO: 765420 - DNA, 19 bp, Mus musculus
  siRNA target sequence for MOR187-3 (NM_146866.1,634-652).
ctgatagtccttggattat

SEQ ID NO: 765421 - DNA, 19 bp, Mus musculus
  siRNA target sequence for MOR187-3 (NM_146866.1,636-654).
gatagtccttggattatat

SEQ ID NO: 765422 - DNA, 19 bp, Mus musculus
  siRNA target sequence for MOR187-3 (NM_146866.1,742-760).
gttgtggtgttttatggta

SEQ ID NO: 765423 - DNA, 19 bp, Mus musculus
  siRNA target sequence for MOR187-3 (NM_146866.1,747-765).
ggtgttttatggtactcta

SEQ ID NO: 765424 - DNA, 19 bp, Mus musculus
  siRNA target sequence for MOR187-3 (NM_146866.1,757-775).
ggtactctactgtttatgt

SEQ ID NO: 765425 - DNA, 19 bp, Mus musculus
  siRNA target sequence for MOR187-3 (NM_146866.1,774-792).
gtacttgcaaccaaaatct

SEQ ID NO: 765426 - DNA, 19 bp, Mus musculus
  siRNA target sequence for MOR187-3 (NM_146866.1,796-814).
gactccttagagaatgata

SEQ ID NO: 765427 - DNA, 19 bp, Mus musculus
  siRNA target sequence for MOR187-3 (NM_146866.1,908-926).
gggcattaaagaatccatt

SEQ ID NO: 765428 - DNA, 19 bp, Mus musculus
  siRNA target sequence for MOR187-3 (NM_146866.1,909-927).
ggcattaaagaatccattt

SEQ ID NO: 765429 - DNA, 19 bp, Mus musculus
  siRNA target sequence for MOR256-4 (NM_146867.1,127-145).
gggaattcagctattatca

SEQ ID NO: 765430 - DNA, 19 bp, Mus musculus
  siRNA target sequence for MOR256-4 (NM_146867.1,128-146).
ggaattcagctattatcat

SEQ ID NO: 765431 - DNA, 19 bp, Mus musculus
  siRNA target sequence for MOR256-4 (NM_146867.1,150-168).
gtctcgccttgatcctaaa

SEQ ID NO: 765432 - DNA, 19 bp, Mus musculus
  siRNA target sequence for MOR256-4 (NM_146867.1,242-260).
cccagatgctaaaaaatat

SEQ ID NO: 765433 - DNA, 19 bp, Mus musculus
  siRNA target sequence for MOR256-4 (NM_146867.1,296-314).
gcatagcacaactgttcat

SEQ ID NO: 765434 - DNA, 19 bp, Mus musculus
  siRNA target sequence for MOR256-4 (NM_146867.1,506-524).
ctcgttgtggccaatacca

SEQ ID NO: 765435 - DNA, 19 bp, Mus musculus
  siRNA target sequence for MOR256-4 (NM_146867.1,516-534).
ccaataccagatagagaat

SEQ ID NO: 765436 - DNA, 19 bp, Mus musculus
  siRNA target sequence for MOR256-4 (NM_146867.1,517-535).
caataccagatagagaatt

SEQ ID NO: 765437 - DNA, 19 bp, Mus musculus
  siRNA target sequence for MOR256-4 (NM_146867.1,550-568).
cctgccatgcttcagttat

SEQ ID NO: 765438 - DNA, 19 bp, Mus musculus
  siRNA target sequence for MOR256-4 (NM_146867.1,579-597).
cacctgggtcaatgaagta

SEQ ID NO: 765439 - DNA, 19 bp, Mus musculus
  siRNA target sequence for MOR256-4 (NM_146867.1,588-606).
caatgaagtagagatgtat

SEQ ID NO: 765440 - DNA, 19 bp, Mus musculus
  siRNA target sequence for MOR256-4 (NM_146867.1,607-625).
gctgctgtggttgtcataa

SEQ ID NO: 765441 - DNA, 19 bp, Mus musculus
  siRNA target sequence for MOR256-4 (NM_146867.1,608-626).
ctgctgtggttgtcataaa

SEQ ID NO: 765442 - DNA, 19 bp, Mus musculus
  siRNA target sequence for MOR256-4 (NM_146867.1,613-631).
gtggttgtcataaaagtta

SEQ ID NO: 765443 - DNA, 19 bp, Mus musculus
  siRNA target sequence for MOR256-4 (NM_146867.1,633-651).
cccccttgggctaattctt

SEQ ID NO: 765444 - DNA, 19 bp, Mus musculus
  siRNA target sequence for MOR256-4 (NM_146867.1,634-652).
ccccttgggctaattcttt

SEQ ID NO: 765445 - DNA, 19 bp, Mus musculus
  siRNA target sequence for MOR256-4 (NM_146867.1,635-653).
cccttgggctaattctttt

SEQ ID NO: 765446 - DNA, 19 bp, Mus musculus
  siRNA target sequence for MOR256-4 (NM_146867.1,666-684).
cattgtcagggcagtcata

SEQ ID NO: 765447 - DNA, 19 bp, Mus musculus
  siRNA target sequence for MOR256-4 (NM_146867.1,670-688).
gtcagggcagtcataaaga

SEQ ID NO: 765448 - DNA, 19 bp, Mus musculus
  siRNA target sequence for MOR256-4 (NM_146867.1,672-690).
cagggcagtcataaagata

SEQ ID NO: 765449 - DNA, 19 bp, Mus musculus
  siRNA target sequence for MOR256-4 (NM_146867.1,681-699).
cataaagatacaatcttct

SEQ ID NO: 765450 - DNA, 19 bp, Mus musculus
  siRNA target sequence for MOR256-4 (NM_146867.1,706-724).
cgaaagaaggcctttaaca

SEQ ID NO: 765451 - DNA, 19 bp, Mus musculus
  siRNA target sequence for MOR170-5 (NM_146868.1,382-400).
gccatcggccagccattaa

SEQ ID NO: 765452 - DNA, 19 bp, Mus musculus
  siRNA target sequence for MOR170-5 (NM_146868.1,383-401).
ccatcggccagccattaat

SEQ ID NO: 765453 - DNA, 19 bp, Mus musculus
  siRNA target sequence for MOR170-5 (NM_146868.1,402-420).
gtaccaggttgttatgtct

SEQ ID NO: 765454 - DNA, 19 bp, Mus musculus
  siRNA target sequence for MOR170-5 (NM_146868.1,494-512).
gtatggtcaggctcagatt

SEQ ID NO: 765455 - DNA, 19 bp, Mus musculus
  siRNA target sequence for MOR170-5 (NM_146868.1,597-615).
gcttatgagttatattgca

SEQ ID NO: 765456 - DNA, 19 bp, Mus musculus
  siRNA target sequence for MOR170-3 (NM_146871.1,22-40).
gtttcagaaagtaactatt

SEQ ID NO: 765457 - DNA, 19 bp, Mus musculus
  siRNA target sequence for MOR170-3 (NM_146871.1,28-46).
gaaagtaactattcagtaa

SEQ ID NO: 765458 - DNA, 19 bp, Mus musculus
  siRNA target sequence for MOR170-3 (NM_146871.1,244-262).
gtctgtaaccccacaatgt

SEQ ID NO: 765459 - DNA, 19 bp, Mus musculus
  siRNA target sequence for MOR267-3 (NM_146880.1,129-147).
catgatcattgtgacaatt

SEQ ID NO: 765460 - DNA, 19 bp, Mus musculus
  siRNA target sequence for MOR267-3 (NM_146880.1,132-150).
gatcattgtgacaattatt

SEQ ID NO: 765461 - DNA, 19 bp, Mus musculus
  siRNA target sequence for MOR267-3 (NM_146880.1,219-237).
ctataccattgccattatt

SEQ ID NO: 765462 - DNA, 19 bp, Mus musculus
  siRNA target sequence for MOR267-3 (NM_146880.1,231-249).
cattattccacgaatgcta

SEQ ID NO: 765463 - DNA, 19 bp, Mus musculus
  siRNA target sequence for MOR267-3 (NM_146880.1,265-283).
ccttaccaggccatagata

SEQ ID NO: 765464 - DNA, 19 bp, Mus musculus
  siRNA target sequence for MOR267-3 (NM_146880.1,266-284).
cttaccaggccatagatat

SEQ ID NO: 765465 - DNA, 19 bp, Mus musculus
  siRNA target sequence for MOR267-3 (NM_146880.1,507-525).
ctgtgatgggtttgttatt

SEQ ID NO: 765466 - DNA, 19 bp, Mus musculus
  siRNA target sequence for MOR267-3 (NM_146880.1,761-779).
gctgtgcctcaataatcta

SEQ ID NO: 765467 - DNA, 19 bp, Mus musculus
  siRNA target sequence for MOR267-3 (NM_146880.1,766-784).
gcctcaataatctacctaa

SEQ ID NO: 765468 - DNA, 19 bp, Mus musculus
  siRNA target sequence for MOR267-3 (NM_146880.1,767-785).
cctcaataatctacctaaa

SEQ ID NO: 765469 - DNA, 19 bp, Mus musculus
  siRNA target sequence for MOR267-3 (NM_146880.1,768-786).
ctcaataatctacctaaaa

SEQ ID NO: 765470 - DNA, 19 bp, Mus musculus
  siRNA target sequence for MOR267-3 (NM_146880.1,862-880).
ccagtggtatacagtttga

SEQ ID NO: 765471 - DNA, 19 bp, Mus musculus
  siRNA target sequence for MOR267-2 (NM_146881.1,72-90).
caggcttgccttttttgct

SEQ ID NO: 765472 - DNA, 19 bp, Mus musculus
  siRNA target sequence for MOR267-2 (NM_146881.1,74-92).
ggcttgccttttttgctat

SEQ ID NO: 765473 - DNA, 19 bp, Mus musculus
  siRNA target sequence for MOR267-2 (NM_146881.1,118-136).
ctgtctggcaatgtgatta

SEQ ID NO: 765474 - DNA, 19 bp, Mus musculus
  siRNA target sequence for MOR267-2 (NM_146881.1,120-138).
gtctggcaatgtgattatt

SEQ ID NO: 765475 - DNA, 19 bp, Mus musculus
  siRNA target sequence for MOR267-2 (NM_146881.1,154-172).
ctggatcatcatctacata

SEQ ID NO: 765476 - DNA, 19 bp, Mus musculus
  siRNA target sequence for MOR267-2 (NM_146881.1,216-234).
ctgctataccgtgactatt

SEQ ID NO: 765477 - DNA, 19 bp, Mus musculus
  siRNA target sequence for MOR267-2 (NM_146881.1,218-236).
gctataccgtgactattat

SEQ ID NO: 765478 - DNA, 19 bp, Mus musculus
  siRNA target sequence for MOR267-2 (NM_146881.1,219-237).
ctataccgtgactattata

SEQ ID NO: 765479 - DNA, 19 bp, Mus musculus
  siRNA target sequence for MOR267-2 (NM_146881.1,265-283).
ccttaccacacgattgctt

SEQ ID NO: 765480 - DNA, 19 bp, Mus musculus
  siRNA target sequence for MOR267-2 (NM_146881.1,266-284).
cttaccacacgattgcttt

SEQ ID NO: 765481 - DNA, 19 bp, Mus musculus
  siRNA target sequence for MOR267-2 (NM_146881.1,270-288).
ccacacgattgcttttcga

SEQ ID NO: 765482 - DNA, 19 bp, Mus musculus
  siRNA target sequence for MOR267-2 (NM_146881.1,300-318).
ccagatctttttttatcta

SEQ ID NO: 765483 - DNA, 19 bp, Mus musculus
  siRNA target sequence for MOR267-2 (NM_146881.1,458-476).
gcctaggcatggctatagt

SEQ ID NO: 765484 - DNA, 19 bp, Mus musculus
  siRNA target sequence for MOR267-2 (NM_146881.1,607-625).
gtcagcgtgtttgttctta

SEQ ID NO: 765485 - DNA, 19 bp, Mus musculus
  siRNA target sequence for MOR267-2 (NM_146881.1,609-627).
cagcgtgtttgttcttatt

SEQ ID NO: 765486 - DNA, 19 bp, Mus musculus
  siRNA target sequence for MOR267-2 (NM_146881.1,611-629).
gcgtgtttgttcttattct

SEQ ID NO: 765487 - DNA, 19 bp, Mus musculus
  siRNA target sequence for MOR267-2 (NM_146881.1,612-630).
cgtgtttgttcttattcta

SEQ ID NO: 765488 - DNA, 19 bp, Mus musculus
  siRNA target sequence for MOR267-2 (NM_146881.1,761-779).
gctgcactgcaatcatcta

SEQ ID NO: 765489 - DNA, 19 bp, Mus musculus
  siRNA target sequence for MOR267-2 (NM_146881.1,921-939).
gcagaagccactttcatct

SEQ ID NO: 765490 - DNA, 19 bp, Mus musculus
  siRNA target sequence for MOR161-1 (NM_146883.1,550-568).
ctggagcactcctgtacta

SEQ ID NO: 765491 - DNA, 19 bp, Mus musculus
  siRNA target sequence for MOR161-1 (NM_146883.1,825-843).
gttctatacgattgtagta

SEQ ID NO: 765492 - DNA, 19 bp, Mus musculus
  siRNA target sequence for MOR161-1 (NM_146883.1,833-851).
cgattgtagtacctatgtt

SEQ ID NO: 765493 - DNA, 19 bp, Mus musculus
  siRNA target sequence for MOR248-6 (NM_146886.1,301-319).
gtctttttatcccattgta

SEQ ID NO: 765494 - DNA, 19 bp, Mus musculus
  siRNA target sequence for MOR248-6 (NM_146886.1,467-485).
gtataagctactttttagt

SEQ ID NO: 765495 - DNA, 19 bp, Mus musculus
  siRNA target sequence for MOR233-11 (NM_146891.1,775-793).
cgacctatatctgcatttt

SEQ ID NO: 765496 - DNA, 19 bp, Mus musculus
  siRNA target sequence for MOR233-11 (NM_146891.1,840-858).
gctcaattctgtagtttat

SEQ ID NO: 765497 - DNA, 19 bp, Mus musculus
  siRNA target sequence for MOR233-11 (NM_146891.1,912-930).
gattgcagtttctgataaa

SEQ ID NO: 765498 - DNA, 19 bp, Mus musculus
  siRNA target sequence for MOR233-9 (NM_146893.1,452-470).
gctttttgcatgctattgt

SEQ ID NO: 765499 - DNA, 19 bp, Mus musculus
  siRNA target sequence for MOR233-9 (NM_146893.1,453-471).
ctttttgcatgctattgta

SEQ ID NO: 765500 - DNA, 19 bp, Mus musculus
  siRNA target sequence for MOR233-9 (NM_146893.1,459-477).
gcatgctattgtacaagtt

SEQ ID NO: 765501 - DNA, 19 bp, Mus musculus
  siRNA target sequence for MOR233-9 (NM_146893.1,902-920).
ggaaaaggctaatagtgat

SEQ ID NO: 765502 - DNA, 19 bp, Mus musculus
  siRNA target sequence for MOR233-9 (NM_146893.1,903-921).
gaaaaggctaatagtgatt

SEQ ID NO: 765503 - DNA, 19 bp, Mus musculus
  siRNA target sequence for MOR233-9 (NM_146893.1,908-926).
ggctaatagtgatttttgt

SEQ ID NO: 765504 - DNA, 19 bp, Mus musculus
  siRNA target sequence for MOR230-2 (NM_146895.1,901-919).
catgttaaatttatcatga

SEQ ID NO: 765505 - DNA, 19 bp, Mus musculus
  siRNA target sequence for MOR233-8 (NM_146897.1,252-270).
gacttatgagaggaagatt

SEQ ID NO: 765506 - DNA, 19 bp, Mus musculus
  siRNA target sequence for MOR233-8 (NM_146897.1,254-272).
cttatgagaggaagattat

SEQ ID NO: 765507 - DNA, 19 bp, Mus musculus
  siRNA target sequence for MOR233-8 (NM_146897.1,642-660).
catttcctatggtgttata

SEQ ID NO: 765508 - DNA, 19 bp, Mus musculus
  siRNA target sequence for MOR155-1 (NM_146905.1,36-54).
ctttctcataggactaata

SEQ ID NO: 765509 - DNA, 19 bp, Mus musculus
  siRNA target sequence for MOR155-1 (NM_146905.1,74-92).
ccctctttttcgacttgtt

SEQ ID NO: 765510 - DNA, 19 bp, Mus musculus
  siRNA target sequence for MOR155-1 (NM_146905.1,102-120).
gtaccttatcaccatcatt

SEQ ID NO: 765511 - DNA, 19 bp, Mus musculus
  siRNA target sequence for MOR155-1 (NM_146905.1,189-207).
ctgcaacctatctttcact

SEQ ID NO: 765512 - DNA, 19 bp, Mus musculus
  siRNA target sequence for MOR155-1 (NM_146905.1,224-242).
caacaacagtcccaaagtt

SEQ ID NO: 765513 - DNA, 19 bp, Mus musculus
  siRNA target sequence for MOR155-1 (NM_146905.1,246-264).
gttgaacatccaagtacat

SEQ ID NO: 765514 - DNA, 19 bp, Mus musculus
  siRNA target sequence for MOR155-1 (NM_146905.1,375-393).
catttgccaacctctaaga

SEQ ID NO: 765515 - DNA, 19 bp, Mus musculus
  siRNA target sequence for MOR155-1 (NM_146905.1,381-399).
ccaacctctaagatataca

SEQ ID NO: 765516 - DNA, 19 bp, Mus musculus
  siRNA target sequence for MOR155-1 (NM_146905.1,382-400).
caacctctaagatatacaa

SEQ ID NO: 765517 - DNA, 19 bp, Mus musculus
  siRNA target sequence for MOR155-1 (NM_146905.1,408-426).
gaaccctttcctatgcatt

SEQ ID NO: 765518 - DNA, 19 bp, Mus musculus
  siRNA target sequence for MOR155-1 (NM_146905.1,422-440).
gcatttgcctagtattact

SEQ ID NO: 765519 - DNA, 19 bp, Mus musculus
  siRNA target sequence for MOR155-1 (NM_146905.1,447-465).
gatcatcagcactataaat

SEQ ID NO: 765520 - DNA, 19 bp, Mus musculus
  siRNA target sequence for MOR155-1 (NM_146905.1,516-534).
gaatgtccccaacttcttt

SEQ ID NO: 765521 - DNA, 19 bp, Mus musculus
  siRNA target sequence for MOR155-1 (NM_146905.1,544-562).
ggtcaaatcacaaagcttt

SEQ ID NO: 765522 - DNA, 19 bp, Mus musculus
  siRNA target sequence for MOR155-1 (NM_146905.1,627-645).
cccactatctgggattatt

SEQ ID NO: 765523 - DNA, 19 bp, Mus musculus
  siRNA target sequence for MOR155-1 (NM_146905.1,753-771).
ctatggcactggtttaggt

SEQ ID NO: 765524 - DNA, 19 bp, Mus musculus
  siRNA target sequence for MOR155-1 (NM_146905.1,761-779).
ctggtttaggtgtgtacat

SEQ ID NO: 765525 - DNA, 19 bp, Mus musculus
  siRNA target sequence for MOR155-1 (NM_146905.1,763-781).
ggtttaggtgtgtacatga

SEQ ID NO: 765526 - DNA, 19 bp, Mus musculus
  siRNA target sequence for MOR155-1 (NM_146905.1,764-782).
gtttaggtgtgtacatgaa

SEQ ID NO: 765527 - DNA, 19 bp, Mus musculus
  siRNA target sequence for MOR155-1 (NM_146905.1,794-812).
ctaactcttccattagcaa

SEQ ID NO: 765528 - DNA, 19 bp, Mus musculus
  siRNA target sequence for MOR155-1 (NM_146905.1,804-822).
cattagcaatgtaataaca

SEQ ID NO: 765529 - DNA, 19 bp, Mus musculus
  siRNA target sequence for MOR155-1 (NM_146905.1,912-930).
catcattgggatcatttgt

SEQ ID NO: 765530 - DNA, 19 bp, Mus musculus
  siRNA target sequence for MOR154-1 (NM_146906.1,86-104).
gactgttcctgcttatgta

SEQ ID NO: 765531 - DNA, 19 bp, Mus musculus
  siRNA target sequence for MOR154-1 (NM_146906.1,267-285).
caaatccatcagttacaca

SEQ ID NO: 765532 - DNA, 19 bp, Mus musculus
  siRNA target sequence for MOR154-1 (NM_146906.1,441-459).
gtctttgtacattagcatt

SEQ ID NO: 765533 - DNA, 19 bp, Mus musculus
  siRNA target sequence for MOR154-1 (NM_146906.1,467-485).
cccttctacatggcttaat

SEQ ID NO: 765534 - DNA, 19 bp, Mus musculus
  siRNA target sequence for MOR154-1 (NM_146906.1,469-487).
cttctacatggcttaatga

SEQ ID NO: 765535 - DNA, 19 bp, Mus musculus
  siRNA target sequence for MOR154-1 (NM_146906.1,472-490).
ctacatggcttaatgacat

SEQ ID NO: 765536 - DNA, 19 bp, Mus musculus
  siRNA target sequence for MOR154-1 (NM_146906.1,536-554).
gtgaactttatcaggttat

SEQ ID NO: 765537 - DNA, 19 bp, Mus musculus
  siRNA target sequence for MOR154-1 (NM_146906.1,538-556).
gaactttatcaggttatca

SEQ ID NO: 765538 - DNA, 19 bp, Mus musculus
  siRNA target sequence for MOR154-1 (NM_146906.1,571-589).
gacactctcatcaataaca

SEQ ID NO: 765539 - DNA, 19 bp, Mus musculus
  siRNA target sequence for MOR154-1 (NM_146906.1,603-621).
catgagtagtgcattaggt

SEQ ID NO: 765540 - DNA, 19 bp, Mus musculus
  siRNA target sequence for MOR154-1 (NM_146906.1,627-645).
gcccctagtagggattatt

SEQ ID NO: 765541 - DNA, 19 bp, Mus musculus
  siRNA target sequence for MOR154-1 (NM_146906.1,631-649).
ctagtagggattattttct

SEQ ID NO: 765542 - DNA, 19 bp, Mus musculus
  siRNA target sequence for MOR154-1 (NM_146906.1,702-720).
gcataaggctttttcaaca

SEQ ID NO: 765543 - DNA, 19 bp, Mus musculus
  siRNA target sequence for MOR154-1 (NM_146906.1,798-816).
gtcatacaggagaacttct

SEQ ID NO: 765544 - DNA, 19 bp, Mus musculus
  siRNA target sequence for MOR154-1 (NM_146906.1,817-835).
gtagcatcattgatgtata

SEQ ID NO: 765545 - DNA, 19 bp, Mus musculus
  siRNA target sequence for MOR154-1 (NM_146906.1,898-916).
gctttgagaaaaatagtct

SEQ ID NO: 765546 - DNA, 19 bp, Mus musculus
  siRNA target sequence for MOR248-1 (NM_146908.1,471-489).
gagtcaactgatactgatt

SEQ ID NO: 765547 - DNA, 19 bp, Mus musculus
  siRNA target sequence for MOR248-1 (NM_146908.1,604-622).
gatagtggtgtcttagcaa

SEQ ID NO: 765548 - DNA, 19 bp, Mus musculus
  siRNA target sequence for MOR248-1 (NM_146908.1,629-647).
gtttcatacttttattgat

SEQ ID NO: 765549 - DNA, 19 bp, Mus musculus
  siRNA target sequence for MOR248-1 (NM_146908.1,645-663).
gatctcttacacttatatt

SEQ ID NO: 765550 - DNA, 19 bp, Mus musculus
  siRNA target sequence for MOR248-1 (NM_146908.1,705-723).
ggcgctctctacatgtact

SEQ ID NO: 765551 - DNA, 19 bp, Mus musculus
  siRNA target sequence for MOR248-1 (NM_146908.1,706-724).
gcgctctctacatgtactt

SEQ ID NO: 765552 - DNA, 19 bp, Mus musculus
  siRNA target sequence for MOR129-1 (NM_146911.1,20-38).
ctatggtggcagaattcct

SEQ ID NO: 765553 - DNA, 19 bp, Mus musculus
  siRNA target sequence for MOR129-1 (NM_146911.1,602-620).
ctgtgggtggagtgatatt

SEQ ID NO: 765554 - DNA, 19 bp, Mus musculus
  siRNA target sequence for MOR129-1 (NM_146911.1,624-642).
gacaccgttttcatgcatt

SEQ ID NO: 765555 - DNA, 19 bp, Mus musculus
  siRNA target sequence for MOR129-1 (NM_146911.1,812-830).
cggtggctactgtcatctt

SEQ ID NO: 765556 - DNA, 19 bp, Mus musculus
  siRNA target sequence for MOR129-1 (NM_146911.1,896-914).
ccctaaggaagataatgct

SEQ ID NO: 765557 - DNA, 19 bp, Mus musculus
  siRNA target sequence for MOR253-9 (NM_146912.1,398-416).
ccatgatgagcaaagcatt

SEQ ID NO: 765558 - DNA, 19 bp, Mus musculus
  siRNA target sequence for MOR253-9 (NM_146912.1,402-420).
gatgagcaaagcattctgt

SEQ ID NO: 765559 - DNA, 19 bp, Mus musculus
  siRNA target sequence for MOR253-9 (NM_146912.1,443-461).
gggcactctgcgctttcaa

SEQ ID NO: 765560 - DNA, 19 bp, Mus musculus
  siRNA target sequence for MOR253-9 (NM_146912.1,445-463).
gcactctgcgctttcaaca

SEQ ID NO: 765561 - DNA, 19 bp, Mus musculus
  siRNA target sequence for MOR253-9 (NM_146912.1,576-594).
cgtgaacagtgtcatgatt

SEQ ID NO: 765562 - DNA, 19 bp, Mus musculus
  siRNA target sequence for MOR253-9 (NM_146912.1,607-625).
gccttttatggcatattga

SEQ ID NO: 765563 - DNA, 19 bp, Mus musculus
  siRNA target sequence for MOR253-9 (NM_146912.1,608-626).
ccttttatggcatattgaa

SEQ ID NO: 765564 - DNA, 19 bp, Mus musculus
  siRNA target sequence for MOR253-9 (NM_146912.1,643-661).
gtgtcatacggcttcatca

SEQ ID NO: 765565 - DNA, 19 bp, Mus musculus
  siRNA target sequence for MOR253-9 (NM_146912.1,645-663).
gtcatacggcttcatcatt

SEQ ID NO: 765566 - DNA, 19 bp, Mus musculus
  siRNA target sequence for MOR253-9 (NM_146912.1,736-754).
gtggtgtgcatgtattaca

SEQ ID NO: 765567 - DNA, 19 bp, Mus musculus
  siRNA target sequence for MOR253-9 (NM_146912.1,817-835).
gctggtgtgctgtatacca

SEQ ID NO: 765568 - DNA, 19 bp, Mus musculus
  siRNA target sequence for Olfr5 (NM_146914.1,269-287).
ggaatggactctaccatat

SEQ ID NO: 765569 - DNA, 19 bp, Mus musculus
  siRNA target sequence for Olfr5 (NM_146914.1,336-354).
gggcacagagtgcattctt

SEQ ID NO: 765570 - DNA, 19 bp, Mus musculus
  siRNA target sequence for Olfr5 (NM_146914.1,337-355).
ggcacagagtgcattcttt

SEQ ID NO: 765571 - DNA, 19 bp, Mus musculus
  siRNA target sequence for Olfr5 (NM_146914.1,438-456).
gggcttggctatgatttca

SEQ ID NO: 765572 - DNA, 19 bp, Mus musculus
  siRNA target sequence for Olfr5 (NM_146914.1,439-457).
ggcttggctatgatttcat

SEQ ID NO: 765573 - DNA, 19 bp, Mus musculus
  siRNA target sequence for Olfr5 (NM_146914.1,460-478).
ctaggtgggctattggttt

SEQ ID NO: 765574 - DNA, 19 bp, Mus musculus
  siRNA target sequence for Olfr5 (NM_146914.1,463-481).
ggtgggctattggtttcta

SEQ ID NO: 765575 - DNA, 19 bp, Mus musculus
  siRNA target sequence for Olfr5 (NM_146914.1,469-487).
ctattggtttctatgatca

SEQ ID NO: 765576 - DNA, 19 bp, Mus musculus
  siRNA target sequence for Olfr5 (NM_146914.1,475-493).
gtttctatgatcaagacaa

SEQ ID NO: 765577 - DNA, 19 bp, Mus musculus
  siRNA target sequence for MOR103-6 (NM_146916.1,13-31).
ctacaactggccaataggt

SEQ ID NO: 765578 - DNA, 19 bp, Mus musculus
  siRNA target sequence for MOR103-6 (NM_146916.1,81-99).
caaggacggcctgtttgtt

SEQ ID NO: 765579 - DNA, 19 bp, Mus musculus
  siRNA target sequence for MOR103-6 (NM_146916.1,84-102).
ggacggcctgtttgttata

SEQ ID NO: 765580 - DNA, 19 bp, Mus musculus
  siRNA target sequence for MOR103-6 (NM_146916.1,85-103).
gacggcctgtttgttatat

SEQ ID NO: 765581 - DNA, 19 bp, Mus musculus
  siRNA target sequence for MOR103-6 (NM_146916.1,89-107).
gcctgtttgttatatttct

SEQ ID NO: 765582 - DNA, 19 bp, Mus musculus
  siRNA target sequence for MOR103-6 (NM_146916.1,129-147).
cctagagaatatgttagtt

SEQ ID NO: 765583 - DNA, 19 bp, Mus musculus
  siRNA target sequence for MOR103-6 (NM_146916.1,130-148).
ctagagaatatgttagtta

SEQ ID NO: 765584 - DNA, 19 bp, Mus musculus
  siRNA target sequence for MOR103-6 (NM_146916.1,463-481).
gtgggtggactgttggttt

SEQ ID NO: 765585 - DNA, 19 bp, Mus musculus
  siRNA target sequence for MOR103-6 (NM_146916.1,599-617).
cagagctgatcgactttat

SEQ ID NO: 765586 - DNA, 19 bp, Mus musculus
  siRNA target sequence for MOR103-6 (NM_146916.1,603-621).
gctgatcgactttatctca

SEQ ID NO: 765587 - DNA, 19 bp, Mus musculus
  siRNA target sequence for MOR103-6 (NM_146916.1,651-669).
ggttgctctggcctcttat

SEQ ID NO: 765588 - DNA, 19 bp, Mus musculus
  siRNA target sequence for MOR103-6 (NM_146916.1,673-691).
gctattggtagggtactaa

SEQ ID NO: 765589 - DNA, 19 bp, Mus musculus
  siRNA target sequence for MOR103-6 (NM_146916.1,674-692).
ctattggtagggtactaat

SEQ ID NO: 765590 - DNA, 19 bp, Mus musculus
  siRNA target sequence for MOR103-6 (NM_146916.1,679-697).
ggtagggtactaatcaaaa

SEQ ID NO: 765591 - DNA, 19 bp, Mus musculus
  siRNA target sequence for MOR103-6 (NM_146916.1,680-698).
gtagggtactaatcaaaat

SEQ ID NO: 765592 - DNA, 19 bp, Mus musculus
  siRNA target sequence for MOR103-6 (NM_146916.1,750-768).
ccttgtaatgggtcttttt

SEQ ID NO: 765593 - DNA, 19 bp, Mus musculus
  siRNA target sequence for MOR103-6 (NM_146916.1,751-769).
cttgtaatgggtctttttt

SEQ ID NO: 765594 - DNA, 19 bp, Mus musculus
  siRNA target sequence for MOR103-6 (NM_146916.1,778-796).
gtcctctttatgtattcca

SEQ ID NO: 765595 - DNA, 19 bp, Mus musculus
  siRNA target sequence for MOR103-6 (NM_146916.1,799-817).
cccagtcatgtcaaatcca

SEQ ID NO: 765596 - DNA, 19 bp, Mus musculus
  siRNA target sequence for MOR225-2 (NM_146917.1,4-22).
gaaagtaccaataatatca

SEQ ID NO: 765597 - DNA, 19 bp, Mus musculus
  siRNA target sequence for MOR225-2 (NM_146917.1,141-159).
cacatgtagccagctaatt

SEQ ID NO: 765598 - DNA, 19 bp, Mus musculus
  siRNA target sequence for MOR225-2 (NM_146917.1,143-161).
catgtagccagctaattga

SEQ ID NO: 765599 - DNA, 19 bp, Mus musculus
  siRNA target sequence for MOR225-2 (NM_146917.1,320-338).
ggattgagatcctcatact

SEQ ID NO: 765600 - DNA, 19 bp, Mus musculus
  siRNA target sequence for MOR225-2 (NM_146917.1,631-649).
gtcttgatgtggtcttact

SEQ ID NO: 765601 - DNA, 19 bp, Mus musculus
  siRNA target sequence for MOR225-2 (NM_146917.1,744-762).
ctttgtgcctgtacttttt

SEQ ID NO: 765602 - DNA, 19 bp, Mus musculus
  siRNA target sequence for MOR225-2 (NM_146917.1,780-798).
caccacttacccagaagat

SEQ ID NO: 765603 - DNA, 19 bp, Mus musculus
  siRNA target sequence for MOR225-1 (NM_146918.1,31-49).
ggactttctgacaatcaaa

SEQ ID NO: 765604 - DNA, 19 bp, Mus musculus
  siRNA target sequence for MOR225-1 (NM_146918.1,32-50).
gactttctgacaatcaaaa

SEQ ID NO: 765605 - DNA, 19 bp, Mus musculus
  siRNA target sequence for MOR225-1 (NM_146918.1,171-189).
cctccattatttatcactt

SEQ ID NO: 765606 - DNA, 19 bp, Mus musculus
  siRNA target sequence for MOR225-1 (NM_146918.1,402-420).
gagatgcaacgaaatcctt

SEQ ID NO: 765607 - DNA, 19 bp, Mus musculus
  siRNA target sequence for MOR225-1 (NM_146918.1,428-446).
gttgtactgggggatttgt

SEQ ID NO: 765608 - DNA, 19 bp, Mus musculus
  siRNA target sequence for MOR225-1 (NM_146918.1,483-501).
gtccttttgtcatcacaat

SEQ ID NO: 765609 - DNA, 19 bp, Mus musculus
  siRNA target sequence for MOR225-1 (NM_146918.1,589-607).
gattctggcttaattgctt

SEQ ID NO: 765610 - DNA, 19 bp, Mus musculus
  siRNA target sequence for MOR225-1 (NM_146918.1,645-663).
gatagcatacaccattagt

SEQ ID NO: 765611 - DNA, 19 bp, Mus musculus
  siRNA target sequence for MOR225-1 (NM_146918.1,650-668).
catacaccattagtgttta

SEQ ID NO: 765612 - DNA, 19 bp, Mus musculus
  siRNA target sequence for MOR225-1 (NM_146918.1,753-771).
catttacatcagaccaaat

SEQ ID NO: 765613 - DNA, 19 bp, Mus musculus
  siRNA target sequence for MOR225-1 (NM_146918.1,862-880).
gagatgaagcgtgcaatta

SEQ ID NO: 765614 - DNA, 19 bp, Mus musculus
  siRNA target sequence for MOR225-1 (NM_146918.1,864-882).
gatgaagcgtgcaattaaa

SEQ ID NO: 765615 - DNA, 19 bp, Mus musculus
  siRNA target sequence for MOR225-1 (NM_146918.1,867-885).
gaagcgtgcaattaaaaaa

SEQ ID NO: 765616 - DNA, 19 bp, Mus musculus
  siRNA target sequence for MOR225-1 (NM_146918.1,871-889).
cgtgcaattaaaaaaatgt

SEQ ID NO: 765617 - DNA, 19 bp, Mus musculus
  siRNA target sequence for MOR225-1 (NM_146918.1,888-906).
gtggtatcatcaaatacct

SEQ ID NO: 765618 - DNA, 19 bp, Mus musculus
  siRNA target sequence for MOR225-1 (NM_146918.1,905-923).
cttcatacaagaaacaaat

SEQ ID NO: 765619 - DNA, 19 bp, Mus musculus
  siRNA target sequence for MOR135-13 (NM_146921.1,639-657).
cattaccatgtcctatgta

SEQ ID NO: 765620 - DNA, 19 bp, Mus musculus
  siRNA target sequence for MOR135-13 (NM_146921.1,689-707).
cttctcaaggtatctacaa

SEQ ID NO: 765621 - DNA, 19 bp, Mus musculus
  siRNA target sequence for MOR135-13 (NM_146921.1,777-795).
cttatctccttccagtaat

SEQ ID NO: 765622 - DNA, 19 bp, Mus musculus
  siRNA target sequence for MOR135-13 (NM_146921.1,924-942).
gaaaattcaactaaaccta

SEQ ID NO: 765623 - DNA, 19 bp, Mus musculus
  siRNA target sequence for MOR135-11 (NM_146923.1,917-935).
gtaagaagaaagttttctt

SEQ ID NO: 765624 - DNA, 19 bp, Mus musculus
  siRNA target sequence for MOR204-2 (NM_146925.1,62-80).
ctacactacgtgctatctt

SEQ ID NO: 765625 - DNA, 19 bp, Mus musculus
  siRNA target sequence for MOR204-2 (NM_146925.1,65-83).
cactacgtgctatcttatt

SEQ ID NO: 765626 - DNA, 19 bp, Mus musculus
  siRNA target sequence for MOR204-2 (NM_146925.1,90-108).
ctttctaccggtttatata

SEQ ID NO: 765627 - DNA, 19 bp, Mus musculus
  siRNA target sequence for MOR204-2 (NM_146925.1,94-112).
ctaccggtttatatagtga

SEQ ID NO: 765628 - DNA, 19 bp, Mus musculus
  siRNA target sequence for MOR204-2 (NM_146925.1,122-140).
gaaatatcagtataatcct

SEQ ID NO: 765629 - DNA, 19 bp, Mus musculus
  siRNA target sequence for MOR204-2 (NM_146925.1,129-147).
cagtataatcctcctaatt

SEQ ID NO: 765630 - DNA, 19 bp, Mus musculus
  siRNA target sequence for MOR204-2 (NM_146925.1,429-447).
cctgctcggggcatcctat

SEQ ID NO: 765631 - DNA, 19 bp, Mus musculus
  siRNA target sequence for MOR204-2 (NM_146925.1,430-448).
ctgctcggggcatcctatt

SEQ ID NO: 765632 - DNA, 19 bp, Mus musculus
  siRNA target sequence for MOR204-2 (NM_146925.1,458-476).
gcatgaatgcttcatcatt

SEQ ID NO: 765633 - DNA, 19 bp, Mus musculus
  siRNA target sequence for MOR204-2 (NM_146925.1,462-480).
gaatgcttcatcattcaca

SEQ ID NO: 765634 - DNA, 19 bp, Mus musculus
  siRNA target sequence for MOR204-2 (NM_146925.1,481-499).
ggctgttttgtgaacctaa

SEQ ID NO: 765635 - DNA, 19 bp, Mus musculus
  siRNA target sequence for MOR204-2 (NM_146925.1,561-579).
gtcttgtggccatgcttat

SEQ ID NO: 765636 - DNA, 19 bp, Mus musculus
  siRNA target sequence for MOR204-2 (NM_146925.1,574-592).
gcttatattgctgaaatat

SEQ ID NO: 765637 - DNA, 19 bp, Mus musculus
  siRNA target sequence for MOR204-2 (NM_146925.1,627-645).
cacgctctctacgatcatt

SEQ ID NO: 765638 - DNA, 19 bp, Mus musculus
  siRNA target sequence for MOR204-2 (NM_146925.1,629-647).
cgctctctacgatcattgt

SEQ ID NO: 765639 - DNA, 19 bp, Mus musculus
  siRNA target sequence for MOR204-2 (NM_146925.1,631-649).
ctctctacgatcattgtgt

SEQ ID NO: 765640 - DNA, 19 bp, Mus musculus
  siRNA target sequence for MOR204-2 (NM_146925.1,635-653).
ctacgatcattgtgtctta

SEQ ID NO: 765641 - DNA, 19 bp, Mus musculus
  siRNA target sequence for MOR204-2 (NM_146925.1,638-656).
cgatcattgtgtcttacat

SEQ ID NO: 765642 - DNA, 19 bp, Mus musculus
  siRNA target sequence for MOR204-2 (NM_146925.1,757-775).
gggacagttctgtttgtgt

SEQ ID NO: 765643 - DNA, 19 bp, Mus musculus
  siRNA target sequence for MOR204-2 (NM_146925.1,800-818).
cagctgaccaagtcaaagt

SEQ ID NO: 765644 - DNA, 19 bp, Mus musculus
  siRNA target sequence for MOR204-1 (NM_146926.1,65-83).
cactacgtgtcatcctatt

SEQ ID NO: 765645 - DNA, 19 bp, Mus musculus
  siRNA target sequence for MOR204-1 (NM_146926.1,70-88).
cgtgtcatcctatttatga

SEQ ID NO: 765646 - DNA, 19 bp, Mus musculus
  siRNA target sequence for MOR204-1 (NM_146926.1,71-89).
gtgtcatcctatttatgat

SEQ ID NO: 765647 - DNA, 19 bp, Mus musculus
  siRNA target sequence for MOR204-1 (NM_146926.1,78-96).
cctatttatgatatttcta

SEQ ID NO: 765648 - DNA, 19 bp, Mus musculus
  siRNA target sequence for MOR204-1 (NM_146926.1,97-115).
ggaatatatactgttactt

SEQ ID NO: 765649 - DNA, 19 bp, Mus musculus
  siRNA target sequence for MOR204-1 (NM_146926.1,129-147).
cagcatcatcagtttaata

SEQ ID NO: 765650 - DNA, 19 bp, Mus musculus
  siRNA target sequence for MOR204-1 (NM_146926.1,205-223).
gtagacattgggttttcca

SEQ ID NO: 765651 - DNA, 19 bp, Mus musculus
  siRNA target sequence for MOR204-1 (NM_146926.1,251-269).
gattccttggacatacagt

SEQ ID NO: 765652 - DNA, 19 bp, Mus musculus
  siRNA target sequence for MOR204-1 (NM_146926.1,276-294).
ctctgtggctgcttgtgta

SEQ ID NO: 765653 - DNA, 19 bp, Mus musculus
  siRNA target sequence for MOR204-1 (NM_146926.1,381-399).
ctctcccctgctctattca

SEQ ID NO: 765654 - DNA, 19 bp, Mus musculus
  siRNA target sequence for MOR204-1 (NM_146926.1,387-405).
cctgctctattcaacacat

SEQ ID NO: 765655 - DNA, 19 bp, Mus musculus
  siRNA target sequence for MOR204-1 (NM_146926.1,388-406).
ctgctctattcaacacata

SEQ ID NO: 765656 - DNA, 19 bp, Mus musculus
  siRNA target sequence for MOR204-1 (NM_146926.1,416-434).
ggatctgcttccttttagt

SEQ ID NO: 765657 - DNA, 19 bp, Mus musculus
  siRNA target sequence for MOR204-1 (NM_146926.1,906-924).
gaaggccatcatcagaata

SEQ ID NO: 765658 - DNA, 19 bp, Mus musculus
  siRNA target sequence for MOR204-1 (NM_146926.1,909-927).
ggccatcatcagaatattt

SEQ ID NO: 765659 - DNA, 19 bp, Mus musculus
  siRNA target sequence for MOR204-1 (NM_146926.1,912-930).
catcatcagaatatttcca

SEQ ID NO: 765660 - DNA, 19 bp, Mus musculus
  siRNA target sequence for MOR114-2 (NM_146927.1,51-69).
cattaggctgcaaactcta

SEQ ID NO: 765661 - DNA, 19 bp, Mus musculus
  siRNA target sequence for MOR114-2 (NM_146927.1,268-286).
gcctatgctgcttgtatca

SEQ ID NO: 765662 - DNA, 19 bp, Mus musculus
  siRNA target sequence for MOR114-2 (NM_146927.1,270-288).
ctatgctgcttgtatcagt

SEQ ID NO: 765663 - DNA, 19 bp, Mus musculus
  siRNA target sequence for MOR114-2 (NM_146927.1,809-827).
ggatttcacttattattgt

SEQ ID NO: 765664 - DNA, 19 bp, Mus musculus
  siRNA target sequence for MOR112-2 (NM_146928.1,4-22).
ccaaataagacatcaatca

SEQ ID NO: 765665 - DNA, 19 bp, Mus musculus
  siRNA target sequence for MOR112-2 (NM_146928.1,55-73).
ccagagttacaaattgtga

SEQ ID NO: 765666 - DNA, 19 bp, Mus musculus
  siRNA target sequence for MOR112-2 (NM_146928.1,56-74).
cagagttacaaattgtgat

SEQ ID NO: 765667 - DNA, 19 bp, Mus musculus
  siRNA target sequence for MOR112-2 (NM_146928.1,103-121).
ctgagtgtaagtggaaata

SEQ ID NO: 765668 - DNA, 19 bp, Mus musculus
  siRNA target sequence for MOR112-2 (NM_146928.1,135-153).
cctgacactgtcgaatgtt

SEQ ID NO: 765669 - DNA, 19 bp, Mus musculus
  siRNA target sequence for MOR112-2 (NM_146928.1,144-162).
gtcgaatgttcacttgaaa

SEQ ID NO: 765670 - DNA, 19 bp, Mus musculus
  siRNA target sequence for MOR112-2 (NM_146928.1,257-275).
ggaacacagctatttccta

SEQ ID NO: 765671 - DNA, 19 bp, Mus musculus
  siRNA target sequence for MOR112-2 (NM_146928.1,280-298).
gcctgcatggcacaagtat

SEQ ID NO: 765672 - DNA, 19 bp, Mus musculus
  siRNA target sequence for MOR112-2 (NM_146928.1,392-410).
cagctatcattaacaacaa

SEQ ID NO: 765673 - DNA, 19 bp, Mus musculus
  siRNA target sequence for MOR112-2 (NM_146928.1,408-426).
caaagtgtgcaatcaactt

SEQ ID NO: 765674 - DNA, 19 bp, Mus musculus
  siRNA target sequence for MOR112-2 (NM_146928.1,412-430).
gtgtgcaatcaacttgtaa

SEQ ID NO: 765675 - DNA, 19 bp, Mus musculus
  siRNA target sequence for MOR112-2 (NM_146928.1,414-432).
gtgcaatcaacttgtaatt

SEQ ID NO: 765676 - DNA, 19 bp, Mus musculus
  siRNA target sequence for MOR112-2 (NM_146928.1,552-570).
gatcgcttgcacagataca

SEQ ID NO: 765677 - DNA, 19 bp, Mus musculus
  siRNA target sequence for MOR112-2 (NM_146928.1,650-668).
cactcatccttagaacaat

SEQ ID NO: 765678 - DNA, 19 bp, Mus musculus
  siRNA target sequence for MOR112-2 (NM_146928.1,790-808).
gaaggtgtggtgctaagta

SEQ ID NO: 765679 - DNA, 19 bp, Mus musculus
  siRNA target sequence for MOR112-2 (NM_146928.1,911-929).
gaaaattactggcatcaaa

SEQ ID NO: 765680 - DNA, 19 bp, Mus musculus
  siRNA target sequence for MOR114-1 (NM_146930.1,14-32).
cgtcaataacaacctttat

SEQ ID NO: 765681 - DNA, 19 bp, Mus musculus
  siRNA target sequence for MOR114-1 (NM_146930.1,144-162).
ggtggatccccatcttaaa

SEQ ID NO: 765682 - DNA, 19 bp, Mus musculus
  siRNA target sequence for MOR114-1 (NM_146930.1,405-423).
ccccagggtgtgtatctta

SEQ ID NO: 765683 - DNA, 19 bp, Mus musculus
  siRNA target sequence for MOR114-1 (NM_146930.1,407-425).
ccagggtgtgtatcttact

SEQ ID NO: 765684 - DNA, 19 bp, Mus musculus
  siRNA target sequence for MOR114-1 (NM_146930.1,410-428).
gggtgtgtatcttactagt

SEQ ID NO: 765685 - DNA, 19 bp, Mus musculus
  siRNA target sequence for MOR114-1 (NM_146930.1,442-460).
gtgtctggcctaatgatta

SEQ ID NO: 765686 - DNA, 19 bp, Mus musculus
  siRNA target sequence for MOR114-1 (NM_146930.1,538-556).
ggtccccttctgaagatct

SEQ ID NO: 765687 - DNA, 19 bp, Mus musculus
  siRNA target sequence for MOR114-1 (NM_146930.1,779-797).
catcggctaaggatgaagt

SEQ ID NO: 765688 - DNA, 19 bp, Mus musculus
  siRNA target sequence for MOR114-1 (NM_146930.1,789-807).
ggatgaagtggccataaat

SEQ ID NO: 765689 - DNA, 19 bp, Mus musculus
  siRNA target sequence for MOR114-1 (NM_146930.1,801-819).
cataaataaaggagtttca

SEQ ID NO: 765690 - DNA, 19 bp, Mus musculus
  siRNA target sequence for MOR114-1 (NM_146930.1,833-851).
ctgtcgcacctctattgaa

SEQ ID NO: 765691 - DNA, 19 bp, Mus musculus
  siRNA target sequence for MOR114-1 (NM_146930.1,893-911).
ctttcagtgactctgtaaa

SEQ ID NO: 765692 - DNA, 19 bp, Mus musculus
  siRNA target sequence for MOR114-1 (NM_146930.1,907-925).
gtaaagagaattacattta

SEQ ID NO: 765693 - DNA, 19 bp, Mus musculus
  siRNA target sequence for MOR269-1 (NM_146931.1,20-38).
ctacaacaactgagtttct

SEQ ID NO: 765694 - DNA, 19 bp, Mus musculus
  siRNA target sequence for MOR269-1 (NM_146931.1,86-104).
ggttggtacttcttgtcta

SEQ ID NO: 765695 - DNA, 19 bp, Mus musculus
  siRNA target sequence for MOR269-1 (NM_146931.1,200-218).
ccatggtggagcttctcta

SEQ ID NO: 765696 - DNA, 19 bp, Mus musculus
  siRNA target sequence for MOR269-1 (NM_146931.1,385-403).
cagcccctgcactactcta

SEQ ID NO: 765697 - DNA, 19 bp, Mus musculus
  siRNA target sequence for MOR269-1 (NM_146931.1,478-496).
cactcttccctcatcttca

SEQ ID NO: 765698 - DNA, 19 bp, Mus musculus
  siRNA target sequence for MOR269-1 (NM_146931.1,576-594).
gaagcacaggagtgaaatt

SEQ ID NO: 765699 - DNA, 19 bp, Mus musculus
  siRNA target sequence for MOR269-1 (NM_146931.1,579-597).
gcacaggagtgaaatttct

SEQ ID NO: 765700 - DNA, 19 bp, Mus musculus
  siRNA target sequence for MOR269-1 (NM_146931.1,630-648).
ccccttctctctgatagtt

SEQ ID NO: 765701 - DNA, 19 bp, Mus musculus
  siRNA target sequence for MOR269-1 (NM_146931.1,760-778).
ggaacggccagcatcacat

SEQ ID NO: 765702 - DNA, 19 bp, Mus musculus
  siRNA target sequence for MOR269-1 (NM_146931.1,761-779).
gaacggccagcatcacata

SEQ ID NO: 765703 - DNA, 19 bp, Mus musculus
  siRNA target sequence for MOR269-1 (NM_146931.1,764-782).
cggccagcatcacatatat

SEQ ID NO: 765704 - DNA, 19 bp, Mus musculus
  siRNA target sequence for MOR269-1 (NM_146931.1,766-784).
gccagcatcacatatatca

SEQ ID NO: 765705 - DNA, 19 bp, Mus musculus
  siRNA target sequence for MOR269-1 (NM_146931.1,768-786).
cagcatcacatatatcaga

SEQ ID NO: 765706 - DNA, 19 bp, Mus musculus
  siRNA target sequence for MOR112-1 (NM_146933.1,13-31).
gcagagagtattatgagaa

SEQ ID NO: 765707 - DNA, 19 bp, Mus musculus
  siRNA target sequence for MOR112-1 (NM_146933.1,14-32).
cagagagtattatgagaaa

SEQ ID NO: 765708 - DNA, 19 bp, Mus musculus
  siRNA target sequence for MOR112-1 (NM_146933.1,16-34).
gagagtattatgagaaatt

SEQ ID NO: 765709 - DNA, 19 bp, Mus musculus
  siRNA target sequence for MOR112-1 (NM_146933.1,88-106).
cagattgtggttttcacat

SEQ ID NO: 765710 - DNA, 19 bp, Mus musculus
  siRNA target sequence for MOR112-1 (NM_146933.1,112-130).
cttgttacctacatgctaa

SEQ ID NO: 765711 - DNA, 19 bp, Mus musculus
  siRNA target sequence for MOR112-1 (NM_146933.1,305-323).
gttgcgtggctcagctatt

SEQ ID NO: 765712 - DNA, 19 bp, Mus musculus
  siRNA target sequence for MOR112-1 (NM_146933.1,336-354).
cttaggagtgacagaattt

SEQ ID NO: 765713 - DNA, 19 bp, Mus musculus
  siRNA target sequence for MOR112-1 (NM_146933.1,502-520).
cttctgttacagttagact

SEQ ID NO: 765714 - DNA, 19 bp, Mus musculus
  siRNA target sequence for MOR112-1 (NM_146933.1,603-621).
cgagctcatggcattttca

SEQ ID NO: 765715 - DNA, 19 bp, Mus musculus
  siRNA target sequence for MOR112-1 (NM_146933.1,642-660).
ggtcaccttgacattaatt

SEQ ID NO: 765716 - DNA, 19 bp, Mus musculus
  siRNA target sequence for MOR112-1 (NM_146933.1,645-663).
caccttgacattaattatt

SEQ ID NO: 765717 - DNA, 19 bp, Mus musculus
  siRNA target sequence for MOR272-1 (NM_146935.1,3-21).
ggatagttataatcaaaca

SEQ ID NO: 765718 - DNA, 19 bp, Mus musculus
  siRNA target sequence for MOR272-1 (NM_146935.1,4-22).
gatagttataatcaaacat

SEQ ID NO: 765719 - DNA, 19 bp, Mus musculus
  siRNA target sequence for MOR272-1 (NM_146935.1,44-62).
gattgttcccaccatcaaa

SEQ ID NO: 765720 - DNA, 19 bp, Mus musculus
  siRNA target sequence for MOR272-1 (NM_146935.1,51-69).
cccaccatcaaaaataggt

SEQ ID NO: 765721 - DNA, 19 bp, Mus musculus
  siRNA target sequence for MOR272-1 (NM_146935.1,103-121).
ctgacagcttggattggta

SEQ ID NO: 765722 - DNA, 19 bp, Mus musculus
  siRNA target sequence for MOR272-1 (NM_146935.1,197-215).
ctcttattgacttaaatta

SEQ ID NO: 765723 - DNA, 19 bp, Mus musculus
  siRNA target sequence for MOR272-1 (NM_146935.1,199-217).
cttattgacttaaattaca

SEQ ID NO: 765724 - DNA, 19 bp, Mus musculus
  siRNA target sequence for MOR272-1 (NM_146935.1,276-294).
cttcattgggtgtggattt

SEQ ID NO: 765725 - DNA, 19 bp, Mus musculus
  siRNA target sequence for MOR272-1 (NM_146935.1,323-341).
gtgcagaaacccttttgtt

SEQ ID NO: 765726 - DNA, 19 bp, Mus musculus
  siRNA target sequence for MOR272-1 (NM_146935.1,385-403).
ctccactatgccacacata

SEQ ID NO: 765727 - DNA, 19 bp, Mus musculus
  siRNA target sequence for MOR272-1 (NM_146935.1,388-406).
cactatgccacacatatga

SEQ ID NO: 765728 - DNA, 19 bp, Mus musculus
  siRNA target sequence for MOR272-1 (NM_146935.1,390-408).
ctatgccacacatatgaat

SEQ ID NO: 765729 - DNA, 19 bp, Mus musculus
  siRNA target sequence for MOR272-1 (NM_146935.1,429-447).
gataacaggagcttggatt

SEQ ID NO: 765730 - DNA, 19 bp, Mus musculus
  siRNA target sequence for MOR272-1 (NM_146935.1,443-461).
ggattctgggctccattaa

SEQ ID NO: 765731 - DNA, 19 bp, Mus musculus
  siRNA target sequence for MOR272-1 (NM_146935.1,444-462).
gattctgggctccattaat

SEQ ID NO: 765732 - DNA, 19 bp, Mus musculus
  siRNA target sequence for MOR272-1 (NM_146935.1,448-466).
ctgggctccattaattcct

SEQ ID NO: 765733 - DNA, 19 bp, Mus musculus
  siRNA target sequence for MOR272-1 (NM_146935.1,476-494).
ctggatatgcactccaaat

SEQ ID NO: 765734 - DNA, 19 bp, Mus musculus
  siRNA target sequence for MOR272-1 (NM_146935.1,575-593).
gggtctatgagtatacagt

SEQ ID NO: 765735 - DNA, 19 bp, Mus musculus
  siRNA target sequence for MOR272-1 (NM_146935.1,619-637).
gtgtttccattcattggaa

SEQ ID NO: 765736 - DNA, 19 bp, Mus musculus
  siRNA target sequence for MOR272-1 (NM_146935.1,625-643).
ccattcattggaatagtgt

SEQ ID NO: 765737 - DNA, 19 bp, Mus musculus
  siRNA target sequence for MOR272-1 (NM_146935.1,644-662).
gttcctatggtcgtgtttt

SEQ ID NO: 765738 - DNA, 19 bp, Mus musculus
  siRNA target sequence for MOR272-1 (NM_146935.1,647-665).
cctatggtcgtgttttcct

SEQ ID NO: 765739 - DNA, 19 bp, Mus musculus
  siRNA target sequence for MOR272-1 (NM_146935.1,648-666).
ctatggtcgtgttttcctt

SEQ ID NO: 765740 - DNA, 19 bp, Mus musculus
  siRNA target sequence for MOR272-1 (NM_146935.1,653-671).
gtcgtgttttccttgctat

SEQ ID NO: 765741 - DNA, 19 bp, Mus musculus
  siRNA target sequence for MOR272-1 (NM_146935.1,667-685).
gctatctaccgtatgcatt

SEQ ID NO: 765742 - DNA, 19 bp, Mus musculus
  siRNA target sequence for MOR272-1 (NM_146935.1,747-765).
ctactacgcaccatttgct

SEQ ID NO: 765743 - DNA, 19 bp, Mus musculus
  siRNA target sequence for MOR272-1 (NM_146935.1,835-853).
gttctcaccccaatgctaa

SEQ ID NO: 765744 - DNA, 19 bp, Mus musculus
  siRNA target sequence for MOR266-2 (NM_146936.1,199-217).
gctagcctggagatcttct

SEQ ID NO: 765745 - DNA, 19 bp, Mus musculus
  siRNA target sequence for MOR266-2 (NM_146936.1,324-342).
gggcagtgctgactgtatt

SEQ ID NO: 765746 - DNA, 19 bp, Mus musculus
  siRNA target sequence for MOR266-2 (NM_146936.1,326-344).
gcagtgctgactgtattct

SEQ ID NO: 765747 - DNA, 19 bp, Mus musculus
  siRNA target sequence for MOR266-2 (NM_146936.1,520-538).
gaaatcagcttgttctact

SEQ ID NO: 765748 - DNA, 19 bp, Mus musculus
  siRNA target sequence for MOR266-2 (NM_146936.1,761-779).
gatgtggaagcctcatcta

SEQ ID NO: 765749 - DNA, 19 bp, Mus musculus
  siRNA target sequence for MOR266-2 (NM_146936.1,764-782).
gtggaagcctcatctactt

SEQ ID NO: 765750 - DNA, 19 bp, Mus musculus
  siRNA target sequence for MOR266-2 (NM_146936.1,766-784).
ggaagcctcatctacttgt

SEQ ID NO: 765751 - DNA, 19 bp, Mus musculus
  siRNA target sequence for MOR266-2 (NM_146936.1,808-826).
gagaggggccaggtagtat

SEQ ID NO: 765752 - DNA, 19 bp, Mus musculus
  siRNA target sequence for MOR266-2 (NM_146936.1,810-828).
gaggggccaggtagtatct

SEQ ID NO: 765753 - DNA, 19 bp, Mus musculus
  siRNA target sequence for MOR266-2 (NM_146936.1,812-830).
ggggccaggtagtatctgt

SEQ ID NO: 765754 - DNA, 19 bp, Mus musculus
  siRNA target sequence for MOR266-2 (NM_146936.1,887-905).
gagaactcaaggatgcttt

SEQ ID NO: 765755 - DNA, 19 bp, Mus musculus
  siRNA target sequence for MOR267-1 (NM_146937.1,10-28).
cagaactacagcaccatat

SEQ ID NO: 765756 - DNA, 19 bp, Mus musculus
  siRNA target sequence for MOR267-1 (NM_146937.1,268-286).
catcgatccatcacattta

SEQ ID NO: 765757 - DNA, 19 bp, Mus musculus
  siRNA target sequence for MOR267-1 (NM_146937.1,295-313).
gctaaccaattgtttttct

SEQ ID NO: 765758 - DNA, 19 bp, Mus musculus
  siRNA target sequence for MOR267-1 (NM_146937.1,394-412).
cattatcatgcacttatga

SEQ ID NO: 765759 - DNA, 19 bp, Mus musculus
  siRNA target sequence for MOR267-1 (NM_146937.1,469-487).
gggatggcattgacaataa

SEQ ID NO: 765760 - DNA, 19 bp, Mus musculus
  siRNA target sequence for MOR267-1 (NM_146937.1,470-488).
ggatggcattgacaataat

SEQ ID NO: 765761 - DNA, 19 bp, Mus musculus
  siRNA target sequence for MOR267-1 (NM_146937.1,496-514).
caccttaccttctgtgaat

SEQ ID NO: 765762 - DNA, 19 bp, Mus musculus
  siRNA target sequence for MOR267-1 (NM_146937.1,631-649).
ggatgcctggtcttcatta

SEQ ID NO: 765763 - DNA, 19 bp, Mus musculus
  siRNA target sequence for MOR267-1 (NM_146937.1,632-650).
gatgcctggtcttcattat

SEQ ID NO: 765764 - DNA, 19 bp, Mus musculus
  siRNA target sequence for MOR267-1 (NM_146937.1,762-780).
cggctttgcctccataatt

SEQ ID NO: 765765 - DNA, 19 bp, Mus musculus
  siRNA target sequence for MOR267-1 (NM_146937.1,764-782).
gctttgcctccataattta

SEQ ID NO: 765766 - DNA, 19 bp, Mus musculus
  siRNA target sequence for MOR267-1 (NM_146937.1,823-841).
ctcatgtccaccacctata

SEQ ID NO: 765767 - DNA, 19 bp, Mus musculus
  siRNA target sequence for MOR267-1 (NM_146937.1,895-913).
ctgaagaatgctataatta

SEQ ID NO: 765768 - DNA, 19 bp, Mus musculus
  siRNA target sequence for MOR267-1 (NM_146937.1,924-942).
caggaatgtctgtcaacaa

SEQ ID NO: 765769 - DNA, 19 bp, Mus musculus
  siRNA target sequence for MOR267-1 (NM_146937.1,931-949).
gtctgtcaacaaagtatct

SEQ ID NO: 765770 - DNA, 19 bp, Mus musculus
  siRNA target sequence for MOR127-4 (NM_146939.1,73-91).
ggggagcagcctcttctat

SEQ ID NO: 765771 - DNA, 19 bp, Mus musculus
  siRNA target sequence for MOR127-4 (NM_146939.1,74-92).
gggagcagcctcttctatt

SEQ ID NO: 765772 - DNA, 19 bp, Mus musculus
  siRNA target sequence for MOR127-4 (NM_146939.1,75-93).
ggagcagcctcttctattt

SEQ ID NO: 765773 - DNA, 19 bp, Mus musculus
  siRNA target sequence for MOR127-4 (NM_146939.1,412-430).
gccatgagtccccaacttt

SEQ ID NO: 765774 - DNA, 19 bp, Mus musculus
  siRNA target sequence for MOR127-4 (NM_146939.1,524-542).
cagccatcccccatttcta

SEQ ID NO: 765775 - DNA, 19 bp, Mus musculus
  siRNA target sequence for MOR127-4 (NM_146939.1,612-630).
catgggcttggtgtttcta

SEQ ID NO: 765776 - DNA, 19 bp, Mus musculus
  siRNA target sequence for MOR127-4 (NM_146939.1,637-655).
cctcttatgttgattgtct

SEQ ID NO: 765777 - DNA, 19 bp, Mus musculus
  siRNA target sequence for MOR127-4 (NM_146939.1,684-702).
gttgggtatcccttcttct

SEQ ID NO: 765778 - DNA, 19 bp, Mus musculus
  siRNA target sequence for MOR127-4 (NM_146939.1,830-848).
ctgctgttctctacatgat

SEQ ID NO: 765779 - DNA, 19 bp, Mus musculus
  siRNA target sequence for MOR127-4 (NM_146939.1,904-922).
gaagctatgggtaaacttt

SEQ ID NO: 765780 - DNA, 19 bp, Mus musculus
  siRNA target sequence for MOR127-4 (NM_146939.1,925-943).
ggtggtggaaaaacagttt

SEQ ID NO: 765781 - DNA, 19 bp, Mus musculus
  siRNA target sequence for MOR136-10 (NM_146940.1,5-23).
gctgtatcataaggaataa

SEQ ID NO: 765782 - DNA, 19 bp, Mus musculus
  siRNA target sequence for MOR136-10 (NM_146940.1,12-30).
cataaggaataatcatagt

SEQ ID NO: 765783 - DNA, 19 bp, Mus musculus
  siRNA target sequence for MOR136-10 (NM_146940.1,18-36).
gaataatcatagtatcaca

SEQ ID NO: 765784 - DNA, 19 bp, Mus musculus
  siRNA target sequence for MOR136-10 (NM_146940.1,29-47).
gtatcacatctgagttcat

SEQ ID NO: 765785 - DNA, 19 bp, Mus musculus
  siRNA target sequence for MOR136-10 (NM_146940.1,73-91).
gaactgaatggcatgtact

SEQ ID NO: 765786 - DNA, 19 bp, Mus musculus
  siRNA target sequence for MOR136-10 (NM_146940.1,285-303).
ctcatatacgggatgcatt

SEQ ID NO: 765787 - DNA, 19 bp, Mus musculus
  siRNA target sequence for MOR136-10 (NM_146940.1,429-447).
ctgtgtactactgttaatt

SEQ ID NO: 765788 - DNA, 19 bp, Mus musculus
  siRNA target sequence for MOR136-10 (NM_146940.1,431-449).
gtgtactactgttaattgt

SEQ ID NO: 765789 - DNA, 19 bp, Mus musculus
  siRNA target sequence for MOR136-10 (NM_146940.1,587-605).
ccattaacgaactggttat

SEQ ID NO: 765790 - DNA, 19 bp, Mus musculus
  siRNA target sequence for MOR136-10 (NM_146940.1,634-652).
gtgccattgatatgtattt

SEQ ID NO: 765791 - DNA, 19 bp, Mus musculus
  siRNA target sequence for MOR136-10 (NM_146940.1,638-656).
cattgatatgtattttggt

SEQ ID NO: 765792 - DNA, 19 bp, Mus musculus
  siRNA target sequence for MOR136-10 (NM_146940.1,778-796).
gggttatactcttttcctt

SEQ ID NO: 765793 - DNA, 19 bp, Mus musculus
  siRNA target sequence for MOR136-10 (NM_146940.1,793-811).
ccttcacctaataacagta

SEQ ID NO: 765794 - DNA, 19 bp, Mus musculus
  siRNA target sequence for MOR136-10 (NM_146940.1,794-812).
cttcacctaataacagtaa

SEQ ID NO: 765795 - DNA, 19 bp, Mus musculus
  siRNA target sequence for MOR127-3 (NM_146941.1,642-660).
ctcttatgtccgcatagta

SEQ ID NO: 765796 - DNA, 19 bp, Mus musculus
  siRNA target sequence for MOR127-3 (NM_146941.1,644-662).
cttatgtccgcatagtatt

SEQ ID NO: 765797 - DNA, 19 bp, Mus musculus
  siRNA target sequence for MOR127-3 (NM_146941.1,683-701).
cttctggcgggagttcaaa

SEQ ID NO: 765798 - DNA, 19 bp, Mus musculus
  siRNA target sequence for MOR127-2 (NM_146942.1,252-270).
gacaaggtgccataccatt

SEQ ID NO: 765799 - DNA, 19 bp, Mus musculus
  siRNA target sequence for MOR127-2 (NM_146942.1,257-275).
ggtgccataccatttccta

SEQ ID NO: 765800 - DNA, 19 bp, Mus musculus
  siRNA target sequence for MOR127-2 (NM_146942.1,567-585).
cactcatgtcaatgaactt

SEQ ID NO: 765801 - DNA, 19 bp, Mus musculus
  siRNA target sequence for MOR127-2 (NM_146942.1,632-650).
gcattgttatctcgtatat

SEQ ID NO: 765802 - DNA, 19 bp, Mus musculus
  siRNA target sequence for MOR127-2 (NM_146942.1,633-651).
cattgttatctcgtatatt

SEQ ID NO: 765803 - DNA, 19 bp, Mus musculus
  siRNA target sequence for MOR127-2 (NM_146942.1,637-655).
gttatctcgtatattcaca

SEQ ID NO: 765804 - DNA, 19 bp, Mus musculus
  siRNA target sequence for MOR127-2 (NM_146942.1,644-662).
cgtatattcacattgtatt

SEQ ID NO: 765805 - DNA, 19 bp, Mus musculus
  siRNA target sequence for MOR127-2 (NM_146942.1,904-922).
cttctatgtcataggaaat

SEQ ID NO: 765806 - DNA, 19 bp, Mus musculus
  siRNA target sequence for MOR136-9 (NM_146943.1,10-28).
ggaaatgagagcattgtgt

SEQ ID NO: 765807 - DNA, 19 bp, Mus musculus
  siRNA target sequence for MOR136-9 (NM_146943.1,388-406).
ctacactataccacaatga

SEQ ID NO: 765808 - DNA, 19 bp, Mus musculus
  siRNA target sequence for MOR136-9 (NM_146943.1,578-596).
ccaccaacaagctggttat

SEQ ID NO: 765809 - DNA, 19 bp, Mus musculus
  siRNA target sequence for MOR136-9 (NM_146943.1,582-600).
caacaagctggttatactt

SEQ ID NO: 765810 - DNA, 19 bp, Mus musculus
  siRNA target sequence for MOR136-9 (NM_146943.1,588-606).
gctggttatacttctttta

SEQ ID NO: 765811 - DNA, 19 bp, Mus musculus
  siRNA target sequence for MOR136-9 (NM_146943.1,591-609).
ggttatacttcttttaggt

SEQ ID NO: 765812 - DNA, 19 bp, Mus musculus
  siRNA target sequence for MOR136-9 (NM_146943.1,592-610).
gttatacttcttttaggta

SEQ ID NO: 765813 - DNA, 19 bp, Mus musculus
  siRNA target sequence for MOR136-9 (NM_146943.1,676-694).
ctgaaaattccttctatga

SEQ ID NO: 765814 - DNA, 19 bp, Mus musculus
  siRNA target sequence for MOR136-8 (NM_146944.1,388-406).
cccctccactatacaagaa

SEQ ID NO: 765815 - DNA, 19 bp, Mus musculus
  siRNA target sequence for MOR136-8 (NM_146944.1,389-407).
ccctccactatacaagaat

SEQ ID NO: 765816 - DNA, 19 bp, Mus musculus
  siRNA target sequence for MOR136-8 (NM_146944.1,391-409).
ctccactatacaagaatca

SEQ ID NO: 765817 - DNA, 19 bp, Mus musculus
  siRNA target sequence for MOR136-8 (NM_146944.1,404-422).
gaatcatgagtcagagtat

SEQ ID NO: 765818 - DNA, 19 bp, Mus musculus
  siRNA target sequence for MOR136-8 (NM_146944.1,413-431).
gtcagagtatctgtatctt

SEQ ID NO: 765819 - DNA, 19 bp, Mus musculus
  siRNA target sequence for MOR136-8 (NM_146944.1,417-435).
gagtatctgtatcttacta

SEQ ID NO: 765820 - DNA, 19 bp, Mus musculus
  siRNA target sequence for MOR136-8 (NM_146944.1,419-437).
gtatctgtatcttactagt

SEQ ID NO: 765821 - DNA, 19 bp, Mus musculus
  siRNA target sequence for MOR136-8 (NM_146944.1,490-508).
ctagctcgtctctctttct

SEQ ID NO: 765822 - DNA, 19 bp, Mus musculus
  siRNA target sequence for MOR136-8 (NM_146944.1,546-564).
gtctgccttaattaagcta

SEQ ID NO: 765823 - DNA, 19 bp, Mus musculus
  siRNA target sequence for MOR136-8 (NM_146944.1,607-625).
gtaggatcattggtcatta

SEQ ID NO: 765824 - DNA, 19 bp, Mus musculus
  siRNA target sequence for MOR136-8 (NM_146944.1,611-629).
gatcattggtcattactgt

SEQ ID NO: 765825 - DNA, 19 bp, Mus musculus
  siRNA target sequence for MOR136-8 (NM_146944.1,667-685).
ggagccactatcctgaaaa

SEQ ID NO: 765826 - DNA, 19 bp, Mus musculus
  siRNA target sequence for MOR136-8 (NM_146944.1,763-781).
gctattattggtctatatt

SEQ ID NO: 765827 - DNA, 19 bp, Mus musculus
  siRNA target sequence for MOR136-5 (NM_146947.1,441-459).
ggccttatcttctgcaaat

SEQ ID NO: 765828 - DNA, 19 bp, Mus musculus
  siRNA target sequence for MOR136-5 (NM_146947.1,580-598).
caactggtcatccttgttt

SEQ ID NO: 765829 - DNA, 19 bp, Mus musculus
  siRNA target sequence for MOR136-5 (NM_146947.1,652-670).
cgcattggagtaaccatta

SEQ ID NO: 765830 - DNA, 19 bp, Mus musculus
  siRNA target sequence for MOR136-3 (NM_146949.1,62-80).
cagaagaccaagctttgta

SEQ ID NO: 765831 - DNA, 19 bp, Mus musculus
  siRNA target sequence for MOR136-2 (NM_146950.1,424-442).
gtccttttagtagtaatgt

SEQ ID NO: 765832 - DNA, 19 bp, Mus musculus
  siRNA target sequence for MOR136-2 (NM_146950.1,536-554).
gtgaaccctctgccttatt

SEQ ID NO: 765833 - DNA, 19 bp, Mus musculus
  siRNA target sequence for MOR136-2 (NM_146950.1,538-556).
gaaccctctgccttattga

SEQ ID NO: 765834 - DNA, 19 bp, Mus musculus
  siRNA target sequence for MOR136-2 (NM_146950.1,777-795).
cctagttccctcatctaat

SEQ ID NO: 765835 - DNA, 19 bp, Mus musculus
  siRNA target sequence for MOR136-1 (NM_146951.1,224-242).
cagtcgcatctccaaaaat

SEQ ID NO: 765836 - DNA, 19 bp, Mus musculus
  siRNA target sequence for MOR136-1 (NM_146951.1,235-253).
ccaaaaatggtcataaata

SEQ ID NO: 765837 - DNA, 19 bp, Mus musculus
  siRNA target sequence for MOR136-1 (NM_146951.1,479-497).
ctcttctcttggtacaact

SEQ ID NO: 765838 - DNA, 19 bp, Mus musculus
  siRNA target sequence for MOR136-1 (NM_146951.1,481-499).
cttctcttggtacaactat

SEQ ID NO: 765839 - DNA, 19 bp, Mus musculus
  siRNA target sequence for MOR103-5 (NM_146952.1,400-418).
ccagccatcatggattcaa

SEQ ID NO: 765840 - DNA, 19 bp, Mus musculus
  siRNA target sequence for MOR103-5 (NM_146952.1,426-444).
cctgcatctagctcttagt

SEQ ID NO: 765841 - DNA, 19 bp, Mus musculus
  siRNA target sequence for MOR103-5 (NM_146952.1,574-592).
gacaccactgccattgaaa

SEQ ID NO: 765842 - DNA, 19 bp, Mus musculus
  siRNA target sequence for MOR103-5 (NM_146952.1,606-624).
ggcagctttagcagtactt

SEQ ID NO: 765843 - DNA, 19 bp, Mus musculus
  siRNA target sequence for MOR103-5 (NM_146952.1,625-643).
gcaacctctctgatagtga

SEQ ID NO: 765844 - DNA, 19 bp, Mus musculus
  siRNA target sequence for MOR103-5 (NM_146952.1,762-780).
caccaccactttcatgtat

SEQ ID NO: 765845 - DNA, 19 bp, Mus musculus
  siRNA target sequence for MOR103-5 (NM_146952.1,808-826).
gacctcaacaagctagtat

SEQ ID NO: 765846 - DNA, 19 bp, Mus musculus
  siRNA target sequence for MOR103-5 (NM_146952.1,816-834).
caagctagtatctgtgatt

SEQ ID NO: 765847 - DNA, 19 bp, Mus musculus
  siRNA target sequence for MOR273-2 (NM_146957.1,582-600).
ctatgagcaaggagtttat

SEQ ID NO: 765848 - DNA, 19 bp, Mus musculus
  siRNA target sequence for MOR3-1 (NM_146959.1,398-416).
ggtcctatccaacattact

SEQ ID NO: 765849 - DNA, 19 bp, Mus musculus
  siRNA target sequence for MOR3-1 (NM_146959.1,417-435).
cattttagccctatgttct

SEQ ID NO: 765850 - DNA, 19 bp, Mus musculus
  siRNA target sequence for MOR3-1 (NM_146959.1,509-527).
ggccatttcaggcaattgt

SEQ ID NO: 765851 - DNA, 19 bp, Mus musculus
  siRNA target sequence for MOR3-1 (NM_146959.1,517-535).
caggcaattgtctcattct

SEQ ID NO: 765852 - DNA, 19 bp, Mus musculus
  siRNA target sequence for MOR3-1 (NM_146959.1,520-538).
gcaattgtctcattctgat

SEQ ID NO: 765853 - DNA, 19 bp, Mus musculus
  siRNA target sequence for MOR3-1 (NM_146959.1,521-539).
caattgtctcattctgata

SEQ ID NO: 765854 - DNA, 19 bp, Mus musculus
  siRNA target sequence for MOR3-1 (NM_146959.1,646-664).
gtattttttggttcaatta

SEQ ID NO: 765855 - DNA, 19 bp, Mus musculus
  siRNA target sequence for MOR3-1 (NM_146959.1,665-683).
ccatggcatttattttgga

SEQ ID NO: 765856 - DNA, 19 bp, Mus musculus
  siRNA target sequence for MOR3-1 (NM_146959.1,706-724).
gcatccactctttttcctt

SEQ ID NO: 765857 - DNA, 19 bp, Mus musculus
  siRNA target sequence for MOR3-1 (NM_146959.1,786-804).
ctgaggtactcctccatta

SEQ ID NO: 765858 - DNA, 19 bp, Mus musculus
  siRNA target sequence for MOR3-1 (NM_146959.1,920-938).
ctcccactcattttgtcta

SEQ ID NO: 765859 - DNA, 19 bp, Mus musculus
  siRNA target sequence for MOR3-1 (NM_146959.1,966-984).
gtagacaccaccttcaaca

SEQ ID NO: 765860 - DNA, 19 bp, Mus musculus
  siRNA target sequence for MOR3-1 (NM_146959.1,973-991).
ccaccttcaacaacctata

SEQ ID NO: 765861 - DNA, 19 bp, Mus musculus
  siRNA target sequence for MOR3-1 (NM_146959.1,974-992).
caccttcaacaacctatat

SEQ ID NO: 765862 - DNA, 19 bp, Mus musculus
  siRNA target sequence for MOR3-1 (NM_146959.1,977-995).
cttcaacaacctatatgga

SEQ ID NO: 765863 - DNA, 19 bp, Mus musculus
  siRNA target sequence for MOR3-1 (NM_146959.1,1107-1125).
gccttccaaacatgtactt

SEQ ID NO: 765864 - DNA, 19 bp, Mus musculus
  siRNA target sequence for MOR3-1 (NM_146959.1,1262-1280).
cccagtcatatatagtatt

SEQ ID NO: 765865 - DNA, 19 bp, Mus musculus
  siRNA target sequence for MOR3-1 (NM_146959.1,1263-1281).
ccagtcatatatagtatta

SEQ ID NO: 765866 - DNA, 19 bp, Mus musculus
  siRNA target sequence for MOR3-1 (NM_146959.1,1268-1286).
catatatagtattaagaca

SEQ ID NO: 765867 - DNA, 19 bp, Mus musculus
  siRNA target sequence for MOR253-5 (NM_146960.1,639-657).
catgttaaccctgttatct

SEQ ID NO: 765868 - DNA, 19 bp, Mus musculus
  siRNA target sequence for MOR253-5 (NM_146960.1,642-660).
gttaaccctgttatcttat

SEQ ID NO: 765869 - DNA, 19 bp, Mus musculus
  siRNA target sequence for MOR253-4 (NM_146961.1,473-491).
ggttcatcggtcttgtgaa

SEQ ID NO: 765870 - DNA, 19 bp, Mus musculus
  siRNA target sequence for MOR253-4 (NM_146961.1,474-492).
gttcatcggtcttgtgaat

SEQ ID NO: 765871 - DNA, 19 bp, Mus musculus
  siRNA target sequence for MOR253-4 (NM_146961.1,497-515).
gtgtccacactggtctaat

SEQ ID NO: 765872 - DNA, 19 bp, Mus musculus
  siRNA target sequence for MOR227-4 (NM_146975.1,180-198).
cagctcgttgtccatagta

SEQ ID NO: 765873 - DNA, 19 bp, Mus musculus
  siRNA target sequence for MOR227-4 (NM_146975.1,182-200).
gctcgttgtccatagtaga

SEQ ID NO: 765874 - DNA, 19 bp, Mus musculus
  siRNA target sequence for MOR227-4 (NM_146975.1,185-203).
cgttgtccatagtagagat

SEQ ID NO: 765875 - DNA, 19 bp, Mus musculus
  siRNA target sequence for MOR227-4 (NM_146975.1,186-204).
gttgtccatagtagagatt

SEQ ID NO: 765876 - DNA, 19 bp, Mus musculus
  siRNA target sequence for MOR227-4 (NM_146975.1,191-209).
ccatagtagagatttgcta

SEQ ID NO: 765877 - DNA, 19 bp, Mus musculus
  siRNA target sequence for MOR232-4 (NM_146977.1,108-126).
gcttctgtacatgataaca

SEQ ID NO: 765878 - DNA, 19 bp, Mus musculus
  siRNA target sequence for MOR232-4 (NM_146977.1,109-127).
cttctgtacatgataacaa

SEQ ID NO: 765879 - DNA, 19 bp, Mus musculus
  siRNA target sequence for MOR232-4 (NM_146977.1,843-861).
ggtggcccctctactgaat

SEQ ID NO: 765880 - DNA, 19 bp, Mus musculus
  siRNA target sequence for MOR257-2 (NM_146986.1,200-218).
ccctggtggatgcatctta

SEQ ID NO: 765881 - DNA, 19 bp, Mus musculus
  siRNA target sequence for MOR257-2 (NM_146986.1,201-219).
cctggtggatgcatcttat

SEQ ID NO: 765882 - DNA, 19 bp, Mus musculus
  siRNA target sequence for MOR257-2 (NM_146986.1,317-335).
gcttgggtgggattgagtt

SEQ ID NO: 765883 - DNA, 19 bp, Mus musculus
  siRNA target sequence for MOR257-2 (NM_146986.1,523-541).
gatcacatagcctgtgaaa

SEQ ID NO: 765884 - DNA, 19 bp, Mus musculus
  siRNA target sequence for MOR257-2 (NM_146986.1,568-586).
gtggatacctcatctaaca

SEQ ID NO: 765885 - DNA, 19 bp, Mus musculus
  siRNA target sequence for MOR257-2 (NM_146986.1,605-623).
ctagcattgtcttgcttat

SEQ ID NO: 765886 - DNA, 19 bp, Mus musculus
  siRNA target sequence for MOR257-2 (NM_146986.1,824-842).
ctctgttctatgctatctt

SEQ ID NO: 765887 - DNA, 19 bp, Mus musculus
  siRNA target sequence for MOR257-2 (NM_146986.1,826-844).
ctgttctatgctatcttga

SEQ ID NO: 765888 - DNA, 19 bp, Mus musculus
  siRNA target sequence for MOR257-2 (NM_146986.1,894-912).
gggggcatggcagaaatta

SEQ ID NO: 765889 - DNA, 19 bp, Mus musculus
  siRNA target sequence for MOR257-2 (NM_146986.1,895-913).
ggggcatggcagaaattat

SEQ ID NO: 765890 - DNA, 19 bp, Mus musculus
  siRNA target sequence for MOR257-2 (NM_146986.1,896-914).
gggcatggcagaaattatt

SEQ ID NO: 765891 - DNA, 19 bp, Mus musculus
  siRNA target sequence for MOR261-1 (NM_146988.1,410-428).
ggagagtttgtgttatcct

SEQ ID NO: 765892 - DNA, 19 bp, Mus musculus
  siRNA target sequence for MOR261-1 (NM_146988.1,443-461).
ggattttaggagtactctt

SEQ ID NO: 765893 - DNA, 19 bp, Mus musculus
  siRNA target sequence for MOR261-1 (NM_146988.1,462-480).
ggccctggtccatctagta

SEQ ID NO: 765894 - DNA, 19 bp, Mus musculus
  siRNA target sequence for MOR261-1 (NM_146988.1,464-482).
ccctggtccatctagtatt

SEQ ID NO: 765895 - DNA, 19 bp, Mus musculus
  siRNA target sequence for MOR261-1 (NM_146988.1,466-484).
ctggtccatctagtattgt

SEQ ID NO: 765896 - DNA, 19 bp, Mus musculus
  siRNA target sequence for MOR261-1 (NM_146988.1,469-487).
gtccatctagtattgttgt

SEQ ID NO: 765897 - DNA, 19 bp, Mus musculus
  siRNA target sequence for MOR261-1 (NM_146988.1,471-489).
ccatctagtattgttgtta

SEQ ID NO: 765898 - DNA, 19 bp, Mus musculus
  siRNA target sequence for MOR261-1 (NM_146988.1,475-493).
ctagtattgttgttaccat

SEQ ID NO: 765899 - DNA, 19 bp, Mus musculus
  siRNA target sequence for MOR261-1 (NM_146988.1,496-514).
cccttctgcggctcacaaa

SEQ ID NO: 765900 - DNA, 19 bp, Mus musculus
  siRNA target sequence for MOR261-1 (NM_146988.1,498-516).
cttctgcggctcacaaaaa

SEQ ID NO: 765901 - DNA, 19 bp, Mus musculus
  siRNA target sequence for MOR261-1 (NM_146988.1,504-522).
cggctcacaaaaagtgaat

SEQ ID NO: 765902 - DNA, 19 bp, Mus musculus
  siRNA target sequence for MOR261-1 (NM_146988.1,506-524).
gctcacaaaaagtgaatca

SEQ ID NO: 765903 - DNA, 19 bp, Mus musculus
  siRNA target sequence for MOR261-1 (NM_146988.1,568-586).
gatacccgcatcaatgagt

SEQ ID NO: 765904 - DNA, 19 bp, Mus musculus
  siRNA target sequence for MOR261-1 (NM_146988.1,572-590).
cccgcatcaatgagttaat

SEQ ID NO: 765905 - DNA, 19 bp, Mus musculus
  siRNA target sequence for MOR261-1 (NM_146988.1,575-593).
gcatcaatgagttaatggt

SEQ ID NO: 765906 - DNA, 19 bp, Mus musculus
  siRNA target sequence for MOR261-1 (NM_146988.1,615-633).
gcttgtcggaccattttct

SEQ ID NO: 765907 - DNA, 19 bp, Mus musculus
  siRNA target sequence for MOR261-1 (NM_146988.1,619-637).
gtcggaccattttcttcaa

SEQ ID NO: 765908 - DNA, 19 bp, Mus musculus
  siRNA target sequence for MOR261-1 (NM_146988.1,621-639).
cggaccattttcttcaatt

SEQ ID NO: 765909 - DNA, 19 bp, Mus musculus
  siRNA target sequence for MOR261-1 (NM_146988.1,739-757).
gttggactcttttatggta

SEQ ID NO: 765910 - DNA, 19 bp, Mus musculus
  siRNA target sequence for MOR261-1 (NM_146988.1,828-846).
ccatagcctttttaatcct

SEQ ID NO: 765911 - DNA, 19 bp, Mus musculus
  siRNA target sequence for MOR127-1 (NM_146989.1,29-47).
gcatctctgaatttatcct

SEQ ID NO: 765912 - DNA, 19 bp, Mus musculus
  siRNA target sequence for MOR127-1 (NM_146989.1,72-90).
gaagcaaaaactcatcttt

SEQ ID NO: 765913 - DNA, 19 bp, Mus musculus
  siRNA target sequence for MOR127-1 (NM_146989.1,150-168).
cattggtttggatatacat

SEQ ID NO: 765914 - DNA, 19 bp, Mus musculus
  siRNA target sequence for MOR127-1 (NM_146989.1,155-173).
gtttggatatacatcttca

SEQ ID NO: 765915 - DNA, 19 bp, Mus musculus
  siRNA target sequence for MOR127-1 (NM_146989.1,159-177).
ggatatacatcttcatact

SEQ ID NO: 765916 - DNA, 19 bp, Mus musculus
  siRNA target sequence for MOR127-1 (NM_146989.1,241-259).
cctaaaatgctaatgaata

SEQ ID NO: 765917 - DNA, 19 bp, Mus musculus
  siRNA target sequence for MOR127-1 (NM_146989.1,264-282).
gaccaatagtcaatccatt

SEQ ID NO: 765918 - DNA, 19 bp, Mus musculus
  siRNA target sequence for MOR127-1 (NM_146989.1,446-464).
gtccatgggctctaagcaa

SEQ ID NO: 765919 - DNA, 19 bp, Mus musculus
  siRNA target sequence for MOR127-1 (NM_146989.1,448-466).
ccatgggctctaagcaata

SEQ ID NO: 765920 - DNA, 19 bp, Mus musculus
  siRNA target sequence for MOR127-1 (NM_146989.1,453-471).
ggctctaagcaatattgtt

SEQ ID NO: 765921 - DNA, 19 bp, Mus musculus
  siRNA target sequence for MOR127-1 (NM_146989.1,485-503).
ctcttctggccaatcaatt

SEQ ID NO: 765922 - DNA, 19 bp, Mus musculus
  siRNA target sequence for MOR127-1 (NM_146989.1,549-567).
ggcccctctgatcaaactt

SEQ ID NO: 765923 - DNA, 19 bp, Mus musculus
  siRNA target sequence for MOR127-1 (NM_146989.1,550-568).
gcccctctgatcaaacttt

SEQ ID NO: 765924 - DNA, 19 bp, Mus musculus
  siRNA target sequence for MOR127-1 (NM_146989.1,573-591).
ctcagatgcaatgatcaat

SEQ ID NO: 765925 - DNA, 19 bp, Mus musculus
  siRNA target sequence for MOR127-1 (NM_146989.1,581-599).
caatgatcaatgaacttgt

SEQ ID NO: 765926 - DNA, 19 bp, Mus musculus
  siRNA target sequence for MOR127-1 (NM_146989.1,665-683).
gcatcatcagggatgtact

SEQ ID NO: 765927 - DNA, 19 bp, Mus musculus
  siRNA target sequence for MOR127-1 (NM_146989.1,734-752).
ctcacctgacaattgtatt

SEQ ID NO: 765928 - DNA, 19 bp, Mus musculus
  siRNA target sequence for MOR127-1 (NM_146989.1,767-785).
ccattgtaggggtttactt

SEQ ID NO: 765929 - DNA, 19 bp, Mus musculus
  siRNA target sequence for MOR127-1 (NM_146989.1,768-786).
cattgtaggggtttacttt

SEQ ID NO: 765930 - DNA, 19 bp, Mus musculus
  siRNA target sequence for MOR127-1 (NM_146989.1,906-924).
ccttaggaagctcatcaat

SEQ ID NO: 765931 - DNA, 19 bp, Mus musculus
  siRNA target sequence for MOR127-1 (NM_146989.1,907-925).
cttaggaagctcatcaata

SEQ ID NO: 765932 - DNA, 19 bp, Mus musculus
  siRNA target sequence for MOR127-1 (NM_146989.1,915-933).
gctcatcaataaaagtcat

SEQ ID NO: 765933 - DNA, 19 bp, Mus musculus
  siRNA target sequence for MOR127-1 (NM_146989.1,916-934).
ctcatcaataaaagtcatt

SEQ ID NO: 765934 - DNA, 19 bp, Mus musculus
  siRNA target sequence for MOR266-1 (NM_146990.1,32-50).
ctgggaccactgagtttgt

SEQ ID NO: 765935 - DNA, 19 bp, Mus musculus
  siRNA target sequence for MOR266-1 (NM_146990.1,65-83).
ccactgtccctgaattcca

SEQ ID NO: 765936 - DNA, 19 bp, Mus musculus
  siRNA target sequence for MOR266-1 (NM_146990.1,123-141).
gatcctctgtggtaatgca

SEQ ID NO: 765937 - DNA, 19 bp, Mus musculus
  siRNA target sequence for MOR266-1 (NM_146990.1,772-790).
ggttgctgcagccttgtat

SEQ ID NO: 765938 - DNA, 19 bp, Mus musculus
  siRNA target sequence for MOR266-1 (NM_146990.1,773-791).
gttgctgcagccttgtata

SEQ ID NO: 765939 - DNA, 19 bp, Mus musculus
  siRNA target sequence for MOR266-1 (NM_146990.1,924-942).
ctccatcttccataaagca

SEQ ID NO: 765940 - DNA, 19 bp, Mus musculus
  siRNA target sequence for MOR182-4 (NM_146991.1,796-814).
ggtaaacaaaaggataaaa

SEQ ID NO: 765941 - DNA, 19 bp, Mus musculus
  siRNA target sequence for MOR182-2 (NM_146994.1,205-223).
gctgactcatgcactacat

SEQ ID NO: 765942 - DNA, 19 bp, Mus musculus
  siRNA target sequence for MOR182-2 (NM_146994.1,227-245).
ctgtgactcccagaatgat

SEQ ID NO: 765943 - DNA, 19 bp, Mus musculus
  siRNA target sequence for MOR182-2 (NM_146994.1,233-251).
ctcccagaatgattctcaa

SEQ ID NO: 765944 - DNA, 19 bp, Mus musculus
  siRNA target sequence for MOR182-2 (NM_146994.1,506-524).
gcagatccaacattataca

SEQ ID NO: 765945 - DNA, 19 bp, Mus musculus
  siRNA target sequence for MOR182-2 (NM_146994.1,507-525).
cagatccaacattatacaa

SEQ ID NO: 765946 - DNA, 19 bp, Mus musculus
  siRNA target sequence for MOR182-2 (NM_146994.1,516-534).
cattatacaatattactat

SEQ ID NO: 765947 - DNA, 19 bp, Mus musculus
  siRNA target sequence for MOR182-2 (NM_146994.1,575-593).
caacaattaacgtgtttgt

SEQ ID NO: 765948 - DNA, 19 bp, Mus musculus
  siRNA target sequence for MOR182-2 (NM_146994.1,758-776).
gaactctttttctcattta

SEQ ID NO: 765949 - DNA, 19 bp, Mus musculus
  siRNA target sequence for MOR182-2 (NM_146994.1,886-904).
gaggttataagtgctttta

SEQ ID NO: 765950 - DNA, 19 bp, Mus musculus
  siRNA target sequence for MOR182-1 (NM_146995.1,335-353).
gtttcctcctgctagtgat

SEQ ID NO: 765951 - DNA, 19 bp, Mus musculus
  siRNA target sequence for MOR182-1 (NM_146995.1,429-447).
gtttatagtcgttacatat

SEQ ID NO: 765952 - DNA, 19 bp, Mus musculus
  siRNA target sequence for MOR182-1 (NM_146995.1,438-456).
cgttacatattttataggt

SEQ ID NO: 765953 - DNA, 19 bp, Mus musculus
  siRNA target sequence for MOR182-1 (NM_146995.1,455-473).
gtgttctgaattcaacaat

SEQ ID NO: 765954 - DNA, 19 bp, Mus musculus
  siRNA target sequence for MOR182-1 (NM_146995.1,478-496).
gtgggtttgctaattagat

SEQ ID NO: 765955 - DNA, 19 bp, Mus musculus
  siRNA target sequence for MOR182-1 (NM_146995.1,506-524).
gcaggtccaacgttataga

SEQ ID NO: 765956 - DNA, 19 bp, Mus musculus
  siRNA target sequence for MOR182-1 (NM_146995.1,509-527).
ggtccaacgttatagacta

SEQ ID NO: 765957 - DNA, 19 bp, Mus musculus
  siRNA target sequence for MOR182-1 (NM_146995.1,510-528).
gtccaacgttatagactat

SEQ ID NO: 765958 - DNA, 19 bp, Mus musculus
  siRNA target sequence for MOR182-1 (NM_146995.1,516-534).
cgttatagactatttctat

SEQ ID NO: 765959 - DNA, 19 bp, Mus musculus
  siRNA target sequence for MOR182-1 (NM_146995.1,517-535).
gttatagactatttctatt

SEQ ID NO: 765960 - DNA, 19 bp, Mus musculus
  siRNA target sequence for MOR182-1 (NM_146995.1,536-554).
gtgaaattgtaaaactact

SEQ ID NO: 765961 - DNA, 19 bp, Mus musculus
  siRNA target sequence for MOR182-1 (NM_146995.1,622-640).
gcctccacacttgcaaata

SEQ ID NO: 765962 - DNA, 19 bp, Mus musculus
  siRNA target sequence for MOR182-1 (NM_146995.1,623-641).
cctccacacttgcaaatat

SEQ ID NO: 765963 - DNA, 19 bp, Mus musculus
  siRNA target sequence for MOR182-1 (NM_146995.1,626-644).
ccacacttgcaaatattgt

SEQ ID NO: 765964 - DNA, 19 bp, Mus musculus
  siRNA target sequence for MOR182-1 (NM_146995.1,810-828).
ggaacaactgttatctata

SEQ ID NO: 765965 - DNA, 19 bp, Mus musculus
  siRNA target sequence for MOR182-1 (NM_146995.1,824-842).
ctatagtttacacaataat

SEQ ID NO: 765966 - DNA, 19 bp, Mus musculus
  siRNA target sequence for MOR182-1 (NM_146995.1,896-914).
gagctctaagaagactaat

SEQ ID NO: 765967 - DNA, 19 bp, Mus musculus
  siRNA target sequence for MOR184-7 (NM_146996.1,138-156).
gaccttgatctacatagaa

SEQ ID NO: 765968 - DNA, 19 bp, Mus musculus
  siRNA target sequence for MOR184-7 (NM_146996.1,908-926).
gagcaatgaagaaaagatt

SEQ ID NO: 765969 - DNA, 19 bp, Mus musculus
  siRNA target sequence for MOR184-3 (NM_147000.1,102-120).
ctatctgattaccatgata

SEQ ID NO: 765970 - DNA, 19 bp, Mus musculus
  siRNA target sequence for MOR184-3 (NM_147000.1,432-450).
gacgacgggagctttcata

SEQ ID NO: 765971 - DNA, 19 bp, Mus musculus
  siRNA target sequence for MOR184-2 (NM_147001.1,435-453).
cacgggagccttcatagtt

SEQ ID NO: 765972 - DNA, 19 bp, Mus musculus
  siRNA target sequence for MOR184-2 (NM_147001.1,582-600).
caatgagcttgtattgctt

SEQ ID NO: 765973 - DNA, 19 bp, Mus musculus
  siRNA target sequence for Olfr139 (NM_147003.1,29-47).
cagctgtcacggatttcat

SEQ ID NO: 765974 - DNA, 19 bp, Mus musculus
  siRNA target sequence for Olfr139 (NM_147003.1,55-73).
ggcttaacaggaaatgtaa

SEQ ID NO: 765975 - DNA, 19 bp, Mus musculus
  siRNA target sequence for Olfr139 (NM_147003.1,57-75).
cttaacaggaaatgtaaga

SEQ ID NO: 765976 - DNA, 19 bp, Mus musculus
  siRNA target sequence for Olfr139 (NM_147003.1,189-207).
ctacttcttggggaatcta

SEQ ID NO: 765977 - DNA, 19 bp, Mus musculus
  siRNA target sequence for Olfr139 (NM_147003.1,237-255).
cactgttcctccaatgctt

SEQ ID NO: 765978 - DNA, 19 bp, Mus musculus
  siRNA target sequence for Olfr139 (NM_147003.1,286-304).
ccctacgctgcctgcattt

SEQ ID NO: 765979 - DNA, 19 bp, Mus musculus
  siRNA target sequence for Olfr139 (NM_147003.1,288-306).
ctacgctgcctgcatttca

SEQ ID NO: 765980 - DNA, 19 bp, Mus musculus
  siRNA target sequence for Olfr139 (NM_147003.1,433-451).
ggcacactggtgggtattt

SEQ ID NO: 765981 - DNA, 19 bp, Mus musculus
  siRNA target sequence for Olfr139 (NM_147003.1,627-645).
gggagtagtccccatgata

SEQ ID NO: 765982 - DNA, 19 bp, Mus musculus
  siRNA target sequence for Olfr139 (NM_147003.1,629-647).
gagtagtccccatgatact

SEQ ID NO: 765983 - DNA, 19 bp, Mus musculus
  siRNA target sequence for Olfr139 (NM_147003.1,631-649).
gtagtccccatgatactta

SEQ ID NO: 765984 - DNA, 19 bp, Mus musculus
  siRNA target sequence for Olfr139 (NM_147003.1,669-687).
cgttgcagctgcagtacta

SEQ ID NO: 765985 - DNA, 19 bp, Mus musculus
  siRNA target sequence for Olfr139 (NM_147003.1,750-768).
ggtctgtatcttttatgga

SEQ ID NO: 765986 - DNA, 19 bp, Mus musculus
  siRNA target sequence for Olfr139 (NM_147003.1,767-785).
gaactggcttcttcagtta

SEQ ID NO: 765987 - DNA, 19 bp, Mus musculus
  siRNA target sequence for Olfr139 (NM_147003.1,882-900).
cctccggaacccagatgta

SEQ ID NO: 765988 - DNA, 19 bp, Mus musculus
  siRNA target sequence for MOR255-1 (NM_147004.1,9-27).
gggaaccttgggaaacgat

SEQ ID NO: 765989 - DNA, 19 bp, Mus musculus
  siRNA target sequence for MOR255-1 (NM_147004.1,10-28).
ggaaccttgggaaacgatt

SEQ ID NO: 765990 - DNA, 19 bp, Mus musculus
  siRNA target sequence for MOR255-1 (NM_147004.1,119-137).
ctacgcttggtggcaattt

SEQ ID NO: 765991 - DNA, 19 bp, Mus musculus
  siRNA target sequence for MOR255-1 (NM_147004.1,245-263).
ctgccatgttgaaacattt

SEQ ID NO: 765992 - DNA, 19 bp, Mus musculus
  siRNA target sequence for MOR255-1 (NM_147004.1,402-420).
ctacaacacccatatgagt

SEQ ID NO: 765993 - DNA, 19 bp, Mus musculus
  siRNA target sequence for MOR255-1 (NM_147004.1,459-477).
gttttcctttagtaatgca

SEQ ID NO: 765994 - DNA, 19 bp, Mus musculus
  siRNA target sequence for MOR255-1 (NM_147004.1,484-502).
caaactgttgccttatcta

SEQ ID NO: 765995 - DNA, 19 bp, Mus musculus
  siRNA target sequence for MOR255-1 (NM_147004.1,490-508).
gttgccttatctactctta

SEQ ID NO: 765996 - DNA, 19 bp, Mus musculus
  siRNA target sequence for MOR255-1 (NM_147004.1,634-652).
gtccccttggtcctcatta

SEQ ID NO: 765997 - DNA, 19 bp, Mus musculus
  siRNA target sequence for MOR255-1 (NM_147004.1,638-656).
ccttggtcctcattactgt

SEQ ID NO: 765998 - DNA, 19 bp, Mus musculus
  siRNA target sequence for MOR135-8 (NM_147007.1,407-425).
ctaaggtctgtacttttct

SEQ ID NO: 765999 - DNA, 19 bp, Mus musculus
  siRNA target sequence for MOR135-7 (NM_147008.1,414-432).
caagctctgtacttgtcta

SEQ ID NO: 766000 - DNA, 19 bp, Mus musculus
  siRNA target sequence for MOR135-7 (NM_147008.1,694-712).
caaggcatatacaaggtat

SEQ ID NO: 766001 - DNA, 19 bp, Mus musculus
  siRNA target sequence for MOR172-1 (NM_147010.1,10-28).
gagaactgtacagttgtta

SEQ ID NO: 766002 - DNA, 19 bp, Mus musculus
  siRNA target sequence for MOR172-1 (NM_147010.1,12-30).
gaactgtacagttgttact

SEQ ID NO: 766003 - DNA, 19 bp, Mus musculus
  siRNA target sequence for MOR172-1 (NM_147010.1,53-71).
ctgatcgtgctgaattgaa

SEQ ID NO: 766004 - DNA, 19 bp, Mus musculus
  siRNA target sequence for MOR172-1 (NM_147010.1,55-73).
gatcgtgctgaattgaaaa

SEQ ID NO: 766005 - DNA, 19 bp, Mus musculus
  siRNA target sequence for MOR172-1 (NM_147010.1,58-76).
cgtgctgaattgaaaatga

SEQ ID NO: 766006 - DNA, 19 bp, Mus musculus
  siRNA target sequence for MOR172-1 (NM_147010.1,59-77).
gtgctgaattgaaaatgat

SEQ ID NO: 766007 - DNA, 19 bp, Mus musculus
  siRNA target sequence for MOR172-1 (NM_147010.1,191-209).
gttgcctatcatttgtaga

SEQ ID NO: 766008 - DNA, 19 bp, Mus musculus
  siRNA target sequence for MOR172-1 (NM_147010.1,232-250).
gcaccaaaaatgttgatta

SEQ ID NO: 766009 - DNA, 19 bp, Mus musculus
  siRNA target sequence for MOR172-1 (NM_147010.1,251-269).
gtttcttggtagtaacaga

SEQ ID NO: 766010 - DNA, 19 bp, Mus musculus
  siRNA target sequence for MOR172-1 (NM_147010.1,286-304).
gcctgcatcatgcaacatt

SEQ ID NO: 766011 - DNA, 19 bp, Mus musculus
  siRNA target sequence for MOR172-1 (NM_147010.1,288-306).
ctgcatcatgcaacattta

SEQ ID NO: 766012 - DNA, 19 bp, Mus musculus
  siRNA target sequence for MOR172-1 (NM_147010.1,363-381).
ccgttatgtggcagttgtt

SEQ ID NO: 766013 - DNA, 19 bp, Mus musculus
  siRNA target sequence for MOR172-1 (NM_147010.1,364-382).
cgttatgtggcagttgtta

SEQ ID NO: 766014 - DNA, 19 bp, Mus musculus
  siRNA target sequence for MOR172-1 (NM_147010.1,365-383).
gttatgtggcagttgttaa

SEQ ID NO: 766015 - DNA, 19 bp, Mus musculus
  siRNA target sequence for MOR172-1 (NM_147010.1,379-397).
gttaacccattgctgtata

SEQ ID NO: 766016 - DNA, 19 bp, Mus musculus
  siRNA target sequence for MOR172-1 (NM_147010.1,410-428).
ctaagcaaaagtgtatcat

SEQ ID NO: 766017 - DNA, 19 bp, Mus musculus
  siRNA target sequence for MOR172-1 (NM_147010.1,475-493).
cacaccataagtttgagta

SEQ ID NO: 766018 - DNA, 19 bp, Mus musculus
  siRNA target sequence for MOR172-1 (NM_147010.1,571-589).
gatacctccatgaatgaat

SEQ ID NO: 766019 - DNA, 19 bp, Mus musculus
  siRNA target sequence for MOR172-1 (NM_147010.1,610-628).
ggagttatcgccattggta

SEQ ID NO: 766020 - DNA, 19 bp, Mus musculus
  siRNA target sequence for MOR172-1 (NM_147010.1,620-638).
ccattggtactctcttgat

SEQ ID NO: 766021 - DNA, 19 bp, Mus musculus
  siRNA target sequence for MOR172-1 (NM_147010.1,621-639).
cattggtactctcttgatt

SEQ ID NO: 766022 - DNA, 19 bp, Mus musculus
  siRNA target sequence for MOR172-1 (NM_147010.1,625-643).
ggtactctcttgattgtgt

SEQ ID NO: 766023 - DNA, 19 bp, Mus musculus
  siRNA target sequence for MOR172-1 (NM_147010.1,783-801).
gccaagctcccagtattct

SEQ ID NO: 766024 - DNA, 19 bp, Mus musculus
  siRNA target sequence for MOR172-1 (NM_147010.1,785-803).
caagctcccagtattctgt

SEQ ID NO: 766025 - DNA, 19 bp, Mus musculus
  siRNA target sequence for MOR188-3 (NM_147012.1,85-103).
ggactatttctcattatct

SEQ ID NO: 766026 - DNA, 19 bp, Mus musculus
  siRNA target sequence for MOR188-3 (NM_147012.1,189-207).
caaacatctggcgattaca

SEQ ID NO: 766027 - DNA, 19 bp, Mus musculus
  siRNA target sequence for MOR188-3 (NM_147012.1,402-420).
cattatgtcacaaaagtta

SEQ ID NO: 766028 - DNA, 19 bp, Mus musculus
  siRNA target sequence for MOR188-3 (NM_147012.1,435-453).
ggcaattccttatctttat

SEQ ID NO: 766029 - DNA, 19 bp, Mus musculus
  siRNA target sequence for MOR188-3 (NM_147012.1,436-454).
gcaattccttatctttatt

SEQ ID NO: 766030 - DNA, 19 bp, Mus musculus
  siRNA target sequence for MOR188-3 (NM_147012.1,469-487).
cttctagtcacagttaaga

SEQ ID NO: 766031 - DNA, 19 bp, Mus musculus
  siRNA target sequence for MOR188-3 (NM_147012.1,472-490).
ctagtcacagttaagattt

SEQ ID NO: 766032 - DNA, 19 bp, Mus musculus
  siRNA target sequence for MOR188-3 (NM_147012.1,569-587).
cagatacacatgacattga

SEQ ID NO: 766033 - DNA, 19 bp, Mus musculus
  siRNA target sequence for MOR180-1 (NM_147015.1,39-57).
ctttatgggcataactcaa

SEQ ID NO: 766034 - DNA, 19 bp, Mus musculus
  siRNA target sequence for MOR180-1 (NM_147015.1,111-129).
caatgtgatagggaatgtt

SEQ ID NO: 766035 - DNA, 19 bp, Mus musculus
  siRNA target sequence for MOR180-1 (NM_147015.1,135-153).
gatcatcctgatcataaca

SEQ ID NO: 766036 - DNA, 19 bp, Mus musculus
  siRNA target sequence for MOR180-1 (NM_147015.1,240-258).
gatgctggctgattttcta

SEQ ID NO: 766037 - DNA, 19 bp, Mus musculus
  siRNA target sequence for MOR180-1 (NM_147015.1,243-261).
gctggctgattttctaaca

SEQ ID NO: 766038 - DNA, 19 bp, Mus musculus
  siRNA target sequence for MOR180-1 (NM_147015.1,256-274).
ctaacaaagcacaaagtta

SEQ ID NO: 766039 - DNA, 19 bp, Mus musculus
  siRNA target sequence for MOR180-1 (NM_147015.1,430-448).
ctaatgctgggctcttact

SEQ ID NO: 766040 - DNA, 19 bp, Mus musculus
  siRNA target sequence for MOR180-1 (NM_147015.1,450-468).
cgctggcctagtgagttta

SEQ ID NO: 766041 - DNA, 19 bp, Mus musculus
  siRNA target sequence for MOR180-1 (NM_147015.1,567-585).
ctcagatacctacattagt

SEQ ID NO: 766042 - DNA, 19 bp, Mus musculus
  siRNA target sequence for MOR180-1 (NM_147015.1,626-644).
gcaccatccttatcatctt

SEQ ID NO: 766043 - DNA, 19 bp, Mus musculus
  siRNA target sequence for MOR180-1 (NM_147015.1,670-688).
gccatcatcagaattcgat

SEQ ID NO: 766044 - DNA, 19 bp, Mus musculus
  siRNA target sequence for MOR180-1 (NM_147015.1,700-718).
cggctaaaggctttttcca

SEQ ID NO: 766045 - DNA, 19 bp, Mus musculus
  siRNA target sequence for MOR185-2 (NM_147017.1,3-21).
ggctcctagaaatttatct

SEQ ID NO: 766046 - DNA, 19 bp, Mus musculus
  siRNA target sequence for MOR185-2 (NM_147017.1,5-23).
ctcctagaaatttatctca

SEQ ID NO: 766047 - DNA, 19 bp, Mus musculus
  siRNA target sequence for MOR185-2 (NM_147017.1,36-54).
cattcttgtcggtgtttca

SEQ ID NO: 766048 - DNA, 19 bp, Mus musculus
  siRNA target sequence for MOR185-2 (NM_147017.1,500-518).
cttattgctcctccaaaaa

SEQ ID NO: 766049 - DNA, 19 bp, Mus musculus
  siRNA target sequence for MOR185-2 (NM_147017.1,610-628).
gctacaaacctgttctttt

SEQ ID NO: 766050 - DNA, 19 bp, Mus musculus
  siRNA target sequence for MOR185-2 (NM_147017.1,635-653).
gtatagtgttggtatctta

SEQ ID NO: 766051 - DNA, 19 bp, Mus musculus
  siRNA target sequence for MOR185-2 (NM_147017.1,795-813).
ccactcactagatactgat

SEQ ID NO: 766052 - DNA, 19 bp, Mus musculus
  siRNA target sequence for MOR186-2 (NM_147018.1,24-42).
gctgaatgagttcatactt

SEQ ID NO: 766053 - DNA, 19 bp, Mus musculus
  siRNA target sequence for MOR186-2 (NM_147018.1,72-90).
ggctcccttttttgtacta

SEQ ID NO: 766054 - DNA, 19 bp, Mus musculus
  siRNA target sequence for MOR186-2 (NM_147018.1,74-92).
ctcccttttttgtactatt

SEQ ID NO: 766055 - DNA, 19 bp, Mus musculus
  siRNA target sequence for MOR186-2 (NM_147018.1,131-149).
gcatgattgtccttaccaa

SEQ ID NO: 766056 - DNA, 19 bp, Mus musculus
  siRNA target sequence for MOR186-2 (NM_147018.1,243-261).
gttggtaagctttgtaaca

SEQ ID NO: 766057 - DNA, 19 bp, Mus musculus
  siRNA target sequence for MOR186-2 (NM_147018.1,247-265).
gtaagctttgtaacaaata

SEQ ID NO: 766058 - DNA, 19 bp, Mus musculus
  siRNA target sequence for MOR186-2 (NM_147018.1,290-308).
gtgcattccagctatcttt

SEQ ID NO: 766059 - DNA, 19 bp, Mus musculus
  siRNA target sequence for MOR186-2 (NM_147018.1,298-316).
cagctatctttgttcatct

SEQ ID NO: 766060 - DNA, 19 bp, Mus musculus
  siRNA target sequence for MOR186-2 (NM_147018.1,318-336).
cttcatcattagtgagtta

SEQ ID NO: 766061 - DNA, 19 bp, Mus musculus
  siRNA target sequence for MOR186-2 (NM_147018.1,423-441).
ctgggtattggtgacaatt

SEQ ID NO: 766062 - DNA, 19 bp, Mus musculus
  siRNA target sequence for MOR186-2 (NM_147018.1,426-444).
ggtattggtgacaattcct

SEQ ID NO: 766063 - DNA, 19 bp, Mus musculus
  siRNA target sequence for MOR186-2 (NM_147018.1,427-445).
gtattggtgacaattcctt

SEQ ID NO: 766064 - DNA, 19 bp, Mus musculus
  siRNA target sequence for MOR186-2 (NM_147018.1,471-489).
gatcaccaccatcaaaatt

SEQ ID NO: 766065 - DNA, 19 bp, Mus musculus
  siRNA target sequence for MOR186-2 (NM_147018.1,538-556).
gacagtcttcccttactga

SEQ ID NO: 766066 - DNA, 19 bp, Mus musculus
  siRNA target sequence for MOR186-2 (NM_147018.1,606-624).
ctcggcatttaatttgatt

SEQ ID NO: 766067 - DNA, 19 bp, Mus musculus
  siRNA target sequence for MOR186-2 (NM_147018.1,621-639).
gatttcatccctttctgta

SEQ ID NO: 766068 - DNA, 19 bp, Mus musculus
  siRNA target sequence for MOR186-2 (NM_147018.1,640-658).
gttctcgtgtcctatacct

SEQ ID NO: 766069 - DNA, 19 bp, Mus musculus
  siRNA target sequence for MOR186-2 (NM_147018.1,643-661).
ctcgtgtcctataccttta

SEQ ID NO: 766070 - DNA, 19 bp, Mus musculus
  siRNA target sequence for MOR186-2 (NM_147018.1,732-750).
ccttacagtggtagttata

SEQ ID NO: 766071 - DNA, 19 bp, Mus musculus
  siRNA target sequence for MOR186-2 (NM_147018.1,791-809).
ctagccactcttttgagaa

SEQ ID NO: 766072 - DNA, 19 bp, Mus musculus
  siRNA target sequence for MOR186-2 (NM_147018.1,840-858).
ggtaattcctgtgctaaat

SEQ ID NO: 766073 - DNA, 19 bp, Mus musculus
  siRNA target sequence for MOR186-2 (NM_147018.1,889-907).
gtaaaaggtgcccttcaaa

SEQ ID NO: 766074 - DNA, 19 bp, Mus musculus
  siRNA target sequence for MOR188-1 (NM_147020.1,3-21).
ggagaaatataatcttaca

SEQ ID NO: 766075 - DNA, 19 bp, Mus musculus
  siRNA target sequence for MOR188-1 (NM_147020.1,4-22).
gagaaatataatcttacaa

SEQ ID NO: 766076 - DNA, 19 bp, Mus musculus
  siRNA target sequence for MOR188-1 (NM_147020.1,120-138).
cgataacttgggcatgata

SEQ ID NO: 766077 - DNA, 19 bp, Mus musculus
  siRNA target sequence for MOR188-1 (NM_147020.1,121-139).
gataacttgggcatgataa

SEQ ID NO: 766078 - DNA, 19 bp, Mus musculus
  siRNA target sequence for MOR188-1 (NM_147020.1,286-304).
gcctgtgctatccaatcat

SEQ ID NO: 766079 - DNA, 19 bp, Mus musculus
  siRNA target sequence for MOR188-1 (NM_147020.1,288-306).
ctgtgctatccaatcatct

SEQ ID NO: 766080 - DNA, 19 bp, Mus musculus
  siRNA target sequence for MOR188-1 (NM_147020.1,443-461).
cctatctctacagtataat

SEQ ID NO: 766081 - DNA, 19 bp, Mus musculus
  siRNA target sequence for MOR188-1 (NM_147020.1,448-466).
ctctacagtataattgtct

SEQ ID NO: 766082 - DNA, 19 bp, Mus musculus
  siRNA target sequence for MOR188-1 (NM_147020.1,463-481).
gtctcacttctagttaaca

SEQ ID NO: 766083 - DNA, 19 bp, Mus musculus
  siRNA target sequence for MOR188-1 (NM_147020.1,465-483).
ctcacttctagttaacata

SEQ ID NO: 766084 - DNA, 19 bp, Mus musculus
  siRNA target sequence for MOR188-1 (NM_147020.1,737-755).
cagttgtcatcgtctttta

SEQ ID NO: 766085 - DNA, 19 bp, Mus musculus
  siRNA target sequence for MOR186-1 (NM_147021.1,3-21).
ggatacgtacaatcttaca

SEQ ID NO: 766086 - DNA, 19 bp, Mus musculus
  siRNA target sequence for MOR186-1 (NM_147021.1,36-54).
cattctaaccggaatcaca

SEQ ID NO: 766087 - DNA, 19 bp, Mus musculus
  siRNA target sequence for MOR186-1 (NM_147021.1,86-104).
gactcttcctcattatata

SEQ ID NO: 766088 - DNA, 19 bp, Mus musculus
  siRNA target sequence for MOR186-1 (NM_147021.1,94-112).
ctcattatatacatgatct

SEQ ID NO: 766089 - DNA, 19 bp, Mus musculus
  siRNA target sequence for MOR186-1 (NM_147021.1,108-126).
gatctctgttgtaggtaat

SEQ ID NO: 766090 - DNA, 19 bp, Mus musculus
  siRNA target sequence for MOR186-1 (NM_147021.1,232-250).
gggcctaagatgttaataa

SEQ ID NO: 766091 - DNA, 19 bp, Mus musculus
  siRNA target sequence for MOR186-1 (NM_147021.1,233-251).
ggcctaagatgttaataaa

SEQ ID NO: 766092 - DNA, 19 bp, Mus musculus
  siRNA target sequence for MOR186-1 (NM_147021.1,259-277).
gctgatcaacctacaattt

SEQ ID NO: 766093 - DNA, 19 bp, Mus musculus
  siRNA target sequence for MOR186-1 (NM_147021.1,262-280).
gatcaacctacaatttcct

SEQ ID NO: 766094 - DNA, 19 bp, Mus musculus
  siRNA target sequence for MOR186-1 (NM_147021.1,305-323).
ccttcttcagcatatttat

SEQ ID NO: 766095 - DNA, 19 bp, Mus musculus
  siRNA target sequence for MOR186-1 (NM_147021.1,382-400).
catccactactgtacacaa

SEQ ID NO: 766096 - DNA, 19 bp, Mus musculus
  siRNA target sequence for MOR186-1 (NM_147021.1,385-403).
ccactactgtacacaatca

SEQ ID NO: 766097 - DNA, 19 bp, Mus musculus
  siRNA target sequence for MOR186-1 (NM_147021.1,388-406).
ctactgtacacaatcatca

SEQ ID NO: 766098 - DNA, 19 bp, Mus musculus
  siRNA target sequence for MOR186-1 (NM_147021.1,427-445).
gttctggtggcaatacctt

SEQ ID NO: 766099 - DNA, 19 bp, Mus musculus
  siRNA target sequence for MOR186-1 (NM_147021.1,436-454).
gcaataccttacctctata

SEQ ID NO: 766100 - DNA, 19 bp, Mus musculus
  siRNA target sequence for MOR186-1 (NM_147021.1,447-465).
cctctatagtgtttttata

SEQ ID NO: 766101 - DNA, 19 bp, Mus musculus
  siRNA target sequence for MOR186-1 (NM_147021.1,448-466).
ctctatagtgtttttatat

SEQ ID NO: 766102 - DNA, 19 bp, Mus musculus
  siRNA target sequence for MOR186-1 (NM_147021.1,473-491).
ggaccattatcaagatttt

SEQ ID NO: 766103 - DNA, 19 bp, Mus musculus
  siRNA target sequence for MOR186-1 (NM_147021.1,477-495).
cattatcaagattttcact

SEQ ID NO: 766104 - DNA, 19 bp, Mus musculus
  siRNA target sequence for MOR186-1 (NM_147021.1,538-556).
gacagtctgccgttgatat

SEQ ID NO: 766105 - DNA, 19 bp, Mus musculus
  siRNA target sequence for MOR186-1 (NM_147021.1,542-560).
gtctgccgttgatattgat

SEQ ID NO: 766106 - DNA, 19 bp, Mus musculus
  siRNA target sequence for MOR186-1 (NM_147021.1,546-564).
gccgttgatattgatgtta

SEQ ID NO: 766107 - DNA, 19 bp, Mus musculus
  siRNA target sequence for MOR186-1 (NM_147021.1,547-565).
ccgttgatattgatgttat

SEQ ID NO: 766108 - DNA, 19 bp, Mus musculus
  siRNA target sequence for MOR186-1 (NM_147021.1,634-652).
ctggtagtctccatatctt

SEQ ID NO: 766109 - DNA, 19 bp, Mus musculus
  siRNA target sequence for MOR186-1 (NM_147021.1,730-748).
catctgacagtgatagtta

SEQ ID NO: 766110 - DNA, 19 bp, Mus musculus
  siRNA target sequence for MOR186-1 (NM_147021.1,781-799).
caaccaaaatccattcact

SEQ ID NO: 766111 - DNA, 19 bp, Mus musculus
  siRNA target sequence for MOR186-1 (NM_147021.1,812-830).
gtcaagtcgcatctttgtt

SEQ ID NO: 766112 - DNA, 19 bp, Mus musculus
  siRNA target sequence for MOR186-1 (NM_147021.1,817-835).
gtcgcatctttgttctata

SEQ ID NO: 766113 - DNA, 19 bp, Mus musculus
  siRNA target sequence for MOR186-1 (NM_147021.1,819-837).
cgcatctttgttctataca

SEQ ID NO: 766114 - DNA, 19 bp, Mus musculus
  siRNA target sequence for MOR186-1 (NM_147021.1,891-909).
gaagcaggccttgaataga

SEQ ID NO: 766115 - DNA, 19 bp, Mus musculus
  siRNA target sequence for MOR135-3 (NM_147023.1,328-346).
ctagagaactttcttctta

SEQ ID NO: 766116 - DNA, 19 bp, Mus musculus
  siRNA target sequence for MOR135-3 (NM_147023.1,470-488).
cattgcacactgtacttat

SEQ ID NO: 766117 - DNA, 19 bp, Mus musculus
  siRNA target sequence for MOR135-3 (NM_147023.1,474-492).
gcacactgtacttattgtt

SEQ ID NO: 766118 - DNA, 19 bp, Mus musculus
  siRNA target sequence for MOR135-3 (NM_147023.1,477-495).
cactgtacttattgttaaa

SEQ ID NO: 766119 - DNA, 19 bp, Mus musculus
  siRNA target sequence for MOR135-3 (NM_147023.1,586-604).
gagctaacgatatttatca

SEQ ID NO: 766120 - DNA, 19 bp, Mus musculus
  siRNA target sequence for MOR135-3 (NM_147023.1,605-623).
cgggagcattcattattgt

SEQ ID NO: 766121 - DNA, 19 bp, Mus musculus
  siRNA target sequence for MOR135-3 (NM_147023.1,694-712).
cggggaatagccaagatct

SEQ ID NO: 766122 - DNA, 19 bp, Mus musculus
  siRNA target sequence for MOR264-3 (NM_147028.1,28-46).
ggaaatctaaccaatctga

SEQ ID NO: 766123 - DNA, 19 bp, Mus musculus
  siRNA target sequence for MOR264-3 (NM_147028.1,34-52).
ctaaccaatctgaaggaat

SEQ ID NO: 766124 - DNA, 19 bp, Mus musculus
  siRNA target sequence for MOR264-3 (NM_147028.1,82-100).
gatctccagtgggttctat

SEQ ID NO: 766125 - DNA, 19 bp, Mus musculus
  siRNA target sequence for MOR264-3 (NM_147028.1,120-138).
gtattgtttcatcctatta

SEQ ID NO: 766126 - DNA, 19 bp, Mus musculus
  siRNA target sequence for MOR264-3 (NM_147028.1,147-165).
caccattgtactaatcaca

SEQ ID NO: 766127 - DNA, 19 bp, Mus musculus
  siRNA target sequence for MOR264-3 (NM_147028.1,228-246).
gatatgttatgtatcaatt

SEQ ID NO: 766128 - DNA, 19 bp, Mus musculus
  siRNA target sequence for MOR264-3 (NM_147028.1,242-260).
caattactcttccaagaat

SEQ ID NO: 766129 - DNA, 19 bp, Mus musculus
  siRNA target sequence for MOR264-3 (NM_147028.1,264-282).
cttcaaccttggaacacaa

SEQ ID NO: 766130 - DNA, 19 bp, Mus musculus
  siRNA target sequence for MOR264-3 (NM_147028.1,405-423).
cctgcattatcctctagtt

SEQ ID NO: 766131 - DNA, 19 bp, Mus musculus
  siRNA target sequence for MOR264-3 (NM_147028.1,406-424).
ctgcattatcctctagtta

SEQ ID NO: 766132 - DNA, 19 bp, Mus musculus
  siRNA target sequence for MOR264-3 (NM_147028.1,409-427).
cattatcctctagttatga

SEQ ID NO: 766133 - DNA, 19 bp, Mus musculus
  siRNA target sequence for MOR264-3 (NM_147028.1,416-434).
ctctagttatgaaccaaaa

SEQ ID NO: 766134 - DNA, 19 bp, Mus musculus
  siRNA target sequence for MOR264-3 (NM_147028.1,451-469).
gtgattggctcctggataa

SEQ ID NO: 766135 - DNA, 19 bp, Mus musculus
  siRNA target sequence for MOR264-3 (NM_147028.1,453-471).
gattggctcctggataagt

SEQ ID NO: 766136 - DNA, 19 bp, Mus musculus
  siRNA target sequence for MOR264-3 (NM_147028.1,821-839).
gtgagacagataaagttct

SEQ ID NO: 766137 - DNA, 19 bp, Mus musculus
  siRNA target sequence for MOR264-3 (NM_147028.1,855-873).
cgttgtgactcctatgttt

SEQ ID NO: 766138 - DNA, 19 bp, Mus musculus
  siRNA target sequence for MOR264-3 (NM_147028.1,879-897).
catggtatacagtctaaga

SEQ ID NO: 766139 - DNA, 19 bp, Mus musculus
  siRNA target sequence for MOR264-3 (NM_147028.1,900-918).
caaggatgtcacaatagca

SEQ ID NO: 766140 - DNA, 19 bp, Mus musculus
  siRNA target sequence for MOR264-1 (NM_147031.1,54-72).
catttcaattacagaattt

SEQ ID NO: 766141 - DNA, 19 bp, Mus musculus
  siRNA target sequence for MOR264-1 (NM_147031.1,110-128).
ggatgctttttgggatatt

SEQ ID NO: 766142 - DNA, 19 bp, Mus musculus
  siRNA target sequence for MOR264-1 (NM_147031.1,158-176).
gcaacagcattataatgtt

SEQ ID NO: 766143 - DNA, 19 bp, Mus musculus
  siRNA target sequence for MOR264-1 (NM_147031.1,159-177).
caacagcattataatgtta

SEQ ID NO: 766144 - DNA, 19 bp, Mus musculus
  siRNA target sequence for MOR264-1 (NM_147031.1,162-180).
cagcattataatgttaata

SEQ ID NO: 766145 - DNA, 19 bp, Mus musculus
  siRNA target sequence for MOR264-1 (NM_147031.1,165-183).
cattataatgttaataaca

SEQ ID NO: 766146 - DNA, 19 bp, Mus musculus
  siRNA target sequence for MOR264-1 (NM_147031.1,475-493).
gcttgctggatctgcatta

SEQ ID NO: 766147 - DNA, 19 bp, Mus musculus
  siRNA target sequence for MOR264-1 (NM_147031.1,499-517).
gttgtgactggacaaactt

SEQ ID NO: 766148 - DNA, 19 bp, Mus musculus
  siRNA target sequence for MOR264-1 (NM_147031.1,630-648).
catctatattgcttcagta

SEQ ID NO: 766149 - DNA, 19 bp, Mus musculus
  siRNA target sequence for MOR264-1 (NM_147031.1,640-658).
gcttcagtagtgtttatca

SEQ ID NO: 766150 - DNA, 19 bp, Mus musculus
  siRNA target sequence for MOR264-1 (NM_147031.1,641-659).
cttcagtagtgtttatcat

SEQ ID NO: 766151 - DNA, 19 bp, Mus musculus
  siRNA target sequence for MOR264-1 (NM_147031.1,663-681).
cccatttctgttaatcctt

SEQ ID NO: 766152 - DNA, 19 bp, Mus musculus
  siRNA target sequence for MOR264-1 (NM_147031.1,815-833).
cacaaccaaaagcatatca

SEQ ID NO: 766153 - DNA, 19 bp, Mus musculus
  siRNA target sequence for MOR264-1 (NM_147031.1,827-845).
catatcagtcggaaacctt

SEQ ID NO: 766154 - DNA, 19 bp, Mus musculus
  siRNA target sequence for MOR264-1 (NM_147031.1,930-948).
ggtagcattgagaaaatta

SEQ ID NO: 766155 - DNA, 19 bp, Mus musculus
  siRNA target sequence for MOR264-1 (NM_147031.1,949-967).
caaactaagttatcaacat

SEQ ID NO: 766156 - DNA, 19 bp, Mus musculus
  siRNA target sequence for MOR283-2 (NM_147032.1,493-511).
cagtattcctattgcaaat

SEQ ID NO: 766157 - DNA, 19 bp, Mus musculus
  siRNA target sequence for MOR283-2 (NM_147032.1,889-907).
gtcactggagctttaataa

SEQ ID NO: 766158 - DNA, 19 bp, Mus musculus
  siRNA target sequence for MOR283-2 (NM_147032.1,908-926).
gggttctgggaaggtatat

SEQ ID NO: 766159 - DNA, 19 bp, Mus musculus
  siRNA target sequence for MOR263-2 (NM_147033.1,927-945).
cctggccctcagaaaattt

SEQ ID NO: 766160 - DNA, 19 bp, Mus musculus
  siRNA target sequence for MOR263-1 (NM_147034.1,435-453).
ccaagagacacgtgtcaaa

SEQ ID NO: 766161 - DNA, 19 bp, Mus musculus
  siRNA target sequence for MOR263-1 (NM_147034.1,948-966).
cctggccctcagaaaccat

SEQ ID NO: 766162 - DNA, 19 bp, Mus musculus
  siRNA target sequence for MOR263-1 (NM_147034.1,952-970).
gccctcagaaaccatatca

SEQ ID NO: 766163 - DNA, 19 bp, Mus musculus
  siRNA target sequence for MOR160-1 (NM_147036.1,17-35).
cggtccccgagtttatcct

SEQ ID NO: 766164 - DNA, 19 bp, Mus musculus
  siRNA target sequence for MOR160-1 (NM_147036.1,474-492).
ccttgtcgctttgaattta

SEQ ID NO: 766165 - DNA, 19 bp, Mus musculus
  siRNA target sequence for MOR160-1 (NM_147036.1,565-583).
gatgtgtctgcgagcttta

SEQ ID NO: 766166 - DNA, 19 bp, Mus musculus
  siRNA target sequence for MOR160-1 (NM_147036.1,729-747).
cacggccgtcagcttcttt

SEQ ID NO: 766167 - DNA, 19 bp, Mus musculus
  siRNA target sequence for MOR160-1 (NM_147036.1,731-749).
cggccgtcagcttctttta

SEQ ID NO: 766168 - DNA, 19 bp, Mus musculus
  siRNA target sequence for MOR160-1 (NM_147036.1,766-784).
cgctacctcatgccaaatt

SEQ ID NO: 766169 - DNA, 19 bp, Mus musculus
  siRNA target sequence for MOR160-1 (NM_147036.1,893-911).
gaagaacggtcacgaaata

SEQ ID NO: 766170 - DNA, 19 bp, Mus musculus
  siRNA target sequence for MOR160-1 (NM_147036.1,899-917).
cggtcacgaaatatttgca

SEQ ID NO: 766171 - DNA, 19 bp, Mus musculus
  siRNA target sequence for MOR208-1 (NM_147037.1,333-351).
ctcccttctggttacaact

SEQ ID NO: 766172 - DNA, 19 bp, Mus musculus
  siRNA target sequence for MOR208-1 (NM_147037.1,336-354).
ccttctggttacaactgaa

SEQ ID NO: 766173 - DNA, 19 bp, Mus musculus
  siRNA target sequence for MOR208-1 (NM_147037.1,451-469).
ctagtcctgggcacatact

SEQ ID NO: 766174 - DNA, 19 bp, Mus musculus
  siRNA target sequence for MOR208-1 (NM_147037.1,594-612).
cacaactctcaatgagttt

SEQ ID NO: 766175 - DNA, 19 bp, Mus musculus
  siRNA target sequence for MOR208-1 (NM_147037.1,596-614).
caactctcaatgagtttgt

SEQ ID NO: 766176 - DNA, 19 bp, Mus musculus
  siRNA target sequence for MOR103-3 (NM_147038.1,59-77).
cccctgagctgcaatacct

SEQ ID NO: 766177 - DNA, 19 bp, Mus musculus
  siRNA target sequence for MOR103-3 (NM_147038.1,271-289).
cgcatctctttcattggat

SEQ ID NO: 766178 - DNA, 19 bp, Mus musculus
  siRNA target sequence for MOR103-3 (NM_147038.1,781-799).
cgaccccaggccattgata

SEQ ID NO: 766179 - DNA, 19 bp, Mus musculus
  siRNA target sequence for MOR103-3 (NM_147038.1,840-858).
cctcacgcccatgatgaat

SEQ ID NO: 766180 - DNA, 19 bp, Mus musculus
  siRNA target sequence for MOR103-3 (NM_147038.1,874-892).
ctgaggaatactgaattta

SEQ ID NO: 766181 - DNA, 19 bp, Mus musculus
  siRNA target sequence for MOR103-3 (NM_147038.1,878-896).
ggaatactgaatttaagga

SEQ ID NO: 766182 - DNA, 19 bp, Mus musculus
  siRNA target sequence for MOR40-2 (NM_147044.1,125-143).
ccatgggggctaatgctat

SEQ ID NO: 766183 - DNA, 19 bp, Mus musculus
  siRNA target sequence for MOR40-2 (NM_147044.1,129-147).
gggggctaatgctattctt

SEQ ID NO: 766184 - DNA, 19 bp, Mus musculus
  siRNA target sequence for MOR40-2 (NM_147044.1,131-149).
gggctaatgctattcttct

SEQ ID NO: 766185 - DNA, 19 bp, Mus musculus
  siRNA target sequence for MOR40-2 (NM_147044.1,299-317).
cctgtttcctccaaatgta

SEQ ID NO: 766186 - DNA, 19 bp, Mus musculus
  siRNA target sequence for MOR40-2 (NM_147044.1,310-328).
caaatgtatatcatgaaca

SEQ ID NO: 766187 - DNA, 19 bp, Mus musculus
  siRNA target sequence for MOR40-2 (NM_147044.1,366-384).
ggccttcgatcgctatata

SEQ ID NO: 766188 - DNA, 19 bp, Mus musculus
  siRNA target sequence for MOR40-2 (NM_147044.1,394-412).
cacccactgagatatccat

SEQ ID NO: 766189 - DNA, 19 bp, Mus musculus
  siRNA target sequence for MOR40-2 (NM_147044.1,459-477).
ggtcaggaatgtccttatt

SEQ ID NO: 766190 - DNA, 19 bp, Mus musculus
  siRNA target sequence for MOR40-2 (NM_147044.1,460-478).
gtcaggaatgtccttatta

SEQ ID NO: 766191 - DNA, 19 bp, Mus musculus
  siRNA target sequence for MOR40-2 (NM_147044.1,462-480).
caggaatgtccttattact

SEQ ID NO: 766192 - DNA, 19 bp, Mus musculus
  siRNA target sequence for MOR40-2 (NM_147044.1,464-482).
ggaatgtccttattacttt

SEQ ID NO: 766193 - DNA, 19 bp, Mus musculus
  siRNA target sequence for MOR40-2 (NM_147044.1,562-580).
gtctctagactctcttgta

SEQ ID NO: 766194 - DNA, 19 bp, Mus musculus
  siRNA target sequence for MOR40-2 (NM_147044.1,564-582).
ctctagactctcttgtaat

SEQ ID NO: 766195 - DNA, 19 bp, Mus musculus
  siRNA target sequence for MOR40-2 (NM_147044.1,566-584).
ctagactctcttgtaatga

SEQ ID NO: 766196 - DNA, 19 bp, Mus musculus
  siRNA target sequence for MOR40-2 (NM_147044.1,573-591).
ctcttgtaatgatgtcaat

SEQ ID NO: 766197 - DNA, 19 bp, Mus musculus
  siRNA target sequence for MOR40-2 (NM_147044.1,575-593).
cttgtaatgatgtcaatgt

SEQ ID NO: 766198 - DNA, 19 bp, Mus musculus
  siRNA target sequence for MOR40-2 (NM_147044.1,592-610).
gtcaaccgtctttatcagt

SEQ ID NO: 766199 - DNA, 19 bp, Mus musculus
  siRNA target sequence for MOR40-2 (NM_147044.1,594-612).
caaccgtctttatcagttt

SEQ ID NO: 766200 - DNA, 19 bp, Mus musculus
  siRNA target sequence for MOR40-2 (NM_147044.1,598-616).
cgtctttatcagtttgcta

SEQ ID NO: 766201 - DNA, 19 bp, Mus musculus
  siRNA target sequence for MOR40-2 (NM_147044.1,657-675).
cctctcttatacccttata

SEQ ID NO: 766202 - DNA, 19 bp, Mus musculus
  siRNA target sequence for MOR40-2 (NM_147044.1,660-678).
ctcttatacccttatacta

SEQ ID NO: 766203 - DNA, 19 bp, Mus musculus
  siRNA target sequence for MOR40-2 (NM_147044.1,742-760).
cacttcatccttattctgt

SEQ ID NO: 766204 - DNA, 19 bp, Mus musculus
  siRNA target sequence for MOR40-2 (NM_147044.1,770-788).
ccatccttttggtttttat

SEQ ID NO: 766205 - DNA, 19 bp, Mus musculus
  siRNA target sequence for MOR39-1 (NM_147046.1,5-23).
cttcatgtaataattccat

SEQ ID NO: 766206 - DNA, 19 bp, Mus musculus
  siRNA target sequence for MOR39-1 (NM_147046.1,21-39).
cattcctcagcccttgata

SEQ ID NO: 766207 - DNA, 19 bp, Mus musculus
  siRNA target sequence for MOR39-1 (NM_147046.1,25-43).
cctcagcccttgatattca

SEQ ID NO: 766208 - DNA, 19 bp, Mus musculus
  siRNA target sequence for MOR39-1 (NM_147046.1,74-92).
cccatggatggttctctat

SEQ ID NO: 766209 - DNA, 19 bp, Mus musculus
  siRNA target sequence for MOR39-1 (NM_147046.1,75-93).
ccatggatggttctctata

SEQ ID NO: 766210 - DNA, 19 bp, Mus musculus
  siRNA target sequence for MOR39-1 (NM_147046.1,133-151).
gtcaccattttacatatca

SEQ ID NO: 766211 - DNA, 19 bp, Mus musculus
  siRNA target sequence for MOR39-1 (NM_147046.1,243-261).
ccgaatgctaggaatcttt

SEQ ID NO: 766212 - DNA, 19 bp, Mus musculus
  siRNA target sequence for MOR39-1 (NM_147046.1,244-262).
cgaatgctaggaatctttt

SEQ ID NO: 766213 - DNA, 19 bp, Mus musculus
  siRNA target sequence for MOR39-1 (NM_147046.1,474-492).
cacccctgcaccaatccta

SEQ ID NO: 766214 - DNA, 19 bp, Mus musculus
  siRNA target sequence for MOR39-1 (NM_147046.1,479-497).
ctgcaccaatcctaactaa

SEQ ID NO: 766215 - DNA, 19 bp, Mus musculus
  siRNA target sequence for MOR39-1 (NM_147046.1,481-499).
gcaccaatcctaactaaaa

SEQ ID NO: 766216 - DNA, 19 bp, Mus musculus
  siRNA target sequence for MOR39-1 (NM_147046.1,489-507).
cctaactaaaagattggaa

SEQ ID NO: 766217 - DNA, 19 bp, Mus musculus
  siRNA target sequence for MOR39-1 (NM_147046.1,514-532).
caaacccaggtcattagtt

SEQ ID NO: 766218 - DNA, 19 bp, Mus musculus
  siRNA target sequence for MOR39-1 (NM_147046.1,545-563).
cgtacatggctgtagtgat

SEQ ID NO: 766219 - DNA, 19 bp, Mus musculus
  siRNA target sequence for MOR39-1 (NM_147046.1,553-571).
gctgtagtgatgattgctt

SEQ ID NO: 766220 - DNA, 19 bp, Mus musculus
  siRNA target sequence for MOR39-1 (NM_147046.1,582-600).
ctccaaccacattgtctat

SEQ ID NO: 766221 - DNA, 19 bp, Mus musculus
  siRNA target sequence for MOR39-1 (NM_147046.1,620-638).
catctgtggggattgatct

SEQ ID NO: 766222 - DNA, 19 bp, Mus musculus
  siRNA target sequence for MOR39-1 (NM_147046.1,651-669).
cctgtcgtatacactgatt

SEQ ID NO: 766223 - DNA, 19 bp, Mus musculus
  siRNA target sequence for MOR39-1 (NM_147046.1,654-672).
gtcgtatacactgattctt

SEQ ID NO: 766224 - DNA, 19 bp, Mus musculus
  siRNA target sequence for MOR39-1 (NM_147046.1,670-688).
cttcgtgctgtctttcata

SEQ ID NO: 766225 - DNA, 19 bp, Mus musculus
  siRNA target sequence for MOR39-1 (NM_147046.1,810-828).
ggctccctacttacagatt

SEQ ID NO: 766226 - DNA, 19 bp, Mus musculus
  siRNA target sequence for MOR39-1 (NM_147046.1,811-829).
gctccctacttacagatta

SEQ ID NO: 766227 - DNA, 19 bp, Mus musculus
  siRNA target sequence for MOR39-1 (NM_147046.1,812-830).
ctccctacttacagattat

SEQ ID NO: 766228 - DNA, 19 bp, Mus musculus
  siRNA target sequence for MOR39-1 (NM_147046.1,814-832).
ccctacttacagattataa

SEQ ID NO: 766229 - DNA, 19 bp, Mus musculus
  siRNA target sequence for MOR39-1 (NM_147046.1,825-843).
gattataattgacaattta

SEQ ID NO: 766230 - DNA, 19 bp, Mus musculus
  siRNA target sequence for MOR39-1 (NM_147046.1,910-928).
cgggtattgcggatattga

SEQ ID NO: 766231 - DNA, 19 bp, Mus musculus
  siRNA target sequence for MOR39-1 (NM_147046.1,911-929).
gggtattgcggatattgaa

SEQ ID NO: 766232 - DNA, 19 bp, Mus musculus
  siRNA target sequence for MOR39-1 (NM_147046.1,913-931).
gtattgcggatattgaact

SEQ ID NO: 766233 - DNA, 19 bp, Mus musculus
  siRNA target sequence for MOR31-9 (NM_147047.1,131-149).
gcaataccctattaatatt

SEQ ID NO: 766234 - DNA, 19 bp, Mus musculus
  siRNA target sequence for MOR31-9 (NM_147047.1,233-251).
cagtgaccacgccaaaagt

SEQ ID NO: 766235 - DNA, 19 bp, Mus musculus
  siRNA target sequence for MOR31-9 (NM_147047.1,363-381).
ggcaattgaccgttatata

SEQ ID NO: 766236 - DNA, 19 bp, Mus musculus
  siRNA target sequence for MOR31-9 (NM_147047.1,397-415).
ctaagatatactaccattt

SEQ ID NO: 766237 - DNA, 19 bp, Mus musculus
  siRNA target sequence for MOR31-9 (NM_147047.1,411-429).
cattttaaccccttcagta

SEQ ID NO: 766238 - DNA, 19 bp, Mus musculus
  siRNA target sequence for MOR31-9 (NM_147047.1,458-476).
ctagaagcttcttaatcat

SEQ ID NO: 766239 - DNA, 19 bp, Mus musculus
  siRNA target sequence for MOR31-9 (NM_147047.1,486-504).
ggtctttctagtttatcga

SEQ ID NO: 766240 - DNA, 19 bp, Mus musculus
  siRNA target sequence for MOR31-9 (NM_147047.1,493-511).
ctagtttatcgactcaatt

SEQ ID NO: 766241 - DNA, 19 bp, Mus musculus
  siRNA target sequence for MOR31-9 (NM_147047.1,496-514).
gtttatcgactcaattatt

SEQ ID NO: 766242 - DNA, 19 bp, Mus musculus
  siRNA target sequence for MOR31-9 (NM_147047.1,632-650).
gcctagacattatgcttat

SEQ ID NO: 766243 - DNA, 19 bp, Mus musculus
  siRNA target sequence for MOR31-9 (NM_147047.1,634-652).
ctagacattatgcttatca

SEQ ID NO: 766244 - DNA, 19 bp, Mus musculus
  siRNA target sequence for MOR31-9 (NM_147047.1,654-672).
catctcctacacccttata

SEQ ID NO: 766245 - DNA, 19 bp, Mus musculus
  siRNA target sequence for MOR31-9 (NM_147047.1,657-675).
ctcctacacccttatactt

SEQ ID NO: 766246 - DNA, 19 bp, Mus musculus
  siRNA target sequence for MOR31-9 (NM_147047.1,868-886).
gcactcaaccctatcatat

SEQ ID NO: 766247 - DNA, 19 bp, Mus musculus
  siRNA target sequence for MOR31-9 (NM_147047.1,869-887).
cactcaaccctatcatata

SEQ ID NO: 766248 - DNA, 19 bp, Mus musculus
  siRNA target sequence for MOR31-9 (NM_147047.1,904-922).
caaattcaagacaggtttt

SEQ ID NO: 766249 - DNA, 19 bp, Mus musculus
  siRNA target sequence for MOR31-9 (NM_147047.1,918-936).
gtttttccagctgttttct

SEQ ID NO: 766250 - DNA, 19 bp, Mus musculus
  siRNA target sequence for MOR31-8 (NM_147048.1,32-50).
gcttcaatccaggattttt

SEQ ID NO: 766251 - DNA, 19 bp, Mus musculus
  siRNA target sequence for MOR31-8 (NM_147048.1,97-115).
gggatccccttctttatta

SEQ ID NO: 766252 - DNA, 19 bp, Mus musculus
  siRNA target sequence for MOR31-8 (NM_147048.1,148-166).
ctactctacctcattttta

SEQ ID NO: 766253 - DNA, 19 bp, Mus musculus
  siRNA target sequence for MOR31-8 (NM_147048.1,226-244).
ctcatcctgtgtaatactt

SEQ ID NO: 766254 - DNA, 19 bp, Mus musculus
  siRNA target sequence for MOR31-8 (NM_147048.1,272-290).
ggctgggtcctcagcatat

SEQ ID NO: 766255 - DNA, 19 bp, Mus musculus
  siRNA target sequence for MOR31-8 (NM_147048.1,276-294).
gggtcctcagcatatcaca

SEQ ID NO: 766256 - DNA, 19 bp, Mus musculus
  siRNA target sequence for MOR31-8 (NM_147048.1,277-295).
ggtcctcagcatatcacat

SEQ ID NO: 766257 - DNA, 19 bp, Mus musculus
  siRNA target sequence for MOR31-8 (NM_147048.1,278-296).
gtcctcagcatatcacatt

SEQ ID NO: 766258 - DNA, 19 bp, Mus musculus
  siRNA target sequence for MOR31-8 (NM_147048.1,325-343).
ctccacttcagctttgcta

SEQ ID NO: 766259 - DNA, 19 bp, Mus musculus
  siRNA target sequence for MOR31-8 (NM_147048.1,350-368).
ctgctatcctgctgtctat

SEQ ID NO: 766260 - DNA, 19 bp, Mus musculus
  siRNA target sequence for MOR31-8 (NM_147048.1,417-435).
catcctcacccatcagatt

SEQ ID NO: 766261 - DNA, 19 bp, Mus musculus
  siRNA target sequence for MOR31-8 (NM_147048.1,421-439).
ctcacccatcagattgtta

SEQ ID NO: 766262 - DNA, 19 bp, Mus musculus
  siRNA target sequence for MOR31-8 (NM_147048.1,423-441).
cacccatcagattgttatt

SEQ ID NO: 766263 - DNA, 19 bp, Mus musculus
  siRNA target sequence for MOR31-8 (NM_147048.1,427-445).
catcagattgttattaaga

SEQ ID NO: 766264 - DNA, 19 bp, Mus musculus
  siRNA target sequence for MOR31-8 (NM_147048.1,464-482).
gcaggagcttttgtatcat

SEQ ID NO: 766265 - DNA, 19 bp, Mus musculus
  siRNA target sequence for MOR31-8 (NM_147048.1,610-628).
ggctttgcagtaccaataa

SEQ ID NO: 766266 - DNA, 19 bp, Mus musculus
  siRNA target sequence for MOR31-8 (NM_147048.1,611-629).
gctttgcagtaccaataat

SEQ ID NO: 766267 - DNA, 19 bp, Mus musculus
  siRNA target sequence for MOR31-8 (NM_147048.1,632-650).
ctgtcatgtcagatctgat

SEQ ID NO: 766268 - DNA, 19 bp, Mus musculus
  siRNA target sequence for MOR31-8 (NM_147048.1,639-657).
gtcagatctgatcttgatt

SEQ ID NO: 766269 - DNA, 19 bp, Mus musculus
  siRNA target sequence for MOR31-8 (NM_147048.1,788-806).
ctgtccttgtccatcgttt

SEQ ID NO: 766270 - DNA, 19 bp, Mus musculus
  siRNA target sequence for MOR31-8 (NM_147048.1,907-925).
cagattcgggacaaaatca

SEQ ID NO: 766271 - DNA, 19 bp, Mus musculus
  siRNA target sequence for MOR34-4 (NM_147050.1,24-42).
ggtgaccccagtctcattt

SEQ ID NO: 766272 - DNA, 19 bp, Mus musculus
  siRNA target sequence for MOR34-4 (NM_147050.1,25-43).
gtgaccccagtctcattta

SEQ ID NO: 766273 - DNA, 19 bp, Mus musculus
  siRNA target sequence for MOR34-4 (NM_147050.1,31-49).
ccagtctcatttattctga

SEQ ID NO: 766274 - DNA, 19 bp, Mus musculus
  siRNA target sequence for MOR34-4 (NM_147050.1,167-185).
gccttcacaggtcaatgta

SEQ ID NO: 766275 - DNA, 19 bp, Mus musculus
  siRNA target sequence for MOR34-4 (NM_147050.1,176-194).
ggtcaatgtactacttctt

SEQ ID NO: 766276 - DNA, 19 bp, Mus musculus
  siRNA target sequence for MOR34-4 (NM_147050.1,233-251).
cttcaatacccaaaactct

SEQ ID NO: 766277 - DNA, 19 bp, Mus musculus
  siRNA target sequence for MOR34-4 (NM_147050.1,261-279).
ctggttctacattaaggaa

SEQ ID NO: 766278 - DNA, 19 bp, Mus musculus
  siRNA target sequence for MOR34-4 (NM_147050.1,263-281).
ggttctacattaaggaaat

SEQ ID NO: 766279 - DNA, 19 bp, Mus musculus
  siRNA target sequence for MOR34-4 (NM_147050.1,264-282).
gttctacattaaggaaatt

SEQ ID NO: 766280 - DNA, 19 bp, Mus musculus
  siRNA target sequence for MOR34-4 (NM_147050.1,277-295).
gaaattagctttactgatt

SEQ ID NO: 766281 - DNA, 19 bp, Mus musculus
  siRNA target sequence for MOR34-4 (NM_147050.1,436-454).
gctggccttgctacattct

SEQ ID NO: 766282 - DNA, 19 bp, Mus musculus
  siRNA target sequence for MOR34-4 (NM_147050.1,439-457).
ggccttgctacattcttga

SEQ ID NO: 766283 - DNA, 19 bp, Mus musculus
  siRNA target sequence for MOR34-4 (NM_147050.1,512-530).
gcagaagcaatatattaat

SEQ ID NO: 766284 - DNA, 19 bp, Mus musculus
  siRNA target sequence for MOR34-4 (NM_147050.1,926-944).
ggatcttttcaggttctaa

SEQ ID NO: 766285 - DNA, 19 bp, Mus musculus
  siRNA target sequence for MOR158-1 (NM_147051.1,10-28).
gccccgaatgcttcacatt

SEQ ID NO: 766286 - DNA, 19 bp, Mus musculus
  siRNA target sequence for MOR158-1 (NM_147051.1,12-30).
cccgaatgcttcacattct

SEQ ID NO: 766287 - DNA, 19 bp, Mus musculus
  siRNA target sequence for MOR158-1 (NM_147051.1,20-38).
cttcacattctccaatctt

SEQ ID NO: 766288 - DNA, 19 bp, Mus musculus
  siRNA target sequence for MOR158-1 (NM_147051.1,173-191).
cacctatgtattatctctt

SEQ ID NO: 766289 - DNA, 19 bp, Mus musculus
  siRNA target sequence for MOR158-1 (NM_147051.1,197-215).
gcctctccatgatagactt

SEQ ID NO: 766290 - DNA, 19 bp, Mus musculus
  siRNA target sequence for MOR158-1 (NM_147051.1,239-257).
cacagctgttggttcatct

SEQ ID NO: 766291 - DNA, 19 bp, Mus musculus
  siRNA target sequence for MOR158-1 (NM_147051.1,280-298).
cctgctgcccgctgtttga

SEQ ID NO: 766292 - DNA, 19 bp, Mus musculus
  siRNA target sequence for MOR158-1 (NM_147051.1,396-414).
ctatgctttggtgatgaat

SEQ ID NO: 766293 - DNA, 19 bp, Mus musculus
  siRNA target sequence for MOR158-1 (NM_147051.1,405-423).
ggtgatgaatcgacaaatt

SEQ ID NO: 766294 - DNA, 19 bp, Mus musculus
  siRNA target sequence for MOR158-1 (NM_147051.1,406-424).
gtgatgaatcgacaaattt

SEQ ID NO: 766295 - DNA, 19 bp, Mus musculus
  siRNA target sequence for MOR158-1 (NM_147051.1,449-467).
gggtggtatctatagtaca

SEQ ID NO: 766296 - DNA, 19 bp, Mus musculus
  siRNA target sequence for MOR158-1 (NM_147051.1,518-536).
ctgggggcaatgttaaact

SEQ ID NO: 766297 - DNA, 19 bp, Mus musculus
  siRNA target sequence for MOR158-1 (NM_147051.1,615-633).
cttggagggtggctttcta

SEQ ID NO: 766298 - DNA, 19 bp, Mus musculus
  siRNA target sequence for MOR158-1 (NM_147051.1,619-637).
gagggtggctttctaatgt

SEQ ID NO: 766299 - DNA, 19 bp, Mus musculus
  siRNA target sequence for MOR158-1 (NM_147051.1,641-659).
gaccttgttcccttattgt

SEQ ID NO: 766300 - DNA, 19 bp, Mus musculus
  siRNA target sequence for MOR158-1 (NM_147051.1,644-662).
cttgttcccttattgtact

SEQ ID NO: 766301 - DNA, 19 bp, Mus musculus
  siRNA target sequence for MOR158-1 (NM_147051.1,650-668).
cccttattgtactttccta

SEQ ID NO: 766302 - DNA, 19 bp, Mus musculus
  siRNA target sequence for MOR158-1 (NM_147051.1,679-697).
gggatcaccatcttacgat

SEQ ID NO: 766303 - DNA, 19 bp, Mus musculus
  siRNA target sequence for MOR158-1 (NM_147051.1,680-698).
ggatcaccatcttacgatt

SEQ ID NO: 766304 - DNA, 19 bp, Mus musculus
  siRNA target sequence for MOR158-1 (NM_147051.1,841-859).
gtaatgtacactgctatta

SEQ ID NO: 766305 - DNA, 19 bp, Mus musculus
  siRNA target sequence for MOR158-1 (NM_147051.1,863-881).
cattggctaacccatttgt

SEQ ID NO: 766306 - DNA, 19 bp, Mus musculus
  siRNA target sequence for MOR158-1 (NM_147051.1,867-885).
ggctaacccatttgtttat

SEQ ID NO: 766307 - DNA, 19 bp, Mus musculus
  siRNA target sequence for MOR158-1 (NM_147051.1,868-886).
gctaacccatttgtttata

SEQ ID NO: 766308 - DNA, 19 bp, Mus musculus
  siRNA target sequence for MOR158-1 (NM_147051.1,880-898).
gtttatagtctccgtaata

SEQ ID NO: 766309 - DNA, 19 bp, Mus musculus
  siRNA target sequence for MOR32-3 (NM_147052.1,11-29).
ccaatgacactcagtttca

SEQ ID NO: 766310 - DNA, 19 bp, Mus musculus
  siRNA target sequence for MOR32-3 (NM_147052.1,62-80).
gactagagtctcttcacat

SEQ ID NO: 766311 - DNA, 19 bp, Mus musculus
  siRNA target sequence for MOR32-3 (NM_147052.1,121-139).
ctcttaggaaacttaacca

SEQ ID NO: 766312 - DNA, 19 bp, Mus musculus
  siRNA target sequence for MOR32-3 (NM_147052.1,195-213).
ggctatgttggctaccatt

SEQ ID NO: 766313 - DNA, 19 bp, Mus musculus
  siRNA target sequence for MOR32-3 (NM_147052.1,230-248).
cagcaaccatccctaaaat

SEQ ID NO: 766314 - DNA, 19 bp, Mus musculus
  siRNA target sequence for MOR32-3 (NM_147052.1,254-272).
ggatcttctggattaatct

SEQ ID NO: 766315 - DNA, 19 bp, Mus musculus
  siRNA target sequence for MOR32-3 (NM_147052.1,255-273).
gatcttctggattaatctt

SEQ ID NO: 766316 - DNA, 19 bp, Mus musculus
  siRNA target sequence for MOR32-3 (NM_147052.1,407-425).
ccattctcaccaataaggt

SEQ ID NO: 766317 - DNA, 19 bp, Mus musculus
  siRNA target sequence for MOR32-3 (NM_147052.1,416-434).
ccaataaggtcgtttctat

SEQ ID NO: 766318 - DNA, 19 bp, Mus musculus
  siRNA target sequence for MOR32-3 (NM_147052.1,448-466).
gtgctagtgagggcaatta

SEQ ID NO: 766319 - DNA, 19 bp, Mus musculus
  siRNA target sequence for MOR32-3 (NM_147052.1,451-469).
ctagtgagggcaattatct

SEQ ID NO: 766320 - DNA, 19 bp, Mus musculus
  siRNA target sequence for MOR32-3 (NM_147052.1,456-474).
gagggcaattatctttgtt

SEQ ID NO: 766321 - DNA, 19 bp, Mus musculus
  siRNA target sequence for MOR32-3 (NM_147052.1,458-476).
gggcaattatctttgttat

SEQ ID NO: 766322 - DNA, 19 bp, Mus musculus
  siRNA target sequence for MOR32-3 (NM_147052.1,510-528).
ctgtgggcatcacatcatt

SEQ ID NO: 766323 - DNA, 19 bp, Mus musculus
  siRNA target sequence for MOR32-3 (NM_147052.1,580-598).
gtcaaggccaatgtaattt

SEQ ID NO: 766324 - DNA, 19 bp, Mus musculus
  siRNA target sequence for MOR32-3 (NM_147052.1,603-621).
cttatgtgccatatgtaat

SEQ ID NO: 766325 - DNA, 19 bp, Mus musculus
  siRNA target sequence for MOR32-3 (NM_147052.1,612-630).
catatgtaatctactgttt

SEQ ID NO: 766326 - DNA, 19 bp, Mus musculus
  siRNA target sequence for MOR32-3 (NM_147052.1,805-823).
gtacctcgttatatacata

SEQ ID NO: 766327 - DNA, 19 bp, Mus musculus
  siRNA target sequence for MOR32-3 (NM_147052.1,809-827).
ctcgttatatacatatact

SEQ ID NO: 766328 - DNA, 19 bp, Mus musculus
  siRNA target sequence for MOR32-3 (NM_147052.1,883-901).
gtgagaaccaaacaaatct

SEQ ID NO: 766329 - DNA, 19 bp, Mus musculus
  siRNA target sequence for MOR32-3 (NM_147052.1,885-903).
gagaaccaaacaaatctat

SEQ ID NO: 766330 - DNA, 19 bp, Mus musculus
  siRNA target sequence for MOR30-2 (NM_147054.1,927-945).
ggttacccgagggttttgt

SEQ ID NO: 766331 - DNA, 19 bp, Mus musculus
  siRNA target sequence for MOR30-2 (NM_147054.1,937-955).
gggttttgtgtaaaaggtt

SEQ ID NO: 766332 - DNA, 19 bp, Mus musculus
  siRNA target sequence for MOR33-2 (NM_147056.1,248-266).
ggctccattctaatgagat

SEQ ID NO: 766333 - DNA, 19 bp, Mus musculus
  siRNA target sequence for MOR33-2 (NM_147056.1,249-267).
gctccattctaatgagatt

SEQ ID NO: 766334 - DNA, 19 bp, Mus musculus
  siRNA target sequence for MOR33-2 (NM_147056.1,372-390).
caacccactgagatataca

SEQ ID NO: 766335 - DNA, 19 bp, Mus musculus
  siRNA target sequence for MOR33-2 (NM_147056.1,392-410).
ccatcctcaaccatactgt

SEQ ID NO: 766336 - DNA, 19 bp, Mus musculus
  siRNA target sequence for MOR33-2 (NM_147056.1,396-414).
cctcaaccatactgtcata

SEQ ID NO: 766337 - DNA, 19 bp, Mus musculus
  siRNA target sequence for MOR33-2 (NM_147056.1,407-425).
ctgtcatagcccaaattat

SEQ ID NO: 766338 - DNA, 19 bp, Mus musculus
  siRNA target sequence for MOR33-2 (NM_147056.1,409-427).
gtcatagcccaaattatct

SEQ ID NO: 766339 - DNA, 19 bp, Mus musculus
  siRNA target sequence for MOR33-2 (NM_147056.1,548-566).
ggcttgcctgtgccaatat

SEQ ID NO: 766340 - DNA, 19 bp, Mus musculus
  siRNA target sequence for MOR33-2 (NM_147056.1,549-567).
gcttgcctgtgccaatatt

SEQ ID NO: 766341 - DNA, 19 bp, Mus musculus
  siRNA target sequence for MOR33-2 (NM_147056.1,557-575).
gtgccaatattactgttaa

SEQ ID NO: 766342 - DNA, 19 bp, Mus musculus
  siRNA target sequence for MOR33-2 (NM_147056.1,560-578).
ccaatattactgttaatat

SEQ ID NO: 766343 - DNA, 19 bp, Mus musculus
  siRNA target sequence for MOR33-2 (NM_147056.1,730-748).
gtcattctggttttctata

SEQ ID NO: 766344 - DNA, 19 bp, Mus musculus
  siRNA target sequence for MOR33-2 (NM_147056.1,893-911).
ggagtcggcttctaaaact

SEQ ID NO: 766345 - DNA, 19 bp, Mus musculus
  siRNA target sequence for MOR34-3 (NM_147059.1,621-639).
gattggtgtgtttgatatt

SEQ ID NO: 766346 - DNA, 19 bp, Mus musculus
  siRNA target sequence for MOR34-2 (NM_147060.1,206-224).
ccttcactgatataacctt

SEQ ID NO: 766347 - DNA, 19 bp, Mus musculus
  siRNA target sequence for MOR34-2 (NM_147060.1,210-228).
cactgatataaccttatgt

SEQ ID NO: 766348 - DNA, 19 bp, Mus musculus
  siRNA target sequence for MOR34-2 (NM_147060.1,222-240).
cttatgtaccactactgta

SEQ ID NO: 766349 - DNA, 19 bp, Mus musculus
  siRNA target sequence for MOR34-2 (NM_147060.1,335-353).
cagagtctggcatgctaat

SEQ ID NO: 766350 - DNA, 19 bp, Mus musculus
  siRNA target sequence for MOR34-2 (NM_147060.1,569-587).
cctgtggcaatgtgaaaat

SEQ ID NO: 766351 - DNA, 19 bp, Mus musculus
  siRNA target sequence for MOR34-2 (NM_147060.1,621-639).
ggtttgtgcatttgacata

SEQ ID NO: 766352 - DNA, 19 bp, Mus musculus
  siRNA target sequence for MOR34-2 (NM_147060.1,628-646).
gcatttgacatattctgta

SEQ ID NO: 766353 - DNA, 19 bp, Mus musculus
  siRNA target sequence for MOR34-2 (NM_147060.1,835-853).
gtggcaaacctctatctgt

SEQ ID NO: 766354 - DNA, 19 bp, Mus musculus
  siRNA target sequence for MOR34-2 (NM_147060.1,837-855).
ggcaaacctctatctgtta

SEQ ID NO: 766355 - DNA, 19 bp, Mus musculus
  siRNA target sequence for MOR34-2 (NM_147060.1,839-857).
caaacctctatctgttatt

SEQ ID NO: 766356 - DNA, 19 bp, Mus musculus
  siRNA target sequence for MOR34-2 (NM_147060.1,913-931).
gagtgtaatcaaatttttt

SEQ ID NO: 766357 - DNA, 19 bp, Mus musculus
  siRNA target sequence for MOR31-6 (NM_147061.1,23-41).
ccatccaccctgcattttt

SEQ ID NO: 766358 - DNA, 19 bp, Mus musculus
  siRNA target sequence for MOR31-6 (NM_147061.1,59-77).
ctgggttggaggcttatca

SEQ ID NO: 766359 - DNA, 19 bp, Mus musculus
  siRNA target sequence for MOR31-6 (NM_147061.1,61-79).
gggttggaggcttatcata

SEQ ID NO: 766360 - DNA, 19 bp, Mus musculus
  siRNA target sequence for MOR31-6 (NM_147061.1,127-145).
ggaaacagcatcctgataa

SEQ ID NO: 766361 - DNA, 19 bp, Mus musculus
  siRNA target sequence for MOR31-6 (NM_147061.1,139-157).
ctgataatggtgatcatca

SEQ ID NO: 766362 - DNA, 19 bp, Mus musculus
  siRNA target sequence for MOR31-6 (NM_147061.1,158-176).
cagaacggaaccttcatga

SEQ ID NO: 766363 - DNA, 19 bp, Mus musculus
  siRNA target sequence for MOR31-6 (NM_147061.1,204-222).
ggccatcacggacatctta

SEQ ID NO: 766364 - DNA, 19 bp, Mus musculus
  siRNA target sequence for MOR31-6 (NM_147061.1,206-224).
ccatcacggacatcttact

SEQ ID NO: 766365 - DNA, 19 bp, Mus musculus
  siRNA target sequence for MOR31-6 (NM_147061.1,334-352).
ggggagtcggccatcttgt

SEQ ID NO: 766366 - DNA, 19 bp, Mus musculus
  siRNA target sequence for MOR31-6 (NM_147061.1,336-354).
ggagtcggccatcttgtta

SEQ ID NO: 766367 - DNA, 19 bp, Mus musculus
  siRNA target sequence for MOR31-6 (NM_147061.1,388-406).
gccccactgagatatgcaa

SEQ ID NO: 766368 - DNA, 19 bp, Mus musculus
  siRNA target sequence for MOR31-6 (NM_147061.1,563-581).
gcttagcttgtgcagatat

SEQ ID NO: 766369 - DNA, 19 bp, Mus musculus
  siRNA target sequence for MOR31-6 (NM_147061.1,564-582).
cttagcttgtgcagatata

SEQ ID NO: 766370 - DNA, 19 bp, Mus musculus
  siRNA target sequence for MOR31-6 (NM_147061.1,575-593).
cagatataactgttaacat

SEQ ID NO: 766371 - DNA, 19 bp, Mus musculus
  siRNA target sequence for MOR31-6 (NM_147061.1,624-642).
ggtcattgtggatgtgatt

SEQ ID NO: 766372 - DNA, 19 bp, Mus musculus
  siRNA target sequence for MOR31-6 (NM_147061.1,812-830).
cccgacacgtgcatatcct

SEQ ID NO: 766373 - DNA, 19 bp, Mus musculus
  siRNA target sequence for MOR31-6 (NM_147061.1,828-846).
cctgctggccaatctttat

SEQ ID NO: 766374 - DNA, 19 bp, Mus musculus
  siRNA target sequence for MOR101-1 (NM_147063.1,501-519).
gacctctcagatggtatat

SEQ ID NO: 766375 - DNA, 19 bp, Mus musculus
  siRNA target sequence for MOR101-1 (NM_147063.1,506-524).
ctcagatggtatataatga

SEQ ID NO: 766376 - DNA, 19 bp, Mus musculus
  siRNA target sequence for MOR101-1 (NM_147063.1,567-585).
ggtccagtcctcttgttct

SEQ ID NO: 766377 - DNA, 19 bp, Mus musculus
  siRNA target sequence for MOR101-1 (NM_147063.1,912-930).
ggccattaccaaaattgtt

SEQ ID NO: 766378 - DNA, 19 bp, Mus musculus
  siRNA target sequence for MOR101-1 (NM_147063.1,913-931).
gccattaccaaaattgttt

SEQ ID NO: 766379 - DNA, 19 bp, Mus musculus
  siRNA target sequence for MOR256-1 (NM_147066.1,26-44).
ggaaaggcttcatattagt

SEQ ID NO: 766380 - DNA, 19 bp, Mus musculus
  siRNA target sequence for MOR256-1 (NM_147066.1,27-45).
gaaaggcttcatattagta

SEQ ID NO: 766381 - DNA, 19 bp, Mus musculus
  siRNA target sequence for MOR256-1 (NM_147066.1,78-96).
cctctttgtctttattcta

SEQ ID NO: 766382 - DNA, 19 bp, Mus musculus
  siRNA target sequence for MOR256-1 (NM_147066.1,146-164).
caaggctggatgtcagatt

SEQ ID NO: 766383 - DNA, 19 bp, Mus musculus
  siRNA target sequence for MOR256-1 (NM_147066.1,471-489).
gattcagacaggacttgtt

SEQ ID NO: 766384 - DNA, 19 bp, Mus musculus
  siRNA target sequence for MOR256-1 (NM_147066.1,506-524).
gtagccatcggctgaatca

SEQ ID NO: 766385 - DNA, 19 bp, Mus musculus
  siRNA target sequence for MOR256-1 (NM_147066.1,601-619).
gcccgaacaataatcttga

SEQ ID NO: 766386 - DNA, 19 bp, Mus musculus
  siRNA target sequence for MOR256-1 (NM_147066.1,602-620).
cccgaacaataatcttgat

SEQ ID NO: 766387 - DNA, 19 bp, Mus musculus
  siRNA target sequence for MOR256-1 (NM_147066.1,604-622).
cgaacaataatcttgatct

SEQ ID NO: 766388 - DNA, 19 bp, Mus musculus
  siRNA target sequence for MOR256-1 (NM_147066.1,642-660).
gggctcctatggacacatt

SEQ ID NO: 766389 - DNA, 19 bp, Mus musculus
  siRNA target sequence for MOR256-1 (NM_147066.1,667-685).
gcaattctgagaatcaagt

SEQ ID NO: 766390 - DNA, 19 bp, Mus musculus
  siRNA target sequence for MOR147-1 (NM_147067.1,47-65).
cggttgtgtcaggattcat

SEQ ID NO: 766391 - DNA, 19 bp, Mus musculus
  siRNA target sequence for MOR147-1 (NM_147067.1,48-66).
ggttgtgtcaggattcatt

SEQ ID NO: 766392 - DNA, 19 bp, Mus musculus
  siRNA target sequence for MOR147-1 (NM_147067.1,74-92).
gactcacagatgataccaa

SEQ ID NO: 766393 - DNA, 19 bp, Mus musculus
  siRNA target sequence for MOR147-1 (NM_147067.1,85-103).
gataccaagctgcaactta

SEQ ID NO: 766394 - DNA, 19 bp, Mus musculus
  siRNA target sequence for MOR147-1 (NM_147067.1,89-107).
ccaagctgcaacttattat

SEQ ID NO: 766395 - DNA, 19 bp, Mus musculus
  siRNA target sequence for MOR147-1 (NM_147067.1,129-147).
gtaccttgcaacagtcata

SEQ ID NO: 766396 - DNA, 19 bp, Mus musculus
  siRNA target sequence for MOR147-1 (NM_147067.1,133-151).
cttgcaacagtcataggaa

SEQ ID NO: 766397 - DNA, 19 bp, Mus musculus
  siRNA target sequence for MOR147-1 (NM_147067.1,166-184).
ctggccaccaactttgact

SEQ ID NO: 766398 - DNA, 19 bp, Mus musculus
  siRNA target sequence for MOR147-1 (NM_147067.1,251-269).
catgcactattccaaagat

SEQ ID NO: 766399 - DNA, 19 bp, Mus musculus
  siRNA target sequence for MOR147-1 (NM_147067.1,419-437).
ggtataggatcataatgaa

SEQ ID NO: 766400 - DNA, 19 bp, Mus musculus
  siRNA target sequence for MOR147-1 (NM_147067.1,440-458).
cctatctttgtatcctaat

SEQ ID NO: 766401 - DNA, 19 bp, Mus musculus
  siRNA target sequence for MOR147-1 (NM_147067.1,459-477).
ggtagcattttctatgata

SEQ ID NO: 766402 - DNA, 19 bp, Mus musculus
  siRNA target sequence for MOR147-1 (NM_147067.1,498-516).
ggtcaatggtctaatggta

SEQ ID NO: 766403 - DNA, 19 bp, Mus musculus
  siRNA target sequence for MOR147-1 (NM_147067.1,499-517).
gtcaatggtctaatggtat

SEQ ID NO: 766404 - DNA, 19 bp, Mus musculus
  siRNA target sequence for MOR147-1 (NM_147067.1,565-583).
gaacttacacagattacta

SEQ ID NO: 766405 - DNA, 19 bp, Mus musculus
  siRNA target sequence for MOR147-1 (NM_147067.1,589-607).
gcctgttccaacactctta

SEQ ID NO: 766406 - DNA, 19 bp, Mus musculus
  siRNA target sequence for MOR147-1 (NM_147067.1,590-608).
cctgttccaacactcttat

SEQ ID NO: 766407 - DNA, 19 bp, Mus musculus
  siRNA target sequence for MOR147-1 (NM_147067.1,600-618).
cactcttattgacaacata

SEQ ID NO: 766408 - DNA, 19 bp, Mus musculus
  siRNA target sequence for MOR147-1 (NM_147067.1,662-680).
ctggcatcattttgtcata

SEQ ID NO: 766409 - DNA, 19 bp, Mus musculus
  siRNA target sequence for MOR147-1 (NM_147067.1,664-682).
ggcatcattttgtcatatt

SEQ ID NO: 766410 - DNA, 19 bp, Mus musculus
  siRNA target sequence for MOR147-1 (NM_147067.1,799-817).
gtctatatcagctcaacaa

SEQ ID NO: 766411 - DNA, 19 bp, Mus musculus
  siRNA target sequence for MOR147-1 (NM_147067.1,801-819).
ctatatcagctcaacaatt

SEQ ID NO: 766412 - DNA, 19 bp, Mus musculus
  siRNA target sequence for MOR147-1 (NM_147067.1,810-828).
ctcaacaattacagaatca

SEQ ID NO: 766413 - DNA, 19 bp, Mus musculus
  siRNA target sequence for MOR147-1 (NM_147067.1,863-881).
cagtagtccctcaaatgat

SEQ ID NO: 766414 - DNA, 19 bp, Mus musculus
  siRNA target sequence for MOR270-1 (NM_147068.1,65-83).
caggcctgctacttttgat

SEQ ID NO: 766415 - DNA, 19 bp, Mus musculus
  siRNA target sequence for MOR270-1 (NM_147068.1,309-327).
cctgactatggcatgttct

SEQ ID NO: 766416 - DNA, 19 bp, Mus musculus
  siRNA target sequence for MOR270-1 (NM_147068.1,913-931).
ggtacttttccttcaacta

SEQ ID NO: 766417 - DNA, 19 bp, Mus musculus
  siRNA target sequence for MOR35-1 (NM_147069.1,3-21).
gattttttctaataattct

SEQ ID NO: 766418 - DNA, 19 bp, Mus musculus
  siRNA target sequence for MOR35-1 (NM_147069.1,64-82).
ctgactgctgcccatgttt

SEQ ID NO: 766419 - DNA, 19 bp, Mus musculus
  siRNA target sequence for MOR35-1 (NM_147069.1,70-88).
gctgcccatgtttggatat

SEQ ID NO: 766420 - DNA, 19 bp, Mus musculus
  siRNA target sequence for MOR35-1 (NM_147069.1,108-126).
gtttgtcctgtcactaact

SEQ ID NO: 766421 - DNA, 19 bp, Mus musculus
  siRNA target sequence for MOR35-1 (NM_147069.1,168-186).
gctccaccagcccatgttt

SEQ ID NO: 766422 - DNA, 19 bp, Mus musculus
  siRNA target sequence for MOR35-1 (NM_147069.1,197-215).
caatgctctcttttgttga

SEQ ID NO: 766423 - DNA, 19 bp, Mus musculus
  siRNA target sequence for MOR35-1 (NM_147069.1,408-426).
catccttacgcctgaagtt

SEQ ID NO: 766424 - DNA, 19 bp, Mus musculus
  siRNA target sequence for MOR35-1 (NM_147069.1,411-429).
ccttacgcctgaagttgtt

SEQ ID NO: 766425 - DNA, 19 bp, Mus musculus
  siRNA target sequence for MOR35-1 (NM_147069.1,454-472).
ctgcgaggtgtgggtttaa

SEQ ID NO: 766426 - DNA, 19 bp, Mus musculus
  siRNA target sequence for MOR35-1 (NM_147069.1,456-474).
gcgaggtgtgggtttaact

SEQ ID NO: 766427 - DNA, 19 bp, Mus musculus
  siRNA target sequence for MOR35-1 (NM_147069.1,457-475).
cgaggtgtgggtttaacta

SEQ ID NO: 766428 - DNA, 19 bp, Mus musculus
  siRNA target sequence for MOR35-1 (NM_147069.1,460-478).
ggtgtgggtttaactatct

SEQ ID NO: 766429 - DNA, 19 bp, Mus musculus
  siRNA target sequence for MOR35-1 (NM_147069.1,463-481).
gtgggtttaactatcttct

SEQ ID NO: 766430 - DNA, 19 bp, Mus musculus
  siRNA target sequence for MOR35-1 (NM_147069.1,492-510).
ggcttgtcgactgtcttat

SEQ ID NO: 766431 - DNA, 19 bp, Mus musculus
  siRNA target sequence for MOR35-1 (NM_147069.1,567-585).
ggcttgtggggccataact

SEQ ID NO: 766432 - DNA, 19 bp, Mus musculus
  siRNA target sequence for MOR35-1 (NM_147069.1,905-923).
gagagtgtctgttcacaat

SEQ ID NO: 766433 - DNA, 19 bp, Mus musculus
  siRNA target sequence for MOR35-1 (NM_147069.1,907-925).
gagtgtctgttcacaatta

SEQ ID NO: 766434 - DNA, 19 bp, Mus musculus
  siRNA target sequence for MOR35-1 (NM_147069.1,909-927).
gtgtctgttcacaattata

SEQ ID NO: 766435 - DNA, 19 bp, Mus musculus
  siRNA target sequence for MOR35-1 (NM_147069.1,913-931).
ctgttcacaattataggtt

SEQ ID NO: 766436 - DNA, 19 bp, Mus musculus
  siRNA target sequence for MOR32-2 (NM_147070.1,3-21).
gccctctaataatgaaact

SEQ ID NO: 766437 - DNA, 19 bp, Mus musculus
  siRNA target sequence for MOR32-2 (NM_147070.1,137-155).
caatcctctgtgtgatcaa

SEQ ID NO: 766438 - DNA, 19 bp, Mus musculus
  siRNA target sequence for MOR32-2 (NM_147070.1,332-350).
gcatggaatctgttgtact

SEQ ID NO: 766439 - DNA, 19 bp, Mus musculus
  siRNA target sequence for MOR32-2 (NM_147070.1,407-425).
ctgttctcaccaacaaagt

SEQ ID NO: 766440 - DNA, 19 bp, Mus musculus
  siRNA target sequence for MOR32-2 (NM_147070.1,433-451).
gtcatggcatcggttgtaa

SEQ ID NO: 766441 - DNA, 19 bp, Mus musculus
  siRNA target sequence for MOR32-2 (NM_147070.1,435-453).
catggcatcggttgtaata

SEQ ID NO: 766442 - DNA, 19 bp, Mus musculus
  siRNA target sequence for MOR32-2 (NM_147070.1,504-522).
gcccttttgtggacactat

SEQ ID NO: 766443 - DNA, 19 bp, Mus musculus
  siRNA target sequence for MOR32-2 (NM_147070.1,505-523).
cccttttgtggacactata

SEQ ID NO: 766444 - DNA, 19 bp, Mus musculus
  siRNA target sequence for MOR32-2 (NM_147070.1,572-590).
gtgctaacataaggataaa

SEQ ID NO: 766445 - DNA, 19 bp, Mus musculus
  siRNA target sequence for MOR32-2 (NM_147070.1,574-592).
gctaacataaggataaaca

SEQ ID NO: 766446 - DNA, 19 bp, Mus musculus
  siRNA target sequence for MOR32-2 (NM_147070.1,575-593).
ctaacataaggataaacat

SEQ ID NO: 766447 - DNA, 19 bp, Mus musculus
  siRNA target sequence for MOR32-2 (NM_147070.1,619-637).
gctctgatctttgatttaa

SEQ ID NO: 766448 - DNA, 19 bp, Mus musculus
  siRNA target sequence for MOR32-2 (NM_147070.1,631-649).
gatttaattctcattgctt

SEQ ID NO: 766449 - DNA, 19 bp, Mus musculus
  siRNA target sequence for MOR32-2 (NM_147070.1,805-823).
gttcctcgttatattcaca

SEQ ID NO: 766450 - DNA, 19 bp, Mus musculus
  siRNA target sequence for MOR32-2 (NM_147070.1,852-870).
ccctccttgtttaaatcca

SEQ ID NO: 766451 - DNA, 19 bp, Mus musculus
  siRNA target sequence for MOR32-2 (NM_147070.1,902-920).
gggagggagtcttaaaaat

SEQ ID NO: 766452 - DNA, 19 bp, Mus musculus
  siRNA target sequence for MOR13-3 (NM_147072.1,86-104).
gacccctttgtgtgatgta

SEQ ID NO: 766453 - DNA, 19 bp, Mus musculus
  siRNA target sequence for MOR13-3 (NM_147072.1,113-131).
ccctcggggcaaatactgt

SEQ ID NO: 766454 - DNA, 19 bp, Mus musculus
  siRNA target sequence for MOR13-3 (NM_147072.1,117-135).
cggggcaaatactgtgatt

SEQ ID NO: 766455 - DNA, 19 bp, Mus musculus
  siRNA target sequence for MOR13-3 (NM_147072.1,246-264).
gagaaccttctgctttgat

SEQ ID NO: 766456 - DNA, 19 bp, Mus musculus
  siRNA target sequence for MOR13-3 (NM_147072.1,262-280).
gatgcccgcagcattgctt

SEQ ID NO: 766457 - DNA, 19 bp, Mus musculus
  siRNA target sequence for MOR13-3 (NM_147072.1,401-419).
ctgtcctcaccaatgaatt

SEQ ID NO: 766458 - DNA, 19 bp, Mus musculus
  siRNA target sequence for MOR13-3 (NM_147072.1,403-421).
gtcctcaccaatgaattca

SEQ ID NO: 766459 - DNA, 19 bp, Mus musculus
  siRNA target sequence for MOR13-3 (NM_147072.1,573-591).
catcaccatcaacagtatt

SEQ ID NO: 766460 - DNA, 19 bp, Mus musculus
  siRNA target sequence for MOR13-3 (NM_147072.1,622-640).
ggcatggacctgcttttta

SEQ ID NO: 766461 - DNA, 19 bp, Mus musculus
  siRNA target sequence for MOR13-3 (NM_147072.1,765-783).
gataggggtctctacagtt

SEQ ID NO: 766462 - DNA, 19 bp, Mus musculus
  siRNA target sequence for MOR13-3 (NM_147072.1,803-821).
ccccacgatacatacatgt

SEQ ID NO: 766463 - DNA, 19 bp, Mus musculus
  siRNA target sequence for MOR13-3 (NM_147072.1,915-933).
catgtttcgccgtatcaaa

SEQ ID NO: 766464 - DNA, 19 bp, Mus musculus
  siRNA target sequence for Ors19 (NM_147074.1,85-103).
cagcatgtttggattgcta

SEQ ID NO: 766465 - DNA, 19 bp, Mus musculus
  siRNA target sequence for Ors19 (NM_147074.1,126-144).
ccttgctctggttggaaat

SEQ ID NO: 766466 - DNA, 19 bp, Mus musculus
  siRNA target sequence for Ors19 (NM_147074.1,130-148).
gctctggttggaaatggta

SEQ ID NO: 766467 - DNA, 19 bp, Mus musculus
  siRNA target sequence for Ors19 (NM_147074.1,146-164).
gtaccatcctctatatcat

SEQ ID NO: 766468 - DNA, 19 bp, Mus musculus
  siRNA target sequence for Ors19 (NM_147074.1,153-171).
cctctatatcattataaca

SEQ ID NO: 766469 - DNA, 19 bp, Mus musculus
  siRNA target sequence for Ors19 (NM_147074.1,232-250).
gttctctgttcaacaacat

SEQ ID NO: 766470 - DNA, 19 bp, Mus musculus
  siRNA target sequence for Ors19 (NM_147074.1,281-299).
gatcccatgtcatttccta

SEQ ID NO: 766471 - DNA, 19 bp, Mus musculus
  siRNA target sequence for Ors19 (NM_147074.1,423-441).
cctcaatgctgttgtaatt

SEQ ID NO: 766472 - DNA, 19 bp, Mus musculus
  siRNA target sequence for Ors19 (NM_147074.1,465-483).
gactcgtggccttctcttt

SEQ ID NO: 766473 - DNA, 19 bp, Mus musculus
  siRNA target sequence for Ors19 (NM_147074.1,603-621).
caccatctatggtcttact

SEQ ID NO: 766474 - DNA, 19 bp, Mus musculus
  siRNA target sequence for Ors19 (NM_147074.1,605-623).
ccatctatggtcttactgt

SEQ ID NO: 766475 - DNA, 19 bp, Mus musculus
  siRNA target sequence for Ors19 (NM_147074.1,696-714).
gcgactgccctcaaaggat

SEQ ID NO: 766476 - DNA, 19 bp, Mus musculus
  siRNA target sequence for Ors19 (NM_147074.1,742-760).
ggagcccacatttgtgtaa

SEQ ID NO: 766477 - DNA, 19 bp, Mus musculus
  siRNA target sequence for Ors19 (NM_147074.1,743-761).
gagcccacatttgtgtaat

SEQ ID NO: 766478 - DNA, 19 bp, Mus musculus
  siRNA target sequence for Ors19 (NM_147074.1,827-845).
ctcaggtacacatcatact

SEQ ID NO: 766479 - DNA, 19 bp, Mus musculus
  siRNA target sequence for Ors19 (NM_147074.1,837-855).
catcatacttgcaaatctt

SEQ ID NO: 766480 - DNA, 19 bp, Mus musculus
  siRNA target sequence for Ors19 (NM_147074.1,885-903).
cctagtctatggcatcaat

SEQ ID NO: 766481 - DNA, 19 bp, Mus musculus
  siRNA target sequence for Ors19 (NM_147074.1,886-904).
ctagtctatggcatcaata

SEQ ID NO: 766482 - DNA, 19 bp, Mus musculus
  siRNA target sequence for Ors19 (NM_147074.1,889-907).
gtctatggcatcaatacca

SEQ ID NO: 766483 - DNA, 19 bp, Mus musculus
  siRNA target sequence for MOR27-1 (NM_147075.1,21-39).
gaccatggagtctcctaat

SEQ ID NO: 766484 - DNA, 19 bp, Mus musculus
  siRNA target sequence for MOR27-1 (NM_147075.1,23-41).
ccatggagtctcctaatca

SEQ ID NO: 766485 - DNA, 19 bp, Mus musculus
  siRNA target sequence for MOR27-1 (NM_147075.1,44-62).
cggacttggatccttctat

SEQ ID NO: 766486 - DNA, 19 bp, Mus musculus
  siRNA target sequence for MOR27-1 (NM_147075.1,86-104).
gtctagagcaattccatat

SEQ ID NO: 766487 - DNA, 19 bp, Mus musculus
  siRNA target sequence for MOR27-1 (NM_147075.1,88-106).
ctagagcaattccatatgt

SEQ ID NO: 766488 - DNA, 19 bp, Mus musculus
  siRNA target sequence for MOR27-1 (NM_147075.1,140-158).
ccacaatcgtgggcaatat

SEQ ID NO: 766489 - DNA, 19 bp, Mus musculus
  siRNA target sequence for MOR27-1 (NM_147075.1,141-159).
cacaatcgtgggcaatata

SEQ ID NO: 766490 - DNA, 19 bp, Mus musculus
  siRNA target sequence for MOR27-1 (NM_147075.1,255-273).
ctccacagtaccaaagcta

SEQ ID NO: 766491 - DNA, 19 bp, Mus musculus
  siRNA target sequence for MOR27-1 (NM_147075.1,463-481).
ggggtagtagctatgatga

SEQ ID NO: 766492 - DNA, 19 bp, Mus musculus
  siRNA target sequence for MOR27-1 (NM_147075.1,606-624).
cagacctaatcgtgtgtat

SEQ ID NO: 766493 - DNA, 19 bp, Mus musculus
  siRNA target sequence for MOR27-1 (NM_147075.1,642-660).
gttggtcattggagttgat

SEQ ID NO: 766494 - DNA, 19 bp, Mus musculus
  siRNA target sequence for MOR27-1 (NM_147075.1,646-664).
gtcattggagttgatttat

SEQ ID NO: 766495 - DNA, 19 bp, Mus musculus
  siRNA target sequence for MOR27-1 (NM_147075.1,666-684).
ctgcattggtctttcctat

SEQ ID NO: 766496 - DNA, 19 bp, Mus musculus
  siRNA target sequence for MOR27-1 (NM_147075.1,771-789).
catccttatctcttacaca

SEQ ID NO: 766497 - DNA, 19 bp, Mus musculus
  siRNA target sequence for MOR27-1 (NM_147075.1,832-850).
gtcccactccacattcata

SEQ ID NO: 766498 - DNA, 19 bp, Mus musculus
  siRNA target sequence for MOR27-1 (NM_147075.1,834-852).
cccactccacattcatatt

SEQ ID NO: 766499 - DNA, 19 bp, Mus musculus
  siRNA target sequence for MOR27-1 (NM_147075.1,887-905).
ctcttaaccctgtggtata

SEQ ID NO: 766500 - DNA, 19 bp, Mus musculus
  siRNA target sequence for MOR27-1 (NM_147075.1,935-953).
gggttgccaaggtgtttca

SEQ ID NO: 766501 - DNA, 19 bp, Mus musculus
  siRNA target sequence for MOR27-1 (NM_147075.1,937-955).
gttgccaaggtgtttcagt

SEQ ID NO: 766502 - DNA, 19 bp, Mus musculus
  siRNA target sequence for MOR27-1 (NM_147075.1,964-982).
ggaacaaggctcaagatat

SEQ ID NO: 766503 - DNA, 19 bp, Mus musculus
  siRNA target sequence for MOR31-5 (NM_147076.1,136-154).
ggcaatacattcctaatat

SEQ ID NO: 766504 - DNA, 19 bp, Mus musculus
  siRNA target sequence for MOR31-5 (NM_147076.1,148-166).
ctaatattgctgatctcta

SEQ ID NO: 766505 - DNA, 19 bp, Mus musculus
  siRNA target sequence for MOR31-5 (NM_147076.1,162-180).
ctctattgagcatagtctt

SEQ ID NO: 766506 - DNA, 19 bp, Mus musculus
  siRNA target sequence for MOR31-5 (NM_147076.1,215-233).
ccctggccgatatcttctt

SEQ ID NO: 766507 - DNA, 19 bp, Mus musculus
  siRNA target sequence for MOR31-5 (NM_147076.1,217-235).
ctggccgatatcttcttgt

SEQ ID NO: 766508 - DNA, 19 bp, Mus musculus
  siRNA target sequence for MOR31-5 (NM_147076.1,241-259).
gtgaccattccaaaggtat

SEQ ID NO: 766509 - DNA, 19 bp, Mus musculus
  siRNA target sequence for MOR31-5 (NM_147076.1,243-261).
gaccattccaaaggtatta

SEQ ID NO: 766510 - DNA, 19 bp, Mus musculus
  siRNA target sequence for MOR31-5 (NM_147076.1,250-268).
ccaaaggtattagcaattt

SEQ ID NO: 766511 - DNA, 19 bp, Mus musculus
  siRNA target sequence for MOR31-5 (NM_147076.1,457-475).
gctgtgactagaagttttt

SEQ ID NO: 766512 - DNA, 19 bp, Mus musculus
  siRNA target sequence for MOR31-5 (NM_147076.1,611-629).
gattgattgtagctctatt

SEQ ID NO: 766513 - DNA, 19 bp, Mus musculus
  siRNA target sequence for MOR31-5 (NM_147076.1,640-658).
ctagacgtagtacttatta

SEQ ID NO: 766514 - DNA, 19 bp, Mus musculus
  siRNA target sequence for MOR31-5 (NM_147076.1,646-664).
gtagtacttattattgtct

SEQ ID NO: 766515 - DNA, 19 bp, Mus musculus
  siRNA target sequence for MOR31-5 (NM_147076.1,685-703).
gctgtgtacagaatacctt

SEQ ID NO: 766516 - DNA, 19 bp, Mus musculus
  siRNA target sequence for MOR31-5 (NM_147076.1,818-836).
gcataccactgcatgttca

SEQ ID NO: 766517 - DNA, 19 bp, Mus musculus
  siRNA target sequence for MOR31-5 (NM_147076.1,848-866).
ctaacctctatgttgttct

SEQ ID NO: 766518 - DNA, 19 bp, Mus musculus
  siRNA target sequence for MOR31-4 (NM_147079.1,445-463).
ggcatctttctgagaagtt

SEQ ID NO: 766519 - DNA, 19 bp, Mus musculus
  siRNA target sequence for MOR31-4 (NM_147079.1,446-464).
gcatctttctgagaagtta

SEQ ID NO: 766520 - DNA, 19 bp, Mus musculus
  siRNA target sequence for MOR31-4 (NM_147079.1,447-465).
catctttctgagaagttat

SEQ ID NO: 766521 - DNA, 19 bp, Mus musculus
  siRNA target sequence for MOR31-4 (NM_147079.1,456-474).
gagaagttatggtacaatt

SEQ ID NO: 766522 - DNA, 19 bp, Mus musculus
  siRNA target sequence for MOR31-4 (NM_147079.1,458-476).
gaagttatggtacaatttt

SEQ ID NO: 766523 - DNA, 19 bp, Mus musculus
  siRNA target sequence for MOR31-4 (NM_147079.1,500-518).
gactaactttctgcaaaaa

SEQ ID NO: 766524 - DNA, 19 bp, Mus musculus
  siRNA target sequence for MOR31-4 (NM_147079.1,549-567).
cataggcttggctaaatat

SEQ ID NO: 766525 - DNA, 19 bp, Mus musculus
  siRNA target sequence for MOR31-4 (NM_147079.1,572-590).
gcaatagcatccgagtaaa

SEQ ID NO: 766526 - DNA, 19 bp, Mus musculus
  siRNA target sequence for MOR31-4 (NM_147079.1,586-604).
gtaaacatttggtatggat

SEQ ID NO: 766527 - DNA, 19 bp, Mus musculus
  siRNA target sequence for MOR31-4 (NM_147079.1,627-645).
ggtcttagatgttgtgtta

SEQ ID NO: 766528 - DNA, 19 bp, Mus musculus
  siRNA target sequence for MOR31-4 (NM_147079.1,734-752).
cccatgtctgcatcattat

SEQ ID NO: 766529 - DNA, 19 bp, Mus musculus
  siRNA target sequence for MOR19-2 (NM_147080.1,89-107).
cactcctgagcctgatgta

SEQ ID NO: 766530 - DNA, 19 bp, Mus musculus
  siRNA target sequence for MOR19-2 (NM_147080.1,94-112).
ctgagcctgatgtacatca

SEQ ID NO: 766531 - DNA, 19 bp, Mus musculus
  siRNA target sequence for MOR19-2 (NM_147080.1,120-138).
ggcagggaactgtactgta

SEQ ID NO: 766532 - DNA, 19 bp, Mus musculus
  siRNA target sequence for MOR19-2 (NM_147080.1,244-262).
gtgctaaaagtctttatct

SEQ ID NO: 766533 - DNA, 19 bp, Mus musculus
  siRNA target sequence for MOR19-2 (NM_147080.1,333-351).
gggttcaggaatcttgtta

SEQ ID NO: 766534 - DNA, 19 bp, Mus musculus
  siRNA target sequence for MOR19-2 (NM_147080.1,338-356).
caggaatcttgttagctat

SEQ ID NO: 766535 - DNA, 19 bp, Mus musculus
  siRNA target sequence for MOR19-2 (NM_147080.1,381-399).
cagtcaccccctgcaatat

SEQ ID NO: 766536 - DNA, 19 bp, Mus musculus
  siRNA target sequence for MOR19-2 (NM_147080.1,394-412).
caatatacaacaatactga

SEQ ID NO: 766537 - DNA, 19 bp, Mus musculus
  siRNA target sequence for MOR19-2 (NM_147080.1,432-450).
gatgggactggcagctttt

SEQ ID NO: 766538 - DNA, 19 bp, Mus musculus
  siRNA target sequence for MOR19-2 (NM_147080.1,455-473).
ggggtgtagcgctcatgat

SEQ ID NO: 766539 - DNA, 19 bp, Mus musculus
  siRNA target sequence for MOR19-2 (NM_147080.1,481-499).
cctatactgcttaagagat

SEQ ID NO: 766540 - DNA, 19 bp, Mus musculus
  siRNA target sequence for MOR19-2 (NM_147080.1,482-500).
ctatactgcttaagagatt

SEQ ID NO: 766541 - DNA, 19 bp, Mus musculus
  siRNA target sequence for MOR19-2 (NM_147080.1,566-584).
cctgtggccaagtcaagat

SEQ ID NO: 766542 - DNA, 19 bp, Mus musculus
  siRNA target sequence for MOR19-2 (NM_147080.1,569-587).
gtggccaagtcaagatcaa

SEQ ID NO: 766543 - DNA, 19 bp, Mus musculus
  siRNA target sequence for MOR19-2 (NM_147080.1,571-589).
ggccaagtcaagatcaata

SEQ ID NO: 766544 - DNA, 19 bp, Mus musculus
  siRNA target sequence for MOR19-2 (NM_147080.1,573-591).
ccaagtcaagatcaatatt

SEQ ID NO: 766545 - DNA, 19 bp, Mus musculus
  siRNA target sequence for MOR19-2 (NM_147080.1,598-616).
ggtcttgttttggttatat

SEQ ID NO: 766546 - DNA, 19 bp, Mus musculus
  siRNA target sequence for MOR19-2 (NM_147080.1,681-699).
ggggatcgcttctagagaa

SEQ ID NO: 766547 - DNA, 19 bp, Mus musculus
  siRNA target sequence for MOR19-2 (NM_147080.1,692-710).
ctagagaaggtcagatgaa

SEQ ID NO: 766548 - DNA, 19 bp, Mus musculus
  siRNA target sequence for MOR19-2 (NM_147080.1,703-721).
cagatgaaagcgctcaata

SEQ ID NO: 766549 - DNA, 19 bp, Mus musculus
  siRNA target sequence for MOR19-2 (NM_147080.1,705-723).
gatgaaagcgctcaatact

SEQ ID NO: 766550 - DNA, 19 bp, Mus musculus
  siRNA target sequence for MOR19-2 (NM_147080.1,712-730).
gcgctcaatacttgtttgt

SEQ ID NO: 766551 - DNA, 19 bp, Mus musculus
  siRNA target sequence for MOR19-2 (NM_147080.1,714-732).
gctcaatacttgtttgtct

SEQ ID NO: 766552 - DNA, 19 bp, Mus musculus
  siRNA target sequence for MOR19-2 (NM_147080.1,725-743).
gtttgtctcatatctttat

SEQ ID NO: 766553 - DNA, 19 bp, Mus musculus
  siRNA target sequence for MOR19-2 (NM_147080.1,760-778).
ggccctttgctggcaataa

SEQ ID NO: 766554 - DNA, 19 bp, Mus musculus
  siRNA target sequence for MOR19-2 (NM_147080.1,771-789).
ggcaataactgtaatgcat

SEQ ID NO: 766555 - DNA, 19 bp, Mus musculus
  siRNA target sequence for MOR19-2 (NM_147080.1,798-816).
ccgcagaagttctccaata

SEQ ID NO: 766556 - DNA, 19 bp, Mus musculus
  siRNA target sequence for MOR19-2 (NM_147080.1,801-819).
cagaagttctccaatagca

SEQ ID NO: 766557 - DNA, 19 bp, Mus musculus
  siRNA target sequence for MOR19-2 (NM_147080.1,823-841).
gcagtcctgggaaatatct

SEQ ID NO: 766558 - DNA, 19 bp, Mus musculus
  siRNA target sequence for MOR9-2 (NM_147081.1,3-21).
ggcaatttctaaacatagt

SEQ ID NO: 766559 - DNA, 19 bp, Mus musculus
  siRNA target sequence for MOR9-2 (NM_147081.1,88-106).
gcaatacccatctgcttaa

SEQ ID NO: 766560 - DNA, 19 bp, Mus musculus
  siRNA target sequence for MOR9-2 (NM_147081.1,89-107).
caatacccatctgcttaat

SEQ ID NO: 766561 - DNA, 19 bp, Mus musculus
  siRNA target sequence for MOR9-2 (NM_147081.1,95-113).
ccatctgcttaatttacgt

SEQ ID NO: 766562 - DNA, 19 bp, Mus musculus
  siRNA target sequence for MOR9-2 (NM_147081.1,96-114).
catctgcttaatttacgtt

SEQ ID NO: 766563 - DNA, 19 bp, Mus musculus
  siRNA target sequence for MOR9-2 (NM_147081.1,221-239).
gcctctcagcttctacatt

SEQ ID NO: 766564 - DNA, 19 bp, Mus musculus
  siRNA target sequence for MOR9-2 (NM_147081.1,245-263).
caatggtagctgttttcct

SEQ ID NO: 766565 - DNA, 19 bp, Mus musculus
  siRNA target sequence for MOR9-2 (NM_147081.1,388-406).
gagcctttgcgttatgcta

SEQ ID NO: 766566 - DNA, 19 bp, Mus musculus
  siRNA target sequence for MOR9-2 (NM_147081.1,403-421).
gctactattctcacaacaa

SEQ ID NO: 766567 - DNA, 19 bp, Mus musculus
  siRNA target sequence for MOR9-2 (NM_147081.1,572-590).
gttccagcacacttgtcaa

SEQ ID NO: 766568 - DNA, 19 bp, Mus musculus
  siRNA target sequence for MOR9-2 (NM_147081.1,595-613).
ggctttgggctctttgtca

SEQ ID NO: 766569 - DNA, 19 bp, Mus musculus
  siRNA target sequence for MOR9-2 (NM_147081.1,630-648).
gatggatgcggtgctaatt

SEQ ID NO: 766570 - DNA, 19 bp, Mus musculus
  siRNA target sequence for MOR9-2 (NM_147081.1,684-702).
gagcattgcttctaatgct

SEQ ID NO: 766571 - DNA, 19 bp, Mus musculus
  siRNA target sequence for MOR9-2 (NM_147081.1,811-829).
ctaccagctcaggtataca

SEQ ID NO: 766572 - DNA, 19 bp, Mus musculus
  siRNA target sequence for MOR9-2 (NM_147081.1,907-925).
cgagttcgcattctaaaga

SEQ ID NO: 766573 - DNA, 19 bp, Mus musculus
  siRNA target sequence for MOR9-2 (NM_147081.1,908-926).
gagttcgcattctaaagat

SEQ ID NO: 766574 - DNA, 19 bp, Mus musculus
  siRNA target sequence for MOR9-1 (NM_147082.1,114-132).
ggcagggaatggcttgatt

SEQ ID NO: 766575 - DNA, 19 bp, Mus musculus
  siRNA target sequence for MOR9-1 (NM_147082.1,236-254).
ccatgctgacgatctatat

SEQ ID NO: 766576 - DNA, 19 bp, Mus musculus
  siRNA target sequence for MOR9-1 (NM_147082.1,266-284).
gcgaagtggcattagacat

SEQ ID NO: 766577 - DNA, 19 bp, Mus musculus
  siRNA target sequence for MOR9-1 (NM_147082.1,514-532).
catctttcccactcttact

SEQ ID NO: 766578 - DNA, 19 bp, Mus musculus
  siRNA target sequence for MOR9-1 (NM_147082.1,758-776).
ctatgattggcctttctat

SEQ ID NO: 766579 - DNA, 19 bp, Mus musculus
  siRNA target sequence for MOR9-1 (NM_147082.1,812-830).
gccgtgtgttgctctctta

SEQ ID NO: 766580 - DNA, 19 bp, Mus musculus
  siRNA target sequence for MOR9-1 (NM_147082.1,813-831).
ccgtgtgttgctctcttat

SEQ ID NO: 766581 - DNA, 19 bp, Mus musculus
  siRNA target sequence for MOR9-1 (NM_147082.1,889-907).
cagatccgacagaggattt

SEQ ID NO: 766582 - DNA, 19 bp, Mus musculus
  siRNA target sequence for MOR9-1 (NM_147082.1,921-939).
gtgtggtggaagaagcatt

SEQ ID NO: 766583 - DNA, 19 bp, Mus musculus
  siRNA target sequence for MOR26-1 (NM_147083.1,3-21).
ggtaggcaatattactcat

SEQ ID NO: 766584 - DNA, 19 bp, Mus musculus
  siRNA target sequence for MOR26-1 (NM_147083.1,56-74).
ctggcttggagaatgttca

SEQ ID NO: 766585 - DNA, 19 bp, Mus musculus
  siRNA target sequence for MOR26-1 (NM_147083.1,404-422).
caatcctgacaacatctat

SEQ ID NO: 766586 - DNA, 19 bp, Mus musculus
  siRNA target sequence for MOR26-1 (NM_147083.1,416-434).
catctatggtgattaaact

SEQ ID NO: 766587 - DNA, 19 bp, Mus musculus
  siRNA target sequence for MOR26-1 (NM_147083.1,501-519).
gccttactatacaaaatat

SEQ ID NO: 766588 - DNA, 19 bp, Mus musculus
  siRNA target sequence for MOR26-1 (NM_147083.1,590-608).
gagcatatggaatttcagt

SEQ ID NO: 766589 - DNA, 19 bp, Mus musculus
  siRNA target sequence for MOR26-1 (NM_147083.1,627-645).
cgtggacctaggactcata

SEQ ID NO: 766590 - DNA, 19 bp, Mus musculus
  siRNA target sequence for MOR26-1 (NM_147083.1,638-656).
gactcatagcaacatctta

SEQ ID NO: 766591 - DNA, 19 bp, Mus musculus
  siRNA target sequence for MOR26-1 (NM_147083.1,642-660).
catagcaacatcttatgta

SEQ ID NO: 766592 - DNA, 19 bp, Mus musculus
  siRNA target sequence for MOR26-1 (NM_147083.1,743-761).
ctatccttgtctcctatat

SEQ ID NO: 766593 - DNA, 19 bp, Mus musculus
  siRNA target sequence for MOR26-1 (NM_147083.1,811-829).
ccaagcgttcacatcattt

SEQ ID NO: 766594 - DNA, 19 bp, Mus musculus
  siRNA target sequence for MOR26-1 (NM_147083.1,812-830).
caagcgttcacatcatttt

SEQ ID NO: 766595 - DNA, 19 bp, Mus musculus
  siRNA target sequence for MOR26-1 (NM_147083.1,816-834).
cgttcacatcatttttgca

SEQ ID NO: 766596 - DNA, 19 bp, Mus musculus
  siRNA target sequence for MOR26-1 (NM_147083.1,902-920).
gtgatcgagtgatagatct

SEQ ID NO: 766597 - DNA, 19 bp, Mus musculus
  siRNA target sequence for MOR26-1 (NM_147083.1,904-922).
gatcgagtgatagatcttt

SEQ ID NO: 766598 - DNA, 19 bp, Mus musculus
  siRNA target sequence for MOR12-1 (NM_147084.1,252-270).
gggcattctttggtttaat

SEQ ID NO: 766599 - DNA, 19 bp, Mus musculus
  siRNA target sequence for MOR12-1 (NM_147084.1,346-364).
gtcctattggccatgagtt

SEQ ID NO: 766600 - DNA, 19 bp, Mus musculus
  siRNA target sequence for MOR12-1 (NM_147084.1,348-366).
cctattggccatgagttat

SEQ ID NO: 766601 - DNA, 19 bp, Mus musculus
  siRNA target sequence for MOR12-1 (NM_147084.1,418-436).
ctgcctcggatcatatcca

SEQ ID NO: 766602 - DNA, 19 bp, Mus musculus
  siRNA target sequence for MOR12-1 (NM_147084.1,435-453).
catgggtctgggtattaca

SEQ ID NO: 766603 - DNA, 19 bp, Mus musculus
  siRNA target sequence for MOR12-1 (NM_147084.1,438-456).
gggtctgggtattacacta

SEQ ID NO: 766604 - DNA, 19 bp, Mus musculus
  siRNA target sequence for MOR12-1 (NM_147084.1,439-457).
ggtctgggtattacactaa

SEQ ID NO: 766605 - DNA, 19 bp, Mus musculus
  siRNA target sequence for MOR12-1 (NM_147084.1,440-458).
gtctgggtattacactaaa

SEQ ID NO: 766606 - DNA, 19 bp, Mus musculus
  siRNA target sequence for MOR12-1 (NM_147084.1,444-462).
gggtattacactaaagagt

SEQ ID NO: 766607 - DNA, 19 bp, Mus musculus
  siRNA target sequence for MOR12-1 (NM_147084.1,474-492).
ggccccacttccaattctt

SEQ ID NO: 766608 - DNA, 19 bp, Mus musculus
  siRNA target sequence for MOR12-1 (NM_147084.1,478-496).
ccacttccaattcttttaa

SEQ ID NO: 766609 - DNA, 19 bp, Mus musculus
  siRNA target sequence for MOR12-1 (NM_147084.1,502-520).
ctaccatattgtcacataa

SEQ ID NO: 766610 - DNA, 19 bp, Mus musculus
  siRNA target sequence for MOR12-1 (NM_147084.1,542-560).
gccttcactcagacttgat

SEQ ID NO: 766611 - DNA, 19 bp, Mus musculus
  siRNA target sequence for MOR12-1 (NM_147084.1,574-592).
gcagatactaggttgaata

SEQ ID NO: 766612 - DNA, 19 bp, Mus musculus
  siRNA target sequence for MOR12-1 (NM_147084.1,577-595).
gatactaggttgaatagca

SEQ ID NO: 766613 - DNA, 19 bp, Mus musculus
  siRNA target sequence for MOR12-1 (NM_147084.1,629-647).
ggctggactcattactcat

SEQ ID NO: 766614 - DNA, 19 bp, Mus musculus
  siRNA target sequence for MOR12-1 (NM_147084.1,656-674).
cttatgggctcattcttta

SEQ ID NO: 766615 - DNA, 19 bp, Mus musculus
  siRNA target sequence for MOR12-1 (NM_147084.1,817-835).
gtggtccacacacttatgt

SEQ ID NO: 766616 - DNA, 19 bp, Mus musculus
  siRNA target sequence for MOR12-1 (NM_147084.1,836-854).
cgagcatctatctgtttgt

SEQ ID NO: 766617 - DNA, 19 bp, Mus musculus
  siRNA target sequence for MOR12-1 (NM_147084.1,888-906).
gaaaacccgtccaatccaa

SEQ ID NO: 766618 - DNA, 19 bp, Mus musculus
  siRNA target sequence for MOR12-1 (NM_147084.1,907-925).
cagggaattgccaacttgt

SEQ ID NO: 766619 - DNA, 19 bp, Mus musculus
  siRNA target sequence for MOR12-1 (NM_147084.1,910-928).
ggaattgccaacttgttct

SEQ ID NO: 766620 - DNA, 19 bp, Mus musculus
  siRNA target sequence for MOR12-1 (NM_147084.1,929-947).
cgtgcaagaagggatctat

SEQ ID NO: 766621 - DNA, 19 bp, Mus musculus
  siRNA target sequence for MOR21-1 (NM_147085.1,7-25).
ccattgtccgcccaagata

SEQ ID NO: 766622 - DNA, 19 bp, Mus musculus
  siRNA target sequence for MOR21-1 (NM_147085.1,109-127).
gtgcctctcatcactatct

SEQ ID NO: 766623 - DNA, 19 bp, Mus musculus
  siRNA target sequence for MOR21-1 (NM_147085.1,541-559).
gtcctgacacattcttact

SEQ ID NO: 766624 - DNA, 19 bp, Mus musculus
  siRNA target sequence for MOR14-5 (NM_147086.1,450-468).
cattactcggggaactcta

SEQ ID NO: 766625 - DNA, 19 bp, Mus musculus
  siRNA target sequence for MOR14-5 (NM_147086.1,455-473).
ctcggggaactctaatcca

SEQ ID NO: 766626 - DNA, 19 bp, Mus musculus
  siRNA target sequence for MOR14-4 (NM_147087.1,433-451).
cttactaattctagaatca

SEQ ID NO: 766627 - DNA, 19 bp, Mus musculus
  siRNA target sequence for MOR14-4 (NM_147087.1,477-495).
gcgcactctacttttaata

SEQ ID NO: 766628 - DNA, 19 bp, Mus musculus
  siRNA target sequence for MOR14-4 (NM_147087.1,478-496).
cgcactctacttttaataa

SEQ ID NO: 766629 - DNA, 19 bp, Mus musculus
  siRNA target sequence for MOR30-1 (NM_147088.1,59-77).
cagggttggagaattatca

SEQ ID NO: 766630 - DNA, 19 bp, Mus musculus
  siRNA target sequence for MOR30-1 (NM_147088.1,61-79).
gggttggagaattatcaat

SEQ ID NO: 766631 - DNA, 19 bp, Mus musculus
  siRNA target sequence for MOR30-1 (NM_147088.1,253-271).
gccatactatggtttcaca

SEQ ID NO: 766632 - DNA, 19 bp, Mus musculus
  siRNA target sequence for MOR30-1 (NM_147088.1,811-829).
ccacgagttgtccatatca

SEQ ID NO: 766633 - DNA, 19 bp, Mus musculus
  siRNA target sequence for MOR30-1 (NM_147088.1,812-830).
cacgagttgtccatatcat

SEQ ID NO: 766634 - DNA, 19 bp, Mus musculus
  siRNA target sequence for MOR10-2 (NM_147089.1,26-44).
cccagcatctgtactttat

SEQ ID NO: 766635 - DNA, 19 bp, Mus musculus
  siRNA target sequence for MOR10-2 (NM_147089.1,28-46).
cagcatctgtactttatct

SEQ ID NO: 766636 - DNA, 19 bp, Mus musculus
  siRNA target sequence for MOR10-2 (NM_147089.1,93-111).
cccattgggcgctatatat

SEQ ID NO: 766637 - DNA, 19 bp, Mus musculus
  siRNA target sequence for MOR10-2 (NM_147089.1,95-113).
cattgggcgctatatatgt

SEQ ID NO: 766638 - DNA, 19 bp, Mus musculus
  siRNA target sequence for MOR10-2 (NM_147089.1,99-117).
gggcgctatatatgtcatt

SEQ ID NO: 766639 - DNA, 19 bp, Mus musculus
  siRNA target sequence for MOR10-2 (NM_147089.1,136-154).
gtcatcatctctacaatca

SEQ ID NO: 766640 - DNA, 19 bp, Mus musculus
  siRNA target sequence for MOR10-2 (NM_147089.1,242-260).
catctatgctaggcatatt

SEQ ID NO: 766641 - DNA, 19 bp, Mus musculus
  siRNA target sequence for MOR10-2 (NM_147089.1,341-359).
caggagtgctagttgcaat

SEQ ID NO: 766642 - DNA, 19 bp, Mus musculus
  siRNA target sequence for MOR10-2 (NM_147089.1,384-402).
ctggagccctcttagatat

SEQ ID NO: 766643 - DNA, 19 bp, Mus musculus
  siRNA target sequence for MOR10-2 (NM_147089.1,416-434).
ccaatggtgtggtctgtaa

SEQ ID NO: 766644 - DNA, 19 bp, Mus musculus
  siRNA target sequence for MOR10-2 (NM_147089.1,495-513).
caagaggctccctttttat

SEQ ID NO: 766645 - DNA, 19 bp, Mus musculus
  siRNA target sequence for MOR10-2 (NM_147089.1,602-620).
gccttatagctgtcatctt

SEQ ID NO: 766646 - DNA, 19 bp, Mus musculus
  siRNA target sequence for MOR10-2 (NM_147089.1,603-621).
ccttatagctgtcatcttt

SEQ ID NO: 766647 - DNA, 19 bp, Mus musculus
  siRNA target sequence for MOR10-2 (NM_147089.1,604-622).
cttatagctgtcatcttta

SEQ ID NO: 766648 - DNA, 19 bp, Mus musculus
  siRNA target sequence for MOR10-2 (NM_147089.1,618-636).
ctttaccaagggttctgat

SEQ ID NO: 766649 - DNA, 19 bp, Mus musculus
  siRNA target sequence for MOR6-1 (NM_147090.1,54-72).
cccaggccttgaaactaga

SEQ ID NO: 766650 - DNA, 19 bp, Mus musculus
  siRNA target sequence for MOR6-1 (NM_147090.1,55-73).
ccaggccttgaaactagat

SEQ ID NO: 766651 - DNA, 19 bp, Mus musculus
  siRNA target sequence for MOR6-1 (NM_147090.1,56-74).
caggccttgaaactagata

SEQ ID NO: 766652 - DNA, 19 bp, Mus musculus
  siRNA target sequence for MOR6-1 (NM_147090.1,319-337).
gttttctcaattattgagt

SEQ ID NO: 766653 - DNA, 19 bp, Mus musculus
  siRNA target sequence for MOR6-1 (NM_147090.1,502-520).
cagtatcgggttatcaata

SEQ ID NO: 766654 - DNA, 19 bp, Mus musculus
  siRNA target sequence for MOR6-1 (NM_147090.1,504-522).
gtatcgggttatcaatata

SEQ ID NO: 766655 - DNA, 19 bp, Mus musculus
  siRNA target sequence for MOR6-1 (NM_147090.1,508-526).
cgggttatcaatatactct

SEQ ID NO: 766656 - DNA, 19 bp, Mus musculus
  siRNA target sequence for MOR6-1 (NM_147090.1,577-595).
cgctgggtcagcagcattt

SEQ ID NO: 766657 - DNA, 19 bp, Mus musculus
  siRNA target sequence for MOR6-1 (NM_147090.1,579-597).
ctgggtcagcagcatttat

SEQ ID NO: 766658 - DNA, 19 bp, Mus musculus
  siRNA target sequence for MOR6-1 (NM_147090.1,660-678).
cctcatcctgggtactgtt

SEQ ID NO: 766659 - DNA, 19 bp, Mus musculus
  siRNA target sequence for MOR6-1 (NM_147090.1,661-679).
ctcatcctgggtactgttt

SEQ ID NO: 766660 - DNA, 19 bp, Mus musculus
  siRNA target sequence for MOR6-1 (NM_147090.1,669-687).
gggtactgttttgagtata

SEQ ID NO: 766661 - DNA, 19 bp, Mus musculus
  siRNA target sequence for MOR6-1 (NM_147090.1,692-710).
ccaaagcagaaaggataaa

SEQ ID NO: 766662 - DNA, 19 bp, Mus musculus
  siRNA target sequence for MOR6-1 (NM_147090.1,742-760).
gctgtacttactttctata

SEQ ID NO: 766663 - DNA, 19 bp, Mus musculus
  siRNA target sequence for MOR6-1 (NM_147090.1,752-770).
ctttctatacaccaatgat

SEQ ID NO: 766664 - DNA, 19 bp, Mus musculus
  siRNA target sequence for MOR6-1 (NM_147090.1,764-782).
caatgattgggctatccat

SEQ ID NO: 766665 - DNA, 19 bp, Mus musculus
  siRNA target sequence for MOR6-1 (NM_147090.1,790-808).
cgctatgggcagaatgctt

SEQ ID NO: 766666 - DNA, 19 bp, Mus musculus
  siRNA target sequence for MOR6-1 (NM_147090.1,812-830).
caattgtccacgtgatcat

SEQ ID NO: 766667 - DNA, 19 bp, Mus musculus
  siRNA target sequence for MOR6-1 (NM_147090.1,822-840).
cgtgatcatggccaatgta

SEQ ID NO: 766668 - DNA, 19 bp, Mus musculus
  siRNA target sequence for MOR6-1 (NM_147090.1,823-841).
gtgatcatggccaatgtat

SEQ ID NO: 766669 - DNA, 19 bp, Mus musculus
  siRNA target sequence for MOR14-3 (NM_147091.1,268-286).
gaagctcgagagatcaatt

SEQ ID NO: 766670 - DNA, 19 bp, Mus musculus
  siRNA target sequence for MOR14-3 (NM_147091.1,271-289).
gctcgagagatcaatttaa

SEQ ID NO: 766671 - DNA, 19 bp, Mus musculus
  siRNA target sequence for MOR14-3 (NM_147091.1,272-290).
ctcgagagatcaatttaaa

SEQ ID NO: 766672 - DNA, 19 bp, Mus musculus
  siRNA target sequence for MOR14-3 (NM_147091.1,312-330).
ctttctccatgggtttact

SEQ ID NO: 766673 - DNA, 19 bp, Mus musculus
  siRNA target sequence for MOR14-3 (NM_147091.1,458-476).
ggaatgttgccgtcatgtt

SEQ ID NO: 766674 - DNA, 19 bp, Mus musculus
  siRNA target sequence for MOR14-3 (NM_147091.1,478-496).
ccagttgtgctctttgtca

SEQ ID NO: 766675 - DNA, 19 bp, Mus musculus
  siRNA target sequence for MOR14-3 (NM_147091.1,515-533).
gttctctggttctttcaca

SEQ ID NO: 766676 - DNA, 19 bp, Mus musculus
  siRNA target sequence for MOR14-3 (NM_147091.1,520-538).
ctggttctttcacattcat

SEQ ID NO: 766677 - DNA, 19 bp, Mus musculus
  siRNA target sequence for MOR14-3 (NM_147091.1,536-554).
catactgctaccatgtaga

SEQ ID NO: 766678 - DNA, 19 bp, Mus musculus
  siRNA target sequence for MOR14-3 (NM_147091.1,556-574).
gtcatccagctctcatgta

SEQ ID NO: 766679 - DNA, 19 bp, Mus musculus
  siRNA target sequence for MOR14-3 (NM_147091.1,558-576).
catccagctctcatgtaca

SEQ ID NO: 766680 - DNA, 19 bp, Mus musculus
  siRNA target sequence for MOR14-3 (NM_147091.1,601-619).
ggtctgtttgcactattct

SEQ ID NO: 766681 - DNA, 19 bp, Mus musculus
  siRNA target sequence for MOR14-3 (NM_147091.1,715-733).
gccttcaatacatgcatat

SEQ ID NO: 766682 - DNA, 19 bp, Mus musculus
  siRNA target sequence for MOR14-3 (NM_147091.1,771-789).
catcagcttgtctcttgta

SEQ ID NO: 766683 - DNA, 19 bp, Mus musculus
  siRNA target sequence for MOR14-3 (NM_147091.1,910-928).
gctattctcaaggtgttaa

SEQ ID NO: 766684 - DNA, 19 bp, Mus musculus
  siRNA target sequence for MOR14-2 (NM_147092.1,217-235).
ctaggtctatgcctttcaa

SEQ ID NO: 766685 - DNA, 19 bp, Mus musculus
  siRNA target sequence for MOR14-2 (NM_147092.1,221-239).
gtctatgcctttcaacatt

SEQ ID NO: 766686 - DNA, 19 bp, Mus musculus
  siRNA target sequence for MOR14-2 (NM_147092.1,264-282).
gtttaatgttcgagaaatt

SEQ ID NO: 766687 - DNA, 19 bp, Mus musculus
  siRNA target sequence for MOR14-2 (NM_147092.1,392-410).
cactgaggtatgctatgat

SEQ ID NO: 766688 - DNA, 19 bp, Mus musculus
  siRNA target sequence for MOR14-2 (NM_147092.1,394-412).
ctgaggtatgctatgatct

SEQ ID NO: 766689 - DNA, 19 bp, Mus musculus
  siRNA target sequence for MOR14-2 (NM_147092.1,396-414).
gaggtatgctatgatctta

SEQ ID NO: 766690 - DNA, 19 bp, Mus musculus
  siRNA target sequence for MOR14-2 (NM_147092.1,434-452).
cagtgggttttgcaatcat

SEQ ID NO: 766691 - DNA, 19 bp, Mus musculus
  siRNA target sequence for MOR14-2 (NM_147092.1,438-456).
gggttttgcaatcataatt

SEQ ID NO: 766692 - DNA, 19 bp, Mus musculus
  siRNA target sequence for MOR14-2 (NM_147092.1,439-457).
ggttttgcaatcataatta

SEQ ID NO: 766693 - DNA, 19 bp, Mus musculus
  siRNA target sequence for MOR14-2 (NM_147092.1,459-477).
gggaaccaccgctcttgtt

SEQ ID NO: 766694 - DNA, 19 bp, Mus musculus
  siRNA target sequence for MOR14-2 (NM_147092.1,706-724).
cggaaaaaggcgtttggta

SEQ ID NO: 766695 - DNA, 19 bp, Mus musculus
  siRNA target sequence for MOR14-2 (NM_147092.1,780-798).
gtcattggtgcacagattt

SEQ ID NO: 766696 - DNA, 19 bp, Mus musculus
  siRNA target sequence for MOR14-2 (NM_147092.1,814-832).
ccctttgtgcacactctaa

SEQ ID NO: 766697 - DNA, 19 bp, Mus musculus
  siRNA target sequence for MOR14-2 (NM_147092.1,815-833).
cctttgtgcacactctaat

SEQ ID NO: 766698 - DNA, 19 bp, Mus musculus
  siRNA target sequence for MOR14-2 (NM_147092.1,852-870).
cattcctccggtaatgaat

SEQ ID NO: 766699 - DNA, 19 bp, Mus musculus
  siRNA target sequence for MOR14-2 (NM_147092.1,909-927).
ggccatgctgaaagtattt

SEQ ID NO: 766700 - DNA, 19 bp, Mus musculus
  siRNA target sequence for MOR17-2 (NM_147094.1,99-117).
ctgccttatctacattatt

SEQ ID NO: 766701 - DNA, 19 bp, Mus musculus
  siRNA target sequence for MOR17-2 (NM_147094.1,118-136).
ggggtaacagggaactgtt

SEQ ID NO: 766702 - DNA, 19 bp, Mus musculus
  siRNA target sequence for MOR17-2 (NM_147094.1,134-152).
gttccatcttgcacattgt

SEQ ID NO: 766703 - DNA, 19 bp, Mus musculus
  siRNA target sequence for MOR17-2 (NM_147094.1,235-253).
gctatggtatcacttttca

SEQ ID NO: 766704 - DNA, 19 bp, Mus musculus
  siRNA target sequence for MOR17-2 (NM_147094.1,450-468).
cttacttcggagtgctatt

SEQ ID NO: 766705 - DNA, 19 bp, Mus musculus
  siRNA target sequence for MOR17-2 (NM_147094.1,486-504).
ggttcgtctagcattcttt

SEQ ID NO: 766706 - DNA, 19 bp, Mus musculus
  siRNA target sequence for MOR17-2 (NM_147094.1,487-505).
gttcgtctagcattctttt

SEQ ID NO: 766707 - DNA, 19 bp, Mus musculus
  siRNA target sequence for MOR17-2 (NM_147094.1,572-590).
gcgctgacatcaggtttaa

SEQ ID NO: 766708 - DNA, 19 bp, Mus musculus
  siRNA target sequence for MOR17-2 (NM_147094.1,573-591).
cgctgacatcaggtttaat

SEQ ID NO: 766709 - DNA, 19 bp, Mus musculus
  siRNA target sequence for MOR17-2 (NM_147094.1,579-597).
catcaggtttaatgttata

SEQ ID NO: 766710 - DNA, 19 bp, Mus musculus
  siRNA target sequence for MOR17-2 (NM_147094.1,600-618).
cggaatggtggtgattctt

SEQ ID NO: 766711 - DNA, 19 bp, Mus musculus
  siRNA target sequence for MOR17-2 (NM_147094.1,602-620).
gaatggtggtgattcttat

SEQ ID NO: 766712 - DNA, 19 bp, Mus musculus
  siRNA target sequence for MOR17-2 (NM_147094.1,633-651).
ggattctttgggtatttta

SEQ ID NO: 766713 - DNA, 19 bp, Mus musculus
  siRNA target sequence for MOR17-2 (NM_147094.1,642-660).
gggtattttaataacttat

SEQ ID NO: 766714 - DNA, 19 bp, Mus musculus
  siRNA target sequence for MOR17-2 (NM_147094.1,815-833).
cctttgttcatatcttcat

SEQ ID NO: 766715 - DNA, 19 bp, Mus musculus
  siRNA target sequence for MOR17-2 (NM_147094.1,907-925).
caaggaatattccatttga

SEQ ID NO: 766716 - DNA, 19 bp, Mus musculus
  siRNA target sequence for MOR32-1 (NM_147095.1,5-23).
ccaacatcaacctactaca

SEQ ID NO: 766717 - DNA, 19 bp, Mus musculus
  siRNA target sequence for MOR32-1 (NM_147095.1,22-40).
cagaatgcccccagtaata

SEQ ID NO: 766718 - DNA, 19 bp, Mus musculus
  siRNA target sequence for MOR32-1 (NM_147095.1,132-150).
gtatctgaccgctcttgtt

SEQ ID NO: 766719 - DNA, 19 bp, Mus musculus
  siRNA target sequence for MOR32-1 (NM_147095.1,180-198).
gactgacaggacctttcat

SEQ ID NO: 766720 - DNA, 19 bp, Mus musculus
  siRNA target sequence for MOR32-1 (NM_147095.1,182-200).
ctgacaggacctttcatca

SEQ ID NO: 766721 - DNA, 19 bp, Mus musculus
  siRNA target sequence for MOR32-1 (NM_147095.1,221-239).
ctatgctgtctgtgattga

SEQ ID NO: 766722 - DNA, 19 bp, Mus musculus
  siRNA target sequence for MOR32-1 (NM_147095.1,225-243).
gctgtctgtgattgactta

SEQ ID NO: 766723 - DNA, 19 bp, Mus musculus
  siRNA target sequence for MOR32-1 (NM_147095.1,226-244).
ctgtctgtgattgacttaa

SEQ ID NO: 766724 - DNA, 19 bp, Mus musculus
  siRNA target sequence for MOR32-1 (NM_147095.1,466-484).
gtcctcgtggttatacgaa

SEQ ID NO: 766725 - DNA, 19 bp, Mus musculus
  siRNA target sequence for MOR32-1 (NM_147095.1,491-509).
gtatgattgtccccataat

SEQ ID NO: 766726 - DNA, 19 bp, Mus musculus
  siRNA target sequence for MOR32-1 (NM_147095.1,495-513).
gattgtccccataattttt

SEQ ID NO: 766727 - DNA, 19 bp, Mus musculus
  siRNA target sequence for MOR32-1 (NM_147095.1,530-548).
cttactgtggacatagaat

SEQ ID NO: 766728 - DNA, 19 bp, Mus musculus
  siRNA target sequence for MOR32-1 (NM_147095.1,602-620).
gcatcagagccaatatcta

SEQ ID NO: 766729 - DNA, 19 bp, Mus musculus
  siRNA target sequence for MOR32-1 (NM_147095.1,625-643).
ggtcttgggaatatttcaa

SEQ ID NO: 766730 - DNA, 19 bp, Mus musculus
  siRNA target sequence for MOR32-1 (NM_147095.1,730-748).
ctaaaggctcttaatacgt

SEQ ID NO: 766731 - DNA, 19 bp, Mus musculus
  siRNA target sequence for MOR32-1 (NM_147095.1,747-765).
gtgtagctcccatatctgt

SEQ ID NO: 766732 - DNA, 19 bp, Mus musculus
  siRNA target sequence for MOR32-1 (NM_147095.1,823-841).
cacaacatccctcagtata

SEQ ID NO: 766733 - DNA, 19 bp, Mus musculus
  siRNA target sequence for MOR32-1 (NM_147095.1,828-846).
catccctcagtatattcat

SEQ ID NO: 766734 - DNA, 19 bp, Mus musculus
  siRNA target sequence for MOR32-1 (NM_147095.1,833-851).
ctcagtatattcatatcct

SEQ ID NO: 766735 - DNA, 19 bp, Mus musculus
  siRNA target sequence for MOR22-1 (NM_147097.1,297-315).
cacttttggggaattctct

SEQ ID NO: 766736 - DNA, 19 bp, Mus musculus
  siRNA target sequence for MOR22-1 (NM_147097.1,312-330).
ctctactcctagttgtcat

SEQ ID NO: 766737 - DNA, 19 bp, Mus musculus
  siRNA target sequence for MOR22-1 (NM_147097.1,364-382).
cctctttctagcaatgctt

SEQ ID NO: 766738 - DNA, 19 bp, Mus musculus
  siRNA target sequence for MOR22-1 (NM_147097.1,384-402).
gagcaacagatatttctct

SEQ ID NO: 766739 - DNA, 19 bp, Mus musculus
  siRNA target sequence for MOR22-1 (NM_147097.1,386-404).
gcaacagatatttctctta

SEQ ID NO: 766740 - DNA, 19 bp, Mus musculus
  siRNA target sequence for MOR22-1 (NM_147097.1,405-423).
gcacttccatcttaccaaa

SEQ ID NO: 766741 - DNA, 19 bp, Mus musculus
  siRNA target sequence for MOR22-1 (NM_147097.1,412-430).
catcttaccaaaaatgcta

SEQ ID NO: 766742 - DNA, 19 bp, Mus musculus
  siRNA target sequence for MOR22-1 (NM_147097.1,502-520).
cttccagggtattgaatca

SEQ ID NO: 766743 - DNA, 19 bp, Mus musculus
  siRNA target sequence for MOR22-1 (NM_147097.1,598-616).
gcgactcctcactcaaata

SEQ ID NO: 766744 - DNA, 19 bp, Mus musculus
  siRNA target sequence for MOR22-1 (NM_147097.1,691-709).
ctactggaccactgttgtt

SEQ ID NO: 766745 - DNA, 19 bp, Mus musculus
  siRNA target sequence for MOR22-1 (NM_147097.1,801-819).
gtatacttggactagacat

SEQ ID NO: 766746 - DNA, 19 bp, Mus musculus
  siRNA target sequence for MOR22-1 (NM_147097.1,806-824).
cttggactagacataattt

SEQ ID NO: 766747 - DNA, 19 bp, Mus musculus
  siRNA target sequence for MOR22-1 (NM_147097.1,826-844).
catcacactttcctacatt

SEQ ID NO: 766748 - DNA, 19 bp, Mus musculus
  siRNA target sequence for MOR22-1 (NM_147097.1,833-851).
ctttcctacattagaatat

SEQ ID NO: 766749 - DNA, 19 bp, Mus musculus
  siRNA target sequence for MOR22-1 (NM_147097.1,837-855).
cctacattagaatatttat

SEQ ID NO: 766750 - DNA, 19 bp, Mus musculus
  siRNA target sequence for MOR22-1 (NM_147097.1,909-927).
gcgttgcccatatttgtgt

SEQ ID NO: 766751 - DNA, 19 bp, Mus musculus
  siRNA target sequence for MOR22-1 (NM_147097.1,981-999).
gctaccatgttccatctta

SEQ ID NO: 766752 - DNA, 19 bp, Mus musculus
  siRNA target sequence for MOR22-1 (NM_147097.1,985-1003).
ccatgttccatcttacatt

SEQ ID NO: 766753 - DNA, 19 bp, Mus musculus
  siRNA target sequence for MOR22-1 (NM_147097.1,1012-1030).
cctgtccaacctttaccta

SEQ ID NO: 766754 - DNA, 19 bp, Mus musculus
  siRNA target sequence for MOR22-1 (NM_147097.1,1017-1035).
ccaacctttacctacttgt

SEQ ID NO: 766755 - DNA, 19 bp, Mus musculus
  siRNA target sequence for MOR22-1 (NM_147097.1,1085-1103).
cgagatcaagtgtccaaaa

SEQ ID NO: 766756 - DNA, 19 bp, Mus musculus
  siRNA target sequence for MOR22-1 (NM_147097.1,1096-1114).
gtccaaaattttgtattgt

SEQ ID NO: 766757 - DNA, 19 bp, Mus musculus
  siRNA target sequence for MOR17-1 (NM_147098.1,344-362).
ccaccatgatgtcactttt

SEQ ID NO: 766758 - DNA, 19 bp, Mus musculus
  siRNA target sequence for MOR17-1 (NM_147098.1,556-574).
gctgctctgctcagaagtt

SEQ ID NO: 766759 - DNA, 19 bp, Mus musculus
  siRNA target sequence for MOR17-1 (NM_147098.1,567-585).
cagaagttctattttgata

SEQ ID NO: 766760 - DNA, 19 bp, Mus musculus
  siRNA target sequence for MOR17-1 (NM_147098.1,690-708).
catcagattcaatgtcata

SEQ ID NO: 766761 - DNA, 19 bp, Mus musculus
  siRNA target sequence for MOR17-1 (NM_147098.1,712-730).
ggactagtactcattactt

SEQ ID NO: 766762 - DNA, 19 bp, Mus musculus
  siRNA target sequence for MOR17-1 (NM_147098.1,747-765).
ctccctgggcatttttgta

SEQ ID NO: 766763 - DNA, 19 bp, Mus musculus
  siRNA target sequence for MOR17-1 (NM_147098.1,1043-1061).
ctccaaaaatcagttctat

SEQ ID NO: 766764 - DNA, 19 bp, Mus musculus
  siRNA target sequence for MOR17-1 (NM_147098.1,1045-1063).
ccaaaaatcagttctatta

SEQ ID NO: 766765 - DNA, 19 bp, Mus musculus
  siRNA target sequence for MOR19-1 (NM_147099.1,31-49).
ccacctacccttcttctaa

SEQ ID NO: 766766 - DNA, 19 bp, Mus musculus
  siRNA target sequence for MOR19-1 (NM_147099.1,167-185).
gccttcatgagcctcaata

SEQ ID NO: 766767 - DNA, 19 bp, Mus musculus
  siRNA target sequence for MOR19-1 (NM_147099.1,178-196).
cctcaatacatattcctat

SEQ ID NO: 766768 - DNA, 19 bp, Mus musculus
  siRNA target sequence for MOR19-1 (NM_147099.1,181-199).
caatacatattcctatcta

SEQ ID NO: 766769 - DNA, 19 bp, Mus musculus
  siRNA target sequence for MOR19-1 (NM_147099.1,217-235).
gttggtctctctgtatcaa

SEQ ID NO: 766770 - DNA, 19 bp, Mus musculus
  siRNA target sequence for MOR19-1 (NM_147099.1,241-259).
ccgacagtactgaatgtct

SEQ ID NO: 766771 - DNA, 19 bp, Mus musculus
  siRNA target sequence for MOR19-1 (NM_147099.1,242-260).
cgacagtactgaatgtctt

SEQ ID NO: 766772 - DNA, 19 bp, Mus musculus
  siRNA target sequence for MOR19-1 (NM_147099.1,416-434).
cccccactcggattattaa

SEQ ID NO: 766773 - DNA, 19 bp, Mus musculus
  siRNA target sequence for MOR19-1 (NM_147099.1,439-457).
ggacttgcagctgttgtta

SEQ ID NO: 766774 - DNA, 19 bp, Mus musculus
  siRNA target sequence for MOR19-1 (NM_147099.1,458-476).
ggggtgtgatgttaatgat

SEQ ID NO: 766775 - DNA, 19 bp, Mus musculus
  siRNA target sequence for MOR19-1 (NM_147099.1,520-538).
gtcatactgtcccattgtt

SEQ ID NO: 766776 - DNA, 19 bp, Mus musculus
  siRNA target sequence for MOR19-1 (NM_147099.1,591-609).
catcatctatggattgtct

SEQ ID NO: 766777 - DNA, 19 bp, Mus musculus
  siRNA target sequence for MOR19-1 (NM_147099.1,640-658).
gtatttattgtcatctctt

SEQ ID NO: 766778 - DNA, 19 bp, Mus musculus
  siRNA target sequence for MOR19-1 (NM_147099.1,908-926).
ctgcagtgtgcaaaatatt

SEQ ID NO: 766779 - DNA, 19 bp, Mus musculus
  siRNA target sequence for MOR19-1 (NM_147099.1,910-928).
gcagtgtgcaaaatattta

SEQ ID NO: 766780 - DNA, 19 bp, Mus musculus
  siRNA target sequence for MOR20-1 (NM_147100.1,3-21).
gtcagatgtgaatactact

SEQ ID NO: 766781 - DNA, 19 bp, Mus musculus
  siRNA target sequence for MOR20-1 (NM_147100.1,155-173).
cggagcagaatcttcatga

SEQ ID NO: 766782 - DNA, 19 bp, Mus musculus
  siRNA target sequence for MOR20-1 (NM_147100.1,172-190).
gaaccccagttctattttt

SEQ ID NO: 766783 - DNA, 19 bp, Mus musculus
  siRNA target sequence for MOR20-1 (NM_147100.1,198-216).
gctagccctcactgatctt

SEQ ID NO: 766784 - DNA, 19 bp, Mus musculus
  siRNA target sequence for MOR20-1 (NM_147100.1,209-227).
ctgatcttggcctctcatt

SEQ ID NO: 766785 - DNA, 19 bp, Mus musculus
  siRNA target sequence for MOR20-1 (NM_147100.1,389-407).
cactaacctacactagaat

SEQ ID NO: 766786 - DNA, 19 bp, Mus musculus
  siRNA target sequence for MOR20-1 (NM_147100.1,566-584).
cctgcggagatgtcacatt

SEQ ID NO: 766787 - DNA, 19 bp, Mus musculus
  siRNA target sequence for MOR20-1 (NM_147100.1,620-638).
catttgcagtggacgtaat

SEQ ID NO: 766788 - DNA, 19 bp, Mus musculus
  siRNA target sequence for MOR20-1 (NM_147100.1,625-643).
gcagtggacgtaatcttca

SEQ ID NO: 766789 - DNA, 19 bp, Mus musculus
  siRNA target sequence for MOR20-1 (NM_147100.1,626-644).
cagtggacgtaatcttcat

SEQ ID NO: 766790 - DNA, 19 bp, Mus musculus
  siRNA target sequence for MOR20-1 (NM_147100.1,628-646).
gtggacgtaatcttcatct

SEQ ID NO: 766791 - DNA, 19 bp, Mus musculus
  siRNA target sequence for MOR20-1 (NM_147100.1,630-648).
ggacgtaatcttcatctta

SEQ ID NO: 766792 - DNA, 19 bp, Mus musculus
  siRNA target sequence for MOR20-1 (NM_147100.1,633-651).
cgtaatcttcatcttagta

SEQ ID NO: 766793 - DNA, 19 bp, Mus musculus
  siRNA target sequence for MOR20-1 (NM_147100.1,694-712).
caagatcgaaactggaaat

SEQ ID NO: 766794 - DNA, 19 bp, Mus musculus
  siRNA target sequence for MOR20-1 (NM_147100.1,743-761).
cagtgctggtgttttactt

SEQ ID NO: 766795 - DNA, 19 bp, Mus musculus
  siRNA target sequence for MOR31-3 (NM_147101.1,137-155).
ctctcatccttgtaatcat

SEQ ID NO: 766796 - DNA, 19 bp, Mus musculus
  siRNA target sequence for MOR31-3 (NM_147101.1,208-226).
gcggctgacctcatcttgt

SEQ ID NO: 766797 - DNA, 19 bp, Mus musculus
  siRNA target sequence for MOR31-3 (NM_147101.1,247-265).
gctctggccatattttggt

SEQ ID NO: 766798 - DNA, 19 bp, Mus musculus
  siRNA target sequence for MOR31-3 (NM_147101.1,315-333).
catccatgctaccttcatt

SEQ ID NO: 766799 - DNA, 19 bp, Mus musculus
  siRNA target sequence for MOR31-3 (NM_147101.1,335-353).
ccgagtcggggattttgct

SEQ ID NO: 766800 - DNA, 19 bp, Mus musculus
  siRNA target sequence for MOR31-3 (NM_147101.1,414-432).
cagtcatgtgataattgtt

SEQ ID NO: 766801 - DNA, 19 bp, Mus musculus
  siRNA target sequence for MOR31-3 (NM_147101.1,450-468).
ggtcctgagaagtttctgt

SEQ ID NO: 766802 - DNA, 19 bp, Mus musculus
  siRNA target sequence for MOR31-3 (NM_147101.1,563-581).
ggtttgcctgtgctgatat

SEQ ID NO: 766803 - DNA, 19 bp, Mus musculus
  siRNA target sequence for MOR31-3 (NM_147101.1,575-593).
ctgatattcgcgtcaatgt

SEQ ID NO: 766804 - DNA, 19 bp, Mus musculus
  siRNA target sequence for MOR31-3 (NM_147101.1,577-595).
gatattcgcgtcaatgttt

SEQ ID NO: 766805 - DNA, 19 bp, Mus musculus
  siRNA target sequence for MOR31-3 (NM_147101.1,651-669).
ggtctcctacggtctcatt

SEQ ID NO: 766806 - DNA, 19 bp, Mus musculus
  siRNA target sequence for MOR31-3 (NM_147101.1,654-672).
ctcctacggtctcattctt

SEQ ID NO: 766807 - DNA, 19 bp, Mus musculus
  siRNA target sequence for MOR31-3 (NM_147101.1,656-674).
cctacggtctcattcttca

SEQ ID NO: 766808 - DNA, 19 bp, Mus musculus
  siRNA target sequence for MOR31-3 (NM_147101.1,743-761).
gggttatttccatgtttta

SEQ ID NO: 766809 - DNA, 19 bp, Mus musculus
  siRNA target sequence for MOR31-3 (NM_147101.1,885-903).
gatcaaaaccagacagatt

SEQ ID NO: 766810 - DNA, 19 bp, Mus musculus
  siRNA target sequence for MOR31-3 (NM_147101.1,900-918).
gattcgtgagcgtgtacta

SEQ ID NO: 766811 - DNA, 19 bp, Mus musculus
  siRNA target sequence for MOR31-3 (NM_147101.1,904-922).
cgtgagcgtgtactaagtt

SEQ ID NO: 766812 - DNA, 19 bp, Mus musculus
  siRNA target sequence for MOR31-3 (NM_147101.1,907-925).
gagcgtgtactaagttctt

SEQ ID NO: 766813 - DNA, 19 bp, Mus musculus
  siRNA target sequence for MOR31-3 (NM_147101.1,910-928).
cgtgtactaagttctttgt

SEQ ID NO: 766814 - DNA, 19 bp, Mus musculus
  siRNA target sequence for MOR28-1 (NM_147102.1,59-77).
caggcctagagcacttaca

SEQ ID NO: 766815 - DNA, 19 bp, Mus musculus
  siRNA target sequence for MOR28-1 (NM_147102.1,62-80).
gcctagagcacttacatat

SEQ ID NO: 766816 - DNA, 19 bp, Mus musculus
  siRNA target sequence for MOR28-1 (NM_147102.1,63-81).
cctagagcacttacatatt

SEQ ID NO: 766817 - DNA, 19 bp, Mus musculus
  siRNA target sequence for MOR28-1 (NM_147102.1,64-82).
ctagagcacttacatattt

SEQ ID NO: 766818 - DNA, 19 bp, Mus musculus
  siRNA target sequence for MOR28-1 (NM_147102.1,67-85).
gagcacttacatatttgga

SEQ ID NO: 766819 - DNA, 19 bp, Mus musculus
  siRNA target sequence for MOR28-1 (NM_147102.1,197-215).
ccatgttggcagcaataga

SEQ ID NO: 766820 - DNA, 19 bp, Mus musculus
  siRNA target sequence for MOR28-1 (NM_147102.1,267-285).
cagggatcgggaaatcaat

SEQ ID NO: 766821 - DNA, 19 bp, Mus musculus
  siRNA target sequence for MOR28-1 (NM_147102.1,269-287).
gggatcgggaaatcaattt

SEQ ID NO: 766822 - DNA, 19 bp, Mus musculus
  siRNA target sequence for MOR28-1 (NM_147102.1,420-438).
gcccctcatcatcaagatt

SEQ ID NO: 766823 - DNA, 19 bp, Mus musculus
  siRNA target sequence for MOR28-1 (NM_147102.1,455-473).
ctcgggctgtgacactaat

SEQ ID NO: 766824 - DNA, 19 bp, Mus musculus
  siRNA target sequence for MOR28-1 (NM_147102.1,459-477).
ggctgtgacactaatgact

SEQ ID NO: 766825 - DNA, 19 bp, Mus musculus
  siRNA target sequence for MOR28-1 (NM_147102.1,510-528).
ctgtcgaggcacagtgatt

SEQ ID NO: 766826 - DNA, 19 bp, Mus musculus
  siRNA target sequence for MOR28-1 (NM_147102.1,574-592).
ggggacacacgcttcaata

SEQ ID NO: 766827 - DNA, 19 bp, Mus musculus
  siRNA target sequence for MOR28-1 (NM_147102.1,575-593).
gggacacacgcttcaataa

SEQ ID NO: 766828 - DNA, 19 bp, Mus musculus
  siRNA target sequence for MOR28-1 (NM_147102.1,577-595).
gacacacgcttcaataaca

SEQ ID NO: 766829 - DNA, 19 bp, Mus musculus
  siRNA target sequence for MOR28-1 (NM_147102.1,581-599).
cacgcttcaataacatcta

SEQ ID NO: 766830 - DNA, 19 bp, Mus musculus
  siRNA target sequence for MOR28-1 (NM_147102.1,812-830).
ctcctcatgtccacatact

SEQ ID NO: 766831 - DNA, 19 bp, Mus musculus
  siRNA target sequence for MOR28-1 (NM_147102.1,888-906).
caagactaagcagattaga

SEQ ID NO: 766832 - DNA, 19 bp, Mus musculus
  siRNA target sequence for MOR28-1 (NM_147102.1,900-918).
gattagagagcgagtctta

SEQ ID NO: 766833 - DNA, 19 bp, Mus musculus
  siRNA target sequence for MOR28-1 (NM_147102.1,911-929).
gagtcttagggctattcct

SEQ ID NO: 766834 - DNA, 19 bp, Mus musculus
  siRNA target sequence for MOR28-1 (NM_147102.1,922-940).
ctattcctcagaaaggatt

SEQ ID NO: 766835 - DNA, 19 bp, Mus musculus
  siRNA target sequence for MOR10-1 (NM_147103.1,24-42).
caatcaccatagcttcatt

SEQ ID NO: 766836 - DNA, 19 bp, Mus musculus
  siRNA target sequence for MOR10-1 (NM_147103.1,28-46).
caccatagcttcattctga

SEQ ID NO: 766837 - DNA, 19 bp, Mus musculus
  siRNA target sequence for MOR10-1 (NM_147103.1,97-115).
ggctttctctacacactaa

SEQ ID NO: 766838 - DNA, 19 bp, Mus musculus
  siRNA target sequence for MOR10-1 (NM_147103.1,134-152).
ccatcctagcagttgtcaa

SEQ ID NO: 766839 - DNA, 19 bp, Mus musculus
  siRNA target sequence for MOR10-1 (NM_147103.1,201-219).
ggctctgactgatgttagt

SEQ ID NO: 766840 - DNA, 19 bp, Mus musculus
  siRNA target sequence for MOR10-1 (NM_147103.1,203-221).
ctctgactgatgttagtct

SEQ ID NO: 766841 - DNA, 19 bp, Mus musculus
  siRNA target sequence for MOR10-1 (NM_147103.1,385-403).
gacccattgcgttatgctt

SEQ ID NO: 766842 - DNA, 19 bp, Mus musculus
  siRNA target sequence for MOR10-1 (NM_147103.1,394-412).
cgttatgcttccatcctta

SEQ ID NO: 766843 - DNA, 19 bp, Mus musculus
  siRNA target sequence for MOR10-1 (NM_147103.1,408-426).
ccttactcatgggcttatt

SEQ ID NO: 766844 - DNA, 19 bp, Mus musculus
  siRNA target sequence for MOR10-1 (NM_147103.1,475-493).
ccagtgccctttcttataa

SEQ ID NO: 766845 - DNA, 19 bp, Mus musculus
  siRNA target sequence for MOR10-1 (NM_147103.1,539-557).
gtcttcaccaagatgcaat

SEQ ID NO: 766846 - DNA, 19 bp, Mus musculus
  siRNA target sequence for MOR10-1 (NM_147103.1,591-609).
cctctatggcctcattgtt

SEQ ID NO: 766847 - DNA, 19 bp, Mus musculus
  siRNA target sequence for MOR10-1 (NM_147103.1,626-644).
ggctcgatgctctcatcat

SEQ ID NO: 766848 - DNA, 19 bp, Mus musculus
  siRNA target sequence for MOR16-1 (NM_147104.1,123-141).
gggcaacagcgttatcctt

SEQ ID NO: 766849 - DNA, 19 bp, Mus musculus
  siRNA target sequence for MOR16-1 (NM_147104.1,155-173).
cggatccagccttacatga

SEQ ID NO: 766850 - DNA, 19 bp, Mus musculus
  siRNA target sequence for MOR16-1 (NM_147104.1,271-289).
cgggagctgcccttcgatt

SEQ ID NO: 766851 - DNA, 19 bp, Mus musculus
  siRNA target sequence for MOR16-1 (NM_147104.1,897-915).
gatccgtcagggcttctta

SEQ ID NO: 766852 - DNA, 19 bp, Mus musculus
  siRNA target sequence for MOR16-1 (NM_147104.1,928-946).
cagaagagggttgatattt

SEQ ID NO: 766853 - DNA, 19 bp, Mus musculus
  siRNA target sequence for MOR223-3 (NM_147105.1,916-934).
gtgcttcctcaggataaat

SEQ ID NO: 766854 - DNA, 19 bp, Mus musculus
  siRNA target sequence for MOR223-2 (NM_147106.1,469-487).
gtccagactacactgattt

SEQ ID NO: 766855 - DNA, 19 bp, Mus musculus
  siRNA target sequence for MOR223-2 (NM_147106.1,471-489).
ccagactacactgattttt

SEQ ID NO: 766856 - DNA, 19 bp, Mus musculus
  siRNA target sequence for MOR223-2 (NM_147106.1,476-494).
ctacactgatttttcattt

SEQ ID NO: 766857 - DNA, 19 bp, Mus musculus
  siRNA target sequence for MOR223-2 (NM_147106.1,509-527).
ccaatgagattcagcatta

SEQ ID NO: 766858 - DNA, 19 bp, Mus musculus
  siRNA target sequence for MOR223-2 (NM_147106.1,510-528).
caatgagattcagcattat

SEQ ID NO: 766859 - DNA, 19 bp, Mus musculus
  siRNA target sequence for MOR223-2 (NM_147106.1,894-912).
gtttaaactcaaagataaa

SEQ ID NO: 766860 - DNA, 19 bp, Mus musculus
  siRNA target sequence for MOR223-1 (NM_147108.1,14-32).
ctctagtgaccacattctt

SEQ ID NO: 766861 - DNA, 19 bp, Mus musculus
  siRNA target sequence for MOR223-1 (NM_147108.1,115-133).
ggcaacttcctgattctga

SEQ ID NO: 766862 - DNA, 19 bp, Mus musculus
  siRNA target sequence for MOR223-1 (NM_147108.1,116-134).
gcaacttcctgattctgat

SEQ ID NO: 766863 - DNA, 19 bp, Mus musculus
  siRNA target sequence for MOR223-1 (NM_147108.1,224-242).
cagtacccaaaatgttgat

SEQ ID NO: 766864 - DNA, 19 bp, Mus musculus
  siRNA target sequence for MOR7-2 (NM_147109.1,10-28).
ggacccctaggaaatggaa

SEQ ID NO: 766865 - DNA, 19 bp, Mus musculus
  siRNA target sequence for MOR7-2 (NM_147109.1,64-82).
gggctggagcacatgcata

SEQ ID NO: 766866 - DNA, 19 bp, Mus musculus
  siRNA target sequence for MOR7-2 (NM_147109.1,321-339).
ccactgcttgtccttctta

SEQ ID NO: 766867 - DNA, 19 bp, Mus musculus
  siRNA target sequence for MOR7-2 (NM_147109.1,391-409).
cgtcctttgcactatgctt

SEQ ID NO: 766868 - DNA, 19 bp, Mus musculus
  siRNA target sequence for MOR7-2 (NM_147109.1,423-441).
cacagtgattgtcagaata

SEQ ID NO: 766869 - DNA, 19 bp, Mus musculus
  siRNA target sequence for MOR7-2 (NM_147109.1,450-468).
ctctctgggccgtagtgtt

SEQ ID NO: 766870 - DNA, 19 bp, Mus musculus
  siRNA target sequence for MOR7-2 (NM_147109.1,498-516).
caaacggttcccttactgt

SEQ ID NO: 766871 - DNA, 19 bp, Mus musculus
  siRNA target sequence for MOR7-2 (NM_147109.1,545-563).
gtctccatcaagaagtgat

SEQ ID NO: 766872 - DNA, 19 bp, Mus musculus
  siRNA target sequence for MOR7-2 (NM_147109.1,609-627).
gttcgtcattgtttctaca

SEQ ID NO: 766873 - DNA, 19 bp, Mus musculus
  siRNA target sequence for MOR7-2 (NM_147109.1,626-644).
cagtgggagtggactcttt

SEQ ID NO: 766874 - DNA, 19 bp, Mus musculus
  siRNA target sequence for MOR7-2 (NM_147109.1,759-777).
gttctatactcccatgata

SEQ ID NO: 766875 - DNA, 19 bp, Mus musculus
  siRNA target sequence for MOR8-3 (NM_147110.1,15-33).
ctccgaggtcgaaatctct

SEQ ID NO: 766876 - DNA, 19 bp, Mus musculus
  siRNA target sequence for MOR8-3 (NM_147110.1,66-84).
gcatatgcacatttggatt

SEQ ID NO: 766877 - DNA, 19 bp, Mus musculus
  siRNA target sequence for MOR8-3 (NM_147110.1,237-255).
ccccactatgctaagaata

SEQ ID NO: 766878 - DNA, 19 bp, Mus musculus
  siRNA target sequence for MOR8-3 (NM_147110.1,382-400).
cggcaccccctaagataca

SEQ ID NO: 766879 - DNA, 19 bp, Mus musculus
  siRNA target sequence for MOR8-3 (NM_147110.1,384-402).
gcaccccctaagatacagt

SEQ ID NO: 766880 - DNA, 19 bp, Mus musculus
  siRNA target sequence for MOR8-3 (NM_147110.1,475-493).
ccccttccattcactttaa

SEQ ID NO: 766881 - DNA, 19 bp, Mus musculus
  siRNA target sequence for MOR8-3 (NM_147110.1,476-494).
cccttccattcactttaaa

SEQ ID NO: 766882 - DNA, 19 bp, Mus musculus
  siRNA target sequence for MOR8-3 (NM_147110.1,497-515).
gactcagatactgcaataa

SEQ ID NO: 766883 - DNA, 19 bp, Mus musculus
  siRNA target sequence for MOR8-3 (NM_147110.1,574-592).
gacaacagggttaactttt

SEQ ID NO: 766884 - DNA, 19 bp, Mus musculus
  siRNA target sequence for MOR8-3 (NM_147110.1,579-597).
cagggttaacttttactat

SEQ ID NO: 766885 - DNA, 19 bp, Mus musculus
  siRNA target sequence for MOR8-3 (NM_147110.1,650-668).
cttacgtgttcatcttgaa

SEQ ID NO: 766886 - DNA, 19 bp, Mus musculus
  siRNA target sequence for MOR8-3 (NM_147110.1,760-778).
cctatcattaccttagcta

SEQ ID NO: 766887 - DNA, 19 bp, Mus musculus
  siRNA target sequence for MOR8-3 (NM_147110.1,783-801).
gcatcgctttgcaaaacat

SEQ ID NO: 766888 - DNA, 19 bp, Mus musculus
  siRNA target sequence for MOR8-3 (NM_147110.1,787-805).
cgctttgcaaaacataaat

SEQ ID NO: 766889 - DNA, 19 bp, Mus musculus
  siRNA target sequence for MOR8-3 (NM_147110.1,799-817).
cataaatctccattagcta

SEQ ID NO: 766890 - DNA, 19 bp, Mus musculus
  siRNA target sequence for MOR8-3 (NM_147110.1,806-824).
ctccattagctatgattct

SEQ ID NO: 766891 - DNA, 19 bp, Mus musculus
  siRNA target sequence for MOR8-3 (NM_147110.1,809-827).
cattagctatgattctgat

SEQ ID NO: 766892 - DNA, 19 bp, Mus musculus
  siRNA target sequence for MOR8-3 (NM_147110.1,887-905).
ctaggcagataagagtaaa

SEQ ID NO: 766893 - DNA, 19 bp, Mus musculus
  siRNA target sequence for MOR8-3 (NM_147110.1,894-912).
gataagagtaaaagtttta

SEQ ID NO: 766894 - DNA, 19 bp, Mus musculus
  siRNA target sequence for MOR11-1 (NM_147112.1,11-29).
ctgggccattcatcaacat

SEQ ID NO: 766895 - DNA, 19 bp, Mus musculus
  siRNA target sequence for MOR14-1 (NM_147113.1,431-449).
ctcaaattggggtgacaat

SEQ ID NO: 766896 - DNA, 19 bp, Mus musculus
  siRNA target sequence for MOR14-1 (NM_147113.1,478-496).
ccgatggtcgcacttctta

SEQ ID NO: 766897 - DNA, 19 bp, Mus musculus
  siRNA target sequence for MOR14-1 (NM_147113.1,479-497).
cgatggtcgcacttcttaa

SEQ ID NO: 766898 - DNA, 19 bp, Mus musculus
  siRNA target sequence for MOR14-1 (NM_147113.1,483-501).
ggtcgcacttcttaagaga

SEQ ID NO: 766899 - DNA, 19 bp, Mus musculus
  siRNA target sequence for MOR14-1 (NM_147113.1,601-619).
ggattgactgccatgatct

SEQ ID NO: 766900 - DNA, 19 bp, Mus musculus
  siRNA target sequence for MOR14-1 (NM_147113.1,742-760).
ggggctgtagctatattct

SEQ ID NO: 766901 - DNA, 19 bp, Mus musculus
  siRNA target sequence for MOR14-1 (NM_147113.1,812-830).
caccctatgtacataccat

SEQ ID NO: 766902 - DNA, 19 bp, Mus musculus
  siRNA target sequence for MOR14-1 (NM_147113.1,816-834).
ctatgtacataccatgatt

SEQ ID NO: 766903 - DNA, 19 bp, Mus musculus
  siRNA target sequence for MOR14-1 (NM_147113.1,823-841).
cataccatgattgctaata

SEQ ID NO: 766904 - DNA, 19 bp, Mus musculus
  siRNA target sequence for MOR14-1 (NM_147113.1,894-912).
caaacagatacgtaaagct

SEQ ID NO: 766905 - DNA, 19 bp, Mus musculus
  siRNA target sequence for MOR14-1 (NM_147113.1,900-918).
gatacgtaaagctgtgata

SEQ ID NO: 766906 - DNA, 19 bp, Mus musculus
  siRNA target sequence for MOR14-1 (NM_147113.1,905-923).
gtaaagctgtgataaaagt

SEQ ID NO: 766907 - DNA, 19 bp, Mus musculus
  siRNA target sequence for MOR8-1 (NM_147114.1,17-35).
ctatcatgtccgttctcaa

SEQ ID NO: 766908 - DNA, 19 bp, Mus musculus
  siRNA target sequence for MOR8-1 (NM_147114.1,59-77).
ccttcttcctgattggaat

SEQ ID NO: 766909 - DNA, 19 bp, Mus musculus
  siRNA target sequence for MOR8-1 (NM_147114.1,273-291).
ccggatctttgtgttcaat

SEQ ID NO: 766910 - DNA, 19 bp, Mus musculus
  siRNA target sequence for MOR8-1 (NM_147114.1,406-424).
cgcaaccccctcagataca

SEQ ID NO: 766911 - DNA, 19 bp, Mus musculus
  siRNA target sequence for MOR8-1 (NM_147114.1,516-534).
gaaaagactggcatattgt

SEQ ID NO: 766912 - DNA, 19 bp, Mus musculus
  siRNA target sequence for MOR8-1 (NM_147114.1,523-541).
ctggcatattgtcagaaaa

SEQ ID NO: 766913 - DNA, 19 bp, Mus musculus
  siRNA target sequence for MOR8-1 (NM_147114.1,704-722).
gcattggatcccataaaga

SEQ ID NO: 766914 - DNA, 19 bp, Mus musculus
  siRNA target sequence for MOR8-1 (NM_147114.1,784-802).
cctatcattgctttagcat

SEQ ID NO: 766915 - DNA, 19 bp, Mus musculus
  siRNA target sequence for MOR8-1 (NM_147114.1,832-850).
cctatggccatgatcctta

SEQ ID NO: 766916 - DNA, 19 bp, Mus musculus
  siRNA target sequence for MOR8-1 (NM_147114.1,833-851).
ctatggccatgatccttat

SEQ ID NO: 766917 - DNA, 19 bp, Mus musculus
  siRNA target sequence for MOR8-1 (NM_147114.1,911-929).
cacggcaaattcgtgaaaa

SEQ ID NO: 766918 - DNA, 19 bp, Mus musculus
  siRNA target sequence for MOR8-1 (NM_147114.1,914-932).
ggcaaattcgtgaaaaggt

SEQ ID NO: 766919 - DNA, 19 bp, Mus musculus
  siRNA target sequence for MOR8-1 (NM_147114.1,915-933).
gcaaattcgtgaaaaggtt

SEQ ID NO: 766920 - DNA, 19 bp, Mus musculus
  siRNA target sequence for MOR8-1 (NM_147114.1,930-948).
ggttctaggaaaattaggt

SEQ ID NO: 766921 - DNA, 19 bp, Mus musculus
  siRNA target sequence for MOR7-1 (NM_147115.1,25-43).
ctccaaaaagccactttct

SEQ ID NO: 766922 - DNA, 19 bp, Mus musculus
  siRNA target sequence for MOR7-1 (NM_147115.1,99-117).
ctgctccatctacttaata

SEQ ID NO: 766923 - DNA, 19 bp, Mus musculus
  siRNA target sequence for MOR7-1 (NM_147115.1,101-119).
gctccatctacttaatagt

SEQ ID NO: 766924 - DNA, 19 bp, Mus musculus
  siRNA target sequence for MOR7-1 (NM_147115.1,104-122).
ccatctacttaatagtcat

SEQ ID NO: 766925 - DNA, 19 bp, Mus musculus
  siRNA target sequence for MOR7-1 (NM_147115.1,105-123).
catctacttaatagtcatt

SEQ ID NO: 766926 - DNA, 19 bp, Mus musculus
  siRNA target sequence for MOR7-1 (NM_147115.1,315-333).
catccacaccttgtcttta

SEQ ID NO: 766927 - DNA, 19 bp, Mus musculus
  siRNA target sequence for MOR7-1 (NM_147115.1,341-359).
catcggttctactgtctat

SEQ ID NO: 766928 - DNA, 19 bp, Mus musculus
  siRNA target sequence for MOR7-1 (NM_147115.1,492-510).
ccttaaacgcttccattat

SEQ ID NO: 766929 - DNA, 19 bp, Mus musculus
  siRNA target sequence for MOR7-1 (NM_147115.1,542-560).
gtctacatctggagatcat

SEQ ID NO: 766930 - DNA, 19 bp, Mus musculus
  siRNA target sequence for MOR7-1 (NM_147115.1,578-596).
gcatcattgtcaatcatat

SEQ ID NO: 766931 - DNA, 19 bp, Mus musculus
  siRNA target sequence for MOR7-1 (NM_147115.1,582-600).
cattgtcaatcatatctat

SEQ ID NO: 766932 - DNA, 19 bp, Mus musculus
  siRNA target sequence for MOR7-1 (NM_147115.1,643-661).
cttatattcctctcataca

SEQ ID NO: 766933 - DNA, 19 bp, Mus musculus
  siRNA target sequence for MOR7-1 (NM_147115.1,706-724).
cgcctccgtgctctcaata

SEQ ID NO: 766934 - DNA, 19 bp, Mus musculus
  siRNA target sequence for MOR7-1 (NM_147115.1,745-763).
gcagtactgcttttctaca

SEQ ID NO: 766935 - DNA, 19 bp, Mus musculus
  siRNA target sequence for MOR7-1 (NM_147115.1,804-822).
gcaccttccccgcattgta

SEQ ID NO: 766936 - DNA, 19 bp, Mus musculus
  siRNA target sequence for MOR7-1 (NM_147115.1,812-830).
cccgcattgtacatcttct

SEQ ID NO: 766937 - DNA, 19 bp, Mus musculus
  siRNA target sequence for MOR7-1 (NM_147115.1,815-833).
gcattgtacatcttctgat

SEQ ID NO: 766938 - DNA, 19 bp, Mus musculus
  siRNA target sequence for MOR7-1 (NM_147115.1,836-854).
catatgtgtatctattagt

SEQ ID NO: 766939 - DNA, 19 bp, Mus musculus
  siRNA target sequence for MOR7-1 (NM_147115.1,904-922).
cgacagcgtatcatcaaga

SEQ ID NO: 766940 - DNA, 19 bp, Mus musculus
  siRNA target sequence for MOR7-1 (NM_147115.1,905-923).
gacagcgtatcatcaagaa

SEQ ID NO: 766941 - DNA, 19 bp, Mus musculus
  siRNA target sequence for MOR7-1 (NM_147115.1,909-927).
gcgtatcatcaagaagttt

SEQ ID NO: 766942 - DNA, 19 bp, Mus musculus
  siRNA target sequence for MOR7-1 (NM_147115.1,911-929).
gtatcatcaagaagtttga

SEQ ID NO: 766943 - DNA, 19 bp, Mus musculus
  siRNA target sequence for MOR2-1 (NM_147119.1,16-34).
ccaccacgtgccaacttca

SEQ ID NO: 766944 - DNA, 19 bp, Mus musculus
  siRNA target sequence for MOR2-1 (NM_147119.1,30-48).
cttcagctacgctatattt

SEQ ID NO: 766945 - DNA, 19 bp, Mus musculus
  siRNA target sequence for MOR2-1 (NM_147119.1,70-88).
ctggaatgggctcatcatt

SEQ ID NO: 766946 - DNA, 19 bp, Mus musculus
  siRNA target sequence for MOR2-1 (NM_147119.1,80-98).
ctcatcattggatttcact

SEQ ID NO: 766947 - DNA, 19 bp, Mus musculus
  siRNA target sequence for MOR2-1 (NM_147119.1,101-119).
ccatatttatggggtattt

SEQ ID NO: 766948 - DNA, 19 bp, Mus musculus
  siRNA target sequence for MOR2-1 (NM_147119.1,253-271).
gtgctgggggtgttatggt

SEQ ID NO: 766949 - DNA, 19 bp, Mus musculus
  siRNA target sequence for MOR2-1 (NM_147119.1,255-273).
gctgggggtgttatggttt

SEQ ID NO: 766950 - DNA, 19 bp, Mus musculus
  siRNA target sequence for MOR2-1 (NM_147119.1,258-276).
gggggtgttatggtttgat

SEQ ID NO: 766951 - DNA, 19 bp, Mus musculus
  siRNA target sequence for MOR2-1 (NM_147119.1,366-384).
ggctctggaccgtctgata

SEQ ID NO: 766952 - DNA, 19 bp, Mus musculus
  siRNA target sequence for MOR2-1 (NM_147119.1,370-388).
ctggaccgtctgatagcaa

SEQ ID NO: 766953 - DNA, 19 bp, Mus musculus
  siRNA target sequence for MOR2-1 (NM_147119.1,462-480).
gcggagtgcagctattaca

SEQ ID NO: 766954 - DNA, 19 bp, Mus musculus
  siRNA target sequence for MOR2-1 (NM_147119.1,482-500).
ccgcaccctcactacatct

SEQ ID NO: 766955 - DNA, 19 bp, Mus musculus
  siRNA target sequence for MOR2-1 (NM_147119.1,483-501).
cgcaccctcactacatcta

SEQ ID NO: 766956 - DNA, 19 bp, Mus musculus
  siRNA target sequence for MOR2-1 (NM_147119.1,491-509).
cactacatctactgacatt

SEQ ID NO: 766957 - DNA, 19 bp, Mus musculus
  siRNA target sequence for MOR2-1 (NM_147119.1,496-514).
catctactgacatttgact

SEQ ID NO: 766958 - DNA, 19 bp, Mus musculus
  siRNA target sequence for MOR2-1 (NM_147119.1,588-606).
ccgcttcaacagactctat

SEQ ID NO: 766959 - DNA, 19 bp, Mus musculus
  siRNA target sequence for MOR2-1 (NM_147119.1,624-642).
gctagccatgggttcagat

SEQ ID NO: 766960 - DNA, 19 bp, Mus musculus
  siRNA target sequence for MOR2-1 (NM_147119.1,635-653).
gttcagatgtcctcttcat

SEQ ID NO: 766961 - DNA, 19 bp, Mus musculus
  siRNA target sequence for MOR2-1 (NM_147119.1,866-884).
ccgtgatgaaccctgttat

SEQ ID NO: 766962 - DNA, 19 bp, Mus musculus
  siRNA target sequence for MOR1-4 (NM_147122.1,304-322).
gcctattttatccatagtt

SEQ ID NO: 766963 - DNA, 19 bp, Mus musculus
  siRNA target sequence for MOR1-4 (NM_147122.1,647-665).
gtttctcctacattttgat

SEQ ID NO: 766964 - DNA, 19 bp, Mus musculus
  siRNA target sequence for MOR1-4 (NM_147122.1,801-819).
gaatattcctcatattgta

SEQ ID NO: 766965 - DNA, 19 bp, Mus musculus
  siRNA target sequence for MOR1-4 (NM_147122.1,808-826).
cctcatattgtacatataa

SEQ ID NO: 766966 - DNA, 19 bp, Mus musculus
  siRNA target sequence for MOR1-4 (NM_147122.1,921-939).
gttctcactgccttattct

SEQ ID NO: 766967 - DNA, 19 bp, Mus musculus
  siRNA target sequence for Mfrp (NM_147126.1,105-123).
gacagagttctgtaatcct

SEQ ID NO: 766968 - DNA, 19 bp, Mus musculus
  siRNA target sequence for Mfrp (NM_147126.1,154-172).
cctccaccagcgttacaga

SEQ ID NO: 766969 - DNA, 19 bp, Mus musculus
  siRNA target sequence for Mfrp (NM_147126.1,517-535).
ggtcccagtggtttcttca

SEQ ID NO: 766970 - DNA, 19 bp, Mus musculus
  siRNA target sequence for Mfrp (NM_147126.1,609-627).
gacaatacagctcaagatt

SEQ ID NO: 766971 - DNA, 19 bp, Mus musculus
  siRNA target sequence for Mfrp (NM_147126.1,611-629).
caatacagctcaagattca

SEQ ID NO: 766972 - DNA, 19 bp, Mus musculus
  siRNA target sequence for Mfrp (NM_147126.1,667-685).
gatcgcttggaaattatct

SEQ ID NO: 766973 - DNA, 19 bp, Mus musculus
  siRNA target sequence for Mfrp (NM_147126.1,727-745).
cctcctgccacattaaaca

SEQ ID NO: 766974 - DNA, 19 bp, Mus musculus
  siRNA target sequence for Mfrp (NM_147126.1,733-751).
gccacattaaacaccaata

SEQ ID NO: 766975 - DNA, 19 bp, Mus musculus
  siRNA target sequence for Mfrp (NM_147126.1,766-784).
gtgtccttcgtctctgata

SEQ ID NO: 766976 - DNA, 19 bp, Mus musculus
  siRNA target sequence for Mfrp (NM_147126.1,770-788).
ccttcgtctctgataacga

SEQ ID NO: 766977 - DNA, 19 bp, Mus musculus
  siRNA target sequence for Mfrp (NM_147126.1,842-860).
ggagctgtgcccataatga

SEQ ID NO: 766978 - DNA, 19 bp, Mus musculus
  siRNA target sequence for Mfrp (NM_147126.1,886-904).
ctgaagcgtgactctgtat

SEQ ID NO: 766979 - DNA, 19 bp, Mus musculus
  siRNA target sequence for Mfrp (NM_147126.1,888-906).
gaagcgtgactctgtatgt

SEQ ID NO: 766980 - DNA, 19 bp, Mus musculus
  siRNA target sequence for Mfrp (NM_147126.1,991-1009).
ctctatggcgtattctcta

SEQ ID NO: 766981 - DNA, 19 bp, Mus musculus
  siRNA target sequence for Mfrp (NM_147126.1,1123-1141).
gctgagtgcaagtttgact

SEQ ID NO: 766982 - DNA, 19 bp, Mus musculus
  siRNA target sequence for Mfrp (NM_147126.1,1124-1142).
ctgagtgcaagtttgacta

SEQ ID NO: 766983 - DNA, 19 bp, Mus musculus
  siRNA target sequence for Mfrp (NM_147126.1,1302-1320).
ccaggccatcaatactaca

SEQ ID NO: 766984 - DNA, 19 bp, Mus musculus
  siRNA target sequence for Mfrp (NM_147126.1,1347-1365).
ctgccagagcggaggatat

SEQ ID NO: 766985 - DNA, 19 bp, Mus musculus
  siRNA target sequence for Mfrp (NM_147126.1,1375-1393).
caatggatgtgtgacttat

SEQ ID NO: 766986 - DNA, 19 bp, Mus musculus
  siRNA target sequence for Mfrp (NM_147126.1,1379-1397).
ggatgtgtgacttatggaa

SEQ ID NO: 766987 - DNA, 19 bp, Mus musculus
  siRNA target sequence for Mfrp (NM_147126.1,1488-1506).
ccttggactaagctacaat

SEQ ID NO: 766988 - DNA, 19 bp, Mus musculus
  siRNA target sequence for Mfrp (NM_147126.1,1489-1507).
cttggactaagctacaata

SEQ ID NO: 766989 - DNA, 19 bp, Mus musculus
  siRNA target sequence for Mfrp (NM_147126.1,1492-1510).
ggactaagctacaatacca

SEQ ID NO: 766990 - DNA, 19 bp, Mus musculus
  siRNA target sequence for Mfrp (NM_147126.1,1508-1526).
ccacggcctttcctaacat

SEQ ID NO: 766991 - DNA, 19 bp, Mus musculus
  siRNA target sequence for Mfrp (NM_147126.1,1578-1596).
caagagtctgacaagtcta

SEQ ID NO: 766992 - DNA, 19 bp, Mus musculus
  siRNA target sequence for Mfrp (NM_147126.1,1736-1754).
gcaccccctggcctttcaa

SEQ ID NO: 766993 - DNA, 19 bp, Mus musculus
  siRNA target sequence for Bup (NM_147778.2,50-68).
gatcccggttcctttgact

SEQ ID NO: 766994 - DNA, 19 bp, Mus musculus
  siRNA target sequence for Bup (NM_147778.2,138-156).
cgctagatcacccatactt

SEQ ID NO: 766995 - DNA, 19 bp, Mus musculus
  siRNA target sequence for Bup (NM_147778.2,140-158).
ctagatcacccatacttga

SEQ ID NO: 766996 - DNA, 19 bp, Mus musculus
  siRNA target sequence for Bup (NM_147778.2,163-181).
gatcgacccagtggtttta

SEQ ID NO: 766997 - DNA, 19 bp, Mus musculus
  siRNA target sequence for Bup (NM_147778.2,169-187).
cccagtggttttaaagcat

SEQ ID NO: 766998 - DNA, 19 bp, Mus musculus
  siRNA target sequence for Bup (NM_147778.2,170-188).
ccagtggttttaaagcatt

SEQ ID NO: 766999 - DNA, 19 bp, Mus musculus
  siRNA target sequence for Bup (NM_147778.2,222-240).
caggaaagcaccaagttga

SEQ ID NO: 767000 - DNA, 19 bp, Mus musculus
  siRNA target sequence for Bup (NM_147778.2,230-248).
caccaagttgacaagtcta

SEQ ID NO: 767001 - DNA, 19 bp, Mus musculus
  siRNA target sequence for Bup (NM_147778.2,236-254).
gttgacaagtctactctaa

SEQ ID NO: 767002 - DNA, 19 bp, Mus musculus
  siRNA target sequence for Bup (NM_147778.2,244-262).
gtctactctaagcacttat

SEQ ID NO: 767003 - DNA, 19 bp, Mus musculus
  siRNA target sequence for Bup (NM_147778.2,246-264).
ctactctaagcacttattt

SEQ ID NO: 767004 - DNA, 19 bp, Mus musculus
  siRNA target sequence for Bup (NM_147778.2,249-267).
ctctaagcacttatttaga

SEQ ID NO: 767005 - DNA, 19 bp, Mus musculus
  siRNA target sequence for Bup (NM_147778.2,285-303).
gagagcgaatagaactgtt

SEQ ID NO: 767006 - DNA, 19 bp, Mus musculus
  siRNA target sequence for Bup (NM_147778.2,290-308).
cgaatagaactgttttgca

SEQ ID NO: 767007 - DNA, 19 bp, Mus musculus
  siRNA target sequence for Bup (NM_147778.2,306-324).
gcaccgagtatcagaacaa

SEQ ID NO: 767008 - DNA, 19 bp, Mus musculus
  siRNA target sequence for Bup (NM_147778.2,307-325).
caccgagtatcagaacaat

SEQ ID NO: 767009 - DNA, 19 bp, Mus musculus
  siRNA target sequence for Bup (NM_147778.2,309-327).
ccgagtatcagaacaataa

SEQ ID NO: 767010 - DNA, 19 bp, Mus musculus
  siRNA target sequence for Bup (NM_147778.2,370-388).
ccctcatataactgatgtt

SEQ ID NO: 767011 - DNA, 19 bp, Mus musculus
  siRNA target sequence for Bup (NM_147778.2,433-451).
gatgtaccgacctggatat

SEQ ID NO: 767012 - DNA, 19 bp, Mus musculus
  siRNA target sequence for Bup (NM_147778.2,484-502).
ccaatcctacccagagatt

SEQ ID NO: 767013 - DNA, 19 bp, Mus musculus
  siRNA target sequence for Bup (NM_147778.2,532-550).
ggacttggtggggaaactt

SEQ ID NO: 767014 - DNA, 19 bp, Mus musculus
  siRNA target sequence for Bup (NM_147778.2,548-566).
cttaaggatgcttcaaaaa

SEQ ID NO: 767015 - DNA, 19 bp, Mus musculus
  siRNA target sequence for Mdm1 (NM_148922.2,294-312).
catgaccctcagatttcaa

SEQ ID NO: 767016 - DNA, 19 bp, Mus musculus
  siRNA target sequence for Mdm1 (NM_148922.2,297-315).
gaccctcagatttcaaaat

SEQ ID NO: 767017 - DNA, 19 bp, Mus musculus
  siRNA target sequence for Mdm1 (NM_148922.2,756-774).
caggttttccgtaataaaa

SEQ ID NO: 767018 - DNA, 19 bp, Mus musculus
  siRNA target sequence for Mdm1 (NM_148922.2,764-782).
ccgtaataaaagccaaatt

SEQ ID NO: 767019 - DNA, 19 bp, Mus musculus
  siRNA target sequence for Mdm1 (NM_148922.2,811-829).
cccacgagactgaatacaa

SEQ ID NO: 767020 - DNA, 19 bp, Mus musculus
  siRNA target sequence for Mdm1 (NM_148922.2,820-838).
ctgaatacaagcgaaattt

SEQ ID NO: 767021 - DNA, 19 bp, Mus musculus
  siRNA target sequence for Mdm1 (NM_148922.2,822-840).
gaatacaagcgaaatttca

SEQ ID NO: 767022 - DNA, 19 bp, Mus musculus
  siRNA target sequence for Mdm1 (NM_148922.2,831-849).
cgaaatttcaagggtttaa

SEQ ID NO: 767023 - DNA, 19 bp, Mus musculus
  siRNA target sequence for Mdm1 (NM_148922.2,927-945).
gcagatgagcctttagact

SEQ ID NO: 767024 - DNA, 19 bp, Mus musculus
  siRNA target sequence for Mdm1 (NM_148922.2,935-953).
gcctttagacttagaagta

SEQ ID NO: 767025 - DNA, 19 bp, Mus musculus
  siRNA target sequence for Mdm1 (NM_148922.2,1059-1077).
ccagcccagtatttctata

SEQ ID NO: 767026 - DNA, 19 bp, Mus musculus
  siRNA target sequence for Mdm1 (NM_148922.2,1135-1153).
gagaaaaggccgaatctta

SEQ ID NO: 767027 - DNA, 19 bp, Mus musculus
  siRNA target sequence for Mdm1 (NM_148922.2,1137-1155).
gaaaaggccgaatcttaca

SEQ ID NO: 767028 - DNA, 19 bp, Mus musculus
  siRNA target sequence for Mdm1 (NM_148922.2,1188-1206).
gaccatctgaaccagatta

SEQ ID NO: 767029 - DNA, 19 bp, Mus musculus
  siRNA target sequence for Mdm1 (NM_148922.2,1191-1209).
catctgaaccagattatgt

SEQ ID NO: 767030 - DNA, 19 bp, Mus musculus
  siRNA target sequence for Mdm1 (NM_148922.2,1325-1343).
gaaacaccctcctaccaaa

SEQ ID NO: 767031 - DNA, 19 bp, Mus musculus
  siRNA target sequence for Mdm1 (NM_148922.2,1710-1728).
ggtggcgcagtcttagtgt

SEQ ID NO: 767032 - DNA, 19 bp, Mus musculus
  siRNA target sequence for Mdm1 (NM_148922.2,1721-1739).
cttagtgtctccatctaaa

SEQ ID NO: 767033 - DNA, 19 bp, Mus musculus
  siRNA target sequence for Mdm1 (NM_148922.2,1857-1875).
ccggctgctggcatgaaga

SEQ ID NO: 767034 - DNA, 19 bp, Mus musculus
  siRNA target sequence for Mdm1 (NM_148922.2,1919-1937).
gctcagatttgctgatact

SEQ ID NO: 767035 - DNA, 19 bp, Mus musculus
  siRNA target sequence for Mdm1 (NM_148922.2,2104-2122).
cacacgatgcctttaatga

SEQ ID NO: 767036 - DNA, 19 bp, Mus musculus
  siRNA target sequence for Mdm1 (NM_148922.2,2108-2126).
cgatgcctttaatgatgaa

SEQ ID NO: 767037 - DNA, 19 bp, Mus musculus
  siRNA target sequence for 2410005C22Rik (NM_148927.1,351-369).
gtggctggctgcacaaaca

SEQ ID NO: 767038 - DNA, 19 bp, Mus musculus
  siRNA target sequence for 2410005C22Rik (NM_148927.1,422-440).
cattgcctcttctactata

SEQ ID NO: 767039 - DNA, 19 bp, Mus musculus
  siRNA target sequence for 2410005C22Rik (NM_148927.1,473-491).
ccttgcagctgacacatta

SEQ ID NO: 767040 - DNA, 19 bp, Mus musculus
  siRNA target sequence for 2410005C22Rik (NM_148927.1,534-552).
cgtgcggagggggaagatt

SEQ ID NO: 767041 - DNA, 19 bp, Mus musculus
  siRNA target sequence for 2410005C22Rik (NM_148927.1,757-775).
cccggagcccagagttgtt

SEQ ID NO: 767042 - DNA, 19 bp, Mus musculus
  siRNA target sequence for 2410005C22Rik (NM_148927.1,1580-1598).
gaaacagcccccacatact

SEQ ID NO: 767043 - DNA, 19 bp, Mus musculus
  siRNA target sequence for 2410005C22Rik (NM_148927.1,1658-1676).
ggaatggaacttaaatcgt

SEQ ID NO: 767044 - DNA, 19 bp, Mus musculus
  siRNA target sequence for 2410005C22Rik (NM_148927.1,1695-1713).
cccttatctgcggagatat

SEQ ID NO: 767045 - DNA, 19 bp, Mus musculus
  siRNA target sequence for 2700084A09Rik (NM_148928.1,439-457).
ccaagaggctcgaactcta

SEQ ID NO: 767046 - DNA, 19 bp, Mus musculus
  siRNA target sequence for 2700084A09Rik (NM_148928.1,491-509).
gtgtgctaaccgtttcagt

SEQ ID NO: 767047 - DNA, 19 bp, Mus musculus
  siRNA target sequence for 2700084A09Rik (NM_148928.1,524-542).
gctccggatccggaaaaga

SEQ ID NO: 767048 - DNA, 19 bp, Mus musculus
  siRNA target sequence for 2700084A09Rik (NM_148928.1,527-545).
ccggatccggaaaagaaca

SEQ ID NO: 767049 - DNA, 19 bp, Mus musculus
  siRNA target sequence for 2700084A09Rik (NM_148928.1,528-546).
cggatccggaaaagaacaa

SEQ ID NO: 767050 - DNA, 19 bp, Mus musculus
  siRNA target sequence for 2700084A09Rik (NM_148928.1,583-601).
cccaggtcacgttcaactt

SEQ ID NO: 767051 - DNA, 19 bp, Mus musculus
  siRNA target sequence for 2700084A09Rik (NM_148928.1,592-610).
cgttcaacttggagatcat

SEQ ID NO: 767052 - DNA, 19 bp, Mus musculus
  siRNA target sequence for 2700084A09Rik (NM_148928.1,612-630).
ggcatcatctccacaattt

SEQ ID NO: 767053 - DNA, 19 bp, Mus musculus
  siRNA target sequence for 2700084A09Rik (NM_148928.1,613-631).
gcatcatctccacaattta

SEQ ID NO: 767054 - DNA, 19 bp, Mus musculus
  siRNA target sequence for 2700084A09Rik (NM_148928.1,798-816).
gacacccctgtggactatt

SEQ ID NO: 767055 - DNA, 19 bp, Mus musculus
  siRNA target sequence for 2700084A09Rik (NM_148928.1,802-820).
cccctgtggactatttcta

SEQ ID NO: 767056 - DNA, 19 bp, Mus musculus
  siRNA target sequence for 2700084A09Rik (NM_148928.1,839-857).
ccgagaaggctatcataat

SEQ ID NO: 767057 - DNA, 19 bp, Mus musculus
  siRNA target sequence for 2700084A09Rik (NM_148928.1,992-1010).
ctgcaccaatcccatagat

SEQ ID NO: 767058 - DNA, 19 bp, Mus musculus
  siRNA target sequence for 2700084A09Rik (NM_148928.1,994-1012).
gcaccaatcccatagatca

SEQ ID NO: 767059 - DNA, 19 bp, Mus musculus
  siRNA target sequence for 2700084A09Rik (NM_148928.1,997-1015).
ccaatcccatagatcagaa

SEQ ID NO: 767060 - DNA, 19 bp, Mus musculus
  siRNA target sequence for 2700084A09Rik (NM_148928.1,1065-1083).
cgaaatgctgtcaagtcta

SEQ ID NO: 767061 - DNA, 19 bp, Mus musculus
  siRNA target sequence for 2700084A09Rik (NM_148928.1,1119-1137).
cttccctatatggcttatt

SEQ ID NO: 767062 - DNA, 19 bp, Mus musculus
  siRNA target sequence for 2700084A09Rik (NM_148928.1,1122-1140).
ccctatatggcttattaca

SEQ ID NO: 767063 - DNA, 19 bp, Mus musculus
  siRNA target sequence for 2700084A09Rik (NM_148928.1,1123-1141).
cctatatggcttattacat

SEQ ID NO: 767064 - DNA, 19 bp, Mus musculus
  siRNA target sequence for 2700084A09Rik (NM_148928.1,1197-1215).
cacccagatgccaagattt

SEQ ID NO: 767065 - DNA, 19 bp, Mus musculus
  siRNA target sequence for 2700084A09Rik (NM_148928.1,1199-1217).
cccagatgccaagatttat

SEQ ID NO: 767066 - DNA, 19 bp, Mus musculus
  siRNA target sequence for 2700084A09Rik (NM_148928.1,1201-1219).
cagatgccaagatttatca

SEQ ID NO: 767067 - DNA, 19 bp, Mus musculus
  siRNA target sequence for 2700084A09Rik (NM_148928.1,1234-1252).
gaatccgctgtggaatgaa

SEQ ID NO: 767068 - DNA, 19 bp, Mus musculus
  siRNA target sequence for 2700084A09Rik (NM_148928.1,1293-1311).
cgtagcacgtacaactaca

SEQ ID NO: 767069 - DNA, 19 bp, Mus musculus
  siRNA target sequence for 2700084A09Rik (NM_148928.1,1379-1397).
gggcccatcaggaactgat

SEQ ID NO: 767070 - DNA, 19 bp, Mus musculus
  siRNA target sequence for 2700084A09Rik (NM_148928.1,1393-1411).
ctgatggcccacggaaatt

SEQ ID NO: 767071 - DNA, 19 bp, Mus musculus
  siRNA target sequence for 2700084A09Rik (NM_148928.1,1395-1413).
gatggcccacggaaattga

SEQ ID NO: 767072 - DNA, 19 bp, Mus musculus
  siRNA target sequence for 2700084A09Rik (NM_148928.1,1404-1422).
cggaaattgacctacaata

SEQ ID NO: 767073 - DNA, 19 bp, Mus musculus
  siRNA target sequence for 2700084A09Rik (NM_148928.1,1405-1423).
ggaaattgacctacaataa

SEQ ID NO: 767074 - DNA, 19 bp, Mus musculus
  siRNA target sequence for 2700084A09Rik (NM_148928.1,1406-1424).
gaaattgacctacaataaa

SEQ ID NO: 767075 - DNA, 19 bp, Mus musculus
  siRNA target sequence for 2700084A09Rik (NM_148928.1,1412-1430).
gacctacaataaatacaaa

SEQ ID NO: 767076 - DNA, 19 bp, Mus musculus
  siRNA target sequence for 2700084A09Rik (NM_148928.1,1471-1489).
caccctatcgacagatgtt

SEQ ID NO: 767077 - DNA, 19 bp, Mus musculus
  siRNA target sequence for 2700084A09Rik (NM_148928.1,1473-1491).
ccctatcgacagatgttct

SEQ ID NO: 767078 - DNA, 19 bp, Mus musculus
  siRNA target sequence for 2700084A09Rik (NM_148928.1,1474-1492).
cctatcgacagatgttcta

SEQ ID NO: 767079 - DNA, 19 bp, Mus musculus
  siRNA target sequence for 2700084A09Rik (NM_148928.1,1619-1637).
catgtcactcatgattcta

SEQ ID NO: 767080 - DNA, 19 bp, Mus musculus
  siRNA target sequence for 2700084A09Rik (NM_148928.1,1765-1783).
cagatgggagcgagaatga

SEQ ID NO: 767081 - DNA, 19 bp, Mus musculus
  siRNA target sequence for Pom121 (NM_148932.1,372-390).
ccggctgagctcttactca

SEQ ID NO: 767082 - DNA, 19 bp, Mus musculus
  siRNA target sequence for Pom121 (NM_148932.1,373-391).
cggctgagctcttactcat

SEQ ID NO: 767083 - DNA, 19 bp, Mus musculus
  siRNA target sequence for Pom121 (NM_148932.1,590-608).
gtccagtcggtttgttata

SEQ ID NO: 767084 - DNA, 19 bp, Mus musculus
  siRNA target sequence for Pom121 (NM_148932.1,593-611).
cagtcggtttgttataaca

SEQ ID NO: 767085 - DNA, 19 bp, Mus musculus
  siRNA target sequence for Pom121 (NM_148932.1,679-697).
ggaatggtggccataagaa

SEQ ID NO: 767086 - DNA, 19 bp, Mus musculus
  siRNA target sequence for Pom121 (NM_148932.1,759-777).
cctccagacagcaagctat

SEQ ID NO: 767087 - DNA, 19 bp, Mus musculus
  siRNA target sequence for Pom121 (NM_148932.1,774-792).
ctattccgctcatcaatgt

SEQ ID NO: 767088 - DNA, 19 bp, Mus musculus
  siRNA target sequence for Pom121 (NM_148932.1,795-813).
gagcagatactcgatacaa

SEQ ID NO: 767089 - DNA, 19 bp, Mus musculus
  siRNA target sequence for Pom121 (NM_148932.1,797-815).
gcagatactcgatacaaca

SEQ ID NO: 767090 - DNA, 19 bp, Mus musculus
  siRNA target sequence for Pom121 (NM_148932.1,962-980).
cggtgggagcggacattca

SEQ ID NO: 767091 - DNA, 19 bp, Mus musculus
  siRNA target sequence for Pom121 (NM_148932.1,1006-1024).
gagtccctgctgcatttgt

SEQ ID NO: 767092 - DNA, 19 bp, Mus musculus
  siRNA target sequence for Pom121 (NM_148932.1,1069-1087).
cagatgaccacttgaacaa

SEQ ID NO: 767093 - DNA, 19 bp, Mus musculus
  siRNA target sequence for Pom121 (NM_148932.1,1500-1518).
ccagagcttggctattcca

SEQ ID NO: 767094 - DNA, 19 bp, Mus musculus
  siRNA target sequence for Pom121 (NM_148932.1,1501-1519).
cagagcttggctattccat

SEQ ID NO: 767095 - DNA, 19 bp, Mus musculus
  siRNA target sequence for Pom121 (NM_148932.1,1555-1573).
cactgcaatggtttaacaa

SEQ ID NO: 767096 - DNA, 19 bp, Mus musculus
  siRNA target sequence for Pom121 (NM_148932.1,1908-1926).
gcttctgcttcgtctataa

SEQ ID NO: 767097 - DNA, 19 bp, Mus musculus
  siRNA target sequence for Pom121 (NM_148932.1,2119-2137).
cagccacacctaaaagtga

SEQ ID NO: 767098 - DNA, 19 bp, Mus musculus
  siRNA target sequence for Pom121 (NM_148932.1,2227-2245).
cgttcaagcccatttttga

SEQ ID NO: 767099 - DNA, 19 bp, Mus musculus
  siRNA target sequence for Pom121 (NM_148932.1,2619-2637).
cagactgctgccagcaata

SEQ ID NO: 767100 - DNA, 19 bp, Mus musculus
  siRNA target sequence for Pom121 (NM_148932.1,2839-2857).
cagcacttgccccaagttt

SEQ ID NO: 767101 - DNA, 19 bp, Mus musculus
  siRNA target sequence for Pom121 (NM_148932.1,3138-3156).
gctccatccccattcacat

SEQ ID NO: 767102 - DNA, 19 bp, Mus musculus
  siRNA target sequence for Pom121 (NM_148932.1,3139-3157).
ctccatccccattcacatt

SEQ ID NO: 767103 - DNA, 19 bp, Mus musculus
  siRNA target sequence for Pom121 (NM_148932.1,3231-3249).
ggaactttcagctttggat

SEQ ID NO: 767104 - DNA, 19 bp, Mus musculus
  siRNA target sequence for Pom121 (NM_148932.1,3385-3403).
gcacatctacacctacttt

SEQ ID NO: 767105 - DNA, 19 bp, Mus musculus
  siRNA target sequence for Pom121 (NM_148932.1,3514-3532).
cagctccttcgttttccat

SEQ ID NO: 767106 - DNA, 19 bp, Mus musculus
  siRNA target sequence for Plcd4 (NM_148937.1,230-248).
cgcaaggtgaggaccaaaa

SEQ ID NO: 767107 - DNA, 19 bp, Mus musculus
  siRNA target sequence for Plcd4 (NM_148937.1,326-344).
cccaagcccactttttcga

SEQ ID NO: 767108 - DNA, 19 bp, Mus musculus
  siRNA target sequence for Plcd4 (NM_148937.1,327-345).
ccaagcccactttttcgat

SEQ ID NO: 767109 - DNA, 19 bp, Mus musculus
  siRNA target sequence for Plcd4 (NM_148937.1,350-368).
gatgtggagaggatacgta

SEQ ID NO: 767110 - DNA, 19 bp, Mus musculus
  siRNA target sequence for Plcd4 (NM_148937.1,372-390).
ggcaggattctgagttgtt

SEQ ID NO: 767111 - DNA, 19 bp, Mus musculus
  siRNA target sequence for Plcd4 (NM_148937.1,426-444).
ggttcaccgttgtctttca

SEQ ID NO: 767112 - DNA, 19 bp, Mus musculus
  siRNA target sequence for Plcd4 (NM_148937.1,517-535).
gctgttggtggatcttgtt

SEQ ID NO: 767113 - DNA, 19 bp, Mus musculus
  siRNA target sequence for Plcd4 (NM_148937.1,605-623).
caggatggccggatgagtt

SEQ ID NO: 767114 - DNA, 19 bp, Mus musculus
  siRNA target sequence for Plcd4 (NM_148937.1,608-626).
gatggccggatgagtttca

SEQ ID NO: 767115 - DNA, 19 bp, Mus musculus
  siRNA target sequence for Plcd4 (NM_148937.1,674-692).
gagtacgccttcagtcttt

SEQ ID NO: 767116 - DNA, 19 bp, Mus musculus
  siRNA target sequence for Plcd4 (NM_148937.1,727-745).
ggggtcggaagaatttgta

SEQ ID NO: 767117 - DNA, 19 bp, Mus musculus
  siRNA target sequence for Plcd4 (NM_148937.1,729-747).
ggtcggaagaatttgtaca

SEQ ID NO: 767118 - DNA, 19 bp, Mus musculus
  siRNA target sequence for Plcd4 (NM_148937.1,737-755).
gaatttgtacagttctata

SEQ ID NO: 767119 - DNA, 19 bp, Mus musculus
  siRNA target sequence for Plcd4 (NM_148937.1,763-781).
gactaagcgcactgagatt

SEQ ID NO: 767120 - DNA, 19 bp, Mus musculus
  siRNA target sequence for Plcd4 (NM_148937.1,765-783).
ctaagcgcactgagattga

SEQ ID NO: 767121 - DNA, 19 bp, Mus musculus
  siRNA target sequence for Plcd4 (NM_148937.1,769-787).
gcgcactgagattgaagaa

SEQ ID NO: 767122 - DNA, 19 bp, Mus musculus
  siRNA target sequence for Plcd4 (NM_148937.1,770-788).
cgcactgagattgaagaaa

SEQ ID NO: 767123 - DNA, 19 bp, Mus musculus
  siRNA target sequence for Plcd4 (NM_148937.1,910-928).
ctatgagccttctgagaat

SEQ ID NO: 767124 - DNA, 19 bp, Mus musculus
  siRNA target sequence for Plcd4 (NM_148937.1,986-1004).
gatggaaacatcttcaaca

SEQ ID NO: 767125 - DNA, 19 bp, Mus musculus
  siRNA target sequence for Plcd4 (NM_148937.1,1048-1066).
ccactactacattaactct

SEQ ID NO: 767126 - DNA, 19 bp, Mus musculus
  siRNA target sequence for Plcd4 (NM_148937.1,1049-1067).
cactactacattaactctt

SEQ ID NO: 767127 - DNA, 19 bp, Mus musculus
  siRNA target sequence for Plcd4 (NM_148937.1,1110-1128).
gcagcgttgaaggatacat

SEQ ID NO: 767128 - DNA, 19 bp, Mus musculus
  siRNA target sequence for Plcd4 (NM_148937.1,1111-1129).
cagcgttgaaggatacata

SEQ ID NO: 767129 - DNA, 19 bp, Mus musculus
  siRNA target sequence for Plcd4 (NM_148937.1,1222-1240).
ctctcgcatcctattcaaa

SEQ ID NO: 767130 - DNA, 19 bp, Mus musculus
  siRNA target sequence for Plcd4 (NM_148937.1,1224-1242).
ctcgcatcctattcaaaga

SEQ ID NO: 767131 - DNA, 19 bp, Mus musculus
  siRNA target sequence for Plcd4 (NM_148937.1,1249-1267).
ggcaactctcgcgcaatat

SEQ ID NO: 767132 - DNA, 19 bp, Mus musculus
  siRNA target sequence for Plcd4 (NM_148937.1,1283-1301).
gactaccctctcatcttgt

SEQ ID NO: 767133 - DNA, 19 bp, Mus musculus
  siRNA target sequence for Plcd4 (NM_148937.1,1457-1475).
ggaaagaagttaagaacaa

SEQ ID NO: 767134 - DNA, 19 bp, Mus musculus
  siRNA target sequence for Plcd4 (NM_148937.1,1661-1679).
cttatctgtggtcatgtta

SEQ ID NO: 767135 - DNA, 19 bp, Mus musculus
  siRNA target sequence for Plcd4 (NM_148937.1,1894-1912).
ggcaggcaacgagtttgta

SEQ ID NO: 767136 - DNA, 19 bp, Mus musculus
  siRNA target sequence for Plcd4 (NM_148937.1,1896-1914).
caggcaacgagtttgtaca

SEQ ID NO: 767137 - DNA, 19 bp, Mus musculus
  siRNA target sequence for Plcd4 (NM_148937.1,1915-1933).
gcacaatgccagacagtta

SEQ ID NO: 767138 - DNA, 19 bp, Mus musculus
  siRNA target sequence for Plcd4 (NM_148937.1,1916-1934).
cacaatgccagacagttat

SEQ ID NO: 767139 - DNA, 19 bp, Mus musculus
  siRNA target sequence for Plcd4 (NM_148937.1,1984-2002).
ccaggaacactggaatgta

SEQ ID NO: 767140 - DNA, 19 bp, Mus musculus
  siRNA target sequence for Plcd4 (NM_148937.1,2036-2054).
gcaggaagtgcaatggata

SEQ ID NO: 767141 - DNA, 19 bp, Mus musculus
  siRNA target sequence for Plcd4 (NM_148937.1,2039-2057).
ggaagtgcaatggatatct

SEQ ID NO: 767142 - DNA, 19 bp, Mus musculus
  siRNA target sequence for Plcd4 (NM_148937.1,2120-2138).
gatacccagagttcattca

SEQ ID NO: 767143 - DNA, 19 bp, Mus musculus
  siRNA target sequence for Plcd4 (NM_148937.1,2142-2160).
ctgagaggccaattagtct

SEQ ID NO: 767144 - DNA, 19 bp, Mus musculus
  siRNA target sequence for Plcd4 (NM_148937.1,2148-2166).
ggccaattagtctttataa

SEQ ID NO: 767145 - DNA, 19 bp, Mus musculus
  siRNA target sequence for Plcd4 (NM_148937.1,2312-2330).
gtggagaacaatggtatta

SEQ ID NO: 767146 - DNA, 19 bp, Mus musculus
  siRNA target sequence for Plcd4 (NM_148937.1,2314-2332).
ggagaacaatggtattaat

SEQ ID NO: 767147 - DNA, 19 bp, Mus musculus
  siRNA target sequence for Plcd4 (NM_148937.1,2317-2335).
gaacaatggtattaatcca

SEQ ID NO: 767148 - DNA, 19 bp, Mus musculus
  siRNA target sequence for Plcd4 (NM_148937.1,2396-2414).
gtggtaaaggattatagca

SEQ ID NO: 767149 - DNA, 19 bp, Mus musculus
  siRNA target sequence for Plcd4 (NM_148937.1,2416-2434).
gaaatcccgaaataacttt

SEQ ID NO: 767150 - DNA, 19 bp, Mus musculus
  siRNA target sequence for Plcd4 (NM_148937.1,2471-2489).
caaggctaccgacatgtat

SEQ ID NO: 767151 - DNA, 19 bp, Mus musculus
  siRNA target sequence for Plcd4 (NM_148937.1,2475-2493).
gctaccgacatgtatcctt

SEQ ID NO: 767152 - DNA, 19 bp, Mus musculus
  siRNA target sequence for Plcd4 (NM_148937.1,2523-2541).
cagcttccatctttgtata

SEQ ID NO: 767153 - DNA, 19 bp, Mus musculus
  siRNA target sequence for Ly6g5b (NM_148939.1,106-124).
ccttcgctaggctgcattt

SEQ ID NO: 767154 - DNA, 19 bp, Mus musculus
  siRNA target sequence for Ly6g5b (NM_148939.1,169-187).
gtgatcaccatctataaaa

SEQ ID NO: 767155 - DNA, 19 bp, Mus musculus
  siRNA target sequence for Ly6g5b (NM_148939.1,264-282).
ccaatcagactacttgtat

SEQ ID NO: 767156 - DNA, 19 bp, Mus musculus
  siRNA target sequence for Ly6g5b (NM_148939.1,289-307).
gattgctgccagtacgatt

SEQ ID NO: 767157 - DNA, 19 bp, Mus musculus
  siRNA target sequence for Ly6g5b (NM_148939.1,381-399).
cctgtcagcgtctcagata

SEQ ID NO: 767158 - DNA, 19 bp, Mus musculus
  siRNA target sequence for Ly6g5b (NM_148939.1,382-400).
ctgtcagcgtctcagataa

SEQ ID NO: 767159 - DNA, 19 bp, Mus musculus
  siRNA target sequence for Ly6g5b (NM_148939.1,386-404).
cagcgtctcagataaaaca

SEQ ID NO: 767160 - DNA, 19 bp, Mus musculus
  siRNA target sequence for Ly6g5b (NM_148939.1,443-461).
gcttccatgctcataaggt

SEQ ID NO: 767161 - DNA, 19 bp, Mus musculus
  siRNA target sequence for Ly6g5b (NM_148939.1,514-532).
gccgaccttcgccaaatat

SEQ ID NO: 767162 - DNA, 19 bp, Mus musculus
  siRNA target sequence for Ly6g5b (NM_148939.1,515-533).
ccgaccttcgccaaatata

SEQ ID NO: 767163 - DNA, 19 bp, Mus musculus
  siRNA target sequence for Ly6g5b (NM_148939.1,517-535).
gaccttcgccaaatatact

SEQ ID NO: 767164 - DNA, 19 bp, Mus musculus
  siRNA target sequence for Osbpl10 (NM_148958.1,468-486).
catgggcccacgtcacatt

SEQ ID NO: 767165 - DNA, 19 bp, Mus musculus
  siRNA target sequence for Osbpl10 (NM_148958.1,527-545).
ctccgccagtgccaacata

SEQ ID NO: 767166 - DNA, 19 bp, Mus musculus
  siRNA target sequence for Osbpl10 (NM_148958.1,530-548).
cgccagtgccaacataaca

SEQ ID NO: 767167 - DNA, 19 bp, Mus musculus
  siRNA target sequence for Osbpl10 (NM_148958.1,531-549).
gccagtgccaacataacat

SEQ ID NO: 767168 - DNA, 19 bp, Mus musculus
  siRNA target sequence for Osbpl10 (NM_148958.1,542-560).
cataacatgggcgattcta

SEQ ID NO: 767169 - DNA, 19 bp, Mus musculus
  siRNA target sequence for Osbpl10 (NM_148958.1,547-565).
catgggcgattctaccaaa

SEQ ID NO: 767170 - DNA, 19 bp, Mus musculus
  siRNA target sequence for Osbpl10 (NM_148958.1,551-569).
ggcgattctaccaaactct

SEQ ID NO: 767171 - DNA, 19 bp, Mus musculus
  siRNA target sequence for Osbpl10 (NM_148958.1,626-644).
ggttttgtccgaagaagaa

SEQ ID NO: 767172 - DNA, 19 bp, Mus musculus
  siRNA target sequence for Osbpl10 (NM_148958.1,860-878).
gccagaggagagagtcatt

SEQ ID NO: 767173 - DNA, 19 bp, Mus musculus
  siRNA target sequence for Osbpl10 (NM_148958.1,864-882).
gaggagagagtcattagct

SEQ ID NO: 767174 - DNA, 19 bp, Mus musculus
  siRNA target sequence for Osbpl10 (NM_148958.1,1058-1076).
ggccgatgacccttctaaa

SEQ ID NO: 767175 - DNA, 19 bp, Mus musculus
  siRNA target sequence for Osbpl10 (NM_148958.1,1059-1077).
gccgatgacccttctaaaa

SEQ ID NO: 767176 - DNA, 19 bp, Mus musculus
  siRNA target sequence for Osbpl10 (NM_148958.1,1069-1087).
cttctaaaagctataagct

SEQ ID NO: 767177 - DNA, 19 bp, Mus musculus
  siRNA target sequence for Osbpl10 (NM_148958.1,1210-1228).
ccgtgggggtctctatgat

SEQ ID NO: 767178 - DNA, 19 bp, Mus musculus
  siRNA target sequence for Osbpl10 (NM_148958.1,1211-1229).
cgtgggggtctctatgata

SEQ ID NO: 767179 - DNA, 19 bp, Mus musculus
  siRNA target sequence for Osbpl10 (NM_148958.1,1457-1475).
caccatcgtctgtaaagca

SEQ ID NO: 767180 - DNA, 19 bp, Mus musculus
  siRNA target sequence for Osbpl10 (NM_148958.1,1554-1572).
gtgtatcctaagaagctta

SEQ ID NO: 767181 - DNA, 19 bp, Mus musculus
  siRNA target sequence for Osbpl10 (NM_148958.1,1731-1749).
ccgtggcgacccaagtatt

SEQ ID NO: 767182 - DNA, 19 bp, Mus musculus
  siRNA target sequence for Osbpl10 (NM_148958.1,1732-1750).
cgtggcgacccaagtattt

SEQ ID NO: 767183 - DNA, 19 bp, Mus musculus
  siRNA target sequence for Ubqln1 (NM_152234.1,221-239).
ccgcagagcccaagatcat

SEQ ID NO: 767184 - DNA, 19 bp, Mus musculus
  siRNA target sequence for Ubqln1 (NM_152234.1,248-266).
cggtgaagacgcctaaaga

SEQ ID NO: 767185 - DNA, 19 bp, Mus musculus
  siRNA target sequence for Ubqln1 (NM_152234.1,296-314).
gctcggtccagcagttcaa

SEQ ID NO: 767186 - DNA, 19 bp, Mus musculus
  siRNA target sequence for Ubqln1 (NM_152234.1,297-315).
ctcggtccagcagttcaaa

SEQ ID NO: 767187 - DNA, 19 bp, Mus musculus
  siRNA target sequence for Ubqln1 (NM_152234.1,349-367).
gaccaacttgtgttgatat

SEQ ID NO: 767188 - DNA, 19 bp, Mus musculus
  siRNA target sequence for Ubqln1 (NM_152234.1,360-378).
gttgatatttgctggaaaa

SEQ ID NO: 767189 - DNA, 19 bp, Mus musculus
  siRNA target sequence for Ubqln1 (NM_152234.1,402-420).
gagtcagcatgggattcat

SEQ ID NO: 767190 - DNA, 19 bp, Mus musculus
  siRNA target sequence for Ubqln1 (NM_152234.1,454-472).
cagaacaggccgcaagata

SEQ ID NO: 767191 - DNA, 19 bp, Mus musculus
  siRNA target sequence for Ubqln1 (NM_152234.1,459-477).
caggccgcaagataattca

SEQ ID NO: 767192 - DNA, 19 bp, Mus musculus
  siRNA target sequence for Ubqln1 (NM_152234.1,518-536).
caccagctcccgatagcaa

SEQ ID NO: 767193 - DNA, 19 bp, Mus musculus
  siRNA target sequence for Ubqln1 (NM_152234.1,649-667).
caaatgcagcggcaacttt

SEQ ID NO: 767194 - DNA, 19 bp, Mus musculus
  siRNA target sequence for Ubqln1 (NM_152234.1,654-672).
gcagcggcaacttttgtct

SEQ ID NO: 767195 - DNA, 19 bp, Mus musculus
  siRNA target sequence for Ubqln1 (NM_152234.1,655-673).
cagcggcaacttttgtcta

SEQ ID NO: 767196 - DNA, 19 bp, Mus musculus
  siRNA target sequence for Ubqln1 (NM_152234.1,736-754).
gacctgatgcggcaattga

SEQ ID NO: 767197 - DNA, 19 bp, Mus musculus
  siRNA target sequence for Ubqln1 (NM_152234.1,738-756).
cctgatgcggcaattgatt

SEQ ID NO: 767198 - DNA, 19 bp, Mus musculus
  siRNA target sequence for Ubqln1 (NM_152234.1,739-757).
ctgatgcggcaattgatta

SEQ ID NO: 767199 - DNA, 19 bp, Mus musculus
  siRNA target sequence for Ubqln1 (NM_152234.1,801-819).
gattagtcatatgcttaat

SEQ ID NO: 767200 - DNA, 19 bp, Mus musculus
  siRNA target sequence for Ubqln1 (NM_152234.1,846-864).
ggaacttgcgagaaatcca

SEQ ID NO: 767201 - DNA, 19 bp, Mus musculus
  siRNA target sequence for Ubqln1 (NM_152234.1,903-921).
cttgagcaacctagaaagt

SEQ ID NO: 767202 - DNA, 19 bp, Mus musculus
  siRNA target sequence for Ubqln1 (NM_152234.1,909-927).
caacctagaaagtattcct

SEQ ID NO: 767203 - DNA, 19 bp, Mus musculus
  siRNA target sequence for Ubqln1 (NM_152234.1,920-938).
gtattcctgggggctataa

SEQ ID NO: 767204 - DNA, 19 bp, Mus musculus
  siRNA target sequence for Ubqln1 (NM_152234.1,940-958).
gccttacggcgcatgtaca

SEQ ID NO: 767205 - DNA, 19 bp, Mus musculus
  siRNA target sequence for Ubqln1 (NM_152234.1,1012-1030).
ccatttgcgtccttagtga

SEQ ID NO: 767206 - DNA, 19 bp, Mus musculus
  siRNA target sequence for Ubqln1 (NM_152234.1,1234-1252).
ggcgcaggagctagtatgt

SEQ ID NO: 767207 - DNA, 19 bp, Mus musculus
  siRNA target sequence for Ubqln1 (NM_152234.1,1235-1253).
gcgcaggagctagtatgtt

SEQ ID NO: 767208 - DNA, 19 bp, Mus musculus
  siRNA target sequence for Ubqln1 (NM_152234.1,1237-1255).
gcaggagctagtatgttca

SEQ ID NO: 767209 - DNA, 19 bp, Mus musculus
  siRNA target sequence for Tor2a (NM_152800.1,245-263).
gtcactgaaggcctttgta

SEQ ID NO: 767210 - DNA, 19 bp, Mus musculus
  siRNA target sequence for Tor2a (NM_152800.1,379-397).
gccctcacgtccatcactt

SEQ ID NO: 767211 - DNA, 19 bp, Mus musculus
  siRNA target sequence for Tor2a (NM_152800.1,427-445).
gccgcactgagcagtacaa

SEQ ID NO: 767212 - DNA, 19 bp, Mus musculus
  siRNA target sequence for Tor2a (NM_152800.1,429-447).
cgcactgagcagtacaaga

SEQ ID NO: 767213 - DNA, 19 bp, Mus musculus
  siRNA target sequence for Tor2a (NM_152800.1,565-583).
gcccttcttgggttgtgta

SEQ ID NO: 767214 - DNA, 19 bp, Mus musculus
  siRNA target sequence for Tor2a (NM_152800.1,833-851).
gcgccactgcgtactcaat

SEQ ID NO: 767215 - DNA, 19 bp, Mus musculus
  siRNA target sequence for Tor2a (NM_152800.1,835-853).
gccactgcgtactcaatga

SEQ ID NO: 767216 - DNA, 19 bp, Mus musculus
  siRNA target sequence for Tor2a (NM_152800.1,973-991).
cccgactcacatttttcct

SEQ ID NO: 767217 - DNA, 19 bp, Mus musculus
  siRNA target sequence for Arhgef6 (NM_152801.1,276-294).
ctagagtctcccaaaaaga

SEQ ID NO: 767218 - DNA, 19 bp, Mus musculus
  siRNA target sequence for Arhgef6 (NM_152801.1,303-321).
gatccagaggagttcttga

SEQ ID NO: 767219 - DNA, 19 bp, Mus musculus
  siRNA target sequence for Arhgef6 (NM_152801.1,306-324).
ccagaggagttcttgaagt

SEQ ID NO: 767220 - DNA, 19 bp, Mus musculus
  siRNA target sequence for Arhgef6 (NM_152801.1,320-338).
gaagtcctcgctgaaaaat

SEQ ID NO: 767221 - DNA, 19 bp, Mus musculus
  siRNA target sequence for Arhgef6 (NM_152801.1,342-360).
gtagtgttgtgcaaactca

SEQ ID NO: 767222 - DNA, 19 bp, Mus musculus
  siRNA target sequence for Arhgef6 (NM_152801.1,345-363).
gtgttgtgcaaactcataa

SEQ ID NO: 767223 - DNA, 19 bp, Mus musculus
  siRNA target sequence for Arhgef6 (NM_152801.1,376-394).
ctggctcggtggagaagta

SEQ ID NO: 767224 - DNA, 19 bp, Mus musculus
  siRNA target sequence for Arhgef6 (NM_152801.1,378-396).
ggctcggtggagaagtatt

SEQ ID NO: 767225 - DNA, 19 bp, Mus musculus
  siRNA target sequence for Arhgef6 (NM_152801.1,382-400).
cggtggagaagtattgtct

SEQ ID NO: 767226 - DNA, 19 bp, Mus musculus
  siRNA target sequence for Arhgef6 (NM_152801.1,454-472).
gatgtgcaactcttcaagt

SEQ ID NO: 767227 - DNA, 19 bp, Mus musculus
  siRNA target sequence for Arhgef6 (NM_152801.1,515-533).
ctccaaggttctgaatact

SEQ ID NO: 767228 - DNA, 19 bp, Mus musculus
  siRNA target sequence for Arhgef6 (NM_152801.1,532-550).
ctcttttagctgtcaacaa

SEQ ID NO: 767229 - DNA, 19 bp, Mus musculus
  siRNA target sequence for Arhgef6 (NM_152801.1,700-718).
gaagtcaccagttgatagt

SEQ ID NO: 767230 - DNA, 19 bp, Mus musculus
  siRNA target sequence for Arhgef6 (NM_152801.1,769-787).
gtaaaggggacatcattta

SEQ ID NO: 767231 - DNA, 19 bp, Mus musculus
  siRNA target sequence for Arhgef6 (NM_152801.1,843-861).
ggatggttccctagtaatt

SEQ ID NO: 767232 - DNA, 19 bp, Mus musculus
  siRNA target sequence for Arhgef6 (NM_152801.1,856-874).
gtaattatgtccgagaaat

SEQ ID NO: 767233 - DNA, 19 bp, Mus musculus
  siRNA target sequence for Arhgef6 (NM_152801.1,900-918).
cctaaggctatcaaaggat

SEQ ID NO: 767234 - DNA, 19 bp, Mus musculus
  siRNA target sequence for Arhgef6 (NM_152801.1,901-919).
ctaaggctatcaaaggatt

SEQ ID NO: 767235 - DNA, 19 bp, Mus musculus
  siRNA target sequence for Arhgef6 (NM_152801.1,928-946).
ctccacttaccaagaatta

SEQ ID NO: 767236 - DNA, 19 bp, Mus musculus
  siRNA target sequence for Arhgef6 (NM_152801.1,930-948).
ccacttaccaagaattact

SEQ ID NO: 767237 - DNA, 19 bp, Mus musculus
  siRNA target sequence for Arhgef6 (NM_152801.1,931-949).
cacttaccaagaattacta

SEQ ID NO: 767238 - DNA, 19 bp, Mus musculus
  siRNA target sequence for Arhgef6 (NM_152801.1,933-951).
cttaccaagaattactaca

SEQ ID NO: 767239 - DNA, 19 bp, Mus musculus
  siRNA target sequence for Arhgef6 (NM_152801.1,1011-1029).
cttcttgttacttacctaa

SEQ ID NO: 767240 - DNA, 19 bp, Mus musculus
  siRNA target sequence for Arhgef6 (NM_152801.1,1053-1071).
ctgagtactgtggagttta

SEQ ID NO: 767241 - DNA, 19 bp, Mus musculus
  siRNA target sequence for Arhgef6 (NM_152801.1,1055-1073).
gagtactgtggagtttaca

SEQ ID NO: 767242 - DNA, 19 bp, Mus musculus
  siRNA target sequence for Arhgef6 (NM_152801.1,1083-1101).
ggaaactttgaagaagtat

SEQ ID NO: 767243 - DNA, 19 bp, Mus musculus
  siRNA target sequence for Arhgef6 (NM_152801.1,1190-1208).
cctcatgcctcatttcaaa

SEQ ID NO: 767244 - DNA, 19 bp, Mus musculus
  siRNA target sequence for Arhgef6 (NM_152801.1,1211-1229).
gatgtacctggcttactgt

SEQ ID NO: 767245 - DNA, 19 bp, Mus musculus
  siRNA target sequence for Arhgef6 (NM_152801.1,1270-1288).
gtgatgatctagaacgatt

SEQ ID NO: 767246 - DNA, 19 bp, Mus musculus
  siRNA target sequence for Arhgef6 (NM_152801.1,1278-1296).
ctagaacgattcatggaaa

SEQ ID NO: 767247 - DNA, 19 bp, Mus musculus
  siRNA target sequence for Arhgef6 (NM_152801.1,1316-1334).
gggtatcctcattctaaca

SEQ ID NO: 767248 - DNA, 19 bp, Mus musculus
  siRNA target sequence for Arhgef6 (NM_152801.1,1317-1335).
ggtatcctcattctaacaa

SEQ ID NO: 767249 - DNA, 19 bp, Mus musculus
  siRNA target sequence for Arhgef6 (NM_152801.1,1322-1340).
cctcattctaacaacaagt

SEQ ID NO: 767250 - DNA, 19 bp, Mus musculus
  siRNA target sequence for Arhgef6 (NM_152801.1,1336-1354).
caagtctcagcaaaccatt

SEQ ID NO: 767251 - DNA, 19 bp, Mus musculus
  siRNA target sequence for Arhgef6 (NM_152801.1,1359-1377).
cgactggaaaagtatgtta

SEQ ID NO: 767252 - DNA, 19 bp, Mus musculus
  siRNA target sequence for Arhgef6 (NM_152801.1,1514-1532).
gatcctttcagaacctatt

SEQ ID NO: 767253 - DNA, 19 bp, Mus musculus
  siRNA target sequence for Arhgef6 (NM_152801.1,1540-1558).
gggaaggagatgatattaa

SEQ ID NO: 767254 - DNA, 19 bp, Mus musculus
  siRNA target sequence for Arhgef6 (NM_152801.1,1574-1592).
gatctttatgtctcaagta

SEQ ID NO: 767255 - DNA, 19 bp, Mus musculus
  siRNA target sequence for Arhgef6 (NM_152801.1,1643-1661).
gttttcaagtgtcttgata

SEQ ID NO: 767256 - DNA, 19 bp, Mus musculus
  siRNA target sequence for Arhgef6 (NM_152801.1,1736-1754).
cagattggatgaaattgaa

SEQ ID NO: 767257 - DNA, 19 bp, Mus musculus
  siRNA target sequence for Arhgef6 (NM_152801.1,1759-1777).
gtgactgtatgttcgaaat

SEQ ID NO: 767258 - DNA, 19 bp, Mus musculus
  siRNA target sequence for Arhgef6 (NM_152801.1,1761-1779).
gactgtatgttcgaaatca

SEQ ID NO: 767259 - DNA, 19 bp, Mus musculus
  siRNA target sequence for Arhgef6 (NM_152801.1,1763-1781).
ctgtatgttcgaaatcaca

SEQ ID NO: 767260 - DNA, 19 bp, Mus musculus
  siRNA target sequence for Arhgef6 (NM_152801.1,1783-1801).
gtagcacggttgagagaat

SEQ ID NO: 767261 - DNA, 19 bp, Mus musculus
  siRNA target sequence for Arhgef6 (NM_152801.1,1786-1804).
gcacggttgagagaattgt

SEQ ID NO: 767262 - DNA, 19 bp, Mus musculus
  siRNA target sequence for Arhgef6 (NM_152801.1,1798-1816).
gaattgtggtccattgcaa

SEQ ID NO: 767263 - DNA, 19 bp, Mus musculus
  siRNA target sequence for Arhgef6 (NM_152801.1,1873-1891).
caacctcttgcggttcatt

SEQ ID NO: 767264 - DNA, 19 bp, Mus musculus
  siRNA target sequence for Arhgef6 (NM_152801.1,1915-1933).
gtagtactcattcttcttt

SEQ ID NO: 767265 - DNA, 19 bp, Mus musculus
  siRNA target sequence for Arhgef6 (NM_152801.1,1960-1978).
ccttggagcctcctcaaat

SEQ ID NO: 767266 - DNA, 19 bp, Mus musculus
  siRNA target sequence for Arhgef6 (NM_152801.1,1961-1979).
cttggagcctcctcaaatt

SEQ ID NO: 767267 - DNA, 19 bp, Mus musculus
  siRNA target sequence for Arhgef6 (NM_152801.1,1964-1982).
ggagcctcctcaaattata

SEQ ID NO: 767268 - DNA, 19 bp, Mus musculus
  siRNA target sequence for Arhgef6 (NM_152801.1,1965-1983).
gagcctcctcaaattataa

SEQ ID NO: 767269 - DNA, 19 bp, Mus musculus
  siRNA target sequence for Arhgef6 (NM_152801.1,2037-2055).
gcactaggttataaagaga

SEQ ID NO: 767270 - DNA, 19 bp, Mus musculus
  siRNA target sequence for Arhgef6 (NM_152801.1,2148-2166).
gaagaatacgtgattagga

SEQ ID NO: 767271 - DNA, 19 bp, Mus musculus
  siRNA target sequence for Arhgef6 (NM_152801.1,2156-2174).
cgtgattaggaaaagtact

SEQ ID NO: 767272 - DNA, 19 bp, Mus musculus
  siRNA target sequence for Arhgef6 (NM_152801.1,2187-2205).
gaggatgctcagattctta

SEQ ID NO: 767273 - DNA, 19 bp, Mus musculus
  siRNA target sequence for Arhgef6 (NM_152801.1,2224-2242).
gcaccagcgccagttttca

SEQ ID NO: 767274 - DNA, 19 bp, Mus musculus
  siRNA target sequence for Arhgef6 (NM_152801.1,2228-2246).
cagcgccagttttcaacaa

SEQ ID NO: 767275 - DNA, 19 bp, Mus musculus
  siRNA target sequence for Arhgef6 (NM_152801.1,2244-2262).
caaggtactcgtaaagatt

SEQ ID NO: 767276 - DNA, 19 bp, Mus musculus
  siRNA target sequence for Arhgef6 (NM_152801.1,2248-2266).
gtactcgtaaagattctgt

SEQ ID NO: 767277 - DNA, 19 bp, Mus musculus
  siRNA target sequence for Arhgef6 (NM_152801.1,2263-2281).
ctgttccacaagttctact

SEQ ID NO: 767278 - DNA, 19 bp, Mus musculus
  siRNA target sequence for Arhgef6 (NM_152801.1,2343-2361).
gagaagagccttgttgata

SEQ ID NO: 767279 - DNA, 19 bp, Mus musculus
  siRNA target sequence for Arhgef6 (NM_152801.1,2468-2486).
ggtccggaagctgttgaaa

SEQ ID NO: 767280 - DNA, 19 bp, Mus musculus
  siRNA target sequence for Arhgef6 (NM_152801.1,2472-2490).
cggaagctgttgaaacaaa

SEQ ID NO: 767281 - DNA, 19 bp, Mus musculus
  siRNA target sequence for Defb12 (NM_152802.1,45-63).
gcagagaggtgttctattt

SEQ ID NO: 767282 - DNA, 19 bp, Mus musculus
  siRNA target sequence for Defb12 (NM_152802.1,50-68).
gaggtgttctattttggtt

SEQ ID NO: 767283 - DNA, 19 bp, Mus musculus
  siRNA target sequence for Defb12 (NM_152802.1,108-126).
cctgggcaggacttgagta

SEQ ID NO: 767284 - DNA, 19 bp, Mus musculus
  siRNA target sequence for Hpse (NM_152803.2,520-538).
ctccgagagcagtaccaaa

SEQ ID NO: 767285 - DNA, 19 bp, Mus musculus
  siRNA target sequence for Hpse (NM_152803.2,524-542).
gagagcagtaccaaaagga

SEQ ID NO: 767286 - DNA, 19 bp, Mus musculus
  siRNA target sequence for Hpse (NM_152803.2,698-716).
gctcttccaagggttataa

SEQ ID NO: 767287 - DNA, 19 bp, Mus musculus
  siRNA target sequence for Hpse (NM_152803.2,701-719).
cttccaagggttataacat

SEQ ID NO: 767288 - DNA, 19 bp, Mus musculus
  siRNA target sequence for Hpse (NM_152803.2,877-895).
cctcgagggaagacagtta

SEQ ID NO: 767289 - DNA, 19 bp, Mus musculus
  siRNA target sequence for Hpse (NM_152803.2,878-896).
ctcgagggaagacagttaa

SEQ ID NO: 767290 - DNA, 19 bp, Mus musculus
  siRNA target sequence for Hpse (NM_152803.2,881-899).
gagggaagacagttaaact

SEQ ID NO: 767291 - DNA, 19 bp, Mus musculus
  siRNA target sequence for Hpse (NM_152803.2,931-949).
gtgatcgactctcttacat

SEQ ID NO: 767292 - DNA, 19 bp, Mus musculus
  siRNA target sequence for Hpse (NM_152803.2,941-959).
ctcttacatggcatcacta

SEQ ID NO: 767293 - DNA, 19 bp, Mus musculus
  siRNA target sequence for Hpse (NM_152803.2,943-961).
cttacatggcatcactatt

SEQ ID NO: 767294 - DNA, 19 bp, Mus musculus
  siRNA target sequence for Hpse (NM_152803.2,947-965).
catggcatcactattactt

SEQ ID NO: 767295 - DNA, 19 bp, Mus musculus
  siRNA target sequence for Hpse (NM_152803.2,950-968).
ggcatcactattacttgaa

SEQ ID NO: 767296 - DNA, 19 bp, Mus musculus
  siRNA target sequence for Hpse (NM_152803.2,951-969).
gcatcactattacttgaat

SEQ ID NO: 767297 - DNA, 19 bp, Mus musculus
  siRNA target sequence for Hpse (NM_152803.2,974-992).
gcatcgctaccaaagaaga

SEQ ID NO: 767298 - DNA, 19 bp, Mus musculus
  siRNA target sequence for Hpse (NM_152803.2,978-996).
cgctaccaaagaagatttt

SEQ ID NO: 767299 - DNA, 19 bp, Mus musculus
  siRNA target sequence for Hpse (NM_152803.2,1151-1169).
gctttatgtggctggataa

SEQ ID NO: 767300 - DNA, 19 bp, Mus musculus
  siRNA target sequence for Hpse (NM_152803.2,1184-1202).
cccagatgggcatagaagt

SEQ ID NO: 767301 - DNA, 19 bp, Mus musculus
  siRNA target sequence for Hpse (NM_152803.2,1229-1247).
caggcaactaccacttagt

SEQ ID NO: 767302 - DNA, 19 bp, Mus musculus
  siRNA target sequence for Hpse (NM_152803.2,1261-1279).
gagcctttacctgattact

SEQ ID NO: 767303 - DNA, 19 bp, Mus musculus
  siRNA target sequence for Hpse (NM_152803.2,1352-1370).
gcaaactccgagtgtatct

SEQ ID NO: 767304 - DNA, 19 bp, Mus musculus
  siRNA target sequence for Hpse (NM_152803.2,1429-1447).
ctgaacctccataatgtca

SEQ ID NO: 767305 - DNA, 19 bp, Mus musculus
  siRNA target sequence for Hpse (NM_152803.2,1462-1480).
gtaccgcctccgttgttca

SEQ ID NO: 767306 - DNA, 19 bp, Mus musculus
  siRNA target sequence for Hpse (NM_152803.2,1481-1499).
ggaaaccagtggatacgta

SEQ ID NO: 767307 - DNA, 19 bp, Mus musculus
  siRNA target sequence for Hpse (NM_152803.2,1520-1538).
cggatggattactttccaa

SEQ ID NO: 767308 - DNA, 19 bp, Mus musculus
  siRNA target sequence for Hpse (NM_152803.2,1521-1539).
ggatggattactttccaaa

SEQ ID NO: 767309 - DNA, 19 bp, Mus musculus
  siRNA target sequence for Hpse (NM_152803.2,1526-1544).
gattactttccaaatctgt

SEQ ID NO: 767310 - DNA, 19 bp, Mus musculus
  siRNA target sequence for Hpse (NM_152803.2,1545-1563).
ccaactgaacggtcaaatt

SEQ ID NO: 767311 - DNA, 19 bp, Mus musculus
  siRNA target sequence for Hpse (NM_152803.2,1549-1567).
ctgaacggtcaaattctga

SEQ ID NO: 767312 - DNA, 19 bp, Mus musculus
  siRNA target sequence for Hpse (NM_152803.2,1590-1608).
gccagctttgacagaaaaa

SEQ ID NO: 767313 - DNA, 19 bp, Mus musculus
  siRNA target sequence for Hpse (NM_152803.2,1649-1667).
cctatggtttttttgtcat

SEQ ID NO: 767314 - DNA, 19 bp, Mus musculus
  siRNA target sequence for Hpse (NM_152803.2,1677-1695).
caaaatcgctgcttgtata

SEQ ID NO: 767315 - DNA, 19 bp, Mus musculus
  siRNA target sequence for Snk (NM_152804.1,119-137).
gagctcctgcggactatca

SEQ ID NO: 767316 - DNA, 19 bp, Mus musculus
  siRNA target sequence for Snk (NM_152804.1,306-324).
ccgagatctcgcggattat

SEQ ID NO: 767317 - DNA, 19 bp, Mus musculus
  siRNA target sequence for Snk (NM_152804.1,307-325).
cgagatctcgcggattata

SEQ ID NO: 767318 - DNA, 19 bp, Mus musculus
  siRNA target sequence for Snk (NM_152804.1,372-390).
gcaagggtggatttgcaaa

SEQ ID NO: 767319 - DNA, 19 bp, Mus musculus
  siRNA target sequence for Snk (NM_152804.1,386-404).
gcaaagtgttacgaaatga

SEQ ID NO: 767320 - DNA, 19 bp, Mus musculus
  siRNA target sequence for Snk (NM_152804.1,425-443).
gtctacgctgcaaaaatta

SEQ ID NO: 767321 - DNA, 19 bp, Mus musculus
  siRNA target sequence for Snk (NM_152804.1,427-445).
ctacgctgcaaaaattatt

SEQ ID NO: 767322 - DNA, 19 bp, Mus musculus
  siRNA target sequence for Snk (NM_152804.1,430-448).
cgctgcaaaaattattcct

SEQ ID NO: 767323 - DNA, 19 bp, Mus musculus
  siRNA target sequence for Snk (NM_152804.1,468-486).
ctcatcagagggaaaagat

SEQ ID NO: 767324 - DNA, 19 bp, Mus musculus
  siRNA target sequence for Snk (NM_152804.1,510-528).
gactactgcaccataagca

SEQ ID NO: 767325 - DNA, 19 bp, Mus musculus
  siRNA target sequence for Snk (NM_152804.1,544-562).
ccactactttgaagacaaa

SEQ ID NO: 767326 - DNA, 19 bp, Mus musculus
  siRNA target sequence for Snk (NM_152804.1,600-618).
ggtccatggctcacatctt

SEQ ID NO: 767327 - DNA, 19 bp, Mus musculus
  siRNA target sequence for Snk (NM_152804.1,828-846).
gtggaaccccaaattatct

SEQ ID NO: 767328 - DNA, 19 bp, Mus musculus
  siRNA target sequence for Snk (NM_152804.1,830-848).
ggaaccccaaattatctct

SEQ ID NO: 767329 - DNA, 19 bp, Mus musculus
  siRNA target sequence for Snk (NM_152804.1,849-867).
cccccgaagtcctcaacaa

SEQ ID NO: 767330 - DNA, 19 bp, Mus musculus
  siRNA target sequence for Snk (NM_152804.1,850-868).
ccccgaagtcctcaacaaa

SEQ ID NO: 767331 - DNA, 19 bp, Mus musculus
  siRNA target sequence for Snk (NM_152804.1,852-870).
ccgaagtcctcaacaaaca

SEQ ID NO: 767332 - DNA, 19 bp, Mus musculus
  siRNA target sequence for Snk (NM_152804.1,853-871).
cgaagtcctcaacaaacaa

SEQ ID NO: 767333 - DNA, 19 bp, Mus musculus
  siRNA target sequence for Snk (NM_152804.1,905-923).
ggctgtgtaatgtatacga

SEQ ID NO: 767334 - DNA, 19 bp, Mus musculus
  siRNA target sequence for Snk (NM_152804.1,942-960).
cattcgaaaccacaaatct

SEQ ID NO: 767335 - DNA, 19 bp, Mus musculus
  siRNA target sequence for Snk (NM_152804.1,979-997).
cataagggaagcaaggtat

SEQ ID NO: 767336 - DNA, 19 bp, Mus musculus
  siRNA target sequence for Snk (NM_152804.1,984-1002).
gggaagcaaggtataccat

SEQ ID NO: 767337 - DNA, 19 bp, Mus musculus
  siRNA target sequence for Snk (NM_152804.1,1020-1038).
cccctgctaagcacttgat

SEQ ID NO: 767338 - DNA, 19 bp, Mus musculus
  siRNA target sequence for Snk (NM_152804.1,1021-1039).
ccctgctaagcacttgata

SEQ ID NO: 767339 - DNA, 19 bp, Mus musculus
  siRNA target sequence for Snk (NM_152804.1,1025-1043).
gctaagcacttgatagcta

SEQ ID NO: 767340 - DNA, 19 bp, Mus musculus
  siRNA target sequence for Snk (NM_152804.1,1160-1178).
ccagatttccacttgtcaa

SEQ ID NO: 767341 - DNA, 19 bp, Mus musculus
  siRNA target sequence for Snk (NM_152804.1,1207-1225).
cgcagccgctctttttggt

SEQ ID NO: 767342 - DNA, 19 bp, Mus musculus
  siRNA target sequence for Snk (NM_152804.1,1226-1244).
ggcaagaaggacaaagcaa

SEQ ID NO: 767343 - DNA, 19 bp, Mus musculus
  siRNA target sequence for Snk (NM_152804.1,1261-1279).
caataaggtgtctaaggaa

SEQ ID NO: 767344 - DNA, 19 bp, Mus musculus
  siRNA target sequence for Snk (NM_152804.1,1298-1316).
cttcggcatgatttgaaga

SEQ ID NO: 767345 - DNA, 19 bp, Mus musculus
  siRNA target sequence for Snk (NM_152804.1,1398-1416).
gaacgtccgcagtggaaaa

SEQ ID NO: 767346 - DNA, 19 bp, Mus musculus
  siRNA target sequence for Snk (NM_152804.1,1402-1420).
gtccgcagtggaaaacaaa

SEQ ID NO: 767347 - DNA, 19 bp, Mus musculus
  siRNA target sequence for Snk (NM_152804.1,1404-1422).
ccgcagtggaaaacaaaca

SEQ ID NO: 767348 - DNA, 19 bp, Mus musculus
  siRNA target sequence for Snk (NM_152804.1,1432-1450).
ggatgcaatccggatgata

SEQ ID NO: 767349 - DNA, 19 bp, Mus musculus
  siRNA target sequence for Snk (NM_152804.1,1436-1454).
gcaatccggatgatagtca

SEQ ID NO: 767350 - DNA, 19 bp, Mus musculus
  siRNA target sequence for Snk (NM_152804.1,1595-1613).
ctgagcacgtcctttcagt

SEQ ID NO: 767351 - DNA, 19 bp, Mus musculus
  siRNA target sequence for Snk (NM_152804.1,1677-1695).
ctgttggcgtccttttcaa

SEQ ID NO: 767352 - DNA, 19 bp, Mus musculus
  siRNA target sequence for Snk (NM_152804.1,1679-1697).
gttggcgtccttttcaaca

SEQ ID NO: 767353 - DNA, 19 bp, Mus musculus
  siRNA target sequence for Snk (NM_152804.1,1713-1731).
gcctccttccggacaaaaa

SEQ ID NO: 767354 - DNA, 19 bp, Mus musculus
  siRNA target sequence for Snk (NM_152804.1,1715-1733).
ctccttccggacaaaaaga

SEQ ID NO: 767355 - DNA, 19 bp, Mus musculus
  siRNA target sequence for Snk (NM_152804.1,1717-1735).
ccttccggacaaaaagaca

SEQ ID NO: 767356 - DNA, 19 bp, Mus musculus
  siRNA target sequence for Snk (NM_152804.1,1789-1807).
ccctgaacaatttattagt

SEQ ID NO: 767357 - DNA, 19 bp, Mus musculus
  siRNA target sequence for Snk (NM_152804.1,1865-1883).
ggtgatctcccgagtgtta

SEQ ID NO: 767358 - DNA, 19 bp, Mus musculus
  siRNA target sequence for Snk (NM_152804.1,1873-1891).
cccgagtgttactgacatt

SEQ ID NO: 767359 - DNA, 19 bp, Mus musculus
  siRNA target sequence for Snk (NM_152804.1,1912-1930).
cctgcagtggttaaagtct

SEQ ID NO: 767360 - DNA, 19 bp, Mus musculus
  siRNA target sequence for Snk (NM_152804.1,1916-1934).
cagtggttaaagtctgata

SEQ ID NO: 767361 - DNA, 19 bp, Mus musculus
  siRNA target sequence for Snk (NM_152804.1,1929-1947).
ctgataaagccttaatgat

SEQ ID NO: 767362 - DNA, 19 bp, Mus musculus
  siRNA target sequence for Snk (NM_152804.1,1981-1999).
ctaccacgatcatacaaaa

SEQ ID NO: 767363 - DNA, 19 bp, Mus musculus
  siRNA target sequence for Snk (NM_152804.1,1988-2006).
gatcatacaaaaatcatca

SEQ ID NO: 767364 - DNA, 19 bp, Mus musculus
  siRNA target sequence for Snk (NM_152804.1,1991-2009).
catacaaaaatcatcatct

SEQ ID NO: 767365 - DNA, 19 bp, Mus musculus
  siRNA target sequence for Snk (NM_152804.1,2050-2068).
ggacaggatctctacaact

SEQ ID NO: 767366 - DNA, 19 bp, Mus musculus
  siRNA target sequence for Snk (NM_152804.1,2051-2069).
gacaggatctctacaactt

SEQ ID NO: 767367 - DNA, 19 bp, Mus musculus
  siRNA target sequence for Snk (NM_152804.1,2056-2074).
gatctctacaactttcaga

SEQ ID NO: 767368 - DNA, 19 bp, Mus musculus
  siRNA target sequence for Snk (NM_152804.1,2089-2107).
gatgtctggctgttcgtta

SEQ ID NO: 767369 - DNA, 19 bp, Mus musculus
  siRNA target sequence for Snk (NM_152804.1,2094-2112).
ctggctgttcgttagaatt

SEQ ID NO: 767370 - DNA, 19 bp, Mus musculus
  siRNA target sequence for Snk (NM_152804.1,2096-2114).
ggctgttcgttagaattga

SEQ ID NO: 767371 - DNA, 19 bp, Mus musculus
  siRNA target sequence for Snk (NM_152804.1,2098-2116).
ctgttcgttagaattgaaa

SEQ ID NO: 767372 - DNA, 19 bp, Mus musculus
  siRNA target sequence for Snk (NM_152804.1,2100-2118).
gttcgttagaattgaaaaa

SEQ ID NO: 767373 - DNA, 19 bp, Mus musculus
  siRNA target sequence for Snk (NM_152804.1,2113-2131).
gaaaaatcgaatggaatat

SEQ ID NO: 767374 - DNA, 19 bp, Mus musculus
  siRNA target sequence for Snk (NM_152804.1,2135-2153).
ctgaacatgctcttacaga

SEQ ID NO: 767375 - DNA, 19 bp, Mus musculus
  siRNA target sequence for 3110023B02Rik (NM_152807.1,142-160).
ggacagcgcagcaaagaaa

SEQ ID NO: 767376 - DNA, 19 bp, Mus musculus
  siRNA target sequence for 3110023B02Rik (NM_152807.1,143-161).
gacagcgcagcaaagaaaa

SEQ ID NO: 767377 - DNA, 19 bp, Mus musculus
  siRNA target sequence for 3110023B02Rik (NM_152807.1,214-232).
cggctccgagaaattatga

SEQ ID NO: 767378 - DNA, 19 bp, Mus musculus
  siRNA target sequence for 3110023B02Rik (NM_152807.1,233-251).
ggagccgacaggagatgaa

SEQ ID NO: 767379 - DNA, 19 bp, Mus musculus
  siRNA target sequence for 3110023B02Rik (NM_152807.1,236-254).
gccgacaggagatgaaaaa

SEQ ID NO: 767380 - DNA, 19 bp, Mus musculus
  siRNA target sequence for 3110023B02Rik (NM_152807.1,417-435).
ccagcacgtgctgtttctt

SEQ ID NO: 767381 - DNA, 19 bp, Mus musculus
  siRNA target sequence for 3110023B02Rik (NM_152807.1,489-507).
gaagtctgagcgcaagaaa

SEQ ID NO: 767382 - DNA, 19 bp, Mus musculus
  siRNA target sequence for 3110023B02Rik (NM_152807.1,677-695).
gcaagaaatcactaatgct

SEQ ID NO: 767383 - DNA, 19 bp, Mus musculus
  siRNA target sequence for 3110023B02Rik (NM_152807.1,817-835).
ctgcatagacaggaaatga

SEQ ID NO: 767384 - DNA, 19 bp, Mus musculus
  siRNA target sequence for 1110028E10Rik (NM_152808.1,79-97).
ggaaggattcgcagaatta

SEQ ID NO: 767385 - DNA, 19 bp, Mus musculus
  siRNA target sequence for 1110028E10Rik (NM_152808.1,107-125).
gcacgggacgcctcagaaa

SEQ ID NO: 767386 - DNA, 19 bp, Mus musculus
  siRNA target sequence for 1110028E10Rik (NM_152808.1,108-126).
cacgggacgcctcagaaat

SEQ ID NO: 767387 - DNA, 19 bp, Mus musculus
  siRNA target sequence for 1110028E10Rik (NM_152808.1,318-336).
gcggacaaaccgttcttgt

SEQ ID NO: 767388 - DNA, 19 bp, Mus musculus
  siRNA target sequence for 1110028E10Rik (NM_152808.1,319-337).
cggacaaaccgttcttgtt

SEQ ID NO: 767389 - DNA, 19 bp, Mus musculus
  siRNA target sequence for 1110028E10Rik (NM_152808.1,321-339).
gacaaaccgttcttgtttt

SEQ ID NO: 767390 - DNA, 19 bp, Mus musculus
  siRNA target sequence for 1110028E10Rik (NM_152808.1,454-472).
gcaacactcgcgactttga

SEQ ID NO: 767391 - DNA, 19 bp, Mus musculus
  siRNA target sequence for 1110028E10Rik (NM_152808.1,460-478).
ctcgcgactttgactatta

SEQ ID NO: 767392 - DNA, 19 bp, Mus musculus
  siRNA target sequence for 1110028E10Rik (NM_152808.1,462-480).
cgcgactttgactattaca

SEQ ID NO: 767393 - DNA, 19 bp, Mus musculus
  siRNA target sequence for 1110028E10Rik (NM_152808.1,463-481).
gcgactttgactattacaa

SEQ ID NO: 767394 - DNA, 19 bp, Mus musculus
  siRNA target sequence for 1110028E10Rik (NM_152808.1,654-672).
ggacatggcgccagaaaga

SEQ ID NO: 767395 - DNA, 19 bp, Mus musculus
  siRNA target sequence for 1110028E10Rik (NM_152808.1,657-675).
catggcgccagaaagaaca

SEQ ID NO: 767396 - DNA, 19 bp, Mus musculus
  siRNA target sequence for 1110028E10Rik (NM_152808.1,660-678).
ggcgccagaaagaacatta

SEQ ID NO: 767397 - DNA, 19 bp, Mus musculus
  siRNA target sequence for 1110028E10Rik (NM_152808.1,729-747).
caactcgccatgcagatat

SEQ ID NO: 767398 - DNA, 19 bp, Mus musculus
  siRNA target sequence for 1110028E10Rik (NM_152808.1,743-761).
gatatttgaagattacact

SEQ ID NO: 767399 - DNA, 19 bp, Mus musculus
  siRNA target sequence for 1110028E10Rik (NM_152808.1,855-873).
gtctgggtgatgattgtca

SEQ ID NO: 767400 - DNA, 19 bp, Mus musculus
  siRNA target sequence for 1110028E10Rik (NM_152808.1,1011-1029).
cagacctggatggctttta

SEQ ID NO: 767401 - DNA, 19 bp, Mus musculus
  siRNA target sequence for 1110028E10Rik (NM_152808.1,1019-1037).
gatggcttttatgatcatt

SEQ ID NO: 767402 - DNA, 19 bp, Mus musculus
  siRNA target sequence for 1110028E10Rik (NM_152808.1,1022-1040).
ggcttttatgatcatttta

SEQ ID NO: 767403 - DNA, 19 bp, Mus musculus
  siRNA target sequence for 1110028E10Rik (NM_152808.1,1129-1147).
gggctgtgggacatgtcat

SEQ ID NO: 767404 - DNA, 19 bp, Mus musculus
  siRNA target sequence for 1110028E10Rik (NM_152808.1,1247-1265).
cgtgtacaaggttgttgat

SEQ ID NO: 767405 - DNA, 19 bp, Mus musculus
  siRNA target sequence for 1110028E10Rik (NM_152808.1,1590-1608).
gcttttggctcccttatct

SEQ ID NO: 767406 - DNA, 19 bp, Mus musculus
  siRNA target sequence for 1110028E10Rik (NM_152808.1,1646-1664).
cctggaccagcgcctaaaa

SEQ ID NO: 767407 - DNA, 19 bp, Mus musculus
  siRNA target sequence for 1110028E10Rik (NM_152808.1,1821-1839).
ctgcttatgagaaatatca

SEQ ID NO: 767408 - DNA, 19 bp, Mus musculus
  siRNA target sequence for 1110028E10Rik (NM_152808.1,1850-1868).
cgtcctggacaaagttaca

SEQ ID NO: 767409 - DNA, 19 bp, Mus musculus
  siRNA target sequence for 1110028E10Rik (NM_152808.1,1937-1955).
cacccatcggatcagaatt

SEQ ID NO: 767410 - DNA, 19 bp, Mus musculus
  siRNA target sequence for 1110028E10Rik (NM_152808.1,1939-1957).
cccatcggatcagaattgt

SEQ ID NO: 767411 - DNA, 19 bp, Mus musculus
  siRNA target sequence for 1110028E10Rik (NM_152808.1,1949-1967).
cagaattgtgcaagataca

SEQ ID NO: 767412 - DNA, 19 bp, Mus musculus
  siRNA target sequence for 1110028E10Rik (NM_152808.1,1971-1989).
ccacctctcaattattact

SEQ ID NO: 767413 - DNA, 19 bp, Mus musculus
  siRNA target sequence for 1110028E10Rik (NM_152808.1,1996-2014).
cgatcctgacagtgatcat

SEQ ID NO: 767414 - DNA, 19 bp, Mus musculus
  siRNA target sequence for 1110028E10Rik (NM_152808.1,1997-2015).
gatcctgacagtgatcatt

SEQ ID NO: 767415 - DNA, 19 bp, Mus musculus
  siRNA target sequence for 1110028E10Rik (NM_152808.1,2140-2158).
cttccactctcaagaaact

SEQ ID NO: 767416 - DNA, 19 bp, Mus musculus
  siRNA target sequence for 1110028E10Rik (NM_152808.1,2148-2166).
ctcaagaaactcttgaata

SEQ ID NO: 767417 - DNA, 19 bp, Mus musculus
  siRNA target sequence for 2700083B01Rik (NM_152815.1,814-832).
gaaaccccatgctctagat

SEQ ID NO: 767418 - DNA, 19 bp, Mus musculus
  siRNA target sequence for 2700083B01Rik (NM_152815.1,819-837).
cccatgctctagatattct

SEQ ID NO: 767419 - DNA, 19 bp, Mus musculus
  siRNA target sequence for 2700083B01Rik (NM_152815.1,820-838).
ccatgctctagatattctt

SEQ ID NO: 767420 - DNA, 19 bp, Mus musculus
  siRNA target sequence for 2700083B01Rik (NM_152815.1,846-864).
ctattccagcttttataaa

SEQ ID NO: 767421 - DNA, 19 bp, Mus musculus
  siRNA target sequence for 2700083B01Rik (NM_152815.1,875-893).
gttatactcgtcaaaaagt

SEQ ID NO: 767422 - DNA, 19 bp, Mus musculus
  siRNA target sequence for 2700083B01Rik (NM_152815.1,1128-1146).
cagcaagcttaattacagt

SEQ ID NO: 767423 - DNA, 19 bp, Mus musculus
  siRNA target sequence for 2700083B01Rik (NM_152815.1,1145-1163).
gtgaagtccttagaaatca

SEQ ID NO: 767424 - DNA, 19 bp, Mus musculus
  siRNA target sequence for 2700083B01Rik (NM_152815.1,1222-1240).
cgagctactggccttctta

SEQ ID NO: 767425 - DNA, 19 bp, Mus musculus
  siRNA target sequence for 2700083B01Rik (NM_152815.1,1223-1241).
gagctactggccttcttaa

SEQ ID NO: 767426 - DNA, 19 bp, Mus musculus
  siRNA target sequence for 2700083B01Rik (NM_152815.1,1288-1306).
gctgtccagggtcttcata

SEQ ID NO: 767427 - DNA, 19 bp, Mus musculus
  siRNA target sequence for 2700083B01Rik (NM_152815.1,1443-1461).
gtaaccctcactgtgtttt

SEQ ID NO: 767428 - DNA, 19 bp, Mus musculus
  siRNA target sequence for 2700083B01Rik (NM_152815.1,1448-1466).
cctcactgtgttttcttat

SEQ ID NO: 767429 - DNA, 19 bp, Mus musculus
  siRNA target sequence for 2700083B01Rik (NM_152815.1,1497-1515).
ctgttcttctcgacttctt

SEQ ID NO: 767430 - DNA, 19 bp, Mus musculus
  siRNA target sequence for 2700083B01Rik (NM_152815.1,1499-1517).
gttcttctcgacttcttga

SEQ ID NO: 767431 - DNA, 19 bp, Mus musculus
  siRNA target sequence for 2700083B01Rik (NM_152815.1,1502-1520).
cttctcgacttcttgatat

SEQ ID NO: 767432 - DNA, 19 bp, Mus musculus
  siRNA target sequence for 2700083B01Rik (NM_152815.1,1505-1523).
ctcgacttcttgatatcct

SEQ ID NO: 767433 - DNA, 19 bp, Mus musculus
  siRNA target sequence for 2700083B01Rik (NM_152815.1,1528-1546).
gacctgtttccttgaatat

SEQ ID NO: 767434 - DNA, 19 bp, Mus musculus
  siRNA target sequence for 2700083B01Rik (NM_152815.1,1577-1595).
gactgggcccactttctgt

SEQ ID NO: 767435 - DNA, 19 bp, Mus musculus
  siRNA target sequence for 2700083B01Rik (NM_152815.1,1632-1650).
gtggaatgcttgttcatga

SEQ ID NO: 767436 - DNA, 19 bp, Mus musculus
  siRNA target sequence for 2700083B01Rik (NM_152815.1,1841-1859).
ccgcagagtctggtagatt

SEQ ID NO: 767437 - DNA, 19 bp, Mus musculus
  siRNA target sequence for 2700083B01Rik (NM_152815.1,1842-1860).
cgcagagtctggtagatta

SEQ ID NO: 767438 - DNA, 19 bp, Mus musculus
  siRNA target sequence for 2700083B01Rik (NM_152815.1,1891-1909).
cacaagtgagcatttagca

SEQ ID NO: 767439 - DNA, 19 bp, Mus musculus
  siRNA target sequence for 2700083B01Rik (NM_152815.1,1893-1911).
caagtgagcatttagcaaa

SEQ ID NO: 767440 - DNA, 19 bp, Mus musculus
  siRNA target sequence for 2700083B01Rik (NM_152815.1,2035-2053).
ctctgccaagggtagagtt

SEQ ID NO: 767441 - DNA, 19 bp, Mus musculus
  siRNA target sequence for 2700083B01Rik (NM_152815.1,2114-2132).
gagctacagggagcaattt

SEQ ID NO: 767442 - DNA, 19 bp, Mus musculus
  siRNA target sequence for 2700083B01Rik (NM_152815.1,2134-2152).
ccgtttgcaggagaaaaat

SEQ ID NO: 767443 - DNA, 19 bp, Mus musculus
  siRNA target sequence for 2700083B01Rik (NM_152815.1,2169-2187).
cagcggcacttctgaagtt

SEQ ID NO: 767444 - DNA, 19 bp, Mus musculus
  siRNA target sequence for 2700083B01Rik (NM_152815.1,2171-2189).
gcggcacttctgaagttgt

SEQ ID NO: 767445 - DNA, 19 bp, Mus musculus
  siRNA target sequence for 2700083B01Rik (NM_152815.1,2172-2190).
cggcacttctgaagttgtt

SEQ ID NO: 767446 - DNA, 19 bp, Mus musculus
  siRNA target sequence for 2610511O17Rik (NM_152817.2,277-295).
cttagaattgctgttagaa

SEQ ID NO: 767447 - DNA, 19 bp, Mus musculus
  siRNA target sequence for 2610511O17Rik (NM_152817.2,297-315).
ggagctatgaggctttgtt

SEQ ID NO: 767448 - DNA, 19 bp, Mus musculus
  siRNA target sequence for 2610511O17Rik (NM_152817.2,320-338).
cattcaacgacacaaacta

SEQ ID NO: 767449 - DNA, 19 bp, Mus musculus
  siRNA target sequence for 2610511O17Rik (NM_152817.2,324-342).
caacgacacaaactatttt

SEQ ID NO: 767450 - DNA, 19 bp, Mus musculus
  siRNA target sequence for 2610511O17Rik (NM_152817.2,327-345).
cgacacaaactattttaaa

SEQ ID NO: 767451 - DNA, 19 bp, Mus musculus
  siRNA target sequence for 2610511O17Rik (NM_152817.2,336-354).
ctattttaaattcaacaat

SEQ ID NO: 767452 - DNA, 19 bp, Mus musculus
  siRNA target sequence for 2610511O17Rik (NM_152817.2,471-489).
gcagcttgcagctttttgt

SEQ ID NO: 767453 - DNA, 19 bp, Mus musculus
  siRNA target sequence for 2610511O17Rik (NM_152817.2,546-564).
ctggtctgctggagcaatt

SEQ ID NO: 767454 - DNA, 19 bp, Mus musculus
  siRNA target sequence for 2610511O17Rik (NM_152817.2,579-597).
gactggatgctattattat

SEQ ID NO: 767455 - DNA, 19 bp, Mus musculus
  siRNA target sequence for 2610511O17Rik (NM_152817.2,598-616).
gggtctcctcattctagat

SEQ ID NO: 767456 - DNA, 19 bp, Mus musculus
  siRNA target sequence for 2610511O17Rik (NM_152817.2,666-684).
cacgcattatcctagtgaa

SEQ ID NO: 767457 - DNA, 19 bp, Mus musculus
  siRNA target sequence for 2610511O17Rik (NM_152817.2,677-695).
ctagtgaacatcagacata

SEQ ID NO: 767458 - DNA, 19 bp, Mus musculus
  siRNA target sequence for 2610511O17Rik (NM_152817.2,680-698).
gtgaacatcagacataaat

SEQ ID NO: 767459 - DNA, 19 bp, Mus musculus
  siRNA target sequence for 2610511O17Rik (NM_152817.2,685-703).
catcagacataaattgaca

SEQ ID NO: 767460 - DNA, 19 bp, Mus musculus
  siRNA target sequence for 2610511O17Rik (NM_152817.2,719-737).
ccatggtggacgttgagat

SEQ ID NO: 767461 - DNA, 19 bp, Mus musculus
  siRNA target sequence for 2610511O17Rik (NM_152817.2,735-753).
gatatgtgaatattcatca

SEQ ID NO: 767462 - DNA, 19 bp, Mus musculus
  siRNA target sequence for 2610511O17Rik (NM_152817.2,769-787).
gcgatcacctcagcttttt

SEQ ID NO: 767463 - DNA, 19 bp, Mus musculus
  siRNA target sequence for 2610511O17Rik (NM_152817.2,789-807).
ctcttgccaaaaactgtat

SEQ ID NO: 767464 - DNA, 19 bp, Mus musculus
  siRNA target sequence for 2610511O17Rik (NM_152817.2,843-861).
gtgattcaggtcgactttt

SEQ ID NO: 767465 - DNA, 19 bp, Mus musculus
  siRNA target sequence for 2610511O17Rik (NM_152817.2,852-870).
gtcgacttttggctattca

SEQ ID NO: 767466 - DNA, 19 bp, Mus musculus
  siRNA target sequence for 2610511O17Rik (NM_152817.2,854-872).
cgacttttggctattcaat

SEQ ID NO: 767467 - DNA, 19 bp, Mus musculus
  siRNA target sequence for 2610511O17Rik (NM_152817.2,923-941).
gcaaaggaccagttcagta

SEQ ID NO: 767468 - DNA, 19 bp, Mus musculus
  siRNA target sequence for 2610511O17Rik (NM_152817.2,931-949).
ccagttcagtactgctaaa

SEQ ID NO: 767469 - DNA, 19 bp, Mus musculus
  siRNA target sequence for 2610511O17Rik (NM_152817.2,952-970).
catcagcaagttagagatt

SEQ ID NO: 767470 - DNA, 19 bp, Mus musculus
  siRNA target sequence for 2610511O17Rik (NM_152817.2,996-1014).
ggacacgattccaggaaaa

SEQ ID NO: 767471 - DNA, 19 bp, Mus musculus
  siRNA target sequence for 2610511O17Rik (NM_152817.2,997-1015).
gacacgattccaggaaaat

SEQ ID NO: 767472 - DNA, 19 bp, Mus musculus
  siRNA target sequence for 2610511O17Rik (NM_152817.2,999-1017).
cacgattccaggaaaatta

SEQ ID NO: 767473 - DNA, 19 bp, Mus musculus
  siRNA target sequence for 2610511O17Rik (NM_152817.2,1002-1020).
gattccaggaaaattacgt

SEQ ID NO: 767474 - DNA, 19 bp, Mus musculus
  siRNA target sequence for 2610511O17Rik (NM_152817.2,1021-1039).
ggcgcagctgattgtagat

SEQ ID NO: 767475 - DNA, 19 bp, Mus musculus
  siRNA target sequence for 2610511O17Rik (NM_152817.2,1163-1181).
gatagtgaacggtttcaga

SEQ ID NO: 767476 - DNA, 19 bp, Mus musculus
  siRNA target sequence for 2610511O17Rik (NM_152817.2,1216-1234).
ccttggagtctgcacaaat

SEQ ID NO: 767477 - DNA, 19 bp, Mus musculus
  siRNA target sequence for 2610511O17Rik (NM_152817.2,1217-1235).
cttggagtctgcacaaatt

SEQ ID NO: 767478 - DNA, 19 bp, Mus musculus
  siRNA target sequence for 2610511O17Rik (NM_152817.2,1221-1239).
gagtctgcacaaatttcca

SEQ ID NO: 767479 - DNA, 19 bp, Mus musculus
  siRNA target sequence for 2610511O17Rik (NM_152817.2,1284-1302).
ccttcacatcgtgtttact

SEQ ID NO: 767480 - DNA, 19 bp, Mus musculus
  siRNA target sequence for 2610511O17Rik (NM_152817.2,1288-1306).
cacatcgtgtttactttca

SEQ ID NO: 767481 - DNA, 19 bp, Mus musculus
  siRNA target sequence for 2610511O17Rik (NM_152817.2,1290-1308).
catcgtgtttactttcaca

SEQ ID NO: 767482 - DNA, 19 bp, Mus musculus
  siRNA target sequence for 2610511O17Rik (NM_152817.2,1301-1319).
ctttcacaaccaaagttct

SEQ ID NO: 767483 - DNA, 19 bp, Mus musculus
  siRNA target sequence for 2610511O17Rik (NM_152817.2,1451-1469).
gaacgtctgaagattttct

SEQ ID NO: 767484 - DNA, 19 bp, Mus musculus
  siRNA target sequence for 2610511O17Rik (NM_152817.2,1454-1472).
cgtctgaagattttctatt

SEQ ID NO: 767485 - DNA, 19 bp, Mus musculus
  siRNA target sequence for 2610511O17Rik (NM_152817.2,1459-1477).
gaagattttctattgttgt

SEQ ID NO: 767486 - DNA, 19 bp, Mus musculus
  siRNA target sequence for 2610511O17Rik (NM_152817.2,1545-1563).
cctcagccctgcagatatt

SEQ ID NO: 767487 - DNA, 19 bp, Mus musculus
  siRNA target sequence for 2610511O17Rik (NM_152817.2,1663-1681).
ggaaacaccaggtttatat

SEQ ID NO: 767488 - DNA, 19 bp, Mus musculus
  siRNA target sequence for 2610511O17Rik (NM_152817.2,1826-1844).
gagcgctcagtgaagatca

SEQ ID NO: 767489 - DNA, 19 bp, Mus musculus
  siRNA target sequence for 2610511O17Rik (NM_152817.2,1939-1957).
gaccctagaacccgataat

SEQ ID NO: 767490 - DNA, 19 bp, Mus musculus
  siRNA target sequence for 2610511O17Rik (NM_152817.2,1942-1960).
cctagaacccgataatgct

SEQ ID NO: 767491 - DNA, 19 bp, Mus musculus
  siRNA target sequence for 2610511O17Rik (NM_152817.2,1958-1976).
gctgaggcttggaacaatt

SEQ ID NO: 767492 - DNA, 19 bp, Mus musculus
  siRNA target sequence for 2610511O17Rik (NM_152817.2,1959-1977).
ctgaggcttggaacaattt

SEQ ID NO: 767493 - DNA, 19 bp, Mus musculus
  siRNA target sequence for 2610511O17Rik (NM_152817.2,1980-1998).
ctacttcctatattcgatt

SEQ ID NO: 767494 - DNA, 19 bp, Mus musculus
  siRNA target sequence for 2610511O17Rik (NM_152817.2,1983-2001).
cttcctatattcgattaaa

SEQ ID NO: 767495 - DNA, 19 bp, Mus musculus
  siRNA target sequence for 2610511O17Rik (NM_152817.2,1986-2004).
cctatattcgattaaagca

SEQ ID NO: 767496 - DNA, 19 bp, Mus musculus
  siRNA target sequence for 2610511O17Rik (NM_152817.2,1987-2005).
ctatattcgattaaagcaa

SEQ ID NO: 767497 - DNA, 19 bp, Mus musculus
  siRNA target sequence for 2610511O17Rik (NM_152817.2,1994-2012).
cgattaaagcaaaaagtca

SEQ ID NO: 767498 - DNA, 19 bp, Mus musculus
  siRNA target sequence for 2610511O17Rik (NM_152817.2,2016-2034).
cttttagaacgttacaaga

SEQ ID NO: 767499 - DNA, 19 bp, Mus musculus
  siRNA target sequence for 2610511O17Rik (NM_152817.2,2033-2051).
gaagccctcaagtgtaact

SEQ ID NO: 767500 - DNA, 19 bp, Mus musculus
  siRNA target sequence for 2610511O17Rik (NM_152817.2,2111-2129).
ggggaagccatcaaagctt

SEQ ID NO: 767501 - DNA, 19 bp, Mus musculus
  siRNA target sequence for 2610511O17Rik (NM_152817.2,2150-2168).
cgagacaaatacaaagata

SEQ ID NO: 767502 - DNA, 19 bp, Mus musculus
  siRNA target sequence for 2610511O17Rik (NM_152817.2,2165-2183).
gatattcaggtccttaaaa

SEQ ID NO: 767503 - DNA, 19 bp, Mus musculus
  siRNA target sequence for 2610511O17Rik (NM_152817.2,2188-2206).
ggtccaggcagtggttaat

SEQ ID NO: 767504 - DNA, 19 bp, Mus musculus
  siRNA target sequence for 2610511O17Rik (NM_152817.2,2191-2209).
ccaggcagtggttaatgat

SEQ ID NO: 767505 - DNA, 19 bp, Mus musculus
  siRNA target sequence for 2610511O17Rik (NM_152817.2,2192-2210).
caggcagtggttaatgata

SEQ ID NO: 767506 - DNA, 19 bp, Mus musculus
  siRNA target sequence for 2610511O17Rik (NM_152817.2,2195-2213).
gcagtggttaatgatatga

SEQ ID NO: 767507 - DNA, 19 bp, Mus musculus
  siRNA target sequence for 2610511O17Rik (NM_152817.2,2260-2278).
ggagttgtttggcagaata

SEQ ID NO: 767508 - DNA, 19 bp, Mus musculus
  siRNA target sequence for 2610511O17Rik (NM_152817.2,2263-2281).
gttgtttggcagaataact

SEQ ID NO: 767509 - DNA, 19 bp, Mus musculus
  siRNA target sequence for 2610511O17Rik (NM_152817.2,2384-2402).
ctctcgaaggcgtacaagt

SEQ ID NO: 767510 - DNA, 19 bp, Mus musculus
  siRNA target sequence for 2610511O17Rik (NM_152817.2,2476-2494).
cgctcatgtggctatgaaa

SEQ ID NO: 767511 - DNA, 19 bp, Mus musculus
  siRNA target sequence for 2610511O17Rik (NM_152817.2,2525-2543).
gctgtacaaacactttctt

SEQ ID NO: 767512 - DNA, 19 bp, Mus musculus
  siRNA target sequence for 2610511O17Rik (NM_152817.2,2541-2559).
cttcagttcgactcaattt

SEQ ID NO: 767513 - DNA, 19 bp, Mus musculus
  siRNA target sequence for 2610511O17Rik (NM_152817.2,2554-2572).
caatttacgtggcttgtta

SEQ ID NO: 767514 - DNA, 19 bp, Mus musculus
  siRNA target sequence for 2610511O17Rik (NM_152817.2,2564-2582).
ggcttgttatccaaagcaa

SEQ ID NO: 767515 - DNA, 19 bp, Mus musculus
  siRNA target sequence for Purg (NM_152821.1,151-169).
cgtcagccacccctaatca

SEQ ID NO: 767516 - DNA, 19 bp, Mus musculus
  siRNA target sequence for Purg (NM_152821.1,175-193).
ggggcacatccgaaatcca

SEQ ID NO: 767517 - DNA, 19 bp, Mus musculus
  siRNA target sequence for Purg (NM_152821.1,306-324).
cggcaggacaatatcagaa

SEQ ID NO: 767518 - DNA, 19 bp, Mus musculus
  siRNA target sequence for Purg (NM_152821.1,307-325).
ggcaggacaatatcagaaa

SEQ ID NO: 767519 - DNA, 19 bp, Mus musculus
  siRNA target sequence for Purg (NM_152821.1,311-329).
ggacaatatcagaaagagt

SEQ ID NO: 767520 - DNA, 19 bp, Mus musculus
  siRNA target sequence for Purg (NM_152821.1,530-548).
cctcaaaacggactatata

SEQ ID NO: 767521 - DNA, 19 bp, Mus musculus
  siRNA target sequence for Purg (NM_152821.1,549-567).
gagagggacaataggaaat

SEQ ID NO: 767522 - DNA, 19 bp, Mus musculus
  siRNA target sequence for Purg (NM_152821.1,553-571).
gggacaataggaaatacta

SEQ ID NO: 767523 - DNA, 19 bp, Mus musculus
  siRNA target sequence for Purg (NM_152821.1,575-593).
ggacctaaaggaaaaccaa

SEQ ID NO: 767524 - DNA, 19 bp, Mus musculus
  siRNA target sequence for Purg (NM_152821.1,591-609).
caacgaggtcgcttcctaa

SEQ ID NO: 767525 - DNA, 19 bp, Mus musculus
  siRNA target sequence for Purg (NM_152821.1,595-613).
gaggtcgcttcctaaggat

SEQ ID NO: 767526 - DNA, 19 bp, Mus musculus
  siRNA target sequence for Purg (NM_152821.1,597-615).
ggtcgcttcctaaggatta

SEQ ID NO: 767527 - DNA, 19 bp, Mus musculus
  siRNA target sequence for Purg (NM_152821.1,601-619).
gcttcctaaggattagaca

SEQ ID NO: 767528 - DNA, 19 bp, Mus musculus
  siRNA target sequence for Purg (NM_152821.1,637-655).
ctggcatgatcggttactt

SEQ ID NO: 767529 - DNA, 19 bp, Mus musculus
  siRNA target sequence for Purg (NM_152821.1,668-686).
gggccaggatcagactatt

SEQ ID NO: 767530 - DNA, 19 bp, Mus musculus
  siRNA target sequence for Purg (NM_152821.1,670-688).
gccaggatcagactattgt

SEQ ID NO: 767531 - DNA, 19 bp, Mus musculus
  siRNA target sequence for Purg (NM_152821.1,694-712).
cagcacaaggtatgattga

SEQ ID NO: 767532 - DNA, 19 bp, Mus musculus
  siRNA target sequence for Purg (NM_152821.1,697-715).
cacaaggtatgattgaatt

SEQ ID NO: 767533 - DNA, 19 bp, Mus musculus
  siRNA target sequence for Purg (NM_152821.1,724-742).
ccttggttcagctgattga

SEQ ID NO: 767534 - DNA, 19 bp, Mus musculus
  siRNA target sequence for Purg (NM_152821.1,725-743).
cttggttcagctgattgaa

SEQ ID NO: 767535 - DNA, 19 bp, Mus musculus
  siRNA target sequence for Purg (NM_152821.1,746-764).
ctacggcgaaggagacata

SEQ ID NO: 767536 - DNA, 19 bp, Mus musculus
  siRNA target sequence for Purg (NM_152821.1,749-767).
cggcgaaggagacatagaa

SEQ ID NO: 767537 - DNA, 19 bp, Mus musculus
  siRNA target sequence for Purg (NM_152821.1,828-846).
gacaataaaaggttctact

SEQ ID NO: 767538 - DNA, 19 bp, Mus musculus
  siRNA target sequence for Purg (NM_152821.1,845-863).
ctttgatgtgggctctaat

SEQ ID NO: 767539 - DNA, 19 bp, Mus musculus
  siRNA target sequence for Purg (NM_152821.1,903-921).
ccttaccgtaatactatta

SEQ ID NO: 767540 - DNA, 19 bp, Mus musculus
  siRNA target sequence for Purg (NM_152821.1,908-926).
ccgtaatactattactgtt

SEQ ID NO: 767541 - DNA, 19 bp, Mus musculus
  siRNA target sequence for Purg (NM_152821.1,951-969).
ggggagaattttatcaagt

SEQ ID NO: 767542 - DNA, 19 bp, Mus musculus
  siRNA target sequence for Purg (NM_152821.1,998-1016).
cagccataaggaaaagaga

SEQ ID NO: 767543 - DNA, 19 bp, Mus musculus
  siRNA target sequence for 5830482G23Rik (NM_152822.1,73-91).
ggacgggcagtccttcaaa

SEQ ID NO: 767544 - DNA, 19 bp, Mus musculus
  siRNA target sequence for 5830482G23Rik (NM_152822.1,157-175).
ggagcaagtgacggtttat

SEQ ID NO: 767545 - DNA, 19 bp, Mus musculus
  siRNA target sequence for 5830482G23Rik (NM_152822.1,210-228).
cgctgaaccgaattacagt

SEQ ID NO: 767546 - DNA, 19 bp, Mus musculus
  siRNA target sequence for 5830482G23Rik (NM_152822.1,324-342).
gcactgatgaacttagact

SEQ ID NO: 767547 - DNA, 19 bp, Mus musculus
  siRNA target sequence for 5830482G23Rik (NM_152822.1,361-379).
ggtcaggtttgtgaatctt

SEQ ID NO: 767548 - DNA, 19 bp, Mus musculus
  siRNA target sequence for 5830482G23Rik (NM_152822.1,362-380).
gtcaggtttgtgaatctta

SEQ ID NO: 767549 - DNA, 19 bp, Mus musculus
  siRNA target sequence for 5830482G23Rik (NM_152822.1,367-385).
gtttgtgaatcttatctca

SEQ ID NO: 767550 - DNA, 19 bp, Mus musculus
  siRNA target sequence for 5830482G23Rik (NM_152822.1,405-423).
ctaaccttcccctcaaata

SEQ ID NO: 767551 - DNA, 19 bp, Mus musculus
  siRNA target sequence for 5830482G23Rik (NM_152822.1,442-460).
cattccagactggattgtt

SEQ ID NO: 767552 - DNA, 19 bp, Mus musculus
  siRNA target sequence for 5830482G23Rik (NM_152822.1,657-675).
ccgatgatgtacttgaaga

SEQ ID NO: 767553 - DNA, 19 bp, Mus musculus
  siRNA target sequence for 5830482G23Rik (NM_152822.1,717-735).
ctgtcgaggatgatgcaaa

SEQ ID NO: 767554 - DNA, 19 bp, Mus musculus
  siRNA target sequence for 5830482G23Rik (NM_152822.1,719-737).
gtcgaggatgatgcaaata

SEQ ID NO: 767555 - DNA, 19 bp, Mus musculus
  siRNA target sequence for 5830482G23Rik (NM_152822.1,721-739).
cgaggatgatgcaaatact

SEQ ID NO: 767556 - DNA, 19 bp, Mus musculus
  siRNA target sequence for 5830482G23Rik (NM_152822.1,783-801).
gacacaaggagttgtatga

SEQ ID NO: 767557 - DNA, 19 bp, Mus musculus
  siRNA target sequence for 5830482G23Rik (NM_152822.1,810-828).
gagaattgctggtatccta

SEQ ID NO: 767558 - DNA, 19 bp, Mus musculus
  siRNA target sequence for 5830482G23Rik (NM_152822.1,878-896).
gctattaaagtgtggaata

SEQ ID NO: 767559 - DNA, 19 bp, Mus musculus
  siRNA target sequence for 5830482G23Rik (NM_152822.1,899-917).
ctttccccacgtgtacaat

SEQ ID NO: 767560 - DNA, 19 bp, Mus musculus
  siRNA target sequence for 5830482G23Rik (NM_152822.1,903-921).
ccccacgtgtacaatgtat

SEQ ID NO: 767561 - DNA, 19 bp, Mus musculus
  siRNA target sequence for Igj (NM_152839.1,91-109).
cgacgaagcgaccattctt

SEQ ID NO: 767562 - DNA, 19 bp, Mus musculus
  siRNA target sequence for Igj (NM_152839.1,102-120).
ccattcttgctgacaacaa

SEQ ID NO: 767563 - DNA, 19 bp, Mus musculus
  siRNA target sequence for Igj (NM_152839.1,113-131).
gacaacaaatgcatgtgta

SEQ ID NO: 767564 - DNA, 19 bp, Mus musculus
  siRNA target sequence for Igj (NM_152839.1,156-174).
cttccaccgaggatcctaa

SEQ ID NO: 767565 - DNA, 19 bp, Mus musculus
  siRNA target sequence for Igj (NM_152839.1,159-177).
ccaccgaggatcctaatga

SEQ ID NO: 767566 - DNA, 19 bp, Mus musculus
  siRNA target sequence for Igj (NM_152839.1,178-196).
ggacattgtggagagaaat

SEQ ID NO: 767567 - DNA, 19 bp, Mus musculus
  siRNA target sequence for Igj (NM_152839.1,280-298).
gtcagacgtctgtaagaaa

SEQ ID NO: 767568 - DNA, 19 bp, Mus musculus
  siRNA target sequence for Igj (NM_152839.1,423-441).
ctatggtcccacttaggta

SEQ ID NO: 767569 - DNA, 19 bp, Mus musculus
  siRNA target sequence for Igj (NM_152839.1,427-445).
ggtcccacttaggtatcat

SEQ ID NO: 767570 - DNA, 19 bp, Mus musculus
  siRNA target sequence for Igj (NM_152839.1,470-488).
gccttgacccccgattctt

SEQ ID NO: 767571 - DNA, 19 bp, Mus musculus
  siRNA target sequence for Plu1 (NM_152895.1,272-290).
cggaccccttcgctttcat

SEQ ID NO: 767572 - DNA, 19 bp, Mus musculus
  siRNA target sequence for Plu1 (NM_152895.1,313-331).
gagcagactgggatctgta

SEQ ID NO: 767573 - DNA, 19 bp, Mus musculus
  siRNA target sequence for Plu1 (NM_152895.1,357-375).
gccaccattcgcttgtgat

SEQ ID NO: 767574 - DNA, 19 bp, Mus musculus
  siRNA target sequence for Plu1 (NM_152895.1,366-384).
cgcttgtgatgtcgataaa

SEQ ID NO: 767575 - DNA, 19 bp, Mus musculus
  siRNA target sequence for Plu1 (NM_152895.1,368-386).
cttgtgatgtcgataaact

SEQ ID NO: 767576 - DNA, 19 bp, Mus musculus
  siRNA target sequence for Plu1 (NM_152895.1,371-389).
gtgatgtcgataaacttca

SEQ ID NO: 767577 - DNA, 19 bp, Mus musculus
  siRNA target sequence for Plu1 (NM_152895.1,426-444).
ggcccaaacacgtgtaaaa

SEQ ID NO: 767578 - DNA, 19 bp, Mus musculus
  siRNA target sequence for Plu1 (NM_152895.1,428-446).
cccaaacacgtgtaaaatt

SEQ ID NO: 767579 - DNA, 19 bp, Mus musculus
  siRNA target sequence for Plu1 (NM_152895.1,510-528).
cgtggagagaaagatctta

SEQ ID NO: 767580 - DNA, 19 bp, Mus musculus
  siRNA target sequence for Plu1 (NM_152895.1,534-552).
gttccagctaaataagtta

SEQ ID NO: 767581 - DNA, 19 bp, Mus musculus
  siRNA target sequence for Plu1 (NM_152895.1,565-583).
ggtgggtttgcagttgttt

SEQ ID NO: 767582 - DNA, 19 bp, Mus musculus
  siRNA target sequence for Plu1 (NM_152895.1,650-668).
cacatatcaggggacatta

SEQ ID NO: 767583 - DNA, 19 bp, Mus musculus
  siRNA target sequence for Plu1 (NM_152895.1,662-680).
gacattatgagcgaatact

SEQ ID NO: 767584 - DNA, 19 bp, Mus musculus
  siRNA target sequence for Plu1 (NM_152895.1,664-682).
cattatgagcgaatactca

SEQ ID NO: 767585 - DNA, 19 bp, Mus musculus
  siRNA target sequence for Plu1 (NM_152895.1,670-688).
gagcgaatactcaatccat

SEQ ID NO: 767586 - DNA, 19 bp, Mus musculus
  siRNA target sequence for Plu1 (NM_152895.1,674-692).
gaatactcaatccatacaa

SEQ ID NO: 767587 - DNA, 19 bp, Mus musculus
  siRNA target sequence for Plu1 (NM_152895.1,752-770).
caaaggacaaggagtacaa

SEQ ID NO: 767588 - DNA, 19 bp, Mus musculus
  siRNA target sequence for Plu1 (NM_152895.1,850-868).
gcagaggctatgaatatta

SEQ ID NO: 767589 - DNA, 19 bp, Mus musculus
  siRNA target sequence for Plu1 (NM_152895.1,895-913).
gccaggactcataatctga

SEQ ID NO: 767590 - DNA, 19 bp, Mus musculus
  siRNA target sequence for Plu1 (NM_152895.1,925-943).
ggttgcacaactccaaaat

SEQ ID NO: 767591 - DNA, 19 bp, Mus musculus
  siRNA target sequence for Plu1 (NM_152895.1,1060-1078).
gcggtggacctgtatgtgt

SEQ ID NO: 767592 - DNA, 19 bp, Mus musculus
  siRNA target sequence for Plu1 (NM_152895.1,1262-1280).
cagcaagggactatacact

SEQ ID NO: 767593 - DNA, 19 bp, Mus musculus
  siRNA target sequence for Plu1 (NM_152895.1,1272-1290).
ctatacacttcgtacattt

SEQ ID NO: 767594 - DNA, 19 bp, Mus musculus
  siRNA target sequence for Plu1 (NM_152895.1,1377-1395).
gcggctcgtaagcactatt

SEQ ID NO: 767595 - DNA, 19 bp, Mus musculus
  siRNA target sequence for Plu1 (NM_152895.1,1379-1397).
ggctcgtaagcactattga

SEQ ID NO: 767596 - DNA, 19 bp, Mus musculus
  siRNA target sequence for Plu1 (NM_152895.1,1380-1398).
gctcgtaagcactattgaa

SEQ ID NO: 767597 - DNA, 19 bp, Mus musculus
  siRNA target sequence for Plu1 (NM_152895.1,1383-1401).
cgtaagcactattgaagaa

SEQ ID NO: 767598 - DNA, 19 bp, Mus musculus
  siRNA target sequence for Plu1 (NM_152895.1,1462-1480).
gttcgagatgggaaaatca

SEQ ID NO: 767599 - DNA, 19 bp, Mus musculus
  siRNA target sequence for Plu1 (NM_152895.1,1507-1525).
ctggatagtggctggaatt

SEQ ID NO: 767600 - DNA, 19 bp, Mus musculus
  siRNA target sequence for Plu1 (NM_152895.1,1510-1528).
gatagtggctggaatttga

SEQ ID NO: 767601 - DNA, 19 bp, Mus musculus
  siRNA target sequence for Plu1 (NM_152895.1,1551-1569).
gtctgtccttgctcatatt

SEQ ID NO: 767602 - DNA, 19 bp, Mus musculus
  siRNA target sequence for Plu1 (NM_152895.1,1562-1580).
ctcatattactgctgatat

SEQ ID NO: 767603 - DNA, 19 bp, Mus musculus
  siRNA target sequence for Plu1 (NM_152895.1,1564-1582).
catattactgctgatatat

SEQ ID NO: 767604 - DNA, 19 bp, Mus musculus
  siRNA target sequence for Plu1 (NM_152895.1,1590-1608).
gaaactcccctggttgtat

SEQ ID NO: 767605 - DNA, 19 bp, Mus musculus
  siRNA target sequence for Plu1 (NM_152895.1,1724-1742).
ctgagcagctagaaaacgt

SEQ ID NO: 767606 - DNA, 19 bp, Mus musculus
  siRNA target sequence for Plu1 (NM_152895.1,1837-1855).
gaagtgcctgtttatcgaa

SEQ ID NO: 767607 - DNA, 19 bp, Mus musculus
  siRNA target sequence for Plu1 (NM_152895.1,1842-1860).
gcctgtttatcgaacgaat

SEQ ID NO: 767608 - DNA, 19 bp, Mus musculus
  siRNA target sequence for Plu1 (NM_152895.1,1846-1864).
gtttatcgaacgaatcagt

SEQ ID NO: 767609 - DNA, 19 bp, Mus musculus
  siRNA target sequence for Plu1 (NM_152895.1,1865-1883).
gtgctggggagtttgtaat

SEQ ID NO: 767610 - DNA, 19 bp, Mus musculus
  siRNA target sequence for Plu1 (NM_152895.1,1867-1885).
gctggggagtttgtaatta

SEQ ID NO: 767611 - DNA, 19 bp, Mus musculus
  siRNA target sequence for Plu1 (NM_152895.1,1870-1888).
ggggagtttgtaattacgt

SEQ ID NO: 767612 - DNA, 19 bp, Mus musculus
  siRNA target sequence for Plu1 (NM_152895.1,1871-1889).
gggagtttgtaattacgtt

SEQ ID NO: 767613 - DNA, 19 bp, Mus musculus
  siRNA target sequence for Plu1 (NM_152895.1,1872-1890).
ggagtttgtaattacgttt

SEQ ID NO: 767614 - DNA, 19 bp, Mus musculus
  siRNA target sequence for Plu1 (NM_152895.1,1907-1925).
gtggcttcaaccaaggttt

SEQ ID NO: 767615 - DNA, 19 bp, Mus musculus
  siRNA target sequence for Plu1 (NM_152895.1,1999-2017).
cgcttgctgcaccgttatt

SEQ ID NO: 767616 - DNA, 19 bp, Mus musculus
  siRNA target sequence for Plu1 (NM_152895.1,2001-2019).
cttgctgcaccgttattgt

SEQ ID NO: 767617 - DNA, 19 bp, Mus musculus
  siRNA target sequence for Plu1 (NM_152895.1,2007-2025).
gcaccgttattgtgtcttt

SEQ ID NO: 767618 - DNA, 19 bp, Mus musculus
  siRNA target sequence for Plu1 (NM_152895.1,2029-2047).
cacgatgaaatgatatgca

SEQ ID NO: 767619 - DNA, 19 bp, Mus musculus
  siRNA target sequence for Plu1 (NM_152895.1,2031-2049).
cgatgaaatgatatgcaaa

SEQ ID NO: 767620 - DNA, 19 bp, Mus musculus
  siRNA target sequence for Plu1 (NM_152895.1,2141-2159).
gggaaactgttcggaaatt

SEQ ID NO: 767621 - DNA, 19 bp, Mus musculus
  siRNA target sequence for Plu1 (NM_152895.1,2267-2285).
gtaaacctggcctacttgt

SEQ ID NO: 767622 - DNA, 19 bp, Mus musculus
  siRNA target sequence for Plu1 (NM_152895.1,2288-2306).
gcctacatcatgtgaaaga

SEQ ID NO: 767623 - DNA, 19 bp, Mus musculus
  siRNA target sequence for Plu1 (NM_152895.1,2293-2311).
catcatgtgaaagaattgt

SEQ ID NO: 767624 - DNA, 19 bp, Mus musculus
  siRNA target sequence for Plu1 (NM_152895.1,2331-2349).
gtataacctgcggtataga

SEQ ID NO: 767625 - DNA, 19 bp, Mus musculus
  siRNA target sequence for Plu1 (NM_152895.1,2356-2374).
ctggatgatctctatccaa

SEQ ID NO: 767626 - DNA, 19 bp, Mus musculus
  siRNA target sequence for Plu1 (NM_152895.1,2392-2410).
cttcgagcagagtcttaca

SEQ ID NO: 767627 - DNA, 19 bp, Mus musculus
  siRNA target sequence for Plu1 (NM_152895.1,2396-2414).
gagcagagtcttacaatga

SEQ ID NO: 767628 - DNA, 19 bp, Mus musculus
  siRNA target sequence for Plu1 (NM_152895.1,2437-2455).
gccttggaagcaaagatca

SEQ ID NO: 767629 - DNA, 19 bp, Mus musculus
  siRNA target sequence for Plu1 (NM_152895.1,2470-2488).
cttgtcagctttaaagctt

SEQ ID NO: 767630 - DNA, 19 bp, Mus musculus
  siRNA target sequence for Plu1 (NM_152895.1,2477-2495).
gctttaaagctttgattga

SEQ ID NO: 767631 - DNA, 19 bp, Mus musculus
  siRNA target sequence for Plu1 (NM_152895.1,2508-2526).
gaaaaaattcccagacaat

SEQ ID NO: 767632 - DNA, 19 bp, Mus musculus
  siRNA target sequence for Plu1 (NM_152895.1,2581-2599).
gttgcccagcagttgctta

SEQ ID NO: 767633 - DNA, 19 bp, Mus musculus
  siRNA target sequence for Plu1 (NM_152895.1,2652-2670).
gctgacggtgaatgaactt

SEQ ID NO: 767634 - DNA, 19 bp, Mus musculus
  siRNA target sequence for Plu1 (NM_152895.1,2655-2673).
gacggtgaatgaacttaga

SEQ ID NO: 767635 - DNA, 19 bp, Mus musculus
  siRNA target sequence for Plu1 (NM_152895.1,2661-2679).
gaatgaacttagacagttt

SEQ ID NO: 767636 - DNA, 19 bp, Mus musculus
  siRNA target sequence for Plu1 (NM_152895.1,2665-2683).
gaacttagacagtttgtga

SEQ ID NO: 767637 - DNA, 19 bp, Mus musculus
  siRNA target sequence for Plu1 (NM_152895.1,2714-2732).
gtcagacaccgttgctaaa

SEQ ID NO: 767638 - DNA, 19 bp, Mus musculus
  siRNA target sequence for Plu1 (NM_152895.1,2718-2736).
gacaccgttgctaaaggat

SEQ ID NO: 767639 - DNA, 19 bp, Mus musculus
  siRNA target sequence for Plu1 (NM_152895.1,2723-2741).
cgttgctaaaggatctctt

SEQ ID NO: 767640 - DNA, 19 bp, Mus musculus
  siRNA target sequence for Plu1 (NM_152895.1,2939-2957).
ccctttctttggatgatat

SEQ ID NO: 767641 - DNA, 19 bp, Mus musculus
  siRNA target sequence for Plu1 (NM_152895.1,2941-2959).
ctttctttggatgatatga

SEQ ID NO: 767642 - DNA, 19 bp, Mus musculus
  siRNA target sequence for Plu1 (NM_152895.1,3085-3103).
gcaagaccacggcattctt

SEQ ID NO: 767643 - DNA, 19 bp, Mus musculus
  siRNA target sequence for Plu1 (NM_152895.1,3163-3181).
ggtacagtcctgaaggatt

SEQ ID NO: 767644 - DNA, 19 bp, Mus musculus
  siRNA target sequence for Plu1 (NM_152895.1,3238-3256).
cgtgtgccagtgttagaga

SEQ ID NO: 767645 - DNA, 19 bp, Mus musculus
  siRNA target sequence for Plu1 (NM_152895.1,3249-3267).
gttagagacactcattgaa

SEQ ID NO: 767646 - DNA, 19 bp, Mus musculus
  siRNA target sequence for Plu1 (NM_152895.1,3255-3273).
gacactcattgaacttgtt

SEQ ID NO: 767647 - DNA, 19 bp, Mus musculus
  siRNA target sequence for Plu1 (NM_152895.1,3282-3300).
ccgatctatcccagtacat

SEQ ID NO: 767648 - DNA, 19 bp, Mus musculus
  siRNA target sequence for Plu1 (NM_152895.1,3284-3302).
gatctatcccagtacatct

SEQ ID NO: 767649 - DNA, 19 bp, Mus musculus
  siRNA target sequence for Plu1 (NM_152895.1,3291-3309).
cccagtacatctcaattct

SEQ ID NO: 767650 - DNA, 19 bp, Mus musculus
  siRNA target sequence for Plu1 (NM_152895.1,3293-3311).
cagtacatctcaattcttt

SEQ ID NO: 767651 - DNA, 19 bp, Mus musculus
  siRNA target sequence for Plu1 (NM_152895.1,3298-3316).
catctcaattctttaccaa

SEQ ID NO: 767652 - DNA, 19 bp, Mus musculus
  siRNA target sequence for Plu1 (NM_152895.1,3355-3373).
gaatgtgctgctaaaacat

SEQ ID NO: 767653 - DNA, 19 bp, Mus musculus
  siRNA target sequence for Plu1 (NM_152895.1,3359-3377).
gtgctgctaaaacattctt

SEQ ID NO: 767654 - DNA, 19 bp, Mus musculus
  siRNA target sequence for Plu1 (NM_152895.1,3433-3451).
ggccttttggggctgaaaa

SEQ ID NO: 767655 - DNA, 19 bp, Mus musculus
  siRNA target sequence for Plu1 (NM_152895.1,3492-3510).
gaagagaagcaccaagtta

SEQ ID NO: 767656 - DNA, 19 bp, Mus musculus
  siRNA target sequence for Plu1 (NM_152895.1,3629-3647).
ccaatgaagagaaattgct

SEQ ID NO: 767657 - DNA, 19 bp, Mus musculus
  siRNA target sequence for Plu1 (NM_152895.1,3650-3668).
cacctgtccaagacttaga

SEQ ID NO: 767658 - DNA, 19 bp, Mus musculus
  siRNA target sequence for Plu1 (NM_152895.1,3698-3716).
cagccactcccatgattca

SEQ ID NO: 767659 - DNA, 19 bp, Mus musculus
  siRNA target sequence for Plu1 (NM_152895.1,3700-3718).
gccactcccatgattcagt

SEQ ID NO: 767660 - DNA, 19 bp, Mus musculus
  siRNA target sequence for Plu1 (NM_152895.1,3754-3772).
gtggcagcacccagtattt

SEQ ID NO: 767661 - DNA, 19 bp, Mus musculus
  siRNA target sequence for Plu1 (NM_152895.1,3813-3831).
gtcagagaagcctccatta

SEQ ID NO: 767662 - DNA, 19 bp, Mus musculus
  siRNA target sequence for Plu1 (NM_152895.1,3815-3833).
cagagaagcctccattaga

SEQ ID NO: 767663 - DNA, 19 bp, Mus musculus
  siRNA target sequence for Plu1 (NM_152895.1,3817-3835).
gagaagcctccattagaga

SEQ ID NO: 767664 - DNA, 19 bp, Mus musculus
  siRNA target sequence for Plu1 (NM_152895.1,3855-3873).
ctccctacagcgtatacga

SEQ ID NO: 767665 - DNA, 19 bp, Mus musculus
  siRNA target sequence for Plu1 (NM_152895.1,3890-3908).
gagatgcactccgatacat

SEQ ID NO: 767666 - DNA, 19 bp, Mus musculus
  siRNA target sequence for Plu1 (NM_152895.1,3896-3914).
cactccgatacatgattga

SEQ ID NO: 767667 - DNA, 19 bp, Mus musculus
  siRNA target sequence for Plu1 (NM_152895.1,3898-3916).
ctccgatacatgattgaaa

SEQ ID NO: 767668 - DNA, 19 bp, Mus musculus
  siRNA target sequence for Plu1 (NM_152895.1,3900-3918).
ccgatacatgattgaaaga

SEQ ID NO: 767669 - DNA, 19 bp, Mus musculus
  siRNA target sequence for Plu1 (NM_152895.1,3921-3939).
cgtgaactggcaacataga

SEQ ID NO: 767670 - DNA, 19 bp, Mus musculus
  siRNA target sequence for Plu1 (NM_152895.1,3991-4009).
ggttctggactgttgtcta

SEQ ID NO: 767671 - DNA, 19 bp, Mus musculus
  siRNA target sequence for Plu1 (NM_152895.1,4104-4122).
caacagaacctcatattta

SEQ ID NO: 767672 - DNA, 19 bp, Mus musculus
  siRNA target sequence for Plu1 (NM_152895.1,4151-4169).
gtctccccctccatggttt

SEQ ID NO: 767673 - DNA, 19 bp, Mus musculus
  siRNA target sequence for Plu1 (NM_152895.1,4155-4173).
ccccctccatggtttgagt

SEQ ID NO: 767674 - DNA, 19 bp, Mus musculus
  siRNA target sequence for Plu1 (NM_152895.1,4226-4244).
ctgaaattcaggagcttta

SEQ ID NO: 767675 - DNA, 19 bp, Mus musculus
  siRNA target sequence for Plu1 (NM_152895.1,4239-4257).
gctttatcagactctactt

SEQ ID NO: 767676 - DNA, 19 bp, Mus musculus
  siRNA target sequence for Plu1 (NM_152895.1,4287-4305).
ccgaagttcaccagttaga

SEQ ID NO: 767677 - DNA, 19 bp, Mus musculus
  siRNA target sequence for Plu1 (NM_152895.1,4334-4352).
gagggaaacgagatgcaat

SEQ ID NO: 767678 - DNA, 19 bp, Mus musculus
  siRNA target sequence for Plu1 (NM_152895.1,4337-4355).
ggaaacgagatgcaatcaa

SEQ ID NO: 767679 - DNA, 19 bp, Mus musculus
  siRNA target sequence for Plu1 (NM_152895.1,4485-4503).
cagtttcaagttagaaaga

SEQ ID NO: 767680 - DNA, 19 bp, Mus musculus
  siRNA target sequence for Plu1 (NM_152895.1,4502-4520).
gagagcgtagctatgactt

SEQ ID NO: 767681 - DNA, 19 bp, Mus musculus
  siRNA target sequence for Plu1 (NM_152895.1,4524-4542).
gcgtaatgctgaaactcat

SEQ ID NO: 767682 - DNA, 19 bp, Mus musculus
  siRNA target sequence for D7Ertd156e (NM_153057.2,125-143).
cggacgtggagatcaacta

SEQ ID NO: 767683 - DNA, 19 bp, Mus musculus
  siRNA target sequence for D7Ertd156e (NM_153057.2,127-145).
gacgtggagatcaactact

SEQ ID NO: 767684 - DNA, 19 bp, Mus musculus
  siRNA target sequence for D7Ertd156e (NM_153057.2,146-164).
cgctcatcgagataaagtt

SEQ ID NO: 767685 - DNA, 19 bp, Mus musculus
  siRNA target sequence for D7Ertd156e (NM_153057.2,148-166).
ctcatcgagataaagttat

SEQ ID NO: 767686 - DNA, 19 bp, Mus musculus
  siRNA target sequence for D7Ertd156e (NM_153057.2,170-188).
ccaagcatgggactttgaa

SEQ ID NO: 767687 - DNA, 19 bp, Mus musculus
  siRNA target sequence for D7Ertd156e (NM_153057.2,208-226).
cctaacaacggctacttta

SEQ ID NO: 767688 - DNA, 19 bp, Mus musculus
  siRNA target sequence for D7Ertd156e (NM_153057.2,209-227).
ctaacaacggctactttat

SEQ ID NO: 767689 - DNA, 19 bp, Mus musculus
  siRNA target sequence for D7Ertd156e (NM_153057.2,248-266).
gggatttcatcctgaagat

SEQ ID NO: 767690 - DNA, 19 bp, Mus musculus
  siRNA target sequence for D7Ertd156e (NM_153057.2,485-503).
cgcagcctggcggaaagtt

SEQ ID NO: 767691 - DNA, 19 bp, Mus musculus
  siRNA target sequence for D7Ertd156e (NM_153057.2,496-514).
ggaaagtttgcgtttttca

SEQ ID NO: 767692 - DNA, 19 bp, Mus musculus
  siRNA target sequence for D7Ertd156e (NM_153057.2,592-610).
gtgacgaactcgaatgcta

SEQ ID NO: 767693 - DNA, 19 bp, Mus musculus
  siRNA target sequence for D7Ertd156e (NM_153057.2,627-645).
catagtggctggctataat

SEQ ID NO: 767694 - DNA, 19 bp, Mus musculus
  siRNA target sequence for D7Ertd156e (NM_153057.2,631-649).
gtggctggctataatgtgt

SEQ ID NO: 767695 - DNA, 19 bp, Mus musculus
  siRNA target sequence for D7Ertd156e (NM_153057.2,798-816).
ctatgcggtctccaaagaa

SEQ ID NO: 767696 - DNA, 19 bp, Mus musculus
  siRNA target sequence for D7Ertd156e (NM_153057.2,984-1002).
caccgggagagtcttgaat

SEQ ID NO: 767697 - DNA, 19 bp, Mus musculus
  siRNA target sequence for D7Ertd156e (NM_153057.2,1083-1101).
cttccgcctggagaacata

SEQ ID NO: 767698 - DNA, 19 bp, Mus musculus
  siRNA target sequence for D7Ertd156e (NM_153057.2,1087-1105).
cgcctggagaacataacga

SEQ ID NO: 767699 - DNA, 19 bp, Mus musculus
  siRNA target sequence for D7Ertd156e (NM_153057.2,1331-1349).
gcgatgcccatggatcatt

SEQ ID NO: 767700 - DNA, 19 bp, Mus musculus
  siRNA target sequence for D7Ertd156e (NM_153057.2,1332-1350).
cgatgcccatggatcattt

SEQ ID NO: 767701 - DNA, 19 bp, Mus musculus
  siRNA target sequence for D7Ertd156e (NM_153057.2,1336-1354).
gcccatggatcattttgct

SEQ ID NO: 767702 - DNA, 19 bp, Mus musculus
  siRNA target sequence for D7Ertd156e (NM_153057.2,1337-1355).
cccatggatcattttgctt

SEQ ID NO: 767703 - DNA, 19 bp, Mus musculus
  siRNA target sequence for D7Ertd156e (NM_153057.2,1339-1357).
catggatcattttgcttta

SEQ ID NO: 767704 - DNA, 19 bp, Mus musculus
  siRNA target sequence for D7Ertd156e (NM_153057.2,1566-1584).
gagccgccagggtgagaaa

SEQ ID NO: 767705 - DNA, 19 bp, Mus musculus
  siRNA target sequence for D7Ertd156e (NM_153057.2,1644-1662).
gcctgggagatacaaaata

SEQ ID NO: 767706 - DNA, 19 bp, Mus musculus
  siRNA target sequence for D7Ertd156e (NM_153057.2,1831-1849).
gtggggatttacaatctct

SEQ ID NO: 767707 - DNA, 19 bp, Mus musculus
  siRNA target sequence for D7Ertd156e (NM_153057.2,1930-1948).
gccttttacacctatgaca

SEQ ID NO: 767708 - DNA, 19 bp, Mus musculus
  siRNA target sequence for D7Ertd156e (NM_153057.2,1980-1998).
cattcgtcaccatgttctt

SEQ ID NO: 767709 - DNA, 19 bp, Mus musculus
  siRNA target sequence for D7Ertd156e (NM_153057.2,2003-2021).
caatcattactgacaaaat

SEQ ID NO: 767710 - DNA, 19 bp, Mus musculus
  siRNA target sequence for D7Ertd156e (NM_153057.2,2029-2047).
gtcacagtgactatcaagt

SEQ ID NO: 767711 - DNA, 19 bp, Mus musculus
  siRNA target sequence for D7Ertd156e (NM_153057.2,2351-2369).
gctgtccagggaagttaat

SEQ ID NO: 767712 - DNA, 19 bp, Mus musculus
  siRNA target sequence for D7Ertd156e (NM_153057.2,2352-2370).
ctgtccagggaagttaatt

SEQ ID NO: 767713 - DNA, 19 bp, Mus musculus
  siRNA target sequence for D7Ertd156e (NM_153057.2,2354-2372).
gtccagggaagttaattga

SEQ ID NO: 767714 - DNA, 19 bp, Mus musculus
  siRNA target sequence for D7Ertd156e (NM_153057.2,2425-2443).
gagggagtcgagattgtca

SEQ ID NO: 767715 - DNA, 19 bp, Mus musculus
  siRNA target sequence for D7Ertd156e (NM_153057.2,2448-2466).
cgagaagggagcaagttca

SEQ ID NO: 767716 - DNA, 19 bp, Mus musculus
  siRNA target sequence for D7Ertd156e (NM_153057.2,2458-2476).
gcaagttcacccttgatca

SEQ ID NO: 767717 - DNA, 19 bp, Mus musculus
  siRNA target sequence for D7Ertd156e (NM_153057.2,2477-2495).
ctgtcttcaccgatgacaa

SEQ ID NO: 767718 - DNA, 19 bp, Mus musculus
  siRNA target sequence for D7Ertd156e (NM_153057.2,2523-2541).
cagtgacctggagtatact

SEQ ID NO: 767719 - DNA, 19 bp, Mus musculus
  siRNA target sequence for D7Ertd156e (NM_153057.2,2525-2543).
gtgacctggagtatactgt

SEQ ID NO: 767720 - DNA, 19 bp, Mus musculus
  siRNA target sequence for D7Ertd156e (NM_153057.2,2585-2603).
gaaccgtgggagacttcaa

SEQ ID NO: 767721 - DNA, 19 bp, Mus musculus
  siRNA target sequence for D7Ertd156e (NM_153057.2,2620-2638).
ggcgtgagcttcgagatta

SEQ ID NO: 767722 - DNA, 19 bp, Mus musculus
  siRNA target sequence for D7Ertd156e (NM_153057.2,2622-2640).
cgtgagcttcgagattaaa

SEQ ID NO: 767723 - DNA, 19 bp, Mus musculus
  siRNA target sequence for D7Ertd156e (NM_153057.2,2625-2643).
gagcttcgagattaaagct

SEQ ID NO: 767724 - DNA, 19 bp, Mus musculus
  siRNA target sequence for D7Ertd156e (NM_153057.2,2804-2822).
cctcacagatgatagaagt

SEQ ID NO: 767725 - DNA, 19 bp, Mus musculus
  siRNA target sequence for D7Ertd156e (NM_153057.2,2883-2901).
cggcactgtgtcgtcttta

SEQ ID NO: 767726 - DNA, 19 bp, Mus musculus
  siRNA target sequence for D7Ertd156e (NM_153057.2,2884-2902).
ggcactgtgtcgtctttaa

SEQ ID NO: 767727 - DNA, 19 bp, Mus musculus
  siRNA target sequence for D7Ertd156e (NM_153057.2,2885-2903).
gcactgtgtcgtctttaaa

SEQ ID NO: 767728 - DNA, 19 bp, Mus musculus
  siRNA target sequence for D7Ertd156e (NM_153057.2,2886-2904).
cactgtgtcgtctttaaat

SEQ ID NO: 767729 - DNA, 19 bp, Mus musculus
  siRNA target sequence for D7Ertd156e (NM_153057.2,3083-3101).
cccaccaccgggtgattga

SEQ ID NO: 767730 - DNA, 19 bp, Mus musculus
  siRNA target sequence for D7Ertd156e (NM_153057.2,3096-3114).
gattgaggttgggaacaat

SEQ ID NO: 767731 - DNA, 19 bp, Mus musculus
  siRNA target sequence for D7Ertd156e (NM_153057.2,3124-3142).
gacgtaaacatcatagttt

SEQ ID NO: 767732 - DNA, 19 bp, Mus musculus
  siRNA target sequence for D7Ertd156e (NM_153057.2,3163-3181).
gacctgagtggaaacgtaa

SEQ ID NO: 767733 - DNA, 19 bp, Mus musculus
  siRNA target sequence for D7Ertd156e (NM_153057.2,3166-3184).
ctgagtggaaacgtaatca

SEQ ID NO: 767734 - DNA, 19 bp, Mus musculus
  siRNA target sequence for D7Ertd156e (NM_153057.2,3168-3186).
gagtggaaacgtaatcact

SEQ ID NO: 767735 - DNA, 19 bp, Mus musculus
  siRNA target sequence for D7Ertd156e (NM_153057.2,3303-3321).
ccgagatggcgagaactat

SEQ ID NO: 767736 - DNA, 19 bp, Mus musculus
  siRNA target sequence for D7Ertd156e (NM_153057.2,3305-3323).
gagatggcgagaactatgt

SEQ ID NO: 767737 - DNA, 19 bp, Mus musculus
  siRNA target sequence for D7Ertd156e (NM_153057.2,3370-3388).
ctgccgcaagtctctttca

SEQ ID NO: 767738 - DNA, 19 bp, Mus musculus
  siRNA target sequence for D7Ertd156e (NM_153057.2,3411-3429).
catcactctggttttcagt

SEQ ID NO: 767739 - DNA, 19 bp, Mus musculus
  siRNA target sequence for D7Ertd156e (NM_153057.2,3441-3459).
gctccctgaacaagacatt

SEQ ID NO: 767740 - DNA, 19 bp, Mus musculus
  siRNA target sequence for Tiaf2 (NM_153061.1,1290-1308).
ctgcaattgcctcttatgt

SEQ ID NO: 767741 - DNA, 19 bp, Mus musculus
  siRNA target sequence for Tiaf2 (NM_153061.1,1347-1365).
ggagggctttcctatccat

SEQ ID NO: 767742 - DNA, 19 bp, Mus musculus
  siRNA target sequence for Tiaf2 (NM_153061.1,1471-1489).
gccaggacaccagatttga

SEQ ID NO: 767743 - DNA, 19 bp, Mus musculus
  siRNA target sequence for Tiaf2 (NM_153061.1,1577-1595).
gaggtgatccagctttctt

SEQ ID NO: 767744 - DNA, 19 bp, Mus musculus
  siRNA target sequence for Tiaf2 (NM_153061.1,1601-1619).
cagtgcagagccaacagat

SEQ ID NO: 767745 - DNA, 19 bp, Mus musculus
  siRNA target sequence for Slc37a1 (NM_153062.1,488-506).
gtggtaccgggctttcatt

SEQ ID NO: 767746 - DNA, 19 bp, Mus musculus
  siRNA target sequence for Slc37a1 (NM_153062.1,490-508).
ggtaccgggctttcatttt

SEQ ID NO: 767747 - DNA, 19 bp, Mus musculus
  siRNA target sequence for Slc37a1 (NM_153062.1,491-509).
gtaccgggctttcattttt

SEQ ID NO: 767748 - DNA, 19 bp, Mus musculus
  siRNA target sequence for Slc37a1 (NM_153062.1,699-717).
cccttcgataagaacaatt

SEQ ID NO: 767749 - DNA, 19 bp, Mus musculus
  siRNA target sequence for Slc37a1 (NM_153062.1,757-775).
gcgcctatgccattggaat

SEQ ID NO: 767750 - DNA, 19 bp, Mus musculus
  siRNA target sequence for Slc37a1 (NM_153062.1,760-778).
cctatgccattggaatgta

SEQ ID NO: 767751 - DNA, 19 bp, Mus musculus
  siRNA target sequence for Slc37a1 (NM_153062.1,776-794).
gtacctgagtggaataata

SEQ ID NO: 767752 - DNA, 19 bp, Mus musculus
  siRNA target sequence for Slc37a1 (NM_153062.1,801-819).
cgcctgccgattaggtatt

SEQ ID NO: 767753 - DNA, 19 bp, Mus musculus
  siRNA target sequence for Slc37a1 (NM_153062.1,802-820).
gcctgccgattaggtatta

SEQ ID NO: 767754 - DNA, 19 bp, Mus musculus
  siRNA target sequence for Slc37a1 (NM_153062.1,994-1012).
gaaggcgtggcctgatcat

SEQ ID NO: 767755 - DNA, 19 bp, Mus musculus
  siRNA target sequence for Slc37a1 (NM_153062.1,1005-1023).
ctgatcatggggatttgga

SEQ ID NO: 767756 - DNA, 19 bp, Mus musculus
  siRNA target sequence for Slc37a1 (NM_153062.1,1084-1102).
cgtgctggggcctgtcatt

SEQ ID NO: 767757 - DNA, 19 bp, Mus musculus
  siRNA target sequence for Slc37a1 (NM_153062.1,1134-1152).
gggatagtgtgctttctct

SEQ ID NO: 767758 - DNA, 19 bp, Mus musculus
  siRNA target sequence for Slc37a1 (NM_153062.1,1220-1238).
gaatggcataaacagattt

SEQ ID NO: 767759 - DNA, 19 bp, Mus musculus
  siRNA target sequence for Slc37a1 (NM_153062.1,1225-1243).
gcataaacagatttagact

SEQ ID NO: 767760 - DNA, 19 bp, Mus musculus
  siRNA target sequence for Slc37a1 (NM_153062.1,1251-1269).
caaaccacgtacagtgaaa

SEQ ID NO: 767761 - DNA, 19 bp, Mus musculus
  siRNA target sequence for Slc37a1 (NM_153062.1,1256-1274).
cacgtacagtgaaaagaat

SEQ ID NO: 767762 - DNA, 19 bp, Mus musculus
  siRNA target sequence for Slc37a1 (NM_153062.1,1328-1346).
ccttcacccaagccatatt

SEQ ID NO: 767763 - DNA, 19 bp, Mus musculus
  siRNA target sequence for Slc37a1 (NM_153062.1,1525-1543).
gggagctgtccacattgtt

SEQ ID NO: 767764 - DNA, 19 bp, Mus musculus
  siRNA target sequence for Slc37a1 (NM_153062.1,1615-1633).
cttgtggtctgatgctatt

SEQ ID NO: 767765 - DNA, 19 bp, Mus musculus
  siRNA target sequence for Slc37a1 (NM_153062.1,1618-1636).
gtggtctgatgctattgct

SEQ ID NO: 767766 - DNA, 19 bp, Mus musculus
  siRNA target sequence for Slc37a1 (NM_153062.1,1639-1657).
cagcacccacgctctatgt

SEQ ID NO: 767767 - DNA, 19 bp, Mus musculus
  siRNA target sequence for Slc37a1 (NM_153062.1,1641-1659).
gcacccacgctctatgtct

SEQ ID NO: 767768 - DNA, 19 bp, Mus musculus
  siRNA target sequence for Slc37a1 (NM_153062.1,1642-1660).
cacccacgctctatgtctt

SEQ ID NO: 767769 - DNA, 19 bp, Mus musculus
  siRNA target sequence for Slc37a1 (NM_153062.1,1897-1915).
gatggagcaacgtgttcta

SEQ ID NO: 767770 - DNA, 19 bp, Mus musculus
  siRNA target sequence for Ddx27 (NM_153065.1,47-65).
ggaccatcggcgagaatga

SEQ ID NO: 767771 - DNA, 19 bp, Mus musculus
  siRNA target sequence for Ddx27 (NM_153065.1,261-279).
gcgggcagccactacacta

SEQ ID NO: 767772 - DNA, 19 bp, Mus musculus
  siRNA target sequence for Ddx27 (NM_153065.1,264-282).
ggcagccactacactagat

SEQ ID NO: 767773 - DNA, 19 bp, Mus musculus
  siRNA target sequence for Ddx27 (NM_153065.1,275-293).
cactagatgagaagattga

SEQ ID NO: 767774 - DNA, 19 bp, Mus musculus
  siRNA target sequence for Ddx27 (NM_153065.1,292-310).
gagaaagtccggaagagaa

SEQ ID NO: 767775 - DNA, 19 bp, Mus musculus
  siRNA target sequence for Ddx27 (NM_153065.1,452-470).
ctgaggatgaggaaatcct

SEQ ID NO: 767776 - DNA, 19 bp, Mus musculus
  siRNA target sequence for Ddx27 (NM_153065.1,550-568).
gcatccgagtatgacaaaa

SEQ ID NO: 767777 - DNA, 19 bp, Mus musculus
  siRNA target sequence for Ddx27 (NM_153065.1,603-621).
cctcctgaaggccattaca

SEQ ID NO: 767778 - DNA, 19 bp, Mus musculus
  siRNA target sequence for Mapa (NM_153074.2,305-323).
gactggactcagacattta

SEQ ID NO: 767779 - DNA, 19 bp, Mus musculus
  siRNA target sequence for Mapa (NM_153074.2,326-344).
ggcacctgcctcaatttca

SEQ ID NO: 767780 - DNA, 19 bp, Mus musculus
  siRNA target sequence for Mapa (NM_153074.2,328-346).
cacctgcctcaatttcagt

SEQ ID NO: 767781 - DNA, 19 bp, Mus musculus
  siRNA target sequence for Mapa (NM_153074.2,839-857).
cccaaaccagtgacagatt

SEQ ID NO: 767782 - DNA, 19 bp, Mus musculus
  siRNA target sequence for Mapa (NM_153074.2,908-926).
ccacccagcaggttcacaa

SEQ ID NO: 767783 - DNA, 19 bp, Mus musculus
  siRNA target sequence for Mapa (NM_153074.2,909-927).
cacccagcaggttcacaat

SEQ ID NO: 767784 - DNA, 19 bp, Mus musculus
  siRNA target sequence for Mapa (NM_153074.2,915-933).
gcaggttcacaatggatta

SEQ ID NO: 767785 - DNA, 19 bp, Mus musculus
  siRNA target sequence for Mapa (NM_153074.2,916-934).
caggttcacaatggattat

SEQ ID NO: 767786 - DNA, 19 bp, Mus musculus
  siRNA target sequence for Mapa (NM_153074.2,924-942).
caatggattatgagaatgt

SEQ ID NO: 767787 - DNA, 19 bp, Mus musculus
  siRNA target sequence for Mapa (NM_153074.2,1008-1026).
gtgactgctacatgaacta

SEQ ID NO: 767788 - DNA, 19 bp, Mus musculus
  siRNA target sequence for Mapa (NM_153074.2,1047-1065).
ctcagcccgtctattgcaa

SEQ ID NO: 767789 - DNA, 19 bp, Mus musculus
  siRNA target sequence for Crygn (NM_153076.1,199-217).
ggtgactaccctgaattct

SEQ ID NO: 767790 - DNA, 19 bp, Mus musculus
  siRNA target sequence for Crygn (NM_153076.1,277-295).
gagcatttccgcatagaca

SEQ ID NO: 767791 - DNA, 19 bp, Mus musculus
  siRNA target sequence for Crygn (NM_153076.1,317-335).
cgggccagtgcctagagtt

SEQ ID NO: 767792 - DNA, 19 bp, Mus musculus
  siRNA target sequence for Crygn (NM_153076.1,413-431).
gagcgtgggtcctctatga

SEQ ID NO: 767793 - DNA, 19 bp, Mus musculus
  siRNA target sequence for AF424697 (NM_153078.1,325-343).
gctgatggttgaatgtaca

SEQ ID NO: 767794 - DNA, 19 bp, Mus musculus
  siRNA target sequence for AF424697 (NM_153078.1,415-433).
cagctggcaacctggaata

SEQ ID NO: 767795 - DNA, 19 bp, Mus musculus
  siRNA target sequence for AF424697 (NM_153078.1,441-459).
catatcgtggtgttgttgt

SEQ ID NO: 767796 - DNA, 19 bp, Mus musculus
  siRNA target sequence for AF424697 (NM_153078.1,489-507).
ctgtgacgctgtttaagga

SEQ ID NO: 767797 - DNA, 19 bp, Mus musculus
  siRNA target sequence for AF424697 (NM_153078.1,625-643).
ccccatgccaacacaaact

SEQ ID NO: 767798 - DNA, 19 bp, Mus musculus
  siRNA target sequence for AF424697 (NM_153078.1,627-645).
ccatgccaacacaaactga

SEQ ID NO: 767799 - DNA, 19 bp, Mus musculus
  siRNA target sequence for AF424697 (NM_153078.1,638-656).
caaactgacgtcaagttaa

SEQ ID NO: 767800 - DNA, 19 bp, Mus musculus
  siRNA target sequence for AF424697 (NM_153078.1,642-660).
ctgacgtcaagttaaaatt

SEQ ID NO: 767801 - DNA, 19 bp, Mus musculus
  siRNA target sequence for AF424697 (NM_153078.1,644-662).
gacgtcaagttaaaattca

SEQ ID NO: 767802 - DNA, 19 bp, Mus musculus
  siRNA target sequence for AF424697 (NM_153078.1,722-740).
cttcgggagggaaaagcaa

SEQ ID NO: 767803 - DNA, 19 bp, Mus musculus
  siRNA target sequence for AF424697 (NM_153078.1,755-773).
cagagtttggctagtttga

SEQ ID NO: 767804 - DNA, 19 bp, Mus musculus
  siRNA target sequence for AF424697 (NM_153078.1,765-783).
ctagtttgatgagtatgaa

SEQ ID NO: 767805 - DNA, 19 bp, Mus musculus
  siRNA target sequence for AF424697 (NM_153078.1,798-816).
gcaatttagatgatttcga

SEQ ID NO: 767806 - DNA, 19 bp, Mus musculus
  siRNA target sequence for AF424697 (NM_153078.1,862-880).
gaaggcggcaaaaattaca

SEQ ID NO: 767807 - DNA, 19 bp, Mus musculus
  siRNA target sequence for AF424697 (NM_153078.1,865-883).
ggcggcaaaaattacagaa

SEQ ID NO: 767808 - DNA, 19 bp, Mus musculus
  siRNA target sequence for AF424697 (NM_153078.1,866-884).
gcggcaaaaattacagaaa

SEQ ID NO: 767809 - DNA, 19 bp, Mus musculus
  siRNA target sequence for AF424697 (NM_153078.1,867-885).
cggcaaaaattacagaaat

SEQ ID NO: 767810 - DNA, 19 bp, Mus musculus
  siRNA target sequence for AF424697 (NM_153078.1,975-993).
gttcctctgaagaacttat

SEQ ID NO: 767811 - DNA, 19 bp, Mus musculus
  siRNA target sequence for AF424697 (NM_153078.1,997-1015).
cacacttaactttttggat

SEQ ID NO: 767812 - DNA, 19 bp, Mus musculus
  siRNA target sequence for AF424697 (NM_153078.1,1027-1045).
ggacttggccactgtgaat

SEQ ID NO: 767813 - DNA, 19 bp, Mus musculus
  siRNA target sequence for AF424697 (NM_153078.1,1033-1051).
ggccactgtgaataccaat

SEQ ID NO: 767814 - DNA, 19 bp, Mus musculus
  siRNA target sequence for AF424697 (NM_153078.1,1183-1201).
ccagtctacacgaagaaaa

SEQ ID NO: 767815 - DNA, 19 bp, Mus musculus
  siRNA target sequence for AF424697 (NM_153078.1,1184-1202).
cagtctacacgaagaaaaa

SEQ ID NO: 767816 - DNA, 19 bp, Mus musculus
  siRNA target sequence for AF424697 (NM_153078.1,1228-1246).
gtacctctatgctgatagt

SEQ ID NO: 767817 - DNA, 19 bp, Mus musculus
  siRNA target sequence for AF424697 (NM_153078.1,1232-1250).
ctctatgctgatagttcaa

SEQ ID NO: 767818 - DNA, 19 bp, Mus musculus
  siRNA target sequence for AF424697 (NM_153078.1,1297-1315).
gccaacttctccaaataat

SEQ ID NO: 767819 - DNA, 19 bp, Mus musculus
  siRNA target sequence for AF424697 (NM_153078.1,1298-1316).
ccaacttctccaaataatt

SEQ ID NO: 767820 - DNA, 19 bp, Mus musculus
  siRNA target sequence for AF424697 (NM_153078.1,1302-1320).
cttctccaaataatttggt

SEQ ID NO: 767821 - DNA, 19 bp, Mus musculus
  siRNA target sequence for AF424697 (NM_153078.1,1318-1336).
ggtcaatacagttcaagaa

SEQ ID NO: 767822 - DNA, 19 bp, Mus musculus
  siRNA target sequence for AF424697 (NM_153078.1,1553-1571).
gcatggtgcagagaagtta

SEQ ID NO: 767823 - DNA, 19 bp, Mus musculus
  siRNA target sequence for AF424697 (NM_153078.1,1588-1606).
cgtgaaaatcaccaacttt

SEQ ID NO: 767824 - DNA, 19 bp, Mus musculus
  siRNA target sequence for AF424697 (NM_153078.1,1615-1633).
gtggaggaatggcttatca

SEQ ID NO: 767825 - DNA, 19 bp, Mus musculus
  siRNA target sequence for AF424697 (NM_153078.1,1627-1645).
cttatcattctgtgcaatt

SEQ ID NO: 767826 - DNA, 19 bp, Mus musculus
  siRNA target sequence for AF424697 (NM_153078.1,1640-1658).
gcaattttacaccacttta

SEQ ID NO: 767827 - DNA, 19 bp, Mus musculus
  siRNA target sequence for AF424697 (NM_153078.1,1651-1669).
ccactttagaccagactta

SEQ ID NO: 767828 - DNA, 19 bp, Mus musculus
  siRNA target sequence for AF424697 (NM_153078.1,1652-1670).
cactttagaccagacttaa

SEQ ID NO: 767829 - DNA, 19 bp, Mus musculus
  siRNA target sequence for AF424697 (NM_153078.1,1664-1682).
gacttaatcgactacaagt

SEQ ID NO: 767830 - DNA, 19 bp, Mus musculus
  siRNA target sequence for AF424697 (NM_153078.1,1672-1690).
cgactacaagtctctgaat

SEQ ID NO: 767831 - DNA, 19 bp, Mus musculus
  siRNA target sequence for AF424697 (NM_153078.1,1683-1701).
ctctgaatcctcaagatat

SEQ ID NO: 767832 - DNA, 19 bp, Mus musculus
  siRNA target sequence for AF424697 (NM_153078.1,1711-1729).
caacaaaaaggcttacgat

SEQ ID NO: 767833 - DNA, 19 bp, Mus musculus
  siRNA target sequence for AF424697 (NM_153078.1,1762-1780).
ggaaccttctgatatggtt

SEQ ID NO: 767834 - DNA, 19 bp, Mus musculus
  siRNA target sequence for AF424697 (NM_153078.1,1763-1781).
gaaccttctgatatggttt

SEQ ID NO: 767835 - DNA, 19 bp, Mus musculus
  siRNA target sequence for AF424697 (NM_153078.1,1794-1812).
ctgacaaactgactgttat

SEQ ID NO: 767836 - DNA, 19 bp, Mus musculus
  siRNA target sequence for AF424697 (NM_153078.1,1798-1816).
caaactgactgttatgact

SEQ ID NO: 767837 - DNA, 19 bp, Mus musculus
  siRNA target sequence for AF424697 (NM_153078.1,1806-1824).
ctgttatgacttatctcta

SEQ ID NO: 767838 - DNA, 19 bp, Mus musculus
  siRNA target sequence for AF424697 (NM_153078.1,1845-1863).
gcggacaagaactaaatgt

SEQ ID NO: 767839 - DNA, 19 bp, Mus musculus
  siRNA target sequence for AF424697 (NM_153078.1,1884-1902).
gcagtaagagcacatataa

SEQ ID NO: 767840 - DNA, 19 bp, Mus musculus
  siRNA target sequence for AF424697 (NM_153078.1,1885-1903).
cagtaagagcacatataaa

SEQ ID NO: 767841 - DNA, 19 bp, Mus musculus
  siRNA target sequence for AF424697 (NM_153078.1,1887-1905).
gtaagagcacatataaagt

SEQ ID NO: 767842 - DNA, 19 bp, Mus musculus
  siRNA target sequence for AF424697 (NM_153078.1,1959-1977).
ctgaactcagcgatctgaa

SEQ ID NO: 767843 - DNA, 19 bp, Mus musculus
  siRNA target sequence for AF424697 (NM_153078.1,2115-2133).
gcacagcctccccttacta

SEQ ID NO: 767844 - DNA, 19 bp, Mus musculus
  siRNA target sequence for AF424697 (NM_153078.1,2131-2149).
ctaccgcaggactaagagt

SEQ ID NO: 767845 - DNA, 19 bp, Mus musculus
  siRNA target sequence for AF424697 (NM_153078.1,2150-2168).
gacacggagccccaaaagt

SEQ ID NO: 767846 - DNA, 19 bp, Mus musculus
  siRNA target sequence for AF424697 (NM_153078.1,2201-2219).
gatgaccctgggttaagtt

SEQ ID NO: 767847 - DNA, 19 bp, Mus musculus
  siRNA target sequence for AF424697 (NM_153078.1,2206-2224).
ccctgggttaagttctagt

SEQ ID NO: 767848 - DNA, 19 bp, Mus musculus
  siRNA target sequence for AF424697 (NM_153078.1,2207-2225).
cctgggttaagttctagta

SEQ ID NO: 767849 - DNA, 19 bp, Mus musculus
  siRNA target sequence for AF424697 (NM_153078.1,2212-2230).
gttaagttctagtactgat

SEQ ID NO: 767850 - DNA, 19 bp, Mus musculus
  siRNA target sequence for AF424697 (NM_153078.1,2265-2283).
gactaaaagctgagaactt

SEQ ID NO: 767851 - DNA, 19 bp, Mus musculus
  siRNA target sequence for AF424697 (NM_153078.1,2284-2302).
ggaactaagtgacttatgt

SEQ ID NO: 767852 - DNA, 19 bp, Mus musculus
  siRNA target sequence for AF424697 (NM_153078.1,2301-2319).
gtgtcagtgacaagaagaa

SEQ ID NO: 767853 - DNA, 19 bp, Mus musculus
  siRNA target sequence for AF424697 (NM_153078.1,2337-2355).
cagcttacgagcaaaagct

SEQ ID NO: 767854 - DNA, 19 bp, Mus musculus
  siRNA target sequence for AF424697 (NM_153078.1,2432-2450).
ggtgaattggctatcacaa

SEQ ID NO: 767855 - DNA, 19 bp, Mus musculus
  siRNA target sequence for AF424697 (NM_153078.1,2468-2486).
ccttctaaacttggatata

SEQ ID NO: 767856 - DNA, 19 bp, Mus musculus
  siRNA target sequence for AF424697 (NM_153078.1,2492-2510).
gacacagacttcacgaaaa

SEQ ID NO: 767857 - DNA, 19 bp, Mus musculus
  siRNA target sequence for AF424697 (NM_153078.1,2597-2615).
gttcagcaccgaatgttgt

SEQ ID NO: 767858 - DNA, 19 bp, Mus musculus
  siRNA target sequence for AF424697 (NM_153078.1,2619-2637).
gacaagaggagctgaaaga

SEQ ID NO: 767859 - DNA, 19 bp, Mus musculus
  siRNA target sequence for AF424697 (NM_153078.1,2808-2826).
ctcgatgcggagtgaagat

SEQ ID NO: 767860 - DNA, 19 bp, Mus musculus
  siRNA target sequence for AF424697 (NM_153078.1,2854-2872).
ggctgcagaaaagttgaaa

SEQ ID NO: 767861 - DNA, 19 bp, Mus musculus
  siRNA target sequence for AF424697 (NM_153078.1,2957-2975).
ggtggagatgaacttacta

SEQ ID NO: 767862 - DNA, 19 bp, Mus musculus
  siRNA target sequence for AF424697 (NM_153078.1,2958-2976).
gtggagatgaacttactaa

SEQ ID NO: 767863 - DNA, 19 bp, Mus musculus
  siRNA target sequence for AF424697 (NM_153078.1,2993-3011).
gataatcccgagcagaata

SEQ ID NO: 767864 - DNA, 19 bp, Mus musculus
  siRNA target sequence for AF424697 (NM_153078.1,3181-3199).
cagaaatcctgttgtgttt

SEQ ID NO: 767865 - DNA, 19 bp, Mus musculus
  siRNA target sequence for AF424697 (NM_153078.1,3513-3531).
cgatgatgcaggaatggtt

SEQ ID NO: 767866 - DNA, 19 bp, Mus musculus
  siRNA target sequence for AF424697 (NM_153078.1,3528-3546).
ggttcatgctggttaataa

SEQ ID NO: 767867 - DNA, 19 bp, Mus musculus
  siRNA target sequence for Slc16a11 (NM_153081.1,637-655).
gcagttcctccttgatact

SEQ ID NO: 767868 - DNA, 19 bp, Mus musculus
  siRNA target sequence for Slc16a11 (NM_153081.1,638-656).
cagttcctccttgatactt

SEQ ID NO: 767869 - DNA, 19 bp, Mus musculus
  siRNA target sequence for Slc16a11 (NM_153081.1,710-728).
ccctgtggcgccttgctaa

SEQ ID NO: 767870 - DNA, 19 bp, Mus musculus
  siRNA target sequence for Slc16a11 (NM_153081.1,718-736).
cgccttgctaagaccttta

SEQ ID NO: 767871 - DNA, 19 bp, Mus musculus
  siRNA target sequence for Slc16a11 (NM_153081.1,880-898).
gggtccgcatgctttagat

SEQ ID NO: 767872 - DNA, 19 bp, Mus musculus
  siRNA target sequence for Slc16a11 (NM_153081.1,882-900).
gtccgcatgctttagatca

SEQ ID NO: 767873 - DNA, 19 bp, Mus musculus
  siRNA target sequence for Slc16a11 (NM_153081.1,1044-1062).
ggttaggggtactagcaat

SEQ ID NO: 767874 - DNA, 19 bp, Mus musculus
  siRNA target sequence for Slc16a11 (NM_153081.1,1135-1153).
gctgagcgctgggagttat

SEQ ID NO: 767875 - DNA, 19 bp, Mus musculus
  siRNA target sequence for Thtpa (NM_153083.2,765-783).
ccgagacacatactatgat

SEQ ID NO: 767876 - DNA, 19 bp, Mus musculus
  siRNA target sequence for Thtpa (NM_153083.2,766-784).
cgagacacatactatgata

SEQ ID NO: 767877 - DNA, 19 bp, Mus musculus
  siRNA target sequence for Thtpa (NM_153083.2,777-795).
ctatgatacctctgagtta

SEQ ID NO: 767878 - DNA, 19 bp, Mus musculus
  siRNA target sequence for Thtpa (NM_153083.2,788-806).
ctgagttaagccttatgct

SEQ ID NO: 767879 - DNA, 19 bp, Mus musculus
  siRNA target sequence for Thtpa (NM_153083.2,1008-1026).
ggaggtggctagttttatt

SEQ ID NO: 767880 - DNA, 19 bp, Mus musculus
  siRNA target sequence for Thtpa (NM_153083.2,1009-1027).
gaggtggctagttttatta

SEQ ID NO: 767881 - DNA, 19 bp, Mus musculus
  siRNA target sequence for Thtpa (NM_153083.2,1169-1187).
ctgccctagagaagatcat

SEQ ID NO: 767882 - DNA, 19 bp, Mus musculus
  siRNA target sequence for A230020G22Rik (NM_153090.1,43-61).
cttggctcctgctactgat

SEQ ID NO: 767883 - DNA, 19 bp, Mus musculus
  siRNA target sequence for A230020G22Rik (NM_153090.1,284-302).
gcagagcgatgctgatcaa

SEQ ID NO: 767884 - DNA, 19 bp, Mus musculus
  siRNA target sequence for A230020G22Rik (NM_153090.1,285-303).
cagagcgatgctgatcaat

SEQ ID NO: 767885 - DNA, 19 bp, Mus musculus
  siRNA target sequence for A230020G22Rik (NM_153090.1,289-307).
gcgatgctgatcaatatta

SEQ ID NO: 767886 - DNA, 19 bp, Mus musculus
  siRNA target sequence for A230020G22Rik (NM_153090.1,379-397).
ctcgccctgtccttacgtt

SEQ ID NO: 767887 - DNA, 19 bp, Mus musculus
  siRNA target sequence for A230020G22Rik (NM_153090.1,462-480).
ggctcacccccaatcttct

SEQ ID NO: 767888 - DNA, 19 bp, Mus musculus
  siRNA target sequence for A230020G22Rik (NM_153090.1,554-572).
ctccctgactgcagaacat

SEQ ID NO: 767889 - DNA, 19 bp, Mus musculus
  siRNA target sequence for A230020G22Rik (NM_153090.1,629-647).
ggtggctctcaacttaaca

SEQ ID NO: 767890 - DNA, 19 bp, Mus musculus
  siRNA target sequence for A230020G22Rik (NM_153090.1,656-674).
cttagtgcctactgagaat

SEQ ID NO: 767891 - DNA, 19 bp, Mus musculus
  siRNA target sequence for A230020G22Rik (NM_153090.1,731-749).
catcaccatggccttaata

SEQ ID NO: 767892 - DNA, 19 bp, Mus musculus
  siRNA target sequence for A230020G22Rik (NM_153090.1,754-772).
gctactggctcaagagaaa

SEQ ID NO: 767893 - DNA, 19 bp, Mus musculus
  siRNA target sequence for A230020G22Rik (NM_153090.1,755-773).
ctactggctcaagagaaaa

SEQ ID NO: 767894 - DNA, 19 bp, Mus musculus
  siRNA target sequence for A230020G22Rik (NM_153090.1,881-899).
gaacgtgaacgttgtaagt

SEQ ID NO: 767895 - DNA, 19 bp, Mus musculus
  siRNA target sequence for A230020G22Rik (NM_153090.1,890-908).
cgttgtaagtggcaatgaa

SEQ ID NO: 767896 - DNA, 19 bp, Mus musculus
  siRNA target sequence for A230020G22Rik (NM_153090.1,968-986).
gaggacacacggagtaagt

SEQ ID NO: 767897 - DNA, 19 bp, Mus musculus
  siRNA target sequence for A230020G22Rik (NM_153090.1,970-988).
ggacacacggagtaagtga

SEQ ID NO: 767898 - DNA, 19 bp, Mus musculus
  siRNA target sequence for A230020G22Rik (NM_153090.1,999-1017).
gtctcctctggactctatt

SEQ ID NO: 767899 - DNA, 19 bp, Mus musculus
  siRNA target sequence for A230020G22Rik (NM_153090.1,1018-1036).
ctaagccaaggataaacat

SEQ ID NO: 767900 - DNA, 19 bp, Mus musculus
  siRNA target sequence for St7l (NM_153091.2,223-241).
cagcggtgacagggttttt

SEQ ID NO: 767901 - DNA, 19 bp, Mus musculus
  siRNA target sequence for St7l (NM_153091.2,260-278).
gttctatgtggcacttaca

SEQ ID NO: 767902 - DNA, 19 bp, Mus musculus
  siRNA target sequence for St7l (NM_153091.2,279-297).
gggacatcttctttgatat

SEQ ID NO: 767903 - DNA, 19 bp, Mus musculus
  siRNA target sequence for St7l (NM_153091.2,289-307).
ctttgatatctggactaat

SEQ ID NO: 767904 - DNA, 19 bp, Mus musculus
  siRNA target sequence for St7l (NM_153091.2,293-311).
gatatctggactaatattt

SEQ ID NO: 767905 - DNA, 19 bp, Mus musculus
  siRNA target sequence for St7l (NM_153091.2,318-336).
gaatggtggtacttccata

SEQ ID NO: 767906 - DNA, 19 bp, Mus musculus
  siRNA target sequence for St7l (NM_153091.2,322-340).
ggtggtacttccataagca

SEQ ID NO: 767907 - DNA, 19 bp, Mus musculus
  siRNA target sequence for St7l (NM_153091.2,323-341).
gtggtacttccataagcat

SEQ ID NO: 767908 - DNA, 19 bp, Mus musculus
  siRNA target sequence for St7l (NM_153091.2,332-350).
ccataagcatggtacatct

SEQ ID NO: 767909 - DNA, 19 bp, Mus musculus
  siRNA target sequence for St7l (NM_153091.2,333-351).
cataagcatggtacatctt

SEQ ID NO: 767910 - DNA, 19 bp, Mus musculus
  siRNA target sequence for St7l (NM_153091.2,522-540).
gaatacagaagatacactt

SEQ ID NO: 767911 - DNA, 19 bp, Mus musculus
  siRNA target sequence for St7l (NM_153091.2,536-554).
cacttgggtgactggtaaa

SEQ ID NO: 767912 - DNA, 19 bp, Mus musculus
  siRNA target sequence for St7l (NM_153091.2,538-556).
cttgggtgactggtaaaga

SEQ ID NO: 767913 - DNA, 19 bp, Mus musculus
  siRNA target sequence for St7l (NM_153091.2,558-576).
ccacttacttactatgaca

SEQ ID NO: 767914 - DNA, 19 bp, Mus musculus
  siRNA target sequence for St7l (NM_153091.2,559-577).
cacttacttactatgacat

SEQ ID NO: 767915 - DNA, 19 bp, Mus musculus
  siRNA target sequence for St7l (NM_153091.2,594-612).
gatcaccagacctttttca

SEQ ID NO: 767916 - DNA, 19 bp, Mus musculus
  siRNA target sequence for St7l (NM_153091.2,633-651).
cgtccttcagacacagtta

SEQ ID NO: 767917 - DNA, 19 bp, Mus musculus
  siRNA target sequence for St7l (NM_153091.2,637-655).
cttcagacacagttatgca

SEQ ID NO: 767918 - DNA, 19 bp, Mus musculus
  siRNA target sequence for St7l (NM_153091.2,699-717).
gcctatcaagctttagagt

SEQ ID NO: 767919 - DNA, 19 bp, Mus musculus
  siRNA target sequence for St7l (NM_153091.2,701-719).
ctatcaagctttagagtta

SEQ ID NO: 767920 - DNA, 19 bp, Mus musculus
  siRNA target sequence for St7l (NM_153091.2,705-723).
caagctttagagttaaaca

SEQ ID NO: 767921 - DNA, 19 bp, Mus musculus
  siRNA target sequence for St7l (NM_153091.2,780-798).
gatgctgaaaggttgttta

SEQ ID NO: 767922 - DNA, 19 bp, Mus musculus
  siRNA target sequence for St7l (NM_153091.2,883-901).
ggcgagataccaatgtact

SEQ ID NO: 767923 - DNA, 19 bp, Mus musculus
  siRNA target sequence for St7l (NM_153091.2,884-902).
gcgagataccaatgtactt

SEQ ID NO: 767924 - DNA, 19 bp, Mus musculus
  siRNA target sequence for St7l (NM_153091.2,886-904).
gagataccaatgtacttgt

SEQ ID NO: 767925 - DNA, 19 bp, Mus musculus
  siRNA target sequence for St7l (NM_153091.2,923-941).
ggccatgtgtgcgagaaaa

SEQ ID NO: 767926 - DNA, 19 bp, Mus musculus
  siRNA target sequence for St7l (NM_153091.2,924-942).
gccatgtgtgcgagaaaat

SEQ ID NO: 767927 - DNA, 19 bp, Mus musculus
  siRNA target sequence for St7l (NM_153091.2,976-994).
gagatttgatgaaagaatt

SEQ ID NO: 767928 - DNA, 19 bp, Mus musculus
  siRNA target sequence for St7l (NM_153091.2,1073-1091).
ggcagtcctggcaaaatat

SEQ ID NO: 767929 - DNA, 19 bp, Mus musculus
  siRNA target sequence for St7l (NM_153091.2,1075-1093).
cagtcctggcaaaatatga

SEQ ID NO: 767930 - DNA, 19 bp, Mus musculus
  siRNA target sequence for St7l (NM_153091.2,1080-1098).
ctggcaaaatatgatgata

SEQ ID NO: 767931 - DNA, 19 bp, Mus musculus
  siRNA target sequence for St7l (NM_153091.2,1157-1175).
cgtctcagataaattctct

SEQ ID NO: 767932 - DNA, 19 bp, Mus musculus
  siRNA target sequence for St7l (NM_153091.2,1198-1216).
ggttaagcacagcagaaat

SEQ ID NO: 767933 - DNA, 19 bp, Mus musculus
  siRNA target sequence for St7l (NM_153091.2,1199-1217).
gttaagcacagcagaaatt

SEQ ID NO: 767934 - DNA, 19 bp, Mus musculus
  siRNA target sequence for St7l (NM_153091.2,1205-1223).
cacagcagaaattaatgct

SEQ ID NO: 767935 - DNA, 19 bp, Mus musculus
  siRNA target sequence for St7l (NM_153091.2,1221-1239).
gctgtggaagcaattcata

SEQ ID NO: 767936 - DNA, 19 bp, Mus musculus
  siRNA target sequence for St7l (NM_153091.2,1257-1275).
cctcatgttccaaaatact

SEQ ID NO: 767937 - DNA, 19 bp, Mus musculus
  siRNA target sequence for St7l (NM_153091.2,1362-1380).
ctacagcactggaaacgaa

SEQ ID NO: 767938 - DNA, 19 bp, Mus musculus
  siRNA target sequence for St7l (NM_153091.2,1367-1385).
gcactggaaacgaatagaa

SEQ ID NO: 767939 - DNA, 19 bp, Mus musculus
  siRNA target sequence for St7l (NM_153091.2,1414-1432).
gggaaggcacttttagaat

SEQ ID NO: 767940 - DNA, 19 bp, Mus musculus
  siRNA target sequence for St7l (NM_153091.2,1416-1434).
gaaggcacttttagaatga

SEQ ID NO: 767941 - DNA, 19 bp, Mus musculus
  siRNA target sequence for St7l (NM_153091.2,1492-1510).
ctgctgatagagagctatt

SEQ ID NO: 767942 - DNA, 19 bp, Mus musculus
  siRNA target sequence for St7l (NM_153091.2,1501-1519).
gagagctattgcctacttt

SEQ ID NO: 767943 - DNA, 19 bp, Mus musculus
  siRNA target sequence for St7l (NM_153091.2,1524-1542).
cacgtctctgtctatccaa

SEQ ID NO: 767944 - DNA, 19 bp, Mus musculus
  siRNA target sequence for St7l (NM_153091.2,1554-1572).
ccttttttcatccacttta

SEQ ID NO: 767945 - DNA, 19 bp, Mus musculus
  siRNA target sequence for St7l (NM_153091.2,1586-1604).
ctcctctaccgcaatgcta

SEQ ID NO: 767946 - DNA, 19 bp, Mus musculus
  siRNA target sequence for St7l (NM_153091.2,1596-1614).
gcaatgctagcgtttctca

SEQ ID NO: 767947 - DNA, 19 bp, Mus musculus
  siRNA target sequence for St7l (NM_153091.2,1648-1666).
ctaaagctgtgagtatgat

SEQ ID NO: 767948 - DNA, 19 bp, Mus musculus
  siRNA target sequence for St7l (NM_153091.2,1673-1691).
gacttgtgtggagtattta

SEQ ID NO: 767949 - DNA, 19 bp, Mus musculus
  siRNA target sequence for AF366264 (NM_153093.1,404-422).
ggcaaacccgaaaatacca

SEQ ID NO: 767950 - DNA, 19 bp, Mus musculus
  siRNA target sequence for Zfp353 (NM_153096.1,1629-1647).
caggttttcaccatatgca

SEQ ID NO: 767951 - DNA, 19 bp, Mus musculus
  siRNA target sequence for Rnf33 (NM_153097.1,390-408).
ggactccacagccctaaaa

SEQ ID NO: 767952 - DNA, 19 bp, Mus musculus
  siRNA target sequence for Rnf33 (NM_153097.1,391-409).
gactccacagccctaaaaa

SEQ ID NO: 767953 - DNA, 19 bp, Mus musculus
  siRNA target sequence for Rnf33 (NM_153097.1,420-438).
caaatgtatctgttacatt

SEQ ID NO: 767954 - DNA, 19 bp, Mus musculus
  siRNA target sequence for Rnf33 (NM_153097.1,559-577).
ccctttccaccgaaaagct

SEQ ID NO: 767955 - DNA, 19 bp, Mus musculus
  siRNA target sequence for Rnf33 (NM_153097.1,560-578).
cctttccaccgaaaagctt

SEQ ID NO: 767956 - DNA, 19 bp, Mus musculus
  siRNA target sequence for Rnf33 (NM_153097.1,711-729).
gagggatcgggatgtctta

SEQ ID NO: 767957 - DNA, 19 bp, Mus musculus
  siRNA target sequence for Rnf33 (NM_153097.1,714-732).
ggatcgggatgtcttatgt

SEQ ID NO: 767958 - DNA, 19 bp, Mus musculus
  siRNA target sequence for Rnf33 (NM_153097.1,715-733).
gatcgggatgtcttatgta

SEQ ID NO: 767959 - DNA, 19 bp, Mus musculus
  siRNA target sequence for Rnf33 (NM_153097.1,814-832).
ctagagagcgccattgcaa

SEQ ID NO: 767960 - DNA, 19 bp, Mus musculus
  siRNA target sequence for Rnf33 (NM_153097.1,819-837).
gagcgccattgcaacgtta

SEQ ID NO: 767961 - DNA, 19 bp, Mus musculus
  siRNA target sequence for Rnf33 (NM_153097.1,821-839).
gcgccattgcaacgttaaa

SEQ ID NO: 767962 - DNA, 19 bp, Mus musculus
  siRNA target sequence for Rnf33 (NM_153097.1,823-841).
gccattgcaacgttaaagt

SEQ ID NO: 767963 - DNA, 19 bp, Mus musculus
  siRNA target sequence for Rnf33 (NM_153097.1,824-842).
ccattgcaacgttaaagtt

SEQ ID NO: 767964 - DNA, 19 bp, Mus musculus
  siRNA target sequence for Rnf33 (NM_153097.1,834-852).
gttaaagttcggagtgaaa

SEQ ID NO: 767965 - DNA, 19 bp, Mus musculus
  siRNA target sequence for Rnf33 (NM_153097.1,840-858).
gttcggagtgaaacaagtt

SEQ ID NO: 767966 - DNA, 19 bp, Mus musculus
  siRNA target sequence for Rnf33 (NM_153097.1,843-861).
cggagtgaaacaagttgaa

SEQ ID NO: 767967 - DNA, 19 bp, Mus musculus
  siRNA target sequence for Rnf33 (NM_153097.1,902-920).
gggaggaggctcaatatca

SEQ ID NO: 767968 - DNA, 19 bp, Mus musculus
  siRNA target sequence for Rnf33 (NM_153097.1,903-921).
ggaggaggctcaatatcaa

SEQ ID NO: 767969 - DNA, 19 bp, Mus musculus
  siRNA target sequence for Rnf33 (NM_153097.1,906-924).
ggaggctcaatatcaaaaa

SEQ ID NO: 767970 - DNA, 19 bp, Mus musculus
  siRNA target sequence for Rnf33 (NM_153097.1,973-991).
gagtacgaagcgcatctaa

SEQ ID NO: 767971 - DNA, 19 bp, Mus musculus
  siRNA target sequence for Rnf33 (NM_153097.1,975-993).
gtacgaagcgcatctaaat

SEQ ID NO: 767972 - DNA, 19 bp, Mus musculus
  siRNA target sequence for Rnf33 (NM_153097.1,979-997).
gaagcgcatctaaatgaga

SEQ ID NO: 767973 - DNA, 19 bp, Mus musculus
  siRNA target sequence for Rnf33 (NM_153097.1,1008-1026).
ggagctgcggagtttctca

SEQ ID NO: 767974 - DNA, 19 bp, Mus musculus
  siRNA target sequence for Rnf33 (NM_153097.1,1016-1034).
ggagtttctcagaactgaa

SEQ ID NO: 767975 - DNA, 19 bp, Mus musculus
  siRNA target sequence for Rnf33 (NM_153097.1,1023-1041).
ctcagaactgaatggatat

SEQ ID NO: 767976 - DNA, 19 bp, Mus musculus
  siRNA target sequence for Rnf33 (NM_153097.1,1070-1088).
cagcaaaagatctgttgaa

SEQ ID NO: 767977 - DNA, 19 bp, Mus musculus
  siRNA target sequence for Rnf33 (NM_153097.1,1093-1111).
gtggaggccatacatgaaa

SEQ ID NO: 767978 - DNA, 19 bp, Mus musculus
  siRNA target sequence for Rnf33 (NM_153097.1,1140-1158).
ccacaagttgcaaaacctt

SEQ ID NO: 767979 - DNA, 19 bp, Mus musculus
  siRNA target sequence for Rnf33 (NM_153097.1,1163-1181).
cccccaaaccgtggttatt

SEQ ID NO: 767980 - DNA, 19 bp, Mus musculus
  siRNA target sequence for Rnf33 (NM_153097.1,1164-1182).
ccccaaaccgtggttattt

SEQ ID NO: 767981 - DNA, 19 bp, Mus musculus
  siRNA target sequence for Rnf33 (NM_153097.1,1165-1183).
cccaaaccgtggttattta

SEQ ID NO: 767982 - DNA, 19 bp, Mus musculus
  siRNA target sequence for Rnf33 (NM_153097.1,1225-1243).
ggcttgagcagaatcatca

SEQ ID NO: 767983 - DNA, 19 bp, Mus musculus
  siRNA target sequence for Rnf33 (NM_153097.1,1226-1244).
gcttgagcagaatcatcaa

SEQ ID NO: 767984 - DNA, 19 bp, Mus musculus
  siRNA target sequence for Rnf33 (NM_153097.1,1232-1250).
gcagaatcatcaagcaatt

SEQ ID NO: 767985 - DNA, 19 bp, Mus musculus
  siRNA target sequence for Rnf33 (NM_153097.1,1283-1301).
cacaccctcagctggttat

SEQ ID NO: 767986 - DNA, 19 bp, Mus musculus
  siRNA target sequence for Rnf33 (NM_153097.1,1297-1315).
gttatttctgaggatagaa

SEQ ID NO: 767987 - DNA, 19 bp, Mus musculus
  siRNA target sequence for Rnf33 (NM_153097.1,1304-1322).
ctgaggatagaaaatctgt

SEQ ID NO: 767988 - DNA, 19 bp, Mus musculus
  siRNA target sequence for Rnf33 (NM_153097.1,1350-1368).
gtgtgctagccctcagaaa

SEQ ID NO: 767989 - DNA, 19 bp, Mus musculus
  siRNA target sequence for Rnf33 (NM_153097.1,1355-1373).
ctagccctcagaaatttca

SEQ ID NO: 767990 - DNA, 19 bp, Mus musculus
  siRNA target sequence for Rnf33 (NM_153097.1,1382-1400).
ccgctctcctgggatgtaa

SEQ ID NO: 767991 - DNA, 19 bp, Mus musculus
  siRNA target sequence for Rnf33 (NM_153097.1,1383-1401).
cgctctcctgggatgtaaa

SEQ ID NO: 767992 - DNA, 19 bp, Mus musculus
  siRNA target sequence for Rnf33 (NM_153097.1,1392-1410).
gggatgtaaaggattcgat

SEQ ID NO: 767993 - DNA, 19 bp, Mus musculus
  siRNA target sequence for Rnf33 (NM_153097.1,1393-1411).
ggatgtaaaggattcgatt

SEQ ID NO: 767994 - DNA, 19 bp, Mus musculus
  siRNA target sequence for Rnf33 (NM_153097.1,1418-1436).
gacagtactgggaagtcaa

SEQ ID NO: 767995 - DNA, 19 bp, Mus musculus
  siRNA target sequence for Rnf33 (NM_153097.1,1528-1546).
gggcggtatgctgagaata

SEQ ID NO: 767996 - DNA, 19 bp, Mus musculus
  siRNA target sequence for Rnf33 (NM_153097.1,1537-1555).
gctgagaatagttatgtca

SEQ ID NO: 767997 - DNA, 19 bp, Mus musculus
  siRNA target sequence for Rnf33 (NM_153097.1,1554-1572).
cacctatggacctctaaga

SEQ ID NO: 767998 - DNA, 19 bp, Mus musculus
  siRNA target sequence for Rnf33 (NM_153097.1,1565-1583).
ctctaagaacggagtttct

SEQ ID NO: 767999 - DNA, 19 bp, Mus musculus
  siRNA target sequence for Rnf33 (NM_153097.1,1598-1616).
ccagcaaggtcggcatatt

SEQ ID NO: 768000 - DNA, 19 bp, Mus musculus
  siRNA target sequence for Rnf33 (NM_153097.1,1599-1617).
cagcaaggtcggcatattt

SEQ ID NO: 768001 - DNA, 19 bp, Mus musculus
  siRNA target sequence for Rnf33 (NM_153097.1,1601-1619).
gcaaggtcggcatattttt

SEQ ID NO: 768002 - DNA, 19 bp, Mus musculus
  siRNA target sequence for Rnf33 (NM_153097.1,1605-1623).
ggtcggcatatttttggat

SEQ ID NO: 768003 - DNA, 19 bp, Mus musculus
  siRNA target sequence for Rnf33 (NM_153097.1,1606-1624).
gtcggcatatttttggatt

SEQ ID NO: 768004 - DNA, 19 bp, Mus musculus
  siRNA target sequence for Rnf33 (NM_153097.1,1608-1626).
cggcatatttttggattat

SEQ ID NO: 768005 - DNA, 19 bp, Mus musculus
  siRNA target sequence for Rnf33 (NM_153097.1,1700-1718).
gcaccctttggccttattt

SEQ ID NO: 768006 - DNA, 19 bp, Mus musculus
  siRNA target sequence for Rnf33 (NM_153097.1,1704-1722).
cctttggccttatttctat

SEQ ID NO: 768007 - DNA, 19 bp, Mus musculus
  siRNA target sequence for Rnf33 (NM_153097.1,1705-1723).
ctttggccttatttctata

SEQ ID NO: 768008 - DNA, 19 bp, Mus musculus
  siRNA target sequence for Rnf33 (NM_153097.1,1710-1728).
gccttatttctatatagga

SEQ ID NO: 768009 - DNA, 19 bp, Mus musculus
  siRNA target sequence for Rnf33 (NM_153097.1,1719-1737).
ctatataggaacagattct

SEQ ID NO: 768010 - DNA, 19 bp, Mus musculus
  siRNA target sequence for Tmem7 (NM_153100.1,250-268).
cagcaaaagacctttgcta

SEQ ID NO: 768011 - DNA, 19 bp, Mus musculus
  siRNA target sequence for Tmem7 (NM_153100.1,516-534).
gggtgagattcctttgcta

SEQ ID NO: 768012 - DNA, 19 bp, Mus musculus
  siRNA target sequence for Tmem7 (NM_153100.1,591-609).
gggcttttgtgctcagaat

SEQ ID NO: 768013 - DNA, 19 bp, Mus musculus
  siRNA target sequence for Tmem7 (NM_153100.1,984-1002).
gattagctgtacctcaaaa

SEQ ID NO: 768014 - DNA, 19 bp, Mus musculus
  siRNA target sequence for Tmem7 (NM_153100.1,1064-1082).
cccctacatgtgtcattca

SEQ ID NO: 768015 - DNA, 19 bp, Mus musculus
  siRNA target sequence for Tmem7 (NM_153100.1,1065-1083).
ccctacatgtgtcattcaa

SEQ ID NO: 768016 - DNA, 19 bp, Mus musculus
  siRNA target sequence for Tmem7 (NM_153100.1,1067-1085).
ctacatgtgtcattcaaat

SEQ ID NO: 768017 - DNA, 19 bp, Mus musculus
  siRNA target sequence for Tmem7 (NM_153100.1,1291-1309).
gttattgtgcccatttcct

SEQ ID NO: 768018 - DNA, 19 bp, Mus musculus
  siRNA target sequence for Tmem7 (NM_153100.1,1313-1331).
cgtggagactaccagaaaa

SEQ ID NO: 768019 - DNA, 19 bp, Mus musculus
  siRNA target sequence for Tmem7 (NM_153100.1,1417-1435).
gagatcttcaggtactcat

SEQ ID NO: 768020 - DNA, 19 bp, Mus musculus
  siRNA target sequence for Tmem7 (NM_153100.1,1481-1499).
gcttggcctttctaatctt

SEQ ID NO: 768021 - DNA, 19 bp, Mus musculus
  siRNA target sequence for Tmem7 (NM_153100.1,1503-1521).
cttattgctgtggtattta

SEQ ID NO: 768022 - DNA, 19 bp, Mus musculus
  siRNA target sequence for Phospho1 (NM_153104.1,313-331).
ggactacgatgcctatcta

SEQ ID NO: 768023 - DNA, 19 bp, Mus musculus
  siRNA target sequence for Phospho1 (NM_153104.1,481-499).
gagggctactacaatgagt

SEQ ID NO: 768024 - DNA, 19 bp, Mus musculus
  siRNA target sequence for Phospho1 (NM_153104.1,498-516).
gtacatgcaacgagtcttt

SEQ ID NO: 768025 - DNA, 19 bp, Mus musculus
  siRNA target sequence for Phospho1 (NM_153104.1,587-605).
caggcatgggcgatttgtt

SEQ ID NO: 768026 - DNA, 19 bp, Mus musculus
  siRNA target sequence for Phospho1 (NM_153104.1,596-614).
gcgatttgttgcagttcat

SEQ ID NO: 768027 - DNA, 19 bp, Mus musculus
  siRNA target sequence for Phospho1 (NM_153104.1,597-615).
cgatttgttgcagttcata

SEQ ID NO: 768028 - DNA, 19 bp, Mus musculus
  siRNA target sequence for Phospho1 (NM_153104.1,629-647).
cctgcttcgaggttattct

SEQ ID NO: 768029 - DNA, 19 bp, Mus musculus
  siRNA target sequence for Phospho1 (NM_153104.1,632-650).
gcttcgaggttattctcat

SEQ ID NO: 768030 - DNA, 19 bp, Mus musculus
  siRNA target sequence for Phospho1 (NM_153104.1,1049-1067).
ccgatgtgcgccaacatct

SEQ ID NO: 768031 - DNA, 19 bp, Mus musculus
  siRNA target sequence for Cpz (NM_153107.1,91-109).
cccgacccctccggtaaat

SEQ ID NO: 768032 - DNA, 19 bp, Mus musculus
  siRNA target sequence for Cpz (NM_153107.1,167-185).
gtgcggatgccgcctataa

SEQ ID NO: 768033 - DNA, 19 bp, Mus musculus
  siRNA target sequence for Cpz (NM_153107.1,170-188).
cggatgccgcctataacca

SEQ ID NO: 768034 - DNA, 19 bp, Mus musculus
  siRNA target sequence for Cpz (NM_153107.1,172-190).
gatgccgcctataaccata

SEQ ID NO: 768035 - DNA, 19 bp, Mus musculus
  siRNA target sequence for Cpz (NM_153107.1,175-193).
gccgcctataaccatacat

SEQ ID NO: 768036 - DNA, 19 bp, Mus musculus
  siRNA target sequence for Cpz (NM_153107.1,256-274).
ctgttgggtgtgatacact

SEQ ID NO: 768037 - DNA, 19 bp, Mus musculus
  siRNA target sequence for Cpz (NM_153107.1,258-276).
gttgggtgtgatacacttt

SEQ ID NO: 768038 - DNA, 19 bp, Mus musculus
  siRNA target sequence for Cpz (NM_153107.1,707-725).
caggccagcatgaactgat

SEQ ID NO: 768039 - DNA, 19 bp, Mus musculus
  siRNA target sequence for Cpz (NM_153107.1,776-794).
gacgggaagtgctcatcta

SEQ ID NO: 768040 - DNA, 19 bp, Mus musculus
  siRNA target sequence for Cpz (NM_153107.1,1034-1052).
gtgtgcgcacagaccatat

SEQ ID NO: 768041 - DNA, 19 bp, Mus musculus
  siRNA target sequence for Cpz (NM_153107.1,1160-1178).
gcgacctggtggtatccta

SEQ ID NO: 768042 - DNA, 19 bp, Mus musculus
  siRNA target sequence for Cpz (NM_153107.1,1201-1219).
ccccatgagaaaaagatgt

SEQ ID NO: 768043 - DNA, 19 bp, Mus musculus
  siRNA target sequence for Cpz (NM_153107.1,1231-1249).
ccagatgagaagatgttca

SEQ ID NO: 768044 - DNA, 19 bp, Mus musculus
  siRNA target sequence for Cpz (NM_153107.1,1379-1397).
gtatgtctgacttcaacta

SEQ ID NO: 768045 - DNA, 19 bp, Mus musculus
  siRNA target sequence for Cpz (NM_153107.1,1385-1403).
ctgacttcaactacttaca

SEQ ID NO: 768046 - DNA, 19 bp, Mus musculus
  siRNA target sequence for Cpz (NM_153107.1,1472-1490).
gcctgtggcaacagaacaa

SEQ ID NO: 768047 - DNA, 19 bp, Mus musculus
  siRNA target sequence for Cpz (NM_153107.1,1536-1554).
gggtatggtgacagataaa

SEQ ID NO: 768048 - DNA, 19 bp, Mus musculus
  siRNA target sequence for Cpz (NM_153107.1,1768-1786).
gcgacaggacccaagaact

SEQ ID NO: 768049 - DNA, 19 bp, Mus musculus
  siRNA target sequence for Cpz (NM_153107.1,1769-1787).
cgacaggacccaagaactt

SEQ ID NO: 768050 - DNA, 19 bp, Mus musculus
  siRNA target sequence for Cpz (NM_153107.1,1901-1919).
catggtggtgggcttactt

SEQ ID NO: 768051 - DNA, 19 bp, Mus musculus
  siRNA target sequence for Cpz (NM_153107.1,1943-1961).
cacgctggctgctcaagta

SEQ ID NO: 768052 - DNA, 19 bp, Mus musculus
  siRNA target sequence for Rnf35 (NM_153110.1,406-424).
gttctgtctgtaaggaata

SEQ ID NO: 768053 - DNA, 19 bp, Mus musculus
  siRNA target sequence for Rnf35 (NM_153110.1,443-461).
catggagtgtggccataaa

SEQ ID NO: 768054 - DNA, 19 bp, Mus musculus
  siRNA target sequence for Rnf35 (NM_153110.1,447-465).
gagtgtggccataaagtct

SEQ ID NO: 768055 - DNA, 19 bp, Mus musculus
  siRNA target sequence for Rnf35 (NM_153110.1,483-501).
gtgttctgggaggatctaa

SEQ ID NO: 768056 - DNA, 19 bp, Mus musculus
  siRNA target sequence for Rnf35 (NM_153110.1,538-556).
gtccaggaaggaacttttt

SEQ ID NO: 768057 - DNA, 19 bp, Mus musculus
  siRNA target sequence for Rnf35 (NM_153110.1,547-565).
ggaactttttgagtaatca

SEQ ID NO: 768058 - DNA, 19 bp, Mus musculus
  siRNA target sequence for Rnf35 (NM_153110.1,593-611).
catcttgccccctgaaaga

SEQ ID NO: 768059 - DNA, 19 bp, Mus musculus
  siRNA target sequence for Rnf35 (NM_153110.1,728-746).
cgtctgccacaggaaacaa

SEQ ID NO: 768060 - DNA, 19 bp, Mus musculus
  siRNA target sequence for Rnf35 (NM_153110.1,729-747).
gtctgccacaggaaacaaa

SEQ ID NO: 768061 - DNA, 19 bp, Mus musculus
  siRNA target sequence for Rnf35 (NM_153110.1,735-753).
cacaggaaacaaattgact

SEQ ID NO: 768062 - DNA, 19 bp, Mus musculus
  siRNA target sequence for Rnf35 (NM_153110.1,744-762).
caaattgactgttacatta

SEQ ID NO: 768063 - DNA, 19 bp, Mus musculus
  siRNA target sequence for Rnf35 (NM_153110.1,814-832).
ggaaaggatcgctagaact

SEQ ID NO: 768064 - DNA, 19 bp, Mus musculus
  siRNA target sequence for Rnf35 (NM_153110.1,820-838).
gatcgctagaactgagaaa

SEQ ID NO: 768065 - DNA, 19 bp, Mus musculus
  siRNA target sequence for Rnf35 (NM_153110.1,862-880).
gagtgaggtctcaatatga

SEQ ID NO: 768066 - DNA, 19 bp, Mus musculus
  siRNA target sequence for Rnf35 (NM_153110.1,868-886).
ggtctcaatatgaacagaa

SEQ ID NO: 768067 - DNA, 19 bp, Mus musculus
  siRNA target sequence for Rnf35 (NM_153110.1,917-935).
gattcttgggcacttacaa

SEQ ID NO: 768068 - DNA, 19 bp, Mus musculus
  siRNA target sequence for Rnf35 (NM_153110.1,947-965).
ggatgggctatccaaacta

SEQ ID NO: 768069 - DNA, 19 bp, Mus musculus
  siRNA target sequence for Rnf35 (NM_153110.1,948-966).
gatgggctatccaaactaa

SEQ ID NO: 768070 - DNA, 19 bp, Mus musculus
  siRNA target sequence for Rnf35 (NM_153110.1,951-969).
gggctatccaaactaaaca

SEQ ID NO: 768071 - DNA, 19 bp, Mus musculus
  siRNA target sequence for Rnf35 (NM_153110.1,968-986).
caaaaacctagcgaaatta

SEQ ID NO: 768072 - DNA, 19 bp, Mus musculus
  siRNA target sequence for Rnf35 (NM_153110.1,974-992).
cctagcgaaattatcagat

SEQ ID NO: 768073 - DNA, 19 bp, Mus musculus
  siRNA target sequence for Rnf35 (NM_153110.1,990-1008).
gatcacgcctccttgttaa

SEQ ID NO: 768074 - DNA, 19 bp, Mus musculus
  siRNA target sequence for Rnf35 (NM_153110.1,993-1011).
cacgcctccttgttaaaga

SEQ ID NO: 768075 - DNA, 19 bp, Mus musculus
  siRNA target sequence for Rnf35 (NM_153110.1,995-1013).
cgcctccttgttaaagagt

SEQ ID NO: 768076 - DNA, 19 bp, Mus musculus
  siRNA target sequence for Rnf35 (NM_153110.1,1014-1032).
ctgttgaaagatctaaaga

SEQ ID NO: 768077 - DNA, 19 bp, Mus musculus
  siRNA target sequence for Rnf35 (NM_153110.1,1031-1049).
gagccagtgtgaaaagtca

SEQ ID NO: 768078 - DNA, 19 bp, Mus musculus
  siRNA target sequence for Rnf35 (NM_153110.1,1056-1074).
gcattgctggcaagtgtta

SEQ ID NO: 768079 - DNA, 19 bp, Mus musculus
  siRNA target sequence for Rnf35 (NM_153110.1,1109-1127).
gcctgagatggccttagta

SEQ ID NO: 768080 - DNA, 19 bp, Mus musculus
  siRNA target sequence for Rnf35 (NM_153110.1,1110-1128).
cctgagatggccttagtaa

SEQ ID NO: 768081 - DNA, 19 bp, Mus musculus
  siRNA target sequence for Rnf35 (NM_153110.1,1113-1131).
gagatggccttagtaacat

SEQ ID NO: 768082 - DNA, 19 bp, Mus musculus
  siRNA target sequence for Rnf35 (NM_153110.1,1148-1166).
caggttacctctacagtat

SEQ ID NO: 768083 - DNA, 19 bp, Mus musculus
  siRNA target sequence for Rnf35 (NM_153110.1,1151-1169).
gttacctctacagtattct

SEQ ID NO: 768084 - DNA, 19 bp, Mus musculus
  siRNA target sequence for Rnf35 (NM_153110.1,1168-1186).
ctgacttagacagaattat

SEQ ID NO: 768085 - DNA, 19 bp, Mus musculus
  siRNA target sequence for Rnf35 (NM_153110.1,1218-1236).
cccgaaacagcaaactata

SEQ ID NO: 768086 - DNA, 19 bp, Mus musculus
  siRNA target sequence for Rnf35 (NM_153110.1,1239-1257).
cttacagtctcaaaggata

SEQ ID NO: 768087 - DNA, 19 bp, Mus musculus
  siRNA target sequence for Rnf35 (NM_153110.1,1290-1308).
gtgccctatagctcaagaa

SEQ ID NO: 768088 - DNA, 19 bp, Mus musculus
  siRNA target sequence for Rnf35 (NM_153110.1,1292-1310).
gccctatagctcaagaaaa

SEQ ID NO: 768089 - DNA, 19 bp, Mus musculus
  siRNA target sequence for Rnf35 (NM_153110.1,1293-1311).
ccctatagctcaagaaaat

SEQ ID NO: 768090 - DNA, 19 bp, Mus musculus
  siRNA target sequence for Rnf35 (NM_153110.1,1294-1312).
cctatagctcaagaaaatt

SEQ ID NO: 768091 - DNA, 19 bp, Mus musculus
  siRNA target sequence for Rnf35 (NM_153110.1,1332-1350).
ctgggatctgagggatata

SEQ ID NO: 768092 - DNA, 19 bp, Mus musculus
  siRNA target sequence for Rnf35 (NM_153110.1,1334-1352).
gggatctgagggatatagt

SEQ ID NO: 768093 - DNA, 19 bp, Mus musculus
  siRNA target sequence for Rnf35 (NM_153110.1,1445-1463).
cgaacggttctctgatgaa

SEQ ID NO: 768094 - DNA, 19 bp, Mus musculus
  siRNA target sequence for Rnf35 (NM_153110.1,1469-1487).
ctcagtgcaggatggatta

SEQ ID NO: 768095 - DNA, 19 bp, Mus musculus
  siRNA target sequence for Rnf35 (NM_153110.1,1490-1508).
gggagttgggctagacaat

SEQ ID NO: 768096 - DNA, 19 bp, Mus musculus
  siRNA target sequence for Rnf35 (NM_153110.1,1491-1509).
ggagttgggctagacaatt

SEQ ID NO: 768097 - DNA, 19 bp, Mus musculus
  siRNA target sequence for Rnf35 (NM_153110.1,1500-1518).
ctagacaattcccaaactt

SEQ ID NO: 768098 - DNA, 19 bp, Mus musculus
  siRNA target sequence for Rnf35 (NM_153110.1,1510-1528).
cccaaacttatgttgcatt

SEQ ID NO: 768099 - DNA, 19 bp, Mus musculus
  siRNA target sequence for Rnf35 (NM_153110.1,1529-1547).
gggtggtgagaaaatccat

SEQ ID NO: 768100 - DNA, 19 bp, Mus musculus
  siRNA target sequence for Rnf35 (NM_153110.1,1567-1585).
ctactaggattgggatttt

SEQ ID NO: 768101 - DNA, 19 bp, Mus musculus
  siRNA target sequence for Rnf35 (NM_153110.1,1605-1623).
gaggtttcgttttacaatt

SEQ ID NO: 768102 - DNA, 19 bp, Mus musculus
  siRNA target sequence for Rnf35 (NM_153110.1,1669-1687).
gcacattttggccttactt

SEQ ID NO: 768103 - DNA, 19 bp, Mus musculus
  siRNA target sequence for Rnf35 (NM_153110.1,1723-1741).
gcacagttgcagatcttga

SEQ ID NO: 768104 - DNA, 19 bp, Mus musculus
  siRNA target sequence for Tsll2 (NM_153112.1,128-146).
cctgccgtctgcatcagta

SEQ ID NO: 768105 - DNA, 19 bp, Mus musculus
  siRNA target sequence for Tsll2 (NM_153112.1,155-173).
ccatagtcgtcattcagaa

SEQ ID NO: 768106 - DNA, 19 bp, Mus musculus
  siRNA target sequence for Tsll2 (NM_153112.1,181-199).
cggcagaccctctttttca

SEQ ID NO: 768107 - DNA, 19 bp, Mus musculus
  siRNA target sequence for Tsll2 (NM_153112.1,182-200).
ggcagaccctctttttcaa

SEQ ID NO: 768108 - DNA, 19 bp, Mus musculus
  siRNA target sequence for Tsll2 (NM_153112.1,292-310).
gacgaggggggttacttct

SEQ ID NO: 768109 - DNA, 19 bp, Mus musculus
  siRNA target sequence for Tsll2 (NM_153112.1,345-363).
cgccacgctcactgtctta

SEQ ID NO: 768110 - DNA, 19 bp, Mus musculus
  siRNA target sequence for Tsll2 (NM_153112.1,347-365).
ccacgctcactgtcttagt

SEQ ID NO: 768111 - DNA, 19 bp, Mus musculus
  siRNA target sequence for Tsll2 (NM_153112.1,480-498).
ggatcgcaaggagttgaaa

SEQ ID NO: 768112 - DNA, 19 bp, Mus musculus
  siRNA target sequence for Tsll2 (NM_153112.1,570-588).
caaggacgacggtggtatt

SEQ ID NO: 768113 - DNA, 19 bp, Mus musculus
  siRNA target sequence for Tsll2 (NM_153112.1,574-592).
gacgacggtggtattgtca

SEQ ID NO: 768114 - DNA, 19 bp, Mus musculus
  siRNA target sequence for Tsll2 (NM_153112.1,649-667).
gtgctggatgtgcagtatt

SEQ ID NO: 768115 - DNA, 19 bp, Mus musculus
  siRNA target sequence for Tsll2 (NM_153112.1,950-968).
ctcagacatcggttcctta

SEQ ID NO: 768116 - DNA, 19 bp, Mus musculus
  siRNA target sequence for Tsll2 (NM_153112.1,991-1009).
gcgctactggtgtttctga

SEQ ID NO: 768117 - DNA, 19 bp, Mus musculus
  siRNA target sequence for Tsll2 (NM_153112.1,1047-1065).
ccgacagaagggatcctat

SEQ ID NO: 768118 - DNA, 19 bp, Mus musculus
  siRNA target sequence for Otos (NM_153114.1,208-226).
ctggaactacgtgcaatat

SEQ ID NO: 768119 - DNA, 19 bp, Mus musculus
  siRNA target sequence for Otos (NM_153114.1,210-228).
ggaactacgtgcaatattt

SEQ ID NO: 768120 - DNA, 19 bp, Mus musculus
  siRNA target sequence for Spag11 (NM_153115.1,194-212).
gagagaaaaggggatatct

SEQ ID NO: 768121 - DNA, 19 bp, Mus musculus
  siRNA target sequence for Spag11 (NM_153115.1,234-252).
gctgcgtcccctattctgt

SEQ ID NO: 768122 - DNA, 19 bp, Mus musculus
  siRNA target sequence for Spag11 (NM_153115.1,237-255).
gcgtcccctattctgttaa

SEQ ID NO: 768123 - DNA, 19 bp, Mus musculus
  siRNA target sequence for 2610318I01Rik (NM_153118.1,181-199).
cacagctgcaaaattttaa

SEQ ID NO: 768124 - DNA, 19 bp, Mus musculus
  siRNA target sequence for 2610318I01Rik (NM_153118.1,264-282).
gatgaacgaaggacaatta

SEQ ID NO: 768125 - DNA, 19 bp, Mus musculus
  siRNA target sequence for 2610318I01Rik (NM_153118.1,270-288).
cgaaggacaattaaactca

SEQ ID NO: 768126 - DNA, 19 bp, Mus musculus
  siRNA target sequence for 2610318I01Rik (NM_153118.1,312-330).
gactcagaacgcaaagtta

SEQ ID NO: 768127 - DNA, 19 bp, Mus musculus
  siRNA target sequence for 2610318I01Rik (NM_153118.1,314-332).
ctcagaacgcaaagttatt

SEQ ID NO: 768128 - DNA, 19 bp, Mus musculus
  siRNA target sequence for 2610318I01Rik (NM_153118.1,318-336).
gaacgcaaagttattccta

SEQ ID NO: 768129 - DNA, 19 bp, Mus musculus
  siRNA target sequence for 2610318I01Rik (NM_153118.1,338-356).
catctcaaaatgtttagaa

SEQ ID NO: 768130 - DNA, 19 bp, Mus musculus
  siRNA target sequence for 2610318I01Rik (NM_153118.1,349-367).
gtttagaaggaatgattct

SEQ ID NO: 768131 - DNA, 19 bp, Mus musculus
  siRNA target sequence for 2610318I01Rik (NM_153118.1,600-618).
ggcccagcactagaagatt

SEQ ID NO: 768132 - DNA, 19 bp, Mus musculus
  siRNA target sequence for 2610318I01Rik (NM_153118.1,768-786).
ggaagtctgcagcctaaat

SEQ ID NO: 768133 - DNA, 19 bp, Mus musculus
  siRNA target sequence for 2610318I01Rik (NM_153118.1,789-807).
gcagagaccatgaataaca

SEQ ID NO: 768134 - DNA, 19 bp, Mus musculus
  siRNA target sequence for 2610318I01Rik (NM_153118.1,814-832).
gcttacgaatggaaatcca

SEQ ID NO: 768135 - DNA, 19 bp, Mus musculus
  siRNA target sequence for 2610318I01Rik (NM_153118.1,842-860).
ggcatggctctctgaagtt

SEQ ID NO: 768136 - DNA, 19 bp, Mus musculus
  siRNA target sequence for 2610318I01Rik (NM_153118.1,892-910).
gacacagcagtgacataaa

SEQ ID NO: 768137 - DNA, 19 bp, Mus musculus
  siRNA target sequence for 2610318I01Rik (NM_153118.1,898-916).
gcagtgacataaatcatct

SEQ ID NO: 768138 - DNA, 19 bp, Mus musculus
  siRNA target sequence for 2610318I01Rik (NM_153118.1,899-917).
cagtgacataaatcatctt

SEQ ID NO: 768139 - DNA, 19 bp, Mus musculus
  siRNA target sequence for 2610318I01Rik (NM_153118.1,901-919).
gtgacataaatcatcttgt

SEQ ID NO: 768140 - DNA, 19 bp, Mus musculus
  siRNA target sequence for 2610318I01Rik (NM_153118.1,1057-1075).
gacactgcaaagcaatcta

SEQ ID NO: 768141 - DNA, 19 bp, Mus musculus
  siRNA target sequence for 2610318I01Rik (NM_153118.1,1076-1094).
cccttttgatgggcataat

SEQ ID NO: 768142 - DNA, 19 bp, Mus musculus
  siRNA target sequence for 2610318I01Rik (NM_153118.1,1078-1096).
cttttgatgggcataatga

SEQ ID NO: 768143 - DNA, 19 bp, Mus musculus
  siRNA target sequence for 2610318I01Rik (NM_153118.1,1119-1137).
ggtgaagttctgtacatta

SEQ ID NO: 768144 - DNA, 19 bp, Mus musculus
  siRNA target sequence for 2610318I01Rik (NM_153118.1,1194-1212).
ggctacgttcccacaacat

SEQ ID NO: 768145 - DNA, 19 bp, Mus musculus
  siRNA target sequence for 2610318I01Rik (NM_153118.1,1195-1213).
gctacgttcccacaacata

SEQ ID NO: 768146 - DNA, 19 bp, Mus musculus
  siRNA target sequence for 2610318I01Rik (NM_153118.1,1199-1217).
cgttcccacaacatacata

SEQ ID NO: 768147 - DNA, 19 bp, Mus musculus
  siRNA target sequence for 2610318I01Rik (NM_153118.1,1221-1239).
gttactctagagaaaagca

SEQ ID NO: 768148 - DNA, 19 bp, Mus musculus
  siRNA target sequence for AI840980 (NM_153119.2,259-277).
ggatgagcagaaatgtgta

SEQ ID NO: 768149 - DNA, 19 bp, Mus musculus
  siRNA target sequence for AI840980 (NM_153119.2,560-578).
ccaacaagaatccacttaa

SEQ ID NO: 768150 - DNA, 19 bp, Mus musculus
  siRNA target sequence for AI840980 (NM_153119.2,564-582).
caagaatccacttaaagga

SEQ ID NO: 768151 - DNA, 19 bp, Mus musculus
  siRNA target sequence for AI840980 (NM_153119.2,1422-1440).
ctgtgtgtgccgagtcatt

SEQ ID NO: 768152 - DNA, 19 bp, Mus musculus
  siRNA target sequence for AI840980 (NM_153119.2,1524-1542).
cccctgggctagtgcaaaa

SEQ ID NO: 768153 - DNA, 19 bp, Mus musculus
  siRNA target sequence for AI840980 (NM_153119.2,1525-1543).
ccctgggctagtgcaaaaa

SEQ ID NO: 768154 - DNA, 19 bp, Mus musculus
  siRNA target sequence for BC018510 (NM_153123.1,82-100).
gtactcgttttggaatttt

SEQ ID NO: 768155 - DNA, 19 bp, Mus musculus
  siRNA target sequence for BC018510 (NM_153123.1,310-328).
ggatgcatctctgtcatat

SEQ ID NO: 768156 - DNA, 19 bp, Mus musculus
  siRNA target sequence for MGC38812 (NM_153125.1,485-503).
ctacgatgggtgatactct

SEQ ID NO: 768157 - DNA, 19 bp, Mus musculus
  siRNA target sequence for MGC38812 (NM_153125.1,494-512).
gtgatactctagcatcaaa

SEQ ID NO: 768158 - DNA, 19 bp, Mus musculus
  siRNA target sequence for MGC38812 (NM_153125.1,546-564).
gatggcccaggttggattt

SEQ ID NO: 768159 - DNA, 19 bp, Mus musculus
  siRNA target sequence for MGC38812 (NM_153125.1,560-578).
gatttggggtttatacaaa

SEQ ID NO: 768160 - DNA, 19 bp, Mus musculus
  siRNA target sequence for MGC38812 (NM_153125.1,659-677).
ggacggaggcttatgagta

SEQ ID NO: 768161 - DNA, 19 bp, Mus musculus
  siRNA target sequence for MGC38812 (NM_153125.1,660-678).
gacggaggcttatgagtat

SEQ ID NO: 768162 - DNA, 19 bp, Mus musculus
  siRNA target sequence for MGC38812 (NM_153125.1,693-711).
ggcacatacctgttcctta

SEQ ID NO: 768163 - DNA, 19 bp, Mus musculus
  siRNA target sequence for MGC38812 (NM_153125.1,697-715).
catacctgttccttaccta

SEQ ID NO: 768164 - DNA, 19 bp, Mus musculus
  siRNA target sequence for MGC38812 (NM_153125.1,701-719).
cctgttccttacctaactt

SEQ ID NO: 768165 - DNA, 19 bp, Mus musculus
  siRNA target sequence for MGC38812 (NM_153125.1,721-739).
caggtgtttaaattcatct

SEQ ID NO: 768166 - DNA, 19 bp, Mus musculus
  siRNA target sequence for MGC38812 (NM_153125.1,783-801).
ccactactgcgaagtaata

SEQ ID NO: 768167 - DNA, 19 bp, Mus musculus
  siRNA target sequence for MGC38812 (NM_153125.1,1017-1035).
ccagcagtgtcgcattaca

SEQ ID NO: 768168 - DNA, 19 bp, Mus musculus
  siRNA target sequence for MGC38812 (NM_153125.1,1018-1036).
cagcagtgtcgcattacat

SEQ ID NO: 768169 - DNA, 19 bp, Mus musculus
  siRNA target sequence for MGC38812 (NM_153125.1,1097-1115).
ccgacaaccctctactgat

SEQ ID NO: 768170 - DNA, 19 bp, Mus musculus
  siRNA target sequence for MGC38812 (NM_153125.1,1343-1361).
cacccactacactaagtct

SEQ ID NO: 768171 - DNA, 19 bp, Mus musculus
  siRNA target sequence for MGC38812 (NM_153125.1,1540-1558).
cttggcagctccagtttga

SEQ ID NO: 768172 - DNA, 19 bp, Mus musculus
  siRNA target sequence for MGC38812 (NM_153125.1,1561-1579).
cgtgcaccatctttgacat

SEQ ID NO: 768173 - DNA, 19 bp, Mus musculus
  siRNA target sequence for MGC38812 (NM_153125.1,1567-1585).
ccatctttgacatctgatt

SEQ ID NO: 768174 - DNA, 19 bp, Mus musculus
  siRNA target sequence for MGC38812 (NM_153125.1,1571-1589).
ctttgacatctgattctga

SEQ ID NO: 768175 - DNA, 19 bp, Mus musculus
  siRNA target sequence for MGC38812 (NM_153125.1,1604-1622).
cacaggctgtcaaaaagga

SEQ ID NO: 768176 - DNA, 19 bp, Mus musculus
  siRNA target sequence for MGC38812 (NM_153125.1,1691-1709).
cttatctaccagatgacaa

SEQ ID NO: 768177 - DNA, 19 bp, Mus musculus
  siRNA target sequence for MGC38812 (NM_153125.1,1853-1871).
ccacggcctccgtgaatgt

SEQ ID NO: 768178 - DNA, 19 bp, Mus musculus
  siRNA target sequence for MGC38812 (NM_153125.1,1856-1874).
cggcctccgtgaatgtgtt

SEQ ID NO: 768179 - DNA, 19 bp, Mus musculus
  siRNA target sequence for MGC38812 (NM_153125.1,1901-1919).
ctcgctatgtggatgttct

SEQ ID NO: 768180 - DNA, 19 bp, Mus musculus
  siRNA target sequence for MGC38812 (NM_153125.1,1903-1921).
cgctatgtggatgttctaa

SEQ ID NO: 768181 - DNA, 19 bp, Mus musculus
  siRNA target sequence for MGC38812 (NM_153125.1,1954-1972).
cttgctcctgcagatttct

SEQ ID NO: 768182 - DNA, 19 bp, Mus musculus
  siRNA target sequence for MGC38812 (NM_153125.1,1993-2011).
ccaattccttctaacttat

SEQ ID NO: 768183 - DNA, 19 bp, Mus musculus
  siRNA target sequence for MGC38812 (NM_153125.1,2003-2021).
ctaacttatttgtaccaaa

SEQ ID NO: 768184 - DNA, 19 bp, Mus musculus
  siRNA target sequence for MGC38812 (NM_153125.1,2078-2096).
cagctgggactcagtctaa

SEQ ID NO: 768185 - DNA, 19 bp, Mus musculus
  siRNA target sequence for MGC38812 (NM_153125.1,2341-2359).
gtcacctcgggaaattcaa

SEQ ID NO: 768186 - DNA, 19 bp, Mus musculus
  siRNA target sequence for MGC38812 (NM_153125.1,2381-2399).
gaaaatatgcggcattgaa

SEQ ID NO: 768187 - DNA, 19 bp, Mus musculus
  siRNA target sequence for Emilin3 (NM_153127.2,168-186).
caagttctcccatctcaat

SEQ ID NO: 768188 - DNA, 19 bp, Mus musculus
  siRNA target sequence for Emilin3 (NM_153127.2,276-294).
caggctagtcacctttgta

SEQ ID NO: 768189 - DNA, 19 bp, Mus musculus
  siRNA target sequence for Emilin3 (NM_153127.2,298-316).
gcttgcaaaacagagaaat

SEQ ID NO: 768190 - DNA, 19 bp, Mus musculus
  siRNA target sequence for Emilin3 (NM_153127.2,299-317).
cttgcaaaacagagaaatt

SEQ ID NO: 768191 - DNA, 19 bp, Mus musculus
  siRNA target sequence for Emilin3 (NM_153127.2,366-384).
gggagtcagagtcatgtat

SEQ ID NO: 768192 - DNA, 19 bp, Mus musculus
  siRNA target sequence for Emilin3 (NM_153127.2,581-599).
cagagtttaatgagattaa

SEQ ID NO: 768193 - DNA, 19 bp, Mus musculus
  siRNA target sequence for Emilin3 (NM_153127.2,721-739).
gaagccaatctaacagaat

SEQ ID NO: 768194 - DNA, 19 bp, Mus musculus
  siRNA target sequence for Emilin3 (NM_153127.2,771-789).
gctgcagccccatattgat

SEQ ID NO: 768195 - DNA, 19 bp, Mus musculus
  siRNA target sequence for Emilin3 (NM_153127.2,856-874).
caggccatcagaaacttgt

SEQ ID NO: 768196 - DNA, 19 bp, Mus musculus
  siRNA target sequence for Emilin3 (NM_153127.2,1308-1326).
gcacgccgaagagatcaaa

SEQ ID NO: 768197 - DNA, 19 bp, Mus musculus
  siRNA target sequence for Emilin3 (NM_153127.2,1420-1438).
gagctgcgggtgatcctaa

SEQ ID NO: 768198 - DNA, 19 bp, Mus musculus
  siRNA target sequence for Emilin3 (NM_153127.2,1425-1443).
gcgggtgatcctaatggaa

SEQ ID NO: 768199 - DNA, 19 bp, Mus musculus
  siRNA target sequence for Emilin3 (NM_153127.2,1426-1444).
cgggtgatcctaatggaaa

SEQ ID NO: 768200 - DNA, 19 bp, Mus musculus
  siRNA target sequence for Emilin3 (NM_153127.2,1528-1546).
ggtcatgcagacctcatta

SEQ ID NO: 768201 - DNA, 19 bp, Mus musculus
  siRNA target sequence for Emilin3 (NM_153127.2,1529-1547).
gtcatgcagacctcattaa

SEQ ID NO: 768202 - DNA, 19 bp, Mus musculus
  siRNA target sequence for Emilin3 (NM_153127.2,1665-1683).
ccagctagacggttcttct

SEQ ID NO: 768203 - DNA, 19 bp, Mus musculus
  siRNA target sequence for Emilin3 (NM_153127.2,1666-1684).
cagctagacggttcttctt

SEQ ID NO: 768204 - DNA, 19 bp, Mus musculus
  siRNA target sequence for Emilin3 (NM_153127.2,1970-1988).
gccctctgccactggatta

SEQ ID NO: 768205 - DNA, 19 bp, Mus musculus
  siRNA target sequence for Emilin3 (NM_153127.2,1973-1991).
ctctgccactggattatga

SEQ ID NO: 768206 - DNA, 19 bp, Mus musculus
  siRNA target sequence for Emilin3 (NM_153127.2,2032-2050).
caggaacaggcgattggtt

SEQ ID NO: 768207 - DNA, 19 bp, Mus musculus
  siRNA target sequence for Emilin3 (NM_153127.2,2381-2399).
gcaacatcagcctagactt

SEQ ID NO: 768208 - DNA, 19 bp, Mus musculus
  siRNA target sequence for Emilin3 (NM_153127.2,2414-2432).
ccatgttgagtaagaaaga

SEQ ID NO: 768209 - DNA, 19 bp, Mus musculus
  siRNA target sequence for Emilin3 (NM_153127.2,2415-2433).
catgttgagtaagaaagat

SEQ ID NO: 768210 - DNA, 19 bp, Mus musculus
  siRNA target sequence for Emilin3 (NM_153127.2,2550-2568).
cttctatgccggttcttca

SEQ ID NO: 768211 - DNA, 19 bp, Mus musculus
  siRNA target sequence for Emilin3 (NM_153127.2,2663-2681).
ccaaacgtggcgtctactt

SEQ ID NO: 768212 - DNA, 19 bp, Mus musculus
  siRNA target sequence for Emilin3 (NM_153127.2,2717-2735).
gaatggggcagctggtatt

SEQ ID NO: 768213 - DNA, 19 bp, Mus musculus
  siRNA target sequence for Emilin3 (NM_153127.2,2749-2767).
cgggttccagtctacagta

SEQ ID NO: 768214 - DNA, 19 bp, Mus musculus
  siRNA target sequence for Emilin3 (NM_153127.2,2804-2822).
gctatggtagagctacaaa

SEQ ID NO: 768215 - DNA, 19 bp, Mus musculus
  siRNA target sequence for AF322649 (NM_153134.2,235-253).
gtgacgtgactgccttatt

SEQ ID NO: 768216 - DNA, 19 bp, Mus musculus
  siRNA target sequence for AF322649 (NM_153134.2,293-311).
cgcgttatgcggtaagaat

SEQ ID NO: 768217 - DNA, 19 bp, Mus musculus
  siRNA target sequence for AF322649 (NM_153134.2,295-313).
cgttatgcggtaagaatgt

SEQ ID NO: 768218 - DNA, 19 bp, Mus musculus
  siRNA target sequence for AF322649 (NM_153134.2,606-624).
gagactgcagccttgttga

SEQ ID NO: 768219 - DNA, 19 bp, Mus musculus
  siRNA target sequence for AF322649 (NM_153134.2,640-658).
gagctgcgcctctctttgt

SEQ ID NO: 768220 - DNA, 19 bp, Mus musculus
  siRNA target sequence for AF322649 (NM_153134.2,921-939).
gtaggccttgtgctagata

SEQ ID NO: 768221 - DNA, 19 bp, Mus musculus
  siRNA target sequence for AF322649 (NM_153134.2,1889-1907).
gcacggtgtacttctacaa

SEQ ID NO: 768222 - DNA, 19 bp, Mus musculus
  siRNA target sequence for BC036718 (NM_153136.1,629-647).
caacaggcggagttctcaa

SEQ ID NO: 768223 - DNA, 19 bp, Mus musculus
  siRNA target sequence for BC036718 (NM_153136.1,748-766).
gagctaggcgccaaattct

SEQ ID NO: 768224 - DNA, 19 bp, Mus musculus
  siRNA target sequence for BC036718 (NM_153136.1,1129-1147).
cggggtgaaaactactttt

SEQ ID NO: 768225 - DNA, 19 bp, Mus musculus
  siRNA target sequence for BC036718 (NM_153136.1,1132-1150).
ggtgaaaactacttttggt

SEQ ID NO: 768226 - DNA, 19 bp, Mus musculus
  siRNA target sequence for D030060O14Rik (NM_153140.1,868-886).
cgtgagaagagcattgaga

SEQ ID NO: 768227 - DNA, 19 bp, Mus musculus
  siRNA target sequence for D030060O14Rik (NM_153140.1,869-887).
gtgagaagagcattgagat

SEQ ID NO: 768228 - DNA, 19 bp, Mus musculus
  siRNA target sequence for D030060O14Rik (NM_153140.1,1037-1055).
gtgaggaacaggagaataa

SEQ ID NO: 768229 - DNA, 19 bp, Mus musculus
  siRNA target sequence for D030060O14Rik (NM_153140.1,1079-1097).
gccatgagcggcaccaatt

SEQ ID NO: 768230 - DNA, 19 bp, Mus musculus
  siRNA target sequence for D030060O14Rik (NM_153140.1,1461-1479).
ccgcctgcaggactacatt

SEQ ID NO: 768231 - DNA, 19 bp, Mus musculus
  siRNA target sequence for A330108F03Rik (NM_153142.2,1500-1518).
caccatgaaggcatgatga

SEQ ID NO: 768232 - DNA, 19 bp, Mus musculus
  siRNA target sequence for A330108F03Rik (NM_153142.2,1653-1671).
gcgggagccagcatgtcaa

SEQ ID NO: 768233 - DNA, 19 bp, Mus musculus
  siRNA target sequence for A330108F03Rik (NM_153142.2,1991-2009).
cctaggggctgcatgtagt

SEQ ID NO: 768234 - DNA, 19 bp, Mus musculus
  siRNA target sequence for A330108F03Rik (NM_153142.2,2136-2154).
ctgctgtatgccacttctt

SEQ ID NO: 768235 - DNA, 19 bp, Mus musculus
  siRNA target sequence for 2410015M20Rik (NM_153152.2,114-132).
cgagtgtggtcgctaatga

SEQ ID NO: 768236 - DNA, 19 bp, Mus musculus
  siRNA target sequence for 2410015M20Rik (NM_153152.2,163-181).
gagcagtctaccttgttta

SEQ ID NO: 768237 - DNA, 19 bp, Mus musculus
  siRNA target sequence for 2410015M20Rik (NM_153152.2,260-278).
gtaccagttcagccaatat

SEQ ID NO: 768238 - DNA, 19 bp, Mus musculus
  siRNA target sequence for 2410015M20Rik (NM_153152.2,316-334).
caacccctccaaagattaa

SEQ ID NO: 768239 - DNA, 19 bp, Mus musculus
  siRNA target sequence for E130308A19Rik (NM_153158.1,288-306).
gtaccactggccactaaca

SEQ ID NO: 768240 - DNA, 19 bp, Mus musculus
  siRNA target sequence for E130308A19Rik (NM_153158.1,346-364).
caggacaaccgaagtttta

SEQ ID NO: 768241 - DNA, 19 bp, Mus musculus
  siRNA target sequence for E130308A19Rik (NM_153158.1,351-369).
caaccgaagttttaattct

SEQ ID NO: 768242 - DNA, 19 bp, Mus musculus
  siRNA target sequence for E130308A19Rik (NM_153158.1,355-373).
cgaagttttaattctgata

SEQ ID NO: 768243 - DNA, 19 bp, Mus musculus
  siRNA target sequence for E130308A19Rik (NM_153158.1,368-386).
ctgatagtcccagtataat

SEQ ID NO: 768244 - DNA, 19 bp, Mus musculus
  siRNA target sequence for E130308A19Rik (NM_153158.1,410-428).
ctagccctgtggaaaggta

SEQ ID NO: 768245 - DNA, 19 bp, Mus musculus
  siRNA target sequence for E130308A19Rik (NM_153158.1,564-582).
ggtttgcgagtcttctgtt

SEQ ID NO: 768246 - DNA, 19 bp, Mus musculus
  siRNA target sequence for E130308A19Rik (NM_153158.1,565-583).
gtttgcgagtcttctgtta

SEQ ID NO: 768247 - DNA, 19 bp, Mus musculus
  siRNA target sequence for E130308A19Rik (NM_153158.1,569-587).
gcgagtcttctgttacaga

SEQ ID NO: 768248 - DNA, 19 bp, Mus musculus
  siRNA target sequence for E130308A19Rik (NM_153158.1,655-673).
gtcccatcttccatccatt

SEQ ID NO: 768249 - DNA, 19 bp, Mus musculus
  siRNA target sequence for E130308A19Rik (NM_153158.1,685-703).
ggacagatggtcgatgaat

SEQ ID NO: 768250 - DNA, 19 bp, Mus musculus
  siRNA target sequence for E130308A19Rik (NM_153158.1,693-711).
ggtcgatgaatgcagtaat

SEQ ID NO: 768251 - DNA, 19 bp, Mus musculus
  siRNA target sequence for E130308A19Rik (NM_153158.1,696-714).
cgatgaatgcagtaatgat

SEQ ID NO: 768252 - DNA, 19 bp, Mus musculus
  siRNA target sequence for E130308A19Rik (NM_153158.1,796-814).
ggaccagccctttcattga

SEQ ID NO: 768253 - DNA, 19 bp, Mus musculus
  siRNA target sequence for E130308A19Rik (NM_153158.1,877-895).
ctgattccccatgtaacat

SEQ ID NO: 768254 - DNA, 19 bp, Mus musculus
  siRNA target sequence for E130308A19Rik (NM_153158.1,899-917).
ccatcaacacggaattaga

SEQ ID NO: 768255 - DNA, 19 bp, Mus musculus
  siRNA target sequence for E130308A19Rik (NM_153158.1,909-927).
ggaattagacccacacatt

SEQ ID NO: 768256 - DNA, 19 bp, Mus musculus
  siRNA target sequence for E130308A19Rik (NM_153158.1,1053-1071).
gcctgtgagcacatcacat

SEQ ID NO: 768257 - DNA, 19 bp, Mus musculus
  siRNA target sequence for E130308A19Rik (NM_153158.1,1061-1079).
gcacatcacatcctaacaa

SEQ ID NO: 768258 - DNA, 19 bp, Mus musculus
  siRNA target sequence for E130308A19Rik (NM_153158.1,1062-1080).
cacatcacatcctaacaaa

SEQ ID NO: 768259 - DNA, 19 bp, Mus musculus
  siRNA target sequence for E130308A19Rik (NM_153158.1,1073-1091).
ctaacaaacagatcagtat

SEQ ID NO: 768260 - DNA, 19 bp, Mus musculus
  siRNA target sequence for E130308A19Rik (NM_153158.1,1083-1101).
gatcagtatccctttgtct

SEQ ID NO: 768261 - DNA, 19 bp, Mus musculus
  siRNA target sequence for E130308A19Rik (NM_153158.1,1162-1180).
cctagccaggtctcatcat

SEQ ID NO: 768262 - DNA, 19 bp, Mus musculus
  siRNA target sequence for E130308A19Rik (NM_153158.1,1245-1263).
ccctgctgctccaaccata

SEQ ID NO: 768263 - DNA, 19 bp, Mus musculus
  siRNA target sequence for E130308A19Rik (NM_153158.1,1246-1264).
cctgctgctccaaccataa

SEQ ID NO: 768264 - DNA, 19 bp, Mus musculus
  siRNA target sequence for E130308A19Rik (NM_153158.1,1249-1267).
gctgctccaaccataacca

SEQ ID NO: 768265 - DNA, 19 bp, Mus musculus
  siRNA target sequence for E130308A19Rik (NM_153158.1,1327-1345).
gagcagaacgagaaaacca

SEQ ID NO: 768266 - DNA, 19 bp, Mus musculus
  siRNA target sequence for E130308A19Rik (NM_153158.1,1407-1425).
cgagaccagagagatctat

SEQ ID NO: 768267 - DNA, 19 bp, Mus musculus
  siRNA target sequence for E130308A19Rik (NM_153158.1,1508-1526).
ccaacagcttggccaatta

SEQ ID NO: 768268 - DNA, 19 bp, Mus musculus
  siRNA target sequence for E130308A19Rik (NM_153158.1,1804-1822).
catggatccaccttgaaat

SEQ ID NO: 768269 - DNA, 19 bp, Mus musculus
  siRNA target sequence for E130308A19Rik (NM_153158.1,1849-1867).
gaaaccgggcttgagtatt

SEQ ID NO: 768270 - DNA, 19 bp, Mus musculus
  siRNA target sequence for E130308A19Rik (NM_153158.1,1880-1898).
gtcaggacactggtgattt

SEQ ID NO: 768271 - DNA, 19 bp, Mus musculus
  siRNA target sequence for E130308A19Rik (NM_153158.1,1922-1940).
gaacggactcgcgagttta

SEQ ID NO: 768272 - DNA, 19 bp, Mus musculus
  siRNA target sequence for E130308A19Rik (NM_153158.1,1967-1985).
gcccggtgcaggattataa

SEQ ID NO: 768273 - DNA, 19 bp, Mus musculus
  siRNA target sequence for E130308A19Rik (NM_153158.1,2023-2041).
gaggatgcccccttctact

SEQ ID NO: 768274 - DNA, 19 bp, Mus musculus
  siRNA target sequence for E130308A19Rik (NM_153158.1,2026-2044).
gatgcccccttctacttgt

SEQ ID NO: 768275 - DNA, 19 bp, Mus musculus
  siRNA target sequence for E130308A19Rik (NM_153158.1,2045-2063).
ccatcaagccagttgtgaa

SEQ ID NO: 768276 - DNA, 19 bp, Mus musculus
  siRNA target sequence for E130308A19Rik (NM_153158.1,2071-2089).
gctcttcactggtacaatt

SEQ ID NO: 768277 - DNA, 19 bp, Mus musculus
  siRNA target sequence for BC036563 (NM_153159.1,347-365).
cggtgctaggggaattggt

SEQ ID NO: 768278 - DNA, 19 bp, Mus musculus
  siRNA target sequence for BC036563 (NM_153159.1,456-474).
caagccttccactctagaa

SEQ ID NO: 768279 - DNA, 19 bp, Mus musculus
  siRNA target sequence for BC036563 (NM_153159.1,522-540).
ggtcatcgacggaagcaat

SEQ ID NO: 768280 - DNA, 19 bp, Mus musculus
  siRNA target sequence for BC036563 (NM_153159.1,613-631).
gagcgaggccacacagata

SEQ ID NO: 768281 - DNA, 19 bp, Mus musculus
  siRNA target sequence for BC036563 (NM_153159.1,615-633).
gcgaggccacacagatatt

SEQ ID NO: 768282 - DNA, 19 bp, Mus musculus
  siRNA target sequence for BC036563 (NM_153159.1,616-634).
cgaggccacacagatatta

SEQ ID NO: 768283 - DNA, 19 bp, Mus musculus
  siRNA target sequence for BC036563 (NM_153159.1,626-644).
cagatattaccgtgtttgt

SEQ ID NO: 768284 - DNA, 19 bp, Mus musculus
  siRNA target sequence for BC036563 (NM_153159.1,777-795).
ctatgatgaccgcttcatt

SEQ ID NO: 768285 - DNA, 19 bp, Mus musculus
  siRNA target sequence for BC036563 (NM_153159.1,1052-1070).
gaatcaagtgccgattttt

SEQ ID NO: 768286 - DNA, 19 bp, Mus musculus
  siRNA target sequence for BC036563 (NM_153159.1,1153-1171).
ccagtcaaggacaaaagta

SEQ ID NO: 768287 - DNA, 19 bp, Mus musculus
  siRNA target sequence for BC036563 (NM_153159.1,1405-1423).
cttgattcaggcattggtt

SEQ ID NO: 768288 - DNA, 19 bp, Mus musculus
  siRNA target sequence for BC036563 (NM_153159.1,1498-1516).
ccctatgcaggttatcaca

SEQ ID NO: 768289 - DNA, 19 bp, Mus musculus
  siRNA target sequence for BC036563 (NM_153159.1,1507-1525).
ggttatcacagctatggat

SEQ ID NO: 768290 - DNA, 19 bp, Mus musculus
  siRNA target sequence for BC036563 (NM_153159.1,1753-1771).
gaaagggctggtgtatata

SEQ ID NO: 768291 - DNA, 19 bp, Mus musculus
  siRNA target sequence for BC036563 (NM_153159.1,1757-1775).
gggctggtgtatataccaa

SEQ ID NO: 768292 - DNA, 19 bp, Mus musculus
  siRNA target sequence for BC036563 (NM_153159.1,1801-1819).
ctggtagaagctgtaatga

SEQ ID NO: 768293 - DNA, 19 bp, Mus musculus
  siRNA target sequence for BC036563 (NM_153159.1,1803-1821).
ggtagaagctgtaatgaga

SEQ ID NO: 768294 - DNA, 19 bp, Mus musculus
  siRNA target sequence for BC037034 (NM_153161.1,619-637).
ccttgaagtccccttgatt

SEQ ID NO: 768295 - DNA, 19 bp, Mus musculus
  siRNA target sequence for BC037034 (NM_153161.1,668-686).
cccttcacccagagcattt

SEQ ID NO: 768296 - DNA, 19 bp, Mus musculus
  siRNA target sequence for BC037034 (NM_153161.1,669-687).
ccttcacccagagcattta

SEQ ID NO: 768297 - DNA, 19 bp, Mus musculus
  siRNA target sequence for BC037034 (NM_153161.1,766-784).
gacctacgagcgtttcact

SEQ ID NO: 768298 - DNA, 19 bp, Mus musculus
  siRNA target sequence for BC037034 (NM_153161.1,789-807).
cctacacgctgctcaacaa

SEQ ID NO: 768299 - DNA, 19 bp, Mus musculus
  siRNA target sequence for BC037034 (NM_153161.1,928-946).
cacacccctcaataatctt

SEQ ID NO: 768300 - DNA, 19 bp, Mus musculus
  siRNA target sequence for BC037034 (NM_153161.1,1018-1036).
gctgagccagcacatgaaa

SEQ ID NO: 768301 - DNA, 19 bp, Mus musculus
  siRNA target sequence for BC037034 (NM_153161.1,1153-1171).
cagcctgggccgttctcaa

SEQ ID NO: 768302 - DNA, 19 bp, Mus musculus
  siRNA target sequence for BC037034 (NM_153161.1,1156-1174).
cctgggccgttctcaatct

SEQ ID NO: 768303 - DNA, 19 bp, Mus musculus
  siRNA target sequence for BC037034 (NM_153161.1,1157-1175).
ctgggccgttctcaatctt

SEQ ID NO: 768304 - DNA, 19 bp, Mus musculus
  siRNA target sequence for BC037034 (NM_153161.1,1160-1178).
ggccgttctcaatctttct

SEQ ID NO: 768305 - DNA, 19 bp, Mus musculus
  siRNA target sequence for BC037034 (NM_153161.1,1297-1315).
ggctgtgctttctcttgat

SEQ ID NO: 768306 - DNA, 19 bp, Mus musculus
  siRNA target sequence for BC037034 (NM_153161.1,1298-1316).
gctgtgctttctcttgata

SEQ ID NO: 768307 - DNA, 19 bp, Mus musculus
  siRNA target sequence for BC037034 (NM_153161.1,1299-1317).
ctgtgctttctcttgataa

SEQ ID NO: 768308 - DNA, 19 bp, Mus musculus
  siRNA target sequence for Cadps2 (NM_153163.2,397-415).
gtggccagaatggttcaaa

SEQ ID NO: 768309 - DNA, 19 bp, Mus musculus
  siRNA target sequence for Cadps2 (NM_153163.2,399-417).
ggccagaatggttcaaagt

SEQ ID NO: 768310 - DNA, 19 bp, Mus musculus
  siRNA target sequence for Cadps2 (NM_153163.2,422-440).
gatgctctgctaatgattt

SEQ ID NO: 768311 - DNA, 19 bp, Mus musculus
  siRNA target sequence for Cadps2 (NM_153163.2,524-542).
gctcatggatagccaaata

SEQ ID NO: 768312 - DNA, 19 bp, Mus musculus
  siRNA target sequence for Cadps2 (NM_153163.2,525-543).
ctcatggatagccaaatat

SEQ ID NO: 768313 - DNA, 19 bp, Mus musculus
  siRNA target sequence for Cadps2 (NM_153163.2,602-620).
gtgccgtgtctgagcttat

SEQ ID NO: 768314 - DNA, 19 bp, Mus musculus
  siRNA target sequence for Cadps2 (NM_153163.2,655-673).
cagattctgggcattaaga

SEQ ID NO: 768315 - DNA, 19 bp, Mus musculus
  siRNA target sequence for Cadps2 (NM_153163.2,678-696).
ggaacaccagctactttat

SEQ ID NO: 768316 - DNA, 19 bp, Mus musculus
  siRNA target sequence for Cadps2 (NM_153163.2,679-697).
gaacaccagctactttata

SEQ ID NO: 768317 - DNA, 19 bp, Mus musculus
  siRNA target sequence for Cadps2 (NM_153163.2,708-726).
gctggataacgctgatgaa

SEQ ID NO: 768318 - DNA, 19 bp, Mus musculus
  siRNA target sequence for Cadps2 (NM_153163.2,794-812).
gaagattccccagattcat

SEQ ID NO: 768319 - DNA, 19 bp, Mus musculus
  siRNA target sequence for Cadps2 (NM_153163.2,804-822).
cagattcatctcgaaagaa

SEQ ID NO: 768320 - DNA, 19 bp, Mus musculus
  siRNA target sequence for Cadps2 (NM_153163.2,806-824).
gattcatctcgaaagaaat

SEQ ID NO: 768321 - DNA, 19 bp, Mus musculus
  siRNA target sequence for Cadps2 (NM_153163.2,815-833).
cgaaagaaatggagagtat

SEQ ID NO: 768322 - DNA, 19 bp, Mus musculus
  siRNA target sequence for Cadps2 (NM_153163.2,825-843).
ggagagtatgtacattgaa

SEQ ID NO: 768323 - DNA, 19 bp, Mus musculus
  siRNA target sequence for Cadps2 (NM_153163.2,867-885).
gctaatggccaatttagaa

SEQ ID NO: 768324 - DNA, 19 bp, Mus musculus
  siRNA target sequence for Cadps2 (NM_153163.2,910-928).
ccggaatttaaattacaaa

SEQ ID NO: 768325 - DNA, 19 bp, Mus musculus
  siRNA target sequence for Cadps2 (NM_153163.2,1058-1076).
ctgtggctcccaatcgaat

SEQ ID NO: 768326 - DNA, 19 bp, Mus musculus
  siRNA target sequence for Cadps2 (NM_153163.2,1062-1080).
ggctcccaatcgaatcgtt

SEQ ID NO: 768327 - DNA, 19 bp, Mus musculus
  siRNA target sequence for Cadps2 (NM_153163.2,1063-1081).
gctcccaatcgaatcgttt

SEQ ID NO: 768328 - DNA, 19 bp, Mus musculus
  siRNA target sequence for Cadps2 (NM_153163.2,1064-1082).
ctcccaatcgaatcgttta

SEQ ID NO: 768329 - DNA, 19 bp, Mus musculus
  siRNA target sequence for Cadps2 (NM_153163.2,1066-1084).
cccaatcgaatcgtttact

SEQ ID NO: 768330 - DNA, 19 bp, Mus musculus
  siRNA target sequence for Cadps2 (NM_153163.2,1153-1171).
gggacccaaggagatttca

SEQ ID NO: 768331 - DNA, 19 bp, Mus musculus
  siRNA target sequence for Cadps2 (NM_153163.2,1159-1177).
caaggagatttcaacacta

SEQ ID NO: 768332 - DNA, 19 bp, Mus musculus
  siRNA target sequence for Cadps2 (NM_153163.2,1186-1204).
cggcctgtcgtcaaagtga

SEQ ID NO: 768333 - DNA, 19 bp, Mus musculus
  siRNA target sequence for Cadps2 (NM_153163.2,1201-1219).
gtgaagctcttcacagaaa

SEQ ID NO: 768334 - DNA, 19 bp, Mus musculus
  siRNA target sequence for Cadps2 (NM_153163.2,1263-1281).
ggtgttatacccaacttct

SEQ ID NO: 768335 - DNA, 19 bp, Mus musculus
  siRNA target sequence for Cadps2 (NM_153163.2,1266-1284).
gttatacccaacttctaat

SEQ ID NO: 768336 - DNA, 19 bp, Mus musculus
  siRNA target sequence for Cadps2 (NM_153163.2,1287-1305).
ctccaagtcagcagagtta

SEQ ID NO: 768337 - DNA, 19 bp, Mus musculus
  siRNA target sequence for Cadps2 (NM_153163.2,1333-1351).
caggactcggacctaaaga

SEQ ID NO: 768338 - DNA, 19 bp, Mus musculus
  siRNA target sequence for Cadps2 (NM_153163.2,1336-1354).
gactcggacctaaagatca

SEQ ID NO: 768339 - DNA, 19 bp, Mus musculus
  siRNA target sequence for Cadps2 (NM_153163.2,1338-1356).
ctcggacctaaagatcaaa

SEQ ID NO: 768340 - DNA, 19 bp, Mus musculus
  siRNA target sequence for Cadps2 (NM_153163.2,1436-1454).
gatggaaaaagcgttactt

SEQ ID NO: 768341 - DNA, 19 bp, Mus musculus
  siRNA target sequence for Cadps2 (NM_153163.2,1440-1458).
gaaaaagcgttactttgtt

SEQ ID NO: 768342 - DNA, 19 bp, Mus musculus
  siRNA target sequence for Cadps2 (NM_153163.2,1512-1530).
gtcggaaccacaggaatta

SEQ ID NO: 768343 - DNA, 19 bp, Mus musculus
  siRNA target sequence for Cadps2 (NM_153163.2,1514-1532).
cggaaccacaggaattaat

SEQ ID NO: 768344 - DNA, 19 bp, Mus musculus
  siRNA target sequence for Cadps2 (NM_153163.2,1596-1614).
gttcttcaacgctgttaaa

SEQ ID NO: 768345 - DNA, 19 bp, Mus musculus
  siRNA target sequence for Cadps2 (NM_153163.2,1645-1663).
gatgaacaggacagaatat

SEQ ID NO: 768346 - DNA, 19 bp, Mus musculus
  siRNA target sequence for Cadps2 (NM_153163.2,1800-1818).
cgggatggatgagtttatt

SEQ ID NO: 768347 - DNA, 19 bp, Mus musculus
  siRNA target sequence for Cadps2 (NM_153163.2,1801-1819).
gggatggatgagtttattt

SEQ ID NO: 768348 - DNA, 19 bp, Mus musculus
  siRNA target sequence for Cadps2 (NM_153163.2,1866-1884).
ccagagacagactttggat

SEQ ID NO: 768349 - DNA, 19 bp, Mus musculus
  siRNA target sequence for Cadps2 (NM_153163.2,1893-1911).
gaatgattcgtattcttgt

SEQ ID NO: 768350 - DNA, 19 bp, Mus musculus
  siRNA target sequence for Cadps2 (NM_153163.2,1997-2015).
gctaccttacagaactgat

SEQ ID NO: 768351 - DNA, 19 bp, Mus musculus
  siRNA target sequence for Cadps2 (NM_153163.2,2111-2129).
ggattggaacggtttcagt

SEQ ID NO: 768352 - DNA, 19 bp, Mus musculus
  siRNA target sequence for Cadps2 (NM_153163.2,2120-2138).
cggtttcagtggaagagaa

SEQ ID NO: 768353 - DNA, 19 bp, Mus musculus
  siRNA target sequence for Cadps2 (NM_153163.2,2154-2172).
gataaaagaccgactttct

SEQ ID NO: 768354 - DNA, 19 bp, Mus musculus
  siRNA target sequence for Cadps2 (NM_153163.2,2163-2181).
ccgactttcttcgctttta

SEQ ID NO: 768355 - DNA, 19 bp, Mus musculus
  siRNA target sequence for Cadps2 (NM_153163.2,2165-2183).
gactttcttcgcttttaga

SEQ ID NO: 768356 - DNA, 19 bp, Mus musculus
  siRNA target sequence for Cadps2 (NM_153163.2,2171-2189).
cttcgcttttagaaaacca

SEQ ID NO: 768357 - DNA, 19 bp, Mus musculus
  siRNA target sequence for Cadps2 (NM_153163.2,2230-2248).
gagggtgccctaaaagcta

SEQ ID NO: 768358 - DNA, 19 bp, Mus musculus
  siRNA target sequence for Cadps2 (NM_153163.2,2344-2362).
gctgccttgatcaattaca

SEQ ID NO: 768359 - DNA, 19 bp, Mus musculus
  siRNA target sequence for Cadps2 (NM_153163.2,2347-2365).
gccttgatcaattacacta

SEQ ID NO: 768360 - DNA, 19 bp, Mus musculus
  siRNA target sequence for Cadps2 (NM_153163.2,2361-2379).
cactaggctcacagaatat

SEQ ID NO: 768361 - DNA, 19 bp, Mus musculus
  siRNA target sequence for Cadps2 (NM_153163.2,2555-2573).
ccgagcatgcagagaagtt

SEQ ID NO: 768362 - DNA, 19 bp, Mus musculus
  siRNA target sequence for Cadps2 (NM_153163.2,2556-2574).
cgagcatgcagagaagttt

SEQ ID NO: 768363 - DNA, 19 bp, Mus musculus
  siRNA target sequence for Cadps2 (NM_153163.2,2566-2584).
gagaagttttgggctttat

SEQ ID NO: 768364 - DNA, 19 bp, Mus musculus
  siRNA target sequence for Cadps2 (NM_153163.2,2571-2589).
gttttgggctttattcaca

SEQ ID NO: 768365 - DNA, 19 bp, Mus musculus
  siRNA target sequence for Cadps2 (NM_153163.2,2813-2831).
ggcagcctgtcaagaatat

SEQ ID NO: 768366 - DNA, 19 bp, Mus musculus
  siRNA target sequence for Cadps2 (NM_153163.2,2870-2888).
caagtctgcctcttaatct

SEQ ID NO: 768367 - DNA, 19 bp, Mus musculus
  siRNA target sequence for Cadps2 (NM_153163.2,2890-2908).
ccacagattcctagctttt

SEQ ID NO: 768368 - DNA, 19 bp, Mus musculus
  siRNA target sequence for Cadps2 (NM_153163.2,2893-2911).
cagattcctagcttttcta

SEQ ID NO: 768369 - DNA, 19 bp, Mus musculus
  siRNA target sequence for Cadps2 (NM_153163.2,2895-2913).
gattcctagcttttctact

SEQ ID NO: 768370 - DNA, 19 bp, Mus musculus
  siRNA target sequence for Cadps2 (NM_153163.2,2915-2933).
ctccgtggatggcttcttt

SEQ ID NO: 768371 - DNA, 19 bp, Mus musculus
  siRNA target sequence for Cadps2 (NM_153163.2,2917-2935).
ccgtggatggcttctttat

SEQ ID NO: 768372 - DNA, 19 bp, Mus musculus
  siRNA target sequence for Cadps2 (NM_153163.2,2918-2936).
cgtggatggcttctttata

SEQ ID NO: 768373 - DNA, 19 bp, Mus musculus
  siRNA target sequence for Cadps2 (NM_153163.2,2943-2961).
caccaatggctcaacaact

SEQ ID NO: 768374 - DNA, 19 bp, Mus musculus
  siRNA target sequence for Cadps2 (NM_153163.2,2957-2975).
caacttccgaggatctgtt

SEQ ID NO: 768375 - DNA, 19 bp, Mus musculus
  siRNA target sequence for Cadps2 (NM_153163.2,2983-3001).
ctcgatgcgctgcaaatgt

SEQ ID NO: 768376 - DNA, 19 bp, Mus musculus
  siRNA target sequence for Cadps2 (NM_153163.2,2994-3012).
gcaaatgttcgtctttgat

SEQ ID NO: 768377 - DNA, 19 bp, Mus musculus
  siRNA target sequence for Cadps2 (NM_153163.2,3064-3082).
ctaatggccagtgatatga

SEQ ID NO: 768378 - DNA, 19 bp, Mus musculus
  siRNA target sequence for Cadps2 (NM_153163.2,3081-3099).
gatagaggcgtgtgtcaaa

SEQ ID NO: 768379 - DNA, 19 bp, Mus musculus
  siRNA target sequence for Cadps2 (NM_153163.2,3085-3103).
gaggcgtgtgtcaaaagaa

SEQ ID NO: 768380 - DNA, 19 bp, Mus musculus
  siRNA target sequence for Cadps2 (NM_153163.2,3087-3105).
ggcgtgtgtcaaaagaaca

SEQ ID NO: 768381 - DNA, 19 bp, Mus musculus
  siRNA target sequence for Cadps2 (NM_153163.2,3107-3125).
gaactgcgttcgaactcaa

SEQ ID NO: 768382 - DNA, 19 bp, Mus musculus
  siRNA target sequence for Cadps2 (NM_153163.2,3166-3184).
gcttccgtgtgcacaatgt

SEQ ID NO: 768383 - DNA, 19 bp, Mus musculus
  siRNA target sequence for Cadps2 (NM_153163.2,3167-3185).
cttccgtgtgcacaatgtt

SEQ ID NO: 768384 - DNA, 19 bp, Mus musculus
  siRNA target sequence for Cadps2 (NM_153163.2,3170-3188).
ccgtgtgcacaatgtttaa

SEQ ID NO: 768385 - DNA, 19 bp, Mus musculus
  siRNA target sequence for Cadps2 (NM_153163.2,3171-3189).
cgtgtgcacaatgtttaat

SEQ ID NO: 768386 - DNA, 19 bp, Mus musculus
  siRNA target sequence for Cadps2 (NM_153163.2,3174-3192).
gtgcacaatgtttaatgta

SEQ ID NO: 768387 - DNA, 19 bp, Mus musculus
  siRNA target sequence for Cadps2 (NM_153163.2,3179-3197).
caatgtttaatgtattagt

SEQ ID NO: 768388 - DNA, 19 bp, Mus musculus
  siRNA target sequence for Cadps2 (NM_153163.2,3315-3333).
ggtttcaaagtttgtttca

SEQ ID NO: 768389 - DNA, 19 bp, Mus musculus
  siRNA target sequence for Cadps2 (NM_153163.2,3343-3361).
ggggtgctttcgaagttgt

SEQ ID NO: 768390 - DNA, 19 bp, Mus musculus
  siRNA target sequence for Cadps2 (NM_153163.2,3411-3429).
gaaagcagctgcaaaatat

SEQ ID NO: 768391 - DNA, 19 bp, Mus musculus
  siRNA target sequence for Cadps2 (NM_153163.2,3457-3475).
ctggcagacacctacatta

SEQ ID NO: 768392 - DNA, 19 bp, Mus musculus
  siRNA target sequence for Cadps2 (NM_153163.2,3550-3568).
caatggtacagcaattcca

SEQ ID NO: 768393 - DNA, 19 bp, Mus musculus
  siRNA target sequence for Cadps2 (NM_153163.2,3555-3573).
gtacagcaattccatgaaa

SEQ ID NO: 768394 - DNA, 19 bp, Mus musculus
  siRNA target sequence for Cadps2 (NM_153163.2,3561-3579).
caattccatgaaagtcatt

SEQ ID NO: 768395 - DNA, 19 bp, Mus musculus
  siRNA target sequence for Cadps2 (NM_153163.2,3691-3709).
gaggggacgctgaacagta

SEQ ID NO: 768396 - DNA, 19 bp, Mus musculus
  siRNA target sequence for Cadps2 (NM_153163.2,3694-3712).
gggacgctgaacagtaaga

SEQ ID NO: 768397 - DNA, 19 bp, Mus musculus
  siRNA target sequence for Cadps2 (NM_153163.2,3696-3714).
gacgctgaacagtaagaca

SEQ ID NO: 768398 - DNA, 19 bp, Mus musculus
  siRNA target sequence for Cadps2 (NM_153163.2,3699-3717).
gctgaacagtaagacatat

SEQ ID NO: 768399 - DNA, 19 bp, Mus musculus
  siRNA target sequence for Cadps2 (NM_153163.2,3702-3720).
gaacagtaagacatatgat

SEQ ID NO: 768400 - DNA, 19 bp, Mus musculus
  siRNA target sequence for Cadps2 (NM_153163.2,3726-3744).
gcacagacgtctaactgta

SEQ ID NO: 768401 - DNA, 19 bp, Mus musculus
  siRNA target sequence for 6030411K04Rik (NM_153164.1,66-84).
gcatcaggagcatgactta

SEQ ID NO: 768402 - DNA, 19 bp, Mus musculus
  siRNA target sequence for 6030411K04Rik (NM_153164.1,67-85).
catcaggagcatgacttaa

SEQ ID NO: 768403 - DNA, 19 bp, Mus musculus
  siRNA target sequence for 6030411K04Rik (NM_153164.1,72-90).
ggagcatgacttaaagtta

SEQ ID NO: 768404 - DNA, 19 bp, Mus musculus
  siRNA target sequence for 6030411K04Rik (NM_153164.1,73-91).
gagcatgacttaaagttaa

SEQ ID NO: 768405 - DNA, 19 bp, Mus musculus
  siRNA target sequence for 6030411K04Rik (NM_153164.1,117-135).
ctgtaagaaccttgcatta

SEQ ID NO: 768406 - DNA, 19 bp, Mus musculus
  siRNA target sequence for 6030411K04Rik (NM_153164.1,119-137).
gtaagaaccttgcattaga

SEQ ID NO: 768407 - DNA, 19 bp, Mus musculus
  siRNA target sequence for 6030411K04Rik (NM_153164.1,126-144).
ccttgcattagacatcaat

SEQ ID NO: 768408 - DNA, 19 bp, Mus musculus
  siRNA target sequence for 6030411K04Rik (NM_153164.1,332-350).
gctaccacgacatcaatgt

SEQ ID NO: 768409 - DNA, 19 bp, Mus musculus
  siRNA target sequence for 6030411K04Rik (NM_153164.1,362-380).
caggcctggcacctcatat

SEQ ID NO: 768410 - DNA, 19 bp, Mus musculus
  siRNA target sequence for 6030411K04Rik (NM_153164.1,364-382).
ggcctggcacctcatatta

SEQ ID NO: 768411 - DNA, 19 bp, Mus musculus
  siRNA target sequence for 6030411K04Rik (NM_153164.1,369-387).
ggcacctcatattactcta

SEQ ID NO: 768412 - DNA, 19 bp, Mus musculus
  siRNA target sequence for 6030411K04Rik (NM_153164.1,392-410).
ctacaatccctttatttca

SEQ ID NO: 768413 - DNA, 19 bp, Mus musculus
  siRNA target sequence for 6030411K04Rik (NM_153164.1,432-450).
gtgtgtgcggcaagcaatt

SEQ ID NO: 768414 - DNA, 19 bp, Mus musculus
  siRNA target sequence for 6030411K04Rik (NM_153164.1,438-456).
gcggcaagcaattgaaaga

SEQ ID NO: 768415 - DNA, 19 bp, Mus musculus
  siRNA target sequence for 6030411K04Rik (NM_153164.1,481-499).
gtggtggatcgctcaatta

SEQ ID NO: 768416 - DNA, 19 bp, Mus musculus
  siRNA target sequence for 6030411K04Rik (NM_153164.1,484-502).
gtggatcgctcaattaaga

SEQ ID NO: 768417 - DNA, 19 bp, Mus musculus
  siRNA target sequence for 6030411K04Rik (NM_153164.1,486-504).
ggatcgctcaattaagatt

SEQ ID NO: 768418 - DNA, 19 bp, Mus musculus
  siRNA target sequence for 6030411K04Rik (NM_153164.1,490-508).
cgctcaattaagattgcta

SEQ ID NO: 768419 - DNA, 19 bp, Mus musculus
  siRNA target sequence for 6030411K04Rik (NM_153164.1,512-530).
ctacgtgcgaacagatagt

SEQ ID NO: 768420 - DNA, 19 bp, Mus musculus
  siRNA target sequence for 6030411K04Rik (NM_153164.1,518-536).
gcgaacagatagtcagaaa

SEQ ID NO: 768421 - DNA, 19 bp, Mus musculus
  siRNA target sequence for 6030411K04Rik (NM_153164.1,572-590).
gaatagcagctcatcacat

SEQ ID NO: 768422 - DNA, 19 bp, Mus musculus
  siRNA target sequence for 6030411K04Rik (NM_153164.1,626-644).
cttgcagggaacctttact

SEQ ID NO: 768423 - DNA, 19 bp, Mus musculus
  siRNA target sequence for 6030411K04Rik (NM_153164.1,629-647).
gcagggaacctttactgat

SEQ ID NO: 768424 - DNA, 19 bp, Mus musculus
  siRNA target sequence for 6030411K04Rik (NM_153164.1,758-776).
gtgaattagcttgttgttt

SEQ ID NO: 768425 - DNA, 19 bp, Mus musculus
  siRNA target sequence for 6030411K04Rik (NM_153164.1,808-826).
cctgagatggacaagagat

SEQ ID NO: 768426 - DNA, 19 bp, Mus musculus
  siRNA target sequence for 6030411K04Rik (NM_153164.1,809-827).
ctgagatggacaagagatt

SEQ ID NO: 768427 - DNA, 19 bp, Mus musculus
  siRNA target sequence for 6030411K04Rik (NM_153164.1,824-842).
gattggcaactgaatttga

SEQ ID NO: 768428 - DNA, 19 bp, Mus musculus
  siRNA target sequence for 6030411K04Rik (NM_153164.1,924-942).
gcagatcaggctgaaagtt

SEQ ID NO: 768429 - DNA, 19 bp, Mus musculus
  siRNA target sequence for 6030411K04Rik (NM_153164.1,960-978).
gcagctagccgtctatgaa

SEQ ID NO: 768430 - DNA, 19 bp, Mus musculus
  siRNA target sequence for 6030411K04Rik (NM_153164.1,994-1012).
gtgcctggcttcttaccta

SEQ ID NO: 768431 - DNA, 19 bp, Mus musculus
  siRNA target sequence for 6030411K04Rik (NM_153164.1,1005-1023).
cttacctacaaatgactta

SEQ ID NO: 768432 - DNA, 19 bp, Mus musculus
  siRNA target sequence for 6030411K04Rik (NM_153164.1,1010-1028).
ctacaaatgacttaagtca

SEQ ID NO: 768433 - DNA, 19 bp, Mus musculus
  siRNA target sequence for 6030411K04Rik (NM_153164.1,1025-1043).
gtcagcctacagggttttt

SEQ ID NO: 768434 - DNA, 19 bp, Mus musculus
  siRNA target sequence for 6030411K04Rik (NM_153164.1,1029-1047).
gcctacagggtttttagct

SEQ ID NO: 768435 - DNA, 19 bp, Mus musculus
  siRNA target sequence for 6030411K04Rik (NM_153164.1,1059-1077).
gcaagcttgggcaactgat

SEQ ID NO: 768436 - DNA, 19 bp, Mus musculus
  siRNA target sequence for 6030411K04Rik (NM_153164.1,1064-1082).
cttgggcaactgatgatgt

SEQ ID NO: 768437 - DNA, 19 bp, Mus musculus
  siRNA target sequence for 6030411K04Rik (NM_153164.1,1075-1093).
gatgatgtagcgcagattt

SEQ ID NO: 768438 - DNA, 19 bp, Mus musculus
  siRNA target sequence for 6030411K04Rik (NM_153164.1,1081-1099).
gtagcgcagatttatgata

SEQ ID NO: 768439 - DNA, 19 bp, Mus musculus
  siRNA target sequence for 6030411K04Rik (NM_153164.1,1084-1102).
gcgcagatttatgataagt

SEQ ID NO: 768440 - DNA, 19 bp, Mus musculus
  siRNA target sequence for 6030411K04Rik (NM_153164.1,1086-1104).
gcagatttatgataagtgt

SEQ ID NO: 768441 - DNA, 19 bp, Mus musculus
  siRNA target sequence for 6030411K04Rik (NM_153164.1,1087-1105).
cagatttatgataagtgta

SEQ ID NO: 768442 - DNA, 19 bp, Mus musculus
  siRNA target sequence for 6030411K04Rik (NM_153164.1,1168-1186).
caggctctccgaagtcttt

SEQ ID NO: 768443 - DNA, 19 bp, Mus musculus
  siRNA target sequence for 6030411K04Rik (NM_153164.1,1172-1190).
ctctccgaagtcttttaga

SEQ ID NO: 768444 - DNA, 19 bp, Mus musculus
  siRNA target sequence for 6030411K04Rik (NM_153164.1,1181-1199).
gtcttttagaggttgtagt

SEQ ID NO: 768445 - DNA, 19 bp, Mus musculus
  siRNA target sequence for 6030411K04Rik (NM_153164.1,1223-1241).
cgatagctgctcttggatt

SEQ ID NO: 768446 - DNA, 19 bp, Mus musculus
  siRNA target sequence for 6030411K04Rik (NM_153164.1,1224-1242).
gatagctgctcttggatta

SEQ ID NO: 768447 - DNA, 19 bp, Mus musculus
  siRNA target sequence for 6030411K04Rik (NM_153164.1,1229-1247).
ctgctcttggattactaca

SEQ ID NO: 768448 - DNA, 19 bp, Mus musculus
  siRNA target sequence for 6030411K04Rik (NM_153164.1,1232-1250).
ctcttggattactacagaa

SEQ ID NO: 768449 - DNA, 19 bp, Mus musculus
  siRNA target sequence for 6030411K04Rik (NM_153164.1,1320-1338).
ccacctgttggtactgaaa

SEQ ID NO: 768450 - DNA, 19 bp, Mus musculus
  siRNA target sequence for 6030411K04Rik (NM_153164.1,1348-1366).
gatggcagggcatatggat

SEQ ID NO: 768451 - DNA, 19 bp, Mus musculus
  siRNA target sequence for 6030411K04Rik (NM_153164.1,1369-1387).
ccatggtgcaacaaacaaa

SEQ ID NO: 768452 - DNA, 19 bp, Mus musculus
  siRNA target sequence for 6030411K04Rik (NM_153164.1,1370-1388).
catggtgcaacaaacaaat

SEQ ID NO: 768453 - DNA, 19 bp, Mus musculus
  siRNA target sequence for 6030411K04Rik (NM_153164.1,1389-1407).
cacaaggtgcctaattgaa

SEQ ID NO: 768454 - DNA, 19 bp, Mus musculus
  siRNA target sequence for 6030411K04Rik (NM_153164.1,1409-1427).
gtcgagatgaatataaata

SEQ ID NO: 768455 - DNA, 19 bp, Mus musculus
  siRNA target sequence for 6030411K04Rik (NM_153164.1,1411-1429).
cgagatgaatataaatata

SEQ ID NO: 768456 - DNA, 19 bp, Mus musculus
  siRNA target sequence for 6030411K04Rik (NM_153164.1,1432-1450).
gtggaggctgtggaattgt

SEQ ID NO: 768457 - DNA, 19 bp, Mus musculus
  siRNA target sequence for 6030411K04Rik (NM_153164.1,1456-1474).
cgaaatcatttggttaaca

SEQ ID NO: 768458 - DNA, 19 bp, Mus musculus
  siRNA target sequence for 6030411K04Rik (NM_153164.1,1473-1491).
catgcagcagtatgatctt

SEQ ID NO: 768459 - DNA, 19 bp, Mus musculus
  siRNA target sequence for 6030411K04Rik (NM_153164.1,1509-1527).
ggagaatggcttgaactat

SEQ ID NO: 768460 - DNA, 19 bp, Mus musculus
  siRNA target sequence for 6030411K04Rik (NM_153164.1,1533-1551).
cgtggcgtttgctatgcaa

SEQ ID NO: 768461 - DNA, 19 bp, Mus musculus
  siRNA target sequence for 6030411K04Rik (NM_153164.1,1544-1562).
ctatgcaactggtaaaaat

SEQ ID NO: 768462 - DNA, 19 bp, Mus musculus
  siRNA target sequence for 6030411K04Rik (NM_153164.1,1581-1599).
gagtgttgcccatattact

SEQ ID NO: 768463 - DNA, 19 bp, Mus musculus
  siRNA target sequence for 6030411K04Rik (NM_153164.1,1629-1647).
cctcatgagaattaatgct

SEQ ID NO: 768464 - DNA, 19 bp, Mus musculus
  siRNA target sequence for 6030411K04Rik (NM_153164.1,1700-1718).
gatccaactatgaagcaat

SEQ ID NO: 768465 - DNA, 19 bp, Mus musculus
  siRNA target sequence for 6030411K04Rik (NM_153164.1,1730-1748).
ctcatggaggccctaactt

SEQ ID NO: 768466 - DNA, 19 bp, Mus musculus
  siRNA target sequence for 6030411K04Rik (NM_153164.1,1732-1750).
catggaggccctaacttta

SEQ ID NO: 768467 - DNA, 19 bp, Mus musculus
  siRNA target sequence for 6030411K04Rik (NM_153164.1,1735-1753).
ggaggccctaactttatga

SEQ ID NO: 768468 - DNA, 19 bp, Mus musculus
  siRNA target sequence for 6030411K04Rik (NM_153164.1,1736-1754).
gaggccctaactttatgat

SEQ ID NO: 768469 - DNA, 19 bp, Mus musculus
  siRNA target sequence for 6030411K04Rik (NM_153164.1,1741-1759).
cctaactttatgatgcatt

SEQ ID NO: 768470 - DNA, 19 bp, Mus musculus
  siRNA target sequence for 6030411K04Rik (NM_153164.1,1867-1885).
cgcgacagtaccaaagcat

SEQ ID NO: 768471 - DNA, 19 bp, Mus musculus
  siRNA target sequence for 6030411K04Rik (NM_153164.1,1905-1923).
gatgcaccaacaaggaata

SEQ ID NO: 768472 - DNA, 19 bp, Mus musculus
  siRNA target sequence for 6030411K04Rik (NM_153164.1,1911-1929).
ccaacaaggaatacttaaa

SEQ ID NO: 768473 - DNA, 19 bp, Mus musculus
  siRNA target sequence for 6030411K04Rik (NM_153164.1,1936-1954).
gacctcataacaaggtttt

SEQ ID NO: 768474 - DNA, 19 bp, Mus musculus
  siRNA target sequence for 6030411K04Rik (NM_153164.1,1941-1959).
cataacaaggttttttcgt

SEQ ID NO: 768475 - DNA, 19 bp, Mus musculus
  siRNA target sequence for 6030411K04Rik (NM_153164.1,1957-1975).
cgtctttgcactgaaatgt

SEQ ID NO: 768476 - DNA, 19 bp, Mus musculus
  siRNA target sequence for 6030411K04Rik (NM_153164.1,2079-2097).
ccgcctcattgcactgtta

SEQ ID NO: 768477 - DNA, 19 bp, Mus musculus
  siRNA target sequence for 6030411K04Rik (NM_153164.1,2139-2157).
caacctgctcaataaggtt

SEQ ID NO: 768478 - DNA, 19 bp, Mus musculus
  siRNA target sequence for 6030411K04Rik (NM_153164.1,2181-2199).
cctacaggatcatgatgtt

SEQ ID NO: 768479 - DNA, 19 bp, Mus musculus
  siRNA target sequence for 6030411K04Rik (NM_153164.1,2215-2233).
cagcaacttccgtaccata

SEQ ID NO: 768480 - DNA, 19 bp, Mus musculus
  siRNA target sequence for 6030411K04Rik (NM_153164.1,2221-2239).
cttccgtaccataggattt

SEQ ID NO: 768481 - DNA, 19 bp, Mus musculus
  siRNA target sequence for 6030411K04Rik (NM_153164.1,2224-2242).
ccgtaccataggattttta

SEQ ID NO: 768482 - DNA, 19 bp, Mus musculus
  siRNA target sequence for 6030411K04Rik (NM_153164.1,2269-2287).
cccgagcatgtgttggaaa

SEQ ID NO: 768483 - DNA, 19 bp, Mus musculus
  siRNA target sequence for 6030411K04Rik (NM_153164.1,2331-2349).
catcttgagacctactaaa

SEQ ID NO: 768484 - DNA, 19 bp, Mus musculus
  siRNA target sequence for 6030411K04Rik (NM_153164.1,2334-2352).
cttgagacctactaaagct

SEQ ID NO: 768485 - DNA, 19 bp, Mus musculus
  siRNA target sequence for 6030411K04Rik (NM_153164.1,2368-2386).
gcttggctcgaattgattt

SEQ ID NO: 768486 - DNA, 19 bp, Mus musculus
  siRNA target sequence for 6030411K04Rik (NM_153164.1,2388-2406).
ccatcggatctttattgca

SEQ ID NO: 768487 - DNA, 19 bp, Mus musculus
  siRNA target sequence for 6030411K04Rik (NM_153164.1,2389-2407).
catcggatctttattgcaa

SEQ ID NO: 768488 - DNA, 19 bp, Mus musculus
  siRNA target sequence for 6030411K04Rik (NM_153164.1,2393-2411).
ggatctttattgcaagaat

SEQ ID NO: 768489 - DNA, 19 bp, Mus musculus
  siRNA target sequence for 6030411K04Rik (NM_153164.1,2557-2575).
ctggttcttttgcatgatt

SEQ ID NO: 768490 - DNA, 19 bp, Mus musculus
  siRNA target sequence for 6030411K04Rik (NM_153164.1,2583-2601).
gttcctttgtgattaccat

SEQ ID NO: 768491 - DNA, 19 bp, Mus musculus
  siRNA target sequence for 6030411K04Rik (NM_153164.1,2617-2635).
gtgatccctcctaattgta

SEQ ID NO: 768492 - DNA, 19 bp, Mus musculus
  siRNA target sequence for 6030411K04Rik (NM_153164.1,2626-2644).
cctaattgtatccagttaa

SEQ ID NO: 768493 - DNA, 19 bp, Mus musculus
  siRNA target sequence for 6030411K04Rik (NM_153164.1,2693-2711).
cattcactcctaatctgaa

SEQ ID NO: 768494 - DNA, 19 bp, Mus musculus
  siRNA target sequence for 6030411K04Rik (NM_153164.1,2746-2764).
cggatcctcaccaatttca

SEQ ID NO: 768495 - DNA, 19 bp, Mus musculus
  siRNA target sequence for 6030411K04Rik (NM_153164.1,2777-2795).
cgcctcagttcaaaaagga

SEQ ID NO: 768496 - DNA, 19 bp, Mus musculus
  siRNA target sequence for 6030411K04Rik (NM_153164.1,2778-2796).
gcctcagttcaaaaaggat

SEQ ID NO: 768497 - DNA, 19 bp, Mus musculus
  siRNA target sequence for 6030411K04Rik (NM_153164.1,2779-2797).
cctcagttcaaaaaggatt

SEQ ID NO: 768498 - DNA, 19 bp, Mus musculus
  siRNA target sequence for 6030411K04Rik (NM_153164.1,2816-2834).
ctcggtcgccggtcacttt

SEQ ID NO: 768499 - DNA, 19 bp, Mus musculus
  siRNA target sequence for 6030411K04Rik (NM_153164.1,2885-2903).
gctacaacctccagcttat

SEQ ID NO: 768500 - DNA, 19 bp, Mus musculus
  siRNA target sequence for 6030411K04Rik (NM_153164.1,2889-2907).
caacctccagcttatcaat

SEQ ID NO: 768501 - DNA, 19 bp, Mus musculus
  siRNA target sequence for 6030411K04Rik (NM_153164.1,3042-3060).
gggccgatatctcttctta

SEQ ID NO: 768502 - DNA, 19 bp, Mus musculus
  siRNA target sequence for 6030411K04Rik (NM_153164.1,3043-3061).
ggccgatatctcttcttaa

SEQ ID NO: 768503 - DNA, 19 bp, Mus musculus
  siRNA target sequence for 6030411K04Rik (NM_153164.1,3044-3062).
gccgatatctcttcttaaa

SEQ ID NO: 768504 - DNA, 19 bp, Mus musculus
  siRNA target sequence for 6030411K04Rik (NM_153164.1,3045-3063).
ccgatatctcttcttaaat

SEQ ID NO: 768505 - DNA, 19 bp, Mus musculus
  siRNA target sequence for Cpne5 (NM_153166.1,246-264).
ctcaagggatggagaacaa

SEQ ID NO: 768506 - DNA, 19 bp, Mus musculus
  siRNA target sequence for Cpne5 (NM_153166.1,282-300).
gacgcaccgaggtcataga

SEQ ID NO: 768507 - DNA, 19 bp, Mus musculus
  siRNA target sequence for Cpne5 (NM_153166.1,284-302).
cgcaccgaggtcatagata

SEQ ID NO: 768508 - DNA, 19 bp, Mus musculus
  siRNA target sequence for Cpne5 (NM_153166.1,285-303).
gcaccgaggtcatagataa

SEQ ID NO: 768509 - DNA, 19 bp, Mus musculus
  siRNA target sequence for Cpne5 (NM_153166.1,327-345).
gcaagttcattgtggatta

SEQ ID NO: 768510 - DNA, 19 bp, Mus musculus
  siRNA target sequence for Cpne5 (NM_153166.1,334-352).
cattgtggattacttcttt

SEQ ID NO: 768511 - DNA, 19 bp, Mus musculus
  siRNA target sequence for Cpne5 (NM_153166.1,361-379).
gcagaacctccgctttgat

SEQ ID NO: 768512 - DNA, 19 bp, Mus musculus
  siRNA target sequence for Cpne5 (NM_153166.1,397-415).
caagagcccggatctatct

SEQ ID NO: 768513 - DNA, 19 bp, Mus musculus
  siRNA target sequence for Cpne5 (NM_153166.1,400-418).
gagcccggatctatctaaa

SEQ ID NO: 768514 - DNA, 19 bp, Mus musculus
  siRNA target sequence for Cpne5 (NM_153166.1,494-512).
ctcacgataggaacattca

SEQ ID NO: 768515 - DNA, 19 bp, Mus musculus
  siRNA target sequence for Cpne5 (NM_153166.1,926-944).
cagagtcagttcaacatct

SEQ ID NO: 768516 - DNA, 19 bp, Mus musculus
  siRNA target sequence for Cpne5 (NM_153166.1,930-948).
gtcagttcaacatctatga

SEQ ID NO: 768517 - DNA, 19 bp, Mus musculus
  siRNA target sequence for Cpne5 (NM_153166.1,940-958).
catctatgaggtgataaat

SEQ ID NO: 768518 - DNA, 19 bp, Mus musculus
  siRNA target sequence for Cpne5 (NM_153166.1,943-961).
ctatgaggtgataaatcca

SEQ ID NO: 768519 - DNA, 19 bp, Mus musculus
  siRNA target sequence for Cpne5 (NM_153166.1,947-965).
gaggtgataaatccaaaaa

SEQ ID NO: 768520 - DNA, 19 bp, Mus musculus
  siRNA target sequence for Cpne5 (NM_153166.1,1128-1146).
ccacgtccctccactacat

SEQ ID NO: 768521 - DNA, 19 bp, Mus musculus
  siRNA target sequence for Cpne5 (NM_153166.1,1186-1204).
cgccgtcggagagatcatt

SEQ ID NO: 768522 - DNA, 19 bp, Mus musculus
  siRNA target sequence for Cpne5 (NM_153166.1,1510-1528).
ggaggcaattgtaaatgct

SEQ ID NO: 768523 - DNA, 19 bp, Mus musculus
  siRNA target sequence for Cpne5 (NM_153166.1,1535-1553).
ctccctatgtcgatcatca

SEQ ID NO: 768524 - DNA, 19 bp, Mus musculus
  siRNA target sequence for Cpne5 (NM_153166.1,1537-1555).
ccctatgtcgatcatcatt

SEQ ID NO: 768525 - DNA, 19 bp, Mus musculus
  siRNA target sequence for Cpne5 (NM_153166.1,1751-1769).
caactggtgtcctacatga

SEQ ID NO: 768526 - DNA, 19 bp, Mus musculus
  siRNA target sequence for Cpne5 (NM_153166.1,1856-1874).
cccgtgcacacgcatatct

SEQ ID NO: 768527 - DNA, 19 bp, Mus musculus
  siRNA target sequence for AA959934 (NM_153167.1,594-612).
gctgacagtcgcttgtgaa

SEQ ID NO: 768528 - DNA, 19 bp, Mus musculus
  siRNA target sequence for AA959934 (NM_153167.1,608-626).
gtgaacagactgaagttct

SEQ ID NO: 768529 - DNA, 19 bp, Mus musculus
  siRNA target sequence for AA959934 (NM_153167.1,625-643).
ctgctttttgaccctatat

SEQ ID NO: 768530 - DNA, 19 bp, Mus musculus
  siRNA target sequence for AA959934 (NM_153167.1,676-694).
catgaagattgtgtgaata

SEQ ID NO: 768531 - DNA, 19 bp, Mus musculus
  siRNA target sequence for AA959934 (NM_153167.1,679-697).
gaagattgtgtgaataata

SEQ ID NO: 768532 - DNA, 19 bp, Mus musculus
  siRNA target sequence for AA959934 (NM_153167.1,682-700).
gattgtgtgaataatatca

SEQ ID NO: 768533 - DNA, 19 bp, Mus musculus
  siRNA target sequence for AA959934 (NM_153167.1,709-727).
gataaccggctctttgcta

SEQ ID NO: 768534 - DNA, 19 bp, Mus musculus
  siRNA target sequence for AA959934 (NM_153167.1,777-795).
caccaaagtatgcacttta

SEQ ID NO: 768535 - DNA, 19 bp, Mus musculus
  siRNA target sequence for AA959934 (NM_153167.1,779-797).
ccaaagtatgcactttaca

SEQ ID NO: 768536 - DNA, 19 bp, Mus musculus
  siRNA target sequence for AA959934 (NM_153167.1,780-798).
caaagtatgcactttacat

SEQ ID NO: 768537 - DNA, 19 bp, Mus musculus
  siRNA target sequence for AA959934 (NM_153167.1,812-830).
gggtgaagaacatcgaata

SEQ ID NO: 768538 - DNA, 19 bp, Mus musculus
  siRNA target sequence for AA959934 (NM_153167.1,816-834).
gaagaacatcgaatatgat

SEQ ID NO: 768539 - DNA, 19 bp, Mus musculus
  siRNA target sequence for AA959934 (NM_153167.1,822-840).
catcgaatatgatactaat

SEQ ID NO: 768540 - DNA, 19 bp, Mus musculus
  siRNA target sequence for AA959934 (NM_153167.1,825-843).
cgaatatgatactaataca

SEQ ID NO: 768541 - DNA, 19 bp, Mus musculus
  siRNA target sequence for AA959934 (NM_153167.1,836-854).
ctaatacaagactcttagt

SEQ ID NO: 768542 - DNA, 19 bp, Mus musculus
  siRNA target sequence for AA959934 (NM_153167.1,849-867).
cttagtaacatcaggattt

SEQ ID NO: 768543 - DNA, 19 bp, Mus musculus
  siRNA target sequence for AA959934 (NM_153167.1,868-886).
gatggaaatgtcattattt

SEQ ID NO: 768544 - DNA, 19 bp, Mus musculus
  siRNA target sequence for AA959934 (NM_153167.1,913-931).
gggtgtccacataagaaat

SEQ ID NO: 768545 - DNA, 19 bp, Mus musculus
  siRNA target sequence for AA959934 (NM_153167.1,917-935).
gtccacataagaaattctt

SEQ ID NO: 768546 - DNA, 19 bp, Mus musculus
  siRNA target sequence for AA959934 (NM_153167.1,943-961).
cgttttctcatgagaatga

SEQ ID NO: 768547 - DNA, 19 bp, Mus musculus
  siRNA target sequence for AA959934 (NM_153167.1,960-978).
gagattaacaccagattgt

SEQ ID NO: 768548 - DNA, 19 bp, Mus musculus
  siRNA target sequence for AA959934 (NM_153167.1,1023-1041).
gcatgagctggacttaact

SEQ ID NO: 768549 - DNA, 19 bp, Mus musculus
  siRNA target sequence for AA959934 (NM_153167.1,1024-1042).
catgagctggacttaacta

SEQ ID NO: 768550 - DNA, 19 bp, Mus musculus
  siRNA target sequence for AA959934 (NM_153167.1,1029-1047).
gctggacttaactaagtct

SEQ ID NO: 768551 - DNA, 19 bp, Mus musculus
  siRNA target sequence for AA959934 (NM_153167.1,1030-1048).
ctggacttaactaagtctt

SEQ ID NO: 768552 - DNA, 19 bp, Mus musculus
  siRNA target sequence for AA959934 (NM_153167.1,1035-1053).
cttaactaagtctttagaa

SEQ ID NO: 768553 - DNA, 19 bp, Mus musculus
  siRNA target sequence for AA959934 (NM_153167.1,1057-1075).
ggcagctatcccattttga

SEQ ID NO: 768554 - DNA, 19 bp, Mus musculus
  siRNA target sequence for AA959934 (NM_153167.1,1088-1106).
ctacttcaagttcagattt

SEQ ID NO: 768555 - DNA, 19 bp, Mus musculus
  siRNA target sequence for AA959934 (NM_153167.1,1156-1174).
catcacaatgattcaaatt

SEQ ID NO: 768556 - DNA, 19 bp, Mus musculus
  siRNA target sequence for AA959934 (NM_153167.1,1213-1231).
ggagtttcaccacgaaata

SEQ ID NO: 768557 - DNA, 19 bp, Mus musculus
  siRNA target sequence for AA959934 (NM_153167.1,1223-1241).
cacgaaatagtcttgaagt

SEQ ID NO: 768558 - DNA, 19 bp, Mus musculus
  siRNA target sequence for AA959934 (NM_153167.1,1266-1284).
gagagatcggggaaactgt

SEQ ID NO: 768559 - DNA, 19 bp, Mus musculus
  siRNA target sequence for AA959934 (NM_153167.1,1268-1286).
gagatcggggaaactgtat

SEQ ID NO: 768560 - DNA, 19 bp, Mus musculus
  siRNA target sequence for AA959934 (NM_153167.1,1421-1439).
ccctgcggttgactcatta

SEQ ID NO: 768561 - DNA, 19 bp, Mus musculus
  siRNA target sequence for AA959934 (NM_153167.1,1425-1443).
gcggttgactcattacatt

SEQ ID NO: 768562 - DNA, 19 bp, Mus musculus
  siRNA target sequence for AA959934 (NM_153167.1,1427-1445).
ggttgactcattacattga

SEQ ID NO: 768563 - DNA, 19 bp, Mus musculus
  siRNA target sequence for AA959934 (NM_153167.1,1458-1476).
gggcaggggctacatcaaa

SEQ ID NO: 768564 - DNA, 19 bp, Mus musculus
  siRNA target sequence for AA959934 (NM_153167.1,1465-1483).
ggctacatcaaagaacttt

SEQ ID NO: 768565 - DNA, 19 bp, Mus musculus
  siRNA target sequence for AA959934 (NM_153167.1,1490-1508).
gccctgatggacgaatgat

SEQ ID NO: 768566 - DNA, 19 bp, Mus musculus
  siRNA target sequence for AA959934 (NM_153167.1,1491-1509).
ccctgatggacgaatgatt

SEQ ID NO: 768567 - DNA, 19 bp, Mus musculus
  siRNA target sequence for AA959934 (NM_153167.1,1495-1513).
gatggacgaatgatttctt

SEQ ID NO: 768568 - DNA, 19 bp, Mus musculus
  siRNA target sequence for AA959934 (NM_153167.1,1534-1552).
cgcttgttgggatttgaca

SEQ ID NO: 768569 - DNA, 19 bp, Mus musculus
  siRNA target sequence for AA959934 (NM_153167.1,1535-1553).
gcttgttgggatttgacaa

SEQ ID NO: 768570 - DNA, 19 bp, Mus musculus
  siRNA target sequence for AA959934 (NM_153167.1,1536-1554).
cttgttgggatttgacaaa

SEQ ID NO: 768571 - DNA, 19 bp, Mus musculus
  siRNA target sequence for AA959934 (NM_153167.1,1597-1615).
cccctgcgggtgattcgtt

SEQ ID NO: 768572 - DNA, 19 bp, Mus musculus
  siRNA target sequence for AA959934 (NM_153167.1,1612-1630).
cgttctctgtactctcata

SEQ ID NO: 768573 - DNA, 19 bp, Mus musculus
  siRNA target sequence for AA959934 (NM_153167.1,1613-1631).
gttctctgtactctcataa

SEQ ID NO: 768574 - DNA, 19 bp, Mus musculus
  siRNA target sequence for AA959934 (NM_153167.1,1616-1634).
ctctgtactctcataatga

SEQ ID NO: 768575 - DNA, 19 bp, Mus musculus
  siRNA target sequence for AA959934 (NM_153167.1,1633-1651).
gacgtggttctgacaacaa

SEQ ID NO: 768576 - DNA, 19 bp, Mus musculus
  siRNA target sequence for AA959934 (NM_153167.1,1639-1657).
gttctgacaacaaagttct

SEQ ID NO: 768577 - DNA, 19 bp, Mus musculus
  siRNA target sequence for AA959934 (NM_153167.1,1694-1712).
gtggacgggtctctttgta

SEQ ID NO: 768578 - DNA, 19 bp, Mus musculus
  siRNA target sequence for AA959934 (NM_153167.1,1697-1715).
gacgggtctctttgtatca

SEQ ID NO: 768579 - DNA, 19 bp, Mus musculus
  siRNA target sequence for Lars2 (NM_153168.1,200-218).
gtcagaggctgagtttcta

SEQ ID NO: 768580 - DNA, 19 bp, Mus musculus
  siRNA target sequence for Lars2 (NM_153168.1,264-282).
cctgtgggaaagactaatt

SEQ ID NO: 768581 - DNA, 19 bp, Mus musculus
  siRNA target sequence for Lars2 (NM_153168.1,284-302).
cagggtgttccagaagtat

SEQ ID NO: 768582 - DNA, 19 bp, Mus musculus
  siRNA target sequence for Lars2 (NM_153168.1,287-305).
ggtgttccagaagtatcta

SEQ ID NO: 768583 - DNA, 19 bp, Mus musculus
  siRNA target sequence for Lars2 (NM_153168.1,366-384).
gtggtggcaccaacagata

SEQ ID NO: 768584 - DNA, 19 bp, Mus musculus
  siRNA target sequence for Lars2 (NM_153168.1,403-421).
gtctcagaggaagataaat

SEQ ID NO: 768585 - DNA, 19 bp, Mus musculus
  siRNA target sequence for Lars2 (NM_153168.1,536-554).
gaggcatgcaggttatcaa

SEQ ID NO: 768586 - DNA, 19 bp, Mus musculus
  siRNA target sequence for Lars2 (NM_153168.1,596-614).
ctgccatagagaggaattt

SEQ ID NO: 768587 - DNA, 19 bp, Mus musculus
  siRNA target sequence for Lars2 (NM_153168.1,707-725).
ctacatgtttgccagatta

SEQ ID NO: 768588 - DNA, 19 bp, Mus musculus
  siRNA target sequence for Lars2 (NM_153168.1,713-731).
gtttgccagattactacaa

SEQ ID NO: 768589 - DNA, 19 bp, Mus musculus
  siRNA target sequence for Lars2 (NM_153168.1,718-736).
ccagattactacaaatgga

SEQ ID NO: 768590 - DNA, 19 bp, Mus musculus
  siRNA target sequence for Lars2 (NM_153168.1,734-752).
ggactcaatacctgtttat

SEQ ID NO: 768591 - DNA, 19 bp, Mus musculus
  siRNA target sequence for Lars2 (NM_153168.1,747-765).
gtttatcaaactctatgaa

SEQ ID NO: 768592 - DNA, 19 bp, Mus musculus
  siRNA target sequence for Lars2 (NM_153168.1,766-784).
gcaggactggcctatcaaa

SEQ ID NO: 768593 - DNA, 19 bp, Mus musculus
  siRNA target sequence for Lars2 (NM_153168.1,767-785).
caggactggcctatcaaaa

SEQ ID NO: 768594 - DNA, 19 bp, Mus musculus
  siRNA target sequence for Lars2 (NM_153168.1,894-912).
cctccgacagtggttcatt

SEQ ID NO: 768595 - DNA, 19 bp, Mus musculus
  siRNA target sequence for Lars2 (NM_153168.1,895-913).
ctccgacagtggttcatta

SEQ ID NO: 768596 - DNA, 19 bp, Mus musculus
  siRNA target sequence for Lars2 (NM_153168.1,898-916).
cgacagtggttcattaaga

SEQ ID NO: 768597 - DNA, 19 bp, Mus musculus
  siRNA target sequence for Lars2 (NM_153168.1,901-919).
cagtggttcattaagacaa

SEQ ID NO: 768598 - DNA, 19 bp, Mus musculus
  siRNA target sequence for Lars2 (NM_153168.1,962-980).
cagagtggtacggaatcaa

SEQ ID NO: 768599 - DNA, 19 bp, Mus musculus
  siRNA target sequence for Lars2 (NM_153168.1,1021-1039).
cacctggacttcacattaa

SEQ ID NO: 768600 - DNA, 19 bp, Mus musculus
  siRNA target sequence for Lars2 (NM_153168.1,1026-1044).
ggacttcacattaaaggtt

SEQ ID NO: 768601 - DNA, 19 bp, Mus musculus
  siRNA target sequence for Lars2 (NM_153168.1,1065-1083).
gaaattgacagcatacaca

SEQ ID NO: 768602 - DNA, 19 bp, Mus musculus
  siRNA target sequence for Lars2 (NM_153168.1,1243-1261).
caggaggtccccatcgtta

SEQ ID NO: 768603 - DNA, 19 bp, Mus musculus
  siRNA target sequence for Lars2 (NM_153168.1,1246-1264).
gaggtccccatcgttatca

SEQ ID NO: 768604 - DNA, 19 bp, Mus musculus
  siRNA target sequence for Lars2 (NM_153168.1,1282-1300).
gaaggctctctagattcaa

SEQ ID NO: 768605 - DNA, 19 bp, Mus musculus
  siRNA target sequence for Lars2 (NM_153168.1,1291-1309).
ctagattcaaaaataggaa

SEQ ID NO: 768606 - DNA, 19 bp, Mus musculus
  siRNA target sequence for Lars2 (NM_153168.1,1489-1507).
ggtggacacgtgacaagta

SEQ ID NO: 768607 - DNA, 19 bp, Mus musculus
  siRNA target sequence for Lars2 (NM_153168.1,1490-1508).
gtggacacgtgacaagtaa

SEQ ID NO: 768608 - DNA, 19 bp, Mus musculus
  siRNA target sequence for Lars2 (NM_153168.1,1492-1510).
ggacacgtgacaagtaaca

SEQ ID NO: 768609 - DNA, 19 bp, Mus musculus
  siRNA target sequence for Lars2 (NM_153168.1,1493-1511).
gacacgtgacaagtaacaa

SEQ ID NO: 768610 - DNA, 19 bp, Mus musculus
  siRNA target sequence for Lars2 (NM_153168.1,1605-1623).
gcaagacttgcctgtgatt

SEQ ID NO: 768611 - DNA, 19 bp, Mus musculus
  siRNA target sequence for Lars2 (NM_153168.1,1606-1624).
caagacttgcctgtgattt

SEQ ID NO: 768612 - DNA, 19 bp, Mus musculus
  siRNA target sequence for Lars2 (NM_153168.1,1763-1781).
cgtggtactacttcagata

SEQ ID NO: 768613 - DNA, 19 bp, Mus musculus
  siRNA target sequence for Lars2 (NM_153168.1,1767-1785).
gtactacttcagatacact

SEQ ID NO: 768614 - DNA, 19 bp, Mus musculus
  siRNA target sequence for Lars2 (NM_153168.1,1782-1800).
cactgaccctcataatact

SEQ ID NO: 768615 - DNA, 19 bp, Mus musculus
  siRNA target sequence for Lars2 (NM_153168.1,1784-1802).
ctgaccctcataatactca

SEQ ID NO: 768616 - DNA, 19 bp, Mus musculus
  siRNA target sequence for Lars2 (NM_153168.1,1786-1804).
gaccctcataatactcaaa

SEQ ID NO: 768617 - DNA, 19 bp, Mus musculus
  siRNA target sequence for Lars2 (NM_153168.1,1835-1853).
ggatgcccgtggatctgta

SEQ ID NO: 768618 - DNA, 19 bp, Mus musculus
  siRNA target sequence for Lars2 (NM_153168.1,1851-1869).
gtacatcggaggaaaggaa

SEQ ID NO: 768619 - DNA, 19 bp, Mus musculus
  siRNA target sequence for Lars2 (NM_153168.1,1874-1892).
ctgtcatgcacttgttcta

SEQ ID NO: 768620 - DNA, 19 bp, Mus musculus
  siRNA target sequence for Lars2 (NM_153168.1,1894-1912).
gcacgattcctcagtcatt

SEQ ID NO: 768621 - DNA, 19 bp, Mus musculus
  siRNA target sequence for Lars2 (NM_153168.1,1895-1913).
cacgattcctcagtcattt

SEQ ID NO: 768622 - DNA, 19 bp, Mus musculus
  siRNA target sequence for Lars2 (NM_153168.1,1897-1915).
cgattcctcagtcattttt

SEQ ID NO: 768623 - DNA, 19 bp, Mus musculus
  siRNA target sequence for Lars2 (NM_153168.1,1941-1959).
cagggaacctttccataaa

SEQ ID NO: 768624 - DNA, 19 bp, Mus musculus
  siRNA target sequence for Lars2 (NM_153168.1,2025-2043).
ggaggatatagatttcaca

SEQ ID NO: 768625 - DNA, 19 bp, Mus musculus
  siRNA target sequence for Lars2 (NM_153168.1,2197-2215).
cctgagaaggacatcttgt

SEQ ID NO: 768626 - DNA, 19 bp, Mus musculus
  siRNA target sequence for Lars2 (NM_153168.1,2211-2229).
cttgtgggatgtaaagact

SEQ ID NO: 768627 - DNA, 19 bp, Mus musculus
  siRNA target sequence for Lars2 (NM_153168.1,2364-2382).
cctctgggagtacaaaaat

SEQ ID NO: 768628 - DNA, 19 bp, Mus musculus
  siRNA target sequence for Lars2 (NM_153168.1,2367-2385).
ctgggagtacaaaaatgca

SEQ ID NO: 768629 - DNA, 19 bp, Mus musculus
  siRNA target sequence for Lars2 (NM_153168.1,2373-2391).
gtacaaaaatgcagtcata

SEQ ID NO: 768630 - DNA, 19 bp, Mus musculus
  siRNA target sequence for Lars2 (NM_153168.1,2395-2413).
caggtgaccactcatttca

SEQ ID NO: 768631 - DNA, 19 bp, Mus musculus
  siRNA target sequence for Lars2 (NM_153168.1,2397-2415).
ggtgaccactcatttcaca

SEQ ID NO: 768632 - DNA, 19 bp, Mus musculus
  siRNA target sequence for Lars2 (NM_153168.1,2606-2624).
gcaagctctgtgaccatta

SEQ ID NO: 768633 - DNA, 19 bp, Mus musculus
  siRNA target sequence for Lars2 (NM_153168.1,2858-2876).
ccaggactgccctcatcaa

SEQ ID NO: 768634 - DNA, 19 bp, Mus musculus
  siRNA target sequence for Lars2 (NM_153168.1,2861-2879).
ggactgccctcatcaactt

SEQ ID NO: 768635 - DNA, 19 bp, Mus musculus
  siRNA target sequence for Ian6 (NM_153175.2,122-140).
gggtccatcggctcatgtt

SEQ ID NO: 768636 - DNA, 19 bp, Mus musculus
  siRNA target sequence for Ian6 (NM_153175.2,150-168).
cttttccctggccattcta

SEQ ID NO: 768637 - DNA, 19 bp, Mus musculus
  siRNA target sequence for Ian6 (NM_153175.2,179-197).
cagagaatctacatttcga

SEQ ID NO: 768638 - DNA, 19 bp, Mus musculus
  siRNA target sequence for Ian6 (NM_153175.2,472-490).
gcaagcctttgaatccaaa

SEQ ID NO: 768639 - DNA, 19 bp, Mus musculus
  siRNA target sequence for Ian6 (NM_153175.2,716-734).
ctccaggagatctttggaa

SEQ ID NO: 768640 - DNA, 19 bp, Mus musculus
  siRNA target sequence for Ian6 (NM_153175.2,790-808).
gggctccttagaagaatat

SEQ ID NO: 768641 - DNA, 19 bp, Mus musculus
  siRNA target sequence for Ian6 (NM_153175.2,795-813).
ccttagaagaatatattca

SEQ ID NO: 768642 - DNA, 19 bp, Mus musculus
  siRNA target sequence for Ian6 (NM_153175.2,796-814).
cttagaagaatatattcaa

SEQ ID NO: 768643 - DNA, 19 bp, Mus musculus
  siRNA target sequence for Ian6 (NM_153175.2,909-927).
cccagttgaagaaacttat

SEQ ID NO: 768644 - DNA, 19 bp, Mus musculus
  siRNA target sequence for Ian6 (NM_153175.2,929-947).
gaggaagtcgaattgatct

SEQ ID NO: 768645 - DNA, 19 bp, Mus musculus
  siRNA target sequence for Ian6 (NM_153175.2,973-991).
caccatggaatttccaaat

SEQ ID NO: 768646 - DNA, 19 bp, Mus musculus
  siRNA target sequence for Eif2c4 (NM_153177.1,64-82).
ggaaccgttgggaaaccaa

SEQ ID NO: 768647 - DNA, 19 bp, Mus musculus
  siRNA target sequence for Eif2c4 (NM_153177.1,65-83).
gaaccgttgggaaaccaat

SEQ ID NO: 768648 - DNA, 19 bp, Mus musculus
  siRNA target sequence for Eif2c4 (NM_153177.1,69-87).
cgttgggaaaccaattcga

SEQ ID NO: 768649 - DNA, 19 bp, Mus musculus
  siRNA target sequence for Eif2c4 (NM_153177.1,75-93).
gaaaccaattcgactgtta

SEQ ID NO: 768650 - DNA, 19 bp, Mus musculus
  siRNA target sequence for Eif2c4 (NM_153177.1,85-103).
cgactgttagccaatcatt

SEQ ID NO: 768651 - DNA, 19 bp, Mus musculus
  siRNA target sequence for Eif2c4 (NM_153177.1,185-203).
gggaggtggtagacactat

SEQ ID NO: 768652 - DNA, 19 bp, Mus musculus
  siRNA target sequence for Eif2c4 (NM_153177.1,200-218).
ctatggtgcggcacttcaa

SEQ ID NO: 768653 - DNA, 19 bp, Mus musculus
  siRNA target sequence for Eif2c4 (NM_153177.1,247-265).
ggctacgatggcaaaagaa

SEQ ID NO: 768654 - DNA, 19 bp, Mus musculus
  siRNA target sequence for Eif2c4 (NM_153177.1,248-266).
gctacgatggcaaaagaaa

SEQ ID NO: 768655 - DNA, 19 bp, Mus musculus
  siRNA target sequence for Eif2c4 (NM_153177.1,290-308).
caatcggacgggataggat

SEQ ID NO: 768656 - DNA, 19 bp, Mus musculus
  siRNA target sequence for Eif2c4 (NM_153177.1,294-312).
cggacgggataggattgat

SEQ ID NO: 768657 - DNA, 19 bp, Mus musculus
  siRNA target sequence for Eif2c4 (NM_153177.1,295-313).
ggacgggataggattgata

SEQ ID NO: 768658 - DNA, 19 bp, Mus musculus
  siRNA target sequence for Eif2c4 (NM_153177.1,296-314).
gacgggataggattgatat

SEQ ID NO: 768659 - DNA, 19 bp, Mus musculus
  siRNA target sequence for Eif2c4 (NM_153177.1,299-317).
gggataggattgatatgga

SEQ ID NO: 768660 - DNA, 19 bp, Mus musculus
  siRNA target sequence for Eif2c4 (NM_153177.1,396-414).
gcttttagaagctttagca

SEQ ID NO: 768661 - DNA, 19 bp, Mus musculus
  siRNA target sequence for Eif2c4 (NM_153177.1,413-431).
caggacacctgaatgaagt

SEQ ID NO: 768662 - DNA, 19 bp, Mus musculus
  siRNA target sequence for Eif2c4 (NM_153177.1,443-461).
cagtacaagcacttgatgt

SEQ ID NO: 768663 - DNA, 19 bp, Mus musculus
  siRNA target sequence for Eif2c4 (NM_153177.1,497-515).
cagtaggccggtctttttt

SEQ ID NO: 768664 - DNA, 19 bp, Mus musculus
  siRNA target sequence for Eif2c4 (NM_153177.1,499-517).
gtaggccggtcttttttct

SEQ ID NO: 768665 - DNA, 19 bp, Mus musculus
  siRNA target sequence for Eif2c4 (NM_153177.1,650-668).
ctcaacctatcattgagtt

SEQ ID NO: 768666 - DNA, 19 bp, Mus musculus
  siRNA target sequence for Eif2c4 (NM_153177.1,655-673).
cctatcattgagttcatgt

SEQ ID NO: 768667 - DNA, 19 bp, Mus musculus
  siRNA target sequence for Eif2c4 (NM_153177.1,787-805).
ggacagatgaaacgaaaat

SEQ ID NO: 768668 - DNA, 19 bp, Mus musculus
  siRNA target sequence for Eif2c4 (NM_153177.1,792-810).
gatgaaacgaaaatatcga

SEQ ID NO: 768669 - DNA, 19 bp, Mus musculus
  siRNA target sequence for Eif2c4 (NM_153177.1,799-817).
cgaaaatatcgagtttgta

SEQ ID NO: 768670 - DNA, 19 bp, Mus musculus
  siRNA target sequence for Eif2c4 (NM_153177.1,852-870).
ccctttgcagctagagaat

SEQ ID NO: 768671 - DNA, 19 bp, Mus musculus
  siRNA target sequence for Eif2c4 (NM_153177.1,890-908).
cagtggctcagtattttaa

SEQ ID NO: 768672 - DNA, 19 bp, Mus musculus
  siRNA target sequence for Eif2c4 (NM_153177.1,1233-1251).
gtatggaggccggaataaa

SEQ ID NO: 768673 - DNA, 19 bp, Mus musculus
  siRNA target sequence for Eif2c4 (NM_153177.1,1287-1305).
gcgaggaaaacagttttat

SEQ ID NO: 768674 - DNA, 19 bp, Mus musculus
  siRNA target sequence for Eif2c4 (NM_153177.1,1366-1384).
gaagatttgctaaagagtt

SEQ ID NO: 768675 - DNA, 19 bp, Mus musculus
  siRNA target sequence for Eif2c4 (NM_153177.1,1386-1404).
cactgaccaacttcgtaaa

SEQ ID NO: 768676 - DNA, 19 bp, Mus musculus
  siRNA target sequence for Eif2c4 (NM_153177.1,1388-1406).
ctgaccaacttcgtaaaat

SEQ ID NO: 768677 - DNA, 19 bp, Mus musculus
  siRNA target sequence for Eif2c4 (NM_153177.1,1390-1408).
gaccaacttcgtaaaatct

SEQ ID NO: 768678 - DNA, 19 bp, Mus musculus
  siRNA target sequence for Eif2c4 (NM_153177.1,1475-1493).
gcgtggagcccatgtttaa

SEQ ID NO: 768679 - DNA, 19 bp, Mus musculus
  siRNA target sequence for Eif2c4 (NM_153177.1,1583-1601).
gagatacccttctaggtat

SEQ ID NO: 768680 - DNA, 19 bp, Mus musculus
  siRNA target sequence for Eif2c4 (NM_153177.1,1643-1661).
cgccccagaccctttccaa

SEQ ID NO: 768681 - DNA, 19 bp, Mus musculus
  siRNA target sequence for Eif2c4 (NM_153177.1,1791-1809).
cgggaagaagccttctatt

SEQ ID NO: 768682 - DNA, 19 bp, Mus musculus
  siRNA target sequence for Eif2c4 (NM_153177.1,1943-1961).
ctcgggagctgctgattca

SEQ ID NO: 768683 - DNA, 19 bp, Mus musculus
  siRNA target sequence for Eif2c4 (NM_153177.1,1945-1963).
cgggagctgctgattcaat

SEQ ID NO: 768684 - DNA, 19 bp, Mus musculus
  siRNA target sequence for Eif2c4 (NM_153177.1,1948-1966).
gagctgctgattcaattct

SEQ ID NO: 768685 - DNA, 19 bp, Mus musculus
  siRNA target sequence for Eif2c4 (NM_153177.1,1954-1972).
ctgattcaattctataagt

SEQ ID NO: 768686 - DNA, 19 bp, Mus musculus
  siRNA target sequence for Eif2c4 (NM_153177.1,2048-2066).
ggccggagctaatagcaat

SEQ ID NO: 768687 - DNA, 19 bp, Mus musculus
  siRNA target sequence for Eif2c4 (NM_153177.1,2052-2070).
ggagctaatagcaattcga

SEQ ID NO: 768688 - DNA, 19 bp, Mus musculus
  siRNA target sequence for Eif2c4 (NM_153177.1,2053-2071).
gagctaatagcaattcgaa

SEQ ID NO: 768689 - DNA, 19 bp, Mus musculus
  siRNA target sequence for Eif2c4 (NM_153177.1,2063-2081).
caattcgaaaggcatgtat

SEQ ID NO: 768690 - DNA, 19 bp, Mus musculus
  siRNA target sequence for Eif2c4 (NM_153177.1,2068-2086).
cgaaaggcatgtataagct

SEQ ID NO: 768691 - DNA, 19 bp, Mus musculus
  siRNA target sequence for Eif2c4 (NM_153177.1,2169-2187).
ggaaagggtggggaaaagt

SEQ ID NO: 768692 - DNA, 19 bp, Mus musculus
  siRNA target sequence for Eif2c4 (NM_153177.1,2228-2246).
cacacccgtctgagtttga

SEQ ID NO: 768693 - DNA, 19 bp, Mus musculus
  siRNA target sequence for Eif2c4 (NM_153177.1,2233-2251).
ccgtctgagtttgactttt

SEQ ID NO: 768694 - DNA, 19 bp, Mus musculus
  siRNA target sequence for Eif2c4 (NM_153177.1,2400-2418).
cattcctgcccctgcatat

SEQ ID NO: 768695 - DNA, 19 bp, Mus musculus
  siRNA target sequence for Eif2c4 (NM_153177.1,2433-2451).
ggcattccgggcaaggtat

SEQ ID NO: 768696 - DNA, 19 bp, Mus musculus
  siRNA target sequence for Eif2c4 (NM_153177.1,2557-2575).
gatacccagcacactatgt

SEQ ID NO: 768697 - DNA, 19 bp, Mus musculus
  siRNA target sequence for 1110034O07Rik (NM_153194.1,500-518).
ggtggtagtggaacaaaat

SEQ ID NO: 768698 - DNA, 19 bp, Mus musculus
  siRNA target sequence for 1110034O07Rik (NM_153194.1,509-527).
ggaacaaaatggctctttt

SEQ ID NO: 768699 - DNA, 19 bp, Mus musculus
  siRNA target sequence for 1110034O07Rik (NM_153194.1,541-559).
ccaaaaattttatttgtga

SEQ ID NO: 768700 - DNA, 19 bp, Mus musculus
  siRNA target sequence for 1110034O07Rik (NM_153194.1,719-737).
ccagtgtgaacgatgtcat

SEQ ID NO: 768701 - DNA, 19 bp, Mus musculus
  siRNA target sequence for 1110034O07Rik (NM_153194.1,748-766).
ctcggacagaccgattact

SEQ ID NO: 768702 - DNA, 19 bp, Mus musculus
  siRNA target sequence for 1110034O07Rik (NM_153194.1,750-768).
cggacagaccgattactca

SEQ ID NO: 768703 - DNA, 19 bp, Mus musculus
  siRNA target sequence for 1110034O07Rik (NM_153194.1,758-776).
ccgattactcagacacaaa

SEQ ID NO: 768704 - DNA, 19 bp, Mus musculus
  siRNA target sequence for 1110034O07Rik (NM_153194.1,810-828).
gaagggcagttttctctat

SEQ ID NO: 768705 - DNA, 19 bp, Mus musculus
  siRNA target sequence for 2410015K21Rik (NM_153195.1,147-165).
gttggggttcagttctgat

SEQ ID NO: 768706 - DNA, 19 bp, Mus musculus
  siRNA target sequence for 2410015K21Rik (NM_153195.1,161-179).
ctgatacccgatttgcaat

SEQ ID NO: 768707 - DNA, 19 bp, Mus musculus
  siRNA target sequence for 2410015K21Rik (NM_153195.1,163-181).
gatacccgatttgcaatta

SEQ ID NO: 768708 - DNA, 19 bp, Mus musculus
  siRNA target sequence for 2410015K21Rik (NM_153195.1,167-185).
cccgatttgcaattacatt

SEQ ID NO: 768709 - DNA, 19 bp, Mus musculus
  siRNA target sequence for 2410015K21Rik (NM_153195.1,169-187).
cgatttgcaattacattga

SEQ ID NO: 768710 - DNA, 19 bp, Mus musculus
  siRNA target sequence for 2410015K21Rik (NM_153195.1,170-188).
gatttgcaattacattgaa

SEQ ID NO: 768711 - DNA, 19 bp, Mus musculus
  siRNA target sequence for 2410015K21Rik (NM_153195.1,175-193).
gcaattacattgaacaaca

SEQ ID NO: 768712 - DNA, 19 bp, Mus musculus
  siRNA target sequence for 2410015K21Rik (NM_153195.1,176-194).
caattacattgaacaacaa

SEQ ID NO: 768713 - DNA, 19 bp, Mus musculus
  siRNA target sequence for 2410015K21Rik (NM_153195.1,225-243).
ggcttcatatgggattgtt

SEQ ID NO: 768714 - DNA, 19 bp, Mus musculus
  siRNA target sequence for 2410015K21Rik (NM_153195.1,226-244).
gcttcatatgggattgttt

SEQ ID NO: 768715 - DNA, 19 bp, Mus musculus
  siRNA target sequence for 2410015K21Rik (NM_153195.1,249-267).
ggacttgatatgtttggtt

SEQ ID NO: 768716 - DNA, 19 bp, Mus musculus
  siRNA target sequence for 2410015K21Rik (NM_153195.1,255-273).
gatatgtttggttcttgaa

SEQ ID NO: 768717 - DNA, 19 bp, Mus musculus
  siRNA target sequence for 2410015K21Rik (NM_153195.1,260-278).
gtttggttcttgaagatga

SEQ ID NO: 768718 - DNA, 19 bp, Mus musculus
  siRNA target sequence for 2410015K21Rik (NM_153195.1,279-297).
catgccggcacctaactta

SEQ ID NO: 768719 - DNA, 19 bp, Mus musculus
  siRNA target sequence for 2410015K21Rik (NM_153195.1,283-301).
ccggcacctaacttacctt

SEQ ID NO: 768720 - DNA, 19 bp, Mus musculus
  siRNA target sequence for 2410015K21Rik (NM_153195.1,294-312).
cttaccttcatctacagat

SEQ ID NO: 768721 - DNA, 19 bp, Mus musculus
  siRNA target sequence for 2410015K21Rik (NM_153195.1,299-317).
cttcatctacagatacaga

SEQ ID NO: 768722 - DNA, 19 bp, Mus musculus
  siRNA target sequence for 2410015K21Rik (NM_153195.1,359-377).
ccaccccaagtcagactaa

SEQ ID NO: 768723 - DNA, 19 bp, Mus musculus
  siRNA target sequence for 2410015K21Rik (NM_153195.1,372-390).
gactaacatcccagatgaa

SEQ ID NO: 768724 - DNA, 19 bp, Mus musculus
  siRNA target sequence for 2410015K21Rik (NM_153195.1,385-403).
gatgaacaagggactgatt

SEQ ID NO: 768725 - DNA, 19 bp, Mus musculus
  siRNA target sequence for 2410015K21Rik (NM_153195.1,413-431).
gacaggccaccccatttga

SEQ ID NO: 768726 - DNA, 19 bp, Mus musculus
  siRNA target sequence for 2410015K21Rik (NM_153195.1,438-456).
gactgatgacagtatggaa

SEQ ID NO: 768727 - DNA, 19 bp, Mus musculus
  siRNA target sequence for 2410015K21Rik (NM_153195.1,458-476).
ggcctagtcaaaatgttga

SEQ ID NO: 768728 - DNA, 19 bp, Mus musculus
  siRNA target sequence for 2410015K21Rik (NM_153195.1,534-552).
ggaaccaatgctctgtaat

SEQ ID NO: 768729 - DNA, 19 bp, Mus musculus
  siRNA target sequence for 2410015K21Rik (NM_153195.1,657-675).
gctcgagtcaggctacatt

SEQ ID NO: 768730 - DNA, 19 bp, Mus musculus
  siRNA target sequence for 2410015K21Rik (NM_153195.1,723-741).
gtcaagtggtgtatacaaa

SEQ ID NO: 768731 - DNA, 19 bp, Mus musculus
  siRNA target sequence for 2410015K21Rik (NM_153195.1,917-935).
gcgcagccaaagtgtacaa

SEQ ID NO: 768732 - DNA, 19 bp, Mus musculus
  siRNA target sequence for 2410015K21Rik (NM_153195.1,928-946).
gtgtacaaagatcttaaga

SEQ ID NO: 768733 - DNA, 19 bp, Mus musculus
  siRNA target sequence for 2410015K21Rik (NM_153195.1,992-1010).
ctttcacacggcaagtact

SEQ ID NO: 768734 - DNA, 19 bp, Mus musculus
  siRNA target sequence for 2410015K21Rik (NM_153195.1,1071-1089).
ccgacttttggatgttcat

SEQ ID NO: 768735 - DNA, 19 bp, Mus musculus
  siRNA target sequence for 2410015K21Rik (NM_153195.1,1072-1090).
cgacttttggatgttcatt

SEQ ID NO: 768736 - DNA, 19 bp, Mus musculus
  siRNA target sequence for 2410015K21Rik (NM_153195.1,1122-1140).
cctcctcattgcgtcaaat

SEQ ID NO: 768737 - DNA, 19 bp, Mus musculus
  siRNA target sequence for 2410015K21Rik (NM_153195.1,1210-1228).
gactggaaagaattgtata

SEQ ID NO: 768738 - DNA, 19 bp, Mus musculus
  siRNA target sequence for 2410015K21Rik (NM_153195.1,1262-1280).
ggatgcggcatgcaatgtt

SEQ ID NO: 768739 - DNA, 19 bp, Mus musculus
  siRNA target sequence for 2410015K21Rik (NM_153195.1,1291-1309).
gcccaccctatcccatttt

SEQ ID NO: 768740 - DNA, 19 bp, Mus musculus
  siRNA target sequence for 2410015K21Rik (NM_153195.1,1293-1311).
ccaccctatcccattttgt

SEQ ID NO: 768741 - DNA, 19 bp, Mus musculus
  siRNA target sequence for 2410015K21Rik (NM_153195.1,1364-1382).
gaatcattggtggtgaata

SEQ ID NO: 768742 - DNA, 19 bp, Mus musculus
  siRNA target sequence for 2410015K21Rik (NM_153195.1,1392-1410).
gccgatactgcctagtgtt

SEQ ID NO: 768743 - DNA, 19 bp, Mus musculus
  siRNA target sequence for 2410015K21Rik (NM_153195.1,1469-1487).
cactcagaccacgttttga

SEQ ID NO: 768744 - DNA, 19 bp, Mus musculus
  siRNA target sequence for 5230400M11Rik (NM_153196.1,91-109).
gacctggtcagtcttactt

SEQ ID NO: 768745 - DNA, 19 bp, Mus musculus
  siRNA target sequence for 5230400M11Rik (NM_153196.1,138-156).
ccatggacatgagtttttt

SEQ ID NO: 768746 - DNA, 19 bp, Mus musculus
  siRNA target sequence for 5230400M11Rik (NM_153196.1,139-157).
catggacatgagtttttta

SEQ ID NO: 768747 - DNA, 19 bp, Mus musculus
  siRNA target sequence for 5230400M11Rik (NM_153196.1,248-266).
cttttggcaatgattacat

SEQ ID NO: 768748 - DNA, 19 bp, Mus musculus
  siRNA target sequence for 5230400M11Rik (NM_153196.1,259-277).
gattacatagaaaacttaa

SEQ ID NO: 768749 - DNA, 19 bp, Mus musculus
  siRNA target sequence for 5230400M11Rik (NM_153196.1,332-350).
gaacagcctccataattgt

SEQ ID NO: 768750 - DNA, 19 bp, Mus musculus
  siRNA target sequence for 5230400M11Rik (NM_153196.1,385-403).
gctggagcaaatctgtttt

SEQ ID NO: 768751 - DNA, 19 bp, Mus musculus
  siRNA target sequence for 5230400M11Rik (NM_153196.1,386-404).
ctggagcaaatctgttttt

SEQ ID NO: 768752 - DNA, 19 bp, Mus musculus
  siRNA target sequence for 5230400M11Rik (NM_153196.1,388-406).
ggagcaaatctgtttttga

SEQ ID NO: 768753 - DNA, 19 bp, Mus musculus
  siRNA target sequence for 5230400M11Rik (NM_153196.1,389-407).
gagcaaatctgtttttgaa

SEQ ID NO: 768754 - DNA, 19 bp, Mus musculus
  siRNA target sequence for 5230400M11Rik (NM_153196.1,491-509).
ctctggaagctctgacaat

SEQ ID NO: 768755 - DNA, 19 bp, Mus musculus
  siRNA target sequence for 5230400M11Rik (NM_153196.1,564-582).
cctggacccccagttctat

SEQ ID NO: 768756 - DNA, 19 bp, Mus musculus
  siRNA target sequence for 5230400M11Rik (NM_153196.1,565-583).
ctggacccccagttctata

SEQ ID NO: 768757 - DNA, 19 bp, Mus musculus
  siRNA target sequence for 5230400M11Rik (NM_153196.1,579-597).
ctataccctctccagtatt

SEQ ID NO: 768758 - DNA, 19 bp, Mus musculus
  siRNA target sequence for 5230400M11Rik (NM_153196.1,610-628).
gagagcgaggctgagattt

SEQ ID NO: 768759 - DNA, 19 bp, Mus musculus
  siRNA target sequence for 5230400M11Rik (NM_153196.1,612-630).
gagcgaggctgagatttta

SEQ ID NO: 768760 - DNA, 19 bp, Mus musculus
  siRNA target sequence for 5230400M11Rik (NM_153196.1,725-743).
cttcaggatgcgtgatact

SEQ ID NO: 768761 - DNA, 19 bp, Mus musculus
  siRNA target sequence for 5230400M11Rik (NM_153196.1,850-868).
gcttactacccaaatctgt

SEQ ID NO: 768762 - DNA, 19 bp, Mus musculus
  siRNA target sequence for 5230400M11Rik (NM_153196.1,883-901).
ctcaagagatccaatttca

SEQ ID NO: 768763 - DNA, 19 bp, Mus musculus
  siRNA target sequence for 5230400M11Rik (NM_153196.1,936-954).
gtcctcttatccatacaaa

SEQ ID NO: 768764 - DNA, 19 bp, Mus musculus
  siRNA target sequence for 5230400M11Rik (NM_153196.1,938-956).
cctcttatccatacaaaaa

SEQ ID NO: 768765 - DNA, 19 bp, Mus musculus
  siRNA target sequence for 5230400M11Rik (NM_153196.1,939-957).
ctcttatccatacaaaaaa

SEQ ID NO: 768766 - DNA, 19 bp, Mus musculus
  siRNA target sequence for Amot (NM_153319.1,126-144).
cgccagaataccctttcaa

SEQ ID NO: 768767 - DNA, 19 bp, Mus musculus
  siRNA target sequence for Amot (NM_153319.1,184-202).
gccagggcacttctatagt

SEQ ID NO: 768768 - DNA, 19 bp, Mus musculus
  siRNA target sequence for Amot (NM_153319.1,228-246).
gaacagaggggcaactgat

SEQ ID NO: 768769 - DNA, 19 bp, Mus musculus
  siRNA target sequence for Amot (NM_153319.1,332-350).
cctcatagccctacttctt

SEQ ID NO: 768770 - DNA, 19 bp, Mus musculus
  siRNA target sequence for Amot (NM_153319.1,390-408).
ctccgccgtccactagatt

SEQ ID NO: 768771 - DNA, 19 bp, Mus musculus
  siRNA target sequence for Amot (NM_153319.1,614-632).
ccagctgacccttttgcta

SEQ ID NO: 768772 - DNA, 19 bp, Mus musculus
  siRNA target sequence for Amot (NM_153319.1,615-633).
cagctgacccttttgctat

SEQ ID NO: 768773 - DNA, 19 bp, Mus musculus
  siRNA target sequence for Amot (NM_153319.1,758-776).
gtctcagaggcttatgaga

SEQ ID NO: 768774 - DNA, 19 bp, Mus musculus
  siRNA target sequence for Amot (NM_153319.1,832-850).
gctggagggcgagattaga

SEQ ID NO: 768775 - DNA, 19 bp, Mus musculus
  siRNA target sequence for Amot (NM_153319.1,833-851).
ctggagggcgagattagaa

SEQ ID NO: 768776 - DNA, 19 bp, Mus musculus
  siRNA target sequence for Amot (NM_153319.1,998-1016).
ccagcggaaagaaaagtga

SEQ ID NO: 768777 - DNA, 19 bp, Mus musculus
  siRNA target sequence for Amot (NM_153319.1,999-1017).
cagcggaaagaaaagtgaa

SEQ ID NO: 768778 - DNA, 19 bp, Mus musculus
  siRNA target sequence for Amot (NM_153319.1,1018-1036).
gtacgtggtggccgtttta

SEQ ID NO: 768779 - DNA, 19 bp, Mus musculus
  siRNA target sequence for Amot (NM_153319.1,1021-1039).
cgtggtggccgttttacca

SEQ ID NO: 768780 - DNA, 19 bp, Mus musculus
  siRNA target sequence for Amot (NM_153319.1,1022-1040).
gtggtggccgttttaccat

SEQ ID NO: 768781 - DNA, 19 bp, Mus musculus
  siRNA target sequence for Amot (NM_153319.1,1044-1062).
gcccaaaggggaccattaa

SEQ ID NO: 768782 - DNA, 19 bp, Mus musculus
  siRNA target sequence for Amot (NM_153319.1,1276-1294).
caactcccagcccactaat

SEQ ID NO: 768783 - DNA, 19 bp, Mus musculus
  siRNA target sequence for Amot (NM_153319.1,1285-1303).
gcccactaatgcttcagaa

SEQ ID NO: 768784 - DNA, 19 bp, Mus musculus
  siRNA target sequence for Amot (NM_153319.1,1286-1304).
cccactaatgcttcagaat

SEQ ID NO: 768785 - DNA, 19 bp, Mus musculus
  siRNA target sequence for Amot (NM_153319.1,1287-1305).
ccactaatgcttcagaata

SEQ ID NO: 768786 - DNA, 19 bp, Mus musculus
  siRNA target sequence for Amot (NM_153319.1,1590-1608).
ccctccatgcccagattat

SEQ ID NO: 768787 - DNA, 19 bp, Mus musculus
  siRNA target sequence for Amot (NM_153319.1,1681-1699).
catgcggccagcaaagtct

SEQ ID NO: 768788 - DNA, 19 bp, Mus musculus
  siRNA target sequence for Amot (NM_153319.1,1755-1773).
ctggtgcgcccattatgga

SEQ ID NO: 768789 - DNA, 19 bp, Mus musculus
  siRNA target sequence for Amot (NM_153319.1,1943-1961).
ggaccggaatcgaccaaaa

SEQ ID NO: 768790 - DNA, 19 bp, Mus musculus
  siRNA target sequence for Amot (NM_153319.1,2318-2336).
ccagctgctgcatctctta

SEQ ID NO: 768791 - DNA, 19 bp, Mus musculus
  siRNA target sequence for Amot (NM_153319.1,2333-2351).
cttactcctgctactgttt

SEQ ID NO: 768792 - DNA, 19 bp, Mus musculus
  siRNA target sequence for Amot (NM_153319.1,2586-2604).
cagctttggttcaaactga

SEQ ID NO: 768793 - DNA, 19 bp, Mus musculus
  siRNA target sequence for Amot (NM_153319.1,2633-2651).
ggaccacgccgcttgtcta

SEQ ID NO: 768794 - DNA, 19 bp, Mus musculus
  siRNA target sequence for Amot (NM_153319.1,2641-2659).
ccgcttgtctacaccaaat

SEQ ID NO: 768795 - DNA, 19 bp, Mus musculus
  siRNA target sequence for Amot (NM_153319.1,2643-2661).
gcttgtctacaccaaatct

SEQ ID NO: 768796 - DNA, 19 bp, Mus musculus
  siRNA target sequence for Ush3a (NM_153384.1,259-277).
caccccactgtgggttaaa

SEQ ID NO: 768797 - DNA, 19 bp, Mus musculus
  siRNA target sequence for Ush3a (NM_153384.1,410-428).
cctttccggttctcatcaa

SEQ ID NO: 768798 - DNA, 19 bp, Mus musculus
  siRNA target sequence for Ush3a (NM_153384.1,507-525).
ccgtaagcatccacatcaa

SEQ ID NO: 768799 - DNA, 19 bp, Mus musculus
  siRNA target sequence for Ush3a (NM_153384.1,508-526).
cgtaagcatccacatcaat

SEQ ID NO: 768800 - DNA, 19 bp, Mus musculus
  siRNA target sequence for Ush3a (NM_153384.1,509-527).
gtaagcatccacatcaata

SEQ ID NO: 768801 - DNA, 19 bp, Mus musculus
  siRNA target sequence for Ush3a (NM_153384.1,513-531).
gcatccacatcaatattat

SEQ ID NO: 768802 - DNA, 19 bp, Mus musculus
  siRNA target sequence for Ush3a (NM_153384.1,570-588).
ggacagccttcttcatgta

SEQ ID NO: 768803 - DNA, 19 bp, Mus musculus
  siRNA target sequence for Ush3a (NM_153384.1,604-622).
gccctttgaaactcttcat

SEQ ID NO: 768804 - DNA, 19 bp, Mus musculus
  siRNA target sequence for Ush3a (NM_153384.1,663-681).
cctgtggctgtcttgtcat

SEQ ID NO: 768805 - DNA, 19 bp, Mus musculus
  siRNA target sequence for Ush3a (NM_153384.1,668-686).
ggctgtcttgtcatgatat

SEQ ID NO: 768806 - DNA, 19 bp, Mus musculus
  siRNA target sequence for Ush3a (NM_153384.1,669-687).
gctgtcttgtcatgatatt

SEQ ID NO: 768807 - DNA, 19 bp, Mus musculus
  siRNA target sequence for Ush3a (NM_153384.1,672-690).
gtcttgtcatgatattgtt

SEQ ID NO: 768808 - DNA, 19 bp, Mus musculus
  siRNA target sequence for Ush3a (NM_153384.1,710-728).
caccgcctttcagagaaaa

SEQ ID NO: 768809 - DNA, 19 bp, Mus musculus
  siRNA target sequence for Ush3a (NM_153384.1,712-730).
ccgcctttcagagaaaatt

SEQ ID NO: 768810 - DNA, 19 bp, Mus musculus
  siRNA target sequence for Ush3a (NM_153384.1,746-764).
gggacctatgcctacagaa

SEQ ID NO: 768811 - DNA, 19 bp, Mus musculus
  siRNA target sequence for Ush3a (NM_153384.1,841-859).
gatacgacttgctggattt

SEQ ID NO: 768812 - DNA, 19 bp, Mus musculus
  siRNA target sequence for Ush3a (NM_153384.1,846-864).
gacttgctggatttcagtt

SEQ ID NO: 768813 - DNA, 19 bp, Mus musculus
  siRNA target sequence for Ush3a (NM_153384.1,895-913).
cactaatgtagcttcagat

SEQ ID NO: 768814 - DNA, 19 bp, Mus musculus
  siRNA target sequence for Ush3a (NM_153384.1,902-920).
gtagcttcagatttaatgt

SEQ ID NO: 768815 - DNA, 19 bp, Mus musculus
  siRNA target sequence for Ush3a (NM_153384.1,905-923).
gcttcagatttaatgtact

SEQ ID NO: 768816 - DNA, 19 bp, Mus musculus
  siRNA target sequence for BC023156 (NM_153388.2,1136-1154).
ggacaggcgcacagttgaa

SEQ ID NO: 768817 - DNA, 19 bp, Mus musculus
  siRNA target sequence for BC023156 (NM_153388.2,1216-1234).
ggctggtggacctaacatt

SEQ ID NO: 768818 - DNA, 19 bp, Mus musculus
  siRNA target sequence for BC023156 (NM_153388.2,1218-1236).
ctggtggacctaacattgt

SEQ ID NO: 768819 - DNA, 19 bp, Mus musculus
  siRNA target sequence for BC023156 (NM_153388.2,1220-1238).
ggtggacctaacattgtct

SEQ ID NO: 768820 - DNA, 19 bp, Mus musculus
  siRNA target sequence for BC023156 (NM_153388.2,1226-1244).
cctaacattgtctcgaaat

SEQ ID NO: 768821 - DNA, 19 bp, Mus musculus
  siRNA target sequence for BC023156 (NM_153388.2,1994-2012).
caatgggaccctagagatt

SEQ ID NO: 768822 - DNA, 19 bp, Mus musculus
  siRNA target sequence for BC023156 (NM_153388.2,2188-2206).
ccgaaggcgagggaacttt

SEQ ID NO: 768823 - DNA, 19 bp, Mus musculus
  siRNA target sequence for BC023156 (NM_153388.2,2189-2207).
cgaaggcgagggaacttta

SEQ ID NO: 768824 - DNA, 19 bp, Mus musculus
  siRNA target sequence for BC023156 (NM_153388.2,2193-2211).
ggcgagggaactttagaat

SEQ ID NO: 768825 - DNA, 19 bp, Mus musculus
  siRNA target sequence for BC023156 (NM_153388.2,2195-2213).
cgagggaactttagaatct

SEQ ID NO: 768826 - DNA, 19 bp, Mus musculus
  siRNA target sequence for BC023156 (NM_153388.2,2640-2658).
cgcctcccactcaaactca

SEQ ID NO: 768827 - DNA, 19 bp, Mus musculus
  siRNA target sequence for D330023L08Rik (NM_153391.1,327-345).
cgatatcctggcagtgatt

SEQ ID NO: 768828 - DNA, 19 bp, Mus musculus
  siRNA target sequence for D330023L08Rik (NM_153391.1,354-372).
gtctagttgcatttatcta

SEQ ID NO: 768829 - DNA, 19 bp, Mus musculus
  siRNA target sequence for D330023L08Rik (NM_153391.1,412-430).
ggcatgagggatcaaatgt

SEQ ID NO: 768830 - DNA, 19 bp, Mus musculus
  siRNA target sequence for D330023L08Rik (NM_153391.1,463-481).
ctggctgttgggaccatta

SEQ ID NO: 768831 - DNA, 19 bp, Mus musculus
  siRNA target sequence for D330023L08Rik (NM_153391.1,465-483).
ggctgttgggaccattaaa

SEQ ID NO: 768832 - DNA, 19 bp, Mus musculus
  siRNA target sequence for D330023L08Rik (NM_153391.1,469-487).
gttgggaccattaaaggaa

SEQ ID NO: 768833 - DNA, 19 bp, Mus musculus
  siRNA target sequence for D330023L08Rik (NM_153391.1,529-547).
gttcttggaaaacatacta

SEQ ID NO: 768834 - DNA, 19 bp, Mus musculus
  siRNA target sequence for D330023L08Rik (NM_153391.1,590-608).
ctttgggaggtgaagataa

SEQ ID NO: 768835 - DNA, 19 bp, Mus musculus
  siRNA target sequence for D330023L08Rik (NM_153391.1,628-646).
caggaaggcgacacaataa

SEQ ID NO: 768836 - DNA, 19 bp, Mus musculus
  siRNA target sequence for D330023L08Rik (NM_153391.1,670-688).
ccaagcgacatcaagttct

SEQ ID NO: 768837 - DNA, 19 bp, Mus musculus
  siRNA target sequence for D330023L08Rik (NM_153391.1,699-717).
gacagatgagcgaatttct

SEQ ID NO: 768838 - DNA, 19 bp, Mus musculus
  siRNA target sequence for D330023L08Rik (NM_153391.1,823-841).
ggcaacattgtctgctata

SEQ ID NO: 768839 - DNA, 19 bp, Mus musculus
  siRNA target sequence for D330023L08Rik (NM_153391.1,825-843).
caacattgtctgctatagt

SEQ ID NO: 768840 - DNA, 19 bp, Mus musculus
  siRNA target sequence for D330023L08Rik (NM_153391.1,885-903).
gacgtttttggctatttct

SEQ ID NO: 768841 - DNA, 19 bp, Mus musculus
  siRNA target sequence for D330023L08Rik (NM_153391.1,914-932).
cggaagttgggcaagagat

SEQ ID NO: 768842 - DNA, 19 bp, Mus musculus
  siRNA target sequence for D330023L08Rik (NM_153391.1,916-934).
gaagttgggcaagagatat

SEQ ID NO: 768843 - DNA, 19 bp, Mus musculus
  siRNA target sequence for D330023L08Rik (NM_153391.1,940-958).
gctcgtgaccataaggata

SEQ ID NO: 768844 - DNA, 19 bp, Mus musculus
  siRNA target sequence for D330023L08Rik (NM_153391.1,946-964).
gaccataaggataatctaa

SEQ ID NO: 768845 - DNA, 19 bp, Mus musculus
  siRNA target sequence for D330023L08Rik (NM_153391.1,1000-1018).
gccacatgtggcgataact

SEQ ID NO: 768846 - DNA, 19 bp, Mus musculus
  siRNA target sequence for D330023L08Rik (NM_153391.1,1007-1025).
gtggcgataactgcataaa

SEQ ID NO: 768847 - DNA, 19 bp, Mus musculus
  siRNA target sequence for D330023L08Rik (NM_153391.1,1019-1037).
gcataaaaatccatgatct

SEQ ID NO: 768848 - DNA, 19 bp, Mus musculus
  siRNA target sequence for D330023L08Rik (NM_153391.1,1030-1048).
catgatctgacagaattga

SEQ ID NO: 768849 - DNA, 19 bp, Mus musculus
  siRNA target sequence for D330023L08Rik (NM_153391.1,1049-1067).
gagacatgtatgctataat

SEQ ID NO: 768850 - DNA, 19 bp, Mus musculus
  siRNA target sequence for D330023L08Rik (NM_153391.1,1053-1071).
catgtatgctataattaat

SEQ ID NO: 768851 - DNA, 19 bp, Mus musculus
  siRNA target sequence for D330023L08Rik (NM_153391.1,1308-1326).
cgcagtagggctctatcat

SEQ ID NO: 768852 - DNA, 19 bp, Mus musculus
  siRNA target sequence for D330023L08Rik (NM_153391.1,1310-1328).
cagtagggctctatcatct

SEQ ID NO: 768853 - DNA, 19 bp, Mus musculus
  siRNA target sequence for D330023L08Rik (NM_153391.1,1341-1359).
gaataaccgggcttggttt

SEQ ID NO: 768854 - DNA, 19 bp, Mus musculus
  siRNA target sequence for D330023L08Rik (NM_153391.1,1369-1387).
ggtgaaaatgttgtcaaaa

SEQ ID NO: 768855 - DNA, 19 bp, Mus musculus
  siRNA target sequence for D330023L08Rik (NM_153391.1,1443-1461).
ctacgccgctgcactcttt

SEQ ID NO: 768856 - DNA, 19 bp, Mus musculus
  siRNA target sequence for D330023L08Rik (NM_153391.1,1593-1611).
catctacggaactgatact

SEQ ID NO: 768857 - DNA, 19 bp, Mus musculus
  siRNA target sequence for D330023L08Rik (NM_153391.1,1604-1622).
ctgatactggcatcattca

SEQ ID NO: 768858 - DNA, 19 bp, Mus musculus
  siRNA target sequence for D330023L08Rik (NM_153391.1,1606-1624).
gatactggcatcattcact

SEQ ID NO: 768859 - DNA, 19 bp, Mus musculus
  siRNA target sequence for D330023L08Rik (NM_153391.1,1636-1654).
gaagactggcagttcgtta

SEQ ID NO: 768860 - DNA, 19 bp, Mus musculus
  siRNA target sequence for D330023L08Rik (NM_153391.1,1641-1659).
ctggcagttcgttaatgat

SEQ ID NO: 768861 - DNA, 19 bp, Mus musculus
  siRNA target sequence for D330023L08Rik (NM_153391.1,1643-1661).
ggcagttcgttaatgatta

SEQ ID NO: 768862 - DNA, 19 bp, Mus musculus
  siRNA target sequence for D330023L08Rik (NM_153391.1,1710-1728).
cagattggttttcattgat

SEQ ID NO: 768863 - DNA, 19 bp, Mus musculus
  siRNA target sequence for D330023L08Rik (NM_153391.1,1791-1809).
ctcaccaaccattaaaggt

SEQ ID NO: 768864 - DNA, 19 bp, Mus musculus
  siRNA target sequence for D330023L08Rik (NM_153391.1,1807-1825).
ggtgttctttgggaaaact

SEQ ID NO: 768865 - DNA, 19 bp, Mus musculus
  siRNA target sequence for D330023L08Rik (NM_153391.1,1845-1863).
ctttatcgcctatgatgat

SEQ ID NO: 768866 - DNA, 19 bp, Mus musculus
  siRNA target sequence for D330023L08Rik (NM_153391.1,1923-1941).
ggctggcagcaccaaactt

SEQ ID NO: 768867 - DNA, 19 bp, Mus musculus
  siRNA target sequence for D330023L08Rik (NM_153391.1,2037-2055).
cttccttggcagcatgaaa

SEQ ID NO: 768868 - DNA, 19 bp, Mus musculus
  siRNA target sequence for D330023L08Rik (NM_153391.1,2128-2146).
gatatatgcaagatgctaa

SEQ ID NO: 768869 - DNA, 19 bp, Mus musculus
  siRNA target sequence for D330023L08Rik (NM_153391.1,2248-2266).
gtgatgtcgttggaacaaa

SEQ ID NO: 768870 - DNA, 19 bp, Mus musculus
  siRNA target sequence for D330023L08Rik (NM_153391.1,2250-2268).
gatgtcgttggaacaaata

SEQ ID NO: 768871 - DNA, 19 bp, Mus musculus
  siRNA target sequence for D330023L08Rik (NM_153391.1,2302-2320).
catctcgccatgtttacta

SEQ ID NO: 768872 - DNA, 19 bp, Mus musculus
  siRNA target sequence for D330023L08Rik (NM_153391.1,2308-2326).
gccatgtttactaatgact

SEQ ID NO: 768873 - DNA, 19 bp, Mus musculus
  siRNA target sequence for D330023L08Rik (NM_153391.1,2448-2466).
gatacccttcatatccaaa

SEQ ID NO: 768874 - DNA, 19 bp, Mus musculus
  siRNA target sequence for D330023L08Rik (NM_153391.1,2484-2502).
ggagttcacaggcgattat

SEQ ID NO: 768875 - DNA, 19 bp, Mus musculus
  siRNA target sequence for D330023L08Rik (NM_153391.1,2487-2505).
gttcacaggcgattatgta

SEQ ID NO: 768876 - DNA, 19 bp, Mus musculus
  siRNA target sequence for D330023L08Rik (NM_153391.1,2529-2547).
gggcatcaccggtgataat

SEQ ID NO: 768877 - DNA, 19 bp, Mus musculus
  siRNA target sequence for D330023L08Rik (NM_153391.1,2530-2548).
ggcatcaccggtgataata

SEQ ID NO: 768878 - DNA, 19 bp, Mus musculus
  siRNA target sequence for D330023L08Rik (NM_153391.1,2531-2549).
gcatcaccggtgataataa

SEQ ID NO: 768879 - DNA, 19 bp, Mus musculus
  siRNA target sequence for D330023L08Rik (NM_153391.1,2610-2628).
ccgcagaggggctaaccaa

SEQ ID NO: 768880 - DNA, 19 bp, Mus musculus
  siRNA target sequence for D330023L08Rik (NM_153391.1,2705-2723).
ctgcccagctgtacgaaaa

SEQ ID NO: 768881 - DNA, 19 bp, Mus musculus
  siRNA target sequence for D330023L08Rik (NM_153391.1,2718-2736).
cgaaaagggccaatattat

SEQ ID NO: 768882 - DNA, 19 bp, Mus musculus
  siRNA target sequence for D330023L08Rik (NM_153391.1,2766-2784).
caagaactgggcaaaagtt

SEQ ID NO: 768883 - DNA, 19 bp, Mus musculus
  siRNA target sequence for D330023L08Rik (NM_153391.1,2777-2795).
caaaagttggcgaacttct

SEQ ID NO: 768884 - DNA, 19 bp, Mus musculus
  siRNA target sequence for D330023L08Rik (NM_153391.1,2869-2887).
gccgtggtggcgtatgaaa

SEQ ID NO: 768885 - DNA, 19 bp, Mus musculus
  siRNA target sequence for D330023L08Rik (NM_153391.1,2870-2888).
ccgtggtggcgtatgaaaa

SEQ ID NO: 768886 - DNA, 19 bp, Mus musculus
  siRNA target sequence for D330023L08Rik (NM_153391.1,2871-2889).
cgtggtggcgtatgaaaat

SEQ ID NO: 768887 - DNA, 19 bp, Mus musculus
  siRNA target sequence for D330023L08Rik (NM_153391.1,2874-2892).
ggtggcgtatgaaaatgca

SEQ ID NO: 768888 - DNA, 19 bp, Mus musculus
  siRNA target sequence for D330023L08Rik (NM_153391.1,2875-2893).
gtggcgtatgaaaatgcaa

SEQ ID NO: 768889 - DNA, 19 bp, Mus musculus
  siRNA target sequence for D330023L08Rik (NM_153391.1,2994-3012).
gatggtagccaggttcttt

SEQ ID NO: 768890 - DNA, 19 bp, Mus musculus
  siRNA target sequence for D330023L08Rik (NM_153391.1,3130-3148).
ggtgctgaagacacaacta

SEQ ID NO: 768891 - DNA, 19 bp, Mus musculus
  siRNA target sequence for D330023L08Rik (NM_153391.1,3131-3149).
gtgctgaagacacaactaa

SEQ ID NO: 768892 - DNA, 19 bp, Mus musculus
  siRNA target sequence for D330023L08Rik (NM_153391.1,3134-3152).
ctgaagacacaactaatga

SEQ ID NO: 768893 - DNA, 19 bp, Mus musculus
  siRNA target sequence for D330023L08Rik (NM_153391.1,3143-3161).
caactaatgaagactatca

SEQ ID NO: 768894 - DNA, 19 bp, Mus musculus
  siRNA target sequence for D330023L08Rik (NM_153391.1,3160-3178).
caaagtatcgccttatatt

SEQ ID NO: 768895 - DNA, 19 bp, Mus musculus
  siRNA target sequence for D330023L08Rik (NM_153391.1,3164-3182).
gtatcgccttatattttga

SEQ ID NO: 768896 - DNA, 19 bp, Mus musculus
  siRNA target sequence for D330023L08Rik (NM_153391.1,3204-3222).
ggctggaaaattcttctta

SEQ ID NO: 768897 - DNA, 19 bp, Mus musculus
  siRNA target sequence for D330023L08Rik (NM_153391.1,3266-3284).
gcccaagctcagaagataa

SEQ ID NO: 768898 - DNA, 19 bp, Mus musculus
  siRNA target sequence for D330023L08Rik (NM_153391.1,3269-3287).
caagctcagaagataatgt

SEQ ID NO: 768899 - DNA, 19 bp, Mus musculus
  siRNA target sequence for D330023L08Rik (NM_153391.1,3446-3464).
cccggaccgccatcatcat

SEQ ID NO: 768900 - DNA, 19 bp, Mus musculus
  siRNA target sequence for D330023L08Rik (NM_153391.1,3497-3515).
ggaatgcacacgatgttct

SEQ ID NO: 768901 - DNA, 19 bp, Mus musculus
  siRNA target sequence for D330023L08Rik (NM_153391.1,3498-3516).
gaatgcacacgatgttctt

SEQ ID NO: 768902 - DNA, 19 bp, Mus musculus
  siRNA target sequence for D330023L08Rik (NM_153391.1,3502-3520).
gcacacgatgttcttttca

SEQ ID NO: 768903 - DNA, 19 bp, Mus musculus
  siRNA target sequence for D330023L08Rik (NM_153391.1,3505-3523).
cacgatgttcttttcagta

SEQ ID NO: 768904 - DNA, 19 bp, Mus musculus
  siRNA target sequence for D330023L08Rik (NM_153391.1,3519-3537).
cagtatgtacgcagaactt

SEQ ID NO: 768905 - DNA, 19 bp, Mus musculus
  siRNA target sequence for D330023L08Rik (NM_153391.1,3521-3539).
gtatgtacgcagaacttaa

SEQ ID NO: 768906 - DNA, 19 bp, Mus musculus
  siRNA target sequence for D330023L08Rik (NM_153391.1,3585-3603).
gatcctgcacagttacatt

SEQ ID NO: 768907 - DNA, 19 bp, Mus musculus
  siRNA target sequence for D330023L08Rik (NM_153391.1,3657-3675).
cattcgggtggccaacaat

SEQ ID NO: 768908 - DNA, 19 bp, Mus musculus
  siRNA target sequence for D330023L08Rik (NM_153391.1,3786-3804).
gcctgaataccgcaacaaa

SEQ ID NO: 768909 - DNA, 19 bp, Mus musculus
  siRNA target sequence for D330023L08Rik (NM_153391.1,3787-3805).
cctgaataccgcaacaaaa

SEQ ID NO: 768910 - DNA, 19 bp, Mus musculus
  siRNA target sequence for D330023L08Rik (NM_153391.1,3788-3806).
ctgaataccgcaacaaaat

SEQ ID NO: 768911 - DNA, 19 bp, Mus musculus
  siRNA target sequence for D330023L08Rik (NM_153391.1,3841-3859).
gtcaggagacccgatactt

SEQ ID NO: 768912 - DNA, 19 bp, Mus musculus
  siRNA target sequence for D330023L08Rik (NM_153391.1,3925-3943).
ctctgtcctggctgtaaaa

SEQ ID NO: 768913 - DNA, 19 bp, Mus musculus
  siRNA target sequence for D330023L08Rik (NM_153391.1,3932-3950).
ctggctgtaaaaacaacat

SEQ ID NO: 768914 - DNA, 19 bp, Mus musculus
  siRNA target sequence for D330023L08Rik (NM_153391.1,3945-3963).
caacattccctattgcatt

SEQ ID NO: 768915 - DNA, 19 bp, Mus musculus
  siRNA target sequence for D330023L08Rik (NM_153391.1,3965-3983).
caacaggccgacacatgtt

SEQ ID NO: 768916 - DNA, 19 bp, Mus musculus
  siRNA target sequence for D330023L08Rik (NM_153391.1,3968-3986).
caggccgacacatgttgaa

SEQ ID NO: 768917 - DNA, 19 bp, Mus musculus
  siRNA target sequence for D330023L08Rik (NM_153391.1,3971-3989).
gccgacacatgttgaaaga

SEQ ID NO: 768918 - DNA, 19 bp, Mus musculus
  siRNA target sequence for D330023L08Rik (NM_153391.1,4034-4052).
cagaattcaagatcttact

SEQ ID NO: 768919 - DNA, 19 bp, Mus musculus
  siRNA target sequence for D330023L08Rik (NM_153391.1,4097-4115).
ccagtcaactgaaaaaaat

SEQ ID NO: 768920 - DNA, 19 bp, Mus musculus
  siRNA target sequence for D330023L08Rik (NM_153391.1,4135-4153).
ctacggacagagatggaat

SEQ ID NO: 768921 - DNA, 19 bp, Mus musculus
  siRNA target sequence for Col23a1 (NM_153393.1,669-687).
gggtacaccgggagacttt

SEQ ID NO: 768922 - DNA, 19 bp, Mus musculus
  siRNA target sequence for Col23a1 (NM_153393.1,1094-1112).
gtgacacagtggtaatcga

SEQ ID NO: 768923 - DNA, 19 bp, Mus musculus
  siRNA target sequence for Col23a1 (NM_153393.1,1100-1118).
cagtggtaatcgactatga

SEQ ID NO: 768924 - DNA, 19 bp, Mus musculus
  siRNA target sequence for Col23a1 (NM_153393.1,1113-1131).
ctatgacggcaggatctta

SEQ ID NO: 768925 - DNA, 19 bp, Mus musculus
  siRNA target sequence for Col23a1 (NM_153393.1,1367-1385).
cggcgtctgaccatctaca

SEQ ID NO: 768926 - DNA, 19 bp, Mus musculus
  siRNA target sequence for Col23a1 (NM_153393.1,1370-1388).
cgtctgaccatctacaaga

SEQ ID NO: 768927 - DNA, 19 bp, Mus musculus
  siRNA target sequence for 2610528O22Rik (NM_153395.1,178-196).
ctgctgaatcgggaataat

SEQ ID NO: 768928 - DNA, 19 bp, Mus musculus
  siRNA target sequence for 2610528O22Rik (NM_153395.1,180-198).
gctgaatcgggaataataa

SEQ ID NO: 768929 - DNA, 19 bp, Mus musculus
  siRNA target sequence for 2610528O22Rik (NM_153395.1,187-205).
cgggaataataaaagttaa

SEQ ID NO: 768930 - DNA, 19 bp, Mus musculus
  siRNA target sequence for 2610528O22Rik (NM_153395.1,264-282).
gtcgtgcagcctttcctaa

SEQ ID NO: 768931 - DNA, 19 bp, Mus musculus
  siRNA target sequence for 2610528O22Rik (NM_153395.1,395-413).
gctttggcagctaatggaa

SEQ ID NO: 768932 - DNA, 19 bp, Mus musculus
  siRNA target sequence for 2610528O22Rik (NM_153395.1,437-455).
gcttcaaacagttcttgtt

SEQ ID NO: 768933 - DNA, 19 bp, Mus musculus
  siRNA target sequence for 2610528O22Rik (NM_153395.1,466-484).
ccaacacggtagttcatga

SEQ ID NO: 768934 - DNA, 19 bp, Mus musculus
  siRNA target sequence for 2610528O22Rik (NM_153395.1,490-508).
cactttccaaggctatagt

SEQ ID NO: 768935 - DNA, 19 bp, Mus musculus
  siRNA target sequence for 2610528O22Rik (NM_153395.1,525-543).
cacttcacaaaggacaata

SEQ ID NO: 768936 - DNA, 19 bp, Mus musculus
  siRNA target sequence for 2610528O22Rik (NM_153395.1,620-638).
ccgtcacagagatatagaa

SEQ ID NO: 768937 - DNA, 19 bp, Mus musculus
  siRNA target sequence for 2610528O22Rik (NM_153395.1,643-661).
cagtgccgatccaaggaaa

SEQ ID NO: 768938 - DNA, 19 bp, Mus musculus
  siRNA target sequence for 2610528O22Rik (NM_153395.1,647-665).
gccgatccaaggaaacagt

SEQ ID NO: 768939 - DNA, 19 bp, Mus musculus
  siRNA target sequence for 2610528O22Rik (NM_153395.1,648-666).
ccgatccaaggaaacagta

SEQ ID NO: 768940 - DNA, 19 bp, Mus musculus
  siRNA target sequence for 2610528O22Rik (NM_153395.1,649-667).
cgatccaaggaaacagtaa

SEQ ID NO: 768941 - DNA, 19 bp, Mus musculus
  siRNA target sequence for 2610528O22Rik (NM_153395.1,726-744).
gacctctgtcagttggtta

SEQ ID NO: 768942 - DNA, 19 bp, Mus musculus
  siRNA target sequence for 2610528O22Rik (NM_153395.1,768-786).
gtgggcatgacggaaatga

SEQ ID NO: 768943 - DNA, 19 bp, Mus musculus
  siRNA target sequence for 2610528O22Rik (NM_153395.1,770-788).
gggcatgacggaaatgact

SEQ ID NO: 768944 - DNA, 19 bp, Mus musculus
  siRNA target sequence for 2610528O22Rik (NM_153395.1,813-831).
gagtctgtcctcaatgatt

SEQ ID NO: 768945 - DNA, 19 bp, Mus musculus
  siRNA target sequence for 2610528O22Rik (NM_153395.1,894-912).
ctcgtgatcaagctctttt

SEQ ID NO: 768946 - DNA, 19 bp, Mus musculus
  siRNA target sequence for 2610528O22Rik (NM_153395.1,896-914).
cgtgatcaagctcttttct

SEQ ID NO: 768947 - DNA, 19 bp, Mus musculus
  siRNA target sequence for 2610528O22Rik (NM_153395.1,906-924).
ctcttttctccaaacatca

SEQ ID NO: 768948 - DNA, 19 bp, Mus musculus
  siRNA target sequence for 2610528O22Rik (NM_153395.1,960-978).
gcacccgttgaaaaaccat

SEQ ID NO: 768949 - DNA, 19 bp, Mus musculus
  siRNA target sequence for 2610528O22Rik (NM_153395.1,961-979).
cacccgttgaaaaaccata

SEQ ID NO: 768950 - DNA, 19 bp, Mus musculus
  siRNA target sequence for 2610528O22Rik (NM_153395.1,963-981).
cccgttgaaaaaccatatt

SEQ ID NO: 768951 - DNA, 19 bp, Mus musculus
  siRNA target sequence for 2610528O22Rik (NM_153395.1,965-983).
cgttgaaaaaccatatttt

SEQ ID NO: 768952 - DNA, 19 bp, Mus musculus
  siRNA target sequence for 2610528O22Rik (NM_153395.1,985-1003).
ctatttgcatgcgtttact

SEQ ID NO: 768953 - DNA, 19 bp, Mus musculus
  siRNA target sequence for 2610528O22Rik (NM_153395.1,1049-1067).
gactgagtgtgaaatattt

SEQ ID NO: 768954 - DNA, 19 bp, Mus musculus
  siRNA target sequence for 2610528O22Rik (NM_153395.1,1152-1170).
gtgcagcctcagttactaa

SEQ ID NO: 768955 - DNA, 19 bp, Mus musculus
  siRNA target sequence for 2610528O22Rik (NM_153395.1,1163-1181).
gttactaaggtcattttgt

SEQ ID NO: 768956 - DNA, 19 bp, Mus musculus
  siRNA target sequence for 2610528O22Rik (NM_153395.1,1180-1198).
gtcagtcgtatgacatgaa

SEQ ID NO: 768957 - DNA, 19 bp, Mus musculus
  siRNA target sequence for 2610528O22Rik (NM_153395.1,1211-1229).
caaggttttccgagacatt

SEQ ID NO: 768958 - DNA, 19 bp, Mus musculus
  siRNA target sequence for 2610528O22Rik (NM_153395.1,1215-1233).
gttttccgagacattgtga

SEQ ID NO: 768959 - DNA, 19 bp, Mus musculus
  siRNA target sequence for 2610528O22Rik (NM_153395.1,1237-1255).
cactggggtcttttatcca

SEQ ID NO: 768960 - DNA, 19 bp, Mus musculus
  siRNA target sequence for 2610528O22Rik (NM_153395.1,1297-1315).
ccaaccaagctggaaacaa

SEQ ID NO: 768961 - DNA, 19 bp, Mus musculus
  siRNA target sequence for 2610528O22Rik (NM_153395.1,1555-1573).
gaatcaccaccatgataga

SEQ ID NO: 768962 - DNA, 19 bp, Mus musculus
  siRNA target sequence for 2610528O22Rik (NM_153395.1,1781-1799).
ggctgccaccgagaacatt

SEQ ID NO: 768963 - DNA, 19 bp, Mus musculus
  siRNA target sequence for 2610528O22Rik (NM_153395.1,1852-1870).
cctcgagagacgcctttat

SEQ ID NO: 768964 - DNA, 19 bp, Mus musculus
  siRNA target sequence for 2610528O22Rik (NM_153395.1,1853-1871).
ctcgagagacgcctttata

SEQ ID NO: 768965 - DNA, 19 bp, Mus musculus
  siRNA target sequence for 2610528O22Rik (NM_153395.1,1856-1874).
gagagacgcctttataact

SEQ ID NO: 768966 - DNA, 19 bp, Mus musculus
  siRNA target sequence for 2610528O22Rik (NM_153395.1,1863-1881).
gcctttataactgcaatat

SEQ ID NO: 768967 - DNA, 19 bp, Mus musculus
  siRNA target sequence for 2610528O22Rik (NM_153395.1,1889-1907).
ctccttgccgccacactat

SEQ ID NO: 768968 - DNA, 19 bp, Mus musculus
  siRNA target sequence for 2610528O22Rik (NM_153395.1,1935-1953).
gcggcgacactctccaata

SEQ ID NO: 768969 - DNA, 19 bp, Mus musculus
  siRNA target sequence for 2610528O22Rik (NM_153395.1,1936-1954).
cggcgacactctccaataa

SEQ ID NO: 768970 - DNA, 19 bp, Mus musculus
  siRNA target sequence for 2610528O22Rik (NM_153395.1,1937-1955).
ggcgacactctccaataaa

SEQ ID NO: 768971 - DNA, 19 bp, Mus musculus
  siRNA target sequence for 2610528O22Rik (NM_153395.1,1938-1956).
gcgacactctccaataaat

SEQ ID NO: 768972 - DNA, 19 bp, Mus musculus
  siRNA target sequence for 2610528O22Rik (NM_153395.1,1940-1958).
gacactctccaataaatca

SEQ ID NO: 768973 - DNA, 19 bp, Mus musculus
  siRNA target sequence for 2610528O22Rik (NM_153395.1,1942-1960).
cactctccaataaatcata

SEQ ID NO: 768974 - DNA, 19 bp, Mus musculus
  siRNA target sequence for 2610528O22Rik (NM_153395.1,1971-1989).
ggccaaagtgttatgatga

SEQ ID NO: 768975 - DNA, 19 bp, Mus musculus
  siRNA target sequence for 2610528O22Rik (NM_153395.1,1972-1990).
gccaaagtgttatgatgat

SEQ ID NO: 768976 - DNA, 19 bp, Mus musculus
  siRNA target sequence for 2610528O22Rik (NM_153395.1,1974-1992).
caaagtgttatgatgatca

SEQ ID NO: 768977 - DNA, 19 bp, Mus musculus
  siRNA target sequence for 2610528O22Rik (NM_153395.1,2064-2082).
gtgatgctgacttccaaaa

SEQ ID NO: 768978 - DNA, 19 bp, Mus musculus
  siRNA target sequence for 2610528O22Rik (NM_153395.1,2129-2147).
cgctgttcttggaacatca

SEQ ID NO: 768979 - DNA, 19 bp, Mus musculus
  siRNA target sequence for 2610528O22Rik (NM_153395.1,2192-2210).
gggactaaagcctagtagt

SEQ ID NO: 768980 - DNA, 19 bp, Mus musculus
  siRNA target sequence for 2610528O22Rik (NM_153395.1,2303-2321).
cctttctagactgtttgaa

SEQ ID NO: 768981 - DNA, 19 bp, Mus musculus
  siRNA target sequence for 2610528O22Rik (NM_153395.1,2340-2358).
gacgtatctttgcatcatt

SEQ ID NO: 768982 - DNA, 19 bp, Mus musculus
  siRNA target sequence for 2610528O22Rik (NM_153395.1,2397-2415).
gatatggcctatggaaata

SEQ ID NO: 768983 - DNA, 19 bp, Mus musculus
  siRNA target sequence for 2610528O22Rik (NM_153395.1,2437-2455).
ctgttgccaaactattaga

SEQ ID NO: 768984 - DNA, 19 bp, Mus musculus
  siRNA target sequence for 2610528O22Rik (NM_153395.1,2439-2457).
gttgccaaactattagaaa

SEQ ID NO: 768985 - DNA, 19 bp, Mus musculus
  siRNA target sequence for 2610528O22Rik (NM_153395.1,2458-2476).
ctggtcttgttaatatgca

SEQ ID NO: 768986 - DNA, 19 bp, Mus musculus
  siRNA target sequence for 2610528O22Rik (NM_153395.1,2474-2492).
gcacaggatagagatttta

SEQ ID NO: 768987 - DNA, 19 bp, Mus musculus
  siRNA target sequence for 2610528O22Rik (NM_153395.1,2691-2709).
gatattcgactcaagcaat

SEQ ID NO: 768988 - DNA, 19 bp, Mus musculus
  siRNA target sequence for 2610528O22Rik (NM_153395.1,2697-2715).
cgactcaagcaattagaat

SEQ ID NO: 768989 - DNA, 19 bp, Mus musculus
  siRNA target sequence for 2610528O22Rik (NM_153395.1,2758-2776).
ctgggtggccgttagttct

SEQ ID NO: 768990 - DNA, 19 bp, Mus musculus
  siRNA target sequence for 2610528O22Rik (NM_153395.1,2805-2823).
caaggagaatcattaataa

SEQ ID NO: 768991 - DNA, 19 bp, Mus musculus
  siRNA target sequence for 2610528O22Rik (NM_153395.1,2808-2826).
ggagaatcattaataagaa

SEQ ID NO: 768992 - DNA, 19 bp, Mus musculus
  siRNA target sequence for 2610528O22Rik (NM_153395.1,2849-2867).
ggttgtgacagattttcta

SEQ ID NO: 768993 - DNA, 19 bp, Mus musculus
  siRNA target sequence for 2610528O22Rik (NM_153395.1,2878-2896).
cttgttcttgcctacagat

SEQ ID NO: 768994 - DNA, 19 bp, Mus musculus
  siRNA target sequence for 2610528O22Rik (NM_153395.1,2884-2902).
cttgcctacagatagttgt

SEQ ID NO: 768995 - DNA, 19 bp, Mus musculus
  siRNA target sequence for 2610528O22Rik (NM_153395.1,2887-2905).
gcctacagatagttgtaga

SEQ ID NO: 768996 - DNA, 19 bp, Mus musculus
  siRNA target sequence for 2610528O22Rik (NM_153395.1,2914-2932).
gtagctttggactgcataa

SEQ ID NO: 768997 - DNA, 19 bp, Mus musculus
  siRNA target sequence for 2610528O22Rik (NM_153395.1,2917-2935).
gctttggactgcataacca

SEQ ID NO: 768998 - DNA, 19 bp, Mus musculus
  siRNA target sequence for 2610528O22Rik (NM_153395.1,2918-2936).
ctttggactgcataaccaa

SEQ ID NO: 768999 - DNA, 19 bp, Mus musculus
  siRNA target sequence for 2610528O22Rik (NM_153395.1,2927-2945).
gcataaccaagaacttaat

SEQ ID NO: 769000 - DNA, 19 bp, Mus musculus
  siRNA target sequence for 2610528O22Rik (NM_153395.1,2937-2955).
gaacttaatattagcttaa

SEQ ID NO: 769001 - DNA, 19 bp, Mus musculus
  siRNA target sequence for 2610528O22Rik (NM_153395.1,2940-2958).
cttaatattagcttaacgt

SEQ ID NO: 769002 - DNA, 19 bp, Mus musculus
  siRNA target sequence for 2610528O22Rik (NM_153395.1,2964-2982).
ggcttattgtggaatatat

SEQ ID NO: 769003 - DNA, 19 bp, Mus musculus
  siRNA target sequence for 2610528O22Rik (NM_153395.1,2966-2984).
cttattgtggaatatatca

SEQ ID NO: 769004 - DNA, 19 bp, Mus musculus
  siRNA target sequence for 2610528O22Rik (NM_153395.1,3284-3302).
ggaccgagttcgagaatct

SEQ ID NO: 769005 - DNA, 19 bp, Mus musculus
  siRNA target sequence for 2610528O22Rik (NM_153395.1,3285-3303).
gaccgagttcgagaatctt

SEQ ID NO: 769006 - DNA, 19 bp, Mus musculus
  siRNA target sequence for 2610528O22Rik (NM_153395.1,3288-3306).
cgagttcgagaatcttcta

SEQ ID NO: 769007 - DNA, 19 bp, Mus musculus
  siRNA target sequence for 2610528O22Rik (NM_153395.1,3393-3411).
gagacctgggtattgacat

SEQ ID NO: 769008 - DNA, 19 bp, Mus musculus
  siRNA target sequence for 2610528O22Rik (NM_153395.1,3511-3529).
cagctgcactcagtaaaaa

SEQ ID NO: 769009 - DNA, 19 bp, Mus musculus
  siRNA target sequence for 2610528O22Rik (NM_153395.1,3513-3531).
gctgcactcagtaaaaaca

SEQ ID NO: 769010 - DNA, 19 bp, Mus musculus
  siRNA target sequence for 2610528O22Rik (NM_153395.1,3517-3535).
cactcagtaaaaacaatga

SEQ ID NO: 769011 - DNA, 19 bp, Mus musculus
  siRNA target sequence for 2610528O22Rik (NM_153395.1,3672-3690).
ctgagcaggccgtttgtga

SEQ ID NO: 769012 - DNA, 19 bp, Mus musculus
  siRNA target sequence for 2610528O22Rik (NM_153395.1,3905-3923).
ctaccagcacataaaagct

SEQ ID NO: 769013 - DNA, 19 bp, Mus musculus
  siRNA target sequence for 2610528O22Rik (NM_153395.1,3994-4012).
ctgacgcctctcctttcat

SEQ ID NO: 769014 - DNA, 19 bp, Mus musculus
  siRNA target sequence for 2610528O22Rik (NM_153395.1,4105-4123).
cagaaaacatgcagatcat

SEQ ID NO: 769015 - DNA, 19 bp, Mus musculus
  siRNA target sequence for 2610528O22Rik (NM_153395.1,4121-4139).
catgtacccggctatattt

SEQ ID NO: 769016 - DNA, 19 bp, Mus musculus
  siRNA target sequence for 2610528O22Rik (NM_153395.1,4148-4166).
gctggcgttcgtagagttt

SEQ ID NO: 769017 - DNA, 19 bp, Mus musculus
  siRNA target sequence for 2610528O22Rik (NM_153395.1,4149-4167).
ctggcgttcgtagagtttt

SEQ ID NO: 769018 - DNA, 19 bp, Mus musculus
  siRNA target sequence for 2610528O22Rik (NM_153395.1,4152-4170).
gcgttcgtagagttttcct

SEQ ID NO: 769019 - DNA, 19 bp, Mus musculus
  siRNA target sequence for 2610528O22Rik (NM_153395.1,4169-4187).
ctgtaaacctccacagtat

SEQ ID NO: 769020 - DNA, 19 bp, Mus musculus
  siRNA target sequence for 2610528O22Rik (NM_153395.1,4236-4254).
gaatgggtagccttgaatt

SEQ ID NO: 769021 - DNA, 19 bp, Mus musculus
  siRNA target sequence for 2610528O22Rik (NM_153395.1,4267-4285).
ctgaaagatctttagaagt

SEQ ID NO: 769022 - DNA, 19 bp, Mus musculus
  siRNA target sequence for 2610528O22Rik (NM_153395.1,4302-4320).
caaaaaacggcttgtcata

SEQ ID NO: 769023 - DNA, 19 bp, Mus musculus
  siRNA target sequence for 2610528O22Rik (NM_153395.1,4346-4364).
ccagaatattattaagact

SEQ ID NO: 769024 - DNA, 19 bp, Mus musculus
  siRNA target sequence for 2610528O22Rik (NM_153395.1,4371-4389).
gttcctctcagtttgaagt

SEQ ID NO: 769025 - DNA, 19 bp, Mus musculus
  siRNA target sequence for 2610528O22Rik (NM_153395.1,4480-4498).
cttcctcggggaaatttga

SEQ ID NO: 769026 - DNA, 19 bp, Mus musculus
  siRNA target sequence for 2610528O22Rik (NM_153395.1,4558-4576).
ctccagataatctctctat

SEQ ID NO: 769027 - DNA, 19 bp, Mus musculus
  siRNA target sequence for 2610528O22Rik (NM_153395.1,4600-4618).
gtattgatgttgaagttgt

SEQ ID NO: 769028 - DNA, 19 bp, Mus musculus
  siRNA target sequence for 2610528O22Rik (NM_153395.1,4669-4687).
cgttcgtgggtcagatgat

SEQ ID NO: 769029 - DNA, 19 bp, Mus musculus
  siRNA target sequence for 2610528O22Rik (NM_153395.1,4741-4759).
cagaaattgacattcgttt

SEQ ID NO: 769030 - DNA, 19 bp, Mus musculus
  siRNA target sequence for 2610528O22Rik (NM_153395.1,4788-4806).
gaaacattgctccagtttt

SEQ ID NO: 769031 - DNA, 19 bp, Mus musculus
  siRNA target sequence for 2610528O22Rik (NM_153395.1,4857-4875).
gcactctctgtgcttttaa

SEQ ID NO: 769032 - DNA, 19 bp, Mus musculus
  siRNA target sequence for 2610528O22Rik (NM_153395.1,4959-4977).
gaaatcatattcgttctaa

SEQ ID NO: 769033 - DNA, 19 bp, Mus musculus
  siRNA target sequence for 2610528O22Rik (NM_153395.1,4964-4982).
catattcgttctaaaagct

SEQ ID NO: 769034 - DNA, 19 bp, Mus musculus
  siRNA target sequence for 2610528O22Rik (NM_153395.1,5012-5030).
gacccagcccgagaatgtt

SEQ ID NO: 769035 - DNA, 19 bp, Mus musculus
  siRNA target sequence for 2610528O22Rik (NM_153395.1,5014-5032).
cccagcccgagaatgttga

SEQ ID NO: 769036 - DNA, 19 bp, Mus musculus
  siRNA target sequence for 2610528O22Rik (NM_153395.1,5015-5033).
ccagcccgagaatgttgat

SEQ ID NO: 769037 - DNA, 19 bp, Mus musculus
  siRNA target sequence for C130040D16Rik (NM_153396.1,448-466).
ccctctgggccaaattgga

SEQ ID NO: 769038 - DNA, 19 bp, Mus musculus
  siRNA target sequence for C130040D16Rik (NM_153396.1,475-493).
gcagtcacaaagactacaa

SEQ ID NO: 769039 - DNA, 19 bp, Mus musculus
  siRNA target sequence for C130040D16Rik (NM_153396.1,583-601).
gagccaaggtggttgttat

SEQ ID NO: 769040 - DNA, 19 bp, Mus musculus
  siRNA target sequence for C130040D16Rik (NM_153396.1,622-640).
cccgcaacaatgtcttaca

SEQ ID NO: 769041 - DNA, 19 bp, Mus musculus
  siRNA target sequence for C130040D16Rik (NM_153396.1,623-641).
ccgcaacaatgtcttacat

SEQ ID NO: 769042 - DNA, 19 bp, Mus musculus
  siRNA target sequence for C130040D16Rik (NM_153396.1,709-727).
ccggagccatcgaccatat

SEQ ID NO: 769043 - DNA, 19 bp, Mus musculus
  siRNA target sequence for C130040D16Rik (NM_153396.1,736-754).
gtcagctccagctaatcct

SEQ ID NO: 769044 - DNA, 19 bp, Mus musculus
  siRNA target sequence for C130040D16Rik (NM_153396.1,778-796).
gcattgagatccatgtcaa

SEQ ID NO: 769045 - DNA, 19 bp, Mus musculus
  siRNA target sequence for C130040D16Rik (NM_153396.1,837-855).
gagaatgaacggataggat

SEQ ID NO: 769046 - DNA, 19 bp, Mus musculus
  siRNA target sequence for C130040D16Rik (NM_153396.1,866-884).
ggtgcaccccaaaactcat

SEQ ID NO: 769047 - DNA, 19 bp, Mus musculus
  siRNA target sequence for C130040D16Rik (NM_153396.1,875-893).
caaaactcatcctgtatca

SEQ ID NO: 769048 - DNA, 19 bp, Mus musculus
  siRNA target sequence for C130040D16Rik (NM_153396.1,938-956).
caccttggaaggatttcgt

SEQ ID NO: 769049 - DNA, 19 bp, Mus musculus
  siRNA target sequence for C130040D16Rik (NM_153396.1,944-962).
ggaaggatttcgtcgaaaa

SEQ ID NO: 769050 - DNA, 19 bp, Mus musculus
  siRNA target sequence for C130040D16Rik (NM_153396.1,948-966).
ggatttcgtcgaaaagaat

SEQ ID NO: 769051 - DNA, 19 bp, Mus musculus
  siRNA target sequence for C130040D16Rik (NM_153396.1,949-967).
gatttcgtcgaaaagaatt

SEQ ID NO: 769052 - DNA, 19 bp, Mus musculus
  siRNA target sequence for C130040D16Rik (NM_153396.1,977-995).
gctagccattgccattaca

SEQ ID NO: 769053 - DNA, 19 bp, Mus musculus
  siRNA target sequence for C130040D16Rik (NM_153396.1,983-1001).
cattgccattacagcaaat

SEQ ID NO: 769054 - DNA, 19 bp, Mus musculus
  siRNA target sequence for C130040D16Rik (NM_153396.1,987-1005).
gccattacagcaaatttta

SEQ ID NO: 769055 - DNA, 19 bp, Mus musculus
  siRNA target sequence for C130040D16Rik (NM_153396.1,1050-1068).
ggcgtggcttttatattca

SEQ ID NO: 769056 - DNA, 19 bp, Mus musculus
  siRNA target sequence for C130040D16Rik (NM_153396.1,1051-1069).
gcgtggcttttatattcaa

SEQ ID NO: 769057 - DNA, 19 bp, Mus musculus
  siRNA target sequence for C130040D16Rik (NM_153396.1,1105-1123).
gtattgacttagagaacat

SEQ ID NO: 769058 - DNA, 19 bp, Mus musculus
  siRNA target sequence for C130040D16Rik (NM_153396.1,1121-1139).
catcgtctactacaaagat

SEQ ID NO: 769059 - DNA, 19 bp, Mus musculus
  siRNA target sequence for C130040D16Rik (NM_153396.1,1192-1210).
gggtgatcctgcatgacta

SEQ ID NO: 769060 - DNA, 19 bp, Mus musculus
  siRNA target sequence for C130040D16Rik (NM_153396.1,1215-1233).
gacacggagctgttgcttt

SEQ ID NO: 769061 - DNA, 19 bp, Mus musculus
  siRNA target sequence for C130040D16Rik (NM_153396.1,1278-1296).
gaggccgcagacttctcta

SEQ ID NO: 769062 - DNA, 19 bp, Mus musculus
  siRNA target sequence for C130040D16Rik (NM_153396.1,1320-1338).
gatttcgccatcaatcact

SEQ ID NO: 769063 - DNA, 19 bp, Mus musculus
  siRNA target sequence for C130040D16Rik (NM_153396.1,1375-1393).
gcatgtacgcctctgaaaa

SEQ ID NO: 769064 - DNA, 19 bp, Mus musculus
  siRNA target sequence for C130040D16Rik (NM_153396.1,1376-1394).
catgtacgcctctgaaaat

SEQ ID NO: 769065 - DNA, 19 bp, Mus musculus
  siRNA target sequence for C130040D16Rik (NM_153396.1,1415-1433).
gaacggacaccagttacta

SEQ ID NO: 769066 - DNA, 19 bp, Mus musculus
  siRNA target sequence for C130040D16Rik (NM_153396.1,1418-1436).
cggacaccagttactagta

SEQ ID NO: 769067 - DNA, 19 bp, Mus musculus
  siRNA target sequence for C130040D16Rik (NM_153396.1,1579-1597).
gggaaagcatttataggtt

SEQ ID NO: 769068 - DNA, 19 bp, Mus musculus
  siRNA target sequence for C130040D16Rik (NM_153396.1,1614-1632).
cctgagaacgtgagcaaaa

SEQ ID NO: 769069 - DNA, 19 bp, Mus musculus
  siRNA target sequence for C130040D16Rik (NM_153396.1,1615-1633).
ctgagaacgtgagcaaaaa

SEQ ID NO: 769070 - DNA, 19 bp, Mus musculus
  siRNA target sequence for C130040D16Rik (NM_153396.1,1617-1635).
gagaacgtgagcaaaaact

SEQ ID NO: 769071 - DNA, 19 bp, Mus musculus
  siRNA target sequence for C130040D16Rik (NM_153396.1,1628-1646).
caaaaacttcagccaatat

SEQ ID NO: 769072 - DNA, 19 bp, Mus musculus
  siRNA target sequence for C130040D16Rik (NM_153396.1,1652-1670).
cgaccctgtcactaggtat

SEQ ID NO: 769073 - DNA, 19 bp, Mus musculus
  siRNA target sequence for C130040D16Rik (NM_153396.1,1663-1681).
ctaggtatcccaatatcaa

SEQ ID NO: 769074 - DNA, 19 bp, Mus musculus
  siRNA target sequence for C130040D16Rik (NM_153396.1,1671-1689).
cccaatatcaacatcaact

SEQ ID NO: 769075 - DNA, 19 bp, Mus musculus
  siRNA target sequence for C130040D16Rik (NM_153396.1,1702-1720).
gccaggtgcgccatttata

SEQ ID NO: 769076 - DNA, 19 bp, Mus musculus
  siRNA target sequence for C130040D16Rik (NM_153396.1,1707-1725).
gtgcgccatttatacgata

SEQ ID NO: 769077 - DNA, 19 bp, Mus musculus
  siRNA target sequence for C130040D16Rik (NM_153396.1,1721-1739).
cgatagcggagaaacaaaa

SEQ ID NO: 769078 - DNA, 19 bp, Mus musculus
  siRNA target sequence for C130040D16Rik (NM_153396.1,1726-1744).
gcggagaaacaaaagatat

SEQ ID NO: 769079 - DNA, 19 bp, Mus musculus
  siRNA target sequence for C130040D16Rik (NM_153396.1,1858-1876).
gctattcaggagtcaatgt

SEQ ID NO: 769080 - DNA, 19 bp, Mus musculus
  siRNA target sequence for C130040D16Rik (NM_153396.1,1884-1902).
ctcactatgtcttggaaaa

SEQ ID NO: 769081 - DNA, 19 bp, Mus musculus
  siRNA target sequence for C130040D16Rik (NM_153396.1,1886-1904).
cactatgtcttggaaaagt

SEQ ID NO: 769082 - DNA, 19 bp, Mus musculus
  siRNA target sequence for C130040D16Rik (NM_153396.1,1918-1936).
gtgcgatcatccacagata

SEQ ID NO: 769083 - DNA, 19 bp, Mus musculus
  siRNA target sequence for C130040D16Rik (NM_153396.1,1942-1960).
ccgatctaatagactttga

SEQ ID NO: 769084 - DNA, 19 bp, Mus musculus
  siRNA target sequence for C130040D16Rik (NM_153396.1,1943-1961).
cgatctaatagactttgat

SEQ ID NO: 769085 - DNA, 19 bp, Mus musculus
  siRNA target sequence for C130040D16Rik (NM_153396.1,1947-1965).
ctaatagactttgattctt

SEQ ID NO: 769086 - DNA, 19 bp, Mus musculus
  siRNA target sequence for C130040D16Rik (NM_153396.1,1963-1981).
ctttggatgagcaaaacgt

SEQ ID NO: 769087 - DNA, 19 bp, Mus musculus
  siRNA target sequence for C130040D16Rik (NM_153396.1,1973-1991).
gcaaaacgtggagaagaat

SEQ ID NO: 769088 - DNA, 19 bp, Mus musculus
  siRNA target sequence for C130040D16Rik (NM_153396.1,2028-2046).
ggtatctctcccatcatga

SEQ ID NO: 769089 - DNA, 19 bp, Mus musculus
  siRNA target sequence for C130040D16Rik (NM_153396.1,2107-2125).
cgcagttctacgagatgtt

SEQ ID NO: 769090 - DNA, 19 bp, Mus musculus
  siRNA target sequence for C130040D16Rik (NM_153396.1,2109-2127).
cagttctacgagatgttca

SEQ ID NO: 769091 - DNA, 19 bp, Mus musculus
  siRNA target sequence for C130040D16Rik (NM_153396.1,2184-2202).
ctgatagccagcaccaaat

SEQ ID NO: 769092 - DNA, 19 bp, Mus musculus
  siRNA target sequence for C130040D16Rik (NM_153396.1,2249-2267).
gcgttcgcccaaggataaa

SEQ ID NO: 769093 - DNA, 19 bp, Mus musculus
  siRNA target sequence for C130040D16Rik (NM_153396.1,2250-2268).
cgttcgcccaaggataaaa

SEQ ID NO: 769094 - DNA, 19 bp, Mus musculus
  siRNA target sequence for C130040D16Rik (NM_153396.1,2330-2348).
gcctccccggagctacaaa

SEQ ID NO: 769095 - DNA, 19 bp, Mus musculus
  siRNA target sequence for C130040D16Rik (NM_153396.1,2499-2517).
ggctccataaagaaagagt

SEQ ID NO: 769096 - DNA, 19 bp, Mus musculus
  siRNA target sequence for C130040D16Rik (NM_153396.1,2500-2518).
gctccataaagaaagagtt

SEQ ID NO: 769097 - DNA, 19 bp, Mus musculus
  siRNA target sequence for C130040D16Rik (NM_153396.1,2535-2553).
ggcagcgacacgtgctatt

SEQ ID NO: 769098 - DNA, 19 bp, Mus musculus
  siRNA target sequence for C130040D16Rik (NM_153396.1,2536-2554).
gcagcgacacgtgctattt

SEQ ID NO: 769099 - DNA, 19 bp, Mus musculus
  siRNA target sequence for C130040D16Rik (NM_153396.1,2802-2820).
ggaggcccagcattcatgt

SEQ ID NO: 769100 - DNA, 19 bp, Mus musculus
  siRNA target sequence for C130040D16Rik (NM_153396.1,2819-2837).
gtcaccagtgttattcaat

SEQ ID NO: 769101 - DNA, 19 bp, Mus musculus
  siRNA target sequence for Tieg3 (NM_153401.1,265-283).
ccaaaggacttccattctt

SEQ ID NO: 769102 - DNA, 19 bp, Mus musculus
  siRNA target sequence for Tieg3 (NM_153401.1,349-367).
gttccttcccaagtagtta

SEQ ID NO: 769103 - DNA, 19 bp, Mus musculus
  siRNA target sequence for Tieg3 (NM_153401.1,634-652).
ggcttactcgtcactaact

SEQ ID NO: 769104 - DNA, 19 bp, Mus musculus
  siRNA target sequence for Tieg3 (NM_153401.1,635-653).
gcttactcgtcactaactt

SEQ ID NO: 769105 - DNA, 19 bp, Mus musculus
  siRNA target sequence for Tieg3 (NM_153401.1,736-754).
gttcagacctgcttaccaa

SEQ ID NO: 769106 - DNA, 19 bp, Mus musculus
  siRNA target sequence for Tieg3 (NM_153401.1,741-759).
gacctgcttaccaaagaat

SEQ ID NO: 769107 - DNA, 19 bp, Mus musculus
  siRNA target sequence for Tieg3 (NM_153401.1,1138-1156).
cgaaggaggaactatgttt

SEQ ID NO: 769108 - DNA, 19 bp, Mus musculus
  siRNA target sequence for Eif2c3 (NM_153402.1,187-205).
ggcaaacccattaaactgt

SEQ ID NO: 769109 - DNA, 19 bp, Mus musculus
  siRNA target sequence for Eif2c3 (NM_153402.1,204-222).
gttggctaactgttttcaa

SEQ ID NO: 769110 - DNA, 19 bp, Mus musculus
  siRNA target sequence for Eif2c3 (NM_153402.1,207-225).
ggctaactgttttcaagtt

SEQ ID NO: 769111 - DNA, 19 bp, Mus musculus
  siRNA target sequence for Eif2c3 (NM_153402.1,319-337).
gttcagcattttaaagtga

SEQ ID NO: 769112 - DNA, 19 bp, Mus musculus
  siRNA target sequence for Eif2c3 (NM_153402.1,347-365).
gagaccgtagaccagttta

SEQ ID NO: 769113 - DNA, 19 bp, Mus musculus
  siRNA target sequence for Eif2c3 (NM_153402.1,351-369).
ccgtagaccagtttatgat

SEQ ID NO: 769114 - DNA, 19 bp, Mus musculus
  siRNA target sequence for Eif2c3 (NM_153402.1,420-438).
ggtagatttagatgttaca

SEQ ID NO: 769115 - DNA, 19 bp, Mus musculus
  siRNA target sequence for Eif2c3 (NM_153402.1,455-473).
gaaaagatcgacctttcaa

SEQ ID NO: 769116 - DNA, 19 bp, Mus musculus
  siRNA target sequence for Eif2c3 (NM_153402.1,610-628).
cgacatctgccctctatga

SEQ ID NO: 769117 - DNA, 19 bp, Mus musculus
  siRNA target sequence for Eif2c3 (NM_153402.1,611-629).
gacatctgccctctatgaa

SEQ ID NO: 769118 - DNA, 19 bp, Mus musculus
  siRNA target sequence for Eif2c3 (NM_153402.1,613-631).
catctgccctctatgaaat

SEQ ID NO: 769119 - DNA, 19 bp, Mus musculus
  siRNA target sequence for Eif2c3 (NM_153402.1,616-634).
ctgccctctatgaaatata

SEQ ID NO: 769120 - DNA, 19 bp, Mus musculus
  siRNA target sequence for Eif2c3 (NM_153402.1,636-654).
gcctgtggggcgttccttt

SEQ ID NO: 769121 - DNA, 19 bp, Mus musculus
  siRNA target sequence for Eif2c3 (NM_153402.1,637-655).
cctgtggggcgttcctttt

SEQ ID NO: 769122 - DNA, 19 bp, Mus musculus
  siRNA target sequence for Eif2c3 (NM_153402.1,657-675).
ctcagctccagaaggatat

SEQ ID NO: 769123 - DNA, 19 bp, Mus musculus
  siRNA target sequence for Eif2c3 (NM_153402.1,786-804).
caaagcacaacctgtaatt

SEQ ID NO: 769124 - DNA, 19 bp, Mus musculus
  siRNA target sequence for Eif2c3 (NM_153402.1,865-883).
gattctcatcgggtaaaat

SEQ ID NO: 769125 - DNA, 19 bp, Mus musculus
  siRNA target sequence for Eif2c3 (NM_153402.1,871-889).
catcgggtaaaattcacta

SEQ ID NO: 769126 - DNA, 19 bp, Mus musculus
  siRNA target sequence for Eif2c3 (NM_153402.1,885-903).
cactaaggagataaaaggt

SEQ ID NO: 769127 - DNA, 19 bp, Mus musculus
  siRNA target sequence for Eif2c3 (NM_153402.1,894-912).
gataaaaggtctgaaagtt

SEQ ID NO: 769128 - DNA, 19 bp, Mus musculus
  siRNA target sequence for Eif2c3 (NM_153402.1,940-958).
cggaaataccgtgtttgta

SEQ ID NO: 769129 - DNA, 19 bp, Mus musculus
  siRNA target sequence for Eif2c3 (NM_153402.1,1026-1044).
gaggactgtggctcagtat

SEQ ID NO: 769130 - DNA, 19 bp, Mus musculus
  siRNA target sequence for Eif2c3 (NM_153402.1,1039-1057).
cagtatttcagagaaaagt

SEQ ID NO: 769131 - DNA, 19 bp, Mus musculus
  siRNA target sequence for Eif2c3 (NM_153402.1,1128-1146).
gccactagaagtctgtaat

SEQ ID NO: 769132 - DNA, 19 bp, Mus musculus
  siRNA target sequence for Eif2c3 (NM_153402.1,1157-1175).
ggcaaaggtgtatcaagaa

SEQ ID NO: 769133 - DNA, 19 bp, Mus musculus
  siRNA target sequence for Eif2c3 (NM_153402.1,1158-1176).
gcaaaggtgtatcaagaaa

SEQ ID NO: 769134 - DNA, 19 bp, Mus musculus
  siRNA target sequence for Eif2c3 (NM_153402.1,1182-1200).
ggacaatcagacttctaca

SEQ ID NO: 769135 - DNA, 19 bp, Mus musculus
  siRNA target sequence for Eif2c3 (NM_153402.1,1183-1201).
gacaatcagacttctacaa

SEQ ID NO: 769136 - DNA, 19 bp, Mus musculus
  siRNA target sequence for Eif2c3 (NM_153402.1,1231-1249).
gatagacaagaggaaatta

SEQ ID NO: 769137 - DNA, 19 bp, Mus musculus
  siRNA target sequence for Eif2c3 (NM_153402.1,1242-1260).
ggaaattagcagattggta

SEQ ID NO: 769138 - DNA, 19 bp, Mus musculus
  siRNA target sequence for Eif2c3 (NM_153402.1,1257-1275).
ggtaagaagtgcaaattat

SEQ ID NO: 769139 - DNA, 19 bp, Mus musculus
  siRNA target sequence for Eif2c3 (NM_153402.1,1442-1460).
caggagtcgaaatcaaaat

SEQ ID NO: 769140 - DNA, 19 bp, Mus musculus
  siRNA target sequence for Eif2c3 (NM_153402.1,1455-1473).
caaaatgtgggctattgct

SEQ ID NO: 769141 - DNA, 19 bp, Mus musculus
  siRNA target sequence for Eif2c3 (NM_153402.1,1748-1766).
gtgtacaagtcaagaatgt

SEQ ID NO: 769142 - DNA, 19 bp, Mus musculus
  siRNA target sequence for Eif2c3 (NM_153402.1,1800-1818).
gtgcctaaagatcaatgtt

SEQ ID NO: 769143 - DNA, 19 bp, Mus musculus
  siRNA target sequence for Eif2c3 (NM_153402.1,1915-1933).
cctgctggtgacggaaaaa

SEQ ID NO: 769144 - DNA, 19 bp, Mus musculus
  siRNA target sequence for Eif2c3 (NM_153402.1,2009-2027).
gaccccgacaggaaatcat

SEQ ID NO: 769145 - DNA, 19 bp, Mus musculus
  siRNA target sequence for Eif2c3 (NM_153402.1,2051-2069).
gggaactgctcatccaatt

SEQ ID NO: 769146 - DNA, 19 bp, Mus musculus
  siRNA target sequence for Eif2c3 (NM_153402.1,2052-2070).
ggaactgctcatccaattt

SEQ ID NO: 769147 - DNA, 19 bp, Mus musculus
  siRNA target sequence for Eif2c3 (NM_153402.1,2053-2071).
gaactgctcatccaatttt

SEQ ID NO: 769148 - DNA, 19 bp, Mus musculus
  siRNA target sequence for Eif2c3 (NM_153402.1,2093-2111).
ctactcgtataatcttcta

SEQ ID NO: 769149 - DNA, 19 bp, Mus musculus
  siRNA target sequence for Eif2c3 (NM_153402.1,2109-2127).
ctatcgggatggtgtttca

SEQ ID NO: 769150 - DNA, 19 bp, Mus musculus
  siRNA target sequence for Eif2c3 (NM_153402.1,2132-2150).
gacagttcagacaggtatt

SEQ ID NO: 769151 - DNA, 19 bp, Mus musculus
  siRNA target sequence for Eif2c3 (NM_153402.1,2173-2191).
cgagaagcctgtatcagtt

SEQ ID NO: 769152 - DNA, 19 bp, Mus musculus
  siRNA target sequence for Eif2c3 (NM_153402.1,2174-2192).
gagaagcctgtatcagttt

SEQ ID NO: 769153 - DNA, 19 bp, Mus musculus
  siRNA target sequence for Eif2c3 (NM_153402.1,2179-2197).
gcctgtatcagtttggaaa

SEQ ID NO: 769154 - DNA, 19 bp, Mus musculus
  siRNA target sequence for Eif2c3 (NM_153402.1,2189-2207).
gtttggaaaaagactatca

SEQ ID NO: 769155 - DNA, 19 bp, Mus musculus
  siRNA target sequence for Eif2c3 (NM_153402.1,2200-2218).
gactatcaacctggaataa

SEQ ID NO: 769156 - DNA, 19 bp, Mus musculus
  siRNA target sequence for Eif2c3 (NM_153402.1,2230-2248).
gttcagaagagacatcata

SEQ ID NO: 769157 - DNA, 19 bp, Mus musculus
  siRNA target sequence for Eif2c3 (NM_153402.1,2316-2334).
ggtggataccgacattact

SEQ ID NO: 769158 - DNA, 19 bp, Mus musculus
  siRNA target sequence for Eif2c3 (NM_153402.1,2328-2346).
cattactcacccatatgaa

SEQ ID NO: 769159 - DNA, 19 bp, Mus musculus
  siRNA target sequence for Eif2c3 (NM_153402.1,2333-2351).
ctcacccatatgaattcga

SEQ ID NO: 769160 - DNA, 19 bp, Mus musculus
  siRNA target sequence for Eif2c3 (NM_153402.1,2338-2356).
ccatatgaattcgactttt

SEQ ID NO: 769161 - DNA, 19 bp, Mus musculus
  siRNA target sequence for Eif2c3 (NM_153402.1,2393-2411).
gtccttcacactatcatgt

SEQ ID NO: 769162 - DNA, 19 bp, Mus musculus
  siRNA target sequence for Eif2c3 (NM_153402.1,2395-2413).
ccttcacactatcatgttt

SEQ ID NO: 769163 - DNA, 19 bp, Mus musculus
  siRNA target sequence for Eif2c3 (NM_153402.1,2396-2414).
cttcacactatcatgtttt

SEQ ID NO: 769164 - DNA, 19 bp, Mus musculus
  siRNA target sequence for Eif2c3 (NM_153402.1,2485-2503).
cgctgtacaagatctgttt

SEQ ID NO: 769165 - DNA, 19 bp, Mus musculus
  siRNA target sequence for Eif2c3 (NM_153402.1,2540-2558).
cattcagagccagatatca

SEQ ID NO: 769166 - DNA, 19 bp, Mus musculus
  siRNA target sequence for Eif2c3 (NM_153402.1,2639-2657).
ccaaggctgtacagattca

SEQ ID NO: 769167 - DNA, 19 bp, Mus musculus
  siRNA target sequence for Eif2c3 (NM_153402.1,2652-2670).
gattcaccaagatacctta

SEQ ID NO: 769168 - DNA, 19 bp, Mus musculus
  siRNA target sequence for Eif2c3 (NM_153402.1,2666-2684).
ccttacgcacaatgtactt

SEQ ID NO: 769169 - DNA, 19 bp, Mus musculus
  siRNA target sequence for Eif2c1 (NM_153403.1,92-110).
ctgtgggcaaaccaatcaa

SEQ ID NO: 769170 - DNA, 19 bp, Mus musculus
  siRNA target sequence for Eif2c1 (NM_153403.1,132-150).
ggtggacattcctaagatt

SEQ ID NO: 769171 - DNA, 19 bp, Mus musculus
  siRNA target sequence for Eif2c1 (NM_153403.1,143-161).
ctaagattgacgtttacca

SEQ ID NO: 769172 - DNA, 19 bp, Mus musculus
  siRNA target sequence for Eif2c1 (NM_153403.1,172-190).
gacatcaagccggataagt

SEQ ID NO: 769173 - DNA, 19 bp, Mus musculus
  siRNA target sequence for Eif2c1 (NM_153403.1,174-192).
catcaagccggataagtgt

SEQ ID NO: 769174 - DNA, 19 bp, Mus musculus
  siRNA target sequence for Eif2c1 (NM_153403.1,310-328).
ctgcccattggcaatgaga

SEQ ID NO: 769175 - DNA, 19 bp, Mus musculus
  siRNA target sequence for Eif2c1 (NM_153403.1,321-339).
caatgagagggttgacttt

SEQ ID NO: 769176 - DNA, 19 bp, Mus musculus
  siRNA target sequence for Eif2c1 (NM_153403.1,356-374).
gggaggggaaggatagaat

SEQ ID NO: 769177 - DNA, 19 bp, Mus musculus
  siRNA target sequence for Eif2c1 (NM_153403.1,361-379).
gggaaggatagaattttta

SEQ ID NO: 769178 - DNA, 19 bp, Mus musculus
  siRNA target sequence for Eif2c1 (NM_153403.1,754-772).
cagcgtgttcggtttacca

SEQ ID NO: 769179 - DNA, 19 bp, Mus musculus
  siRNA target sequence for Eif2c1 (NM_153403.1,991-1009).
gaacagaagcatacctatt

SEQ ID NO: 769180 - DNA, 19 bp, Mus musculus
  siRNA target sequence for Eif2c1 (NM_153403.1,1012-1030).
cccctcgaggtctgtaaca

SEQ ID NO: 769181 - DNA, 19 bp, Mus musculus
  siRNA target sequence for Eif2c1 (NM_153403.1,1013-1031).
ccctcgaggtctgtaacat

SEQ ID NO: 769182 - DNA, 19 bp, Mus musculus
  siRNA target sequence for Eif2c1 (NM_153403.1,1014-1032).
cctcgaggtctgtaacatt

SEQ ID NO: 769183 - DNA, 19 bp, Mus musculus
  siRNA target sequence for Eif2c1 (NM_153403.1,1036-1054).
gctgggcagcggtgcatta

SEQ ID NO: 769184 - DNA, 19 bp, Mus musculus
  siRNA target sequence for Eif2c1 (NM_153403.1,1039-1057).
gggcagcggtgcattaaga

SEQ ID NO: 769185 - DNA, 19 bp, Mus musculus
  siRNA target sequence for Eif2c1 (NM_153403.1,1040-1058).
ggcagcggtgcattaagaa

SEQ ID NO: 769186 - DNA, 19 bp, Mus musculus
  siRNA target sequence for Eif2c1 (NM_153403.1,1071-1089).
ccagacttcaaccatgata

SEQ ID NO: 769187 - DNA, 19 bp, Mus musculus
  siRNA target sequence for Eif2c1 (NM_153403.1,1323-1341).
caatgggattgagatcaaa

SEQ ID NO: 769188 - DNA, 19 bp, Mus musculus
  siRNA target sequence for Eif2c1 (NM_153403.1,1384-1402).
gaagaggtgctcaagaact

SEQ ID NO: 769189 - DNA, 19 bp, Mus musculus
  siRNA target sequence for Eif2c1 (NM_153403.1,1680-1698).
cctctgcctcaagatcaat

SEQ ID NO: 769190 - DNA, 19 bp, Mus musculus
  siRNA target sequence for Eif2c1 (NM_153403.1,1892-1910).
gcccacggcaggagatcat

SEQ ID NO: 769191 - DNA, 19 bp, Mus musculus
  siRNA target sequence for Eif2c1 (NM_153403.1,1893-1911).
cccacggcaggagatcatt

SEQ ID NO: 769192 - DNA, 19 bp, Mus musculus
  siRNA target sequence for Eif2c1 (NM_153403.1,2091-2109).
gcctgggatcacatatatt

SEQ ID NO: 769193 - DNA, 19 bp, Mus musculus
  siRNA target sequence for Eif2c1 (NM_153403.1,2093-2111).
ctgggatcacatatattgt

SEQ ID NO: 769194 - DNA, 19 bp, Mus musculus
  siRNA target sequence for Eif2c1 (NM_153403.1,2222-2240).
catttgagttcgacttcta

SEQ ID NO: 769195 - DNA, 19 bp, Mus musculus
  siRNA target sequence for Eif2c1 (NM_153403.1,2273-2291).
gccgaccatcccattatta

SEQ ID NO: 769196 - DNA, 19 bp, Mus musculus
  siRNA target sequence for Eif2c1 (NM_153403.1,2274-2292).
ccgaccatcccattattat

SEQ ID NO: 769197 - DNA, 19 bp, Mus musculus
  siRNA target sequence for Eif2c1 (NM_153403.1,2276-2294).
gaccatcccattattatgt

SEQ ID NO: 769198 - DNA, 19 bp, Mus musculus
  siRNA target sequence for Eif2c1 (NM_153403.1,2301-2319).
ggatgacaaccgtttcaca

SEQ ID NO: 769199 - DNA, 19 bp, Mus musculus
  siRNA target sequence for Eif2c1 (NM_153403.1,2310-2328).
ccgtttcacagcagatgaa

SEQ ID NO: 769200 - DNA, 19 bp, Mus musculus
  siRNA target sequence for Eif2c1 (NM_153403.1,2326-2344).
gaactccagatcttgacat

SEQ ID NO: 769201 - DNA, 19 bp, Mus musculus
  siRNA target sequence for Eif2c1 (NM_153403.1,2372-2390).
gcacacgttctgtctctat

SEQ ID NO: 769202 - DNA, 19 bp, Mus musculus
  siRNA target sequence for Eif2c1 (NM_153403.1,2467-2485).
ggagaggggagccacatat

SEQ ID NO: 769203 - DNA, 19 bp, Mus musculus
  siRNA target sequence for Eif2c1 (NM_153403.1,2535-2553).
ggttcaccaggatactcta

SEQ ID NO: 769204 - DNA, 19 bp, Mus musculus
  siRNA target sequence for Eif2c1 (NM_153403.1,2549-2567).
ctctacgcaccatgtactt

SEQ ID NO: 769205 - DNA, 19 bp, Mus musculus
  siRNA target sequence for 4932439K10Rik (NM_153406.1,748-766).
gagcagcgctacatggatt

SEQ ID NO: 769206 - DNA, 19 bp, Mus musculus
  siRNA target sequence for 4932439K10Rik (NM_153406.1,759-777).
catggatttggctgagaat

SEQ ID NO: 769207 - DNA, 19 bp, Mus musculus
  siRNA target sequence for 4932439K10Rik (NM_153406.1,808-826).
gtgcagcagcatttaagca

SEQ ID NO: 769208 - DNA, 19 bp, Mus musculus
  siRNA target sequence for 4932439K10Rik (NM_153406.1,900-918).
ccacatggagcggattatt

SEQ ID NO: 769209 - DNA, 19 bp, Mus musculus
  siRNA target sequence for 4932439K10Rik (NM_153406.1,954-972).
cacattggaggagtacaaa

SEQ ID NO: 769210 - DNA, 19 bp, Mus musculus
  siRNA target sequence for 4932439K10Rik (NM_153406.1,982-1000).
gccagtgaccagatagaga

SEQ ID NO: 769211 - DNA, 19 bp, Mus musculus
  siRNA target sequence for 4932439K10Rik (NM_153406.1,1073-1091).
gagacaagtccgatatcca

SEQ ID NO: 769212 - DNA, 19 bp, Mus musculus
  siRNA target sequence for 4932439K10Rik (NM_153406.1,1145-1163).
gtagcctgcaggaagatct

SEQ ID NO: 769213 - DNA, 19 bp, Mus musculus
  siRNA target sequence for 4932439K10Rik (NM_153406.1,1164-1182).
ggctcatacccgaaatgat

SEQ ID NO: 769214 - DNA, 19 bp, Mus musculus
  siRNA target sequence for 4932439K10Rik (NM_153406.1,1203-1221).
cattgctaaggtagaagat

SEQ ID NO: 769215 - DNA, 19 bp, Mus musculus
  siRNA target sequence for 4932439K10Rik (NM_153406.1,1379-1397).
ccgtgaagctgcatgacaa

SEQ ID NO: 769216 - DNA, 19 bp, Mus musculus
  siRNA target sequence for 4932439K10Rik (NM_153406.1,1411-1429).
gatctagagaatacagtta

SEQ ID NO: 769217 - DNA, 19 bp, Mus musculus
  siRNA target sequence for 4932439K10Rik (NM_153406.1,1449-1467).
gcatgacatggaaagagaa

SEQ ID NO: 769218 - DNA, 19 bp, Mus musculus
  siRNA target sequence for 4932439K10Rik (NM_153406.1,1579-1597).
gaagagatcggtgatctaa

SEQ ID NO: 769219 - DNA, 19 bp, Mus musculus
  siRNA target sequence for 4932439K10Rik (NM_153406.1,1690-1708).
cgggtgtataactacatga

SEQ ID NO: 769220 - DNA, 19 bp, Mus musculus
  siRNA target sequence for 4932439K10Rik (NM_153406.1,1691-1709).
gggtgtataactacatgaa

SEQ ID NO: 769221 - DNA, 19 bp, Mus musculus
  siRNA target sequence for 4932439K10Rik (NM_153406.1,1692-1710).
ggtgtataactacatgaat

SEQ ID NO: 769222 - DNA, 19 bp, Mus musculus
  siRNA target sequence for 4932439K10Rik (NM_153406.1,1701-1719).
ctacatgaatgctgttgaa

SEQ ID NO: 769223 - DNA, 19 bp, Mus musculus
  siRNA target sequence for 4932439K10Rik (NM_153406.1,1707-1725).
gaatgctgttgaaagagat

SEQ ID NO: 769224 - DNA, 19 bp, Mus musculus
  siRNA target sequence for 4932439K10Rik (NM_153406.1,1783-1801).
ccaactcccacagtaaaaa

SEQ ID NO: 769225 - DNA, 19 bp, Mus musculus
  siRNA target sequence for 4932439K10Rik (NM_153406.1,1818-1836).
cgacagtgcatctcaagta

SEQ ID NO: 769226 - DNA, 19 bp, Mus musculus
  siRNA target sequence for 4932439K10Rik (NM_153406.1,1935-1953).
cataagtggtccaatctca

SEQ ID NO: 769227 - DNA, 19 bp, Mus musculus
  siRNA target sequence for 4932439K10Rik (NM_153406.1,1966-1984).
ctgacagccttgtcagata

SEQ ID NO: 769228 - DNA, 19 bp, Mus musculus
  siRNA target sequence for 4932439K10Rik (NM_153406.1,2011-2029).
gtacaagagcatctactaa

SEQ ID NO: 769229 - DNA, 19 bp, Mus musculus
  siRNA target sequence for 4932439K10Rik (NM_153406.1,2103-2121).
gtctcgacggagtagtgaa

SEQ ID NO: 769230 - DNA, 19 bp, Mus musculus
  siRNA target sequence for 4932439K10Rik (NM_153406.1,2107-2125).
cgacggagtagtgaagaaa

SEQ ID NO: 769231 - DNA, 19 bp, Mus musculus
  siRNA target sequence for 4932439K10Rik (NM_153406.1,2108-2126).
gacggagtagtgaagaaat

SEQ ID NO: 769232 - DNA, 19 bp, Mus musculus
  siRNA target sequence for 4932439K10Rik (NM_153406.1,2110-2128).
cggagtagtgaagaaatga

SEQ ID NO: 769233 - DNA, 19 bp, Mus musculus
  siRNA target sequence for 4932439K10Rik (NM_153406.1,2111-2129).
ggagtagtgaagaaatgaa

SEQ ID NO: 769234 - DNA, 19 bp, Mus musculus
  siRNA target sequence for 4932439K10Rik (NM_153406.1,2282-2300).
cagcattggcaagagaata

SEQ ID NO: 769235 - DNA, 19 bp, Mus musculus
  siRNA target sequence for 4932439K10Rik (NM_153406.1,2406-2424).
ggctttctgcgcattgctt

SEQ ID NO: 769236 - DNA, 19 bp, Mus musculus
  siRNA target sequence for 4932439K10Rik (NM_153406.1,2414-2432).
gcgcattgcttcataccta

SEQ ID NO: 769237 - DNA, 19 bp, Mus musculus
  siRNA target sequence for 4932439K10Rik (NM_153406.1,2415-2433).
cgcattgcttcatacctat

SEQ ID NO: 769238 - DNA, 19 bp, Mus musculus
  siRNA target sequence for 4932439K10Rik (NM_153406.1,2461-2479).
ctgaacagtcaagataaga

SEQ ID NO: 769239 - DNA, 19 bp, Mus musculus
  siRNA target sequence for 4932439K10Rik (NM_153406.1,2463-2481).
gaacagtcaagataagaaa

SEQ ID NO: 769240 - DNA, 19 bp, Mus musculus
  siRNA target sequence for 4932439K10Rik (NM_153406.1,2531-2549).
cgacgctggacatcaatga

SEQ ID NO: 769241 - DNA, 19 bp, Mus musculus
  siRNA target sequence for 4932439K10Rik (NM_153406.1,2534-2552).
cgctggacatcaatgaaat

SEQ ID NO: 769242 - DNA, 19 bp, Mus musculus
  siRNA target sequence for 4932439K10Rik (NM_153406.1,2580-2598).
gaacgtcatgctgtatgtt

SEQ ID NO: 769243 - DNA, 19 bp, Mus musculus
  siRNA target sequence for 4932439K10Rik (NM_153406.1,2583-2601).
cgtcatgctgtatgttaca

SEQ ID NO: 769244 - DNA, 19 bp, Mus musculus
  siRNA target sequence for BC035295 (NM_153407.1,310-328).
gcctcaagaggaaattcga

SEQ ID NO: 769245 - DNA, 19 bp, Mus musculus
  siRNA target sequence for BC035295 (NM_153407.1,369-387).
gagatgtccagcagtgata

SEQ ID NO: 769246 - DNA, 19 bp, Mus musculus
  siRNA target sequence for BC035295 (NM_153407.1,371-389).
gatgtccagcagtgatagt

SEQ ID NO: 769247 - DNA, 19 bp, Mus musculus
  siRNA target sequence for BC035295 (NM_153407.1,572-590).
ggcccaacgccataactct

SEQ ID NO: 769248 - DNA, 19 bp, Mus musculus
  siRNA target sequence for BC035295 (NM_153407.1,678-696).
cttcacgccaagaaaatga

SEQ ID NO: 769249 - DNA, 19 bp, Mus musculus
  siRNA target sequence for BC035295 (NM_153407.1,739-757).
gcttgacactcgatgatgt

SEQ ID NO: 769250 - DNA, 19 bp, Mus musculus
  siRNA target sequence for BC035295 (NM_153407.1,868-886).
ggattgacgccgaagagaa

SEQ ID NO: 769251 - DNA, 19 bp, Mus musculus
  siRNA target sequence for BC035295 (NM_153407.1,1049-1067).
ggctgggcgaattgagttt

SEQ ID NO: 769252 - DNA, 19 bp, Mus musculus
  siRNA target sequence for BC035295 (NM_153407.1,1050-1068).
gctgggcgaattgagttta

SEQ ID NO: 769253 - DNA, 19 bp, Mus musculus
  siRNA target sequence for BC035295 (NM_153407.1,1051-1069).
ctgggcgaattgagtttaa

SEQ ID NO: 769254 - DNA, 19 bp, Mus musculus
  siRNA target sequence for BC035295 (NM_153407.1,1432-1450).
ccgtcctgtgttttactga

SEQ ID NO: 769255 - DNA, 19 bp, Mus musculus
  siRNA target sequence for BC035295 (NM_153407.1,1789-1807).
ccttccgaacggacaatga

SEQ ID NO: 769256 - DNA, 19 bp, Mus musculus
  siRNA target sequence for BC035295 (NM_153407.1,1790-1808).
cttccgaacggacaatgaa

SEQ ID NO: 769257 - DNA, 19 bp, Mus musculus
  siRNA target sequence for Lincr (NM_153408.1,185-203).
cgacgttccacgatggtat

SEQ ID NO: 769258 - DNA, 19 bp, Mus musculus
  siRNA target sequence for Lincr (NM_153408.1,251-269).
gcgtcctgcgacatgaaga

SEQ ID NO: 769259 - DNA, 19 bp, Mus musculus
  siRNA target sequence for Lincr (NM_153408.1,586-604).
gccaacgcctggattcgta

SEQ ID NO: 769260 - DNA, 19 bp, Mus musculus
  siRNA target sequence for Lincr (NM_153408.1,725-743).
cctggcacatcttcaaaga

SEQ ID NO: 769261 - DNA, 19 bp, Mus musculus
  siRNA target sequence for Lincr (NM_153408.1,747-765).
ggccaggtgccccatatgt

SEQ ID NO: 769262 - DNA, 19 bp, Mus musculus
  siRNA target sequence for A330102K23Rik (NM_153409.2,379-397).
ctcgggaatcggatgatga

SEQ ID NO: 769263 - DNA, 19 bp, Mus musculus
  siRNA target sequence for A330102K23Rik (NM_153409.2,426-444).
ggggatagcgtcaatccat

SEQ ID NO: 769264 - DNA, 19 bp, Mus musculus
  siRNA target sequence for A330102K23Rik (NM_153409.2,437-455).
caatccatccacctcaaat

SEQ ID NO: 769265 - DNA, 19 bp, Mus musculus
  siRNA target sequence for A330102K23Rik (NM_153409.2,441-459).
ccatccacctcaaatcact

SEQ ID NO: 769266 - DNA, 19 bp, Mus musculus
  siRNA target sequence for A330102K23Rik (NM_153409.2,493-511).
ggctgaggacgaagaatgt

SEQ ID NO: 769267 - DNA, 19 bp, Mus musculus
  siRNA target sequence for A330102K23Rik (NM_153409.2,494-512).
gctgaggacgaagaatgta

SEQ ID NO: 769268 - DNA, 19 bp, Mus musculus
  siRNA target sequence for A330102K23Rik (NM_153409.2,499-517).
ggacgaagaatgtacactt

SEQ ID NO: 769269 - DNA, 19 bp, Mus musculus
  siRNA target sequence for A330102K23Rik (NM_153409.2,523-541).
gtgtcaccgtgtactactt

SEQ ID NO: 769270 - DNA, 19 bp, Mus musculus
  siRNA target sequence for A330102K23Rik (NM_153409.2,701-719).
gaaactcaactctctcaaa

SEQ ID NO: 769271 - DNA, 19 bp, Mus musculus
  siRNA target sequence for A330102K23Rik (NM_153409.2,767-785).
cctgaccgtggatgacatt

SEQ ID NO: 769272 - DNA, 19 bp, Mus musculus
  siRNA target sequence for A330102K23Rik (NM_153409.2,787-805).
ccgatgacgatattgatct

SEQ ID NO: 769273 - DNA, 19 bp, Mus musculus
  siRNA target sequence for A330102K23Rik (NM_153409.2,1001-1019).
cctggcaggcattaagtgt

SEQ ID NO: 769274 - DNA, 19 bp, Mus musculus
  siRNA target sequence for A330102K23Rik (NM_153409.2,1054-1072).
ctaaagaaggctgtagtaa

SEQ ID NO: 769275 - DNA, 19 bp, Mus musculus
  siRNA target sequence for A330102K23Rik (NM_153409.2,1077-1095).
gcaggtagaattgaattca

SEQ ID NO: 769276 - DNA, 19 bp, Mus musculus
  siRNA target sequence for A330102K23Rik (NM_153409.2,1078-1096).
caggtagaattgaattcaa

SEQ ID NO: 769277 - DNA, 19 bp, Mus musculus
  siRNA target sequence for A330102K23Rik (NM_153409.2,1103-1121).
ccgtgtccggactcatttt

SEQ ID NO: 769278 - DNA, 19 bp, Mus musculus
  siRNA target sequence for A330102K23Rik (NM_153409.2,1105-1123).
gtgtccggactcatttttt

SEQ ID NO: 769279 - DNA, 19 bp, Mus musculus
  siRNA target sequence for A330102K23Rik (NM_153409.2,1114-1132).
ctcattttttgcacacaat

SEQ ID NO: 769280 - DNA, 19 bp, Mus musculus
  siRNA target sequence for A330102K23Rik (NM_153409.2,1252-1270).
ccatcgcagacaatttcga

SEQ ID NO: 769281 - DNA, 19 bp, Mus musculus
  siRNA target sequence for A330102K23Rik (NM_153409.2,1258-1276).
cagacaatttcgagattga

SEQ ID NO: 769282 - DNA, 19 bp, Mus musculus
  siRNA target sequence for A330102K23Rik (NM_153409.2,1260-1278).
gacaatttcgagattgaaa

SEQ ID NO: 769283 - DNA, 19 bp, Mus musculus
  siRNA target sequence for A330102K23Rik (NM_153409.2,1350-1368).
gaggacggaagcagtttct

SEQ ID NO: 769284 - DNA, 19 bp, Mus musculus
  siRNA target sequence for A330102K23Rik (NM_153409.2,1370-1388).
cagtggagccactgattct

SEQ ID NO: 769285 - DNA, 19 bp, Mus musculus
  siRNA target sequence for A330102K23Rik (NM_153409.2,1538-1556).
gtctgtcctttgttactct

SEQ ID NO: 769286 - DNA, 19 bp, Mus musculus
  siRNA target sequence for A330102K23Rik (NM_153409.2,1560-1578).
ggcaccgcagttcatgaaa

SEQ ID NO: 769287 - DNA, 19 bp, Mus musculus
  siRNA target sequence for A330102K23Rik (NM_153409.2,1609-1627).
gctcttcaactctctacta

SEQ ID NO: 769288 - DNA, 19 bp, Mus musculus
  siRNA target sequence for A330102K23Rik (NM_153409.2,1620-1638).
ctctactaccaaatagata

SEQ ID NO: 769289 - DNA, 19 bp, Mus musculus
  siRNA target sequence for A330102K23Rik (NM_153409.2,1662-1680).
cagctctctgacaactatt

SEQ ID NO: 769290 - DNA, 19 bp, Mus musculus
  siRNA target sequence for A330102K23Rik (NM_153409.2,1667-1685).
ctctgacaactattctgaa

SEQ ID NO: 769291 - DNA, 19 bp, Mus musculus
  siRNA target sequence for A330102K23Rik (NM_153409.2,1673-1691).
caactattctgaaagagat

SEQ ID NO: 769292 - DNA, 19 bp, Mus musculus
  siRNA target sequence for A330102K23Rik (NM_153409.2,1683-1701).
gaaagagatactgtcaaaa

SEQ ID NO: 769293 - DNA, 19 bp, Mus musculus
  siRNA target sequence for A330102K23Rik (NM_153409.2,1738-1756).
cagagaggtttgttgacta

SEQ ID NO: 769294 - DNA, 19 bp, Mus musculus
  siRNA target sequence for A330102K23Rik (NM_153409.2,1856-1874).
gccctgtaaccccttgtat

SEQ ID NO: 769295 - DNA, 19 bp, Mus musculus
  siRNA target sequence for A330102K23Rik (NM_153409.2,1963-1981).
gcgacagccacatttcaga

SEQ ID NO: 769296 - DNA, 19 bp, Mus musculus
  siRNA target sequence for 1810037C22Rik (NM_153410.2,465-483).
ggtcctaggccgattcgat

SEQ ID NO: 769297 - DNA, 19 bp, Mus musculus
  siRNA target sequence for 1810037C22Rik (NM_153410.2,550-568).
gcgagagcactctacaaca

SEQ ID NO: 769298 - DNA, 19 bp, Mus musculus
  siRNA target sequence for 1810037C22Rik (NM_153410.2,552-570).
gagagcactctacaacatt

SEQ ID NO: 769299 - DNA, 19 bp, Mus musculus
  siRNA target sequence for 1810037C22Rik (NM_153410.2,556-574).
gcactctacaacattggaa

SEQ ID NO: 769300 - DNA, 19 bp, Mus musculus
  siRNA target sequence for 1810037C22Rik (NM_153410.2,557-575).
cactctacaacattggaaa

SEQ ID NO: 769301 - DNA, 19 bp, Mus musculus
  siRNA target sequence for 1810037C22Rik (NM_153410.2,871-889).
ggcaatgctcacatcttct

SEQ ID NO: 769302 - DNA, 19 bp, Mus musculus
  siRNA target sequence for 1810037C22Rik (NM_153410.2,901-919).
gatgtggctgctgaacatt

SEQ ID NO: 769303 - DNA, 19 bp, Mus musculus
  siRNA target sequence for 1810037C22Rik (NM_153410.2,904-922).
gtggctgctgaacattaca

SEQ ID NO: 769304 - DNA, 19 bp, Mus musculus
  siRNA target sequence for 1810037C22Rik (NM_153410.2,908-926).
ctgctgaacattacaagaa

SEQ ID NO: 769305 - DNA, 19 bp, Mus musculus
  siRNA target sequence for 1810037C22Rik (NM_153410.2,1041-1059).
cctgcggcacctagtcatt

SEQ ID NO: 769306 - DNA, 19 bp, Mus musculus
  siRNA target sequence for 1810037C22Rik (NM_153410.2,1212-1230).
gacagcccgcatgaatatt

SEQ ID NO: 769307 - DNA, 19 bp, Mus musculus
  siRNA target sequence for 1810037C22Rik (NM_153410.2,1586-1604).
ctgacgaggagtgtttctt

SEQ ID NO: 769308 - DNA, 19 bp, Mus musculus
  siRNA target sequence for 1810037C22Rik (NM_153410.2,1926-1944).
ccagtcctccaggattgat

SEQ ID NO: 769309 - DNA, 19 bp, Mus musculus
  siRNA target sequence for C820004H04Rik (NM_153412.1,296-314).
gcctaagcccgaggaaata

SEQ ID NO: 769310 - DNA, 19 bp, Mus musculus
  siRNA target sequence for C820004H04Rik (NM_153412.1,306-324).
gaggaaatactcatcaagt

SEQ ID NO: 769311 - DNA, 19 bp, Mus musculus
  siRNA target sequence for C820004H04Rik (NM_153412.1,317-335).
catcaagtctgaagtttaa

SEQ ID NO: 769312 - DNA, 19 bp, Mus musculus
  siRNA target sequence for C820004H04Rik (NM_153412.1,346-364).
gactattctggctcctatt

SEQ ID NO: 769313 - DNA, 19 bp, Mus musculus
  siRNA target sequence for C820004H04Rik (NM_153412.1,348-366).
ctattctggctcctattta

SEQ ID NO: 769314 - DNA, 19 bp, Mus musculus
  siRNA target sequence for C820004H04Rik (NM_153412.1,471-489).
cgatggaattgataaaaat

SEQ ID NO: 769315 - DNA, 19 bp, Mus musculus
  siRNA target sequence for C820004H04Rik (NM_153412.1,559-577).
gcagatttggatcattata

SEQ ID NO: 769316 - DNA, 19 bp, Mus musculus
  siRNA target sequence for C820004H04Rik (NM_153412.1,639-657).
ctctaggaataaatctcat

SEQ ID NO: 769317 - DNA, 19 bp, Mus musculus
  siRNA target sequence for C820004H04Rik (NM_153412.1,908-926).
cagggagcagtctgagtaa

SEQ ID NO: 769318 - DNA, 19 bp, Mus musculus
  siRNA target sequence for C820004H04Rik (NM_153412.1,910-928).
gggagcagtctgagtaata

SEQ ID NO: 769319 - DNA, 19 bp, Mus musculus
  siRNA target sequence for C820004H04Rik (NM_153412.1,947-965).
cgcttcccaggttgtataa

SEQ ID NO: 769320 - DNA, 19 bp, Mus musculus
  siRNA target sequence for C820004H04Rik (NM_153412.1,1065-1083).
cctagtggatagtgacaat

SEQ ID NO: 769321 - DNA, 19 bp, Mus musculus
  siRNA target sequence for C820004H04Rik (NM_153412.1,1071-1089).
ggatagtgacaattacctt

SEQ ID NO: 769322 - DNA, 19 bp, Mus musculus
  siRNA target sequence for C820004H04Rik (NM_153412.1,1109-1127).
caggggcttcaccctataa

SEQ ID NO: 769323 - DNA, 19 bp, Mus musculus
  siRNA target sequence for C820004H04Rik (NM_153412.1,1114-1132).
gcttcaccctataaaacct

SEQ ID NO: 769324 - DNA, 19 bp, Mus musculus
  siRNA target sequence for C820004H04Rik (NM_153412.1,1141-1159).
gagggaaatccttacgtaa

SEQ ID NO: 769325 - DNA, 19 bp, Mus musculus
  siRNA target sequence for C820004H04Rik (NM_153412.1,1220-1238).
cctcctctgatgactttga

SEQ ID NO: 769326 - DNA, 19 bp, Mus musculus
  siRNA target sequence for C820004H04Rik (NM_153412.1,1221-1239).
ctcctctgatgactttgat

SEQ ID NO: 769327 - DNA, 19 bp, Mus musculus
  siRNA target sequence for C820004H04Rik (NM_153412.1,1255-1273).
gggaccagcccaagtcatt

SEQ ID NO: 769328 - DNA, 19 bp, Mus musculus
  siRNA target sequence for C820004H04Rik (NM_153412.1,1259-1277).
ccagcccaagtcattcctt

SEQ ID NO: 769329 - DNA, 19 bp, Mus musculus
  siRNA target sequence for C820004H04Rik (NM_153412.1,1331-1349).
gatcaatggagcttgatga

SEQ ID NO: 769330 - DNA, 19 bp, Mus musculus
  siRNA target sequence for C820004H04Rik (NM_153412.1,1366-1384).
ctaagacagtcgtcagaaa

SEQ ID NO: 769331 - DNA, 19 bp, Mus musculus
  siRNA target sequence for C820004H04Rik (NM_153412.1,1394-1412).
cggtccttcgagaaaggaa

SEQ ID NO: 769332 - DNA, 19 bp, Mus musculus
  siRNA target sequence for C820004H04Rik (NM_153412.1,1438-1456).
cgcgacgacctgatggatt

SEQ ID NO: 769333 - DNA, 19 bp, Mus musculus
  siRNA target sequence for C820004H04Rik (NM_153412.1,1439-1457).
gcgacgacctgatggatta

SEQ ID NO: 769334 - DNA, 19 bp, Mus musculus
  siRNA target sequence for C820004H04Rik (NM_153412.1,1440-1458).
cgacgacctgatggattat

SEQ ID NO: 769335 - DNA, 19 bp, Mus musculus
  siRNA target sequence for C820004H04Rik (NM_153412.1,1835-1853).
cctcagccgcgtttctgaa

SEQ ID NO: 769336 - DNA, 19 bp, Mus musculus
  siRNA target sequence for C820004H04Rik (NM_153412.1,1836-1854).
ctcagccgcgtttctgaaa

SEQ ID NO: 769337 - DNA, 19 bp, Mus musculus
  siRNA target sequence for C820004H04Rik (NM_153412.1,1840-1858).
gccgcgtttctgaaagcaa

SEQ ID NO: 769338 - DNA, 19 bp, Mus musculus
  siRNA target sequence for C820004H04Rik (NM_153412.1,1889-1907).
cgaagaccccagaggatat

SEQ ID NO: 769339 - DNA, 19 bp, Mus musculus
  siRNA target sequence for C820004H04Rik (NM_153412.1,1955-1973).
ggatggtgattctgaacaa

SEQ ID NO: 769340 - DNA, 19 bp, Mus musculus
  siRNA target sequence for C820004H04Rik (NM_153412.1,2011-2029).
gaccaaatggatgaatctt

SEQ ID NO: 769341 - DNA, 19 bp, Mus musculus
  siRNA target sequence for C820004H04Rik (NM_153412.1,2027-2045).
cttccagagagttggatat

SEQ ID NO: 769342 - DNA, 19 bp, Mus musculus
  siRNA target sequence for C820004H04Rik (NM_153412.1,2046-2064).
ggaatgcgctcttttggat

SEQ ID NO: 769343 - DNA, 19 bp, Mus musculus
  siRNA target sequence for C820004H04Rik (NM_153412.1,2106-2124).
ggagattctagatcatcta

SEQ ID NO: 769344 - DNA, 19 bp, Mus musculus
  siRNA target sequence for C820004H04Rik (NM_153412.1,2107-2125).
gagattctagatcatctaa

SEQ ID NO: 769345 - DNA, 19 bp, Mus musculus
  siRNA target sequence for C820004H04Rik (NM_153412.1,2119-2137).
catctaaaccggaaaatca

SEQ ID NO: 769346 - DNA, 19 bp, Mus musculus
  siRNA target sequence for C820004H04Rik (NM_153412.1,2130-2148).
gaaaatcacggaactagaa

SEQ ID NO: 769347 - DNA, 19 bp, Mus musculus
  siRNA target sequence for C820004H04Rik (NM_153412.1,2171-2189).
ctaaggagaaggtaaagct

SEQ ID NO: 769348 - DNA, 19 bp, Mus musculus
  siRNA target sequence for C820004H04Rik (NM_153412.1,2244-2262).
gacccagctggacaattgt

SEQ ID NO: 769349 - DNA, 19 bp, Mus musculus
  siRNA target sequence for C820004H04Rik (NM_153412.1,2320-2338).
gatgttgagagcaaacact

SEQ ID NO: 769350 - DNA, 19 bp, Mus musculus
  siRNA target sequence for C820004H04Rik (NM_153412.1,2375-2393).
gccgcctagatgaggaaaa

SEQ ID NO: 769351 - DNA, 19 bp, Mus musculus
  siRNA target sequence for C820004H04Rik (NM_153412.1,2623-2641).
gggaaagggttccctatta

SEQ ID NO: 769352 - DNA, 19 bp, Mus musculus
  siRNA target sequence for C820004H04Rik (NM_153412.1,2634-2652).
ccctattaaccccaatact

SEQ ID NO: 769353 - DNA, 19 bp, Mus musculus
  siRNA target sequence for C820004H04Rik (NM_153412.1,2653-2671).
ctgaaagagggctatatca

SEQ ID NO: 769354 - DNA, 19 bp, Mus musculus
  siRNA target sequence for C820004H04Rik (NM_153412.1,2655-2673).
gaaagagggctatatcagt

SEQ ID NO: 769355 - DNA, 19 bp, Mus musculus
  siRNA target sequence for C820004H04Rik (NM_153412.1,2661-2679).
gggctatatcagtgtaaat

SEQ ID NO: 769356 - DNA, 19 bp, Mus musculus
  siRNA target sequence for C820004H04Rik (NM_153412.1,2674-2692).
gtaaatgagattaatgagt

SEQ ID NO: 769357 - DNA, 19 bp, Mus musculus
  siRNA target sequence for C820004H04Rik (NM_153412.1,2689-2707).
gagtcatgtggcaattcca

SEQ ID NO: 769358 - DNA, 19 bp, Mus musculus
  siRNA target sequence for C820004H04Rik (NM_153412.1,2698-2716).
ggcaattccacgaatctat

SEQ ID NO: 769359 - DNA, 19 bp, Mus musculus
  siRNA target sequence for C820004H04Rik (NM_153412.1,3004-3022).
gcgaccatgaccaaagact

SEQ ID NO: 769360 - DNA, 19 bp, Mus musculus
  siRNA target sequence for C820004H04Rik (NM_153412.1,3033-3051).
gaggatgctcagaggttat

SEQ ID NO: 769361 - DNA, 19 bp, Mus musculus
  siRNA target sequence for C820004H04Rik (NM_153412.1,3063-3081).
gatgagtgaaggacaaaga

SEQ ID NO: 769362 - DNA, 19 bp, Mus musculus
  siRNA target sequence for C820004H04Rik (NM_153412.1,3082-3100).
cagaaacccgaattttaca

SEQ ID NO: 769363 - DNA, 19 bp, Mus musculus
  siRNA target sequence for C820004H04Rik (NM_153412.1,3104-3122).
gcacagcatctgagtcaaa

SEQ ID NO: 769364 - DNA, 19 bp, Mus musculus
  siRNA target sequence for C820004H04Rik (NM_153412.1,3113-3131).
ctgagtcaaacgtctactt

SEQ ID NO: 769365 - DNA, 19 bp, Mus musculus
  siRNA target sequence for C820004H04Rik (NM_153412.1,3115-3133).
gagtcaaacgtctacttga

SEQ ID NO: 769366 - DNA, 19 bp, Mus musculus
  siRNA target sequence for C820004H04Rik (NM_153412.1,3228-3246).
ctgttcaccggacaatata

SEQ ID NO: 769367 - DNA, 19 bp, Mus musculus
  siRNA target sequence for C820004H04Rik (NM_153412.1,3251-3269).
gtgccagcacatccaatat

SEQ ID NO: 769368 - DNA, 19 bp, Mus musculus
  siRNA target sequence for C820004H04Rik (NM_153412.1,3263-3281).
ccaatattgccagaataga

SEQ ID NO: 769369 - DNA, 19 bp, Mus musculus
  siRNA target sequence for C820004H04Rik (NM_153412.1,3397-3415).
gaaatcctggaaaaacgat

SEQ ID NO: 769370 - DNA, 19 bp, Mus musculus
  siRNA target sequence for C820004H04Rik (NM_153412.1,3432-3450).
ccagaggcagaagttaata

SEQ ID NO: 769371 - DNA, 19 bp, Mus musculus
  siRNA target sequence for C820004H04Rik (NM_153412.1,3567-3585).
caatattgacacctgtttt

SEQ ID NO: 769372 - DNA, 19 bp, Mus musculus
  siRNA target sequence for C820004H04Rik (NM_153412.1,3614-3632).
gaggatacctcatcaaaat

SEQ ID NO: 769373 - DNA, 19 bp, Mus musculus
  siRNA target sequence for C820004H04Rik (NM_153412.1,3634-3652).
ggtgggaaaattaaaacgt

SEQ ID NO: 769374 - DNA, 19 bp, Mus musculus
  siRNA target sequence for C820004H04Rik (NM_153412.1,3678-3696).
ccggaataagcgaacattt

SEQ ID NO: 769375 - DNA, 19 bp, Mus musculus
  siRNA target sequence for C820004H04Rik (NM_153412.1,3679-3697).
cggaataagcgaacatttt

SEQ ID NO: 769376 - DNA, 19 bp, Mus musculus
  siRNA target sequence for C820004H04Rik (NM_153412.1,3709-3727).
gacaagcatgaggctaaat

SEQ ID NO: 769377 - DNA, 19 bp, Mus musculus
  siRNA target sequence for C820004H04Rik (NM_153412.1,3729-3747).
gaaaggcgtgatatacttt

SEQ ID NO: 769378 - DNA, 19 bp, Mus musculus
  siRNA target sequence for C820004H04Rik (NM_153412.1,3753-3771).
cattgaagaagtgtattat

SEQ ID NO: 769379 - DNA, 19 bp, Mus musculus
  siRNA target sequence for C820004H04Rik (NM_153412.1,3775-3793).
cacctcaagaacgctaata

SEQ ID NO: 769380 - DNA, 19 bp, Mus musculus
  siRNA target sequence for C820004H04Rik (NM_153412.1,3828-3846).
gacacatgacagaatctat

SEQ ID NO: 769381 - DNA, 19 bp, Mus musculus
  siRNA target sequence for BC028953 (NM_153414.2,231-249).
gctctgggctatagagatt

SEQ ID NO: 769382 - DNA, 19 bp, Mus musculus
  siRNA target sequence for BC028953 (NM_153414.2,263-281).
cttccctgtctttagaagt

SEQ ID NO: 769383 - DNA, 19 bp, Mus musculus
  siRNA target sequence for BC028953 (NM_153414.2,292-310).
gtactgaacaaccaaaagt

SEQ ID NO: 769384 - DNA, 19 bp, Mus musculus
  siRNA target sequence for BC028953 (NM_153414.2,303-321).
ccaaaagtccgatatgaaa

SEQ ID NO: 769385 - DNA, 19 bp, Mus musculus
  siRNA target sequence for BC028953 (NM_153414.2,309-327).
gtccgatatgaaactgtat

SEQ ID NO: 769386 - DNA, 19 bp, Mus musculus
  siRNA target sequence for BC028953 (NM_153414.2,333-351).
gtcagggcacccaacttta

SEQ ID NO: 769387 - DNA, 19 bp, Mus musculus
  siRNA target sequence for BC028953 (NM_153414.2,337-355).
gggcacccaactttaccat

SEQ ID NO: 769388 - DNA, 19 bp, Mus musculus
  siRNA target sequence for BC028953 (NM_153414.2,352-370).
ccatgcaacgtactcaaat

SEQ ID NO: 769389 - DNA, 19 bp, Mus musculus
  siRNA target sequence for BC028953 (NM_153414.2,353-371).
catgcaacgtactcaaatt

SEQ ID NO: 769390 - DNA, 19 bp, Mus musculus
  siRNA target sequence for BC028953 (NM_153414.2,357-375).
caacgtactcaaattcaaa

SEQ ID NO: 769391 - DNA, 19 bp, Mus musculus
  siRNA target sequence for BC028953 (NM_153414.2,361-379).
gtactcaaattcaaatcca

SEQ ID NO: 769392 - DNA, 19 bp, Mus musculus
  siRNA target sequence for BC028953 (NM_153414.2,453-471).
ccccaggctatctaatctt

SEQ ID NO: 769393 - DNA, 19 bp, Mus musculus
  siRNA target sequence for BC028953 (NM_153414.2,473-491).
ccggatggtctctaaaaga

SEQ ID NO: 769394 - DNA, 19 bp, Mus musculus
  siRNA target sequence for BC028953 (NM_153414.2,525-543).
gtgctccggtcatgtattt

SEQ ID NO: 769395 - DNA, 19 bp, Mus musculus
  siRNA target sequence for BC028953 (NM_153414.2,572-590).
cagagaccgagctaataga

SEQ ID NO: 769396 - DNA, 19 bp, Mus musculus
  siRNA target sequence for BC028953 (NM_153414.2,604-622).
gatgtgatcctcatctcta

SEQ ID NO: 769397 - DNA, 19 bp, Mus musculus
  siRNA target sequence for BC028953 (NM_153414.2,780-798).
gtggaagaataaggatata

SEQ ID NO: 769398 - DNA, 19 bp, Mus musculus
  siRNA target sequence for BC028953 (NM_153414.2,881-899).
cggccctcagtaaaatcca

SEQ ID NO: 769399 - DNA, 19 bp, Mus musculus
  siRNA target sequence for BC028953 (NM_153414.2,976-994).
ggaagctccaactggatta

SEQ ID NO: 769400 - DNA, 19 bp, Mus musculus
  siRNA target sequence for BC028953 (NM_153414.2,977-995).
gaagctccaactggattat

SEQ ID NO: 769401 - DNA, 19 bp, Mus musculus
  siRNA target sequence for BC028953 (NM_153414.2,1197-1215).
cgtgttggtcccttgctat

SEQ ID NO: 769402 - DNA, 19 bp, Mus musculus
  siRNA target sequence for BC028953 (NM_153414.2,1240-1258).
ctggagtgcttatatcaat

SEQ ID NO: 769403 - DNA, 19 bp, Mus musculus
  siRNA target sequence for BC028953 (NM_153414.2,1243-1261).
gagtgcttatatcaataca

SEQ ID NO: 769404 - DNA, 19 bp, Mus musculus
  siRNA target sequence for BC028953 (NM_153414.2,1245-1263).
gtgcttatatcaatacatt

SEQ ID NO: 769405 - DNA, 19 bp, Mus musculus
  siRNA target sequence for BC028953 (NM_153414.2,1247-1265).
gcttatatcaatacattga

SEQ ID NO: 769406 - DNA, 19 bp, Mus musculus
  siRNA target sequence for BC028953 (NM_153414.2,1350-1368).
gtggctttgtcacaacaaa

SEQ ID NO: 769407 - DNA, 19 bp, Mus musculus
  siRNA target sequence for BC028953 (NM_153414.2,1358-1376).
gtcacaacaaacagagtaa

SEQ ID NO: 769408 - DNA, 19 bp, Mus musculus
  siRNA target sequence for BC028953 (NM_153414.2,1362-1380).
caacaaacagagtaaagtt

SEQ ID NO: 769409 - DNA, 19 bp, Mus musculus
  siRNA target sequence for BC028953 (NM_153414.2,1523-1541).
gggacgtcgtccacttcat

SEQ ID NO: 769410 - DNA, 19 bp, Mus musculus
  siRNA target sequence for BC028953 (NM_153414.2,1562-1580).
gcctcaacaccatcatatt

SEQ ID NO: 769411 - DNA, 19 bp, Mus musculus
  siRNA target sequence for BC028953 (NM_153414.2,1566-1584).
caacaccatcatattcaca

SEQ ID NO: 769412 - DNA, 19 bp, Mus musculus
  siRNA target sequence for BC028953 (NM_153414.2,1660-1678).
gacactcgactgaatttca

SEQ ID NO: 769413 - DNA, 19 bp, Mus musculus
  siRNA target sequence for BC028953 (NM_153414.2,1683-1701).
ggtgtcaaagctgcttaaa

SEQ ID NO: 769414 - DNA, 19 bp, Mus musculus
  siRNA target sequence for BC028953 (NM_153414.2,1842-1860).
caaacgacgctatgagaaa

SEQ ID NO: 769415 - DNA, 19 bp, Mus musculus
  siRNA target sequence for BC028953 (NM_153414.2,1847-1865).
gacgctatgagaaaattga

SEQ ID NO: 769416 - DNA, 19 bp, Mus musculus
  siRNA target sequence for BC028953 (NM_153414.2,1849-1867).
cgctatgagaaaattgaaa

SEQ ID NO: 769417 - DNA, 19 bp, Mus musculus
  siRNA target sequence for BC028953 (NM_153414.2,1850-1868).
gctatgagaaaattgaaat

SEQ ID NO: 769418 - DNA, 19 bp, Mus musculus
  siRNA target sequence for BC028953 (NM_153414.2,1942-1960).
gtgctgcatacgaaggata

SEQ ID NO: 769419 - DNA, 19 bp, Mus musculus
  siRNA target sequence for BC028953 (NM_153414.2,1945-1963).
ctgcatacgaaggataaca

SEQ ID NO: 769420 - DNA, 19 bp, Mus musculus
  siRNA target sequence for BC028953 (NM_153414.2,1952-1970).
cgaaggataacaaacatgt

SEQ ID NO: 769421 - DNA, 19 bp, Mus musculus
  siRNA target sequence for BC028953 (NM_153414.2,2120-2138).
gcttcagtgacattaaggt

SEQ ID NO: 769422 - DNA, 19 bp, Mus musculus
  siRNA target sequence for BC028953 (NM_153414.2,2147-2165).
cagccaagggacatattgt

SEQ ID NO: 769423 - DNA, 19 bp, Mus musculus
  siRNA target sequence for BC028953 (NM_153414.2,2206-2224).
gactccactcacatcatct

SEQ ID NO: 769424 - DNA, 19 bp, Mus musculus
  siRNA target sequence for Pomt2 (NM_153415.1,197-215).
gctgcagcacggaaactta

SEQ ID NO: 769425 - DNA, 19 bp, Mus musculus
  siRNA target sequence for Pomt2 (NM_153415.1,382-400).
ccgcacctttttctttgat

SEQ ID NO: 769426 - DNA, 19 bp, Mus musculus
  siRNA target sequence for Pomt2 (NM_153415.1,442-460).
ctacctgagcgggtatgat

SEQ ID NO: 769427 - DNA, 19 bp, Mus musculus
  siRNA target sequence for Pomt2 (NM_153415.1,451-469).
cgggtatgatggtaccttt

SEQ ID NO: 769428 - DNA, 19 bp, Mus musculus
  siRNA target sequence for Pomt2 (NM_153415.1,801-819).
gtgctttaggggtcaaatt

SEQ ID NO: 769429 - DNA, 19 bp, Mus musculus
  siRNA target sequence for Pomt2 (NM_153415.1,842-860).
caagtggggttgaacacta

SEQ ID NO: 769430 - DNA, 19 bp, Mus musculus
  siRNA target sequence for Pomt2 (NM_153415.1,962-980).
gtgctctatgtgaccattt

SEQ ID NO: 769431 - DNA, 19 bp, Mus musculus
  siRNA target sequence for Pomt2 (NM_153415.1,964-982).
gctctatgtgaccattttt

SEQ ID NO: 769432 - DNA, 19 bp, Mus musculus
  siRNA target sequence for Pomt2 (NM_153415.1,973-991).
gaccatttttgctgttcat

SEQ ID NO: 769433 - DNA, 19 bp, Mus musculus
  siRNA target sequence for Pomt2 (NM_153415.1,1019-1037).
ggtgatggcttcttcagtt

SEQ ID NO: 769434 - DNA, 19 bp, Mus musculus
  siRNA target sequence for Pomt2 (NM_153415.1,1100-1118).
gcgtatggctctgtaatca

SEQ ID NO: 769435 - DNA, 19 bp, Mus musculus
  siRNA target sequence for Pomt2 (NM_153415.1,1145-1163).
ggctacctgcactctcata

SEQ ID NO: 769436 - DNA, 19 bp, Mus musculus
  siRNA target sequence for Pomt2 (NM_153415.1,1205-1223).
gttaccacctatttgcata

SEQ ID NO: 769437 - DNA, 19 bp, Mus musculus
  siRNA target sequence for Pomt2 (NM_153415.1,1240-1258).
gtggattatcaagaagtat

SEQ ID NO: 769438 - DNA, 19 bp, Mus musculus
  siRNA target sequence for Pomt2 (NM_153415.1,1242-1260).
ggattatcaagaagtataa

SEQ ID NO: 769439 - DNA, 19 bp, Mus musculus
  siRNA target sequence for Pomt2 (NM_153415.1,1243-1261).
gattatcaagaagtataat

SEQ ID NO: 769440 - DNA, 19 bp, Mus musculus
  siRNA target sequence for Pomt2 (NM_153415.1,1321-1339).
catacgactagaacacaaa

SEQ ID NO: 769441 - DNA, 19 bp, Mus musculus
  siRNA target sequence for Pomt2 (NM_153415.1,1325-1343).
cgactagaacacaaagaaa

SEQ ID NO: 769442 - DNA, 19 bp, Mus musculus
  siRNA target sequence for Pomt2 (NM_153415.1,1351-1369).
gaacctgcacagtcactat

SEQ ID NO: 769443 - DNA, 19 bp, Mus musculus
  siRNA target sequence for Pomt2 (NM_153415.1,1425-1443).
ggacaggggactcaaatga

SEQ ID NO: 769444 - DNA, 19 bp, Mus musculus
  siRNA target sequence for Pomt2 (NM_153415.1,1428-1446).
caggggactcaaatgactt

SEQ ID NO: 769445 - DNA, 19 bp, Mus musculus
  siRNA target sequence for Pomt2 (NM_153415.1,1447-1465).
ctggcggattgaagttgta

SEQ ID NO: 769446 - DNA, 19 bp, Mus musculus
  siRNA target sequence for Pomt2 (NM_153415.1,1449-1467).
ggcggattgaagttgtaaa

SEQ ID NO: 769447 - DNA, 19 bp, Mus musculus
  siRNA target sequence for Pomt2 (NM_153415.1,1450-1468).
gcggattgaagttgtaaat

SEQ ID NO: 769448 - DNA, 19 bp, Mus musculus
  siRNA target sequence for Pomt2 (NM_153415.1,1451-1469).
cggattgaagttgtaaata

SEQ ID NO: 769449 - DNA, 19 bp, Mus musculus
  siRNA target sequence for Pomt2 (NM_153415.1,1457-1475).
gaagttgtaaatagaaaat

SEQ ID NO: 769450 - DNA, 19 bp, Mus musculus
  siRNA target sequence for Pomt2 (NM_153415.1,1492-1510).
ggtactgagaagtcgaatt

SEQ ID NO: 769451 - DNA, 19 bp, Mus musculus
  siRNA target sequence for Pomt2 (NM_153415.1,1505-1523).
cgaattcgcctcatccatt

SEQ ID NO: 769452 - DNA, 19 bp, Mus musculus
  siRNA target sequence for Pomt2 (NM_153415.1,1506-1524).
gaattcgcctcatccattt

SEQ ID NO: 769453 - DNA, 19 bp, Mus musculus
  siRNA target sequence for Pomt2 (NM_153415.1,1545-1563).
gatcgtcaggaaagattct

SEQ ID NO: 769454 - DNA, 19 bp, Mus musculus
  siRNA target sequence for Pomt2 (NM_153415.1,1597-1615).
ctgtactccgtacctaaaa

SEQ ID NO: 769455 - DNA, 19 bp, Mus musculus
  siRNA target sequence for Pomt2 (NM_153415.1,1599-1617).
gtactccgtacctaaaaga

SEQ ID NO: 769456 - DNA, 19 bp, Mus musculus
  siRNA target sequence for Pomt2 (NM_153415.1,1610-1628).
ctaaaagaaaccactaact

SEQ ID NO: 769457 - DNA, 19 bp, Mus musculus
  siRNA target sequence for Pomt2 (NM_153415.1,1616-1634).
gaaaccactaactccattt

SEQ ID NO: 769458 - DNA, 19 bp, Mus musculus
  siRNA target sequence for Pomt2 (NM_153415.1,1620-1638).
ccactaactccatttggaa

SEQ ID NO: 769459 - DNA, 19 bp, Mus musculus
  siRNA target sequence for Pomt2 (NM_153415.1,1635-1653).
ggaacatagaagagcatat

SEQ ID NO: 769460 - DNA, 19 bp, Mus musculus
  siRNA target sequence for Pomt2 (NM_153415.1,1639-1657).
catagaagagcatatcaat

SEQ ID NO: 769461 - DNA, 19 bp, Mus musculus
  siRNA target sequence for Pomt2 (NM_153415.1,1695-1713).
ccagttttcctgagatctt

SEQ ID NO: 769462 - DNA, 19 bp, Mus musculus
  siRNA target sequence for Pomt2 (NM_153415.1,1730-1748).
gtcatgatccggggaaata

SEQ ID NO: 769463 - DNA, 19 bp, Mus musculus
  siRNA target sequence for Pomt2 (NM_153415.1,1732-1750).
catgatccggggaaataat

SEQ ID NO: 769464 - DNA, 19 bp, Mus musculus
  siRNA target sequence for Pomt2 (NM_153415.1,1789-1807).
ctggcactggcctatcaat

SEQ ID NO: 769465 - DNA, 19 bp, Mus musculus
  siRNA target sequence for Pomt2 (NM_153415.1,1791-1809).
ggcactggcctatcaatta

SEQ ID NO: 769466 - DNA, 19 bp, Mus musculus
  siRNA target sequence for Pomt2 (NM_153415.1,1792-1810).
gcactggcctatcaattat

SEQ ID NO: 769467 - DNA, 19 bp, Mus musculus
  siRNA target sequence for Pomt2 (NM_153415.1,1840-1858).
cacggacttccgagtctat

SEQ ID NO: 769468 - DNA, 19 bp, Mus musculus
  siRNA target sequence for Pomt2 (NM_153415.1,1842-1860).
cggacttccgagtctatct

SEQ ID NO: 769469 - DNA, 19 bp, Mus musculus
  siRNA target sequence for Pomt2 (NM_153415.1,2024-2042).
ggatggatgctccattact

SEQ ID NO: 769470 - DNA, 19 bp, Mus musculus
  siRNA target sequence for Pomt2 (NM_153415.1,2025-2043).
gatggatgctccattactt

SEQ ID NO: 769471 - DNA, 19 bp, Mus musculus
  siRNA target sequence for Pomt2 (NM_153415.1,2110-2128).
catgttgacaggtatccta

SEQ ID NO: 769472 - DNA, 19 bp, Mus musculus
  siRNA target sequence for Pomt2 (NM_153415.1,2121-2139).
gtatcctatgggatactct

SEQ ID NO: 769473 - DNA, 19 bp, Mus musculus
  siRNA target sequence for Pomt2 (NM_153415.1,2176-2194).
cctgggtaggaggatacat

SEQ ID NO: 769474 - DNA, 19 bp, Mus musculus
  siRNA target sequence for D030041N15Rik (NM_153416.1,138-156).
ccctgtatgagcacaataa

SEQ ID NO: 769475 - DNA, 19 bp, Mus musculus
  siRNA target sequence for D030041N15Rik (NM_153416.1,238-256).
gaccaaggatcccctaaaa

SEQ ID NO: 769476 - DNA, 19 bp, Mus musculus
  siRNA target sequence for D030041N15Rik (NM_153416.1,367-385).
gaatgaaattgcgaattca

SEQ ID NO: 769477 - DNA, 19 bp, Mus musculus
  siRNA target sequence for D030041N15Rik (NM_153416.1,395-413).
gtgtttgagtgggtaaaga

SEQ ID NO: 769478 - DNA, 19 bp, Mus musculus
  siRNA target sequence for D030041N15Rik (NM_153416.1,490-508).
caggagtgaagatctgatt

SEQ ID NO: 769479 - DNA, 19 bp, Mus musculus
  siRNA target sequence for D030041N15Rik (NM_153416.1,509-527).
gctgaatttgcccaagtaa

SEQ ID NO: 769480 - DNA, 19 bp, Mus musculus
  siRNA target sequence for D030041N15Rik (NM_153416.1,566-584).
catcctcacaccaacaagt

SEQ ID NO: 769481 - DNA, 19 bp, Mus musculus
  siRNA target sequence for D030041N15Rik (NM_153416.1,604-622).
cgactccatccgtgtttat

SEQ ID NO: 769482 - DNA, 19 bp, Mus musculus
  siRNA target sequence for D030041N15Rik (NM_153416.1,605-623).
gactccatccgtgtttata

SEQ ID NO: 769483 - DNA, 19 bp, Mus musculus
  siRNA target sequence for D030041N15Rik (NM_153416.1,607-625).
ctccatccgtgtttataat

SEQ ID NO: 769484 - DNA, 19 bp, Mus musculus
  siRNA target sequence for D030041N15Rik (NM_153416.1,658-676).
ccgtctgcagcgaaatgta

SEQ ID NO: 769485 - DNA, 19 bp, Mus musculus
  siRNA target sequence for D030041N15Rik (NM_153416.1,755-773).
gaccccacttccttatcta

SEQ ID NO: 769486 - DNA, 19 bp, Mus musculus
  siRNA target sequence for D030041N15Rik (NM_153416.1,896-914).
ctggtatgggacgtttcaa

SEQ ID NO: 769487 - DNA, 19 bp, Mus musculus
  siRNA target sequence for D030041N15Rik (NM_153416.1,898-916).
ggtatgggacgtttcaaca

SEQ ID NO: 769488 - DNA, 19 bp, Mus musculus
  siRNA target sequence for D030041N15Rik (NM_153416.1,988-1006).
caaagtcctggctactact

SEQ ID NO: 769489 - DNA, 19 bp, Mus musculus
  siRNA target sequence for D030041N15Rik (NM_153416.1,1052-1070).
gaggcgtggccaactcttt

SEQ ID NO: 769490 - DNA, 19 bp, Mus musculus
  siRNA target sequence for D030041N15Rik (NM_153416.1,1112-1130).
cgactgctgttcactgtat

SEQ ID NO: 769491 - DNA, 19 bp, Mus musculus
  siRNA target sequence for D030041N15Rik (NM_153416.1,1113-1131).
gactgctgttcactgtatt

SEQ ID NO: 769492 - DNA, 19 bp, Mus musculus
  siRNA target sequence for D030041N15Rik (NM_153416.1,1127-1145).
gtattgggggaagcattaa

SEQ ID NO: 769493 - DNA, 19 bp, Mus musculus
  siRNA target sequence for D030041N15Rik (NM_153416.1,1411-1429).
gcttccctgtggtattatt

SEQ ID NO: 769494 - DNA, 19 bp, Mus musculus
  siRNA target sequence for D030041N15Rik (NM_153416.1,1608-1626).
gagggggaggctctattca

SEQ ID NO: 769495 - DNA, 19 bp, Mus musculus
  siRNA target sequence for D030041N15Rik (NM_153416.1,1611-1629).
ggggaggctctattcatga

SEQ ID NO: 769496 - DNA, 19 bp, Mus musculus
  siRNA target sequence for D030041N15Rik (NM_153416.1,1612-1630).
gggaggctctattcatgaa

SEQ ID NO: 769497 - DNA, 19 bp, Mus musculus
  siRNA target sequence for D030041N15Rik (NM_153416.1,1614-1632).
gaggctctattcatgaagt

SEQ ID NO: 769498 - DNA, 19 bp, Mus musculus
  siRNA target sequence for Grwd1 (NM_153419.1,472-490).
gatgagcaggcccgaataa

SEQ ID NO: 769499 - DNA, 19 bp, Mus musculus
  siRNA target sequence for Grwd1 (NM_153419.1,572-590).
ctggtgactgtcagaagaa

SEQ ID NO: 769500 - DNA, 19 bp, Mus musculus
  siRNA target sequence for Grwd1 (NM_153419.1,717-735).
ctctgctgatgcctctatt

SEQ ID NO: 769501 - DNA, 19 bp, Mus musculus
  siRNA target sequence for Grwd1 (NM_153419.1,793-811).
gcccatgatggagatgtta

SEQ ID NO: 769502 - DNA, 19 bp, Mus musculus
  siRNA target sequence for Grwd1 (NM_153419.1,881-899).
gggacctgcgacagtttaa

SEQ ID NO: 769503 - DNA, 19 bp, Mus musculus
  siRNA target sequence for Grwd1 (NM_153419.1,883-901).
gacctgcgacagtttaagt

SEQ ID NO: 769504 - DNA, 19 bp, Mus musculus
  siRNA target sequence for Phc3 (NM_153421.1,87-105).
ggaacatccgtgtcaacaa

SEQ ID NO: 769505 - DNA, 19 bp, Mus musculus
  siRNA target sequence for Phc3 (NM_153421.1,193-211).
gacatgctgttcaggtaat

SEQ ID NO: 769506 - DNA, 19 bp, Mus musculus
  siRNA target sequence for Phc3 (NM_153421.1,398-416).
cacaggcagtgttacacaa

SEQ ID NO: 769507 - DNA, 19 bp, Mus musculus
  siRNA target sequence for Phc3 (NM_153421.1,585-603).
cgagctcagatgctgattt

SEQ ID NO: 769508 - DNA, 19 bp, Mus musculus
  siRNA target sequence for Phc3 (NM_153421.1,586-604).
gagctcagatgctgatttt

SEQ ID NO: 769509 - DNA, 19 bp, Mus musculus
  siRNA target sequence for Phc3 (NM_153421.1,588-606).
gctcagatgctgattttca

SEQ ID NO: 769510 - DNA, 19 bp, Mus musculus
  siRNA target sequence for Phc3 (NM_153421.1,690-708).
gctcaggttcagaatttaa

SEQ ID NO: 769511 - DNA, 19 bp, Mus musculus
  siRNA target sequence for Phc3 (NM_153421.1,719-737).
ccagaagctgggtgtctta

SEQ ID NO: 769512 - DNA, 19 bp, Mus musculus
  siRNA target sequence for Phc3 (NM_153421.1,720-738).
cagaagctgggtgtcttat

SEQ ID NO: 769513 - DNA, 19 bp, Mus musculus
  siRNA target sequence for Phc3 (NM_153421.1,734-752).
cttatctagctcacagaat

SEQ ID NO: 769514 - DNA, 19 bp, Mus musculus
  siRNA target sequence for Phc3 (NM_153421.1,897-915).
gccgtcactcggacatcaa

SEQ ID NO: 769515 - DNA, 19 bp, Mus musculus
  siRNA target sequence for Phc3 (NM_153421.1,913-931).
caagcatccaccagttaat

SEQ ID NO: 769516 - DNA, 19 bp, Mus musculus
  siRNA target sequence for Phc3 (NM_153421.1,940-958).
cttcatattctccaattca

SEQ ID NO: 769517 - DNA, 19 bp, Mus musculus
  siRNA target sequence for Phc3 (NM_153421.1,952-970).
caattcagcctcattctct

SEQ ID NO: 769518 - DNA, 19 bp, Mus musculus
  siRNA target sequence for Phc3 (NM_153421.1,957-975).
cagcctcattctctaatca

SEQ ID NO: 769519 - DNA, 19 bp, Mus musculus
  siRNA target sequence for Phc3 (NM_153421.1,959-977).
gcctcattctctaatcaaa

SEQ ID NO: 769520 - DNA, 19 bp, Mus musculus
  siRNA target sequence for Phc3 (NM_153421.1,1187-1205).
ccatcctccgcctttaact

SEQ ID NO: 769521 - DNA, 19 bp, Mus musculus
  siRNA target sequence for Phc3 (NM_153421.1,1276-1294).
gtcagtctcctactataat

SEQ ID NO: 769522 - DNA, 19 bp, Mus musculus
  siRNA target sequence for Phc3 (NM_153421.1,1278-1296).
cagtctcctactataatta

SEQ ID NO: 769523 - DNA, 19 bp, Mus musculus
  siRNA target sequence for Phc3 (NM_153421.1,1334-1352).
gtcttcagctcttcaaaca

SEQ ID NO: 769524 - DNA, 19 bp, Mus musculus
  siRNA target sequence for Phc3 (NM_153421.1,1344-1362).
cttcaaacagggccaaatt

SEQ ID NO: 769525 - DNA, 19 bp, Mus musculus
  siRNA target sequence for Phc3 (NM_153421.1,1393-1411).
ccaccgcacagctgaatct

SEQ ID NO: 769526 - DNA, 19 bp, Mus musculus
  siRNA target sequence for Phc3 (NM_153421.1,1394-1412).
caccgcacagctgaatctt

SEQ ID NO: 769527 - DNA, 19 bp, Mus musculus
  siRNA target sequence for Phc3 (NM_153421.1,1432-1450).
cagcatcccctgttgtaca

SEQ ID NO: 769528 - DNA, 19 bp, Mus musculus
  siRNA target sequence for Phc3 (NM_153421.1,1435-1453).
catcccctgttgtacacat

SEQ ID NO: 769529 - DNA, 19 bp, Mus musculus
  siRNA target sequence for Phc3 (NM_153421.1,1496-1514).
gatggtgtccccaacatca

SEQ ID NO: 769530 - DNA, 19 bp, Mus musculus
  siRNA target sequence for Phc3 (NM_153421.1,1532-1550).
cctacagtcctctccaatt

SEQ ID NO: 769531 - DNA, 19 bp, Mus musculus
  siRNA target sequence for Phc3 (NM_153421.1,1613-1631).
gcagtctatgcagtcttta

SEQ ID NO: 769532 - DNA, 19 bp, Mus musculus
  siRNA target sequence for Phc3 (NM_153421.1,1665-1683).
gttttggtgcagaatgctt

SEQ ID NO: 769533 - DNA, 19 bp, Mus musculus
  siRNA target sequence for Phc3 (NM_153421.1,1757-1775).
gactgttgcggtaaatcta

SEQ ID NO: 769534 - DNA, 19 bp, Mus musculus
  siRNA target sequence for Phc3 (NM_153421.1,1784-1802).
gccgccagcacctgttgat

SEQ ID NO: 769535 - DNA, 19 bp, Mus musculus
  siRNA target sequence for Phc3 (NM_153421.1,1804-1822).
caccagtggtttatcaagt

SEQ ID NO: 769536 - DNA, 19 bp, Mus musculus
  siRNA target sequence for Phc3 (NM_153421.1,1807-1825).
cagtggtttatcaagtaga

SEQ ID NO: 769537 - DNA, 19 bp, Mus musculus
  siRNA target sequence for Phc3 (NM_153421.1,1945-1963).
catccgaacatcctttgtt

SEQ ID NO: 769538 - DNA, 19 bp, Mus musculus
  siRNA target sequence for Phc3 (NM_153421.1,1948-1966).
ccgaacatcctttgttaga

SEQ ID NO: 769539 - DNA, 19 bp, Mus musculus
  siRNA target sequence for Phc3 (NM_153421.1,2046-2064).
cctgcacctcccctcttaa

SEQ ID NO: 769540 - DNA, 19 bp, Mus musculus
  siRNA target sequence for Phc3 (NM_153421.1,2047-2065).
ctgcacctcccctcttaat

SEQ ID NO: 769541 - DNA, 19 bp, Mus musculus
  siRNA target sequence for Phc3 (NM_153421.1,2159-2177).
gattttgacccacgttata

SEQ ID NO: 769542 - DNA, 19 bp, Mus musculus
  siRNA target sequence for Phc3 (NM_153421.1,2224-2242).
gatcatcactgctgataga

SEQ ID NO: 769543 - DNA, 19 bp, Mus musculus
  siRNA target sequence for Phc3 (NM_153421.1,2227-2245).
catcactgctgatagaaca

SEQ ID NO: 769544 - DNA, 19 bp, Mus musculus
  siRNA target sequence for Phc3 (NM_153421.1,2307-2325).
gagttacagaataacacaa

SEQ ID NO: 769545 - DNA, 19 bp, Mus musculus
  siRNA target sequence for Phc3 (NM_153421.1,2339-2357).
ctcatccgacacagagata

SEQ ID NO: 769546 - DNA, 19 bp, Mus musculus
  siRNA target sequence for Phc3 (NM_153421.1,2341-2359).
catccgacacagagataga

SEQ ID NO: 769547 - DNA, 19 bp, Mus musculus
  siRNA target sequence for Phc3 (NM_153421.1,2400-2418).
gagttactcaagtgtgaat

SEQ ID NO: 769548 - DNA, 19 bp, Mus musculus
  siRNA target sequence for Phc3 (NM_153421.1,2424-2442).
ggaaaaatgggatatccta

SEQ ID NO: 769549 - DNA, 19 bp, Mus musculus
  siRNA target sequence for Phc3 (NM_153421.1,2432-2450).
gggatatcctaatgaattt

SEQ ID NO: 769550 - DNA, 19 bp, Mus musculus
  siRNA target sequence for Phc3 (NM_153421.1,2454-2472).
cggtccaaacgattctgta

SEQ ID NO: 769551 - DNA, 19 bp, Mus musculus
  siRNA target sequence for Phc3 (NM_153421.1,2458-2476).
ccaaacgattctgtactat

SEQ ID NO: 769552 - DNA, 19 bp, Mus musculus
  siRNA target sequence for Phc3 (NM_153421.1,2495-2513).
caacgttagctgttctaaa

SEQ ID NO: 769553 - DNA, 19 bp, Mus musculus
  siRNA target sequence for Phc3 (NM_153421.1,2523-2541).
cttagtcgttggaatcgta

SEQ ID NO: 769554 - DNA, 19 bp, Mus musculus
  siRNA target sequence for Phc3 (NM_153421.1,2538-2556).
cgtaagcctgataatcaga

SEQ ID NO: 769555 - DNA, 19 bp, Mus musculus
  siRNA target sequence for Phc3 (NM_153421.1,2596-2614).
gggcagcaagagaacatat

SEQ ID NO: 769556 - DNA, 19 bp, Mus musculus
  siRNA target sequence for Phc3 (NM_153421.1,2616-2634).
cttaggcagcttccaatta

SEQ ID NO: 769557 - DNA, 19 bp, Mus musculus
  siRNA target sequence for Phc3 (NM_153421.1,2739-2757).
cttcgggatgtgaggatta

SEQ ID NO: 769558 - DNA, 19 bp, Mus musculus
  siRNA target sequence for Phc3 (NM_153421.1,2742-2760).
cgggatgtgaggattagga

SEQ ID NO: 769559 - DNA, 19 bp, Mus musculus
  siRNA target sequence for Phc3 (NM_153421.1,2743-2761).
gggatgtgaggattaggaa

SEQ ID NO: 769560 - DNA, 19 bp, Mus musculus
  siRNA target sequence for Phc3 (NM_153421.1,2829-2847).
gtctgggccttcatccatt

SEQ ID NO: 769561 - DNA, 19 bp, Mus musculus
  siRNA target sequence for Phc3 (NM_153421.1,2833-2851).
gggccttcatccattcttt

SEQ ID NO: 769562 - DNA, 19 bp, Mus musculus
  siRNA target sequence for Phc3 (NM_153421.1,2906-2924).
ggccctgctcttgctaaaa

SEQ ID NO: 769563 - DNA, 19 bp, Mus musculus
  siRNA target sequence for Phc3 (NM_153421.1,2908-2926).
ccctgctcttgctaaaaga

SEQ ID NO: 769564 - DNA, 19 bp, Mus musculus
  siRNA target sequence for Wasf2 (NM_153423.3,215-233).
gaatgcaggaccaacatca

SEQ ID NO: 769565 - DNA, 19 bp, Mus musculus
  siRNA target sequence for Wasf2 (NM_153423.3,257-275).
ctgggcagcctgagtaagt

SEQ ID NO: 769566 - DNA, 19 bp, Mus musculus
  siRNA target sequence for Wasf2 (NM_153423.3,259-277).
gggcagcctgagtaagtat

SEQ ID NO: 769567 - DNA, 19 bp, Mus musculus
  siRNA target sequence for Wasf2 (NM_153423.3,284-302).
gacattttcggagagattt

SEQ ID NO: 769568 - DNA, 19 bp, Mus musculus
  siRNA target sequence for Wasf2 (NM_153423.3,286-304).
cattttcggagagatttgt

SEQ ID NO: 769569 - DNA, 19 bp, Mus musculus
  siRNA target sequence for Wasf2 (NM_153423.3,349-367).
gcgggttgaccgagtacaa

SEQ ID NO: 769570 - DNA, 19 bp, Mus musculus
  siRNA target sequence for Wasf2 (NM_153423.3,352-370).
ggttgaccgagtacaagtt

SEQ ID NO: 769571 - DNA, 19 bp, Mus musculus
  siRNA target sequence for Wasf2 (NM_153423.3,353-371).
gttgaccgagtacaagtta

SEQ ID NO: 769572 - DNA, 19 bp, Mus musculus
  siRNA target sequence for Wasf2 (NM_153423.3,428-446).
cggaaggccttcagaagtt

SEQ ID NO: 769573 - DNA, 19 bp, Mus musculus
  siRNA target sequence for Wasf2 (NM_153423.3,488-506).
ccggtgcccgtcttagaga

SEQ ID NO: 769574 - DNA, 19 bp, Mus musculus
  siRNA target sequence for Wasf2 (NM_153423.3,524-542).
gctcctccccctcttaaca

SEQ ID NO: 769575 - DNA, 19 bp, Mus musculus
  siRNA target sequence for Wasf2 (NM_153423.3,530-548).
ccccctcttaacaatctca

SEQ ID NO: 769576 - DNA, 19 bp, Mus musculus
  siRNA target sequence for Wasf2 (NM_153423.3,566-584).
ggaaaagaggcactcaaat

SEQ ID NO: 769577 - DNA, 19 bp, Mus musculus
  siRNA target sequence for Wasf2 (NM_153423.3,567-585).
gaaaagaggcactcaaatt

SEQ ID NO: 769578 - DNA, 19 bp, Mus musculus
  siRNA target sequence for Wasf2 (NM_153423.3,572-590).
gaggcactcaaattctaca

SEQ ID NO: 769579 - DNA, 19 bp, Mus musculus
  siRNA target sequence for Wasf2 (NM_153423.3,595-613).
cccctcatacttctttgat

SEQ ID NO: 769580 - DNA, 19 bp, Mus musculus
  siRNA target sequence for Wasf2 (NM_153423.3,695-713).
ccaaatagagggaatgtga

SEQ ID NO: 769581 - DNA, 19 bp, Mus musculus
  siRNA target sequence for Wasf2 (NM_153423.3,706-724).
gaatgtgaacccacgtaaa

SEQ ID NO: 769582 - DNA, 19 bp, Mus musculus
  siRNA target sequence for Wasf2 (NM_153423.3,710-728).
gtgaacccacgtaaaatca

SEQ ID NO: 769583 - DNA, 19 bp, Mus musculus
  siRNA target sequence for Wasf2 (NM_153423.3,1560-1578).
gtcggatcgctgttgagta

SEQ ID NO: 769584 - DNA, 19 bp, Mus musculus
  siRNA target sequence for Wasf2 (NM_153423.3,1585-1603).
ctcggaagatgattcttct

SEQ ID NO: 769585 - DNA, 19 bp, Mus musculus
  siRNA target sequence for Pank2 (NM_153501.1,363-381).
ggtttattttgaacctaaa

SEQ ID NO: 769586 - DNA, 19 bp, Mus musculus
  siRNA target sequence for Pank2 (NM_153501.1,545-563).
gctttcccacccatgacat

SEQ ID NO: 769587 - DNA, 19 bp, Mus musculus
  siRNA target sequence for Pank2 (NM_153501.1,629-647).
ctggaggtggatcatacaa

SEQ ID NO: 769588 - DNA, 19 bp, Mus musculus
  siRNA target sequence for Pank2 (NM_153501.1,631-649).
ggaggtggatcatacaaat

SEQ ID NO: 769589 - DNA, 19 bp, Mus musculus
  siRNA target sequence for Pank2 (NM_153501.1,632-650).
gaggtggatcatacaaatt

SEQ ID NO: 769590 - DNA, 19 bp, Mus musculus
  siRNA target sequence for Pank2 (NM_153501.1,654-672).
gcaggattttctcacaata

SEQ ID NO: 769591 - DNA, 19 bp, Mus musculus
  siRNA target sequence for Pank2 (NM_153501.1,657-675).
ggattttctcacaataggt

SEQ ID NO: 769592 - DNA, 19 bp, Mus musculus
  siRNA target sequence for Pank2 (NM_153501.1,697-715).
gatgaactagattgcttaa

SEQ ID NO: 769593 - DNA, 19 bp, Mus musculus
  siRNA target sequence for Pank2 (NM_153501.1,700-718).
gaactagattgcttaataa

SEQ ID NO: 769594 - DNA, 19 bp, Mus musculus
  siRNA target sequence for Pank2 (NM_153501.1,721-739).
ggaattttatacattgact

SEQ ID NO: 769595 - DNA, 19 bp, Mus musculus
  siRNA target sequence for Pank2 (NM_153501.1,754-772).
ggacggtcacagtgctatt

SEQ ID NO: 769596 - DNA, 19 bp, Mus musculus
  siRNA target sequence for Pank2 (NM_153501.1,755-773).
gacggtcacagtgctatta

SEQ ID NO: 769597 - DNA, 19 bp, Mus musculus
  siRNA target sequence for Pank2 (NM_153501.1,757-775).
cggtcacagtgctattatt

SEQ ID NO: 769598 - DNA, 19 bp, Mus musculus
  siRNA target sequence for Pank2 (NM_153501.1,759-777).
gtcacagtgctattatttt

SEQ ID NO: 769599 - DNA, 19 bp, Mus musculus
  siRNA target sequence for Pank2 (NM_153501.1,803-821).
gtcagaagttaccatttga

SEQ ID NO: 769600 - DNA, 19 bp, Mus musculus
  siRNA target sequence for Pank2 (NM_153501.1,805-823).
cagaagttaccatttgatt

SEQ ID NO: 769601 - DNA, 19 bp, Mus musculus
  siRNA target sequence for Pank2 (NM_153501.1,876-894).
cttagcagtgtattccaaa

SEQ ID NO: 769602 - DNA, 19 bp, Mus musculus
  siRNA target sequence for Pank2 (NM_153501.1,880-898).
gcagtgtattccaaagata

SEQ ID NO: 769603 - DNA, 19 bp, Mus musculus
  siRNA target sequence for Pank2 (NM_153501.1,885-903).
gtattccaaagataattat

SEQ ID NO: 769604 - DNA, 19 bp, Mus musculus
  siRNA target sequence for Pank2 (NM_153501.1,958-976).
cttcttactggctgtagta

SEQ ID NO: 769605 - DNA, 19 bp, Mus musculus
  siRNA target sequence for Pank2 (NM_153501.1,961-979).
cttactggctgtagtactt

SEQ ID NO: 769606 - DNA, 19 bp, Mus musculus
  siRNA target sequence for Pank2 (NM_153501.1,965-983).
ctggctgtagtacttttga

SEQ ID NO: 769607 - DNA, 19 bp, Mus musculus
  siRNA target sequence for Pank2 (NM_153501.1,968-986).
gctgtagtacttttgaaga

SEQ ID NO: 769608 - DNA, 19 bp, Mus musculus
  siRNA target sequence for Pank2 (NM_153501.1,1016-1034).
gcaccaaagtggacaaatt

SEQ ID NO: 769609 - DNA, 19 bp, Mus musculus
  siRNA target sequence for Pank2 (NM_153501.1,1019-1037).
ccaaagtggacaaattagt

SEQ ID NO: 769610 - DNA, 19 bp, Mus musculus
  siRNA target sequence for Pank2 (NM_153501.1,1020-1038).
caaagtggacaaattagtt

SEQ ID NO: 769611 - DNA, 19 bp, Mus musculus
  siRNA target sequence for Pank2 (NM_153501.1,1029-1047).
caaattagttcgagacatt

SEQ ID NO: 769612 - DNA, 19 bp, Mus musculus
  siRNA target sequence for Pank2 (NM_153501.1,1090-1108).
gtggcttcaagttttggaa

SEQ ID NO: 769613 - DNA, 19 bp, Mus musculus
  siRNA target sequence for Pank2 (NM_153501.1,1213-1231).
gcccttaatgaaaacatta

SEQ ID NO: 769614 - DNA, 19 bp, Mus musculus
  siRNA target sequence for Pank2 (NM_153501.1,1227-1245).
cattaaccaggtcgtattt

SEQ ID NO: 769615 - DNA, 19 bp, Mus musculus
  siRNA target sequence for Pank2 (NM_153501.1,1291-1309).
gcgtatgcgctggattact

SEQ ID NO: 769616 - DNA, 19 bp, Mus musculus
  siRNA target sequence for Pank2 (NM_153501.1,1340-1358).
ccgagcacgagggatattt

SEQ ID NO: 769617 - DNA, 19 bp, Mus musculus
  siRNA target sequence for Pank2 (NM_153501.1,1341-1359).
cgagcacgagggatatttt

SEQ ID NO: 769618 - DNA, 19 bp, Mus musculus
  siRNA target sequence for Pank2 (NM_153501.1,1373-1391).
cactcctcgagctgttgaa

SEQ ID NO: 769619 - DNA, 19 bp, Mus musculus
  siRNA target sequence for Pank2 (NM_153501.1,1375-1393).
ctcctcgagctgttgaaga

SEQ ID NO: 769620 - DNA, 19 bp, Mus musculus
  siRNA target sequence for Pank2 (NM_153501.1,1377-1395).
cctcgagctgttgaagata

SEQ ID NO: 769621 - DNA, 19 bp, Mus musculus
  siRNA target sequence for 2310041C05Rik (NM_153502.2,45-63).
gttggtaagtggagaaaga

SEQ ID NO: 769622 - DNA, 19 bp, Mus musculus
  siRNA target sequence for 2310041C05Rik (NM_153502.2,56-74).
gagaaagagttgataggaa

SEQ ID NO: 769623 - DNA, 19 bp, Mus musculus
  siRNA target sequence for 2310041C05Rik (NM_153502.2,350-368).
ccgtgggcctggaaatgtt

SEQ ID NO: 769624 - DNA, 19 bp, Mus musculus
  siRNA target sequence for 2310041C05Rik (NM_153502.2,698-716).
gcctagagcaccttatcga

SEQ ID NO: 769625 - DNA, 19 bp, Mus musculus
  siRNA target sequence for 5830442J12Rik (NM_153504.2,862-880).
cggatcttcgcctatctga

SEQ ID NO: 769626 - DNA, 19 bp, Mus musculus
  siRNA target sequence for 5830442J12Rik (NM_153504.2,863-881).
ggatcttcgcctatctgat

SEQ ID NO: 769627 - DNA, 19 bp, Mus musculus
  siRNA target sequence for 4930568P13Rik (NM_153505.2,69-87).
cctctgcctatcagcttaa

SEQ ID NO: 769628 - DNA, 19 bp, Mus musculus
  siRNA target sequence for 4930568P13Rik (NM_153505.2,76-94).
ctatcagcttaaattagca

SEQ ID NO: 769629 - DNA, 19 bp, Mus musculus
  siRNA target sequence for 4930568P13Rik (NM_153505.2,120-138).
gaggacagggagttctcat

SEQ ID NO: 769630 - DNA, 19 bp, Mus musculus
  siRNA target sequence for 4930568P13Rik (NM_153505.2,131-149).
gttctcatccgcatgtaca

SEQ ID NO: 769631 - DNA, 19 bp, Mus musculus
  siRNA target sequence for 4930568P13Rik (NM_153505.2,134-152).
ctcatccgcatgtacaaca

SEQ ID NO: 769632 - DNA, 19 bp, Mus musculus
  siRNA target sequence for 4930568P13Rik (NM_153505.2,157-175).
gaagacctgttcagattca

SEQ ID NO: 769633 - DNA, 19 bp, Mus musculus
  siRNA target sequence for 4930568P13Rik (NM_153505.2,160-178).
gacctgttcagattcaaaa

SEQ ID NO: 769634 - DNA, 19 bp, Mus musculus
  siRNA target sequence for 4930568P13Rik (NM_153505.2,186-204).
caccttttttactggaaaa

SEQ ID NO: 769635 - DNA, 19 bp, Mus musculus
  siRNA target sequence for 4930568P13Rik (NM_153505.2,216-234).
catgtctcaagtacatcaa

SEQ ID NO: 769636 - DNA, 19 bp, Mus musculus
  siRNA target sequence for 4930568P13Rik (NM_153505.2,260-278).
cgaaatagcacgcaacatt

SEQ ID NO: 769637 - DNA, 19 bp, Mus musculus
  siRNA target sequence for 4930568P13Rik (NM_153505.2,293-311).
cgtgaaaaagctgagataa

SEQ ID NO: 769638 - DNA, 19 bp, Mus musculus
  siRNA target sequence for 4930568P13Rik (NM_153505.2,315-333).
gattcctcactaactatta

SEQ ID NO: 769639 - DNA, 19 bp, Mus musculus
  siRNA target sequence for 4930568P13Rik (NM_153505.2,324-342).
ctaactattaccagtcatt

SEQ ID NO: 769640 - DNA, 19 bp, Mus musculus
  siRNA target sequence for 4930568P13Rik (NM_153505.2,355-373).
ggaatttcgggatcatgta

SEQ ID NO: 769641 - DNA, 19 bp, Mus musculus
  siRNA target sequence for 4930568P13Rik (NM_153505.2,356-374).
gaatttcgggatcatgtat

SEQ ID NO: 769642 - DNA, 19 bp, Mus musculus
  siRNA target sequence for 4930568P13Rik (NM_153505.2,443-461).
cggagctacctggacttaa

SEQ ID NO: 769643 - DNA, 19 bp, Mus musculus
  siRNA target sequence for 4930568P13Rik (NM_153505.2,444-462).
ggagctacctggacttaat

SEQ ID NO: 769644 - DNA, 19 bp, Mus musculus
  siRNA target sequence for 4930568P13Rik (NM_153505.2,466-484).
gacgtacacctcagtcatt

SEQ ID NO: 769645 - DNA, 19 bp, Mus musculus
  siRNA target sequence for 4930568P13Rik (NM_153505.2,468-486).
cgtacacctcagtcatttt

SEQ ID NO: 769646 - DNA, 19 bp, Mus musculus
  siRNA target sequence for 4930568P13Rik (NM_153505.2,469-487).
gtacacctcagtcatttta

SEQ ID NO: 769647 - DNA, 19 bp, Mus musculus
  siRNA target sequence for 4930568P13Rik (NM_153505.2,503-521).
gaggaccgcaggatactca

SEQ ID NO: 769648 - DNA, 19 bp, Mus musculus
  siRNA target sequence for 4930568P13Rik (NM_153505.2,505-523).
ggaccgcaggatactcatt

SEQ ID NO: 769649 - DNA, 19 bp, Mus musculus
  siRNA target sequence for 4930568P13Rik (NM_153505.2,518-536).
ctcattggcatgtacaact

SEQ ID NO: 769650 - DNA, 19 bp, Mus musculus
  siRNA target sequence for 4930568P13Rik (NM_153505.2,581-599).
cgcctgggccagatggtat

SEQ ID NO: 769651 - DNA, 19 bp, Mus musculus
  siRNA target sequence for 4930568P13Rik (NM_153505.2,582-600).
gcctgggccagatggtatt

SEQ ID NO: 769652 - DNA, 19 bp, Mus musculus
  siRNA target sequence for 4930568P13Rik (NM_153505.2,725-743).
cgcagcgcccagcttctaa

SEQ ID NO: 769653 - DNA, 19 bp, Mus musculus
  siRNA target sequence for 4930568P13Rik (NM_153505.2,766-784).
catgattaaccctgctaat

SEQ ID NO: 769654 - DNA, 19 bp, Mus musculus
  siRNA target sequence for 4930568P13Rik (NM_153505.2,769-787).
gattaaccctgctaattca

SEQ ID NO: 769655 - DNA, 19 bp, Mus musculus
  siRNA target sequence for 4930568P13Rik (NM_153505.2,777-795).
ctgctaattcagacacaat

SEQ ID NO: 769656 - DNA, 19 bp, Mus musculus
  siRNA target sequence for 4930568P13Rik (NM_153505.2,792-810).
caatggcctgtgagtatct

SEQ ID NO: 769657 - DNA, 19 bp, Mus musculus
  siRNA target sequence for 4930568P13Rik (NM_153505.2,823-841).
gatggagcgatggatcata

SEQ ID NO: 769658 - DNA, 19 bp, Mus musculus
  siRNA target sequence for 4930568P13Rik (NM_153505.2,826-844).
ggagcgatggatcataatt

SEQ ID NO: 769659 - DNA, 19 bp, Mus musculus
  siRNA target sequence for 4930568P13Rik (NM_153505.2,835-853).
gatcataattgggtttctt

SEQ ID NO: 769660 - DNA, 19 bp, Mus musculus
  siRNA target sequence for 4930568P13Rik (NM_153505.2,933-951).
cgctcatccgggaagatgt

SEQ ID NO: 769661 - DNA, 19 bp, Mus musculus
  siRNA target sequence for 4930568P13Rik (NM_153505.2,990-1008).
gtttgaaagggtacagtaa

SEQ ID NO: 769662 - DNA, 19 bp, Mus musculus
  siRNA target sequence for 4930568P13Rik (NM_153505.2,1033-1051).
caaggaacacgccattaca

SEQ ID NO: 769663 - DNA, 19 bp, Mus musculus
  siRNA target sequence for 4930568P13Rik (NM_153505.2,1037-1055).
gaacacgccattacaaaca

SEQ ID NO: 769664 - DNA, 19 bp, Mus musculus
  siRNA target sequence for 4930568P13Rik (NM_153505.2,1106-1124).
gagttggagactgtgttaa

SEQ ID NO: 769665 - DNA, 19 bp, Mus musculus
  siRNA target sequence for 4930568P13Rik (NM_153505.2,1108-1126).
gttggagactgtgttaaat

SEQ ID NO: 769666 - DNA, 19 bp, Mus musculus
  siRNA target sequence for 4930568P13Rik (NM_153505.2,1148-1166).
cctaaggccctttttgctt

SEQ ID NO: 769667 - DNA, 19 bp, Mus musculus
  siRNA target sequence for 4930568P13Rik (NM_153505.2,1207-1225).
ggttcgccatacagaaaat

SEQ ID NO: 769668 - DNA, 19 bp, Mus musculus
  siRNA target sequence for 4930568P13Rik (NM_153505.2,1211-1229).
cgccatacagaaaatgtca

SEQ ID NO: 769669 - DNA, 19 bp, Mus musculus
  siRNA target sequence for 4930568P13Rik (NM_153505.2,1220-1238).
gaaaatgtcaccaagacta

SEQ ID NO: 769670 - DNA, 19 bp, Mus musculus
  siRNA target sequence for 4930568P13Rik (NM_153505.2,1236-1254).
ctaagacacccgaagacta

SEQ ID NO: 769671 - DNA, 19 bp, Mus musculus
  siRNA target sequence for 4930568P13Rik (NM_153505.2,1309-1327).
ggtcagaagacacatcaaa

SEQ ID NO: 769672 - DNA, 19 bp, Mus musculus
  siRNA target sequence for 4930568P13Rik (NM_153505.2,1314-1332).
gaagacacatcaaagttat

SEQ ID NO: 769673 - DNA, 19 bp, Mus musculus
  siRNA target sequence for 4930568P13Rik (NM_153505.2,1418-1436).
gaggagtctgtcattatgt

SEQ ID NO: 769674 - DNA, 19 bp, Mus musculus
  siRNA target sequence for 4930568P13Rik (NM_153505.2,1435-1453).
gtcctcatttgttagtata

SEQ ID NO: 769675 - DNA, 19 bp, Mus musculus
  siRNA target sequence for 4930568P13Rik (NM_153505.2,1465-1483).
gaatctcaagcaagttgat

SEQ ID NO: 769676 - DNA, 19 bp, Mus musculus
  siRNA target sequence for 4930568P13Rik (NM_153505.2,1509-1527).
gattaaggctggattggtt

SEQ ID NO: 769677 - DNA, 19 bp, Mus musculus
  siRNA target sequence for 4930568P13Rik (NM_153505.2,1529-1547).
cgcctacaggcatatacca

SEQ ID NO: 769678 - DNA, 19 bp, Mus musculus
  siRNA target sequence for 4930568P13Rik (NM_153505.2,1630-1648).
gttggactcagtagagaaa

SEQ ID NO: 769679 - DNA, 19 bp, Mus musculus
  siRNA target sequence for 4930568P13Rik (NM_153505.2,1684-1702).
ctttcatctccgtaccttt

SEQ ID NO: 769680 - DNA, 19 bp, Mus musculus
  siRNA target sequence for 4930568P13Rik (NM_153505.2,1688-1706).
catctccgtacctttgaga

SEQ ID NO: 769681 - DNA, 19 bp, Mus musculus
  siRNA target sequence for 4930568P13Rik (NM_153505.2,1784-1802).
gtccactgcgttcatgaaa

SEQ ID NO: 769682 - DNA, 19 bp, Mus musculus
  siRNA target sequence for 4930568P13Rik (NM_153505.2,1891-1909).
ctgtgtgcttgagatatgt

SEQ ID NO: 769683 - DNA, 19 bp, Mus musculus
  siRNA target sequence for 4930568P13Rik (NM_153505.2,2079-2097).
ctaacatggacaaactaca

SEQ ID NO: 769684 - DNA, 19 bp, Mus musculus
  siRNA target sequence for 4930568P13Rik (NM_153505.2,2096-2114).
catctaaacttgactgaat

SEQ ID NO: 769685 - DNA, 19 bp, Mus musculus
  siRNA target sequence for 4930568P13Rik (NM_153505.2,2116-2134).
ggcactggcaatgaatcat

SEQ ID NO: 769686 - DNA, 19 bp, Mus musculus
  siRNA target sequence for 4930568P13Rik (NM_153505.2,2195-2213).
ctggaggccaggcttaaca

SEQ ID NO: 769687 - DNA, 19 bp, Mus musculus
  siRNA target sequence for 4930568P13Rik (NM_153505.2,2197-2215).
ggaggccaggcttaacaga

SEQ ID NO: 769688 - DNA, 19 bp, Mus musculus
  siRNA target sequence for 4930568P13Rik (NM_153505.2,2283-2301).
caggagtcaaagcatacat

SEQ ID NO: 769689 - DNA, 19 bp, Mus musculus
  siRNA target sequence for 4930568P13Rik (NM_153505.2,2312-2330).
cagtcattggcacagtttt

SEQ ID NO: 769690 - DNA, 19 bp, Mus musculus
  siRNA target sequence for 4930568P13Rik (NM_153505.2,2519-2537).
gatggagagcagaacttca

SEQ ID NO: 769691 - DNA, 19 bp, Mus musculus
  siRNA target sequence for 4930568P13Rik (NM_153505.2,2569-2587).
gcgagccttggctgaaatt

SEQ ID NO: 769692 - DNA, 19 bp, Mus musculus
  siRNA target sequence for 4930568P13Rik (NM_153505.2,2591-2609).
ggtccctatggcatgaagt

SEQ ID NO: 769693 - DNA, 19 bp, Mus musculus
  siRNA target sequence for 4930568P13Rik (NM_153505.2,2592-2610).
gtccctatggcatgaagtt

SEQ ID NO: 769694 - DNA, 19 bp, Mus musculus
  siRNA target sequence for 4930568P13Rik (NM_153505.2,2669-2687).
gtggtggaaaacatggata

SEQ ID NO: 769695 - DNA, 19 bp, Mus musculus
  siRNA target sequence for 4930568P13Rik (NM_153505.2,2762-2780).
gaaaatgtgctgaaacgaa

SEQ ID NO: 769696 - DNA, 19 bp, Mus musculus
  siRNA target sequence for 4930568P13Rik (NM_153505.2,2773-2791).
gaaacgaatgaccatcatt

SEQ ID NO: 769697 - DNA, 19 bp, Mus musculus
  siRNA target sequence for 4930568P13Rik (NM_153505.2,2784-2802).
ccatcattggggtgattct

SEQ ID NO: 769698 - DNA, 19 bp, Mus musculus
  siRNA target sequence for 4930568P13Rik (NM_153505.2,2792-2810).
ggggtgattctcagtttta

SEQ ID NO: 769699 - DNA, 19 bp, Mus musculus
  siRNA target sequence for 4930568P13Rik (NM_153505.2,2901-2919).
cccctgacacagacattaa

SEQ ID NO: 769700 - DNA, 19 bp, Mus musculus
  siRNA target sequence for 4930568P13Rik (NM_153505.2,2904-2922).
ctgacacagacattaaggt

SEQ ID NO: 769701 - DNA, 19 bp, Mus musculus
  siRNA target sequence for 4930568P13Rik (NM_153505.2,2990-3008).
gctgccattgccaatctga

SEQ ID NO: 769702 - DNA, 19 bp, Mus musculus
  siRNA target sequence for 4930568P13Rik (NM_153505.2,2991-3009).
ctgccattgccaatctgaa

SEQ ID NO: 769703 - DNA, 19 bp, Mus musculus
  siRNA target sequence for 4930568P13Rik (NM_153505.2,3000-3018).
ccaatctgaaagctgataa

SEQ ID NO: 769704 - DNA, 19 bp, Mus musculus
  siRNA target sequence for 4930568P13Rik (NM_153505.2,3005-3023).
ctgaaagctgataactcat

SEQ ID NO: 769705 - DNA, 19 bp, Mus musculus
  siRNA target sequence for 4930568P13Rik (NM_153505.2,3027-3045).
ctgaagaagagtataaggt

SEQ ID NO: 769706 - DNA, 19 bp, Mus musculus
  siRNA target sequence for 4930568P13Rik (NM_153505.2,3047-3065).
gcatgcctactcttgatct

SEQ ID NO: 769707 - DNA, 19 bp, Mus musculus
  siRNA target sequence for 4930568P13Rik (NM_153505.2,3048-3066).
catgcctactcttgatctt

SEQ ID NO: 769708 - DNA, 19 bp, Mus musculus
  siRNA target sequence for 4930568P13Rik (NM_153505.2,3294-3312).
ccagaaatcgtgaatccat

SEQ ID NO: 769709 - DNA, 19 bp, Mus musculus
  siRNA target sequence for 4930568P13Rik (NM_153505.2,3295-3313).
cagaaatcgtgaatccatt

SEQ ID NO: 769710 - DNA, 19 bp, Mus musculus
  siRNA target sequence for 4930568P13Rik (NM_153505.2,3338-3356).
gaggagtcacccttcttga

SEQ ID NO: 769711 - DNA, 19 bp, Mus musculus
  siRNA target sequence for 4930568P13Rik (NM_153505.2,3373-3391).
gtcctgtttcccttacgtt

SEQ ID NO: 769712 - DNA, 19 bp, Mus musculus
  siRNA target sequence for Cpne2 (NM_153507.2,330-348).
caagtctgaccctttctgt

SEQ ID NO: 769713 - DNA, 19 bp, Mus musculus
  siRNA target sequence for Cpne2 (NM_153507.2,619-637).
gcggggaagggcgtaatca

SEQ ID NO: 769714 - DNA, 19 bp, Mus musculus
  siRNA target sequence for Cpne2 (NM_153507.2,784-802).
cataggaccgaggtgatta

SEQ ID NO: 769715 - DNA, 19 bp, Mus musculus
  siRNA target sequence for Cpne2 (NM_153507.2,788-806).
ggaccgaggtgattaagta

SEQ ID NO: 769716 - DNA, 19 bp, Mus musculus
  siRNA target sequence for Cpne2 (NM_153507.2,814-832).
gacccggtgtggaaaccat

SEQ ID NO: 769717 - DNA, 19 bp, Mus musculus
  siRNA target sequence for Cpne2 (NM_153507.2,897-915).
cgactatgacagtaatgga

SEQ ID NO: 769718 - DNA, 19 bp, Mus musculus
  siRNA target sequence for Cpne2 (NM_153507.2,977-995).
gtgtcccgctggagataga

SEQ ID NO: 769719 - DNA, 19 bp, Mus musculus
  siRNA target sequence for Cpne2 (NM_153507.2,979-997).
gtcccgctggagatagagt

SEQ ID NO: 769720 - DNA, 19 bp, Mus musculus
  siRNA target sequence for Cpne2 (NM_153507.2,1067-1085).
gcaagatacaccgaaacta

SEQ ID NO: 769721 - DNA, 19 bp, Mus musculus
  siRNA target sequence for Cpne2 (NM_153507.2,1122-1140).
catgttcaccgttggaata

SEQ ID NO: 769722 - DNA, 19 bp, Mus musculus
  siRNA target sequence for Cpne2 (NM_153507.2,1198-1216).
cccatgggcaccaatgaat

SEQ ID NO: 769723 - DNA, 19 bp, Mus musculus
  siRNA target sequence for Cpne2 (NM_153507.2,1199-1217).
ccatgggcaccaatgaata

SEQ ID NO: 769724 - DNA, 19 bp, Mus musculus
  siRNA target sequence for Cpne2 (NM_153507.2,1204-1222).
ggcaccaatgaatacttgt

SEQ ID NO: 769725 - DNA, 19 bp, Mus musculus
  siRNA target sequence for Cpne2 (NM_153507.2,1499-1517).
cagcaacgcagtacttcat

SEQ ID NO: 769726 - DNA, 19 bp, Mus musculus
  siRNA target sequence for Cpne2 (NM_153507.2,1734-1752).
gttccgcaacgcagcaaaa

SEQ ID NO: 769727 - DNA, 19 bp, Mus musculus
  siRNA target sequence for Cpne2 (NM_153507.2,1737-1755).
ccgcaacgcagcaaaagaa

SEQ ID NO: 769728 - DNA, 19 bp, Mus musculus
  siRNA target sequence for Cpne2 (NM_153507.2,1738-1756).
cgcaacgcagcaaaagaaa

SEQ ID NO: 769729 - DNA, 19 bp, Mus musculus
  siRNA target sequence for Cpne2 (NM_153507.2,1789-1807).
cagcaagtagtgcagtatt

SEQ ID NO: 769730 - DNA, 19 bp, Mus musculus
  siRNA target sequence for Pilra (NM_153510.1,534-552).
ctgcacccccactacactt

SEQ ID NO: 769731 - DNA, 19 bp, Mus musculus
  siRNA target sequence for Pilra (NM_153510.1,575-593).
ctgcacacacccaaaatga

SEQ ID NO: 769732 - DNA, 19 bp, Mus musculus
  siRNA target sequence for Pilra (NM_153510.1,584-602).
cccaaaatgacataacaga

SEQ ID NO: 769733 - DNA, 19 bp, Mus musculus
  siRNA target sequence for Pilra (NM_153510.1,685-703).
gttttgggattgatagtgt

SEQ ID NO: 769734 - DNA, 19 bp, Mus musculus
  siRNA target sequence for Pilra (NM_153510.1,938-956).
ctgtgtactccatcgtaaa

SEQ ID NO: 769735 - DNA, 19 bp, Mus musculus
  siRNA target sequence for L259 (NM_153513.1,93-111).
ggaagagggtgattactat

SEQ ID NO: 769736 - DNA, 19 bp, Mus musculus
  siRNA target sequence for L259 (NM_153513.1,108-126).
ctatcaagtggcatattat

SEQ ID NO: 769737 - DNA, 19 bp, Mus musculus
  siRNA target sequence for L259 (NM_153513.1,112-130).
caagtggcatattattatt

SEQ ID NO: 769738 - DNA, 19 bp, Mus musculus
  siRNA target sequence for L259 (NM_153513.1,115-133).
gtggcatattattattaca

SEQ ID NO: 769739 - DNA, 19 bp, Mus musculus
  siRNA target sequence for L259 (NM_153513.1,117-135).
ggcatattattattacaca

SEQ ID NO: 769740 - DNA, 19 bp, Mus musculus
  siRNA target sequence for L259 (NM_153513.1,140-158).
cccctaattatgatgactt

SEQ ID NO: 769741 - DNA, 19 bp, Mus musculus
  siRNA target sequence for L259 (NM_153513.1,154-172).
gacttcagtgtaaacttca

SEQ ID NO: 769742 - DNA, 19 bp, Mus musculus
  siRNA target sequence for L259 (NM_153513.1,178-196).
gattactccgtgtttgagt

SEQ ID NO: 769743 - DNA, 19 bp, Mus musculus
  siRNA target sequence for L259 (NM_153513.1,219-237).
gaataaggaggtaacaaca

SEQ ID NO: 769744 - DNA, 19 bp, Mus musculus
  siRNA target sequence for L259 (NM_153513.1,272-290).
gtcttcatacagaacttat

SEQ ID NO: 769745 - DNA, 19 bp, Mus musculus
  siRNA target sequence for L259 (NM_153513.1,442-460).
ggaggggtacattttatgt

SEQ ID NO: 769746 - DNA, 19 bp, Mus musculus
  siRNA target sequence for E230022H04Rik (NM_153515.2,514-532).
gctgttgtggggtcaagaa

SEQ ID NO: 769747 - DNA, 19 bp, Mus musculus
  siRNA target sequence for E230022H04Rik (NM_153515.2,524-542).
ggtcaagaagcccaaacta

SEQ ID NO: 769748 - DNA, 19 bp, Mus musculus
  siRNA target sequence for E230022H04Rik (NM_153515.2,527-545).
caagaagcccaaactatct

SEQ ID NO: 769749 - DNA, 19 bp, Mus musculus
  siRNA target sequence for E230022H04Rik (NM_153515.2,566-584).
cgggaaccagtctacaact

SEQ ID NO: 769750 - DNA, 19 bp, Mus musculus
  siRNA target sequence for E230022H04Rik (NM_153515.2,569-587).
gaaccagtctacaactgtt

SEQ ID NO: 769751 - DNA, 19 bp, Mus musculus
  siRNA target sequence for E230022H04Rik (NM_153515.2,637-655).
gcagtggtcgggaaaatgt

SEQ ID NO: 769752 - DNA, 19 bp, Mus musculus
  siRNA target sequence for E230022H04Rik (NM_153515.2,648-666).
gaaaatgtatcggacttaa

SEQ ID NO: 769753 - DNA, 19 bp, Mus musculus
  siRNA target sequence for E230022H04Rik (NM_153515.2,675-693).
cctggaaactctcctatta

SEQ ID NO: 769754 - DNA, 19 bp, Mus musculus
  siRNA target sequence for E230022H04Rik (NM_153515.2,685-703).
ctcctattacacgaatgaa

SEQ ID NO: 769755 - DNA, 19 bp, Mus musculus
  siRNA target sequence for E230022H04Rik (NM_153515.2,687-705).
cctattacacgaatgaata

SEQ ID NO: 769756 - DNA, 19 bp, Mus musculus
  siRNA target sequence for E230022H04Rik (NM_153515.2,973-991).
cattaaccagtgcacttaa

SEQ ID NO: 769757 - DNA, 19 bp, Mus musculus
  siRNA target sequence for E230022H04Rik (NM_153515.2,1023-1041).
gagctgcccaaacttttct

SEQ ID NO: 769758 - DNA, 19 bp, Mus musculus
  siRNA target sequence for E230022H04Rik (NM_153515.2,1025-1043).
gctgcccaaacttttctgt

SEQ ID NO: 769759 - DNA, 19 bp, Mus musculus
  siRNA target sequence for E230022H04Rik (NM_153515.2,1026-1044).
ctgcccaaacttttctgtt

SEQ ID NO: 769760 - DNA, 19 bp, Mus musculus
  siRNA target sequence for E230022H04Rik (NM_153515.2,1045-1063).
ctgtctccctccttactaa

SEQ ID NO: 769761 - DNA, 19 bp, Mus musculus
  siRNA target sequence for E230022H04Rik (NM_153515.2,1047-1065).
gtctccctccttactaact

SEQ ID NO: 769762 - DNA, 19 bp, Mus musculus
  siRNA target sequence for E230022H04Rik (NM_153515.2,1051-1069).
ccctccttactaactttga

SEQ ID NO: 769763 - DNA, 19 bp, Mus musculus
  siRNA target sequence for E230022H04Rik (NM_153515.2,1197-1215).
cagatccagacaatagatt

SEQ ID NO: 769764 - DNA, 19 bp, Mus musculus
  siRNA target sequence for E230022H04Rik (NM_153515.2,1301-1319).
ggtgacaatcagttatgca

SEQ ID NO: 769765 - DNA, 19 bp, Mus musculus
  siRNA target sequence for E230022H04Rik (NM_153515.2,1374-1392).
cccctctacaatcattact

SEQ ID NO: 769766 - DNA, 19 bp, Mus musculus
  siRNA target sequence for 4933417K04Rik (NM_153518.1,334-352).
caacagcgctctaaacctt

SEQ ID NO: 769767 - DNA, 19 bp, Mus musculus
  siRNA target sequence for 4933417K04Rik (NM_153518.1,337-355).
cagcgctctaaaccttaat

SEQ ID NO: 769768 - DNA, 19 bp, Mus musculus
  siRNA target sequence for 4933417K04Rik (NM_153518.1,339-357).
gcgctctaaaccttaataa

SEQ ID NO: 769769 - DNA, 19 bp, Mus musculus
  siRNA target sequence for 4933417K04Rik (NM_153518.1,342-360).
ctctaaaccttaataagat

SEQ ID NO: 769770 - DNA, 19 bp, Mus musculus
  siRNA target sequence for 4933417K04Rik (NM_153518.1,344-362).
ctaaaccttaataagatta

SEQ ID NO: 769771 - DNA, 19 bp, Mus musculus
  siRNA target sequence for 4933417K04Rik (NM_153518.1,459-477).
gtaaggacagcgtcatcaa

SEQ ID NO: 769772 - DNA, 19 bp, Mus musculus
  siRNA target sequence for 4933417K04Rik (NM_153518.1,531-549).
gtagtcacttgcacaacat

SEQ ID NO: 769773 - DNA, 19 bp, Mus musculus
  siRNA target sequence for 4933417K04Rik (NM_153518.1,534-552).
gtcacttgcacaacattga

SEQ ID NO: 769774 - DNA, 19 bp, Mus musculus
  siRNA target sequence for 4933417K04Rik (NM_153518.1,642-660).
cggaaaggaaattgatcat

SEQ ID NO: 769775 - DNA, 19 bp, Mus musculus
  siRNA target sequence for 4933417K04Rik (NM_153518.1,643-661).
ggaaaggaaattgatcatt

SEQ ID NO: 769776 - DNA, 19 bp, Mus musculus
  siRNA target sequence for 4933417K04Rik (NM_153518.1,708-726).
ccatggagcagaactacat

SEQ ID NO: 769777 - DNA, 19 bp, Mus musculus
  siRNA target sequence for 4933417K04Rik (NM_153518.1,709-727).
catggagcagaactacata

SEQ ID NO: 769778 - DNA, 19 bp, Mus musculus
  siRNA target sequence for 4933417K04Rik (NM_153518.1,762-780).
gcatgtgggatgaccttaa

SEQ ID NO: 769779 - DNA, 19 bp, Mus musculus
  siRNA target sequence for 4933417K04Rik (NM_153518.1,813-831).
gcctacaactggagaacat

SEQ ID NO: 769780 - DNA, 19 bp, Mus musculus
  siRNA target sequence for 4933417K04Rik (NM_153518.1,814-832).
cctacaactggagaacata

SEQ ID NO: 769781 - DNA, 19 bp, Mus musculus
  siRNA target sequence for 4933417K04Rik (NM_153518.1,856-874).
ccaggatgcactcaagaat

SEQ ID NO: 769782 - DNA, 19 bp, Mus musculus
  siRNA target sequence for 4933417K04Rik (NM_153518.1,857-875).
caggatgcactcaagaatt

SEQ ID NO: 769783 - DNA, 19 bp, Mus musculus
  siRNA target sequence for 4933417K04Rik (NM_153518.1,896-914).
cggaagatcgcctttgagt

SEQ ID NO: 769784 - DNA, 19 bp, Mus musculus
  siRNA target sequence for 4933417K04Rik (NM_153518.1,897-915).
ggaagatcgcctttgagta

SEQ ID NO: 769785 - DNA, 19 bp, Mus musculus
  siRNA target sequence for 4933417K04Rik (NM_153518.1,949-967).
gattgagacgcagatgaaa

SEQ ID NO: 769786 - DNA, 19 bp, Mus musculus
  siRNA target sequence for 4933417K04Rik (NM_153518.1,980-998).
ctgcaggagaccataggta

SEQ ID NO: 769787 - DNA, 19 bp, Mus musculus
  siRNA target sequence for 4933417K04Rik (NM_153518.1,1034-1052).
ggggaatggcagaatcagt

SEQ ID NO: 769788 - DNA, 19 bp, Mus musculus
  siRNA target sequence for 4933417K04Rik (NM_153518.1,1049-1067).
cagtgcatccggaataaca

SEQ ID NO: 769789 - DNA, 19 bp, Mus musculus
  siRNA target sequence for 4933417K04Rik (NM_153518.1,1081-1099).
cgtgcagcttcgaaaactt

SEQ ID NO: 769790 - DNA, 19 bp, Mus musculus
  siRNA target sequence for 4933417K04Rik (NM_153518.1,1125-1143).
ccctatctcaggagaactt

SEQ ID NO: 769791 - DNA, 19 bp, Mus musculus
  siRNA target sequence for 4933417K04Rik (NM_153518.1,1126-1144).
cctatctcaggagaactta

SEQ ID NO: 769792 - DNA, 19 bp, Mus musculus
  siRNA target sequence for 4933417K04Rik (NM_153518.1,1322-1340).
cagaacccggaggatatca

SEQ ID NO: 769793 - DNA, 19 bp, Mus musculus
  siRNA target sequence for 4933417K04Rik (NM_153518.1,1324-1342).
gaacccggaggatatcaca

SEQ ID NO: 769794 - DNA, 19 bp, Mus musculus
  siRNA target sequence for 4933417K04Rik (NM_153518.1,1398-1416).
gatacaacaaggtgaaact

SEQ ID NO: 769795 - DNA, 19 bp, Mus musculus
  siRNA target sequence for 4933417K04Rik (NM_153518.1,1475-1493).
cgggagatgctcaaacagt

SEQ ID NO: 769796 - DNA, 19 bp, Mus musculus
  siRNA target sequence for 4933417K04Rik (NM_153518.1,1542-1560).
cgctcttcgtagtaaacca

SEQ ID NO: 769797 - DNA, 19 bp, Mus musculus
  siRNA target sequence for Tmem10 (NM_153520.1,95-113).
ctttacactgccatcgaat

SEQ ID NO: 769798 - DNA, 19 bp, Mus musculus
  siRNA target sequence for Tmem10 (NM_153520.1,155-173).
ctgtggtccctctattgga

SEQ ID NO: 769799 - DNA, 19 bp, Mus musculus
  siRNA target sequence for Tmem10 (NM_153520.1,216-234).
gtggctttgctgtttacct

SEQ ID NO: 769800 - DNA, 19 bp, Mus musculus
  siRNA target sequence for Tmem10 (NM_153520.1,233-251).
cttgatccagcgaagaaga

SEQ ID NO: 769801 - DNA, 19 bp, Mus musculus
  siRNA target sequence for Tmem10 (NM_153520.1,247-265).
gaagaaccatcgatgatga

SEQ ID NO: 769802 - DNA, 19 bp, Mus musculus
  siRNA target sequence for Tmem10 (NM_153520.1,273-291).
gaggagactgagataccat

SEQ ID NO: 769803 - DNA, 19 bp, Mus musculus
  siRNA target sequence for Tmem10 (NM_153520.1,278-296).
gactgagataccatgtgaa

SEQ ID NO: 769804 - DNA, 19 bp, Mus musculus
  siRNA target sequence for Tmem10 (NM_153520.1,292-310).
gtgaaatttcagaactcta

SEQ ID NO: 769805 - DNA, 19 bp, Mus musculus
  siRNA target sequence for Tmem10 (NM_153520.1,377-395).
ccaagaagggcacatatat

SEQ ID NO: 769806 - DNA, 19 bp, Mus musculus
  siRNA target sequence for Tmem10 (NM_153520.1,381-399).
gaagggcacatatatgtga

SEQ ID NO: 769807 - DNA, 19 bp, Mus musculus
  siRNA target sequence for Tmem10 (NM_153520.1,437-455).
ctaccgtcctcctgaagaa

SEQ ID NO: 769808 - DNA, 19 bp, Mus musculus
  siRNA target sequence for Tmem10 (NM_153520.1,440-458).
ccgtcctcctgaagaacta

SEQ ID NO: 769809 - DNA, 19 bp, Mus musculus
  siRNA target sequence for D630045E04Rik (NM_153521.1,774-792).
gagatgaagggtccttatt

SEQ ID NO: 769810 - DNA, 19 bp, Mus musculus
  siRNA target sequence for D630045E04Rik (NM_153521.1,944-962).
ggtggaacagactctaagt

SEQ ID NO: 769811 - DNA, 19 bp, Mus musculus
  siRNA target sequence for D630045E04Rik (NM_153521.1,947-965).
ggaacagactctaagttgt

SEQ ID NO: 769812 - DNA, 19 bp, Mus musculus
  siRNA target sequence for D630045E04Rik (NM_153521.1,948-966).
gaacagactctaagttgta

SEQ ID NO: 769813 - DNA, 19 bp, Mus musculus
  siRNA target sequence for D630045E04Rik (NM_153521.1,967-985).
cctcccagccacctcttat

SEQ ID NO: 769814 - DNA, 19 bp, Mus musculus
  siRNA target sequence for D630045E04Rik (NM_153521.1,1077-1095).
cacagcctaagcccttaaa

SEQ ID NO: 769815 - DNA, 19 bp, Mus musculus
  siRNA target sequence for D630045E04Rik (NM_153521.1,1298-1316).
cagcgattccgcagcattt

SEQ ID NO: 769816 - DNA, 19 bp, Mus musculus
  siRNA target sequence for D630045E04Rik (NM_153521.1,1301-1319).
cgattccgcagcatttcca

SEQ ID NO: 769817 - DNA, 19 bp, Mus musculus
  siRNA target sequence for D630045E04Rik (NM_153521.1,1420-1438).
caatggtctgggctctaat

SEQ ID NO: 769818 - DNA, 19 bp, Mus musculus
  siRNA target sequence for D630045E04Rik (NM_153521.1,1424-1442).
ggtctgggctctaatatct

SEQ ID NO: 769819 - DNA, 19 bp, Mus musculus
  siRNA target sequence for D630045E04Rik (NM_153521.1,1425-1443).
gtctgggctctaatatctt

SEQ ID NO: 769820 - DNA, 19 bp, Mus musculus
  siRNA target sequence for D630045E04Rik (NM_153521.1,1527-1545).
cactgcccatcctggaatt

SEQ ID NO: 769821 - DNA, 19 bp, Mus musculus
  siRNA target sequence for D630045E04Rik (NM_153521.1,1576-1594).
gttgcgggtcctgtctatt

SEQ ID NO: 769822 - DNA, 19 bp, Mus musculus
  siRNA target sequence for D630045E04Rik (NM_153521.1,1579-1597).
gcgggtcctgtctattcgt

SEQ ID NO: 769823 - DNA, 19 bp, Mus musculus
  siRNA target sequence for D630045E04Rik (NM_153521.1,1692-1710).
gcctcgagcagttggaaat

SEQ ID NO: 769824 - DNA, 19 bp, Mus musculus
  siRNA target sequence for D630045E04Rik (NM_153521.1,1844-1862).
ctcaaagaacacaacctat

SEQ ID NO: 769825 - DNA, 19 bp, Mus musculus
  siRNA target sequence for D630045E04Rik (NM_153521.1,1907-1925).
cagagtgaagtgctttttt

SEQ ID NO: 769826 - DNA, 19 bp, Mus musculus
  siRNA target sequence for D630045E04Rik (NM_153521.1,1911-1929).
gtgaagtgctttttttgct

SEQ ID NO: 769827 - DNA, 19 bp, Mus musculus
  siRNA target sequence for D630045E04Rik (NM_153521.1,1913-1931).
gaagtgctttttttgctaa

SEQ ID NO: 769828 - DNA, 19 bp, Mus musculus
  siRNA target sequence for D630045E04Rik (NM_153521.1,1937-1955).
ctgacccttcaagagatta

SEQ ID NO: 769829 - DNA, 19 bp, Mus musculus
  siRNA target sequence for D630045E04Rik (NM_153521.1,1941-1959).
cccttcaagagattacctt

SEQ ID NO: 769830 - DNA, 19 bp, Mus musculus
  siRNA target sequence for D630045E04Rik (NM_153521.1,1962-1980).
ccttctgccgtctgtttga

SEQ ID NO: 769831 - DNA, 19 bp, Mus musculus
  siRNA target sequence for D630045E04Rik (NM_153521.1,1981-1999).
gaagcgcccagtccaattt

SEQ ID NO: 769832 - DNA, 19 bp, Mus musculus
  siRNA target sequence for D630045E04Rik (NM_153521.1,2071-2089).
ggggaacgctggcctatta

SEQ ID NO: 769833 - DNA, 19 bp, Mus musculus
  siRNA target sequence for D630045E04Rik (NM_153521.1,2090-2108).
gccctagcagatgttttct

SEQ ID NO: 769834 - DNA, 19 bp, Mus musculus
  siRNA target sequence for D630045E04Rik (NM_153521.1,2092-2110).
cctagcagatgttttctca

SEQ ID NO: 769835 - DNA, 19 bp, Mus musculus
  siRNA target sequence for D630045E04Rik (NM_153521.1,2335-2353).
ccaggcctttgcagattat

SEQ ID NO: 769836 - DNA, 19 bp, Mus musculus
  siRNA target sequence for D7Ertd743e (NM_153525.2,857-875).
gtgttgcacctccttcttt

SEQ ID NO: 769837 - DNA, 19 bp, Mus musculus
  siRNA target sequence for D7Ertd743e (NM_153525.2,869-887).
cttcttttgtagcaatcaa

SEQ ID NO: 769838 - DNA, 19 bp, Mus musculus
  siRNA target sequence for D7Ertd743e (NM_153525.2,941-959).
gctcggtatttattctgat

SEQ ID NO: 769839 - DNA, 19 bp, Mus musculus
  siRNA target sequence for 4921521N14Rik (NM_153528.1,454-472).
caaggccgtcagctttaca

SEQ ID NO: 769840 - DNA, 19 bp, Mus musculus
  siRNA target sequence for 4921521N14Rik (NM_153528.1,552-570).
cccagagcgagagaaatgt

SEQ ID NO: 769841 - DNA, 19 bp, Mus musculus
  siRNA target sequence for 4921521N14Rik (NM_153528.1,554-572).
cagagcgagagaaatgtga

SEQ ID NO: 769842 - DNA, 19 bp, Mus musculus
  siRNA target sequence for 4921521N14Rik (NM_153528.1,559-577).
cgagagaaatgtgagaaaa

SEQ ID NO: 769843 - DNA, 19 bp, Mus musculus
  siRNA target sequence for 4921521N14Rik (NM_153528.1,581-599).
ccttcgctagcttcagaaa

SEQ ID NO: 769844 - DNA, 19 bp, Mus musculus
  siRNA target sequence for 4921521N14Rik (NM_153528.1,621-639).
ccaagtcactggacttgaa

SEQ ID NO: 769845 - DNA, 19 bp, Mus musculus
  siRNA target sequence for 4921521N14Rik (NM_153528.1,622-640).
caagtcactggacttgaat

SEQ ID NO: 769846 - DNA, 19 bp, Mus musculus
  siRNA target sequence for 4921521N14Rik (NM_153528.1,632-650).
gacttgaataagaatgagt

SEQ ID NO: 769847 - DNA, 19 bp, Mus musculus
  siRNA target sequence for 4921521N14Rik (NM_153528.1,781-799).
gttcactagctcacacttt

SEQ ID NO: 769848 - DNA, 19 bp, Mus musculus
  siRNA target sequence for 4921521N14Rik (NM_153528.1,878-896).
ctgcgaaccatgacctata

SEQ ID NO: 769849 - DNA, 19 bp, Mus musculus
  siRNA target sequence for 4921521N14Rik (NM_153528.1,881-899).
cgaaccatgacctatacca

SEQ ID NO: 769850 - DNA, 19 bp, Mus musculus
  siRNA target sequence for 4921521N14Rik (NM_153528.1,913-931).
cccgctaactgggaagtat

SEQ ID NO: 769851 - DNA, 19 bp, Mus musculus
  siRNA target sequence for 4921521N14Rik (NM_153528.1,1000-1018).
cgaagtgctgacacatgat

SEQ ID NO: 769852 - DNA, 19 bp, Mus musculus
  siRNA target sequence for 4921521N14Rik (NM_153528.1,1022-1040).
ccctatcacgactacttct

SEQ ID NO: 769853 - DNA, 19 bp, Mus musculus
  siRNA target sequence for 4921521N14Rik (NM_153528.1,1023-1041).
cctatcacgactacttcta

SEQ ID NO: 769854 - DNA, 19 bp, Mus musculus
  siRNA target sequence for 4921521N14Rik (NM_153528.1,1031-1049).
gactacttctacactttga

SEQ ID NO: 769855 - DNA, 19 bp, Mus musculus
  siRNA target sequence for 4921521N14Rik (NM_153528.1,1042-1060).
cactttgaacagatactgt

SEQ ID NO: 769856 - DNA, 19 bp, Mus musculus
  siRNA target sequence for 4921521N14Rik (NM_153528.1,1044-1062).
ctttgaacagatactgtat

SEQ ID NO: 769857 - DNA, 19 bp, Mus musculus
  siRNA target sequence for 4921521N14Rik (NM_153528.1,1095-1113).
gagtctccacagacttgaa

SEQ ID NO: 769858 - DNA, 19 bp, Mus musculus
  siRNA target sequence for 4921521N14Rik (NM_153528.1,1131-1149).
ggggccttatcaagtcttt

SEQ ID NO: 769859 - DNA, 19 bp, Mus musculus
  siRNA target sequence for 4921521N14Rik (NM_153528.1,1144-1162).
gtctttaattgagaagaat

SEQ ID NO: 769860 - DNA, 19 bp, Mus musculus
  siRNA target sequence for 4921521N14Rik (NM_153528.1,1180-1198).
gagctacttcaaaaagctt

SEQ ID NO: 769861 - DNA, 19 bp, Mus musculus
  siRNA target sequence for 4921521N14Rik (NM_153528.1,1195-1213).
gcttgaatccgatttgtta

SEQ ID NO: 769862 - DNA, 19 bp, Mus musculus
  siRNA target sequence for 4921521N14Rik (NM_153528.1,1196-1214).
cttgaatccgatttgttaa

SEQ ID NO: 769863 - DNA, 19 bp, Mus musculus
  siRNA target sequence for 4921521N14Rik (NM_153528.1,1220-1238).
gagtctgtgttgagtcaat

SEQ ID NO: 769864 - DNA, 19 bp, Mus musculus
  siRNA target sequence for 4921521N14Rik (NM_153528.1,1224-1242).
ctgtgttgagtcaatccat

SEQ ID NO: 769865 - DNA, 19 bp, Mus musculus
  siRNA target sequence for 4921521N14Rik (NM_153528.1,1231-1249).
gagtcaatccattgaagat

SEQ ID NO: 769866 - DNA, 19 bp, Mus musculus
  siRNA target sequence for 4921521N14Rik (NM_153528.1,1350-1368).
gcttcgaggccaaagtaga

SEQ ID NO: 769867 - DNA, 19 bp, Mus musculus
  siRNA target sequence for 4921521N14Rik (NM_153528.1,1354-1372).
cgaggccaaagtagatgtt

SEQ ID NO: 769868 - DNA, 19 bp, Mus musculus
  siRNA target sequence for 4921521N14Rik (NM_153528.1,1418-1436).
gtggtgatgagcatattct

SEQ ID NO: 769869 - DNA, 19 bp, Mus musculus
  siRNA target sequence for 4921521N14Rik (NM_153528.1,1451-1469).
ctgctgaatgtgacactat

SEQ ID NO: 769870 - DNA, 19 bp, Mus musculus
  siRNA target sequence for 4921521N14Rik (NM_153528.1,1453-1471).
gctgaatgtgacactattt

SEQ ID NO: 769871 - DNA, 19 bp, Mus musculus
  siRNA target sequence for 4921521N14Rik (NM_153528.1,1522-1540).
cctccagggagaaaaatct

SEQ ID NO: 769872 - DNA, 19 bp, Mus musculus
  siRNA target sequence for 4921521N14Rik (NM_153528.1,1525-1543).
ccagggagaaaaatcttta

SEQ ID NO: 769873 - DNA, 19 bp, Mus musculus
  siRNA target sequence for 4921521N14Rik (NM_153528.1,1560-1578).
ggttctcaagaacagaaaa

SEQ ID NO: 769874 - DNA, 19 bp, Mus musculus
  siRNA target sequence for 4921521N14Rik (NM_153528.1,1561-1579).
gttctcaagaacagaaaat

SEQ ID NO: 769875 - DNA, 19 bp, Mus musculus
  siRNA target sequence for 4921521N14Rik (NM_153528.1,1600-1618).
ggcccaccgcctaaaagga

SEQ ID NO: 769876 - DNA, 19 bp, Mus musculus
  siRNA target sequence for 4921521N14Rik (NM_153528.1,1617-1635).
gagtactccaagattccat

SEQ ID NO: 769877 - DNA, 19 bp, Mus musculus
  siRNA target sequence for Nrn1 (NM_153529.1,187-205).
gttgaacggcagatatatt

SEQ ID NO: 769878 - DNA, 19 bp, Mus musculus
  siRNA target sequence for Nrn1 (NM_153529.1,190-208).
gaacggcagatatatttca

SEQ ID NO: 769879 - DNA, 19 bp, Mus musculus
  siRNA target sequence for Nrn1 (NM_153529.1,211-229).
gatcctcgcggtgcaaata

SEQ ID NO: 769880 - DNA, 19 bp, Mus musculus
  siRNA target sequence for Nrn1 (NM_153529.1,214-232).
cctcgcggtgcaaatagct

SEQ ID NO: 769881 - DNA, 19 bp, Mus musculus
  siRNA target sequence for Nrn1 (NM_153529.1,215-233).
ctcgcggtgcaaatagctt

SEQ ID NO: 769882 - DNA, 19 bp, Mus musculus
  siRNA target sequence for Nrn1 (NM_153529.1,372-390).
gcacatactgggaggattt

SEQ ID NO: 769883 - DNA, 19 bp, Mus musculus
  siRNA target sequence for Nrn1 (NM_153529.1,424-442).
ccaggaaggggcgaaagat

SEQ ID NO: 769884 - DNA, 19 bp, Mus musculus
  siRNA target sequence for Nrn1 (NM_153529.1,425-443).
caggaaggggcgaaagata

SEQ ID NO: 769885 - DNA, 19 bp, Mus musculus
  siRNA target sequence for Nrn1 (NM_153529.1,428-446).
gaaggggcgaaagatatgt

SEQ ID NO: 769886 - DNA, 19 bp, Mus musculus
  siRNA target sequence for Nrn1 (NM_153529.1,484-502).
ccaaggcagcttattcgaa

SEQ ID NO: 769887 - DNA, 19 bp, Mus musculus
  siRNA target sequence for BC028839 (NM_153532.2,533-551).
cctcttggaaattagataa

SEQ ID NO: 769888 - DNA, 19 bp, Mus musculus
  siRNA target sequence for BC028839 (NM_153532.2,554-572).
caaaaatggctgaactttt

SEQ ID NO: 769889 - DNA, 19 bp, Mus musculus
  siRNA target sequence for BC028839 (NM_153532.2,562-580).
gctgaacttttcatggaat

SEQ ID NO: 769890 - DNA, 19 bp, Mus musculus
  siRNA target sequence for BC028839 (NM_153532.2,602-620).
catggcagcagaaagtaga

SEQ ID NO: 769891 - DNA, 19 bp, Mus musculus
  siRNA target sequence for BC028839 (NM_153532.2,756-774).
caatccagctatttctaat

SEQ ID NO: 769892 - DNA, 19 bp, Mus musculus
  siRNA target sequence for BC028839 (NM_153532.2,840-858).
ctttcatcctgctctcaaa

SEQ ID NO: 769893 - DNA, 19 bp, Mus musculus
  siRNA target sequence for BC028839 (NM_153532.2,953-971).
cagactcgacccaagatat

SEQ ID NO: 769894 - DNA, 19 bp, Mus musculus
  siRNA target sequence for BC028839 (NM_153532.2,999-1017).
gacaggtgtcgatcaaact

SEQ ID NO: 769895 - DNA, 19 bp, Mus musculus
  siRNA target sequence for BC028839 (NM_153532.2,1001-1019).
caggtgtcgatcaaacttt

SEQ ID NO: 769896 - DNA, 19 bp, Mus musculus
  siRNA target sequence for BC028839 (NM_153532.2,1006-1024).
gtcgatcaaactttaggat

SEQ ID NO: 769897 - DNA, 19 bp, Mus musculus
  siRNA target sequence for BC028839 (NM_153532.2,1008-1026).
cgatcaaactttaggatta

SEQ ID NO: 769898 - DNA, 19 bp, Mus musculus
  siRNA target sequence for BC028839 (NM_153532.2,1009-1027).
gatcaaactttaggattaa

SEQ ID NO: 769899 - DNA, 19 bp, Mus musculus
  siRNA target sequence for BC028839 (NM_153532.2,1048-1066).
gtaaacagtgttaatccaa

SEQ ID NO: 769900 - DNA, 19 bp, Mus musculus
  siRNA target sequence for BC028839 (NM_153532.2,1077-1095).
gacgagtgcgagcatttct

SEQ ID NO: 769901 - DNA, 19 bp, Mus musculus
  siRNA target sequence for BC028839 (NM_153532.2,1079-1097).
cgagtgcgagcatttctga

SEQ ID NO: 769902 - DNA, 19 bp, Mus musculus
  siRNA target sequence for BC028839 (NM_153532.2,1080-1098).
gagtgcgagcatttctgaa

SEQ ID NO: 769903 - DNA, 19 bp, Mus musculus
  siRNA target sequence for BC028839 (NM_153532.2,1157-1175).
ctgtactatcaaatgtgaa

SEQ ID NO: 769904 - DNA, 19 bp, Mus musculus
  siRNA target sequence for BC028839 (NM_153532.2,1159-1177).
gtactatcaaatgtgaata

SEQ ID NO: 769905 - DNA, 19 bp, Mus musculus
  siRNA target sequence for BC028839 (NM_153532.2,1201-1219).
ggatcatcttcactaagat

SEQ ID NO: 769906 - DNA, 19 bp, Mus musculus
  siRNA target sequence for BC028839 (NM_153532.2,1225-1243).
ccaaagtgcaatgttaagt

SEQ ID NO: 769907 - DNA, 19 bp, Mus musculus
  siRNA target sequence for BC028839 (NM_153532.2,1352-1370).
ctaccactgactcagataa

SEQ ID NO: 769908 - DNA, 19 bp, Mus musculus
  siRNA target sequence for BC028839 (NM_153532.2,1412-1430).
gacatgaaggaactattga

SEQ ID NO: 769909 - DNA, 19 bp, Mus musculus
  siRNA target sequence for BC028839 (NM_153532.2,1519-1537).
caccacttggaacttgaaa

SEQ ID NO: 769910 - DNA, 19 bp, Mus musculus
  siRNA target sequence for BC028839 (NM_153532.2,1621-1639).
cacattgagagtacacata

SEQ ID NO: 769911 - DNA, 19 bp, Mus musculus
  siRNA target sequence for BC028839 (NM_153532.2,1623-1641).
cattgagagtacacatact

SEQ ID NO: 769912 - DNA, 19 bp, Mus musculus
  siRNA target sequence for BC028839 (NM_153532.2,1648-1666).
gatttttctactatttgca

SEQ ID NO: 769913 - DNA, 19 bp, Mus musculus
  siRNA target sequence for BC028839 (NM_153532.2,1668-1686).
gatctgtgaattgtcattt

SEQ ID NO: 769914 - DNA, 19 bp, Mus musculus
  siRNA target sequence for BC028839 (NM_153532.2,1682-1700).
catttgaaacagagcatat

SEQ ID NO: 769915 - DNA, 19 bp, Mus musculus
  siRNA target sequence for BC028839 (NM_153532.2,1687-1705).
gaaacagagcatatgcttt

SEQ ID NO: 769916 - DNA, 19 bp, Mus musculus
  siRNA target sequence for BC028839 (NM_153532.2,1691-1709).
cagagcatatgcttttaca

SEQ ID NO: 769917 - DNA, 19 bp, Mus musculus
  siRNA target sequence for BC028839 (NM_153532.2,1711-1729).
cacatgaaggatactcata

SEQ ID NO: 769918 - DNA, 19 bp, Mus musculus
  siRNA target sequence for BC028839 (NM_153532.2,1716-1734).
gaaggatactcataaacct

SEQ ID NO: 769919 - DNA, 19 bp, Mus musculus
  siRNA target sequence for BC028839 (NM_153532.2,1756-1774).
caggtttgccagtttagat

SEQ ID NO: 769920 - DNA, 19 bp, Mus musculus
  siRNA target sequence for BC028839 (NM_153532.2,1758-1776).
ggtttgccagtttagatca

SEQ ID NO: 769921 - DNA, 19 bp, Mus musculus
  siRNA target sequence for BC028839 (NM_153532.2,1763-1781).
gccagtttagatcatcaat

SEQ ID NO: 769922 - DNA, 19 bp, Mus musculus
  siRNA target sequence for BC028839 (NM_153532.2,1764-1782).
ccagtttagatcatcaata

SEQ ID NO: 769923 - DNA, 19 bp, Mus musculus
  siRNA target sequence for BC028839 (NM_153532.2,1765-1783).
cagtttagatcatcaatat

SEQ ID NO: 769924 - DNA, 19 bp, Mus musculus
  siRNA target sequence for BC028839 (NM_153532.2,1845-1863).
gttttgcctcaaagttagt

SEQ ID NO: 769925 - DNA, 19 bp, Mus musculus
  siRNA target sequence for BC028839 (NM_153532.2,1869-1887).
ggcaaccccttatatgaat

SEQ ID NO: 769926 - DNA, 19 bp, Mus musculus
  siRNA target sequence for BC028839 (NM_153532.2,1871-1889).
caaccccttatatgaatca

SEQ ID NO: 769927 - DNA, 19 bp, Mus musculus
  siRNA target sequence for BC028839 (NM_153532.2,1874-1892).
ccccttatatgaatcacta

SEQ ID NO: 769928 - DNA, 19 bp, Mus musculus
  siRNA target sequence for BC028839 (NM_153532.2,1877-1895).
cttatatgaatcactacat

SEQ ID NO: 769929 - DNA, 19 bp, Mus musculus
  siRNA target sequence for BC028839 (NM_153532.2,1926-1944).
cccgaaatgcagactacaa

SEQ ID NO: 769930 - DNA, 19 bp, Mus musculus
  siRNA target sequence for BC028839 (NM_153532.2,1927-1945).
ccgaaatgcagactacaat

SEQ ID NO: 769931 - DNA, 19 bp, Mus musculus
  siRNA target sequence for BC028839 (NM_153532.2,1928-1946).
cgaaatgcagactacaatt

SEQ ID NO: 769932 - DNA, 19 bp, Mus musculus
  siRNA target sequence for BC028839 (NM_153532.2,1929-1947).
gaaatgcagactacaattt

SEQ ID NO: 769933 - DNA, 19 bp, Mus musculus
  siRNA target sequence for BC028839 (NM_153532.2,1981-1999).
gaacatcgcacatttataa

SEQ ID NO: 769934 - DNA, 19 bp, Mus musculus
  siRNA target sequence for BC028839 (NM_153532.2,2136-2154).
gtctaaaagtacaactact

SEQ ID NO: 769935 - DNA, 19 bp, Mus musculus
  siRNA target sequence for BC028839 (NM_153532.2,2144-2162).
gtacaactactaagaataa

SEQ ID NO: 769936 - DNA, 19 bp, Mus musculus
  siRNA target sequence for BC028839 (NM_153532.2,2150-2168).
ctactaagaataactcaaa

SEQ ID NO: 769937 - DNA, 19 bp, Mus musculus
  siRNA target sequence for BC028839 (NM_153532.2,2192-2210).
ccactagccctcaaacagt

SEQ ID NO: 769938 - DNA, 19 bp, Mus musculus
  siRNA target sequence for BC028839 (NM_153532.2,2193-2211).
cactagccctcaaacagtt

SEQ ID NO: 769939 - DNA, 19 bp, Mus musculus
  siRNA target sequence for BC028839 (NM_153532.2,2225-2243).
gtaagcccagtgcaagtaa

SEQ ID NO: 769940 - DNA, 19 bp, Mus musculus
  siRNA target sequence for BC028839 (NM_153532.2,2245-2263).
ccaggtacggggacaacta

SEQ ID NO: 769941 - DNA, 19 bp, Mus musculus
  siRNA target sequence for BC028839 (NM_153532.2,2246-2264).
caggtacggggacaactaa

SEQ ID NO: 769942 - DNA, 19 bp, Mus musculus
  siRNA target sequence for BC028839 (NM_153532.2,2248-2266).
ggtacggggacaactaaat

SEQ ID NO: 769943 - DNA, 19 bp, Mus musculus
  siRNA target sequence for BC028839 (NM_153532.2,2302-2320).
cgcaccaggaaaaacaaat

SEQ ID NO: 769944 - DNA, 19 bp, Mus musculus
  siRNA target sequence for BC028839 (NM_153532.2,2324-2342).
gcatagatctgaagaactt

SEQ ID NO: 769945 - DNA, 19 bp, Mus musculus
  siRNA target sequence for BC028839 (NM_153532.2,2325-2343).
catagatctgaagaactta

SEQ ID NO: 769946 - DNA, 19 bp, Mus musculus
  siRNA target sequence for BC028839 (NM_153532.2,2329-2347).
gatctgaagaacttaaggt

SEQ ID NO: 769947 - DNA, 19 bp, Mus musculus
  siRNA target sequence for BC028839 (NM_153532.2,2379-2397).
ccgttccaaaataaaagat

SEQ ID NO: 769948 - DNA, 19 bp, Mus musculus
  siRNA target sequence for BC028839 (NM_153532.2,2464-2482).
gcctttacaaatcatatga

SEQ ID NO: 769949 - DNA, 19 bp, Mus musculus
  siRNA target sequence for BC028839 (NM_153532.2,2500-2518).
ccaagtaagcagctttata

SEQ ID NO: 769950 - DNA, 19 bp, Mus musculus
  siRNA target sequence for BC028839 (NM_153532.2,2501-2519).
caagtaagcagctttatat

SEQ ID NO: 769951 - DNA, 19 bp, Mus musculus
  siRNA target sequence for BC028839 (NM_153532.2,2504-2522).
gtaagcagctttatatttt

SEQ ID NO: 769952 - DNA, 19 bp, Mus musculus
  siRNA target sequence for BC028839 (NM_153532.2,2553-2571).
cactctagtgtgccttaaa

SEQ ID NO: 769953 - DNA, 19 bp, Mus musculus
  siRNA target sequence for BC028839 (NM_153532.2,2577-2595).
cttcctagccgatacttct

SEQ ID NO: 769954 - DNA, 19 bp, Mus musculus
  siRNA target sequence for BC028839 (NM_153532.2,2602-2620).
gaccgtatggctaaacact

SEQ ID NO: 769955 - DNA, 19 bp, Mus musculus
  siRNA target sequence for BC028839 (NM_153532.2,2604-2622).
ccgtatggctaaacactta

SEQ ID NO: 769956 - DNA, 19 bp, Mus musculus
  siRNA target sequence for BC028839 (NM_153532.2,2610-2628).
ggctaaacacttaaatcaa

SEQ ID NO: 769957 - DNA, 19 bp, Mus musculus
  siRNA target sequence for BC028839 (NM_153532.2,2617-2635).
cacttaaatcaacgtaaaa

SEQ ID NO: 769958 - DNA, 19 bp, Mus musculus
  siRNA target sequence for BC028839 (NM_153532.2,2619-2637).
cttaaatcaacgtaaaact

SEQ ID NO: 769959 - DNA, 19 bp, Mus musculus
  siRNA target sequence for BC028839 (NM_153532.2,2626-2644).
caacgtaaaactcatactt

SEQ ID NO: 769960 - DNA, 19 bp, Mus musculus
  siRNA target sequence for BC028839 (NM_153532.2,2642-2660).
cttgccaagttgtaataga

SEQ ID NO: 769961 - DNA, 19 bp, Mus musculus
  siRNA target sequence for BC028839 (NM_153532.2,2670-2688).
cgaaagagccgtaacttct

SEQ ID NO: 769962 - DNA, 19 bp, Mus musculus
  siRNA target sequence for Tenc1 (NM_153533.1,162-180).
gtggccacacacagaaaat

SEQ ID NO: 769963 - DNA, 19 bp, Mus musculus
  siRNA target sequence for Tenc1 (NM_153533.1,164-182).
ggccacacacagaaaatgt

SEQ ID NO: 769964 - DNA, 19 bp, Mus musculus
  siRNA target sequence for Tenc1 (NM_153533.1,359-377).
cttggacctcacctatgta

SEQ ID NO: 769965 - DNA, 19 bp, Mus musculus
  siRNA target sequence for Tenc1 (NM_153533.1,454-472).
cccatgtgcttcaatccaa

SEQ ID NO: 769966 - DNA, 19 bp, Mus musculus
  siRNA target sequence for Tenc1 (NM_153533.1,642-660).
cacgtggttgtgttgtact

SEQ ID NO: 769967 - DNA, 19 bp, Mus musculus
  siRNA target sequence for Tenc1 (NM_153533.1,813-831).
cgctatgtcagctacttca

SEQ ID NO: 769968 - DNA, 19 bp, Mus musculus
  siRNA target sequence for Tenc1 (NM_153533.1,1005-1023).
gggcctcagcaactttgta

SEQ ID NO: 769969 - DNA, 19 bp, Mus musculus
  siRNA target sequence for Tenc1 (NM_153533.1,1006-1024).
ggcctcagcaactttgtat

SEQ ID NO: 769970 - DNA, 19 bp, Mus musculus
  siRNA target sequence for Tenc1 (NM_153533.1,1163-1181).
cccaaaggaccaactagat

SEQ ID NO: 769971 - DNA, 19 bp, Mus musculus
  siRNA target sequence for Tenc1 (NM_153533.1,1165-1183).
caaaggaccaactagatga

SEQ ID NO: 769972 - DNA, 19 bp, Mus musculus
  siRNA target sequence for Tenc1 (NM_153533.1,1192-1210).
ctgatgagcggtttccttt

SEQ ID NO: 769973 - DNA, 19 bp, Mus musculus
  siRNA target sequence for Tenc1 (NM_153533.1,1215-1233).
gcctcagtggagtttgttt

SEQ ID NO: 769974 - DNA, 19 bp, Mus musculus
  siRNA target sequence for Tenc1 (NM_153533.1,1262-1280).
caacaccccacggaatgat

SEQ ID NO: 769975 - DNA, 19 bp, Mus musculus
  siRNA target sequence for Tenc1 (NM_153533.1,1285-1303).
ctgtctccgtggattacaa

SEQ ID NO: 769976 - DNA, 19 bp, Mus musculus
  siRNA target sequence for Tenc1 (NM_153533.1,1649-1667).
gaccgccatccttgatgat

SEQ ID NO: 769977 - DNA, 19 bp, Mus musculus
  siRNA target sequence for Tenc1 (NM_153533.1,1651-1669).
ccgccatccttgatgatga

SEQ ID NO: 769978 - DNA, 19 bp, Mus musculus
  siRNA target sequence for Tenc1 (NM_153533.1,1652-1670).
cgccatccttgatgatgaa

SEQ ID NO: 769979 - DNA, 19 bp, Mus musculus
  siRNA target sequence for Tenc1 (NM_153533.1,2357-2375).
cagctactgcccagcatat

SEQ ID NO: 769980 - DNA, 19 bp, Mus musculus
  siRNA target sequence for Tenc1 (NM_153533.1,2715-2733).
ccagttcagggcaaggaaa

SEQ ID NO: 769981 - DNA, 19 bp, Mus musculus
  siRNA target sequence for Tenc1 (NM_153533.1,2801-2819).
ggccttgccctctgttgta

SEQ ID NO: 769982 - DNA, 19 bp, Mus musculus
  siRNA target sequence for Tenc1 (NM_153533.1,2822-2840).
gggagttgctgaaaagact

SEQ ID NO: 769983 - DNA, 19 bp, Mus musculus
  siRNA target sequence for Tenc1 (NM_153533.1,3027-3045).
cctcggggcacttcagata

SEQ ID NO: 769984 - DNA, 19 bp, Mus musculus
  siRNA target sequence for Tenc1 (NM_153533.1,3238-3256).
ccagaagcaccaatcaaca

SEQ ID NO: 769985 - DNA, 19 bp, Mus musculus
  siRNA target sequence for Tenc1 (NM_153533.1,3239-3257).
cagaagcaccaatcaacat

SEQ ID NO: 769986 - DNA, 19 bp, Mus musculus
  siRNA target sequence for Tenc1 (NM_153533.1,3241-3259).
gaagcaccaatcaacatgt

SEQ ID NO: 769987 - DNA, 19 bp, Mus musculus
  siRNA target sequence for Tenc1 (NM_153533.1,3252-3270).
caacatgtcacctttgcat

SEQ ID NO: 769988 - DNA, 19 bp, Mus musculus
  siRNA target sequence for Tenc1 (NM_153533.1,3354-3372).
caggatacatcaaagttct

SEQ ID NO: 769989 - DNA, 19 bp, Mus musculus
  siRNA target sequence for Tenc1 (NM_153533.1,3577-3595).
ccaaaggcgtgaagatcaa

SEQ ID NO: 769990 - DNA, 19 bp, Mus musculus
  siRNA target sequence for Tenc1 (NM_153533.1,3605-3623).
cactgagccctattttgga

SEQ ID NO: 769991 - DNA, 19 bp, Mus musculus
  siRNA target sequence for Tenc1 (NM_153533.1,3683-3701).
gagaattcctagcaaagat

SEQ ID NO: 769992 - DNA, 19 bp, Mus musculus
  siRNA target sequence for Tenc1 (NM_153533.1,4039-4057).
cctccaagatctttggttt

SEQ ID NO: 769993 - DNA, 19 bp, Mus musculus
  siRNA target sequence for BC035537 (NM_153535.1,725-743).
cagctcaggagcatccata

SEQ ID NO: 769994 - DNA, 19 bp, Mus musculus
  siRNA target sequence for BC035537 (NM_153535.1,912-930).
gagcgagagcccagtgtat

SEQ ID NO: 769995 - DNA, 19 bp, Mus musculus
  siRNA target sequence for BC035537 (NM_153535.1,941-959).
gggtccggttcccaaaact

SEQ ID NO: 769996 - DNA, 19 bp, Mus musculus
  siRNA target sequence for BC035537 (NM_153535.1,943-961).
gtccggttcccaaaactct

SEQ ID NO: 769997 - DNA, 19 bp, Mus musculus
  siRNA target sequence for BC035537 (NM_153535.1,1073-1091).
gagcaaagatcctttacct

SEQ ID NO: 769998 - DNA, 19 bp, Mus musculus
  siRNA target sequence for BC035537 (NM_153535.1,1083-1101).
cctttacctacgaatttta

SEQ ID NO: 769999 - DNA, 19 bp, Mus musculus
  siRNA target sequence for BC035537 (NM_153535.1,1112-1130).
gcagaaagccattgataaa

SEQ ID NO: 770000 - DNA, 19 bp, Mus musculus
  siRNA target sequence for BC035537 (NM_153535.1,1139-1157).
cgagtccccctcatcattt

SEQ ID NO: 770001 - DNA, 19 bp, Mus musculus
  siRNA target sequence for BC035537 (NM_153535.1,1140-1158).
gagtccccctcatcatttt

SEQ ID NO: 770002 - DNA, 19 bp, Mus musculus
  siRNA target sequence for BC035537 (NM_153535.1,1142-1160).
gtccccctcatcattttca

SEQ ID NO: 770003 - DNA, 19 bp, Mus musculus
  siRNA target sequence for BC035537 (NM_153535.1,1245-1263).
gagcggagctcggtttctt

SEQ ID NO: 770004 - DNA, 19 bp, Mus musculus
  siRNA target sequence for BC035537 (NM_153535.1,1247-1265).
gcggagctcggtttcttct

SEQ ID NO: 770005 - DNA, 19 bp, Mus musculus
  siRNA target sequence for BC035537 (NM_153535.1,1248-1266).
cggagctcggtttcttctt

SEQ ID NO: 770006 - DNA, 19 bp, Mus musculus
  siRNA target sequence for BC035537 (NM_153535.1,1492-1510).
ctgctactcacgaagcttt

SEQ ID NO: 770007 - DNA, 19 bp, Mus musculus
  siRNA target sequence for BC035537 (NM_153535.1,1639-1657).
catgctcatccctgaaaga

SEQ ID NO: 770008 - DNA, 19 bp, Mus musculus
  siRNA target sequence for BC035537 (NM_153535.1,1909-1927).
gtgggaaaaaacataagga

SEQ ID NO: 770009 - DNA, 19 bp, Mus musculus
  siRNA target sequence for BC035537 (NM_153535.1,1974-1992).
cgtctcagcaccgatgttt

SEQ ID NO: 770010 - DNA, 19 bp, Mus musculus
  siRNA target sequence for BC035537 (NM_153535.1,2111-2129).
cggtgtgatgacgattcaa

SEQ ID NO: 770011 - DNA, 19 bp, Mus musculus
  siRNA target sequence for BC035537 (NM_153535.1,2231-2249).
ccgacttggccgaattcta

SEQ ID NO: 770012 - DNA, 19 bp, Mus musculus
  siRNA target sequence for BC035537 (NM_153535.1,2233-2251).
gacttggccgaattctaga

SEQ ID NO: 770013 - DNA, 19 bp, Mus musculus
  siRNA target sequence for BC035537 (NM_153535.1,2294-2312).
caggagactgccttcaatt

SEQ ID NO: 770014 - DNA, 19 bp, Mus musculus
  siRNA target sequence for BC035537 (NM_153535.1,2633-2651).
gtcagacacacctcgaaaa

SEQ ID NO: 770015 - DNA, 19 bp, Mus musculus
  siRNA target sequence for BC035537 (NM_153535.1,2684-2702).
cacttggacgggtcaaagt

SEQ ID NO: 770016 - DNA, 19 bp, Mus musculus
  siRNA target sequence for BC035537 (NM_153535.1,2686-2704).
cttggacgggtcaaagtat

SEQ ID NO: 770017 - DNA, 19 bp, Mus musculus
  siRNA target sequence for BC035537 (NM_153535.1,2720-2738).
gtatctgcccaaatcttat

SEQ ID NO: 770018 - DNA, 19 bp, Mus musculus
  siRNA target sequence for BC035537 (NM_153535.1,2724-2742).
ctgcccaaatcttatcaga

SEQ ID NO: 770019 - DNA, 19 bp, Mus musculus
  siRNA target sequence for D330037A14Rik (NM_153537.3,156-174).
ggccattggatctgattga

SEQ ID NO: 770020 - DNA, 19 bp, Mus musculus
  siRNA target sequence for D330037A14Rik (NM_153537.3,275-293).
gggaggacagtcattggtt

SEQ ID NO: 770021 - DNA, 19 bp, Mus musculus
  siRNA target sequence for D330037A14Rik (NM_153537.3,474-492).
ccttcctgcgctttaacca

SEQ ID NO: 770022 - DNA, 19 bp, Mus musculus
  siRNA target sequence for D330037A14Rik (NM_153537.3,475-493).
cttcctgcgctttaaccat

SEQ ID NO: 770023 - DNA, 19 bp, Mus musculus
  siRNA target sequence for D330037A14Rik (NM_153537.3,953-971).
cgctcctctagctaccatt

SEQ ID NO: 770024 - DNA, 19 bp, Mus musculus
  siRNA target sequence for D330037A14Rik (NM_153537.3,1213-1231).
ccaacccgccagtattcct

SEQ ID NO: 770025 - DNA, 19 bp, Mus musculus
  siRNA target sequence for D330037A14Rik (NM_153537.3,1260-1278).
ctgctccccgaaacaagat

SEQ ID NO: 770026 - DNA, 19 bp, Mus musculus
  siRNA target sequence for D330037A14Rik (NM_153537.3,1325-1343).
ggcacagagcgggtactaa

SEQ ID NO: 770027 - DNA, 19 bp, Mus musculus
  siRNA target sequence for D330037A14Rik (NM_153537.3,1327-1345).
cacagagcgggtactaaca

SEQ ID NO: 770028 - DNA, 19 bp, Mus musculus
  siRNA target sequence for D330037A14Rik (NM_153537.3,1361-1379).
caactggtgggcagaacat

SEQ ID NO: 770029 - DNA, 19 bp, Mus musculus
  siRNA target sequence for D330037A14Rik (NM_153537.3,1440-1458).
ggaggggcctggacagtat

SEQ ID NO: 770030 - DNA, 19 bp, Mus musculus
  siRNA target sequence for D330037A14Rik (NM_153537.3,1708-1726).
gctgagcccagcttacagt

SEQ ID NO: 770031 - DNA, 19 bp, Mus musculus
  siRNA target sequence for D330037A14Rik (NM_153537.3,1836-1854).
cggagatcagcgacaatga

SEQ ID NO: 770032 - DNA, 19 bp, Mus musculus
  siRNA target sequence for D330037A14Rik (NM_153537.3,2773-2791).
ccttgagaggagataccat

SEQ ID NO: 770033 - DNA, 19 bp, Mus musculus
  siRNA target sequence for D330037A14Rik (NM_153537.3,2951-2969).
cctttgcctgccaaagctt

SEQ ID NO: 770034 - DNA, 19 bp, Mus musculus
  siRNA target sequence for D330037A14Rik (NM_153537.3,2991-3009).
gctccaagatggatagtga

SEQ ID NO: 770035 - DNA, 19 bp, Mus musculus
  siRNA target sequence for D330037A14Rik (NM_153537.3,3757-3775).
ccaggcacggcctcttaca

SEQ ID NO: 770036 - DNA, 19 bp, Mus musculus
  siRNA target sequence for D330037A14Rik (NM_153537.3,3766-3784).
gcctcttacacgttacctt

SEQ ID NO: 770037 - DNA, 19 bp, Mus musculus
  siRNA target sequence for D330037A14Rik (NM_153537.3,3790-3808).
ccggaaggaggactttgat

SEQ ID NO: 770038 - DNA, 19 bp, Mus musculus
  siRNA target sequence for D330037A14Rik (NM_153537.3,3809-3827).
ctgaagacccacatagagt

SEQ ID NO: 770039 - DNA, 19 bp, Mus musculus
  siRNA target sequence for D330037A14Rik (NM_153537.3,3898-3916).
caagatgggtggcaagatt

SEQ ID NO: 770040 - DNA, 19 bp, Mus musculus
  siRNA target sequence for D330037A14Rik (NM_153537.3,3905-3923).
ggtggcaagattaaatcgt

SEQ ID NO: 770041 - DNA, 19 bp, Mus musculus
  siRNA target sequence for D330037A14Rik (NM_153537.3,3955-3973).
gaagcgcaccctttcctat

SEQ ID NO: 770042 - DNA, 19 bp, Mus musculus
  siRNA target sequence for D330037A14Rik (NM_153537.3,3969-3987).
cctattacgtggacaaaca

SEQ ID NO: 770043 - DNA, 19 bp, Mus musculus
  siRNA target sequence for D330037A14Rik (NM_153537.3,3970-3988).
ctattacgtggacaaacat

SEQ ID NO: 770044 - DNA, 19 bp, Mus musculus
  siRNA target sequence for D330037A14Rik (NM_153537.3,3998-4016).
ctgaagggggtcatctatt

SEQ ID NO: 770045 - DNA, 19 bp, Mus musculus
  siRNA target sequence for D330037A14Rik (NM_153537.3,4101-4119).
cccatgaccggttgtacta

SEQ ID NO: 770046 - DNA, 19 bp, Mus musculus
  siRNA target sequence for D330037A14Rik (NM_153537.3,4103-4121).
catgaccggttgtactaca

SEQ ID NO: 770047 - DNA, 19 bp, Mus musculus
  siRNA target sequence for D330037A14Rik (NM_153537.3,4178-4196).
gccgagggctacactcaat

SEQ ID NO: 770048 - DNA, 19 bp, Mus musculus
  siRNA target sequence for D330037A14Rik (NM_153537.3,4179-4197).
ccgagggctacactcaatt

SEQ ID NO: 770049 - DNA, 19 bp, Mus musculus
  siRNA target sequence for D330037A14Rik (NM_153537.3,4184-4202).
ggctacactcaattcatga

SEQ ID NO: 770050 - DNA, 19 bp, Mus musculus
  siRNA target sequence for D330037A14Rik (NM_153537.3,4185-4203).
gctacactcaattcatgaa

SEQ ID NO: 770051 - DNA, 19 bp, Mus musculus
  siRNA target sequence for B830045N13Rik (NM_153539.1,288-306).
ggatttagcacaagataca

SEQ ID NO: 770052 - DNA, 19 bp, Mus musculus
  siRNA target sequence for B830045N13Rik (NM_153539.1,324-342).
ggtcgttggaaggtaaata

SEQ ID NO: 770053 - DNA, 19 bp, Mus musculus
  siRNA target sequence for B830045N13Rik (NM_153539.1,396-414).
gagttcttccgcaacataa

SEQ ID NO: 770054 - DNA, 19 bp, Mus musculus
  siRNA target sequence for B830045N13Rik (NM_153539.1,398-416).
gttcttccgcaacataaga

SEQ ID NO: 770055 - DNA, 19 bp, Mus musculus
  siRNA target sequence for B830045N13Rik (NM_153539.1,401-419).
cttccgcaacataagactt

SEQ ID NO: 770056 - DNA, 19 bp, Mus musculus
  siRNA target sequence for B830045N13Rik (NM_153539.1,422-440).
gggacgacgacctactcta

SEQ ID NO: 770057 - DNA, 19 bp, Mus musculus
  siRNA target sequence for B830045N13Rik (NM_153539.1,430-448).
gacctactctacagcaaat

SEQ ID NO: 770058 - DNA, 19 bp, Mus musculus
  siRNA target sequence for B830045N13Rik (NM_153539.1,432-450).
cctactctacagcaaatca

SEQ ID NO: 770059 - DNA, 19 bp, Mus musculus
  siRNA target sequence for B830045N13Rik (NM_153539.1,508-526).
gagaggagtcactcacaat

SEQ ID NO: 770060 - DNA, 19 bp, Mus musculus
  siRNA target sequence for B830045N13Rik (NM_153539.1,512-530).
ggagtcactcacaattttt

SEQ ID NO: 770061 - DNA, 19 bp, Mus musculus
  siRNA target sequence for B830045N13Rik (NM_153539.1,539-557).
gcggaagctgagcaaaaga

SEQ ID NO: 770062 - DNA, 19 bp, Mus musculus
  siRNA target sequence for B830045N13Rik (NM_153539.1,540-558).
cggaagctgagcaaaagat

SEQ ID NO: 770063 - DNA, 19 bp, Mus musculus
  siRNA target sequence for B830045N13Rik (NM_153539.1,545-563).
gctgagcaaaagatctgaa

SEQ ID NO: 770064 - DNA, 19 bp, Mus musculus
  siRNA target sequence for B830045N13Rik (NM_153539.1,570-588).
gaaaccagcaccaatagtt

SEQ ID NO: 770065 - DNA, 19 bp, Mus musculus
  siRNA target sequence for B830045N13Rik (NM_153539.1,598-616).
ccctggagaccttacatca

SEQ ID NO: 770066 - DNA, 19 bp, Mus musculus
  siRNA target sequence for B830045N13Rik (NM_153539.1,620-638).
ggctgcttcctattttatt

SEQ ID NO: 770067 - DNA, 19 bp, Mus musculus
  siRNA target sequence for B830045N13Rik (NM_153539.1,721-739).
ctcttggctgcagtaacta

SEQ ID NO: 770068 - DNA, 19 bp, Mus musculus
  siRNA target sequence for B830045N13Rik (NM_153539.1,797-815).
gttgcaagggcttcaagtt

SEQ ID NO: 770069 - DNA, 19 bp, Mus musculus
  siRNA target sequence for B830045N13Rik (NM_153539.1,860-878).
gagctacattgcttgcaat

SEQ ID NO: 770070 - DNA, 19 bp, Mus musculus
  siRNA target sequence for B830045N13Rik (NM_153539.1,863-881).
ctacattgcttgcaattct

SEQ ID NO: 770071 - DNA, 19 bp, Mus musculus
  siRNA target sequence for B830045N13Rik (NM_153539.1,888-906).
gagtttatctgcaaggata

SEQ ID NO: 770072 - DNA, 19 bp, Mus musculus
  siRNA target sequence for B830045N13Rik (NM_153539.1,930-948).
ccaaaattcccagaatgta

SEQ ID NO: 770073 - DNA, 19 bp, Mus musculus
  siRNA target sequence for B830045N13Rik (NM_153539.1,981-999).
gagaatcttcttcgaataa

SEQ ID NO: 770074 - DNA, 19 bp, Mus musculus
  siRNA target sequence for B830045N13Rik (NM_153539.1,1032-1050).
gaagattcagatgaattca

SEQ ID NO: 770075 - DNA, 19 bp, Mus musculus
  siRNA target sequence for B830045N13Rik (NM_153539.1,1039-1057).
cagatgaattcaagttctt

SEQ ID NO: 770076 - DNA, 19 bp, Mus musculus
  siRNA target sequence for B830045N13Rik (NM_153539.1,1052-1070).
gttctttatgaaaagacta

SEQ ID NO: 770077 - DNA, 19 bp, Mus musculus
  siRNA target sequence for B830045N13Rik (NM_153539.1,1061-1079).
gaaaagactacccatgaat

SEQ ID NO: 770078 - DNA, 19 bp, Mus musculus
  siRNA target sequence for B830045N13Rik (NM_153539.1,1086-1104).
ctcaacacttcaactataa

SEQ ID NO: 770079 - DNA, 19 bp, Mus musculus
  siRNA target sequence for B830045N13Rik (NM_153539.1,1106-1124).
gcatttgtggacaatggat

SEQ ID NO: 770080 - DNA, 19 bp, Mus musculus
  siRNA target sequence for B830045N13Rik (NM_153539.1,1107-1125).
catttgtggacaatggatt

SEQ ID NO: 770081 - DNA, 19 bp, Mus musculus
  siRNA target sequence for B830045N13Rik (NM_153539.1,1114-1132).
ggacaatggattctaattt

SEQ ID NO: 770082 - DNA, 19 bp, Mus musculus
  siRNA target sequence for B830045N13Rik (NM_153539.1,1115-1133).
gacaatggattctaatttt

SEQ ID NO: 770083 - DNA, 19 bp, Mus musculus
  siRNA target sequence for B830045N13Rik (NM_153539.1,1117-1135).
caatggattctaattttca

SEQ ID NO: 770084 - DNA, 19 bp, Mus musculus
  siRNA target sequence for B830045N13Rik (NM_153539.1,1181-1199).
gaaggcacacagaattgta

SEQ ID NO: 770085 - DNA, 19 bp, Mus musculus
  siRNA target sequence for B830045N13Rik (NM_153539.1,1186-1204).
cacacagaattgtacacaa

SEQ ID NO: 770086 - DNA, 19 bp, Mus musculus
  siRNA target sequence for B830045N13Rik (NM_153539.1,1251-1269).
ctgccgagacagagaacat

SEQ ID NO: 770087 - DNA, 19 bp, Mus musculus
  siRNA target sequence for B830045N13Rik (NM_153539.1,1288-1306).
gcatccagtcttttctcta

SEQ ID NO: 770088 - DNA, 19 bp, Mus musculus
  siRNA target sequence for B830045N13Rik (NM_153539.1,1516-1534).
ctgagtcaaccgatcacta

SEQ ID NO: 770089 - DNA, 19 bp, Mus musculus
  siRNA target sequence for B830045N13Rik (NM_153539.1,1530-1548).
cactacattggctttgaga

SEQ ID NO: 770090 - DNA, 19 bp, Mus musculus
  siRNA target sequence for B830045N13Rik (NM_153539.1,1586-1604).
gaaaacagatagacgaata

SEQ ID NO: 770091 - DNA, 19 bp, Mus musculus
  siRNA target sequence for B830045N13Rik (NM_153539.1,1591-1609).
cagatagacgaatagaagt

SEQ ID NO: 770092 - DNA, 19 bp, Mus musculus
  siRNA target sequence for B830045N13Rik (NM_153539.1,1727-1745).
gatcttgggtctctcttta

SEQ ID NO: 770093 - DNA, 19 bp, Mus musculus
  siRNA target sequence for B830045N13Rik (NM_153539.1,1778-1796).
gccagtgctggctgtttat

SEQ ID NO: 770094 - DNA, 19 bp, Mus musculus
  siRNA target sequence for B830045N13Rik (NM_153539.1,1887-1905).
ctccctctacagtgctata

SEQ ID NO: 770095 - DNA, 19 bp, Mus musculus
  siRNA target sequence for B830045N13Rik (NM_153539.1,1914-1932).
ctgactctgggaaacaaat

SEQ ID NO: 770096 - DNA, 19 bp, Mus musculus
  siRNA target sequence for B830045N13Rik (NM_153539.1,1999-2017).
gcaatgagagcatttatta

SEQ ID NO: 770097 - DNA, 19 bp, Mus musculus
  siRNA target sequence for B830045N13Rik (NM_153539.1,2115-2133).
gccattcgggacctgattt

SEQ ID NO: 770098 - DNA, 19 bp, Mus musculus
  siRNA target sequence for B830045N13Rik (NM_153539.1,2116-2134).
ccattcgggacctgatttt

SEQ ID NO: 770099 - DNA, 19 bp, Mus musculus
  siRNA target sequence for B830045N13Rik (NM_153539.1,2195-2213).
gataagagaccgtgtaaat

SEQ ID NO: 770100 - DNA, 19 bp, Mus musculus
  siRNA target sequence for B830045N13Rik (NM_153539.1,2200-2218).
gagaccgtgtaaataaact

SEQ ID NO: 770101 - DNA, 19 bp, Mus musculus
  siRNA target sequence for B830045N13Rik (NM_153539.1,2202-2220).
gaccgtgtaaataaactct

SEQ ID NO: 770102 - DNA, 19 bp, Mus musculus
  siRNA target sequence for B830045N13Rik (NM_153539.1,2238-2256).
cgcctggatctgttttctt

SEQ ID NO: 770103 - DNA, 19 bp, Mus musculus
  siRNA target sequence for B830045N13Rik (NM_153539.1,2287-2305).
ctagtgaggtggtgagaat

SEQ ID NO: 770104 - DNA, 19 bp, Mus musculus
  siRNA target sequence for B830045N13Rik (NM_153539.1,2290-2308).
gtgaggtggtgagaattca

SEQ ID NO: 770105 - DNA, 19 bp, Mus musculus
  siRNA target sequence for B830045N13Rik (NM_153539.1,2292-2310).
gaggtggtgagaattcagt

SEQ ID NO: 770106 - DNA, 19 bp, Mus musculus
  siRNA target sequence for B830045N13Rik (NM_153539.1,2339-2357).
gccaaacacagtggattat

SEQ ID NO: 770107 - DNA, 19 bp, Mus musculus
  siRNA target sequence for B830045N13Rik (NM_153539.1,2352-2370).
gattatgacacaaccaaat

SEQ ID NO: 770108 - DNA, 19 bp, Mus musculus
  siRNA target sequence for C85492 (NM_153540.2,310-328).
cacctctctgccgtattca

SEQ ID NO: 770109 - DNA, 19 bp, Mus musculus
  siRNA target sequence for C85492 (NM_153540.2,779-797).
gcttcaaccccgataacct

SEQ ID NO: 770110 - DNA, 19 bp, Mus musculus
  siRNA target sequence for C85492 (NM_153540.2,798-816).
catgcacgtctttcatgat

SEQ ID NO: 770111 - DNA, 19 bp, Mus musculus
  siRNA target sequence for C85492 (NM_153540.2,907-925).
gcccactttgacctctata

SEQ ID NO: 770112 - DNA, 19 bp, Mus musculus
  siRNA target sequence for C85492 (NM_153540.2,1006-1024).
gtgggcctgtccaaggtta

SEQ ID NO: 770113 - DNA, 19 bp, Mus musculus
  siRNA target sequence for C85492 (NM_153540.2,1021-1039).
gttaccacctggtaccaat

SEQ ID NO: 770114 - DNA, 19 bp, Mus musculus
  siRNA target sequence for C85492 (NM_153540.2,1032-1050).
gtaccaatacggctttgta

SEQ ID NO: 770115 - DNA, 19 bp, Mus musculus
  siRNA target sequence for C85492 (NM_153540.2,1102-1120).
cagttcacgcgcttcatga

SEQ ID NO: 770116 - DNA, 19 bp, Mus musculus
  siRNA target sequence for C85492 (NM_153540.2,1153-1171).
cccctgggggaggaataca

SEQ ID NO: 770117 - DNA, 19 bp, Mus musculus
  siRNA target sequence for C85492 (NM_153540.2,1238-1256).
cacaagagttccagatgaa

SEQ ID NO: 770118 - DNA, 19 bp, Mus musculus
  siRNA target sequence for C85492 (NM_153540.2,1379-1397).
gggctaccgtggttgaact

SEQ ID NO: 770119 - DNA, 19 bp, Mus musculus
  siRNA target sequence for C85492 (NM_153540.2,1382-1400).
ctaccgtggttgaactctt

SEQ ID NO: 770120 - DNA, 19 bp, Mus musculus
  siRNA target sequence for C85492 (NM_153540.2,1423-1441).
cactacaccccctataaga

SEQ ID NO: 770121 - DNA, 19 bp, Mus musculus
  siRNA target sequence for C85492 (NM_153540.2,1461-1479).
catggacctgcagtatgta

SEQ ID NO: 770122 - DNA, 19 bp, Mus musculus
  siRNA target sequence for C85492 (NM_153540.2,1477-1495).
gtagcctggcgaaacatga

SEQ ID NO: 770123 - DNA, 19 bp, Mus musculus
  siRNA target sequence for C85492 (NM_153540.2,1670-1688).
catcccttatgcaatccat

SEQ ID NO: 770124 - DNA, 19 bp, Mus musculus
  siRNA target sequence for C85492 (NM_153540.2,1948-1966).
gagaacatcaaacctttta

SEQ ID NO: 770125 - DNA, 19 bp, Mus musculus
  siRNA target sequence for C85492 (NM_153540.2,1977-1995).
ggtgtgggtccgctgtata

SEQ ID NO: 770126 - DNA, 19 bp, Mus musculus
  siRNA target sequence for C85492 (NM_153540.2,1978-1996).
gtgtgggtccgctgtatat

SEQ ID NO: 770127 - DNA, 19 bp, Mus musculus
  siRNA target sequence for C85492 (NM_153540.2,1982-2000).
gggtccgctgtatatttaa

SEQ ID NO: 770128 - DNA, 19 bp, Mus musculus
  siRNA target sequence for C85492 (NM_153540.2,1984-2002).
gtccgctgtatatttaaca

SEQ ID NO: 770129 - DNA, 19 bp, Mus musculus
  siRNA target sequence for BC036304 (NM_153542.1,159-177).
gcgaggaaggtcaatgaga

SEQ ID NO: 770130 - DNA, 19 bp, Mus musculus
  siRNA target sequence for BC036304 (NM_153542.1,180-198).
gtggaaagcggctcagata

SEQ ID NO: 770131 - DNA, 19 bp, Mus musculus
  siRNA target sequence for BC036304 (NM_153542.1,284-302).
catcacgctggctaacaat

SEQ ID NO: 770132 - DNA, 19 bp, Mus musculus
  siRNA target sequence for BC036304 (NM_153542.1,289-307).
cgctggctaacaatgaact

SEQ ID NO: 770133 - DNA, 19 bp, Mus musculus
  siRNA target sequence for BC036304 (NM_153542.1,313-331).
ccctcaccagcaagttcat

SEQ ID NO: 770134 - DNA, 19 bp, Mus musculus
  siRNA target sequence for BC036304 (NM_153542.1,553-571).
cagctctgcgagtcatcaa

SEQ ID NO: 770135 - DNA, 19 bp, Mus musculus
  siRNA target sequence for BC036304 (NM_153542.1,593-611).
cgccgacgtgcgtgtgatt

SEQ ID NO: 770136 - DNA, 19 bp, Mus musculus
  siRNA target sequence for BC036304 (NM_153542.1,612-630).
gccccaccgctcatcaagt

SEQ ID NO: 770137 - DNA, 19 bp, Mus musculus
  siRNA target sequence for D330038I09Rik (NM_153543.1,84-102).
ctccaccagccgggtttat

SEQ ID NO: 770138 - DNA, 19 bp, Mus musculus
  siRNA target sequence for D330038I09Rik (NM_153543.1,89-107).
ccagccgggtttatttcaa

SEQ ID NO: 770139 - DNA, 19 bp, Mus musculus
  siRNA target sequence for D330038I09Rik (NM_153543.1,94-112).
cgggtttatttcaaaaaca

SEQ ID NO: 770140 - DNA, 19 bp, Mus musculus
  siRNA target sequence for D330038I09Rik (NM_153543.1,144-162).
gttcggacaggaagtctat

SEQ ID NO: 770141 - DNA, 19 bp, Mus musculus
  siRNA target sequence for D330038I09Rik (NM_153543.1,262-280).
gggactcccgtgttcaagt

SEQ ID NO: 770142 - DNA, 19 bp, Mus musculus
  siRNA target sequence for D330038I09Rik (NM_153543.1,385-403).
cccatggatgtcattgaca

SEQ ID NO: 770143 - DNA, 19 bp, Mus musculus
  siRNA target sequence for D330038I09Rik (NM_153543.1,481-499).
ctaatcatgggagataaga

SEQ ID NO: 770144 - DNA, 19 bp, Mus musculus
  siRNA target sequence for D330038I09Rik (NM_153543.1,522-540).
ggcagatgatggtttggat

SEQ ID NO: 770145 - DNA, 19 bp, Mus musculus
  siRNA target sequence for D330038I09Rik (NM_153543.1,523-541).
gcagatgatggtttggata

SEQ ID NO: 770146 - DNA, 19 bp, Mus musculus
  siRNA target sequence for D330038I09Rik (NM_153543.1,588-606).
cacagtggactcgctttat

SEQ ID NO: 770147 - DNA, 19 bp, Mus musculus
  siRNA target sequence for D330038I09Rik (NM_153543.1,590-608).
cagtggactcgctttataa

SEQ ID NO: 770148 - DNA, 19 bp, Mus musculus
  siRNA target sequence for D330038I09Rik (NM_153543.1,733-751).
gagaacgctgaggtttctt

SEQ ID NO: 770149 - DNA, 19 bp, Mus musculus
  siRNA target sequence for D330038I09Rik (NM_153543.1,761-779).
ctgctgaaggtttgcataa

SEQ ID NO: 770150 - DNA, 19 bp, Mus musculus
  siRNA target sequence for D330038I09Rik (NM_153543.1,782-800).
ggattcgaggtcatgacaa

SEQ ID NO: 770151 - DNA, 19 bp, Mus musculus
  siRNA target sequence for D330038I09Rik (NM_153543.1,850-868).
ggctcatcactgttgacta

SEQ ID NO: 770152 - DNA, 19 bp, Mus musculus
  siRNA target sequence for D330038I09Rik (NM_153543.1,1012-1030).
ccagcctcccagtactttt

SEQ ID NO: 770153 - DNA, 19 bp, Mus musculus
  siRNA target sequence for D330038I09Rik (NM_153543.1,1041-1059).
gacatcagtggtagaactt

SEQ ID NO: 770154 - DNA, 19 bp, Mus musculus
  siRNA target sequence for D330038I09Rik (NM_153543.1,1095-1113).
ggtcatctgggctcgaatt

SEQ ID NO: 770155 - DNA, 19 bp, Mus musculus
  siRNA target sequence for D330038I09Rik (NM_153543.1,1096-1114).
gtcatctgggctcgaattt

SEQ ID NO: 770156 - DNA, 19 bp, Mus musculus
  siRNA target sequence for D330038I09Rik (NM_153543.1,1098-1116).
catctgggctcgaatttta

SEQ ID NO: 770157 - DNA, 19 bp, Mus musculus
  siRNA target sequence for D330038I09Rik (NM_153543.1,1118-1136).
gcaacacccctgtgattga

SEQ ID NO: 770158 - DNA, 19 bp, Mus musculus
  siRNA target sequence for D330038I09Rik (NM_153543.1,1137-1155).
ggactccacggacttcttt

SEQ ID NO: 770159 - DNA, 19 bp, Mus musculus
  siRNA target sequence for D330038I09Rik (NM_153543.1,1138-1156).
gactccacggacttcttta

SEQ ID NO: 770160 - DNA, 19 bp, Mus musculus
  siRNA target sequence for D330038I09Rik (NM_153543.1,1140-1158).
ctccacggacttctttaaa

SEQ ID NO: 770161 - DNA, 19 bp, Mus musculus
  siRNA target sequence for D330038I09Rik (NM_153543.1,1143-1161).
cacggacttctttaaatct

SEQ ID NO: 770162 - DNA, 19 bp, Mus musculus
  siRNA target sequence for D330038I09Rik (NM_153543.1,1166-1184).
cgagctcaatggatgttgt

SEQ ID NO: 770163 - DNA, 19 bp, Mus musculus
  siRNA target sequence for D330038I09Rik (NM_153543.1,1442-1460).
ccacagatggaactacaat

SEQ ID NO: 770164 - DNA, 19 bp, Mus musculus
  siRNA target sequence for D330038I09Rik (NM_153543.1,1447-1465).
gatggaactacaatatgca

SEQ ID NO: 770165 - DNA, 19 bp, Mus musculus
  siRNA target sequence for D330038I09Rik (NM_153543.1,1583-1601).
gactcgctgacctaatgga

SEQ ID NO: 770166 - DNA, 19 bp, Mus musculus
  siRNA target sequence for D330038I09Rik (NM_153543.1,1671-1689).
gactcacattggaatgtct

SEQ ID NO: 770167 - DNA, 19 bp, Mus musculus
  siRNA target sequence for D330038I09Rik (NM_153543.1,1688-1706).
ctgtgcagacgttcagata

SEQ ID NO: 770168 - DNA, 19 bp, Mus musculus
  siRNA target sequence for D330038I09Rik (NM_153543.1,1690-1708).
gtgcagacgttcagatact

SEQ ID NO: 770169 - DNA, 19 bp, Mus musculus
  siRNA target sequence for D330038I09Rik (NM_153543.1,1710-1728).
cgcaggctggtgtgacaaa

SEQ ID NO: 770170 - DNA, 19 bp, Mus musculus
  siRNA target sequence for D330038I09Rik (NM_153543.1,1736-1754).
gttctacaattccaatcaa

SEQ ID NO: 770171 - DNA, 19 bp, Mus musculus
  siRNA target sequence for D330038I09Rik (NM_153543.1,1804-1822).
ggtgcctgtgccattatca

SEQ ID NO: 770172 - DNA, 19 bp, Mus musculus
  siRNA target sequence for D330038I09Rik (NM_153543.1,1829-1847).
ggaactacccactgatgat

SEQ ID NO: 770173 - DNA, 19 bp, Mus musculus
  siRNA target sequence for D330038I09Rik (NM_153543.1,1971-1989).
gggggtgattaacatcatt

SEQ ID NO: 770174 - DNA, 19 bp, Mus musculus
  siRNA target sequence for D330038I09Rik (NM_153543.1,2137-2155).
ggcaaatccccactgataa

SEQ ID NO: 770175 - DNA, 19 bp, Mus musculus
  siRNA target sequence for D330038I09Rik (NM_153543.1,2149-2167).
ctgataatattcagtgatt

SEQ ID NO: 770176 - DNA, 19 bp, Mus musculus
  siRNA target sequence for D330038I09Rik (NM_153543.1,2193-2211).
gggcatgggcgcagtgttt

SEQ ID NO: 770177 - DNA, 19 bp, Mus musculus
  siRNA target sequence for D330038I09Rik (NM_153543.1,2195-2213).
gcatgggcgcagtgttttt

SEQ ID NO: 770178 - DNA, 19 bp, Mus musculus
  siRNA target sequence for D330038I09Rik (NM_153543.1,2199-2217).
gggcgcagtgtttttcaat

SEQ ID NO: 770179 - DNA, 19 bp, Mus musculus
  siRNA target sequence for D330038I09Rik (NM_153543.1,2264-2282).
ccatccacgacgaattcgt

SEQ ID NO: 770180 - DNA, 19 bp, Mus musculus
  siRNA target sequence for D330038I09Rik (NM_153543.1,2265-2283).
catccacgacgaattcgta

SEQ ID NO: 770181 - DNA, 19 bp, Mus musculus
  siRNA target sequence for D330038I09Rik (NM_153543.1,2288-2306).
gagtggtggaagagattaa

SEQ ID NO: 770182 - DNA, 19 bp, Mus musculus
  siRNA target sequence for D330038I09Rik (NM_153543.1,2530-2548).
gggcctatcatggtcattt

SEQ ID NO: 770183 - DNA, 19 bp, Mus musculus
  siRNA target sequence for D330038I09Rik (NM_153543.1,2533-2551).
cctatcatggtcatttcta

SEQ ID NO: 770184 - DNA, 19 bp, Mus musculus
  siRNA target sequence for D330038I09Rik (NM_153543.1,2541-2559).
ggtcatttctaaattccaa

SEQ ID NO: 770185 - DNA, 19 bp, Mus musculus
  siRNA target sequence for D330038I09Rik (NM_153543.1,2577-2595).
ggtgttgcagagagcaaat

SEQ ID NO: 770186 - DNA, 19 bp, Mus musculus
  siRNA target sequence for D330038I09Rik (NM_153543.1,2671-2689).
gaggcgggaacggttttca

SEQ ID NO: 770187 - DNA, 19 bp, Mus musculus
  siRNA target sequence for D330038I09Rik (NM_153543.1,2673-2691).
ggcgggaacggttttcatt

SEQ ID NO: 770188 - DNA, 19 bp, Mus musculus
  siRNA target sequence for D330038I09Rik (NM_153543.1,2674-2692).
gcgggaacggttttcatta

SEQ ID NO: 770189 - DNA, 19 bp, Mus musculus
  siRNA target sequence for D330038I09Rik (NM_153543.1,2712-2730).
cgtggcagccccatttggt

SEQ ID NO: 770190 - DNA, 19 bp, Mus musculus
  siRNA target sequence for BC030867 (NM_153544.2,285-303).
gcagagaaccacgttgtta

SEQ ID NO: 770191 - DNA, 19 bp, Mus musculus
  siRNA target sequence for BC030867 (NM_153544.2,357-375).
gagactgtgcagacacaat

SEQ ID NO: 770192 - DNA, 19 bp, Mus musculus
  siRNA target sequence for BC030867 (NM_153544.2,379-397).
caagaccagtgccatcata

SEQ ID NO: 770193 - DNA, 19 bp, Mus musculus
  siRNA target sequence for BC030867 (NM_153544.2,588-606).
gccgcacactctggatata

SEQ ID NO: 770194 - DNA, 19 bp, Mus musculus
  siRNA target sequence for BC030867 (NM_153544.2,589-607).
ccgcacactctggatatat

SEQ ID NO: 770195 - DNA, 19 bp, Mus musculus
  siRNA target sequence for BC030867 (NM_153544.2,590-608).
cgcacactctggatatatt

SEQ ID NO: 770196 - DNA, 19 bp, Mus musculus
  siRNA target sequence for BC030867 (NM_153544.2,626-644).
gggcattggtgactttgaa

SEQ ID NO: 770197 - DNA, 19 bp, Mus musculus
  siRNA target sequence for BC030867 (NM_153544.2,822-840).
cctatggtccactgtagaa

SEQ ID NO: 770198 - DNA, 19 bp, Mus musculus
  siRNA target sequence for BC030867 (NM_153544.2,1121-1139).
cccagtgtcttctgttgaa

SEQ ID NO: 770199 - DNA, 19 bp, Mus musculus
  siRNA target sequence for BC030867 (NM_153544.2,1146-1164).
gtcagcacccccagaaata

SEQ ID NO: 770200 - DNA, 19 bp, Mus musculus
  siRNA target sequence for BC030867 (NM_153544.2,1165-1183).
cttccaccccagttactca

SEQ ID NO: 770201 - DNA, 19 bp, Mus musculus
  siRNA target sequence for BC030867 (NM_153544.2,1268-1286).
cccctccattcgagctaaa

SEQ ID NO: 770202 - DNA, 19 bp, Mus musculus
  siRNA target sequence for BC030867 (NM_153544.2,1269-1287).
ccctccattcgagctaaaa

SEQ ID NO: 770203 - DNA, 19 bp, Mus musculus
  siRNA target sequence for BC030867 (NM_153544.2,1460-1478).
gccctggctcaccatgaaa

SEQ ID NO: 770204 - DNA, 19 bp, Mus musculus
  siRNA target sequence for BC030867 (NM_153544.2,1506-1524).
cccacctgctttctctata

SEQ ID NO: 770205 - DNA, 19 bp, Mus musculus
  siRNA target sequence for BC030867 (NM_153544.2,1588-1606).
ccaatatggcggtgatgat

SEQ ID NO: 770206 - DNA, 19 bp, Mus musculus
  siRNA target sequence for BC030867 (NM_153544.2,1616-1634).
gactcggagcacaatggat

SEQ ID NO: 770207 - DNA, 19 bp, Mus musculus
  siRNA target sequence for BC030867 (NM_153544.2,1636-1654).
ccagtgtggtgtttaagga

SEQ ID NO: 770208 - DNA, 19 bp, Mus musculus
  siRNA target sequence for BC030867 (NM_153544.2,1745-1763).
gcagattggagtgttttct

SEQ ID NO: 770209 - DNA, 19 bp, Mus musculus
  siRNA target sequence for BC030867 (NM_153544.2,1805-1823).
cctagtccacatttacagt

SEQ ID NO: 770210 - DNA, 19 bp, Mus musculus
  siRNA target sequence for BC030867 (NM_153544.2,1811-1829).
ccacatttacagtctagat

SEQ ID NO: 770211 - DNA, 19 bp, Mus musculus
  siRNA target sequence for BC023296 (NM_153545.1,379-397).
gtgcagcatctggatctaa

SEQ ID NO: 770212 - DNA, 19 bp, Mus musculus
  siRNA target sequence for BC023296 (NM_153545.1,445-463).
cttcgacagaacaagtcta

SEQ ID NO: 770213 - DNA, 19 bp, Mus musculus
  siRNA target sequence for BC023296 (NM_153545.1,449-467).
gacagaacaagtctattca

SEQ ID NO: 770214 - DNA, 19 bp, Mus musculus
  siRNA target sequence for BC023296 (NM_153545.1,832-850).
gcacgcaccaagatcctta

SEQ ID NO: 770215 - DNA, 19 bp, Mus musculus
  siRNA target sequence for BC023296 (NM_153545.1,846-864).
ccttagcaaggaagttcaa

SEQ ID NO: 770216 - DNA, 19 bp, Mus musculus
  siRNA target sequence for BC023296 (NM_153545.1,884-902).
ccaagcagtttctggattt

SEQ ID NO: 770217 - DNA, 19 bp, Mus musculus
  siRNA target sequence for BC023296 (NM_153545.1,996-1014).
gaggcagtccatcatcaat

SEQ ID NO: 770218 - DNA, 19 bp, Mus musculus
  siRNA target sequence for BC023296 (NM_153545.1,1177-1195).
cgggagtccaagttactca

SEQ ID NO: 770219 - DNA, 19 bp, Mus musculus
  siRNA target sequence for BC023296 (NM_153545.1,1295-1313).
ccaagcaggagctgactaa

SEQ ID NO: 770220 - DNA, 19 bp, Mus musculus
  siRNA target sequence for BC023296 (NM_153545.1,1316-1334).
cgtcggccgagttgaagat

SEQ ID NO: 770221 - DNA, 19 bp, Mus musculus
  siRNA target sequence for BC023296 (NM_153545.1,1326-1344).
gttgaagatccgtgctatt

SEQ ID NO: 770222 - DNA, 19 bp, Mus musculus
  siRNA target sequence for BC023296 (NM_153545.1,1418-1436).
ccaaggaggtggatcatat

SEQ ID NO: 770223 - DNA, 19 bp, Mus musculus
  siRNA target sequence for BC023296 (NM_153545.1,1422-1440).
ggaggtggatcatatgact

SEQ ID NO: 770224 - DNA, 19 bp, Mus musculus
  siRNA target sequence for BC023296 (NM_153545.1,1625-1643).
ctcatctggaggaaaagat

SEQ ID NO: 770225 - DNA, 19 bp, Mus musculus
  siRNA target sequence for BC023296 (NM_153545.1,1912-1930).
gccctggagcgtcaaatga

SEQ ID NO: 770226 - DNA, 19 bp, Mus musculus
  siRNA target sequence for BC023296 (NM_153545.1,2054-2072).
gggcaagcttcctgcaaaa

SEQ ID NO: 770227 - DNA, 19 bp, Mus musculus
  siRNA target sequence for Oact1 (NM_153546.1,266-284).
ccgctggatcaggttaact

SEQ ID NO: 770228 - DNA, 19 bp, Mus musculus
  siRNA target sequence for Oact1 (NM_153546.1,267-285).
cgctggatcaggttaactt

SEQ ID NO: 770229 - DNA, 19 bp, Mus musculus
  siRNA target sequence for Oact1 (NM_153546.1,268-286).
gctggatcaggttaacttt

SEQ ID NO: 770230 - DNA, 19 bp, Mus musculus
  siRNA target sequence for Oact1 (NM_153546.1,322-340).
ctggttcagaatctactta

SEQ ID NO: 770231 - DNA, 19 bp, Mus musculus
  siRNA target sequence for Oact1 (NM_153546.1,324-342).
ggttcagaatctacttaca

SEQ ID NO: 770232 - DNA, 19 bp, Mus musculus
  siRNA target sequence for Oact1 (NM_153546.1,334-352).
ctacttacatcctggtaaa

SEQ ID NO: 770233 - DNA, 19 bp, Mus musculus
  siRNA target sequence for Oact1 (NM_153546.1,371-389).
cacaccttggccaccattt

SEQ ID NO: 770234 - DNA, 19 bp, Mus musculus
  siRNA target sequence for Oact1 (NM_153546.1,475-493).
cactgcaagtgtatccaat

SEQ ID NO: 770235 - DNA, 19 bp, Mus musculus
  siRNA target sequence for Oact1 (NM_153546.1,477-495).
ctgcaagtgtatccaatat

SEQ ID NO: 770236 - DNA, 19 bp, Mus musculus
  siRNA target sequence for Oact1 (NM_153546.1,519-537).
ccatgggctaccttacgat

SEQ ID NO: 770237 - DNA, 19 bp, Mus musculus
  siRNA target sequence for Oact1 (NM_153546.1,520-538).
catgggctaccttacgata

SEQ ID NO: 770238 - DNA, 19 bp, Mus musculus
  siRNA target sequence for Oact1 (NM_153546.1,540-558).
gccacatcagccgcattta

SEQ ID NO: 770239 - DNA, 19 bp, Mus musculus
  siRNA target sequence for Oact1 (NM_153546.1,625-643).
cacgacgttggctttccaa

SEQ ID NO: 770240 - DNA, 19 bp, Mus musculus
  siRNA target sequence for Oact1 (NM_153546.1,722-740).
cttctggaatacttaagct

SEQ ID NO: 770241 - DNA, 19 bp, Mus musculus
  siRNA target sequence for Oact1 (NM_153546.1,738-756).
gctaccatctcaactttat

SEQ ID NO: 770242 - DNA, 19 bp, Mus musculus
  siRNA target sequence for Oact1 (NM_153546.1,771-789).
gcccttgcaacaatttcaa

SEQ ID NO: 770243 - DNA, 19 bp, Mus musculus
  siRNA target sequence for Oact1 (NM_153546.1,805-823).
catcgaagggagacatata

SEQ ID NO: 770244 - DNA, 19 bp, Mus musculus
  siRNA target sequence for Oact1 (NM_153546.1,888-906).
ccatgggagctgtgataca

SEQ ID NO: 770245 - DNA, 19 bp, Mus musculus
  siRNA target sequence for Oact1 (NM_153546.1,894-912).
gagctgtgatacagaagtt

SEQ ID NO: 770246 - DNA, 19 bp, Mus musculus
  siRNA target sequence for Oact1 (NM_153546.1,896-914).
gctgtgatacagaagttgt

SEQ ID NO: 770247 - DNA, 19 bp, Mus musculus
  siRNA target sequence for Oact1 (NM_153546.1,983-1001).
gatgactggtttgtacata

SEQ ID NO: 770248 - DNA, 19 bp, Mus musculus
  siRNA target sequence for Oact1 (NM_153546.1,1015-1033).
gagtcgtctctggtactta

SEQ ID NO: 770249 - DNA, 19 bp, Mus musculus
  siRNA target sequence for Oact1 (NM_153546.1,1017-1035).
gtcgtctctggtacttata

SEQ ID NO: 770250 - DNA, 19 bp, Mus musculus
  siRNA target sequence for Oact1 (NM_153546.1,1020-1038).
gtctctggtacttatatgt

SEQ ID NO: 770251 - DNA, 19 bp, Mus musculus
  siRNA target sequence for Oact1 (NM_153546.1,1049-1067).
gccgcaaagcccaagtatt

SEQ ID NO: 770252 - DNA, 19 bp, Mus musculus
  siRNA target sequence for Oact1 (NM_153546.1,1053-1071).
caaagcccaagtattactt

SEQ ID NO: 770253 - DNA, 19 bp, Mus musculus
  siRNA target sequence for Oact1 (NM_153546.1,1069-1087).
ctttgcgtggacattagca

SEQ ID NO: 770254 - DNA, 19 bp, Mus musculus
  siRNA target sequence for Oact1 (NM_153546.1,1144-1162).
gtctcgctgggatttacta

SEQ ID NO: 770255 - DNA, 19 bp, Mus musculus
  siRNA target sequence for Oact1 (NM_153546.1,1148-1166).
cgctgggatttactatcta

SEQ ID NO: 770256 - DNA, 19 bp, Mus musculus
  siRNA target sequence for Oact1 (NM_153546.1,1160-1178).
ctatctaacctgaacatct

SEQ ID NO: 770257 - DNA, 19 bp, Mus musculus
  siRNA target sequence for Oact1 (NM_153546.1,1189-1207).
gactgccacgagtttcaaa

SEQ ID NO: 770258 - DNA, 19 bp, Mus musculus
  siRNA target sequence for Oact1 (NM_153546.1,1191-1209).
ctgccacgagtttcaaaat

SEQ ID NO: 770259 - DNA, 19 bp, Mus musculus
  siRNA target sequence for Oact1 (NM_153546.1,1193-1211).
gccacgagtttcaaaatgt

SEQ ID NO: 770260 - DNA, 19 bp, Mus musculus
  siRNA target sequence for Oact1 (NM_153546.1,1197-1215).
cgagtttcaaaatgtactt

SEQ ID NO: 770261 - DNA, 19 bp, Mus musculus
  siRNA target sequence for Oact1 (NM_153546.1,1325-1343).
gtctaccctggatactact

SEQ ID NO: 770262 - DNA, 19 bp, Mus musculus
  siRNA target sequence for Oact1 (NM_153546.1,1332-1350).
ctggatactacttcacatt

SEQ ID NO: 770263 - DNA, 19 bp, Mus musculus
  siRNA target sequence for Oact1 (NM_153546.1,1383-1401).
gagcggtgaggaacaacta

SEQ ID NO: 770264 - DNA, 19 bp, Mus musculus
  siRNA target sequence for Oact1 (NM_153546.1,1516-1534).
cgagccaaccatcagttta

SEQ ID NO: 770265 - DNA, 19 bp, Mus musculus
  siRNA target sequence for Oact1 (NM_153546.1,1520-1538).
ccaaccatcagtttataca

SEQ ID NO: 770266 - DNA, 19 bp, Mus musculus
  siRNA target sequence for Oact1 (NM_153546.1,1618-1636).
gcagtctcggagtccaaat

SEQ ID NO: 770267 - DNA, 19 bp, Mus musculus
  siRNA target sequence for Oact1 (NM_153546.1,1619-1637).
cagtctcggagtccaaatt

SEQ ID NO: 770268 - DNA, 19 bp, Mus musculus
  siRNA target sequence for Oact1 (NM_153546.1,1621-1639).
gtctcggagtccaaattct

SEQ ID NO: 770269 - DNA, 19 bp, Mus musculus
  siRNA target sequence for Oact1 (NM_153546.1,1623-1641).
ctcggagtccaaattctgt

SEQ ID NO: 770270 - DNA, 19 bp, Mus musculus
  siRNA target sequence for Oact1 (NM_153546.1,1625-1643).
cggagtccaaattctgtaa

SEQ ID NO: 770271 - DNA, 19 bp, Mus musculus
  siRNA target sequence for Oact1 (NM_153546.1,1626-1644).
ggagtccaaattctgtaaa

SEQ ID NO: 770272 - DNA, 19 bp, Mus musculus
  siRNA target sequence for E430025E21Rik (NM_153548.1,257-275).
gttcagagagatctcaaaa

SEQ ID NO: 770273 - DNA, 19 bp, Mus musculus
  siRNA target sequence for E430025E21Rik (NM_153548.1,406-424).
ctgacacccgaaagtttct

SEQ ID NO: 770274 - DNA, 19 bp, Mus musculus
  siRNA target sequence for E430025E21Rik (NM_153548.1,415-433).
gaaagtttctccatcaaat

SEQ ID NO: 770275 - DNA, 19 bp, Mus musculus
  siRNA target sequence for E430025E21Rik (NM_153548.1,423-441).
ctccatcaaatgatcagaa

SEQ ID NO: 770276 - DNA, 19 bp, Mus musculus
  siRNA target sequence for E430025E21Rik (NM_153548.1,501-519).
gcctggcagttaattgaca

SEQ ID NO: 770277 - DNA, 19 bp, Mus musculus
  siRNA target sequence for E430025E21Rik (NM_153548.1,507-525).
cagttaattgacagtttca

SEQ ID NO: 770278 - DNA, 19 bp, Mus musculus
  siRNA target sequence for E430025E21Rik (NM_153548.1,552-570).
gtaaacccatccatggtta

SEQ ID NO: 770279 - DNA, 19 bp, Mus musculus
  siRNA target sequence for E430025E21Rik (NM_153548.1,557-575).
cccatccatggttaccaaa

SEQ ID NO: 770280 - DNA, 19 bp, Mus musculus
  siRNA target sequence for E430025E21Rik (NM_153548.1,576-594).
ctcagagccacgttcctaa

SEQ ID NO: 770281 - DNA, 19 bp, Mus musculus
  siRNA target sequence for E430025E21Rik (NM_153548.1,580-598).
gagccacgttcctaaagct

SEQ ID NO: 770282 - DNA, 19 bp, Mus musculus
  siRNA target sequence for E430025E21Rik (NM_153548.1,614-632).
ccttcccctgctacgtatt

SEQ ID NO: 770283 - DNA, 19 bp, Mus musculus
  siRNA target sequence for E430025E21Rik (NM_153548.1,615-633).
cttcccctgctacgtatta

SEQ ID NO: 770284 - DNA, 19 bp, Mus musculus
  siRNA target sequence for E430025E21Rik (NM_153548.1,627-645).
cgtattaatcaagcaaata

SEQ ID NO: 770285 - DNA, 19 bp, Mus musculus
  siRNA target sequence for E430025E21Rik (NM_153548.1,679-697).
caggagaattggtgtcata

SEQ ID NO: 770286 - DNA, 19 bp, Mus musculus
  siRNA target sequence for E430025E21Rik (NM_153548.1,703-721).
gaaaggttttgcagatcat

SEQ ID NO: 770287 - DNA, 19 bp, Mus musculus
  siRNA target sequence for E430025E21Rik (NM_153548.1,739-757).
catctctcctgaagatcat

SEQ ID NO: 770288 - DNA, 19 bp, Mus musculus
  siRNA target sequence for E430025E21Rik (NM_153548.1,864-882).
cacgccatctccatcttta

SEQ ID NO: 770289 - DNA, 19 bp, Mus musculus
  siRNA target sequence for E430025E21Rik (NM_153548.1,885-903).
gagggcatcttgatgatga

SEQ ID NO: 770290 - DNA, 19 bp, Mus musculus
  siRNA target sequence for E430025E21Rik (NM_153548.1,996-1014).
cttcaccggggactgatat

SEQ ID NO: 770291 - DNA, 19 bp, Mus musculus
  siRNA target sequence for E430025E21Rik (NM_153548.1,999-1017).
caccggggactgatattca

SEQ ID NO: 770292 - DNA, 19 bp, Mus musculus
  siRNA target sequence for E430025E21Rik (NM_153548.1,1085-1103).
ccatcgctcctttgagtat

SEQ ID NO: 770293 - DNA, 19 bp, Mus musculus
  siRNA target sequence for E430025E21Rik (NM_153548.1,1086-1104).
catcgctcctttgagtata

SEQ ID NO: 770294 - DNA, 19 bp, Mus musculus
  siRNA target sequence for E430025E21Rik (NM_153548.1,1121-1139).
catttacggtctgaagatt

SEQ ID NO: 770295 - DNA, 19 bp, Mus musculus
  siRNA target sequence for E430025E21Rik (NM_153548.1,1145-1163).
ggaggaagtctctcgtatt

SEQ ID NO: 770296 - DNA, 19 bp, Mus musculus
  siRNA target sequence for E430025E21Rik (NM_153548.1,1146-1164).
gaggaagtctctcgtatta

SEQ ID NO: 770297 - DNA, 19 bp, Mus musculus
  siRNA target sequence for E430025E21Rik (NM_153548.1,1148-1166).
ggaagtctctcgtattata

SEQ ID NO: 770298 - DNA, 19 bp, Mus musculus
  siRNA target sequence for E430025E21Rik (NM_153548.1,1149-1167).
gaagtctctcgtattataa

SEQ ID NO: 770299 - DNA, 19 bp, Mus musculus
  siRNA target sequence for E430025E21Rik (NM_153548.1,1152-1170).
gtctctcgtattataaatt

SEQ ID NO: 770300 - DNA, 19 bp, Mus musculus
  siRNA target sequence for E430025E21Rik (NM_153548.1,1154-1172).
ctctcgtattataaattat

SEQ ID NO: 770301 - DNA, 19 bp, Mus musculus
  siRNA target sequence for E430025E21Rik (NM_153548.1,1175-1193).
cgtggaacaggagtgtaat

SEQ ID NO: 770302 - DNA, 19 bp, Mus musculus
  siRNA target sequence for E430025E21Rik (NM_153548.1,1176-1194).
gtggaacaggagtgtaata

SEQ ID NO: 770303 - DNA, 19 bp, Mus musculus
  siRNA target sequence for E430025E21Rik (NM_153548.1,1182-1200).
caggagtgtaataacttct

SEQ ID NO: 770304 - DNA, 19 bp, Mus musculus
  siRNA target sequence for E430025E21Rik (NM_153548.1,1185-1203).
gagtgtaataacttcttaa

SEQ ID NO: 770305 - DNA, 19 bp, Mus musculus
  siRNA target sequence for E430025E21Rik (NM_153548.1,1187-1205).
gtgtaataacttcttaaga

SEQ ID NO: 770306 - DNA, 19 bp, Mus musculus
  siRNA target sequence for E430025E21Rik (NM_153548.1,1235-1253).
ccaatccactcatatacca

SEQ ID NO: 770307 - DNA, 19 bp, Mus musculus
  siRNA target sequence for E430025E21Rik (NM_153548.1,1236-1254).
caatccactcatataccaa

SEQ ID NO: 770308 - DNA, 19 bp, Mus musculus
  siRNA target sequence for E430025E21Rik (NM_153548.1,1267-1285).
cacctgtggatgagtctat

SEQ ID NO: 770309 - DNA, 19 bp, Mus musculus
  siRNA target sequence for E430025E21Rik (NM_153548.1,1274-1292).
ggatgagtctataacattt

SEQ ID NO: 770310 - DNA, 19 bp, Mus musculus
  siRNA target sequence for E430025E21Rik (NM_153548.1,1275-1293).
gatgagtctataacattta

SEQ ID NO: 770311 - DNA, 19 bp, Mus musculus
  siRNA target sequence for E430025E21Rik (NM_153548.1,1297-1315).
gtcgactctgcagagaaat

SEQ ID NO: 770312 - DNA, 19 bp, Mus musculus
  siRNA target sequence for E430025E21Rik (NM_153548.1,1299-1317).
cgactctgcagagaaatct

SEQ ID NO: 770313 - DNA, 19 bp, Mus musculus
  siRNA target sequence for E430025E21Rik (NM_153548.1,1320-1338).
cggatcacagacccaaaaa

SEQ ID NO: 770314 - DNA, 19 bp, Mus musculus
  siRNA target sequence for E430025E21Rik (NM_153548.1,1369-1387).
ggtatgacgtgaaaactca

SEQ ID NO: 770315 - DNA, 19 bp, Mus musculus
  siRNA target sequence for E430025E21Rik (NM_153548.1,1370-1388).
gtatgacgtgaaaactcat

SEQ ID NO: 770316 - DNA, 19 bp, Mus musculus
  siRNA target sequence for E430025E21Rik (NM_153548.1,1376-1394).
cgtgaaaactcatcaagaa

SEQ ID NO: 770317 - DNA, 19 bp, Mus musculus
  siRNA target sequence for E430025E21Rik (NM_153548.1,1427-1445).
gaccaccttggggactttt

SEQ ID NO: 770318 - DNA, 19 bp, Mus musculus
  siRNA target sequence for E430025E21Rik (NM_153548.1,1474-1492).
gcttcatgattgtgaaaga

SEQ ID NO: 770319 - DNA, 19 bp, Mus musculus
  siRNA target sequence for E430025E21Rik (NM_153548.1,1538-1556).
gagaactgttcaagaaact

SEQ ID NO: 770320 - DNA, 19 bp, Mus musculus
  siRNA target sequence for E430025E21Rik (NM_153548.1,1575-1593).
gctgttaaccctctaaaga

SEQ ID NO: 770321 - DNA, 19 bp, Mus musculus
  siRNA target sequence for E430025E21Rik (NM_153548.1,1595-1613).
catagtggcaaattcaagt

SEQ ID NO: 770322 - DNA, 19 bp, Mus musculus
  siRNA target sequence for E430025E21Rik (NM_153548.1,1660-1678).
cttacctggaggctataat

SEQ ID NO: 770323 - DNA, 19 bp, Mus musculus
  siRNA target sequence for E430025E21Rik (NM_153548.1,1715-1733).
cgccaatgagctaaactct

SEQ ID NO: 770324 - DNA, 19 bp, Mus musculus
  siRNA target sequence for E430025E21Rik (NM_153548.1,1762-1780).
cagctgccctggataatct

SEQ ID NO: 770325 - DNA, 19 bp, Mus musculus
  siRNA target sequence for E430025E21Rik (NM_153548.1,1819-1837).
gggacccttcgcttcctta

SEQ ID NO: 770326 - DNA, 19 bp, Mus musculus
  siRNA target sequence for E430025E21Rik (NM_153548.1,1829-1847).
gcttccttaccccaaagaa

SEQ ID NO: 770327 - DNA, 19 bp, Mus musculus
  siRNA target sequence for E430025E21Rik (NM_153548.1,1845-1863).
gaagataacacactcttat

SEQ ID NO: 770328 - DNA, 19 bp, Mus musculus
  siRNA target sequence for E430025E21Rik (NM_153548.1,1907-1925).
cctgaataagatttacata

SEQ ID NO: 770329 - DNA, 19 bp, Mus musculus
  siRNA target sequence for E430025E21Rik (NM_153548.1,1908-1926).
ctgaataagatttacataa

SEQ ID NO: 770330 - DNA, 19 bp, Mus musculus
  siRNA target sequence for E430025E21Rik (NM_153548.1,1930-1948).
cgaagcgcttaccctattt

SEQ ID NO: 770331 - DNA, 19 bp, Mus musculus
  siRNA target sequence for E430025E21Rik (NM_153548.1,1950-1968).
ccgattgtcaactttctgt

SEQ ID NO: 770332 - DNA, 19 bp, Mus musculus
  siRNA target sequence for E430025E21Rik (NM_153548.1,1951-1969).
cgattgtcaactttctgtt

SEQ ID NO: 770333 - DNA, 19 bp, Mus musculus
  siRNA target sequence for E430025E21Rik (NM_153548.1,1976-1994).
cgcgcagttgccaaaactt

SEQ ID NO: 770334 - DNA, 19 bp, Mus musculus
  siRNA target sequence for E430025E21Rik (NM_153548.1,1978-1996).
cgcagttgccaaaacttca

SEQ ID NO: 770335 - DNA, 19 bp, Mus musculus
  siRNA target sequence for E430025E21Rik (NM_153548.1,2101-2119).
ggtacaccgagcaattcct

SEQ ID NO: 770336 - DNA, 19 bp, Mus musculus
  siRNA target sequence for E430025E21Rik (NM_153548.1,2222-2240).
ggattatgttcggtataca

SEQ ID NO: 770337 - DNA, 19 bp, Mus musculus
  siRNA target sequence for E430025E21Rik (NM_153548.1,2223-2241).
gattatgttcggtatacaa

SEQ ID NO: 770338 - DNA, 19 bp, Mus musculus
  siRNA target sequence for BC031575 (NM_153549.2,608-626).
cagtcccacttcctgatat

SEQ ID NO: 770339 - DNA, 19 bp, Mus musculus
  siRNA target sequence for BC031575 (NM_153549.2,613-631).
ccacttcctgatattcgtt

SEQ ID NO: 770340 - DNA, 19 bp, Mus musculus
  siRNA target sequence for BC031575 (NM_153549.2,677-695).
caagaaatagtataattga

SEQ ID NO: 770341 - DNA, 19 bp, Mus musculus
  siRNA target sequence for BC031575 (NM_153549.2,700-718).
gctaaaatctggccaaata

SEQ ID NO: 770342 - DNA, 19 bp, Mus musculus
  siRNA target sequence for BC031575 (NM_153549.2,701-719).
ctaaaatctggccaaatat

SEQ ID NO: 770343 - DNA, 19 bp, Mus musculus
  siRNA target sequence for BC031575 (NM_153549.2,776-794).
gaacaaaaggcatggaaaa

SEQ ID NO: 770344 - DNA, 19 bp, Mus musculus
  siRNA target sequence for BC031575 (NM_153549.2,902-920).
gcgttttctgggatattga

SEQ ID NO: 770345 - DNA, 19 bp, Mus musculus
  siRNA target sequence for BC031575 (NM_153549.2,942-960).
ccggtcagcaacaactgtt

SEQ ID NO: 770346 - DNA, 19 bp, Mus musculus
  siRNA target sequence for BC031575 (NM_153549.2,947-965).
cagcaacaactgttgtaca

SEQ ID NO: 770347 - DNA, 19 bp, Mus musculus
  siRNA target sequence for BC031575 (NM_153549.2,972-990).
ccgtgagaagttttttaga

SEQ ID NO: 770348 - DNA, 19 bp, Mus musculus
  siRNA target sequence for BC031575 (NM_153549.2,1020-1038).
gtgtgacatcagtaaagaa

SEQ ID NO: 770349 - DNA, 19 bp, Mus musculus
  siRNA target sequence for BC031575 (NM_153549.2,1080-1098).
cgttgctcacataaatgct

SEQ ID NO: 770350 - DNA, 19 bp, Mus musculus
  siRNA target sequence for BC031575 (NM_153549.2,1081-1099).
gttgctcacataaatgcta

SEQ ID NO: 770351 - DNA, 19 bp, Mus musculus
  siRNA target sequence for BC031575 (NM_153549.2,1186-1204).
gtgtcaactgatgtcaatt

SEQ ID NO: 770352 - DNA, 19 bp, Mus musculus
  siRNA target sequence for BC031575 (NM_153549.2,1277-1295).
ctgaagccttgttacatca

SEQ ID NO: 770353 - DNA, 19 bp, Mus musculus
  siRNA target sequence for BC031575 (NM_153549.2,1297-1315).
gctaaccagctgatcagat

SEQ ID NO: 770354 - DNA, 19 bp, Mus musculus
  siRNA target sequence for BC031575 (NM_153549.2,1364-1382).
cttgccacactctactcta

SEQ ID NO: 770355 - DNA, 19 bp, Mus musculus
  siRNA target sequence for BC031575 (NM_153549.2,1371-1389).
cactctactctatgtttat

SEQ ID NO: 770356 - DNA, 19 bp, Mus musculus
  siRNA target sequence for BC031575 (NM_153549.2,1457-1475).
gtggcaaggtgctgagtat

SEQ ID NO: 770357 - DNA, 19 bp, Mus musculus
  siRNA target sequence for BC031575 (NM_153549.2,1488-1506).
cgcaattctccgcttcata

SEQ ID NO: 770358 - DNA, 19 bp, Mus musculus
  siRNA target sequence for BC031575 (NM_153549.2,1569-1587).
gatcatcgtgtcctttact

SEQ ID NO: 770359 - DNA, 19 bp, Mus musculus
  siRNA target sequence for BC031575 (NM_153549.2,1575-1593).
cgtgtcctttactccaaaa

SEQ ID NO: 770360 - DNA, 19 bp, Mus musculus
  siRNA target sequence for BC031575 (NM_153549.2,1578-1596).
gtcctttactccaaaacat

SEQ ID NO: 770361 - DNA, 19 bp, Mus musculus
  siRNA target sequence for BC031575 (NM_153549.2,1627-1645).
gctattgccgacaaagtga

SEQ ID NO: 770362 - DNA, 19 bp, Mus musculus
  siRNA target sequence for BC031575 (NM_153549.2,1753-1771).
ggatctgctacaaaaacca

SEQ ID NO: 770363 - DNA, 19 bp, Mus musculus
  siRNA target sequence for BC031575 (NM_153549.2,1800-1818).
ccgaatggagtcaaagtct

SEQ ID NO: 770364 - DNA, 19 bp, Mus musculus
  siRNA target sequence for BC031575 (NM_153549.2,1809-1827).
gtcaaagtctggcaataga

SEQ ID NO: 770365 - DNA, 19 bp, Mus musculus
  siRNA target sequence for BC031575 (NM_153549.2,1815-1833).
gtctggcaatagaaacagt

SEQ ID NO: 770366 - DNA, 19 bp, Mus musculus
  siRNA target sequence for BC031575 (NM_153549.2,1860-1878).
ggcagcactgcctaacagt

SEQ ID NO: 770367 - DNA, 19 bp, Mus musculus
  siRNA target sequence for BC031575 (NM_153549.2,1916-1934).
gtgtgacagagccacttta

SEQ ID NO: 770368 - DNA, 19 bp, Mus musculus
  siRNA target sequence for BC031575 (NM_153549.2,1918-1936).
gtgacagagccactttaca

SEQ ID NO: 770369 - DNA, 19 bp, Mus musculus
  siRNA target sequence for BC031575 (NM_153549.2,2011-2029).
gagactgtcttccaagtaa

SEQ ID NO: 770370 - DNA, 19 bp, Mus musculus
  siRNA target sequence for Dirc2 (NM_153550.2,422-440).
ccctgcttcgcgttcatgt

SEQ ID NO: 770371 - DNA, 19 bp, Mus musculus
  siRNA target sequence for Dirc2 (NM_153550.2,481-499).
gacgtcatttcttatggtt

SEQ ID NO: 770372 - DNA, 19 bp, Mus musculus
  siRNA target sequence for Dirc2 (NM_153550.2,516-534).
gatgcatacctgtatcaga

SEQ ID NO: 770373 - DNA, 19 bp, Mus musculus
  siRNA target sequence for Dirc2 (NM_153550.2,560-578).
catgggggacagatactga

SEQ ID NO: 770374 - DNA, 19 bp, Mus musculus
  siRNA target sequence for Dirc2 (NM_153550.2,588-606).
caggtccgactgtcatgaa

SEQ ID NO: 770375 - DNA, 19 bp, Mus musculus
  siRNA target sequence for Dirc2 (NM_153550.2,660-678).
ccacagcaatcgcatcaat

SEQ ID NO: 770376 - DNA, 19 bp, Mus musculus
  siRNA target sequence for Dirc2 (NM_153550.2,769-787).
gagtagcagggctcatatt

SEQ ID NO: 770377 - DNA, 19 bp, Mus musculus
  siRNA target sequence for Dirc2 (NM_153550.2,771-789).
gtagcagggctcatattaa

SEQ ID NO: 770378 - DNA, 19 bp, Mus musculus
  siRNA target sequence for Dirc2 (NM_153550.2,795-813).
gaatcgagaccgtgttgta

SEQ ID NO: 770379 - DNA, 19 bp, Mus musculus
  siRNA target sequence for Dirc2 (NM_153550.2,903-921).
cgagccagcggctgagtta

SEQ ID NO: 770380 - DNA, 19 bp, Mus musculus
  siRNA target sequence for Dirc2 (NM_153550.2,928-946).
gagcttttgtaggttacta

SEQ ID NO: 770381 - DNA, 19 bp, Mus musculus
  siRNA target sequence for Dirc2 (NM_153550.2,944-962).
ctaagcaatttgaggtttt

SEQ ID NO: 770382 - DNA, 19 bp, Mus musculus
  siRNA target sequence for Dirc2 (NM_153550.2,1111-1129).
gatagctatggcaaggttt

SEQ ID NO: 770383 - DNA, 19 bp, Mus musculus
  siRNA target sequence for Dirc2 (NM_153550.2,1120-1138).
ggcaaggtttgcggatttt

SEQ ID NO: 770384 - DNA, 19 bp, Mus musculus
  siRNA target sequence for Dirc2 (NM_153550.2,1231-1249).
cacccacttgcctttgaca

SEQ ID NO: 770385 - DNA, 19 bp, Mus musculus
  siRNA target sequence for Dirc2 (NM_153550.2,1299-1317).
gcagcgtccccatattctt

SEQ ID NO: 770386 - DNA, 19 bp, Mus musculus
  siRNA target sequence for Dirc2 (NM_153550.2,1300-1318).
cagcgtccccatattcttt

SEQ ID NO: 770387 - DNA, 19 bp, Mus musculus
  siRNA target sequence for Dirc2 (NM_153550.2,1302-1320).
gcgtccccatattctttga

SEQ ID NO: 770388 - DNA, 19 bp, Mus musculus
  siRNA target sequence for Dirc2 (NM_153550.2,1365-1383).
gtggagttgtcaccttttt

SEQ ID NO: 770389 - DNA, 19 bp, Mus musculus
  siRNA target sequence for Dirc2 (NM_153550.2,1370-1388).
gttgtcacctttttaagta

SEQ ID NO: 770390 - DNA, 19 bp, Mus musculus
  siRNA target sequence for Dirc2 (NM_153550.2,1373-1391).
gtcacctttttaagtaata

SEQ ID NO: 770391 - DNA, 19 bp, Mus musculus
  siRNA target sequence for 4432409M07Rik (NM_153551.1,259-277).
gtttccccttcgacataga

SEQ ID NO: 770392 - DNA, 19 bp, Mus musculus
  siRNA target sequence for 4432409M07Rik (NM_153551.1,292-310).
gccctgctgttcagcattt

SEQ ID NO: 770393 - DNA, 19 bp, Mus musculus
  siRNA target sequence for 4432409M07Rik (NM_153551.1,332-350).
ggtgggcaaccgtagattt

SEQ ID NO: 770394 - DNA, 19 bp, Mus musculus
  siRNA target sequence for 4432409M07Rik (NM_153551.1,409-427).
cctggtttgaagtgttcta

SEQ ID NO: 770395 - DNA, 19 bp, Mus musculus
  siRNA target sequence for 4432409M07Rik (NM_153551.1,420-438).
gtgttctacaagattctca

SEQ ID NO: 770396 - DNA, 19 bp, Mus musculus
  siRNA target sequence for 4432409M07Rik (NM_153551.1,527-545).
ccggttttcaggaagatca

SEQ ID NO: 770397 - DNA, 19 bp, Mus musculus
  siRNA target sequence for 4432409M07Rik (NM_153551.1,563-581).
cactgtccggagtgaatgt

SEQ ID NO: 770398 - DNA, 19 bp, Mus musculus
  siRNA target sequence for 4432409M07Rik (NM_153551.1,595-613).
ctgccctggggaatagcaa

SEQ ID NO: 770399 - DNA, 19 bp, Mus musculus
  siRNA target sequence for 4432409M07Rik (NM_153551.1,643-661).
ccgccagcctgccatctat

SEQ ID NO: 770400 - DNA, 19 bp, Mus musculus
  siRNA target sequence for 4432409M07Rik (NM_153551.1,647-665).
cagcctgccatctattcct

SEQ ID NO: 770401 - DNA, 19 bp, Mus musculus
  siRNA target sequence for 4432409M07Rik (NM_153551.1,1268-1286).
cgaatcccgactggaaaaa

SEQ ID NO: 770402 - DNA, 19 bp, Mus musculus
  siRNA target sequence for 4432409M07Rik (NM_153551.1,1274-1292).
ccgactggaaaaactcaat

SEQ ID NO: 770403 - DNA, 19 bp, Mus musculus
  siRNA target sequence for 4432409M07Rik (NM_153551.1,1376-1394).
gctctgggtagatagtctt

SEQ ID NO: 770404 - DNA, 19 bp, Mus musculus
  siRNA target sequence for 4432409M07Rik (NM_153551.1,1377-1395).
ctctgggtagatagtctta

SEQ ID NO: 770405 - DNA, 19 bp, Mus musculus
  siRNA target sequence for 4432409M07Rik (NM_153551.1,1381-1399).
gggtagatagtcttaagaa

SEQ ID NO: 770406 - DNA, 19 bp, Mus musculus
  siRNA target sequence for 4432409M07Rik (NM_153551.1,1407-1425).
gatgcccttctgcattcaa

SEQ ID NO: 770407 - DNA, 19 bp, Mus musculus
  siRNA target sequence for 4432409M07Rik (NM_153551.1,1413-1431).
cttctgcattcaatgaaga

SEQ ID NO: 770408 - DNA, 19 bp, Mus musculus
  siRNA target sequence for 4432409M07Rik (NM_153551.1,1473-1491).
gactccctccaggaatatt

SEQ ID NO: 770409 - DNA, 19 bp, Mus musculus
  siRNA target sequence for 4432409M07Rik (NM_153551.1,1475-1493).
ctccctccaggaatattgt

SEQ ID NO: 770410 - DNA, 19 bp, Mus musculus
  siRNA target sequence for 4432409M07Rik (NM_153551.1,1620-1638).
caacagcgcctgcctatta

SEQ ID NO: 770411 - DNA, 19 bp, Mus musculus
  siRNA target sequence for 4432409M07Rik (NM_153551.1,1763-1781).
ggcagaagatactctagat

SEQ ID NO: 770412 - DNA, 19 bp, Mus musculus
  siRNA target sequence for 4432409M07Rik (NM_153551.1,1837-1855).
gcctgaacgtggaaaccaa

SEQ ID NO: 770413 - DNA, 19 bp, Mus musculus
  siRNA target sequence for 4432409M07Rik (NM_153551.1,2028-2046).
ctgcaagacaccccatttt

SEQ ID NO: 770414 - DNA, 19 bp, Mus musculus
  siRNA target sequence for 4432409M07Rik (NM_153551.1,2030-2048).
gcaagacaccccattttca

SEQ ID NO: 770415 - DNA, 19 bp, Mus musculus
  siRNA target sequence for 4432409M07Rik (NM_153551.1,2049-2067).
gaggttgtaagctactcaa

SEQ ID NO: 770416 - DNA, 19 bp, Mus musculus
  siRNA target sequence for 4432409M07Rik (NM_153551.1,2055-2073).
gtaagctactcaaagaact

SEQ ID NO: 770417 - DNA, 19 bp, Mus musculus
  siRNA target sequence for 4432409M07Rik (NM_153551.1,2142-2160).
gatcctagaccctcacaaa

SEQ ID NO: 770418 - DNA, 19 bp, Mus musculus
  siRNA target sequence for 4432409M07Rik (NM_153551.1,2250-2268).
gctgtccaaagattacaat

SEQ ID NO: 770419 - DNA, 19 bp, Mus musculus
  siRNA target sequence for 4432409M07Rik (NM_153551.1,2336-2354).
gggccaggcttgtgtacaa

SEQ ID NO: 770420 - DNA, 19 bp, Mus musculus
  siRNA target sequence for 4432409M07Rik (NM_153551.1,2428-2446).
ctcgagttgctgatctgaa

SEQ ID NO: 770421 - DNA, 19 bp, Mus musculus
  siRNA target sequence for D1Ucla4 (NM_153555.1,410-428).
cctcagggattgaagtaga

SEQ ID NO: 770422 - DNA, 19 bp, Mus musculus
  siRNA target sequence for D1Ucla4 (NM_153555.1,550-568).
gacacgggccattattcca

SEQ ID NO: 770423 - DNA, 19 bp, Mus musculus
  siRNA target sequence for D1Ucla4 (NM_153555.1,555-573).
gggccattattccatcaat

SEQ ID NO: 770424 - DNA, 19 bp, Mus musculus
  siRNA target sequence for D1Ucla4 (NM_153555.1,557-575).
gccattattccatcaatga

SEQ ID NO: 770425 - DNA, 19 bp, Mus musculus
  siRNA target sequence for D1Ucla4 (NM_153555.1,558-576).
ccattattccatcaatgat

SEQ ID NO: 770426 - DNA, 19 bp, Mus musculus
  siRNA target sequence for D1Ucla4 (NM_153555.1,776-794).
ccagtgcccgctttgtgta

SEQ ID NO: 770427 - DNA, 19 bp, Mus musculus
  siRNA target sequence for D1Ucla4 (NM_153555.1,806-824).
gagctagagtctttgtaca

SEQ ID NO: 770428 - DNA, 19 bp, Mus musculus
  siRNA target sequence for D1Ucla4 (NM_153555.1,855-873).
ccatactggttgtgtcaat

SEQ ID NO: 770429 - DNA, 19 bp, Mus musculus
  siRNA target sequence for D1Ucla4 (NM_153555.1,856-874).
catactggttgtgtcaata

SEQ ID NO: 770430 - DNA, 19 bp, Mus musculus
  siRNA target sequence for D1Ucla4 (NM_153555.1,1230-1248).
ccggccagcttcgaaacta

SEQ ID NO: 770431 - DNA, 19 bp, Mus musculus
  siRNA target sequence for D1Ucla4 (NM_153555.1,1232-1250).
ggccagcttcgaaactagt

SEQ ID NO: 770432 - DNA, 19 bp, Mus musculus
  siRNA target sequence for D1Ucla4 (NM_153555.1,1241-1259).
cgaaactagtggtgacaaa

SEQ ID NO: 770433 - DNA, 19 bp, Mus musculus
  siRNA target sequence for D1Ucla4 (NM_153555.1,1280-1298).
ggctgtatacaatctatgt

SEQ ID NO: 770434 - DNA, 19 bp, Mus musculus
  siRNA target sequence for D1Ucla4 (NM_153555.1,1435-1453).
gagtccaaagcaaacatca

SEQ ID NO: 770435 - DNA, 19 bp, Mus musculus
  siRNA target sequence for D1Ucla4 (NM_153555.1,1504-1522).
gatgaagacatttaccttt

SEQ ID NO: 770436 - DNA, 19 bp, Mus musculus
  siRNA target sequence for D1Ucla4 (NM_153555.1,1551-1569).
gtatattaagagatacaaa

SEQ ID NO: 770437 - DNA, 19 bp, Mus musculus
  siRNA target sequence for D1Ucla4 (NM_153555.1,1591-1609).
gtaaaaggcgtcaatttct

SEQ ID NO: 770438 - DNA, 19 bp, Mus musculus
  siRNA target sequence for D1Ucla4 (NM_153555.1,1613-1631).
gccccaagagtgagtttgt

SEQ ID NO: 770439 - DNA, 19 bp, Mus musculus
  siRNA target sequence for D1Ucla4 (NM_153555.1,1676-1694).
catcttgccagattattca

SEQ ID NO: 770440 - DNA, 19 bp, Mus musculus
  siRNA target sequence for D1Ucla4 (NM_153555.1,1713-1731).
gggaggtgtggtaaactgt

SEQ ID NO: 770441 - DNA, 19 bp, Mus musculus
  siRNA target sequence for D1Ucla4 (NM_153555.1,1772-1790).
gcctagaccatgatgtgaa

SEQ ID NO: 770442 - DNA, 19 bp, Mus musculus
  siRNA target sequence for D1Ucla4 (NM_153555.1,1820-1838).
ctgagctgacagggttaaa

SEQ ID NO: 770443 - DNA, 19 bp, Mus musculus
  siRNA target sequence for D1Ucla4 (NM_153555.1,1824-1842).
gctgacagggttaaaggaa

SEQ ID NO: 770444 - DNA, 19 bp, Mus musculus
  siRNA target sequence for D1Ucla4 (NM_153555.1,1887-1905).
ccacactgatctgtttgat

SEQ ID NO: 770445 - DNA, 19 bp, Mus musculus
  siRNA target sequence for D1Ucla4 (NM_153555.1,1888-1906).
cacactgatctgtttgata

SEQ ID NO: 770446 - DNA, 19 bp, Mus musculus
  siRNA target sequence for BC029214 (NM_153557.1,201-219).
gtcgctgccgctttgtatt

SEQ ID NO: 770447 - DNA, 19 bp, Mus musculus
  siRNA target sequence for BC029214 (NM_153557.1,203-221).
cgctgccgctttgtattct

SEQ ID NO: 770448 - DNA, 19 bp, Mus musculus
  siRNA target sequence for BC029214 (NM_153557.1,284-302).
gggaccgcgacgacttcaa

SEQ ID NO: 770449 - DNA, 19 bp, Mus musculus
  siRNA target sequence for BC029214 (NM_153557.1,389-407).
gtggggctgaagatatcca

SEQ ID NO: 770450 - DNA, 19 bp, Mus musculus
  siRNA target sequence for BC029214 (NM_153557.1,460-478).
gaagacagagcattgataa

SEQ ID NO: 770451 - DNA, 19 bp, Mus musculus
  siRNA target sequence for BC029214 (NM_153557.1,727-745).
ccaggggagtctctcatta

SEQ ID NO: 770452 - DNA, 19 bp, Mus musculus
  siRNA target sequence for BC029214 (NM_153557.1,728-746).
caggggagtctctcattaa

SEQ ID NO: 770453 - DNA, 19 bp, Mus musculus
  siRNA target sequence for BC030934 (NM_153559.1,437-455).
ggatgtgtgccgcacatat

SEQ ID NO: 770454 - DNA, 19 bp, Mus musculus
  siRNA target sequence for BC030934 (NM_153559.1,441-459).
gtgtgccgcacatatgaca

SEQ ID NO: 770455 - DNA, 19 bp, Mus musculus
  siRNA target sequence for BC030934 (NM_153559.1,451-469).
catatgacatccacttcta

SEQ ID NO: 770456 - DNA, 19 bp, Mus musculus
  siRNA target sequence for BC030934 (NM_153559.1,470-488).
ccccaccttcaggtatttt

SEQ ID NO: 770457 - DNA, 19 bp, Mus musculus
  siRNA target sequence for BC030934 (NM_153559.1,473-491).
caccttcaggtattttaaa

SEQ ID NO: 770458 - DNA, 19 bp, Mus musculus
  siRNA target sequence for BC030934 (NM_153559.1,476-494).
cttcaggtattttaaagca

SEQ ID NO: 770459 - DNA, 19 bp, Mus musculus
  siRNA target sequence for BC030934 (NM_153559.1,492-510).
gcatttacaaaggagttta

SEQ ID NO: 770460 - DNA, 19 bp, Mus musculus
  siRNA target sequence for BC030934 (NM_153559.1,506-524).
gtttacaacgggagaaaat

SEQ ID NO: 770461 - DNA, 19 bp, Mus musculus
  siRNA target sequence for BC030934 (NM_153559.1,550-568).
ggacagtcaggcagacaat

SEQ ID NO: 770462 - DNA, 19 bp, Mus musculus
  siRNA target sequence for BC030934 (NM_153559.1,619-637).
cacccctggaccctattca

SEQ ID NO: 770463 - DNA, 19 bp, Mus musculus
  siRNA target sequence for BC030934 (NM_153559.1,667-685).
gccacagtggccaatacca

SEQ ID NO: 770464 - DNA, 19 bp, Mus musculus
  siRNA target sequence for BC030934 (NM_153559.1,673-691).
gtggccaataccatgctat

SEQ ID NO: 770465 - DNA, 19 bp, Mus musculus
  siRNA target sequence for BC030934 (NM_153559.1,721-739).
gacgagaggtgatcttaga

SEQ ID NO: 770466 - DNA, 19 bp, Mus musculus
  siRNA target sequence for BC030934 (NM_153559.1,723-741).
cgagaggtgatcttagatt

SEQ ID NO: 770467 - DNA, 19 bp, Mus musculus
  siRNA target sequence for BC030934 (NM_153559.1,777-795).
ctggatacggacaaagcat

SEQ ID NO: 770468 - DNA, 19 bp, Mus musculus
  siRNA target sequence for BC030934 (NM_153559.1,803-821).
gacacttggcattacttca

SEQ ID NO: 770469 - DNA, 19 bp, Mus musculus
  siRNA target sequence for BC030934 (NM_153559.1,820-838).
cagtgccttcctgttactt

SEQ ID NO: 770470 - DNA, 19 bp, Mus musculus
  siRNA target sequence for BC030934 (NM_153559.1,853-871).
ggtctcatggactggttaa

SEQ ID NO: 770471 - DNA, 19 bp, Mus musculus
  siRNA target sequence for BC030934 (NM_153559.1,882-900).
cctctacgatcgtttttct

SEQ ID NO: 770472 - DNA, 19 bp, Mus musculus
  siRNA target sequence for BC030934 (NM_153559.1,927-945).
gtaaggaaaaagtcacttt

SEQ ID NO: 770473 - DNA, 19 bp, Mus musculus
  siRNA target sequence for BC030934 (NM_153559.1,952-970).
ctgaaaagtccaacaaaga

SEQ ID NO: 770474 - DNA, 19 bp, Mus musculus
  siRNA target sequence for BC030934 (NM_153559.1,1089-1107).
gctggagcccagttaaaga

SEQ ID NO: 770475 - DNA, 19 bp, Mus musculus
  siRNA target sequence for BC030934 (NM_153559.1,1092-1110).
ggagcccagttaaagacat

SEQ ID NO: 770476 - DNA, 19 bp, Mus musculus
  siRNA target sequence for BC030934 (NM_153559.1,1231-1249).
ccatcctagacctagtcaa

SEQ ID NO: 770477 - DNA, 19 bp, Mus musculus
  siRNA target sequence for BC030934 (NM_153559.1,1345-1363).
ccctctggaaactgtttca

SEQ ID NO: 770478 - DNA, 19 bp, Mus musculus
  siRNA target sequence for BC030934 (NM_153559.1,1445-1463).
ggccatcaggagatacatt

SEQ ID NO: 770479 - DNA, 19 bp, Mus musculus
  siRNA target sequence for BC030934 (NM_153559.1,1593-1611).
cgcctggcaggccatttga

SEQ ID NO: 770480 - DNA, 19 bp, Mus musculus
  siRNA target sequence for BC030934 (NM_153559.1,1610-1628).
gagtgaggaccccaagttt

SEQ ID NO: 770481 - DNA, 19 bp, Mus musculus
  siRNA target sequence for BC030934 (NM_153559.1,1916-1934).
caagcccagatcatcgtta

SEQ ID NO: 770482 - DNA, 19 bp, Mus musculus
  siRNA target sequence for C230093N12Rik (NM_153560.2,917-935).
ggttcacctttgtgtgtaa

SEQ ID NO: 770483 - DNA, 19 bp, Mus musculus
  siRNA target sequence for C230093N12Rik (NM_153560.2,918-936).
gttcacctttgtgtgtaaa

SEQ ID NO: 770484 - DNA, 19 bp, Mus musculus
  siRNA target sequence for C230093N12Rik (NM_153560.2,1009-1027).
ggtgggaaggcgtattcca

SEQ ID NO: 770485 - DNA, 19 bp, Mus musculus
  siRNA target sequence for C230093N12Rik (NM_153560.2,1010-1028).
gtgggaaggcgtattccaa

SEQ ID NO: 770486 - DNA, 19 bp, Mus musculus
  siRNA target sequence for C230093N12Rik (NM_153560.2,1088-1106).
gctgcctattggaaggata

SEQ ID NO: 770487 - DNA, 19 bp, Mus musculus
  siRNA target sequence for C230093N12Rik (NM_153560.2,1102-1120).
ggatacgacaccaagaata

SEQ ID NO: 770488 - DNA, 19 bp, Mus musculus
  siRNA target sequence for C230093N12Rik (NM_153560.2,1172-1190).
ctggggacccctgtttcaa

SEQ ID NO: 770489 - DNA, 19 bp, Mus musculus
  siRNA target sequence for C230093N12Rik (NM_153560.2,1174-1192).
ggggacccctgtttcaaga

SEQ ID NO: 770490 - DNA, 19 bp, Mus musculus
  siRNA target sequence for C230093N12Rik (NM_153560.2,1198-1216).
ccgtctaccgccaaatcca

SEQ ID NO: 770491 - DNA, 19 bp, Mus musculus
  siRNA target sequence for C230093N12Rik (NM_153560.2,1199-1217).
cgtctaccgccaaatccat

SEQ ID NO: 770492 - DNA, 19 bp, Mus musculus
  siRNA target sequence for C230093N12Rik (NM_153560.2,1242-1260).
cctgcagctgacgtgtaaa

SEQ ID NO: 770493 - DNA, 19 bp, Mus musculus
  siRNA target sequence for C230093N12Rik (NM_153560.2,1245-1263).
gcagctgacgtgtaaaggt

SEQ ID NO: 770494 - DNA, 19 bp, Mus musculus
  siRNA target sequence for C230093N12Rik (NM_153560.2,1500-1518).
gacacaccgcagaaataca

SEQ ID NO: 770495 - DNA, 19 bp, Mus musculus
  siRNA target sequence for C230093N12Rik (NM_153560.2,1535-1553).
cctctggtggcctcagtat

SEQ ID NO: 770496 - DNA, 19 bp, Mus musculus
  siRNA target sequence for C230093N12Rik (NM_153560.2,1643-1661).
gccccttgcatctatcaga

SEQ ID NO: 770497 - DNA, 19 bp, Mus musculus
  siRNA target sequence for C230093N12Rik (NM_153560.2,1664-1682).
gctcttttcggcgaaagaa

SEQ ID NO: 770498 - DNA, 19 bp, Mus musculus
  siRNA target sequence for C230093N12Rik (NM_153560.2,1665-1683).
ctcttttcggcgaaagaaa

SEQ ID NO: 770499 - DNA, 19 bp, Mus musculus
  siRNA target sequence for C230093N12Rik (NM_153560.2,1881-1899).
ctacgagccagtcgtaatt

SEQ ID NO: 770500 - DNA, 19 bp, Mus musculus
  siRNA target sequence for C230093N12Rik (NM_153560.2,1885-1903).
gagccagtcgtaattgaga

SEQ ID NO: 770501 - DNA, 19 bp, Mus musculus
  siRNA target sequence for Nudt6 (NM_153561.1,47-65).
ctggttctccacattgctt

SEQ ID NO: 770502 - DNA, 19 bp, Mus musculus
  siRNA target sequence for Nudt6 (NM_153561.1,49-67).
ggttctccacattgcttta

SEQ ID NO: 770503 - DNA, 19 bp, Mus musculus
  siRNA target sequence for Nudt6 (NM_153561.1,413-431).
cagactcccgggatatgct

SEQ ID NO: 770504 - DNA, 19 bp, Mus musculus
  siRNA target sequence for Nudt6 (NM_153561.1,451-469).
caggtgctgtatttgatgt

SEQ ID NO: 770505 - DNA, 19 bp, Mus musculus
  siRNA target sequence for Nudt6 (NM_153561.1,453-471).
ggtgctgtatttgatgtta

SEQ ID NO: 770506 - DNA, 19 bp, Mus musculus
  siRNA target sequence for Nudt6 (NM_153561.1,478-496).
ggaaagtactggttgtaca

SEQ ID NO: 770507 - DNA, 19 bp, Mus musculus
  siRNA target sequence for Nudt6 (NM_153561.1,488-506).
ggttgtacaagatcgaaat

SEQ ID NO: 770508 - DNA, 19 bp, Mus musculus
  siRNA target sequence for Nudt6 (NM_153561.1,489-507).
gttgtacaagatcgaaata

SEQ ID NO: 770509 - DNA, 19 bp, Mus musculus
  siRNA target sequence for Nudt6 (NM_153561.1,568-586).
cagcagtccgagaggtttt

SEQ ID NO: 770510 - DNA, 19 bp, Mus musculus
  siRNA target sequence for Nudt6 (NM_153561.1,595-613).
ctggtgtcaagtcagaatt

SEQ ID NO: 770511 - DNA, 19 bp, Mus musculus
  siRNA target sequence for Nudt6 (NM_153561.1,696-714).
cagcctcgttccttcacta

SEQ ID NO: 770512 - DNA, 19 bp, Mus musculus
  siRNA target sequence for Nudt6 (NM_153561.1,751-769).
ggattgatctagaaaacct

SEQ ID NO: 770513 - DNA, 19 bp, Mus musculus
  siRNA target sequence for Nudt6 (NM_153561.1,916-934).
gggagctgccggagagtta

SEQ ID NO: 770514 - DNA, 19 bp, Mus musculus
  siRNA target sequence for Nudt6 (NM_153561.1,918-936).
gagctgccggagagttaca

SEQ ID NO: 770515 - DNA, 19 bp, Mus musculus
  siRNA target sequence for Nudt6 (NM_153561.1,920-938).
gctgccggagagttacaaa

SEQ ID NO: 770516 - DNA, 19 bp, Mus musculus
  siRNA target sequence for BC023814 (NM_153562.2,280-298).
cgcctacatcatcgaattt

SEQ ID NO: 770517 - DNA, 19 bp, Mus musculus
  siRNA target sequence for BC023814 (NM_153562.2,281-299).
gcctacatcatcgaatttt

SEQ ID NO: 770518 - DNA, 19 bp, Mus musculus
  siRNA target sequence for BC023814 (NM_153562.2,282-300).
cctacatcatcgaattttt

SEQ ID NO: 770519 - DNA, 19 bp, Mus musculus
  siRNA target sequence for BC023814 (NM_153562.2,532-550).
ccagagctcccgactaaca

SEQ ID NO: 770520 - DNA, 19 bp, Mus musculus
  siRNA target sequence for BC023814 (NM_153562.2,552-570).
ctccttttcggaaacatgt

SEQ ID NO: 770521 - DNA, 19 bp, Mus musculus
  siRNA target sequence for BC023814 (NM_153562.2,636-654).
ctggctgcacccaagttgt

SEQ ID NO: 770522 - DNA, 19 bp, Mus musculus
  siRNA target sequence for BC023814 (NM_153562.2,972-990).
gtgttgccttgctaagaca

SEQ ID NO: 770523 - DNA, 19 bp, Mus musculus
  siRNA target sequence for BC023814 (NM_153562.2,1150-1168).
ggactatgcggagagatta

SEQ ID NO: 770524 - DNA, 19 bp, Mus musculus
  siRNA target sequence for BC023814 (NM_153562.2,1153-1171).
ctatgcggagagattacat

SEQ ID NO: 770525 - DNA, 19 bp, Mus musculus
  siRNA target sequence for BC023814 (NM_153562.2,1254-1272).
ggcctggtgtgcaaggaat

SEQ ID NO: 770526 - DNA, 19 bp, Mus musculus
  siRNA target sequence for BC023814 (NM_153562.2,1433-1451).
ccactggtagagacattga

SEQ ID NO: 770527 - DNA, 19 bp, Mus musculus
  siRNA target sequence for BC023814 (NM_153562.2,1459-1477).
ggaccggatgctctatctt

SEQ ID NO: 770528 - DNA, 19 bp, Mus musculus
  siRNA target sequence for 6330569M22Rik (NM_153563.1,436-454).
gtggcccgagccattctct

SEQ ID NO: 770529 - DNA, 19 bp, Mus musculus
  siRNA target sequence for 6330569M22Rik (NM_153563.1,438-456).
ggcccgagccattctctat

SEQ ID NO: 770530 - DNA, 19 bp, Mus musculus
  siRNA target sequence for 6330569M22Rik (NM_153563.1,440-458).
cccgagccattctctatgt

SEQ ID NO: 770531 - DNA, 19 bp, Mus musculus
  siRNA target sequence for 6330569M22Rik (NM_153563.1,507-525).
ctggatgcgctacaacata

SEQ ID NO: 770532 - DNA, 19 bp, Mus musculus
  siRNA target sequence for 6330569M22Rik (NM_153563.1,509-527).
ggatgcgctacaacatatt

SEQ ID NO: 770533 - DNA, 19 bp, Mus musculus
  siRNA target sequence for 6330569M22Rik (NM_153563.1,510-528).
gatgcgctacaacatattt

SEQ ID NO: 770534 - DNA, 19 bp, Mus musculus
  siRNA target sequence for 6330569M22Rik (NM_153563.1,537-555).
ggaggtgggcacgttcaat

SEQ ID NO: 770535 - DNA, 19 bp, Mus musculus
  siRNA target sequence for 6330569M22Rik (NM_153563.1,576-594).
catggaaatagataacagt

SEQ ID NO: 770536 - DNA, 19 bp, Mus musculus
  siRNA target sequence for 6330569M22Rik (NM_153563.1,764-782).
gttcccctctgtacaacaa

SEQ ID NO: 770537 - DNA, 19 bp, Mus musculus
  siRNA target sequence for 6330569M22Rik (NM_153563.1,787-805).
ccatttgccatcatgctat

SEQ ID NO: 770538 - DNA, 19 bp, Mus musculus
  siRNA target sequence for 6330569M22Rik (NM_153563.1,842-860).
cccacttccccatgaagaa

SEQ ID NO: 770539 - DNA, 19 bp, Mus musculus
  siRNA target sequence for 6330569M22Rik (NM_153563.1,843-861).
ccacttccccatgaagaaa

SEQ ID NO: 770540 - DNA, 19 bp, Mus musculus
  siRNA target sequence for 6330569M22Rik (NM_153563.1,846-864).
cttccccatgaagaaagtt

SEQ ID NO: 770541 - DNA, 19 bp, Mus musculus
  siRNA target sequence for 6330569M22Rik (NM_153563.1,874-892).
ctctggaagactgtattgt

SEQ ID NO: 770542 - DNA, 19 bp, Mus musculus
  siRNA target sequence for 6330569M22Rik (NM_153563.1,1065-1083).
ggagcacaaggctctgata

SEQ ID NO: 770543 - DNA, 19 bp, Mus musculus
  siRNA target sequence for 6330569M22Rik (NM_153563.1,1272-1290).
cccttgggctcccaaagtt

SEQ ID NO: 770544 - DNA, 19 bp, Mus musculus
  siRNA target sequence for 6330569M22Rik (NM_153563.1,1273-1291).
ccttgggctcccaaagtta

SEQ ID NO: 770545 - DNA, 19 bp, Mus musculus
  siRNA target sequence for 6330569M22Rik (NM_153563.1,1277-1295).
gggctcccaaagttagaga

SEQ ID NO: 770546 - DNA, 19 bp, Mus musculus
  siRNA target sequence for 6330569M22Rik (NM_153563.1,1388-1406).
ggccaatccacgaaagcat

SEQ ID NO: 770547 - DNA, 19 bp, Mus musculus
  siRNA target sequence for 6330569M22Rik (NM_153563.1,1396-1414).
cacgaaagcatcaagacat

SEQ ID NO: 770548 - DNA, 19 bp, Mus musculus
  siRNA target sequence for 6330569M22Rik (NM_153563.1,1416-1434).
gaaacaacacaagtataca

SEQ ID NO: 770549 - DNA, 19 bp, Mus musculus
  siRNA target sequence for 6330569M22Rik (NM_153563.1,1420-1438).
caacacaagtatacatcaa

SEQ ID NO: 770550 - DNA, 19 bp, Mus musculus
  siRNA target sequence for 6330569M22Rik (NM_153563.1,1458-1476).
gatggaggaggaatacctt

SEQ ID NO: 770551 - DNA, 19 bp, Mus musculus
  siRNA target sequence for 6330569M22Rik (NM_153563.1,1675-1693).
gtactgcagagcatgaagt

SEQ ID NO: 770552 - DNA, 19 bp, Mus musculus
  siRNA target sequence for 6330569M22Rik (NM_153563.1,1759-1777).
ctgctcaagcactttaagt

SEQ ID NO: 770553 - DNA, 19 bp, Mus musculus
  siRNA target sequence for 6330569M22Rik (NM_153563.1,1762-1780).
ctcaagcactttaagttga

SEQ ID NO: 770554 - DNA, 19 bp, Mus musculus
  siRNA target sequence for 6330569M22Rik (NM_153563.1,1895-1913).
gcatttccgtcttggatta

SEQ ID NO: 770555 - DNA, 19 bp, Mus musculus
  siRNA target sequence for 6330569M22Rik (NM_153563.1,2017-2035).
ctgcttcggatcttgaaca

SEQ ID NO: 770556 - DNA, 19 bp, Mus musculus
  siRNA target sequence for 6330569M22Rik (NM_153563.1,2038-2056).
ctaaccaagtggaaacact

SEQ ID NO: 770557 - DNA, 19 bp, Mus musculus
  siRNA target sequence for 6330569M22Rik (NM_153563.1,2189-2207).
ggcgcaagagcaacatgaa

SEQ ID NO: 770558 - DNA, 19 bp, Mus musculus
  siRNA target sequence for 6330569M22Rik (NM_153563.1,2256-2274).
ctgggcgtacggcaatgat

SEQ ID NO: 770559 - DNA, 19 bp, Mus musculus
  siRNA target sequence for 6330569M22Rik (NM_153563.1,2258-2276).
gggcgtacggcaatgatct

SEQ ID NO: 770560 - DNA, 19 bp, Mus musculus
  siRNA target sequence for 6330569M22Rik (NM_153563.1,2259-2277).
ggcgtacggcaatgatctt

SEQ ID NO: 770561 - DNA, 19 bp, Mus musculus
  siRNA target sequence for 6330569M22Rik (NM_153563.1,2261-2279).
cgtacggcaatgatcttga

SEQ ID NO: 770562 - DNA, 19 bp, Mus musculus
  siRNA target sequence for 6330569M22Rik (NM_153563.1,2262-2280).
gtacggcaatgatcttgat

SEQ ID NO: 770563 - DNA, 19 bp, Mus musculus
  siRNA target sequence for 6330569M22Rik (NM_153563.1,2315-2333).
ctctccgtgccaacattga

SEQ ID NO: 770564 - DNA, 19 bp, Mus musculus
  siRNA target sequence for 6330569M22Rik (NM_153563.1,2415-2433).
gggccagcgggtagatctt

SEQ ID NO: 770565 - DNA, 19 bp, Mus musculus
  siRNA target sequence for 6330569M22Rik (NM_153563.1,2470-2488).
gagagggaggtcttctcta

SEQ ID NO: 770566 - DNA, 19 bp, Mus musculus
  siRNA target sequence for 5033405K12Rik (NM_153567.1,330-348).
gaaagtctccggcaagaat

SEQ ID NO: 770567 - DNA, 19 bp, Mus musculus
  siRNA target sequence for 5033405K12Rik (NM_153567.1,369-387).
cgcagctctggttcatctt

SEQ ID NO: 770568 - DNA, 19 bp, Mus musculus
  siRNA target sequence for 5033405K12Rik (NM_153567.1,474-492).
gtacaccctgcccttaata

SEQ ID NO: 770569 - DNA, 19 bp, Mus musculus
  siRNA target sequence for 5033405K12Rik (NM_153567.1,479-497).
ccctgcccttaataggttt

SEQ ID NO: 770570 - DNA, 19 bp, Mus musculus
  siRNA target sequence for 5033405K12Rik (NM_153567.1,480-498).
cctgcccttaataggtttt

SEQ ID NO: 770571 - DNA, 19 bp, Mus musculus
  siRNA target sequence for 5033405K12Rik (NM_153567.1,536-554).
gcagtcgcctcgaaattca

SEQ ID NO: 770572 - DNA, 19 bp, Mus musculus
  siRNA target sequence for 5033405K12Rik (NM_153567.1,669-687).
cagacgagcaatgttaaaa

SEQ ID NO: 770573 - DNA, 19 bp, Mus musculus
  siRNA target sequence for 5033405K12Rik (NM_153567.1,671-689).
gacgagcaatgttaaaaat

SEQ ID NO: 770574 - DNA, 19 bp, Mus musculus
  siRNA target sequence for 5033405K12Rik (NM_153567.1,673-691).
cgagcaatgttaaaaatga

SEQ ID NO: 770575 - DNA, 19 bp, Mus musculus
  siRNA target sequence for 5033405K12Rik (NM_153567.1,763-781).
gtagaagtgactccaattt

SEQ ID NO: 770576 - DNA, 19 bp, Mus musculus
  siRNA target sequence for 5033405K12Rik (NM_153567.1,766-784).
gaagtgactccaattttca

SEQ ID NO: 770577 - DNA, 19 bp, Mus musculus
  siRNA target sequence for 5033405K12Rik (NM_153567.1,881-899).
gttgcttccaacttcatct

SEQ ID NO: 770578 - DNA, 19 bp, Mus musculus
  siRNA target sequence for 5033405K12Rik (NM_153567.1,969-987).
ccagtgaaagcgtttagta

SEQ ID NO: 770579 - DNA, 19 bp, Mus musculus
  siRNA target sequence for 5033405K12Rik (NM_153567.1,970-988).
cagtgaaagcgtttagtaa

SEQ ID NO: 770580 - DNA, 19 bp, Mus musculus
  siRNA target sequence for 5033405K12Rik (NM_153567.1,974-992).
gaaagcgtttagtaaccat

SEQ ID NO: 770581 - DNA, 19 bp, Mus musculus
  siRNA target sequence for 5033405K12Rik (NM_153567.1,1195-1213).
ctcgcagcaagcttgtaca

SEQ ID NO: 770582 - DNA, 19 bp, Mus musculus
  siRNA target sequence for 5033405K12Rik (NM_153567.1,1212-1230).
cagcctgttcgaagatcat

SEQ ID NO: 770583 - DNA, 19 bp, Mus musculus
  siRNA target sequence for 5033405K12Rik (NM_153567.1,1236-1254).
gctcctaaaagttatggta

SEQ ID NO: 770584 - DNA, 19 bp, Mus musculus
  siRNA target sequence for BC031901 (NM_153568.1,43-61).
gacttctacgtcagagtta

SEQ ID NO: 770585 - DNA, 19 bp, Mus musculus
  siRNA target sequence for BC031901 (NM_153568.1,51-69).
cgtcagagttactatccta

SEQ ID NO: 770586 - DNA, 19 bp, Mus musculus
  siRNA target sequence for BC031901 (NM_153568.1,154-172).
ggggaccttctggtaaact

SEQ ID NO: 770587 - DNA, 19 bp, Mus musculus
  siRNA target sequence for BC031901 (NM_153568.1,163-181).
ctggtaaactggtcttcta

SEQ ID NO: 770588 - DNA, 19 bp, Mus musculus
  siRNA target sequence for BC031901 (NM_153568.1,205-223).
gacgccatggatagaagtt

SEQ ID NO: 770589 - DNA, 19 bp, Mus musculus
  siRNA target sequence for BC031901 (NM_153568.1,259-277).
caaaaagaacggcacataa

SEQ ID NO: 770590 - DNA, 19 bp, Mus musculus
  siRNA target sequence for BC031901 (NM_153568.1,293-311).
ctcaccatcgcatatcgaa

SEQ ID NO: 770591 - DNA, 19 bp, Mus musculus
  siRNA target sequence for BC031901 (NM_153568.1,298-316).
catcgcatatcgaaagtga

SEQ ID NO: 770592 - DNA, 19 bp, Mus musculus
  siRNA target sequence for BC031901 (NM_153568.1,321-339).
cgaccctctggcgcattta

SEQ ID NO: 770593 - DNA, 19 bp, Mus musculus
  siRNA target sequence for BC031901 (NM_153568.1,549-567).
gtcattcaacaggatagtt

SEQ ID NO: 770594 - DNA, 19 bp, Mus musculus
  siRNA target sequence for BC031901 (NM_153568.1,551-569).
cattcaacaggatagttca

SEQ ID NO: 770595 - DNA, 19 bp, Mus musculus
  siRNA target sequence for BC031901 (NM_153568.1,568-586).
cacattgggctgtctgatt

SEQ ID NO: 770596 - DNA, 19 bp, Mus musculus
  siRNA target sequence for BC031901 (NM_153568.1,603-621).
gctggaaagcatctattta

SEQ ID NO: 770597 - DNA, 19 bp, Mus musculus
  siRNA target sequence for BC031901 (NM_153568.1,660-678).
caaagggctcaaaaaatta

SEQ ID NO: 770598 - DNA, 19 bp, Mus musculus
  siRNA target sequence for BC031901 (NM_153568.1,727-745).
gtgaccattgctctagaat

SEQ ID NO: 770599 - DNA, 19 bp, Mus musculus
  siRNA target sequence for BC031901 (NM_153568.1,777-795).
ccagtggcagtgtagtgaa

SEQ ID NO: 770600 - DNA, 19 bp, Mus musculus
  siRNA target sequence for BC031901 (NM_153568.1,778-796).
cagtggcagtgtagtgaaa

SEQ ID NO: 770601 - DNA, 19 bp, Mus musculus
  siRNA target sequence for BC031901 (NM_153568.1,783-801).
gcagtgtagtgaaagcaat

SEQ ID NO: 770602 - DNA, 19 bp, Mus musculus
  siRNA target sequence for BC031901 (NM_153568.1,788-806).
gtagtgaaagcaatgtcaa

SEQ ID NO: 770603 - DNA, 19 bp, Mus musculus
  siRNA target sequence for BC031901 (NM_153568.1,1088-1106).
gagattctcaggatgaaca

SEQ ID NO: 770604 - DNA, 19 bp, Mus musculus
  siRNA target sequence for BC031901 (NM_153568.1,1234-1252).
caacagagatgctcgaata

SEQ ID NO: 770605 - DNA, 19 bp, Mus musculus
  siRNA target sequence for BC031901 (NM_153568.1,1237-1255).
cagagatgctcgaataaaa

SEQ ID NO: 770606 - DNA, 19 bp, Mus musculus
  siRNA target sequence for BC031901 (NM_153568.1,1265-1283).
cagataatgcctactcaaa

SEQ ID NO: 770607 - DNA, 19 bp, Mus musculus
  siRNA target sequence for BC031901 (NM_153568.1,1289-1307).
gcttccatggcgacattga

SEQ ID NO: 770608 - DNA, 19 bp, Mus musculus
  siRNA target sequence for BC031901 (NM_153568.1,1290-1308).
cttccatggcgacattgaa

SEQ ID NO: 770609 - DNA, 19 bp, Mus musculus
  siRNA target sequence for BC031901 (NM_153568.1,1326-1344).
gtaccaagggacagatcta

SEQ ID NO: 770610 - DNA, 19 bp, Mus musculus
  siRNA target sequence for BC031901 (NM_153568.1,1491-1509).
caaggacagcaatgaatca

SEQ ID NO: 770611 - DNA, 19 bp, Mus musculus
  siRNA target sequence for BC031901 (NM_153568.1,1606-1624).
gtgcagcatcaccatgatt

SEQ ID NO: 770612 - DNA, 19 bp, Mus musculus
  siRNA target sequence for BC031901 (NM_153568.1,1608-1626).
gcagcatcaccatgatttt

SEQ ID NO: 770613 - DNA, 19 bp, Mus musculus
  siRNA target sequence for BC031901 (NM_153568.1,1630-1648).
gaagaagcacattatgaca

SEQ ID NO: 770614 - DNA, 19 bp, Mus musculus
  siRNA target sequence for BC031901 (NM_153568.1,1667-1685).
ctctcattgacgatgtgat

SEQ ID NO: 770615 - DNA, 19 bp, Mus musculus
  siRNA target sequence for BC031901 (NM_153568.1,1703-1721).
ctggccctctgggaacttt

SEQ ID NO: 770616 - DNA, 19 bp, Mus musculus
  siRNA target sequence for BC031901 (NM_153568.1,1772-1790).
gagatgttgtggcttcttt

SEQ ID NO: 770617 - DNA, 19 bp, Mus musculus
  siRNA target sequence for BC031901 (NM_153568.1,1774-1792).
gatgttgtggcttctttct

SEQ ID NO: 770618 - DNA, 19 bp, Mus musculus
  siRNA target sequence for BC031901 (NM_153568.1,1824-1842).
ggctgaggggagtatggaa

SEQ ID NO: 770619 - DNA, 19 bp, Mus musculus
  siRNA target sequence for BC031901 (NM_153568.1,1989-2007).
cagcgaggtcctacacaat

SEQ ID NO: 770620 - DNA, 19 bp, Mus musculus
  siRNA target sequence for BC031901 (NM_153568.1,1991-2009).
gcgaggtcctacacaatga

SEQ ID NO: 770621 - DNA, 19 bp, Mus musculus
  siRNA target sequence for BC031901 (NM_153568.1,2033-2051).
ggggcagtggccattatgt

SEQ ID NO: 770622 - DNA, 19 bp, Mus musculus
  siRNA target sequence for BC031901 (NM_153568.1,2090-2108).
cttttgaccctcattatga

SEQ ID NO: 770623 - DNA, 19 bp, Mus musculus
  siRNA target sequence for BC031901 (NM_153568.1,2135-2153).
ccgacgagggttctttgtt

SEQ ID NO: 770624 - DNA, 19 bp, Mus musculus
  siRNA target sequence for BC031901 (NM_153568.1,2136-2154).
cgacgagggttctttgttt

SEQ ID NO: 770625 - DNA, 19 bp, Mus musculus
  siRNA target sequence for BC031901 (NM_153568.1,2301-2319).
cctcacatcgcaaaggatt

SEQ ID NO: 770626 - DNA, 19 bp, Mus musculus
  siRNA target sequence for BC031901 (NM_153568.1,2421-2439).
ccttgaccctgagaataga

SEQ ID NO: 770627 - DNA, 19 bp, Mus musculus
  siRNA target sequence for BC031901 (NM_153568.1,2422-2440).
cttgaccctgagaatagat

SEQ ID NO: 770628 - DNA, 19 bp, Mus musculus
  siRNA target sequence for BC031901 (NM_153568.1,2425-2443).
gaccctgagaatagatcaa

SEQ ID NO: 770629 - DNA, 19 bp, Mus musculus
  siRNA target sequence for BC031901 (NM_153568.1,2450-2468).
cccaactcccaggacataa

SEQ ID NO: 770630 - DNA, 19 bp, Mus musculus
  siRNA target sequence for BC031901 (NM_153568.1,2452-2470).
caactcccaggacataagt

SEQ ID NO: 770631 - DNA, 19 bp, Mus musculus
  siRNA target sequence for BC031901 (NM_153568.1,2455-2473).
ctcccaggacataagttat

SEQ ID NO: 770632 - DNA, 19 bp, Mus musculus
  siRNA target sequence for BC031901 (NM_153568.1,2457-2475).
cccaggacataagttatca

SEQ ID NO: 770633 - DNA, 19 bp, Mus musculus
  siRNA target sequence for BC031901 (NM_153568.1,2459-2477).
caggacataagttatcaca

SEQ ID NO: 770634 - DNA, 19 bp, Mus musculus
  siRNA target sequence for BC031901 (NM_153568.1,2553-2571).
cctggaatccccaaatgta

SEQ ID NO: 770635 - DNA, 19 bp, Mus musculus
  siRNA target sequence for BC031901 (NM_153568.1,2562-2580).
cccaaatgtagatagttca

SEQ ID NO: 770636 - DNA, 19 bp, Mus musculus
  siRNA target sequence for BC031901 (NM_153568.1,2623-2641).
gatcgtgcccgcaagagaa

SEQ ID NO: 770637 - DNA, 19 bp, Mus musculus
  siRNA target sequence for AI326906 (NM_153570.2,287-305).
cagggagccacatacaaat

SEQ ID NO: 770638 - DNA, 19 bp, Mus musculus
  siRNA target sequence for AI326906 (NM_153570.2,291-309).
gagccacatacaaatacaa

SEQ ID NO: 770639 - DNA, 19 bp, Mus musculus
  siRNA target sequence for AI326906 (NM_153570.2,396-414).
ccctcaagacactcatgaa

SEQ ID NO: 770640 - DNA, 19 bp, Mus musculus
  siRNA target sequence for AI326906 (NM_153570.2,400-418).
caagacactcatgaagttt

SEQ ID NO: 770641 - DNA, 19 bp, Mus musculus
  siRNA target sequence for AI326906 (NM_153570.2,539-557).
ctgcttatctcccatttct

SEQ ID NO: 770642 - DNA, 19 bp, Mus musculus
  siRNA target sequence for AI326906 (NM_153570.2,556-574).
ctgtgagtacttggaatat

SEQ ID NO: 770643 - DNA, 19 bp, Mus musculus
  siRNA target sequence for AI326906 (NM_153570.2,762-780).
ggaaggtcgttcacttgaa

SEQ ID NO: 770644 - DNA, 19 bp, Mus musculus
  siRNA target sequence for AI326906 (NM_153570.2,965-983).
gccttgaacgggcttttca

SEQ ID NO: 770645 - DNA, 19 bp, Mus musculus
  siRNA target sequence for AI326906 (NM_153570.2,975-993).
ggcttttcatcctaatcca

SEQ ID NO: 770646 - DNA, 19 bp, Mus musculus
  siRNA target sequence for AI326906 (NM_153570.2,976-994).
gcttttcatcctaatccat

SEQ ID NO: 770647 - DNA, 19 bp, Mus musculus
  siRNA target sequence for AI326906 (NM_153570.2,1053-1071).
ccatctttcatgtcaagta

SEQ ID NO: 770648 - DNA, 19 bp, Mus musculus
  siRNA target sequence for AI326906 (NM_153570.2,1182-1200).
ctcctgaggccctacttat

SEQ ID NO: 770649 - DNA, 19 bp, Mus musculus
  siRNA target sequence for AI326906 (NM_153570.2,1185-1203).
ctgaggccctacttatggt

SEQ ID NO: 770650 - DNA, 19 bp, Mus musculus
  siRNA target sequence for AI326906 (NM_153570.2,1196-1214).
cttatggtcctgcctttaa

SEQ ID NO: 770651 - DNA, 19 bp, Mus musculus
  siRNA target sequence for AI326906 (NM_153570.2,1239-1257).
ctgcctgccgagttatggt

SEQ ID NO: 770652 - DNA, 19 bp, Mus musculus
  siRNA target sequence for AI326906 (NM_153570.2,1445-1463).
gcgccactcctggaactta

SEQ ID NO: 770653 - DNA, 19 bp, Mus musculus
  siRNA target sequence for BC024561 (NM_153576.1,238-256).
ggaaggtggccaagaatgt

SEQ ID NO: 770654 - DNA, 19 bp, Mus musculus
  siRNA target sequence for BC024561 (NM_153576.1,242-260).
ggtggccaagaatgtgaat

SEQ ID NO: 770655 - DNA, 19 bp, Mus musculus
  siRNA target sequence for BC024561 (NM_153576.1,255-273).
gtgaatgcaaagattggtt

SEQ ID NO: 770656 - DNA, 19 bp, Mus musculus
  siRNA target sequence for BC024561 (NM_153576.1,417-435).
cagcaatttctcaaacgat

SEQ ID NO: 770657 - DNA, 19 bp, Mus musculus
  siRNA target sequence for BC024561 (NM_153576.1,448-466).
gctttgcgctgcccttata

SEQ ID NO: 770658 - DNA, 19 bp, Mus musculus
  siRNA target sequence for AI428936 (NM_153577.1,144-162).
cacctcttggccgtgaatt

SEQ ID NO: 770659 - DNA, 19 bp, Mus musculus
  siRNA target sequence for AI428936 (NM_153577.1,164-182).
ccgccagagcctgtgaatt

SEQ ID NO: 770660 - DNA, 19 bp, Mus musculus
  siRNA target sequence for AI428936 (NM_153577.1,406-424).
ctctggtttggaagtacta

SEQ ID NO: 770661 - DNA, 19 bp, Mus musculus
  siRNA target sequence for AI428936 (NM_153577.1,434-452).
caggacagtctacatcttt

SEQ ID NO: 770662 - DNA, 19 bp, Mus musculus
  siRNA target sequence for AI428936 (NM_153577.1,570-588).
ctgagcgcgtggatgcatt

SEQ ID NO: 770663 - DNA, 19 bp, Mus musculus
  siRNA target sequence for AI428936 (NM_153577.1,574-592).
gcgcgtggatgcattgctt

SEQ ID NO: 770664 - DNA, 19 bp, Mus musculus
  siRNA target sequence for AI428936 (NM_153577.1,707-725).
ctgcaggcccagttgatca

SEQ ID NO: 770665 - DNA, 19 bp, Mus musculus
  siRNA target sequence for AI428936 (NM_153577.1,893-911).
gggccctcagggcaaaaga

SEQ ID NO: 770666 - DNA, 19 bp, Mus musculus
  siRNA target sequence for AI428936 (NM_153577.1,1004-1022).
cttggccaccggaaacatt

SEQ ID NO: 770667 - DNA, 19 bp, Mus musculus
  siRNA target sequence for AI428936 (NM_153577.1,1254-1272).
cctacctggtgctcagtta

SEQ ID NO: 770668 - DNA, 19 bp, Mus musculus
  siRNA target sequence for AI428936 (NM_153577.1,1259-1277).
ctggtgctcagttatgtca

SEQ ID NO: 770669 - DNA, 19 bp, Mus musculus
  siRNA target sequence for A830014A18Rik (NM_153578.1,141-159).
ggcattgtgcgcgctaaaa

SEQ ID NO: 770670 - DNA, 19 bp, Mus musculus
  siRNA target sequence for A830014A18Rik (NM_153578.1,162-180).
cgaggtacttcctacctaa

SEQ ID NO: 770671 - DNA, 19 bp, Mus musculus
  siRNA target sequence for A830014A18Rik (NM_153578.1,166-184).
gtacttcctacctaacaga

SEQ ID NO: 770672 - DNA, 19 bp, Mus musculus
  siRNA target sequence for A830014A18Rik (NM_153578.1,191-209).
gtggtgggctggcacaatt

SEQ ID NO: 770673 - DNA, 19 bp, Mus musculus
  siRNA target sequence for A830014A18Rik (NM_153578.1,196-214).
gggctggcacaattgcaat

SEQ ID NO: 770674 - DNA, 19 bp, Mus musculus
  siRNA target sequence for A830014A18Rik (NM_153578.1,216-234).
gctgtcggccagattggaa

SEQ ID NO: 770675 - DNA, 19 bp, Mus musculus
  siRNA target sequence for A830014A18Rik (NM_153578.1,217-235).
ctgtcggccagattggaaa

SEQ ID NO: 770676 - DNA, 19 bp, Mus musculus
  siRNA target sequence for A830014A18Rik (NM_153578.1,221-239).
cggccagattggaaacttt

SEQ ID NO: 770677 - DNA, 19 bp, Mus musculus
  siRNA target sequence for A830014A18Rik (NM_153578.1,294-312).
gtaccgtttgggtccattt

SEQ ID NO: 770678 - DNA, 19 bp, Mus musculus
  siRNA target sequence for A830014A18Rik (NM_153578.1,299-317).
gtttgggtccattttagct

SEQ ID NO: 770679 - DNA, 19 bp, Mus musculus
  siRNA target sequence for A830014A18Rik (NM_153578.1,304-322).
ggtccattttagcttctta

SEQ ID NO: 770680 - DNA, 19 bp, Mus musculus
  siRNA target sequence for A830014A18Rik (NM_153578.1,308-326).
cattttagcttcttacctt

SEQ ID NO: 770681 - DNA, 19 bp, Mus musculus
  siRNA target sequence for A830014A18Rik (NM_153578.1,382-400).
gttctgtcgtgctgatcat

SEQ ID NO: 770682 - DNA, 19 bp, Mus musculus
  siRNA target sequence for A830014A18Rik (NM_153578.1,387-405).
gtcgtgctgatcatccatt

SEQ ID NO: 770683 - DNA, 19 bp, Mus musculus
  siRNA target sequence for AI854876 (NM_153580.1,185-203).
cgacttctgcagtatgaga

SEQ ID NO: 770684 - DNA, 19 bp, Mus musculus
  siRNA target sequence for AI854876 (NM_153580.1,234-252).
ccaccgcatcttcagataa

SEQ ID NO: 770685 - DNA, 19 bp, Mus musculus
  siRNA target sequence for AI854876 (NM_153580.1,263-281).
gaggggacacccaagttgt

SEQ ID NO: 770686 - DNA, 19 bp, Mus musculus
  siRNA target sequence for AI854876 (NM_153580.1,512-530).
cgcctaccccggaaactca

SEQ ID NO: 770687 - DNA, 19 bp, Mus musculus
  siRNA target sequence for AI854876 (NM_153580.1,513-531).
gcctaccccggaaactcaa

SEQ ID NO: 770688 - DNA, 19 bp, Mus musculus
  siRNA target sequence for AI854876 (NM_153580.1,518-536).
ccccggaaactcaagatgt

SEQ ID NO: 770689 - DNA, 19 bp, Mus musculus
  siRNA target sequence for Autl4 (NM_153583.8,325-343).
ggcagctctcggttcatct

SEQ ID NO: 770690 - DNA, 19 bp, Mus musculus
  siRNA target sequence for Autl4 (NM_153583.8,367-385).
cgaggtggacaagttcaaa

SEQ ID NO: 770691 - DNA, 19 bp, Mus musculus
  siRNA target sequence for Autl4 (NM_153583.8,418-436).
gtatggttgggcagttaaa

SEQ ID NO: 770692 - DNA, 19 bp, Mus musculus
  siRNA target sequence for Autl4 (NM_153583.8,480-498).
ggcgatgctaccatttcga

SEQ ID NO: 770693 - DNA, 19 bp, Mus musculus
  siRNA target sequence for Autl4 (NM_153583.8,509-527).
gacatccagcggtttcaaa

SEQ ID NO: 770694 - DNA, 19 bp, Mus musculus
  siRNA target sequence for Autl4 (NM_153583.8,606-624).
gtggctggggatgtatgtt

SEQ ID NO: 770695 - DNA, 19 bp, Mus musculus
  siRNA target sequence for Autl4 (NM_153583.8,1064-1082).
cctacagcggagtggaaat

SEQ ID NO: 770696 - DNA, 19 bp, Mus musculus
  siRNA target sequence for Autl4 (NM_153583.8,1363-1381).
ctgtaccgtggggttctat

SEQ ID NO: 770697 - DNA, 19 bp, Mus musculus
  siRNA target sequence for Autl4 (NM_153583.8,1454-1472).
gaacggtaccccatgttca

SEQ ID NO: 770698 - DNA, 19 bp, Mus musculus
  siRNA target sequence for Autl4 (NM_153583.8,1554-1572).
gcacaggacgactactcaa

SEQ ID NO: 770699 - DNA, 19 bp, Mus musculus
  siRNA target sequence for BC031353 (NM_153584.1,313-331).
ggaacggccagacatgaat

SEQ ID NO: 770700 - DNA, 19 bp, Mus musculus
  siRNA target sequence for BC031353 (NM_153584.1,595-613).
gctgtcagatcatttgtgt

SEQ ID NO: 770701 - DNA, 19 bp, Mus musculus
  siRNA target sequence for BC031353 (NM_153584.1,653-671).
gtgctattccacgaaacat

SEQ ID NO: 770702 - DNA, 19 bp, Mus musculus
  siRNA target sequence for BC031353 (NM_153584.1,656-674).
ctattccacgaaacattct

SEQ ID NO: 770703 - DNA, 19 bp, Mus musculus
  siRNA target sequence for BC031353 (NM_153584.1,661-679).
ccacgaaacattctttaca

SEQ ID NO: 770704 - DNA, 19 bp, Mus musculus
  siRNA target sequence for BC031353 (NM_153584.1,664-682).
cgaaacattctttacagaa

SEQ ID NO: 770705 - DNA, 19 bp, Mus musculus
  siRNA target sequence for BC031353 (NM_153584.1,725-743).
ctccaactgagcatgtgtt

SEQ ID NO: 770706 - DNA, 19 bp, Mus musculus
  siRNA target sequence for BC031353 (NM_153584.1,750-768).
ccccaatgtctctcacaat

SEQ ID NO: 770707 - DNA, 19 bp, Mus musculus
  siRNA target sequence for BC031353 (NM_153584.1,808-826).
gctcattatccggttttga

SEQ ID NO: 770708 - DNA, 19 bp, Mus musculus
  siRNA target sequence for BC031353 (NM_153584.1,817-835).
ccggttttgacctgtagta

SEQ ID NO: 770709 - DNA, 19 bp, Mus musculus
  siRNA target sequence for BC031353 (NM_153584.1,819-837).
ggttttgacctgtagtatt

SEQ ID NO: 770710 - DNA, 19 bp, Mus musculus
  siRNA target sequence for BC031353 (NM_153584.1,842-860).
ctaacattggtctgtatga

SEQ ID NO: 770711 - DNA, 19 bp, Mus musculus
  siRNA target sequence for BC031353 (NM_153584.1,1020-1038).
gtacactgcagccattaga

SEQ ID NO: 770712 - DNA, 19 bp, Mus musculus
  siRNA target sequence for BC031353 (NM_153584.1,1023-1041).
cactgcagccattagaaat

SEQ ID NO: 770713 - DNA, 19 bp, Mus musculus
  siRNA target sequence for BC031353 (NM_153584.1,1146-1164).
gtcagtgagaacgttcaaa

SEQ ID NO: 770714 - DNA, 19 bp, Mus musculus
  siRNA target sequence for BC031353 (NM_153584.1,1257-1275).
ggatcgacaagaagtcatt

SEQ ID NO: 770715 - DNA, 19 bp, Mus musculus
  siRNA target sequence for BC031353 (NM_153584.1,1280-1298).
ggattgctcagcacttgat

SEQ ID NO: 770716 - DNA, 19 bp, Mus musculus
  siRNA target sequence for BC031353 (NM_153584.1,1348-1366).
caggagtccacgtcactta

SEQ ID NO: 770717 - DNA, 19 bp, Mus musculus
  siRNA target sequence for BC031353 (NM_153584.1,1359-1377).
gtcacttagcccaaagctt

SEQ ID NO: 770718 - DNA, 19 bp, Mus musculus
  siRNA target sequence for BC031353 (NM_153584.1,1399-1417).
gggtgtgtgaggagatata

SEQ ID NO: 770719 - DNA, 19 bp, Mus musculus
  siRNA target sequence for BC031353 (NM_153584.1,1400-1418).
ggtgtgtgaggagatataa

SEQ ID NO: 770720 - DNA, 19 bp, Mus musculus
  siRNA target sequence for BC031353 (NM_153584.1,1401-1419).
gtgtgtgaggagatataaa

SEQ ID NO: 770721 - DNA, 19 bp, Mus musculus
  siRNA target sequence for BC031353 (NM_153584.1,1622-1640).
cacagcacctagaacacat

SEQ ID NO: 770722 - DNA, 19 bp, Mus musculus
  siRNA target sequence for BC031353 (NM_153584.1,1641-1659).
cgaccccgcagctcacatt

SEQ ID NO: 770723 - DNA, 19 bp, Mus musculus
  siRNA target sequence for BC031353 (NM_153584.1,1710-1728).
gttcaggagttcatttgat

SEQ ID NO: 770724 - DNA, 19 bp, Mus musculus
  siRNA target sequence for BC031353 (NM_153584.1,1715-1733).
ggagttcatttgatgacaa

SEQ ID NO: 770725 - DNA, 19 bp, Mus musculus
  siRNA target sequence for BC031353 (NM_153584.1,1716-1734).
gagttcatttgatgacaaa

SEQ ID NO: 770726 - DNA, 19 bp, Mus musculus
  siRNA target sequence for BC031353 (NM_153584.1,1726-1744).
gatgacaaaaccttgttga

SEQ ID NO: 770727 - DNA, 19 bp, Mus musculus
  siRNA target sequence for BC031353 (NM_153584.1,1729-1747).
gacaaaaccttgttgaaga

SEQ ID NO: 770728 - DNA, 19 bp, Mus musculus
  siRNA target sequence for BC031353 (NM_153584.1,1841-1859).
gcttgcgatctttcaaata

SEQ ID NO: 770729 - DNA, 19 bp, Mus musculus
  siRNA target sequence for BC031353 (NM_153584.1,1881-1899).
gaaacctgaagtaagaact

SEQ ID NO: 770730 - DNA, 19 bp, Mus musculus
  siRNA target sequence for BC031353 (NM_153584.1,1956-1974).
caaggctgctggcttacta

SEQ ID NO: 770731 - DNA, 19 bp, Mus musculus
  siRNA target sequence for BC031353 (NM_153584.1,2020-2038).
gttagcagattggaaagta

SEQ ID NO: 770732 - DNA, 19 bp, Mus musculus
  siRNA target sequence for BC031353 (NM_153584.1,2036-2054).
gtacatcttgtaaattaca

SEQ ID NO: 770733 - DNA, 19 bp, Mus musculus
  siRNA target sequence for BC031353 (NM_153584.1,2042-2060).
cttgtaaattacaacttaa

SEQ ID NO: 770734 - DNA, 19 bp, Mus musculus
  siRNA target sequence for BC031353 (NM_153584.1,2045-2063).
gtaaattacaacttaagga

SEQ ID NO: 770735 - DNA, 19 bp, Mus musculus
  siRNA target sequence for BC031353 (NM_153584.1,2075-2093).
gccatgaaactgagaaaca

SEQ ID NO: 770736 - DNA, 19 bp, Mus musculus
  siRNA target sequence for BC031353 (NM_153584.1,2086-2104).
gagaaacagtgtttgcatt

SEQ ID NO: 770737 - DNA, 19 bp, Mus musculus
  siRNA target sequence for BC031353 (NM_153584.1,2109-2127).
cagtattgacaaacagatt

SEQ ID NO: 770738 - DNA, 19 bp, Mus musculus
  siRNA target sequence for BC031353 (NM_153584.1,2188-2206).
ctccagtgtgatgattcaa

SEQ ID NO: 770739 - DNA, 19 bp, Mus musculus
  siRNA target sequence for BC031353 (NM_153584.1,2190-2208).
ccagtgtgatgattcaaaa

SEQ ID NO: 770740 - DNA, 19 bp, Mus musculus
  siRNA target sequence for BC031353 (NM_153584.1,2209-2227).
ggtattgactcaaaactaa

SEQ ID NO: 770741 - DNA, 19 bp, Mus musculus
  siRNA target sequence for BC031353 (NM_153584.1,2248-2266).
cctgacagtttgaacaaga

SEQ ID NO: 770742 - DNA, 19 bp, Mus musculus
  siRNA target sequence for BC031353 (NM_153584.1,2365-2383).
ggtcccggaagcactgtat

SEQ ID NO: 770743 - DNA, 19 bp, Mus musculus
  siRNA target sequence for BC031353 (NM_153584.1,2380-2398).
gtatcagaccgactcaaaa

SEQ ID NO: 770744 - DNA, 19 bp, Mus musculus
  siRNA target sequence for BC031353 (NM_153584.1,2384-2402).
cagaccgactcaaaactga

SEQ ID NO: 770745 - DNA, 19 bp, Mus musculus
  siRNA target sequence for BC031353 (NM_153584.1,2493-2511).
gttgaggactacactgaaa

SEQ ID NO: 770746 - DNA, 19 bp, Mus musculus
  siRNA target sequence for BC031353 (NM_153584.1,2496-2514).
gaggactacactgaaacat

SEQ ID NO: 770747 - DNA, 19 bp, Mus musculus
  siRNA target sequence for BC031353 (NM_153584.1,2499-2517).
gactacactgaaacattca

SEQ ID NO: 770748 - DNA, 19 bp, Mus musculus
  siRNA target sequence for BC031353 (NM_153584.1,2521-2539).
gtctggaggaaacataatt

SEQ ID NO: 770749 - DNA, 19 bp, Mus musculus
  siRNA target sequence for BC031353 (NM_153584.1,2526-2544).
gaggaaacataattttcat

SEQ ID NO: 770750 - DNA, 19 bp, Mus musculus
  siRNA target sequence for BC031353 (NM_153584.1,2631-2649).
gtcaggctgctttgatcta

SEQ ID NO: 770751 - DNA, 19 bp, Mus musculus
  siRNA target sequence for BC031353 (NM_153584.1,2696-2714).
ggccatgcctgaatattga

SEQ ID NO: 770752 - DNA, 19 bp, Mus musculus
  siRNA target sequence for BC031353 (NM_153584.1,2719-2737).
gacccagatgttcatgaaa

SEQ ID NO: 770753 - DNA, 19 bp, Mus musculus
  siRNA target sequence for BC031353 (NM_153584.1,2765-2783).
caatcacaagtcttagtct

SEQ ID NO: 770754 - DNA, 19 bp, Mus musculus
  siRNA target sequence for BC031353 (NM_153584.1,2774-2792).
gtcttagtctcctaggaaa

SEQ ID NO: 770755 - DNA, 19 bp, Mus musculus
  siRNA target sequence for BC031353 (NM_153584.1,2905-2923).
gtggaagtgtcgttctaca

SEQ ID NO: 770756 - DNA, 19 bp, Mus musculus
  siRNA target sequence for BC031353 (NM_153584.1,2911-2929).
gtgtcgttctacagtgttt

SEQ ID NO: 770757 - DNA, 19 bp, Mus musculus
  siRNA target sequence for BC031353 (NM_153584.1,2922-2940).
cagtgtttccgatgataat

SEQ ID NO: 770758 - DNA, 19 bp, Mus musculus
  siRNA target sequence for BC031353 (NM_153584.1,2949-2967).
gccttacatgggtgtgatt

SEQ ID NO: 770759 - DNA, 19 bp, Mus musculus
  siRNA target sequence for BC031353 (NM_153584.1,2950-2968).
ccttacatgggtgtgatta

SEQ ID NO: 770760 - DNA, 19 bp, Mus musculus
  siRNA target sequence for BC031353 (NM_153584.1,2969-2987).
ctttagagtcccttggtaa

SEQ ID NO: 770761 - DNA, 19 bp, Mus musculus
  siRNA target sequence for BC031353 (NM_153584.1,3128-3146).
cgttctcagttcctgttaa

SEQ ID NO: 770762 - DNA, 19 bp, Mus musculus
  siRNA target sequence for BC031353 (NM_153584.1,3129-3147).
gttctcagttcctgttaaa

SEQ ID NO: 770763 - DNA, 19 bp, Mus musculus
  siRNA target sequence for BC031353 (NM_153584.1,3186-3204).
gcacacggcacagttacta

SEQ ID NO: 770764 - DNA, 19 bp, Mus musculus
  siRNA target sequence for BC031353 (NM_153584.1,3222-3240).
gaggttccagagttctaaa

SEQ ID NO: 770765 - DNA, 19 bp, Mus musculus
  siRNA target sequence for BC031353 (NM_153584.1,3249-3267).
gatctacctccatagagat

SEQ ID NO: 770766 - DNA, 19 bp, Mus musculus
  siRNA target sequence for BC031353 (NM_153584.1,3308-3326).
gcggtgctgcgtatgaact

SEQ ID NO: 770767 - DNA, 19 bp, Mus musculus
  siRNA target sequence for BC031353 (NM_153584.1,3311-3329).
gtgctgcgtatgaactcaa

SEQ ID NO: 770768 - DNA, 19 bp, Mus musculus
  siRNA target sequence for BC031353 (NM_153584.1,3317-3335).
cgtatgaactcaaatccta

SEQ ID NO: 770769 - DNA, 19 bp, Mus musculus
  siRNA target sequence for BC031353 (NM_153584.1,3345-3363).
gccaacaaaccctcagttt

SEQ ID NO: 770770 - DNA, 19 bp, Mus musculus
  siRNA target sequence for 2600001P13Rik (NM_153585.3,178-196).
gaaggggcaggccaatcat

SEQ ID NO: 770771 - DNA, 19 bp, Mus musculus
  siRNA target sequence for 2600001P13Rik (NM_153585.3,243-261).
ggccttcacgtctggaaat

SEQ ID NO: 770772 - DNA, 19 bp, Mus musculus
  siRNA target sequence for 2600001P13Rik (NM_153585.3,249-267).
cacgtctggaaattatgat

SEQ ID NO: 770773 - DNA, 19 bp, Mus musculus
  siRNA target sequence for 2600001P13Rik (NM_153585.3,286-304).
gcctgtctccaagatataa

SEQ ID NO: 770774 - DNA, 19 bp, Mus musculus
  siRNA target sequence for 2600001P13Rik (NM_153585.3,294-312).
ccaagatataaacaaagat

SEQ ID NO: 770775 - DNA, 19 bp, Mus musculus
  siRNA target sequence for 2600001P13Rik (NM_153585.3,392-410).
cacttaaccagctgaagaa

SEQ ID NO: 770776 - DNA, 19 bp, Mus musculus
  siRNA target sequence for 2600001P13Rik (NM_153585.3,443-461).
ggttagacgatgttgagaa

SEQ ID NO: 770777 - DNA, 19 bp, Mus musculus
  siRNA target sequence for 2600001P13Rik (NM_153585.3,464-482).
gcatgctgtattataacca

SEQ ID NO: 770778 - DNA, 19 bp, Mus musculus
  siRNA target sequence for 2600001P13Rik (NM_153585.3,483-501).
ggctgtcattctctatcat

SEQ ID NO: 770779 - DNA, 19 bp, Mus musculus
  siRNA target sequence for 2600001P13Rik (NM_153585.3,510-528).
gtacacggaggccatatct

SEQ ID NO: 770780 - DNA, 19 bp, Mus musculus
  siRNA target sequence for 2600001P13Rik (NM_153585.3,549-567).
gttcatagaacctttcgaa

SEQ ID NO: 770781 - DNA, 19 bp, Mus musculus
  siRNA target sequence for 2600001P13Rik (NM_153585.3,577-595).
gcccaagcggtgtgctttt

SEQ ID NO: 770782 - DNA, 19 bp, Mus musculus
  siRNA target sequence for 2600001P13Rik (NM_153585.3,578-596).
cccaagcggtgtgcttttt

SEQ ID NO: 770783 - DNA, 19 bp, Mus musculus
  siRNA target sequence for 2600001P13Rik (NM_153585.3,597-615).
gctcgtagacttgtatata

SEQ ID NO: 770784 - DNA, 19 bp, Mus musculus
  siRNA target sequence for 2600001P13Rik (NM_153585.3,600-618).
cgtagacttgtatatatta

SEQ ID NO: 770785 - DNA, 19 bp, Mus musculus
  siRNA target sequence for 2600001P13Rik (NM_153585.3,649-667).
cttgccgtcctagaaaaaa

SEQ ID NO: 770786 - DNA, 19 bp, Mus musculus
  siRNA target sequence for 2600001P13Rik (NM_153585.3,652-670).
gccgtcctagaaaaaatga

SEQ ID NO: 770787 - DNA, 19 bp, Mus musculus
  siRNA target sequence for 2600001P13Rik (NM_153585.3,653-671).
ccgtcctagaaaaaatgat

SEQ ID NO: 770788 - DNA, 19 bp, Mus musculus
  siRNA target sequence for 2600001P13Rik (NM_153585.3,678-696).
gggtagcggtggcaaaaat

SEQ ID NO: 770789 - DNA, 19 bp, Mus musculus
  siRNA target sequence for 2600001P13Rik (NM_153585.3,771-789).
ggctgccaagtccaagata

SEQ ID NO: 770790 - DNA, 19 bp, Mus musculus
  siRNA target sequence for 2600001P13Rik (NM_153585.3,782-800).
ccaagatacaccagtacaa

SEQ ID NO: 770791 - DNA, 19 bp, Mus musculus
  siRNA target sequence for 2600001P13Rik (NM_153585.3,783-801).
caagatacaccagtacaaa

SEQ ID NO: 770792 - DNA, 19 bp, Mus musculus
  siRNA target sequence for 2600001P13Rik (NM_153585.3,898-916).
cttaaaagcaactttgagt

SEQ ID NO: 770793 - DNA, 19 bp, Mus musculus
  siRNA target sequence for 2600001P13Rik (NM_153585.3,943-961).
gtgaagctgttgaatagtt

SEQ ID NO: 770794 - DNA, 19 bp, Mus musculus
  siRNA target sequence for 2600001P13Rik (NM_153585.3,951-969).
gttgaatagttcaaacatt

SEQ ID NO: 770795 - DNA, 19 bp, Mus musculus
  siRNA target sequence for 2600001P13Rik (NM_153585.3,1010-1028).
gatgcatgttctggaataa

SEQ ID NO: 770796 - DNA, 19 bp, Mus musculus
  siRNA target sequence for 2600001P13Rik (NM_153585.3,1014-1032).
catgttctggaataacctt

SEQ ID NO: 770797 - DNA, 19 bp, Mus musculus
  siRNA target sequence for 2600001P13Rik (NM_153585.3,1048-1066).
gccatgagcaagcacaatt

SEQ ID NO: 770798 - DNA, 19 bp, Mus musculus
  siRNA target sequence for 2600001P13Rik (NM_153585.3,1139-1157).
ctgatccaggcaaaaagtt

SEQ ID NO: 770799 - DNA, 19 bp, Mus musculus
  siRNA target sequence for 2600001P13Rik (NM_153585.3,1141-1159).
gatccaggcaaaaagtttt

SEQ ID NO: 770800 - DNA, 19 bp, Mus musculus
  siRNA target sequence for 2600001P13Rik (NM_153585.3,1182-1200).
gctgaccaacaaaagatat

SEQ ID NO: 770801 - DNA, 19 bp, Mus musculus
  siRNA target sequence for 2600001P13Rik (NM_153585.3,1196-1214).
gatatgagctgctctacaa

SEQ ID NO: 770802 - DNA, 19 bp, Mus musculus
  siRNA target sequence for 2600001P13Rik (NM_153585.3,1256-1274).
ccttcgagtgtctgattga

SEQ ID NO: 770803 - DNA, 19 bp, Mus musculus
  siRNA target sequence for 2600001P13Rik (NM_153585.3,1380-1398).
caccaaaaaaggcattgta

SEQ ID NO: 770804 - DNA, 19 bp, Mus musculus
  siRNA target sequence for 2600001P13Rik (NM_153585.3,1391-1409).
gcattgtacagtctattgt

SEQ ID NO: 770805 - DNA, 19 bp, Mus musculus
  siRNA target sequence for 2600001P13Rik (NM_153585.3,1392-1410).
cattgtacagtctattgtt

SEQ ID NO: 770806 - DNA, 19 bp, Mus musculus
  siRNA target sequence for 2600001P13Rik (NM_153585.3,1416-1434).
gggatatcaccgtaaaata

SEQ ID NO: 770807 - DNA, 19 bp, Mus musculus
  siRNA target sequence for 2600001P13Rik (NM_153585.3,1418-1436).
gatatcaccgtaaaatagt

SEQ ID NO: 770808 - DNA, 19 bp, Mus musculus
  siRNA target sequence for 2600001P13Rik (NM_153585.3,1458-1476).
gaacactgtctacaatgat

SEQ ID NO: 770809 - DNA, 19 bp, Mus musculus
  siRNA target sequence for 2600001P13Rik (NM_153585.3,1639-1657).
gagacgtgcagcagtaaga

SEQ ID NO: 770810 - DNA, 19 bp, Mus musculus
  siRNA target sequence for 2600001P13Rik (NM_153585.3,1827-1845).
gctgtctggctctcttaaa

SEQ ID NO: 770811 - DNA, 19 bp, Mus musculus
  siRNA target sequence for 2600001P13Rik (NM_153585.3,1881-1899).
ctccctcgacaggatatct

SEQ ID NO: 770812 - DNA, 19 bp, Mus musculus
  siRNA target sequence for 2600001P13Rik (NM_153585.3,1883-1901).
ccctcgacaggatatctga

SEQ ID NO: 770813 - DNA, 19 bp, Mus musculus
  siRNA target sequence for 2600001P13Rik (NM_153585.3,1884-1902).
cctcgacaggatatctgat

SEQ ID NO: 770814 - DNA, 19 bp, Mus musculus
  siRNA target sequence for 2600001P13Rik (NM_153585.3,1943-1961).
ccttagggatctcttcaaa

SEQ ID NO: 770815 - DNA, 19 bp, Mus musculus
  siRNA target sequence for 2600001P13Rik (NM_153585.3,1976-1994).
gatcagacaagggtgaaaa

SEQ ID NO: 770816 - DNA, 19 bp, Mus musculus
  siRNA target sequence for 2600001P13Rik (NM_153585.3,2112-2130).
cgacaaggcccgaaagtgt

SEQ ID NO: 770817 - DNA, 19 bp, Mus musculus
  siRNA target sequence for 2600001P13Rik (NM_153585.3,2144-2162).
catcgatgatccatcctaa

SEQ ID NO: 770818 - DNA, 19 bp, Mus musculus
  siRNA target sequence for 2600001P13Rik (NM_153585.3,2203-2221).
gagctgcagaatggtaata

SEQ ID NO: 770819 - DNA, 19 bp, Mus musculus
  siRNA target sequence for Tmem16b (NM_153589.1,187-205).
gaggaaagtcgactatgta

SEQ ID NO: 770820 - DNA, 19 bp, Mus musculus
  siRNA target sequence for Tmem16b (NM_153589.1,189-207).
ggaaagtcgactatgtact

SEQ ID NO: 770821 - DNA, 19 bp, Mus musculus
  siRNA target sequence for Tmem16b (NM_153589.1,190-208).
gaaagtcgactatgtactt

SEQ ID NO: 770822 - DNA, 19 bp, Mus musculus
  siRNA target sequence for Tmem16b (NM_153589.1,258-276).
gacactctctggctgttat

SEQ ID NO: 770823 - DNA, 19 bp, Mus musculus
  siRNA target sequence for Tmem16b (NM_153589.1,364-382).
gagggagcagcgagatgaa

SEQ ID NO: 770824 - DNA, 19 bp, Mus musculus
  siRNA target sequence for Tmem16b (NM_153589.1,366-384).
gggagcagcgagatgaatt

SEQ ID NO: 770825 - DNA, 19 bp, Mus musculus
  siRNA target sequence for Tmem16b (NM_153589.1,367-385).
ggagcagcgagatgaattt

SEQ ID NO: 770826 - DNA, 19 bp, Mus musculus
  siRNA target sequence for Tmem16b (NM_153589.1,514-532).
caaagtccccaccaagaaa

SEQ ID NO: 770827 - DNA, 19 bp, Mus musculus
  siRNA target sequence for Tmem16b (NM_153589.1,529-547).
gaaaatgtacgagatcaaa

SEQ ID NO: 770828 - DNA, 19 bp, Mus musculus
  siRNA target sequence for Tmem16b (NM_153589.1,552-570).
gaggcagcatcgcaaagaa

SEQ ID NO: 770829 - DNA, 19 bp, Mus musculus
  siRNA target sequence for Tmem16b (NM_153589.1,790-808).
gggtattaactctctaata

SEQ ID NO: 770830 - DNA, 19 bp, Mus musculus
  siRNA target sequence for Tmem16b (NM_153589.1,803-821).
ctaatagcaaacaatatct

SEQ ID NO: 770831 - DNA, 19 bp, Mus musculus
  siRNA target sequence for Tmem16b (NM_153589.1,837-855).
cgcttcatgatggtgaata

SEQ ID NO: 770832 - DNA, 19 bp, Mus musculus
  siRNA target sequence for Tmem16b (NM_153589.1,907-925).
ggcacgctatggagtgttt

SEQ ID NO: 770833 - DNA, 19 bp, Mus musculus
  siRNA target sequence for Tmem16b (NM_153589.1,968-986).
gagaaaattgggctatatt

SEQ ID NO: 770834 - DNA, 19 bp, Mus musculus
  siRNA target sequence for Tmem16b (NM_153589.1,989-1007).
gcttggctggggttgtata

SEQ ID NO: 770835 - DNA, 19 bp, Mus musculus
  siRNA target sequence for Tmem16b (NM_153589.1,1031-1049).
gtcataggcgtgattgtgt

SEQ ID NO: 770836 - DNA, 19 bp, Mus musculus
  siRNA target sequence for Tmem16b (NM_153589.1,1033-1051).
cataggcgtgattgtgttt

SEQ ID NO: 770837 - DNA, 19 bp, Mus musculus
  siRNA target sequence for Tmem16b (NM_153589.1,1185-1203).
cacgggccagtcatctgtt

SEQ ID NO: 770838 - DNA, 19 bp, Mus musculus
  siRNA target sequence for Tmem16b (NM_153589.1,1188-1206).
gggccagtcatctgtttga

SEQ ID NO: 770839 - DNA, 19 bp, Mus musculus
  siRNA target sequence for Tmem16b (NM_153589.1,1190-1208).
gccagtcatctgtttgaca

SEQ ID NO: 770840 - DNA, 19 bp, Mus musculus
  siRNA target sequence for Tmem16b (NM_153589.1,1191-1209).
ccagtcatctgtttgacaa

SEQ ID NO: 770841 - DNA, 19 bp, Mus musculus
  siRNA target sequence for Tmem16b (NM_153589.1,1214-1232).
gccaccgtcttcttttcca

SEQ ID NO: 770842 - DNA, 19 bp, Mus musculus
  siRNA target sequence for Tmem16b (NM_153589.1,1215-1233).
ccaccgtcttcttttccat

SEQ ID NO: 770843 - DNA, 19 bp, Mus musculus
  siRNA target sequence for Tmem16b (NM_153589.1,1351-1369).
ctctcggcctgaatatgaa

SEQ ID NO: 770844 - DNA, 19 bp, Mus musculus
  siRNA target sequence for Tmem16b (NM_153589.1,1371-1389).
ccaaagtacgagagaaact

SEQ ID NO: 770845 - DNA, 19 bp, Mus musculus
  siRNA target sequence for Tmem16b (NM_153589.1,1404-1422).
gcaagtcagcggttcagaa

SEQ ID NO: 770846 - DNA, 19 bp, Mus musculus
  siRNA target sequence for Tmem16b (NM_153589.1,1484-1502).
cgtttcccaggatacttga

SEQ ID NO: 770847 - DNA, 19 bp, Mus musculus
  siRNA target sequence for Tmem16b (NM_153589.1,1702-1720).
ggccaagtggcttaccaaa

SEQ ID NO: 770848 - DNA, 19 bp, Mus musculus
  siRNA target sequence for Tmem16b (NM_153589.1,1703-1721).
gccaagtggcttaccaaaa

SEQ ID NO: 770849 - DNA, 19 bp, Mus musculus
  siRNA target sequence for Tmem16b (NM_153589.1,1704-1722).
ccaagtggcttaccaaaat

SEQ ID NO: 770850 - DNA, 19 bp, Mus musculus
  siRNA target sequence for Tmem16b (NM_153589.1,1723-1741).
cgaggttccgaaaacagaa

SEQ ID NO: 770851 - DNA, 19 bp, Mus musculus
  siRNA target sequence for Tmem16b (NM_153589.1,1731-1749).
cgaaaacagaacagacttt

SEQ ID NO: 770852 - DNA, 19 bp, Mus musculus
  siRNA target sequence for Tmem16b (NM_153589.1,1757-1775).
cggttgatcctcaaagctt

SEQ ID NO: 770853 - DNA, 19 bp, Mus musculus
  siRNA target sequence for Tmem16b (NM_153589.1,1758-1776).
ggttgatcctcaaagcttt

SEQ ID NO: 770854 - DNA, 19 bp, Mus musculus
  siRNA target sequence for Tmem16b (NM_153589.1,1777-1795).
cttgctcaagtttgtcaat

SEQ ID NO: 770855 - DNA, 19 bp, Mus musculus
  siRNA target sequence for Tmem16b (NM_153589.1,1994-2012).
ccgaagctaaagaaactct

SEQ ID NO: 770856 - DNA, 19 bp, Mus musculus
  siRNA target sequence for Tmem16b (NM_153589.1,1995-2013).
cgaagctaaagaaactctt

SEQ ID NO: 770857 - DNA, 19 bp, Mus musculus
  siRNA target sequence for Tmem16b (NM_153589.1,2011-2029).
ctttcggaagctgaaagat

SEQ ID NO: 770858 - DNA, 19 bp, Mus musculus
  siRNA target sequence for Tmem16b (NM_153589.1,2053-2071).
ccctgaccactcaaaacgt

SEQ ID NO: 770859 - DNA, 19 bp, Mus musculus
  siRNA target sequence for Tmem16b (NM_153589.1,2095-2113).
cagcctagagccttacact

SEQ ID NO: 770860 - DNA, 19 bp, Mus musculus
  siRNA target sequence for Tmem16b (NM_153589.1,2225-2243).
gtgcggctggatgcaaaaa

SEQ ID NO: 770861 - DNA, 19 bp, Mus musculus
  siRNA target sequence for Tmem16b (NM_153589.1,2281-2299).
gaccaaagacattggaatt

SEQ ID NO: 770862 - DNA, 19 bp, Mus musculus
  siRNA target sequence for Tmem16b (NM_153589.1,2325-2343).
gcaagttctccgtcatcat

SEQ ID NO: 770863 - DNA, 19 bp, Mus musculus
  siRNA target sequence for Tmem16b (NM_153589.1,2326-2344).
caagttctccgtcatcatt

SEQ ID NO: 770864 - DNA, 19 bp, Mus musculus
  siRNA target sequence for Tmem16b (NM_153589.1,2332-2350).
ctccgtcatcattaatgct

SEQ ID NO: 770865 - DNA, 19 bp, Mus musculus
  siRNA target sequence for Tmem16b (NM_153589.1,2390-2408).
gtgtaccagtactcctata

SEQ ID NO: 770866 - DNA, 19 bp, Mus musculus
  siRNA target sequence for Tmem16b (NM_153589.1,2410-2428).
ccacaacgggacactacat

SEQ ID NO: 770867 - DNA, 19 bp, Mus musculus
  siRNA target sequence for Tmem16b (NM_153589.1,2426-2444).
catggctttgtgaaccata

SEQ ID NO: 770868 - DNA, 19 bp, Mus musculus
  siRNA target sequence for Tmem16b (NM_153589.1,2430-2448).
gctttgtgaaccatacact

SEQ ID NO: 770869 - DNA, 19 bp, Mus musculus
  siRNA target sequence for Tmem16b (NM_153589.1,2506-2524).
cgaccaggaggttcagttt

SEQ ID NO: 770870 - DNA, 19 bp, Mus musculus
  siRNA target sequence for Tmem16b (NM_153589.1,2507-2525).
gaccaggaggttcagtttt

SEQ ID NO: 770871 - DNA, 19 bp, Mus musculus
  siRNA target sequence for Tmem16b (NM_153589.1,2527-2545).
caggttcaaagattatcga

SEQ ID NO: 770872 - DNA, 19 bp, Mus musculus
  siRNA target sequence for Tmem16b (NM_153589.1,2558-2576).
gcaccaaacccttatgagt

SEQ ID NO: 770873 - DNA, 19 bp, Mus musculus
  siRNA target sequence for Tmem16b (NM_153589.1,2561-2579).
ccaaacccttatgagtttt

SEQ ID NO: 770874 - DNA, 19 bp, Mus musculus
  siRNA target sequence for Tmem16b (NM_153589.1,2587-2605).
gtactggtctgttttgtct

SEQ ID NO: 770875 - DNA, 19 bp, Mus musculus
  siRNA target sequence for Tmem16b (NM_153589.1,2606-2624).
gcccgtctggcctttgtta

SEQ ID NO: 770876 - DNA, 19 bp, Mus musculus
  siRNA target sequence for Tmem16b (NM_153589.1,2607-2625).
cccgtctggcctttgttat

SEQ ID NO: 770877 - DNA, 19 bp, Mus musculus
  siRNA target sequence for Tmem16b (NM_153589.1,2609-2627).
cgtctggcctttgttatca

SEQ ID NO: 770878 - DNA, 19 bp, Mus musculus
  siRNA target sequence for Tmem16b (NM_153589.1,2698-2716).
cagcgaccagatcaagaaa

SEQ ID NO: 770879 - DNA, 19 bp, Mus musculus
  siRNA target sequence for Tmem16b (NM_153589.1,2700-2718).
gcgaccagatcaagaaaga

SEQ ID NO: 770880 - DNA, 19 bp, Mus musculus
  siRNA target sequence for Tmem16b (NM_153589.1,2724-2742).
gcttgctggtagacttctt

SEQ ID NO: 770881 - DNA, 19 bp, Mus musculus
  siRNA target sequence for Tmem16b (NM_153589.1,2887-2905).
gtcccagcacaccaatgta

SEQ ID NO: 770882 - DNA, 19 bp, Mus musculus
  siRNA target sequence for BC036333 (NM_153592.1,148-166).
ggacatattggagtatatt

SEQ ID NO: 770883 - DNA, 19 bp, Mus musculus
  siRNA target sequence for BC036333 (NM_153592.1,222-240).
cccgttcatcacatcctat

SEQ ID NO: 770884 - DNA, 19 bp, Mus musculus
  siRNA target sequence for BC036333 (NM_153592.1,223-241).
ccgttcatcacatcctata

SEQ ID NO: 770885 - DNA, 19 bp, Mus musculus
  siRNA target sequence for BC036333 (NM_153592.1,224-242).
cgttcatcacatcctataa

SEQ ID NO: 770886 - DNA, 19 bp, Mus musculus
  siRNA target sequence for BC036333 (NM_153592.1,301-319).
ggtggtgtgatgatctact

SEQ ID NO: 770887 - DNA, 19 bp, Mus musculus
  siRNA target sequence for BC036333 (NM_153592.1,302-320).
gtggtgtgatgatctactt

SEQ ID NO: 770888 - DNA, 19 bp, Mus musculus
  siRNA target sequence for BC036333 (NM_153592.1,315-333).
ctactttgacagaattgaa

SEQ ID NO: 770889 - DNA, 19 bp, Mus musculus
  siRNA target sequence for BC036333 (NM_153592.1,348-366).
ggtcccaaatgcagtgtat

SEQ ID NO: 770890 - DNA, 19 bp, Mus musculus
  siRNA target sequence for BC036333 (NM_153592.1,351-369).
cccaaatgcagtgtatgat

SEQ ID NO: 770891 - DNA, 19 bp, Mus musculus
  siRNA target sequence for BC036333 (NM_153592.1,352-370).
ccaaatgcagtgtatgata

SEQ ID NO: 770892 - DNA, 19 bp, Mus musculus
  siRNA target sequence for BC036333 (NM_153592.1,353-371).
caaatgcagtgtatgatat

SEQ ID NO: 770893 - DNA, 19 bp, Mus musculus
  siRNA target sequence for BC036333 (NM_153592.1,367-385).
gatatagtgaagaactata

SEQ ID NO: 770894 - DNA, 19 bp, Mus musculus
  siRNA target sequence for BC036333 (NM_153592.1,439-457).
cagttctgcagcgttcata

SEQ ID NO: 770895 - DNA, 19 bp, Mus musculus
  siRNA target sequence for BC036333 (NM_153592.1,441-459).
gttctgcagcgttcatact

SEQ ID NO: 770896 - DNA, 19 bp, Mus musculus
  siRNA target sequence for BC036333 (NM_153592.1,471-489).
ctatatcgagctgtttgat

SEQ ID NO: 770897 - DNA, 19 bp, Mus musculus
  siRNA target sequence for BC036333 (NM_153592.1,480-498).
gctgtttgatcaaattgat

SEQ ID NO: 770898 - DNA, 19 bp, Mus musculus
  siRNA target sequence for BC036333 (NM_153592.1,542-560).
cccctgggctggttatcca

SEQ ID NO: 770899 - DNA, 19 bp, Mus musculus
  siRNA target sequence for BC036333 (NM_153592.1,569-587).
gagtgacaaagcccaatat

SEQ ID NO: 770900 - DNA, 19 bp, Mus musculus
  siRNA target sequence for BC036333 (NM_153592.1,573-591).
gacaaagcccaatatacct

SEQ ID NO: 770901 - DNA, 19 bp, Mus musculus
  siRNA target sequence for BC036333 (NM_153592.1,594-612).
ggcaatccgcaggaactat

SEQ ID NO: 770902 - DNA, 19 bp, Mus musculus
  siRNA target sequence for BC036333 (NM_153592.1,596-614).
caatccgcaggaactatga

SEQ ID NO: 770903 - DNA, 19 bp, Mus musculus
  siRNA target sequence for BC036333 (NM_153592.1,966-984).
ccccaacatgtttatggat

SEQ ID NO: 770904 - DNA, 19 bp, Mus musculus
  siRNA target sequence for BC036333 (NM_153592.1,967-985).
cccaacatgtttatggatt

SEQ ID NO: 770905 - DNA, 19 bp, Mus musculus
  siRNA target sequence for BC030307 (NM_153595.1,490-508).
gtgagaccggacaaagata

SEQ ID NO: 770906 - DNA, 19 bp, Mus musculus
  siRNA target sequence for BC030307 (NM_153595.1,492-510).
gagaccggacaaagataca

SEQ ID NO: 770907 - DNA, 19 bp, Mus musculus
  siRNA target sequence for BC030307 (NM_153595.1,509-527).
caacggtcaacccatttta

SEQ ID NO: 770908 - DNA, 19 bp, Mus musculus
  siRNA target sequence for BC030307 (NM_153595.1,540-558).
cccatcctaccttacatat

SEQ ID NO: 770909 - DNA, 19 bp, Mus musculus
  siRNA target sequence for BC030307 (NM_153595.1,559-577).
gttccactctagattttca

SEQ ID NO: 770910 - DNA, 19 bp, Mus musculus
  siRNA target sequence for BC030307 (NM_153595.1,562-580).
ccactctagattttcaaga

SEQ ID NO: 770911 - DNA, 19 bp, Mus musculus
  siRNA target sequence for BC030307 (NM_153595.1,605-623).
catcttccctcggcttaat

SEQ ID NO: 770912 - DNA, 19 bp, Mus musculus
  siRNA target sequence for BC030307 (NM_153595.1,678-696).
gctgtgaaggcccataagt

SEQ ID NO: 770913 - DNA, 19 bp, Mus musculus
  siRNA target sequence for BC030307 (NM_153595.1,759-777).
ctggactacgtgaacagat

SEQ ID NO: 770914 - DNA, 19 bp, Mus musculus
  siRNA target sequence for BC030307 (NM_153595.1,775-793).
gatgcttcccgtttttcat

SEQ ID NO: 770915 - DNA, 19 bp, Mus musculus
  siRNA target sequence for BC030307 (NM_153595.1,858-876).
gtgaaggacttcgaaagtt

SEQ ID NO: 770916 - DNA, 19 bp, Mus musculus
  siRNA target sequence for BC030307 (NM_153595.1,864-882).
gacttcgaaagtttatcca

SEQ ID NO: 770917 - DNA, 19 bp, Mus musculus
  siRNA target sequence for BC030307 (NM_153595.1,886-904).
gagaacagaatctatacat

SEQ ID NO: 770918 - DNA, 19 bp, Mus musculus
  siRNA target sequence for BC030307 (NM_153595.1,919-937).
gttacccttgggttctcaa

SEQ ID NO: 770919 - DNA, 19 bp, Mus musculus
  siRNA target sequence for BC030307 (NM_153595.1,978-996).
gcagtattccggaagaaat

SEQ ID NO: 770920 - DNA, 19 bp, Mus musculus
  siRNA target sequence for BC030307 (NM_153595.1,986-1004).
ccggaagaaatctcaattt

SEQ ID NO: 770921 - DNA, 19 bp, Mus musculus
  siRNA target sequence for BC030307 (NM_153595.1,992-1010).
gaaatctcaatttcaattt

SEQ ID NO: 770922 - DNA, 19 bp, Mus musculus
  siRNA target sequence for BC030307 (NM_153595.1,1076-1094).
gaagctgtcctcagcatat

SEQ ID NO: 770923 - DNA, 19 bp, Mus musculus
  siRNA target sequence for BC030307 (NM_153595.1,1130-1148).
gctcaaggctaagatcatt

SEQ ID NO: 770924 - DNA, 19 bp, Mus musculus
  siRNA target sequence for BC030307 (NM_153595.1,1216-1234).
ggtcggctgttgtggaaaa

SEQ ID NO: 770925 - DNA, 19 bp, Mus musculus
  siRNA target sequence for BC030307 (NM_153595.1,1249-1267).
ctacgatcatgggaaatat

SEQ ID NO: 770926 - DNA, 19 bp, Mus musculus
  siRNA target sequence for BC030307 (NM_153595.1,1252-1270).
cgatcatgggaaatataga

SEQ ID NO: 770927 - DNA, 19 bp, Mus musculus
  siRNA target sequence for BC030307 (NM_153595.1,1282-1300).
gtttcgagaatttgtatca

SEQ ID NO: 770928 - DNA, 19 bp, Mus musculus
  siRNA target sequence for BC030307 (NM_153595.1,1357-1375).
gaacctttgaaatattgga

SEQ ID NO: 770929 - DNA, 19 bp, Mus musculus
  siRNA target sequence for BC030307 (NM_153595.1,1373-1391).
ggaaagatttgctataaaa

SEQ ID NO: 770930 - DNA, 19 bp, Mus musculus
  siRNA target sequence for BC030307 (NM_153595.1,1395-1413).
cttgatcttgatcttgata

SEQ ID NO: 770931 - DNA, 19 bp, Mus musculus
  siRNA target sequence for BC030307 (NM_153595.1,1407-1425).
cttgatactgacagtacta

SEQ ID NO: 770932 - DNA, 19 bp, Mus musculus
  siRNA target sequence for BC030307 (NM_153595.1,1474-1492).
cttgtaagtccattttgct

SEQ ID NO: 770933 - DNA, 19 bp, Mus musculus
  siRNA target sequence for BC030307 (NM_153595.1,1533-1551).
gccaactgggtcagtaatt

SEQ ID NO: 770934 - DNA, 19 bp, Mus musculus
  siRNA target sequence for BC030307 (NM_153595.1,1538-1556).
ctgggtcagtaatttccaa

SEQ ID NO: 770935 - DNA, 19 bp, Mus musculus
  siRNA target sequence for AI503894 (NM_153596.1,420-438).
ctgactactacaaattcat

SEQ ID NO: 770936 - DNA, 19 bp, Mus musculus
  siRNA target sequence for AI503894 (NM_153596.1,454-472).
catcctcataaccttgatt

SEQ ID NO: 770937 - DNA, 19 bp, Mus musculus
  siRNA target sequence for AI503894 (NM_153596.1,457-475).
cctcataaccttgattgaa

SEQ ID NO: 770938 - DNA, 19 bp, Mus musculus
  siRNA target sequence for AI503894 (NM_153596.1,620-638).
gagaaagcaatacatatca

SEQ ID NO: 770939 - DNA, 19 bp, Mus musculus
  siRNA target sequence for AI503894 (NM_153596.1,626-644).
gcaatacatatcatcttca

SEQ ID NO: 770940 - DNA, 19 bp, Mus musculus
  siRNA target sequence for AI503894 (NM_153596.1,762-780).
ctgtaaggagggtaagaca

SEQ ID NO: 770941 - DNA, 19 bp, Mus musculus
  siRNA target sequence for 9430097H08Rik (NM_153600.1,109-127).
ccgcacactgacaaaagaa

SEQ ID NO: 770942 - DNA, 19 bp, Mus musculus
  siRNA target sequence for 9430097H08Rik (NM_153600.1,163-181).
ctactttcgcagagagatt

SEQ ID NO: 770943 - DNA, 19 bp, Mus musculus
  siRNA target sequence for 9430097H08Rik (NM_153600.1,188-206).
gcgccattaccctattgga

SEQ ID NO: 770944 - DNA, 19 bp, Mus musculus
  siRNA target sequence for 9430097H08Rik (NM_153600.1,229-247).
caagaagacgacactaact

SEQ ID NO: 770945 - DNA, 19 bp, Mus musculus
  siRNA target sequence for 9430097H08Rik (NM_153600.1,232-250).
gaagacgacactaacttat

SEQ ID NO: 770946 - DNA, 19 bp, Mus musculus
  siRNA target sequence for 9430097H08Rik (NM_153600.1,235-253).
gacgacactaacttatgga

SEQ ID NO: 770947 - DNA, 19 bp, Mus musculus
  siRNA target sequence for 9430097H08Rik (NM_153600.1,237-255).
cgacactaacttatggatt

SEQ ID NO: 770948 - DNA, 19 bp, Mus musculus
  siRNA target sequence for 9430097H08Rik (NM_153600.1,242-260).
ctaacttatggattggata

SEQ ID NO: 770949 - DNA, 19 bp, Mus musculus
  siRNA target sequence for 9430097H08Rik (NM_153600.1,246-264).
cttatggattggatactgt

SEQ ID NO: 770950 - DNA, 19 bp, Mus musculus
  siRNA target sequence for 9430097H08Rik (NM_153600.1,317-335).
cgaaggaggaaaattgcaa

SEQ ID NO: 770951 - DNA, 19 bp, Mus musculus
  siRNA target sequence for 9430097H08Rik (NM_153600.1,318-336).
gaaggaggaaaattgcaat

SEQ ID NO: 770952 - DNA, 19 bp, Mus musculus
  siRNA target sequence for 9430097H08Rik (NM_153600.1,419-437).
caaaaagccggctccaaaa

SEQ ID NO: 770953 - DNA, 19 bp, Mus musculus
  siRNA target sequence for 9430097H08Rik (NM_153600.1,450-468).
ccatctggctcacaagttt

SEQ ID NO: 770954 - DNA, 19 bp, Mus musculus
  siRNA target sequence for 9430097H08Rik (NM_153600.1,451-469).
catctggctcacaagttta

SEQ ID NO: 770955 - DNA, 19 bp, Mus musculus
  siRNA target sequence for 9430097H08Rik (NM_153600.1,456-474).
ggctcacaagtttaatgat

SEQ ID NO: 770956 - DNA, 19 bp, Mus musculus
  siRNA target sequence for 9430097H08Rik (NM_153600.1,458-476).
ctcacaagtttaatgatga

SEQ ID NO: 770957 - DNA, 19 bp, Mus musculus
  siRNA target sequence for 2410008J05Rik (NM_153776.1,330-348).
gattggcgtgtgcataatt

SEQ ID NO: 770958 - DNA, 19 bp, Mus musculus
  siRNA target sequence for 2410008J05Rik (NM_153776.1,334-352).
ggcgtgtgcataattgtgt

SEQ ID NO: 770959 - DNA, 19 bp, Mus musculus
  siRNA target sequence for 2410008J05Rik (NM_153776.1,335-353).
gcgtgtgcataattgtgtt

SEQ ID NO: 770960 - DNA, 19 bp, Mus musculus
  siRNA target sequence for 2410008J05Rik (NM_153776.1,472-490).
ctggagatcaagctctatt

SEQ ID NO: 770961 - DNA, 19 bp, Mus musculus
  siRNA target sequence for 2410008J05Rik (NM_153776.1,475-493).
gagatcaagctctatttca

SEQ ID NO: 770962 - DNA, 19 bp, Mus musculus
  siRNA target sequence for 2410008J05Rik (NM_153776.1,604-622).
gcactagaccgcatggaat

SEQ ID NO: 770963 - DNA, 19 bp, Mus musculus
  siRNA target sequence for 2410008J05Rik (NM_153776.1,605-623).
cactagaccgcatggaata

SEQ ID NO: 770964 - DNA, 19 bp, Mus musculus
  siRNA target sequence for 2410008J05Rik (NM_153776.1,751-769).
gccgaaggcctcacctttt

SEQ ID NO: 770965 - DNA, 19 bp, Mus musculus
  siRNA target sequence for 2410008J05Rik (NM_153776.1,754-772).
gaaggcctcacctttttct

SEQ ID NO: 770966 - DNA, 19 bp, Mus musculus
  siRNA target sequence for 2410008J05Rik (NM_153776.1,762-780).
cacctttttctattgctat

SEQ ID NO: 770967 - DNA, 19 bp, Mus musculus
  siRNA target sequence for 2410008J05Rik (NM_153776.1,764-782).
cctttttctattgctatat

SEQ ID NO: 770968 - DNA, 19 bp, Mus musculus
  siRNA target sequence for 2410008J05Rik (NM_153776.1,878-896).
gcctcgccactgtcaatgt

SEQ ID NO: 770969 - DNA, 19 bp, Mus musculus
  siRNA target sequence for 5730427C23Rik (NM_153777.1,237-255).
gctggcagggcctaaacaa

SEQ ID NO: 770970 - DNA, 19 bp, Mus musculus
  siRNA target sequence for 5730427C23Rik (NM_153777.1,283-301).
cagccatggggatatccat

SEQ ID NO: 770971 - DNA, 19 bp, Mus musculus
  siRNA target sequence for 5730427C23Rik (NM_153777.1,396-414).
gtgtggacacccgtaagaa

SEQ ID NO: 770972 - DNA, 19 bp, Mus musculus
  siRNA target sequence for 5730427C23Rik (NM_153777.1,398-416).
gtggacacccgtaagaaca

SEQ ID NO: 770973 - DNA, 19 bp, Mus musculus
  siRNA target sequence for 5730427C23Rik (NM_153777.1,444-462).
ctaacctgatccaactgaa

SEQ ID NO: 770974 - DNA, 19 bp, Mus musculus
  siRNA target sequence for 5730427C23Rik (NM_153777.1,854-872).
gacgaggtgcccactacat

SEQ ID NO: 770975 - DNA, 19 bp, Mus musculus
  siRNA target sequence for 5730427C23Rik (NM_153777.1,942-960).
gcagcgtgcttgacattct

SEQ ID NO: 770976 - DNA, 19 bp, Mus musculus
  siRNA target sequence for 5730427C23Rik (NM_153777.1,987-1005).
gagccaccattcggaaatt

SEQ ID NO: 770977 - DNA, 19 bp, Mus musculus
  siRNA target sequence for 5730427C23Rik (NM_153777.1,1173-1191).
gccttcggaaacgtagaaa

SEQ ID NO: 770978 - DNA, 19 bp, Mus musculus
  siRNA target sequence for 4933425C05Rik (NM_153778.2,454-472).
gactgtgtgcgttaaagaa

SEQ ID NO: 770979 - DNA, 19 bp, Mus musculus
  siRNA target sequence for 4933425C05Rik (NM_153778.2,523-541).
cgcgaatggctataaaact

SEQ ID NO: 770980 - DNA, 19 bp, Mus musculus
  siRNA target sequence for 4933425C05Rik (NM_153778.2,524-542).
gcgaatggctataaaactt

SEQ ID NO: 770981 - DNA, 19 bp, Mus musculus
  siRNA target sequence for 4933425C05Rik (NM_153778.2,525-543).
cgaatggctataaaacttt

SEQ ID NO: 770982 - DNA, 19 bp, Mus musculus
  siRNA target sequence for 4933425C05Rik (NM_153778.2,990-1008).
cctactcgtcaatttcaca

SEQ ID NO: 770983 - DNA, 19 bp, Mus musculus
  siRNA target sequence for 4933425C05Rik (NM_153778.2,996-1014).
cgtcaatttcacacgtaat

SEQ ID NO: 770984 - DNA, 19 bp, Mus musculus
  siRNA target sequence for 4933425C05Rik (NM_153778.2,997-1015).
gtcaatttcacacgtaatt

SEQ ID NO: 770985 - DNA, 19 bp, Mus musculus
  siRNA target sequence for 4933425C05Rik (NM_153778.2,1075-1093).
cgcctcaacggagatcaaa

SEQ ID NO: 770986 - DNA, 19 bp, Mus musculus
  siRNA target sequence for 4933425C05Rik (NM_153778.2,1236-1254).
ggattgcctgtaactacat

SEQ ID NO: 770987 - DNA, 19 bp, Mus musculus
  siRNA target sequence for 4933425C05Rik (NM_153778.2,1241-1259).
gcctgtaactacatcttgt

SEQ ID NO: 770988 - DNA, 19 bp, Mus musculus
  siRNA target sequence for BC029169 (NM_153782.1,735-753).
gcacagcctcgcacaactt

SEQ ID NO: 770989 - DNA, 19 bp, Mus musculus
  siRNA target sequence for BC029169 (NM_153782.1,736-754).
cacagcctcgcacaacttt

SEQ ID NO: 770990 - DNA, 19 bp, Mus musculus
  siRNA target sequence for BC029169 (NM_153782.1,945-963).
gacggcacaagatatacaa

SEQ ID NO: 770991 - DNA, 19 bp, Mus musculus
  siRNA target sequence for BC029169 (NM_153782.1,948-966).
ggcacaagatatacaaaga

SEQ ID NO: 770992 - DNA, 19 bp, Mus musculus
  siRNA target sequence for BC029169 (NM_153782.1,949-967).
gcacaagatatacaaagaa

SEQ ID NO: 770993 - DNA, 19 bp, Mus musculus
  siRNA target sequence for BC029169 (NM_153782.1,1197-1215).
gggtccacctgaaattggt

SEQ ID NO: 770994 - DNA, 19 bp, Mus musculus
  siRNA target sequence for BC029169 (NM_153782.1,1198-1216).
ggtccacctgaaattggtt

SEQ ID NO: 770995 - DNA, 19 bp, Mus musculus
  siRNA target sequence for BC029169 (NM_153782.1,1234-1252).
cgggaaagccatgttcaaa

SEQ ID NO: 770996 - DNA, 19 bp, Mus musculus
  siRNA target sequence for BC029169 (NM_153782.1,1490-1508).
gccaagtgtccgtacatgt

SEQ ID NO: 770997 - DNA, 19 bp, Mus musculus
  siRNA target sequence for BC029169 (NM_153782.1,1627-1645).
ctactcgctgtcaggaaaa

SEQ ID NO: 770998 - DNA, 19 bp, Mus musculus
  siRNA target sequence for BC029169 (NM_153782.1,1688-1706).
cagatctacccgtacaaca

SEQ ID NO: 770999 - DNA, 19 bp, Mus musculus
  siRNA target sequence for BC029169 (NM_153782.1,1714-1732).
cagactcctcggcatcatt

SEQ ID NO: 771000 - DNA, 19 bp, Mus musculus
  siRNA target sequence for BC029169 (NM_153782.1,1716-1734).
gactcctcggcatcattga

SEQ ID NO: 771001 - DNA, 19 bp, Mus musculus
  siRNA target sequence for BC029169 (NM_153782.1,1769-1787).
gaccgacaccattatgaga

SEQ ID NO: 771002 - DNA, 19 bp, Mus musculus
  siRNA target sequence for BC029169 (NM_153782.1,1775-1793).
caccattatgagatgttca

SEQ ID NO: 771003 - DNA, 19 bp, Mus musculus
  siRNA target sequence for BC029169 (NM_153782.1,1802-1820).
ggggatgatggatacctta

SEQ ID NO: 771004 - DNA, 19 bp, Mus musculus
  siRNA target sequence for BC029169 (NM_153782.1,1803-1821).
gggatgatggataccttat

SEQ ID NO: 771005 - DNA, 19 bp, Mus musculus
  siRNA target sequence for BC029169 (NM_153782.1,1812-1830).
gataccttattcatcttga

SEQ ID NO: 771006 - DNA, 19 bp, Mus musculus
  siRNA target sequence for BC029169 (NM_153782.1,1850-1868).
cgacattcccaggatgaaa

SEQ ID NO: 771007 - DNA, 19 bp, Mus musculus
  siRNA target sequence for BC038613 (NM_153784.1,128-146).
ctagtggcgatgaaggatt

SEQ ID NO: 771008 - DNA, 19 bp, Mus musculus
  siRNA target sequence for BC038613 (NM_153784.1,521-539).
gtgaactcagcgagcaaaa

SEQ ID NO: 771009 - DNA, 19 bp, Mus musculus
  siRNA target sequence for BC038613 (NM_153784.1,731-749).
gaggccttcgtgaagaagt

SEQ ID NO: 771010 - DNA, 19 bp, Mus musculus
  siRNA target sequence for BC038613 (NM_153784.1,922-940).
ctccaagacaccgagatat

SEQ ID NO: 771011 - DNA, 19 bp, Mus musculus
  siRNA target sequence for BC038613 (NM_153784.1,1062-1080).
cagtccccagccttcaata

SEQ ID NO: 771012 - DNA, 19 bp, Mus musculus
  siRNA target sequence for BC038613 (NM_153784.1,1292-1310).
gggacgaagcagtgaacaa

SEQ ID NO: 771013 - DNA, 19 bp, Mus musculus
  siRNA target sequence for BC038613 (NM_153784.1,1466-1484).
gctcccagcgccagaaaga

SEQ ID NO: 771014 - DNA, 19 bp, Mus musculus
  siRNA target sequence for BC038613 (NM_153784.1,1517-1535).
cgaagacccgcttttcact

SEQ ID NO: 771015 - DNA, 19 bp, Mus musculus
  siRNA target sequence for 2610102K23Rik (NM_153787.1,188-206).
ccgctccaattctagatca

SEQ ID NO: 771016 - DNA, 19 bp, Mus musculus
  siRNA target sequence for 2610102K23Rik (NM_153787.1,236-254).
gtctagttctagatcaaga

SEQ ID NO: 771017 - DNA, 19 bp, Mus musculus
  siRNA target sequence for 2610102K23Rik (NM_153787.1,291-309).
cgttccagaacatattcga

SEQ ID NO: 771018 - DNA, 19 bp, Mus musculus
  siRNA target sequence for 2610102K23Rik (NM_153787.1,313-331).
ctcgtagtagagatcgtat

SEQ ID NO: 771019 - DNA, 19 bp, Mus musculus
  siRNA target sequence for 2610102K23Rik (NM_153787.1,315-333).
cgtagtagagatcgtattt

SEQ ID NO: 771020 - DNA, 19 bp, Mus musculus
  siRNA target sequence for 2610102K23Rik (NM_153787.1,327-345).
cgtatttattctagagatt

SEQ ID NO: 771021 - DNA, 19 bp, Mus musculus
  siRNA target sequence for 2610102K23Rik (NM_153787.1,328-346).
gtatttattctagagatta

SEQ ID NO: 771022 - DNA, 19 bp, Mus musculus
  siRNA target sequence for 2610102K23Rik (NM_153787.1,351-369).
cgagattacaggaataata

SEQ ID NO: 771023 - DNA, 19 bp, Mus musculus
  siRNA target sequence for 2610102K23Rik (NM_153787.1,362-380).
gaataatagaggaatgaga

SEQ ID NO: 771024 - DNA, 19 bp, Mus musculus
  siRNA target sequence for 2610102K23Rik (NM_153787.1,400-418).
gaaggggtagagggtatta

SEQ ID NO: 771025 - DNA, 19 bp, Mus musculus
  siRNA target sequence for 2610102K23Rik (NM_153787.1,403-421).
ggggtagagggtattatca

SEQ ID NO: 771026 - DNA, 19 bp, Mus musculus
  siRNA target sequence for 2610102K23Rik (NM_153787.1,440-458).
ccatcgaggtggctataga

SEQ ID NO: 771027 - DNA, 19 bp, Mus musculus
  siRNA target sequence for 2610102K23Rik (NM_153787.1,507-525).
cggtccaggagtccaaaaa

SEQ ID NO: 771028 - DNA, 19 bp, Mus musculus
  siRNA target sequence for 2610102K23Rik (NM_153787.1,557-575).
cagatctcgccggtcatat

SEQ ID NO: 771029 - DNA, 19 bp, Mus musculus
  siRNA target sequence for 2610102K23Rik (NM_153787.1,613-631).
cttcatccccatatagcaa

SEQ ID NO: 771030 - DNA, 19 bp, Mus musculus
  siRNA target sequence for 2610102K23Rik (NM_153787.1,649-667).
gacgagggtctcaggaaaa

SEQ ID NO: 771031 - DNA, 19 bp, Mus musculus
  siRNA target sequence for 2610102K23Rik (NM_153787.1,652-670).
gagggtctcaggaaaaaca

SEQ ID NO: 771032 - DNA, 19 bp, Mus musculus
  siRNA target sequence for 2610102K23Rik (NM_153787.1,740-758).
ggatacttttgaacatgat

SEQ ID NO: 771033 - DNA, 19 bp, Mus musculus
  siRNA target sequence for 2610102K23Rik (NM_153787.1,753-771).
catgatccatctgaatcta

SEQ ID NO: 771034 - DNA, 19 bp, Mus musculus
  siRNA target sequence for 2610102K23Rik (NM_153787.1,763-781).
ctgaatctattgatgagtt

SEQ ID NO: 771035 - DNA, 19 bp, Mus musculus
  siRNA target sequence for 2610102K23Rik (NM_153787.1,765-783).
gaatctattgatgagttta

SEQ ID NO: 771036 - DNA, 19 bp, Mus musculus
  siRNA target sequence for 2610102K23Rik (NM_153787.1,792-810).
gctacttctggtgatattt

SEQ ID NO: 771037 - DNA, 19 bp, Mus musculus
  siRNA target sequence for 2610102K23Rik (NM_153787.1,1124-1142).
gcggtcctccttttatcct

SEQ ID NO: 771038 - DNA, 19 bp, Mus musculus
  siRNA target sequence for 2610102K23Rik (NM_153787.1,1215-1233).
ctgcttgataggggtaata

SEQ ID NO: 771039 - DNA, 19 bp, Mus musculus
  siRNA target sequence for 2610102K23Rik (NM_153787.1,1218-1236).
cttgataggggtaatatca

SEQ ID NO: 771040 - DNA, 19 bp, Mus musculus
  siRNA target sequence for 2610102K23Rik (NM_153787.1,1302-1320).
caggaagttctagattact

SEQ ID NO: 771041 - DNA, 19 bp, Mus musculus
  siRNA target sequence for 2610102K23Rik (NM_153787.1,1311-1329).
ctagattactttagtgata

SEQ ID NO: 771042 - DNA, 19 bp, Mus musculus
  siRNA target sequence for 2610102K23Rik (NM_153787.1,1379-1397).
ggagacagaggattataga

SEQ ID NO: 771043 - DNA, 19 bp, Mus musculus
  siRNA target sequence for 2610102K23Rik (NM_153787.1,1386-1404).
gaggattatagacagttta

SEQ ID NO: 771044 - DNA, 19 bp, Mus musculus
  siRNA target sequence for 2610102K23Rik (NM_153787.1,1389-1407).
gattatagacagtttagga

SEQ ID NO: 771045 - DNA, 19 bp, Mus musculus
  siRNA target sequence for 2610102K23Rik (NM_153787.1,1396-1414).
gacagtttaggaaatcagt

SEQ ID NO: 771046 - DNA, 19 bp, Mus musculus
  siRNA target sequence for 2610102K23Rik (NM_153787.1,1498-1516).
cattaaaaggcaatagaga

SEQ ID NO: 771047 - DNA, 19 bp, Mus musculus
  siRNA target sequence for 2610102K23Rik (NM_153787.1,1553-1571).
gaaagagactgcatacata

SEQ ID NO: 771048 - DNA, 19 bp, Mus musculus
  siRNA target sequence for 2610102K23Rik (NM_153787.1,1723-1741).
gtctggatgcacgagaaaa

SEQ ID NO: 771049 - DNA, 19 bp, Mus musculus
  siRNA target sequence for 2610102K23Rik (NM_153787.1,1725-1743).
ctggatgcacgagaaaagt

SEQ ID NO: 771050 - DNA, 19 bp, Mus musculus
  siRNA target sequence for 2610102K23Rik (NM_153787.1,1762-1780).
gcccactgaggatcaaaat

SEQ ID NO: 771051 - DNA, 19 bp, Mus musculus
  siRNA target sequence for 2610102K23Rik (NM_153787.1,1764-1782).
ccactgaggatcaaaatga

SEQ ID NO: 771052 - DNA, 19 bp, Mus musculus
  siRNA target sequence for 2610102K23Rik (NM_153787.1,1795-1813).
ctcaccgtcctgaagtcaa

SEQ ID NO: 771053 - DNA, 19 bp, Mus musculus
  siRNA target sequence for 2610102K23Rik (NM_153787.1,1969-1987).
gcacttcagaatcatttat

SEQ ID NO: 771054 - DNA, 19 bp, Mus musculus
  siRNA target sequence for 2610102K23Rik (NM_153787.1,1970-1988).
cacttcagaatcatttata

SEQ ID NO: 771055 - DNA, 19 bp, Mus musculus
  siRNA target sequence for 2610102K23Rik (NM_153787.1,1975-1993).
cagaatcatttatacaaca

SEQ ID NO: 771056 - DNA, 19 bp, Mus musculus
  siRNA target sequence for 2610102K23Rik (NM_153787.1,2002-2020).
ccttggttcatcatgtgaa

SEQ ID NO: 771057 - DNA, 19 bp, Mus musculus
  siRNA target sequence for 2610102K23Rik (NM_153787.1,2041-2059).
ctgcagtgaccctaaacga

SEQ ID NO: 771058 - DNA, 19 bp, Mus musculus
  siRNA target sequence for 2610102K23Rik (NM_153787.1,2052-2070).
ctaaacgagcggttcactt

SEQ ID NO: 771059 - DNA, 19 bp, Mus musculus
  siRNA target sequence for 2610102K23Rik (NM_153787.1,2082-2100).
gctactgaagaacatagta

SEQ ID NO: 771060 - DNA, 19 bp, Mus musculus
  siRNA target sequence for 2610102K23Rik (NM_153787.1,2214-2232).
ggagataaaaagttaaggt

SEQ ID NO: 771061 - DNA, 19 bp, Mus musculus
  siRNA target sequence for 2610102K23Rik (NM_153787.1,2340-2358).
gaaaaaacaccaaaggatt

SEQ ID NO: 771062 - DNA, 19 bp, Mus musculus
  siRNA target sequence for 2610102K23Rik (NM_153787.1,2509-2527).
ctcaccacgagatgaaaga

SEQ ID NO: 771063 - DNA, 19 bp, Mus musculus
  siRNA target sequence for 2610102K23Rik (NM_153787.1,2522-2540).
gaaagactactcaggattt

SEQ ID NO: 771064 - DNA, 19 bp, Mus musculus
  siRNA target sequence for 2610102K23Rik (NM_153787.1,2552-2570).
cagaccacgaggaaccttt

SEQ ID NO: 771065 - DNA, 19 bp, Mus musculus
  siRNA target sequence for 2610102K23Rik (NM_153787.1,2559-2577).
cgaggaaccttttttcgaa

SEQ ID NO: 771066 - DNA, 19 bp, Mus musculus
  siRNA target sequence for 2610102K23Rik (NM_153787.1,2560-2578).
gaggaaccttttttcgaat

SEQ ID NO: 771067 - DNA, 19 bp, Mus musculus
  siRNA target sequence for 2610102K23Rik (NM_153787.1,2562-2580).
ggaaccttttttcgaatta

SEQ ID NO: 771068 - DNA, 19 bp, Mus musculus
  siRNA target sequence for 2610102K23Rik (NM_153787.1,2617-2635).
caaatactggtccaaacaa

SEQ ID NO: 771069 - DNA, 19 bp, Mus musculus
  siRNA target sequence for 2610102K23Rik (NM_153787.1,2625-2643).
ggtccaaacaactcaaata

SEQ ID NO: 771070 - DNA, 19 bp, Mus musculus
  siRNA target sequence for 2610102K23Rik (NM_153787.1,2695-2713).
caaagagcaagaagtactt

SEQ ID NO: 771071 - DNA, 19 bp, Mus musculus
  siRNA target sequence for 2610102K23Rik (NM_153787.1,2717-2735).
gcacgatgacagagatgat

SEQ ID NO: 771072 - DNA, 19 bp, Mus musculus
  siRNA target sequence for 2610102K23Rik (NM_153787.1,2728-2746).
gagatgatggtgtggatta

SEQ ID NO: 771073 - DNA, 19 bp, Mus musculus
  siRNA target sequence for 2610102K23Rik (NM_153787.1,2730-2748).
gatgatggtgtggattact

SEQ ID NO: 771074 - DNA, 19 bp, Mus musculus
  siRNA target sequence for 2610102K23Rik (NM_153787.1,2761-2779).
gaagaggtcgtggtacttt

SEQ ID NO: 771075 - DNA, 19 bp, Mus musculus
  siRNA target sequence for 2610102K23Rik (NM_153787.1,2764-2782).
gaggtcgtggtacttttca

SEQ ID NO: 771076 - DNA, 19 bp, Mus musculus
  siRNA target sequence for 2610102K23Rik (NM_153787.1,2791-2809).
gagggcgctttaatttcaa

SEQ ID NO: 771077 - DNA, 19 bp, Mus musculus
  siRNA target sequence for 2610102K23Rik (NM_153787.1,2793-2811).
gggcgctttaatttcaaaa

SEQ ID NO: 771078 - DNA, 19 bp, Mus musculus
  siRNA target sequence for 2610102K23Rik (NM_153787.1,2827-2845).
caaaatggactcatgacaa

SEQ ID NO: 771079 - DNA, 19 bp, Mus musculus
  siRNA target sequence for 2610102K23Rik (NM_153787.1,2833-2851).
ggactcatgacaaatacca

SEQ ID NO: 771080 - DNA, 19 bp, Mus musculus
  siRNA target sequence for 2610102K23Rik (NM_153787.1,2834-2852).
gactcatgacaaataccaa

SEQ ID NO: 771081 - DNA, 19 bp, Mus musculus
  siRNA target sequence for 2610102K23Rik (NM_153787.1,2874-2892).
gacgaagagaccatggaaa

SEQ ID NO: 771082 - DNA, 19 bp, Mus musculus
  siRNA target sequence for E030034P13Rik (NM_153791.1,725-743).
gcaaccctaccgaacaata

SEQ ID NO: 771083 - DNA, 19 bp, Mus musculus
  siRNA target sequence for E030034P13Rik (NM_153791.1,729-747).
ccctaccgaacaatactct

SEQ ID NO: 771084 - DNA, 19 bp, Mus musculus
  siRNA target sequence for E030034P13Rik (NM_153791.1,908-926).
gacaaggtgtactggaaat

SEQ ID NO: 771085 - DNA, 19 bp, Mus musculus
  siRNA target sequence for E030034P13Rik (NM_153791.1,1310-1328).
ctctacaagcgggaaaaga

SEQ ID NO: 771086 - DNA, 19 bp, Mus musculus
  siRNA target sequence for E030034P13Rik (NM_153791.1,1434-1452).
gccactcacctgacataga

SEQ ID NO: 771087 - DNA, 19 bp, Mus musculus
  siRNA target sequence for E030034P13Rik (NM_153791.1,1941-1959).
caccagacctgttaggatt

SEQ ID NO: 771088 - DNA, 19 bp, Mus musculus
  siRNA target sequence for E030034P13Rik (NM_153791.1,2018-2036).
gggcctgagttcctaaaga

SEQ ID NO: 771089 - DNA, 19 bp, Mus musculus
  siRNA target sequence for E030034P13Rik (NM_153791.1,2077-2095).
ctacagacgggaaaaagca

SEQ ID NO: 771090 - DNA, 19 bp, Mus musculus
  siRNA target sequence for 4631403P03Rik (NM_153793.1,382-400).
cccaacatgggctgtacat

SEQ ID NO: 771091 - DNA, 19 bp, Mus musculus
  siRNA target sequence for 4631403P03Rik (NM_153793.1,560-578).
cacagtagagcggattgtt

SEQ ID NO: 771092 - DNA, 19 bp, Mus musculus
  siRNA target sequence for 4631403P03Rik (NM_153793.1,576-594).
gttcgctgcatcatccaaa

SEQ ID NO: 771093 - DNA, 19 bp, Mus musculus
  siRNA target sequence for 4631403P03Rik (NM_153793.1,848-866).
gggcagattccgagtaaca

SEQ ID NO: 771094 - DNA, 19 bp, Mus musculus
  siRNA target sequence for 4631403P03Rik (NM_153793.1,858-876).
cgagtaacacacattgaga

SEQ ID NO: 771095 - DNA, 19 bp, Mus musculus
  siRNA target sequence for 4631403P03Rik (NM_153793.1,878-896).
gcgctacggcctacatgaa

SEQ ID NO: 771096 - DNA, 19 bp, Mus musculus
  siRNA target sequence for 4631403P03Rik (NM_153793.1,881-899).
ctacggcctacatgaacat

SEQ ID NO: 771097 - DNA, 19 bp, Mus musculus
  siRNA target sequence for 4631403P03Rik (NM_153793.1,1088-1106).
cctcgtcccttgtacactt

SEQ ID NO: 771098 - DNA, 19 bp, Mus musculus
  siRNA target sequence for 4631403P03Rik (NM_153793.1,1166-1184).
cccagggctgtctagtcaa

SEQ ID NO: 771099 - DNA, 19 bp, Mus musculus
  siRNA target sequence for 4933403F05Rik (NM_153794.2,278-296).
cataaaagggccgttactt

SEQ ID NO: 771100 - DNA, 19 bp, Mus musculus
  siRNA target sequence for 4933403F05Rik (NM_153794.2,299-317).
gcatagaggtgaatacaga

SEQ ID NO: 771101 - DNA, 19 bp, Mus musculus
  siRNA target sequence for 4933403F05Rik (NM_153794.2,325-343).
ggacaccacaccttcgaaa

SEQ ID NO: 771102 - DNA, 19 bp, Mus musculus
  siRNA target sequence for 4933403F05Rik (NM_153794.2,339-357).
cgaaagcagtggctacatt

SEQ ID NO: 771103 - DNA, 19 bp, Mus musculus
  siRNA target sequence for 4933403F05Rik (NM_153794.2,383-401).
gcaaaggaatctcttagat

SEQ ID NO: 771104 - DNA, 19 bp, Mus musculus
  siRNA target sequence for 4933403F05Rik (NM_153794.2,438-456).
cgatgggagcaggacattt

SEQ ID NO: 771105 - DNA, 19 bp, Mus musculus
  siRNA target sequence for 4933403F05Rik (NM_153794.2,491-509).
ccaggaaactccatcagaa

SEQ ID NO: 771106 - DNA, 19 bp, Mus musculus
  siRNA target sequence for 4933403F05Rik (NM_153794.2,529-547).
ctttacaagacaaatctat

SEQ ID NO: 771107 - DNA, 19 bp, Mus musculus
  siRNA target sequence for 4933403F05Rik (NM_153794.2,539-557).
caaatctatcagtctgtat

SEQ ID NO: 771108 - DNA, 19 bp, Mus musculus
  siRNA target sequence for 4933403F05Rik (NM_153794.2,550-568).
gtctgtatcaacggtttaa

SEQ ID NO: 771109 - DNA, 19 bp, Mus musculus
  siRNA target sequence for 4933403F05Rik (NM_153794.2,552-570).
ctgtatcaacggtttaaga

SEQ ID NO: 771110 - DNA, 19 bp, Mus musculus
  siRNA target sequence for 4933403F05Rik (NM_153794.2,558-576).
caacggtttaagaagacat

SEQ ID NO: 771111 - DNA, 19 bp, Mus musculus
  siRNA target sequence for 4933403F05Rik (NM_153794.2,561-579).
cggtttaagaagacattta

SEQ ID NO: 771112 - DNA, 19 bp, Mus musculus
  siRNA target sequence for 4933403F05Rik (NM_153794.2,572-590).
gacatttagacaatatgga

SEQ ID NO: 771113 - DNA, 19 bp, Mus musculus
  siRNA target sequence for 4933403F05Rik (NM_153794.2,574-592).
catttagacaatatggaaa

SEQ ID NO: 771114 - DNA, 19 bp, Mus musculus
  siRNA target sequence for 4933403F05Rik (NM_153794.2,603-621).
cctgtgcacctaataactt

SEQ ID NO: 771115 - DNA, 19 bp, Mus musculus
  siRNA target sequence for 4933403F05Rik (NM_153794.2,631-649).
ggtttggaacattttacta

SEQ ID NO: 771116 - DNA, 19 bp, Mus musculus
  siRNA target sequence for 4933403F05Rik (NM_153794.2,636-654).
ggaacattttactatgcaa

SEQ ID NO: 771117 - DNA, 19 bp, Mus musculus
  siRNA target sequence for 4933403F05Rik (NM_153794.2,647-665).
ctatgcaactataaaagga

SEQ ID NO: 771118 - DNA, 19 bp, Mus musculus
  siRNA target sequence for 4933403F05Rik (NM_153794.2,754-772).
cagcctacgccatgtttaa

SEQ ID NO: 771119 - DNA, 19 bp, Mus musculus
  siRNA target sequence for 4933403F05Rik (NM_153794.2,757-775).
cctacgccatgtttaagat

SEQ ID NO: 771120 - DNA, 19 bp, Mus musculus
  siRNA target sequence for 4933403F05Rik (NM_153794.2,814-832).
cctcctttaccgtgaagta

SEQ ID NO: 771121 - DNA, 19 bp, Mus musculus
  siRNA target sequence for 4933403F05Rik (NM_153794.2,815-833).
ctcctttaccgtgaagtat

SEQ ID NO: 771122 - DNA, 19 bp, Mus musculus
  siRNA target sequence for 4933403F05Rik (NM_153794.2,817-835).
cctttaccgtgaagtattt

SEQ ID NO: 771123 - DNA, 19 bp, Mus musculus
  siRNA target sequence for 4933403F05Rik (NM_153794.2,837-855).
cgaagtcacggctacatgt

SEQ ID NO: 771124 - DNA, 19 bp, Mus musculus
  siRNA target sequence for 4933403F05Rik (NM_153794.2,865-883).
cgcctgtcaaggagtactt

SEQ ID NO: 771125 - DNA, 19 bp, Mus musculus
  siRNA target sequence for 4933403F05Rik (NM_153794.2,944-962).
cagactcactgagaagtta

SEQ ID NO: 771126 - DNA, 19 bp, Mus musculus
  siRNA target sequence for B230341L19Rik (NM_153800.2,338-356).
ggggatcagctcttctact

SEQ ID NO: 771127 - DNA, 19 bp, Mus musculus
  siRNA target sequence for B230341L19Rik (NM_153800.2,339-357).
gggatcagctcttctacta

SEQ ID NO: 771128 - DNA, 19 bp, Mus musculus
  siRNA target sequence for B230341L19Rik (NM_153800.2,347-365).
ctcttctactacaaagaca

SEQ ID NO: 771129 - DNA, 19 bp, Mus musculus
  siRNA target sequence for B230341L19Rik (NM_153800.2,385-403).
gggatttatttctctacaa

SEQ ID NO: 771130 - DNA, 19 bp, Mus musculus
  siRNA target sequence for B230341L19Rik (NM_153800.2,444-462).
caggaaagcacctgtttga

SEQ ID NO: 771131 - DNA, 19 bp, Mus musculus
  siRNA target sequence for B230341L19Rik (NM_153800.2,447-465).
gaaagcacctgtttgagat

SEQ ID NO: 771132 - DNA, 19 bp, Mus musculus
  siRNA target sequence for B230341L19Rik (NM_153800.2,534-552).
gctcccagcgggatatgga

SEQ ID NO: 771133 - DNA, 19 bp, Mus musculus
  siRNA target sequence for B230341L19Rik (NM_153800.2,1005-1023).
gatacatctgcaagtttct

SEQ ID NO: 771134 - DNA, 19 bp, Mus musculus
  siRNA target sequence for B230341L19Rik (NM_153800.2,1040-1058).
cactcagatgtcaataaga

SEQ ID NO: 771135 - DNA, 19 bp, Mus musculus
  siRNA target sequence for B230341L19Rik (NM_153800.2,1096-1114).
cattcttcggccacagata

SEQ ID NO: 771136 - DNA, 19 bp, Mus musculus
  siRNA target sequence for B230341L19Rik (NM_153800.2,1295-1313).
cctggcttgcccacacata

SEQ ID NO: 771137 - DNA, 19 bp, Mus musculus
  siRNA target sequence for B230341L19Rik (NM_153800.2,1304-1322).
cccacacataggacttcat

SEQ ID NO: 771138 - DNA, 19 bp, Mus musculus
  siRNA target sequence for B230341L19Rik (NM_153800.2,1337-1355).
gctgcagcagtgctatcta

SEQ ID NO: 771139 - DNA, 19 bp, Mus musculus
  siRNA target sequence for B230341L19Rik (NM_153800.2,1478-1496).
cccaaaggggtcaactcat

SEQ ID NO: 771140 - DNA, 19 bp, Mus musculus
  siRNA target sequence for B230341L19Rik (NM_153800.2,1523-1541).
ggtgggaactggctcataa

SEQ ID NO: 771141 - DNA, 19 bp, Mus musculus
  siRNA target sequence for B230341L19Rik (NM_153800.2,1639-1657).
gccgccatctagccaattt

SEQ ID NO: 771142 - DNA, 19 bp, Mus musculus
  siRNA target sequence for B230341L19Rik (NM_153800.2,1640-1658).
ccgccatctagccaatttt

SEQ ID NO: 771143 - DNA, 19 bp, Mus musculus
  siRNA target sequence for Srd5a2l2 (NM_153801.1,224-242).
cgcaagagggaattgttat

SEQ ID NO: 771144 - DNA, 19 bp, Mus musculus
  siRNA target sequence for Srd5a2l2 (NM_153801.1,257-275).
cagtccacaatgaagaata

SEQ ID NO: 771145 - DNA, 19 bp, Mus musculus
  siRNA target sequence for Srd5a2l2 (NM_153801.1,268-286).
gaagaataatgcgagaaat

SEQ ID NO: 771146 - DNA, 19 bp, Mus musculus
  siRNA target sequence for Srd5a2l2 (NM_153801.1,279-297).
cgagaaatttccactcttt

SEQ ID NO: 771147 - DNA, 19 bp, Mus musculus
  siRNA target sequence for Srd5a2l2 (NM_153801.1,289-307).
ccactctttgtcacaactt

SEQ ID NO: 771148 - DNA, 19 bp, Mus musculus
  siRNA target sequence for Srd5a2l2 (NM_153801.1,294-312).
ctttgtcacaacttgtact

SEQ ID NO: 771149 - DNA, 19 bp, Mus musculus
  siRNA target sequence for Srd5a2l2 (NM_153801.1,333-351).
ctactacagcagtcaaaca

SEQ ID NO: 771150 - DNA, 19 bp, Mus musculus
  siRNA target sequence for Srd5a2l2 (NM_153801.1,354-372).
caaaaacgactcactttga

SEQ ID NO: 771151 - DNA, 19 bp, Mus musculus
  siRNA target sequence for Srd5a2l2 (NM_153801.1,363-381).
ctcactttgagatcgaaat

SEQ ID NO: 771152 - DNA, 19 bp, Mus musculus
  siRNA target sequence for Srd5a2l2 (NM_153801.1,425-443).
gtcacacaaacatcaacta

SEQ ID NO: 771153 - DNA, 19 bp, Mus musculus
  siRNA target sequence for Srd5a2l2 (NM_153801.1,429-447).
cacaaacatcaactattca

SEQ ID NO: 771154 - DNA, 19 bp, Mus musculus
  siRNA target sequence for Srd5a2l2 (NM_153801.1,435-453).
catcaactattcatgatgt

SEQ ID NO: 771155 - DNA, 19 bp, Mus musculus
  siRNA target sequence for Srd5a2l2 (NM_153801.1,438-456).
caactattcatgatgtcaa

SEQ ID NO: 771156 - DNA, 19 bp, Mus musculus
  siRNA target sequence for Srd5a2l2 (NM_153801.1,484-502).
gtggtacccttctcgaatt

SEQ ID NO: 771157 - DNA, 19 bp, Mus musculus
  siRNA target sequence for Srd5a2l2 (NM_153801.1,495-513).
ctcgaattggcctacaact

SEQ ID NO: 771158 - DNA, 19 bp, Mus musculus
  siRNA target sequence for Srd5a2l2 (NM_153801.1,498-516).
gaattggcctacaactaga

SEQ ID NO: 771159 - DNA, 19 bp, Mus musculus
  siRNA target sequence for Srd5a2l2 (NM_153801.1,538-556).
ggactacatcacagttcaa

SEQ ID NO: 771160 - DNA, 19 bp, Mus musculus
  siRNA target sequence for Srd5a2l2 (NM_153801.1,613-631).
cgggtggactacagtcttt

SEQ ID NO: 771161 - DNA, 19 bp, Mus musculus
  siRNA target sequence for Srd5a2l2 (NM_153801.1,614-632).
gggtggactacagtctttt

SEQ ID NO: 771162 - DNA, 19 bp, Mus musculus
  siRNA target sequence for Srd5a2l2 (NM_153801.1,626-644).
gtctttttggctgaatact

SEQ ID NO: 771163 - DNA, 19 bp, Mus musculus
  siRNA target sequence for Srd5a2l2 (NM_153801.1,645-663).
caggacctctgttaatata

SEQ ID NO: 771164 - DNA, 19 bp, Mus musculus
  siRNA target sequence for Srd5a2l2 (NM_153801.1,679-697).
gaggagctcatacatatat

SEQ ID NO: 771165 - DNA, 19 bp, Mus musculus
  siRNA target sequence for Srd5a2l2 (NM_153801.1,682-700).
gagctcatacatatatgat

SEQ ID NO: 771166 - DNA, 19 bp, Mus musculus
  siRNA target sequence for Srd5a2l2 (NM_153801.1,684-702).
gctcatacatatatgatgt

SEQ ID NO: 771167 - DNA, 19 bp, Mus musculus
  siRNA target sequence for Srd5a2l2 (NM_153801.1,726-744).
ggcaccctgtggtacactt

SEQ ID NO: 771168 - DNA, 19 bp, Mus musculus
  siRNA target sequence for Srd5a2l2 (NM_153801.1,818-836).
ggacacagtcctatgaaaa

SEQ ID NO: 771169 - DNA, 19 bp, Mus musculus
  siRNA target sequence for Srd5a2l2 (NM_153801.1,912-930).
caccaccatcatttggaaa

SEQ ID NO: 771170 - DNA, 19 bp, Mus musculus
  siRNA target sequence for Srd5a2l2 (NM_153801.1,977-995).
ggaaatcatttcatcaata

SEQ ID NO: 771171 - DNA, 19 bp, Mus musculus
  siRNA target sequence for Srd5a2l2 (NM_153801.1,1057-1075).
cccctttacatggttgttt

SEQ ID NO: 771172 - DNA, 19 bp, Mus musculus
  siRNA target sequence for Srd5a2l2 (NM_153801.1,1086-1104).
cctgtcctaactataccta

SEQ ID NO: 771173 - DNA, 19 bp, Mus musculus
  siRNA target sequence for Srd5a2l2 (NM_153801.1,1087-1105).
ctgtcctaactatacctat

SEQ ID NO: 771174 - DNA, 19 bp, Mus musculus
  siRNA target sequence for Srd5a2l2 (NM_153801.1,1106-1124).
gagatcggatcttggatta

SEQ ID NO: 771175 - DNA, 19 bp, Mus musculus
  siRNA target sequence for Srd5a2l2 (NM_153801.1,1108-1126).
gatcggatcttggattagt

SEQ ID NO: 771176 - DNA, 19 bp, Mus musculus
  siRNA target sequence for Srd5a2l2 (NM_153801.1,1112-1130).
ggatcttggattagtttca

SEQ ID NO: 771177 - DNA, 19 bp, Mus musculus
  siRNA target sequence for Srd5a2l2 (NM_153801.1,1119-1137).
ggattagtttcacagttat

SEQ ID NO: 771178 - DNA, 19 bp, Mus musculus
  siRNA target sequence for Srd5a2l2 (NM_153801.1,1154-1172).
gttggtattttcacaatct

SEQ ID NO: 771179 - DNA, 19 bp, Mus musculus
  siRNA target sequence for Srd5a2l2 (NM_153801.1,1158-1176).
gtattttcacaatcttaat

SEQ ID NO: 771180 - DNA, 19 bp, Mus musculus
  siRNA target sequence for Srd5a2l2 (NM_153801.1,1191-1209).
ctctgtgggcacgaaagaa

SEQ ID NO: 771181 - DNA, 19 bp, Mus musculus
  siRNA target sequence for Srd5a2l2 (NM_153801.1,1224-1242).
ggaagaagttcaactcata

SEQ ID NO: 771182 - DNA, 19 bp, Mus musculus
  siRNA target sequence for Srd5a2l2 (NM_153801.1,1231-1249).
gttcaactcatatgttcat

SEQ ID NO: 771183 - DNA, 19 bp, Mus musculus
  siRNA target sequence for Srd5a2l2 (NM_153801.1,1252-1270).
gaaatcagccataattcca

SEQ ID NO: 771184 - DNA, 19 bp, Mus musculus
  siRNA target sequence for Srd5a2l2 (NM_153801.1,1259-1277).
gccataattccactcatat

SEQ ID NO: 771185 - DNA, 19 bp, Mus musculus
  siRNA target sequence for Srd5a2l2 (NM_153801.1,1261-1279).
cataattccactcatatta

SEQ ID NO: 771186 - DNA, 19 bp, Mus musculus
  siRNA target sequence for BC030417 (NM_153804.2,1381-1399).
ctgtcacccactataagca

SEQ ID NO: 771187 - DNA, 19 bp, Mus musculus
  siRNA target sequence for BC030417 (NM_153804.2,1567-1585).
gcccagagcggatgaaaaa

SEQ ID NO: 771188 - DNA, 19 bp, Mus musculus
  siRNA target sequence for BC030417 (NM_153804.2,1782-1800).
gtggaccgttttctcttta

SEQ ID NO: 771189 - DNA, 19 bp, Mus musculus
  siRNA target sequence for BC030417 (NM_153804.2,1871-1889).
cctggggatgtttgttatt

SEQ ID NO: 771190 - DNA, 19 bp, Mus musculus
  siRNA target sequence for BC030417 (NM_153804.2,1893-1911).
gatttggcgtctcttctta

SEQ ID NO: 771191 - DNA, 19 bp, Mus musculus
  siRNA target sequence for BC030417 (NM_153804.2,1946-1964).
gagtagcacttggaaatca

SEQ ID NO: 771192 - DNA, 19 bp, Mus musculus
  siRNA target sequence for BC030417 (NM_153804.2,2004-2022).
ggctgggtgggcggaaaaa

SEQ ID NO: 771193 - DNA, 19 bp, Mus musculus
  siRNA target sequence for BC030417 (NM_153804.2,2102-2120).
ccatgacgggatttgctta

SEQ ID NO: 771194 - DNA, 19 bp, Mus musculus
  siRNA target sequence for BC030417 (NM_153804.2,2103-2121).
catgacgggatttgcttat

SEQ ID NO: 771195 - DNA, 19 bp, Mus musculus
  siRNA target sequence for BC030417 (NM_153804.2,2125-2143).
ctcgtggagttattagaat

SEQ ID NO: 771196 - DNA, 19 bp, Mus musculus
  siRNA target sequence for AA408582 (NM_153806.1,68-86).
gtctgctcctcggagaatt

SEQ ID NO: 771197 - DNA, 19 bp, Mus musculus
  siRNA target sequence for AA408582 (NM_153806.1,80-98).
gagaattgggacacatcta

SEQ ID NO: 771198 - DNA, 19 bp, Mus musculus
  siRNA target sequence for AA408582 (NM_153806.1,82-100).
gaattgggacacatctaga

SEQ ID NO: 771199 - DNA, 19 bp, Mus musculus
  siRNA target sequence for AA408582 (NM_153806.1,200-218).
gatcattgtgcttatttct

SEQ ID NO: 771200 - DNA, 19 bp, Mus musculus
  siRNA target sequence for AA408582 (NM_153806.1,275-293).
ggaccaagagcccattgta

SEQ ID NO: 771201 - DNA, 19 bp, Mus musculus
  siRNA target sequence for AA408582 (NM_153806.1,282-300).
gagcccattgtaagagtaa

SEQ ID NO: 771202 - DNA, 19 bp, Mus musculus
  siRNA target sequence for AA408582 (NM_153806.1,284-302).
gcccattgtaagagtaact

SEQ ID NO: 771203 - DNA, 19 bp, Mus musculus
  siRNA target sequence for AA408582 (NM_153806.1,285-303).
cccattgtaagagtaacta

SEQ ID NO: 771204 - DNA, 19 bp, Mus musculus
  siRNA target sequence for AA408582 (NM_153806.1,304-322).
ggaaacggcagatcgtaat

SEQ ID NO: 771205 - DNA, 19 bp, Mus musculus
  siRNA target sequence for AA408582 (NM_153806.1,305-323).
gaaacggcagatcgtaatt

SEQ ID NO: 771206 - DNA, 19 bp, Mus musculus
  siRNA target sequence for AA408582 (NM_153806.1,309-327).
cggcagatcgtaattgctt

SEQ ID NO: 771207 - DNA, 19 bp, Mus musculus
  siRNA target sequence for AA408582 (NM_153806.1,334-352).
caaagtccactgttaggaa

SEQ ID NO: 771208 - DNA, 19 bp, Mus musculus
  siRNA target sequence for AA408582 (NM_153806.1,417-435).
catgtttcaggggtttcta

SEQ ID NO: 771209 - DNA, 19 bp, Mus musculus
  siRNA target sequence for AA408582 (NM_153806.1,466-484).
gaaataaggctaattctca

SEQ ID NO: 771210 - DNA, 19 bp, Mus musculus
  siRNA target sequence for AA408582 (NM_153806.1,509-527).
gtcgggaactgtatctgat

SEQ ID NO: 771211 - DNA, 19 bp, Mus musculus
  siRNA target sequence for AA408582 (NM_153806.1,546-564).
ggcatttcatcgttagaga

SEQ ID NO: 771212 - DNA, 19 bp, Mus musculus
  siRNA target sequence for AA408582 (NM_153806.1,561-579).
gagatcttgccgagaacaa

SEQ ID NO: 771213 - DNA, 19 bp, Mus musculus
  siRNA target sequence for AA408582 (NM_153806.1,563-581).
gatcttgccgagaacaaca

SEQ ID NO: 771214 - DNA, 19 bp, Mus musculus
  siRNA target sequence for AA408582 (NM_153806.1,611-629).
cccagctgagaaaaacgat

SEQ ID NO: 771215 - DNA, 19 bp, Mus musculus
  siRNA target sequence for AA408582 (NM_153806.1,612-630).
ccagctgagaaaaacgata

SEQ ID NO: 771216 - DNA, 19 bp, Mus musculus
  siRNA target sequence for AA408582 (NM_153806.1,656-674).
gcaaattgtgggtatgtct

SEQ ID NO: 771217 - DNA, 19 bp, Mus musculus
  siRNA target sequence for AA408582 (NM_153806.1,689-707).
ctcagatgctactcagtta

SEQ ID NO: 771218 - DNA, 19 bp, Mus musculus
  siRNA target sequence for AA408582 (NM_153806.1,709-727).
cagcaagaccactttctca

SEQ ID NO: 771219 - DNA, 19 bp, Mus musculus
  siRNA target sequence for AA408582 (NM_153806.1,780-798).
gattccagccccagaaatt

SEQ ID NO: 771220 - DNA, 19 bp, Mus musculus
  siRNA target sequence for AA408582 (NM_153806.1,827-845).
ccaaaatttgcatatccaa

SEQ ID NO: 771221 - DNA, 19 bp, Mus musculus
  siRNA target sequence for AA408582 (NM_153806.1,836-854).
gcatatccaagaggaaaaa

SEQ ID NO: 771222 - DNA, 19 bp, Mus musculus
  siRNA target sequence for AA408582 (NM_153806.1,858-876).
gccaatgttgtgtctctta

SEQ ID NO: 771223 - DNA, 19 bp, Mus musculus
  siRNA target sequence for AA408582 (NM_153806.1,867-885).
gtgtctcttacagaagtta

SEQ ID NO: 771224 - DNA, 19 bp, Mus musculus
  siRNA target sequence for AA408582 (NM_153806.1,882-900).
gttagaaaggagaattgta

SEQ ID NO: 771225 - DNA, 19 bp, Mus musculus
  siRNA target sequence for AA408582 (NM_153806.1,898-916).
gtaagagtctggatgaaga

SEQ ID NO: 771226 - DNA, 19 bp, Mus musculus
  siRNA target sequence for AA408582 (NM_153806.1,957-975).
gattcccagcggagtcttt

SEQ ID NO: 771227 - DNA, 19 bp, Mus musculus
  siRNA target sequence for AA408582 (NM_153806.1,1001-1019).
gcagtcagtgtctcagaat

SEQ ID NO: 771228 - DNA, 19 bp, Mus musculus
  siRNA target sequence for AA408582 (NM_153806.1,1004-1022).
gtcagtgtctcagaatcat

SEQ ID NO: 771229 - DNA, 19 bp, Mus musculus
  siRNA target sequence for AA408582 (NM_153806.1,1020-1038).
cattcaagcaccccaaata

SEQ ID NO: 771230 - DNA, 19 bp, Mus musculus
  siRNA target sequence for AA408582 (NM_153806.1,1066-1084).
cagatcggaaggctctaat

SEQ ID NO: 771231 - DNA, 19 bp, Mus musculus
  siRNA target sequence for AA408582 (NM_153806.1,1071-1089).
cggaaggctctaatgaaat

SEQ ID NO: 771232 - DNA, 19 bp, Mus musculus
  siRNA target sequence for AA408582 (NM_153806.1,1073-1091).
gaaggctctaatgaaatca

SEQ ID NO: 771233 - DNA, 19 bp, Mus musculus
  siRNA target sequence for AA408582 (NM_153806.1,1076-1094).
ggctctaatgaaatcatta

SEQ ID NO: 771234 - DNA, 19 bp, Mus musculus
  siRNA target sequence for AA408582 (NM_153806.1,1078-1096).
ctctaatgaaatcattaga

SEQ ID NO: 771235 - DNA, 19 bp, Mus musculus
  siRNA target sequence for AA408582 (NM_153806.1,1119-1137).
gtagaaaggtggaatgaca

SEQ ID NO: 771236 - DNA, 19 bp, Mus musculus
  siRNA target sequence for AA408582 (NM_153806.1,1145-1163).
gggcagcggaaaaaagagt

SEQ ID NO: 771237 - DNA, 19 bp, Mus musculus
  siRNA target sequence for AA408582 (NM_153806.1,1214-1232).
cacgggtgcaggtatcagt

SEQ ID NO: 771238 - DNA, 19 bp, Mus musculus
  siRNA target sequence for AA408582 (NM_153806.1,1266-1284).
gaatgtgataccaaaccat

SEQ ID NO: 771239 - DNA, 19 bp, Mus musculus
  siRNA target sequence for AA408582 (NM_153806.1,1319-1337).
ggacagtcctgtcttatta

SEQ ID NO: 771240 - DNA, 19 bp, Mus musculus
  siRNA target sequence for AA408582 (NM_153806.1,1324-1342).
gtcctgtcttattatttct

SEQ ID NO: 771241 - DNA, 19 bp, Mus musculus
  siRNA target sequence for AA408582 (NM_153806.1,1459-1477).
gtgacagtgcactgtttgt

SEQ ID NO: 771242 - DNA, 19 bp, Mus musculus
  siRNA target sequence for AA408582 (NM_153806.1,1463-1481).
cagtgcactgtttgtaatt

SEQ ID NO: 771243 - DNA, 19 bp, Mus musculus
  siRNA target sequence for AA408582 (NM_153806.1,1465-1483).
gtgcactgtttgtaattga

SEQ ID NO: 771244 - DNA, 19 bp, Mus musculus
  siRNA target sequence for AA408582 (NM_153806.1,1494-1512).
ggattgagtgctgacaaaa

SEQ ID NO: 771245 - DNA, 19 bp, Mus musculus
  siRNA target sequence for AA408582 (NM_153806.1,1499-1517).
gagtgctgacaaaaacttt

SEQ ID NO: 771246 - DNA, 19 bp, Mus musculus
  siRNA target sequence for AA408582 (NM_153806.1,1534-1552).
ctccgagtgaagttgctat

SEQ ID NO: 771247 - DNA, 19 bp, Mus musculus
  siRNA target sequence for AA408582 (NM_153806.1,1537-1555).
cgagtgaagttgctattga

SEQ ID NO: 771248 - DNA, 19 bp, Mus musculus
  siRNA target sequence for AA408582 (NM_153806.1,1545-1563).
gttgctattgaggaagaaa

SEQ ID NO: 771249 - DNA, 19 bp, Mus musculus
  siRNA target sequence for AA408582 (NM_153806.1,1636-1654).
ctagtgacgaagaagactt

SEQ ID NO: 771250 - DNA, 19 bp, Mus musculus
  siRNA target sequence for AA408582 (NM_153806.1,1724-1742).
gcagttgggtggtctgtat

SEQ ID NO: 771251 - DNA, 19 bp, Mus musculus
  siRNA target sequence for AA408582 (NM_153806.1,1725-1743).
cagttgggtggtctgtata

SEQ ID NO: 771252 - DNA, 19 bp, Mus musculus
  siRNA target sequence for AA408582 (NM_153806.1,1730-1748).
gggtggtctgtatattaat

SEQ ID NO: 771253 - DNA, 19 bp, Mus musculus
  siRNA target sequence for AA408582 (NM_153806.1,1734-1752).
ggtctgtatattaatttca

SEQ ID NO: 771254 - DNA, 19 bp, Mus musculus
  siRNA target sequence for AA408582 (NM_153806.1,1735-1753).
gtctgtatattaatttcaa

SEQ ID NO: 771255 - DNA, 19 bp, Mus musculus
  siRNA target sequence for AA408582 (NM_153806.1,1769-1787).
gcctcacaaggaaactcta

SEQ ID NO: 771256 - DNA, 19 bp, Mus musculus
  siRNA target sequence for AA408582 (NM_153806.1,1770-1788).
cctcacaaggaaactctaa

SEQ ID NO: 771257 - DNA, 19 bp, Mus musculus
  siRNA target sequence for AA408582 (NM_153806.1,1885-1903).
ccaagcatcgacttcagaa

SEQ ID NO: 771258 - DNA, 19 bp, Mus musculus
  siRNA target sequence for AA408582 (NM_153806.1,2016-2034).
ggcatggaccccaaaaggt

SEQ ID NO: 771259 - DNA, 19 bp, Mus musculus
  siRNA target sequence for AA408582 (NM_153806.1,2018-2036).
catggaccccaaaaggttt

SEQ ID NO: 771260 - DNA, 19 bp, Mus musculus
  siRNA target sequence for AA408582 (NM_153806.1,2100-2118).
ccagccgacttctaccatt

SEQ ID NO: 771261 - DNA, 19 bp, Mus musculus
  siRNA target sequence for AA408582 (NM_153806.1,2108-2126).
cttctaccattcacgaatt

SEQ ID NO: 771262 - DNA, 19 bp, Mus musculus
  siRNA target sequence for AA408582 (NM_153806.1,2180-2198).
gttcaggagatttaatcga

SEQ ID NO: 771263 - DNA, 19 bp, Mus musculus
  siRNA target sequence for Arhgap15 (NM_153820.1,170-188).
caggcagagccaaactaaa

SEQ ID NO: 771264 - DNA, 19 bp, Mus musculus
  siRNA target sequence for Arhgap15 (NM_153820.1,233-251).
ccggcacagaaggaatcat

SEQ ID NO: 771265 - DNA, 19 bp, Mus musculus
  siRNA target sequence for Arhgap15 (NM_153820.1,280-298).
caccactagaacatccaat

SEQ ID NO: 771266 - DNA, 19 bp, Mus musculus
  siRNA target sequence for Arhgap15 (NM_153820.1,384-402).
gttctttctggtcgaaaaa

SEQ ID NO: 771267 - DNA, 19 bp, Mus musculus
  siRNA target sequence for Arhgap15 (NM_153820.1,391-409).
ctggtcgaaaaattgaatt

SEQ ID NO: 771268 - DNA, 19 bp, Mus musculus
  siRNA target sequence for Arhgap15 (NM_153820.1,396-414).
cgaaaaattgaattttaca

SEQ ID NO: 771269 - DNA, 19 bp, Mus musculus
  siRNA target sequence for Arhgap15 (NM_153820.1,454-472).
ggcacaacgtggaaagtgt

SEQ ID NO: 771270 - DNA, 19 bp, Mus musculus
  siRNA target sequence for Arhgap15 (NM_153820.1,462-480).
gtggaaagtgtggatttgt

SEQ ID NO: 771271 - DNA, 19 bp, Mus musculus
  siRNA target sequence for Arhgap15 (NM_153820.1,479-497).
gtgtggtgcacatatagaa

SEQ ID NO: 771272 - DNA, 19 bp, Mus musculus
  siRNA target sequence for Arhgap15 (NM_153820.1,563-581).
ccttctacagtcagatatt

SEQ ID NO: 771273 - DNA, 19 bp, Mus musculus
  siRNA target sequence for Arhgap15 (NM_153820.1,576-594).
gatattgacttcctcatat

SEQ ID NO: 771274 - DNA, 19 bp, Mus musculus
  siRNA target sequence for Arhgap15 (NM_153820.1,601-619).
ggttccaagctatcaaaaa

SEQ ID NO: 771275 - DNA, 19 bp, Mus musculus
  siRNA target sequence for Arhgap15 (NM_153820.1,602-620).
gttccaagctatcaaaaat

SEQ ID NO: 771276 - DNA, 19 bp, Mus musculus
  siRNA target sequence for Arhgap15 (NM_153820.1,655-673).
ggtccctggagttgttcaa

SEQ ID NO: 771277 - DNA, 19 bp, Mus musculus
  siRNA target sequence for Arhgap15 (NM_153820.1,656-674).
gtccctggagttgttcaat

SEQ ID NO: 771278 - DNA, 19 bp, Mus musculus
  siRNA target sequence for Arhgap15 (NM_153820.1,658-676).
ccctggagttgttcaattt

SEQ ID NO: 771279 - DNA, 19 bp, Mus musculus
  siRNA target sequence for Arhgap15 (NM_153820.1,708-726).
cactgccacatcgatagaa

SEQ ID NO: 771280 - DNA, 19 bp, Mus musculus
  siRNA target sequence for Arhgap15 (NM_153820.1,710-728).
ctgccacatcgatagaaaa

SEQ ID NO: 771281 - DNA, 19 bp, Mus musculus
  siRNA target sequence for Arhgap15 (NM_153820.1,861-879).
caggaaaagggactcatta

SEQ ID NO: 771282 - DNA, 19 bp, Mus musculus
  siRNA target sequence for Arhgap15 (NM_153820.1,912-930).
gtgtgtgaacgagaacatt

SEQ ID NO: 771283 - DNA, 19 bp, Mus musculus
  siRNA target sequence for Arhgap15 (NM_153820.1,939-957).
ccatggtttgtaaagcaat

SEQ ID NO: 771284 - DNA, 19 bp, Mus musculus
  siRNA target sequence for Arhgap15 (NM_153820.1,943-961).
ggtttgtaaagcaatgcat

SEQ ID NO: 771285 - DNA, 19 bp, Mus musculus
  siRNA target sequence for Arhgap15 (NM_153820.1,982-1000).
gcctagacgttgatggaat

SEQ ID NO: 771286 - DNA, 19 bp, Mus musculus
  siRNA target sequence for Arhgap15 (NM_153820.1,983-1001).
cctagacgttgatggaatt

SEQ ID NO: 771287 - DNA, 19 bp, Mus musculus
  siRNA target sequence for Arhgap15 (NM_153820.1,989-1007).
cgttgatggaatttatcga

SEQ ID NO: 771288 - DNA, 19 bp, Mus musculus
  siRNA target sequence for Arhgap15 (NM_153820.1,1015-1033).
gcaatcttgcaacaataca

SEQ ID NO: 771289 - DNA, 19 bp, Mus musculus
  siRNA target sequence for Arhgap15 (NM_153820.1,1023-1041).
gcaacaatacagaagttaa

SEQ ID NO: 771290 - DNA, 19 bp, Mus musculus
  siRNA target sequence for Arhgap15 (NM_153820.1,1184-1202).
ggaggcgatcaaaaaacaa

SEQ ID NO: 771291 - DNA, 19 bp, Mus musculus
  siRNA target sequence for Arhgap15 (NM_153820.1,1225-1243).
ctatgaggtctctggtaaa

SEQ ID NO: 771292 - DNA, 19 bp, Mus musculus
  siRNA target sequence for Arhgap15 (NM_153820.1,1229-1247).
gaggtctctggtaaaacgt

SEQ ID NO: 771293 - DNA, 19 bp, Mus musculus
  siRNA target sequence for Arhgap15 (NM_153820.1,1255-1273).
caccaaatcatgataccat

SEQ ID NO: 771294 - DNA, 19 bp, Mus musculus
  siRNA target sequence for Arhgap15 (NM_153820.1,1288-1306).
gacatctaaccaagatagt

SEQ ID NO: 771295 - DNA, 19 bp, Mus musculus
  siRNA target sequence for Arhgap15 (NM_153820.1,1338-1356).
caaagcttggggattgtgt

SEQ ID NO: 771296 - DNA, 19 bp, Mus musculus
  siRNA target sequence for Arhgap15 (NM_153820.1,1398-1416).
gtagcggtccacatggtat

SEQ ID NO: 771297 - DNA, 19 bp, Mus musculus
  siRNA target sequence for Arhgap15 (NM_153820.1,1402-1420).
cggtccacatggtatacca

SEQ ID NO: 771298 - DNA, 19 bp, Mus musculus
  siRNA target sequence for Arhgap15 (NM_153820.1,1403-1421).
ggtccacatggtataccaa

SEQ ID NO: 771299 - DNA, 19 bp, Mus musculus
  siRNA target sequence for Arhgap15 (NM_153820.1,1404-1422).
gtccacatggtataccaaa

SEQ ID NO: 771300 - DNA, 19 bp, Mus musculus
  siRNA target sequence for Cpne1 (NM_170588.1,258-276).
ctccgtgtcctgtgaacat

SEQ ID NO: 771301 - DNA, 19 bp, Mus musculus
  siRNA target sequence for Cpne1 (NM_170588.1,260-278).
ccgtgtcctgtgaacatct

SEQ ID NO: 771302 - DNA, 19 bp, Mus musculus
  siRNA target sequence for Cpne1 (NM_170588.1,444-462).
gctgcgctttggaatctat

SEQ ID NO: 771303 - DNA, 19 bp, Mus musculus
  siRNA target sequence for Cpne1 (NM_170588.1,448-466).
cgctttggaatctatgaca

SEQ ID NO: 771304 - DNA, 19 bp, Mus musculus
  siRNA target sequence for Cpne1 (NM_170588.1,557-575).
ccttacccttgatgttgaa

SEQ ID NO: 771305 - DNA, 19 bp, Mus musculus
  siRNA target sequence for Cpne1 (NM_170588.1,654-672).
ggtggaagctagaaaccta

SEQ ID NO: 771306 - DNA, 19 bp, Mus musculus
  siRNA target sequence for Cpne1 (NM_170588.1,658-676).
gaagctagaaacctagata

SEQ ID NO: 771307 - DNA, 19 bp, Mus musculus
  siRNA target sequence for Cpne1 (NM_170588.1,661-679).
gctagaaacctagataaga

SEQ ID NO: 771308 - DNA, 19 bp, Mus musculus
  siRNA target sequence for Cpne1 (NM_170588.1,856-874).
cgctgctcagactatgaca

SEQ ID NO: 771309 - DNA, 19 bp, Mus musculus
  siRNA target sequence for Cpne1 (NM_170588.1,875-893).
gtgacggctcacatgatct

SEQ ID NO: 771310 - DNA, 19 bp, Mus musculus
  siRNA target sequence for Cpne1 (NM_170588.1,879-897).
cggctcacatgatctcatt

SEQ ID NO: 771311 - DNA, 19 bp, Mus musculus
  siRNA target sequence for Cpne1 (NM_170588.1,932-950).
cagtcccggctgagtttga

SEQ ID NO: 771312 - DNA, 19 bp, Mus musculus
  siRNA target sequence for Cpne1 (NM_170588.1,934-952).
gtcccggctgagtttgaat

SEQ ID NO: 771313 - DNA, 19 bp, Mus musculus
  siRNA target sequence for Cpne1 (NM_170588.1,936-954).
cccggctgagtttgaatgt

SEQ ID NO: 771314 - DNA, 19 bp, Mus musculus
  siRNA target sequence for Cpne1 (NM_170588.1,938-956).
cggctgagtttgaatgtgt

SEQ ID NO: 771315 - DNA, 19 bp, Mus musculus
  siRNA target sequence for Cpne1 (NM_170588.1,1023-1041).
ccgggtggagacagagtat

SEQ ID NO: 771316 - DNA, 19 bp, Mus musculus
  siRNA target sequence for Cpne1 (NM_170588.1,1024-1042).
cgggtggagacagagtatt

SEQ ID NO: 771317 - DNA, 19 bp, Mus musculus
  siRNA target sequence for Cpne1 (NM_170588.1,1130-1148).
ctgactccctgcattatct

SEQ ID NO: 771318 - DNA, 19 bp, Mus musculus
  siRNA target sequence for Cpne1 (NM_170588.1,1132-1150).
gactccctgcattatctga

SEQ ID NO: 771319 - DNA, 19 bp, Mus musculus
  siRNA target sequence for Cpne1 (NM_170588.1,1159-1177).
ggagtcaacgagtatctga

SEQ ID NO: 771320 - DNA, 19 bp, Mus musculus
  siRNA target sequence for Cpne1 (NM_170588.1,1196-1214).
gcagcgtggttcaagacta

SEQ ID NO: 771321 - DNA, 19 bp, Mus musculus
  siRNA target sequence for Cpne1 (NM_170588.1,1197-1215).
cagcgtggttcaagactat

SEQ ID NO: 771322 - DNA, 19 bp, Mus musculus
  siRNA target sequence for Cpne1 (NM_170588.1,1218-1236).
ctcagacaagctatttcct

SEQ ID NO: 771323 - DNA, 19 bp, Mus musculus
  siRNA target sequence for Cpne1 (NM_170588.1,1282-1300).
catgagtttgccttgaact

SEQ ID NO: 771324 - DNA, 19 bp, Mus musculus
  siRNA target sequence for Cpne1 (NM_170588.1,1296-1314).
gaacttcaatcccagtaat

SEQ ID NO: 771325 - DNA, 19 bp, Mus musculus
  siRNA target sequence for Cpne1 (NM_170588.1,1451-1469).
ggtcggcctcgcaatactt

SEQ ID NO: 771326 - DNA, 19 bp, Mus musculus
  siRNA target sequence for Cpne1 (NM_170588.1,1668-1686).
gcagttcgtgccttatcga

SEQ ID NO: 771327 - DNA, 19 bp, Mus musculus
  siRNA target sequence for Cpne1 (NM_170588.1,1674-1692).
cgtgccttatcgacgattt

SEQ ID NO: 771328 - DNA, 19 bp, Mus musculus
  siRNA target sequence for Nupl1 (NM_170591.1,322-340).
gcctgccactggatttact

SEQ ID NO: 771329 - DNA, 19 bp, Mus musculus
  siRNA target sequence for Nupl1 (NM_170591.1,384-402).
ctacaacaggcttcagttt

SEQ ID NO: 771330 - DNA, 19 bp, Mus musculus
  siRNA target sequence for Nupl1 (NM_170591.1,440-458).
gccctgcctgtcacttcta

SEQ ID NO: 771331 - DNA, 19 bp, Mus musculus
  siRNA target sequence for Nupl1 (NM_170591.1,460-478).
ctcagctagtggtcttact

SEQ ID NO: 771332 - DNA, 19 bp, Mus musculus
  siRNA target sequence for Nupl1 (NM_170591.1,506-524).
gcagcatccacaggattta

SEQ ID NO: 771333 - DNA, 19 bp, Mus musculus
  siRNA target sequence for Nupl1 (NM_170591.1,518-536).
ggatttactttgaataact

SEQ ID NO: 771334 - DNA, 19 bp, Mus musculus
  siRNA target sequence for Nupl1 (NM_170591.1,542-560).
gcaacaccagccacaacta

SEQ ID NO: 771335 - DNA, 19 bp, Mus musculus
  siRNA target sequence for Nupl1 (NM_170591.1,566-584).
gcatcaactgggctttctt

SEQ ID NO: 771336 - DNA, 19 bp, Mus musculus
  siRNA target sequence for Nupl1 (NM_170591.1,642-660).
catcaggtctcggacaaaa

SEQ ID NO: 771337 - DNA, 19 bp, Mus musculus
  siRNA target sequence for Nupl1 (NM_170591.1,650-668).
ctcggacaaaatgctttaa

SEQ ID NO: 771338 - DNA, 19 bp, Mus musculus
  siRNA target sequence for Nupl1 (NM_170591.1,654-672).
gacaaaatgctttaagctt

SEQ ID NO: 771339 - DNA, 19 bp, Mus musculus
  siRNA target sequence for Nupl1 (NM_170591.1,718-736).
ccttggtggtatagacttt

SEQ ID NO: 771340 - DNA, 19 bp, Mus musculus
  siRNA target sequence for Nupl1 (NM_170591.1,719-737).
cttggtggtatagacttta

SEQ ID NO: 771341 - DNA, 19 bp, Mus musculus
  siRNA target sequence for Nupl1 (NM_170591.1,722-740).
ggtggtatagactttagta

SEQ ID NO: 771342 - DNA, 19 bp, Mus musculus
  siRNA target sequence for Nupl1 (NM_170591.1,787-805).
cagtaaagcactgaaagat

SEQ ID NO: 771343 - DNA, 19 bp, Mus musculus
  siRNA target sequence for Nupl1 (NM_170591.1,823-841).
catctgtcaggatgttgaa

SEQ ID NO: 771344 - DNA, 19 bp, Mus musculus
  siRNA target sequence for Nupl1 (NM_170591.1,836-854).
gttgaaaacctccagaaat

SEQ ID NO: 771345 - DNA, 19 bp, Mus musculus
  siRNA target sequence for Nupl1 (NM_170591.1,884-902).
gaaattagccgaatgtctt

SEQ ID NO: 771346 - DNA, 19 bp, Mus musculus
  siRNA target sequence for Nupl1 (NM_170591.1,976-994).
gcagaggaatacactcaat

SEQ ID NO: 771347 - DNA, 19 bp, Mus musculus
  siRNA target sequence for Nupl1 (NM_170591.1,977-995).
cagaggaatacactcaata

SEQ ID NO: 771348 - DNA, 19 bp, Mus musculus
  siRNA target sequence for Nupl1 (NM_170591.1,1027-1045).
gttaaagaatgccgaaata

SEQ ID NO: 771349 - DNA, 19 bp, Mus musculus
  siRNA target sequence for Nupl1 (NM_170591.1,1037-1055).
gccgaaatagctttaagaa

SEQ ID NO: 771350 - DNA, 19 bp, Mus musculus
  siRNA target sequence for Nupl1 (NM_170591.1,1094-1112).
gctcctgctgactacttca

SEQ ID NO: 771351 - DNA, 19 bp, Mus musculus
  siRNA target sequence for Nupl1 (NM_170591.1,1100-1118).
gctgactacttcagaatat

SEQ ID NO: 771352 - DNA, 19 bp, Mus musculus
  siRNA target sequence for Nupl1 (NM_170591.1,1101-1119).
ctgactacttcagaatatt

SEQ ID NO: 771353 - DNA, 19 bp, Mus musculus
  siRNA target sequence for Nupl1 (NM_170591.1,1187-1205).
gccactcaagccagtaatt

SEQ ID NO: 771354 - DNA, 19 bp, Mus musculus
  siRNA target sequence for Nupl1 (NM_170591.1,1196-1214).
gccagtaattcacatataa

SEQ ID NO: 771355 - DNA, 19 bp, Mus musculus
  siRNA target sequence for Nupl1 (NM_170591.1,1208-1226).
catataactcctcaagatt

SEQ ID NO: 771356 - DNA, 19 bp, Mus musculus
  siRNA target sequence for Nupl1 (NM_170591.1,1215-1233).
ctcctcaagatttatcaat

SEQ ID NO: 771357 - DNA, 19 bp, Mus musculus
  siRNA target sequence for Nupl1 (NM_170591.1,1236-1254).
ctatgcagaaaatttatca

SEQ ID NO: 771358 - DNA, 19 bp, Mus musculus
  siRNA target sequence for Nupl1 (NM_170591.1,1266-1284).
ctttagccgcacaacttca

SEQ ID NO: 771359 - DNA, 19 bp, Mus musculus
  siRNA target sequence for Nupl1 (NM_170591.1,1271-1289).
gccgcacaacttcaatcta

SEQ ID NO: 771360 - DNA, 19 bp, Mus musculus
  siRNA target sequence for Nupl1 (NM_170591.1,1272-1290).
ccgcacaacttcaatctat

SEQ ID NO: 771361 - DNA, 19 bp, Mus musculus
  siRNA target sequence for Nupl1 (NM_170591.1,1306-1324).
ggtgcttaaagaacagtat

SEQ ID NO: 771362 - DNA, 19 bp, Mus musculus
  siRNA target sequence for Nupl1 (NM_170591.1,1319-1337).
cagtatctcggctacagaa

SEQ ID NO: 771363 - DNA, 19 bp, Mus musculus
  siRNA target sequence for Nupl1 (NM_170591.1,1321-1339).
gtatctcggctacagaaaa

SEQ ID NO: 771364 - DNA, 19 bp, Mus musculus
  siRNA target sequence for Nupl1 (NM_170591.1,1543-1561).
gccattcggctcaggtatt

SEQ ID NO: 771365 - DNA, 19 bp, Mus musculus
  siRNA target sequence for Nupl1 (NM_170591.1,1574-1592).
caatcaagtggcttaggtt

SEQ ID NO: 771366 - DNA, 19 bp, Mus musculus
  siRNA target sequence for Nupl1 (NM_170591.1,1581-1599).
gtggcttaggttcttcaaa

SEQ ID NO: 771367 - DNA, 19 bp, Mus musculus
  siRNA target sequence for Nupl1 (NM_170591.1,1642-1660).
cacaggggcctccacattt

SEQ ID NO: 771368 - DNA, 19 bp, Mus musculus
  siRNA target sequence for Nupl1 (NM_170591.1,1651-1669).
ctccacatttggatttgga

SEQ ID NO: 771369 - DNA, 19 bp, Mus musculus
  siRNA target sequence for Nupl1 (NM_170591.1,1703-1721).
ggctttggcagctcaagta

SEQ ID NO: 771370 - DNA, 19 bp, Mus musculus
  siRNA target sequence for Nupl1 (NM_170591.1,1716-1734).
caagtacgtctgggtttaa

SEQ ID NO: 771371 - DNA, 19 bp, Mus musculus
  siRNA target sequence for Nupl1 (NM_170591.1,1793-1811).
gcatctgcggggtttggaa

SEQ ID NO: 771372 - DNA, 19 bp, Mus musculus
  siRNA target sequence for Disp2 (NM_170593.1,138-156).
ccacgctccaggctataga

SEQ ID NO: 771373 - DNA, 19 bp, Mus musculus
  siRNA target sequence for Disp2 (NM_170593.1,168-186).
cgttaacggctggtcattt

SEQ ID NO: 771374 - DNA, 19 bp, Mus musculus
  siRNA target sequence for Disp2 (NM_170593.1,195-213).
ctcgagcgcctcaagacta

SEQ ID NO: 771375 - DNA, 19 bp, Mus musculus
  siRNA target sequence for Disp2 (NM_170593.1,278-296).
ctcagcacctccatagaca

SEQ ID NO: 771376 - DNA, 19 bp, Mus musculus
  siRNA target sequence for Disp2 (NM_170593.1,374-392).
cggatgccgaagagctatt

SEQ ID NO: 771377 - DNA, 19 bp, Mus musculus
  siRNA target sequence for Disp2 (NM_170593.1,376-394).
gatgccgaagagctattct

SEQ ID NO: 771378 - DNA, 19 bp, Mus musculus
  siRNA target sequence for Disp2 (NM_170593.1,385-403).
gagctattctcatatgatt

SEQ ID NO: 771379 - DNA, 19 bp, Mus musculus
  siRNA target sequence for Disp2 (NM_170593.1,520-538).
gcctcgagacacagagata

SEQ ID NO: 771380 - DNA, 19 bp, Mus musculus
  siRNA target sequence for Disp2 (NM_170593.1,535-553).
gataggccgaaggttagaa

SEQ ID NO: 771381 - DNA, 19 bp, Mus musculus
  siRNA target sequence for Disp2 (NM_170593.1,539-557).
ggccgaaggttagaagttt

SEQ ID NO: 771382 - DNA, 19 bp, Mus musculus
  siRNA target sequence for Disp2 (NM_170593.1,828-846).
ccatgtgtcgcatagaaca

SEQ ID NO: 771383 - DNA, 19 bp, Mus musculus
  siRNA target sequence for Disp2 (NM_170593.1,856-874).
ccgctctcacatcagtttt

SEQ ID NO: 771384 - DNA, 19 bp, Mus musculus
  siRNA target sequence for Disp2 (NM_170593.1,890-908).
cgatcagcagccaatgagt

SEQ ID NO: 771385 - DNA, 19 bp, Mus musculus
  siRNA target sequence for Disp2 (NM_170593.1,921-939).
ggtccttgggcaactatct

SEQ ID NO: 771386 - DNA, 19 bp, Mus musculus
  siRNA target sequence for Disp2 (NM_170593.1,975-993).
ctacccaagccgatacaga

SEQ ID NO: 771387 - DNA, 19 bp, Mus musculus
  siRNA target sequence for Disp2 (NM_170593.1,1119-1137).
gaagcaacgtggtctatga

SEQ ID NO: 771388 - DNA, 19 bp, Mus musculus
  siRNA target sequence for Disp2 (NM_170593.1,1176-1194).
cccagactgcggattacca

SEQ ID NO: 771389 - DNA, 19 bp, Mus musculus
  siRNA target sequence for Disp2 (NM_170593.1,1219-1237).
gctcttcctgcccattata

SEQ ID NO: 771390 - DNA, 19 bp, Mus musculus
  siRNA target sequence for Disp2 (NM_170593.1,1220-1238).
ctcttcctgcccattataa

SEQ ID NO: 771391 - DNA, 19 bp, Mus musculus
  siRNA target sequence for Disp2 (NM_170593.1,1245-1263).
cctctcttctagacatcta

SEQ ID NO: 771392 - DNA, 19 bp, Mus musculus
  siRNA target sequence for Disp2 (NM_170593.1,1271-1289).
ggcctaggtgacccaatta

SEQ ID NO: 771393 - DNA, 19 bp, Mus musculus
  siRNA target sequence for Disp2 (NM_170593.1,1272-1290).
gcctaggtgacccaattaa

SEQ ID NO: 771394 - DNA, 19 bp, Mus musculus
  siRNA target sequence for Disp2 (NM_170593.1,1298-1316).
gacaactacacatctatca

SEQ ID NO: 771395 - DNA, 19 bp, Mus musculus
  siRNA target sequence for Disp2 (NM_170593.1,1300-1318).
caactacacatctatcagt

SEQ ID NO: 771396 - DNA, 19 bp, Mus musculus
  siRNA target sequence for Disp2 (NM_170593.1,1372-1390).
caccatgtatcccttgata

SEQ ID NO: 771397 - DNA, 19 bp, Mus musculus
  siRNA target sequence for Disp2 (NM_170593.1,1444-1462).
cacgttcatgtcacttcta

SEQ ID NO: 771398 - DNA, 19 bp, Mus musculus
  siRNA target sequence for Disp2 (NM_170593.1,1477-1495).
cctaatggtggcctacttt

SEQ ID NO: 771399 - DNA, 19 bp, Mus musculus
  siRNA target sequence for Disp2 (NM_170593.1,1520-1538).
gcctacttcccctttgtca

SEQ ID NO: 771400 - DNA, 19 bp, Mus musculus
  siRNA target sequence for Disp2 (NM_170593.1,1584-1602).
cgctcatcttcttggatat

SEQ ID NO: 771401 - DNA, 19 bp, Mus musculus
  siRNA target sequence for Disp2 (NM_170593.1,1586-1604).
ctcatcttcttggatatgt

SEQ ID NO: 771402 - DNA, 19 bp, Mus musculus
  siRNA target sequence for Disp2 (NM_170593.1,1744-1762).
gcccgcagtgcgttgcttt

SEQ ID NO: 771403 - DNA, 19 bp, Mus musculus
  siRNA target sequence for Disp2 (NM_170593.1,1771-1789).
catgggcactgctgtacta

SEQ ID NO: 771404 - DNA, 19 bp, Mus musculus
  siRNA target sequence for Disp2 (NM_170593.1,1925-1943).
cacagacggatccgtattt

SEQ ID NO: 771405 - DNA, 19 bp, Mus musculus
  siRNA target sequence for Disp2 (NM_170593.1,1927-1945).
cagacggatccgtattttt

SEQ ID NO: 771406 - DNA, 19 bp, Mus musculus
  siRNA target sequence for Disp2 (NM_170593.1,1936-1954).
ccgtatttttcgcaagatt

SEQ ID NO: 771407 - DNA, 19 bp, Mus musculus
  siRNA target sequence for Disp2 (NM_170593.1,1937-1955).
cgtatttttcgcaagatta

SEQ ID NO: 771408 - DNA, 19 bp, Mus musculus
  siRNA target sequence for Disp2 (NM_170593.1,1991-2009).
ctgccctgtggtgtcatta

SEQ ID NO: 771409 - DNA, 19 bp, Mus musculus
  siRNA target sequence for Disp2 (NM_170593.1,2087-2105).
ctgcaactgcccattctat

SEQ ID NO: 771410 - DNA, 19 bp, Mus musculus
  siRNA target sequence for Disp2 (NM_170593.1,2245-2263).
gccagtggacactagtgat

SEQ ID NO: 771411 - DNA, 19 bp, Mus musculus
  siRNA target sequence for Disp2 (NM_170593.1,2401-2419).
ctggcctacgctgtgttta

SEQ ID NO: 771412 - DNA, 19 bp, Mus musculus
  siRNA target sequence for Disp2 (NM_170593.1,2403-2421).
ggcctacgctgtgtttagt

SEQ ID NO: 771413 - DNA, 19 bp, Mus musculus
  siRNA target sequence for Disp2 (NM_170593.1,2481-2499).
gctgcggacaatcagaatt

SEQ ID NO: 771414 - DNA, 19 bp, Mus musculus
  siRNA target sequence for Disp2 (NM_170593.1,2580-2598).
gactccgcttcgatactca

SEQ ID NO: 771415 - DNA, 19 bp, Mus musculus
  siRNA target sequence for Disp2 (NM_170593.1,2602-2620).
caacctggcagctctagtt

SEQ ID NO: 771416 - DNA, 19 bp, Mus musculus
  siRNA target sequence for Disp2 (NM_170593.1,2663-2681).
ccggtccaccacttctaca

SEQ ID NO: 771417 - DNA, 19 bp, Mus musculus
  siRNA target sequence for Disp2 (NM_170593.1,2953-2971).
cactgccgaagctctcttt

SEQ ID NO: 771418 - DNA, 19 bp, Mus musculus
  siRNA target sequence for Disp2 (NM_170593.1,2955-2973).
ctgccgaagctctctttct

SEQ ID NO: 771419 - DNA, 19 bp, Mus musculus
  siRNA target sequence for Disp2 (NM_170593.1,2987-3005).
ggcctctctgtagacttaa

SEQ ID NO: 771420 - DNA, 19 bp, Mus musculus
  siRNA target sequence for Disp2 (NM_170593.1,2990-3008).
ctctctgtagacttaacca

SEQ ID NO: 771421 - DNA, 19 bp, Mus musculus
  siRNA target sequence for Disp2 (NM_170593.1,2992-3010).
ctctgtagacttaaccatt

SEQ ID NO: 771422 - DNA, 19 bp, Mus musculus
  siRNA target sequence for Disp2 (NM_170593.1,2994-3012).
ctgtagacttaaccattaa

SEQ ID NO: 771423 - DNA, 19 bp, Mus musculus
  siRNA target sequence for Disp2 (NM_170593.1,2996-3014).
gtagacttaaccattaact

SEQ ID NO: 771424 - DNA, 19 bp, Mus musculus
  siRNA target sequence for Disp2 (NM_170593.1,2999-3017).
gacttaaccattaactact

SEQ ID NO: 771425 - DNA, 19 bp, Mus musculus
  siRNA target sequence for Disp2 (NM_170593.1,3058-3076).
ccgtgtggccttctcttta

SEQ ID NO: 771426 - DNA, 19 bp, Mus musculus
  siRNA target sequence for Disp2 (NM_170593.1,3243-3261).
gtttcttcgggccagaaaa

SEQ ID NO: 771427 - DNA, 19 bp, Mus musculus
  siRNA target sequence for Disp2 (NM_170593.1,3351-3369).
caggattctccgaacacta

SEQ ID NO: 771428 - DNA, 19 bp, Mus musculus
  siRNA target sequence for Disp2 (NM_170593.1,3354-3372).
gattctccgaacactatga

SEQ ID NO: 771429 - DNA, 19 bp, Mus musculus
  siRNA target sequence for Disp2 (NM_170593.1,3574-3592).
gcagacctcctctccatat

SEQ ID NO: 771430 - DNA, 19 bp, Mus musculus
  siRNA target sequence for Disp2 (NM_170593.1,3575-3593).
cagacctcctctccatata

SEQ ID NO: 771431 - DNA, 19 bp, Mus musculus
  siRNA target sequence for Disp2 (NM_170593.1,3820-3838).
ctccccagaagtcatgaat

SEQ ID NO: 771432 - DNA, 19 bp, Mus musculus
  siRNA target sequence for Disp2 (NM_170593.1,3843-3861).
ctggacaccccatacttga

SEQ ID NO: 771433 - DNA, 19 bp, Mus musculus
  siRNA target sequence for Disp2 (NM_170593.1,3915-3933).
ccatctatgacccaaacat

SEQ ID NO: 771434 - DNA, 19 bp, Mus musculus
  siRNA target sequence for Disp2 (NM_170593.1,3927-3945).
caaacatgcccaattctca

SEQ ID NO: 771435 - DNA, 19 bp, Mus musculus
  siRNA target sequence for Disp2 (NM_170593.1,3974-3992).
ggagggccaggcgatatca

SEQ ID NO: 771436 - DNA, 19 bp, Mus musculus
  siRNA target sequence for Igsf11 (NM_170599.2,315-333).
ccctcctgaacctcaatgt

SEQ ID NO: 771437 - DNA, 19 bp, Mus musculus
  siRNA target sequence for Igsf11 (NM_170599.2,319-337).
cctgaacctcaatgtcatt

SEQ ID NO: 771438 - DNA, 19 bp, Mus musculus
  siRNA target sequence for Igsf11 (NM_170599.2,370-388).
gcccgaacaggtcattctt

SEQ ID NO: 771439 - DNA, 19 bp, Mus musculus
  siRNA target sequence for Igsf11 (NM_170599.2,371-389).
cccgaacaggtcattcttt

SEQ ID NO: 771440 - DNA, 19 bp, Mus musculus
  siRNA target sequence for Igsf11 (NM_170599.2,372-390).
ccgaacaggtcattcttta

SEQ ID NO: 771441 - DNA, 19 bp, Mus musculus
  siRNA target sequence for Igsf11 (NM_170599.2,373-391).
cgaacaggtcattctttat

SEQ ID NO: 771442 - DNA, 19 bp, Mus musculus
  siRNA target sequence for Igsf11 (NM_170599.2,427-445).
ccacgggagggtaggattt

SEQ ID NO: 771443 - DNA, 19 bp, Mus musculus
  siRNA target sequence for Igsf11 (NM_170599.2,428-446).
cacgggagggtaggattta

SEQ ID NO: 771444 - DNA, 19 bp, Mus musculus
  siRNA target sequence for Igsf11 (NM_170599.2,520-538).
gtgcttggtgaataacctt

SEQ ID NO: 771445 - DNA, 19 bp, Mus musculus
  siRNA target sequence for Igsf11 (NM_170599.2,600-618).
ctccacaatgccaaatcca

SEQ ID NO: 771446 - DNA, 19 bp, Mus musculus
  siRNA target sequence for Igsf11 (NM_170599.2,644-662).
gtcatccttctgtgtagtt

SEQ ID NO: 771447 - DNA, 19 bp, Mus musculus
  siRNA target sequence for Igsf11 (NM_170599.2,677-695).
cctcggcccacgtaccttt

SEQ ID NO: 771448 - DNA, 19 bp, Mus musculus
  siRNA target sequence for Igsf11 (NM_170599.2,687-705).
cgtacctttgggagaagtt

SEQ ID NO: 771449 - DNA, 19 bp, Mus musculus
  siRNA target sequence for Igsf11 (NM_170599.2,802-820).
ccagtgtgtggcttctaat

SEQ ID NO: 771450 - DNA, 19 bp, Mus musculus
  siRNA target sequence for Igsf11 (NM_170599.2,847-865).
ggacctccaggttatctca

SEQ ID NO: 771451 - DNA, 19 bp, Mus musculus
  siRNA target sequence for Igsf11 (NM_170599.2,874-892).
ccggagcgttggagtaata

SEQ ID NO: 771452 - DNA, 19 bp, Mus musculus
  siRNA target sequence for Igsf11 (NM_170599.2,905-923).
ggcaccggtgctgttctta

SEQ ID NO: 771453 - DNA, 19 bp, Mus musculus
  siRNA target sequence for Igsf11 (NM_170599.2,906-924).
gcaccggtgctgttcttat

SEQ ID NO: 771454 - DNA, 19 bp, Mus musculus
  siRNA target sequence for Igsf11 (NM_170599.2,909-927).
ccggtgctgttcttatcgt

SEQ ID NO: 771455 - DNA, 19 bp, Mus musculus
  siRNA target sequence for Igsf11 (NM_170599.2,1022-1040).
gatgatcttccccctaaat

SEQ ID NO: 771456 - DNA, 19 bp, Mus musculus
  siRNA target sequence for Igsf11 (NM_170599.2,1055-1073).
gccttccacacggagatat

SEQ ID NO: 771457 - DNA, 19 bp, Mus musculus
  siRNA target sequence for Igsf11 (NM_170599.2,1069-1087).
gatatcctcctcagaaaat

SEQ ID NO: 771458 - DNA, 19 bp, Mus musculus
  siRNA target sequence for Igsf11 (NM_170599.2,1152-1170).
gaaacacagagtctttcaa

SEQ ID NO: 771459 - DNA, 19 bp, Mus musculus
  siRNA target sequence for Igsf11 (NM_170599.2,1168-1186).
caaccacttcagtgactta

SEQ ID NO: 771460 - DNA, 19 bp, Mus musculus
  siRNA target sequence for Igsf11 (NM_170599.2,1179-1197).
gtgacttacgccagtcttt

SEQ ID NO: 771461 - DNA, 19 bp, Mus musculus
  siRNA target sequence for Igsf11 (NM_170599.2,1208-1226).
gcagttatcccatcaatct

SEQ ID NO: 771462 - DNA, 19 bp, Mus musculus
  siRNA target sequence for Igsf11 (NM_170599.2,1209-1227).
cagttatcccatcaatcta

SEQ ID NO: 771463 - DNA, 19 bp, Mus musculus
  siRNA target sequence for Igsf11 (NM_170599.2,1247-1265).
gttttgggtccacataaga

SEQ ID NO: 771464 - DNA, 19 bp, Mus musculus
  siRNA target sequence for Igsf11 (NM_170599.2,1259-1277).
cataagactctggtagtta

SEQ ID NO: 771465 - DNA, 19 bp, Mus musculus
  siRNA target sequence for Igsf11 (NM_170599.2,1303-1321).
ggtcttgcccaggaacaat

SEQ ID NO: 771466 - DNA, 19 bp, Mus musculus
  siRNA target sequence for Igsf11 (NM_170599.2,1347-1365).
ctcaacacactcattccta

SEQ ID NO: 771467 - DNA, 19 bp, Mus musculus
  siRNA target sequence for Mycbpap (NM_170671.1,79-97).
cataccggggagagctata

SEQ ID NO: 771468 - DNA, 19 bp, Mus musculus
  siRNA target sequence for Mycbpap (NM_170671.1,212-230).
gtcttctcatgaccaaaaa

SEQ ID NO: 771469 - DNA, 19 bp, Mus musculus
  siRNA target sequence for Mycbpap (NM_170671.1,214-232).
cttctcatgaccaaaaaga

SEQ ID NO: 771470 - DNA, 19 bp, Mus musculus
  siRNA target sequence for Mycbpap (NM_170671.1,341-359).
gggaccggagtctgtttct

SEQ ID NO: 771471 - DNA, 19 bp, Mus musculus
  siRNA target sequence for Mycbpap (NM_170671.1,515-533).
cggaagacacggtatttct

SEQ ID NO: 771472 - DNA, 19 bp, Mus musculus
  siRNA target sequence for Mycbpap (NM_170671.1,645-663).
gaaaaacatcggaattggt

SEQ ID NO: 771473 - DNA, 19 bp, Mus musculus
  siRNA target sequence for Mycbpap (NM_170671.1,662-680).
gtgtccgcctgacatttga

SEQ ID NO: 771474 - DNA, 19 bp, Mus musculus
  siRNA target sequence for Mycbpap (NM_170671.1,664-682).
gtccgcctgacatttgaaa

SEQ ID NO: 771475 - DNA, 19 bp, Mus musculus
  siRNA target sequence for Mycbpap (NM_170671.1,709-727).
gaactgactgtggtcaata

SEQ ID NO: 771476 - DNA, 19 bp, Mus musculus
  siRNA target sequence for Mycbpap (NM_170671.1,731-749).
gcacggtggccatttggta

SEQ ID NO: 771477 - DNA, 19 bp, Mus musculus
  siRNA target sequence for Mycbpap (NM_170671.1,736-754).
gtggccatttggtacaact

SEQ ID NO: 771478 - DNA, 19 bp, Mus musculus
  siRNA target sequence for Mycbpap (NM_170671.1,804-822).
gacgcagaggttttacttt

SEQ ID NO: 771479 - DNA, 19 bp, Mus musculus
  siRNA target sequence for Mycbpap (NM_170671.1,806-824).
cgcagaggttttactttaa

SEQ ID NO: 771480 - DNA, 19 bp, Mus musculus
  siRNA target sequence for Mycbpap (NM_170671.1,1010-1028).
ggaagttgttggagacaaa

SEQ ID NO: 771481 - DNA, 19 bp, Mus musculus
  siRNA target sequence for Mycbpap (NM_170671.1,1117-1135).
ccggtggacgcgtatctca

SEQ ID NO: 771482 - DNA, 19 bp, Mus musculus
  siRNA target sequence for Mycbpap (NM_170671.1,1136-1154).
ccgaggaggacttgttcaa

SEQ ID NO: 771483 - DNA, 19 bp, Mus musculus
  siRNA target sequence for Mycbpap (NM_170671.1,1141-1159).
gaggacttgttcaactaca

SEQ ID NO: 771484 - DNA, 19 bp, Mus musculus
  siRNA target sequence for Mycbpap (NM_170671.1,1183-1201).
catcaagtggtgcaaaact

SEQ ID NO: 771485 - DNA, 19 bp, Mus musculus
  siRNA target sequence for Mycbpap (NM_170671.1,1268-1286).
ctccagtgccgttactgtt

SEQ ID NO: 771486 - DNA, 19 bp, Mus musculus
  siRNA target sequence for Mycbpap (NM_170671.1,1293-1311).
gaaggcctcaggttcgata

SEQ ID NO: 771487 - DNA, 19 bp, Mus musculus
  siRNA target sequence for Mycbpap (NM_170671.1,1376-1394).
ggaagactcgggacttctt

SEQ ID NO: 771488 - DNA, 19 bp, Mus musculus
  siRNA target sequence for Mycbpap (NM_170671.1,1402-1420).
ctgaagtctagcataggaa

SEQ ID NO: 771489 - DNA, 19 bp, Mus musculus
  siRNA target sequence for Mycbpap (NM_170671.1,1725-1743).
gtccctgtggctaagaaat

SEQ ID NO: 771490 - DNA, 19 bp, Mus musculus
  siRNA target sequence for Mycbpap (NM_170671.1,1779-1797).
ggatcttccagatgaacaa

SEQ ID NO: 771491 - DNA, 19 bp, Mus musculus
  siRNA target sequence for Mycbpap (NM_170671.1,1787-1805).
cagatgaacaaggtcaaaa

SEQ ID NO: 771492 - DNA, 19 bp, Mus musculus
  siRNA target sequence for Mycbpap (NM_170671.1,1951-1969).
ccgaatagcaaaaaactga

SEQ ID NO: 771493 - DNA, 19 bp, Mus musculus
  siRNA target sequence for Mycbpap (NM_170671.1,2174-2192).
gctctacaaagaatgttga

SEQ ID NO: 771494 - DNA, 19 bp, Mus musculus
  siRNA target sequence for Mycbpap (NM_170671.1,2175-2193).
ctctacaaagaatgttgaa

SEQ ID NO: 771495 - DNA, 19 bp, Mus musculus
  siRNA target sequence for Mycbpap (NM_170671.1,2191-2209).
gaagagtctttacgttttt

SEQ ID NO: 771496 - DNA, 19 bp, Mus musculus
  siRNA target sequence for Mycbpap (NM_170671.1,2194-2212).
gagtctttacgtttttgca

SEQ ID NO: 771497 - DNA, 19 bp, Mus musculus
  siRNA target sequence for A730016F12Rik (NM_170673.2,240-258).
ctgctagacctggatacat

SEQ ID NO: 771498 - DNA, 19 bp, Mus musculus
  siRNA target sequence for A730016F12Rik (NM_170673.2,243-261).
ctagacctggatacattct

SEQ ID NO: 771499 - DNA, 19 bp, Mus musculus
  siRNA target sequence for A730016F12Rik (NM_170673.2,328-346).
gacgaaccgaggtgattga

SEQ ID NO: 771500 - DNA, 19 bp, Mus musculus
  siRNA target sequence for A730016F12Rik (NM_170673.2,428-446).
gtacaacgtcgactctaaa

SEQ ID NO: 771501 - DNA, 19 bp, Mus musculus
  siRNA target sequence for A730016F12Rik (NM_170673.2,546-564).
ggtgtgccaggaaagaagt

SEQ ID NO: 771502 - DNA, 19 bp, Mus musculus
  siRNA target sequence for A730016F12Rik (NM_170673.2,820-838).
cagtgaagatcgacgtata

SEQ ID NO: 771503 - DNA, 19 bp, Mus musculus
  siRNA target sequence for A730016F12Rik (NM_170673.2,904-922).
gcaaggcccagaatcagtt

SEQ ID NO: 771504 - DNA, 19 bp, Mus musculus
  siRNA target sequence for A730016F12Rik (NM_170673.2,925-943).
cagtgtacgaggtacttaa

SEQ ID NO: 771505 - DNA, 19 bp, Mus musculus
  siRNA target sequence for A730016F12Rik (NM_170673.2,1011-1029).
gtggactcagaattcactt

SEQ ID NO: 771506 - DNA, 19 bp, Mus musculus
  siRNA target sequence for A730016F12Rik (NM_170673.2,1050-1068).
gggacacagctgaacttca

SEQ ID NO: 771507 - DNA, 19 bp, Mus musculus
  siRNA target sequence for A730016F12Rik (NM_170673.2,1061-1079).
gaacttcaccgtagctatt

SEQ ID NO: 771508 - DNA, 19 bp, Mus musculus
  siRNA target sequence for A730016F12Rik (NM_170673.2,1268-1286).
ccagttccccctgaacaat

SEQ ID NO: 771509 - DNA, 19 bp, Mus musculus
  siRNA target sequence for A730016F12Rik (NM_170673.2,1269-1287).
cagttccccctgaacaata

SEQ ID NO: 771510 - DNA, 19 bp, Mus musculus
  siRNA target sequence for A730016F12Rik (NM_170673.2,1274-1292).
ccccctgaacaataacgat

SEQ ID NO: 771511 - DNA, 19 bp, Mus musculus
  siRNA target sequence for A730016F12Rik (NM_170673.2,1320-1338).
ggtgtgctagagagttact

SEQ ID NO: 771512 - DNA, 19 bp, Mus musculus
  siRNA target sequence for A730016F12Rik (NM_170673.2,1362-1380).
ctctatgggcccacttact

SEQ ID NO: 771513 - DNA, 19 bp, Mus musculus
  siRNA target sequence for A730016F12Rik (NM_170673.2,1364-1382).
ctatgggcccacttacttt

SEQ ID NO: 771514 - DNA, 19 bp, Mus musculus
  siRNA target sequence for A730016F12Rik (NM_170673.2,1405-1423).
ccagggctgcagccaaaat

SEQ ID NO: 771515 - DNA, 19 bp, Mus musculus
  siRNA target sequence for A730016F12Rik (NM_170673.2,1426-1444).
cggatggttcccagtacta

SEQ ID NO: 771516 - DNA, 19 bp, Mus musculus
  siRNA target sequence for A730016F12Rik (NM_170673.2,1649-1667).
cccattccgagattatgtt

SEQ ID NO: 771517 - DNA, 19 bp, Mus musculus
  siRNA target sequence for A730016F12Rik (NM_170673.2,1651-1669).
cattccgagattatgttga

SEQ ID NO: 771518 - DNA, 19 bp, Mus musculus
  siRNA target sequence for A730016F12Rik (NM_170673.2,1734-1752).
gaacagttgctctcctata

SEQ ID NO: 771519 - DNA, 19 bp, Mus musculus
  siRNA target sequence for BC038286 (NM_170755.1,201-219).
cgaggcagtgggacgttta

SEQ ID NO: 771520 - DNA, 19 bp, Mus musculus
  siRNA target sequence for BC038286 (NM_170755.1,204-222).
ggcagtgggacgtttagct

SEQ ID NO: 771521 - DNA, 19 bp, Mus musculus
  siRNA target sequence for BC038286 (NM_170755.1,205-223).
gcagtgggacgtttagcta

SEQ ID NO: 771522 - DNA, 19 bp, Mus musculus
  siRNA target sequence for BC038286 (NM_170755.1,654-672).
ggctgtgttgggacactat

SEQ ID NO: 771523 - DNA, 19 bp, Mus musculus
  siRNA target sequence for BC038286 (NM_170755.1,656-674).
ctgtgttgggacactatgt

SEQ ID NO: 771524 - DNA, 19 bp, Mus musculus
  siRNA target sequence for BC038286 (NM_170755.1,673-691).
gttccgggagttatgattt

SEQ ID NO: 771525 - DNA, 19 bp, Mus musculus
  siRNA target sequence for BC038286 (NM_170755.1,676-694).
ccgggagttatgatttcct

SEQ ID NO: 771526 - DNA, 19 bp, Mus musculus
  siRNA target sequence for BC038286 (NM_170755.1,677-695).
cgggagttatgatttccta

SEQ ID NO: 771527 - DNA, 19 bp, Mus musculus
  siRNA target sequence for BC038286 (NM_170755.1,744-762).
gttgatccagaggatgtat

SEQ ID NO: 771528 - DNA, 19 bp, Mus musculus
  siRNA target sequence for Spata2 (NM_170756.1,362-380).
cacaaggtggaccctttat

SEQ ID NO: 771529 - DNA, 19 bp, Mus musculus
  siRNA target sequence for Spata2 (NM_170756.1,364-382).
caaggtggaccctttatat

SEQ ID NO: 771530 - DNA, 19 bp, Mus musculus
  siRNA target sequence for Spata2 (NM_170756.1,367-385).
ggtggaccctttatatcga

SEQ ID NO: 771531 - DNA, 19 bp, Mus musculus
  siRNA target sequence for Spata2 (NM_170756.1,370-388).
ggaccctttatatcgattt

SEQ ID NO: 771532 - DNA, 19 bp, Mus musculus
  siRNA target sequence for Spata2 (NM_170756.1,592-610).
ggacatccgagccattcta

SEQ ID NO: 771533 - DNA, 19 bp, Mus musculus
  siRNA target sequence for Spata2 (NM_170756.1,593-611).
gacatccgagccattctaa

SEQ ID NO: 771534 - DNA, 19 bp, Mus musculus
  siRNA target sequence for Spata2 (NM_170756.1,640-658).
gactgtgtacaaactcaaa

SEQ ID NO: 771535 - DNA, 19 bp, Mus musculus
  siRNA target sequence for Spata2 (NM_170756.1,884-902).
cgtgtggcactccagaaat

SEQ ID NO: 771536 - DNA, 19 bp, Mus musculus
  siRNA target sequence for Spata2 (NM_170756.1,917-935).
gcagccaaggactactaca

SEQ ID NO: 771537 - DNA, 19 bp, Mus musculus
  siRNA target sequence for Spata2 (NM_170756.1,1169-1187).
ggccttcttcgtagtacat

SEQ ID NO: 771538 - DNA, 19 bp, Mus musculus
  siRNA target sequence for Spata2 (NM_170756.1,1170-1188).
gccttcttcgtagtacata

SEQ ID NO: 771539 - DNA, 19 bp, Mus musculus
  siRNA target sequence for Spata2 (NM_170756.1,1172-1190).
cttcttcgtagtacatact

SEQ ID NO: 771540 - DNA, 19 bp, Mus musculus
  siRNA target sequence for Spata2 (NM_170756.1,1175-1193).
cttcgtagtacatactttt

SEQ ID NO: 771541 - DNA, 19 bp, Mus musculus
  siRNA target sequence for Spata2 (NM_170756.1,1202-1220).
gatgacgtggacctgtata

SEQ ID NO: 771542 - DNA, 19 bp, Mus musculus
  siRNA target sequence for Spata2 (NM_170756.1,1271-1289).
gatgtgtggctggtcaaaa

SEQ ID NO: 771543 - DNA, 19 bp, Mus musculus
  siRNA target sequence for Spata2 (NM_170756.1,1276-1294).
gtggctggtcaaaaatgat

SEQ ID NO: 771544 - DNA, 19 bp, Mus musculus
  siRNA target sequence for Spata2 (NM_170756.1,1485-1503).
cacctatgcgggagaagta

SEQ ID NO: 771545 - DNA, 19 bp, Mus musculus
  siRNA target sequence for Spata2 (NM_170756.1,1488-1506).
ctatgcgggagaagtatgt

SEQ ID NO: 771546 - DNA, 19 bp, Mus musculus
  siRNA target sequence for Spata2 (NM_170756.1,1620-1638).
cgtgcacccagtgttcaaa

SEQ ID NO: 771547 - DNA, 19 bp, Mus musculus
  siRNA target sequence for Spata2 (NM_170756.1,1621-1639).
gtgcacccagtgttcaaaa

SEQ ID NO: 771548 - DNA, 19 bp, Mus musculus
  siRNA target sequence for Spata2 (NM_170756.1,1623-1641).
gcacccagtgttcaaaagt

SEQ ID NO: 771549 - DNA, 19 bp, Mus musculus
  siRNA target sequence for Spata2 (NM_170756.1,1676-1694).
gacccgtgctgcagaaaga

SEQ ID NO: 771550 - DNA, 19 bp, Mus musculus
  siRNA target sequence for Spata2 (NM_170756.1,1716-1734).
ccaacagtcagctgaacta

SEQ ID NO: 771551 - DNA, 19 bp, Mus musculus
  siRNA target sequence for A630007B06Rik (NM_170757.1,6-24).
gatcaggagcagatttgaa

SEQ ID NO: 771552 - DNA, 19 bp, Mus musculus
  siRNA target sequence for A630007B06Rik (NM_170757.1,11-29).
ggagcagatttgaagaaat

SEQ ID NO: 771553 - DNA, 19 bp, Mus musculus
  siRNA target sequence for A630007B06Rik (NM_170757.1,70-88).
cacatagcctccatttctt

SEQ ID NO: 771554 - DNA, 19 bp, Mus musculus
  siRNA target sequence for A630007B06Rik (NM_170757.1,127-145).
gactcgtgcatctcagttt

SEQ ID NO: 771555 - DNA, 19 bp, Mus musculus
  siRNA target sequence for A630007B06Rik (NM_170757.1,169-187).
gaaacaggagctgaactat

SEQ ID NO: 771556 - DNA, 19 bp, Mus musculus
  siRNA target sequence for A630007B06Rik (NM_170757.1,195-213).
ggactctgacagaatttta

SEQ ID NO: 771557 - DNA, 19 bp, Mus musculus
  siRNA target sequence for A630007B06Rik (NM_170757.1,200-218).
ctgacagaattttatgtca

SEQ ID NO: 771558 - DNA, 19 bp, Mus musculus
  siRNA target sequence for A630007B06Rik (NM_170757.1,233-251).
gtagtcagatcgaagtaca

SEQ ID NO: 771559 - DNA, 19 bp, Mus musculus
  siRNA target sequence for A630007B06Rik (NM_170757.1,270-288).
ctgtggcagtggtgagaat

SEQ ID NO: 771560 - DNA, 19 bp, Mus musculus
  siRNA target sequence for A630007B06Rik (NM_170757.1,274-292).
ggcagtggtgagaattctt

SEQ ID NO: 771561 - DNA, 19 bp, Mus musculus
  siRNA target sequence for A630007B06Rik (NM_170757.1,384-402).
gccagaacagacagtaaca

SEQ ID NO: 771562 - DNA, 19 bp, Mus musculus
  siRNA target sequence for A630007B06Rik (NM_170757.1,386-404).
cagaacagacagtaacaca

SEQ ID NO: 771563 - DNA, 19 bp, Mus musculus
  siRNA target sequence for A630007B06Rik (NM_170757.1,409-427).
ctggcagagttaaagtcat

SEQ ID NO: 771564 - DNA, 19 bp, Mus musculus
  siRNA target sequence for A630007B06Rik (NM_170757.1,436-454).
gcagaagccgctaatccaa

SEQ ID NO: 771565 - DNA, 19 bp, Mus musculus
  siRNA target sequence for A630007B06Rik (NM_170757.1,437-455).
cagaagccgctaatccaaa

SEQ ID NO: 771566 - DNA, 19 bp, Mus musculus
  siRNA target sequence for A630007B06Rik (NM_170757.1,486-504).
ctgcaccaggaaactcatt

SEQ ID NO: 771567 - DNA, 19 bp, Mus musculus
  siRNA target sequence for A630007B06Rik (NM_170757.1,499-517).
ctcatttccgagatgaaga

SEQ ID NO: 771568 - DNA, 19 bp, Mus musculus
  siRNA target sequence for A630007B06Rik (NM_170757.1,507-525).
cgagatgaagactgtttca

SEQ ID NO: 771569 - DNA, 19 bp, Mus musculus
  siRNA target sequence for A630007B06Rik (NM_170757.1,524-542).
cagcctcagacgatttgtt

SEQ ID NO: 771570 - DNA, 19 bp, Mus musculus
  siRNA target sequence for A630007B06Rik (NM_170757.1,595-613).
gtcccaaatggactgaata

SEQ ID NO: 771571 - DNA, 19 bp, Mus musculus
  siRNA target sequence for A630007B06Rik (NM_170757.1,673-691).
gagctcactgttaaacagt

SEQ ID NO: 771572 - DNA, 19 bp, Mus musculus
  siRNA target sequence for A630007B06Rik (NM_170757.1,675-693).
gctcactgttaaacagtta

SEQ ID NO: 771573 - DNA, 19 bp, Mus musculus
  siRNA target sequence for A630007B06Rik (NM_170757.1,676-694).
ctcactgttaaacagttaa

SEQ ID NO: 771574 - DNA, 19 bp, Mus musculus
  siRNA target sequence for A630007B06Rik (NM_170757.1,712-730).
catcaggaacttatcttaa

SEQ ID NO: 771575 - DNA, 19 bp, Mus musculus
  siRNA target sequence for A630007B06Rik (NM_170757.1,901-919).
gcaattcagcaaatccata

SEQ ID NO: 771576 - DNA, 19 bp, Mus musculus
  siRNA target sequence for A630007B06Rik (NM_170757.1,902-920).
caattcagcaaatccataa

SEQ ID NO: 771577 - DNA, 19 bp, Mus musculus
  siRNA target sequence for A630007B06Rik (NM_170757.1,935-953).
ggatggaccaggccaataa

SEQ ID NO: 771578 - DNA, 19 bp, Mus musculus
  siRNA target sequence for A630007B06Rik (NM_170757.1,939-957).
ggaccaggccaataagaaa

SEQ ID NO: 771579 - DNA, 19 bp, Mus musculus
  siRNA target sequence for A630007B06Rik (NM_170757.1,982-1000).
gaggcaatggtaatgaagt

SEQ ID NO: 771580 - DNA, 19 bp, Mus musculus
  siRNA target sequence for A630007B06Rik (NM_170757.1,1024-1042).
ctagacctgcgaaaggaaa

SEQ ID NO: 771581 - DNA, 19 bp, Mus musculus
  siRNA target sequence for A630007B06Rik (NM_170757.1,1080-1098).
ggaattggagaaaaacact

SEQ ID NO: 771582 - DNA, 19 bp, Mus musculus
  siRNA target sequence for A630007B06Rik (NM_170757.1,1081-1099).
gaattggagaaaaacacta

SEQ ID NO: 771583 - DNA, 19 bp, Mus musculus
  siRNA target sequence for A630007B06Rik (NM_170757.1,1135-1153).
ctgcagcaactctatgaat

SEQ ID NO: 771584 - DNA, 19 bp, Mus musculus
  siRNA target sequence for A630007B06Rik (NM_170757.1,1175-1193).
gactcatcagagaaataga

SEQ ID NO: 771585 - DNA, 19 bp, Mus musculus
  siRNA target sequence for A630007B06Rik (NM_170757.1,1217-1235).
ctcaagtcattaaagtaaa

SEQ ID NO: 771586 - DNA, 19 bp, Mus musculus
  siRNA target sequence for A630007B06Rik (NM_170757.1,1219-1237).
caagtcattaaagtaaagt

SEQ ID NO: 771587 - DNA, 19 bp, Mus musculus
  siRNA target sequence for A630007B06Rik (NM_170757.1,1231-1249).
gtaaagtgggcgcaaaaca

SEQ ID NO: 771588 - DNA, 19 bp, Mus musculus
  siRNA target sequence for A630007B06Rik (NM_170757.1,1236-1254).
gtgggcgcaaaacaagtta

SEQ ID NO: 771589 - DNA, 19 bp, Mus musculus
  siRNA target sequence for A630007B06Rik (NM_170757.1,1238-1256).
gggcgcaaaacaagttaaa

SEQ ID NO: 771590 - DNA, 19 bp, Mus musculus
  siRNA target sequence for A630007B06Rik (NM_170757.1,1239-1257).
ggcgcaaaacaagttaaaa

SEQ ID NO: 771591 - DNA, 19 bp, Mus musculus
  siRNA target sequence for A630007B06Rik (NM_170757.1,1353-1371).
gaactgtcaggacatgata

SEQ ID NO: 771592 - DNA, 19 bp, Mus musculus
  siRNA target sequence for A630007B06Rik (NM_170757.1,1374-1392).
gacctatcaggaatctgaa

SEQ ID NO: 771593 - DNA, 19 bp, Mus musculus
  siRNA target sequence for A630007B06Rik (NM_170757.1,1414-1432).
gatgcaaagctcagagtta

SEQ ID NO: 771594 - DNA, 19 bp, Mus musculus
  siRNA target sequence for A630007B06Rik (NM_170757.1,1543-1561).
gatgagctacggacattga

SEQ ID NO: 771595 - DNA, 19 bp, Mus musculus
  siRNA target sequence for A630007B06Rik (NM_170757.1,1566-1584).
gaaggcgaaatgtctagaa

SEQ ID NO: 771596 - DNA, 19 bp, Mus musculus
  siRNA target sequence for A630007B06Rik (NM_170757.1,1569-1587).
ggcgaaatgtctagaagat

SEQ ID NO: 771597 - DNA, 19 bp, Mus musculus
  siRNA target sequence for A630007B06Rik (NM_170757.1,1571-1589).
cgaaatgtctagaagatga

SEQ ID NO: 771598 - DNA, 19 bp, Mus musculus
  siRNA target sequence for A630007B06Rik (NM_170757.1,1582-1600).
gaagatgaacgcttaagaa

SEQ ID NO: 771599 - DNA, 19 bp, Mus musculus
  siRNA target sequence for A630007B06Rik (NM_170757.1,1601-1619).
cggaagatgagttatcaaa

SEQ ID NO: 771600 - DNA, 19 bp, Mus musculus
  siRNA target sequence for A630007B06Rik (NM_170757.1,1606-1624).
gatgagttatcaaagtaca

SEQ ID NO: 771601 - DNA, 19 bp, Mus musculus
  siRNA target sequence for A630007B06Rik (NM_170757.1,1620-1638).
gtacagggaaattatcaat

SEQ ID NO: 771602 - DNA, 19 bp, Mus musculus
  siRNA target sequence for A630007B06Rik (NM_170757.1,1677-1695).
gaaaatcacagatcagtta

SEQ ID NO: 771603 - DNA, 19 bp, Mus musculus
  siRNA target sequence for A630007B06Rik (NM_170757.1,1701-1719).
gcagcttcaaagtggtaaa

SEQ ID NO: 771604 - DNA, 19 bp, Mus musculus
  siRNA target sequence for A630007B06Rik (NM_170757.1,1754-1772).
gccttaattctttgatcaa

SEQ ID NO: 771605 - DNA, 19 bp, Mus musculus
  siRNA target sequence for A630007B06Rik (NM_170757.1,1834-1852).
gaaaagctcacgagtaaga

SEQ ID NO: 771606 - DNA, 19 bp, Mus musculus
  siRNA target sequence for A630007B06Rik (NM_170757.1,1949-1967).
gacaggctaaccgtaatct

SEQ ID NO: 771607 - DNA, 19 bp, Mus musculus
  siRNA target sequence for A630007B06Rik (NM_170757.1,2039-2057).
ctgcgcagaccgaagtcaa

SEQ ID NO: 771608 - DNA, 19 bp, Mus musculus
  siRNA target sequence for A630007B06Rik (NM_170757.1,2152-2170).
cagcaagctcggagaaagt

SEQ ID NO: 771609 - DNA, 19 bp, Mus musculus
  siRNA target sequence for A630007B06Rik (NM_170757.1,2154-2172).
gcaagctcggagaaagtta

SEQ ID NO: 771610 - DNA, 19 bp, Mus musculus
  siRNA target sequence for A630007B06Rik (NM_170757.1,2184-2202).
gaatggaaaccacgataaa

SEQ ID NO: 771611 - DNA, 19 bp, Mus musculus
  siRNA target sequence for A630007B06Rik (NM_170757.1,2188-2206).
ggaaaccacgataaagaca

SEQ ID NO: 771612 - DNA, 19 bp, Mus musculus
  siRNA target sequence for A630007B06Rik (NM_170757.1,2194-2212).
cacgataaagacattagca

SEQ ID NO: 771613 - DNA, 19 bp, Mus musculus
  siRNA target sequence for A630007B06Rik (NM_170757.1,2218-2236).
ggaagtcgctcgagttcat

SEQ ID NO: 771614 - DNA, 19 bp, Mus musculus
  siRNA target sequence for A630007B06Rik (NM_170757.1,2272-2290).
cgatctccagagaatacca

SEQ ID NO: 771615 - DNA, 19 bp, Mus musculus
  siRNA target sequence for A630007B06Rik (NM_170757.1,2349-2367).
gatagtgaggctacagaaa

SEQ ID NO: 771616 - DNA, 19 bp, Mus musculus
  siRNA target sequence for A630007B06Rik (NM_170757.1,2369-2387).
cccatgcccggaagaatga

SEQ ID NO: 771617 - DNA, 19 bp, Mus musculus
  siRNA target sequence for A630007B06Rik (NM_170757.1,2371-2389).
catgcccggaagaatgaga

SEQ ID NO: 771618 - DNA, 19 bp, Mus musculus
  siRNA target sequence for A630007B06Rik (NM_170757.1,2576-2594).
ctgacagcgggctaacact

SEQ ID NO: 771619 - DNA, 19 bp, Mus musculus
  siRNA target sequence for A630007B06Rik (NM_170757.1,2607-2625).
ggaaatcaaccgaaaatta

SEQ ID NO: 771620 - DNA, 19 bp, Mus musculus
  siRNA target sequence for A630007B06Rik (NM_170757.1,2637-2655).
ggaagatacattgctaaaa

SEQ ID NO: 771621 - DNA, 19 bp, Mus musculus
  siRNA target sequence for A630007B06Rik (NM_170757.1,2670-2688).
ggaaaacctgcaaacactt

SEQ ID NO: 771622 - DNA, 19 bp, Mus musculus
  siRNA target sequence for A630007B06Rik (NM_170757.1,2695-2713).
gaaatagaacgccttatta

SEQ ID NO: 771623 - DNA, 19 bp, Mus musculus
  siRNA target sequence for Zec (NM_170759.1,175-193).
caggtgaacggccctataa

SEQ ID NO: 771624 - DNA, 19 bp, Mus musculus
  siRNA target sequence for Zec (NM_170759.1,389-407).
gtggtcatcccattaccaa

SEQ ID NO: 771625 - DNA, 19 bp, Mus musculus
  siRNA target sequence for Zec (NM_170759.1,391-409).
ggtcatcccattaccaata

SEQ ID NO: 771626 - DNA, 19 bp, Mus musculus
  siRNA target sequence for Zec (NM_170759.1,394-412).
catcccattaccaatacca

SEQ ID NO: 771627 - DNA, 19 bp, Mus musculus
  siRNA target sequence for Zec (NM_170759.1,853-871).
ctacagtggagctagtgta

SEQ ID NO: 771628 - DNA, 19 bp, Mus musculus
  siRNA target sequence for Zec (NM_170759.1,1029-1047).
ggccctcctaactttgctt

SEQ ID NO: 771629 - DNA, 19 bp, Mus musculus
  siRNA target sequence for Zec (NM_170759.1,1543-1561).
ggtcgtcccactatcagta

SEQ ID NO: 771630 - DNA, 19 bp, Mus musculus
  siRNA target sequence for Zec (NM_170759.1,1812-1830).
ctgcaccagcgcactcatt

SEQ ID NO: 771631 - DNA, 19 bp, Mus musculus
  siRNA target sequence for Zec (NM_170759.1,2030-2048).
cctacaggccacactttca

SEQ ID NO: 771632 - DNA, 19 bp, Mus musculus
  siRNA target sequence for Zec (NM_170759.1,2036-2054).
ggccacactttcacttgaa

SEQ ID NO: 771633 - DNA, 19 bp, Mus musculus
  siRNA target sequence for Zec (NM_170759.1,2039-2057).
cacactttcacttgaagta

SEQ ID NO: 771634 - DNA, 19 bp, Mus musculus
  siRNA target sequence for Zec (NM_170759.1,2097-2115).
gctcccagttctcaaacat

SEQ ID NO: 771635 - DNA, 19 bp, Mus musculus
  siRNA target sequence for Zec (NM_170759.1,2371-2389).
ggcagagcctcattgttct

SEQ ID NO: 771636 - DNA, 19 bp, Mus musculus
  siRNA target sequence for Zec (NM_170759.1,2556-2574).
ggccaagtctccaattcta

SEQ ID NO: 771637 - DNA, 19 bp, Mus musculus
  siRNA target sequence for Zec (NM_170759.1,2557-2575).
gccaagtctccaattctaa

SEQ ID NO: 771638 - DNA, 19 bp, Mus musculus
  siRNA target sequence for Zec (NM_170759.1,2558-2576).
ccaagtctccaattctaat

SEQ ID NO: 771639 - DNA, 19 bp, Mus musculus
  siRNA target sequence for Zec (NM_170759.1,2853-2871).
ggacagaaactccttatca

SEQ ID NO: 771640 - DNA, 19 bp, Mus musculus
  siRNA target sequence for Zec (NM_170759.1,2886-2904).
gctactgatctgctagaaa

SEQ ID NO: 771641 - DNA, 19 bp, Mus musculus
  siRNA target sequence for Zec (NM_170759.1,2887-2905).
ctactgatctgctagaaaa

SEQ ID NO: 771642 - DNA, 19 bp, Mus musculus
  siRNA target sequence for Zec (NM_170759.1,2892-2910).
gatctgctagaaaatagca

SEQ ID NO: 771643 - DNA, 19 bp, Mus musculus
  siRNA target sequence for Zec (NM_170759.1,3001-3019).
cgtcccagatggtacaagt

SEQ ID NO: 771644 - DNA, 19 bp, Mus musculus
  siRNA target sequence for Zec (NM_170759.1,3102-3120).
caactggtacacacgtttt

SEQ ID NO: 771645 - DNA, 19 bp, Mus musculus
  siRNA target sequence for 1110011K10Rik (NM_170777.3,336-354).
ccacgagaagtcttgtgat

SEQ ID NO: 771646 - DNA, 19 bp, Mus musculus
  siRNA target sequence for Pgbd5 (NM_171824.1,14-32).
ctagcgcggtggacttctt

SEQ ID NO: 771647 - DNA, 19 bp, Mus musculus
  siRNA target sequence for Pgbd5 (NM_171824.1,47-65).
cggacaacgtgctcaagaa

SEQ ID NO: 771648 - DNA, 19 bp, Mus musculus
  siRNA target sequence for Pgbd5 (NM_171824.1,224-242).
gcggaggcttctatagcaa

SEQ ID NO: 771649 - DNA, 19 bp, Mus musculus
  siRNA target sequence for Pgbd5 (NM_171824.1,514-532).
gtccgccagtgctcttcaa

SEQ ID NO: 771650 - DNA, 19 bp, Mus musculus
  siRNA target sequence for Pgbd5 (NM_171824.1,527-545).
cttcaaccgggttcatcat

SEQ ID NO: 771651 - DNA, 19 bp, Mus musculus
  siRNA target sequence for Pgbd5 (NM_171824.1,536-554).
ggttcatcatccagatcta

SEQ ID NO: 771652 - DNA, 19 bp, Mus musculus
  siRNA target sequence for Pgbd5 (NM_171824.1,552-570).
ctacgtccacctaaaggaa

SEQ ID NO: 771653 - DNA, 19 bp, Mus musculus
  siRNA target sequence for Pgbd5 (NM_171824.1,656-674).
ccggaaagaactatatcat

SEQ ID NO: 771654 - DNA, 19 bp, Mus musculus
  siRNA target sequence for Pgbd5 (NM_171824.1,700-718).
ctcaatctgttcgaagaat

SEQ ID NO: 771655 - DNA, 19 bp, Mus musculus
  siRNA target sequence for Pgbd5 (NM_171824.1,702-720).
caatctgttcgaagaattt

SEQ ID NO: 771656 - DNA, 19 bp, Mus musculus
  siRNA target sequence for Pgbd5 (NM_171824.1,706-724).
ctgttcgaagaatttgaga

SEQ ID NO: 771657 - DNA, 19 bp, Mus musculus
  siRNA target sequence for Pgbd5 (NM_171824.1,781-799).
ctccctccatccatgttga

SEQ ID NO: 771658 - DNA, 19 bp, Mus musculus
  siRNA target sequence for Pgbd5 (NM_171824.1,1001-1019).
gctacatctgcagatatga

SEQ ID NO: 771659 - DNA, 19 bp, Mus musculus
  siRNA target sequence for Pgbd5 (NM_171824.1,1010-1028).
gcagatatgacgataagta

SEQ ID NO: 771660 - DNA, 19 bp, Mus musculus
  siRNA target sequence for Pgbd5 (NM_171824.1,1020-1038).
cgataagtacagcaagtat

SEQ ID NO: 771661 - DNA, 19 bp, Mus musculus
  siRNA target sequence for Pgbd5 (NM_171824.1,1110-1128).
cgcctacatcctgtacaaa

SEQ ID NO: 771662 - DNA, 19 bp, Mus musculus
  siRNA target sequence for BC024093 (NM_172049.1,208-226).
gtctggtagtgttagtcta

SEQ ID NO: 771663 - DNA, 19 bp, Mus musculus
  siRNA target sequence for BC024093 (NM_172049.1,210-228).
ctggtagtgttagtctata

SEQ ID NO: 771664 - DNA, 19 bp, Mus musculus
  siRNA target sequence for BC024093 (NM_172049.1,302-320).
ggggatgttcatttctctt

SEQ ID NO: 771665 - DNA, 19 bp, Mus musculus
  siRNA target sequence for BC024093 (NM_172049.1,371-389).
ggtacggaagactttgact

SEQ ID NO: 771666 - DNA, 19 bp, Mus musculus
  siRNA target sequence for BC024093 (NM_172049.1,398-416).
cgacctgaagaccttacaa

SEQ ID NO: 771667 - DNA, 19 bp, Mus musculus
  siRNA target sequence for BC034097 (NM_172050.1,83-101).
cttccaaggttgtttgtct

SEQ ID NO: 771668 - DNA, 19 bp, Mus musculus
  siRNA target sequence for BC034097 (NM_172050.1,144-162).
ctccgtgtgcagtgtcaat

SEQ ID NO: 771669 - DNA, 19 bp, Mus musculus
  siRNA target sequence for BC034097 (NM_172050.1,146-164).
ccgtgtgcagtgtcaatat

SEQ ID NO: 771670 - DNA, 19 bp, Mus musculus
  siRNA target sequence for BC034097 (NM_172050.1,157-175).
gtcaatatagtccatcata

SEQ ID NO: 771671 - DNA, 19 bp, Mus musculus
  siRNA target sequence for BC034097 (NM_172050.1,169-187).
catcatataagggctatat

SEQ ID NO: 771672 - DNA, 19 bp, Mus musculus
  siRNA target sequence for BC034097 (NM_172050.1,172-190).
catataagggctatatgaa

SEQ ID NO: 771673 - DNA, 19 bp, Mus musculus
  siRNA target sequence for BC034097 (NM_172050.1,207-225).
ccgcatgacacgacatgta

SEQ ID NO: 771674 - DNA, 19 bp, Mus musculus
  siRNA target sequence for BC034097 (NM_172050.1,208-226).
cgcatgacacgacatgtaa

SEQ ID NO: 771675 - DNA, 19 bp, Mus musculus
  siRNA target sequence for BC034097 (NM_172050.1,210-228).
catgacacgacatgtaaaa

SEQ ID NO: 771676 - DNA, 19 bp, Mus musculus
  siRNA target sequence for BC034097 (NM_172050.1,213-231).
gacacgacatgtaaaacta

SEQ ID NO: 771677 - DNA, 19 bp, Mus musculus
  siRNA target sequence for BC034097 (NM_172050.1,215-233).
cacgacatgtaaaactatt

SEQ ID NO: 771678 - DNA, 19 bp, Mus musculus
  siRNA target sequence for BC034097 (NM_172050.1,217-235).
cgacatgtaaaactattgt

SEQ ID NO: 771679 - DNA, 19 bp, Mus musculus
  siRNA target sequence for BC034097 (NM_172050.1,218-236).
gacatgtaaaactattgta

SEQ ID NO: 771680 - DNA, 19 bp, Mus musculus
  siRNA target sequence for BC034097 (NM_172050.1,241-259).
ccgacggaagtgagaaaga

SEQ ID NO: 771681 - DNA, 19 bp, Mus musculus
  siRNA target sequence for BC034097 (NM_172050.1,242-260).
cgacggaagtgagaaagaa

SEQ ID NO: 771682 - DNA, 19 bp, Mus musculus
  siRNA target sequence for BC034097 (NM_172050.1,350-368).
gtcttactggtgcaagatt

SEQ ID NO: 771683 - DNA, 19 bp, Mus musculus
  siRNA target sequence for BC034097 (NM_172050.1,352-370).
cttactggtgcaagattca

SEQ ID NO: 771684 - DNA, 19 bp, Mus musculus
  siRNA target sequence for BC034097 (NM_172050.1,362-380).
caagattcagacttccttt

SEQ ID NO: 771685 - DNA, 19 bp, Mus musculus
  siRNA target sequence for BC034097 (NM_172050.1,402-420).
gatccatcggtcagtgtaa

SEQ ID NO: 771686 - DNA, 19 bp, Mus musculus
  siRNA target sequence for BC034097 (NM_172050.1,413-431).
cagtgtaagggtgaatgtt

SEQ ID NO: 771687 - DNA, 19 bp, Mus musculus
  siRNA target sequence for BC034097 (NM_172050.1,469-487).
ctatcctcccactagtgaa

SEQ ID NO: 771688 - DNA, 19 bp, Mus musculus
  siRNA target sequence for BC034097 (NM_172050.1,473-491).
cctcccactagtgaattct

SEQ ID NO: 771689 - DNA, 19 bp, Mus musculus
  siRNA target sequence for BC034097 (NM_172050.1,494-512).
gcagaacctgaggattagt

SEQ ID NO: 771690 - DNA, 19 bp, Mus musculus
  siRNA target sequence for BC034097 (NM_172050.1,495-513).
cagaacctgaggattagta

SEQ ID NO: 771691 - DNA, 19 bp, Mus musculus
  siRNA target sequence for BC034097 (NM_172050.1,497-515).
gaacctgaggattagtact

SEQ ID NO: 771692 - DNA, 19 bp, Mus musculus
  siRNA target sequence for BC034097 (NM_172050.1,511-529).
gtactaatgtgatgttcat

SEQ ID NO: 771693 - DNA, 19 bp, Mus musculus
  siRNA target sequence for C630016B22Rik (NM_172051.1,257-275).
ccgatggcatcctggattt

SEQ ID NO: 771694 - DNA, 19 bp, Mus musculus
  siRNA target sequence for C630016B22Rik (NM_172051.1,302-320).
gcctgagacaaaaaatctt

SEQ ID NO: 771695 - DNA, 19 bp, Mus musculus
  siRNA target sequence for C630016B22Rik (NM_172051.1,303-321).
cctgagacaaaaaatctta

SEQ ID NO: 771696 - DNA, 19 bp, Mus musculus
  siRNA target sequence for C630016B22Rik (NM_172051.1,365-383).
ggaacgttgcagagtatct

SEQ ID NO: 771697 - DNA, 19 bp, Mus musculus
  siRNA target sequence for C630016B22Rik (NM_172051.1,513-531).
cagggagatcgaacagaat

SEQ ID NO: 771698 - DNA, 19 bp, Mus musculus
  siRNA target sequence for C630016B22Rik (NM_172051.1,597-615).
ggatgcccacgtgaaatct

SEQ ID NO: 771699 - DNA, 19 bp, Mus musculus
  siRNA target sequence for C630016B22Rik (NM_172051.1,693-711).
caataagtccagagagttt

SEQ ID NO: 771700 - DNA, 19 bp, Mus musculus
  siRNA target sequence for C630016B22Rik (NM_172051.1,713-731).
ccaacttgatccggaataa

SEQ ID NO: 771701 - DNA, 19 bp, Mus musculus
  siRNA target sequence for C630016B22Rik (NM_172051.1,717-735).
cttgatccggaataagttt

SEQ ID NO: 771702 - DNA, 19 bp, Mus musculus
  siRNA target sequence for C630016B22Rik (NM_172051.1,818-836).
gcgctaccatcgtgaacaa

SEQ ID NO: 771703 - DNA, 19 bp, Mus musculus
  siRNA target sequence for C630016B22Rik (NM_172051.1,819-837).
cgctaccatcgtgaacaaa

SEQ ID NO: 771704 - DNA, 19 bp, Mus musculus
  siRNA target sequence for C630016B22Rik (NM_172051.1,824-842).
ccatcgtgaacaaacctaa

SEQ ID NO: 771705 - DNA, 19 bp, Mus musculus
  siRNA target sequence for C630016B22Rik (NM_172051.1,847-865).
ggcagcgatgacgaatgtt

SEQ ID NO: 771706 - DNA, 19 bp, Mus musculus
  siRNA target sequence for C630016B22Rik (NM_172051.1,849-867).
cagcgatgacgaatgttct

SEQ ID NO: 771707 - DNA, 19 bp, Mus musculus
  siRNA target sequence for C630016B22Rik (NM_172051.1,852-870).
cgatgacgaatgttctagt

SEQ ID NO: 771708 - DNA, 19 bp, Mus musculus
  siRNA target sequence for C630016B22Rik (NM_172051.1,936-954).
ggacagccaggggaagatt

SEQ ID NO: 771709 - DNA, 19 bp, Mus musculus
  siRNA target sequence for C630016B22Rik (NM_172051.1,973-991).
ctgagggagatcaaggtta

SEQ ID NO: 771710 - DNA, 19 bp, Mus musculus
  siRNA target sequence for C630016B22Rik (NM_172051.1,1086-1104).
caggtatgagcgacttgaa

SEQ ID NO: 771711 - DNA, 19 bp, Mus musculus
  siRNA target sequence for C630016B22Rik (NM_172051.1,1088-1106).
ggtatgagcgacttgaaga

SEQ ID NO: 771712 - DNA, 19 bp, Mus musculus
  siRNA target sequence for C630016B22Rik (NM_172051.1,1399-1417).
gtctcgcccatgatgaaga

SEQ ID NO: 771713 - DNA, 19 bp, Mus musculus
  siRNA target sequence for C630016B22Rik (NM_172051.1,1428-1446).
catccttggcaccttcttt

SEQ ID NO: 771714 - DNA, 19 bp, Mus musculus
  siRNA target sequence for C630016B22Rik (NM_172051.1,1459-1477).
ctcgccatattctgtaaaa

SEQ ID NO: 771715 - DNA, 19 bp, Mus musculus
  siRNA target sequence for C630016B22Rik (NM_172051.1,1462-1480).
gccatattctgtaaaaact

SEQ ID NO: 771716 - DNA, 19 bp, Mus musculus
  siRNA target sequence for C630016B22Rik (NM_172051.1,1494-1512).
gtgtgccatagaaaggata

SEQ ID NO: 771717 - DNA, 19 bp, Mus musculus
  siRNA target sequence for C630016B22Rik (NM_172051.1,1496-1514).
gtgccatagaaaggataat

SEQ ID NO: 771718 - DNA, 19 bp, Mus musculus
  siRNA target sequence for C630016B22Rik (NM_172051.1,1498-1516).
gccatagaaaggataatca

SEQ ID NO: 771719 - DNA, 19 bp, Mus musculus
  siRNA target sequence for BC023835 (NM_172116.2,117-135).
cttcgtccactgtttcaca

SEQ ID NO: 771720 - DNA, 19 bp, Mus musculus
  siRNA target sequence for BC023835 (NM_172116.2,175-193).
gggggaaaggccattgact

SEQ ID NO: 771721 - DNA, 19 bp, Mus musculus
  siRNA target sequence for BC023835 (NM_172116.2,218-236).
cccgatgggtacaagactt

SEQ ID NO: 771722 - DNA, 19 bp, Mus musculus
  siRNA target sequence for BC023835 (NM_172116.2,252-270).
cgccagtcctgctaagctt

SEQ ID NO: 771723 - DNA, 19 bp, Mus musculus
  siRNA target sequence for BC023835 (NM_172116.2,350-368).
ggtccctggctcgaatact

SEQ ID NO: 771724 - DNA, 19 bp, Mus musculus
  siRNA target sequence for BC023835 (NM_172116.2,426-444).
cctgtgctgtgctaccaat

SEQ ID NO: 771725 - DNA, 19 bp, Mus musculus
  siRNA target sequence for BC023835 (NM_172116.2,684-702).
cggcagcggaagtaagctt

SEQ ID NO: 771726 - DNA, 19 bp, Mus musculus
  siRNA target sequence for Vps41 (NM_172120.2,46-64).
cgagtctcttgaagaatct

SEQ ID NO: 771727 - DNA, 19 bp, Mus musculus
  siRNA target sequence for Vps41 (NM_172120.2,94-112).
ggaacccaaactgaagtat

SEQ ID NO: 771728 - DNA, 19 bp, Mus musculus
  siRNA target sequence for Vps41 (NM_172120.2,109-127).
gtatgaaaggctttccaat

SEQ ID NO: 771729 - DNA, 19 bp, Mus musculus
  siRNA target sequence for Vps41 (NM_172120.2,169-187).
gacggtccatgacaagttt

SEQ ID NO: 771730 - DNA, 19 bp, Mus musculus
  siRNA target sequence for Vps41 (NM_172120.2,171-189).
cggtccatgacaagttttt

SEQ ID NO: 771731 - DNA, 19 bp, Mus musculus
  siRNA target sequence for Vps41 (NM_172120.2,227-245).
gatgtccagggaaacatca

SEQ ID NO: 771732 - DNA, 19 bp, Mus musculus
  siRNA target sequence for Vps41 (NM_172120.2,260-278).
gtaagtcctgtgaagataa

SEQ ID NO: 771733 - DNA, 19 bp, Mus musculus
  siRNA target sequence for Vps41 (NM_172120.2,355-373).
gtattctggagaagaattt

SEQ ID NO: 771734 - DNA, 19 bp, Mus musculus
  siRNA target sequence for Vps41 (NM_172120.2,432-450).
ccagttgtaagcagtttgt

SEQ ID NO: 771735 - DNA, 19 bp, Mus musculus
  siRNA target sequence for Vps41 (NM_172120.2,479-497).
gaacggacctggatgaaca

SEQ ID NO: 771736 - DNA, 19 bp, Mus musculus
  siRNA target sequence for Vps41 (NM_172120.2,482-500).
cggacctggatgaacagat

SEQ ID NO: 771737 - DNA, 19 bp, Mus musculus
  siRNA target sequence for Vps41 (NM_172120.2,636-654).
cccgagatgacataagtct

SEQ ID NO: 771738 - DNA, 19 bp, Mus musculus
  siRNA target sequence for Vps41 (NM_172120.2,651-669).
gtcttcgcccagacatgta

SEQ ID NO: 771739 - DNA, 19 bp, Mus musculus
  siRNA target sequence for Vps41 (NM_172120.2,691-709).
ggacaatgtgacactcatt

SEQ ID NO: 771740 - DNA, 19 bp, Mus musculus
  siRNA target sequence for Vps41 (NM_172120.2,692-710).
gacaatgtgacactcatta

SEQ ID NO: 771741 - DNA, 19 bp, Mus musculus
  siRNA target sequence for Vps41 (NM_172120.2,718-736).
gggaacttccatcaagata

SEQ ID NO: 771742 - DNA, 19 bp, Mus musculus
  siRNA target sequence for Vps41 (NM_172120.2,780-798).
caagccgatatgttgagat

SEQ ID NO: 771743 - DNA, 19 bp, Mus musculus
  siRNA target sequence for Vps41 (NM_172120.2,783-801).
gccgatatgttgagatagt

SEQ ID NO: 771744 - DNA, 19 bp, Mus musculus
  siRNA target sequence for Vps41 (NM_172120.2,785-803).
cgatatgttgagatagtgt

SEQ ID NO: 771745 - DNA, 19 bp, Mus musculus
  siRNA target sequence for Vps41 (NM_172120.2,806-824).
cagtttgaaactgaattct

SEQ ID NO: 771746 - DNA, 19 bp, Mus musculus
  siRNA target sequence for Vps41 (NM_172120.2,860-878).
gttgtactttcctacgtaa

SEQ ID NO: 771747 - DNA, 19 bp, Mus musculus
  siRNA target sequence for Vps41 (NM_172120.2,948-966).
cggagacttgtgaagagat

SEQ ID NO: 771748 - DNA, 19 bp, Mus musculus
  siRNA target sequence for Vps41 (NM_172120.2,1011-1029).
gtagggattaccacttaga

SEQ ID NO: 771749 - DNA, 19 bp, Mus musculus
  siRNA target sequence for Vps41 (NM_172120.2,1014-1032).
gggattaccacttagaata

SEQ ID NO: 771750 - DNA, 19 bp, Mus musculus
  siRNA target sequence for Vps41 (NM_172120.2,1016-1034).
gattaccacttagaatact

SEQ ID NO: 771751 - DNA, 19 bp, Mus musculus
  siRNA target sequence for Vps41 (NM_172120.2,1041-1059).
gggaatcactcttctatgt

SEQ ID NO: 771752 - DNA, 19 bp, Mus musculus
  siRNA target sequence for Vps41 (NM_172120.2,1100-1118).
caggatgatcacatcgatt

SEQ ID NO: 771753 - DNA, 19 bp, Mus musculus
  siRNA target sequence for Vps41 (NM_172120.2,1161-1179).
ctgaaattagccaaaggaa

SEQ ID NO: 771754 - DNA, 19 bp, Mus musculus
  siRNA target sequence for Vps41 (NM_172120.2,1176-1194).
ggaacattaaacgacataa

SEQ ID NO: 771755 - DNA, 19 bp, Mus musculus
  siRNA target sequence for Vps41 (NM_172120.2,1180-1198).
cattaaacgacataagatt

SEQ ID NO: 771756 - DNA, 19 bp, Mus musculus
  siRNA target sequence for Vps41 (NM_172120.2,1293-1311).
catccctctgggaatacga

SEQ ID NO: 771757 - DNA, 19 bp, Mus musculus
  siRNA target sequence for Vps41 (NM_172120.2,1302-1320).
gggaatacgaagtttacaa

SEQ ID NO: 771758 - DNA, 19 bp, Mus musculus
  siRNA target sequence for Vps41 (NM_172120.2,1303-1321).
ggaatacgaagtttacaaa

SEQ ID NO: 771759 - DNA, 19 bp, Mus musculus
  siRNA target sequence for Vps41 (NM_172120.2,1304-1322).
gaatacgaagtttacaaat

SEQ ID NO: 771760 - DNA, 19 bp, Mus musculus
  siRNA target sequence for Vps41 (NM_172120.2,1384-1402).
gaaaccactcatctatgaa

SEQ ID NO: 771761 - DNA, 19 bp, Mus musculus
  siRNA target sequence for Vps41 (NM_172120.2,1464-1482).
ggcctggagatctatataa

SEQ ID NO: 771762 - DNA, 19 bp, Mus musculus
  siRNA target sequence for Vps41 (NM_172120.2,1466-1484).
cctggagatctatataaca

SEQ ID NO: 771763 - DNA, 19 bp, Mus musculus
  siRNA target sequence for Vps41 (NM_172120.2,1467-1485).
ctggagatctatataacaa

SEQ ID NO: 771764 - DNA, 19 bp, Mus musculus
  siRNA target sequence for Vps41 (NM_172120.2,1526-1544).
gacagtcagaacaaaacgt

SEQ ID NO: 771765 - DNA, 19 bp, Mus musculus
  siRNA target sequence for Vps41 (NM_172120.2,1528-1546).
cagtcagaacaaaacgtta

SEQ ID NO: 771766 - DNA, 19 bp, Mus musculus
  siRNA target sequence for Vps41 (NM_172120.2,1530-1548).
gtcagaacaaaacgttatt

SEQ ID NO: 771767 - DNA, 19 bp, Mus musculus
  siRNA target sequence for Vps41 (NM_172120.2,1534-1552).
gaacaaaacgttattgaaa

SEQ ID NO: 771768 - DNA, 19 bp, Mus musculus
  siRNA target sequence for Vps41 (NM_172120.2,1562-1580).
gaattgtacacctatgaca

SEQ ID NO: 771769 - DNA, 19 bp, Mus musculus
  siRNA target sequence for Vps41 (NM_172120.2,1570-1588).
cacctatgacaaaaattat

SEQ ID NO: 771770 - DNA, 19 bp, Mus musculus
  siRNA target sequence for Vps41 (NM_172120.2,1590-1608).
gcaatgctctggaaatata

SEQ ID NO: 771771 - DNA, 19 bp, Mus musculus
  siRNA target sequence for Vps41 (NM_172120.2,1595-1613).
gctctggaaatatacttaa

SEQ ID NO: 771772 - DNA, 19 bp, Mus musculus
  siRNA target sequence for Vps41 (NM_172120.2,1598-1616).
ctggaaatatacttaacgt

SEQ ID NO: 771773 - DNA, 19 bp, Mus musculus
  siRNA target sequence for Vps41 (NM_172120.2,1600-1618).
ggaaatatacttaacgtta

SEQ ID NO: 771774 - DNA, 19 bp, Mus musculus
  siRNA target sequence for Vps41 (NM_172120.2,1609-1627).
cttaacgttaagacataaa

SEQ ID NO: 771775 - DNA, 19 bp, Mus musculus
  siRNA target sequence for Vps41 (NM_172120.2,1631-1649).
gttttccaactgatacaca

SEQ ID NO: 771776 - DNA, 19 bp, Mus musculus
  siRNA target sequence for Vps41 (NM_172120.2,1637-1655).
caactgatacacaagcata

SEQ ID NO: 771777 - DNA, 19 bp, Mus musculus
  siRNA target sequence for Vps41 (NM_172120.2,1646-1664).
cacaagcataatcttttca

SEQ ID NO: 771778 - DNA, 19 bp, Mus musculus
  siRNA target sequence for Vps41 (NM_172120.2,1665-1683).
gctccatcaaggataaaat

SEQ ID NO: 771779 - DNA, 19 bp, Mus musculus
  siRNA target sequence for Vps41 (NM_172120.2,1668-1686).
ccatcaaggataaaattgt

SEQ ID NO: 771780 - DNA, 19 bp, Mus musculus
  siRNA target sequence for Vps41 (NM_172120.2,1716-1734).
ctgttgacatgcttttgga

SEQ ID NO: 771781 - DNA, 19 bp, Mus musculus
  siRNA target sequence for Vps41 (NM_172120.2,1841-1859).
ggacagcgctaccatgaaa

SEQ ID NO: 771782 - DNA, 19 bp, Mus musculus
  siRNA target sequence for Vps41 (NM_172120.2,2125-2143).
catcgacaaaccaccattt

SEQ ID NO: 771783 - DNA, 19 bp, Mus musculus
  siRNA target sequence for Vps41 (NM_172120.2,2131-2149).
caaaccaccatttatcact

SEQ ID NO: 771784 - DNA, 19 bp, Mus musculus
  siRNA target sequence for Vps41 (NM_172120.2,2148-2166).
ctggcttgttgaacaacat

SEQ ID NO: 771785 - DNA, 19 bp, Mus musculus
  siRNA target sequence for Vps41 (NM_172120.2,2177-2195).
gtggacccgattctactta

SEQ ID NO: 771786 - DNA, 19 bp, Mus musculus
  siRNA target sequence for Vps41 (NM_172120.2,2189-2207).
ctacttatccaccgaatta

SEQ ID NO: 771787 - DNA, 19 bp, Mus musculus
  siRNA target sequence for Vps41 (NM_172120.2,2306-2324).
ctcgtagctgactcattgt

SEQ ID NO: 771788 - DNA, 19 bp, Mus musculus
  siRNA target sequence for Vps41 (NM_172120.2,2325-2343).
cgttgctgaaaaaaatgca

SEQ ID NO: 771789 - DNA, 19 bp, Mus musculus
  siRNA target sequence for Vps41 (NM_172120.2,2369-2387).
gttgatgaagagaatatct

SEQ ID NO: 771790 - DNA, 19 bp, Mus musculus
  siRNA target sequence for Vps41 (NM_172120.2,2510-2528).
gcacaatactgcaacatct

SEQ ID NO: 771791 - DNA, 19 bp, Mus musculus
  siRNA target sequence for LOC230872 (NM_172122.1,119-137).
ctggcactggagattgtga

SEQ ID NO: 771792 - DNA, 19 bp, Mus musculus
  siRNA target sequence for LOC230872 (NM_172122.1,621-639).
ccaagattctgcagtacaa

SEQ ID NO: 771793 - DNA, 19 bp, Mus musculus
  siRNA target sequence for LOC230872 (NM_172122.1,670-688).
gatggacaggtctactgaa

SEQ ID NO: 771794 - DNA, 19 bp, Mus musculus
  siRNA target sequence for LOC230872 (NM_172122.1,1035-1053).
gcacggagagggacttgtt

SEQ ID NO: 771795 - DNA, 19 bp, Mus musculus
  siRNA target sequence for LOC230872 (NM_172122.1,1458-1476).
cacaggctgccctatctga

SEQ ID NO: 771796 - DNA, 19 bp, Mus musculus
  siRNA target sequence for LOC230872 (NM_172122.1,1993-2011).
gaaacgtcagcataaccaa

SEQ ID NO: 771797 - DNA, 19 bp, Mus musculus
  siRNA target sequence for LOC230872 (NM_172122.1,2333-2351).
caggacaagctggaattaa

SEQ ID NO: 771798 - DNA, 19 bp, Mus musculus
  siRNA target sequence for LOC230872 (NM_172122.1,2936-2954).
ctacggcagcaggtaacat

SEQ ID NO: 771799 - DNA, 19 bp, Mus musculus
  siRNA target sequence for LOC230872 (NM_172122.1,3302-3320).
gcgctgtcggagaagttga

SEQ ID NO: 771800 - DNA, 19 bp, Mus musculus
  siRNA target sequence for LOC230872 (NM_172122.1,3415-3433).
gaacgccctgacatctgaa

SEQ ID NO: 771801 - DNA, 19 bp, Mus musculus
  siRNA target sequence for LOC230872 (NM_172122.1,3418-3436).
cgccctgacatctgaactt

SEQ ID NO: 771802 - DNA, 19 bp, Mus musculus
  siRNA target sequence for LOC230872 (NM_172122.1,4627-4645).
gcgggagcgggatgaactt

SEQ ID NO: 771803 - DNA, 19 bp, Mus musculus
  siRNA target sequence for LOC230872 (NM_172122.1,4628-4646).
cgggagcgggatgaactta

SEQ ID NO: 771804 - DNA, 19 bp, Mus musculus
  siRNA target sequence for LOC230872 (NM_172122.1,5392-5410).
gtctgaagcgcgaagacaa

SEQ ID NO: 771805 - DNA, 19 bp, Mus musculus
  siRNA target sequence for LOC230872 (NM_172122.1,5424-5442).
gtgaacaggtgcagacttt

SEQ ID NO: 771806 - DNA, 19 bp, Mus musculus
  siRNA target sequence for 4732474L06Rik (NM_172132.1,244-262).
gaattcagggacttcaaca

SEQ ID NO: 771807 - DNA, 19 bp, Mus musculus
  siRNA target sequence for 4732474L06Rik (NM_172132.1,261-279).
cagatatgtggcgtacatt

SEQ ID NO: 771808 - DNA, 19 bp, Mus musculus
  siRNA target sequence for 4732474L06Rik (NM_172132.1,263-281).
gatatgtggcgtacattga

SEQ ID NO: 771809 - DNA, 19 bp, Mus musculus
  siRNA target sequence for 4732474L06Rik (NM_172132.1,339-357).
gccacggcagacgtatgat

SEQ ID NO: 771810 - DNA, 19 bp, Mus musculus
  siRNA target sequence for 4732474L06Rik (NM_172132.1,344-362).
ggcagacgtatgatgacat

SEQ ID NO: 771811 - DNA, 19 bp, Mus musculus
  siRNA target sequence for 4732474L06Rik (NM_172132.1,408-426).
ccagtcggggcttttcaca

SEQ ID NO: 771812 - DNA, 19 bp, Mus musculus
  siRNA target sequence for 4732474L06Rik (NM_172132.1,472-490).
cgcctagccaatagtgaaa

SEQ ID NO: 771813 - DNA, 19 bp, Mus musculus
  siRNA target sequence for 4732474L06Rik (NM_172132.1,473-491).
gcctagccaatagtgaaaa

SEQ ID NO: 771814 - DNA, 19 bp, Mus musculus
  siRNA target sequence for 4732474L06Rik (NM_172132.1,663-681).
cgaatgcgggaccatcatt

SEQ ID NO: 771815 - DNA, 19 bp, Mus musculus
  siRNA target sequence for 4732474L06Rik (NM_172132.1,678-696).
cattgagggcgtgaataca

SEQ ID NO: 771816 - DNA, 19 bp, Mus musculus
  siRNA target sequence for 4732474L06Rik (NM_172132.1,688-706).
gtgaatacaccctacttgt

SEQ ID NO: 771817 - DNA, 19 bp, Mus musculus
  siRNA target sequence for 4732474L06Rik (NM_172132.1,942-960).
ccccttcagccggattaca

SEQ ID NO: 771818 - DNA, 19 bp, Mus musculus
  siRNA target sequence for 4732474L06Rik (NM_172132.1,944-962).
ccttcagccggattacaca

SEQ ID NO: 771819 - DNA, 19 bp, Mus musculus
  siRNA target sequence for 4732474L06Rik (NM_172132.1,987-1005).
gttcccctatggttaccat

SEQ ID NO: 771820 - DNA, 19 bp, Mus musculus
  siRNA target sequence for 4732474L06Rik (NM_172132.1,1031-1049).
gcgctgagtccactaactt

SEQ ID NO: 771821 - DNA, 19 bp, Mus musculus
  siRNA target sequence for 4732474L06Rik (NM_172132.1,1083-1101).
ggccacacagtgtacatgt

SEQ ID NO: 771822 - DNA, 19 bp, Mus musculus
  siRNA target sequence for 4732474L06Rik (NM_172132.1,1281-1299).
cctgcgcagacaaattagt

SEQ ID NO: 771823 - DNA, 19 bp, Mus musculus
  siRNA target sequence for 4732474L06Rik (NM_172132.1,1440-1458).
cacggctggggtatctact

SEQ ID NO: 771824 - DNA, 19 bp, Mus musculus
  siRNA target sequence for 4732474L06Rik (NM_172132.1,1574-1592).
gcaagcctcggcctactaa

SEQ ID NO: 771825 - DNA, 19 bp, Mus musculus
  siRNA target sequence for 4732474L06Rik (NM_172132.1,1585-1603).
cctactaaggccagaaata

SEQ ID NO: 771826 - DNA, 19 bp, Mus musculus
  siRNA target sequence for 4732474L06Rik (NM_172132.1,1951-1969).
ggaacaacccctttctcta

SEQ ID NO: 771827 - DNA, 19 bp, Mus musculus
  siRNA target sequence for 4732474L06Rik (NM_172132.1,1952-1970).
gaacaacccctttctctaa

SEQ ID NO: 771828 - DNA, 19 bp, Mus musculus
  siRNA target sequence for 4732474L06Rik (NM_172132.1,2055-2073).
ggcctcaagtgatgaagaa

SEQ ID NO: 771829 - DNA, 19 bp, Mus musculus
  siRNA target sequence for 4732474L06Rik (NM_172132.1,2107-2125).
gatcctgaggccttgagat

SEQ ID NO: 771830 - DNA, 19 bp, Mus musculus
  siRNA target sequence for 4732474L06Rik (NM_172132.1,2167-2185).
caagccgagaggaagttca

SEQ ID NO: 771831 - DNA, 19 bp, Mus musculus
  siRNA target sequence for 4732474L06Rik (NM_172132.1,2606-2624).
cagtccctgaggtacgatt

SEQ ID NO: 771832 - DNA, 19 bp, Mus musculus
  siRNA target sequence for 4732474L06Rik (NM_172132.1,2617-2635).
gtacgattcctcaatgtga

SEQ ID NO: 771833 - DNA, 19 bp, Mus musculus
  siRNA target sequence for 4732474L06Rik (NM_172132.1,2671-2689).
gagcagcgatggaaactga

SEQ ID NO: 771834 - DNA, 19 bp, Mus musculus
  siRNA target sequence for 4732474L06Rik (NM_172132.1,2674-2692).
cagcgatggaaactgaaat

SEQ ID NO: 771835 - DNA, 19 bp, Mus musculus
  siRNA target sequence for 4732474L06Rik (NM_172132.1,2677-2695).
cgatggaaactgaaatgca

SEQ ID NO: 771836 - DNA, 19 bp, Mus musculus
  siRNA target sequence for 4732474L06Rik (NM_172132.1,2925-2943).
ccgcaatgggctctactat

SEQ ID NO: 771837 - DNA, 19 bp, Mus musculus
  siRNA target sequence for 4732474L06Rik (NM_172132.1,2960-2978).
gcaccactgcgcagacatt

SEQ ID NO: 771838 - DNA, 19 bp, Mus musculus
  siRNA target sequence for 4732474L06Rik (NM_172132.1,2963-2981).
ccactgcgcagacattcta

SEQ ID NO: 771839 - DNA, 19 bp, Mus musculus
  siRNA target sequence for 4732474L06Rik (NM_172132.1,3095-3113).
ggtggacagacggtaatct

SEQ ID NO: 771840 - DNA, 19 bp, Mus musculus
  siRNA target sequence for 4732474L06Rik (NM_172132.1,3098-3116).
ggacagacggtaatctgta

SEQ ID NO: 771841 - DNA, 19 bp, Mus musculus
  siRNA target sequence for 4732474L06Rik (NM_172132.1,3359-3377).
cagggcgtagcccagaata

SEQ ID NO: 771842 - DNA, 19 bp, Mus musculus
  siRNA target sequence for 4732474L06Rik (NM_172132.1,3362-3380).
ggcgtagcccagaatacct

SEQ ID NO: 771843 - DNA, 19 bp, Mus musculus
  siRNA target sequence for IkappaBNS (NM_172142.1,600-618).
cagcccgagctcacatatt

SEQ ID NO: 771844 - DNA, 19 bp, Mus musculus
  siRNA target sequence for IkappaBNS (NM_172142.1,720-738).
ccgaggtgttacagatgta

SEQ ID NO: 771845 - DNA, 19 bp, Mus musculus
  siRNA target sequence for IkappaBNS (NM_172142.1,736-754).
gtaccgacagctggatatt

SEQ ID NO: 771846 - DNA, 19 bp, Mus musculus
  siRNA target sequence for IkappaBNS (NM_172142.1,739-757).
ccgacagctggatattcgt

SEQ ID NO: 771847 - DNA, 19 bp, Mus musculus
  siRNA target sequence for IkappaBNS (NM_172142.1,745-763).
gctggatattcgtgaacat

SEQ ID NO: 771848 - DNA, 19 bp, Mus musculus
  siRNA target sequence for IkappaBNS (NM_172142.1,746-764).
ctggatattcgtgaacata

SEQ ID NO: 771849 - DNA, 19 bp, Mus musculus
  siRNA target sequence for IkappaBNS (NM_172142.1,748-766).
ggatattcgtgaacataaa

SEQ ID NO: 771850 - DNA, 19 bp, Mus musculus
  siRNA target sequence for IkappaBNS (NM_172142.1,911-929).
gtcctttcggctgtgttta

SEQ ID NO: 771851 - DNA, 19 bp, Mus musculus
  siRNA target sequence for IkappaBNS (NM_172142.1,914-932).
ctttcggctgtgtttaagt

SEQ ID NO: 771852 - DNA, 19 bp, Mus musculus
  siRNA target sequence for IkappaBNS (NM_172142.1,1074-1092).
cttgtgtgcagatgttact

SEQ ID NO: 771853 - DNA, 19 bp, Mus musculus
  siRNA target sequence for IkappaBNS (NM_172142.1,1094-1112).
caaatgggtgccagtcata

SEQ ID NO: 771854 - DNA, 19 bp, Mus musculus
  siRNA target sequence for IkappaBNS (NM_172142.1,1401-1419).
ggctccggcagctgttgaa

SEQ ID NO: 771855 - DNA, 19 bp, Mus musculus
  siRNA target sequence for Ofcc1 (NM_172143.1,368-386).
ccacgtcggctgaatttct

SEQ ID NO: 771856 - DNA, 19 bp, Mus musculus
  siRNA target sequence for Ofcc1 (NM_172143.1,371-389).
cgtcggctgaatttctgat

SEQ ID NO: 771857 - DNA, 19 bp, Mus musculus
  siRNA target sequence for Ofcc1 (NM_172143.1,422-440).
ccgggaatccaggttttaa

SEQ ID NO: 771858 - DNA, 19 bp, Mus musculus
  siRNA target sequence for Ofcc1 (NM_172143.1,424-442).
gggaatccaggttttaaca

SEQ ID NO: 771859 - DNA, 19 bp, Mus musculus
  siRNA target sequence for Ofcc1 (NM_172143.1,425-443).
ggaatccaggttttaacat

SEQ ID NO: 771860 - DNA, 19 bp, Mus musculus
  siRNA target sequence for Ofcc1 (NM_172143.1,471-489).
gactccacaagagaaagtt

SEQ ID NO: 771861 - DNA, 19 bp, Mus musculus
  siRNA target sequence for Ofcc1 (NM_172143.1,473-491).
ctccacaagagaaagttgt

SEQ ID NO: 771862 - DNA, 19 bp, Mus musculus
  siRNA target sequence for Ofcc1 (NM_172143.1,513-531).
cacccttgcaactcatcaa

SEQ ID NO: 771863 - DNA, 19 bp, Mus musculus
  siRNA target sequence for Ofcc1 (NM_172143.1,670-688).
gcttctgtggaagatttgt

SEQ ID NO: 771864 - DNA, 19 bp, Mus musculus
  siRNA target sequence for Ofcc1 (NM_172143.1,755-773).
gcttcgtgggtgaaggata

SEQ ID NO: 771865 - DNA, 19 bp, Mus musculus
  siRNA target sequence for Ofcc1 (NM_172143.1,756-774).
cttcgtgggtgaaggatat

SEQ ID NO: 771866 - DNA, 19 bp, Mus musculus
  siRNA target sequence for 2610027C15Rik (NM_172145.2,1131-1149).
ctgggacgaatgcactatt

SEQ ID NO: 771867 - DNA, 19 bp, Mus musculus
  siRNA target sequence for 2610027C15Rik (NM_172145.2,1134-1152).
ggacgaatgcactattact

SEQ ID NO: 771868 - DNA, 19 bp, Mus musculus
  siRNA target sequence for BC033606 (NM_172147.1,200-218).
ctttcttccggaatacctt

SEQ ID NO: 771869 - DNA, 19 bp, Mus musculus
  siRNA target sequence for BC033606 (NM_172147.1,359-377).
ccaataacttcatatacaa

SEQ ID NO: 771870 - DNA, 19 bp, Mus musculus
  siRNA target sequence for BC033606 (NM_172147.1,582-600).
ggaggacactcttccaaat

SEQ ID NO: 771871 - DNA, 19 bp, Mus musculus
  siRNA target sequence for BC033606 (NM_172147.1,585-603).
ggacactcttccaaataca

SEQ ID NO: 771872 - DNA, 19 bp, Mus musculus
  siRNA target sequence for BC033606 (NM_172147.1,616-634).
gatgctgtatcagaaaaga

SEQ ID NO: 771873 - DNA, 19 bp, Mus musculus
  siRNA target sequence for BC028440 (NM_172148.1,244-262).
cgtgatcgggcagatcata

SEQ ID NO: 771874 - DNA, 19 bp, Mus musculus
  siRNA target sequence for BC028440 (NM_172148.1,418-436).
gcacttcgctactaaaggt

SEQ ID NO: 771875 - DNA, 19 bp, Mus musculus
  siRNA target sequence for BC028440 (NM_172148.1,635-653).
cacgcagataccatctaca

SEQ ID NO: 771876 - DNA, 19 bp, Mus musculus
  siRNA target sequence for BC037708 (NM_172150.2,81-99).
gctgcggagtaccattctt

SEQ ID NO: 771877 - DNA, 19 bp, Mus musculus
  siRNA target sequence for BC037708 (NM_172150.2,82-100).
ctgcggagtaccattcttt

SEQ ID NO: 771878 - DNA, 19 bp, Mus musculus
  siRNA target sequence for BC037708 (NM_172150.2,85-103).
cggagtaccattcttttca

SEQ ID NO: 771879 - DNA, 19 bp, Mus musculus
  siRNA target sequence for BC037708 (NM_172150.2,86-104).
ggagtaccattcttttcaa

SEQ ID NO: 771880 - DNA, 19 bp, Mus musculus
  siRNA target sequence for BC037708 (NM_172150.2,87-105).
gagtaccattcttttcaat

SEQ ID NO: 771881 - DNA, 19 bp, Mus musculus
  siRNA target sequence for BC037708 (NM_172150.2,92-110).
ccattcttttcaatgcata

SEQ ID NO: 771882 - DNA, 19 bp, Mus musculus
  siRNA target sequence for BC037708 (NM_172150.2,161-179).
gacttcggagtaattggaa

SEQ ID NO: 771883 - DNA, 19 bp, Mus musculus
  siRNA target sequence for BC037708 (NM_172150.2,180-198).
gattcagagcttgaaagat

SEQ ID NO: 771884 - DNA, 19 bp, Mus musculus
  siRNA target sequence for BC037708 (NM_172150.2,216-234).
gttaattggggtgaaacta

SEQ ID NO: 771885 - DNA, 19 bp, Mus musculus
  siRNA target sequence for BC037708 (NM_172150.2,245-263).
ctggaccaagggaaaagtt

SEQ ID NO: 771886 - DNA, 19 bp, Mus musculus
  siRNA target sequence for BC037708 (NM_172150.2,247-265).
ggaccaagggaaaagttta

SEQ ID NO: 771887 - DNA, 19 bp, Mus musculus
  siRNA target sequence for BC037708 (NM_172150.2,387-405).
cggaatcatggttaataat

SEQ ID NO: 771888 - DNA, 19 bp, Mus musculus
  siRNA target sequence for BC037708 (NM_172150.2,389-407).
gaatcatggttaataatga

SEQ ID NO: 771889 - DNA, 19 bp, Mus musculus
  siRNA target sequence for BC037708 (NM_172150.2,412-430).
gtggttagaaacgtgtatt

SEQ ID NO: 771890 - DNA, 19 bp, Mus musculus
  siRNA target sequence for BC037708 (NM_172150.2,415-433).
gttagaaacgtgtattaca

SEQ ID NO: 771891 - DNA, 19 bp, Mus musculus
  siRNA target sequence for BC037708 (NM_172150.2,419-437).
gaaacgtgtattacaagta

SEQ ID NO: 771892 - DNA, 19 bp, Mus musculus
  siRNA target sequence for BC037708 (NM_172150.2,435-453).
gtacttccatcctaaggaa

SEQ ID NO: 771893 - DNA, 19 bp, Mus musculus
  siRNA target sequence for BC037708 (NM_172150.2,513-531).
gcctggagtcattgatgaa

SEQ ID NO: 771894 - DNA, 19 bp, Mus musculus
  siRNA target sequence for BC037708 (NM_172150.2,574-592).
ccttttggtgccacattga

SEQ ID NO: 771895 - DNA, 19 bp, Mus musculus
  siRNA target sequence for BC037708 (NM_172150.2,656-674).
ccattctagctttctatca

SEQ ID NO: 771896 - DNA, 19 bp, Mus musculus
  siRNA target sequence for BC037708 (NM_172150.2,664-682).
gctttctatcactcaaaga

SEQ ID NO: 771897 - DNA, 19 bp, Mus musculus
  siRNA target sequence for BC037708 (NM_172150.2,709-727).
cttggttcgtgtcatatgt

SEQ ID NO: 771898 - DNA, 19 bp, Mus musculus
  siRNA target sequence for BC037708 (NM_172150.2,712-730).
ggttcgtgtcatatgttca

SEQ ID NO: 771899 - DNA, 19 bp, Mus musculus
  siRNA target sequence for BC037708 (NM_172150.2,726-744).
gttcagtgaccaatattta

SEQ ID NO: 771900 - DNA, 19 bp, Mus musculus
  siRNA target sequence for BC037708 (NM_172150.2,729-747).
cagtgaccaatatttagat

SEQ ID NO: 771901 - DNA, 19 bp, Mus musculus
  siRNA target sequence for BC037708 (NM_172150.2,731-749).
gtgaccaatatttagataa

SEQ ID NO: 771902 - DNA, 19 bp, Mus musculus
  siRNA target sequence for BC037708 (NM_172150.2,761-779).
gcaaaattatggatgttgt

SEQ ID NO: 771903 - DNA, 19 bp, Mus musculus
  siRNA target sequence for BC037708 (NM_172150.2,778-796).
gtgttccagtggcttacaa

SEQ ID NO: 771904 - DNA, 19 bp, Mus musculus
  siRNA target sequence for BC037708 (NM_172150.2,996-1014).
ggctcacgaggaactaaat

SEQ ID NO: 771905 - DNA, 19 bp, Mus musculus
  siRNA target sequence for BC037708 (NM_172150.2,998-1016).
ctcacgaggaactaaatgt

SEQ ID NO: 771906 - DNA, 19 bp, Mus musculus
  siRNA target sequence for BC037708 (NM_172150.2,1035-1053).
gctcgtccaacctcagttt

SEQ ID NO: 771907 - DNA, 19 bp, Mus musculus
  siRNA target sequence for BC037708 (NM_172150.2,1039-1057).
gtccaacctcagtttgaga

SEQ ID NO: 771908 - DNA, 19 bp, Mus musculus
  siRNA target sequence for BC037708 (NM_172150.2,1131-1149).
gtttgacctagatgaaaca

SEQ ID NO: 771909 - DNA, 19 bp, Mus musculus
  siRNA target sequence for BC037708 (NM_172150.2,1135-1153).
gacctagatgaaacattct

SEQ ID NO: 771910 - DNA, 19 bp, Mus musculus
  siRNA target sequence for BC037708 (NM_172150.2,1177-1195).
cagatcaccaacaagtgta

SEQ ID NO: 771911 - DNA, 19 bp, Mus musculus
  siRNA target sequence for BC037708 (NM_172150.2,1182-1200).
caccaacaagtgtactgat

SEQ ID NO: 771912 - DNA, 19 bp, Mus musculus
  siRNA target sequence for BC037708 (NM_172150.2,1185-1203).
caacaagtgtactgatgaa

SEQ ID NO: 771913 - DNA, 19 bp, Mus musculus
  siRNA target sequence for BC037708 (NM_172150.2,1196-1214).
ctgatgaagacctggaatt

SEQ ID NO: 771914 - DNA, 19 bp, Mus musculus
  siRNA target sequence for BC037708 (NM_172150.2,1204-1222).
gacctggaattctatgtca

SEQ ID NO: 771915 - DNA, 19 bp, Mus musculus
  siRNA target sequence for BC037708 (NM_172150.2,1234-1252).
gacattcttggagtaacaa

SEQ ID NO: 771916 - DNA, 19 bp, Mus musculus
  siRNA target sequence for BC037708 (NM_172150.2,1280-1298).
ccaaacatatccttgaaca

SEQ ID NO: 771917 - DNA, 19 bp, Mus musculus
  siRNA target sequence for BC037708 (NM_172150.2,1309-1327).
caagtggtggagttcaaga

SEQ ID NO: 771918 - DNA, 19 bp, Mus musculus
  siRNA target sequence for A630025C20Rik (NM_172154.2,2865-2883).
cagcgaatgatccaacaat

SEQ ID NO: 771919 - DNA, 19 bp, Mus musculus
  siRNA target sequence for A630025C20Rik (NM_172154.2,2867-2885).
gcgaatgatccaacaattt

SEQ ID NO: 771920 - DNA, 19 bp, Mus musculus
  siRNA target sequence for A630025C20Rik (NM_172154.2,2892-2910).
gaatatacctcaaaaacta

SEQ ID NO: 771921 - DNA, 19 bp, Mus musculus
  siRNA target sequence for A630025C20Rik (NM_172154.2,2931-2949).
cagcccaatagcacaaaga

SEQ ID NO: 771922 - DNA, 19 bp, Mus musculus
  siRNA target sequence for A630025C20Rik (NM_172154.2,2952-2970).
caaagcctgccgaaagcat

SEQ ID NO: 771923 - DNA, 19 bp, Mus musculus
  siRNA target sequence for A630025C20Rik (NM_172154.2,3080-3098).
gtcagaacctagtgaacaa

SEQ ID NO: 771924 - DNA, 19 bp, Mus musculus
  siRNA target sequence for A630025C20Rik (NM_172154.2,3105-3123).
gtacttgacttatctacta

SEQ ID NO: 771925 - DNA, 19 bp, Mus musculus
  siRNA target sequence for A630025C20Rik (NM_172154.2,3108-3126).
cttgacttatctactaaga

SEQ ID NO: 771926 - DNA, 19 bp, Mus musculus
  siRNA target sequence for A630025C20Rik (NM_172154.2,3113-3131).
cttatctactaagaaaagt

SEQ ID NO: 771927 - DNA, 19 bp, Mus musculus
  siRNA target sequence for A630025C20Rik (NM_172154.2,3296-3314).
ctccacatcactcaaagtt

SEQ ID NO: 771928 - DNA, 19 bp, Mus musculus
  siRNA target sequence for A630025C20Rik (NM_172154.2,3332-3350).
gcagattagtgaagaacta

SEQ ID NO: 771929 - DNA, 19 bp, Mus musculus
  siRNA target sequence for A630025C20Rik (NM_172154.2,3351-3369).
ctgagcagaaaccaattgt

SEQ ID NO: 771930 - DNA, 19 bp, Mus musculus
  siRNA target sequence for A630025C20Rik (NM_172154.2,3387-3405).
ggtccgtctggattacaga

SEQ ID NO: 771931 - DNA, 19 bp, Mus musculus
  siRNA target sequence for A630025C20Rik (NM_172154.2,3388-3406).
gtccgtctggattacagaa

SEQ ID NO: 771932 - DNA, 19 bp, Mus musculus
  siRNA target sequence for A630025C20Rik (NM_172154.2,3391-3409).
cgtctggattacagaatca

SEQ ID NO: 771933 - DNA, 19 bp, Mus musculus
  siRNA target sequence for A630025C20Rik (NM_172154.2,3410-3428).
cggacagcacttaatctta

SEQ ID NO: 771934 - DNA, 19 bp, Mus musculus
  siRNA target sequence for A630025C20Rik (NM_172154.2,3411-3429).
ggacagcacttaatcttat

SEQ ID NO: 771935 - DNA, 19 bp, Mus musculus
  siRNA target sequence for A630025C20Rik (NM_172154.2,3414-3432).
cagcacttaatcttatcca

SEQ ID NO: 771936 - DNA, 19 bp, Mus musculus
  siRNA target sequence for A630025C20Rik (NM_172154.2,3447-3465).
gcaaaacctcactatgaat

SEQ ID NO: 771937 - DNA, 19 bp, Mus musculus
  siRNA target sequence for A630025C20Rik (NM_172154.2,3469-3487).
gcctcagccgaatgaagtt

SEQ ID NO: 771938 - DNA, 19 bp, Mus musculus
  siRNA target sequence for A630025C20Rik (NM_172154.2,3471-3489).
ctcagccgaatgaagttca

SEQ ID NO: 771939 - DNA, 19 bp, Mus musculus
  siRNA target sequence for A630025C20Rik (NM_172154.2,3498-3516).
ggtgcactcagcaacatta

SEQ ID NO: 771940 - DNA, 19 bp, Mus musculus
  siRNA target sequence for A630025C20Rik (NM_172154.2,3599-3617).
ccattcatctcctgtagat

SEQ ID NO: 771941 - DNA, 19 bp, Mus musculus
  siRNA target sequence for A630025C20Rik (NM_172154.2,3604-3622).
catctcctgtagatttaaa

SEQ ID NO: 771942 - DNA, 19 bp, Mus musculus
  siRNA target sequence for A630025C20Rik (NM_172154.2,3633-3651).
gttcgaggaatggatcttt

SEQ ID NO: 771943 - DNA, 19 bp, Mus musculus
  siRNA target sequence for A630025C20Rik (NM_172154.2,3636-3654).
cgaggaatggatctttctt

SEQ ID NO: 771944 - DNA, 19 bp, Mus musculus
  siRNA target sequence for A630025C20Rik (NM_172154.2,3661-3679).
ctcgcactggtgatcagta

SEQ ID NO: 771945 - DNA, 19 bp, Mus musculus
  siRNA target sequence for A630025C20Rik (NM_172154.2,3669-3687).
ggtgatcagtacagctata

SEQ ID NO: 771946 - DNA, 19 bp, Mus musculus
  siRNA target sequence for A630025C20Rik (NM_172154.2,3672-3690).
gatcagtacagctatagct

SEQ ID NO: 771947 - DNA, 19 bp, Mus musculus
  siRNA target sequence for A630025C20Rik (NM_172154.2,3682-3700).
gctatagctctttggtaat

SEQ ID NO: 771948 - DNA, 19 bp, Mus musculus
  siRNA target sequence for A630025C20Rik (NM_172154.2,3712-3730).
cggagagcgcgcttagtaa

SEQ ID NO: 771949 - DNA, 19 bp, Mus musculus
  siRNA target sequence for A630025C20Rik (NM_172154.2,3713-3731).
ggagagcgcgcttagtaaa

SEQ ID NO: 771950 - DNA, 19 bp, Mus musculus
  siRNA target sequence for A630025C20Rik (NM_172154.2,3714-3732).
gagagcgcgcttagtaaaa

SEQ ID NO: 771951 - DNA, 19 bp, Mus musculus
  siRNA target sequence for A630025C20Rik (NM_172154.2,3716-3734).
gagcgcgcttagtaaaaaa

SEQ ID NO: 771952 - DNA, 19 bp, Mus musculus
  siRNA target sequence for A630025C20Rik (NM_172154.2,3718-3736).
gcgcgcttagtaaaaaatt

SEQ ID NO: 771953 - DNA, 19 bp, Mus musculus
  siRNA target sequence for A630025C20Rik (NM_172154.2,3719-3737).
cgcgcttagtaaaaaatta

SEQ ID NO: 771954 - DNA, 19 bp, Mus musculus
  siRNA target sequence for A630025C20Rik (NM_172154.2,3720-3738).
gcgcttagtaaaaaattaa

SEQ ID NO: 771955 - DNA, 19 bp, Mus musculus
  siRNA target sequence for A630025C20Rik (NM_172154.2,3739-3757).
gggctattcttccaaaaca

SEQ ID NO: 771956 - DNA, 19 bp, Mus musculus
  siRNA target sequence for A630025C20Rik (NM_172154.2,3740-3758).
ggctattcttccaaaacaa

SEQ ID NO: 771957 - DNA, 19 bp, Mus musculus
  siRNA target sequence for A630025C20Rik (NM_172154.2,3892-3910).
ggcgttacagacagtacaa

SEQ ID NO: 771958 - DNA, 19 bp, Mus musculus
  siRNA target sequence for A630025C20Rik (NM_172154.2,3894-3912).
cgttacagacagtacaaca

SEQ ID NO: 771959 - DNA, 19 bp, Mus musculus
  siRNA target sequence for A630025C20Rik (NM_172154.2,3932-3950).
catctcggtggttatgagt

SEQ ID NO: 771960 - DNA, 19 bp, Mus musculus
  siRNA target sequence for A630025C20Rik (NM_172154.2,3998-4016).
cagtacactggagtacaaa

SEQ ID NO: 771961 - DNA, 19 bp, Mus musculus
  siRNA target sequence for A630025C20Rik (NM_172154.2,4000-4018).
gtacactggagtacaaagt

SEQ ID NO: 771962 - DNA, 19 bp, Mus musculus
  siRNA target sequence for A630025C20Rik (NM_172154.2,4082-4100).
ggggccagatgtttctgta

SEQ ID NO: 771963 - DNA, 19 bp, Mus musculus
  siRNA target sequence for A630025C20Rik (NM_172154.2,4127-4145).
ggcagcacaaagtgcaaat

SEQ ID NO: 771964 - DNA, 19 bp, Mus musculus
  siRNA target sequence for A630025C20Rik (NM_172154.2,4141-4159).
caaatgaatcaaaaactga

SEQ ID NO: 771965 - DNA, 19 bp, Mus musculus
  siRNA target sequence for AA589481 (NM_172162.1,211-229).
ccacttgaggaagaattct

SEQ ID NO: 771966 - DNA, 19 bp, Mus musculus
  siRNA target sequence for AA589481 (NM_172162.1,310-328).
cacaccaagctaaaacagt

SEQ ID NO: 771967 - DNA, 19 bp, Mus musculus
  siRNA target sequence for AA589481 (NM_172162.1,331-349).
gggctgcaagccttacaaa

SEQ ID NO: 771968 - DNA, 19 bp, Mus musculus
  siRNA target sequence for AA589481 (NM_172162.1,576-594).
caaggaccggtgtaagctt

SEQ ID NO: 771969 - DNA, 19 bp, Mus musculus
  siRNA target sequence for AA589481 (NM_172162.1,652-670).
ggcatgtttgccaacaaca

SEQ ID NO: 771970 - DNA, 19 bp, Mus musculus
  siRNA target sequence for AA589481 (NM_172162.1,666-684).
caacaccaagttcttagat

SEQ ID NO: 771971 - DNA, 19 bp, Mus musculus
  siRNA target sequence for AA589481 (NM_172162.1,777-795).
catgcggaaccatgtgaat

SEQ ID NO: 771972 - DNA, 19 bp, Mus musculus
  siRNA target sequence for AA589481 (NM_172162.1,781-799).
cggaaccatgtgaatcact

SEQ ID NO: 771973 - DNA, 19 bp, Mus musculus
  siRNA target sequence for AA589481 (NM_172162.1,782-800).
ggaaccatgtgaatcacta

SEQ ID NO: 771974 - DNA, 19 bp, Mus musculus
  siRNA target sequence for AA589481 (NM_172162.1,783-801).
gaaccatgtgaatcactat

SEQ ID NO: 771975 - DNA, 19 bp, Mus musculus
  siRNA target sequence for AA589481 (NM_172162.1,786-804).
ccatgtgaatcactataaa

SEQ ID NO: 771976 - DNA, 19 bp, Mus musculus
  siRNA target sequence for AA589481 (NM_172162.1,787-805).
catgtgaatcactataaat

SEQ ID NO: 771977 - DNA, 19 bp, Mus musculus
  siRNA target sequence for AA589481 (NM_172162.1,872-890).
gtgaggaccgaccctataa

SEQ ID NO: 771978 - DNA, 19 bp, Mus musculus
  siRNA target sequence for AA589481 (NM_172162.1,874-892).
gaggaccgaccctataaat

SEQ ID NO: 771979 - DNA, 19 bp, Mus musculus
  siRNA target sequence for AA589481 (NM_172162.1,876-894).
ggaccgaccctataaatgt

SEQ ID NO: 771980 - DNA, 19 bp, Mus musculus
  siRNA target sequence for AA589481 (NM_172162.1,909-927).
cagctgtaagaatttgatt

SEQ ID NO: 771981 - DNA, 19 bp, Mus musculus
  siRNA target sequence for AA589481 (NM_172162.1,911-929).
gctgtaagaatttgattga

SEQ ID NO: 771982 - DNA, 19 bp, Mus musculus
  siRNA target sequence for AA589481 (NM_172162.1,1062-1080).
gccaaggtacaaatgtcat

SEQ ID NO: 771983 - DNA, 19 bp, Mus musculus
  siRNA target sequence for AA589481 (NM_172162.1,1210-1228).
cagctagttcggtatgaga

SEQ ID NO: 771984 - DNA, 19 bp, Mus musculus
  siRNA target sequence for AA589481 (NM_172162.1,1248-1266).
gttgctgcagcagttacaa

SEQ ID NO: 771985 - DNA, 19 bp, Mus musculus
  siRNA target sequence for AA589481 (NM_172162.1,1280-1298).
cgggattggcactgaatga

SEQ ID NO: 771986 - DNA, 19 bp, Mus musculus
  siRNA target sequence for AA589481 (NM_172162.1,1304-1322).
gcctgcagggcattgttct

SEQ ID NO: 771987 - DNA, 19 bp, Mus musculus
  siRNA target sequence for AA589481 (NM_172162.1,1421-1439).
gctcagccattcatatggt

SEQ ID NO: 771988 - DNA, 19 bp, Mus musculus
  siRNA target sequence for AA589481 (NM_172162.1,1460-1478).
gccagcgagacattgtcta

SEQ ID NO: 771989 - DNA, 19 bp, Mus musculus
  siRNA target sequence for AA589481 (NM_172162.1,1527-1545).
cctcaagagagatggaaaa

SEQ ID NO: 771990 - DNA, 19 bp, Mus musculus
  siRNA target sequence for Twistnb (NM_172253.1,278-296).
ctccgagagccttttaggt

SEQ ID NO: 771991 - DNA, 19 bp, Mus musculus
  siRNA target sequence for Twistnb (NM_172253.1,320-338).
cagagttgtgggtgaacta

SEQ ID NO: 771992 - DNA, 19 bp, Mus musculus
  siRNA target sequence for Twistnb (NM_172253.1,329-347).
gggtgaactaggagatatt

SEQ ID NO: 771993 - DNA, 19 bp, Mus musculus
  siRNA target sequence for Twistnb (NM_172253.1,331-349).
gtgaactaggagatattta

SEQ ID NO: 771994 - DNA, 19 bp, Mus musculus
  siRNA target sequence for Twistnb (NM_172253.1,340-358).
gagatatttatgatgatca

SEQ ID NO: 771995 - DNA, 19 bp, Mus musculus
  siRNA target sequence for Twistnb (NM_172253.1,408-426).
gagcctgggcagacgttaa

SEQ ID NO: 771996 - DNA, 19 bp, Mus musculus
  siRNA target sequence for Twistnb (NM_172253.1,422-440).
gttaatgggtacagttaat

SEQ ID NO: 771997 - DNA, 19 bp, Mus musculus
  siRNA target sequence for Twistnb (NM_172253.1,428-446).
gggtacagttaataaagta

SEQ ID NO: 771998 - DNA, 19 bp, Mus musculus
  siRNA target sequence for Twistnb (NM_172253.1,468-486).
ctagtccatggatgtttta

SEQ ID NO: 771999 - DNA, 19 bp, Mus musculus
  siRNA target sequence for Twistnb (NM_172253.1,530-548).
gcaaacattggagatacat

SEQ ID NO: 772000 - DNA, 19 bp, Mus musculus
  siRNA target sequence for Twistnb (NM_172253.1,553-571).
gcgatgaactggaatttga

SEQ ID NO: 772001 - DNA, 19 bp, Mus musculus
  siRNA target sequence for Twistnb (NM_172253.1,570-588).
gatgtatttcgcttagatt

SEQ ID NO: 772002 - DNA, 19 bp, Mus musculus
  siRNA target sequence for Twistnb (NM_172253.1,605-623).
gttctgcattcgaggaaaa

SEQ ID NO: 772003 - DNA, 19 bp, Mus musculus
  siRNA target sequence for Twistnb (NM_172253.1,626-644).
gagtaccaccagtttgcaa

SEQ ID NO: 772004 - DNA, 19 bp, Mus musculus
  siRNA target sequence for Twistnb (NM_172253.1,631-649).
ccaccagtttgcaacttaa

SEQ ID NO: 772005 - DNA, 19 bp, Mus musculus
  siRNA target sequence for Twistnb (NM_172253.1,676-694).
cagaaactgtcgttgaaga

SEQ ID NO: 772006 - DNA, 19 bp, Mus musculus
  siRNA target sequence for Twistnb (NM_172253.1,686-704).
cgttgaagaggttgttgaa

SEQ ID NO: 772007 - DNA, 19 bp, Mus musculus
  siRNA target sequence for Twistnb (NM_172253.1,690-708).
gaagaggttgttgaaaaaa

SEQ ID NO: 772008 - DNA, 19 bp, Mus musculus
  siRNA target sequence for Twistnb (NM_172253.1,756-774).
ggaacagttgatagtgtta

SEQ ID NO: 772009 - DNA, 19 bp, Mus musculus
  siRNA target sequence for Twistnb (NM_172253.1,779-797).
ggttgcagatgttacagat

SEQ ID NO: 772010 - DNA, 19 bp, Mus musculus
  siRNA target sequence for Twistnb (NM_172253.1,800-818).
cacgccacaggaagaaaca

SEQ ID NO: 772011 - DNA, 19 bp, Mus musculus
  siRNA target sequence for Twistnb (NM_172253.1,819-837).
gacataccatgtagtgata

SEQ ID NO: 772012 - DNA, 19 bp, Mus musculus
  siRNA target sequence for Twistnb (NM_172253.1,821-839).
cataccatgtagtgataat

SEQ ID NO: 772013 - DNA, 19 bp, Mus musculus
  siRNA target sequence for Twistnb (NM_172253.1,825-843).
ccatgtagtgataatgtga

SEQ ID NO: 772014 - DNA, 19 bp, Mus musculus
  siRNA target sequence for Twistnb (NM_172253.1,826-844).
catgtagtgataatgtgaa

SEQ ID NO: 772015 - DNA, 19 bp, Mus musculus
  siRNA target sequence for Twistnb (NM_172253.1,832-850).
gtgataatgtgaatgactt

SEQ ID NO: 772016 - DNA, 19 bp, Mus musculus
  siRNA target sequence for Twistnb (NM_172253.1,940-958).
gctaccagagtgaccataa

SEQ ID NO: 772017 - DNA, 19 bp, Mus musculus
  siRNA target sequence for Twistnb (NM_172253.1,947-965).
gagtgaccataacaagaaa

SEQ ID NO: 772018 - DNA, 19 bp, Mus musculus
  siRNA target sequence for 2610018L09Rik (NM_172254.2,92-110).
gatcgaggactttcaatat

SEQ ID NO: 772019 - DNA, 19 bp, Mus musculus
  siRNA target sequence for 2610018L09Rik (NM_172254.2,113-131).
cgaggactcggagacatat

SEQ ID NO: 772020 - DNA, 19 bp, Mus musculus
  siRNA target sequence for 2610018L09Rik (NM_172254.2,143-161).
cccctgtggggataacttt

SEQ ID NO: 772021 - DNA, 19 bp, Mus musculus
  siRNA target sequence for 2610018L09Rik (NM_172254.2,167-185).
caccaaggaagatttggaa

SEQ ID NO: 772022 - DNA, 19 bp, Mus musculus
  siRNA target sequence for 2610018L09Rik (NM_172254.2,214-232).
gctgctcactcattataaa

SEQ ID NO: 772023 - DNA, 19 bp, Mus musculus
  siRNA target sequence for 2610018L09Rik (NM_172254.2,215-233).
ctgctcactcattataaaa

SEQ ID NO: 772024 - DNA, 19 bp, Mus musculus
  siRNA target sequence for 2610018L09Rik (NM_172254.2,217-235).
gctcactcattataaaagt

SEQ ID NO: 772025 - DNA, 19 bp, Mus musculus
  siRNA target sequence for 2610018L09Rik (NM_172254.2,290-308).
caacaaggagttagttaaa

SEQ ID NO: 772026 - DNA, 19 bp, Mus musculus
  siRNA target sequence for 4933404O11Rik (NM_172256.1,205-223).
cgggggaaagacaaccatt

SEQ ID NO: 772027 - DNA, 19 bp, Mus musculus
  siRNA target sequence for 4933404O11Rik (NM_172256.1,206-224).
gggggaaagacaaccatta

SEQ ID NO: 772028 - DNA, 19 bp, Mus musculus
  siRNA target sequence for 4933404O11Rik (NM_172256.1,307-325).
caacacgccaaaagacatt

SEQ ID NO: 772029 - DNA, 19 bp, Mus musculus
  siRNA target sequence for 4933404O11Rik (NM_172256.1,391-409).
cgacaccttaaggacattt

SEQ ID NO: 772030 - DNA, 19 bp, Mus musculus
  siRNA target sequence for 4933404O11Rik (NM_172256.1,403-421).
gacattttctattgttctt

SEQ ID NO: 772031 - DNA, 19 bp, Mus musculus
  siRNA target sequence for 4933404O11Rik (NM_172256.1,427-445).
ggatctttccaaacctaat

SEQ ID NO: 772032 - DNA, 19 bp, Mus musculus
  siRNA target sequence for 4933404O11Rik (NM_172256.1,453-471).
ggtcaaccatggaaaatct

SEQ ID NO: 772033 - DNA, 19 bp, Mus musculus
  siRNA target sequence for 4933404O11Rik (NM_172256.1,456-474).
caaccatggaaaatctgtt

SEQ ID NO: 772034 - DNA, 19 bp, Mus musculus
  siRNA target sequence for 4933404O11Rik (NM_172256.1,543-561).
ccgagatgcggcaacgaat

SEQ ID NO: 772035 - DNA, 19 bp, Mus musculus
  siRNA target sequence for 4933404O11Rik (NM_172256.1,583-601).
ccatccggaccgggaatta

SEQ ID NO: 772036 - DNA, 19 bp, Mus musculus
  siRNA target sequence for 4933404O11Rik (NM_172256.1,584-602).
catccggaccgggaattaa

SEQ ID NO: 772037 - DNA, 19 bp, Mus musculus
  siRNA target sequence for 4933404O11Rik (NM_172256.1,588-606).
cggaccgggaattaattga

SEQ ID NO: 772038 - DNA, 19 bp, Mus musculus
  siRNA target sequence for 4933404O11Rik (NM_172256.1,615-633).
caatacctctggtcattat

SEQ ID NO: 772039 - DNA, 19 bp, Mus musculus
  siRNA target sequence for 4933404O11Rik (NM_172256.1,721-739).
cggagcctcgctgatgttt

SEQ ID NO: 772040 - DNA, 19 bp, Mus musculus
  siRNA target sequence for 4933404O11Rik (NM_172256.1,722-740).
ggagcctcgctgatgttta

SEQ ID NO: 772041 - DNA, 19 bp, Mus musculus
  siRNA target sequence for 4933404O11Rik (NM_172256.1,725-743).
gcctcgctgatgtttacca

SEQ ID NO: 772042 - DNA, 19 bp, Mus musculus
  siRNA target sequence for 4933404O11Rik (NM_172256.1,790-808).
gttggcattcggtattgat

SEQ ID NO: 772043 - DNA, 19 bp, Mus musculus
  siRNA target sequence for 4933404O11Rik (NM_172256.1,793-811).
ggcattcggtattgataaa

SEQ ID NO: 772044 - DNA, 19 bp, Mus musculus
  siRNA target sequence for 4933404O11Rik (NM_172256.1,857-875).
gcaggactggattctttat

SEQ ID NO: 772045 - DNA, 19 bp, Mus musculus
  siRNA target sequence for 4933404O11Rik (NM_172256.1,865-883).
ggattctttatgtcagata

SEQ ID NO: 772046 - DNA, 19 bp, Mus musculus
  siRNA target sequence for 4933404O11Rik (NM_172256.1,936-954).
ctatggagctgtggaaaaa

SEQ ID NO: 772047 - DNA, 19 bp, Mus musculus
  siRNA target sequence for 4933404O11Rik (NM_172256.1,967-985).
gctcttcccaccaaagagt

SEQ ID NO: 772048 - DNA, 19 bp, Mus musculus
  siRNA target sequence for 4933404O11Rik (NM_172256.1,1076-1094).
gaactagaacactacaaga

SEQ ID NO: 772049 - DNA, 19 bp, Mus musculus
  siRNA target sequence for BC023957 (NM_172257.1,626-644).
ccaggtgcccctaatcctt

SEQ ID NO: 772050 - DNA, 19 bp, Mus musculus
  siRNA target sequence for BC023957 (NM_172257.1,660-678).
cggaagtacctctaccaaa

SEQ ID NO: 772051 - DNA, 19 bp, Mus musculus
  siRNA target sequence for BC023957 (NM_172257.1,756-774).
ctgtcacccgtcaatacca

SEQ ID NO: 772052 - DNA, 19 bp, Mus musculus
  siRNA target sequence for BC023957 (NM_172257.1,822-840).
ggagagctgtttactttta

SEQ ID NO: 772053 - DNA, 19 bp, Mus musculus
  siRNA target sequence for BC023957 (NM_172257.1,859-877).
cccagtacttcaaatacga

SEQ ID NO: 772054 - DNA, 19 bp, Mus musculus
  siRNA target sequence for BC023957 (NM_172257.1,889-907).
gtgtggactcggtaattgt

SEQ ID NO: 772055 - DNA, 19 bp, Mus musculus
  siRNA target sequence for BC023957 (NM_172257.1,891-909).
gtggactcggtaattgtca

SEQ ID NO: 772056 - DNA, 19 bp, Mus musculus
  siRNA target sequence for BC023957 (NM_172257.1,1164-1182).
caagggcaccgtcagaaaa

SEQ ID NO: 772057 - DNA, 19 bp, Mus musculus
  siRNA target sequence for BC023957 (NM_172257.1,1211-1229).
cacatctgaggcctatgtt

SEQ ID NO: 772058 - DNA, 19 bp, Mus musculus
  siRNA target sequence for BC023957 (NM_172257.1,1371-1389).
cgggtcttggctgattcat

SEQ ID NO: 772059 - DNA, 19 bp, Mus musculus
  siRNA target sequence for BC023957 (NM_172257.1,1404-1422).
ccttacgagggttacaact

SEQ ID NO: 772060 - DNA, 19 bp, Mus musculus
  siRNA target sequence for BC023957 (NM_172257.1,1405-1423).
cttacgagggttacaacta

SEQ ID NO: 772061 - DNA, 19 bp, Mus musculus
  siRNA target sequence for BC023957 (NM_172257.1,1418-1436).
caactatggctcctttgaa

SEQ ID NO: 772062 - DNA, 19 bp, Mus musculus
  siRNA target sequence for BC023957 (NM_172257.1,1421-1439).
ctatggctcctttgaaaat

SEQ ID NO: 772063 - DNA, 19 bp, Mus musculus
  siRNA target sequence for BC023957 (NM_172257.1,1425-1443).
ggctcctttgaaaatggtt

SEQ ID NO: 772064 - DNA, 19 bp, Mus musculus
  siRNA target sequence for BC023957 (NM_172257.1,1483-1501).
gggacctctcctacagtta

SEQ ID NO: 772065 - DNA, 19 bp, Mus musculus
  siRNA target sequence for BC023957 (NM_172257.1,1666-1684).
gtgttttgcggaaaaagta

SEQ ID NO: 772066 - DNA, 19 bp, Mus musculus
  siRNA target sequence for BC023957 (NM_172257.1,1910-1928).
gcagcgagagatcaatcat

SEQ ID NO: 772067 - DNA, 19 bp, Mus musculus
  siRNA target sequence for BC023957 (NM_172257.1,1911-1929).
cagcgagagatcaatcata

SEQ ID NO: 772068 - DNA, 19 bp, Mus musculus
  siRNA target sequence for BC023957 (NM_172257.1,2021-2039).
gatggaggggctacttagt

SEQ ID NO: 772069 - DNA, 19 bp, Mus musculus
  siRNA target sequence for BC023957 (NM_172257.1,2239-2257).
cggccttctggattgtctt

SEQ ID NO: 772070 - DNA, 19 bp, Mus musculus
  siRNA target sequence for BC023957 (NM_172257.1,2253-2271).
gtcttctccgtcattcaca

SEQ ID NO: 772071 - DNA, 19 bp, Mus musculus
  siRNA target sequence for BC023957 (NM_172257.1,2455-2473).
ctgcatacggactcatcat

SEQ ID NO: 772072 - DNA, 19 bp, Mus musculus
  siRNA target sequence for BC023957 (NM_172257.1,2655-2673).
ctgagcacgtggcagaaaa

SEQ ID NO: 772073 - DNA, 19 bp, Mus musculus
  siRNA target sequence for BC027174 (NM_172260.1,187-205).
gaagtgtctgtcaacacaa

SEQ ID NO: 772074 - DNA, 19 bp, Mus musculus
  siRNA target sequence for BC027174 (NM_172260.1,930-948).
ctgtgcgctgccaaattct

SEQ ID NO: 772075 - DNA, 19 bp, Mus musculus
  siRNA target sequence for BC027174 (NM_172260.1,932-950).
gtgcgctgccaaattctct

SEQ ID NO: 772076 - DNA, 19 bp, Mus musculus
  siRNA target sequence for BC027174 (NM_172260.1,983-1001).
gggacccaaataaagagta

SEQ ID NO: 772077 - DNA, 19 bp, Mus musculus
  siRNA target sequence for BC027174 (NM_172260.1,1103-1121).
gtgtagatctggacagttt

SEQ ID NO: 772078 - DNA, 19 bp, Mus musculus
  siRNA target sequence for BC027174 (NM_172260.1,1213-1231).
gccagagagtcatgtctta

SEQ ID NO: 772079 - DNA, 19 bp, Mus musculus
  siRNA target sequence for BC027174 (NM_172260.1,1234-1252).
cgctggcccttgggaatat

SEQ ID NO: 772080 - DNA, 19 bp, Mus musculus
  siRNA target sequence for BC027174 (NM_172260.1,1374-1392).
ggactgcctccctataggt

SEQ ID NO: 772081 - DNA, 19 bp, Mus musculus
  siRNA target sequence for BC027174 (NM_172260.1,1827-1845).
cggggtctcttcaaaacca

SEQ ID NO: 772082 - DNA, 19 bp, Mus musculus
  siRNA target sequence for BC027174 (NM_172260.1,1996-2014).
ctgatctgctggttgtata

SEQ ID NO: 772083 - DNA, 19 bp, Mus musculus
  siRNA target sequence for BC027174 (NM_172260.1,1998-2016).
gatctgctggttgtataat

SEQ ID NO: 772084 - DNA, 19 bp, Mus musculus
  siRNA target sequence for BC027174 (NM_172260.1,2010-2028).
gtataatgtcacagatgtt

SEQ ID NO: 772085 - DNA, 19 bp, Mus musculus
  siRNA target sequence for BC027174 (NM_172260.1,2059-2077).
cttacaggtctcaagtctt

SEQ ID NO: 772086 - DNA, 19 bp, Mus musculus
  siRNA target sequence for BC027174 (NM_172260.1,2082-2100).
gcagctttacaggcaattt

SEQ ID NO: 772087 - DNA, 19 bp, Mus musculus
  siRNA target sequence for BC027174 (NM_172260.1,2083-2101).
cagctttacaggcaattta

SEQ ID NO: 772088 - DNA, 19 bp, Mus musculus
  siRNA target sequence for BC027174 (NM_172260.1,2086-2104).
ctttacaggcaatttaaga

SEQ ID NO: 772089 - DNA, 19 bp, Mus musculus
  siRNA target sequence for BC027174 (NM_172260.1,2241-2259).
gagccgtgcagatcatctt

SEQ ID NO: 772090 - DNA, 19 bp, Mus musculus
  siRNA target sequence for BC027174 (NM_172260.1,2254-2272).
catctttatgactctatct

SEQ ID NO: 772091 - DNA, 19 bp, Mus musculus
  siRNA target sequence for D630034H06Rik (NM_172264.1,266-284).
caccgaggacccgaatcat

SEQ ID NO: 772092 - DNA, 19 bp, Mus musculus
  siRNA target sequence for D630034H06Rik (NM_172264.1,304-322).
caggacctaaggacttgtt

SEQ ID NO: 772093 - DNA, 19 bp, Mus musculus
  siRNA target sequence for D630034H06Rik (NM_172264.1,377-395).
caacctgtgtgatgacaaa

SEQ ID NO: 772094 - DNA, 19 bp, Mus musculus
  siRNA target sequence for D630034H06Rik (NM_172264.1,514-532).
gacacgccgaggactataa

SEQ ID NO: 772095 - DNA, 19 bp, Mus musculus
  siRNA target sequence for D630034H06Rik (NM_172264.1,609-627).
gagctgggtgccaatatgt

SEQ ID NO: 772096 - DNA, 19 bp, Mus musculus
  siRNA target sequence for D630034H06Rik (NM_172264.1,857-875).
cgaggtccagacacttgta

SEQ ID NO: 772097 - DNA, 19 bp, Mus musculus
  siRNA target sequence for D630034H06Rik (NM_172264.1,1295-1313).
cctgccatcgcaagtgatt

SEQ ID NO: 772098 - DNA, 19 bp, Mus musculus
  siRNA target sequence for D630034H06Rik (NM_172264.1,1439-1457).
caactacttgtcaacagaa

SEQ ID NO: 772099 - DNA, 19 bp, Mus musculus
  siRNA target sequence for D630034H06Rik (NM_172264.1,1487-1505).
gaggctgtcacgagaaatt

SEQ ID NO: 772100 - DNA, 19 bp, Mus musculus
  siRNA target sequence for D630034H06Rik (NM_172264.1,1489-1507).
ggctgtcacgagaaatttt

SEQ ID NO: 772101 - DNA, 19 bp, Mus musculus
  siRNA target sequence for D630034H06Rik (NM_172264.1,1490-1508).
gctgtcacgagaaattttt

SEQ ID NO: 772102 - DNA, 19 bp, Mus musculus
  siRNA target sequence for D630034H06Rik (NM_172264.1,1514-1532).
ggaagccttggctccattt

SEQ ID NO: 772103 - DNA, 19 bp, Mus musculus
  siRNA target sequence for D630034H06Rik (NM_172264.1,1525-1543).
ctccatttcggggaaaaga

SEQ ID NO: 772104 - DNA, 19 bp, Mus musculus
  siRNA target sequence for D630034H06Rik (NM_172264.1,1559-1577).
ccacgtccagtcagacaaa

SEQ ID NO: 772105 - DNA, 19 bp, Mus musculus
  siRNA target sequence for D630034H06Rik (NM_172264.1,1589-1607).
ctttgtgcgggcaaaagca

SEQ ID NO: 772106 - DNA, 19 bp, Mus musculus
  siRNA target sequence for D630034H06Rik (NM_172264.1,1623-1641).
ccctcgtgcacctgtaaga

SEQ ID NO: 772107 - DNA, 19 bp, Mus musculus
  siRNA target sequence for D630034H06Rik (NM_172264.1,1624-1642).
cctcgtgcacctgtaagat

SEQ ID NO: 772108 - DNA, 19 bp, Mus musculus
  siRNA target sequence for D630034H06Rik (NM_172264.1,1760-1778).
cgctcccacggtaatgatt

SEQ ID NO: 772109 - DNA, 19 bp, Mus musculus
  siRNA target sequence for D630034H06Rik (NM_172264.1,1782-1800).
gagaaagcagccgacatta

SEQ ID NO: 772110 - DNA, 19 bp, Mus musculus
  siRNA target sequence for 9930024E13Rik (NM_172269.2,364-382).
cccccattctgggtatgta

SEQ ID NO: 772111 - DNA, 19 bp, Mus musculus
  siRNA target sequence for 9930024E13Rik (NM_172269.2,365-383).
ccccattctgggtatgtaa

SEQ ID NO: 772112 - DNA, 19 bp, Mus musculus
  siRNA target sequence for 9930024E13Rik (NM_172269.2,507-525).
cactgctccgcattgactt

SEQ ID NO: 772113 - DNA, 19 bp, Mus musculus
  siRNA target sequence for 9930024E13Rik (NM_172269.2,575-593).
gccaaagtccacaagatgt

SEQ ID NO: 772114 - DNA, 19 bp, Mus musculus
  siRNA target sequence for 9930024E13Rik (NM_172269.2,633-651).
gtagcaccgaggtccttta

SEQ ID NO: 772115 - DNA, 19 bp, Mus musculus
  siRNA target sequence for 9930024E13Rik (NM_172269.2,639-657).
ccgaggtcctttacatgaa

SEQ ID NO: 772116 - DNA, 19 bp, Mus musculus
  siRNA target sequence for 9930024E13Rik (NM_172269.2,853-871).
ccgtccactgtatgtgtta

SEQ ID NO: 772117 - DNA, 19 bp, Mus musculus
  siRNA target sequence for 9930024E13Rik (NM_172269.2,854-872).
cgtccactgtatgtgttaa

SEQ ID NO: 772118 - DNA, 19 bp, Mus musculus
  siRNA target sequence for 9930024E13Rik (NM_172269.2,855-873).
gtccactgtatgtgttaaa

SEQ ID NO: 772119 - DNA, 19 bp, Mus musculus
  siRNA target sequence for 9930024E13Rik (NM_172269.2,862-880).
gtatgtgttaaatgaagaa

SEQ ID NO: 772120 - DNA, 19 bp, Mus musculus
  siRNA target sequence for 9930024E13Rik (NM_172269.2,1052-1070).
ccattccgtgagtttccta

SEQ ID NO: 772121 - DNA, 19 bp, Mus musculus
  siRNA target sequence for 9930024E13Rik (NM_172269.2,1057-1075).
ccgtgagtttcctagcaat

SEQ ID NO: 772122 - DNA, 19 bp, Mus musculus
  siRNA target sequence for 9930024E13Rik (NM_172269.2,1058-1076).
cgtgagtttcctagcaatt

SEQ ID NO: 772123 - DNA, 19 bp, Mus musculus
  siRNA target sequence for 9930024E13Rik (NM_172269.2,1059-1077).
gtgagtttcctagcaattt

SEQ ID NO: 772124 - DNA, 19 bp, Mus musculus
  siRNA target sequence for 9930024E13Rik (NM_172269.2,1508-1526).
gacctggccaaagagtatt

SEQ ID NO: 772125 - DNA, 19 bp, Mus musculus
  siRNA target sequence for 9930024E13Rik (NM_172269.2,1510-1528).
cctggccaaagagtattgt

SEQ ID NO: 772126 - DNA, 19 bp, Mus musculus
  siRNA target sequence for 9930024E13Rik (NM_172269.2,1511-1529).
ctggccaaagagtattgta

SEQ ID NO: 772127 - DNA, 19 bp, Mus musculus
  siRNA target sequence for 9930024E13Rik (NM_172269.2,1565-1583).
cgagaggctgatttctgtt

SEQ ID NO: 772128 - DNA, 19 bp, Mus musculus
  siRNA target sequence for 9930024E13Rik (NM_172269.2,1622-1640).
gcgctgacccagagctatt

SEQ ID NO: 772129 - DNA, 19 bp, Mus musculus
  siRNA target sequence for 9930024E13Rik (NM_172269.2,1623-1641).
cgctgacccagagctattt

SEQ ID NO: 772130 - DNA, 19 bp, Mus musculus
  siRNA target sequence for 9930024E13Rik (NM_172269.2,1646-1664).
gagattgccctcaagttct

SEQ ID NO: 772131 - DNA, 19 bp, Mus musculus
  siRNA target sequence for 9930024E13Rik (NM_172269.2,1842-1860).
gggagtgtttccgtacttt

SEQ ID NO: 772132 - DNA, 19 bp, Mus musculus
  siRNA target sequence for 9930024E13Rik (NM_172269.2,2058-2076).
cccagctcttctacaaatt

SEQ ID NO: 772133 - DNA, 19 bp, Mus musculus
  siRNA target sequence for 9930024E13Rik (NM_172269.2,2114-2132).
gtagacgcctggattgaga

SEQ ID NO: 772134 - DNA, 19 bp, Mus musculus
  siRNA target sequence for 9930024E13Rik (NM_172269.2,2259-2277).
cggagcaggccattcacaa

SEQ ID NO: 772135 - DNA, 19 bp, Mus musculus
  siRNA target sequence for 9930024E13Rik (NM_172269.2,2347-2365).
cagcccgcaccgtgtacat

SEQ ID NO: 772136 - DNA, 19 bp, Mus musculus
  siRNA target sequence for 9930024E13Rik (NM_172269.2,2349-2367).
gcccgcaccgtgtacatta

SEQ ID NO: 772137 - DNA, 19 bp, Mus musculus
  siRNA target sequence for 9930024E13Rik (NM_172269.2,2350-2368).
cccgcaccgtgtacattat

SEQ ID NO: 772138 - DNA, 19 bp, Mus musculus
  siRNA target sequence for 9930024E13Rik (NM_172269.2,2352-2370).
cgcaccgtgtacattatga

SEQ ID NO: 772139 - DNA, 19 bp, Mus musculus
  siRNA target sequence for 9930024E13Rik (NM_172269.2,2353-2371).
gcaccgtgtacattatgat

SEQ ID NO: 772140 - DNA, 19 bp, Mus musculus
  siRNA target sequence for 9930024E13Rik (NM_172269.2,2358-2376).
gtgtacattatgatctcaa

SEQ ID NO: 772141 - DNA, 19 bp, Mus musculus
  siRNA target sequence for 9930024E13Rik (NM_172269.2,2360-2378).
gtacattatgatctcaaat

SEQ ID NO: 772142 - DNA, 19 bp, Mus musculus
  siRNA target sequence for 9930024E13Rik (NM_172269.2,2416-2434).
cgcctgcgtccatgtctat

SEQ ID NO: 772143 - DNA, 19 bp, Mus musculus
  siRNA target sequence for 9930024E13Rik (NM_172269.2,2417-2435).
gcctgcgtccatgtctata

SEQ ID NO: 772144 - DNA, 19 bp, Mus musculus
  siRNA target sequence for 9930024E13Rik (NM_172269.2,2418-2436).
cctgcgtccatgtctataa

SEQ ID NO: 772145 - DNA, 19 bp, Mus musculus
  siRNA target sequence for 9930024E13Rik (NM_172269.2,2531-2549).
gaacttcgcaagaaactat

SEQ ID NO: 772146 - DNA, 19 bp, Mus musculus
  siRNA target sequence for 9930024E13Rik (NM_172269.2,2822-2840).
gtggagccccaggacaaat

SEQ ID NO: 772147 - DNA, 19 bp, Mus musculus
  siRNA target sequence for 5730509K17Rik (NM_172274.1,378-396).
gaataccaacgacgaaaaa

SEQ ID NO: 772148 - DNA, 19 bp, Mus musculus
  siRNA target sequence for 5730509K17Rik (NM_172274.1,387-405).
cgacgaaaaaatgaaaata

SEQ ID NO: 772149 - DNA, 19 bp, Mus musculus
  siRNA target sequence for 5730509K17Rik (NM_172274.1,509-527).
ctccccctgaggaaatggt

SEQ ID NO: 772150 - DNA, 19 bp, Mus musculus
  siRNA target sequence for 5730509K17Rik (NM_172274.1,828-846).
ggtgcaagacactcaaaaa

SEQ ID NO: 772151 - DNA, 19 bp, Mus musculus
  siRNA target sequence for 5730509K17Rik (NM_172274.1,852-870).
cgacacaaagagttattca

SEQ ID NO: 772152 - DNA, 19 bp, Mus musculus
  siRNA target sequence for 5730509K17Rik (NM_172274.1,855-873).
cacaaagagttattcaaga

SEQ ID NO: 772153 - DNA, 19 bp, Mus musculus
  siRNA target sequence for 5730509K17Rik (NM_172274.1,863-881).
gttattcaagaattaagtt

SEQ ID NO: 772154 - DNA, 19 bp, Mus musculus
  siRNA target sequence for 5730509K17Rik (NM_172274.1,882-900).
ccgtgattctgtacgaaaa

SEQ ID NO: 772155 - DNA, 19 bp, Mus musculus
  siRNA target sequence for 5730509K17Rik (NM_172274.1,883-901).
cgtgattctgtacgaaaaa

SEQ ID NO: 772156 - DNA, 19 bp, Mus musculus
  siRNA target sequence for 5730509K17Rik (NM_172274.1,884-902).
gtgattctgtacgaaaaat

SEQ ID NO: 772157 - DNA, 19 bp, Mus musculus
  siRNA target sequence for 5730509K17Rik (NM_172274.1,886-904).
gattctgtacgaaaaatta

SEQ ID NO: 772158 - DNA, 19 bp, Mus musculus
  siRNA target sequence for 5730509K17Rik (NM_172274.1,938-956).
ctgcagaagaggcctataa

SEQ ID NO: 772159 - DNA, 19 bp, Mus musculus
  siRNA target sequence for 5730509K17Rik (NM_172274.1,980-998).
ctgagccagaggaatcaga

SEQ ID NO: 772160 - DNA, 19 bp, Mus musculus
  siRNA target sequence for 5730509K17Rik (NM_172274.1,1022-1040).
gagagagagctcatcatga

SEQ ID NO: 772161 - DNA, 19 bp, Mus musculus
  siRNA target sequence for 5730509K17Rik (NM_172274.1,1249-1267).
ctgacagtgccgacctata

SEQ ID NO: 772162 - DNA, 19 bp, Mus musculus
  siRNA target sequence for 5730509K17Rik (NM_172274.1,1253-1271).
cagtgccgacctataaaaa

SEQ ID NO: 772163 - DNA, 19 bp, Mus musculus
  siRNA target sequence for 5730509K17Rik (NM_172274.1,1343-1361).
cacgcaccaatgagaacat

SEQ ID NO: 772164 - DNA, 19 bp, Mus musculus
  siRNA target sequence for 5730509K17Rik (NM_172274.1,1345-1363).
cgcaccaatgagaacatca

SEQ ID NO: 772165 - DNA, 19 bp, Mus musculus
  siRNA target sequence for 5730509K17Rik (NM_172274.1,1542-1560).
cagtagacagcatatgatt

SEQ ID NO: 772166 - DNA, 19 bp, Mus musculus
  siRNA target sequence for 5730509K17Rik (NM_172274.1,1568-1586).
gagaccctccaggaaattt

SEQ ID NO: 772167 - DNA, 19 bp, Mus musculus
  siRNA target sequence for 5730509K17Rik (NM_172274.1,1587-1605).
ccaactggacatcgatatt

SEQ ID NO: 772168 - DNA, 19 bp, Mus musculus
  siRNA target sequence for 5730509K17Rik (NM_172274.1,1588-1606).
caactggacatcgatattt

SEQ ID NO: 772169 - DNA, 19 bp, Mus musculus
  siRNA target sequence for 5730509K17Rik (NM_172274.1,1620-1638).
cactcatcacccctgtttt

SEQ ID NO: 772170 - DNA, 19 bp, Mus musculus
  siRNA target sequence for 5730509K17Rik (NM_172274.1,1661-1679).
caaagctggcccagttgta

SEQ ID NO: 772171 - DNA, 19 bp, Mus musculus
  siRNA target sequence for 5730509K17Rik (NM_172274.1,1706-1724).
gaaataagacgaaattcct

SEQ ID NO: 772172 - DNA, 19 bp, Mus musculus
  siRNA target sequence for 5730509K17Rik (NM_172274.1,1713-1731).
gacgaaattccttacagat

SEQ ID NO: 772173 - DNA, 19 bp, Mus musculus
  siRNA target sequence for 5730509K17Rik (NM_172274.1,1715-1733).
cgaaattccttacagataa

SEQ ID NO: 772174 - DNA, 19 bp, Mus musculus
  siRNA target sequence for 5730509K17Rik (NM_172274.1,1754-1772).
ctgttcagaccagtcttaa

SEQ ID NO: 772175 - DNA, 19 bp, Mus musculus
  siRNA target sequence for 5730509K17Rik (NM_172274.1,1795-1813).
cttgacacaacccagaaaa

SEQ ID NO: 772176 - DNA, 19 bp, Mus musculus
  siRNA target sequence for 5730509K17Rik (NM_172274.1,1809-1827).
gaaaaccatcaatgagtat

SEQ ID NO: 772177 - DNA, 19 bp, Mus musculus
  siRNA target sequence for 5730509K17Rik (NM_172274.1,1815-1833).
catcaatgagtataaatct

SEQ ID NO: 772178 - DNA, 19 bp, Mus musculus
  siRNA target sequence for 5730509K17Rik (NM_172274.1,1818-1836).
caatgagtataaatctgaa

SEQ ID NO: 772179 - DNA, 19 bp, Mus musculus
  siRNA target sequence for 5730509K17Rik (NM_172274.1,1933-1951).
cgggagttccagaggttta

SEQ ID NO: 772180 - DNA, 19 bp, Mus musculus
  siRNA target sequence for 5730509K17Rik (NM_172274.1,1969-1987).
ctcgtcttgagaaaggaaa

SEQ ID NO: 772181 - DNA, 19 bp, Mus musculus
  siRNA target sequence for 5730509K17Rik (NM_172274.1,2015-2033).
catatgaagccgagattca

SEQ ID NO: 772182 - DNA, 19 bp, Mus musculus
  siRNA target sequence for 5730509K17Rik (NM_172274.1,2062-2080).
cacatggaggaatatgcaa

SEQ ID NO: 772183 - DNA, 19 bp, Mus musculus
  siRNA target sequence for 5730509K17Rik (NM_172274.1,2250-2268).
cactgacccagctgtcata

SEQ ID NO: 772184 - DNA, 19 bp, Mus musculus
  siRNA target sequence for 5730509K17Rik (NM_172274.1,2407-2425).
gtcaggaggcgctctgtat

SEQ ID NO: 772185 - DNA, 19 bp, Mus musculus
  siRNA target sequence for 5730509K17Rik (NM_172274.1,2412-2430).
gaggcgctctgtatactta

SEQ ID NO: 772186 - DNA, 19 bp, Mus musculus
  siRNA target sequence for 5730509K17Rik (NM_172274.1,2414-2432).
ggcgctctgtatacttaaa

SEQ ID NO: 772187 - DNA, 19 bp, Mus musculus
  siRNA target sequence for 5730509K17Rik (NM_172274.1,2452-2470).
gaggtgtcgaggactgtta

SEQ ID NO: 772188 - DNA, 19 bp, Mus musculus
  siRNA target sequence for 5730509K17Rik (NM_172274.1,2474-2492).
ggcctctaggggcagattt

SEQ ID NO: 772189 - DNA, 19 bp, Mus musculus
  siRNA target sequence for 5730509K17Rik (NM_172274.1,2486-2504).
cagatttccgggttcactt

SEQ ID NO: 772190 - DNA, 19 bp, Mus musculus
  siRNA target sequence for 5730509K17Rik (NM_172274.1,2537-2555).
ggccagagagcttaatgct

SEQ ID NO: 772191 - DNA, 19 bp, Mus musculus
  siRNA target sequence for 5730509K17Rik (NM_172274.1,2554-2572).
cttcaggtctatgaaacta

SEQ ID NO: 772192 - DNA, 19 bp, Mus musculus
  siRNA target sequence for 5730509K17Rik (NM_172274.1,2559-2577).
ggtctatgaaactattggt

SEQ ID NO: 772193 - DNA, 19 bp, Mus musculus
  siRNA target sequence for 5730509K17Rik (NM_172274.1,2675-2693).
gtaaccagcatgtgacatt

SEQ ID NO: 772194 - DNA, 19 bp, Mus musculus
  siRNA target sequence for 5730509K17Rik (NM_172274.1,2738-2756).
ctgatggcagcaatcaact

SEQ ID NO: 772195 - DNA, 19 bp, Mus musculus
  siRNA target sequence for 5730509K17Rik (NM_172274.1,2809-2827).
gaaaatgggattcctttaa

SEQ ID NO: 772196 - DNA, 19 bp, Mus musculus
  siRNA target sequence for 5730509K17Rik (NM_172274.1,2844-2862).
gcagaacattggatttcga

SEQ ID NO: 772197 - DNA, 19 bp, Mus musculus
  siRNA target sequence for 5730509K17Rik (NM_172274.1,2845-2863).
cagaacattggatttcgaa

SEQ ID NO: 772198 - DNA, 19 bp, Mus musculus
  siRNA target sequence for 5730509K17Rik (NM_172274.1,2906-2924).
cagggctgacggacatgaa

SEQ ID NO: 772199 - DNA, 19 bp, Mus musculus
  siRNA target sequence for 5730509K17Rik (NM_172274.1,2908-2926).
gggctgacggacatgaaga

SEQ ID NO: 772200 - DNA, 19 bp, Mus musculus
  siRNA target sequence for 5730509K17Rik (NM_172274.1,2952-2970).
caagcttgaccccaatgat

SEQ ID NO: 772201 - DNA, 19 bp, Mus musculus
  siRNA target sequence for 5730509K17Rik (NM_172274.1,2972-2990).
ccaaccacgccccattgat

SEQ ID NO: 772202 - DNA, 19 bp, Mus musculus
  siRNA target sequence for 5730509K17Rik (NM_172274.1,3008-3026).
ctaccagtggtgaatccta

SEQ ID NO: 772203 - DNA, 19 bp, Mus musculus
  siRNA target sequence for 5730509K17Rik (NM_172274.1,3131-3149).
gccaagaggtgccagaatt

SEQ ID NO: 772204 - DNA, 19 bp, Mus musculus
  siRNA target sequence for 5730509K17Rik (NM_172274.1,3150-3168).
ccggaactataaacaaatt

SEQ ID NO: 772205 - DNA, 19 bp, Mus musculus
  siRNA target sequence for 5730509K17Rik (NM_172274.1,3205-3223).
caggactatgagaaacgat

SEQ ID NO: 772206 - DNA, 19 bp, Mus musculus
  siRNA target sequence for 5730509K17Rik (NM_172274.1,3207-3225).
ggactatgagaaacgatta

SEQ ID NO: 772207 - DNA, 19 bp, Mus musculus
  siRNA target sequence for 5730509K17Rik (NM_172274.1,3210-3228).
ctatgagaaacgattacga

SEQ ID NO: 772208 - DNA, 19 bp, Mus musculus
  siRNA target sequence for 5730509K17Rik (NM_172274.1,3288-3306).
gtaccttcagcaagttaga

SEQ ID NO: 772209 - DNA, 19 bp, Mus musculus
  siRNA target sequence for 5730509K17Rik (NM_172274.1,3313-3331).
gtggtaaatcgcttcctaa

SEQ ID NO: 772210 - DNA, 19 bp, Mus musculus
  siRNA target sequence for 5730509K17Rik (NM_172274.1,3356-3374).
ctgatttggtagtagaaga

SEQ ID NO: 772211 - DNA, 19 bp, Mus musculus
  siRNA target sequence for 5730509K17Rik (NM_172274.1,3499-3517).
ctgtctgatggagacataa

SEQ ID NO: 772212 - DNA, 19 bp, Mus musculus
  siRNA target sequence for 5730509K17Rik (NM_172274.1,3546-3564).
cgacatccctgtaaggaaa

SEQ ID NO: 772213 - DNA, 19 bp, Mus musculus
  siRNA target sequence for 5730509K17Rik (NM_172274.1,3585-3603).
gcagccatcgagatcttca

SEQ ID NO: 772214 - DNA, 19 bp, Mus musculus
  siRNA target sequence for 5730509K17Rik (NM_172274.1,3671-3689).
ccctcggccaggtcttagt

SEQ ID NO: 772215 - DNA, 19 bp, Mus musculus
  siRNA target sequence for 5730509K17Rik (NM_172274.1,3700-3718).
gtggaggtctcttttcaaa

SEQ ID NO: 772216 - DNA, 19 bp, Mus musculus
  siRNA target sequence for 5730509K17Rik (NM_172274.1,3759-3777).
cagctggaacgaagaactt

SEQ ID NO: 772217 - DNA, 19 bp, Mus musculus
  siRNA target sequence for 5730509K17Rik (NM_172274.1,3764-3782).
ggaacgaagaacttgaact

SEQ ID NO: 772218 - DNA, 19 bp, Mus musculus
  siRNA target sequence for 5730509K17Rik (NM_172274.1,3765-3783).
gaacgaagaacttgaactt

SEQ ID NO: 772219 - DNA, 19 bp, Mus musculus
  siRNA target sequence for 5730509K17Rik (NM_172274.1,3830-3848).
cagtgaaggatgacgtata

SEQ ID NO: 772220 - DNA, 19 bp, Mus musculus
  siRNA target sequence for 5730509K17Rik (NM_172274.1,3834-3852).
gaaggatgacgtatacatt

SEQ ID NO: 772221 - DNA, 19 bp, Mus musculus
  siRNA target sequence for 5730509K17Rik (NM_172274.1,3841-3859).
gacgtatacattaacattt

SEQ ID NO: 772222 - DNA, 19 bp, Mus musculus
  siRNA target sequence for 5730509K17Rik (NM_172274.1,3911-3929).
ggatccatacgcgtattga

SEQ ID NO: 772223 - DNA, 19 bp, Mus musculus
  siRNA target sequence for 5730509K17Rik (NM_172274.1,3938-3956).
ggttaggatgtgtgaaaat

SEQ ID NO: 772224 - DNA, 19 bp, Mus musculus
  siRNA target sequence for 5730509K17Rik (NM_172274.1,3949-3967).
gtgaaaatcccatttagca

SEQ ID NO: 772225 - DNA, 19 bp, Mus musculus
  siRNA target sequence for 5730509K17Rik (NM_172274.1,3957-3975).
cccatttagcaccatctat

SEQ ID NO: 772226 - DNA, 19 bp, Mus musculus
  siRNA target sequence for 5730509K17Rik (NM_172274.1,3958-3976).
ccatttagcaccatctatt

SEQ ID NO: 772227 - DNA, 19 bp, Mus musculus
  siRNA target sequence for 5730509K17Rik (NM_172274.1,3972-3990).
ctatttccaggcaaggatt

SEQ ID NO: 772228 - DNA, 19 bp, Mus musculus
  siRNA target sequence for 5730509K17Rik (NM_172274.1,3986-4004).
ggattgatggcacatttaa

SEQ ID NO: 772229 - DNA, 19 bp, Mus musculus
  siRNA target sequence for 5730509K17Rik (NM_172274.1,3987-4005).
gattgatggcacatttaaa

SEQ ID NO: 772230 - DNA, 19 bp, Mus musculus
  siRNA target sequence for 5730509K17Rik (NM_172274.1,4021-4039).
gttctcctgggctatagta

SEQ ID NO: 772231 - DNA, 19 bp, Mus musculus
  siRNA target sequence for 5730509K17Rik (NM_172274.1,4037-4055).
gtaaggagcgaaacattat

SEQ ID NO: 772232 - DNA, 19 bp, Mus musculus
  siRNA target sequence for 5730509K17Rik (NM_172274.1,4044-4062).
gcgaaacattattatggaa

SEQ ID NO: 772233 - DNA, 19 bp, Mus musculus
  siRNA target sequence for 5730509K17Rik (NM_172274.1,4144-4162).
ggggagcctatgagagaaa

SEQ ID NO: 772234 - DNA, 19 bp, Mus musculus
  siRNA target sequence for 5730509K17Rik (NM_172274.1,4295-4313).
ccgggaaaacggtttttat

SEQ ID NO: 772235 - DNA, 19 bp, Mus musculus
  siRNA target sequence for 5730509K17Rik (NM_172274.1,4297-4315).
gggaaaacggtttttatta

SEQ ID NO: 772236 - DNA, 19 bp, Mus musculus
  siRNA target sequence for 5730509K17Rik (NM_172274.1,4318-4336).
cgttatctcaagcctttaa

SEQ ID NO: 772237 - DNA, 19 bp, Mus musculus
  siRNA target sequence for 5730509K17Rik (NM_172274.1,4393-4411).
ctggtagctcggtatgtgt

SEQ ID NO: 772238 - DNA, 19 bp, Mus musculus
  siRNA target sequence for 5730509K17Rik (NM_172274.1,4461-4479).
cctgtggagcacttctgat

SEQ ID NO: 772239 - DNA, 19 bp, Mus musculus
  siRNA target sequence for 5730509K17Rik (NM_172274.1,4466-4484).
ggagcacttctgatcaatt

SEQ ID NO: 772240 - DNA, 19 bp, Mus musculus
  siRNA target sequence for 5730509K17Rik (NM_172274.1,4520-4538).
cagtactgctatgcaatta

SEQ ID NO: 772241 - DNA, 19 bp, Mus musculus
  siRNA target sequence for 5730509K17Rik (NM_172274.1,4522-4540).
gtactgctatgcaattact

SEQ ID NO: 772242 - DNA, 19 bp, Mus musculus
  siRNA target sequence for 5730509K17Rik (NM_172274.1,4648-4666).
ccctgcagcggacattgtt

SEQ ID NO: 772243 - DNA, 19 bp, Mus musculus
  siRNA target sequence for 5730509K17Rik (NM_172274.1,4658-4676).
gacattgttacggacaatt

SEQ ID NO: 772244 - DNA, 19 bp, Mus musculus
  siRNA target sequence for 5730509K17Rik (NM_172274.1,4668-4686).
cggacaatttgatgcattt

SEQ ID NO: 772245 - DNA, 19 bp, Mus musculus
  siRNA target sequence for 5730509K17Rik (NM_172274.1,4709-4727).
gtttaattggtcctgataa

SEQ ID NO: 772246 - DNA, 19 bp, Mus musculus
  siRNA target sequence for 5730509K17Rik (NM_172274.1,4717-4735).
ggtcctgataatatttggt

SEQ ID NO: 772247 - DNA, 19 bp, Mus musculus
  siRNA target sequence for 5730509K17Rik (NM_172274.1,4723-4741).
gataatatttggtttaata

SEQ ID NO: 772248 - DNA, 19 bp, Mus musculus
  siRNA target sequence for 5730509K17Rik (NM_172274.1,4760-4778).
cactaaggataaattttga

SEQ ID NO: 772249 - DNA, 19 bp, Mus musculus
  siRNA target sequence for 5730509K17Rik (NM_172274.1,4849-4867).
cagccggaagagctaattt

SEQ ID NO: 772250 - DNA, 19 bp, Mus musculus
  siRNA target sequence for 5730509K17Rik (NM_172274.1,4851-4869).
gccggaagagctaatttat

SEQ ID NO: 772251 - DNA, 19 bp, Mus musculus
  siRNA target sequence for 5730509K17Rik (NM_172274.1,4853-4871).
cggaagagctaatttatca

SEQ ID NO: 772252 - DNA, 19 bp, Mus musculus
  siRNA target sequence for 5730509K17Rik (NM_172274.1,5137-5155).
gttgaagcggtgtatagca

SEQ ID NO: 772253 - DNA, 19 bp, Mus musculus
  siRNA target sequence for 5730509K17Rik (NM_172274.1,5148-5166).
gtatagcactggagtacat

SEQ ID NO: 772254 - DNA, 19 bp, Mus musculus
  siRNA target sequence for 5730509K17Rik (NM_172274.1,5153-5171).
gcactggagtacataacat

SEQ ID NO: 772255 - DNA, 19 bp, Mus musculus
  siRNA target sequence for 5730509K17Rik (NM_172274.1,5154-5172).
cactggagtacataacatt

SEQ ID NO: 772256 - DNA, 19 bp, Mus musculus
  siRNA target sequence for 5730509K17Rik (NM_172274.1,5175-5193).
ccttcctaatgttgagttt

SEQ ID NO: 772257 - DNA, 19 bp, Mus musculus
  siRNA target sequence for 5730509K17Rik (NM_172274.1,5215-5233).
ccttatcccaaaaacgttt

SEQ ID NO: 772258 - DNA, 19 bp, Mus musculus
  siRNA target sequence for 5730509K17Rik (NM_172274.1,5216-5234).
cttatcccaaaaacgtttt

SEQ ID NO: 772259 - DNA, 19 bp, Mus musculus
  siRNA target sequence for 1110008K06Rik (NM_172275.1,119-137).
ggaaattcctgtatttaat

SEQ ID NO: 772260 - DNA, 19 bp, Mus musculus
  siRNA target sequence for 1110008K06Rik (NM_172275.1,126-144).
cctgtatttaattttacca

SEQ ID NO: 772261 - DNA, 19 bp, Mus musculus
  siRNA target sequence for 1110008K06Rik (NM_172275.1,155-173).
ccactgtcaaaggaacatt

SEQ ID NO: 772262 - DNA, 19 bp, Mus musculus
  siRNA target sequence for 1110008K06Rik (NM_172275.1,246-264).
caggtgacctgtaaatgca

SEQ ID NO: 772263 - DNA, 19 bp, Mus musculus
  siRNA target sequence for 1110008K06Rik (NM_172275.1,256-274).
gtaaatgcaacaagaagtt

SEQ ID NO: 772264 - DNA, 19 bp, Mus musculus
  siRNA target sequence for 1110008K06Rik (NM_172275.1,424-442).
ggcgcaacgtgcttgtgaa

SEQ ID NO: 772265 - DNA, 19 bp, Mus musculus
  siRNA target sequence for 1110008K06Rik (NM_172275.1,532-550).
cctggagtcaggacagaat

SEQ ID NO: 772266 - DNA, 19 bp, Mus musculus
  siRNA target sequence for 1110008K06Rik (NM_172275.1,636-654).
gcagaccccttctacagta

SEQ ID NO: 772267 - DNA, 19 bp, Mus musculus
  siRNA target sequence for 1110008K06Rik (NM_172275.1,799-817).
ccttgagtctgcagaatga

SEQ ID NO: 772268 - DNA, 19 bp, Mus musculus
  siRNA target sequence for 1110008K06Rik (NM_172275.1,893-911).
cacatctctaggtgacata

SEQ ID NO: 772269 - DNA, 19 bp, Mus musculus
  siRNA target sequence for 1110008K06Rik (NM_172275.1,1005-1023).
ccttctcatgccttacgtt

SEQ ID NO: 772270 - DNA, 19 bp, Mus musculus
  siRNA target sequence for 1110008K06Rik (NM_172275.1,1287-1305).
gattcgcagccagaaaaca

SEQ ID NO: 772271 - DNA, 19 bp, Mus musculus
  siRNA target sequence for 1110008K06Rik (NM_172275.1,1321-1339).
ccaggaggcgggtcaaaca

SEQ ID NO: 772272 - DNA, 19 bp, Mus musculus
  siRNA target sequence for 1110008K06Rik (NM_172275.1,1376-1394).
caagccggaatcagtgaaa

SEQ ID NO: 772273 - DNA, 19 bp, Mus musculus
  siRNA target sequence for 1110008K06Rik (NM_172275.1,1417-1435).
ctaacaggaccatgaacaa

SEQ ID NO: 772274 - DNA, 19 bp, Mus musculus
  siRNA target sequence for 1110008K06Rik (NM_172275.1,1444-1462).
cctgcaaccgactgttgaa

SEQ ID NO: 772275 - DNA, 19 bp, Mus musculus
  siRNA target sequence for 1110008K06Rik (NM_172275.1,1448-1466).
caaccgactgttgaactta

SEQ ID NO: 772276 - DNA, 19 bp, Mus musculus
  siRNA target sequence for 1110008K06Rik (NM_172275.1,1501-1519).
ctcccggtgtgctgaaact

SEQ ID NO: 772277 - DNA, 19 bp, Mus musculus
  siRNA target sequence for 1110008K06Rik (NM_172275.1,1504-1522).
ccggtgtgctgaaactcaa

SEQ ID NO: 772278 - DNA, 19 bp, Mus musculus
  siRNA target sequence for 1110008K06Rik (NM_172275.1,1566-1584).
cagaatgggcccatagcat

SEQ ID NO: 772279 - DNA, 19 bp, Mus musculus
  siRNA target sequence for 1110008K06Rik (NM_172275.1,1594-1612).
ctccagtgatccactctat

SEQ ID NO: 772280 - DNA, 19 bp, Mus musculus
  siRNA target sequence for 1110008K06Rik (NM_172275.1,1597-1615).
cagtgatccactctattca

SEQ ID NO: 772281 - DNA, 19 bp, Mus musculus
  siRNA target sequence for 1110008K06Rik (NM_172275.1,1601-1619).
gatccactctattcaaaat

SEQ ID NO: 772282 - DNA, 19 bp, Mus musculus
  siRNA target sequence for 2210018M11Rik (NM_172280.1,138-156).
gtggccaacccttttggat

SEQ ID NO: 772283 - DNA, 19 bp, Mus musculus
  siRNA target sequence for 2210018M11Rik (NM_172280.1,154-172).
gatctcagcagggatgaat

SEQ ID NO: 772284 - DNA, 19 bp, Mus musculus
  siRNA target sequence for 2210018M11Rik (NM_172280.1,179-197).
ggattcttcgaaaattgga

SEQ ID NO: 772285 - DNA, 19 bp, Mus musculus
  siRNA target sequence for 2210018M11Rik (NM_172280.1,180-198).
gattcttcgaaaattggaa

SEQ ID NO: 772286 - DNA, 19 bp, Mus musculus
  siRNA target sequence for 2210018M11Rik (NM_172280.1,342-360).
cgatgaacggttaacaaca

SEQ ID NO: 772287 - DNA, 19 bp, Mus musculus
  siRNA target sequence for 2210018M11Rik (NM_172280.1,417-435).
gtctggacctaatagttct

SEQ ID NO: 772288 - DNA, 19 bp, Mus musculus
  siRNA target sequence for 2210018M11Rik (NM_172280.1,446-464).
ccatcgaaggacgtagatt

SEQ ID NO: 772289 - DNA, 19 bp, Mus musculus
  siRNA target sequence for 2210018M11Rik (NM_172280.1,686-704).
ctgttgttccggtctcaaa

SEQ ID NO: 772290 - DNA, 19 bp, Mus musculus
  siRNA target sequence for 2210018M11Rik (NM_172280.1,771-789).
cttaccaccccatatgtca

SEQ ID NO: 772291 - DNA, 19 bp, Mus musculus
  siRNA target sequence for 2210018M11Rik (NM_172280.1,788-806).
cacctgtgaaaataacgtt

SEQ ID NO: 772292 - DNA, 19 bp, Mus musculus
  siRNA target sequence for 2210018M11Rik (NM_172280.1,815-833).
catcaacacagacaacaaa

SEQ ID NO: 772293 - DNA, 19 bp, Mus musculus
  siRNA target sequence for 2210018M11Rik (NM_172280.1,836-854).
caacaacacagaaggttat

SEQ ID NO: 772294 - DNA, 19 bp, Mus musculus
  siRNA target sequence for 2210018M11Rik (NM_172280.1,839-857).
caacacagaaggttattat

SEQ ID NO: 772295 - DNA, 19 bp, Mus musculus
  siRNA target sequence for 2210018M11Rik (NM_172280.1,894-912).
cattctctccaaatctcat

SEQ ID NO: 772296 - DNA, 19 bp, Mus musculus
  siRNA target sequence for 2210018M11Rik (NM_172280.1,967-985).
cagaagccacctgttgtta

SEQ ID NO: 772297 - DNA, 19 bp, Mus musculus
  siRNA target sequence for 2210018M11Rik (NM_172280.1,969-987).
gaagccacctgttgttata

SEQ ID NO: 772298 - DNA, 19 bp, Mus musculus
  siRNA target sequence for 2210018M11Rik (NM_172280.1,1044-1062).
gtcatcacctatttctagt

SEQ ID NO: 772299 - DNA, 19 bp, Mus musculus
  siRNA target sequence for 2210018M11Rik (NM_172280.1,1072-1090).
gtaacaacggtggtatctt

SEQ ID NO: 772300 - DNA, 19 bp, Mus musculus
  siRNA target sequence for 2210018M11Rik (NM_172280.1,1096-1114).
ccgtccgtggtcatgtcaa

SEQ ID NO: 772301 - DNA, 19 bp, Mus musculus
  siRNA target sequence for 2210018M11Rik (NM_172280.1,1339-1357).
ccgcctggtatcaaaccta

SEQ ID NO: 772302 - DNA, 19 bp, Mus musculus
  siRNA target sequence for 2210018M11Rik (NM_172280.1,1375-1393).
gagtcaggtgttaaaatca

SEQ ID NO: 772303 - DNA, 19 bp, Mus musculus
  siRNA target sequence for 2210018M11Rik (NM_172280.1,1401-1419).
gcaggttcaaccaagtaaa

SEQ ID NO: 772304 - DNA, 19 bp, Mus musculus
  siRNA target sequence for 2210018M11Rik (NM_172280.1,1405-1423).
gttcaaccaagtaaaatct

SEQ ID NO: 772305 - DNA, 19 bp, Mus musculus
  siRNA target sequence for 2210018M11Rik (NM_172280.1,1447-1465).
ctacccaccagtagcaatt

SEQ ID NO: 772306 - DNA, 19 bp, Mus musculus
  siRNA target sequence for 2210018M11Rik (NM_172280.1,1457-1475).
gtagcaattccccaattat

SEQ ID NO: 772307 - DNA, 19 bp, Mus musculus
  siRNA target sequence for 2210018M11Rik (NM_172280.1,1476-1494).
ggtggttagcagtaatggt

SEQ ID NO: 772308 - DNA, 19 bp, Mus musculus
  siRNA target sequence for 2210018M11Rik (NM_172280.1,1484-1502).
gcagtaatggtgcaattat

SEQ ID NO: 772309 - DNA, 19 bp, Mus musculus
  siRNA target sequence for 2210018M11Rik (NM_172280.1,1492-1510).
ggtgcaattatgacaacta

SEQ ID NO: 772310 - DNA, 19 bp, Mus musculus
  siRNA target sequence for 2210018M11Rik (NM_172280.1,1493-1511).
gtgcaattatgacaactaa

SEQ ID NO: 772311 - DNA, 19 bp, Mus musculus
  siRNA target sequence for 2210018M11Rik (NM_172280.1,1496-1514).
caattatgacaactaaact

SEQ ID NO: 772312 - DNA, 19 bp, Mus musculus
  siRNA target sequence for 2210018M11Rik (NM_172280.1,1530-1548).
cggtactcaggcaacctat

SEQ ID NO: 772313 - DNA, 19 bp, Mus musculus
  siRNA target sequence for 2210018M11Rik (NM_172280.1,1531-1549).
ggtactcaggcaacctata

SEQ ID NO: 772314 - DNA, 19 bp, Mus musculus
  siRNA target sequence for 2210018M11Rik (NM_172280.1,1593-1611).
ccctggagctgcaacctat

SEQ ID NO: 772315 - DNA, 19 bp, Mus musculus
  siRNA target sequence for 2210018M11Rik (NM_172280.1,1597-1615).
ggagctgcaacctatgtga

SEQ ID NO: 772316 - DNA, 19 bp, Mus musculus
  siRNA target sequence for 2210018M11Rik (NM_172280.1,1598-1616).
gagctgcaacctatgtgaa

SEQ ID NO: 772317 - DNA, 19 bp, Mus musculus
  siRNA target sequence for 2210018M11Rik (NM_172280.1,1600-1618).
gctgcaacctatgtgaaaa

SEQ ID NO: 772318 - DNA, 19 bp, Mus musculus
  siRNA target sequence for 2210018M11Rik (NM_172280.1,1629-1647).
cagcatcatcactgtagta

SEQ ID NO: 772319 - DNA, 19 bp, Mus musculus
  siRNA target sequence for 2210018M11Rik (NM_172280.1,1638-1656).
cactgtagtacccaaatca

SEQ ID NO: 772320 - DNA, 19 bp, Mus musculus
  siRNA target sequence for 2210018M11Rik (NM_172280.1,1640-1658).
ctgtagtacccaaatcatt

SEQ ID NO: 772321 - DNA, 19 bp, Mus musculus
  siRNA target sequence for 2210018M11Rik (NM_172280.1,1645-1663).
gtacccaaatcattagcta

SEQ ID NO: 772322 - DNA, 19 bp, Mus musculus
  siRNA target sequence for 2210018M11Rik (NM_172280.1,1664-1682).
ccttgggaggcaagataat

SEQ ID NO: 772323 - DNA, 19 bp, Mus musculus
  siRNA target sequence for 2210018M11Rik (NM_172280.1,1669-1687).
ggaggcaagataattagca

SEQ ID NO: 772324 - DNA, 19 bp, Mus musculus
  siRNA target sequence for 2210018M11Rik (NM_172280.1,1709-1727).
ctaccaaaatcactacaat

SEQ ID NO: 772325 - DNA, 19 bp, Mus musculus
  siRNA target sequence for 2210018M11Rik (NM_172280.1,1719-1737).
cactacaatcccaatgact

SEQ ID NO: 772326 - DNA, 19 bp, Mus musculus
  siRNA target sequence for 2210018M11Rik (NM_172280.1,1736-1754).
cttccaagcccaatgtgat

SEQ ID NO: 772327 - DNA, 19 bp, Mus musculus
  siRNA target sequence for 2210018M11Rik (NM_172280.1,1739-1757).
ccaagcccaatgtgattgt

SEQ ID NO: 772328 - DNA, 19 bp, Mus musculus
  siRNA target sequence for 2210018M11Rik (NM_172280.1,1740-1758).
caagcccaatgtgattgtt

SEQ ID NO: 772329 - DNA, 19 bp, Mus musculus
  siRNA target sequence for 2210018M11Rik (NM_172280.1,1752-1770).
gattgttgtacaaaagact

SEQ ID NO: 772330 - DNA, 19 bp, Mus musculus
  siRNA target sequence for 2210018M11Rik (NM_172280.1,1796-1814).
gcctccctggcaaaaacgt

SEQ ID NO: 772331 - DNA, 19 bp, Mus musculus
  siRNA target sequence for 2210018M11Rik (NM_172280.1,1813-1831).
gttgtcacaaccttgctaa

SEQ ID NO: 772332 - DNA, 19 bp, Mus musculus
  siRNA target sequence for Rnf40 (NM_172281.1,183-201).
ccacgaccactctaatcga

SEQ ID NO: 772333 - DNA, 19 bp, Mus musculus
  siRNA target sequence for Rnf40 (NM_172281.1,184-202).
cacgaccactctaatcgaa

SEQ ID NO: 772334 - DNA, 19 bp, Mus musculus
  siRNA target sequence for Rnf40 (NM_172281.1,489-507).
gcctgacccgtgatgtgat

SEQ ID NO: 772335 - DNA, 19 bp, Mus musculus
  siRNA target sequence for Rnf40 (NM_172281.1,641-659).
ctgcagggtcggatggaat

SEQ ID NO: 772336 - DNA, 19 bp, Mus musculus
  siRNA target sequence for Rnf40 (NM_172281.1,644-662).
cagggtcggatggaattct

SEQ ID NO: 772337 - DNA, 19 bp, Mus musculus
  siRNA target sequence for Rnf40 (NM_172281.1,974-992).
cgagaacagaagctcaata

SEQ ID NO: 772338 - DNA, 19 bp, Mus musculus
  siRNA target sequence for Rnf40 (NM_172281.1,1018-1036).
gctcaactccggctactat

SEQ ID NO: 772339 - DNA, 19 bp, Mus musculus
  siRNA target sequence for Rnf40 (NM_172281.1,1077-1095).
cactcagcatgcagaagtt

SEQ ID NO: 772340 - DNA, 19 bp, Mus musculus
  siRNA target sequence for Rnf40 (NM_172281.1,1088-1106).
cagaagtttgagatgttga

SEQ ID NO: 772341 - DNA, 19 bp, Mus musculus
  siRNA target sequence for Rnf40 (NM_172281.1,1294-1312).
ctacaatgagtctttgcaa

SEQ ID NO: 772342 - DNA, 19 bp, Mus musculus
  siRNA target sequence for Rnf40 (NM_172281.1,1363-1381).
ctcccacttgagacacatt

SEQ ID NO: 772343 - DNA, 19 bp, Mus musculus
  siRNA target sequence for Rnf40 (NM_172281.1,1369-1387).
cttgagacacattgaacat

SEQ ID NO: 772344 - DNA, 19 bp, Mus musculus
  siRNA target sequence for Rnf40 (NM_172281.1,1544-1562).
gaaatgcgccacctgatta

SEQ ID NO: 772345 - DNA, 19 bp, Mus musculus
  siRNA target sequence for Rnf40 (NM_172281.1,1596-1614).
gagatgcccagcgatacaa

SEQ ID NO: 772346 - DNA, 19 bp, Mus musculus
  siRNA target sequence for Rnf40 (NM_172281.1,1606-1624).
gcgatacaagcggaaactt

SEQ ID NO: 772347 - DNA, 19 bp, Mus musculus
  siRNA target sequence for Rnf40 (NM_172281.1,1615-1633).
gcggaaacttcgagaagta

SEQ ID NO: 772348 - DNA, 19 bp, Mus musculus
  siRNA target sequence for Rnf40 (NM_172281.1,1617-1635).
ggaaacttcgagaagtaca

SEQ ID NO: 772349 - DNA, 19 bp, Mus musculus
  siRNA target sequence for Rnf40 (NM_172281.1,1732-1750).
cccagggaaggaagatagt

SEQ ID NO: 772350 - DNA, 19 bp, Mus musculus
  siRNA target sequence for Rnf40 (NM_172281.1,1995-2013).
caagggctgatcgagaaaa

SEQ ID NO: 772351 - DNA, 19 bp, Mus musculus
  siRNA target sequence for Rnf40 (NM_172281.1,2659-2677).
ccaggctctggagcttaat

SEQ ID NO: 772352 - DNA, 19 bp, Mus musculus
  siRNA target sequence for Rnf40 (NM_172281.1,2660-2678).
caggctctggagcttaata

SEQ ID NO: 772353 - DNA, 19 bp, Mus musculus
  siRNA target sequence for Rnf40 (NM_172281.1,2663-2681).
gctctggagcttaataaga

SEQ ID NO: 772354 - DNA, 19 bp, Mus musculus
  siRNA target sequence for Rnf40 (NM_172281.1,2838-2856).
cccggcttcggcgaaaact

SEQ ID NO: 772355 - DNA, 19 bp, Mus musculus
  siRNA target sequence for Rnf40 (NM_172281.1,2839-2857).
ccggcttcggcgaaaacta

SEQ ID NO: 772356 - DNA, 19 bp, Mus musculus
  siRNA target sequence for Rnf40 (NM_172281.1,2841-2859).
ggcttcggcgaaaactaga

SEQ ID NO: 772357 - DNA, 19 bp, Mus musculus
  siRNA target sequence for Rnf40 (NM_172281.1,2866-2884).
gcggaaagtggaggtttat

SEQ ID NO: 772358 - DNA, 19 bp, Mus musculus
  siRNA target sequence for 6430548M08Rik (NM_172286.2,129-147).
gtgggctccctgattgact

SEQ ID NO: 772359 - DNA, 19 bp, Mus musculus
  siRNA target sequence for 6430548M08Rik (NM_172286.2,131-149).
gggctccctgattgacttt

SEQ ID NO: 772360 - DNA, 19 bp, Mus musculus
  siRNA target sequence for 6430548M08Rik (NM_172286.2,133-151).
gctccctgattgactttga

SEQ ID NO: 772361 - DNA, 19 bp, Mus musculus
  siRNA target sequence for 6430548M08Rik (NM_172286.2,409-427).
gctacgtagagaagatctt

SEQ ID NO: 772362 - DNA, 19 bp, Mus musculus
  siRNA target sequence for 6430548M08Rik (NM_172286.2,593-611).
cgcggtagtgctgtttgaa

SEQ ID NO: 772363 - DNA, 19 bp, Mus musculus
  siRNA target sequence for 6430548M08Rik (NM_172286.2,594-612).
gcggtagtgctgtttgaat

SEQ ID NO: 772364 - DNA, 19 bp, Mus musculus
  siRNA target sequence for 6430548M08Rik (NM_172286.2,720-738).
ccagcaggcagtattgact

SEQ ID NO: 772365 - DNA, 19 bp, Mus musculus
  siRNA target sequence for 6430548M08Rik (NM_172286.2,856-874).
gaccgctggtcaggaaaaa

SEQ ID NO: 772366 - DNA, 19 bp, Mus musculus
  siRNA target sequence for 6430548M08Rik (NM_172286.2,859-877).
cgctggtcaggaaaaatga

SEQ ID NO: 772367 - DNA, 19 bp, Mus musculus
  siRNA target sequence for 6430548M08Rik (NM_172286.2,1186-1204).
gcacgttcacccacaacat

SEQ ID NO: 772368 - DNA, 19 bp, Mus musculus
  siRNA target sequence for 6430548M08Rik (NM_172286.2,1256-1274).
ggctgtgattggcaatcta

SEQ ID NO: 772369 - DNA, 19 bp, Mus musculus
  siRNA target sequence for 4832420O05Rik (NM_172288.1,212-230).
ctgggatctgcggttaact

SEQ ID NO: 772370 - DNA, 19 bp, Mus musculus
  siRNA target sequence for 4832420O05Rik (NM_172288.1,282-300).
gaacgcctactcggatatt

SEQ ID NO: 772371 - DNA, 19 bp, Mus musculus
  siRNA target sequence for 4832420O05Rik (NM_172288.1,301-319).
cccccaccattccatatca

SEQ ID NO: 772372 - DNA, 19 bp, Mus musculus
  siRNA target sequence for 4832420O05Rik (NM_172288.1,303-321).
cccaccattccatatcaga

SEQ ID NO: 772373 - DNA, 19 bp, Mus musculus
  siRNA target sequence for 4832420O05Rik (NM_172288.1,354-372).
catctctccctgttaagat

SEQ ID NO: 772374 - DNA, 19 bp, Mus musculus
  siRNA target sequence for 4832420O05Rik (NM_172288.1,357-375).
ctctccctgttaagatcat

SEQ ID NO: 772375 - DNA, 19 bp, Mus musculus
  siRNA target sequence for 4832420O05Rik (NM_172288.1,399-417).
ctgacgagcagctttctgt

SEQ ID NO: 772376 - DNA, 19 bp, Mus musculus
  siRNA target sequence for 4832420O05Rik (NM_172288.1,485-503).
gtgtcgcctgtcactaagt

SEQ ID NO: 772377 - DNA, 19 bp, Mus musculus
  siRNA target sequence for 4832420O05Rik (NM_172288.1,588-606).
caggtgaagtccattctgt

SEQ ID NO: 772378 - DNA, 19 bp, Mus musculus
  siRNA target sequence for 4832420O05Rik (NM_172288.1,774-792).
ggagccagttggttcgatt

SEQ ID NO: 772379 - DNA, 19 bp, Mus musculus
  siRNA target sequence for 4832420O05Rik (NM_172288.1,777-795).
gccagttggttcgattgat

SEQ ID NO: 772380 - DNA, 19 bp, Mus musculus
  siRNA target sequence for 4832420O05Rik (NM_172288.1,778-796).
ccagttggttcgattgatt

SEQ ID NO: 772381 - DNA, 19 bp, Mus musculus
  siRNA target sequence for 4832420O05Rik (NM_172288.1,889-907).
gattctgtcccctactagt

SEQ ID NO: 772382 - DNA, 19 bp, Mus musculus
  siRNA target sequence for 4832420O05Rik (NM_172288.1,934-952).
ggacagaggaggatcaagt

SEQ ID NO: 772383 - DNA, 19 bp, Mus musculus
  siRNA target sequence for 4832420O05Rik (NM_172288.1,935-953).
gacagaggaggatcaagtt

SEQ ID NO: 772384 - DNA, 19 bp, Mus musculus
  siRNA target sequence for 4832420O05Rik (NM_172288.1,939-957).
gaggaggatcaagtttcta

SEQ ID NO: 772385 - DNA, 19 bp, Mus musculus
  siRNA target sequence for 4832420O05Rik (NM_172288.1,988-1006).
ggaactggacgattcttca

SEQ ID NO: 772386 - DNA, 19 bp, Mus musculus
  siRNA target sequence for 4832420O05Rik (NM_172288.1,1072-1090).
ggggtctgaaagtaactat

SEQ ID NO: 772387 - DNA, 19 bp, Mus musculus
  siRNA target sequence for 4832420O05Rik (NM_172288.1,1074-1092).
ggtctgaaagtaactatga

SEQ ID NO: 772388 - DNA, 19 bp, Mus musculus
  siRNA target sequence for 4832420O05Rik (NM_172288.1,1075-1093).
gtctgaaagtaactatgaa

SEQ ID NO: 772389 - DNA, 19 bp, Mus musculus
  siRNA target sequence for 4832420O05Rik (NM_172288.1,1087-1105).
ctatgaagctattaaagaa

SEQ ID NO: 772390 - DNA, 19 bp, Mus musculus
  siRNA target sequence for 4832420O05Rik (NM_172288.1,1107-1125).
gggtcaacattcagtactt

SEQ ID NO: 772391 - DNA, 19 bp, Mus musculus
  siRNA target sequence for 4832420O05Rik (NM_172288.1,1188-1206).
gcccctgtcttgtctatta

SEQ ID NO: 772392 - DNA, 19 bp, Mus musculus
  siRNA target sequence for 4832420O05Rik (NM_172288.1,1192-1210).
ctgtcttgtctattactct

SEQ ID NO: 772393 - DNA, 19 bp, Mus musculus
  siRNA target sequence for 4832420O05Rik (NM_172288.1,1258-1276).
cgtagaagtgactcagtat

SEQ ID NO: 772394 - DNA, 19 bp, Mus musculus
  siRNA target sequence for 4832420O05Rik (NM_172288.1,1259-1277).
gtagaagtgactcagtata

SEQ ID NO: 772395 - DNA, 19 bp, Mus musculus
  siRNA target sequence for 4832420O05Rik (NM_172288.1,1314-1332).
gattgatggtgccaaactt

SEQ ID NO: 772396 - DNA, 19 bp, Mus musculus
  siRNA target sequence for 4832420O05Rik (NM_172288.1,1384-1402).
cacaggcactgggaagttt

SEQ ID NO: 772397 - DNA, 19 bp, Mus musculus
  siRNA target sequence for 4832420O05Rik (NM_172288.1,1420-1438).
gattgtctttgatacacaa

SEQ ID NO: 772398 - DNA, 19 bp, Mus musculus
  siRNA target sequence for 4832420O05Rik (NM_172288.1,1434-1452).
cacaaggggatggcatttt

SEQ ID NO: 772399 - DNA, 19 bp, Mus musculus
  siRNA target sequence for 4832420O05Rik (NM_172288.1,1470-1488).
ctggtgttcctatcctttt

SEQ ID NO: 772400 - DNA, 19 bp, Mus musculus
  siRNA target sequence for 4832420O05Rik (NM_172288.1,1472-1490).
ggtgttcctatccttttct

SEQ ID NO: 772401 - DNA, 19 bp, Mus musculus
  siRNA target sequence for 4832420O05Rik (NM_172288.1,1483-1501).
ccttttctctaggaatagt

SEQ ID NO: 772402 - DNA, 19 bp, Mus musculus
  siRNA target sequence for 4832420O05Rik (NM_172288.1,1584-1602).
gacggggcagtgagagtat

SEQ ID NO: 772403 - DNA, 19 bp, Mus musculus
  siRNA target sequence for 4832420O05Rik (NM_172288.1,1588-1606).
gggcagtgagagtatggtt

SEQ ID NO: 772404 - DNA, 19 bp, Mus musculus
  siRNA target sequence for 4832420O05Rik (NM_172288.1,1589-1607).
ggcagtgagagtatggttt

SEQ ID NO: 772405 - DNA, 19 bp, Mus musculus
  siRNA target sequence for 4832420O05Rik (NM_172288.1,1593-1611).
gtgagagtatggtttttga

SEQ ID NO: 772406 - DNA, 19 bp, Mus musculus
  siRNA target sequence for 4832420O05Rik (NM_172288.1,1595-1613).
gagagtatggtttttgaga

SEQ ID NO: 772407 - DNA, 19 bp, Mus musculus
  siRNA target sequence for 4832420O05Rik (NM_172288.1,1618-1636).
cacaaaaaacgaaactgta

SEQ ID NO: 772408 - DNA, 19 bp, Mus musculus
  siRNA target sequence for 4832420O05Rik (NM_172288.1,1632-1650).
ctgtagcccatgaagacaa

SEQ ID NO: 772409 - DNA, 19 bp, Mus musculus
  siRNA target sequence for 4832420O05Rik (NM_172288.1,1718-1736).
gctgatgagctgttttcct

SEQ ID NO: 772410 - DNA, 19 bp, Mus musculus
  siRNA target sequence for 4832420O05Rik (NM_172288.1,1734-1752).
cctctcacacggatttgga

SEQ ID NO: 772411 - DNA, 19 bp, Mus musculus
  siRNA target sequence for 4832420O05Rik (NM_172288.1,1735-1753).
ctctcacacggatttggat

SEQ ID NO: 772412 - DNA, 19 bp, Mus musculus
  siRNA target sequence for 4832420O05Rik (NM_172288.1,1870-1888).
caacacctcactgatcatt

SEQ ID NO: 772413 - DNA, 19 bp, Mus musculus
  siRNA target sequence for 4832420O05Rik (NM_172288.1,1943-1961).
caccaagtcggcttgttta

SEQ ID NO: 772414 - DNA, 19 bp, Mus musculus
  siRNA target sequence for 4832420O05Rik (NM_172288.1,2042-2060).
gctgccatcacactaaaaa

SEQ ID NO: 772415 - DNA, 19 bp, Mus musculus
  siRNA target sequence for 4832420O05Rik (NM_172288.1,2046-2064).
ccatcacactaaaaaacca

SEQ ID NO: 772416 - DNA, 19 bp, Mus musculus
  siRNA target sequence for 4832420O05Rik (NM_172288.1,2102-2120).
ctgctcgccctgaacaaga

SEQ ID NO: 772417 - DNA, 19 bp, Mus musculus
  siRNA target sequence for 4832420O05Rik (NM_172288.1,2267-2285).
gtggcgatcgacgtcaata

SEQ ID NO: 772418 - DNA, 19 bp, Mus musculus
  siRNA target sequence for 4832420O05Rik (NM_172288.1,2269-2287).
ggcgatcgacgtcaatact

SEQ ID NO: 772419 - DNA, 19 bp, Mus musculus
  siRNA target sequence for 4832420O05Rik (NM_172288.1,2271-2289).
cgatcgacgtcaatactgt

SEQ ID NO: 772420 - DNA, 19 bp, Mus musculus
  siRNA target sequence for 4832420O05Rik (NM_172288.1,2316-2334).
ctcactaccgcctaaacaa

SEQ ID NO: 772421 - DNA, 19 bp, Mus musculus
  siRNA target sequence for 4832420O05Rik (NM_172288.1,2554-2572).
gctgaagtcgctagagaaa

SEQ ID NO: 772422 - DNA, 19 bp, Mus musculus
  siRNA target sequence for 4832420O05Rik (NM_172288.1,2555-2573).
ctgaagtcgctagagaaat

SEQ ID NO: 772423 - DNA, 19 bp, Mus musculus
  siRNA target sequence for 4832420O05Rik (NM_172288.1,2689-2707).
gaagtattgtgactttgat

SEQ ID NO: 772424 - DNA, 19 bp, Mus musculus
  siRNA target sequence for 4832420O05Rik (NM_172288.1,2823-2841).
gaaagcggggaaaattgct

SEQ ID NO: 772425 - DNA, 19 bp, Mus musculus
  siRNA target sequence for 4832420O05Rik (NM_172288.1,2861-2879).
catggacagttggcaaatt

SEQ ID NO: 772426 - DNA, 19 bp, Mus musculus
  siRNA target sequence for 4832420O05Rik (NM_172288.1,2904-2922).
gctggttacatgaaattaa

SEQ ID NO: 772427 - DNA, 19 bp, Mus musculus
  siRNA target sequence for 4832420O05Rik (NM_172288.1,2905-2923).
ctggttacatgaaattaat

SEQ ID NO: 772428 - DNA, 19 bp, Mus musculus
  siRNA target sequence for 4832420O05Rik (NM_172288.1,2954-2972).
ctgctaggtttggcaaata

SEQ ID NO: 772429 - DNA, 19 bp, Mus musculus
  siRNA target sequence for 4832420O05Rik (NM_172288.1,2975-2993).
gaaactcgttactttgcaa

SEQ ID NO: 772430 - DNA, 19 bp, Mus musculus
  siRNA target sequence for 4832420O05Rik (NM_172288.1,3016-3034).
gagtaaactggcagcttta

SEQ ID NO: 772431 - DNA, 19 bp, Mus musculus
  siRNA target sequence for 4832420O05Rik (NM_172288.1,3029-3047).
gctttagcttcagacattt

SEQ ID NO: 772432 - DNA, 19 bp, Mus musculus
  siRNA target sequence for 4832420O05Rik (NM_172288.1,3055-3073).
caggctgcaagagaagatt

SEQ ID NO: 772433 - DNA, 19 bp, Mus musculus
  siRNA target sequence for 4832420O05Rik (NM_172288.1,3142-3160).
gagacagctgagtcttagt

SEQ ID NO: 772434 - DNA, 19 bp, Mus musculus
  siRNA target sequence for 4832420O05Rik (NM_172288.1,3188-3206).
ctcatcagtctgtatatct

SEQ ID NO: 772435 - DNA, 19 bp, Mus musculus
  siRNA target sequence for 4832420O05Rik (NM_172288.1,3222-3240).
gagccaatgagtatgattt

SEQ ID NO: 772436 - DNA, 19 bp, Mus musculus
  siRNA target sequence for 4832420O05Rik (NM_172288.1,3361-3379).
caaagatgatccaatcgaa

SEQ ID NO: 772437 - DNA, 19 bp, Mus musculus
  siRNA target sequence for 4832420O05Rik (NM_172288.1,3372-3390).
caatcgaagtgtctaaaga

SEQ ID NO: 772438 - DNA, 19 bp, Mus musculus
  siRNA target sequence for 4832420O05Rik (NM_172288.1,3406-3424).
gatcttgcagaaacttata

SEQ ID NO: 772439 - DNA, 19 bp, Mus musculus
  siRNA target sequence for 4832420O05Rik (NM_172288.1,3495-3513).
gcctcaagtccaactctta

SEQ ID NO: 772440 - DNA, 19 bp, Mus musculus
  siRNA target sequence for 4832420O05Rik (NM_172288.1,3497-3515).
ctcaagtccaactcttact

SEQ ID NO: 772441 - DNA, 19 bp, Mus musculus
  siRNA target sequence for 4832420O05Rik (NM_172288.1,3529-3547).
gaaagcaaattatgagtat

SEQ ID NO: 772442 - DNA, 19 bp, Mus musculus
  siRNA target sequence for MGC47262 (NM_172293.2,1014-1032).
gaacctggaaaacttgttt

SEQ ID NO: 772443 - DNA, 19 bp, Mus musculus
  siRNA target sequence for MGC47262 (NM_172293.2,1693-1711).
gcctttgagggcgacttta

SEQ ID NO: 772444 - DNA, 19 bp, Mus musculus
  siRNA target sequence for BC037703 (NM_172295.2,130-148).
ctctggtccacgttcacaa

SEQ ID NO: 772445 - DNA, 19 bp, Mus musculus
  siRNA target sequence for BC037703 (NM_172295.2,135-153).
gtccacgttcacaattcca

SEQ ID NO: 772446 - DNA, 19 bp, Mus musculus
  siRNA target sequence for BC037703 (NM_172295.2,320-338).
ctgaggcggcagcagattt

SEQ ID NO: 772447 - DNA, 19 bp, Mus musculus
  siRNA target sequence for BC037703 (NM_172295.2,324-342).
ggcggcagcagatttctca

SEQ ID NO: 772448 - DNA, 19 bp, Mus musculus
  siRNA target sequence for BC037703 (NM_172295.2,371-389).
cacctgctaaccacagaaa

SEQ ID NO: 772449 - DNA, 19 bp, Mus musculus
  siRNA target sequence for BC037703 (NM_172295.2,397-415).
ccaggacagtcgtttcgaa

SEQ ID NO: 772450 - DNA, 19 bp, Mus musculus
  siRNA target sequence for BC037703 (NM_172295.2,527-545).
cagcgctggcggtactaca

SEQ ID NO: 772451 - DNA, 19 bp, Mus musculus
  siRNA target sequence for BC037703 (NM_172295.2,531-549).
gctggcggtactacaatgt

SEQ ID NO: 772452 - DNA, 19 bp, Mus musculus
  siRNA target sequence for BC037703 (NM_172295.2,608-626).
gagactgagatgttcatga

SEQ ID NO: 772453 - DNA, 19 bp, Mus musculus
  siRNA target sequence for BC037703 (NM_172295.2,947-965).
gcccagtccgcctatcact

SEQ ID NO: 772454 - DNA, 19 bp, Mus musculus
  siRNA target sequence for BC037703 (NM_172295.2,1026-1044).
gctgccgcaggcaatgctt

SEQ ID NO: 772455 - DNA, 19 bp, Mus musculus
  siRNA target sequence for BC037703 (NM_172295.2,1027-1045).
ctgccgcaggcaatgcttt

SEQ ID NO: 772456 - DNA, 19 bp, Mus musculus
  siRNA target sequence for Tex10 (NM_172304.1,247-265).
cattctgctggagcattat

SEQ ID NO: 772457 - DNA, 19 bp, Mus musculus
  siRNA target sequence for Tex10 (NM_172304.1,259-277).
gcattatccagctctcatt

SEQ ID NO: 772458 - DNA, 19 bp, Mus musculus
  siRNA target sequence for Tex10 (NM_172304.1,279-297).
ctggccgtagcagtatatt

SEQ ID NO: 772459 - DNA, 19 bp, Mus musculus
  siRNA target sequence for Tex10 (NM_172304.1,282-300).
gccgtagcagtatattgct

SEQ ID NO: 772460 - DNA, 19 bp, Mus musculus
  siRNA target sequence for Tex10 (NM_172304.1,283-301).
ccgtagcagtatattgctt

SEQ ID NO: 772461 - DNA, 19 bp, Mus musculus
  siRNA target sequence for Tex10 (NM_172304.1,284-302).
cgtagcagtatattgctta

SEQ ID NO: 772462 - DNA, 19 bp, Mus musculus
  siRNA target sequence for Tex10 (NM_172304.1,285-303).
gtagcagtatattgcttaa

SEQ ID NO: 772463 - DNA, 19 bp, Mus musculus
  siRNA target sequence for Tex10 (NM_172304.1,291-309).
gtatattgcttaagaactt

SEQ ID NO: 772464 - DNA, 19 bp, Mus musculus
  siRNA target sequence for Tex10 (NM_172304.1,416-434).
caatggaggctgaaagtct

SEQ ID NO: 772465 - DNA, 19 bp, Mus musculus
  siRNA target sequence for Tex10 (NM_172304.1,438-456).
caagactcagtaaattcct

SEQ ID NO: 772466 - DNA, 19 bp, Mus musculus
  siRNA target sequence for Tex10 (NM_172304.1,478-496).
cagtaggttgagagaaagt

SEQ ID NO: 772467 - DNA, 19 bp, Mus musculus
  siRNA target sequence for Tex10 (NM_172304.1,570-588).
ccaacgaccagcaacagat

SEQ ID NO: 772468 - DNA, 19 bp, Mus musculus
  siRNA target sequence for Tex10 (NM_172304.1,586-604).
gatccaggtttatgaaaat

SEQ ID NO: 772469 - DNA, 19 bp, Mus musculus
  siRNA target sequence for Tex10 (NM_172304.1,704-722).
ggattcattgagataataa

SEQ ID NO: 772470 - DNA, 19 bp, Mus musculus
  siRNA target sequence for Tex10 (NM_172304.1,798-816).
gagagcctctgcaggttat

SEQ ID NO: 772471 - DNA, 19 bp, Mus musculus
  siRNA target sequence for Tex10 (NM_172304.1,889-907).
gtcatggcttcgaaaaaat

SEQ ID NO: 772472 - DNA, 19 bp, Mus musculus
  siRNA target sequence for Tex10 (NM_172304.1,891-909).
catggcttcgaaaaaatta

SEQ ID NO: 772473 - DNA, 19 bp, Mus musculus
  siRNA target sequence for Tex10 (NM_172304.1,894-912).
ggcttcgaaaaaattatct

SEQ ID NO: 772474 - DNA, 19 bp, Mus musculus
  siRNA target sequence for Tex10 (NM_172304.1,895-913).
gcttcgaaaaaattatctt

SEQ ID NO: 772475 - DNA, 19 bp, Mus musculus
  siRNA target sequence for Tex10 (NM_172304.1,896-914).
cttcgaaaaaattatctta

SEQ ID NO: 772476 - DNA, 19 bp, Mus musculus
  siRNA target sequence for Tex10 (NM_172304.1,973-991).
gcaacggaagaaagataca

SEQ ID NO: 772477 - DNA, 19 bp, Mus musculus
  siRNA target sequence for Cyp4a12 (NM_172306.1,213-231).
ggctctttggacacaagat

SEQ ID NO: 772478 - DNA, 19 bp, Mus musculus
  siRNA target sequence for Cyp4a12 (NM_172306.1,222-240).
gacacaagatcttaaagga

SEQ ID NO: 772479 - DNA, 19 bp, Mus musculus
  siRNA target sequence for Cyp4a12 (NM_172306.1,244-262).
ggaccttcaagatattcta

SEQ ID NO: 772480 - DNA, 19 bp, Mus musculus
  siRNA target sequence for Cyp4a12 (NM_172306.1,254-272).
gatattctaactaggatta

SEQ ID NO: 772481 - DNA, 19 bp, Mus musculus
  siRNA target sequence for LOC272322 (NM_172309.1,102-120).
ctctcttctttcaacaaga

SEQ ID NO: 772482 - DNA, 19 bp, Mus musculus
  siRNA target sequence for LOC272322 (NM_172309.1,154-172).
gctcacagccagatggaaa

SEQ ID NO: 772483 - DNA, 19 bp, Mus musculus
  siRNA target sequence for LOC272322 (NM_172309.1,175-193).
cgtcggagagacaagatga

SEQ ID NO: 772484 - DNA, 19 bp, Mus musculus
  siRNA target sequence for LOC272322 (NM_172309.1,275-293).
ggagggcggtgcagtactt

SEQ ID NO: 772485 - DNA, 19 bp, Mus musculus
  siRNA target sequence for LOC272322 (NM_172309.1,305-323).
gaggcatgacagagcttta

SEQ ID NO: 772486 - DNA, 19 bp, Mus musculus
  siRNA target sequence for LOC272322 (NM_172309.1,307-325).
ggcatgacagagctttact

SEQ ID NO: 772487 - DNA, 19 bp, Mus musculus
  siRNA target sequence for LOC272322 (NM_172309.1,425-443).
gagggagaattttttacgt

SEQ ID NO: 772488 - DNA, 19 bp, Mus musculus
  siRNA target sequence for LOC272322 (NM_172309.1,427-445).
gggagaattttttacgttt

SEQ ID NO: 772489 - DNA, 19 bp, Mus musculus
  siRNA target sequence for LOC272322 (NM_172309.1,459-477).
caaaacactgcgttatgat

SEQ ID NO: 772490 - DNA, 19 bp, Mus musculus
  siRNA target sequence for LOC272322 (NM_172309.1,625-643).
gggcgaccacgcatgcatt

SEQ ID NO: 772491 - DNA, 19 bp, Mus musculus
  siRNA target sequence for LOC272322 (NM_172309.1,644-662).
ctggctccagacgatcttt

SEQ ID NO: 772492 - DNA, 19 bp, Mus musculus
  siRNA target sequence for LOC272322 (NM_172309.1,646-664).
ggctccagacgatctttct

SEQ ID NO: 772493 - DNA, 19 bp, Mus musculus
  siRNA target sequence for LOC272322 (NM_172309.1,650-668).
ccagacgatctttcttctt

SEQ ID NO: 772494 - DNA, 19 bp, Mus musculus
  siRNA target sequence for LOC272322 (NM_172309.1,651-669).
cagacgatctttcttcttt

SEQ ID NO: 772495 - DNA, 19 bp, Mus musculus
  siRNA target sequence for LOC272322 (NM_172309.1,681-699).
ctgtaccgtccctgtcaaa

SEQ ID NO: 772496 - DNA, 19 bp, Mus musculus
  siRNA target sequence for LOC272322 (NM_172309.1,683-701).
gtaccgtccctgtcaaaga

SEQ ID NO: 772497 - DNA, 19 bp, Mus musculus
  siRNA target sequence for LOC272322 (NM_172309.1,713-731).
gctcgtcctgctcaaagaa

SEQ ID NO: 772498 - DNA, 19 bp, Mus musculus
  siRNA target sequence for LOC272322 (NM_172309.1,760-778).
cattgcactggatacttga

SEQ ID NO: 772499 - DNA, 19 bp, Mus musculus
  siRNA target sequence for LOC272322 (NM_172309.1,782-800).
gctggcctctgaatgttgt

SEQ ID NO: 772500 - DNA, 19 bp, Mus musculus
  siRNA target sequence for LOC272322 (NM_172309.1,799-817).
gttggcatggagaaagagt

SEQ ID NO: 772501 - DNA, 19 bp, Mus musculus
  siRNA target sequence for LOC272322 (NM_172309.1,869-887).
ggttgcatccatacattgt

SEQ ID NO: 772502 - DNA, 19 bp, Mus musculus
  siRNA target sequence for LOC272322 (NM_172309.1,915-933).
gagaccggctgagttcata

SEQ ID NO: 772503 - DNA, 19 bp, Mus musculus
  siRNA target sequence for LOC272322 (NM_172309.1,944-962).
caatgaacgggaaattcgt

SEQ ID NO: 772504 - DNA, 19 bp, Mus musculus
  siRNA target sequence for LOC272322 (NM_172309.1,951-969).
cgggaaattcgtctatgtt

SEQ ID NO: 772505 - DNA, 19 bp, Mus musculus
  siRNA target sequence for LOC272322 (NM_172309.1,953-971).
ggaaattcgtctatgttga

SEQ ID NO: 772506 - DNA, 19 bp, Mus musculus
  siRNA target sequence for LOC272322 (NM_172309.1,980-998).
caacggcaattttaggata

SEQ ID NO: 772507 - DNA, 19 bp, Mus musculus
  siRNA target sequence for LOC272322 (NM_172309.1,1009-1027).
gaacttttgggaacttcat

SEQ ID NO: 772508 - DNA, 19 bp, Mus musculus
  siRNA target sequence for LOC272322 (NM_172309.1,1092-1110).
gagtaaggagaaaatactt

SEQ ID NO: 772509 - DNA, 19 bp, Mus musculus
  siRNA target sequence for LOC272322 (NM_172309.1,1244-1262).
gtgagaccaggctgtcttt

SEQ ID NO: 772510 - DNA, 19 bp, Mus musculus
  siRNA target sequence for LOC272322 (NM_172309.1,1290-1308).
ctccgaagactcatttaga

SEQ ID NO: 772511 - DNA, 19 bp, Mus musculus
  siRNA target sequence for LOC272322 (NM_172309.1,1292-1310).
ccgaagactcatttagaca

SEQ ID NO: 772512 - DNA, 19 bp, Mus musculus
  siRNA target sequence for LOC272322 (NM_172309.1,1354-1372).
ggtgctgggagtattggaa

SEQ ID NO: 772513 - DNA, 19 bp, Mus musculus
  siRNA target sequence for LOC272322 (NM_172309.1,1360-1378).
gggagtattggaacagata

SEQ ID NO: 772514 - DNA, 19 bp, Mus musculus
  siRNA target sequence for LOC272322 (NM_172309.1,1361-1379).
ggagtattggaacagatat

SEQ ID NO: 772515 - DNA, 19 bp, Mus musculus
  siRNA target sequence for LOC272322 (NM_172309.1,1382-1400).
caaatgaggttctgagttt

SEQ ID NO: 772516 - DNA, 19 bp, Mus musculus
  siRNA target sequence for LOC272322 (NM_172309.1,1661-1679).
ctgcattcatgaattacct

SEQ ID NO: 772517 - DNA, 19 bp, Mus musculus
  siRNA target sequence for 1700007D07Rik (NM_172371.1,474-492).
ctcctggatcgcttccata

SEQ ID NO: 772518 - DNA, 19 bp, Mus musculus
  siRNA target sequence for 1700007D07Rik (NM_172371.1,597-615).
gatgctgcttgcttcattt

SEQ ID NO: 772519 - DNA, 19 bp, Mus musculus
  siRNA target sequence for 1700007D07Rik (NM_172371.1,620-638).
cctccttgacccacctata

SEQ ID NO: 772520 - DNA, 19 bp, Mus musculus
  siRNA target sequence for 1700007D07Rik (NM_172371.1,623-641).
ccttgacccacctatacct

SEQ ID NO: 772521 - DNA, 19 bp, Mus musculus
  siRNA target sequence for 1700007D07Rik (NM_172371.1,629-647).
cccacctatacctgagtat

SEQ ID NO: 772522 - DNA, 19 bp, Mus musculus
  siRNA target sequence for 1700007D07Rik (NM_172371.1,630-648).
ccacctatacctgagtatt

SEQ ID NO: 772523 - DNA, 19 bp, Mus musculus
  siRNA target sequence for 1700007D07Rik (NM_172371.1,698-716).
cctgcctttcccgttactt

SEQ ID NO: 772524 - DNA, 19 bp, Mus musculus
  siRNA target sequence for 1700007D07Rik (NM_172371.1,762-780).
gggcatctcctcttttgca

SEQ ID NO: 772525 - DNA, 19 bp, Mus musculus
  siRNA target sequence for 1700007D07Rik (NM_172371.1,796-814).
cagtggctgatcaacaact

SEQ ID NO: 772526 - DNA, 19 bp, Mus musculus
  siRNA target sequence for 1700007D07Rik (NM_172371.1,980-998).
ctgccctcaccctgatcaa

SEQ ID NO: 772527 - DNA, 19 bp, Mus musculus
  siRNA target sequence for 1700007D07Rik (NM_172371.1,1070-1088).
cggccttcctactttcagt

SEQ ID NO: 772528 - DNA, 19 bp, Mus musculus
  siRNA target sequence for 1700007D07Rik (NM_172371.1,1315-1333).
gtggggactggaaggattt

SEQ ID NO: 772529 - DNA, 19 bp, Mus musculus
  siRNA target sequence for 1700007D07Rik (NM_172371.1,1380-1398).
gctgggggctcctctatca

SEQ ID NO: 772530 - DNA, 19 bp, Mus musculus
  siRNA target sequence for 1700007D07Rik (NM_172371.1,1421-1439).
gcaactacacggcttcttt

SEQ ID NO: 772531 - DNA, 19 bp, Mus musculus
  siRNA target sequence for 1700007D07Rik (NM_172371.1,1464-1482).
cgcaggaagtggagttctt

SEQ ID NO: 772532 - DNA, 19 bp, Mus musculus
  siRNA target sequence for 1700007D07Rik (NM_172371.1,1529-1547).
gaccccaggaccttgtgat

SEQ ID NO: 772533 - DNA, 19 bp, Mus musculus
  siRNA target sequence for 1700007D07Rik (NM_172371.1,1543-1561).
gtgatagaggcatcagata

SEQ ID NO: 772534 - DNA, 19 bp, Mus musculus
  siRNA target sequence for 1700007D07Rik (NM_172371.1,1549-1567).
gaggcatcagataccaaaa

SEQ ID NO: 772535 - DNA, 19 bp, Mus musculus
  siRNA target sequence for DXImx38e (NM_172372.1,165-183).
ggtgtgaccagcctacatt

SEQ ID NO: 772536 - DNA, 19 bp, Mus musculus
  siRNA target sequence for DXImx38e (NM_172372.1,166-184).
gtgtgaccagcctacattt

SEQ ID NO: 772537 - DNA, 19 bp, Mus musculus
  siRNA target sequence for DXImx38e (NM_172372.1,168-186).
gtgaccagcctacatttca

SEQ ID NO: 772538 - DNA, 19 bp, Mus musculus
  siRNA target sequence for DXImx38e (NM_172372.1,223-241).
caggcgtccggatctacaa

SEQ ID NO: 772539 - DNA, 19 bp, Mus musculus
  siRNA target sequence for DXImx38e (NM_172372.1,226-244).
gcgtccggatctacaatgt

SEQ ID NO: 772540 - DNA, 19 bp, Mus musculus
  siRNA target sequence for DXImx38e (NM_172372.1,292-310).
gcgtgggcctggtagagat

SEQ ID NO: 772541 - DNA, 19 bp, Mus musculus
  siRNA target sequence for DXImx38e (NM_172372.1,469-487).
gcatgcgccatgacaagat

SEQ ID NO: 772542 - DNA, 19 bp, Mus musculus
  siRNA target sequence for DXImx38e (NM_172372.1,497-515).
gctgaggaaccgcatctat

SEQ ID NO: 772543 - DNA, 19 bp, Mus musculus
  siRNA target sequence for DXImx38e (NM_172372.1,535-553).
gtccaagaaagctgtttga

SEQ ID NO: 772544 - DNA, 19 bp, Mus musculus
  siRNA target sequence for DXImx38e (NM_172372.1,537-555).
ccaagaaagctgtttgagt

SEQ ID NO: 772545 - DNA, 19 bp, Mus musculus
  siRNA target sequence for DXImx38e (NM_172372.1,640-658).
gtggaagtctgcaacttgt

SEQ ID NO: 772546 - DNA, 19 bp, Mus musculus
  siRNA target sequence for DXImx38e (NM_172372.1,776-794).
ccagaagggcacccttatt

SEQ ID NO: 772547 - DNA, 19 bp, Mus musculus
  siRNA target sequence for DXImx38e (NM_172372.1,779-797).
gaagggcacccttattcgt

SEQ ID NO: 772548 - DNA, 19 bp, Mus musculus
  siRNA target sequence for DXImx38e (NM_172372.1,785-803).
cacccttattcgtctcttt

SEQ ID NO: 772549 - DNA, 19 bp, Mus musculus
  siRNA target sequence for DXImx38e (NM_172372.1,787-805).
cccttattcgtctctttga

SEQ ID NO: 772550 - DNA, 19 bp, Mus musculus
  siRNA target sequence for DXImx38e (NM_172372.1,859-877).
ccctgtactgcattaactt

SEQ ID NO: 772551 - DNA, 19 bp, Mus musculus
  siRNA target sequence for DXImx38e (NM_172372.1,926-944).
ccacatcttcgctcttaaa

SEQ ID NO: 772552 - DNA, 19 bp, Mus musculus
  siRNA target sequence for DXImx38e (NM_172372.1,985-1003).
gcaaagtgggacctatgat

SEQ ID NO: 772553 - DNA, 19 bp, Mus musculus
  siRNA target sequence for DXImx38e (NM_172372.1,986-1004).
caaagtgggacctatgatt

SEQ ID NO: 772554 - DNA, 19 bp, Mus musculus
  siRNA target sequence for DXImx38e (NM_172372.1,997-1015).
ctatgattgggcaatacgt

SEQ ID NO: 772555 - DNA, 19 bp, Mus musculus
  siRNA target sequence for DXImx38e (NM_172372.1,1028-1046).
gagcctggccagctttact

SEQ ID NO: 772556 - DNA, 19 bp, Mus musculus
  siRNA target sequence for DXImx38e (NM_172372.1,1070-1088).
ctgcgcctttggtcgaaat

SEQ ID NO: 772557 - DNA, 19 bp, Mus musculus
  siRNA target sequence for DXImx38e (NM_172372.1,1073-1091).
cgcctttggtcgaaatact

SEQ ID NO: 772558 - DNA, 19 bp, Mus musculus
  siRNA target sequence for DXImx38e (NM_172372.1,1097-1115).
gaatgtcaattctgtaatt

SEQ ID NO: 772559 - DNA, 19 bp, Mus musculus
  siRNA target sequence for LOC218805 (NM_172379.1,231-249).
ggagctgaaaggactaaca

SEQ ID NO: 772560 - DNA, 19 bp, Mus musculus
  siRNA target sequence for LOC218805 (NM_172379.1,248-266).
caaagcacgctcttaacca

SEQ ID NO: 772561 - DNA, 19 bp, Mus musculus
  siRNA target sequence for LOC218805 (NM_172379.1,283-301).
cgactggatgacatttcct

SEQ ID NO: 772562 - DNA, 19 bp, Mus musculus
  siRNA target sequence for LOC218805 (NM_172379.1,309-327).
caacagccatggaaaagat

SEQ ID NO: 772563 - DNA, 19 bp, Mus musculus
  siRNA target sequence for LOC218805 (NM_172379.1,332-350).
gttctcacagtgaatctga

SEQ ID NO: 772564 - DNA, 19 bp, Mus musculus
  siRNA target sequence for LOC218805 (NM_172379.1,357-375).
ccaagaatcacccattaca

SEQ ID NO: 772565 - DNA, 19 bp, Mus musculus
  siRNA target sequence for LOC218805 (NM_172379.1,358-376).
caagaatcacccattacat

SEQ ID NO: 772566 - DNA, 19 bp, Mus musculus
  siRNA target sequence for LOC218805 (NM_172379.1,380-398).
ctgacactgggaattcgaa

SEQ ID NO: 772567 - DNA, 19 bp, Mus musculus
  siRNA target sequence for LOC218805 (NM_172379.1,382-400).
gacactgggaattcgaatt

SEQ ID NO: 772568 - DNA, 19 bp, Mus musculus
  siRNA target sequence for LOC218805 (NM_172379.1,448-466).
ggcagctccgacttctctt

SEQ ID NO: 772569 - DNA, 19 bp, Mus musculus
  siRNA target sequence for LOC218805 (NM_172379.1,467-485).
ggggatatggtgaacttga

SEQ ID NO: 772570 - DNA, 19 bp, Mus musculus
  siRNA target sequence for LOC218805 (NM_172379.1,625-643).
ctgggtaggcagataatta

SEQ ID NO: 772571 - DNA, 19 bp, Mus musculus
  siRNA target sequence for LOC218805 (NM_172379.1,627-645).
gggtaggcagataattact

SEQ ID NO: 772572 - DNA, 19 bp, Mus musculus
  siRNA target sequence for LOC218805 (NM_172379.1,647-665).
cgagtgaaggctatggatt

SEQ ID NO: 772573 - DNA, 19 bp, Mus musculus
  siRNA target sequence for LOC218805 (NM_172379.1,650-668).
gtgaaggctatggattgta

SEQ ID NO: 772574 - DNA, 19 bp, Mus musculus
  siRNA target sequence for LOC218805 (NM_172379.1,745-763).
ggatttcatggaaacaaat

SEQ ID NO: 772575 - DNA, 19 bp, Mus musculus
  siRNA target sequence for LOC218805 (NM_172379.1,802-820).
cccattgcgccatttcact

SEQ ID NO: 772576 - DNA, 19 bp, Mus musculus
  siRNA target sequence for LOC218805 (NM_172379.1,1029-1047).
gtgtactaggcaaacacta

SEQ ID NO: 772577 - DNA, 19 bp, Mus musculus
  siRNA target sequence for 9630046K23Rik (NM_172380.1,100-118).
ctcaggctcaaaatggaaa

SEQ ID NO: 772578 - DNA, 19 bp, Mus musculus
  siRNA target sequence for 9630046K23Rik (NM_172380.1,104-122).
ggctcaaaatggaaagtat

SEQ ID NO: 772579 - DNA, 19 bp, Mus musculus
  siRNA target sequence for 9630046K23Rik (NM_172380.1,158-176).
gaaccatgttcaagtcaaa

SEQ ID NO: 772580 - DNA, 19 bp, Mus musculus
  siRNA target sequence for 9630046K23Rik (NM_172380.1,161-179).
ccatgttcaagtcaaaact

SEQ ID NO: 772581 - DNA, 19 bp, Mus musculus
  siRNA target sequence for 9630046K23Rik (NM_172380.1,186-204).
gctatcacggcgtcataga

SEQ ID NO: 772582 - DNA, 19 bp, Mus musculus
  siRNA target sequence for 9630046K23Rik (NM_172380.1,187-205).
ctatcacggcgtcatagaa

SEQ ID NO: 772583 - DNA, 19 bp, Mus musculus
  siRNA target sequence for 9630046K23Rik (NM_172380.1,342-360).
gtagtggcgtggaacactt

SEQ ID NO: 772584 - DNA, 19 bp, Mus musculus
  siRNA target sequence for 9630046K23Rik (NM_172380.1,345-363).
gtggcgtggaacactttat

SEQ ID NO: 772585 - DNA, 19 bp, Mus musculus
  siRNA target sequence for 9630046K23Rik (NM_172380.1,381-399).
gcctccctgacatggaaat

SEQ ID NO: 772586 - DNA, 19 bp, Mus musculus
  siRNA target sequence for 9630046K23Rik (NM_172380.1,387-405).
ctgacatggaaatggtaat

SEQ ID NO: 772587 - DNA, 19 bp, Mus musculus
  siRNA target sequence for 9630046K23Rik (NM_172380.1,406-424).
caatgtccgagattatcct

SEQ ID NO: 772588 - DNA, 19 bp, Mus musculus
  siRNA target sequence for 9630046K23Rik (NM_172380.1,423-441).
ctcaggttcctaaatggat

SEQ ID NO: 772589 - DNA, 19 bp, Mus musculus
  siRNA target sequence for 9630046K23Rik (NM_172380.1,458-476).
gtcttctccttcagtaaga

SEQ ID NO: 772590 - DNA, 19 bp, Mus musculus
  siRNA target sequence for 9630046K23Rik (NM_172380.1,460-478).
cttctccttcagtaagaca

SEQ ID NO: 772591 - DNA, 19 bp, Mus musculus
  siRNA target sequence for 9630046K23Rik (NM_172380.1,477-495).
catcggagtaccatgatat

SEQ ID NO: 772592 - DNA, 19 bp, Mus musculus
  siRNA target sequence for 9630046K23Rik (NM_172380.1,480-498).
cggagtaccatgatatcat

SEQ ID NO: 772593 - DNA, 19 bp, Mus musculus
  siRNA target sequence for 9630046K23Rik (NM_172380.1,482-500).
gagtaccatgatatcatgt

SEQ ID NO: 772594 - DNA, 19 bp, Mus musculus
  siRNA target sequence for 9630046K23Rik (NM_172380.1,484-502).
gtaccatgatatcatgtat

SEQ ID NO: 772595 - DNA, 19 bp, Mus musculus
  siRNA target sequence for 9630046K23Rik (NM_172380.1,499-517).
gtatcctgcgtggacattt

SEQ ID NO: 772596 - DNA, 19 bp, Mus musculus
  siRNA target sequence for 9630046K23Rik (NM_172380.1,536-554).
gtgtggccactttatccta

SEQ ID NO: 772597 - DNA, 19 bp, Mus musculus
  siRNA target sequence for 9630046K23Rik (NM_172380.1,608-626).
caatggccgtgggaaaaga

SEQ ID NO: 772598 - DNA, 19 bp, Mus musculus
  siRNA target sequence for 9630046K23Rik (NM_172380.1,612-630).
ggccgtgggaaaagaaaaa

SEQ ID NO: 772599 - DNA, 19 bp, Mus musculus
  siRNA target sequence for 9630046K23Rik (NM_172380.1,613-631).
gccgtgggaaaagaaaaat

SEQ ID NO: 772600 - DNA, 19 bp, Mus musculus
  siRNA target sequence for 9630046K23Rik (NM_172380.1,625-643).
gaaaaattctacagcatat

SEQ ID NO: 772601 - DNA, 19 bp, Mus musculus
  siRNA target sequence for 9630046K23Rik (NM_172380.1,658-676).
gacaagcccagaaagagat

SEQ ID NO: 772602 - DNA, 19 bp, Mus musculus
  siRNA target sequence for 9630046K23Rik (NM_172380.1,716-734).
gatgccgagtacaccaaaa

SEQ ID NO: 772603 - DNA, 19 bp, Mus musculus
  siRNA target sequence for 9630046K23Rik (NM_172380.1,720-738).
ccgagtacaccaaaaacca

SEQ ID NO: 772604 - DNA, 19 bp, Mus musculus
  siRNA target sequence for 9630046K23Rik (NM_172380.1,737-755).
caggcctggaagtctatga

SEQ ID NO: 772605 - DNA, 19 bp, Mus musculus
  siRNA target sequence for 9630046K23Rik (NM_172380.1,745-763).
gaagtctatgaaagatact

SEQ ID NO: 772606 - DNA, 19 bp, Mus musculus
  siRNA target sequence for 9630046K23Rik (NM_172380.1,774-792).
cagccgctaaggatgtaca

SEQ ID NO: 772607 - DNA, 19 bp, Mus musculus
  siRNA target sequence for 9630046K23Rik (NM_172380.1,784-802).
ggatgtacacctcatagat

SEQ ID NO: 772608 - DNA, 19 bp, Mus musculus
  siRNA target sequence for 9630046K23Rik (NM_172380.1,794-812).
ctcatagatcactgcaaat

SEQ ID NO: 772609 - DNA, 19 bp, Mus musculus
  siRNA target sequence for 9630046K23Rik (NM_172380.1,807-825).
gcaaatacagatacctatt

SEQ ID NO: 772610 - DNA, 19 bp, Mus musculus
  siRNA target sequence for 9630046K23Rik (NM_172380.1,846-864).
caagcttccggttcaaaca

SEQ ID NO: 772611 - DNA, 19 bp, Mus musculus
  siRNA target sequence for 9630046K23Rik (NM_172380.1,855-873).
ggttcaaacacctcttctt

SEQ ID NO: 772612 - DNA, 19 bp, Mus musculus
  siRNA target sequence for 9630046K23Rik (NM_172380.1,985-1003).
ggagctgttgcagtttgta

SEQ ID NO: 772613 - DNA, 19 bp, Mus musculus
  siRNA target sequence for 9630046K23Rik (NM_172380.1,986-1004).
gagctgttgcagtttgtaa

SEQ ID NO: 772614 - DNA, 19 bp, Mus musculus
  siRNA target sequence for 9630046K23Rik (NM_172380.1,997-1015).
gtttgtaaaagcgaatgat

SEQ ID NO: 772615 - DNA, 19 bp, Mus musculus
  siRNA target sequence for 9630046K23Rik (NM_172380.1,1001-1019).
gtaaaagcgaatgatgata

SEQ ID NO: 772616 - DNA, 19 bp, Mus musculus
  siRNA target sequence for 9630046K23Rik (NM_172380.1,1042-1060).
gggaagccagttcatcata

SEQ ID NO: 772617 - DNA, 19 bp, Mus musculus
  siRNA target sequence for 9630046K23Rik (NM_172380.1,1103-1121).
ctcttgactgactattcca

SEQ ID NO: 772618 - DNA, 19 bp, Mus musculus
  siRNA target sequence for 9630046K23Rik (NM_172380.1,1105-1123).
cttgactgactattccaaa

SEQ ID NO: 772619 - DNA, 19 bp, Mus musculus
  siRNA target sequence for 9630046K23Rik (NM_172380.1,1119-1137).
ccaaattcctgtcctataa

SEQ ID NO: 772620 - DNA, 19 bp, Mus musculus
  siRNA target sequence for 9630046K23Rik (NM_172380.1,1120-1138).
caaattcctgtcctataat

SEQ ID NO: 772621 - DNA, 19 bp, Mus musculus
  siRNA target sequence for 9630046K23Rik (NM_172380.1,1126-1144).
cctgtcctataatgtaaca

SEQ ID NO: 772622 - DNA, 19 bp, Mus musculus
  siRNA target sequence for 9630046K23Rik (NM_172380.1,1129-1147).
gtcctataatgtaacaaga

SEQ ID NO: 772623 - DNA, 19 bp, Mus musculus
  siRNA target sequence for AI314180 (NM_172381.2,253-271).
cagctcgaacgggtctttt

SEQ ID NO: 772624 - DNA, 19 bp, Mus musculus
  siRNA target sequence for AI314180 (NM_172381.2,255-273).
gctcgaacgggtcttttta

SEQ ID NO: 772625 - DNA, 19 bp, Mus musculus
  siRNA target sequence for AI314180 (NM_172381.2,258-276).
cgaacgggtctttttacga

SEQ ID NO: 772626 - DNA, 19 bp, Mus musculus
  siRNA target sequence for AI314180 (NM_172381.2,303-321).
gttacaaaatattatatct

SEQ ID NO: 772627 - DNA, 19 bp, Mus musculus
  siRNA target sequence for AI314180 (NM_172381.2,368-386).
gagtacggaaaaaagtaat

SEQ ID NO: 772628 - DNA, 19 bp, Mus musculus
  siRNA target sequence for AI314180 (NM_172381.2,403-421).
ctgaataaacgtataaaaa

SEQ ID NO: 772629 - DNA, 19 bp, Mus musculus
  siRNA target sequence for AI314180 (NM_172381.2,438-456).
gcttccagtagaaacacta

SEQ ID NO: 772630 - DNA, 19 bp, Mus musculus
  siRNA target sequence for AI314180 (NM_172381.2,443-461).
cagtagaaacactattggt

SEQ ID NO: 772631 - DNA, 19 bp, Mus musculus
  siRNA target sequence for AI314180 (NM_172381.2,484-502).
gtttcctttgtcacgaatt

SEQ ID NO: 772632 - DNA, 19 bp, Mus musculus
  siRNA target sequence for AI314180 (NM_172381.2,489-507).
ctttgtcacgaattttact

SEQ ID NO: 772633 - DNA, 19 bp, Mus musculus
  siRNA target sequence for AI314180 (NM_172381.2,493-511).
gtcacgaattttactataa

SEQ ID NO: 772634 - DNA, 19 bp, Mus musculus
  siRNA target sequence for AI314180 (NM_172381.2,495-513).
cacgaattttactataatt

SEQ ID NO: 772635 - DNA, 19 bp, Mus musculus
  siRNA target sequence for AI314180 (NM_172381.2,497-515).
cgaattttactataattta

SEQ ID NO: 772636 - DNA, 19 bp, Mus musculus
  siRNA target sequence for AI314180 (NM_172381.2,533-551).
ctcgcctgccagtggaaaa

SEQ ID NO: 772637 - DNA, 19 bp, Mus musculus
  siRNA target sequence for AI314180 (NM_172381.2,540-558).
gccagtggaaaaacaatgt

SEQ ID NO: 772638 - DNA, 19 bp, Mus musculus
  siRNA target sequence for AI314180 (NM_172381.2,562-580).
ctggcccctacgcttctta

SEQ ID NO: 772639 - DNA, 19 bp, Mus musculus
  siRNA target sequence for AI314180 (NM_172381.2,564-582).
ggcccctacgcttcttact

SEQ ID NO: 772640 - DNA, 19 bp, Mus musculus
  siRNA target sequence for AI314180 (NM_172381.2,603-621).
gccacagcaggatagctta

SEQ ID NO: 772641 - DNA, 19 bp, Mus musculus
  siRNA target sequence for AI314180 (NM_172381.2,604-622).
ccacagcaggatagcttaa

SEQ ID NO: 772642 - DNA, 19 bp, Mus musculus
  siRNA target sequence for AI314180 (NM_172381.2,605-623).
cacagcaggatagcttaat

SEQ ID NO: 772643 - DNA, 19 bp, Mus musculus
  siRNA target sequence for AI314180 (NM_172381.2,609-627).
gcaggatagcttaatgcat

SEQ ID NO: 772644 - DNA, 19 bp, Mus musculus
  siRNA target sequence for AI314180 (NM_172381.2,613-631).
gatagcttaatgcatcttt

SEQ ID NO: 772645 - DNA, 19 bp, Mus musculus
  siRNA target sequence for AI314180 (NM_172381.2,641-659).
ctctttttcacatgaagta

SEQ ID NO: 772646 - DNA, 19 bp, Mus musculus
  siRNA target sequence for AI314180 (NM_172381.2,654-672).
gaagtacccggctgaatca

SEQ ID NO: 772647 - DNA, 19 bp, Mus musculus
  siRNA target sequence for AI314180 (NM_172381.2,657-675).
gtacccggctgaatcatca

SEQ ID NO: 772648 - DNA, 19 bp, Mus musculus
  siRNA target sequence for AI314180 (NM_172381.2,726-744).
gctcttggactttatgcta

SEQ ID NO: 772649 - DNA, 19 bp, Mus musculus
  siRNA target sequence for AI314180 (NM_172381.2,759-777).
gccttacggatatgtgtta

SEQ ID NO: 772650 - DNA, 19 bp, Mus musculus
  siRNA target sequence for AI314180 (NM_172381.2,760-778).
ccttacggatatgtgttaa

SEQ ID NO: 772651 - DNA, 19 bp, Mus musculus
  siRNA target sequence for AI314180 (NM_172381.2,761-779).
cttacggatatgtgttaaa

SEQ ID NO: 772652 - DNA, 19 bp, Mus musculus
  siRNA target sequence for AI314180 (NM_172381.2,765-783).
cggatatgtgttaaatgaa

SEQ ID NO: 772653 - DNA, 19 bp, Mus musculus
  siRNA target sequence for AI314180 (NM_172381.2,793-811).
cgccaaaattcatcatcat

SEQ ID NO: 772654 - DNA, 19 bp, Mus musculus
  siRNA target sequence for AI314180 (NM_172381.2,817-835).
cagggttcttcttcaaaca

SEQ ID NO: 772655 - DNA, 19 bp, Mus musculus
  siRNA target sequence for AI314180 (NM_172381.2,865-883).
cccccaggaatgagctttt

SEQ ID NO: 772656 - DNA, 19 bp, Mus musculus
  siRNA target sequence for AI314180 (NM_172381.2,866-884).
ccccaggaatgagctttta

SEQ ID NO: 772657 - DNA, 19 bp, Mus musculus
  siRNA target sequence for AI314180 (NM_172381.2,867-885).
cccaggaatgagcttttat

SEQ ID NO: 772658 - DNA, 19 bp, Mus musculus
  siRNA target sequence for AI314180 (NM_172381.2,876-894).
gagcttttatgcagctaaa

SEQ ID NO: 772659 - DNA, 19 bp, Mus musculus
  siRNA target sequence for AI314180 (NM_172381.2,914-932).
cgtggacacctgaacagtt

SEQ ID NO: 772660 - DNA, 19 bp, Mus musculus
  siRNA target sequence for AI314180 (NM_172381.2,928-946).
cagttggaacagtgcaaat

SEQ ID NO: 772661 - DNA, 19 bp, Mus musculus
  siRNA target sequence for AI314180 (NM_172381.2,948-966).
gggtatagtgaagttcata

SEQ ID NO: 772662 - DNA, 19 bp, Mus musculus
  siRNA target sequence for AI314180 (NM_172381.2,1005-1023).
cctggtgattgcttctagt

SEQ ID NO: 772663 - DNA, 19 bp, Mus musculus
  siRNA target sequence for AI314180 (NM_172381.2,1079-1097).
gcttaattgactggaataa

SEQ ID NO: 772664 - DNA, 19 bp, Mus musculus
  siRNA target sequence for AI314180 (NM_172381.2,1092-1110).
gaataaccctgccatcatt

SEQ ID NO: 772665 - DNA, 19 bp, Mus musculus
  siRNA target sequence for AI314180 (NM_172381.2,1099-1117).
cctgccatcattaataaga

SEQ ID NO: 772666 - DNA, 19 bp, Mus musculus
  siRNA target sequence for AI314180 (NM_172381.2,1102-1120).
gccatcattaataagatgt

SEQ ID NO: 772667 - DNA, 19 bp, Mus musculus
  siRNA target sequence for AI314180 (NM_172381.2,1125-1143).
ggtgtaccttggggatata

SEQ ID NO: 772668 - DNA, 19 bp, Mus musculus
  siRNA target sequence for AI314180 (NM_172381.2,1171-1189).
ctaaagccggagctgaaaa

SEQ ID NO: 772669 - DNA, 19 bp, Mus musculus
  siRNA target sequence for AI314180 (NM_172381.2,1200-1218).
cagtactagagtgaagtta

SEQ ID NO: 772670 - DNA, 19 bp, Mus musculus
  siRNA target sequence for AI314180 (NM_172381.2,1202-1220).
gtactagagtgaagttaaa

SEQ ID NO: 772671 - DNA, 19 bp, Mus musculus
  siRNA target sequence for AI314180 (NM_172381.2,1262-1280).
cgttcccagctaacattca

SEQ ID NO: 772672 - DNA, 19 bp, Mus musculus
  siRNA target sequence for AI314180 (NM_172381.2,1271-1289).
ctaacattcaggtggtata

SEQ ID NO: 772673 - DNA, 19 bp, Mus musculus
  siRNA target sequence for AI314180 (NM_172381.2,1284-1302).
ggtatatgatggacttttt

SEQ ID NO: 772674 - DNA, 19 bp, Mus musculus
  siRNA target sequence for AI314180 (NM_172381.2,1294-1312).
ggactttttggtacaaata

SEQ ID NO: 772675 - DNA, 19 bp, Mus musculus
  siRNA target sequence for AI314180 (NM_172381.2,1328-1346).
gaacactgtccctgcaatt

SEQ ID NO: 772676 - DNA, 19 bp, Mus musculus
  siRNA target sequence for AI314180 (NM_172381.2,1335-1353).
gtccctgcaatttgtacat

SEQ ID NO: 772677 - DNA, 19 bp, Mus musculus
  siRNA target sequence for AI314180 (NM_172381.2,1351-1369).
catcacatttgtttaactt

SEQ ID NO: 772678 - DNA, 19 bp, Mus musculus
  siRNA target sequence for AI314180 (NM_172381.2,1367-1385).
cttgcccagaaatcaagat

SEQ ID NO: 772679 - DNA, 19 bp, Mus musculus
  siRNA target sequence for AI314180 (NM_172381.2,1370-1388).
gcccagaaatcaagattaa

SEQ ID NO: 772680 - DNA, 19 bp, Mus musculus
  siRNA target sequence for AI314180 (NM_172381.2,1415-1433).
gtctcactaagctaataaa

SEQ ID NO: 772681 - DNA, 19 bp, Mus musculus
  siRNA target sequence for AI314180 (NM_172381.2,1494-1512).
cagtcgaatgccccattta

SEQ ID NO: 772682 - DNA, 19 bp, Mus musculus
  siRNA target sequence for AI314180 (NM_172381.2,1496-1514).
gtcgaatgccccatttatt

SEQ ID NO: 772683 - DNA, 19 bp, Mus musculus
  siRNA target sequence for AI314180 (NM_172381.2,1498-1516).
cgaatgccccatttattca

SEQ ID NO: 772684 - DNA, 19 bp, Mus musculus
  siRNA target sequence for AI314180 (NM_172381.2,1571-1589).
cggagactcggcttgctat

SEQ ID NO: 772685 - DNA, 19 bp, Mus musculus
  siRNA target sequence for AI314180 (NM_172381.2,1572-1590).
ggagactcggcttgctatt

SEQ ID NO: 772686 - DNA, 19 bp, Mus musculus
  siRNA target sequence for AI314180 (NM_172381.2,1660-1678).
gcacttgtagcttcatact

SEQ ID NO: 772687 - DNA, 19 bp, Mus musculus
  siRNA target sequence for AI314180 (NM_172381.2,1661-1679).
cacttgtagcttcatactt

SEQ ID NO: 772688 - DNA, 19 bp, Mus musculus
  siRNA target sequence for AI314180 (NM_172381.2,1663-1681).
cttgtagcttcatacttaa

SEQ ID NO: 772689 - DNA, 19 bp, Mus musculus
  siRNA target sequence for AI314180 (NM_172381.2,1666-1684).
gtagcttcatacttaataa

SEQ ID NO: 772690 - DNA, 19 bp, Mus musculus
  siRNA target sequence for AI314180 (NM_172381.2,1677-1695).
cttaataaagcctgaagtt

SEQ ID NO: 772691 - DNA, 19 bp, Mus musculus
  siRNA target sequence for AI314180 (NM_172381.2,1702-1720).
cggcaagttgcagtgaaat

SEQ ID NO: 772692 - DNA, 19 bp, Mus musculus
  siRNA target sequence for AI314180 (NM_172381.2,1734-1752).
gtttccctcagatcatata

SEQ ID NO: 772693 - DNA, 19 bp, Mus musculus
  siRNA target sequence for AI314180 (NM_172381.2,1813-1831).
gcacagcgcgtattacgat

SEQ ID NO: 772694 - DNA, 19 bp, Mus musculus
  siRNA target sequence for AI314180 (NM_172381.2,1818-1836).
gcgcgtattacgatgtctt

SEQ ID NO: 772695 - DNA, 19 bp, Mus musculus
  siRNA target sequence for AI314180 (NM_172381.2,1880-1898).
cttttccagaaatggtata

SEQ ID NO: 772696 - DNA, 19 bp, Mus musculus
  siRNA target sequence for AI314180 (NM_172381.2,1893-1911).
ggtatattacattcaagaa

SEQ ID NO: 772697 - DNA, 19 bp, Mus musculus
  siRNA target sequence for AI314180 (NM_172381.2,1894-1912).
gtatattacattcaagaaa

SEQ ID NO: 772698 - DNA, 19 bp, Mus musculus
  siRNA target sequence for AI314180 (NM_172381.2,1915-1933).
gcttcccatcgaatgaaaa

SEQ ID NO: 772699 - DNA, 19 bp, Mus musculus
  siRNA target sequence for AI314180 (NM_172381.2,2085-2103).
ggctattggacggtacata

SEQ ID NO: 772700 - DNA, 19 bp, Mus musculus
  siRNA target sequence for AI314180 (NM_172381.2,2096-2114).
ggtacatacgggctttgat

SEQ ID NO: 772701 - DNA, 19 bp, Mus musculus
  siRNA target sequence for AI314180 (NM_172381.2,2124-2142).
ccaggcgacagcttcatct

SEQ ID NO: 772702 - DNA, 19 bp, Mus musculus
  siRNA target sequence for AI314180 (NM_172381.2,2134-2152).
gcttcatcttctaataaga

SEQ ID NO: 772703 - DNA, 19 bp, Mus musculus
  siRNA target sequence for AI314180 (NM_172381.2,2162-2180).
ccaaccctgttcagatcta

SEQ ID NO: 772704 - DNA, 19 bp, Mus musculus
  siRNA target sequence for AI314180 (NM_172381.2,2218-2236).
ggtttgccagtcatgtact

SEQ ID NO: 772705 - DNA, 19 bp, Mus musculus
  siRNA target sequence for AI314180 (NM_172381.2,2229-2247).
catgtactgtctattggaa

SEQ ID NO: 772706 - DNA, 19 bp, Mus musculus
  siRNA target sequence for AI314180 (NM_172381.2,2255-2273).
cagtgtatccagaaaaatt

SEQ ID NO: 772707 - DNA, 19 bp, Mus musculus
  siRNA target sequence for AI314180 (NM_172381.2,2276-2294).
ctaccaaatttgtagacaa

SEQ ID NO: 772708 - DNA, 19 bp, Mus musculus
  siRNA target sequence for AI314180 (NM_172381.2,2342-2360).
gtgaattggcggctttgtt

SEQ ID NO: 772709 - DNA, 19 bp, Mus musculus
  siRNA target sequence for AI314180 (NM_172381.2,2344-2362).
gaattggcggctttgtttt

SEQ ID NO: 772710 - DNA, 19 bp, Mus musculus
  siRNA target sequence for AI314180 (NM_172381.2,2383-2401).
gtgtccggaattgagttaa

SEQ ID NO: 772711 - DNA, 19 bp, Mus musculus
  siRNA target sequence for AI314180 (NM_172381.2,2388-2406).
cggaattgagttaaagtca

SEQ ID NO: 772712 - DNA, 19 bp, Mus musculus
  siRNA target sequence for AI314180 (NM_172381.2,2390-2408).
gaattgagttaaagtcaat

SEQ ID NO: 772713 - DNA, 19 bp, Mus musculus
  siRNA target sequence for AI314180 (NM_172381.2,2495-2513).
gaagatacttggctaagaa

SEQ ID NO: 772714 - DNA, 19 bp, Mus musculus
  siRNA target sequence for AI314180 (NM_172381.2,2603-2621).
caataggttcatttttaga

SEQ ID NO: 772715 - DNA, 19 bp, Mus musculus
  siRNA target sequence for AI314180 (NM_172381.2,2664-2682).
gggtgaaatcggcagaaat

SEQ ID NO: 772716 - DNA, 19 bp, Mus musculus
  siRNA target sequence for AI314180 (NM_172381.2,2704-2722).
gaagggtctggatttacta

SEQ ID NO: 772717 - DNA, 19 bp, Mus musculus
  siRNA target sequence for AI314180 (NM_172381.2,2727-2745).
gcacctcgtagaaagctta

SEQ ID NO: 772718 - DNA, 19 bp, Mus musculus
  siRNA target sequence for AI314180 (NM_172381.2,2731-2749).
ctcgtagaaagcttactca

SEQ ID NO: 772719 - DNA, 19 bp, Mus musculus
  siRNA target sequence for AI314180 (NM_172381.2,2753-2771).
gaattccgtctagtaaaga

SEQ ID NO: 772720 - DNA, 19 bp, Mus musculus
  siRNA target sequence for AI314180 (NM_172381.2,2922-2940).
cattaccagtgctgcaata

SEQ ID NO: 772721 - DNA, 19 bp, Mus musculus
  siRNA target sequence for AI314180 (NM_172381.2,2930-2948).
gtgctgcaataggaactaa

SEQ ID NO: 772722 - DNA, 19 bp, Mus musculus
  siRNA target sequence for AI314180 (NM_172381.2,3030-3048).
cccatgggttttagatgtt

SEQ ID NO: 772723 - DNA, 19 bp, Mus musculus
  siRNA target sequence for AI314180 (NM_172381.2,3031-3049).
ccatgggttttagatgtta

SEQ ID NO: 772724 - DNA, 19 bp, Mus musculus
  siRNA target sequence for AI314180 (NM_172381.2,3145-3163).
gaagtgaagtcccatctta

SEQ ID NO: 772725 - DNA, 19 bp, Mus musculus
  siRNA target sequence for AI314180 (NM_172381.2,3184-3202).
gtttcagttctgtcagaaa

SEQ ID NO: 772726 - DNA, 19 bp, Mus musculus
  siRNA target sequence for AI314180 (NM_172381.2,3236-3254).
ggcttgggttggtttatga

SEQ ID NO: 772727 - DNA, 19 bp, Mus musculus
  siRNA target sequence for AI314180 (NM_172381.2,3285-3303).
ggtgtctacacttgtagaa

SEQ ID NO: 772728 - DNA, 19 bp, Mus musculus
  siRNA target sequence for AI314180 (NM_172381.2,3286-3304).
gtgtctacacttgtagaaa

SEQ ID NO: 772729 - DNA, 19 bp, Mus musculus
  siRNA target sequence for AI314180 (NM_172381.2,3290-3308).
ctacacttgtagaaacact

SEQ ID NO: 772730 - DNA, 19 bp, Mus musculus
  siRNA target sequence for AI314180 (NM_172381.2,3293-3311).
cacttgtagaaacacttat

SEQ ID NO: 772731 - DNA, 19 bp, Mus musculus
  siRNA target sequence for AI314180 (NM_172381.2,3344-3362).
gagagacagtggtatttca

SEQ ID NO: 772732 - DNA, 19 bp, Mus musculus
  siRNA target sequence for AI314180 (NM_172381.2,3447-3465).
gccagatctggtatataaa

SEQ ID NO: 772733 - DNA, 19 bp, Mus musculus
  siRNA target sequence for AI314180 (NM_172381.2,3448-3466).
ccagatctggtatataaat

SEQ ID NO: 772734 - DNA, 19 bp, Mus musculus
  siRNA target sequence for AI314180 (NM_172381.2,3449-3467).
cagatctggtatataaatt

SEQ ID NO: 772735 - DNA, 19 bp, Mus musculus
  siRNA target sequence for AI314180 (NM_172381.2,3451-3469).
gatctggtatataaattta

SEQ ID NO: 772736 - DNA, 19 bp, Mus musculus
  siRNA target sequence for AI314180 (NM_172381.2,3471-3489).
gaatctggcaaatcatcat

SEQ ID NO: 772737 - DNA, 19 bp, Mus musculus
  siRNA target sequence for AI314180 (NM_172381.2,3583-3601).
gttcctcgcctttatcgat

SEQ ID NO: 772738 - DNA, 19 bp, Mus musculus
  siRNA target sequence for AI314180 (NM_172381.2,3634-3652).
gctatgacaagcatttgga

SEQ ID NO: 772739 - DNA, 19 bp, Mus musculus
  siRNA target sequence for AI314180 (NM_172381.2,3669-3687).
caagtcaatggtggataaa

SEQ ID NO: 772740 - DNA, 19 bp, Mus musculus
  siRNA target sequence for AI314180 (NM_172381.2,3674-3692).
caatggtggataaatattt

SEQ ID NO: 772741 - DNA, 19 bp, Mus musculus
  siRNA target sequence for AI314180 (NM_172381.2,3783-3801).
gagaggaagacctttagat

SEQ ID NO: 772742 - DNA, 19 bp, Mus musculus
  siRNA target sequence for AI314180 (NM_172381.2,3902-3920).
ctctgagcaaggtttgtgt

SEQ ID NO: 772743 - DNA, 19 bp, Mus musculus
  siRNA target sequence for AI314180 (NM_172381.2,3988-4006).
ctggacaaaggaatgatga

SEQ ID NO: 772744 - DNA, 19 bp, Mus musculus
  siRNA target sequence for AI314180 (NM_172381.2,4021-4039).
gtccgagccctcagcatta

SEQ ID NO: 772745 - DNA, 19 bp, Mus musculus
  siRNA target sequence for AI314180 (NM_172381.2,4024-4042).
cgagccctcagcattaaca

SEQ ID NO: 772746 - DNA, 19 bp, Mus musculus
  siRNA target sequence for AI314180 (NM_172381.2,4064-4082).
gtgcaggagccatgttgaa

SEQ ID NO: 772747 - DNA, 19 bp, Mus musculus
  siRNA target sequence for AI314180 (NM_172381.2,4085-4103).
cacacgcacccaaactcat

SEQ ID NO: 772748 - DNA, 19 bp, Mus musculus
  siRNA target sequence for AI314180 (NM_172381.2,4137-4155).
gcctcaagttctcaattat

SEQ ID NO: 772749 - DNA, 19 bp, Mus musculus
  siRNA target sequence for AI314180 (NM_172381.2,4251-4269).
gtgcctgcaatatcttgat

SEQ ID NO: 772750 - DNA, 19 bp, Mus musculus
  siRNA target sequence for AI314180 (NM_172381.2,4253-4271).
gcctgcaatatcttgatgt

SEQ ID NO: 772751 - DNA, 19 bp, Mus musculus
  siRNA target sequence for AI314180 (NM_172381.2,4274-4292).
cggtgctaggtgaactagt

SEQ ID NO: 772752 - DNA, 19 bp, Mus musculus
  siRNA target sequence for AI314180 (NM_172381.2,4275-4293).
ggtgctaggtgaactagtt

SEQ ID NO: 772753 - DNA, 19 bp, Mus musculus
  siRNA target sequence for AI314180 (NM_172381.2,4353-4371).
cagtgtcatcgtgtcttta

SEQ ID NO: 772754 - DNA, 19 bp, Mus musculus
  siRNA target sequence for AI314180 (NM_172381.2,4359-4377).
catcgtgtctttaactact

SEQ ID NO: 772755 - DNA, 19 bp, Mus musculus
  siRNA target sequence for AI314180 (NM_172381.2,4389-4407).
ggacctgacaccttactca

SEQ ID NO: 772756 - DNA, 19 bp, Mus musculus
  siRNA target sequence for AI314180 (NM_172381.2,4395-4413).
gacaccttactcaggtaaa

SEQ ID NO: 772757 - DNA, 19 bp, Mus musculus
  siRNA target sequence for AI314180 (NM_172381.2,4397-4415).
caccttactcaggtaaact

SEQ ID NO: 772758 - DNA, 19 bp, Mus musculus
  siRNA target sequence for AI314180 (NM_172381.2,4399-4417).
ccttactcaggtaaactta

SEQ ID NO: 772759 - DNA, 19 bp, Mus musculus
  siRNA target sequence for AI314180 (NM_172381.2,4400-4418).
cttactcaggtaaacttat

SEQ ID NO: 772760 - DNA, 19 bp, Mus musculus
  siRNA target sequence for AI314180 (NM_172381.2,4442-4460).
cagatcggaacagtgtaat

SEQ ID NO: 772761 - DNA, 19 bp, Mus musculus
  siRNA target sequence for AI314180 (NM_172381.2,4564-4582).
gatgaacctgtctataaga

SEQ ID NO: 772762 - DNA, 19 bp, Mus musculus
  siRNA target sequence for AI314180 (NM_172381.2,4581-4599).
gacgtcttgtgctttgaca

SEQ ID NO: 772763 - DNA, 19 bp, Mus musculus
  siRNA target sequence for AI314180 (NM_172381.2,4583-4601).
cgtcttgtgctttgacaat

SEQ ID NO: 772764 - DNA, 19 bp, Mus musculus
  siRNA target sequence for AI314180 (NM_172381.2,4596-4614).
gacaattcatgcaattgga

SEQ ID NO: 772765 - DNA, 19 bp, Mus musculus
  siRNA target sequence for AI314180 (NM_172381.2,4616-4634).
gatacagcccagatgtatt

SEQ ID NO: 772766 - DNA, 19 bp, Mus musculus
  siRNA target sequence for AI314180 (NM_172381.2,4651-4669).
gaagttctgcccttagcat

SEQ ID NO: 772767 - DNA, 19 bp, Mus musculus
  siRNA target sequence for AI314180 (NM_172381.2,4761-4779).
ctcctttggaggtattcga

SEQ ID NO: 772768 - DNA, 19 bp, Mus musculus
  siRNA target sequence for AI314180 (NM_172381.2,4763-4781).
cctttggaggtattcgatt

SEQ ID NO: 772769 - DNA, 19 bp, Mus musculus
  siRNA target sequence for AI314180 (NM_172381.2,4782-4800).
gtacctgcaggaattgatt

SEQ ID NO: 772770 - DNA, 19 bp, Mus musculus
  siRNA target sequence for AI314180 (NM_172381.2,4785-4803).
cctgcaggaattgattact

SEQ ID NO: 772771 - DNA, 19 bp, Mus musculus
  siRNA target sequence for AI314180 (NM_172381.2,4786-4804).
ctgcaggaattgattacta

SEQ ID NO: 772772 - DNA, 19 bp, Mus musculus
  siRNA target sequence for AI314180 (NM_172381.2,4789-4807).
caggaattgattactatta

SEQ ID NO: 772773 - DNA, 19 bp, Mus musculus
  siRNA target sequence for AI314180 (NM_172381.2,4809-4827).
ccagaaggctttacaatca

SEQ ID NO: 772774 - DNA, 19 bp, Mus musculus
  siRNA target sequence for AI314180 (NM_172381.2,4812-4830).
gaaggctttacaatcacaa

SEQ ID NO: 772775 - DNA, 19 bp, Mus musculus
  siRNA target sequence for AI314180 (NM_172381.2,4815-4833).
ggctttacaatcacaatct

SEQ ID NO: 772776 - DNA, 19 bp, Mus musculus
  siRNA target sequence for AI314180 (NM_172381.2,4842-4860).
gaaagcccagggtgcaatt

SEQ ID NO: 772777 - DNA, 19 bp, Mus musculus
  siRNA target sequence for AI314180 (NM_172381.2,4846-4864).
gcccagggtgcaattgcta

SEQ ID NO: 772778 - DNA, 19 bp, Mus musculus
  siRNA target sequence for AI314180 (NM_172381.2,4856-4874).
caattgctatggcatcaat

SEQ ID NO: 772779 - DNA, 19 bp, Mus musculus
  siRNA target sequence for AI314180 (NM_172381.2,4861-4879).
gctatggcatcaatttcaa

SEQ ID NO: 772780 - DNA, 19 bp, Mus musculus
  siRNA target sequence for AI314180 (NM_172381.2,5009-5027).
gcagtacagagttggaaaa

SEQ ID NO: 772781 - DNA, 19 bp, Mus musculus
  siRNA target sequence for AI314180 (NM_172381.2,5048-5066).
ccacaaatgaaattcttca

SEQ ID NO: 772782 - DNA, 19 bp, Mus musculus
  siRNA target sequence for AI314180 (NM_172381.2,5087-5105).
gcaaagagaatctcaaata

SEQ ID NO: 772783 - DNA, 19 bp, Mus musculus
  siRNA target sequence for AI314180 (NM_172381.2,5094-5112).
gaatctcaaatataagatt

SEQ ID NO: 772784 - DNA, 19 bp, Mus musculus
  siRNA target sequence for AI314180 (NM_172381.2,5123-5141).
gctgtgcagctgatgtttt

SEQ ID NO: 772785 - DNA, 19 bp, Mus musculus
  siRNA target sequence for AI314180 (NM_172381.2,5126-5144).
gtgcagctgatgttttgaa

SEQ ID NO: 772786 - DNA, 19 bp, Mus musculus
  siRNA target sequence for AI314180 (NM_172381.2,5333-5351).
cagacacccaacgttgtta

SEQ ID NO: 772787 - DNA, 19 bp, Mus musculus
  siRNA target sequence for AI314180 (NM_172381.2,5429-5447).
caatgaacgcctttttcca

SEQ ID NO: 772788 - DNA, 19 bp, Mus musculus
  siRNA target sequence for AI314180 (NM_172381.2,5438-5456).
cctttttccaggggttaat

SEQ ID NO: 772789 - DNA, 19 bp, Mus musculus
  siRNA target sequence for AI314180 (NM_172381.2,5508-5526).
cgaaacatgcaaatcaatt

SEQ ID NO: 772790 - DNA, 19 bp, Mus musculus
  siRNA target sequence for AI314180 (NM_172381.2,5509-5527).
gaaacatgcaaatcaatta

SEQ ID NO: 772791 - DNA, 19 bp, Mus musculus
  siRNA target sequence for AI314180 (NM_172381.2,5522-5540).
caattacttactctttaga

SEQ ID NO: 772792 - DNA, 19 bp, Mus musculus
  siRNA target sequence for AI314180 (NM_172381.2,5583-5601).
ggtagaattactgcttaaa

SEQ ID NO: 772793 - DNA, 19 bp, Mus musculus
  siRNA target sequence for AI314180 (NM_172381.2,5584-5602).
gtagaattactgcttaaaa

SEQ ID NO: 772794 - DNA, 19 bp, Mus musculus
  siRNA target sequence for AI314180 (NM_172381.2,5614-5632).
gctaaacaatgggaaagtt

SEQ ID NO: 772795 - DNA, 19 bp, Mus musculus
  siRNA target sequence for AI314180 (NM_172381.2,5615-5633).
ctaaacaatgggaaagttt

SEQ ID NO: 772796 - DNA, 19 bp, Mus musculus
  siRNA target sequence for AI314180 (NM_172381.2,5707-5725).
gagaaagcctcagtattga

SEQ ID NO: 772797 - DNA, 19 bp, Mus musculus
  siRNA target sequence for Jmjd2 (NM_172382.1,126-144).
cccagtgctcggatcatga

SEQ ID NO: 772798 - DNA, 19 bp, Mus musculus
  siRNA target sequence for Jmjd2 (NM_172382.1,132-150).
gctcggatcatgacctttt

SEQ ID NO: 772799 - DNA, 19 bp, Mus musculus
  siRNA target sequence for Jmjd2 (NM_172382.1,133-151).
ctcggatcatgacctttta

SEQ ID NO: 772800 - DNA, 19 bp, Mus musculus
  siRNA target sequence for Jmjd2 (NM_172382.1,173-191).
gaacttcagccgctacatt

SEQ ID NO: 772801 - DNA, 19 bp, Mus musculus
  siRNA target sequence for Jmjd2 (NM_172382.1,182-200).
ccgctacattgcctacatt

SEQ ID NO: 772802 - DNA, 19 bp, Mus musculus
  siRNA target sequence for Jmjd2 (NM_172382.1,265-283).
gaacatcctacgacgatat

SEQ ID NO: 772803 - DNA, 19 bp, Mus musculus
  siRNA target sequence for Jmjd2 (NM_172382.1,268-286).
catcctacgacgatattga

SEQ ID NO: 772804 - DNA, 19 bp, Mus musculus
  siRNA target sequence for Jmjd2 (NM_172382.1,275-293).
cgacgatattgatgatcta

SEQ ID NO: 772805 - DNA, 19 bp, Mus musculus
  siRNA target sequence for Jmjd2 (NM_172382.1,341-359).
cttcactcagtacaacata

SEQ ID NO: 772806 - DNA, 19 bp, Mus musculus
  siRNA target sequence for Jmjd2 (NM_172382.1,424-442).
cgcgatacagtgaatttga

SEQ ID NO: 772807 - DNA, 19 bp, Mus musculus
  siRNA target sequence for Jmjd2 (NM_172382.1,425-443).
gcgatacagtgaatttgaa

SEQ ID NO: 772808 - DNA, 19 bp, Mus musculus
  siRNA target sequence for Jmjd2 (NM_172382.1,441-459).
gaagaacttgagcgtaaat

SEQ ID NO: 772809 - DNA, 19 bp, Mus musculus
  siRNA target sequence for Jmjd2 (NM_172382.1,495-513).
ggagcagacgtgaatggta

SEQ ID NO: 772810 - DNA, 19 bp, Mus musculus
  siRNA target sequence for Jmjd2 (NM_172382.1,503-521).
cgtgaatggtactctctat

SEQ ID NO: 772811 - DNA, 19 bp, Mus musculus
  siRNA target sequence for Jmjd2 (NM_172382.1,506-524).
gaatggtactctctatgaa

SEQ ID NO: 772812 - DNA, 19 bp, Mus musculus
  siRNA target sequence for Jmjd2 (NM_172382.1,701-719).
cttcggagagccaaagtct

SEQ ID NO: 772813 - DNA, 19 bp, Mus musculus
  siRNA target sequence for Jmjd2 (NM_172382.1,760-778).
gtcttgccaaaggcttttt

SEQ ID NO: 772814 - DNA, 19 bp, Mus musculus
  siRNA target sequence for Jmjd2 (NM_172382.1,826-844).
ccctgatctccccattaat

SEQ ID NO: 772815 - DNA, 19 bp, Mus musculus
  siRNA target sequence for Jmjd2 (NM_172382.1,976-994).
cccgtcggtggattgagta

SEQ ID NO: 772816 - DNA, 19 bp, Mus musculus
  siRNA target sequence for Jmjd2 (NM_172382.1,977-995).
ccgtcggtggattgagtat

SEQ ID NO: 772817 - DNA, 19 bp, Mus musculus
  siRNA target sequence for Jmjd2 (NM_172382.1,1070-1088).
ccagccggaacgctacaaa

SEQ ID NO: 772818 - DNA, 19 bp, Mus musculus
  siRNA target sequence for Jmjd2 (NM_172382.1,1073-1091).
gccggaacgctacaaactt

SEQ ID NO: 772819 - DNA, 19 bp, Mus musculus
  siRNA target sequence for Jmjd2 (NM_172382.1,1272-1290).
catcggatcgggacaaaga

SEQ ID NO: 772820 - DNA, 19 bp, Mus musculus
  siRNA target sequence for Jmjd2 (NM_172382.1,1355-1373).
gctaagttctggacagtat

SEQ ID NO: 772821 - DNA, 19 bp, Mus musculus
  siRNA target sequence for Jmjd2 (NM_172382.1,1423-1441).
gctccgtgcggcaagttga

SEQ ID NO: 772822 - DNA, 19 bp, Mus musculus
  siRNA target sequence for Jmjd2 (NM_172382.1,1595-1613).
cgtcttctcgggttccaaa

SEQ ID NO: 772823 - DNA, 19 bp, Mus musculus
  siRNA target sequence for Jmjd2 (NM_172382.1,1828-1846).
cagaggttgcagatgagta

SEQ ID NO: 772824 - DNA, 19 bp, Mus musculus
  siRNA target sequence for Jmjd2 (NM_172382.1,1836-1854).
gcagatgagtacatgcttt

SEQ ID NO: 772825 - DNA, 19 bp, Mus musculus
  siRNA target sequence for Jmjd2 (NM_172382.1,1851-1869).
ctttccctggaggagaata

SEQ ID NO: 772826 - DNA, 19 bp, Mus musculus
  siRNA target sequence for Jmjd2 (NM_172382.1,2033-2051).
gaaccgacccccgaacttt

SEQ ID NO: 772827 - DNA, 19 bp, Mus musculus
  siRNA target sequence for Jmjd2 (NM_172382.1,2125-2143).
cctaccatcaggtggaatt

SEQ ID NO: 772828 - DNA, 19 bp, Mus musculus
  siRNA target sequence for Jmjd2 (NM_172382.1,2126-2144).
ctaccatcaggtggaattt

SEQ ID NO: 772829 - DNA, 19 bp, Mus musculus
  siRNA target sequence for Jmjd2 (NM_172382.1,2520-2538).
gtcaacattgctgaaagaa

SEQ ID NO: 772830 - DNA, 19 bp, Mus musculus
  siRNA target sequence for Jmjd2 (NM_172382.1,2542-2560).
cagtggatgtgagcaaaat

SEQ ID NO: 772831 - DNA, 19 bp, Mus musculus
  siRNA target sequence for Jmjd2 (NM_172382.1,2708-2726).
cgacgactggccctttgtt

SEQ ID NO: 772832 - DNA, 19 bp, Mus musculus
  siRNA target sequence for Jmjd2 (NM_172382.1,2716-2734).
ggccctttgttgtcttcat

SEQ ID NO: 772833 - DNA, 19 bp, Mus musculus
  siRNA target sequence for Jmjd2 (NM_172382.1,2737-2755).
cgtgcttccgtcacaagat

SEQ ID NO: 772834 - DNA, 19 bp, Mus musculus
  siRNA target sequence for Jmjd2 (NM_172382.1,2738-2756).
gtgcttccgtcacaagatt

SEQ ID NO: 772835 - DNA, 19 bp, Mus musculus
  siRNA target sequence for Jmjd2 (NM_172382.1,2930-2948).
ggacatagtggtaatgtct

SEQ ID NO: 772836 - DNA, 19 bp, Mus musculus
  siRNA target sequence for Jmjd2 (NM_172382.1,3146-3164).
cagtccactgaaatatgct

SEQ ID NO: 772837 - DNA, 19 bp, Mus musculus
  siRNA target sequence for 6330530A05Rik (NM_172383.1,828-846).
gctctgccgtgcaggatat

SEQ ID NO: 772838 - DNA, 19 bp, Mus musculus
  siRNA target sequence for 6330530A05Rik (NM_172383.1,831-849).
ctgccgtgcaggatatgaa

SEQ ID NO: 772839 - DNA, 19 bp, Mus musculus
  siRNA target sequence for 6330530A05Rik (NM_172383.1,833-851).
gccgtgcaggatatgaact

SEQ ID NO: 772840 - DNA, 19 bp, Mus musculus
  siRNA target sequence for 6330530A05Rik (NM_172383.1,1088-1106).
cactgccctccgatctgta

SEQ ID NO: 772841 - DNA, 19 bp, Mus musculus
  siRNA target sequence for 6330530A05Rik (NM_172383.1,1111-1129).
ggcattctccgcccaaaat

SEQ ID NO: 772842 - DNA, 19 bp, Mus musculus
  siRNA target sequence for 6330530A05Rik (NM_172383.1,1139-1157).
gataacagtagcatcttta

SEQ ID NO: 772843 - DNA, 19 bp, Mus musculus
  siRNA target sequence for 9630010P11Rik (NM_172385.1,714-732).
ccgaaagaaccggaagtat

SEQ ID NO: 772844 - DNA, 19 bp, Mus musculus
  siRNA target sequence for 9630010P11Rik (NM_172385.1,750-768).
caagcgtttccggttcaat

SEQ ID NO: 772845 - DNA, 19 bp, Mus musculus
  siRNA target sequence for 9630010P11Rik (NM_172385.1,754-772).
cgtttccggttcaatagca

SEQ ID NO: 772846 - DNA, 19 bp, Mus musculus
  siRNA target sequence for 9630010P11Rik (NM_172385.1,755-773).
gtttccggttcaatagcat

SEQ ID NO: 772847 - DNA, 19 bp, Mus musculus
  siRNA target sequence for 9630010P11Rik (NM_172385.1,964-982).
ctgcgggacaagcaaatga

SEQ ID NO: 772848 - DNA, 19 bp, Mus musculus
  siRNA target sequence for 9630010P11Rik (NM_172385.1,1063-1081).
gccttgcctcccaaccata

SEQ ID NO: 772849 - DNA, 19 bp, Mus musculus
  siRNA target sequence for 9630010P11Rik (NM_172385.1,1159-1177).
ggcttccgatgcacctttt

SEQ ID NO: 772850 - DNA, 19 bp, Mus musculus
  siRNA target sequence for 9630010P11Rik (NM_172385.1,1164-1182).
ccgatgcaccttttgcaaa

SEQ ID NO: 772851 - DNA, 19 bp, Mus musculus
  siRNA target sequence for 9630010P11Rik (NM_172385.1,1214-1232).
gccacatccgcattttgca

SEQ ID NO: 772852 - DNA, 19 bp, Mus musculus
  siRNA target sequence for 9630010P11Rik (NM_172385.1,1215-1233).
ccacatccgcattttgcat

SEQ ID NO: 772853 - DNA, 19 bp, Mus musculus
  siRNA target sequence for 9630010P11Rik (NM_172385.1,1216-1234).
cacatccgcattttgcata

SEQ ID NO: 772854 - DNA, 19 bp, Mus musculus
  siRNA target sequence for 9630010P11Rik (NM_172385.1,1245-1263).
gtgcacactgtgtgacttt

SEQ ID NO: 772855 - DNA, 19 bp, Mus musculus
  siRNA target sequence for 9630010P11Rik (NM_172385.1,1536-1554).
gctatcggtgaagaacaaa

SEQ ID NO: 772856 - DNA, 19 bp, Mus musculus
  siRNA target sequence for 9630010P11Rik (NM_172385.1,1537-1555).
ctatcggtgaagaacaaat

SEQ ID NO: 772857 - DNA, 19 bp, Mus musculus
  siRNA target sequence for 9630010P11Rik (NM_172385.1,1609-1627).
catgccaacctatactcta

SEQ ID NO: 772858 - DNA, 19 bp, Mus musculus
  siRNA target sequence for 9630010P11Rik (NM_172385.1,1653-1671).
ctttatggccccagacaaa

SEQ ID NO: 772859 - DNA, 19 bp, Mus musculus
  siRNA target sequence for 9630010P11Rik (NM_172385.1,1747-1765).
ctactgtctcccatttcca

SEQ ID NO: 772860 - DNA, 19 bp, Mus musculus
  siRNA target sequence for 9630010P11Rik (NM_172385.1,1821-1839).
cctcgtgccaccactgaaa

SEQ ID NO: 772861 - DNA, 19 bp, Mus musculus
  siRNA target sequence for 9630010P11Rik (NM_172385.1,1887-1905).
ggaccctgtgaatagctat

SEQ ID NO: 772862 - DNA, 19 bp, Mus musculus
  siRNA target sequence for 9630010P11Rik (NM_172385.1,1941-1959).
ggaacacggcttcttatct

SEQ ID NO: 772863 - DNA, 19 bp, Mus musculus
  siRNA target sequence for 9630010P11Rik (NM_172385.1,1942-1960).
gaacacggcttcttatcta

SEQ ID NO: 772864 - DNA, 19 bp, Mus musculus
  siRNA target sequence for 9630010P11Rik (NM_172385.1,2000-2018).
caaacaccggagttctgtt

SEQ ID NO: 772865 - DNA, 19 bp, Mus musculus
  siRNA target sequence for 9630010P11Rik (NM_172385.1,2004-2022).
caccggagttctgtttgat

SEQ ID NO: 772866 - DNA, 19 bp, Mus musculus
  siRNA target sequence for 9630010P11Rik (NM_172385.1,2009-2027).
gagttctgtttgataagga

SEQ ID NO: 772867 - DNA, 19 bp, Mus musculus
  siRNA target sequence for 9630010P11Rik (NM_172385.1,2149-2167).
ggcagtcgggaatttttgt

SEQ ID NO: 772868 - DNA, 19 bp, Mus musculus
  siRNA target sequence for 9630010P11Rik (NM_172385.1,2151-2169).
cagtcgggaatttttgtca

SEQ ID NO: 772869 - DNA, 19 bp, Mus musculus
  siRNA target sequence for 9630010P11Rik (NM_172385.1,2207-2225).
gtcctgggaacatgaaaga

SEQ ID NO: 772870 - DNA, 19 bp, Mus musculus
  siRNA target sequence for 9630010P11Rik (NM_172385.1,2633-2651).
cttcccatcaccttaaggt

SEQ ID NO: 772871 - DNA, 19 bp, Mus musculus
  siRNA target sequence for 9630010P11Rik (NM_172385.1,2718-2736).
gtcagcgtccctgaagtat

SEQ ID NO: 772872 - DNA, 19 bp, Mus musculus
  siRNA target sequence for 9630010P11Rik (NM_172385.1,2814-2832).
ggatgagacctctagcaaa

SEQ ID NO: 772873 - DNA, 19 bp, Mus musculus
  siRNA target sequence for 9630010P11Rik (NM_172385.1,2825-2843).
ctagcaaagcgcctatgtt

SEQ ID NO: 772874 - DNA, 19 bp, Mus musculus
  siRNA target sequence for 9630010P11Rik (NM_172385.1,2828-2846).
gcaaagcgcctatgttcat

SEQ ID NO: 772875 - DNA, 19 bp, Mus musculus
  siRNA target sequence for 9630010P11Rik (NM_172385.1,2937-2955).
gctctcctccggagatcat

SEQ ID NO: 772876 - DNA, 19 bp, Mus musculus
  siRNA target sequence for 9630010P11Rik (NM_172385.1,2938-2956).
ctctcctccggagatcatt

SEQ ID NO: 772877 - DNA, 19 bp, Mus musculus
  siRNA target sequence for 9630010P11Rik (NM_172385.1,3042-3060).
ggagatcggaagagcttat

SEQ ID NO: 772878 - DNA, 19 bp, Mus musculus
  siRNA target sequence for 9630010P11Rik (NM_172385.1,3045-3063).
gatcggaagagcttatcaa

SEQ ID NO: 772879 - DNA, 19 bp, Mus musculus
  siRNA target sequence for 9630010P11Rik (NM_172385.1,3074-3092).
gcaacggtgtgaatttcca

SEQ ID NO: 772880 - DNA, 19 bp, Mus musculus
  siRNA target sequence for 9630010P11Rik (NM_172385.1,3231-3249).
gccctcccagcgaaagtct

SEQ ID NO: 772881 - DNA, 19 bp, Mus musculus
  siRNA target sequence for 9630010P11Rik (NM_172385.1,3425-3443).
gagcaaaacgcaaagatca

SEQ ID NO: 772882 - DNA, 19 bp, Mus musculus
  siRNA target sequence for 9630010P11Rik (NM_172385.1,3792-3810).
cccggaaaccacgaacaaa

SEQ ID NO: 772883 - DNA, 19 bp, Mus musculus
  siRNA target sequence for 9630010P11Rik (NM_172385.1,4192-4210).
gctagcagcacagcaaatt

SEQ ID NO: 772884 - DNA, 19 bp, Mus musculus
  siRNA target sequence for 9630010P11Rik (NM_172385.1,4204-4222).
gcaaattctggatgtatca

SEQ ID NO: 772885 - DNA, 19 bp, Mus musculus
  siRNA target sequence for 1110064P04Rik (NM_172391.2,147-165).
gggaccaacgtgaacaact

SEQ ID NO: 772886 - DNA, 19 bp, Mus musculus
  siRNA target sequence for 1110064P04Rik (NM_172391.2,177-195).
gagcgggatgccaccattt

SEQ ID NO: 772887 - DNA, 19 bp, Mus musculus
  siRNA target sequence for 1110064P04Rik (NM_172391.2,180-198).
cgggatgccaccatttggt

SEQ ID NO: 772888 - DNA, 19 bp, Mus musculus
  siRNA target sequence for 1110064P04Rik (NM_172391.2,307-325).
gccgcaaagggaagcttat

SEQ ID NO: 772889 - DNA, 19 bp, Mus musculus
  siRNA target sequence for 1110064P04Rik (NM_172391.2,308-326).
ccgcaaagggaagcttatt

SEQ ID NO: 772890 - DNA, 19 bp, Mus musculus
  siRNA target sequence for 1110064P04Rik (NM_172391.2,309-327).
cgcaaagggaagcttattt

SEQ ID NO: 772891 - DNA, 19 bp, Mus musculus
  siRNA target sequence for 1110064P04Rik (NM_172391.2,356-374).
ctggaaaggtacagttaaa

SEQ ID NO: 772892 - DNA, 19 bp, Mus musculus
  siRNA target sequence for 1110064P04Rik (NM_172391.2,358-376).
ggaaaggtacagttaaaga

SEQ ID NO: 772893 - DNA, 19 bp, Mus musculus
  siRNA target sequence for 1110064P04Rik (NM_172391.2,390-408).
cacaagggacttattgaaa

SEQ ID NO: 772894 - DNA, 19 bp, Mus musculus
  siRNA target sequence for 1110064P04Rik (NM_172391.2,415-433).
gcctttctgaagaaaacga

SEQ ID NO: 772895 - DNA, 19 bp, Mus musculus
  siRNA target sequence for 1110064P04Rik (NM_172391.2,426-444).
gaaaacgaaatcaatgaca

SEQ ID NO: 772896 - DNA, 19 bp, Mus musculus
  siRNA target sequence for 1110064P04Rik (NM_172391.2,445-463).
ctgaggtgaacgtgagtaa

SEQ ID NO: 772897 - DNA, 19 bp, Mus musculus
  siRNA target sequence for 1110064P04Rik (NM_172391.2,450-468).
gtgaacgtgagtaaaaaga

SEQ ID NO: 772898 - DNA, 19 bp, Mus musculus
  siRNA target sequence for 1110064P04Rik (NM_172391.2,551-569).
ggcactcaagacggaattt

SEQ ID NO: 772899 - DNA, 19 bp, Mus musculus
  siRNA target sequence for 1110064P04Rik (NM_172391.2,552-570).
gcactcaagacggaattta

SEQ ID NO: 772900 - DNA, 19 bp, Mus musculus
  siRNA target sequence for 1110064P04Rik (NM_172391.2,557-575).
caagacggaatttacaaca

SEQ ID NO: 772901 - DNA, 19 bp, Mus musculus
  siRNA target sequence for 1110064P04Rik (NM_172391.2,581-599).
gatcttaccaacaaaagct

SEQ ID NO: 772902 - DNA, 19 bp, Mus musculus
  siRNA target sequence for 1110064P04Rik (NM_172391.2,713-731).
gtttgacacgacagtagaa

SEQ ID NO: 772903 - DNA, 19 bp, Mus musculus
  siRNA target sequence for 1110064P04Rik (NM_172391.2,836-854).
gaacatcagtggagaatat

SEQ ID NO: 772904 - DNA, 19 bp, Mus musculus
  siRNA target sequence for 1110064P04Rik (NM_172391.2,858-876).
gaactggtaacaaatagga

SEQ ID NO: 772905 - DNA, 19 bp, Mus musculus
  siRNA target sequence for 1110064P04Rik (NM_172391.2,955-973).
cagggcaaacggaattaca

SEQ ID NO: 772906 - DNA, 19 bp, Mus musculus
  siRNA target sequence for 1110064P04Rik (NM_172391.2,957-975).
gggcaaacggaattacaat

SEQ ID NO: 772907 - DNA, 19 bp, Mus musculus
  siRNA target sequence for Aim1 (NM_172393.1,191-209).
ctcagggcaacctacaatt

SEQ ID NO: 772908 - DNA, 19 bp, Mus musculus
  siRNA target sequence for Aim1 (NM_172393.1,251-269).
gcgatggcgtggaaggtat

SEQ ID NO: 772909 - DNA, 19 bp, Mus musculus
  siRNA target sequence for Aim1 (NM_172393.1,252-270).
cgatggcgtggaaggtatt

SEQ ID NO: 772910 - DNA, 19 bp, Mus musculus
  siRNA target sequence for Aim1 (NM_172393.1,256-274).
ggcgtggaaggtattctga

SEQ ID NO: 772911 - DNA, 19 bp, Mus musculus
  siRNA target sequence for Aim1 (NM_172393.1,276-294).
gtcaaacctgccgaatgtt

SEQ ID NO: 772912 - DNA, 19 bp, Mus musculus
  siRNA target sequence for Aim1 (NM_172393.1,401-419).
gtatgcacagcaaactcaa

SEQ ID NO: 772913 - DNA, 19 bp, Mus musculus
  siRNA target sequence for Aim1 (NM_172393.1,430-448).
ggcaaggtagtgatattca

SEQ ID NO: 772914 - DNA, 19 bp, Mus musculus
  siRNA target sequence for Aim1 (NM_172393.1,513-531).
gcgcctctctccagtgata

SEQ ID NO: 772915 - DNA, 19 bp, Mus musculus
  siRNA target sequence for Aim1 (NM_172393.1,544-562).
gtccgaggatgttggattt

SEQ ID NO: 772916 - DNA, 19 bp, Mus musculus
  siRNA target sequence for Aim1 (NM_172393.1,671-689).
ctgataaacctgtagtgat

SEQ ID NO: 772917 - DNA, 19 bp, Mus musculus
  siRNA target sequence for Aim1 (NM_172393.1,701-719).
gacacgtggttcaggatta

SEQ ID NO: 772918 - DNA, 19 bp, Mus musculus
  siRNA target sequence for Aim1 (NM_172393.1,705-723).
cgtggttcaggattacaga

SEQ ID NO: 772919 - DNA, 19 bp, Mus musculus
  siRNA target sequence for Aim1 (NM_172393.1,768-786).
cctgaactcgtactttgat

SEQ ID NO: 772920 - DNA, 19 bp, Mus musculus
  siRNA target sequence for Aim1 (NM_172393.1,848-866).
ggggcacatggctgatcta

SEQ ID NO: 772921 - DNA, 19 bp, Mus musculus
  siRNA target sequence for Aim1 (NM_172393.1,849-867).
gggcacatggctgatctat

SEQ ID NO: 772922 - DNA, 19 bp, Mus musculus
  siRNA target sequence for Aim1 (NM_172393.1,962-980).
ccatgcggcctctgaaaat

SEQ ID NO: 772923 - DNA, 19 bp, Mus musculus
  siRNA target sequence for Aim1 (NM_172393.1,981-999).
gggtggccgtaaagttgaa

SEQ ID NO: 772924 - DNA, 19 bp, Mus musculus
  siRNA target sequence for Aim1 (NM_172393.1,982-1000).
ggtggccgtaaagttgaat

SEQ ID NO: 772925 - DNA, 19 bp, Mus musculus
  siRNA target sequence for Aim1 (NM_172393.1,983-1001).
gtggccgtaaagttgaatt

SEQ ID NO: 772926 - DNA, 19 bp, Mus musculus
  siRNA target sequence for Aim1 (NM_172393.1,1007-1025).
cagatccaaaggtagttat

SEQ ID NO: 772927 - DNA, 19 bp, Mus musculus
  siRNA target sequence for Aim1 (NM_172393.1,1125-1143).
caacaacttgccctttaca

SEQ ID NO: 772928 - DNA, 19 bp, Mus musculus
  siRNA target sequence for Aim1 (NM_172393.1,1145-1163).
ccgtggggtctatgaaagt

SEQ ID NO: 772929 - DNA, 19 bp, Mus musculus
  siRNA target sequence for Aim1 (NM_172393.1,1174-1192).
gtctgggttgcttatgaga

SEQ ID NO: 772930 - DNA, 19 bp, Mus musculus
  siRNA target sequence for Aim1 (NM_172393.1,1279-1297).
cagtctctgcggcctatat

SEQ ID NO: 772931 - DNA, 19 bp, Mus musculus
  siRNA target sequence for Aim1 (NM_172393.1,1281-1299).
gtctctgcggcctatatta

SEQ ID NO: 772932 - DNA, 19 bp, Mus musculus
  siRNA target sequence for Aim1 (NM_172393.1,1288-1306).
cggcctatattaagtgatt

SEQ ID NO: 772933 - DNA, 19 bp, Mus musculus
  siRNA target sequence for Aim1 (NM_172393.1,1290-1308).
gcctatattaagtgatttt

SEQ ID NO: 772934 - DNA, 19 bp, Mus musculus
  siRNA target sequence for Aim1 (NM_172393.1,1291-1309).
cctatattaagtgattttt

SEQ ID NO: 772935 - DNA, 19 bp, Mus musculus
  siRNA target sequence for Aim1 (NM_172393.1,1315-1333).
gcgcacatgataatgtaca

SEQ ID NO: 772936 - DNA, 19 bp, Mus musculus
  siRNA target sequence for Aim1 (NM_172393.1,1358-1376).
gttccagtattgatgtgtt

SEQ ID NO: 772937 - DNA, 19 bp, Mus musculus
  siRNA target sequence for Aim1 (NM_172393.1,1378-1396).
ggaattgttgccaatttga

SEQ ID NO: 772938 - DNA, 19 bp, Mus musculus
  siRNA target sequence for Aim1 (NM_172393.1,1379-1397).
gaattgttgccaatttgaa

SEQ ID NO: 772939 - DNA, 19 bp, Mus musculus
  siRNA target sequence for Aim1 (NM_172393.1,1412-1430).
gagtgaagacacagtcaat

SEQ ID NO: 772940 - DNA, 19 bp, Mus musculus
  siRNA target sequence for Aim1 (NM_172393.1,1419-1437).
gacacagtcaatcaatgta

SEQ ID NO: 772941 - DNA, 19 bp, Mus musculus
  siRNA target sequence for Aim1 (NM_172393.1,1421-1439).
cacagtcaatcaatgtact

SEQ ID NO: 772942 - DNA, 19 bp, Mus musculus
  siRNA target sequence for Aim1 (NM_172393.1,1495-1513).
ctggataaaggcttctaca

SEQ ID NO: 772943 - DNA, 19 bp, Mus musculus
  siRNA target sequence for Aim1 (NM_172393.1,1534-1552).
ggcaaaaattgtaagatct

SEQ ID NO: 772944 - DNA, 19 bp, Mus musculus
  siRNA target sequence for Aim1 (NM_172393.1,1564-1582).
cccatatgcctggattctt

SEQ ID NO: 772945 - DNA, 19 bp, Mus musculus
  siRNA target sequence for Aim1 (NM_172393.1,1589-1607).
gccccaggagacgaaatca

SEQ ID NO: 772946 - DNA, 19 bp, Mus musculus
  siRNA target sequence for Aim1 (NM_172393.1,1592-1610).
ccaggagacgaaatcagat

SEQ ID NO: 772947 - DNA, 19 bp, Mus musculus
  siRNA target sequence for Aim1 (NM_172393.1,1593-1611).
caggagacgaaatcagatt

SEQ ID NO: 772948 - DNA, 19 bp, Mus musculus
  siRNA target sequence for Aim1 (NM_172393.1,1595-1613).
ggagacgaaatcagattca

SEQ ID NO: 772949 - DNA, 19 bp, Mus musculus
  siRNA target sequence for Aim1 (NM_172393.1,1598-1616).
gacgaaatcagattcactt

SEQ ID NO: 772950 - DNA, 19 bp, Mus musculus
  siRNA target sequence for Aim1 (NM_172393.1,1608-1626).
gattcacttgttttcagaa

SEQ ID NO: 772951 - DNA, 19 bp, Mus musculus
  siRNA target sequence for Aim1 (NM_172393.1,1827-1845).
gaagtctcttcgctttata

SEQ ID NO: 772952 - DNA, 19 bp, Mus musculus
  siRNA target sequence for Aim1 (NM_172393.1,1830-1848).
gtctcttcgctttatagat

SEQ ID NO: 772953 - DNA, 19 bp, Mus musculus
  siRNA target sequence for Aim1 (NM_172393.1,1860-1878).
cgaaccaacaattattctt

SEQ ID NO: 772954 - DNA, 19 bp, Mus musculus
  siRNA target sequence for Aim1 (NM_172393.1,1865-1883).
caacaattattcttttcga

SEQ ID NO: 772955 - DNA, 19 bp, Mus musculus
  siRNA target sequence for Aim1 (NM_172393.1,1989-2007).
catatgggttacctatgaa

SEQ ID NO: 772956 - DNA, 19 bp, Mus musculus
  siRNA target sequence for Aim1 (NM_172393.1,2000-2018).
cctatgaatatggcaatta

SEQ ID NO: 772957 - DNA, 19 bp, Mus musculus
  siRNA target sequence for Aim1 (NM_172393.1,2105-2123).
cctttgctcagaaacgaat

SEQ ID NO: 772958 - DNA, 19 bp, Mus musculus
  siRNA target sequence for Aim1 (NM_172393.1,2106-2124).
ctttgctcagaaacgaatt

SEQ ID NO: 772959 - DNA, 19 bp, Mus musculus
  siRNA target sequence for Aim1 (NM_172393.1,2110-2128).
gctcagaaacgaatttact

SEQ ID NO: 772960 - DNA, 19 bp, Mus musculus
  siRNA target sequence for Aim1 (NM_172393.1,2111-2129).
ctcagaaacgaatttactt

SEQ ID NO: 772961 - DNA, 19 bp, Mus musculus
  siRNA target sequence for Aim1 (NM_172393.1,2113-2131).
cagaaacgaatttacttca

SEQ ID NO: 772962 - DNA, 19 bp, Mus musculus
  siRNA target sequence for Aim1 (NM_172393.1,2205-2223).
ccaggtcatggaagatgtt

SEQ ID NO: 772963 - DNA, 19 bp, Mus musculus
  siRNA target sequence for Aim1 (NM_172393.1,2335-2353).
ggactggccctcgatcaaa

SEQ ID NO: 772964 - DNA, 19 bp, Mus musculus
  siRNA target sequence for Aim1 (NM_172393.1,2439-2457).
gggtgcgcagtatgatcaa

SEQ ID NO: 772965 - DNA, 19 bp, Mus musculus
  siRNA target sequence for Aim1 (NM_172393.1,2440-2458).
ggtgcgcagtatgatcaaa

SEQ ID NO: 772966 - DNA, 19 bp, Mus musculus
  siRNA target sequence for Aim1 (NM_172393.1,2441-2459).
gtgcgcagtatgatcaaaa

SEQ ID NO: 772967 - DNA, 19 bp, Mus musculus
  siRNA target sequence for Aim1 (NM_172393.1,2477-2495).
cagtgagcacagagaagtt

SEQ ID NO: 772968 - DNA, 19 bp, Mus musculus
  siRNA target sequence for Nup88 (NM_172394.1,67-85).
ctaaccacgtcgtgttctt

SEQ ID NO: 772969 - DNA, 19 bp, Mus musculus
  siRNA target sequence for Nup88 (NM_172394.1,90-108).
ctccgcgagggcgtaagaa

SEQ ID NO: 772970 - DNA, 19 bp, Mus musculus
  siRNA target sequence for Nup88 (NM_172394.1,205-223).
gcctcggaggggaactgtt

SEQ ID NO: 772971 - DNA, 19 bp, Mus musculus
  siRNA target sequence for Nup88 (NM_172394.1,206-224).
cctcggaggggaactgttt

SEQ ID NO: 772972 - DNA, 19 bp, Mus musculus
  siRNA target sequence for Nup88 (NM_172394.1,304-322).
cccagtatcagagattact

SEQ ID NO: 772973 - DNA, 19 bp, Mus musculus
  siRNA target sequence for Nup88 (NM_172394.1,312-330).
cagagattactctgcatta

SEQ ID NO: 772974 - DNA, 19 bp, Mus musculus
  siRNA target sequence for Nup88 (NM_172394.1,334-352).
cacccttgtttgaaatcca

SEQ ID NO: 772975 - DNA, 19 bp, Mus musculus
  siRNA target sequence for Nup88 (NM_172394.1,367-385).
gtccaacccaacatcatgt

SEQ ID NO: 772976 - DNA, 19 bp, Mus musculus
  siRNA target sequence for Nup88 (NM_172394.1,405-423).
ggacttatggcattagaat

SEQ ID NO: 772977 - DNA, 19 bp, Mus musculus
  siRNA target sequence for Nup88 (NM_172394.1,406-424).
gacttatggcattagaatt

SEQ ID NO: 772978 - DNA, 19 bp, Mus musculus
  siRNA target sequence for Nup88 (NM_172394.1,462-480).
ggaaaagcaactgtgaatt

SEQ ID NO: 772979 - DNA, 19 bp, Mus musculus
  siRNA target sequence for Nup88 (NM_172394.1,491-509).
cccgattgctgagagattt

SEQ ID NO: 772980 - DNA, 19 bp, Mus musculus
  siRNA target sequence for Nup88 (NM_172394.1,492-510).
ccgattgctgagagatttt

SEQ ID NO: 772981 - DNA, 19 bp, Mus musculus
  siRNA target sequence for Nup88 (NM_172394.1,536-554).
gaagcatgctgcatggtat

SEQ ID NO: 772982 - DNA, 19 bp, Mus musculus
  siRNA target sequence for Nup88 (NM_172394.1,540-558).
catgctgcatggtatccaa

SEQ ID NO: 772983 - DNA, 19 bp, Mus musculus
  siRNA target sequence for Nup88 (NM_172394.1,597-615).
gacaacgtgataagaattt

SEQ ID NO: 772984 - DNA, 19 bp, Mus musculus
  siRNA target sequence for Nup88 (NM_172394.1,599-617).
caacgtgataagaatttat

SEQ ID NO: 772985 - DNA, 19 bp, Mus musculus
  siRNA target sequence for Nup88 (NM_172394.1,602-620).
cgtgataagaatttattct

SEQ ID NO: 772986 - DNA, 19 bp, Mus musculus
  siRNA target sequence for Nup88 (NM_172394.1,637-655).
cacccactaaggtgattgt

SEQ ID NO: 772987 - DNA, 19 bp, Mus musculus
  siRNA target sequence for Nup88 (NM_172394.1,641-659).
cactaaggtgattgtactt

SEQ ID NO: 772988 - DNA, 19 bp, Mus musculus
  siRNA target sequence for Nup88 (NM_172394.1,672-690).
gaggaaagtttaatactca

SEQ ID NO: 772989 - DNA, 19 bp, Mus musculus
  siRNA target sequence for Nup88 (NM_172394.1,811-829).
cactgtacatcctgtatga

SEQ ID NO: 772990 - DNA, 19 bp, Mus musculus
  siRNA target sequence for Nup88 (NM_172394.1,815-833).
gtacatcctgtatgagaat

SEQ ID NO: 772991 - DNA, 19 bp, Mus musculus
  siRNA target sequence for Nup88 (NM_172394.1,850-868).
cctacgtgagcctgttaca

SEQ ID NO: 772992 - DNA, 19 bp, Mus musculus
  siRNA target sequence for Nup88 (NM_172394.1,896-914).
gggcccactgcctatgcat

SEQ ID NO: 772993 - DNA, 19 bp, Mus musculus
  siRNA target sequence for Nup88 (NM_172394.1,1013-1031).
gtaccactgtgttgtacta

SEQ ID NO: 772994 - DNA, 19 bp, Mus musculus
  siRNA target sequence for Nup88 (NM_172394.1,1047-1065).
gatgaccaaacgttagaaa

SEQ ID NO: 772995 - DNA, 19 bp, Mus musculus
  siRNA target sequence for Nup88 (NM_172394.1,1265-1283).
gctgacttggattcacaaa

SEQ ID NO: 772996 - DNA, 19 bp, Mus musculus
  siRNA target sequence for Nup88 (NM_172394.1,1361-1379).
ggagcacattctttgtaca

SEQ ID NO: 772997 - DNA, 19 bp, Mus musculus
  siRNA target sequence for Nup88 (NM_172394.1,1394-1412).
caggcagccagctccaatt

SEQ ID NO: 772998 - DNA, 19 bp, Mus musculus
  siRNA target sequence for Nup88 (NM_172394.1,1460-1478).
catcaccagtacctatgaa

SEQ ID NO: 772999 - DNA, 19 bp, Mus musculus
  siRNA target sequence for Nup88 (NM_172394.1,1463-1481).
caccagtacctatgaatgt

SEQ ID NO: 773000 - DNA, 19 bp, Mus musculus
  siRNA target sequence for Nup88 (NM_172394.1,1482-1500).
ctcatacggcctttattaa

SEQ ID NO: 773001 - DNA, 19 bp, Mus musculus
  siRNA target sequence for Nup88 (NM_172394.1,1529-1547).
gctctgtacccaagaagat

SEQ ID NO: 773002 - DNA, 19 bp, Mus musculus
  siRNA target sequence for Nup88 (NM_172394.1,1571-1589).
gcgcattctggctgaaact

SEQ ID NO: 773003 - DNA, 19 bp, Mus musculus
  siRNA target sequence for Nup88 (NM_172394.1,1595-1613).
ctcctttgagaagcatatt

SEQ ID NO: 773004 - DNA, 19 bp, Mus musculus
  siRNA target sequence for Nup88 (NM_172394.1,1598-1616).
ctttgagaagcatattaaa

SEQ ID NO: 773005 - DNA, 19 bp, Mus musculus
  siRNA target sequence for 1300002M12Rik (NM_172395.1,346-364).
gcgagttttggcacaaact

SEQ ID NO: 773006 - DNA, 19 bp, Mus musculus
  siRNA target sequence for 1300002M12Rik (NM_172395.1,383-401).
gaagccccagccgaagaaa

SEQ ID NO: 773007 - DNA, 19 bp, Mus musculus
  siRNA target sequence for 1300002M12Rik (NM_172395.1,389-407).
ccagccgaagaaaaagaga

SEQ ID NO: 773008 - DNA, 19 bp, Mus musculus
  siRNA target sequence for 1300002M12Rik (NM_172395.1,413-431).
gattgaccgcactatgatt

SEQ ID NO: 773009 - DNA, 19 bp, Mus musculus
  siRNA target sequence for 1300002M12Rik (NM_172395.1,433-451).
gggagccaatgaactttgt

SEQ ID NO: 773010 - DNA, 19 bp, Mus musculus
  siRNA target sequence for 1300002M12Rik (NM_172395.1,552-570).
gacagaccgtggagcaatt

SEQ ID NO: 773011 - DNA, 19 bp, Mus musculus
  siRNA target sequence for 1300002M12Rik (NM_172395.1,554-572).
cagaccgtggagcaattct

SEQ ID NO: 773012 - DNA, 19 bp, Mus musculus
  siRNA target sequence for 9130011J15Rik (NM_172396.1,80-98).
ggctgtgctcaactttaaa

SEQ ID NO: 773013 - DNA, 19 bp, Mus musculus
  siRNA target sequence for 9130011J15Rik (NM_172396.1,82-100).
ctgtgctcaactttaaact

SEQ ID NO: 773014 - DNA, 19 bp, Mus musculus
  siRNA target sequence for 9130011J15Rik (NM_172396.1,86-104).
gctcaactttaaactgaaa

SEQ ID NO: 773015 - DNA, 19 bp, Mus musculus
  siRNA target sequence for 9130011J15Rik (NM_172396.1,87-105).
ctcaactttaaactgaaaa

SEQ ID NO: 773016 - DNA, 19 bp, Mus musculus
  siRNA target sequence for 9130011J15Rik (NM_172396.1,121-139).
gctttggggaagaatcgaa

SEQ ID NO: 773017 - DNA, 19 bp, Mus musculus
  siRNA target sequence for 9130011J15Rik (NM_172396.1,158-176).
caacatccgagagttttta

SEQ ID NO: 773018 - DNA, 19 bp, Mus musculus
  siRNA target sequence for 9130011J15Rik (NM_172396.1,187-205).
ggtatttccggatcttcat

SEQ ID NO: 773019 - DNA, 19 bp, Mus musculus
  siRNA target sequence for A930038C07Rik (NM_172399.1,567-585).
gagatgaggaactttttca

SEQ ID NO: 773020 - DNA, 19 bp, Mus musculus
  siRNA target sequence for A930038C07Rik (NM_172399.1,592-610).
gatccgggataaggaattt

SEQ ID NO: 773021 - DNA, 19 bp, Mus musculus
  siRNA target sequence for A930038C07Rik (NM_172399.1,651-669).
gcagttatctctttagaga

SEQ ID NO: 773022 - DNA, 19 bp, Mus musculus
  siRNA target sequence for A930038C07Rik (NM_172399.1,668-686).
gatacacctagaaggtatt

SEQ ID NO: 773023 - DNA, 19 bp, Mus musculus
  siRNA target sequence for A930038C07Rik (NM_172399.1,675-693).
ctagaaggtatttcttcat

SEQ ID NO: 773024 - DNA, 19 bp, Mus musculus
  siRNA target sequence for A930038C07Rik (NM_172399.1,807-825).
gtgacccagaactacttga

SEQ ID NO: 773025 - DNA, 19 bp, Mus musculus
  siRNA target sequence for A930038C07Rik (NM_172399.1,835-853).
gcagcagatgactgatgta

SEQ ID NO: 773026 - DNA, 19 bp, Mus musculus
  siRNA target sequence for A930038C07Rik (NM_172399.1,851-869).
gtagagggcacagaactat

SEQ ID NO: 773027 - DNA, 19 bp, Mus musculus
  siRNA target sequence for A930038C07Rik (NM_172399.1,873-891).
cctacaagggcaatgatgt

SEQ ID NO: 773028 - DNA, 19 bp, Mus musculus
  siRNA target sequence for A930038C07Rik (NM_172399.1,880-898).
gggcaatgatgtagagtat

SEQ ID NO: 773029 - DNA, 19 bp, Mus musculus
  siRNA target sequence for A930038C07Rik (NM_172399.1,881-899).
ggcaatgatgtagagtatt

SEQ ID NO: 773030 - DNA, 19 bp, Mus musculus
  siRNA target sequence for A930038C07Rik (NM_172399.1,887-905).
gatgtagagtattttctgt

SEQ ID NO: 773031 - DNA, 19 bp, Mus musculus
  siRNA target sequence for A930038C07Rik (NM_172399.1,912-930).
gttccccatctggtttgta

SEQ ID NO: 773032 - DNA, 19 bp, Mus musculus
  siRNA target sequence for A930038C07Rik (NM_172399.1,932-950).
cagttggagcttctttcaa

SEQ ID NO: 773033 - DNA, 19 bp, Mus musculus
  siRNA target sequence for A930038C07Rik (NM_172399.1,934-952).
gttggagcttctttcaaca

SEQ ID NO: 773034 - DNA, 19 bp, Mus musculus
  siRNA target sequence for A930038C07Rik (NM_172399.1,1003-1021).
ccagccataccctgaatta

SEQ ID NO: 773035 - DNA, 19 bp, Mus musculus
  siRNA target sequence for A930038C07Rik (NM_172399.1,1006-1024).
gccataccctgaattacca

SEQ ID NO: 773036 - DNA, 19 bp, Mus musculus
  siRNA target sequence for A930038C07Rik (NM_172399.1,1007-1025).
ccataccctgaattaccat

SEQ ID NO: 773037 - DNA, 19 bp, Mus musculus
  siRNA target sequence for A930038C07Rik (NM_172399.1,1008-1026).
cataccctgaattaccata

SEQ ID NO: 773038 - DNA, 19 bp, Mus musculus
  siRNA target sequence for A930038C07Rik (NM_172399.1,1056-1074).
gacgtaccacagtcacttt

SEQ ID NO: 773039 - DNA, 19 bp, Mus musculus
  siRNA target sequence for A930038C07Rik (NM_172399.1,1089-1107).
gccctacagcctctatatt

SEQ ID NO: 773040 - DNA, 19 bp, Mus musculus
  siRNA target sequence for A930038C07Rik (NM_172399.1,1091-1109).
cctacagcctctatattga

SEQ ID NO: 773041 - DNA, 19 bp, Mus musculus
  siRNA target sequence for A930038C07Rik (NM_172399.1,1215-1233).
ccaaacctggtctagactt

SEQ ID NO: 773042 - DNA, 19 bp, Mus musculus
  siRNA target sequence for A930038C07Rik (NM_172399.1,1216-1234).
caaacctggtctagacttt

SEQ ID NO: 773043 - DNA, 19 bp, Mus musculus
  siRNA target sequence for A930038C07Rik (NM_172399.1,1341-1359).
ggcccaaggttgacattca

SEQ ID NO: 773044 - DNA, 19 bp, Mus musculus
  siRNA target sequence for A930038C07Rik (NM_172399.1,1343-1361).
cccaaggttgacattcaaa

SEQ ID NO: 773045 - DNA, 19 bp, Mus musculus
  siRNA target sequence for A930038C07Rik (NM_172399.1,1344-1362).
ccaaggttgacattcaaaa

SEQ ID NO: 773046 - DNA, 19 bp, Mus musculus
  siRNA target sequence for A930038C07Rik (NM_172399.1,1345-1363).
caaggttgacattcaaaaa

SEQ ID NO: 773047 - DNA, 19 bp, Mus musculus
  siRNA target sequence for A930038C07Rik (NM_172399.1,1409-1427).
cccgatacccaatactact

SEQ ID NO: 773048 - DNA, 19 bp, Mus musculus
  siRNA target sequence for A930038C07Rik (NM_172399.1,1456-1474).
caacatgagtacagcttat

SEQ ID NO: 773049 - DNA, 19 bp, Mus musculus
  siRNA target sequence for A930038C07Rik (NM_172399.1,1536-1554).
ggagggtcacagatgtgtt

SEQ ID NO: 773050 - DNA, 19 bp, Mus musculus
  siRNA target sequence for A930038C07Rik (NM_172399.1,1537-1555).
gagggtcacagatgtgttt

SEQ ID NO: 773051 - DNA, 19 bp, Mus musculus
  siRNA target sequence for A930038C07Rik (NM_172399.1,1607-1625).
caaaaggtcacgttcttta

SEQ ID NO: 773052 - DNA, 19 bp, Mus musculus
  siRNA target sequence for A930038C07Rik (NM_172399.1,1701-1719).
gcattcggcagtttcagtt

SEQ ID NO: 773053 - DNA, 19 bp, Mus musculus
  siRNA target sequence for A930038C07Rik (NM_172399.1,1702-1720).
cattcggcagtttcagtta

SEQ ID NO: 773054 - DNA, 19 bp, Mus musculus
  siRNA target sequence for A930038C07Rik (NM_172399.1,1806-1824).
ggcccagtaagcatgcatt

SEQ ID NO: 773055 - DNA, 19 bp, Mus musculus
  siRNA target sequence for A930038C07Rik (NM_172399.1,1835-1853).
cccgaagacacaagaatca

SEQ ID NO: 773056 - DNA, 19 bp, Mus musculus
  siRNA target sequence for A930038C07Rik (NM_172399.1,2145-2163).
ggggacactctgtgaagta

SEQ ID NO: 773057 - DNA, 19 bp, Mus musculus
  siRNA target sequence for A930038C07Rik (NM_172399.1,2146-2164).
gggacactctgtgaagtat

SEQ ID NO: 773058 - DNA, 19 bp, Mus musculus
  siRNA target sequence for A930038C07Rik (NM_172399.1,2148-2166).
gacactctgtgaagtatca

SEQ ID NO: 773059 - DNA, 19 bp, Mus musculus
  siRNA target sequence for A930038C07Rik (NM_172399.1,2150-2168).
cactctgtgaagtatcaaa

SEQ ID NO: 773060 - DNA, 19 bp, Mus musculus
  siRNA target sequence for A930038C07Rik (NM_172399.1,2152-2170).
ctctgtgaagtatcaaagt

SEQ ID NO: 773061 - DNA, 19 bp, Mus musculus
  siRNA target sequence for Dnajc8 (NM_172400.1,429-447).
ctgttaaagagcgaaaaaa

SEQ ID NO: 773062 - DNA, 19 bp, Mus musculus
  siRNA target sequence for Dnajc8 (NM_172400.1,689-707).
gtggacagttggcgaaatt

SEQ ID NO: 773063 - DNA, 19 bp, Mus musculus
  siRNA target sequence for Dnajc8 (NM_172400.1,754-772).
ctgcggccaccgaaagtca

SEQ ID NO: 773064 - DNA, 19 bp, Mus musculus
  siRNA target sequence for Dnajc8 (NM_172400.1,758-776).
ggccaccgaaagtcaagat

SEQ ID NO: 773065 - DNA, 19 bp, Mus musculus
  siRNA target sequence for Dnajc8 (NM_172400.1,824-842).
cctgcttcacggactcatt

SEQ ID NO: 773066 - DNA, 19 bp, Mus musculus
  siRNA target sequence for Dnajc8 (NM_172400.1,864-882).
cagagagtagcgattgctt

SEQ ID NO: 773067 - DNA, 19 bp, Mus musculus
  siRNA target sequence for 2610043O12Rik (NM_172402.1,274-292).
cgctcgacctcgtgaagat

SEQ ID NO: 773068 - DNA, 19 bp, Mus musculus
  siRNA target sequence for 2610043O12Rik (NM_172402.1,352-370).
gcttggctaccatttggaa

SEQ ID NO: 773069 - DNA, 19 bp, Mus musculus
  siRNA target sequence for 2610043O12Rik (NM_172402.1,399-417).
ggagtaaccccgaatgtgt

SEQ ID NO: 773070 - DNA, 19 bp, Mus musculus
  siRNA target sequence for 2610043O12Rik (NM_172402.1,436-454).
ggggactctactttttctt

SEQ ID NO: 773071 - DNA, 19 bp, Mus musculus
  siRNA target sequence for 2610043O12Rik (NM_172402.1,458-476).
caatgccatcaaatcgtat

SEQ ID NO: 773072 - DNA, 19 bp, Mus musculus
  siRNA target sequence for 2610043O12Rik (NM_172402.1,462-480).
gccatcaaatcgtataaga

SEQ ID NO: 773073 - DNA, 19 bp, Mus musculus
  siRNA target sequence for 2610043O12Rik (NM_172402.1,464-482).
catcaaatcgtataagaca

SEQ ID NO: 773074 - DNA, 19 bp, Mus musculus
  siRNA target sequence for 2610043O12Rik (NM_172402.1,543-561).
gccatgactctgtgcatta

SEQ ID NO: 773075 - DNA, 19 bp, Mus musculus
  siRNA target sequence for 2610043O12Rik (NM_172402.1,567-585).
ccattatgggtgacgaaaa

SEQ ID NO: 773076 - DNA, 19 bp, Mus musculus
  siRNA target sequence for 2610043O12Rik (NM_172402.1,580-598).
cgaaaactcgccttatgtt

SEQ ID NO: 773077 - DNA, 19 bp, Mus musculus
  siRNA target sequence for 2610043O12Rik (NM_172402.1,590-608).
ccttatgttacaatatggt

SEQ ID NO: 773078 - DNA, 19 bp, Mus musculus
  siRNA target sequence for 2610043O12Rik (NM_172402.1,621-639).
ccttcacagagacagtata

SEQ ID NO: 773079 - DNA, 19 bp, Mus musculus
  siRNA target sequence for 2610043O12Rik (NM_172402.1,635-653).
gtataaaggaatgtttgat

SEQ ID NO: 773080 - DNA, 19 bp, Mus musculus
  siRNA target sequence for 2610043O12Rik (NM_172402.1,654-672).
gcacttgtgaaaatatata

SEQ ID NO: 773081 - DNA, 19 bp, Mus musculus
  siRNA target sequence for 2610043O12Rik (NM_172402.1,678-696).
gaaggcgtgcgtggattat

SEQ ID NO: 773082 - DNA, 19 bp, Mus musculus
  siRNA target sequence for 2610043O12Rik (NM_172402.1,681-699).
ggcgtgcgtggattataca

SEQ ID NO: 773083 - DNA, 19 bp, Mus musculus
  siRNA target sequence for 2610043O12Rik (NM_172402.1,682-700).
gcgtgcgtggattatacaa

SEQ ID NO: 773084 - DNA, 19 bp, Mus musculus
  siRNA target sequence for 2610043O12Rik (NM_172402.1,691-709).
gattatacaagggatttgt

SEQ ID NO: 773085 - DNA, 19 bp, Mus musculus
  siRNA target sequence for 2610043O12Rik (NM_172402.1,716-734).
gctgtttggaacatcacat

SEQ ID NO: 773086 - DNA, 19 bp, Mus musculus
  siRNA target sequence for 2610043O12Rik (NM_172402.1,744-762).
cagtttatggcatatgagt

SEQ ID NO: 773087 - DNA, 19 bp, Mus musculus
  siRNA target sequence for 2610043O12Rik (NM_172402.1,753-771).
gcatatgagttgctaaagt

SEQ ID NO: 773088 - DNA, 19 bp, Mus musculus
  siRNA target sequence for 2610043O12Rik (NM_172402.1,754-772).
catatgagttgctaaagtt

SEQ ID NO: 773089 - DNA, 19 bp, Mus musculus
  siRNA target sequence for 2610043O12Rik (NM_172402.1,759-777).
gagttgctaaagttgaagt

SEQ ID NO: 773090 - DNA, 19 bp, Mus musculus
  siRNA target sequence for 2610043O12Rik (NM_172402.1,765-783).
ctaaagttgaagtacaaca

SEQ ID NO: 773091 - DNA, 19 bp, Mus musculus
  siRNA target sequence for 2610043O12Rik (NM_172402.1,776-794).
gtacaacaaacacatcaat

SEQ ID NO: 773092 - DNA, 19 bp, Mus musculus
  siRNA target sequence for 2610043O12Rik (NM_172402.1,835-853).
ctgtcgcagcgctatccaa

SEQ ID NO: 773093 - DNA, 19 bp, Mus musculus
  siRNA target sequence for 2610043O12Rik (NM_172402.1,837-855).
gtcgcagcgctatccaaaa

SEQ ID NO: 773094 - DNA, 19 bp, Mus musculus
  siRNA target sequence for 2610043O12Rik (NM_172402.1,839-857).
cgcagcgctatccaaaata

SEQ ID NO: 773095 - DNA, 19 bp, Mus musculus
  siRNA target sequence for 2610043O12Rik (NM_172402.1,840-858).
gcagcgctatccaaaatat

SEQ ID NO: 773096 - DNA, 19 bp, Mus musculus
  siRNA target sequence for 2610043O12Rik (NM_172402.1,841-859).
cagcgctatccaaaatatt

SEQ ID NO: 773097 - DNA, 19 bp, Mus musculus
  siRNA target sequence for 2610043O12Rik (NM_172402.1,922-940).
cttatggtggtgtaacaga

SEQ ID NO: 773098 - DNA, 19 bp, Mus musculus
  siRNA target sequence for 2610043O12Rik (NM_172402.1,933-951).
gtaacagatgtgatcacaa

SEQ ID NO: 773099 - DNA, 19 bp, Mus musculus
  siRNA target sequence for 2610043O12Rik (NM_172402.1,969-987).
ggcatcggtggattttaca

SEQ ID NO: 773100 - DNA, 19 bp, Mus musculus
  siRNA target sequence for 2610043O12Rik (NM_172402.1,970-988).
gcatcggtggattttacaa

SEQ ID NO: 773101 - DNA, 19 bp, Mus musculus
  siRNA target sequence for 2610043O12Rik (NM_172402.1,971-989).
catcggtggattttacaaa

SEQ ID NO: 773102 - DNA, 19 bp, Mus musculus
  siRNA target sequence for 2610043O12Rik (NM_172402.1,990-1008).
ggaattgcccccaatctga

SEQ ID NO: 773103 - DNA, 19 bp, Mus musculus
  siRNA target sequence for 2610043O12Rik (NM_172402.1,991-1009).
gaattgcccccaatctgat

SEQ ID NO: 773104 - DNA, 19 bp, Mus musculus
  siRNA target sequence for 2610043O12Rik (NM_172402.1,997-1015).
cccccaatctgattagagt

SEQ ID NO: 773105 - DNA, 19 bp, Mus musculus
  siRNA target sequence for 2610043O12Rik (NM_172402.1,1034-1052).
cacctttgtggtttatgaa

SEQ ID NO: 773106 - DNA, 19 bp, Mus musculus
  siRNA target sequence for 2610043O12Rik (NM_172402.1,1041-1059).
gtggtttatgaaaatgtct

SEQ ID NO: 773107 - DNA, 19 bp, Mus musculus
  siRNA target sequence for 3830405G04Rik (NM_172405.1,69-87).
cgctcactttccatcatct

SEQ ID NO: 773108 - DNA, 19 bp, Mus musculus
  siRNA target sequence for 3830405G04Rik (NM_172405.1,97-115).
ctcagacacggaaggtttt

SEQ ID NO: 773109 - DNA, 19 bp, Mus musculus
  siRNA target sequence for 3830405G04Rik (NM_172405.1,137-155).
gaagccaagaatagcatta

SEQ ID NO: 773110 - DNA, 19 bp, Mus musculus
  siRNA target sequence for 3830405G04Rik (NM_172405.1,142-160).
caagaatagcattactgat

SEQ ID NO: 773111 - DNA, 19 bp, Mus musculus
  siRNA target sequence for 3830405G04Rik (NM_172405.1,162-180).
cacagatggacaacgttaa

SEQ ID NO: 773112 - DNA, 19 bp, Mus musculus
  siRNA target sequence for 3830405G04Rik (NM_172405.1,166-184).
gatggacaacgttaaagtt

SEQ ID NO: 773113 - DNA, 19 bp, Mus musculus
  siRNA target sequence for 3830405G04Rik (NM_172405.1,169-187).
ggacaacgttaaagttgtt

SEQ ID NO: 773114 - DNA, 19 bp, Mus musculus
  siRNA target sequence for 3830405G04Rik (NM_172405.1,214-232).
cccatgctaccggcttttt

SEQ ID NO: 773115 - DNA, 19 bp, Mus musculus
  siRNA target sequence for 3830405G04Rik (NM_172405.1,215-233).
ccatgctaccggcttttta

SEQ ID NO: 773116 - DNA, 19 bp, Mus musculus
  siRNA target sequence for 3830405G04Rik (NM_172405.1,219-237).
gctaccggctttttagctt

SEQ ID NO: 773117 - DNA, 19 bp, Mus musculus
  siRNA target sequence for 3830405G04Rik (NM_172405.1,220-238).
ctaccggctttttagcttt

SEQ ID NO: 773118 - DNA, 19 bp, Mus musculus
  siRNA target sequence for 3830405G04Rik (NM_172405.1,224-242).
cggctttttagcttttata

SEQ ID NO: 773119 - DNA, 19 bp, Mus musculus
  siRNA target sequence for 3830405G04Rik (NM_172405.1,303-321).
ctgtggtgggttggtataa

SEQ ID NO: 773120 - DNA, 19 bp, Mus musculus
  siRNA target sequence for 3830405G04Rik (NM_172405.1,327-345).
gtcgtcactcggatcagat

SEQ ID NO: 773121 - DNA, 19 bp, Mus musculus
  siRNA target sequence for 3830405G04Rik (NM_172405.1,336-354).
cggatcagatcatgacatt

SEQ ID NO: 773122 - DNA, 19 bp, Mus musculus
  siRNA target sequence for 3830405G04Rik (NM_172405.1,338-356).
gatcagatcatgacattta

SEQ ID NO: 773123 - DNA, 19 bp, Mus musculus
  siRNA target sequence for 3830405G04Rik (NM_172405.1,362-380).
cagttactccacagaaact

SEQ ID NO: 773124 - DNA, 19 bp, Mus musculus
  siRNA target sequence for 3830405G04Rik (NM_172405.1,379-397).
cttacagacacatctttca

SEQ ID NO: 773125 - DNA, 19 bp, Mus musculus
  siRNA target sequence for 3830405G04Rik (NM_172405.1,407-425).
ctggttttcctgttgttaa

SEQ ID NO: 773126 - DNA, 19 bp, Mus musculus
  siRNA target sequence for 3830405G04Rik (NM_172405.1,418-436).
gttgttaacaccgagtata

SEQ ID NO: 773127 - DNA, 19 bp, Mus musculus
  siRNA target sequence for 3830405G04Rik (NM_172405.1,421-439).
gttaacaccgagtataaca

SEQ ID NO: 773128 - DNA, 19 bp, Mus musculus
  siRNA target sequence for 3830405G04Rik (NM_172405.1,428-446).
ccgagtataacaacagaaa

SEQ ID NO: 773129 - DNA, 19 bp, Mus musculus
  siRNA target sequence for 3830405G04Rik (NM_172405.1,462-480).
gcctggaacacgccttata

SEQ ID NO: 773130 - DNA, 19 bp, Mus musculus
  siRNA target sequence for 3830405G04Rik (NM_172405.1,464-482).
ctggaacacgccttatata

SEQ ID NO: 773131 - DNA, 19 bp, Mus musculus
  siRNA target sequence for 3830405G04Rik (NM_172405.1,466-484).
ggaacacgccttatataaa

SEQ ID NO: 773132 - DNA, 19 bp, Mus musculus
  siRNA target sequence for 3830405G04Rik (NM_172405.1,540-558).
ctgatcaactgggttataa

SEQ ID NO: 773133 - DNA, 19 bp, Mus musculus
  siRNA target sequence for 3830405G04Rik (NM_172405.1,580-598).
gtccactgtctttagtaga

SEQ ID NO: 773134 - DNA, 19 bp, Mus musculus
  siRNA target sequence for 3830405G04Rik (NM_172405.1,642-660).
cattaaaggaagtccataa

SEQ ID NO: 773135 - DNA, 19 bp, Mus musculus
  siRNA target sequence for 3830405G04Rik (NM_172405.1,678-696).
ctgctgtacaagaagagtt

SEQ ID NO: 773136 - DNA, 19 bp, Mus musculus
  siRNA target sequence for 3830405G04Rik (NM_172405.1,700-718).
gagtatatgccaaaaagtt

SEQ ID NO: 773137 - DNA, 19 bp, Mus musculus
  siRNA target sequence for 3830405G04Rik (NM_172405.1,731-749).
cgagaagtagagaaactat

SEQ ID NO: 773138 - DNA, 19 bp, Mus musculus
  siRNA target sequence for 3830405G04Rik (NM_172405.1,938-956).
cccagtgggtgtaacgtta

SEQ ID NO: 773139 - DNA, 19 bp, Mus musculus
  siRNA target sequence for 3830405G04Rik (NM_172405.1,939-957).
ccagtgggtgtaacgttaa

SEQ ID NO: 773140 - DNA, 19 bp, Mus musculus
  siRNA target sequence for 3830405G04Rik (NM_172405.1,942-960).
gtgggtgtaacgttaacca

SEQ ID NO: 773141 - DNA, 19 bp, Mus musculus
  siRNA target sequence for 3830405G04Rik (NM_172405.1,952-970).
cgttaaccaccatgttgat

SEQ ID NO: 773142 - DNA, 19 bp, Mus musculus
  siRNA target sequence for 3830405G04Rik (NM_172405.1,1164-1182).
cctcaagcagcctagatat

SEQ ID NO: 773143 - DNA, 19 bp, Mus musculus
  siRNA target sequence for 3830405G04Rik (NM_172405.1,1165-1183).
ctcaagcagcctagatata

SEQ ID NO: 773144 - DNA, 19 bp, Mus musculus
  siRNA target sequence for 3830405G04Rik (NM_172405.1,1173-1191).
gcctagatatagacataga

SEQ ID NO: 773145 - DNA, 19 bp, Mus musculus
  siRNA target sequence for 3830405G04Rik (NM_172405.1,1175-1193).
ctagatatagacatagaga

SEQ ID NO: 773146 - DNA, 19 bp, Mus musculus
  siRNA target sequence for 4733401O11Rik (NM_172406.2,176-194).
gaatgccattttcaaatca

SEQ ID NO: 773147 - DNA, 19 bp, Mus musculus
  siRNA target sequence for 4733401O11Rik (NM_172406.2,193-211).
cacgaacaggtgaagcaaa

SEQ ID NO: 773148 - DNA, 19 bp, Mus musculus
  siRNA target sequence for 4733401O11Rik (NM_172406.2,204-222).
gaagcaaacctcatgagta

SEQ ID NO: 773149 - DNA, 19 bp, Mus musculus
  siRNA target sequence for 4733401O11Rik (NM_172406.2,213-231).
ctcatgagtagcaatcata

SEQ ID NO: 773150 - DNA, 19 bp, Mus musculus
  siRNA target sequence for 4733401O11Rik (NM_172406.2,306-324).
gaacagctgccacagtata

SEQ ID NO: 773151 - DNA, 19 bp, Mus musculus
  siRNA target sequence for 4733401O11Rik (NM_172406.2,311-329).
gctgccacagtataagcta

SEQ ID NO: 773152 - DNA, 19 bp, Mus musculus
  siRNA target sequence for 4733401O11Rik (NM_172406.2,312-330).
ctgccacagtataagctaa

SEQ ID NO: 773153 - DNA, 19 bp, Mus musculus
  siRNA target sequence for 4733401O11Rik (NM_172406.2,326-344).
gctaagagtagattctctt

SEQ ID NO: 773154 - DNA, 19 bp, Mus musculus
  siRNA target sequence for 4733401O11Rik (NM_172406.2,429-447).
gagacgttccgctacatga

SEQ ID NO: 773155 - DNA, 19 bp, Mus musculus
  siRNA target sequence for 4733401O11Rik (NM_172406.2,431-449).
gacgttccgctacatgatt

SEQ ID NO: 773156 - DNA, 19 bp, Mus musculus
  siRNA target sequence for 4733401O11Rik (NM_172406.2,620-638).
gttgggacaagcctttgat

SEQ ID NO: 773157 - DNA, 19 bp, Mus musculus
  siRNA target sequence for 4733401O11Rik (NM_172406.2,623-641).
gggacaagcctttgatcaa

SEQ ID NO: 773158 - DNA, 19 bp, Mus musculus
  siRNA target sequence for 4733401O11Rik (NM_172406.2,683-701).
gctccgaatcgtctctatt

SEQ ID NO: 773159 - DNA, 19 bp, Mus musculus
  siRNA target sequence for 4733401O11Rik (NM_172406.2,702-720).
gcctccgaggagagtgaaa

SEQ ID NO: 773160 - DNA, 19 bp, Mus musculus
  siRNA target sequence for 4733401O11Rik (NM_172406.2,843-861).
cgatccaaggcttgtcata

SEQ ID NO: 773161 - DNA, 19 bp, Mus musculus
  siRNA target sequence for 4733401O11Rik (NM_172406.2,844-862).
gatccaaggcttgtcatat

SEQ ID NO: 773162 - DNA, 19 bp, Mus musculus
  siRNA target sequence for 4733401O11Rik (NM_172406.2,847-865).
ccaaggcttgtcatatcaa

SEQ ID NO: 773163 - DNA, 19 bp, Mus musculus
  siRNA target sequence for 4733401O11Rik (NM_172406.2,858-876).
catatcaagacagaaacat

SEQ ID NO: 773164 - DNA, 19 bp, Mus musculus
  siRNA target sequence for 4733401O11Rik (NM_172406.2,897-915).
caacagctcgtcaatgact

SEQ ID NO: 773165 - DNA, 19 bp, Mus musculus
  siRNA target sequence for 4733401O11Rik (NM_172406.2,903-921).
ctcgtcaatgactgtgtta

SEQ ID NO: 773166 - DNA, 19 bp, Mus musculus
  siRNA target sequence for 4733401O11Rik (NM_172406.2,1094-1112).
cctgcaggcttccaaagat

SEQ ID NO: 773167 - DNA, 19 bp, Mus musculus
  siRNA target sequence for 4733401O11Rik (NM_172406.2,1114-1132).
cccagcgacagctgacaat

SEQ ID NO: 773168 - DNA, 19 bp, Mus musculus
  siRNA target sequence for 4733401O11Rik (NM_172406.2,1163-1181).
ggaatgcctgggaatgtta

SEQ ID NO: 773169 - DNA, 19 bp, Mus musculus
  siRNA target sequence for 4733401O11Rik (NM_172406.2,1250-1268).
ccagtcttacggcgttttt

SEQ ID NO: 773170 - DNA, 19 bp, Mus musculus
  siRNA target sequence for 4733401O11Rik (NM_172406.2,1251-1269).
cagtcttacggcgttttta

SEQ ID NO: 773171 - DNA, 19 bp, Mus musculus
  siRNA target sequence for 4733401O11Rik (NM_172406.2,1253-1271).
gtcttacggcgtttttaca

SEQ ID NO: 773172 - DNA, 19 bp, Mus musculus
  siRNA target sequence for 4733401O11Rik (NM_172406.2,1296-1314).
gaagggaccatgcgtaaaa

SEQ ID NO: 773173 - DNA, 19 bp, Mus musculus
  siRNA target sequence for 4733401O11Rik (NM_172406.2,1300-1318).
ggaccatgcgtaaaaagct

SEQ ID NO: 773174 - DNA, 19 bp, Mus musculus
  siRNA target sequence for 4733401O11Rik (NM_172406.2,1358-1376).
gcagaaacgggtgtttgat

SEQ ID NO: 773175 - DNA, 19 bp, Mus musculus
  siRNA target sequence for 4733401O11Rik (NM_172406.2,1359-1377).
cagaaacgggtgtttgata

SEQ ID NO: 773176 - DNA, 19 bp, Mus musculus
  siRNA target sequence for 4733401O11Rik (NM_172406.2,1361-1379).
gaaacgggtgtttgatact

SEQ ID NO: 773177 - DNA, 19 bp, Mus musculus
  siRNA target sequence for 4733401O11Rik (NM_172406.2,1452-1470).
cgttcaagtgtcatcatga

SEQ ID NO: 773178 - DNA, 19 bp, Mus musculus
  siRNA target sequence for 4733401O11Rik (NM_172406.2,1575-1593).
ccaggatcccctgaagata

SEQ ID NO: 773179 - DNA, 19 bp, Mus musculus
  siRNA target sequence for 4733401O11Rik (NM_172406.2,1633-1651).
gacagaactacctaagtga

SEQ ID NO: 773180 - DNA, 19 bp, Mus musculus
  siRNA target sequence for 4733401O11Rik (NM_172406.2,1819-1837).
cagagaagttacagattgt

SEQ ID NO: 773181 - DNA, 19 bp, Mus musculus
  siRNA target sequence for 4733401O11Rik (NM_172406.2,1889-1907).
gccgaacttgggaaccatt

SEQ ID NO: 773182 - DNA, 19 bp, Mus musculus
  siRNA target sequence for 4733401O11Rik (NM_172406.2,1895-1913).
cttgggaaccattcttgat

SEQ ID NO: 773183 - DNA, 19 bp, Mus musculus
  siRNA target sequence for 4733401O11Rik (NM_172406.2,1918-1936).
gcccaggcgtcatcactaa

SEQ ID NO: 773184 - DNA, 19 bp, Mus musculus
  siRNA target sequence for 4733401O11Rik (NM_172406.2,2062-2080).
cgccagtaacgggaatctt

SEQ ID NO: 773185 - DNA, 19 bp, Mus musculus
  siRNA target sequence for 4733401O11Rik (NM_172406.2,2063-2081).
gccagtaacgggaatcttt

SEQ ID NO: 773186 - DNA, 19 bp, Mus musculus
  siRNA target sequence for 4733401O11Rik (NM_172406.2,2102-2120).
gggtggaccaggtacagtt

SEQ ID NO: 773187 - DNA, 19 bp, Mus musculus
  siRNA target sequence for 4733401O11Rik (NM_172406.2,2136-2154).
ggaaagtgtctctcattca

SEQ ID NO: 773188 - DNA, 19 bp, Mus musculus
  siRNA target sequence for 4733401O11Rik (NM_172406.2,2176-2194).
ccacctgcaggatcttaca

SEQ ID NO: 773189 - DNA, 19 bp, Mus musculus
  siRNA target sequence for 4733401O11Rik (NM_172406.2,2299-2317).
catcctatagactaagcat

SEQ ID NO: 773190 - DNA, 19 bp, Mus musculus
  siRNA target sequence for 4733401O11Rik (NM_172406.2,2400-2418).
ggcatctctgctaaagtgt

SEQ ID NO: 773191 - DNA, 19 bp, Mus musculus
  siRNA target sequence for 4733401O11Rik (NM_172406.2,2401-2419).
gcatctctgctaaagtgta

SEQ ID NO: 773192 - DNA, 19 bp, Mus musculus
  siRNA target sequence for 4733401O11Rik (NM_172406.2,2544-2562).
gtgcatgtctccgagaatt

SEQ ID NO: 773193 - DNA, 19 bp, Mus musculus
  siRNA target sequence for 4733401O11Rik (NM_172406.2,2637-2655).
gttggacagctgaagatga

SEQ ID NO: 773194 - DNA, 19 bp, Mus musculus
  siRNA target sequence for 4733401O11Rik (NM_172406.2,2712-2730).
ccccaggagaacggaaaaa

SEQ ID NO: 773195 - DNA, 19 bp, Mus musculus
  siRNA target sequence for 4733401O11Rik (NM_172406.2,2831-2849).
ggtcatgatgggtagcttt

SEQ ID NO: 773196 - DNA, 19 bp, Mus musculus
  siRNA target sequence for 4933440M02Rik (NM_172408.1,1485-1503).
ggtcttcaataaggaaata

SEQ ID NO: 773197 - DNA, 19 bp, Mus musculus
  siRNA target sequence for 4933440M02Rik (NM_172408.1,1488-1506).
cttcaataaggaaatacca

SEQ ID NO: 773198 - DNA, 19 bp, Mus musculus
  siRNA target sequence for 4933440M02Rik (NM_172408.1,1567-1585).
cagaccattgtcaagtcaa

SEQ ID NO: 773199 - DNA, 19 bp, Mus musculus
  siRNA target sequence for 4933440M02Rik (NM_172408.1,1617-1635).
gagccagtactgaagtcaa

SEQ ID NO: 773200 - DNA, 19 bp, Mus musculus
  siRNA target sequence for 4933440M02Rik (NM_172408.1,1619-1637).
gccagtactgaagtcaata

SEQ ID NO: 773201 - DNA, 19 bp, Mus musculus
  siRNA target sequence for 4933440M02Rik (NM_172408.1,1623-1641).
gtactgaagtcaataaata

SEQ ID NO: 773202 - DNA, 19 bp, Mus musculus
  siRNA target sequence for 4933440M02Rik (NM_172408.1,1675-1693).
ccagctgtcagccaaagtt

SEQ ID NO: 773203 - DNA, 19 bp, Mus musculus
  siRNA target sequence for 4933440M02Rik (NM_172408.1,1678-1696).
gctgtcagccaaagttgta

SEQ ID NO: 773204 - DNA, 19 bp, Mus musculus
  siRNA target sequence for 4933440M02Rik (NM_172408.1,1681-1699).
gtcagccaaagttgtaact

SEQ ID NO: 773205 - DNA, 19 bp, Mus musculus
  siRNA target sequence for 4933440M02Rik (NM_172408.1,1760-1778).
cagagtagggccttgcaaa

SEQ ID NO: 773206 - DNA, 19 bp, Mus musculus
  siRNA target sequence for 4933440M02Rik (NM_172408.1,1794-1812).
cagccccagggtcatcatt

SEQ ID NO: 773207 - DNA, 19 bp, Mus musculus
  siRNA target sequence for 4933440M02Rik (NM_172408.1,1809-1827).
cattagggcttcaatctaa

SEQ ID NO: 773208 - DNA, 19 bp, Mus musculus
  siRNA target sequence for 4933440M02Rik (NM_172408.1,1815-1833).
ggcttcaatctaatattca

SEQ ID NO: 773209 - DNA, 19 bp, Mus musculus
  siRNA target sequence for 4933440M02Rik (NM_172408.1,1873-1891).
cctctgtgggagcttaaga

SEQ ID NO: 773210 - DNA, 19 bp, Mus musculus
  siRNA target sequence for 4933440M02Rik (NM_172408.1,1894-1912).
ggaggagatgacatcatat

SEQ ID NO: 773211 - DNA, 19 bp, Mus musculus
  siRNA target sequence for 4933440M02Rik (NM_172408.1,1930-1948).
gctgtggagacaatcacaa

SEQ ID NO: 773212 - DNA, 19 bp, Mus musculus
  siRNA target sequence for 4933440M02Rik (NM_172408.1,1931-1949).
ctgtggagacaatcacaaa

SEQ ID NO: 773213 - DNA, 19 bp, Mus musculus
  siRNA target sequence for 4933440M02Rik (NM_172408.1,2016-2034).
gccctacggggcatacctt

SEQ ID NO: 773214 - DNA, 19 bp, Mus musculus
  siRNA target sequence for 4933440M02Rik (NM_172408.1,2071-2089).
gcagcatcctacattttct

SEQ ID NO: 773215 - DNA, 19 bp, Mus musculus
  siRNA target sequence for 4933440M02Rik (NM_172408.1,2079-2097).
ctacattttctctttggta

SEQ ID NO: 773216 - DNA, 19 bp, Mus musculus
  siRNA target sequence for 4933440M02Rik (NM_172408.1,2160-2178).
gctctacagggaaagtgtt

SEQ ID NO: 773217 - DNA, 19 bp, Mus musculus
  siRNA target sequence for 2410008G02Rik (NM_172410.1,177-195).
ccacatgtagaacgaaatt

SEQ ID NO: 773218 - DNA, 19 bp, Mus musculus
  siRNA target sequence for 2410008G02Rik (NM_172410.1,303-321).
cttgacatatcccatatct

SEQ ID NO: 773219 - DNA, 19 bp, Mus musculus
  siRNA target sequence for 2410008G02Rik (NM_172410.1,344-362).
cgcagccaccacttttgaa

SEQ ID NO: 773220 - DNA, 19 bp, Mus musculus
  siRNA target sequence for 2410008G02Rik (NM_172410.1,425-443).
cttgttgtctgctattgaa

SEQ ID NO: 773221 - DNA, 19 bp, Mus musculus
  siRNA target sequence for 2410008G02Rik (NM_172410.1,467-485).
catggctgaggagtatcat

SEQ ID NO: 773222 - DNA, 19 bp, Mus musculus
  siRNA target sequence for 2410008G02Rik (NM_172410.1,476-494).
ggagtatcatcgagaatca

SEQ ID NO: 773223 - DNA, 19 bp, Mus musculus
  siRNA target sequence for 2410008G02Rik (NM_172410.1,503-521).
cgagtgggaacaagtgaaa

SEQ ID NO: 773224 - DNA, 19 bp, Mus musculus
  siRNA target sequence for 2410008G02Rik (NM_172410.1,564-582).
cttgacttcacccaagaaa

SEQ ID NO: 773225 - DNA, 19 bp, Mus musculus
  siRNA target sequence for 2410008G02Rik (NM_172410.1,579-597).
gaaagtgagccgagttaca

SEQ ID NO: 773226 - DNA, 19 bp, Mus musculus
  siRNA target sequence for 2410008G02Rik (NM_172410.1,592-610).
gttacatcggtgatgtgaa

SEQ ID NO: 773227 - DNA, 19 bp, Mus musculus
  siRNA target sequence for 2410008G02Rik (NM_172410.1,622-640).
gaagctctctggatagcat

SEQ ID NO: 773228 - DNA, 19 bp, Mus musculus
  siRNA target sequence for 2410008G02Rik (NM_172410.1,628-646).
ctctggatagcattgagat

SEQ ID NO: 773229 - DNA, 19 bp, Mus musculus
  siRNA target sequence for 2410008G02Rik (NM_172410.1,657-675).
cggcagatctatatctata

SEQ ID NO: 773230 - DNA, 19 bp, Mus musculus
  siRNA target sequence for 2410008G02Rik (NM_172410.1,658-676).
ggcagatctatatctataa

SEQ ID NO: 773231 - DNA, 19 bp, Mus musculus
  siRNA target sequence for 2410008G02Rik (NM_172410.1,846-864).
gtgcgtatggactttgtca

SEQ ID NO: 773232 - DNA, 19 bp, Mus musculus
  siRNA target sequence for 2410008G02Rik (NM_172410.1,866-884).
gcaagccttgggatatctt

SEQ ID NO: 773233 - DNA, 19 bp, Mus musculus
  siRNA target sequence for 2410008G02Rik (NM_172410.1,971-989).
gctggttcggagtttccta

SEQ ID NO: 773234 - DNA, 19 bp, Mus musculus
  siRNA target sequence for 2410008G02Rik (NM_172410.1,975-993).
gttcggagtttcctaaaca

SEQ ID NO: 773235 - DNA, 19 bp, Mus musculus
  siRNA target sequence for 2410008G02Rik (NM_172410.1,978-996).
cggagtttcctaaacatta

SEQ ID NO: 773236 - DNA, 19 bp, Mus musculus
  siRNA target sequence for 2410008G02Rik (NM_172410.1,1288-1306).
gcgatatcaccgacaatca

SEQ ID NO: 773237 - DNA, 19 bp, Mus musculus
  siRNA target sequence for 2410008G02Rik (NM_172410.1,1290-1308).
gatatcaccgacaatcaga

SEQ ID NO: 773238 - DNA, 19 bp, Mus musculus
  siRNA target sequence for 2410008G02Rik (NM_172410.1,1298-1316).
cgacaatcagagtgaagta

SEQ ID NO: 773239 - DNA, 19 bp, Mus musculus
  siRNA target sequence for 2410008G02Rik (NM_172410.1,1329-1347).
gaggactacctatggttaa

SEQ ID NO: 773240 - DNA, 19 bp, Mus musculus
  siRNA target sequence for 2410008G02Rik (NM_172410.1,1331-1349).
ggactacctatggttaaaa

SEQ ID NO: 773241 - DNA, 19 bp, Mus musculus
  siRNA target sequence for 2410008G02Rik (NM_172410.1,1332-1350).
gactacctatggttaaaat

SEQ ID NO: 773242 - DNA, 19 bp, Mus musculus
  siRNA target sequence for 2410008G02Rik (NM_172410.1,1352-1370).
gaaccaggtgtgttttgat

SEQ ID NO: 773243 - DNA, 19 bp, Mus musculus
  siRNA target sequence for 2410008G02Rik (NM_172410.1,1355-1373).
ccaggtgtgttttgatgat

SEQ ID NO: 773244 - DNA, 19 bp, Mus musculus
  siRNA target sequence for 2410008G02Rik (NM_172410.1,1424-1442).
gcagctgctagaagactat

SEQ ID NO: 773245 - DNA, 19 bp, Mus musculus
  siRNA target sequence for 2410008G02Rik (NM_172410.1,1496-1514).
gttcctgactgcacagttt

SEQ ID NO: 773246 - DNA, 19 bp, Mus musculus
  siRNA target sequence for 2410008G02Rik (NM_172410.1,1590-1608).
gagctaaagctgcttttaa

SEQ ID NO: 773247 - DNA, 19 bp, Mus musculus
  siRNA target sequence for 2410008G02Rik (NM_172410.1,1593-1611).
ctaaagctgcttttaaagt

SEQ ID NO: 773248 - DNA, 19 bp, Mus musculus
  siRNA target sequence for 2410008G02Rik (NM_172410.1,1663-1681).
gcatgcgacggctgaactt

SEQ ID NO: 773249 - DNA, 19 bp, Mus musculus
  siRNA target sequence for 2410008G02Rik (NM_172410.1,1664-1682).
catgcgacggctgaacttt

SEQ ID NO: 773250 - DNA, 19 bp, Mus musculus
  siRNA target sequence for 2410008G02Rik (NM_172410.1,1697-1715).
gctctacacccgcaagttt

SEQ ID NO: 773251 - DNA, 19 bp, Mus musculus
  siRNA target sequence for 2410008G02Rik (NM_172410.1,1732-1750).
gagaagccctccagtactt

SEQ ID NO: 773252 - DNA, 19 bp, Mus musculus
  siRNA target sequence for 2410008G02Rik (NM_172410.1,1737-1755).
gccctccagtacttttact

SEQ ID NO: 773253 - DNA, 19 bp, Mus musculus
  siRNA target sequence for 2410008G02Rik (NM_172410.1,1738-1756).
ccctccagtacttttactt

SEQ ID NO: 773254 - DNA, 19 bp, Mus musculus
  siRNA target sequence for 2410008G02Rik (NM_172410.1,1808-1826).
gagcgagcttgtgatagaa

SEQ ID NO: 773255 - DNA, 19 bp, Mus musculus
  siRNA target sequence for 2410008G02Rik (NM_172410.1,1824-1842).
gaaagtcgagagtttgata

SEQ ID NO: 773256 - DNA, 19 bp, Mus musculus
  siRNA target sequence for 2410008G02Rik (NM_172410.1,1873-1891).
gtagaaagcctggagttat

SEQ ID NO: 773257 - DNA, 19 bp, Mus musculus
  siRNA target sequence for 2410008G02Rik (NM_172410.1,1884-1902).
ggagttatagataagttta

SEQ ID NO: 773258 - DNA, 19 bp, Mus musculus
  siRNA target sequence for 2410008G02Rik (NM_172410.1,1906-1924).
gtgacacaaagcctattat

SEQ ID NO: 773259 - DNA, 19 bp, Mus musculus
  siRNA target sequence for 2410008G02Rik (NM_172410.1,1935-1953).
gcttcggtggcagaaaaca

SEQ ID NO: 773260 - DNA, 19 bp, Mus musculus
  siRNA target sequence for 2410008G02Rik (NM_172410.1,1936-1954).
cttcggtggcagaaaacaa

SEQ ID NO: 773261 - DNA, 19 bp, Mus musculus
  siRNA target sequence for 2410008G02Rik (NM_172410.1,2127-2145).
cagggaataagtgcaaata

SEQ ID NO: 773262 - DNA, 19 bp, Mus musculus
  siRNA target sequence for 2410008G02Rik (NM_172410.1,2130-2148).
ggaataagtgcaaataagt

SEQ ID NO: 773263 - DNA, 19 bp, Mus musculus
  siRNA target sequence for 2410008G02Rik (NM_172410.1,2131-2149).
gaataagtgcaaataagtt

SEQ ID NO: 773264 - DNA, 19 bp, Mus musculus
  siRNA target sequence for 2410008G02Rik (NM_172410.1,2177-2195).
ggacctgatcacctttttt

SEQ ID NO: 773265 - DNA, 19 bp, Mus musculus
  siRNA target sequence for 2410008G02Rik (NM_172410.1,2188-2206).
ccttttttgacgagtatca

SEQ ID NO: 773266 - DNA, 19 bp, Mus musculus
  siRNA target sequence for 2410008G02Rik (NM_172410.1,2224-2242).
gagcctttgatattattga

SEQ ID NO: 773267 - DNA, 19 bp, Mus musculus
  siRNA target sequence for 2410008G02Rik (NM_172410.1,2364-2382).
ctgttcacacagtttaaga

SEQ ID NO: 773268 - DNA, 19 bp, Mus musculus
  siRNA target sequence for 2410008G02Rik (NM_172410.1,2463-2481).
gccagagccctgattacct

SEQ ID NO: 773269 - DNA, 19 bp, Mus musculus
  siRNA target sequence for 2410008G02Rik (NM_172410.1,2503-2521).
ggacgtcgggggacactaa

SEQ ID NO: 773270 - DNA, 19 bp, Mus musculus
  siRNA target sequence for 2410008G02Rik (NM_172410.1,2504-2522).
gacgtcgggggacactaat

SEQ ID NO: 773271 - DNA, 19 bp, Mus musculus
  siRNA target sequence for 2310007B03Rik (NM_172411.1,299-317).
gcggagaatatcttgctta

SEQ ID NO: 773272 - DNA, 19 bp, Mus musculus
  siRNA target sequence for 2310007B03Rik (NM_172411.1,340-358).
cttggactcccgcttcatt

SEQ ID NO: 773273 - DNA, 19 bp, Mus musculus
  siRNA target sequence for 2310007B03Rik (NM_172411.1,348-366).
cccgcttcattgttgacta

SEQ ID NO: 773274 - DNA, 19 bp, Mus musculus
  siRNA target sequence for 2310007B03Rik (NM_172411.1,350-368).
cgcttcattgttgactatt

SEQ ID NO: 773275 - DNA, 19 bp, Mus musculus
  siRNA target sequence for 2310007B03Rik (NM_172411.1,493-511).
ggatggccctgcaatctgt

SEQ ID NO: 773276 - DNA, 19 bp, Mus musculus
  siRNA target sequence for 2310007B03Rik (NM_172411.1,552-570).
ggatgactgctgacatctt

SEQ ID NO: 773277 - DNA, 19 bp, Mus musculus
  siRNA target sequence for 2310007B03Rik (NM_172411.1,631-649).
gtgtgtcctcaaagatctt

SEQ ID NO: 773278 - DNA, 19 bp, Mus musculus
  siRNA target sequence for 2310007B03Rik (NM_172411.1,652-670).
ggtggctgccattgtacat

SEQ ID NO: 773279 - DNA, 19 bp, Mus musculus
  siRNA target sequence for 2310007B03Rik (NM_172411.1,653-671).
gtggctgccattgtacatt

SEQ ID NO: 773280 - DNA, 19 bp, Mus musculus
  siRNA target sequence for 2310007B03Rik (NM_172411.1,704-722).
ctgaatgctgctaatctga

SEQ ID NO: 773281 - DNA, 19 bp, Mus musculus
  siRNA target sequence for 2310007B03Rik (NM_172411.1,859-877).
gggcatcttgagaagaatt

SEQ ID NO: 773282 - DNA, 19 bp, Mus musculus
  siRNA target sequence for 2310007B03Rik (NM_172411.1,1010-1028).
gaccgcgtaaacctagaaa

SEQ ID NO: 773283 - DNA, 19 bp, Mus musculus
  siRNA target sequence for 2310007B03Rik (NM_172411.1,1012-1030).
ccgcgtaaacctagaaagt

SEQ ID NO: 773284 - DNA, 19 bp, Mus musculus
  siRNA target sequence for 2310007B03Rik (NM_172411.1,1013-1031).
cgcgtaaacctagaaagtt

SEQ ID NO: 773285 - DNA, 19 bp, Mus musculus
  siRNA target sequence for 2310007B03Rik (NM_172411.1,1046-1064).
cagaaccatggcctaactt

SEQ ID NO: 773286 - DNA, 19 bp, Mus musculus
  siRNA target sequence for 2310007B03Rik (NM_172411.1,1048-1066).
gaaccatggcctaactttt

SEQ ID NO: 773287 - DNA, 19 bp, Mus musculus
  siRNA target sequence for 2310007B03Rik (NM_172411.1,1289-1307).
cccgaagagtccttacgaa

SEQ ID NO: 773288 - DNA, 19 bp, Mus musculus
  siRNA target sequence for 2310007B03Rik (NM_172411.1,1290-1308).
ccgaagagtccttacgaat

SEQ ID NO: 773289 - DNA, 19 bp, Mus musculus
  siRNA target sequence for 2310007B03Rik (NM_172411.1,1401-1419).
gggccaccgcctactttga

SEQ ID NO: 773290 - DNA, 19 bp, Mus musculus
  siRNA target sequence for 2310007B03Rik (NM_172411.1,1403-1421).
gccaccgcctactttgact

SEQ ID NO: 773291 - DNA, 19 bp, Mus musculus
  siRNA target sequence for 2310007B03Rik (NM_172411.1,1404-1422).
ccaccgcctactttgactt

SEQ ID NO: 773292 - DNA, 19 bp, Mus musculus
  siRNA target sequence for 2810002I04Rik (NM_172414.1,190-208).
gcgttatgttcccacataa

SEQ ID NO: 773293 - DNA, 19 bp, Mus musculus
  siRNA target sequence for 2810002I04Rik (NM_172414.1,191-209).
cgttatgttcccacataat

SEQ ID NO: 773294 - DNA, 19 bp, Mus musculus
  siRNA target sequence for 2810002I04Rik (NM_172414.1,243-261).
cacgacccttacgaacaaa

SEQ ID NO: 773295 - DNA, 19 bp, Mus musculus
  siRNA target sequence for 2810002I04Rik (NM_172414.1,279-297).
ccctcgatgggacatttga

SEQ ID NO: 773296 - DNA, 19 bp, Mus musculus
  siRNA target sequence for 2810002I04Rik (NM_172414.1,499-517).
ggtatcccaaagcaaatga

SEQ ID NO: 773297 - DNA, 19 bp, Mus musculus
  siRNA target sequence for 2810002I04Rik (NM_172414.1,587-605).
ccaccggaagtcacatagt

SEQ ID NO: 773298 - DNA, 19 bp, Mus musculus
  siRNA target sequence for 2810002I04Rik (NM_172414.1,588-606).
caccggaagtcacatagta

SEQ ID NO: 773299 - DNA, 19 bp, Mus musculus
  siRNA target sequence for 2810002I04Rik (NM_172414.1,590-608).
ccggaagtcacatagtaca

SEQ ID NO: 773300 - DNA, 19 bp, Mus musculus
  siRNA target sequence for 2810002I04Rik (NM_172414.1,591-609).
cggaagtcacatagtacaa

SEQ ID NO: 773301 - DNA, 19 bp, Mus musculus
  siRNA target sequence for 2810002I04Rik (NM_172414.1,593-611).
gaagtcacatagtacaagt

SEQ ID NO: 773302 - DNA, 19 bp, Mus musculus
  siRNA target sequence for 2810002I04Rik (NM_172414.1,596-614).
gtcacatagtacaagtgat

SEQ ID NO: 773303 - DNA, 19 bp, Mus musculus
  siRNA target sequence for 2810002I04Rik (NM_172414.1,653-671).
ccctgactcaagtgagttt

SEQ ID NO: 773304 - DNA, 19 bp, Mus musculus
  siRNA target sequence for 2810002I04Rik (NM_172414.1,654-672).
cctgactcaagtgagtttt

SEQ ID NO: 773305 - DNA, 19 bp, Mus musculus
  siRNA target sequence for 2810002I04Rik (NM_172414.1,673-691).
cagacaacagctttggttt

SEQ ID NO: 773306 - DNA, 19 bp, Mus musculus
  siRNA target sequence for 2810002I04Rik (NM_172414.1,695-713).
gagctgggtgaattcatct

SEQ ID NO: 773307 - DNA, 19 bp, Mus musculus
  siRNA target sequence for 2810002I04Rik (NM_172414.1,795-813).
gcaggggagagtttacaga

SEQ ID NO: 773308 - DNA, 19 bp, Mus musculus
  siRNA target sequence for 2810002I04Rik (NM_172414.1,796-814).
caggggagagtttacagaa

SEQ ID NO: 773309 - DNA, 19 bp, Mus musculus
  siRNA target sequence for 2810002I04Rik (NM_172414.1,830-848).
ggagattctcctacaagaa

SEQ ID NO: 773310 - DNA, 19 bp, Mus musculus
  siRNA target sequence for 2810002I04Rik (NM_172414.1,1037-1055).
gggagaggatcaaacttgt

SEQ ID NO: 773311 - DNA, 19 bp, Mus musculus
  siRNA target sequence for 2810002I04Rik (NM_172414.1,1080-1098).
ccacgccagctctctgatt

SEQ ID NO: 773312 - DNA, 19 bp, Mus musculus
  siRNA target sequence for 2810002I04Rik (NM_172414.1,1081-1099).
cacgccagctctctgatta

SEQ ID NO: 773313 - DNA, 19 bp, Mus musculus
  siRNA target sequence for 2810002I04Rik (NM_172414.1,1172-1190).
ctcagcagacgcgttcttt

SEQ ID NO: 773314 - DNA, 19 bp, Mus musculus
  siRNA target sequence for 2810002I04Rik (NM_172414.1,1174-1192).
cagcagacgcgttctttca

SEQ ID NO: 773315 - DNA, 19 bp, Mus musculus
  siRNA target sequence for 2810002I04Rik (NM_172414.1,1301-1319).
ccactgtggacgatcgttt

SEQ ID NO: 773316 - DNA, 19 bp, Mus musculus
  siRNA target sequence for 2810002I04Rik (NM_172414.1,1304-1322).
ctgtggacgatcgtttctt

SEQ ID NO: 773317 - DNA, 19 bp, Mus musculus
  siRNA target sequence for 2810002I04Rik (NM_172414.1,1406-1424).
ggcgaagggcacagaacta

SEQ ID NO: 773318 - DNA, 19 bp, Mus musculus
  siRNA target sequence for 2810002I04Rik (NM_172414.1,1408-1426).
cgaagggcacagaactaga

SEQ ID NO: 773319 - DNA, 19 bp, Mus musculus
  siRNA target sequence for 2810002I04Rik (NM_172414.1,1543-1561).
gacaggtccagcaggtaat

SEQ ID NO: 773320 - DNA, 19 bp, Mus musculus
  siRNA target sequence for 2810002I04Rik (NM_172414.1,1666-1684).
ctgaacgccacatacctaa

SEQ ID NO: 773321 - DNA, 19 bp, Mus musculus
  siRNA target sequence for 2810002I04Rik (NM_172414.1,1671-1689).
cgccacatacctaagtgta

SEQ ID NO: 773322 - DNA, 19 bp, Mus musculus
  siRNA target sequence for 2810441C07Rik (NM_172415.2,506-524).
cgaattgaccgcttcactt

SEQ ID NO: 773323 - DNA, 19 bp, Mus musculus
  siRNA target sequence for 2810441C07Rik (NM_172415.2,507-525).
gaattgaccgcttcacttt

SEQ ID NO: 773324 - DNA, 19 bp, Mus musculus
  siRNA target sequence for 2810441C07Rik (NM_172415.2,780-798).
ctaggctaaaggagagata

SEQ ID NO: 773325 - DNA, 19 bp, Mus musculus
  siRNA target sequence for 2810441C07Rik (NM_172415.2,804-822).
ggactaagagagacatctt

SEQ ID NO: 773326 - DNA, 19 bp, Mus musculus
  siRNA target sequence for 2810441C07Rik (NM_172415.2,863-881).
ctcaagtgcgattgtaaga

SEQ ID NO: 773327 - DNA, 19 bp, Mus musculus
  siRNA target sequence for 2810441C07Rik (NM_172415.2,944-962).
gccgtcatgcgaaaagtct

SEQ ID NO: 773328 - DNA, 19 bp, Mus musculus
  siRNA target sequence for 2810441C07Rik (NM_172415.2,1240-1258).
ccgcgtgaaggagattcta

SEQ ID NO: 773329 - DNA, 19 bp, Mus musculus
  siRNA target sequence for 2810441C07Rik (NM_172415.2,1357-1375).
gtccatggtcctagatgta

SEQ ID NO: 773330 - DNA, 19 bp, Mus musculus
  siRNA target sequence for 2810441C07Rik (NM_172415.2,1359-1377).
ccatggtcctagatgtata

SEQ ID NO: 773331 - DNA, 19 bp, Mus musculus
  siRNA target sequence for 2810441C07Rik (NM_172415.2,1373-1391).
gtatacagcgactatgtga

SEQ ID NO: 773332 - DNA, 19 bp, Mus musculus
  siRNA target sequence for 2810441C07Rik (NM_172415.2,1441-1459).
gccagcgttccttgagttt

SEQ ID NO: 773333 - DNA, 19 bp, Mus musculus
  siRNA target sequence for 2810441C07Rik (NM_172415.2,1799-1817).
cgagggcagctgatcaagt

SEQ ID NO: 773334 - DNA, 19 bp, Mus musculus
  siRNA target sequence for 2810441C07Rik (NM_172415.2,1830-1848).
gggtcttcctgctcaatga

SEQ ID NO: 773335 - DNA, 19 bp, Mus musculus
  siRNA target sequence for 2810441C07Rik (NM_172415.2,1856-1874).
gtctgcgccaacatcaact

SEQ ID NO: 773336 - DNA, 19 bp, Mus musculus
  siRNA target sequence for 2810441C07Rik (NM_172415.2,1983-2001).
gtggcacctacgacaaaga

SEQ ID NO: 773337 - DNA, 19 bp, Mus musculus
  siRNA target sequence for 2810441C07Rik (NM_172415.2,2166-2184).
gcacttaccagaatctgaa

SEQ ID NO: 773338 - DNA, 19 bp, Mus musculus
  siRNA target sequence for 2810441C07Rik (NM_172415.2,2435-2453).
cccgatgaggacaagaaaa

SEQ ID NO: 773339 - DNA, 19 bp, Mus musculus
  siRNA target sequence for 2810441C07Rik (NM_172415.2,2594-2612).
cttccacagggctaccttt

SEQ ID NO: 773340 - DNA, 19 bp, Mus musculus
  siRNA target sequence for 2810441C07Rik (NM_172415.2,2711-2729).
cctgtgctctgcatagagt

SEQ ID NO: 773341 - DNA, 19 bp, Mus musculus
  siRNA target sequence for 2810441C07Rik (NM_172415.2,2719-2737).
ctgcatagagtatattcca

SEQ ID NO: 773342 - DNA, 19 bp, Mus musculus
  siRNA target sequence for 2810441C07Rik (NM_172415.2,3041-3059).
ggcccagggccgattcgaa

SEQ ID NO: 773343 - DNA, 19 bp, Mus musculus
  siRNA target sequence for 2810441C07Rik (NM_172415.2,3102-3120).
cgagggtcactgtactaga

SEQ ID NO: 773344 - DNA, 19 bp, Mus musculus
  siRNA target sequence for 2810441C07Rik (NM_172415.2,3103-3121).
gagggtcactgtactagat

SEQ ID NO: 773345 - DNA, 19 bp, Mus musculus
  siRNA target sequence for 2810441C07Rik (NM_172415.2,3119-3137).
gatgccgccactttgcaaa

SEQ ID NO: 773346 - DNA, 19 bp, Mus musculus
  siRNA target sequence for Ostm1 (NM_172416.2,437-455).
caacaggtcgcaatcaaga

SEQ ID NO: 773347 - DNA, 19 bp, Mus musculus
  siRNA target sequence for Ostm1 (NM_172416.2,447-465).
caatcaagatggacaacat

SEQ ID NO: 773348 - DNA, 19 bp, Mus musculus
  siRNA target sequence for Ostm1 (NM_172416.2,545-563).
ctcatggtctctgagtttt

SEQ ID NO: 773349 - DNA, 19 bp, Mus musculus
  siRNA target sequence for Ostm1 (NM_172416.2,581-599).
gaggcgaactgcgcaaatt

SEQ ID NO: 773350 - DNA, 19 bp, Mus musculus
  siRNA target sequence for Ostm1 (NM_172416.2,591-609).
gcgcaaattgcctaacaaa

SEQ ID NO: 773351 - DNA, 19 bp, Mus musculus
  siRNA target sequence for Ostm1 (NM_172416.2,593-611).
gcaaattgcctaacaaaca

SEQ ID NO: 773352 - DNA, 19 bp, Mus musculus
  siRNA target sequence for Ostm1 (NM_172416.2,594-612).
caaattgcctaacaaacaa

SEQ ID NO: 773353 - DNA, 19 bp, Mus musculus
  siRNA target sequence for Ostm1 (NM_172416.2,615-633).
gtgaggatttgtcaaacaa

SEQ ID NO: 773354 - DNA, 19 bp, Mus musculus
  siRNA target sequence for Ostm1 (NM_172416.2,672-690).
cctgctttgagcataacct

SEQ ID NO: 773355 - DNA, 19 bp, Mus musculus
  siRNA target sequence for Ostm1 (NM_172416.2,691-709).
gcaggggcacacatacagt

SEQ ID NO: 773356 - DNA, 19 bp, Mus musculus
  siRNA target sequence for Ostm1 (NM_172416.2,774-792).
gcctcctgtacagtcaaat

SEQ ID NO: 773357 - DNA, 19 bp, Mus musculus
  siRNA target sequence for Ostm1 (NM_172416.2,856-874).
ggatgcaatgaacattact

SEQ ID NO: 773358 - DNA, 19 bp, Mus musculus
  siRNA target sequence for Ostm1 (NM_172416.2,1039-1057).
caagtcgagcaccagtttt

SEQ ID NO: 773359 - DNA, 19 bp, Mus musculus
  siRNA target sequence for Ostm1 (NM_172416.2,1048-1066).
caccagttttgccaacatt

SEQ ID NO: 773360 - DNA, 19 bp, Mus musculus
  siRNA target sequence for 2310042D19Rik (NM_172417.1,1042-1060).
ccacgagtcctgaacagat

SEQ ID NO: 773361 - DNA, 19 bp, Mus musculus
  siRNA target sequence for 2310042D19Rik (NM_172417.1,1071-1089).
gagtcaggcttggatcttt

SEQ ID NO: 773362 - DNA, 19 bp, Mus musculus
  siRNA target sequence for 2310042D19Rik (NM_172417.1,1082-1100).
ggatctttctacacctatt

SEQ ID NO: 773363 - DNA, 19 bp, Mus musculus
  siRNA target sequence for 2310042D19Rik (NM_172417.1,1086-1104).
ctttctacacctattctga

SEQ ID NO: 773364 - DNA, 19 bp, Mus musculus
  siRNA target sequence for 2310042D19Rik (NM_172417.1,1116-1134).
gatcagatcagaaagacat

SEQ ID NO: 773365 - DNA, 19 bp, Mus musculus
  siRNA target sequence for 2310042D19Rik (NM_172417.1,1135-1153).
ccagagctgcgttacatgt

SEQ ID NO: 773366 - DNA, 19 bp, Mus musculus
  siRNA target sequence for 2310042D19Rik (NM_172417.1,1144-1162).
cgttacatgtggtatccaa

SEQ ID NO: 773367 - DNA, 19 bp, Mus musculus
  siRNA target sequence for 2310042D19Rik (NM_172417.1,1145-1163).
gttacatgtggtatccaaa

SEQ ID NO: 773368 - DNA, 19 bp, Mus musculus
  siRNA target sequence for 2310042D19Rik (NM_172417.1,1190-1208).
ccccatggcctcaccaaat

SEQ ID NO: 773369 - DNA, 19 bp, Mus musculus
  siRNA target sequence for 2310042D19Rik (NM_172417.1,1192-1210).
ccatggcctcaccaaatgt

SEQ ID NO: 773370 - DNA, 19 bp, Mus musculus
  siRNA target sequence for 2310042D19Rik (NM_172417.1,1241-1259).
cgtggctttgcctaaacct

SEQ ID NO: 773371 - DNA, 19 bp, Mus musculus
  siRNA target sequence for 2310042D19Rik (NM_172417.1,1265-1283).
caagccgcagtctgacata

SEQ ID NO: 773372 - DNA, 19 bp, Mus musculus
  siRNA target sequence for 2310042D19Rik (NM_172417.1,1269-1287).
ccgcagtctgacatagctt

SEQ ID NO: 773373 - DNA, 19 bp, Mus musculus
  siRNA target sequence for 2310042D19Rik (NM_172417.1,1280-1298).
catagcttcgtctacacat

SEQ ID NO: 773374 - DNA, 19 bp, Mus musculus
  siRNA target sequence for 2310042D19Rik (NM_172417.1,1344-1362).
caacccaatacaaatcagt

SEQ ID NO: 773375 - DNA, 19 bp, Mus musculus
  siRNA target sequence for 2310042D19Rik (NM_172417.1,1644-1662).
gatctgcctcgttctgttt

SEQ ID NO: 773376 - DNA, 19 bp, Mus musculus
  siRNA target sequence for 2310042D19Rik (NM_172417.1,1650-1668).
cctcgttctgtttcaaaga

SEQ ID NO: 773377 - DNA, 19 bp, Mus musculus
  siRNA target sequence for 2310042D19Rik (NM_172417.1,2055-2073).
cctcctgtatcctctgtat

SEQ ID NO: 773378 - DNA, 19 bp, Mus musculus
  siRNA target sequence for 2310042D19Rik (NM_172417.1,2116-2134).
ctgaggcctacgagttctt

SEQ ID NO: 773379 - DNA, 19 bp, Mus musculus
  siRNA target sequence for 2310042D19Rik (NM_172417.1,2118-2136).
gaggcctacgagttcttct

SEQ ID NO: 773380 - DNA, 19 bp, Mus musculus
  siRNA target sequence for 2310042D19Rik (NM_172417.1,2217-2235).
cctgacacatgcgagtttt

SEQ ID NO: 773381 - DNA, 19 bp, Mus musculus
  siRNA target sequence for 2310042D19Rik (NM_172417.1,2220-2238).
gacacatgcgagttttttt

SEQ ID NO: 773382 - DNA, 19 bp, Mus musculus
  siRNA target sequence for 2310042D19Rik (NM_172417.1,2331-2349).
gaaggcttggtgcctattt

SEQ ID NO: 773383 - DNA, 19 bp, Mus musculus
  siRNA target sequence for 2310042D19Rik (NM_172417.1,2334-2352).
ggcttggtgcctatttcca

SEQ ID NO: 773384 - DNA, 19 bp, Mus musculus
  siRNA target sequence for 2310042D19Rik (NM_172417.1,2335-2353).
gcttggtgcctatttccat

SEQ ID NO: 773385 - DNA, 19 bp, Mus musculus
  siRNA target sequence for 2310042D19Rik (NM_172417.1,2361-2379).
gtctatgaacacttcttca

SEQ ID NO: 773386 - DNA, 19 bp, Mus musculus
  siRNA target sequence for 2310042D19Rik (NM_172417.1,2487-2505).
gcggaacatcttagcttaa

SEQ ID NO: 773387 - DNA, 19 bp, Mus musculus
  siRNA target sequence for 2310042D19Rik (NM_172417.1,2489-2507).
ggaacatcttagcttaaca

SEQ ID NO: 773388 - DNA, 19 bp, Mus musculus
  siRNA target sequence for 2310042D19Rik (NM_172417.1,2535-2553).
cccctcacttcatttacgt

SEQ ID NO: 773389 - DNA, 19 bp, Mus musculus
  siRNA target sequence for 2310042D19Rik (NM_172417.1,2545-2563).
catttacgttcagtcaaaa

SEQ ID NO: 773390 - DNA, 19 bp, Mus musculus
  siRNA target sequence for 9030612E09Rik (NM_172419.1,171-189).
ggccgctgaggcaaaacat

SEQ ID NO: 773391 - DNA, 19 bp, Mus musculus
  siRNA target sequence for 9030612E09Rik (NM_172419.1,403-421).
ctgtttgccaggaagcttt

SEQ ID NO: 773392 - DNA, 19 bp, Mus musculus
  siRNA target sequence for 4930556B16Rik (NM_172421.1,304-322).
cgccaagacggtcttagaa

SEQ ID NO: 773393 - DNA, 19 bp, Mus musculus
  siRNA target sequence for 4930556B16Rik (NM_172421.1,305-323).
gccaagacggtcttagaaa

SEQ ID NO: 773394 - DNA, 19 bp, Mus musculus
  siRNA target sequence for 4930556B16Rik (NM_172421.1,345-363).
gtcataaagaaattcttca

SEQ ID NO: 773395 - DNA, 19 bp, Mus musculus
  siRNA target sequence for 4930556B16Rik (NM_172421.1,428-446).
gcaatgctgcacacaaact

SEQ ID NO: 773396 - DNA, 19 bp, Mus musculus
  siRNA target sequence for 4930556B16Rik (NM_172421.1,482-500).
ggtagaatgggcgtgtata

SEQ ID NO: 773397 - DNA, 19 bp, Mus musculus
  siRNA target sequence for 4930556B16Rik (NM_172421.1,492-510).
gcgtgtatactttgaagaa

SEQ ID NO: 773398 - DNA, 19 bp, Mus musculus
  siRNA target sequence for 4930556B16Rik (NM_172421.1,708-726).
ccaccattccagcaagtaa

SEQ ID NO: 773399 - DNA, 19 bp, Mus musculus
  siRNA target sequence for 4930556B16Rik (NM_172421.1,709-727).
caccattccagcaagtaaa

SEQ ID NO: 773400 - DNA, 19 bp, Mus musculus
  siRNA target sequence for 4930556B16Rik (NM_172421.1,774-792).
ccttgaagcagcaacaaca

SEQ ID NO: 773401 - DNA, 19 bp, Mus musculus
  siRNA target sequence for 4930556B16Rik (NM_172421.1,899-917).
cagatgaaaaggactaaat

SEQ ID NO: 773402 - DNA, 19 bp, Mus musculus
  siRNA target sequence for 4930556B16Rik (NM_172421.1,910-928).
gactaaatgtgctgacatt

SEQ ID NO: 773403 - DNA, 19 bp, Mus musculus
  siRNA target sequence for 4930556B16Rik (NM_172421.1,948-966).
ccattctggttaatactaa

SEQ ID NO: 773404 - DNA, 19 bp, Mus musculus
  siRNA target sequence for 4930556B16Rik (NM_172421.1,968-986).
cttcgagcactgatcaaca

SEQ ID NO: 773405 - DNA, 19 bp, Mus musculus
  siRNA target sequence for 4930556B16Rik (NM_172421.1,1092-1110).
gctcagcccttaacaatga

SEQ ID NO: 773406 - DNA, 19 bp, Mus musculus
  siRNA target sequence for 4930556B16Rik (NM_172421.1,1095-1113).
cagcccttaacaatgagtt

SEQ ID NO: 773407 - DNA, 19 bp, Mus musculus
  siRNA target sequence for 4930556B16Rik (NM_172421.1,1146-1164).
ggctctcagaaggtgaatt

SEQ ID NO: 773408 - DNA, 19 bp, Mus musculus
  siRNA target sequence for 4930556B16Rik (NM_172421.1,1158-1176).
gtgaatttactcctgaaat

SEQ ID NO: 773409 - DNA, 19 bp, Mus musculus
  siRNA target sequence for 4930556B16Rik (NM_172421.1,1183-1201).
gagaattcgacaagagatt

SEQ ID NO: 773410 - DNA, 19 bp, Mus musculus
  siRNA target sequence for 4930556B16Rik (NM_172421.1,1223-1241).
ctgtggaaggaacaattct

SEQ ID NO: 773411 - DNA, 19 bp, Mus musculus
  siRNA target sequence for 4930556B16Rik (NM_172421.1,1225-1243).
gtggaaggaacaattcttt

SEQ ID NO: 773412 - DNA, 19 bp, Mus musculus
  siRNA target sequence for 4930556B16Rik (NM_172421.1,1334-1352).
ccagctgagcaaccaaaat

SEQ ID NO: 773413 - DNA, 19 bp, Mus musculus
  siRNA target sequence for 4930556B16Rik (NM_172421.1,1381-1399).
cagaattgtcccagtagtt

SEQ ID NO: 773414 - DNA, 19 bp, Mus musculus
  siRNA target sequence for 4930556B16Rik (NM_172421.1,1405-1423).
gtccgagtgtaaagaagaa

SEQ ID NO: 773415 - DNA, 19 bp, Mus musculus
  siRNA target sequence for 4930556B16Rik (NM_172421.1,1512-1530).
cagctagcaatacaaatga

SEQ ID NO: 773416 - DNA, 19 bp, Mus musculus
  siRNA target sequence for 4930556B16Rik (NM_172421.1,1635-1653).
ccacaacttctcgtaataa

SEQ ID NO: 773417 - DNA, 19 bp, Mus musculus
  siRNA target sequence for 4930556B16Rik (NM_172421.1,1638-1656).
caacttctcgtaataacaa

SEQ ID NO: 773418 - DNA, 19 bp, Mus musculus
  siRNA target sequence for 4930556B16Rik (NM_172421.1,1666-1684).
ccaagaagcgttagctata

SEQ ID NO: 773419 - DNA, 19 bp, Mus musculus
  siRNA target sequence for 4930556B16Rik (NM_172421.1,1667-1685).
caagaagcgttagctatat

SEQ ID NO: 773420 - DNA, 19 bp, Mus musculus
  siRNA target sequence for 4930556B16Rik (NM_172421.1,1686-1704).
ccccaagcaaatctaaaaa

SEQ ID NO: 773421 - DNA, 19 bp, Mus musculus
  siRNA target sequence for 4930556B16Rik (NM_172421.1,1687-1705).
cccaagcaaatctaaaaat

SEQ ID NO: 773422 - DNA, 19 bp, Mus musculus
  siRNA target sequence for 4930556B16Rik (NM_172421.1,1710-1728).
ggttacaaaaacccataat

SEQ ID NO: 773423 - DNA, 19 bp, Mus musculus
  siRNA target sequence for 4930556B16Rik (NM_172421.1,1749-1767).
gtccactgaaccctgatat

SEQ ID NO: 773424 - DNA, 19 bp, Mus musculus
  siRNA target sequence for 4930556B16Rik (NM_172421.1,1751-1769).
ccactgaaccctgatatga

SEQ ID NO: 773425 - DNA, 19 bp, Mus musculus
  siRNA target sequence for 4930556B16Rik (NM_172421.1,1776-1794).
caccagcaactgttactga

SEQ ID NO: 773426 - DNA, 19 bp, Mus musculus
  siRNA target sequence for 4930556B16Rik (NM_172421.1,1805-1823).
gaaagtctcaagaggaaat

SEQ ID NO: 773427 - DNA, 19 bp, Mus musculus
  siRNA target sequence for 4930556B16Rik (NM_172421.1,1849-1867).
cagtagctgggagaaaaga

SEQ ID NO: 773428 - DNA, 19 bp, Mus musculus
  siRNA target sequence for 4930556B16Rik (NM_172421.1,1914-1932).
ccccacagccttttcttaa

SEQ ID NO: 773429 - DNA, 19 bp, Mus musculus
  siRNA target sequence for 4930556B16Rik (NM_172421.1,1916-1934).
ccacagccttttcttaata

SEQ ID NO: 773430 - DNA, 19 bp, Mus musculus
  siRNA target sequence for 4930556B16Rik (NM_172421.1,1944-1962).
gggtccaagtgcgaaaagt

SEQ ID NO: 773431 - DNA, 19 bp, Mus musculus
  siRNA target sequence for 4930556B16Rik (NM_172421.1,1999-2017).
gatgctgttttctacatca

SEQ ID NO: 773432 - DNA, 19 bp, Mus musculus
  siRNA target sequence for 4930556B16Rik (NM_172421.1,2023-2041).
ctctcccagggctcgtttt

SEQ ID NO: 773433 - DNA, 19 bp, Mus musculus
  siRNA target sequence for 4930556B16Rik (NM_172421.1,2027-2045).
cccagggctcgttttccaa

SEQ ID NO: 773434 - DNA, 19 bp, Mus musculus
  siRNA target sequence for 4930556B16Rik (NM_172421.1,2050-2068).
catcactagtccttacaga

SEQ ID NO: 773435 - DNA, 19 bp, Mus musculus
  siRNA target sequence for 4930556B16Rik (NM_172421.1,2079-2097).
gaactctggcagacatcaa

SEQ ID NO: 773436 - DNA, 19 bp, Mus musculus
  siRNA target sequence for 4930556B16Rik (NM_172421.1,2328-2346).
gaggtacgagagaactttt

SEQ ID NO: 773437 - DNA, 19 bp, Mus musculus
  siRNA target sequence for 4930556B16Rik (NM_172421.1,2358-2376).
ctcaacctgagaccaatat

SEQ ID NO: 773438 - DNA, 19 bp, Mus musculus
  siRNA target sequence for 4930556B16Rik (NM_172421.1,2467-2485).
cacaagtgtcccattacca

SEQ ID NO: 773439 - DNA, 19 bp, Mus musculus
  siRNA target sequence for 4930556B16Rik (NM_172421.1,2625-2643).
caggagcctcaactgttta

SEQ ID NO: 773440 - DNA, 19 bp, Mus musculus
  siRNA target sequence for 4930556B16Rik (NM_172421.1,2670-2688).
ccaaagcaggttctaataa

SEQ ID NO: 773441 - DNA, 19 bp, Mus musculus
  siRNA target sequence for 4930556B16Rik (NM_172421.1,2726-2744).
gctcctgctccactagata

SEQ ID NO: 773442 - DNA, 19 bp, Mus musculus
  siRNA target sequence for 4930556B16Rik (NM_172421.1,2727-2745).
ctcctgctccactagatat

SEQ ID NO: 773443 - DNA, 19 bp, Mus musculus
  siRNA target sequence for 4930556B16Rik (NM_172421.1,2729-2747).
cctgctccactagatatga

SEQ ID NO: 773444 - DNA, 19 bp, Mus musculus
  siRNA target sequence for 4930556B16Rik (NM_172421.1,2732-2750).
gctccactagatatgactt

SEQ ID NO: 773445 - DNA, 19 bp, Mus musculus
  siRNA target sequence for 4930556B16Rik (NM_172421.1,2763-2781).
caacagccagtttagaaaa

SEQ ID NO: 773446 - DNA, 19 bp, Mus musculus
  siRNA target sequence for 4930556B16Rik (NM_172421.1,2800-2818).
cagtggaactgcaacatct

SEQ ID NO: 773447 - DNA, 19 bp, Mus musculus
  siRNA target sequence for 4930556B16Rik (NM_172421.1,2874-2892).
caggaacttctgcaaatat

SEQ ID NO: 773448 - DNA, 19 bp, Mus musculus
  siRNA target sequence for 4930556B16Rik (NM_172421.1,2900-2918).
cccatttcaagaacaagtt

SEQ ID NO: 773449 - DNA, 19 bp, Mus musculus
  siRNA target sequence for 4930556B16Rik (NM_172421.1,2902-2920).
catttcaagaacaagttct

SEQ ID NO: 773450 - DNA, 19 bp, Mus musculus
  siRNA target sequence for 4930556B16Rik (NM_172421.1,2926-2944).
ccctgctaataatccttta

SEQ ID NO: 773451 - DNA, 19 bp, Mus musculus
  siRNA target sequence for 4930556B16Rik (NM_172421.1,2928-2946).
ctgctaataatcctttagt

SEQ ID NO: 773452 - DNA, 19 bp, Mus musculus
  siRNA target sequence for 4930556B16Rik (NM_172421.1,2930-2948).
gctaataatcctttagtta

SEQ ID NO: 773453 - DNA, 19 bp, Mus musculus
  siRNA target sequence for 4930556B16Rik (NM_172421.1,2993-3011).
cctaagcctctcaccaaaa

SEQ ID NO: 773454 - DNA, 19 bp, Mus musculus
  siRNA target sequence for 4930556B16Rik (NM_172421.1,2998-3016).
gcctctcaccaaaattgaa

SEQ ID NO: 773455 - DNA, 19 bp, Mus musculus
  siRNA target sequence for 4930556B16Rik (NM_172421.1,3061-3079).
gatattccctggtatcagt

SEQ ID NO: 773456 - DNA, 19 bp, Mus musculus
  siRNA target sequence for 4930556B16Rik (NM_172421.1,3071-3089).
ggtatcagtgtaatggaaa

SEQ ID NO: 773457 - DNA, 19 bp, Mus musculus
  siRNA target sequence for 4930556B16Rik (NM_172421.1,3146-3164).
gggaaacccttgcaaagta

SEQ ID NO: 773458 - DNA, 19 bp, Mus musculus
  siRNA target sequence for 4930556B16Rik (NM_172421.1,3238-3256).
gtaccgagaaggtctaagt

SEQ ID NO: 773459 - DNA, 19 bp, Mus musculus
  siRNA target sequence for 4930556B16Rik (NM_172421.1,3241-3259).
ccgagaaggtctaagtaaa

SEQ ID NO: 773460 - DNA, 19 bp, Mus musculus
  siRNA target sequence for 4930556B16Rik (NM_172421.1,3242-3260).
cgagaaggtctaagtaaaa

SEQ ID NO: 773461 - DNA, 19 bp, Mus musculus
  siRNA target sequence for 4930556B16Rik (NM_172421.1,3264-3282).
cgcaagatcagctctttca

SEQ ID NO: 773462 - DNA, 19 bp, Mus musculus
  siRNA target sequence for 4930556B16Rik (NM_172421.1,3306-3324).
gacagagtgttctttcatt

SEQ ID NO: 773463 - DNA, 19 bp, Mus musculus
  siRNA target sequence for 4930556B16Rik (NM_172421.1,3331-3349).
gccctctcagttcaacttt

SEQ ID NO: 773464 - DNA, 19 bp, Mus musculus
  siRNA target sequence for 4930556B16Rik (NM_172421.1,3435-3453).
caatggcaggtcactattt

SEQ ID NO: 773465 - DNA, 19 bp, Mus musculus
  siRNA target sequence for 4930556B16Rik (NM_172421.1,3440-3458).
gcaggtcactatttactta

SEQ ID NO: 773466 - DNA, 19 bp, Mus musculus
  siRNA target sequence for 4930556B16Rik (NM_172421.1,3477-3495).
ggggtacagagaacattaa

SEQ ID NO: 773467 - DNA, 19 bp, Mus musculus
  siRNA target sequence for 4930556B16Rik (NM_172421.1,3518-3536).
gatgatcgattttgtctaa

SEQ ID NO: 773468 - DNA, 19 bp, Mus musculus
  siRNA target sequence for 4930556B16Rik (NM_172421.1,3558-3576).
gaatggggcatgcagatta

SEQ ID NO: 773469 - DNA, 19 bp, Mus musculus
  siRNA target sequence for 4930556B16Rik (NM_172421.1,3566-3584).
catgcagattataaaaaca

SEQ ID NO: 773470 - DNA, 19 bp, Mus musculus
  siRNA target sequence for 4930556B16Rik (NM_172421.1,3707-3725).
catggggaagcttcatcta

SEQ ID NO: 773471 - DNA, 19 bp, Mus musculus
  siRNA target sequence for 4930556B16Rik (NM_172421.1,3712-3730).
ggaagcttcatctaccaat

SEQ ID NO: 773472 - DNA, 19 bp, Mus musculus
  siRNA target sequence for 4930556B16Rik (NM_172421.1,3716-3734).
gcttcatctaccaatgatt

SEQ ID NO: 773473 - DNA, 19 bp, Mus musculus
  siRNA target sequence for 4930556B16Rik (NM_172421.1,3720-3738).
catctaccaatgattgttt

SEQ ID NO: 773474 - DNA, 19 bp, Mus musculus
  siRNA target sequence for 4930556B16Rik (NM_172421.1,3838-3856).
gagcctgcctagagatttt

SEQ ID NO: 773475 - DNA, 19 bp, Mus musculus
  siRNA target sequence for 4930556B16Rik (NM_172421.1,3840-3858).
gcctgcctagagattttat

SEQ ID NO: 773476 - DNA, 19 bp, Mus musculus
  siRNA target sequence for 4930556B16Rik (NM_172421.1,3841-3859).
cctgcctagagattttatt

SEQ ID NO: 773477 - DNA, 19 bp, Mus musculus
  siRNA target sequence for 4930556B16Rik (NM_172421.1,3990-4008).
cactgcaaacccccaaatt

SEQ ID NO: 773478 - DNA, 19 bp, Mus musculus
  siRNA target sequence for 4930556B16Rik (NM_172421.1,3992-4010).
ctgcaaacccccaaattgt

SEQ ID NO: 773479 - DNA, 19 bp, Mus musculus
  siRNA target sequence for 4930556B16Rik (NM_172421.1,4025-4043).
cagatagggccaagctata

SEQ ID NO: 773480 - DNA, 19 bp, Mus musculus
  siRNA target sequence for 4930556B16Rik (NM_172421.1,4027-4045).
gatagggccaagctataga

SEQ ID NO: 773481 - DNA, 19 bp, Mus musculus
  siRNA target sequence for 4930556B16Rik (NM_172421.1,4038-4056).
gctatagaggcatgatcaa

SEQ ID NO: 773482 - DNA, 19 bp, Mus musculus
  siRNA target sequence for 4930556B16Rik (NM_172421.1,4039-4057).
ctatagaggcatgatcaat

SEQ ID NO: 773483 - DNA, 19 bp, Mus musculus
  siRNA target sequence for 4930556B16Rik (NM_172421.1,4068-4086).
catcagacatggaccataa

SEQ ID NO: 773484 - DNA, 19 bp, Mus musculus
  siRNA target sequence for 4930556B16Rik (NM_172421.1,4078-4096).
ggaccataactctgctata

SEQ ID NO: 773485 - DNA, 19 bp, Mus musculus
  siRNA target sequence for 4930556B16Rik (NM_172421.1,4081-4099).
ccataactctgctatacca

SEQ ID NO: 773486 - DNA, 19 bp, Mus musculus
  siRNA target sequence for 4930556B16Rik (NM_172421.1,4105-4123).
ccaggtatctagcaatgta

SEQ ID NO: 773487 - DNA, 19 bp, Mus musculus
  siRNA target sequence for 4930556B16Rik (NM_172421.1,4124-4142).
ggggacgtcatgtcgtttt

SEQ ID NO: 773488 - DNA, 19 bp, Mus musculus
  siRNA target sequence for 4930556B16Rik (NM_172421.1,4164-4182).
ctgccagtcaagcaatgaa

SEQ ID NO: 773489 - DNA, 19 bp, Mus musculus
  siRNA target sequence for 4930556B16Rik (NM_172421.1,4188-4206).
gcagccatggccagacaat

SEQ ID NO: 773490 - DNA, 19 bp, Mus musculus
  siRNA target sequence for 4930556B16Rik (NM_172421.1,4216-4234).
gacttttcctgatgacaat

SEQ ID NO: 773491 - DNA, 19 bp, Mus musculus
  siRNA target sequence for 4930556B16Rik (NM_172421.1,4240-4258).
cgaggacacaccatcaaaa

SEQ ID NO: 773492 - DNA, 19 bp, Mus musculus
  siRNA target sequence for 4930556B16Rik (NM_172421.1,4241-4259).
gaggacacaccatcaaaat

SEQ ID NO: 773493 - DNA, 19 bp, Mus musculus
  siRNA target sequence for 2810421I24Rik (NM_172422.1,142-160).
gcacgttccttgttatgga

SEQ ID NO: 773494 - DNA, 19 bp, Mus musculus
  siRNA target sequence for 2810421I24Rik (NM_172422.1,159-177).
gaccatccgacgattcagt

SEQ ID NO: 773495 - DNA, 19 bp, Mus musculus
  siRNA target sequence for 2810421I24Rik (NM_172422.1,165-183).
ccgacgattcagtacgtta

SEQ ID NO: 773496 - DNA, 19 bp, Mus musculus
  siRNA target sequence for 2810421I24Rik (NM_172422.1,200-218).
ctttgaggatagatccatt

SEQ ID NO: 773497 - DNA, 19 bp, Mus musculus
  siRNA target sequence for 2810421I24Rik (NM_172422.1,227-245).
gcagaccagaggttattca

SEQ ID NO: 773498 - DNA, 19 bp, Mus musculus
  siRNA target sequence for 2810421I24Rik (NM_172422.1,228-246).
cagaccagaggttattcat

SEQ ID NO: 773499 - DNA, 19 bp, Mus musculus
  siRNA target sequence for 2810421I24Rik (NM_172422.1,233-251).
cagaggttattcattcaaa

SEQ ID NO: 773500 - DNA, 19 bp, Mus musculus
  siRNA target sequence for 2810421I24Rik (NM_172422.1,377-395).
gccattcagccgtttttaa

SEQ ID NO: 773501 - DNA, 19 bp, Mus musculus
  siRNA target sequence for 2810421I24Rik (NM_172422.1,378-396).
ccattcagccgtttttaaa

SEQ ID NO: 773502 - DNA, 19 bp, Mus musculus
  siRNA target sequence for 2810421I24Rik (NM_172422.1,426-444).
gtcctttgatgcaaaacat

SEQ ID NO: 773503 - DNA, 19 bp, Mus musculus
  siRNA target sequence for 2810421I24Rik (NM_172422.1,436-454).
gcaaaacattcttttgtct

SEQ ID NO: 773504 - DNA, 19 bp, Mus musculus
  siRNA target sequence for 2810421I24Rik (NM_172422.1,460-478).
gggacatctgatcatgatt

SEQ ID NO: 773505 - DNA, 19 bp, Mus musculus
  siRNA target sequence for 2810421I24Rik (NM_172422.1,461-479).
ggacatctgatcatgattt

SEQ ID NO: 773506 - DNA, 19 bp, Mus musculus
  siRNA target sequence for 2810421I24Rik (NM_172422.1,536-554).
gaccaacccctgtgaatta

SEQ ID NO: 773507 - DNA, 19 bp, Mus musculus
  siRNA target sequence for 2810421I24Rik (NM_172422.1,539-557).
caacccctgtgaattataa

SEQ ID NO: 773508 - DNA, 19 bp, Mus musculus
  siRNA target sequence for 2810421I24Rik (NM_172422.1,620-638).
catttcctggtagtaacta

SEQ ID NO: 773509 - DNA, 19 bp, Mus musculus
  siRNA target sequence for 2810421I24Rik (NM_172422.1,642-660).
cttagcaatgtggataatt

SEQ ID NO: 773510 - DNA, 19 bp, Mus musculus
  siRNA target sequence for 2810421I24Rik (NM_172422.1,679-697).
gacaagaggcgctttgaga

SEQ ID NO: 773511 - DNA, 19 bp, Mus musculus
  siRNA target sequence for 2810421I24Rik (NM_172422.1,758-776).
ccaagattatgcactatga

SEQ ID NO: 773512 - DNA, 19 bp, Mus musculus
  siRNA target sequence for 2810421I24Rik (NM_172422.1,780-798).
cctcttgttcagccttaat

SEQ ID NO: 773513 - DNA, 19 bp, Mus musculus
  siRNA target sequence for 2810421I24Rik (NM_172422.1,783-801).
cttgttcagccttaatgct

SEQ ID NO: 773514 - DNA, 19 bp, Mus musculus
  siRNA target sequence for 2810421I24Rik (NM_172422.1,791-809).
gccttaatgctatagtgaa

SEQ ID NO: 773515 - DNA, 19 bp, Mus musculus
  siRNA target sequence for 2810421I24Rik (NM_172422.1,830-848).
ctcttatggtacagacttt

SEQ ID NO: 773516 - DNA, 19 bp, Mus musculus
  siRNA target sequence for 2810421I24Rik (NM_172422.1,879-897).
gtgtgatgagagatgtctt

SEQ ID NO: 773517 - DNA, 19 bp, Mus musculus
  siRNA target sequence for 2810421I24Rik (NM_172422.1,886-904).
gagagatgtctttcaattt

SEQ ID NO: 773518 - DNA, 19 bp, Mus musculus
  siRNA target sequence for 2810421I24Rik (NM_172422.1,908-926).
caaccgctttagtgtcaat

SEQ ID NO: 773519 - DNA, 19 bp, Mus musculus
  siRNA target sequence for 2810421I24Rik (NM_172422.1,930-948).
gccatgcatgaatgtgaat

SEQ ID NO: 773520 - DNA, 19 bp, Mus musculus
  siRNA target sequence for 2810421I24Rik (NM_172422.1,962-980).
ggttgcgaatcctagttga

SEQ ID NO: 773521 - DNA, 19 bp, Mus musculus
  siRNA target sequence for 2810421I24Rik (NM_172422.1,963-981).
gttgcgaatcctagttgat

SEQ ID NO: 773522 - DNA, 19 bp, Mus musculus
  siRNA target sequence for 2810421I24Rik (NM_172422.1,1018-1036).
caaacagtgatgaaatgta

SEQ ID NO: 773523 - DNA, 19 bp, Mus musculus
  siRNA target sequence for 2810421I24Rik (NM_172422.1,1093-1111).
gagttaggcagattttcca

SEQ ID NO: 773524 - DNA, 19 bp, Mus musculus
  siRNA target sequence for 2810421I24Rik (NM_172422.1,1099-1117).
ggcagattttccatcttga

SEQ ID NO: 773525 - DNA, 19 bp, Mus musculus
  siRNA target sequence for 2810421I24Rik (NM_172422.1,1100-1118).
gcagattttccatcttgaa

SEQ ID NO: 773526 - DNA, 19 bp, Mus musculus
  siRNA target sequence for 2810421I24Rik (NM_172422.1,1125-1143).
gcacatgtttgaagtctta

SEQ ID NO: 773527 - DNA, 19 bp, Mus musculus
  siRNA target sequence for 2810421I24Rik (NM_172422.1,1187-1205).
gtaaggttgtcatagataa

SEQ ID NO: 773528 - DNA, 19 bp, Mus musculus
  siRNA target sequence for 2810421I24Rik (NM_172422.1,1260-1278).
cctccgataccaaaatgaa

SEQ ID NO: 773529 - DNA, 19 bp, Mus musculus
  siRNA target sequence for 2810421I24Rik (NM_172422.1,1263-1281).
ccgataccaaaatgaagat

SEQ ID NO: 773530 - DNA, 19 bp, Mus musculus
  siRNA target sequence for 2810421I24Rik (NM_172422.1,1276-1294).
gaagatctcttcaaaagca

SEQ ID NO: 773531 - DNA, 19 bp, Mus musculus
  siRNA target sequence for 2810421I24Rik (NM_172422.1,1306-1324).
gtggctacaacctttgaca

SEQ ID NO: 773532 - DNA, 19 bp, Mus musculus
  siRNA target sequence for 2810421I24Rik (NM_172422.1,1328-1346).
ggaagttgaaacaagttat

SEQ ID NO: 773533 - DNA, 19 bp, Mus musculus
  siRNA target sequence for 2810421I24Rik (NM_172422.1,1332-1350).
gttgaaacaagttatcttt

SEQ ID NO: 773534 - DNA, 19 bp, Mus musculus
  siRNA target sequence for 2810421I24Rik (NM_172422.1,1353-1371).
cctcttattatttgaaact

SEQ ID NO: 773535 - DNA, 19 bp, Mus musculus
  siRNA target sequence for 2810421I24Rik (NM_172422.1,1390-1408).
ggtttgatggacaagctta

SEQ ID NO: 773536 - DNA, 19 bp, Mus musculus
  siRNA target sequence for 2810421I24Rik (NM_172422.1,1391-1409).
gtttgatggacaagcttat

SEQ ID NO: 773537 - DNA, 19 bp, Mus musculus
  siRNA target sequence for 2810421I24Rik (NM_172422.1,1404-1422).
gcttatggagaaagtagta

SEQ ID NO: 773538 - DNA, 19 bp, Mus musculus
  siRNA target sequence for 2810421I24Rik (NM_172422.1,1433-1451).
gctctctaaacgtgaagaa

SEQ ID NO: 773539 - DNA, 19 bp, Mus musculus
  siRNA target sequence for 2810421I24Rik (NM_172422.1,1444-1462).
gtgaagaacatcgtttcta

SEQ ID NO: 773540 - DNA, 19 bp, Mus musculus
  siRNA target sequence for 2810421I24Rik (NM_172422.1,1464-1482).
cctgcatgtgtattcttct

SEQ ID NO: 773541 - DNA, 19 bp, Mus musculus
  siRNA target sequence for 2810421I24Rik (NM_172422.1,1481-1499).
ctctcaatcatgttcacaa

SEQ ID NO: 773542 - DNA, 19 bp, Mus musculus
  siRNA target sequence for 2810421I24Rik (NM_172422.1,1483-1501).
ctcaatcatgttcacaaaa

SEQ ID NO: 773543 - DNA, 19 bp, Mus musculus
  siRNA target sequence for 2810421I24Rik (NM_172422.1,1565-1583).
cttctgaaagcctgttgaa

SEQ ID NO: 773544 - DNA, 19 bp, Mus musculus
  siRNA target sequence for 2810421I24Rik (NM_172422.1,1585-1603).
gctgtgcattcgttttgca

SEQ ID NO: 773545 - DNA, 19 bp, Mus musculus
  siRNA target sequence for 2810421I24Rik (NM_172422.1,1586-1604).
ctgtgcattcgttttgcat

SEQ ID NO: 773546 - DNA, 19 bp, Mus musculus
  siRNA target sequence for 2810421I24Rik (NM_172422.1,1591-1609).
cattcgttttgcatgatga

SEQ ID NO: 773547 - DNA, 19 bp, Mus musculus
  siRNA target sequence for 2810421I24Rik (NM_172422.1,1625-1643).
cccctattaaccagcttat

SEQ ID NO: 773548 - DNA, 19 bp, Mus musculus
  siRNA target sequence for 2810421I24Rik (NM_172422.1,1627-1645).
cctattaaccagcttatca

SEQ ID NO: 773549 - DNA, 19 bp, Mus musculus
  siRNA target sequence for 2810421I24Rik (NM_172422.1,1628-1646).
ctattaaccagcttatcaa

SEQ ID NO: 773550 - DNA, 19 bp, Mus musculus
  siRNA target sequence for 2810421I24Rik (NM_172422.1,1716-1734).
gaatacttgtctgaaactt

SEQ ID NO: 773551 - DNA, 19 bp, Mus musculus
  siRNA target sequence for 2810421I24Rik (NM_172422.1,1847-1865).
gacgcttctcgagaaatgt

SEQ ID NO: 773552 - DNA, 19 bp, Mus musculus
  siRNA target sequence for 2810421I24Rik (NM_172422.1,1864-1882).
gtgccattgccacataatt

SEQ ID NO: 773553 - DNA, 19 bp, Mus musculus
  siRNA target sequence for 2810421I24Rik (NM_172422.1,1866-1884).
gccattgccacataattat

SEQ ID NO: 773554 - DNA, 19 bp, Mus musculus
  siRNA target sequence for 2810421I24Rik (NM_172422.1,1876-1894).
cataattatcacattgatt

SEQ ID NO: 773555 - DNA, 19 bp, Mus musculus
  siRNA target sequence for 2810421I24Rik (NM_172422.1,1919-1937).
ggacccaagtattttcatt

SEQ ID NO: 773556 - DNA, 19 bp, Mus musculus
  siRNA target sequence for 2810421I24Rik (NM_172422.1,1982-2000).
cagtgctgtgtgttcctaa

SEQ ID NO: 773557 - DNA, 19 bp, Mus musculus
  siRNA target sequence for 2810421I24Rik (NM_172422.1,1993-2011).
gttcctaagtctgtttact

SEQ ID NO: 773558 - DNA, 19 bp, Mus musculus
  siRNA target sequence for 2810421I24Rik (NM_172422.1,2080-2098).
catgtgatcttgatccata

SEQ ID NO: 773559 - DNA, 19 bp, Mus musculus
  siRNA target sequence for 2810421I24Rik (NM_172422.1,2083-2101).
gtgatcttgatccataact

SEQ ID NO: 773560 - DNA, 19 bp, Mus musculus
  siRNA target sequence for 2810421I24Rik (NM_172422.1,2124-2142).
ggaggatgcggtcacattt

SEQ ID NO: 773561 - DNA, 19 bp, Mus musculus
  siRNA target sequence for 2810421I24Rik (NM_172422.1,2151-2169).
gaagatctattcagatgaa

SEQ ID NO: 773562 - DNA, 19 bp, Mus musculus
  siRNA target sequence for 2310067E19Rik (NM_172427.1,1902-1920).
ggcctcctctctcattact

SEQ ID NO: 773563 - DNA, 19 bp, Mus musculus
  siRNA target sequence for 2310067E19Rik (NM_172427.1,1990-2008).
cccagactggcaacattaa

SEQ ID NO: 773564 - DNA, 19 bp, Mus musculus
  siRNA target sequence for 2310067E19Rik (NM_172427.1,1994-2012).
gactggcaacattaacaga

SEQ ID NO: 773565 - DNA, 19 bp, Mus musculus
  siRNA target sequence for 2310067E19Rik (NM_172427.1,2074-2092).
catagctcttcctcttcat

SEQ ID NO: 773566 - DNA, 19 bp, Mus musculus
  siRNA target sequence for 2310067E19Rik (NM_172427.1,2130-2148).
gcttcttcctttaggtaat

SEQ ID NO: 773567 - DNA, 19 bp, Mus musculus
  siRNA target sequence for 2310067E19Rik (NM_172427.1,2193-2211).
ggaagtgtcggtttcatat

SEQ ID NO: 773568 - DNA, 19 bp, Mus musculus
  siRNA target sequence for 2310067E19Rik (NM_172427.1,2197-2215).
gtgtcggtttcatatctga

SEQ ID NO: 773569 - DNA, 19 bp, Mus musculus
  siRNA target sequence for 2310067E19Rik (NM_172427.1,2203-2221).
gtttcatatctgagatgtt

SEQ ID NO: 773570 - DNA, 19 bp, Mus musculus
  siRNA target sequence for 2310067E19Rik (NM_172427.1,2230-2248).
cgtttgctctgctttgact

SEQ ID NO: 773571 - DNA, 19 bp, Mus musculus
  siRNA target sequence for 2310067E19Rik (NM_172427.1,2312-2330).
gcgtaggtagaggtttgat

SEQ ID NO: 773572 - DNA, 19 bp, Mus musculus
  siRNA target sequence for 2310067E19Rik (NM_172427.1,2317-2335).
ggtagaggtttgatggtat

SEQ ID NO: 773573 - DNA, 19 bp, Mus musculus
  siRNA target sequence for 2310042L06Rik (NM_172428.1,155-173).
ggacccgagcctcaagatt

SEQ ID NO: 773574 - DNA, 19 bp, Mus musculus
  siRNA target sequence for 2310042L06Rik (NM_172428.1,156-174).
gacccgagcctcaagattt

SEQ ID NO: 773575 - DNA, 19 bp, Mus musculus
  siRNA target sequence for 2310042L06Rik (NM_172428.1,385-403).
gagggagtgacccatatgt

SEQ ID NO: 773576 - DNA, 19 bp, Mus musculus
  siRNA target sequence for 2310042L06Rik (NM_172428.1,389-407).
gagtgacccatatgtagaa

SEQ ID NO: 773577 - DNA, 19 bp, Mus musculus
  siRNA target sequence for C030002O17Rik (NM_172432.1,520-538).
catcactttccacttgaat

SEQ ID NO: 773578 - DNA, 19 bp, Mus musculus
  siRNA target sequence for C030002O17Rik (NM_172432.1,532-550).
cttgaatcaagccaacatt

SEQ ID NO: 773579 - DNA, 19 bp, Mus musculus
  siRNA target sequence for C030002O17Rik (NM_172432.1,625-643).
cacaattcactcaaacaaa

SEQ ID NO: 773580 - DNA, 19 bp, Mus musculus
  siRNA target sequence for C030002O17Rik (NM_172432.1,627-645).
caattcactcaaacaaagt

SEQ ID NO: 773581 - DNA, 19 bp, Mus musculus
  siRNA target sequence for C030002O17Rik (NM_172432.1,684-702).
ctttgcatgggtgtttaaa

SEQ ID NO: 773582 - DNA, 19 bp, Mus musculus
  siRNA target sequence for C030002O17Rik (NM_172432.1,688-706).
gcatgggtgtttaaatagt

SEQ ID NO: 773583 - DNA, 19 bp, Mus musculus
  siRNA target sequence for C030002O17Rik (NM_172432.1,716-734).
gaattgttcctgcatagtt

SEQ ID NO: 773584 - DNA, 19 bp, Mus musculus
  siRNA target sequence for C030002O17Rik (NM_172432.1,732-750).
gttctgagctgtcctttta

SEQ ID NO: 773585 - DNA, 19 bp, Mus musculus
  siRNA target sequence for A830015P08Rik (NM_172440.1,252-270).
gcttccgagagaggaaatt

SEQ ID NO: 773586 - DNA, 19 bp, Mus musculus
  siRNA target sequence for A830015P08Rik (NM_172440.1,289-307).
gactatttccagatttgca

SEQ ID NO: 773587 - DNA, 19 bp, Mus musculus
  siRNA target sequence for A830015P08Rik (NM_172440.1,313-331).
gttcggcatgggtttcctt

SEQ ID NO: 773588 - DNA, 19 bp, Mus musculus
  siRNA target sequence for A830015P08Rik (NM_172440.1,389-407).
gaacaggtgctatacgaat

SEQ ID NO: 773589 - DNA, 19 bp, Mus musculus
  siRNA target sequence for A830015P08Rik (NM_172440.1,392-410).
caggtgctatacgaatact

SEQ ID NO: 773590 - DNA, 19 bp, Mus musculus
  siRNA target sequence for A830015P08Rik (NM_172440.1,416-434).
ggcctggtgttgactgtta

SEQ ID NO: 773591 - DNA, 19 bp, Mus musculus
  siRNA target sequence for A830015P08Rik (NM_172440.1,418-436).
cctggtgttgactgttact

SEQ ID NO: 773592 - DNA, 19 bp, Mus musculus
  siRNA target sequence for A830015P08Rik (NM_172440.1,468-486).
gctccaattcctcatcaat

SEQ ID NO: 773593 - DNA, 19 bp, Mus musculus
  siRNA target sequence for A830015P08Rik (NM_172440.1,498-516).
ggtcagtgcgagttcagat

SEQ ID NO: 773594 - DNA, 19 bp, Mus musculus
  siRNA target sequence for A830015P08Rik (NM_172440.1,514-532).
gatgacacgcttcatttgt

SEQ ID NO: 773595 - DNA, 19 bp, Mus musculus
  siRNA target sequence for A830015P08Rik (NM_172440.1,565-583).
cattctcttaaatttaaca

SEQ ID NO: 773596 - DNA, 19 bp, Mus musculus
  siRNA target sequence for A830015P08Rik (NM_172440.1,627-645).
gctctatgttggaacagaa

SEQ ID NO: 773597 - DNA, 19 bp, Mus musculus
  siRNA target sequence for A830015P08Rik (NM_172440.1,647-665).
gaggaaatacacatattgt

SEQ ID NO: 773598 - DNA, 19 bp, Mus musculus
  siRNA target sequence for A830015P08Rik (NM_172440.1,649-667).
ggaaatacacatattgtaa

SEQ ID NO: 773599 - DNA, 19 bp, Mus musculus
  siRNA target sequence for A830015P08Rik (NM_172440.1,656-674).
cacatattgtaaatattga

SEQ ID NO: 773600 - DNA, 19 bp, Mus musculus
  siRNA target sequence for A830015P08Rik (NM_172440.1,705-723).
gtggaacaaggcaattgaa

SEQ ID NO: 773601 - DNA, 19 bp, Mus musculus
  siRNA target sequence for A830015P08Rik (NM_172440.1,707-725).
ggaacaaggcaattgaact

SEQ ID NO: 773602 - DNA, 19 bp, Mus musculus
  siRNA target sequence for A830015P08Rik (NM_172440.1,751-769).
gttgtacatttaagtgata

SEQ ID NO: 773603 - DNA, 19 bp, Mus musculus
  siRNA target sequence for A830015P08Rik (NM_172440.1,819-837).
ggtgttctgggacttgaaa

SEQ ID NO: 773604 - DNA, 19 bp, Mus musculus
  siRNA target sequence for A830015P08Rik (NM_172440.1,825-843).
ctgggacttgaaatctaaa

SEQ ID NO: 773605 - DNA, 19 bp, Mus musculus
  siRNA target sequence for A830015P08Rik (NM_172440.1,845-863).
gagcagaactgagagttta

SEQ ID NO: 773606 - DNA, 19 bp, Mus musculus
  siRNA target sequence for A830015P08Rik (NM_172440.1,847-865).
gcagaactgagagtttatt

SEQ ID NO: 773607 - DNA, 19 bp, Mus musculus
  siRNA target sequence for A830015P08Rik (NM_172440.1,873-891).
ggctattcattcaattgat

SEQ ID NO: 773608 - DNA, 19 bp, Mus musculus
  siRNA target sequence for A830015P08Rik (NM_172440.1,874-892).
gctattcattcaattgatt

SEQ ID NO: 773609 - DNA, 19 bp, Mus musculus
  siRNA target sequence for A830015P08Rik (NM_172440.1,931-949).
gatggtagcttgactttat

SEQ ID NO: 773610 - DNA, 19 bp, Mus musculus
  siRNA target sequence for A830015P08Rik (NM_172440.1,934-952).
ggtagcttgactttatgga

SEQ ID NO: 773611 - DNA, 19 bp, Mus musculus
  siRNA target sequence for A830015P08Rik (NM_172440.1,1023-1041).
gtctgagtcttgtaaacct

SEQ ID NO: 773612 - DNA, 19 bp, Mus musculus
  siRNA target sequence for A830015P08Rik (NM_172440.1,1025-1043).
ctgagtcttgtaaacctat

SEQ ID NO: 773613 - DNA, 19 bp, Mus musculus
  siRNA target sequence for A830015P08Rik (NM_172440.1,1029-1047).
gtcttgtaaacctattctt

SEQ ID NO: 773614 - DNA, 19 bp, Mus musculus
  siRNA target sequence for A830015P08Rik (NM_172440.1,1034-1052).
gtaaacctattcttaaagt

SEQ ID NO: 773615 - DNA, 19 bp, Mus musculus
  siRNA target sequence for A830015P08Rik (NM_172440.1,1076-1094).
gtgaaccatttataatatt

SEQ ID NO: 773616 - DNA, 19 bp, Mus musculus
  siRNA target sequence for A830015P08Rik (NM_172440.1,1127-1145).
gaagaccaagtttaaccat

SEQ ID NO: 773617 - DNA, 19 bp, Mus musculus
  siRNA target sequence for A830015P08Rik (NM_172440.1,1217-1235).
cgccctatccaaatgaatt

SEQ ID NO: 773618 - DNA, 19 bp, Mus musculus
  siRNA target sequence for A830015P08Rik (NM_172440.1,1218-1236).
gccctatccaaatgaattt

SEQ ID NO: 773619 - DNA, 19 bp, Mus musculus
  siRNA target sequence for A830015P08Rik (NM_172440.1,1282-1300).
gtagttgacctgacacaaa

SEQ ID NO: 773620 - DNA, 19 bp, Mus musculus
  siRNA target sequence for A830015P08Rik (NM_172440.1,1293-1311).
gacacaaaccaattttcca

SEQ ID NO: 773621 - DNA, 19 bp, Mus musculus
  siRNA target sequence for A830015P08Rik (NM_172440.1,1301-1319).
ccaattttccaatctttga

SEQ ID NO: 773622 - DNA, 19 bp, Mus musculus
  siRNA target sequence for A830015P08Rik (NM_172440.1,1325-1343).
catatccaatggacattca

SEQ ID NO: 773623 - DNA, 19 bp, Mus musculus
  siRNA target sequence for A830015P08Rik (NM_172440.1,1342-1360).
catgagtcacctgttacat

SEQ ID NO: 773624 - DNA, 19 bp, Mus musculus
  siRNA target sequence for A830015P08Rik (NM_172440.1,1376-1394).
ccgattgccctccagattt

SEQ ID NO: 773625 - DNA, 19 bp, Mus musculus
  siRNA target sequence for A830015P08Rik (NM_172440.1,1382-1400).
gccctccagatttgattct

SEQ ID NO: 773626 - DNA, 19 bp, Mus musculus
  siRNA target sequence for A830015P08Rik (NM_172440.1,1383-1401).
ccctccagatttgattcta

SEQ ID NO: 773627 - DNA, 19 bp, Mus musculus
  siRNA target sequence for A830015P08Rik (NM_172440.1,1388-1406).
cagatttgattctagtact

SEQ ID NO: 773628 - DNA, 19 bp, Mus musculus
  siRNA target sequence for A830015P08Rik (NM_172440.1,1395-1413).
gattctagtactctattct

SEQ ID NO: 773629 - DNA, 19 bp, Mus musculus
  siRNA target sequence for A830015P08Rik (NM_172440.1,1438-1456).
ggatacagtaataaggaat

SEQ ID NO: 773630 - DNA, 19 bp, Mus musculus
  siRNA target sequence for A830015P08Rik (NM_172440.1,1482-1500).
cctcggagcacaaacttat

SEQ ID NO: 773631 - DNA, 19 bp, Mus musculus
  siRNA target sequence for A830015P08Rik (NM_172440.1,1490-1508).
cacaaacttatccagaaat

SEQ ID NO: 773632 - DNA, 19 bp, Mus musculus
  siRNA target sequence for A830015P08Rik (NM_172440.1,1492-1510).
caaacttatccagaaatta

SEQ ID NO: 773633 - DNA, 19 bp, Mus musculus
  siRNA target sequence for A830015P08Rik (NM_172440.1,1520-1538).
gtcatgctgatggaacaat

SEQ ID NO: 773634 - DNA, 19 bp, Mus musculus
  siRNA target sequence for A830015P08Rik (NM_172440.1,1522-1540).
catgctgatggaacaataa

SEQ ID NO: 773635 - DNA, 19 bp, Mus musculus
  siRNA target sequence for A830015P08Rik (NM_172440.1,1548-1566).
ggatgcttcagcaatgaca

SEQ ID NO: 773636 - DNA, 19 bp, Mus musculus
  siRNA target sequence for A830015P08Rik (NM_172440.1,1585-1603).
ctaaaaacttccaaagtgt

SEQ ID NO: 773637 - DNA, 19 bp, Mus musculus
  siRNA target sequence for A830015P08Rik (NM_172440.1,1629-1647).
caaacagacgtgtgaactt

SEQ ID NO: 773638 - DNA, 19 bp, Mus musculus
  siRNA target sequence for A830015P08Rik (NM_172440.1,1661-1679).
cctttgctgtgcagatgat

SEQ ID NO: 773639 - DNA, 19 bp, Mus musculus
  siRNA target sequence for A830015P08Rik (NM_172440.1,1762-1780).
gtcacaacagaaatagtgt

SEQ ID NO: 773640 - DNA, 19 bp, Mus musculus
  siRNA target sequence for A830015P08Rik (NM_172440.1,1793-1811).
gacttcagtgtgatgttga

SEQ ID NO: 773641 - DNA, 19 bp, Mus musculus
  siRNA target sequence for A830015P08Rik (NM_172440.1,1888-1906).
ctttctggaagcactaata

SEQ ID NO: 773642 - DNA, 19 bp, Mus musculus
  siRNA target sequence for A830015P08Rik (NM_172440.1,1941-1959).
cccgtgcctcagtgttaaa

SEQ ID NO: 773643 - DNA, 19 bp, Mus musculus
  siRNA target sequence for A830015P08Rik (NM_172440.1,1942-1960).
ccgtgcctcagtgttaaaa

SEQ ID NO: 773644 - DNA, 19 bp, Mus musculus
  siRNA target sequence for A830015P08Rik (NM_172440.1,1985-2003).
gctatcaagcagatcttgt

SEQ ID NO: 773645 - DNA, 19 bp, Mus musculus
  siRNA target sequence for A830015P08Rik (NM_172440.1,1986-2004).
ctatcaagcagatcttgtt

SEQ ID NO: 773646 - DNA, 19 bp, Mus musculus
  siRNA target sequence for A830015P08Rik (NM_172440.1,2029-2047).
gagcctcctcagcaaatta

SEQ ID NO: 773647 - DNA, 19 bp, Mus musculus
  siRNA target sequence for A830015P08Rik (NM_172440.1,2063-2081).
gctcagcatatggaatagt

SEQ ID NO: 773648 - DNA, 19 bp, Mus musculus
  siRNA target sequence for A830015P08Rik (NM_172440.1,2104-2122).
ctggttgtggtggatttca

SEQ ID NO: 773649 - DNA, 19 bp, Mus musculus
  siRNA target sequence for A830015P08Rik (NM_172440.1,2149-2167).
gggaccattgacctctata

SEQ ID NO: 773650 - DNA, 19 bp, Mus musculus
  siRNA target sequence for A830015P08Rik (NM_172440.1,2197-2215).
cggtctcctcgaaagaaca

SEQ ID NO: 773651 - DNA, 19 bp, Mus musculus
  siRNA target sequence for A830015P08Rik (NM_172440.1,2220-2238).
gttcattgcaggcttaaca

SEQ ID NO: 773652 - DNA, 19 bp, Mus musculus
  siRNA target sequence for A830015P08Rik (NM_172440.1,2231-2249).
gcttaacagagctgaatga

SEQ ID NO: 773653 - DNA, 19 bp, Mus musculus
  siRNA target sequence for A830015P08Rik (NM_172440.1,2232-2250).
cttaacagagctgaatgat

SEQ ID NO: 773654 - DNA, 19 bp, Mus musculus
  siRNA target sequence for A830015P08Rik (NM_172440.1,2287-2305).
cccacctcagaccatgtaa

SEQ ID NO: 773655 - DNA, 19 bp, Mus musculus
  siRNA target sequence for A830015P08Rik (NM_172440.1,2288-2306).
ccacctcagaccatgtaaa

SEQ ID NO: 773656 - DNA, 19 bp, Mus musculus
  siRNA target sequence for A830015P08Rik (NM_172440.1,2289-2307).
cacctcagaccatgtaaat

SEQ ID NO: 773657 - DNA, 19 bp, Mus musculus
  siRNA target sequence for A830015P08Rik (NM_172440.1,2363-2381).
gtgctgacgtttcaaaagt

SEQ ID NO: 773658 - DNA, 19 bp, Mus musculus
  siRNA target sequence for A830015P08Rik (NM_172440.1,2365-2383).
gctgacgtttcaaaagtaa

SEQ ID NO: 773659 - DNA, 19 bp, Mus musculus
  siRNA target sequence for A830015P08Rik (NM_172440.1,2436-2454).
catggagatttctttacca

SEQ ID NO: 773660 - DNA, 19 bp, Mus musculus
  siRNA target sequence for A830015P08Rik (NM_172440.1,2442-2460).
gatttctttaccagttaca

SEQ ID NO: 773661 - DNA, 19 bp, Mus musculus
  siRNA target sequence for A830015P08Rik (NM_172440.1,2471-2489).
cccgagagaattcctataa

SEQ ID NO: 773662 - DNA, 19 bp, Mus musculus
  siRNA target sequence for A830015P08Rik (NM_172440.1,2472-2490).
ccgagagaattcctataat

SEQ ID NO: 773663 - DNA, 19 bp, Mus musculus
  siRNA target sequence for A830015P08Rik (NM_172440.1,2504-2522).
ctagcatctccagtattga

SEQ ID NO: 773664 - DNA, 19 bp, Mus musculus
  siRNA target sequence for A830015P08Rik (NM_172440.1,2514-2532).
cagtattgacaaagattct

SEQ ID NO: 773665 - DNA, 19 bp, Mus musculus
  siRNA target sequence for A830015P08Rik (NM_172440.1,2660-2678).
catcagatgaacaaaggtt

SEQ ID NO: 773666 - DNA, 19 bp, Mus musculus
  siRNA target sequence for A830015P08Rik (NM_172440.1,2755-2773).
gacagaactggcagtttaa

SEQ ID NO: 773667 - DNA, 19 bp, Mus musculus
  siRNA target sequence for A830015P08Rik (NM_172440.1,2776-2794).
cagcctccatacgaagtat

SEQ ID NO: 773668 - DNA, 19 bp, Mus musculus
  siRNA target sequence for A830015P08Rik (NM_172440.1,3094-3112).
gataatcacaacaatgcta

SEQ ID NO: 773669 - DNA, 19 bp, Mus musculus
  siRNA target sequence for A830015P08Rik (NM_172440.1,3109-3127).
gctagcaaggtcaaatggt

SEQ ID NO: 773670 - DNA, 19 bp, Mus musculus
  siRNA target sequence for Apxl (NM_172441.1,305-323).
cgggtgatggacaacaaca

SEQ ID NO: 773671 - DNA, 19 bp, Mus musculus
  siRNA target sequence for Apxl (NM_172441.1,462-480).
gtacatcagagcaatgcta

SEQ ID NO: 773672 - DNA, 19 bp, Mus musculus
  siRNA target sequence for Apxl (NM_172441.1,511-529).
ggtggaagctcctcataga

SEQ ID NO: 773673 - DNA, 19 bp, Mus musculus
  siRNA target sequence for Apxl (NM_172441.1,595-613).
ccctccctcactcaactat

SEQ ID NO: 773674 - DNA, 19 bp, Mus musculus
  siRNA target sequence for Apxl (NM_172441.1,643-661).
cttgaagtctgaagaatta

SEQ ID NO: 773675 - DNA, 19 bp, Mus musculus
  siRNA target sequence for Apxl (NM_172441.1,712-730).
cagtgtgaagatcaaaact

SEQ ID NO: 773676 - DNA, 19 bp, Mus musculus
  siRNA target sequence for Apxl (NM_172441.1,750-768).
gaatttttcccaaagatga

SEQ ID NO: 773677 - DNA, 19 bp, Mus musculus
  siRNA target sequence for Apxl (NM_172441.1,872-890).
gtgtccttggccaccaatt

SEQ ID NO: 773678 - DNA, 19 bp, Mus musculus
  siRNA target sequence for Apxl (NM_172441.1,880-898).
ggccaccaattctacctat

SEQ ID NO: 773679 - DNA, 19 bp, Mus musculus
  siRNA target sequence for Apxl (NM_172441.1,881-899).
gccaccaattctacctatt

SEQ ID NO: 773680 - DNA, 19 bp, Mus musculus
  siRNA target sequence for Apxl (NM_172441.1,882-900).
ccaccaattctacctatta

SEQ ID NO: 773681 - DNA, 19 bp, Mus musculus
  siRNA target sequence for Apxl (NM_172441.1,914-932).
cccaaagcagagcttctta

SEQ ID NO: 773682 - DNA, 19 bp, Mus musculus
  siRNA target sequence for Apxl (NM_172441.1,915-933).
ccaaagcagagcttcttat

SEQ ID NO: 773683 - DNA, 19 bp, Mus musculus
  siRNA target sequence for Apxl (NM_172441.1,923-941).
gagcttcttatcaagatga

SEQ ID NO: 773684 - DNA, 19 bp, Mus musculus
  siRNA target sequence for Apxl (NM_172441.1,950-968).
caggagcctgaagagtatt

SEQ ID NO: 773685 - DNA, 19 bp, Mus musculus
  siRNA target sequence for Apxl (NM_172441.1,972-990).
caggtgacttggatcatga

SEQ ID NO: 773686 - DNA, 19 bp, Mus musculus
  siRNA target sequence for Apxl (NM_172441.1,1239-1257).
cccttaataatttagatga

SEQ ID NO: 773687 - DNA, 19 bp, Mus musculus
  siRNA target sequence for BC044798 (NM_172442.2,458-476).
gcccagttcgacgaaacta

SEQ ID NO: 773688 - DNA, 19 bp, Mus musculus
  siRNA target sequence for BC044798 (NM_172442.2,460-478).
ccagttcgacgaaactact

SEQ ID NO: 773689 - DNA, 19 bp, Mus musculus
  siRNA target sequence for BC044798 (NM_172442.2,461-479).
cagttcgacgaaactacta

SEQ ID NO: 773690 - DNA, 19 bp, Mus musculus
  siRNA target sequence for BC044798 (NM_172442.2,621-639).
cattggcttcagctacata

SEQ ID NO: 773691 - DNA, 19 bp, Mus musculus
  siRNA target sequence for BC044798 (NM_172442.2,701-719).
gacgactagacctcatcta

SEQ ID NO: 773692 - DNA, 19 bp, Mus musculus
  siRNA target sequence for BC044798 (NM_172442.2,985-1003).
gccccatcgcaggttatca

SEQ ID NO: 773693 - DNA, 19 bp, Mus musculus
  siRNA target sequence for BC044798 (NM_172442.2,987-1005).
cccatcgcaggttatcaga

SEQ ID NO: 773694 - DNA, 19 bp, Mus musculus
  siRNA target sequence for BC044798 (NM_172442.2,988-1006).
ccatcgcaggttatcagaa

SEQ ID NO: 773695 - DNA, 19 bp, Mus musculus
  siRNA target sequence for BC044798 (NM_172442.2,993-1011).
gcaggttatcagaagacaa

SEQ ID NO: 773696 - DNA, 19 bp, Mus musculus
  siRNA target sequence for BC044798 (NM_172442.2,1197-1215).
gtccagccctgttaatcct

SEQ ID NO: 773697 - DNA, 19 bp, Mus musculus
  siRNA target sequence for BC044798 (NM_172442.2,1225-1243).
ggaatcaccgggatactca

SEQ ID NO: 773698 - DNA, 19 bp, Mus musculus
  siRNA target sequence for BC044798 (NM_172442.2,1226-1244).
gaatcaccgggatactcat

SEQ ID NO: 773699 - DNA, 19 bp, Mus musculus
  siRNA target sequence for BC044798 (NM_172442.2,1615-1633).
cagtgcccaacatgtaaga

SEQ ID NO: 773700 - DNA, 19 bp, Mus musculus
  siRNA target sequence for BC044798 (NM_172442.2,1622-1640).
caacatgtaagaccattta

SEQ ID NO: 773701 - DNA, 19 bp, Mus musculus
  siRNA target sequence for BC044798 (NM_172442.2,1667-1685).
cagggaagatggaatacca

SEQ ID NO: 773702 - DNA, 19 bp, Mus musculus
  siRNA target sequence for BC044798 (NM_172442.2,1812-1830).
cccacgacattgttacctt

SEQ ID NO: 773703 - DNA, 19 bp, Mus musculus
  siRNA target sequence for BC044798 (NM_172442.2,1881-1899).
ggaccgccgtctcatcttt

SEQ ID NO: 773704 - DNA, 19 bp, Mus musculus
  siRNA target sequence for BC044798 (NM_172442.2,1922-1940).
cgggcgagtccgatactgt

SEQ ID NO: 773705 - DNA, 19 bp, Mus musculus
  siRNA target sequence for BC044798 (NM_172442.2,1967-1985).
cagaatttggctctaatct

SEQ ID NO: 773706 - DNA, 19 bp, Mus musculus
  siRNA target sequence for BC044798 (NM_172442.2,1969-1987).
gaatttggctctaatctca

SEQ ID NO: 773707 - DNA, 19 bp, Mus musculus
  siRNA target sequence for BC044798 (NM_172442.2,1997-2015).
gctacccagatgccaatta

SEQ ID NO: 773708 - DNA, 19 bp, Mus musculus
  siRNA target sequence for BC044798 (NM_172442.2,2040-2058).
ggctgcccagggtatctct

SEQ ID NO: 773709 - DNA, 19 bp, Mus musculus
  siRNA target sequence for BC026530 (NM_172443.1,437-455).
gaggccctacgctatatca

SEQ ID NO: 773710 - DNA, 19 bp, Mus musculus
  siRNA target sequence for BC026530 (NM_172443.1,439-457).
ggccctacgctatatcact

SEQ ID NO: 773711 - DNA, 19 bp, Mus musculus
  siRNA target sequence for BC026530 (NM_172443.1,1140-1158).
gccgagagagccaatacaa

SEQ ID NO: 773712 - DNA, 19 bp, Mus musculus
  siRNA target sequence for BC026530 (NM_172443.1,1142-1160).
cgagagagccaatacaaga

SEQ ID NO: 773713 - DNA, 19 bp, Mus musculus
  siRNA target sequence for BC026530 (NM_172443.1,1143-1161).
gagagagccaatacaagat

SEQ ID NO: 773714 - DNA, 19 bp, Mus musculus
  siRNA target sequence for BC026530 (NM_172443.1,1147-1165).
gagccaatacaagattttt

SEQ ID NO: 773715 - DNA, 19 bp, Mus musculus
  siRNA target sequence for BC026530 (NM_172443.1,1149-1167).
gccaatacaagatttttca

SEQ ID NO: 773716 - DNA, 19 bp, Mus musculus
  siRNA target sequence for BC026530 (NM_172443.1,1257-1275).
cggatgagaggacatgtat

SEQ ID NO: 773717 - DNA, 19 bp, Mus musculus
  siRNA target sequence for BC026530 (NM_172443.1,1409-1427).
ctacgccaggccattttct

SEQ ID NO: 773718 - DNA, 19 bp, Mus musculus
  siRNA target sequence for BC026530 (NM_172443.1,1466-1484).
ccttttctgctgcactatt

SEQ ID NO: 773719 - DNA, 19 bp, Mus musculus
  siRNA target sequence for BC026530 (NM_172443.1,1631-1649).
gacgtggttcggacagata

SEQ ID NO: 773720 - DNA, 19 bp, Mus musculus
  siRNA target sequence for BC026530 (NM_172443.1,1667-1685).
cgaggggaggacaatccaa

SEQ ID NO: 773721 - DNA, 19 bp, Mus musculus
  siRNA target sequence for BC026530 (NM_172443.1,1668-1686).
gaggggaggacaatccaaa

SEQ ID NO: 773722 - DNA, 19 bp, Mus musculus
  siRNA target sequence for BC026530 (NM_172443.1,1701-1719).
ggaggatcctgttgaacta

SEQ ID NO: 773723 - DNA, 19 bp, Mus musculus
  siRNA target sequence for BC026530 (NM_172443.1,1702-1720).
gaggatcctgttgaactat

SEQ ID NO: 773724 - DNA, 19 bp, Mus musculus
  siRNA target sequence for BC026530 (NM_172443.1,1784-1802).
gctgaagtcttggatgaat

SEQ ID NO: 773725 - DNA, 19 bp, Mus musculus
  siRNA target sequence for BC026530 (NM_172443.1,1815-1833).
ggtgcttcgtgggtttgat

SEQ ID NO: 773726 - DNA, 19 bp, Mus musculus
  siRNA target sequence for BC026530 (NM_172443.1,1999-2017).
ctgcttcaagcgagagttt

SEQ ID NO: 773727 - DNA, 19 bp, Mus musculus
  siRNA target sequence for BC026530 (NM_172443.1,2109-2127).
ccatctacggggatgatgt

SEQ ID NO: 773728 - DNA, 19 bp, Mus musculus
  siRNA target sequence for B230114P05Rik (NM_172444.1,114-132).
cactgagacagcaatgtta

SEQ ID NO: 773729 - DNA, 19 bp, Mus musculus
  siRNA target sequence for B230114P05Rik (NM_172444.1,118-136).
gagacagcaatgttagcaa

SEQ ID NO: 773730 - DNA, 19 bp, Mus musculus
  siRNA target sequence for B230114P05Rik (NM_172444.1,172-190).
ctgggatctgacaaagtct

SEQ ID NO: 773731 - DNA, 19 bp, Mus musculus
  siRNA target sequence for B230114P05Rik (NM_172444.1,275-293).
gctaccaccgggttgtaga

SEQ ID NO: 773732 - DNA, 19 bp, Mus musculus
  siRNA target sequence for B230114P05Rik (NM_172444.1,279-297).
ccaccgggttgtagagatt

SEQ ID NO: 773733 - DNA, 19 bp, Mus musculus
  siRNA target sequence for B230114P05Rik (NM_172444.1,298-316).
ccccaaggagctacgaaaa

SEQ ID NO: 773734 - DNA, 19 bp, Mus musculus
  siRNA target sequence for B230114P05Rik (NM_172444.1,299-317).
cccaaggagctacgaaaat

SEQ ID NO: 773735 - DNA, 19 bp, Mus musculus
  siRNA target sequence for B230114P05Rik (NM_172444.1,300-318).
ccaaggagctacgaaaatt

SEQ ID NO: 773736 - DNA, 19 bp, Mus musculus
  siRNA target sequence for B230114P05Rik (NM_172444.1,301-319).
caaggagctacgaaaatta

SEQ ID NO: 773737 - DNA, 19 bp, Mus musculus
  siRNA target sequence for B230114P05Rik (NM_172444.1,305-323).
gagctacgaaaattaacat

SEQ ID NO: 773738 - DNA, 19 bp, Mus musculus
  siRNA target sequence for B230114P05Rik (NM_172444.1,307-325).
gctacgaaaattaacatta

SEQ ID NO: 773739 - DNA, 19 bp, Mus musculus
  siRNA target sequence for B230114P05Rik (NM_172444.1,371-389).
ctggccgctccatcatcaa

SEQ ID NO: 773740 - DNA, 19 bp, Mus musculus
  siRNA target sequence for B230114P05Rik (NM_172444.1,424-442).
gagggcggagggacaatgt

SEQ ID NO: 773741 - DNA, 19 bp, Mus musculus
  siRNA target sequence for B230114P05Rik (NM_172444.1,427-445).
ggcggagggacaatgttca

SEQ ID NO: 773742 - DNA, 19 bp, Mus musculus
  siRNA target sequence for B230114P05Rik (NM_172444.1,435-453).
gacaatgttcacctacaaa

SEQ ID NO: 773743 - DNA, 19 bp, Mus musculus
  siRNA target sequence for B230114P05Rik (NM_172444.1,495-513).
ggctgagggtcccactaat

SEQ ID NO: 773744 - DNA, 19 bp, Mus musculus
  siRNA target sequence for B230114P05Rik (NM_172444.1,497-515).
ctgagggtcccactaatga

SEQ ID NO: 773745 - DNA, 19 bp, Mus musculus
  siRNA target sequence for B230114P05Rik (NM_172444.1,499-517).
gagggtcccactaatgaga

SEQ ID NO: 773746 - DNA, 19 bp, Mus musculus
  siRNA target sequence for B230114P05Rik (NM_172444.1,553-571).
ccaggagtccactatgagt

SEQ ID NO: 773747 - DNA, 19 bp, Mus musculus
  siRNA target sequence for B230114P05Rik (NM_172444.1,554-572).
caggagtccactatgagta

SEQ ID NO: 773748 - DNA, 19 bp, Mus musculus
  siRNA target sequence for B230114P05Rik (NM_172444.1,573-591).
cgtgatcatgaggaataat

SEQ ID NO: 773749 - DNA, 19 bp, Mus musculus
  siRNA target sequence for B230114P05Rik (NM_172444.1,620-638).
ggagaccaggagaaccttt

SEQ ID NO: 773750 - DNA, 19 bp, Mus musculus
  siRNA target sequence for B230114P05Rik (NM_172444.1,623-641).
gaccaggagaacctttcaa

SEQ ID NO: 773751 - DNA, 19 bp, Mus musculus
  siRNA target sequence for B230114P05Rik (NM_172444.1,733-751).
gaggtattcacgtcagaat

SEQ ID NO: 773752 - DNA, 19 bp, Mus musculus
  siRNA target sequence for B230114P05Rik (NM_172444.1,794-812).
cccaccgaccagacaactt

SEQ ID NO: 773753 - DNA, 19 bp, Mus musculus
  siRNA target sequence for B230114P05Rik (NM_172444.1,925-943).
cgctgcgtgcacagaaaca

SEQ ID NO: 773754 - DNA, 19 bp, Mus musculus
  siRNA target sequence for B230114P05Rik (NM_172444.1,1521-1539).
ggctacgccgtgtgacaat

SEQ ID NO: 773755 - DNA, 19 bp, Mus musculus
  siRNA target sequence for B230114P05Rik (NM_172444.1,1663-1681).
gtgctagacccttatgagt

SEQ ID NO: 773756 - DNA, 19 bp, Mus musculus
  siRNA target sequence for B230114P05Rik (NM_172444.1,1669-1687).
gacccttatgagtgttcat

SEQ ID NO: 773757 - DNA, 19 bp, Mus musculus
  siRNA target sequence for B230114P05Rik (NM_172444.1,1725-1743).
caagccttgtggagctaaa

SEQ ID NO: 773758 - DNA, 19 bp, Mus musculus
  siRNA target sequence for B230114P05Rik (NM_172444.1,1735-1753).
ggagctaaatggtttagca

SEQ ID NO: 773759 - DNA, 19 bp, Mus musculus
  siRNA target sequence for B230114P05Rik (NM_172444.1,1845-1863).
ctgcgacccccagttgaaa

SEQ ID NO: 773760 - DNA, 19 bp, Mus musculus
  siRNA target sequence for B230114P05Rik (NM_172444.1,1870-1888).
gagagagagtcttgtaaca

SEQ ID NO: 773761 - DNA, 19 bp, Mus musculus
  siRNA target sequence for B230114P05Rik (NM_172444.1,1893-1911).
ggactgtgtccctgaagtt

SEQ ID NO: 773762 - DNA, 19 bp, Mus musculus
  siRNA target sequence for B230114P05Rik (NM_172444.1,1900-1918).
gtccctgaagttgatgaaa

SEQ ID NO: 773763 - DNA, 19 bp, Mus musculus
  siRNA target sequence for B230114P05Rik (NM_172444.1,1961-1979).
cacgcctctgtgtctacaa

SEQ ID NO: 773764 - DNA, 19 bp, Mus musculus
  siRNA target sequence for B230114P05Rik (NM_172444.1,1963-1981).
cgcctctgtgtctacaact

SEQ ID NO: 773765 - DNA, 19 bp, Mus musculus
  siRNA target sequence for 3110035P10Rik (NM_172445.1,217-235).
cacagaaagcggaagttgt

SEQ ID NO: 773766 - DNA, 19 bp, Mus musculus
  siRNA target sequence for 3110035P10Rik (NM_172445.1,237-255).
caactgctcgccaagcaaa

SEQ ID NO: 773767 - DNA, 19 bp, Mus musculus
  siRNA target sequence for 3110035P10Rik (NM_172445.1,257-275).
caaaagcgcaagtctcata

SEQ ID NO: 773768 - DNA, 19 bp, Mus musculus
  siRNA target sequence for 3110035P10Rik (NM_172445.1,268-286).
gtctcatagcctttctata

SEQ ID NO: 773769 - DNA, 19 bp, Mus musculus
  siRNA target sequence for 3110035P10Rik (NM_172445.1,277-295).
cctttctatacgaagaact

SEQ ID NO: 773770 - DNA, 19 bp, Mus musculus
  siRNA target sequence for 3110035P10Rik (NM_172445.1,325-343).
gccaagagaaatgttagaa

SEQ ID NO: 773771 - DNA, 19 bp, Mus musculus
  siRNA target sequence for 3110035P10Rik (NM_172445.1,375-393).
gcagtacactgctggaatt

SEQ ID NO: 773772 - DNA, 19 bp, Mus musculus
  siRNA target sequence for 3110035P10Rik (NM_172445.1,378-396).
gtacactgctggaattgtt

SEQ ID NO: 773773 - DNA, 19 bp, Mus musculus
  siRNA target sequence for 3110035P10Rik (NM_172445.1,448-466).
gcgcagagaaattgatact

SEQ ID NO: 773774 - DNA, 19 bp, Mus musculus
  siRNA target sequence for 3110035P10Rik (NM_172445.1,450-468).
gcagagaaattgatactct

SEQ ID NO: 773775 - DNA, 19 bp, Mus musculus
  siRNA target sequence for 3110035P10Rik (NM_172445.1,453-471).
gagaaattgatactcttaa

SEQ ID NO: 773776 - DNA, 19 bp, Mus musculus
  siRNA target sequence for 3110035P10Rik (NM_172445.1,498-516).
cgatcgatggggcagaatt

SEQ ID NO: 773777 - DNA, 19 bp, Mus musculus
  siRNA target sequence for 3110035P10Rik (NM_172445.1,502-520).
cgatggggcagaattgagt

SEQ ID NO: 773778 - DNA, 19 bp, Mus musculus
  siRNA target sequence for 3110035P10Rik (NM_172445.1,503-521).
gatggggcagaattgagta

SEQ ID NO: 773779 - DNA, 19 bp, Mus musculus
  siRNA target sequence for 3110035P10Rik (NM_172445.1,517-535).
gagtaagggccaactcaaa

SEQ ID NO: 773780 - DNA, 19 bp, Mus musculus
  siRNA target sequence for 3110035P10Rik (NM_172445.1,611-629).
gtttccagctttaagacta

SEQ ID NO: 773781 - DNA, 19 bp, Mus musculus
  siRNA target sequence for 3110035P10Rik (NM_172445.1,650-668).
cagcttgtgaaggagtata

SEQ ID NO: 773782 - DNA, 19 bp, Mus musculus
  siRNA target sequence for 3110035P10Rik (NM_172445.1,652-670).
gcttgtgaaggagtatatt

SEQ ID NO: 773783 - DNA, 19 bp, Mus musculus
  siRNA target sequence for 3110035P10Rik (NM_172445.1,688-706).
ctgggatgtcagtgttaca

SEQ ID NO: 773784 - DNA, 19 bp, Mus musculus
  siRNA target sequence for 3110035P10Rik (NM_172445.1,709-727).
gacacagcctattgttctt

SEQ ID NO: 773785 - DNA, 19 bp, Mus musculus
  siRNA target sequence for 3110035P10Rik (NM_172445.1,741-759).
ctgatcacacggctttgtt

SEQ ID NO: 773786 - DNA, 19 bp, Mus musculus
  siRNA target sequence for 3110035P10Rik (NM_172445.1,743-761).
gatcacacggctttgttgt

SEQ ID NO: 773787 - DNA, 19 bp, Mus musculus
  siRNA target sequence for 3110035P10Rik (NM_172445.1,766-784).
catagagactggcaaatgt

SEQ ID NO: 773788 - DNA, 19 bp, Mus musculus
  siRNA target sequence for 3110035P10Rik (NM_172445.1,808-826).
gggctcagtaaattctata

SEQ ID NO: 773789 - DNA, 19 bp, Mus musculus
  siRNA target sequence for 3110035P10Rik (NM_172445.1,809-827).
ggctcagtaaattctataa

SEQ ID NO: 773790 - DNA, 19 bp, Mus musculus
  siRNA target sequence for 3110035P10Rik (NM_172445.1,810-828).
gctcagtaaattctataaa

SEQ ID NO: 773791 - DNA, 19 bp, Mus musculus
  siRNA target sequence for 3110035P10Rik (NM_172445.1,811-829).
ctcagtaaattctataaaa

SEQ ID NO: 773792 - DNA, 19 bp, Mus musculus
  siRNA target sequence for 3110035P10Rik (NM_172445.1,867-885).
gagatcagactgctcatat

SEQ ID NO: 773793 - DNA, 19 bp, Mus musculus
  siRNA target sequence for 3110035P10Rik (NM_172445.1,926-944).
gccgacactagtcaacaaa

SEQ ID NO: 773794 - DNA, 19 bp, Mus musculus
  siRNA target sequence for 3110035P10Rik (NM_172445.1,927-945).
ccgacactagtcaacaaat

SEQ ID NO: 773795 - DNA, 19 bp, Mus musculus
  siRNA target sequence for 3110035P10Rik (NM_172445.1,928-946).
cgacactagtcaacaaatt

SEQ ID NO: 773796 - DNA, 19 bp, Mus musculus
  siRNA target sequence for 3110035P10Rik (NM_172445.1,931-949).
cactagtcaacaaatttct

SEQ ID NO: 773797 - DNA, 19 bp, Mus musculus
  siRNA target sequence for 3110035P10Rik (NM_172445.1,1053-1071).
gccaccagggtgtggttat

SEQ ID NO: 773798 - DNA, 19 bp, Mus musculus
  siRNA target sequence for 3110035P10Rik (NM_172445.1,1125-1143).
gaactgccaacctgtatga

SEQ ID NO: 773799 - DNA, 19 bp, Mus musculus
  siRNA target sequence for 3110035P10Rik (NM_172445.1,1178-1196).
gggcatgaccaggagttaa

SEQ ID NO: 773800 - DNA, 19 bp, Mus musculus
  siRNA target sequence for 3110035P10Rik (NM_172445.1,1180-1198).
gcatgaccaggagttaaca

SEQ ID NO: 773801 - DNA, 19 bp, Mus musculus
  siRNA target sequence for 3110035P10Rik (NM_172445.1,1284-1302).
ccatccactccgtgaatgt

SEQ ID NO: 773802 - DNA, 19 bp, Mus musculus
  siRNA target sequence for 3110035P10Rik (NM_172445.1,1285-1303).
catccactccgtgaatgtt

SEQ ID NO: 773803 - DNA, 19 bp, Mus musculus
  siRNA target sequence for 3110035P10Rik (NM_172445.1,1291-1309).
ctccgtgaatgttttccaa

SEQ ID NO: 773804 - DNA, 19 bp, Mus musculus
  siRNA target sequence for 3110035P10Rik (NM_172445.1,1371-1389).
gtgatgaccgcacagtaaa

SEQ ID NO: 773805 - DNA, 19 bp, Mus musculus
  siRNA target sequence for 3110035P10Rik (NM_172445.1,1376-1394).
gaccgcacagtaaaagtct

SEQ ID NO: 773806 - DNA, 19 bp, Mus musculus
  siRNA target sequence for 3110035P10Rik (NM_172445.1,1418-1436).
ccaattgcgacaattcgta

SEQ ID NO: 773807 - DNA, 19 bp, Mus musculus
  siRNA target sequence for 3110035P10Rik (NM_172445.1,1446-1464).
ccattaataggatcaatgt

SEQ ID NO: 773808 - DNA, 19 bp, Mus musculus
  siRNA target sequence for 3110035P10Rik (NM_172445.1,1506-1524).
ggcaagtgcgattgtttga

SEQ ID NO: 773809 - DNA, 19 bp, Mus musculus
  siRNA target sequence for 3110035P10Rik (NM_172445.1,1507-1525).
gcaagtgcgattgtttgat

SEQ ID NO: 773810 - DNA, 19 bp, Mus musculus
  siRNA target sequence for 3110035P10Rik (NM_172445.1,1508-1526).
caagtgcgattgtttgata

SEQ ID NO: 773811 - DNA, 19 bp, Mus musculus
  siRNA target sequence for 3110035P10Rik (NM_172445.1,1511-1529).
gtgcgattgtttgatatgt

SEQ ID NO: 773812 - DNA, 19 bp, Mus musculus
  siRNA target sequence for 3110035P10Rik (NM_172445.1,1613-1631).
caccccatatgcaatctat

SEQ ID NO: 773813 - DNA, 19 bp, Mus musculus
  siRNA target sequence for 3110035P10Rik (NM_172445.1,1615-1633).
ccccatatgcaatctattt

SEQ ID NO: 773814 - DNA, 19 bp, Mus musculus
  siRNA target sequence for 3110035P10Rik (NM_172445.1,1641-1659).
ggttcgataggcaagctat

SEQ ID NO: 773815 - DNA, 19 bp, Mus musculus
  siRNA target sequence for 3110035P10Rik (NM_172445.1,1642-1660).
gttcgataggcaagctatt

SEQ ID NO: 773816 - DNA, 19 bp, Mus musculus
  siRNA target sequence for 3110035P10Rik (NM_172445.1,1655-1673).
gctattgggtggaacatca

SEQ ID NO: 773817 - DNA, 19 bp, Mus musculus
  siRNA target sequence for 3110035P10Rik (NM_172445.1,1656-1674).
ctattgggtggaacatcaa

SEQ ID NO: 773818 - DNA, 19 bp, Mus musculus
  siRNA target sequence for 3110035P10Rik (NM_172445.1,1663-1681).
gtggaacatcaatattcct

SEQ ID NO: 773819 - DNA, 19 bp, Mus musculus
  siRNA target sequence for A330021E22Rik (NM_172447.1,315-333).
ggggagatgcagggtattt

SEQ ID NO: 773820 - DNA, 19 bp, Mus musculus
  siRNA target sequence for A330021E22Rik (NM_172447.1,316-334).
gggagatgcagggtatttt

SEQ ID NO: 773821 - DNA, 19 bp, Mus musculus
  siRNA target sequence for A330021E22Rik (NM_172447.1,335-353).
caagcctatggaccttaat

SEQ ID NO: 773822 - DNA, 19 bp, Mus musculus
  siRNA target sequence for A330021E22Rik (NM_172447.1,338-356).
gcctatggaccttaatcgt

SEQ ID NO: 773823 - DNA, 19 bp, Mus musculus
  siRNA target sequence for A330021E22Rik (NM_172447.1,339-357).
cctatggaccttaatcgta

SEQ ID NO: 773824 - DNA, 19 bp, Mus musculus
  siRNA target sequence for A330021E22Rik (NM_172447.1,340-358).
ctatggaccttaatcgtat

SEQ ID NO: 773825 - DNA, 19 bp, Mus musculus
  siRNA target sequence for A330021E22Rik (NM_172447.1,345-363).
gaccttaatcgtatcatca

SEQ ID NO: 773826 - DNA, 19 bp, Mus musculus
  siRNA target sequence for A330021E22Rik (NM_172447.1,347-365).
ccttaatcgtatcatcaaa

SEQ ID NO: 773827 - DNA, 19 bp, Mus musculus
  siRNA target sequence for A330021E22Rik (NM_172447.1,426-444).
ctgatacactgctatcaga

SEQ ID NO: 773828 - DNA, 19 bp, Mus musculus
  siRNA target sequence for A330021E22Rik (NM_172447.1,432-450).
cactgctatcagaatggat

SEQ ID NO: 773829 - DNA, 19 bp, Mus musculus
  siRNA target sequence for A330021E22Rik (NM_172447.1,443-461).
gaatggatttcctctaaga

SEQ ID NO: 773830 - DNA, 19 bp, Mus musculus
  siRNA target sequence for A330021E22Rik (NM_172447.1,447-465).
ggatttcctctaagagatt

SEQ ID NO: 773831 - DNA, 19 bp, Mus musculus
  siRNA target sequence for A330021E22Rik (NM_172447.1,460-478).
gagatttggcacagatatt

SEQ ID NO: 773832 - DNA, 19 bp, Mus musculus
  siRNA target sequence for A330021E22Rik (NM_172447.1,462-480).
gatttggcacagatattta

SEQ ID NO: 773833 - DNA, 19 bp, Mus musculus
  siRNA target sequence for A330021E22Rik (NM_172447.1,537-555).
gcatctgacatcataaaat

SEQ ID NO: 773834 - DNA, 19 bp, Mus musculus
  siRNA target sequence for A330021E22Rik (NM_172447.1,585-603).
gtatcggatgaaataactt

SEQ ID NO: 773835 - DNA, 19 bp, Mus musculus
  siRNA target sequence for A330021E22Rik (NM_172447.1,590-608).
ggatgaaataacttacact

SEQ ID NO: 773836 - DNA, 19 bp, Mus musculus
  siRNA target sequence for A330021E22Rik (NM_172447.1,605-623).
cactgaagatactgctaat

SEQ ID NO: 773837 - DNA, 19 bp, Mus musculus
  siRNA target sequence for A330021E22Rik (NM_172447.1,658-676).
caagttctgcattaaggat

SEQ ID NO: 773838 - DNA, 19 bp, Mus musculus
  siRNA target sequence for A330021E22Rik (NM_172447.1,666-684).
gcattaaggatacaaattt

SEQ ID NO: 773839 - DNA, 19 bp, Mus musculus
  siRNA target sequence for A330021E22Rik (NM_172447.1,750-768).
gtgagttcatcctacaaga

SEQ ID NO: 773840 - DNA, 19 bp, Mus musculus
  siRNA target sequence for A330021E22Rik (NM_172447.1,752-770).
gagttcatcctacaagatt

SEQ ID NO: 773841 - DNA, 19 bp, Mus musculus
  siRNA target sequence for A330021E22Rik (NM_172447.1,814-832).
cggcactcctgcttgagaa

SEQ ID NO: 773842 - DNA, 19 bp, Mus musculus
  siRNA target sequence for A330021E22Rik (NM_172447.1,834-852).
cagcttgtcgagaaactct

SEQ ID NO: 773843 - DNA, 19 bp, Mus musculus
  siRNA target sequence for A330021E22Rik (NM_172447.1,889-907).
gagttaattgcactttaat

SEQ ID NO: 773844 - DNA, 19 bp, Mus musculus
  siRNA target sequence for A330021E22Rik (NM_172447.1,1064-1082).
gctggctttgaaagaagta

SEQ ID NO: 773845 - DNA, 19 bp, Mus musculus
  siRNA target sequence for A330021E22Rik (NM_172447.1,1065-1083).
ctggctttgaaagaagtat

SEQ ID NO: 773846 - DNA, 19 bp, Mus musculus
  siRNA target sequence for A330021E22Rik (NM_172447.1,1102-1120).
gggggcatagtcactatga

SEQ ID NO: 773847 - DNA, 19 bp, Mus musculus
  siRNA target sequence for A330021E22Rik (NM_172447.1,1122-1140).
cgtcagcttagaaatgata

SEQ ID NO: 773848 - DNA, 19 bp, Mus musculus
  siRNA target sequence for A330021E22Rik (NM_172447.1,1125-1143).
cagcttagaaatgatatat

SEQ ID NO: 773849 - DNA, 19 bp, Mus musculus
  siRNA target sequence for A330021E22Rik (NM_172447.1,1176-1194).
ggagcaccgatgattgaat

SEQ ID NO: 773850 - DNA, 19 bp, Mus musculus
  siRNA target sequence for A330021E22Rik (NM_172447.1,1197-1215).
ggctttaccagggatttga

SEQ ID NO: 773851 - DNA, 19 bp, Mus musculus
  siRNA target sequence for A330021E22Rik (NM_172447.1,1198-1216).
gctttaccagggatttgat

SEQ ID NO: 773852 - DNA, 19 bp, Mus musculus
  siRNA target sequence for A330021E22Rik (NM_172447.1,1204-1222).
ccagggatttgatactatt

SEQ ID NO: 773853 - DNA, 19 bp, Mus musculus
  siRNA target sequence for A330021E22Rik (NM_172447.1,1205-1223).
cagggatttgatactattt

SEQ ID NO: 773854 - DNA, 19 bp, Mus musculus
  siRNA target sequence for A330021E22Rik (NM_172447.1,1214-1232).
gatactatttgcaactttt

SEQ ID NO: 773855 - DNA, 19 bp, Mus musculus
  siRNA target sequence for A330021E22Rik (NM_172447.1,1224-1242).
gcaacttttaatgaagtta

SEQ ID NO: 773856 - DNA, 19 bp, Mus musculus
  siRNA target sequence for A330021E22Rik (NM_172447.1,1253-1271).
ccccttggtaaaaagtctt

SEQ ID NO: 773857 - DNA, 19 bp, Mus musculus
  siRNA target sequence for A330021E22Rik (NM_172447.1,1254-1272).
cccttggtaaaaagtctta

SEQ ID NO: 773858 - DNA, 19 bp, Mus musculus
  siRNA target sequence for A330021E22Rik (NM_172447.1,1255-1273).
ccttggtaaaaagtcttaa

SEQ ID NO: 773859 - DNA, 19 bp, Mus musculus
  siRNA target sequence for A330021E22Rik (NM_172447.1,1259-1277).
ggtaaaaagtcttaagctt

SEQ ID NO: 773860 - DNA, 19 bp, Mus musculus
  siRNA target sequence for A330021E22Rik (NM_172447.1,1269-1287).
cttaagctttttaattgct

SEQ ID NO: 773861 - DNA, 19 bp, Mus musculus
  siRNA target sequence for A330021E22Rik (NM_172447.1,1329-1347).
gtgatcttatgtaaagatt

SEQ ID NO: 773862 - DNA, 19 bp, Mus musculus
  siRNA target sequence for A330021E22Rik (NM_172447.1,1354-1372).
ctgtacagctattaatcga

SEQ ID NO: 773863 - DNA, 19 bp, Mus musculus
  siRNA target sequence for A330021E22Rik (NM_172447.1,1389-1407).
gctttgtttacctatgtga

SEQ ID NO: 773864 - DNA, 19 bp, Mus musculus
  siRNA target sequence for A330021E22Rik (NM_172447.1,1498-1516).
ctcctttgttaatagaaga

SEQ ID NO: 773865 - DNA, 19 bp, Mus musculus
  siRNA target sequence for A330021E22Rik (NM_172447.1,1523-1541).
gtcatgccacggcaattct

SEQ ID NO: 773866 - DNA, 19 bp, Mus musculus
  siRNA target sequence for A330021E22Rik (NM_172447.1,1567-1585).
gtgggcatgaggattccta

SEQ ID NO: 773867 - DNA, 19 bp, Mus musculus
  siRNA target sequence for A330021E22Rik (NM_172447.1,1586-1604).
cttcattcatggtaacagt

SEQ ID NO: 773868 - DNA, 19 bp, Mus musculus
  siRNA target sequence for A330021E22Rik (NM_172447.1,1637-1655).
cgcccagatgcgttacact

SEQ ID NO: 773869 - DNA, 19 bp, Mus musculus
  siRNA target sequence for A330021E22Rik (NM_172447.1,1720-1738).
gaggggttattcatcaact

SEQ ID NO: 773870 - DNA, 19 bp, Mus musculus
  siRNA target sequence for A330021E22Rik (NM_172447.1,1724-1742).
ggttattcatcaactgata

SEQ ID NO: 773871 - DNA, 19 bp, Mus musculus
  siRNA target sequence for A330021E22Rik (NM_172447.1,1785-1803).
gaggccattgccttagaaa

SEQ ID NO: 773872 - DNA, 19 bp, Mus musculus
  siRNA target sequence for A330021E22Rik (NM_172447.1,1805-1823).
ccagtctgacacattactt

SEQ ID NO: 773873 - DNA, 19 bp, Mus musculus
  siRNA target sequence for A330021E22Rik (NM_172447.1,1806-1824).
cagtctgacacattactta

SEQ ID NO: 773874 - DNA, 19 bp, Mus musculus
  siRNA target sequence for A330021E22Rik (NM_172447.1,1810-1828).
ctgacacattacttattct

SEQ ID NO: 773875 - DNA, 19 bp, Mus musculus
  siRNA target sequence for A330021E22Rik (NM_172447.1,1873-1891).
gtactgaaggagttgacat

SEQ ID NO: 773876 - DNA, 19 bp, Mus musculus
  siRNA target sequence for A330021E22Rik (NM_172447.1,1882-1900).
gagttgacatagttcttca

SEQ ID NO: 773877 - DNA, 19 bp, Mus musculus
  siRNA target sequence for A330021E22Rik (NM_172447.1,1887-1905).
gacatagttcttcatgtaa

SEQ ID NO: 773878 - DNA, 19 bp, Mus musculus
  siRNA target sequence for A330021E22Rik (NM_172447.1,1931-1949).
gaggggtttaggctacaat

SEQ ID NO: 773879 - DNA, 19 bp, Mus musculus
  siRNA target sequence for A330021E22Rik (NM_172447.1,1933-1951).
ggggtttaggctacaatgt

SEQ ID NO: 773880 - DNA, 19 bp, Mus musculus
  siRNA target sequence for A330021E22Rik (NM_172447.1,1952-1970).
ccttcttttcagtacgtta

SEQ ID NO: 773881 - DNA, 19 bp, Mus musculus
  siRNA target sequence for A330021E22Rik (NM_172447.1,1956-1974).
cttttcagtacgttagaca

SEQ ID NO: 773882 - DNA, 19 bp, Mus musculus
  siRNA target sequence for A330021E22Rik (NM_172447.1,1994-2012).
gggatgttatgattctgaa

SEQ ID NO: 773883 - DNA, 19 bp, Mus musculus
  siRNA target sequence for A330021E22Rik (NM_172447.1,2058-2076).
ctagcattgaaccaaaaaa

SEQ ID NO: 773884 - DNA, 19 bp, Mus musculus
  siRNA target sequence for A330021E22Rik (NM_172447.1,2069-2087).
ccaaaaaaaattctgtaat

SEQ ID NO: 773885 - DNA, 19 bp, Mus musculus
  siRNA target sequence for A330021E22Rik (NM_172447.1,2090-2108).
gattcttggaataatggtt

SEQ ID NO: 773886 - DNA, 19 bp, Mus musculus
  siRNA target sequence for A330021E22Rik (NM_172447.1,2097-2115).
ggaataatggttgaatttt

SEQ ID NO: 773887 - DNA, 19 bp, Mus musculus
  siRNA target sequence for A330021E22Rik (NM_172447.1,2149-2167).
cttggcgtgggaagaaaga

SEQ ID NO: 773888 - DNA, 19 bp, Mus musculus
  siRNA target sequence for A330021E22Rik (NM_172447.1,2171-2189).
gactgctgccagcctttta

SEQ ID NO: 773889 - DNA, 19 bp, Mus musculus
  siRNA target sequence for A330021E22Rik (NM_172447.1,2175-2193).
gctgccagccttttaatta

SEQ ID NO: 773890 - DNA, 19 bp, Mus musculus
  siRNA target sequence for A330021E22Rik (NM_172447.1,2179-2197).
ccagccttttaattaaact

SEQ ID NO: 773891 - DNA, 19 bp, Mus musculus
  siRNA target sequence for A330021E22Rik (NM_172447.1,2216-2234).
ggagctaggagtaaaacgt

SEQ ID NO: 773892 - DNA, 19 bp, Mus musculus
  siRNA target sequence for A330021E22Rik (NM_172447.1,2237-2255).
caggaacggcaagattgtt

SEQ ID NO: 773893 - DNA, 19 bp, Mus musculus
  siRNA target sequence for A330021E22Rik (NM_172447.1,2240-2258).
gaacggcaagattgttgat

SEQ ID NO: 773894 - DNA, 19 bp, Mus musculus
  siRNA target sequence for A330021E22Rik (NM_172447.1,2243-2261).
cggcaagattgttgataca

SEQ ID NO: 773895 - DNA, 19 bp, Mus musculus
  siRNA target sequence for A330021E22Rik (NM_172447.1,2264-2282).
gagacctctatttactagt

SEQ ID NO: 773896 - DNA, 19 bp, Mus musculus
  siRNA target sequence for A330021E22Rik (NM_172447.1,2314-2332).
ctgctaactgcccatctat

SEQ ID NO: 773897 - DNA, 19 bp, Mus musculus
  siRNA target sequence for A330021E22Rik (NM_172447.1,2323-2341).
gcccatctattgcagttat

SEQ ID NO: 773898 - DNA, 19 bp, Mus musculus
  siRNA target sequence for A330021E22Rik (NM_172447.1,2360-2378).
cagagcaaaaatttatgct

SEQ ID NO: 773899 - DNA, 19 bp, Mus musculus
  siRNA target sequence for A330021E22Rik (NM_172447.1,2381-2399).
gttggataaactagatttt

SEQ ID NO: 773900 - DNA, 19 bp, Mus musculus
  siRNA target sequence for A330021E22Rik (NM_172447.1,2384-2402).
ggataaactagattttgaa

SEQ ID NO: 773901 - DNA, 19 bp, Mus musculus
  siRNA target sequence for A330021E22Rik (NM_172447.1,2412-2430).
ggcttatctgccgaagatt

SEQ ID NO: 773902 - DNA, 19 bp, Mus musculus
  siRNA target sequence for A330021E22Rik (NM_172447.1,2413-2431).
gcttatctgccgaagattt

SEQ ID NO: 773903 - DNA, 19 bp, Mus musculus
  siRNA target sequence for A330021E22Rik (NM_172447.1,2414-2432).
cttatctgccgaagatttt

SEQ ID NO: 773904 - DNA, 19 bp, Mus musculus
  siRNA target sequence for A330021E22Rik (NM_172447.1,2435-2453).
caccctctgtataatacat

SEQ ID NO: 773905 - DNA, 19 bp, Mus musculus
  siRNA target sequence for A330021E22Rik (NM_172447.1,2438-2456).
cctctgtataatacataga

SEQ ID NO: 773906 - DNA, 19 bp, Mus musculus
  siRNA target sequence for A330021E22Rik (NM_172447.1,2443-2461).
gtataatacatagatactt

SEQ ID NO: 773907 - DNA, 19 bp, Mus musculus
  siRNA target sequence for A330021E22Rik (NM_172447.1,2599-2617).
ccttgcaaagtgagatgat

SEQ ID NO: 773908 - DNA, 19 bp, Mus musculus
  siRNA target sequence for A330021E22Rik (NM_172447.1,2600-2618).
cttgcaaagtgagatgatt

SEQ ID NO: 773909 - DNA, 19 bp, Mus musculus
  siRNA target sequence for A330021E22Rik (NM_172447.1,2694-2712).
gagcaggctaacaagtcat

SEQ ID NO: 773910 - DNA, 19 bp, Mus musculus
  siRNA target sequence for A330021E22Rik (NM_172447.1,2723-2741).
cttggctaggacatcaaat

SEQ ID NO: 773911 - DNA, 19 bp, Mus musculus
  siRNA target sequence for A330021E22Rik (NM_172447.1,2726-2744).
ggctaggacatcaaatgct

SEQ ID NO: 773912 - DNA, 19 bp, Mus musculus
  siRNA target sequence for A330021E22Rik (NM_172447.1,2727-2745).
gctaggacatcaaatgcta

SEQ ID NO: 773913 - DNA, 19 bp, Mus musculus
  siRNA target sequence for A330021E22Rik (NM_172447.1,2772-2790).
caagaaaaggctatagaat

SEQ ID NO: 773914 - DNA, 19 bp, Mus musculus
  siRNA target sequence for A330021E22Rik (NM_172447.1,2828-2846).
ccaccaaacagttattaaa

SEQ ID NO: 773915 - DNA, 19 bp, Mus musculus
  siRNA target sequence for A330021E22Rik (NM_172447.1,2838-2856).
gttattaaaggtcttaaca

SEQ ID NO: 773916 - DNA, 19 bp, Mus musculus
  siRNA target sequence for A330021E22Rik (NM_172447.1,2930-2948).
cacagacatcgctctgaaa

SEQ ID NO: 773917 - DNA, 19 bp, Mus musculus
  siRNA target sequence for A330021E22Rik (NM_172447.1,2945-2963).
gaaaaaactgcctattcga

SEQ ID NO: 773918 - DNA, 19 bp, Mus musculus
  siRNA target sequence for A330021E22Rik (NM_172447.1,2971-2989).
ccttgcagcgggtgaaagt

SEQ ID NO: 773919 - DNA, 19 bp, Mus musculus
  siRNA target sequence for A330021E22Rik (NM_172447.1,2990-3008).
gaagccaccactgaatgat

SEQ ID NO: 773920 - DNA, 19 bp, Mus musculus
  siRNA target sequence for A330021E22Rik (NM_172447.1,2995-3013).
caccactgaatgatcctaa

SEQ ID NO: 773921 - DNA, 19 bp, Mus musculus
  siRNA target sequence for A330021E22Rik (NM_172447.1,2997-3015).
ccactgaatgatcctaaaa

SEQ ID NO: 773922 - DNA, 19 bp, Mus musculus
  siRNA target sequence for 4732452J19Rik (NM_172448.1,374-392).
gagccaacgcagtactctt

SEQ ID NO: 773923 - DNA, 19 bp, Mus musculus
  siRNA target sequence for 4732452J19Rik (NM_172448.1,377-395).
ccaacgcagtactctttga

SEQ ID NO: 773924 - DNA, 19 bp, Mus musculus
  siRNA target sequence for 4732452J19Rik (NM_172448.1,462-480).
gctgatctggggtagtgat

SEQ ID NO: 773925 - DNA, 19 bp, Mus musculus
  siRNA target sequence for 4732452J19Rik (NM_172448.1,596-614).
gtaccgtctttgtgatcat

SEQ ID NO: 773926 - DNA, 19 bp, Mus musculus
  siRNA target sequence for 4732452J19Rik (NM_172448.1,842-860).
cgtgcctccacgagtttca

SEQ ID NO: 773927 - DNA, 19 bp, Mus musculus
  siRNA target sequence for 4732452J19Rik (NM_172448.1,843-861).
gtgcctccacgagtttcat

SEQ ID NO: 773928 - DNA, 19 bp, Mus musculus
  siRNA target sequence for 4732452J19Rik (NM_172448.1,904-922).
cccctctgcatgttcaaca

SEQ ID NO: 773929 - DNA, 19 bp, Mus musculus
  siRNA target sequence for 4732452J19Rik (NM_172448.1,924-942).
cgtagagggagattcattt

SEQ ID NO: 773930 - DNA, 19 bp, Mus musculus
  siRNA target sequence for 4732452J19Rik (NM_172448.1,925-943).
gtagagggagattcatttt

SEQ ID NO: 773931 - DNA, 19 bp, Mus musculus
  siRNA target sequence for 4732452J19Rik (NM_172448.1,953-971).
cggcagcctctccatctta

SEQ ID NO: 773932 - DNA, 19 bp, Mus musculus
  siRNA target sequence for 4732452J19Rik (NM_172448.1,1013-1031).
ctggccacgcccactatca

SEQ ID NO: 773933 - DNA, 19 bp, Mus musculus
  siRNA target sequence for 4732452J19Rik (NM_172448.1,1017-1035).
ccacgcccactatcatctt

SEQ ID NO: 773934 - DNA, 19 bp, Mus musculus
  siRNA target sequence for 4732452J19Rik (NM_172448.1,1143-1161).
ccttcccaggacttcacat

SEQ ID NO: 773935 - DNA, 19 bp, Mus musculus
  siRNA target sequence for 4732452J19Rik (NM_172448.1,1331-1349).
cagaacgcagcggttactt

SEQ ID NO: 773936 - DNA, 19 bp, Mus musculus
  siRNA target sequence for 4732452J19Rik (NM_172448.1,1492-1510).
gaccccttggtatactgta

SEQ ID NO: 773937 - DNA, 19 bp, Mus musculus
  siRNA target sequence for 4732452J19Rik (NM_172448.1,1811-1829).
ggcccagggctcttacaga

SEQ ID NO: 773938 - DNA, 19 bp, Mus musculus
  siRNA target sequence for 4732452J19Rik (NM_172448.1,1880-1898).
ctaaccccagcggtctttt

SEQ ID NO: 773939 - DNA, 19 bp, Mus musculus
  siRNA target sequence for 4732452J19Rik (NM_172448.1,1885-1903).
cccagcggtcttttgaact

SEQ ID NO: 773940 - DNA, 19 bp, Mus musculus
  siRNA target sequence for 4732452J19Rik (NM_172448.1,2060-2078).
cagaggttcatccattgat

SEQ ID NO: 773941 - DNA, 19 bp, Mus musculus
  siRNA target sequence for 4732452J19Rik (NM_172448.1,2062-2080).
gaggttcatccattgatgt

SEQ ID NO: 773942 - DNA, 19 bp, Mus musculus
  siRNA target sequence for 4732452J19Rik (NM_172448.1,2065-2083).
gttcatccattgatgttca

SEQ ID NO: 773943 - DNA, 19 bp, Mus musculus
  siRNA target sequence for 4732452J19Rik (NM_172448.1,2122-2140).
ccaggcccctgttactcaa

SEQ ID NO: 773944 - DNA, 19 bp, Mus musculus
  siRNA target sequence for 4732452J19Rik (NM_172448.1,2125-2143).
ggcccctgttactcaagtt

SEQ ID NO: 773945 - DNA, 19 bp, Mus musculus
  siRNA target sequence for 4732452J19Rik (NM_172448.1,2149-2167).
ccagtgtggttgtatctga

SEQ ID NO: 773946 - DNA, 19 bp, Mus musculus
  siRNA target sequence for 4732452J19Rik (NM_172448.1,2241-2259).
caggagatgtccttactca

SEQ ID NO: 773947 - DNA, 19 bp, Mus musculus
  siRNA target sequence for Bzrap1 (NM_172449.1,1922-1940).
caccgaggcctcaggaaat

SEQ ID NO: 773948 - DNA, 19 bp, Mus musculus
  siRNA target sequence for Bzrap1 (NM_172449.1,1925-1943).
cgaggcctcaggaaatggt

SEQ ID NO: 773949 - DNA, 19 bp, Mus musculus
  siRNA target sequence for Bzrap1 (NM_172449.1,1990-2008).
ctcgtcggtccaagaaagt

SEQ ID NO: 773950 - DNA, 19 bp, Mus musculus
  siRNA target sequence for Bzrap1 (NM_172449.1,2090-2108).
ggtggctgcatttgactat

SEQ ID NO: 773951 - DNA, 19 bp, Mus musculus
  siRNA target sequence for Bzrap1 (NM_172449.1,2093-2111).
ggctgcatttgactataat

SEQ ID NO: 773952 - DNA, 19 bp, Mus musculus
  siRNA target sequence for Bzrap1 (NM_172449.1,2164-2182).
caggggatgtcattactgt

SEQ ID NO: 773953 - DNA, 19 bp, Mus musculus
  siRNA target sequence for Bzrap1 (NM_172449.1,2168-2186).
ggatgtcattactgtgttt

SEQ ID NO: 773954 - DNA, 19 bp, Mus musculus
  siRNA target sequence for Bzrap1 (NM_172449.1,2443-2461).
gtctcctcgccaaagcaaa

SEQ ID NO: 773955 - DNA, 19 bp, Mus musculus
  siRNA target sequence for 4930539E08Rik (NM_172450.1,1007-1025).
cagcctgaagagagtctta

SEQ ID NO: 773956 - DNA, 19 bp, Mus musculus
  siRNA target sequence for 4930539E08Rik (NM_172450.1,1288-1306).
cctccgaatccagagaatt

SEQ ID NO: 773957 - DNA, 19 bp, Mus musculus
  siRNA target sequence for 4930539E08Rik (NM_172450.1,1473-1491).
cacagctccaaggattcta

SEQ ID NO: 773958 - DNA, 19 bp, Mus musculus
  siRNA target sequence for 4930539E08Rik (NM_172450.1,1478-1496).
ctccaaggattctaagaaa

SEQ ID NO: 773959 - DNA, 19 bp, Mus musculus
  siRNA target sequence for 4930539E08Rik (NM_172450.1,1815-1833).
cccagcttcaagcgttttt

SEQ ID NO: 773960 - DNA, 19 bp, Mus musculus
  siRNA target sequence for 4930539E08Rik (NM_172450.1,1816-1834).
ccagcttcaagcgtttttt

SEQ ID NO: 773961 - DNA, 19 bp, Mus musculus
  siRNA target sequence for 4930539E08Rik (NM_172450.1,1862-1880).
gaagctggtggctacctta

SEQ ID NO: 773962 - DNA, 19 bp, Mus musculus
  siRNA target sequence for 4930539E08Rik (NM_172450.1,1866-1884).
ctggtggctaccttagaga

SEQ ID NO: 773963 - DNA, 19 bp, Mus musculus
  siRNA target sequence for 4930539E08Rik (NM_172450.1,2004-2022).
cagtccagaggcgaataca

SEQ ID NO: 773964 - DNA, 19 bp, Mus musculus
  siRNA target sequence for AI449441 (NM_172453.1,775-793).
gagcctaggtcgaaacgaa

SEQ ID NO: 773965 - DNA, 19 bp, Mus musculus
  siRNA target sequence for AI449441 (NM_172453.1,1160-1178).
gaaaagcggccaatggaat

SEQ ID NO: 773966 - DNA, 19 bp, Mus musculus
  siRNA target sequence for AI449441 (NM_172453.1,1242-1260).
ccaaaccgaagctttctga

SEQ ID NO: 773967 - DNA, 19 bp, Mus musculus
  siRNA target sequence for AI449441 (NM_172453.1,1243-1261).
caaaccgaagctttctgaa

SEQ ID NO: 773968 - DNA, 19 bp, Mus musculus
  siRNA target sequence for AI449441 (NM_172453.1,1524-1542).
ggctgaactgccaacgttt

SEQ ID NO: 773969 - DNA, 19 bp, Mus musculus
  siRNA target sequence for AI449441 (NM_172453.1,1533-1551).
gccaacgtttggtcattga

SEQ ID NO: 773970 - DNA, 19 bp, Mus musculus
  siRNA target sequence for AI449441 (NM_172453.1,1564-1582).
ggtggaggcagacttcttt

SEQ ID NO: 773971 - DNA, 19 bp, Mus musculus
  siRNA target sequence for AI449441 (NM_172453.1,1605-1623).
gagctgtccggcaacagaa

SEQ ID NO: 773972 - DNA, 19 bp, Mus musculus
  siRNA target sequence for AI449441 (NM_172453.1,1814-1832).
gtgaggttaggcagatgtt

SEQ ID NO: 773973 - DNA, 19 bp, Mus musculus
  siRNA target sequence for AI449441 (NM_172453.1,1825-1843).
cagatgttcagatgaagta

SEQ ID NO: 773974 - DNA, 19 bp, Mus musculus
  siRNA target sequence for AI449441 (NM_172453.1,1895-1913).
gtagccacgagactatgta

SEQ ID NO: 773975 - DNA, 19 bp, Mus musculus
  siRNA target sequence for AI449441 (NM_172453.1,1911-1929).
gtacccatcaggatgatgt

SEQ ID NO: 773976 - DNA, 19 bp, Mus musculus
  siRNA target sequence for AI449441 (NM_172453.1,2043-2061).
gccgtgtccttcagttaaa

SEQ ID NO: 773977 - DNA, 19 bp, Mus musculus
  siRNA target sequence for AI449441 (NM_172453.1,2335-2353).
ctctctgggccgtgtgttt

SEQ ID NO: 773978 - DNA, 19 bp, Mus musculus
  siRNA target sequence for Panx3 (NM_172454.1,231-249).
gatggtcaagttcattact

SEQ ID NO: 773979 - DNA, 19 bp, Mus musculus
  siRNA target sequence for Panx3 (NM_172454.1,533-551).
gctctgacctgctgttcat

SEQ ID NO: 773980 - DNA, 19 bp, Mus musculus
  siRNA target sequence for Panx3 (NM_172454.1,669-687).
gaaggaacggtactttgaa

SEQ ID NO: 773981 - DNA, 19 bp, Mus musculus
  siRNA target sequence for Panx3 (NM_172454.1,672-690).
ggaacggtactttgaattt

SEQ ID NO: 773982 - DNA, 19 bp, Mus musculus
  siRNA target sequence for Panx3 (NM_172454.1,798-816).
gtaccttggccaattccat

SEQ ID NO: 773983 - DNA, 19 bp, Mus musculus
  siRNA target sequence for Panx3 (NM_172454.1,801-819).
ccttggccaattccattta

SEQ ID NO: 773984 - DNA, 19 bp, Mus musculus
  siRNA target sequence for Panx3 (NM_172454.1,813-831).
ccatttagatgtcttcttt

SEQ ID NO: 773985 - DNA, 19 bp, Mus musculus
  siRNA target sequence for Panx3 (NM_172454.1,858-876).
gacagggctgctacatgat

SEQ ID NO: 773986 - DNA, 19 bp, Mus musculus
  siRNA target sequence for Panx3 (NM_172454.1,860-878).
cagggctgctacatgatga

SEQ ID NO: 773987 - DNA, 19 bp, Mus musculus
  siRNA target sequence for Panx3 (NM_172454.1,952-970).
gcagcaatatacaccatat

SEQ ID NO: 773988 - DNA, 19 bp, Mus musculus
  siRNA target sequence for Panx3 (NM_172454.1,956-974).
caatatacaccatattggt

SEQ ID NO: 773989 - DNA, 19 bp, Mus musculus
  siRNA target sequence for Panx3 (NM_172454.1,966-984).
catattggtcccagtgata

SEQ ID NO: 773990 - DNA, 19 bp, Mus musculus
  siRNA target sequence for Panx3 (NM_172454.1,973-991).
gtcccagtgataatataca

SEQ ID NO: 773991 - DNA, 19 bp, Mus musculus
  siRNA target sequence for Panx3 (NM_172454.1,1077-1095).
gctaggatgccccatcaat

SEQ ID NO: 773992 - DNA, 19 bp, Mus musculus
  siRNA target sequence for Panx3 (NM_172454.1,1092-1110).
caatgacctcaatgtgatt

SEQ ID NO: 773993 - DNA, 19 bp, Mus musculus
  siRNA target sequence for Panx3 (NM_172454.1,1098-1116).
cctcaatgtgattcttctt

SEQ ID NO: 773994 - DNA, 19 bp, Mus musculus
  siRNA target sequence for Panx3 (NM_172454.1,1114-1132).
cttttcctccgagctaata

SEQ ID NO: 773995 - DNA, 19 bp, Mus musculus
  siRNA target sequence for Panx3 (NM_172454.1,1119-1137).
cctccgagctaatatctct

SEQ ID NO: 773996 - DNA, 19 bp, Mus musculus
  siRNA target sequence for Panx3 (NM_172454.1,1134-1152).
ctctgagctcatctctttt

SEQ ID NO: 773997 - DNA, 19 bp, Mus musculus
  siRNA target sequence for Panx3 (NM_172454.1,1155-1173).
ctggctgagtgtcttaagt

SEQ ID NO: 773998 - DNA, 19 bp, Mus musculus
  siRNA target sequence for Panx3 (NM_172454.1,1190-1208).
ccacccagaaacacaacat

SEQ ID NO: 773999 - DNA, 19 bp, Mus musculus
  siRNA target sequence for Panx3 (NM_172454.1,1233-1251).
ctttgtggctggcttagaa

SEQ ID NO: 774000 - DNA, 19 bp, Mus musculus
  siRNA target sequence for Panx3 (NM_172454.1,1267-1285).
catctcacccaacatacat

SEQ ID NO: 774001 - DNA, 19 bp, Mus musculus
  siRNA target sequence for Panx3 (NM_172454.1,1272-1290).
cacccaacatacatatgat

SEQ ID NO: 774002 - DNA, 19 bp, Mus musculus
  siRNA target sequence for Panx3 (NM_172454.1,1275-1293).
ccaacatacatatgatgaa

SEQ ID NO: 774003 - DNA, 19 bp, Mus musculus
  siRNA target sequence for A630029F06 (NM_172457.1,744-762).
gtaccaaacccaagtctat

SEQ ID NO: 774004 - DNA, 19 bp, Mus musculus
  siRNA target sequence for Zfp11 (NM_172462.1,104-122).
gtccccagagaatctttct

SEQ ID NO: 774005 - DNA, 19 bp, Mus musculus
  siRNA target sequence for Zfp11 (NM_172462.1,198-216).
ccgtacaagcaggaagaat

SEQ ID NO: 774006 - DNA, 19 bp, Mus musculus
  siRNA target sequence for Zfp11 (NM_172462.1,258-276).
ggaggcatgccctatgaat

SEQ ID NO: 774007 - DNA, 19 bp, Mus musculus
  siRNA target sequence for Zfp11 (NM_172462.1,571-589).
ctcagcatgaagtcattca

SEQ ID NO: 774008 - DNA, 19 bp, Mus musculus
  siRNA target sequence for Zfp11 (NM_172462.1,573-591).
cagcatgaagtcattcata

SEQ ID NO: 774009 - DNA, 19 bp, Mus musculus
  siRNA target sequence for Zfp11 (NM_172462.1,653-671).
cagtcaacaccaggtaatt

SEQ ID NO: 774010 - DNA, 19 bp, Mus musculus
  siRNA target sequence for Zfp11 (NM_172462.1,655-673).
gtcaacaccaggtaattca

SEQ ID NO: 774011 - DNA, 19 bp, Mus musculus
  siRNA target sequence for Zfp11 (NM_172462.1,725-743).
gcactcgtctcttacacaa

SEQ ID NO: 774012 - DNA, 19 bp, Mus musculus
  siRNA target sequence for Zfp11 (NM_172462.1,794-812).
gaaagcgttcaggtatcaa

SEQ ID NO: 774013 - DNA, 19 bp, Mus musculus
  siRNA target sequence for Zfp11 (NM_172462.1,798-816).
gcgttcaggtatcaatcaa

SEQ ID NO: 774014 - DNA, 19 bp, Mus musculus
  siRNA target sequence for Zfp11 (NM_172462.1,1157-1175).
cacccgccaccagatactt

SEQ ID NO: 774015 - DNA, 19 bp, Mus musculus
  siRNA target sequence for Zfp11 (NM_172462.1,1160-1178).
ccgccaccagatacttcat

SEQ ID NO: 774016 - DNA, 19 bp, Mus musculus
  siRNA target sequence for Zfp11 (NM_172462.1,1161-1179).
cgccaccagatacttcata

SEQ ID NO: 774017 - DNA, 19 bp, Mus musculus
  siRNA target sequence for Zfp11 (NM_172462.1,1350-1368).
gaagagattccctatagat

SEQ ID NO: 774018 - DNA, 19 bp, Mus musculus
  siRNA target sequence for Zfp11 (NM_172462.1,1355-1373).
gattccctatagatgcaaa

SEQ ID NO: 774019 - DNA, 19 bp, Mus musculus
  siRNA target sequence for Zfp11 (NM_172462.1,1817-1835).
ctcctcatacctgactaaa

SEQ ID NO: 774020 - DNA, 19 bp, Mus musculus
  siRNA target sequence for Zfp11 (NM_172462.1,1968-1986).
ggcaaggcctttattactt

SEQ ID NO: 774021 - DNA, 19 bp, Mus musculus
  siRNA target sequence for B130055L09Rik (NM_172467.1,463-481).
ggctttttggcctcaatga

SEQ ID NO: 774022 - DNA, 19 bp, Mus musculus
  siRNA target sequence for B130055L09Rik (NM_172467.1,464-482).
gctttttggcctcaatgaa

SEQ ID NO: 774023 - DNA, 19 bp, Mus musculus
  siRNA target sequence for B130055L09Rik (NM_172467.1,529-547).
cagaggtctgtcagatgta

SEQ ID NO: 774024 - DNA, 19 bp, Mus musculus
  siRNA target sequence for B130055L09Rik (NM_172467.1,590-608).
ggatagatgcaacaagttt

SEQ ID NO: 774025 - DNA, 19 bp, Mus musculus
  siRNA target sequence for B130055L09Rik (NM_172467.1,699-717).
ctagaggaccaagaactta

SEQ ID NO: 774026 - DNA, 19 bp, Mus musculus
  siRNA target sequence for B130055L09Rik (NM_172467.1,704-722).
ggaccaagaacttagtgtt

SEQ ID NO: 774027 - DNA, 19 bp, Mus musculus
  siRNA target sequence for B130055L09Rik (NM_172467.1,720-738).
gtttcaagcgtcgtgaatt

SEQ ID NO: 774028 - DNA, 19 bp, Mus musculus
  siRNA target sequence for B130055L09Rik (NM_172467.1,724-742).
caagcgtcgtgaatttcca

SEQ ID NO: 774029 - DNA, 19 bp, Mus musculus
  siRNA target sequence for B130055L09Rik (NM_172467.1,732-750).
gtgaatttccagataatct

SEQ ID NO: 774030 - DNA, 19 bp, Mus musculus
  siRNA target sequence for 4930459M12Rik (NM_172470.2,293-311).
ctgttcccaataatgtgaa

SEQ ID NO: 774031 - DNA, 19 bp, Mus musculus
  siRNA target sequence for 4930459M12Rik (NM_172470.2,337-355).
gaccaagggttcatagcat

SEQ ID NO: 774032 - DNA, 19 bp, Mus musculus
  siRNA target sequence for 4930459M12Rik (NM_172470.2,359-377).
gcggtgaggatggattact

SEQ ID NO: 774033 - DNA, 19 bp, Mus musculus
  siRNA target sequence for 4930459M12Rik (NM_172470.2,366-384).
ggatggattactgaaagtt

SEQ ID NO: 774034 - DNA, 19 bp, Mus musculus
  siRNA target sequence for 4930459M12Rik (NM_172470.2,434-452).
cccctagtaacctttccat

SEQ ID NO: 774035 - DNA, 19 bp, Mus musculus
  siRNA target sequence for 4930459M12Rik (NM_172470.2,444-462).
cctttccatgaaccaaaat

SEQ ID NO: 774036 - DNA, 19 bp, Mus musculus
  siRNA target sequence for 4930459M12Rik (NM_172470.2,476-494).
gtggtgctgttcaagttgt

SEQ ID NO: 774037 - DNA, 19 bp, Mus musculus
  siRNA target sequence for 4930459M12Rik (NM_172470.2,497-515).
cgtggaatgaacagtatca

SEQ ID NO: 774038 - DNA, 19 bp, Mus musculus
  siRNA target sequence for 4930459M12Rik (NM_172470.2,532-550).
gatcaaaatgggcttatca

SEQ ID NO: 774039 - DNA, 19 bp, Mus musculus
  siRNA target sequence for 4930459M12Rik (NM_172470.2,564-582).
gtataaaggctcttggtat

SEQ ID NO: 774040 - DNA, 19 bp, Mus musculus
  siRNA target sequence for 4930459M12Rik (NM_172470.2,758-776).
ctgcagatagtaaaatcct

SEQ ID NO: 774041 - DNA, 19 bp, Mus musculus
  siRNA target sequence for 4930459M12Rik (NM_172470.2,763-781).
gatagtaaaatcctacttt

SEQ ID NO: 774042 - DNA, 19 bp, Mus musculus
  siRNA target sequence for 4930459M12Rik (NM_172470.2,865-883).
gtcactggagcgatcagta

SEQ ID NO: 774043 - DNA, 19 bp, Mus musculus
  siRNA target sequence for 4930459M12Rik (NM_172470.2,938-956).
cttgcctggcaatttgctt

SEQ ID NO: 774044 - DNA, 19 bp, Mus musculus
  siRNA target sequence for 4930459M12Rik (NM_172470.2,943-961).
ctggcaatttgctttgaca

SEQ ID NO: 774045 - DNA, 19 bp, Mus musculus
  siRNA target sequence for 4930459M12Rik (NM_172470.2,945-963).
ggcaatttgctttgacaat

SEQ ID NO: 774046 - DNA, 19 bp, Mus musculus
  siRNA target sequence for 4930459M12Rik (NM_172470.2,994-1012).
gaccaaaacccggttttga

SEQ ID NO: 774047 - DNA, 19 bp, Mus musculus
  siRNA target sequence for 4930459M12Rik (NM_172470.2,1011-1029).
gatcgacacgggcatgtat

SEQ ID NO: 774048 - DNA, 19 bp, Mus musculus
  siRNA target sequence for 4930459M12Rik (NM_172470.2,1050-1068).
ccacatcggcagtgtgtta

SEQ ID NO: 774049 - DNA, 19 bp, Mus musculus
  siRNA target sequence for 4930459M12Rik (NM_172470.2,1097-1115).
ctcaggacaaggacatcaa

SEQ ID NO: 774050 - DNA, 19 bp, Mus musculus
  siRNA target sequence for 4930459M12Rik (NM_172470.2,1144-1162).
gagcatctgggtactttga

SEQ ID NO: 774051 - DNA, 19 bp, Mus musculus
  siRNA target sequence for 4930459M12Rik (NM_172470.2,1228-1246).
gttgactcctttatatatt

SEQ ID NO: 774052 - DNA, 19 bp, Mus musculus
  siRNA target sequence for 4930459M12Rik (NM_172470.2,1283-1301).
gttccaacacagtggttta

SEQ ID NO: 774053 - DNA, 19 bp, Mus musculus
  siRNA target sequence for 4930459M12Rik (NM_172470.2,1315-1333).
cccgatcgtcccgaatact

SEQ ID NO: 774054 - DNA, 19 bp, Mus musculus
  siRNA target sequence for 4930459M12Rik (NM_172470.2,1317-1335).
cgatcgtcccgaatactgt

SEQ ID NO: 774055 - DNA, 19 bp, Mus musculus
  siRNA target sequence for 4930459M12Rik (NM_172470.2,1325-1343).
ccgaatactgtgttgtgtt

SEQ ID NO: 774056 - DNA, 19 bp, Mus musculus
  siRNA target sequence for 4930459M12Rik (NM_172470.2,1381-1399).
gtgaagagcctcatttcta

SEQ ID NO: 774057 - DNA, 19 bp, Mus musculus
  siRNA target sequence for 4930459M12Rik (NM_172470.2,1453-1471).
cctcaggaggagaatgaaa

SEQ ID NO: 774058 - DNA, 19 bp, Mus musculus
  siRNA target sequence for 4930459M12Rik (NM_172470.2,1476-1494).
gacatttggtgcaacgttt

SEQ ID NO: 774059 - DNA, 19 bp, Mus musculus
  siRNA target sequence for 4930459M12Rik (NM_172470.2,1497-1515).
gcttgtcctttgcaattct

SEQ ID NO: 774060 - DNA, 19 bp, Mus musculus
  siRNA target sequence for 4930459M12Rik (NM_172470.2,1523-1541).
cacccttggaccctaaata

SEQ ID NO: 774061 - DNA, 19 bp, Mus musculus
  siRNA target sequence for 4930459M12Rik (NM_172470.2,1525-1543).
cccttggaccctaaataca

SEQ ID NO: 774062 - DNA, 19 bp, Mus musculus
  siRNA target sequence for 4930459M12Rik (NM_172470.2,1526-1544).
ccttggaccctaaatacat

SEQ ID NO: 774063 - DNA, 19 bp, Mus musculus
  siRNA target sequence for 4930459M12Rik (NM_172470.2,1527-1545).
cttggaccctaaatacatt

SEQ ID NO: 774064 - DNA, 19 bp, Mus musculus
  siRNA target sequence for 4930459M12Rik (NM_172470.2,1530-1548).
ggaccctaaatacattgat

SEQ ID NO: 774065 - DNA, 19 bp, Mus musculus
  siRNA target sequence for 4930459M12Rik (NM_172470.2,1533-1551).
ccctaaatacattgatctt

SEQ ID NO: 774066 - DNA, 19 bp, Mus musculus
  siRNA target sequence for 4930459M12Rik (NM_172470.2,1542-1560).
cattgatcttgtaccatta

SEQ ID NO: 774067 - DNA, 19 bp, Mus musculus
  siRNA target sequence for 4930459M12Rik (NM_172470.2,1572-1590).
gaccaaaacccatgtgata

SEQ ID NO: 774068 - DNA, 19 bp, Mus musculus
  siRNA target sequence for 4930459M12Rik (NM_172470.2,1649-1667).
cactggaaattaatcagat

SEQ ID NO: 774069 - DNA, 19 bp, Mus musculus
  siRNA target sequence for 4930459M12Rik (NM_172470.2,1665-1683).
gatcacacggtctcgaaaa

SEQ ID NO: 774070 - DNA, 19 bp, Mus musculus
  siRNA target sequence for 4930459M12Rik (NM_172470.2,1697-1715).
gaatttatcacgttgatga

SEQ ID NO: 774071 - DNA, 19 bp, Mus musculus
  siRNA target sequence for 4930459M12Rik (NM_172470.2,1732-1750).
gtggatggggtgtttgatt

SEQ ID NO: 774072 - DNA, 19 bp, Mus musculus
  siRNA target sequence for 4930459M12Rik (NM_172470.2,1735-1753).
gatggggtgtttgattaca

SEQ ID NO: 774073 - DNA, 19 bp, Mus musculus
  siRNA target sequence for 4930459M12Rik (NM_172470.2,1738-1756).
ggggtgtttgattacagta

SEQ ID NO: 774074 - DNA, 19 bp, Mus musculus
  siRNA target sequence for 4930459M12Rik (NM_172470.2,1768-1786).
ggtacaagggatccaattt

SEQ ID NO: 774075 - DNA, 19 bp, Mus musculus
  siRNA target sequence for 4930459M12Rik (NM_172470.2,1789-1807).
gccattactgcatctgata

SEQ ID NO: 774076 - DNA, 19 bp, Mus musculus
  siRNA target sequence for 4930459M12Rik (NM_172470.2,1790-1808).
ccattactgcatctgataa

SEQ ID NO: 774077 - DNA, 19 bp, Mus musculus
  siRNA target sequence for 4930459M12Rik (NM_172470.2,1798-1816).
gcatctgataagacattga

SEQ ID NO: 774078 - DNA, 19 bp, Mus musculus
  siRNA target sequence for 4930459M12Rik (NM_172470.2,1802-1820).
ctgataagacattgattgt

SEQ ID NO: 774079 - DNA, 19 bp, Mus musculus
  siRNA target sequence for 4930459M12Rik (NM_172470.2,1826-1844).
gtgaatctggcgtcattca

SEQ ID NO: 774080 - DNA, 19 bp, Mus musculus
  siRNA target sequence for 4930459M12Rik (NM_172470.2,1828-1846).
gaatctggcgtcattcaga

SEQ ID NO: 774081 - DNA, 19 bp, Mus musculus
  siRNA target sequence for 4930459M12Rik (NM_172470.2,1848-1866).
gtacagctttcctaatgtt

SEQ ID NO: 774082 - DNA, 19 bp, Mus musculus
  siRNA target sequence for 4930459M12Rik (NM_172470.2,1867-1885).
gctctgattcaaaagtatt

SEQ ID NO: 774083 - DNA, 19 bp, Mus musculus
  siRNA target sequence for 4930459M12Rik (NM_172470.2,1896-1914).
ccgtgcctgccagttatct

SEQ ID NO: 774084 - DNA, 19 bp, Mus musculus
  siRNA target sequence for 4930459M12Rik (NM_172470.2,1928-1946).
ccagtcgtcttgctatcat

SEQ ID NO: 774085 - DNA, 19 bp, Mus musculus
  siRNA target sequence for 4930459M12Rik (NM_172470.2,2014-2032).
gtcgttggcgagttgctaa

SEQ ID NO: 774086 - DNA, 19 bp, Mus musculus
  siRNA target sequence for 4930459M12Rik (NM_172470.2,2016-2034).
cgttggcgagttgctaaaa

SEQ ID NO: 774087 - DNA, 19 bp, Mus musculus
  siRNA target sequence for 4930459M12Rik (NM_172470.2,2047-2065).
gacgtctgggatatgaagt

SEQ ID NO: 774088 - DNA, 19 bp, Mus musculus
  siRNA target sequence for 4930459M12Rik (NM_172470.2,2103-2121).
gaagacgagaatgtatgtt

SEQ ID NO: 774089 - DNA, 19 bp, Mus musculus
  siRNA target sequence for 4930459M12Rik (NM_172470.2,2203-2221).
ctcttggatgagatactga

SEQ ID NO: 774090 - DNA, 19 bp, Mus musculus
  siRNA target sequence for 4930459M12Rik (NM_172470.2,2285-2303).
gccgagcattgattgagaa

SEQ ID NO: 774091 - DNA, 19 bp, Mus musculus
  siRNA target sequence for 4930459M12Rik (NM_172470.2,2286-2304).
ccgagcattgattgagaaa

SEQ ID NO: 774092 - DNA, 19 bp, Mus musculus
  siRNA target sequence for 4930459M12Rik (NM_172470.2,2424-2442).
gcgctgcaaggattaccaa

SEQ ID NO: 774093 - DNA, 19 bp, Mus musculus
  siRNA target sequence for 4930459M12Rik (NM_172470.2,2440-2458).
caaggcatcaagtttgtga

SEQ ID NO: 774094 - DNA, 19 bp, Mus musculus
  siRNA target sequence for 4930459M12Rik (NM_172470.2,2572-2590).
gctattggtctcagaatga

SEQ ID NO: 774095 - DNA, 19 bp, Mus musculus
  siRNA target sequence for 4930459M12Rik (NM_172470.2,2573-2591).
ctattggtctcagaatgaa

SEQ ID NO: 774096 - DNA, 19 bp, Mus musculus
  siRNA target sequence for 4930459M12Rik (NM_172470.2,2649-2667).
cgacagtctccttgaacaa

SEQ ID NO: 774097 - DNA, 19 bp, Mus musculus
  siRNA target sequence for 4930459M12Rik (NM_172470.2,2654-2672).
gtctccttgaacaagctaa

SEQ ID NO: 774098 - DNA, 19 bp, Mus musculus
  siRNA target sequence for 4930459M12Rik (NM_172470.2,2711-2729).
ggcagaatgctgtgcaata

SEQ ID NO: 774099 - DNA, 19 bp, Mus musculus
  siRNA target sequence for 4930459M12Rik (NM_172470.2,2715-2733).
gaatgctgtgcaatattat

SEQ ID NO: 774100 - DNA, 19 bp, Mus musculus
  siRNA target sequence for 4930459M12Rik (NM_172470.2,2754-2772).
gcgcctggccgaatgctat

SEQ ID NO: 774101 - DNA, 19 bp, Mus musculus
  siRNA target sequence for 4930459M12Rik (NM_172470.2,2755-2773).
cgcctggccgaatgctatt

SEQ ID NO: 774102 - DNA, 19 bp, Mus musculus
  siRNA target sequence for 4930459M12Rik (NM_172470.2,2756-2774).
gcctggccgaatgctatta

SEQ ID NO: 774103 - DNA, 19 bp, Mus musculus
  siRNA target sequence for 4930459M12Rik (NM_172470.2,2757-2775).
cctggccgaatgctattat

SEQ ID NO: 774104 - DNA, 19 bp, Mus musculus
  siRNA target sequence for 4930459M12Rik (NM_172470.2,2758-2776).
ctggccgaatgctattata

SEQ ID NO: 774105 - DNA, 19 bp, Mus musculus
  siRNA target sequence for 4930459M12Rik (NM_172470.2,2762-2780).
ccgaatgctattatatgct

SEQ ID NO: 774106 - DNA, 19 bp, Mus musculus
  siRNA target sequence for 4930459M12Rik (NM_172470.2,2769-2787).
ctattatatgctagaagat

SEQ ID NO: 774107 - DNA, 19 bp, Mus musculus
  siRNA target sequence for 4930459M12Rik (NM_172470.2,2802-2820).
gactcttgccaattcactt

SEQ ID NO: 774108 - DNA, 19 bp, Mus musculus
  siRNA target sequence for 4930459M12Rik (NM_172470.2,2843-2861).
cagaaatagcccagatgtt

SEQ ID NO: 774109 - DNA, 19 bp, Mus musculus
  siRNA target sequence for 4930459M12Rik (NM_172470.2,2888-2906).
ctgtgagcgcattcttgaa

SEQ ID NO: 774110 - DNA, 19 bp, Mus musculus
  siRNA target sequence for 4930459M12Rik (NM_172470.2,2890-2908).
gtgagcgcattcttgaagt

SEQ ID NO: 774111 - DNA, 19 bp, Mus musculus
  siRNA target sequence for 4930459M12Rik (NM_172470.2,2965-2983).
gccgtcgaactggctaaaa

SEQ ID NO: 774112 - DNA, 19 bp, Mus musculus
  siRNA target sequence for 4930459M12Rik (NM_172470.2,2967-2985).
cgtcgaactggctaaaagt

SEQ ID NO: 774113 - DNA, 19 bp, Mus musculus
  siRNA target sequence for 4930459M12Rik (NM_172470.2,2970-2988).
cgaactggctaaaagtcat

SEQ ID NO: 774114 - DNA, 19 bp, Mus musculus
  siRNA target sequence for 4930459M12Rik (NM_172470.2,2971-2989).
gaactggctaaaagtcata

SEQ ID NO: 774115 - DNA, 19 bp, Mus musculus
  siRNA target sequence for 4930459M12Rik (NM_172470.2,2974-2992).
ctggctaaaagtcatagta

SEQ ID NO: 774116 - DNA, 19 bp, Mus musculus
  siRNA target sequence for 4930459M12Rik (NM_172470.2,2978-2996).
ctaaaagtcatagtatgaa

SEQ ID NO: 774117 - DNA, 19 bp, Mus musculus
  siRNA target sequence for 4930459M12Rik (NM_172470.2,3020-3038).
ggtacgcgtcccatttact

SEQ ID NO: 774118 - DNA, 19 bp, Mus musculus
  siRNA target sequence for 4930459M12Rik (NM_172470.2,3051-3069).
gactctcgatgccattgaa

SEQ ID NO: 774119 - DNA, 19 bp, Mus musculus
  siRNA target sequence for 4930459M12Rik (NM_172470.2,3053-3071).
ctctcgatgccattgaact

SEQ ID NO: 774120 - DNA, 19 bp, Mus musculus
  siRNA target sequence for 4930459M12Rik (NM_172470.2,3061-3079).
gccattgaactctatagga

SEQ ID NO: 774121 - DNA, 19 bp, Mus musculus
  siRNA target sequence for 4930459M12Rik (NM_172470.2,3062-3080).
ccattgaactctataggaa

SEQ ID NO: 774122 - DNA, 19 bp, Mus musculus
  siRNA target sequence for 4930459M12Rik (NM_172470.2,3103-3121).
gctaaactgatgtataaga

SEQ ID NO: 774123 - DNA, 19 bp, Mus musculus
  siRNA target sequence for 4930459M12Rik (NM_172470.2,3114-3132).
gtataagattgcagatgaa

SEQ ID NO: 774124 - DNA, 19 bp, Mus musculus
  siRNA target sequence for 4930459M12Rik (NM_172470.2,3204-3222).
gtatcacgagcagatgaaa

SEQ ID NO: 774125 - DNA, 19 bp, Mus musculus
  siRNA target sequence for 4930459M12Rik (NM_172470.2,3292-3310).
gaggaggttctctctacaa

SEQ ID NO: 774126 - DNA, 19 bp, Mus musculus
  siRNA target sequence for 4930459M12Rik (NM_172470.2,3311-3329).
ctagtcggttcacagataa

SEQ ID NO: 774127 - DNA, 19 bp, Mus musculus
  siRNA target sequence for 4930459M12Rik (NM_172470.2,3340-3358).
ggagcggaggcctaccatt

SEQ ID NO: 774128 - DNA, 19 bp, Mus musculus
  siRNA target sequence for 4930459M12Rik (NM_172470.2,3341-3359).
gagcggaggcctaccattt

SEQ ID NO: 774129 - DNA, 19 bp, Mus musculus
  siRNA target sequence for 4930459M12Rik (NM_172470.2,3343-3361).
gcggaggcctaccatttct

SEQ ID NO: 774130 - DNA, 19 bp, Mus musculus
  siRNA target sequence for 4930459M12Rik (NM_172470.2,3344-3362).
cggaggcctaccatttctt

SEQ ID NO: 774131 - DNA, 19 bp, Mus musculus
  siRNA target sequence for 4930459M12Rik (NM_172470.2,3348-3366).
ggcctaccatttctttata

SEQ ID NO: 774132 - DNA, 19 bp, Mus musculus
  siRNA target sequence for 4930459M12Rik (NM_172470.2,3397-3415).
gttgacactgcattgaaga

SEQ ID NO: 774133 - DNA, 19 bp, Mus musculus
  siRNA target sequence for 4930459M12Rik (NM_172470.2,3508-3526).
ggtacctgttcaaaagctt

SEQ ID NO: 774134 - DNA, 19 bp, Mus musculus
  siRNA target sequence for 4930459M12Rik (NM_172470.2,3595-3613).
gaaatcttcaccaaacaca

SEQ ID NO: 774135 - DNA, 19 bp, Mus musculus
  siRNA target sequence for 4930459M12Rik (NM_172470.2,3622-3640).
gacaacaggaagtctgaat

SEQ ID NO: 774136 - DNA, 19 bp, Mus musculus
  siRNA target sequence for 4930459M12Rik (NM_172470.2,3624-3642).
caacaggaagtctgaatta

SEQ ID NO: 774137 - DNA, 19 bp, Mus musculus
  siRNA target sequence for 4930459M12Rik (NM_172470.2,3698-3716).
gcccaatcatcgagtatca

SEQ ID NO: 774138 - DNA, 19 bp, Mus musculus
  siRNA target sequence for 4930459M12Rik (NM_172470.2,3700-3718).
ccaatcatcgagtatcagt

SEQ ID NO: 774139 - DNA, 19 bp, Mus musculus
  siRNA target sequence for 5430408M01Rik (NM_172471.1,195-213).
gcccttgatggcagagttt

SEQ ID NO: 774140 - DNA, 19 bp, Mus musculus
  siRNA target sequence for 5430408M01Rik (NM_172471.1,208-226).
gagttttcggtgaagtcta

SEQ ID NO: 774141 - DNA, 19 bp, Mus musculus
  siRNA target sequence for 5430408M01Rik (NM_172471.1,216-234).
ggtgaagtctaccatcatt

SEQ ID NO: 774142 - DNA, 19 bp, Mus musculus
  siRNA target sequence for 5430408M01Rik (NM_172471.1,217-235).
gtgaagtctaccatcattt

SEQ ID NO: 774143 - DNA, 19 bp, Mus musculus
  siRNA target sequence for 5430408M01Rik (NM_172471.1,339-357).
caacttcaccatgcttata

SEQ ID NO: 774144 - DNA, 19 bp, Mus musculus
  siRNA target sequence for 5430408M01Rik (NM_172471.1,366-384).
cgtgtatcggggtgaaatt

SEQ ID NO: 774145 - DNA, 19 bp, Mus musculus
  siRNA target sequence for 5430408M01Rik (NM_172471.1,367-385).
gtgtatcggggtgaaatta

SEQ ID NO: 774146 - DNA, 19 bp, Mus musculus
  siRNA target sequence for 5430408M01Rik (NM_172471.1,369-387).
gtatcggggtgaaattaca

SEQ ID NO: 774147 - DNA, 19 bp, Mus musculus
  siRNA target sequence for 5430408M01Rik (NM_172471.1,405-423).
cagtgagagcgtaaaagat

SEQ ID NO: 774148 - DNA, 19 bp, Mus musculus
  siRNA target sequence for 5430408M01Rik (NM_172471.1,407-425).
gtgagagcgtaaaagataa

SEQ ID NO: 774149 - DNA, 19 bp, Mus musculus
  siRNA target sequence for 5430408M01Rik (NM_172471.1,409-427).
gagagcgtaaaagataaaa

SEQ ID NO: 774150 - DNA, 19 bp, Mus musculus
  siRNA target sequence for 5430408M01Rik (NM_172471.1,413-431).
gcgtaaaagataaaaggaa

SEQ ID NO: 774151 - DNA, 19 bp, Mus musculus
  siRNA target sequence for 5430408M01Rik (NM_172471.1,437-455).
cctcagacgataatgaaga

SEQ ID NO: 774152 - DNA, 19 bp, Mus musculus
  siRNA target sequence for 5430408M01Rik (NM_172471.1,474-492).
caaagcgtctttagtgatt

SEQ ID NO: 774153 - DNA, 19 bp, Mus musculus
  siRNA target sequence for 5430408M01Rik (NM_172471.1,554-572).
ggaaatacgagcatagcat

SEQ ID NO: 774154 - DNA, 19 bp, Mus musculus
  siRNA target sequence for 5430408M01Rik (NM_172471.1,628-646).
gagcgatcgggcatcacat

SEQ ID NO: 774155 - DNA, 19 bp, Mus musculus
  siRNA target sequence for 5430408M01Rik (NM_172471.1,725-743).
ctactctcatcaaccaaaa

SEQ ID NO: 774156 - DNA, 19 bp, Mus musculus
  siRNA target sequence for 5430408M01Rik (NM_172471.1,776-794).
ctgtggtccaacaagctaa

SEQ ID NO: 774157 - DNA, 19 bp, Mus musculus
  siRNA target sequence for 5430408M01Rik (NM_172471.1,780-798).
ggtccaacaagctaagatt

SEQ ID NO: 774158 - DNA, 19 bp, Mus musculus
  siRNA target sequence for 5430408M01Rik (NM_172471.1,863-881).
gtgacatccaggttctgaa

SEQ ID NO: 774159 - DNA, 19 bp, Mus musculus
  siRNA target sequence for 5430408M01Rik (NM_172471.1,884-902).
gttatttcgtgcactactt

SEQ ID NO: 774160 - DNA, 19 bp, Mus musculus
  siRNA target sequence for 5430408M01Rik (NM_172471.1,894-912).
gcactactttgctcctaaa

SEQ ID NO: 774161 - DNA, 19 bp, Mus musculus
  siRNA target sequence for 5430408M01Rik (NM_172471.1,895-913).
cactactttgctcctaaaa

SEQ ID NO: 774162 - DNA, 19 bp, Mus musculus
  siRNA target sequence for 5430408M01Rik (NM_172471.1,995-1013).
gggaggctctcgtcacaat

SEQ ID NO: 774163 - DNA, 19 bp, Mus musculus
  siRNA target sequence for 5430408M01Rik (NM_172471.1,996-1014).
ggaggctctcgtcacaatt

SEQ ID NO: 774164 - DNA, 19 bp, Mus musculus
  siRNA target sequence for 5430408M01Rik (NM_172471.1,1000-1018).
gctctcgtcacaattctca

SEQ ID NO: 774165 - DNA, 19 bp, Mus musculus
  siRNA target sequence for 5430408M01Rik (NM_172471.1,1030-1048).
ccccaggatcgcttcaata

SEQ ID NO: 774166 - DNA, 19 bp, Mus musculus
  siRNA target sequence for 5430408M01Rik (NM_172471.1,1031-1049).
cccaggatcgcttcaatat

SEQ ID NO: 774167 - DNA, 19 bp, Mus musculus
  siRNA target sequence for 5430408M01Rik (NM_172471.1,1035-1053).
ggatcgcttcaatatcatt

SEQ ID NO: 774168 - DNA, 19 bp, Mus musculus
  siRNA target sequence for 5430408M01Rik (NM_172471.1,1055-1073).
ggttctccaatcggattaa

SEQ ID NO: 774169 - DNA, 19 bp, Mus musculus
  siRNA target sequence for 5430408M01Rik (NM_172471.1,1056-1074).
gttctccaatcggattaaa

SEQ ID NO: 774170 - DNA, 19 bp, Mus musculus
  siRNA target sequence for 5430408M01Rik (NM_172471.1,1077-1095).
gtggaaggaccacttacta

SEQ ID NO: 774171 - DNA, 19 bp, Mus musculus
  siRNA target sequence for 5430408M01Rik (NM_172471.1,1118-1136).
ggaatggcaagatctacat

SEQ ID NO: 774172 - DNA, 19 bp, Mus musculus
  siRNA target sequence for 5430408M01Rik (NM_172471.1,1290-1308).
gaccaataccctcaagatt

SEQ ID NO: 774173 - DNA, 19 bp, Mus musculus
  siRNA target sequence for 5430408M01Rik (NM_172471.1,1292-1310).
ccaataccctcaagattct

SEQ ID NO: 774174 - DNA, 19 bp, Mus musculus
  siRNA target sequence for 5430408M01Rik (NM_172471.1,1368-1386).
cgatgacgtggacttcaaa

SEQ ID NO: 774175 - DNA, 19 bp, Mus musculus
  siRNA target sequence for 5430408M01Rik (NM_172471.1,1372-1390).
gacgtggacttcaaactgt

SEQ ID NO: 774176 - DNA, 19 bp, Mus musculus
  siRNA target sequence for 5430408M01Rik (NM_172471.1,1485-1503).
ccggaccccgcttctttct

SEQ ID NO: 774177 - DNA, 19 bp, Mus musculus
  siRNA target sequence for 5430408M01Rik (NM_172471.1,1487-1505).
ggaccccgcttctttctga

SEQ ID NO: 774178 - DNA, 19 bp, Mus musculus
  siRNA target sequence for 5430408M01Rik (NM_172471.1,1502-1520).
ctgacatccgcatagatta

SEQ ID NO: 774179 - DNA, 19 bp, Mus musculus
  siRNA target sequence for 5430408M01Rik (NM_172471.1,1506-1524).
catccgcatagattatcct

SEQ ID NO: 774180 - DNA, 19 bp, Mus musculus
  siRNA target sequence for 5430408M01Rik (NM_172471.1,1553-1571).
ccctgttccctaactactt

SEQ ID NO: 774181 - DNA, 19 bp, Mus musculus
  siRNA target sequence for 5430408M01Rik (NM_172471.1,1555-1573).
ctgttccctaactacttca

SEQ ID NO: 774182 - DNA, 19 bp, Mus musculus
  siRNA target sequence for 5430408M01Rik (NM_172471.1,1557-1575).
gttccctaactacttcaat

SEQ ID NO: 774183 - DNA, 19 bp, Mus musculus
  siRNA target sequence for 5430408M01Rik (NM_172471.1,1639-1657).
gtcactgccagcaacagta

SEQ ID NO: 774184 - DNA, 19 bp, Mus musculus
  siRNA target sequence for 5430408M01Rik (NM_172471.1,1649-1667).
gcaacagtaagaaatttgt

SEQ ID NO: 774185 - DNA, 19 bp, Mus musculus
  siRNA target sequence for 5430408M01Rik (NM_172471.1,1869-1887).
ggacttagccttgaactat

SEQ ID NO: 774186 - DNA, 19 bp, Mus musculus
  siRNA target sequence for 5430408M01Rik (NM_172471.1,1872-1890).
cttagccttgaactatcat

SEQ ID NO: 774187 - DNA, 19 bp, Mus musculus
  siRNA target sequence for 5430408M01Rik (NM_172471.1,1877-1895).
ccttgaactatcatttcct

SEQ ID NO: 774188 - DNA, 19 bp, Mus musculus
  siRNA target sequence for 5430408M01Rik (NM_172471.1,2456-2474).
gcaacattgcctttgtcat

SEQ ID NO: 774189 - DNA, 19 bp, Mus musculus
  siRNA target sequence for 5430408M01Rik (NM_172471.1,2475-2493).
cctcatccacctgtacaaa

SEQ ID NO: 774190 - DNA, 19 bp, Mus musculus
  siRNA target sequence for 5430408M01Rik (NM_172471.1,2622-2640).
ggaatacggcaagaatctt

SEQ ID NO: 774191 - DNA, 19 bp, Mus musculus
  siRNA target sequence for 5430408M01Rik (NM_172471.1,2755-2773).
gtagactgctggtttgaca

SEQ ID NO: 774192 - DNA, 19 bp, Mus musculus
  siRNA target sequence for 5430408M01Rik (NM_172471.1,2811-2829).
ggactacctggcatctcat

SEQ ID NO: 774193 - DNA, 19 bp, Mus musculus
  siRNA target sequence for 5430408M01Rik (NM_172471.1,2821-2839).
gcatctcatccgtttgaca

SEQ ID NO: 774194 - DNA, 19 bp, Mus musculus
  siRNA target sequence for 5230400J09Rik (NM_172474.1,168-186).
gaactcgcgggaagagttt

SEQ ID NO: 774195 - DNA, 19 bp, Mus musculus
  siRNA target sequence for 5230400J09Rik (NM_172474.1,296-314).
gtgcgagagacgatgtgat

SEQ ID NO: 774196 - DNA, 19 bp, Mus musculus
  siRNA target sequence for 5230400J09Rik (NM_172474.1,332-350).
caaccagcgaagctgtttt

SEQ ID NO: 774197 - DNA, 19 bp, Mus musculus
  siRNA target sequence for 5230400J09Rik (NM_172474.1,335-353).
ccagcgaagctgttttgaa

SEQ ID NO: 774198 - DNA, 19 bp, Mus musculus
  siRNA target sequence for 5230400J09Rik (NM_172474.1,338-356).
gcgaagctgttttgaagtt

SEQ ID NO: 774199 - DNA, 19 bp, Mus musculus
  siRNA target sequence for 5230400J09Rik (NM_172474.1,411-429).
gcactcagtggcaattgat

SEQ ID NO: 774200 - DNA, 19 bp, Mus musculus
  siRNA target sequence for 5230400J09Rik (NM_172474.1,414-432).
ctcagtggcaattgattct

SEQ ID NO: 774201 - DNA, 19 bp, Mus musculus
  siRNA target sequence for 5230400J09Rik (NM_172474.1,492-510).
gggtacacatggattggaa

SEQ ID NO: 774202 - DNA, 19 bp, Mus musculus
  siRNA target sequence for 5230400J09Rik (NM_172474.1,502-520).
ggattggaagtcccattaa

SEQ ID NO: 774203 - DNA, 19 bp, Mus musculus
  siRNA target sequence for 5230400J09Rik (NM_172474.1,641-659).
ctctcaaacgagaaaccat

SEQ ID NO: 774204 - DNA, 19 bp, Mus musculus
  siRNA target sequence for 5230400J09Rik (NM_172474.1,649-667).
cgagaaaccatttcaaact

SEQ ID NO: 774205 - DNA, 19 bp, Mus musculus
  siRNA target sequence for 5230400J09Rik (NM_172474.1,668-686).
cacattccaagatcaaaga

SEQ ID NO: 774206 - DNA, 19 bp, Mus musculus
  siRNA target sequence for 5230400J09Rik (NM_172474.1,746-764).
catcgaccactgaagacaa

SEQ ID NO: 774207 - DNA, 19 bp, Mus musculus
  siRNA target sequence for 2700017I06Rik (NM_172475.2,245-263).
ggagggccgtcgatgtcaa

SEQ ID NO: 774208 - DNA, 19 bp, Mus musculus
  siRNA target sequence for 2700017I06Rik (NM_172475.2,250-268).
gccgtcgatgtcaagtaca

SEQ ID NO: 774209 - DNA, 19 bp, Mus musculus
  siRNA target sequence for 2700017I06Rik (NM_172475.2,253-271).
gtcgatgtcaagtacatct

SEQ ID NO: 774210 - DNA, 19 bp, Mus musculus
  siRNA target sequence for 2700017I06Rik (NM_172475.2,396-414).
gagacgggacacttgaatt

SEQ ID NO: 774211 - DNA, 19 bp, Mus musculus
  siRNA target sequence for 2700017I06Rik (NM_172475.2,433-451).
gagtcctggagcatgactt

SEQ ID NO: 774212 - DNA, 19 bp, Mus musculus
  siRNA target sequence for 2700017I06Rik (NM_172475.2,468-486).
ccggtggttctgtacttct

SEQ ID NO: 774213 - DNA, 19 bp, Mus musculus
  siRNA target sequence for 2700017I06Rik (NM_172475.2,603-621).
gtggtatttgaattagctt

SEQ ID NO: 774214 - DNA, 19 bp, Mus musculus
  siRNA target sequence for 2700017I06Rik (NM_172475.2,612-630).
gaattagcttcctatattt

SEQ ID NO: 774215 - DNA, 19 bp, Mus musculus
  siRNA target sequence for 2700017I06Rik (NM_172475.2,639-657).
gcaaaaggagatttctcta

SEQ ID NO: 774216 - DNA, 19 bp, Mus musculus
  siRNA target sequence for 2700017I06Rik (NM_172475.2,668-686).
ggtgagaagtgatctgaaa

SEQ ID NO: 774217 - DNA, 19 bp, Mus musculus
  siRNA target sequence for 2700017I06Rik (NM_172475.2,751-769).
gagtcattgagtactacaa

SEQ ID NO: 774218 - DNA, 19 bp, Mus musculus
  siRNA target sequence for 2700017I06Rik (NM_172475.2,793-811).
gacaagcaatcgtgaacta

SEQ ID NO: 774219 - DNA, 19 bp, Mus musculus
  siRNA target sequence for 2700017I06Rik (NM_172475.2,798-816).
gcaatcgtgaactacatga

SEQ ID NO: 774220 - DNA, 19 bp, Mus musculus
  siRNA target sequence for 2700017I06Rik (NM_172475.2,835-853).
caacctacggtgttcacta

SEQ ID NO: 774221 - DNA, 19 bp, Mus musculus
  siRNA target sequence for 2700017I06Rik (NM_172475.2,839-857).
ctacggtgttcactattat

SEQ ID NO: 774222 - DNA, 19 bp, Mus musculus
  siRNA target sequence for 2700017I06Rik (NM_172475.2,842-860).
cggtgttcactattatgca

SEQ ID NO: 774223 - DNA, 19 bp, Mus musculus
  siRNA target sequence for 2700017I06Rik (NM_172475.2,867-885).
gacaagcaggggataccat

SEQ ID NO: 774224 - DNA, 19 bp, Mus musculus
  siRNA target sequence for 2700017I06Rik (NM_172475.2,890-908).
gctgggactgagctacaaa

SEQ ID NO: 774225 - DNA, 19 bp, Mus musculus
  siRNA target sequence for 2700017I06Rik (NM_172475.2,895-913).
gactgagctacaaaggaat

SEQ ID NO: 774226 - DNA, 19 bp, Mus musculus
  siRNA target sequence for 2700017I06Rik (NM_172475.2,918-936).
cagtatgactaccatgata

SEQ ID NO: 774227 - DNA, 19 bp, Mus musculus
  siRNA target sequence for 2700017I06Rik (NM_172475.2,939-957).
gtgaagccaaggaagatat

SEQ ID NO: 774228 - DNA, 19 bp, Mus musculus
  siRNA target sequence for 2700017I06Rik (NM_172475.2,967-985).
gacagttggagaatctgta

SEQ ID NO: 774229 - DNA, 19 bp, Mus musculus
  siRNA target sequence for 2700017I06Rik (NM_172475.2,1089-1107).
gcgtgtccggcattgatca

SEQ ID NO: 774230 - DNA, 19 bp, Mus musculus
  siRNA target sequence for 2700017I06Rik (NM_172475.2,1090-1108).
cgtgtccggcattgatcaa

SEQ ID NO: 774231 - DNA, 19 bp, Mus musculus
  siRNA target sequence for 2700017I06Rik (NM_172475.2,1311-1329).
ggttctcaggaatcagata

SEQ ID NO: 774232 - DNA, 19 bp, Mus musculus
  siRNA target sequence for 2700017I06Rik (NM_172475.2,1333-1351).
cgcagtcggccaagaaaga

SEQ ID NO: 774233 - DNA, 19 bp, Mus musculus
  siRNA target sequence for 2700017I06Rik (NM_172475.2,1352-1370).
catgttggctgccttgaaa

SEQ ID NO: 774234 - DNA, 19 bp, Mus musculus
  siRNA target sequence for 2700017I06Rik (NM_172475.2,1444-1462).
ctgaactcacaggaaaatt

SEQ ID NO: 774235 - DNA, 19 bp, Mus musculus
  siRNA target sequence for 2700017I06Rik (NM_172475.2,1456-1474).
gaaaattgcctgtggaata

SEQ ID NO: 774236 - DNA, 19 bp, Mus musculus
  siRNA target sequence for 2700017I06Rik (NM_172475.2,1489-1507).
gcgaggaaccacctattgt

SEQ ID NO: 774237 - DNA, 19 bp, Mus musculus
  siRNA target sequence for 2700017I06Rik (NM_172475.2,1490-1508).
cgaggaaccacctattgtt

SEQ ID NO: 774238 - DNA, 19 bp, Mus musculus
  siRNA target sequence for 2700017I06Rik (NM_172475.2,1506-1524).
gttcggaggagaattggaa

SEQ ID NO: 774239 - DNA, 19 bp, Mus musculus
  siRNA target sequence for 2700017I06Rik (NM_172475.2,1593-1611).
cgagagtttgcgattcagt

SEQ ID NO: 774240 - DNA, 19 bp, Mus musculus
  siRNA target sequence for 2700017I06Rik (NM_172475.2,1647-1665).
gaccccaatgtcagcaaaa

SEQ ID NO: 774241 - DNA, 19 bp, Mus musculus
  siRNA target sequence for 2700017I06Rik (NM_172475.2,1651-1669).
ccaatgtcagcaaaaaact

SEQ ID NO: 774242 - DNA, 19 bp, Mus musculus
  siRNA target sequence for 2700017I06Rik (NM_172475.2,1677-1695).
caaaggaagacctcttatt

SEQ ID NO: 774243 - DNA, 19 bp, Mus musculus
  siRNA target sequence for 2700017I06Rik (NM_172475.2,1682-1700).
gaagacctcttatttgaat

SEQ ID NO: 774244 - DNA, 19 bp, Mus musculus
  siRNA target sequence for 2700017I06Rik (NM_172475.2,1837-1855).
ccctcgttctggaagatga

SEQ ID NO: 774245 - DNA, 19 bp, Mus musculus
  siRNA target sequence for 2700017I06Rik (NM_172475.2,1863-1881).
caggttaccagcacaatat

SEQ ID NO: 774246 - DNA, 19 bp, Mus musculus
  siRNA target sequence for 2700017I06Rik (NM_172475.2,1986-2004).
caccgtaccgactatgaca

SEQ ID NO: 774247 - DNA, 19 bp, Mus musculus
  siRNA target sequence for 2700017I06Rik (NM_172475.2,2027-2045).
gtggagcgagtcatcttta

SEQ ID NO: 774248 - DNA, 19 bp, Mus musculus
  siRNA target sequence for 2700017I06Rik (NM_172475.2,2029-2047).
ggagcgagtcatctttaga

SEQ ID NO: 774249 - DNA, 19 bp, Mus musculus
  siRNA target sequence for 2700017I06Rik (NM_172475.2,2030-2048).
gagcgagtcatctttagat

SEQ ID NO: 774250 - DNA, 19 bp, Mus musculus
  siRNA target sequence for 2700017I06Rik (NM_172475.2,2032-2050).
gcgagtcatctttagatga

SEQ ID NO: 774251 - DNA, 19 bp, Mus musculus
  siRNA target sequence for 2700017I06Rik (NM_172475.2,2041-2059).
ctttagatgagccttatga

SEQ ID NO: 774252 - DNA, 19 bp, Mus musculus
  siRNA target sequence for 2700017I06Rik (NM_172475.2,2231-2249).
ccggagtccccactatgtt

SEQ ID NO: 774253 - DNA, 19 bp, Mus musculus
  siRNA target sequence for 2700017I06Rik (NM_172475.2,2455-2473).
cgagctcagagcactacta

SEQ ID NO: 774254 - DNA, 19 bp, Mus musculus
  siRNA target sequence for 2700017I06Rik (NM_172475.2,2687-2705).
caaggagtacccactatat

SEQ ID NO: 774255 - DNA, 19 bp, Mus musculus
  siRNA target sequence for 2700017I06Rik (NM_172475.2,2770-2788).
gcgtcaaagcgcagtttaa

SEQ ID NO: 774256 - DNA, 19 bp, Mus musculus
  siRNA target sequence for 2700017I06Rik (NM_172475.2,2772-2790).
gtcaaagcgcagtttaaga

SEQ ID NO: 774257 - DNA, 19 bp, Mus musculus
  siRNA target sequence for 2700017I06Rik (NM_172475.2,2986-3004).
ccacagcctcgcataagga

SEQ ID NO: 774258 - DNA, 19 bp, Mus musculus
  siRNA target sequence for 2700017I06Rik (NM_172475.2,3163-3181).
caacaccgtccagtgaaat

SEQ ID NO: 774259 - DNA, 19 bp, Mus musculus
  siRNA target sequence for Tmc7 (NM_172476.2,161-179).
gtggcacgtaggagaacaa

SEQ ID NO: 774260 - DNA, 19 bp, Mus musculus
  siRNA target sequence for Tmc7 (NM_172476.2,164-182).
gcacgtaggagaacaaaca

SEQ ID NO: 774261 - DNA, 19 bp, Mus musculus
  siRNA target sequence for Tmc7 (NM_172476.2,185-203).
ctctctcgggacaagcaaa

SEQ ID NO: 774262 - DNA, 19 bp, Mus musculus
  siRNA target sequence for Tmc7 (NM_172476.2,220-238).
gccgacagactctttcagt

SEQ ID NO: 774263 - DNA, 19 bp, Mus musculus
  siRNA target sequence for Tmc7 (NM_172476.2,277-295).
ccaatccatccgcaagtat

SEQ ID NO: 774264 - DNA, 19 bp, Mus musculus
  siRNA target sequence for Tmc7 (NM_172476.2,288-306).
gcaagtatgcactgaacat

SEQ ID NO: 774265 - DNA, 19 bp, Mus musculus
  siRNA target sequence for Tmc7 (NM_172476.2,318-336).
ggagactaagggacattca

SEQ ID NO: 774266 - DNA, 19 bp, Mus musculus
  siRNA target sequence for Tmc7 (NM_172476.2,337-355).
ggaaacccaaatgaagtat

SEQ ID NO: 774267 - DNA, 19 bp, Mus musculus
  siRNA target sequence for Tmc7 (NM_172476.2,443-461).
gaactgtggcgcaaagaca

SEQ ID NO: 774268 - DNA, 19 bp, Mus musculus
  siRNA target sequence for Tmc7 (NM_172476.2,568-586).
ggttttgcttccaatccta

SEQ ID NO: 774269 - DNA, 19 bp, Mus musculus
  siRNA target sequence for Tmc7 (NM_172476.2,584-602).
ctactcaccaagtacaaga

SEQ ID NO: 774270 - DNA, 19 bp, Mus musculus
  siRNA target sequence for Tmc7 (NM_172476.2,601-619).
gattaccaacagcactttt

SEQ ID NO: 774271 - DNA, 19 bp, Mus musculus
  siRNA target sequence for Tmc7 (NM_172476.2,623-641).
ctcatcccgttcaaagaca

SEQ ID NO: 774272 - DNA, 19 bp, Mus musculus
  siRNA target sequence for Tmc7 (NM_172476.2,630-648).
cgttcaaagacatggatat

SEQ ID NO: 774273 - DNA, 19 bp, Mus musculus
  siRNA target sequence for Tmc7 (NM_172476.2,672-690).
gtagctctgggctcattta

SEQ ID NO: 774274 - DNA, 19 bp, Mus musculus
  siRNA target sequence for Tmc7 (NM_172476.2,680-698).
gggctcatttacttctaca

SEQ ID NO: 774275 - DNA, 19 bp, Mus musculus
  siRNA target sequence for Tmc7 (NM_172476.2,739-757).
ggagaccagccttttttat

SEQ ID NO: 774276 - DNA, 19 bp, Mus musculus
  siRNA target sequence for Tmc7 (NM_172476.2,857-875).
ctttggatcgtgaaaaggt

SEQ ID NO: 774277 - DNA, 19 bp, Mus musculus
  siRNA target sequence for Tmc7 (NM_172476.2,876-894).
cggtggaagggttcaagat

SEQ ID NO: 774278 - DNA, 19 bp, Mus musculus
  siRNA target sequence for Tmc7 (NM_172476.2,906-924).
ggagcgaggaacactttca

SEQ ID NO: 774279 - DNA, 19 bp, Mus musculus
  siRNA target sequence for Tmc7 (NM_172476.2,917-935).
cactttcagagttactgta

SEQ ID NO: 774280 - DNA, 19 bp, Mus musculus
  siRNA target sequence for Tmc7 (NM_172476.2,919-937).
ctttcagagttactgtaat

SEQ ID NO: 774281 - DNA, 19 bp, Mus musculus
  siRNA target sequence for Tmc7 (NM_172476.2,1037-1055).
gagagaatacgacagaaaa

SEQ ID NO: 774282 - DNA, 19 bp, Mus musculus
  siRNA target sequence for Tmc7 (NM_172476.2,1039-1057).
gagaatacgacagaaaata

SEQ ID NO: 774283 - DNA, 19 bp, Mus musculus
  siRNA target sequence for Tmc7 (NM_172476.2,1076-1094).
gagaccatccgcatttaca

SEQ ID NO: 774284 - DNA, 19 bp, Mus musculus
  siRNA target sequence for Tmc7 (NM_172476.2,1078-1096).
gaccatccgcatttacact

SEQ ID NO: 774285 - DNA, 19 bp, Mus musculus
  siRNA target sequence for Tmc7 (NM_172476.2,1080-1098).
ccatccgcatttacacttt

SEQ ID NO: 774286 - DNA, 19 bp, Mus musculus
  siRNA target sequence for Tmc7 (NM_172476.2,1217-1235).
ggggagaacctgttgatat

SEQ ID NO: 774287 - DNA, 19 bp, Mus musculus
  siRNA target sequence for Tmc7 (NM_172476.2,1240-1258).
cctcccgtccattgtgatt

SEQ ID NO: 774288 - DNA, 19 bp, Mus musculus
  siRNA target sequence for Tmc7 (NM_172476.2,1273-1291).
cattaccccaatcatcttt

SEQ ID NO: 774289 - DNA, 19 bp, Mus musculus
  siRNA target sequence for Tmc7 (NM_172476.2,1333-1351).
gatccgcctgacgattctt

SEQ ID NO: 774290 - DNA, 19 bp, Mus musculus
  siRNA target sequence for Tmc7 (NM_172476.2,1437-1455).
gtgaactctgcggctataa

SEQ ID NO: 774291 - DNA, 19 bp, Mus musculus
  siRNA target sequence for Tmc7 (NM_172476.2,1446-1464).
gcggctataaccagaaact

SEQ ID NO: 774292 - DNA, 19 bp, Mus musculus
  siRNA target sequence for Tmc7 (NM_172476.2,1487-1505).
gtgggacaggaaatgtaca

SEQ ID NO: 774293 - DNA, 19 bp, Mus musculus
  siRNA target sequence for Tmc7 (NM_172476.2,1666-1684).
gcagaccatctgttggatt

SEQ ID NO: 774294 - DNA, 19 bp, Mus musculus
  siRNA target sequence for Tmc7 (NM_172476.2,1718-1736).
gccaccttgaaattcgtta

SEQ ID NO: 774295 - DNA, 19 bp, Mus musculus
  siRNA target sequence for Tmc7 (NM_172476.2,1719-1737).
ccaccttgaaattcgttat

SEQ ID NO: 774296 - DNA, 19 bp, Mus musculus
  siRNA target sequence for Tmc7 (NM_172476.2,1726-1744).
gaaattcgttatcatcttt

SEQ ID NO: 774297 - DNA, 19 bp, Mus musculus
  siRNA target sequence for Tmc7 (NM_172476.2,1733-1751).
gttatcatcttttatgtga

SEQ ID NO: 774298 - DNA, 19 bp, Mus musculus
  siRNA target sequence for Tmc7 (NM_172476.2,1802-1820).
gcatccaattctaacttct

SEQ ID NO: 774299 - DNA, 19 bp, Mus musculus
  siRNA target sequence for Tmc7 (NM_172476.2,1803-1821).
catccaattctaacttctt

SEQ ID NO: 774300 - DNA, 19 bp, Mus musculus
  siRNA target sequence for Tmc7 (NM_172476.2,1845-1863).
ggctgtgcctagcaatcat

SEQ ID NO: 774301 - DNA, 19 bp, Mus musculus
  siRNA target sequence for Tmc7 (NM_172476.2,1846-1864).
gctgtgcctagcaatcata

SEQ ID NO: 774302 - DNA, 19 bp, Mus musculus
  siRNA target sequence for Tmc7 (NM_172476.2,1911-1929).
gcccatttaccaacttcaa

SEQ ID NO: 774303 - DNA, 19 bp, Mus musculus
  siRNA target sequence for Tmc7 (NM_172476.2,1913-1931).
ccatttaccaacttcaaca

SEQ ID NO: 774304 - DNA, 19 bp, Mus musculus
  siRNA target sequence for Tmc7 (NM_172476.2,1988-2006).
ctgatccatgccgttacat

SEQ ID NO: 774305 - DNA, 19 bp, Mus musculus
  siRNA target sequence for Tmc7 (NM_172476.2,1990-2008).
gatccatgccgttacatca

SEQ ID NO: 774306 - DNA, 19 bp, Mus musculus
  siRNA target sequence for Tmc7 (NM_172476.2,1993-2011).
ccatgccgttacatcagaa

SEQ ID NO: 774307 - DNA, 19 bp, Mus musculus
  siRNA target sequence for Tmc7 (NM_172476.2,2018-2036).
gcggtgcctttcttcatga

SEQ ID NO: 774308 - DNA, 19 bp, Mus musculus
  siRNA target sequence for Tmc7 (NM_172476.2,2045-2063).
cttgtcatgttctacttca

SEQ ID NO: 774309 - DNA, 19 bp, Mus musculus
  siRNA target sequence for Tmc7 (NM_172476.2,2127-2145).
gtcgtgacaagcgttatct

SEQ ID NO: 774310 - DNA, 19 bp, Mus musculus
  siRNA target sequence for Tmc7 (NM_172476.2,2129-2147).
cgtgacaagcgttatctta

SEQ ID NO: 774311 - DNA, 19 bp, Mus musculus
  siRNA target sequence for Tmc7 (NM_172476.2,2130-2148).
gtgacaagcgttatcttat

SEQ ID NO: 774312 - DNA, 19 bp, Mus musculus
  siRNA target sequence for B930096L08Rik (NM_172477.1,450-468).
cagaccttggcgctaaaga

SEQ ID NO: 774313 - DNA, 19 bp, Mus musculus
  siRNA target sequence for B930096L08Rik (NM_172477.1,677-695).
gagctcaccagaactaaga

SEQ ID NO: 774314 - DNA, 19 bp, Mus musculus
  siRNA target sequence for B930096L08Rik (NM_172477.1,705-723).
ggcttgaaacagagagatt

SEQ ID NO: 774315 - DNA, 19 bp, Mus musculus
  siRNA target sequence for B930096L08Rik (NM_172477.1,838-856).
cagcgatctacgctttcaa

SEQ ID NO: 774316 - DNA, 19 bp, Mus musculus
  siRNA target sequence for B930096L08Rik (NM_172477.1,841-859).
cgatctacgctttcaaagt

SEQ ID NO: 774317 - DNA, 19 bp, Mus musculus
  siRNA target sequence for B930096L08Rik (NM_172477.1,989-1007).
gacctgcccagtcttgaaa

SEQ ID NO: 774318 - DNA, 19 bp, Mus musculus
  siRNA target sequence for B930096L08Rik (NM_172477.1,1012-1030).
cgagaaggggggtgtctta

SEQ ID NO: 774319 - DNA, 19 bp, Mus musculus
  siRNA target sequence for B930096L08Rik (NM_172477.1,1100-1118).
ggccaggagagtgtctata

SEQ ID NO: 774320 - DNA, 19 bp, Mus musculus
  siRNA target sequence for B930096L08Rik (NM_172477.1,1221-1239).
gcatcagcttcaagaaaga

SEQ ID NO: 774321 - DNA, 19 bp, Mus musculus
  siRNA target sequence for B930096L08Rik (NM_172477.1,1304-1322).
cctcccacttccgtgaata

SEQ ID NO: 774322 - DNA, 19 bp, Mus musculus
  siRNA target sequence for B930096L08Rik (NM_172477.1,1307-1325).
cccacttccgtgaatagaa

SEQ ID NO: 774323 - DNA, 19 bp, Mus musculus
  siRNA target sequence for B930096L08Rik (NM_172477.1,1309-1327).
cacttccgtgaatagaaga

SEQ ID NO: 774324 - DNA, 19 bp, Mus musculus
  siRNA target sequence for B930096L08Rik (NM_172477.1,1425-1443).
ggtatgcacagaccaaatt

SEQ ID NO: 774325 - DNA, 19 bp, Mus musculus
  siRNA target sequence for B930096L08Rik (NM_172477.1,1444-1462).
gggactcacacgcacttta

SEQ ID NO: 774326 - DNA, 19 bp, Mus musculus
  siRNA target sequence for B930096L08Rik (NM_172477.1,1445-1463).
ggactcacacgcactttat

SEQ ID NO: 774327 - DNA, 19 bp, Mus musculus
  siRNA target sequence for B930096L08Rik (NM_172477.1,1464-1482).
cggaggagaacgtctatga

SEQ ID NO: 774328 - DNA, 19 bp, Mus musculus
  siRNA target sequence for B930096L08Rik (NM_172477.1,1493-1511).
gatccgccaatgaaggaaa

SEQ ID NO: 774329 - DNA, 19 bp, Mus musculus
  siRNA target sequence for B930096L08Rik (NM_172477.1,1541-1559).
cgctgcctgggcaagaagt

SEQ ID NO: 774330 - DNA, 19 bp, Mus musculus
  siRNA target sequence for B930096L08Rik (NM_172477.1,1750-1768).
cccggacgacacgttcttt

SEQ ID NO: 774331 - DNA, 19 bp, Mus musculus
  siRNA target sequence for B930096L08Rik (NM_172477.1,1751-1769).
ccggacgacacgttcttta

SEQ ID NO: 774332 - DNA, 19 bp, Mus musculus
  siRNA target sequence for B930096L08Rik (NM_172477.1,1752-1770).
cggacgacacgttctttaa

SEQ ID NO: 774333 - DNA, 19 bp, Mus musculus
  siRNA target sequence for B930096L08Rik (NM_172477.1,1816-1834).
gctggtattgaggatcaat

SEQ ID NO: 774334 - DNA, 19 bp, Mus musculus
  siRNA target sequence for B930096L08Rik (NM_172477.1,1825-1843).
gaggatcaatgccatttat

SEQ ID NO: 774335 - DNA, 19 bp, Mus musculus
  siRNA target sequence for B930096L08Rik (NM_172477.1,1827-1845).
ggatcaatgccatttatga

SEQ ID NO: 774336 - DNA, 19 bp, Mus musculus
  siRNA target sequence for B930096L08Rik (NM_172477.1,2002-2020).
gcaggcccctcgatactca

SEQ ID NO: 774337 - DNA, 19 bp, Mus musculus
  siRNA target sequence for B930096L08Rik (NM_172477.1,2003-2021).
caggcccctcgatactcat

SEQ ID NO: 774338 - DNA, 19 bp, Mus musculus
  siRNA target sequence for B930096L08Rik (NM_172477.1,2022-2040).
cgcttgaccgggatctcat

SEQ ID NO: 774339 - DNA, 19 bp, Mus musculus
  siRNA target sequence for B930096L08Rik (NM_172477.1,2023-2041).
gcttgaccgggatctcatt

SEQ ID NO: 774340 - DNA, 19 bp, Mus musculus
  siRNA target sequence for B930096L08Rik (NM_172477.1,2027-2045).
gaccgggatctcattgagt

SEQ ID NO: 774341 - DNA, 19 bp, Mus musculus
  siRNA target sequence for B930096L08Rik (NM_172477.1,2055-2073).
ggcaactcttcgagtactt

SEQ ID NO: 774342 - DNA, 19 bp, Mus musculus
  siRNA target sequence for B930096L08Rik (NM_172477.1,2121-2139).
cagagctcacccagcaatt

SEQ ID NO: 774343 - DNA, 19 bp, Mus musculus
  siRNA target sequence for B930096L08Rik (NM_172477.1,2125-2143).
gctcacccagcaatttcct

SEQ ID NO: 774344 - DNA, 19 bp, Mus musculus
  siRNA target sequence for B930096L08Rik (NM_172477.1,2246-2264).
caggagtttaccagtgaaa

SEQ ID NO: 774345 - DNA, 19 bp, Mus musculus
  siRNA target sequence for B930096L08Rik (NM_172477.1,2248-2266).
ggagtttaccagtgaaaca

SEQ ID NO: 774346 - DNA, 19 bp, Mus musculus
  siRNA target sequence for B930096L08Rik (NM_172477.1,2249-2267).
gagtttaccagtgaaacat

SEQ ID NO: 774347 - DNA, 19 bp, Mus musculus
  siRNA target sequence for B930096L08Rik (NM_172477.1,2497-2515).
cctgggcaaaaccatcatt

SEQ ID NO: 774348 - DNA, 19 bp, Mus musculus
  siRNA target sequence for B930096L08Rik (NM_172477.1,2502-2520).
gcaaaaccatcattgtcaa

SEQ ID NO: 774349 - DNA, 19 bp, Mus musculus
  siRNA target sequence for B930096L08Rik (NM_172477.1,2538-2556).
cggggactgaggtgattga

SEQ ID NO: 774350 - DNA, 19 bp, Mus musculus
  siRNA target sequence for B930096L08Rik (NM_172477.1,2721-2739).
caatggtggcgctcatcta

SEQ ID NO: 774351 - DNA, 19 bp, Mus musculus
  siRNA target sequence for B930096L08Rik (NM_172477.1,2881-2899).
cgtggtcgatctcatcaat

SEQ ID NO: 774352 - DNA, 19 bp, Mus musculus
  siRNA target sequence for B930096L08Rik (NM_172477.1,2884-2902).
ggtcgatctcatcaatgat

SEQ ID NO: 774353 - DNA, 19 bp, Mus musculus
  siRNA target sequence for B930096L08Rik (NM_172477.1,3075-3093).
cctttgtccgcttttttgt

SEQ ID NO: 774354 - DNA, 19 bp, Mus musculus
  siRNA target sequence for B930096L08Rik (NM_172477.1,3084-3102).
gcttttttgtggagattgt

SEQ ID NO: 774355 - DNA, 19 bp, Mus musculus
  siRNA target sequence for B930096L08Rik (NM_172477.1,3149-3167).
caacgagaggccttcagaa

SEQ ID NO: 774356 - DNA, 19 bp, Mus musculus
  siRNA target sequence for B930096L08Rik (NM_172477.1,3270-3288).
ccaaaggtctgtttgaagt

SEQ ID NO: 774357 - DNA, 19 bp, Mus musculus
  siRNA target sequence for B930096L08Rik (NM_172477.1,3328-3346).
gcacagcggagtcaataaa

SEQ ID NO: 774358 - DNA, 19 bp, Mus musculus
  siRNA target sequence for B930096L08Rik (NM_172477.1,3333-3351).
gcggagtcaataaattcct

SEQ ID NO: 774359 - DNA, 19 bp, Mus musculus
  siRNA target sequence for 6330576A08Rik (NM_172478.1,281-299).
cactgttgggtgtacgtta

SEQ ID NO: 774360 - DNA, 19 bp, Mus musculus
  siRNA target sequence for 6330576A08Rik (NM_172478.1,296-314).
gttagggtacgggtaacta

SEQ ID NO: 774361 - DNA, 19 bp, Mus musculus
  siRNA target sequence for 6330576A08Rik (NM_172478.1,306-324).
gggtaactatcggttatca

SEQ ID NO: 774362 - DNA, 19 bp, Mus musculus
  siRNA target sequence for 6330576A08Rik (NM_172478.1,458-476).
cgggtccgagtcaagaaat

SEQ ID NO: 774363 - DNA, 19 bp, Mus musculus
  siRNA target sequence for 6330576A08Rik (NM_172478.1,460-478).
ggtccgagtcaagaaatgt

SEQ ID NO: 774364 - DNA, 19 bp, Mus musculus
  siRNA target sequence for 6330576A08Rik (NM_172478.1,493-511).
ccctgagttccgctctttt

SEQ ID NO: 774365 - DNA, 19 bp, Mus musculus
  siRNA target sequence for 6330576A08Rik (NM_172478.1,562-580).
ccgagcctttgacttaaat

SEQ ID NO: 774366 - DNA, 19 bp, Mus musculus
  siRNA target sequence for 6330576A08Rik (NM_172478.1,620-638).
cggctaggacaggaaactt

SEQ ID NO: 774367 - DNA, 19 bp, Mus musculus
  siRNA target sequence for 6330576A08Rik (NM_172478.1,621-639).
ggctaggacaggaaacttt

SEQ ID NO: 774368 - DNA, 19 bp, Mus musculus
  siRNA target sequence for 6330576A08Rik (NM_172478.1,703-721).
gcagttgcgtgtagacatt

SEQ ID NO: 774369 - DNA, 19 bp, Mus musculus
  siRNA target sequence for 6330576A08Rik (NM_172478.1,760-778).
cataattagccccaaagat

SEQ ID NO: 774370 - DNA, 19 bp, Mus musculus
  siRNA target sequence for 6330576A08Rik (NM_172478.1,770-788).
cccaaagatgtcattggat

SEQ ID NO: 774371 - DNA, 19 bp, Mus musculus
  siRNA target sequence for 6330576A08Rik (NM_172478.1,895-913).
ggtgctgagttggtcttat

SEQ ID NO: 774372 - DNA, 19 bp, Mus musculus
  siRNA target sequence for 6330576A08Rik (NM_172478.1,906-924).
ggtcttatggggaagatgt

SEQ ID NO: 774373 - DNA, 19 bp, Mus musculus
  siRNA target sequence for 6330576A08Rik (NM_172478.1,909-927).
cttatggggaagatgtgaa

SEQ ID NO: 774374 - DNA, 19 bp, Mus musculus
  siRNA target sequence for 6330576A08Rik (NM_172478.1,961-979).
ccacacgtacctgaatcat

SEQ ID NO: 774375 - DNA, 19 bp, Mus musculus
  siRNA target sequence for 6330576A08Rik (NM_172478.1,964-982).
cacgtacctgaatcatgaa

SEQ ID NO: 774376 - DNA, 19 bp, Mus musculus
  siRNA target sequence for 6330576A08Rik (NM_172478.1,1036-1054).
ggagccttcacttcgaaaa

SEQ ID NO: 774377 - DNA, 19 bp, Mus musculus
  siRNA target sequence for 6330576A08Rik (NM_172478.1,1041-1059).
cttcacttcgaaaagtagt

SEQ ID NO: 774378 - DNA, 19 bp, Mus musculus
  siRNA target sequence for 6330576A08Rik (NM_172478.1,1062-1080).
ggcggtacctccttaatgt

SEQ ID NO: 774379 - DNA, 19 bp, Mus musculus
  siRNA target sequence for 6330576A08Rik (NM_172478.1,1064-1082).
cggtacctccttaatgtgt

SEQ ID NO: 774380 - DNA, 19 bp, Mus musculus
  siRNA target sequence for 6330576A08Rik (NM_172478.1,1065-1083).
ggtacctccttaatgtgta

SEQ ID NO: 774381 - DNA, 19 bp, Mus musculus
  siRNA target sequence for 6330576A08Rik (NM_172478.1,1106-1124).
gagcggatggactacatga

SEQ ID NO: 774382 - DNA, 19 bp, Mus musculus
  siRNA target sequence for 6330576A08Rik (NM_172478.1,1108-1126).
gcggatggactacatgaaa

SEQ ID NO: 774383 - DNA, 19 bp, Mus musculus
  siRNA target sequence for 6330576A08Rik (NM_172478.1,1141-1159).
gtacgagcagctcaaaagt

SEQ ID NO: 774384 - DNA, 19 bp, Mus musculus
  siRNA target sequence for 6330576A08Rik (NM_172478.1,1320-1338).
cccatccacaggtatcata

SEQ ID NO: 774385 - DNA, 19 bp, Mus musculus
  siRNA target sequence for 6330576A08Rik (NM_172478.1,1322-1340).
catccacaggtatcatact

SEQ ID NO: 774386 - DNA, 19 bp, Mus musculus
  siRNA target sequence for 6330576A08Rik (NM_172478.1,1482-1500).
cccacctcaagctgctatt

SEQ ID NO: 774387 - DNA, 19 bp, Mus musculus
  siRNA target sequence for 6330576A08Rik (NM_172478.1,1545-1563).
gtgccgatgacctcttttt

SEQ ID NO: 774388 - DNA, 19 bp, Mus musculus
  siRNA target sequence for 6330576A08Rik (NM_172478.1,1549-1567).
cgatgacctctttttctgt

SEQ ID NO: 774389 - DNA, 19 bp, Mus musculus
  siRNA target sequence for 6330576A08Rik (NM_172478.1,1550-1568).
gatgacctctttttctgtt

SEQ ID NO: 774390 - DNA, 19 bp, Mus musculus
  siRNA target sequence for 6330576A08Rik (NM_172478.1,1617-1635).
ctctccgaatgctagaagt

SEQ ID NO: 774391 - DNA, 19 bp, Mus musculus
  siRNA target sequence for 6330576A08Rik (NM_172478.1,1776-1794).
gaggaggcggtgcttttga

SEQ ID NO: 774392 - DNA, 19 bp, Mus musculus
  siRNA target sequence for 6330576A08Rik (NM_172478.1,1880-1898).
caacaactcagggataaca

SEQ ID NO: 774393 - DNA, 19 bp, Mus musculus
  siRNA target sequence for 6330576A08Rik (NM_172478.1,1913-1931).
gaccatctggtccaactat

SEQ ID NO: 774394 - DNA, 19 bp, Mus musculus
  siRNA target sequence for 6330576A08Rik (NM_172478.1,1934-1952).
cacccagctaccctcatta

SEQ ID NO: 774395 - DNA, 19 bp, Mus musculus
  siRNA target sequence for 6330576A08Rik (NM_172478.1,1937-1955).
ccagctaccctcattagct

SEQ ID NO: 774396 - DNA, 19 bp, Mus musculus
  siRNA target sequence for 6330576A08Rik (NM_172478.1,2082-2100).
ctgtaggatcccccttaat

SEQ ID NO: 774397 - DNA, 19 bp, Mus musculus
  siRNA target sequence for 6330576A08Rik (NM_172478.1,2184-2202).
gccgagggaacccattcat

SEQ ID NO: 774398 - DNA, 19 bp, Mus musculus
  siRNA target sequence for 6330576A08Rik (NM_172478.1,2343-2361).
cactctttgctgattacct

SEQ ID NO: 774399 - DNA, 19 bp, Mus musculus
  siRNA target sequence for E330024M09 (NM_172481.1,246-264).
ggaattactcatacatgaa

SEQ ID NO: 774400 - DNA, 19 bp, Mus musculus
  siRNA target sequence for E330024M09 (NM_172481.1,271-289).
caaatgggtctaaaacaga

SEQ ID NO: 774401 - DNA, 19 bp, Mus musculus
  siRNA target sequence for E330024M09 (NM_172481.1,336-354).
cttactggtaaaacattgt

SEQ ID NO: 774402 - DNA, 19 bp, Mus musculus
  siRNA target sequence for E330024M09 (NM_172481.1,404-422).
ggaggaatgttatcactaa

SEQ ID NO: 774403 - DNA, 19 bp, Mus musculus
  siRNA target sequence for E330024M09 (NM_172481.1,442-460).
gctgcacactcaacaatat

SEQ ID NO: 774404 - DNA, 19 bp, Mus musculus
  siRNA target sequence for E330024M09 (NM_172481.1,443-461).
ctgcacactcaacaatata

SEQ ID NO: 774405 - DNA, 19 bp, Mus musculus
  siRNA target sequence for E330024M09 (NM_172481.1,455-473).
caatatatcgagctcattt

SEQ ID NO: 774406 - DNA, 19 bp, Mus musculus
  siRNA target sequence for E330024M09 (NM_172481.1,486-504).
gacccatgattgttctaga

SEQ ID NO: 774407 - DNA, 19 bp, Mus musculus
  siRNA target sequence for E330024M09 (NM_172481.1,490-508).
catgattgttctagaaagt

SEQ ID NO: 774408 - DNA, 19 bp, Mus musculus
  siRNA target sequence for E330024M09 (NM_172481.1,503-521).
gaaagttcaacatcagtat

SEQ ID NO: 774409 - DNA, 19 bp, Mus musculus
  siRNA target sequence for E330024M09 (NM_172481.1,537-555).
ggatgaatatgatcatctt

SEQ ID NO: 774410 - DNA, 19 bp, Mus musculus
  siRNA target sequence for E330024M09 (NM_172481.1,609-627).
gcaaggtgtagctggaatt

SEQ ID NO: 774411 - DNA, 19 bp, Mus musculus
  siRNA target sequence for E330024M09 (NM_172481.1,719-737).
gtcatgatgtgaagcaatt

SEQ ID NO: 774412 - DNA, 19 bp, Mus musculus
  siRNA target sequence for E330024M09 (NM_172481.1,886-904).
cagctgtgttacaattgca

SEQ ID NO: 774413 - DNA, 19 bp, Mus musculus
  siRNA target sequence for E330024M09 (NM_172481.1,973-991).
ctcctcatctccactagtt

SEQ ID NO: 774414 - DNA, 19 bp, Mus musculus
  siRNA target sequence for E330024M09 (NM_172481.1,975-993).
cctcatctccactagttgt

SEQ ID NO: 774415 - DNA, 19 bp, Mus musculus
  siRNA target sequence for E330024M09 (NM_172481.1,984-1002).
cactagttgtgagactttt

SEQ ID NO: 774416 - DNA, 19 bp, Mus musculus
  siRNA target sequence for E330024M09 (NM_172481.1,986-1004).
ctagttgtgagacttttaa

SEQ ID NO: 774417 - DNA, 19 bp, Mus musculus
  siRNA target sequence for E330024M09 (NM_172481.1,1050-1068).
cggattcaaggaaaacaat

SEQ ID NO: 774418 - DNA, 19 bp, Mus musculus
  siRNA target sequence for E330024M09 (NM_172481.1,1051-1069).
ggattcaaggaaaacaata

SEQ ID NO: 774419 - DNA, 19 bp, Mus musculus
  siRNA target sequence for E330024M09 (NM_172481.1,1297-1315).
cacaatgcccaaaatccaa

SEQ ID NO: 774420 - DNA, 19 bp, Mus musculus
  siRNA target sequence for E330024M09 (NM_172481.1,1330-1348).
gacctgctggataacttgt

SEQ ID NO: 774421 - DNA, 19 bp, Mus musculus
  siRNA target sequence for E330024M09 (NM_172481.1,1440-1458).
cacactgctggatattgga

SEQ ID NO: 774422 - DNA, 19 bp, Mus musculus
  siRNA target sequence for E330024M09 (NM_172481.1,1568-1586).
cttgtcagggtgtttactt

SEQ ID NO: 774423 - DNA, 19 bp, Mus musculus
  siRNA target sequence for E330024M09 (NM_172481.1,1571-1589).
gtcagggtgtttactttat

SEQ ID NO: 774424 - DNA, 19 bp, Mus musculus
  siRNA target sequence for E330024M09 (NM_172481.1,1607-1625).
cttttctaaacaagatcaa

SEQ ID NO: 774425 - DNA, 19 bp, Mus musculus
  siRNA target sequence for E330024M09 (NM_172481.1,1707-1725).
ctaccacttatctaaagaa

SEQ ID NO: 774426 - DNA, 19 bp, Mus musculus
  siRNA target sequence for E330024M09 (NM_172481.1,1748-1766).
ggctggaactcctattgga

SEQ ID NO: 774427 - DNA, 19 bp, Mus musculus
  siRNA target sequence for E330024M09 (NM_172481.1,1830-1848).
ggaagaggaagtctttgta

SEQ ID NO: 774428 - DNA, 19 bp, Mus musculus
  siRNA target sequence for E330024M09 (NM_172481.1,1846-1864).
gtacagtcagcaatgaact

SEQ ID NO: 774429 - DNA, 19 bp, Mus musculus
  siRNA target sequence for E330024M09 (NM_172481.1,1882-1900).
gttgtggttaagggttatt

SEQ ID NO: 774430 - DNA, 19 bp, Mus musculus
  siRNA target sequence for E330024M09 (NM_172481.1,1947-1965).
gacagacttctccatttca

SEQ ID NO: 774431 - DNA, 19 bp, Mus musculus
  siRNA target sequence for E330024M09 (NM_172481.1,2000-2018).
ggggaaagctactcatact

SEQ ID NO: 774432 - DNA, 19 bp, Mus musculus
  siRNA target sequence for E330024M09 (NM_172481.1,2091-2109).
caatgaaccagtctttaaa

SEQ ID NO: 774433 - DNA, 19 bp, Mus musculus
  siRNA target sequence for E330024M09 (NM_172481.1,2160-2178).
ggcatataatgtttccttt

SEQ ID NO: 774434 - DNA, 19 bp, Mus musculus
  siRNA target sequence for E330024M09 (NM_172481.1,2161-2179).
gcatataatgtttcctttt

SEQ ID NO: 774435 - DNA, 19 bp, Mus musculus
  siRNA target sequence for E330024M09 (NM_172481.1,2191-2209).
cgcctattcttggaattga

SEQ ID NO: 774436 - DNA, 19 bp, Mus musculus
  siRNA target sequence for E330024M09 (NM_172481.1,2192-2210).
gcctattcttggaattgat

SEQ ID NO: 774437 - DNA, 19 bp, Mus musculus
  siRNA target sequence for E330024M09 (NM_172481.1,2314-2332).
cgcatactggatttagcta

SEQ ID NO: 774438 - DNA, 19 bp, Mus musculus
  siRNA target sequence for E330024M09 (NM_172481.1,2320-2338).
ctggatttagctaactgtt

SEQ ID NO: 774439 - DNA, 19 bp, Mus musculus
  siRNA target sequence for E330024M09 (NM_172481.1,2393-2411).
ccctgagatacctaaacat

SEQ ID NO: 774440 - DNA, 19 bp, Mus musculus
  siRNA target sequence for E330024M09 (NM_172481.1,2484-2502).
gcattcactaagtttggaa

SEQ ID NO: 774441 - DNA, 19 bp, Mus musculus
  siRNA target sequence for E330024M09 (NM_172481.1,2598-2616).
gggcttcagtggattgttt

SEQ ID NO: 774442 - DNA, 19 bp, Mus musculus
  siRNA target sequence for E330024M09 (NM_172481.1,2670-2688).
gcgaatggctgactttgat

SEQ ID NO: 774443 - DNA, 19 bp, Mus musculus
  siRNA target sequence for E330024M09 (NM_172481.1,2690-2708).
gcgattcccaggaatttct

SEQ ID NO: 774444 - DNA, 19 bp, Mus musculus
  siRNA target sequence for E330024M09 (NM_172481.1,2691-2709).
cgattcccaggaatttcta

SEQ ID NO: 774445 - DNA, 19 bp, Mus musculus
  siRNA target sequence for E330024M09 (NM_172481.1,2736-2754).
cttgagcatcgaaaatggt

SEQ ID NO: 774446 - DNA, 19 bp, Mus musculus
  siRNA target sequence for Zfp180 (NM_172483.1,678-696).
gatacccctcagaaaccat

SEQ ID NO: 774447 - DNA, 19 bp, Mus musculus
  siRNA target sequence for Zfp180 (NM_172483.1,706-724).
caggcgtcacatgttaaaa

SEQ ID NO: 774448 - DNA, 19 bp, Mus musculus
  siRNA target sequence for Zfp180 (NM_172483.1,746-764).
caagcagtcaccaaaagat

SEQ ID NO: 774449 - DNA, 19 bp, Mus musculus
  siRNA target sequence for Zfp180 (NM_172483.1,754-772).
caccaaaagatcagtgata

SEQ ID NO: 774450 - DNA, 19 bp, Mus musculus
  siRNA target sequence for Zfp180 (NM_172483.1,858-876).
ggaagcctatgaacttaat

SEQ ID NO: 774451 - DNA, 19 bp, Mus musculus
  siRNA target sequence for Zfp180 (NM_172483.1,967-985).
gggcaagttttaaaccata

SEQ ID NO: 774452 - DNA, 19 bp, Mus musculus
  siRNA target sequence for Zfp180 (NM_172483.1,1024-1042).
gagggccaggataaatgta

SEQ ID NO: 774453 - DNA, 19 bp, Mus musculus
  siRNA target sequence for Zfp180 (NM_172483.1,1026-1044).
gggccaggataaatgtaaa

SEQ ID NO: 774454 - DNA, 19 bp, Mus musculus
  siRNA target sequence for Zfp180 (NM_172483.1,1099-1117).
cgttttgaatgtaagtact

SEQ ID NO: 774455 - DNA, 19 bp, Mus musculus
  siRNA target sequence for Zfp180 (NM_172483.1,1215-1233).
cacccggagctcacatgtt

SEQ ID NO: 774456 - DNA, 19 bp, Mus musculus
  siRNA target sequence for Zfp180 (NM_172483.1,1217-1235).
cccggagctcacatgttgt

SEQ ID NO: 774457 - DNA, 19 bp, Mus musculus
  siRNA target sequence for Zfp180 (NM_172483.1,1218-1236).
ccggagctcacatgttgtt

SEQ ID NO: 774458 - DNA, 19 bp, Mus musculus
  siRNA target sequence for Zfp180 (NM_172483.1,1221-1239).
gagctcacatgttgtttct

SEQ ID NO: 774459 - DNA, 19 bp, Mus musculus
  siRNA target sequence for Zfp180 (NM_172483.1,1384-1402).
cgccagagctacaaactca

SEQ ID NO: 774460 - DNA, 19 bp, Mus musculus
  siRNA target sequence for Zfp180 (NM_172483.1,1395-1413).
caaactcatcgcacatcaa

SEQ ID NO: 774461 - DNA, 19 bp, Mus musculus
  siRNA target sequence for Zfp180 (NM_172483.1,1545-1563).
gtccttcagccaaagctat

SEQ ID NO: 774462 - DNA, 19 bp, Mus musculus
  siRNA target sequence for B230206N24Rik (NM_172487.1,461-479).
gggtccaaggtgaaagact

SEQ ID NO: 774463 - DNA, 19 bp, Mus musculus
  siRNA target sequence for B230206N24Rik (NM_172487.1,465-483).
ccaaggtgaaagactacta

SEQ ID NO: 774464 - DNA, 19 bp, Mus musculus
  siRNA target sequence for B230206N24Rik (NM_172487.1,466-484).
caaggtgaaagactactaa

SEQ ID NO: 774465 - DNA, 19 bp, Mus musculus
  siRNA target sequence for B230206N24Rik (NM_172487.1,604-622).
ctcactcttgtcactacaa

SEQ ID NO: 774466 - DNA, 19 bp, Mus musculus
  siRNA target sequence for B230206N24Rik (NM_172487.1,637-655).
ctctcggcagccatacttt

SEQ ID NO: 774467 - DNA, 19 bp, Mus musculus
  siRNA target sequence for B230206N24Rik (NM_172487.1,701-719).
ctaggaacgaggagctaat

SEQ ID NO: 774468 - DNA, 19 bp, Mus musculus
  siRNA target sequence for B230206N24Rik (NM_172487.1,704-722).
ggaacgaggagctaataat

SEQ ID NO: 774469 - DNA, 19 bp, Mus musculus
  siRNA target sequence for B230206N24Rik (NM_172487.1,914-932).
gctcaacacccccagttaa

SEQ ID NO: 774470 - DNA, 19 bp, Mus musculus
  siRNA target sequence for B230206N24Rik (NM_172487.1,915-933).
ctcaacacccccagttaaa

SEQ ID NO: 774471 - DNA, 19 bp, Mus musculus
  siRNA target sequence for B230206N24Rik (NM_172487.1,917-935).
caacacccccagttaaagt

SEQ ID NO: 774472 - DNA, 19 bp, Mus musculus
  siRNA target sequence for B230206N24Rik (NM_172487.1,1276-1294).
gctcaagctgcaaatggaa

SEQ ID NO: 774473 - DNA, 19 bp, Mus musculus
  siRNA target sequence for B230206N24Rik (NM_172487.1,1383-1401).
gcaggggccagggctaaat

SEQ ID NO: 774474 - DNA, 19 bp, Mus musculus
  siRNA target sequence for B230206N24Rik (NM_172487.1,1384-1402).
caggggccagggctaaata

SEQ ID NO: 774475 - DNA, 19 bp, Mus musculus
  siRNA target sequence for B230206N24Rik (NM_172487.1,1410-1428).
gcacccgctgaaaggaata

SEQ ID NO: 774476 - DNA, 19 bp, Mus musculus
  siRNA target sequence for B230206N24Rik (NM_172487.1,1413-1431).
cccgctgaaaggaataggt

SEQ ID NO: 774477 - DNA, 19 bp, Mus musculus
  siRNA target sequence for B230206N24Rik (NM_172487.1,1414-1432).
ccgctgaaaggaataggtt

SEQ ID NO: 774478 - DNA, 19 bp, Mus musculus
  siRNA target sequence for 9030625A04Rik (NM_172488.1,377-395).
ctctctggtttacaattga

SEQ ID NO: 774479 - DNA, 19 bp, Mus musculus
  siRNA target sequence for 9030625A04Rik (NM_172488.1,427-445).
ggagacactggatggtatt

SEQ ID NO: 774480 - DNA, 19 bp, Mus musculus
  siRNA target sequence for 9030625A04Rik (NM_172488.1,432-450).
cactggatggtattcacta

SEQ ID NO: 774481 - DNA, 19 bp, Mus musculus
  siRNA target sequence for 9030625A04Rik (NM_172488.1,468-486).
ccaagttcctttgcataat

SEQ ID NO: 774482 - DNA, 19 bp, Mus musculus
  siRNA target sequence for 9030625A04Rik (NM_172488.1,469-487).
caagttcctttgcataata

SEQ ID NO: 774483 - DNA, 19 bp, Mus musculus
  siRNA target sequence for 9030625A04Rik (NM_172488.1,521-539).
gagtatggcctctgtgaat

SEQ ID NO: 774484 - DNA, 19 bp, Mus musculus
  siRNA target sequence for 9030625A04Rik (NM_172488.1,561-579).
cacgtctcgcgggaaaatt

SEQ ID NO: 774485 - DNA, 19 bp, Mus musculus
  siRNA target sequence for 9030625A04Rik (NM_172488.1,564-582).
gtctcgcgggaaaattcga

SEQ ID NO: 774486 - DNA, 19 bp, Mus musculus
  siRNA target sequence for 9030625A04Rik (NM_172488.1,604-622).
ggctgcctctttgtataca

SEQ ID NO: 774487 - DNA, 19 bp, Mus musculus
  siRNA target sequence for 9030625A04Rik (NM_172488.1,605-623).
gctgcctctttgtatacaa

SEQ ID NO: 774488 - DNA, 19 bp, Mus musculus
  siRNA target sequence for 9030625A04Rik (NM_172488.1,606-624).
ctgcctctttgtatacaat

SEQ ID NO: 774489 - DNA, 19 bp, Mus musculus
  siRNA target sequence for 9030625A04Rik (NM_172488.1,608-626).
gcctctttgtatacaatta

SEQ ID NO: 774490 - DNA, 19 bp, Mus musculus
  siRNA target sequence for 9030625A04Rik (NM_172488.1,654-672).
gctgcattaaggtgattgt

SEQ ID NO: 774491 - DNA, 19 bp, Mus musculus
  siRNA target sequence for 9030625A04Rik (NM_172488.1,675-693).
ccgagcacaggaaactgtt

SEQ ID NO: 774492 - DNA, 19 bp, Mus musculus
  siRNA target sequence for 9030625A04Rik (NM_172488.1,676-694).
cgagcacaggaaactgtta

SEQ ID NO: 774493 - DNA, 19 bp, Mus musculus
  siRNA target sequence for 9030625A04Rik (NM_172488.1,691-709).
gttaatgaaggcttacgtt

SEQ ID NO: 774494 - DNA, 19 bp, Mus musculus
  siRNA target sequence for 9030625A04Rik (NM_172488.1,702-720).
cttacgttggtcaactctt

SEQ ID NO: 774495 - DNA, 19 bp, Mus musculus
  siRNA target sequence for 9030625A04Rik (NM_172488.1,723-741).
ccgaggtgtatgagtttga

SEQ ID NO: 774496 - DNA, 19 bp, Mus musculus
  siRNA target sequence for 9030625A04Rik (NM_172488.1,802-820).
cgtgaccacaactcaagaa

SEQ ID NO: 774497 - DNA, 19 bp, Mus musculus
  siRNA target sequence for 9030625A04Rik (NM_172488.1,805-823).
gaccacaactcaagaacta

SEQ ID NO: 774498 - DNA, 19 bp, Mus musculus
  siRNA target sequence for 9030625A04Rik (NM_172488.1,872-890).
ctgaaaggggacctaacta

SEQ ID NO: 774499 - DNA, 19 bp, Mus musculus
  siRNA target sequence for 9030625A04Rik (NM_172488.1,969-987).
ctctcagctccctcaatct

SEQ ID NO: 774500 - DNA, 19 bp, Mus musculus
  siRNA target sequence for 9030625A04Rik (NM_172488.1,971-989).
ctcagctccctcaatcttt

SEQ ID NO: 774501 - DNA, 19 bp, Mus musculus
  siRNA target sequence for 9030625A04Rik (NM_172488.1,1015-1033).
caaagtggttgttcaagaa

SEQ ID NO: 774502 - DNA, 19 bp, Mus musculus
  siRNA target sequence for 9030625A04Rik (NM_172488.1,1049-1067).
gcaaatgctgccggattta

SEQ ID NO: 774503 - DNA, 19 bp, Mus musculus
  siRNA target sequence for 9030625A04Rik (NM_172488.1,1050-1068).
caaatgctgccggatttaa

SEQ ID NO: 774504 - DNA, 19 bp, Mus musculus
  siRNA target sequence for 9030625A04Rik (NM_172488.1,1060-1078).
cggatttaacgcagagaaa

SEQ ID NO: 774505 - DNA, 19 bp, Mus musculus
  siRNA target sequence for 9030625A04Rik (NM_172488.1,1132-1150).
ggagcctgaatcttacgat

SEQ ID NO: 774506 - DNA, 19 bp, Mus musculus
  siRNA target sequence for 9030625A04Rik (NM_172488.1,1147-1165).
cgatgggatcgtcacaaat

SEQ ID NO: 774507 - DNA, 19 bp, Mus musculus
  siRNA target sequence for 9030625A04Rik (NM_172488.1,1151-1169).
gggatcgtcacaaatcaga

SEQ ID NO: 774508 - DNA, 19 bp, Mus musculus
  siRNA target sequence for 9030625A04Rik (NM_172488.1,1166-1184).
cagagaggagtcacaatca

SEQ ID NO: 774509 - DNA, 19 bp, Mus musculus
  siRNA target sequence for 9030625A04Rik (NM_172488.1,1216-1234).
cttcgcagatcctgtgaaa

SEQ ID NO: 774510 - DNA, 19 bp, Mus musculus
  siRNA target sequence for 9030625A04Rik (NM_172488.1,1253-1271).
cactccggctggaaaggta

SEQ ID NO: 774511 - DNA, 19 bp, Mus musculus
  siRNA target sequence for 9030625A04Rik (NM_172488.1,1257-1275).
ccggctggaaaggtacatt

SEQ ID NO: 774512 - DNA, 19 bp, Mus musculus
  siRNA target sequence for 9030625A04Rik (NM_172488.1,1259-1277).
ggctggaaaggtacattgt

SEQ ID NO: 774513 - DNA, 19 bp, Mus musculus
  siRNA target sequence for 9030625A04Rik (NM_172488.1,1260-1278).
gctggaaaggtacattgtt

SEQ ID NO: 774514 - DNA, 19 bp, Mus musculus
  siRNA target sequence for 9030625A04Rik (NM_172488.1,1285-1303).
ggctatggctactgtgaat

SEQ ID NO: 774515 - DNA, 19 bp, Mus musculus
  siRNA target sequence for 9030625A04Rik (NM_172488.1,1480-1498).
caccaggattcttctagaa

SEQ ID NO: 774516 - DNA, 19 bp, Mus musculus
  siRNA target sequence for 9030625A04Rik (NM_172488.1,1561-1579).
ctgccatcctgagaagttt

SEQ ID NO: 774517 - DNA, 19 bp, Mus musculus
  siRNA target sequence for 9030625A04Rik (NM_172488.1,1563-1581).
gccatcctgagaagttttt

SEQ ID NO: 774518 - DNA, 19 bp, Mus musculus
  siRNA target sequence for 9030625A04Rik (NM_172488.1,1589-1607).
gtccgcgatggccttaact

SEQ ID NO: 774519 - DNA, 19 bp, Mus musculus
  siRNA target sequence for C630025L14 (NM_172489.1,1901-1919).
ggccagggtcggcttgatt

SEQ ID NO: 774520 - DNA, 19 bp, Mus musculus
  siRNA target sequence for C630025L14 (NM_172489.1,1903-1921).
ccagggtcggcttgattct

SEQ ID NO: 774521 - DNA, 19 bp, Mus musculus
  siRNA target sequence for C630025L14 (NM_172489.1,1992-2010).
ctctttacatcttattgtt

SEQ ID NO: 774522 - DNA, 19 bp, Mus musculus
  siRNA target sequence for D5Ertd135e (NM_172490.1,183-201).
gagcttgcagtcatggata

SEQ ID NO: 774523 - DNA, 19 bp, Mus musculus
  siRNA target sequence for D5Ertd135e (NM_172490.1,192-210).
gtcatggatagcaacaatt

SEQ ID NO: 774524 - DNA, 19 bp, Mus musculus
  siRNA target sequence for D5Ertd135e (NM_172490.1,264-282).
gttgctcgacgacattaca

SEQ ID NO: 774525 - DNA, 19 bp, Mus musculus
  siRNA target sequence for D5Ertd135e (NM_172490.1,284-302).
gttcatccacggaattgga

SEQ ID NO: 774526 - DNA, 19 bp, Mus musculus
  siRNA target sequence for D5Ertd135e (NM_172490.1,300-318).
ggacgatccggtgatattt

SEQ ID NO: 774527 - DNA, 19 bp, Mus musculus
  siRNA target sequence for D5Ertd135e (NM_172490.1,342-360).
ggctctagcctcttgaaca

SEQ ID NO: 774528 - DNA, 19 bp, Mus musculus
  siRNA target sequence for D5Ertd135e (NM_172490.1,346-364).
ctagcctcttgaacaaaat

SEQ ID NO: 774529 - DNA, 19 bp, Mus musculus
  siRNA target sequence for D5Ertd135e (NM_172490.1,367-385).
ctaattctttggtgcttaa

SEQ ID NO: 774530 - DNA, 19 bp, Mus musculus
  siRNA target sequence for D5Ertd135e (NM_172490.1,373-391).
ctttggtgcttaatgtcat

SEQ ID NO: 774531 - DNA, 19 bp, Mus musculus
  siRNA target sequence for D5Ertd135e (NM_172490.1,380-398).
gcttaatgtcataaagctt

SEQ ID NO: 774532 - DNA, 19 bp, Mus musculus
  siRNA target sequence for D5Ertd135e (NM_172490.1,441-459).
gcaactgggatgagtctaa

SEQ ID NO: 774533 - DNA, 19 bp, Mus musculus
  siRNA target sequence for D5Ertd135e (NM_172490.1,445-463).
ctgggatgagtctaacctt

SEQ ID NO: 774534 - DNA, 19 bp, Mus musculus
  siRNA target sequence for D5Ertd135e (NM_172490.1,470-488).
cctgacactacgacacaaa

SEQ ID NO: 774535 - DNA, 19 bp, Mus musculus
  siRNA target sequence for D5Ertd135e (NM_172490.1,471-489).
ctgacactacgacacaaaa

SEQ ID NO: 774536 - DNA, 19 bp, Mus musculus
  siRNA target sequence for D5Ertd135e (NM_172490.1,525-543).
gaccagaagtcctgcttta

SEQ ID NO: 774537 - DNA, 19 bp, Mus musculus
  siRNA target sequence for D5Ertd135e (NM_172490.1,567-585).
gaacccgtggtaatagaaa

SEQ ID NO: 774538 - DNA, 19 bp, Mus musculus
  siRNA target sequence for D5Ertd135e (NM_172490.1,571-589).
ccgtggtaatagaaaacgt

SEQ ID NO: 774539 - DNA, 19 bp, Mus musculus
  siRNA target sequence for D5Ertd135e (NM_172490.1,572-590).
cgtggtaatagaaaacgta

SEQ ID NO: 774540 - DNA, 19 bp, Mus musculus
  siRNA target sequence for D5Ertd135e (NM_172490.1,573-591).
gtggtaatagaaaacgtat

SEQ ID NO: 774541 - DNA, 19 bp, Mus musculus
  siRNA target sequence for D5Ertd135e (NM_172490.1,699-717).
ccaagggtgcccgatagat

SEQ ID NO: 774542 - DNA, 19 bp, Mus musculus
  siRNA target sequence for D5Ertd135e (NM_172490.1,700-718).
caagggtgcccgatagatt

SEQ ID NO: 774543 - DNA, 19 bp, Mus musculus
  siRNA target sequence for D5Ertd135e (NM_172490.1,707-725).
gcccgatagattagaagaa

SEQ ID NO: 774544 - DNA, 19 bp, Mus musculus
  siRNA target sequence for D5Ertd135e (NM_172490.1,709-727).
ccgatagattagaagaact

SEQ ID NO: 774545 - DNA, 19 bp, Mus musculus
  siRNA target sequence for D5Ertd135e (NM_172490.1,765-783).
gtcaacaacgcttatggat

SEQ ID NO: 774546 - DNA, 19 bp, Mus musculus
  siRNA target sequence for D5Ertd135e (NM_172490.1,767-785).
caacaacgcttatggatta

SEQ ID NO: 774547 - DNA, 19 bp, Mus musculus
  siRNA target sequence for D5Ertd135e (NM_172490.1,820-838).
gggctcgggttggtagaat

SEQ ID NO: 774548 - DNA, 19 bp, Mus musculus
  siRNA target sequence for D5Ertd135e (NM_172490.1,821-839).
ggctcgggttggtagaatt

SEQ ID NO: 774549 - DNA, 19 bp, Mus musculus
  siRNA target sequence for D5Ertd135e (NM_172490.1,823-841).
ctcgggttggtagaattga

SEQ ID NO: 774550 - DNA, 19 bp, Mus musculus
  siRNA target sequence for D5Ertd135e (NM_172490.1,856-874).
gcttggacaaaaattttat

SEQ ID NO: 774551 - DNA, 19 bp, Mus musculus
  siRNA target sequence for D5Ertd135e (NM_172490.1,879-897).
ccagtaggtggtgctataa

SEQ ID NO: 774552 - DNA, 19 bp, Mus musculus
  siRNA target sequence for D5Ertd135e (NM_172490.1,1012-1030).
gctacaggaagctgttgaa

SEQ ID NO: 774553 - DNA, 19 bp, Mus musculus
  siRNA target sequence for D5Ertd135e (NM_172490.1,1080-1098).
gcagaggcccacaatgaaa

SEQ ID NO: 774554 - DNA, 19 bp, Mus musculus
  siRNA target sequence for D5Ertd135e (NM_172490.1,1085-1103).
ggcccacaatgaaagacta

SEQ ID NO: 774555 - DNA, 19 bp, Mus musculus
  siRNA target sequence for D5Ertd135e (NM_172490.1,1114-1132).
ctcacaaccctatatcctt

SEQ ID NO: 774556 - DNA, 19 bp, Mus musculus
  siRNA target sequence for D5Ertd135e (NM_172490.1,1139-1157).
gacacttaagacgatagat

SEQ ID NO: 774557 - DNA, 19 bp, Mus musculus
  siRNA target sequence for D5Ertd135e (NM_172490.1,1188-1206).
ggctcaatgctttttacca

SEQ ID NO: 774558 - DNA, 19 bp, Mus musculus
  siRNA target sequence for D5Ertd135e (NM_172490.1,1252-1270).
ctgtgagtggccatacttt

SEQ ID NO: 774559 - DNA, 19 bp, Mus musculus
  siRNA target sequence for D5Ertd135e (NM_172490.1,1256-1274).
gagtggccatacttttcga

SEQ ID NO: 774560 - DNA, 19 bp, Mus musculus
  siRNA target sequence for D5Ertd135e (NM_172490.1,1280-1298).
catgtcccatgcagataat

SEQ ID NO: 774561 - DNA, 19 bp, Mus musculus
  siRNA target sequence for D5Ertd135e (NM_172490.1,1372-1390).
gacttgacaagtgcttaaa

SEQ ID NO: 774562 - DNA, 19 bp, Mus musculus
  siRNA target sequence for D5Ertd135e (NM_172490.1,1379-1397).
caagtgcttaaacatagta

SEQ ID NO: 774563 - DNA, 19 bp, Mus musculus
  siRNA target sequence for AI841794 (NM_172492.2,1223-1241).
ggacctgtccaacaacttt

SEQ ID NO: 774564 - DNA, 19 bp, Mus musculus
  siRNA target sequence for AI841794 (NM_172492.2,1226-1244).
cctgtccaacaactttctt

SEQ ID NO: 774565 - DNA, 19 bp, Mus musculus
  siRNA target sequence for AI841794 (NM_172492.2,1269-1287).
gaggacttggtcaatctga

SEQ ID NO: 774566 - DNA, 19 bp, Mus musculus
  siRNA target sequence for AI841794 (NM_172492.2,1341-1359).
cagcactccccactactta

SEQ ID NO: 774567 - DNA, 19 bp, Mus musculus
  siRNA target sequence for AI841794 (NM_172492.2,1343-1361).
gcactccccactacttaga

SEQ ID NO: 774568 - DNA, 19 bp, Mus musculus
  siRNA target sequence for AI841794 (NM_172492.2,1346-1364).
ctccccactacttagacat

SEQ ID NO: 774569 - DNA, 19 bp, Mus musculus
  siRNA target sequence for AI841794 (NM_172492.2,1356-1374).
cttagacatctggatttgt

SEQ ID NO: 774570 - DNA, 19 bp, Mus musculus
  siRNA target sequence for AI841794 (NM_172492.2,1544-1562).
caaccttcgggaattcaaa

SEQ ID NO: 774571 - DNA, 19 bp, Mus musculus
  siRNA target sequence for AI841794 (NM_172492.2,1548-1566).
cttcgggaattcaaacact

SEQ ID NO: 774572 - DNA, 19 bp, Mus musculus
  siRNA target sequence for AI841794 (NM_172492.2,1753-1771).
cggagcctcctaaacctaa

SEQ ID NO: 774573 - DNA, 19 bp, Mus musculus
  siRNA target sequence for AI841794 (NM_172492.2,1852-1870).
ccattggcacagtgatcat

SEQ ID NO: 774574 - DNA, 19 bp, Mus musculus
  siRNA target sequence for AI841794 (NM_172492.2,1878-1896).
gtcgtgtgtggcattgtct

SEQ ID NO: 774575 - DNA, 19 bp, Mus musculus
  siRNA target sequence for AI841794 (NM_172492.2,1887-1905).
ggcattgtctgcatcatga

SEQ ID NO: 774576 - DNA, 19 bp, Mus musculus
  siRNA target sequence for AI841794 (NM_172492.2,1888-1906).
gcattgtctgcatcatgat

SEQ ID NO: 774577 - DNA, 19 bp, Mus musculus
  siRNA target sequence for 9030406N13Rik (NM_172495.2,506-524).
gggcaccatggaatacact

SEQ ID NO: 774578 - DNA, 19 bp, Mus musculus
  siRNA target sequence for 9030406N13Rik (NM_172495.2,550-568).
ctgttgcactgaagtttaa

SEQ ID NO: 774579 - DNA, 19 bp, Mus musculus
  siRNA target sequence for 9030406N13Rik (NM_172495.2,569-587).
cgtcactcccaataaatta

SEQ ID NO: 774580 - DNA, 19 bp, Mus musculus
  siRNA target sequence for 9030406N13Rik (NM_172495.2,645-663).
ccagatgccaacatctctt

SEQ ID NO: 774581 - DNA, 19 bp, Mus musculus
  siRNA target sequence for 9030406N13Rik (NM_172495.2,648-666).
gatgccaacatctcttcta

SEQ ID NO: 774582 - DNA, 19 bp, Mus musculus
  siRNA target sequence for 9030406N13Rik (NM_172495.2,651-669).
gccaacatctcttctagta

SEQ ID NO: 774583 - DNA, 19 bp, Mus musculus
  siRNA target sequence for 9030406N13Rik (NM_172495.2,656-674).
catctcttctagtaccata

SEQ ID NO: 774584 - DNA, 19 bp, Mus musculus
  siRNA target sequence for 9030406N13Rik (NM_172495.2,777-795).
cccatcgagagggtcttat

SEQ ID NO: 774585 - DNA, 19 bp, Mus musculus
  siRNA target sequence for 9030406N13Rik (NM_172495.2,799-817).
ctacttccgaagaagatga

SEQ ID NO: 774586 - DNA, 19 bp, Mus musculus
  siRNA target sequence for 9030406N13Rik (NM_172495.2,813-831).
gatgagccaggtgttgtaa

SEQ ID NO: 774587 - DNA, 19 bp, Mus musculus
  siRNA target sequence for 9030406N13Rik (NM_172495.2,828-846).
gtaaaattcctcaaaatga

SEQ ID NO: 774588 - DNA, 19 bp, Mus musculus
  siRNA target sequence for 9030406N13Rik (NM_172495.2,932-950).
gtccgatcccttagtgatt

SEQ ID NO: 774589 - DNA, 19 bp, Mus musculus
  siRNA target sequence for 9030406N13Rik (NM_172495.2,934-952).
ccgatcccttagtgattga

SEQ ID NO: 774590 - DNA, 19 bp, Mus musculus
  siRNA target sequence for 9030406N13Rik (NM_172495.2,935-953).
cgatcccttagtgattgaa

SEQ ID NO: 774591 - DNA, 19 bp, Mus musculus
  siRNA target sequence for 9030406N13Rik (NM_172495.2,951-969).
gaaaacggttgcgaagaat

SEQ ID NO: 774592 - DNA, 19 bp, Mus musculus
  siRNA target sequence for 9030406N13Rik (NM_172495.2,1018-1036).
gtgacatatcccacatgaa

SEQ ID NO: 774593 - DNA, 19 bp, Mus musculus
  siRNA target sequence for 9030406N13Rik (NM_172495.2,1106-1124).
ggacctggcttcagagaaa

SEQ ID NO: 774594 - DNA, 19 bp, Mus musculus
  siRNA target sequence for 9030406N13Rik (NM_172495.2,1110-1128).
ctggcttcagagaaagata

SEQ ID NO: 774595 - DNA, 19 bp, Mus musculus
  siRNA target sequence for 9030406N13Rik (NM_172495.2,1119-1137).
gagaaagatatcaatccat

SEQ ID NO: 774596 - DNA, 19 bp, Mus musculus
  siRNA target sequence for 9030406N13Rik (NM_172495.2,1125-1143).
gatatcaatccattcagta

SEQ ID NO: 774597 - DNA, 19 bp, Mus musculus
  siRNA target sequence for 9030406N13Rik (NM_172495.2,1183-1201).
gggagaggacccttgcttt

SEQ ID NO: 774598 - DNA, 19 bp, Mus musculus
  siRNA target sequence for 9030406N13Rik (NM_172495.2,1184-1202).
ggagaggacccttgcttta

SEQ ID NO: 774599 - DNA, 19 bp, Mus musculus
  siRNA target sequence for 9030406N13Rik (NM_172495.2,1264-1282).
ccccagacaactctgaatt

SEQ ID NO: 774600 - DNA, 19 bp, Mus musculus
  siRNA target sequence for 9030406N13Rik (NM_172495.2,1274-1292).
ctctgaattgtggaaatta

SEQ ID NO: 774601 - DNA, 19 bp, Mus musculus
  siRNA target sequence for 9030406N13Rik (NM_172495.2,1444-1462).
ctgagagtggaatcaacaa

SEQ ID NO: 774602 - DNA, 19 bp, Mus musculus
  siRNA target sequence for 9030406N13Rik (NM_172495.2,1464-1482).
ggagatgccacgaaagaat

SEQ ID NO: 774603 - DNA, 19 bp, Mus musculus
  siRNA target sequence for 9030406N13Rik (NM_172495.2,1570-1588).
gaccagagagtgatactga

SEQ ID NO: 774604 - DNA, 19 bp, Mus musculus
  siRNA target sequence for 9030406N13Rik (NM_172495.2,1592-1610).
gaagggagccctagatcta

SEQ ID NO: 774605 - DNA, 19 bp, Mus musculus
  siRNA target sequence for 9030406N13Rik (NM_172495.2,1595-1613).
gggagccctagatctagaa

SEQ ID NO: 774606 - DNA, 19 bp, Mus musculus
  siRNA target sequence for 9030406N13Rik (NM_172495.2,1638-1656).
ccagaagtagacaaacact

SEQ ID NO: 774607 - DNA, 19 bp, Mus musculus
  siRNA target sequence for 9030406N13Rik (NM_172495.2,1657-1675).
ctggatccccagaaaactt

SEQ ID NO: 774608 - DNA, 19 bp, Mus musculus
  siRNA target sequence for 9030406N13Rik (NM_172495.2,1677-1695).
ggggaaagcacgctgaata

SEQ ID NO: 774609 - DNA, 19 bp, Mus musculus
  siRNA target sequence for 9030406N13Rik (NM_172495.2,1698-1716).
cacgaagatctagataaaa

SEQ ID NO: 774610 - DNA, 19 bp, Mus musculus
  siRNA target sequence for 9030406N13Rik (NM_172495.2,1700-1718).
cgaagatctagataaaatt

SEQ ID NO: 774611 - DNA, 19 bp, Mus musculus
  siRNA target sequence for 9030406N13Rik (NM_172495.2,1707-1725).
ctagataaaattaaactca

SEQ ID NO: 774612 - DNA, 19 bp, Mus musculus
  siRNA target sequence for 9030406N13Rik (NM_172495.2,1790-1808).
gttaagtgaccgcaaaagt

SEQ ID NO: 774613 - DNA, 19 bp, Mus musculus
  siRNA target sequence for 9030406N13Rik (NM_172495.2,1812-1830).
gaaccaggaggaatagaca

SEQ ID NO: 774614 - DNA, 19 bp, Mus musculus
  siRNA target sequence for 9030406N13Rik (NM_172495.2,1945-1963).
gtgcagaggaaactgtaat

SEQ ID NO: 774615 - DNA, 19 bp, Mus musculus
  siRNA target sequence for 9030406N13Rik (NM_172495.2,1950-1968).
gaggaaactgtaattaaca

SEQ ID NO: 774616 - DNA, 19 bp, Mus musculus
  siRNA target sequence for 9030406N13Rik (NM_172495.2,1993-2011).
gatcatctctagacaagat

SEQ ID NO: 774617 - DNA, 19 bp, Mus musculus
  siRNA target sequence for 9030406N13Rik (NM_172495.2,2022-2040).
gcacagatggataacaaat

SEQ ID NO: 774618 - DNA, 19 bp, Mus musculus
  siRNA target sequence for 9030406N13Rik (NM_172495.2,2030-2048).
ggataacaaatctgagatt

SEQ ID NO: 774619 - DNA, 19 bp, Mus musculus
  siRNA target sequence for 9030406N13Rik (NM_172495.2,2066-2084).
gagaattcaggtaccaatt

SEQ ID NO: 774620 - DNA, 19 bp, Mus musculus
  siRNA target sequence for 9030406N13Rik (NM_172495.2,2068-2086).
gaattcaggtaccaattga

SEQ ID NO: 774621 - DNA, 19 bp, Mus musculus
  siRNA target sequence for 9030406N13Rik (NM_172495.2,2073-2091).
caggtaccaattgaagata

SEQ ID NO: 774622 - DNA, 19 bp, Mus musculus
  siRNA target sequence for 9030406N13Rik (NM_172495.2,2075-2093).
ggtaccaattgaagatata

SEQ ID NO: 774623 - DNA, 19 bp, Mus musculus
  siRNA target sequence for 9030406N13Rik (NM_172495.2,2199-2217).
cagcagtatagcaagagaa

SEQ ID NO: 774624 - DNA, 19 bp, Mus musculus
  siRNA target sequence for 9030406N13Rik (NM_172495.2,2251-2269).
gggagagggtggatcactt

SEQ ID NO: 774625 - DNA, 19 bp, Mus musculus
  siRNA target sequence for 9030406N13Rik (NM_172495.2,2355-2373).
ctgaacatgatcgacaatt

SEQ ID NO: 774626 - DNA, 19 bp, Mus musculus
  siRNA target sequence for 9030406N13Rik (NM_172495.2,2604-2622).
catggaacgagcttgaaga

SEQ ID NO: 774627 - DNA, 19 bp, Mus musculus
  siRNA target sequence for 9030406N13Rik (NM_172495.2,2633-2651).
gaaatcagcatctctagat

SEQ ID NO: 774628 - DNA, 19 bp, Mus musculus
  siRNA target sequence for 9030406N13Rik (NM_172495.2,2676-2694).
gacatggataaccagatat

SEQ ID NO: 774629 - DNA, 19 bp, Mus musculus
  siRNA target sequence for 9030406N13Rik (NM_172495.2,2678-2696).
catggataaccagatattt

SEQ ID NO: 774630 - DNA, 19 bp, Mus musculus
  siRNA target sequence for 9030406N13Rik (NM_172495.2,2690-2708).
gatatttggggcatatgca

SEQ ID NO: 774631 - DNA, 19 bp, Mus musculus
  siRNA target sequence for 9030406N13Rik (NM_172495.2,2706-2724).
gcaactcatcccttcaagt

SEQ ID NO: 774632 - DNA, 19 bp, Mus musculus
  siRNA target sequence for 9030406N13Rik (NM_172495.2,2707-2725).
caactcatcccttcaagtt

SEQ ID NO: 774633 - DNA, 19 bp, Mus musculus
  siRNA target sequence for 9030406N13Rik (NM_172495.2,2723-2741).
gttcagtgaccactattat

SEQ ID NO: 774634 - DNA, 19 bp, Mus musculus
  siRNA target sequence for 9030406N13Rik (NM_172495.2,2746-2764).
caggcgaaacgtttctcta

SEQ ID NO: 774635 - DNA, 19 bp, Mus musculus
  siRNA target sequence for 9030406N13Rik (NM_172495.2,2775-2793).
ccgaatttcaaggtcttta

SEQ ID NO: 774636 - DNA, 19 bp, Mus musculus
  siRNA target sequence for 9030406N13Rik (NM_172495.2,2776-2794).
cgaatttcaaggtctttaa

SEQ ID NO: 774637 - DNA, 19 bp, Mus musculus
  siRNA target sequence for 9030406N13Rik (NM_172495.2,2797-2815).
ggagtggagaaaactcata

SEQ ID NO: 774638 - DNA, 19 bp, Mus musculus
  siRNA target sequence for 9030406N13Rik (NM_172495.2,2800-2818).
gtggagaaaactcatattt

SEQ ID NO: 774639 - DNA, 19 bp, Mus musculus
  siRNA target sequence for 9030406N13Rik (NM_172495.2,2831-2849).
cataagttctttagaactt

SEQ ID NO: 774640 - DNA, 19 bp, Mus musculus
  siRNA target sequence for 9030406N13Rik (NM_172495.2,2908-2926).
gcaactcttgcagtacttt

SEQ ID NO: 774641 - DNA, 19 bp, Mus musculus
  siRNA target sequence for 9030406N13Rik (NM_172495.2,2909-2927).
caactcttgcagtactttt

SEQ ID NO: 774642 - DNA, 19 bp, Mus musculus
  siRNA target sequence for 9030406N13Rik (NM_172495.2,2917-2935).
gcagtacttttaataatga

SEQ ID NO: 774643 - DNA, 19 bp, Mus musculus
  siRNA target sequence for Cobl (NM_172496.2,380-398).
ctcaccacgtcctagagat

SEQ ID NO: 774644 - DNA, 19 bp, Mus musculus
  siRNA target sequence for Cobl (NM_172496.2,444-462).
gttgattgggtccttgaat

SEQ ID NO: 774645 - DNA, 19 bp, Mus musculus
  siRNA target sequence for Cobl (NM_172496.2,459-477).
gaatgtgcatactgtactt

SEQ ID NO: 774646 - DNA, 19 bp, Mus musculus
  siRNA target sequence for Cobl (NM_172496.2,539-557).
ctgtacgactggtagtgaa

SEQ ID NO: 774647 - DNA, 19 bp, Mus musculus
  siRNA target sequence for Cobl (NM_172496.2,596-614).
ctgaggtgccactacagaa

SEQ ID NO: 774648 - DNA, 19 bp, Mus musculus
  siRNA target sequence for Cobl (NM_172496.2,598-616).
gaggtgccactacagaata

SEQ ID NO: 774649 - DNA, 19 bp, Mus musculus
  siRNA target sequence for Cobl (NM_172496.2,600-618).
ggtgccactacagaatatt

SEQ ID NO: 774650 - DNA, 19 bp, Mus musculus
  siRNA target sequence for Cobl (NM_172496.2,779-797).
catcacttggcaatgatga

SEQ ID NO: 774651 - DNA, 19 bp, Mus musculus
  siRNA target sequence for Cobl (NM_172496.2,933-951).
gaacggctgcgtaacaaca

SEQ ID NO: 774652 - DNA, 19 bp, Mus musculus
  siRNA target sequence for Cobl (NM_172496.2,1084-1102).
ctgggtcaagacaaggtat

SEQ ID NO: 774653 - DNA, 19 bp, Mus musculus
  siRNA target sequence for Cobl (NM_172496.2,1088-1106).
gtcaagacaaggtatcaga

SEQ ID NO: 774654 - DNA, 19 bp, Mus musculus
  siRNA target sequence for Cobl (NM_172496.2,1204-1222).
cccaaccgcaaggaagata

SEQ ID NO: 774655 - DNA, 19 bp, Mus musculus
  siRNA target sequence for Cobl (NM_172496.2,1205-1223).
ccaaccgcaaggaagataa

SEQ ID NO: 774656 - DNA, 19 bp, Mus musculus
  siRNA target sequence for Cobl (NM_172496.2,1256-1274).
gacgtcaggtgccacaaaa

SEQ ID NO: 774657 - DNA, 19 bp, Mus musculus
  siRNA target sequence for Cobl (NM_172496.2,1554-1572).
ctccctggactcacaacaa

SEQ ID NO: 774658 - DNA, 19 bp, Mus musculus
  siRNA target sequence for Cobl (NM_172496.2,1556-1574).
ccctggactcacaacaaga

SEQ ID NO: 774659 - DNA, 19 bp, Mus musculus
  siRNA target sequence for Cobl (NM_172496.2,1688-1706).
gttcaggaagctcaattct

SEQ ID NO: 774660 - DNA, 19 bp, Mus musculus
  siRNA target sequence for Cobl (NM_172496.2,1722-1740).
caccatgcctaccaatgat

SEQ ID NO: 774661 - DNA, 19 bp, Mus musculus
  siRNA target sequence for Cobl (NM_172496.2,1738-1756).
gatgatgaagacctattca

SEQ ID NO: 774662 - DNA, 19 bp, Mus musculus
  siRNA target sequence for Cobl (NM_172496.2,1741-1759).
gatgaagacctattcatca

SEQ ID NO: 774663 - DNA, 19 bp, Mus musculus
  siRNA target sequence for Cobl (NM_172496.2,1853-1871).
ctgtcaatggtgtatccaa

SEQ ID NO: 774664 - DNA, 19 bp, Mus musculus
  siRNA target sequence for Cobl (NM_172496.2,1966-1984).
gggctgttctccagtagat

SEQ ID NO: 774665 - DNA, 19 bp, Mus musculus
  siRNA target sequence for Cobl (NM_172496.2,1969-1987).
ctgttctccagtagatgta

SEQ ID NO: 774666 - DNA, 19 bp, Mus musculus
  siRNA target sequence for Cobl (NM_172496.2,1974-1992).
ctccagtagatgtaacaat

SEQ ID NO: 774667 - DNA, 19 bp, Mus musculus
  siRNA target sequence for Cobl (NM_172496.2,2016-2034).
cattgctagccaaagatct

SEQ ID NO: 774668 - DNA, 19 bp, Mus musculus
  siRNA target sequence for Cobl (NM_172496.2,2058-2076).
gcatagccagccattcgta

SEQ ID NO: 774669 - DNA, 19 bp, Mus musculus
  siRNA target sequence for Cobl (NM_172496.2,2059-2077).
catagccagccattcgtaa

SEQ ID NO: 774670 - DNA, 19 bp, Mus musculus
  siRNA target sequence for Cobl (NM_172496.2,2068-2086).
ccattcgtaaggacaagta

SEQ ID NO: 774671 - DNA, 19 bp, Mus musculus
  siRNA target sequence for Cobl (NM_172496.2,2073-2091).
cgtaaggacaagtagaaaa

SEQ ID NO: 774672 - DNA, 19 bp, Mus musculus
  siRNA target sequence for Cobl (NM_172496.2,2107-2125).
cctccttcccaagataaca

SEQ ID NO: 774673 - DNA, 19 bp, Mus musculus
  siRNA target sequence for Cobl (NM_172496.2,2140-2158).
ccaaccttagccaacacat

SEQ ID NO: 774674 - DNA, 19 bp, Mus musculus
  siRNA target sequence for Cobl (NM_172496.2,2194-2212).
gttacatcacttgtttcaa

SEQ ID NO: 774675 - DNA, 19 bp, Mus musculus
  siRNA target sequence for Cobl (NM_172496.2,2250-2268).
caaagtgcatggttctagt

SEQ ID NO: 774676 - DNA, 19 bp, Mus musculus
  siRNA target sequence for Cobl (NM_172496.2,2284-2302).
caggcaggtcatggaataa

SEQ ID NO: 774677 - DNA, 19 bp, Mus musculus
  siRNA target sequence for Cobl (NM_172496.2,2287-2305).
gcaggtcatggaataaact

SEQ ID NO: 774678 - DNA, 19 bp, Mus musculus
  siRNA target sequence for Cobl (NM_172496.2,2334-2352).
ggatgagagctccaattca

SEQ ID NO: 774679 - DNA, 19 bp, Mus musculus
  siRNA target sequence for Cobl (NM_172496.2,2382-2400).
ggccttagggggaagctat

SEQ ID NO: 774680 - DNA, 19 bp, Mus musculus
  siRNA target sequence for Cobl (NM_172496.2,2409-2427).
gtatggcctcacgacatat

SEQ ID NO: 774681 - DNA, 19 bp, Mus musculus
  siRNA target sequence for Cobl (NM_172496.2,2413-2431).
ggcctcacgacatataaaa

SEQ ID NO: 774682 - DNA, 19 bp, Mus musculus
  siRNA target sequence for Cobl (NM_172496.2,2414-2432).
gcctcacgacatataaaat

SEQ ID NO: 774683 - DNA, 19 bp, Mus musculus
  siRNA target sequence for Cobl (NM_172496.2,2415-2433).
cctcacgacatataaaatt

SEQ ID NO: 774684 - DNA, 19 bp, Mus musculus
  siRNA target sequence for Cobl (NM_172496.2,2447-2465).
cagagatgaggtgttatga

SEQ ID NO: 774685 - DNA, 19 bp, Mus musculus
  siRNA target sequence for Cobl (NM_172496.2,2449-2467).
gagatgaggtgttatgaca

SEQ ID NO: 774686 - DNA, 19 bp, Mus musculus
  siRNA target sequence for Cobl (NM_172496.2,2483-2501).
ccactggtgccattaagat

SEQ ID NO: 774687 - DNA, 19 bp, Mus musculus
  siRNA target sequence for Cobl (NM_172496.2,2484-2502).
cactggtgccattaagatt

SEQ ID NO: 774688 - DNA, 19 bp, Mus musculus
  siRNA target sequence for Cobl (NM_172496.2,2486-2504).
ctggtgccattaagattga

SEQ ID NO: 774689 - DNA, 19 bp, Mus musculus
  siRNA target sequence for Cobl (NM_172496.2,2489-2507).
gtgccattaagattgatga

SEQ ID NO: 774690 - DNA, 19 bp, Mus musculus
  siRNA target sequence for Cobl (NM_172496.2,2493-2511).
cattaagattgatgaacta

SEQ ID NO: 774691 - DNA, 19 bp, Mus musculus
  siRNA target sequence for Cobl (NM_172496.2,2564-2582).
cagctgttgtcgaaacaga

SEQ ID NO: 774692 - DNA, 19 bp, Mus musculus
  siRNA target sequence for Cobl (NM_172496.2,2581-2599).
gacactccacctattggaa

SEQ ID NO: 774693 - DNA, 19 bp, Mus musculus
  siRNA target sequence for Cobl (NM_172496.2,2588-2606).
cacctattggaaaagtcaa

SEQ ID NO: 774694 - DNA, 19 bp, Mus musculus
  siRNA target sequence for Cobl (NM_172496.2,2591-2609).
ctattggaaaagtcaaaga

SEQ ID NO: 774695 - DNA, 19 bp, Mus musculus
  siRNA target sequence for Cobl (NM_172496.2,2616-2634).
gaggcgcaactcaatggaa

SEQ ID NO: 774696 - DNA, 19 bp, Mus musculus
  siRNA target sequence for Cobl (NM_172496.2,2618-2636).
ggcgcaactcaatggaaaa

SEQ ID NO: 774697 - DNA, 19 bp, Mus musculus
  siRNA target sequence for Cobl (NM_172496.2,2620-2638).
cgcaactcaatggaaaagt

SEQ ID NO: 774698 - DNA, 19 bp, Mus musculus
  siRNA target sequence for Cobl (NM_172496.2,2651-2669).
cggctgagtgcactatcaa

SEQ ID NO: 774699 - DNA, 19 bp, Mus musculus
  siRNA target sequence for Cobl (NM_172496.2,2652-2670).
ggctgagtgcactatcaaa

SEQ ID NO: 774700 - DNA, 19 bp, Mus musculus
  siRNA target sequence for Cobl (NM_172496.2,2894-2912).
gaacatccagccagtatgt

SEQ ID NO: 774701 - DNA, 19 bp, Mus musculus
  siRNA target sequence for Cobl (NM_172496.2,2907-2925).
gtatgtggcctctgctatt

SEQ ID NO: 774702 - DNA, 19 bp, Mus musculus
  siRNA target sequence for Cobl (NM_172496.2,2931-2949).
gaagatggggcctccaaaa

SEQ ID NO: 774703 - DNA, 19 bp, Mus musculus
  siRNA target sequence for Cobl (NM_172496.2,3119-3137).
gcaaccctggtgtgcaatt

SEQ ID NO: 774704 - DNA, 19 bp, Mus musculus
  siRNA target sequence for Cobl (NM_172496.2,3214-3232).
gtccacagaaactcctatt

SEQ ID NO: 774705 - DNA, 19 bp, Mus musculus
  siRNA target sequence for Cobl (NM_172496.2,3252-3270).
ccatagggatcgtgtttct

SEQ ID NO: 774706 - DNA, 19 bp, Mus musculus
  siRNA target sequence for Cobl (NM_172496.2,3301-3319).
caaactacaagtaaccaaa

SEQ ID NO: 774707 - DNA, 19 bp, Mus musculus
  siRNA target sequence for Cobl (NM_172496.2,3316-3334).
caaaaggcaaattcaacat

SEQ ID NO: 774708 - DNA, 19 bp, Mus musculus
  siRNA target sequence for Cobl (NM_172496.2,3322-3340).
gcaaattcaacatctaact

SEQ ID NO: 774709 - DNA, 19 bp, Mus musculus
  siRNA target sequence for Cobl (NM_172496.2,3323-3341).
caaattcaacatctaactt

SEQ ID NO: 774710 - DNA, 19 bp, Mus musculus
  siRNA target sequence for Cobl (NM_172496.2,3397-3415).
gactctgggaggatactga

SEQ ID NO: 774711 - DNA, 19 bp, Mus musculus
  siRNA target sequence for Cobl (NM_172496.2,3427-3445).
gcacgaaccccaggaaatt

SEQ ID NO: 774712 - DNA, 19 bp, Mus musculus
  siRNA target sequence for Cobl (NM_172496.2,3473-3491).
ccaccctgactagctatat

SEQ ID NO: 774713 - DNA, 19 bp, Mus musculus
  siRNA target sequence for Cobl (NM_172496.2,3474-3492).
caccctgactagctatatt

SEQ ID NO: 774714 - DNA, 19 bp, Mus musculus
  siRNA target sequence for Cobl (NM_172496.2,3507-3525).
ggaaaagcccagttcgtta

SEQ ID NO: 774715 - DNA, 19 bp, Mus musculus
  siRNA target sequence for Cobl (NM_172496.2,3513-3531).
gcccagttcgttatctaca

SEQ ID NO: 774716 - DNA, 19 bp, Mus musculus
  siRNA target sequence for Cobl (NM_172496.2,3535-3553).
ggtcaagacgcagatgata

SEQ ID NO: 774717 - DNA, 19 bp, Mus musculus
  siRNA target sequence for Cobl (NM_172496.2,3588-3606).
gttcaagcctgtcattcaa

SEQ ID NO: 774718 - DNA, 19 bp, Mus musculus
  siRNA target sequence for Cobl (NM_172496.2,3861-3879).
cggggctccaggtttggat

SEQ ID NO: 774719 - DNA, 19 bp, Mus musculus
  siRNA target sequence for Cobl (NM_172496.2,3863-3881).
gggctccaggtttggataa

SEQ ID NO: 774720 - DNA, 19 bp, Mus musculus
  siRNA target sequence for Cobl (NM_172496.2,3864-3882).
ggctccaggtttggataaa

SEQ ID NO: 774721 - DNA, 19 bp, Mus musculus
  siRNA target sequence for Cobl (NM_172496.2,3961-3979).
gcctccgtaacagtttcta

SEQ ID NO: 774722 - DNA, 19 bp, Mus musculus
  siRNA target sequence for 4831426I19Rik (NM_172500.1,785-803).
ggctgtgggtgtcattcaa

SEQ ID NO: 774723 - DNA, 19 bp, Mus musculus
  siRNA target sequence for 4831426I19Rik (NM_172500.1,787-805).
ctgtgggtgtcattcaaaa

SEQ ID NO: 774724 - DNA, 19 bp, Mus musculus
  siRNA target sequence for 4831426I19Rik (NM_172500.1,789-807).
gtgggtgtcattcaaaaca

SEQ ID NO: 774725 - DNA, 19 bp, Mus musculus
  siRNA target sequence for 4831426I19Rik (NM_172500.1,1109-1127).
ccgtgtagaccggttacaa

SEQ ID NO: 774726 - DNA, 19 bp, Mus musculus
  siRNA target sequence for 4831426I19Rik (NM_172500.1,1110-1128).
cgtgtagaccggttacaaa

SEQ ID NO: 774727 - DNA, 19 bp, Mus musculus
  siRNA target sequence for 4831426I19Rik (NM_172500.1,1189-1207).
ccaccattcaggaatacca

SEQ ID NO: 774728 - DNA, 19 bp, Mus musculus
  siRNA target sequence for 4831426I19Rik (NM_172500.1,1355-1373).
ctccattcacacctttcta

SEQ ID NO: 774729 - DNA, 19 bp, Mus musculus
  siRNA target sequence for 4831426I19Rik (NM_172500.1,1491-1509).
ctggagcaggtgacaagtt

SEQ ID NO: 774730 - DNA, 19 bp, Mus musculus
  siRNA target sequence for 4831426I19Rik (NM_172500.1,1602-1620).
gcttttgatcccctaaaca

SEQ ID NO: 774731 - DNA, 19 bp, Mus musculus
  siRNA target sequence for 4831426I19Rik (NM_172500.1,2333-2351).
cgacctccctgaagatcat

SEQ ID NO: 774732 - DNA, 19 bp, Mus musculus
  siRNA target sequence for 4831426I19Rik (NM_172500.1,2398-2416).
ccaagctacgtagaatcat

SEQ ID NO: 774733 - DNA, 19 bp, Mus musculus
  siRNA target sequence for 4831426I19Rik (NM_172500.1,2403-2421).
ctacgtagaatcatcacaa

SEQ ID NO: 774734 - DNA, 19 bp, Mus musculus
  siRNA target sequence for 4831426I19Rik (NM_172500.1,2406-2424).
cgtagaatcatcacaatga

SEQ ID NO: 774735 - DNA, 19 bp, Mus musculus
  siRNA target sequence for 4831426I19Rik (NM_172500.1,2832-2850).
gctcatgcttcggtacaat

SEQ ID NO: 774736 - DNA, 19 bp, Mus musculus
  siRNA target sequence for 8030451K01Rik (NM_172501.1,197-215).
ctggtttcaaggacatttt

SEQ ID NO: 774737 - DNA, 19 bp, Mus musculus
  siRNA target sequence for 8030451K01Rik (NM_172501.1,324-342).
ccctcaacgggttagttta

SEQ ID NO: 774738 - DNA, 19 bp, Mus musculus
  siRNA target sequence for 8030451K01Rik (NM_172501.1,328-346).
caacgggttagtttacgta

SEQ ID NO: 774739 - DNA, 19 bp, Mus musculus
  siRNA target sequence for 8030451K01Rik (NM_172501.1,347-365).
gcccaaagaggggataaca

SEQ ID NO: 774740 - DNA, 19 bp, Mus musculus
  siRNA target sequence for 8030451K01Rik (NM_172501.1,348-366).
cccaaagaggggataacat

SEQ ID NO: 774741 - DNA, 19 bp, Mus musculus
  siRNA target sequence for 8030451K01Rik (NM_172501.1,403-421).
cctacgagcctggaattat

SEQ ID NO: 774742 - DNA, 19 bp, Mus musculus
  siRNA target sequence for 8030451K01Rik (NM_172501.1,404-422).
ctacgagcctggaattata

SEQ ID NO: 774743 - DNA, 19 bp, Mus musculus
  siRNA target sequence for 8030451K01Rik (NM_172501.1,432-450).
caccccatggtatgtttgt

SEQ ID NO: 774744 - DNA, 19 bp, Mus musculus
  siRNA target sequence for 8030451K01Rik (NM_172501.1,434-452).
ccccatggtatgtttgtct

SEQ ID NO: 774745 - DNA, 19 bp, Mus musculus
  siRNA target sequence for 8030451K01Rik (NM_172501.1,453-471).
ccggcacaccatttgaaca

SEQ ID NO: 774746 - DNA, 19 bp, Mus musculus
  siRNA target sequence for 8030451K01Rik (NM_172501.1,505-523).
ctacggccatactgttaaa

SEQ ID NO: 774747 - DNA, 19 bp, Mus musculus
  siRNA target sequence for 8030451K01Rik (NM_172501.1,508-526).
cggccatactgttaaaaaa

SEQ ID NO: 774748 - DNA, 19 bp, Mus musculus
  siRNA target sequence for 8030451K01Rik (NM_172501.1,610-628).
ccctgcagaattatatgta

SEQ ID NO: 774749 - DNA, 19 bp, Mus musculus
  siRNA target sequence for 8030451K01Rik (NM_172501.1,659-677).
ggagatgggggactgaata

SEQ ID NO: 774750 - DNA, 19 bp, Mus musculus
  siRNA target sequence for 8030451K01Rik (NM_172501.1,662-680).
gatgggggactgaataaca

SEQ ID NO: 774751 - DNA, 19 bp, Mus musculus
  siRNA target sequence for 8030451K01Rik (NM_172501.1,692-710).
ctatcccaagatttcatga

SEQ ID NO: 774752 - DNA, 19 bp, Mus musculus
  siRNA target sequence for 8030451K01Rik (NM_172501.1,715-733).
ctggctgcgtggagagaat

SEQ ID NO: 774753 - DNA, 19 bp, Mus musculus
  siRNA target sequence for 8030451K01Rik (NM_172501.1,799-817).
ggttgcggaccgaggaaat

SEQ ID NO: 774754 - DNA, 19 bp, Mus musculus
  siRNA target sequence for 8030451K01Rik (NM_172501.1,800-818).
gttgcggaccgaggaaata

SEQ ID NO: 774755 - DNA, 19 bp, Mus musculus
  siRNA target sequence for 8030451K01Rik (NM_172501.1,820-838).
gaggctccaagtatttgat

SEQ ID NO: 774756 - DNA, 19 bp, Mus musculus
  siRNA target sequence for 8030451K01Rik (NM_172501.1,863-881).
gcatgggacaactgtttca

SEQ ID NO: 774757 - DNA, 19 bp, Mus musculus
  siRNA target sequence for 8030451K01Rik (NM_172501.1,1069-1087).
gactggcgcagtgtatgta

SEQ ID NO: 774758 - DNA, 19 bp, Mus musculus
  siRNA target sequence for 6720484B16 (NM_172502.1,211-229).
gcgtgtccctcaagaacat

SEQ ID NO: 774759 - DNA, 19 bp, Mus musculus
  siRNA target sequence for 6720484B16 (NM_172502.1,227-245).
catcgtagatgaggatttt

SEQ ID NO: 774760 - DNA, 19 bp, Mus musculus
  siRNA target sequence for 6720484B16 (NM_172502.1,246-264).
ctctatgcaggccatatct

SEQ ID NO: 774761 - DNA, 19 bp, Mus musculus
  siRNA target sequence for 6720484B16 (NM_172502.1,324-342).
gacgacttctccttctaca

SEQ ID NO: 774762 - DNA, 19 bp, Mus musculus
  siRNA target sequence for 6720484B16 (NM_172502.1,327-345).
gacttctccttctacatat

SEQ ID NO: 774763 - DNA, 19 bp, Mus musculus
  siRNA target sequence for 6720484B16 (NM_172502.1,555-573).
catcgtgacatctacatca

SEQ ID NO: 774764 - DNA, 19 bp, Mus musculus
  siRNA target sequence for 6720484B16 (NM_172502.1,1195-1213).
ccaagttgcactatgtgtt

SEQ ID NO: 774765 - DNA, 19 bp, Mus musculus
  siRNA target sequence for 6720484B16 (NM_172502.1,1373-1391).
cttcgagtatgtcatcaat

SEQ ID NO: 774766 - DNA, 19 bp, Mus musculus
  siRNA target sequence for 6720484B16 (NM_172502.1,1441-1459).
gtgactatgacatagtcat

SEQ ID NO: 774767 - DNA, 19 bp, Mus musculus
  siRNA target sequence for 6720484B16 (NM_172502.1,1617-1635).
gtcagcgtgggtgatctaa

SEQ ID NO: 774768 - DNA, 19 bp, Mus musculus
  siRNA target sequence for 6720484B16 (NM_172502.1,1619-1637).
cagcgtgggtgatctaact

SEQ ID NO: 774769 - DNA, 19 bp, Mus musculus
  siRNA target sequence for 6720484B16 (NM_172502.1,1621-1639).
gcgtgggtgatctaactga

SEQ ID NO: 774770 - DNA, 19 bp, Mus musculus
  siRNA target sequence for 6720484B16 (NM_172502.1,1797-1815).
gacagtgagcggtacactt

SEQ ID NO: 774771 - DNA, 19 bp, Mus musculus
  siRNA target sequence for E130119J17Rik (NM_172503.1,269-287).
gagatctgtatgtactcat

SEQ ID NO: 774772 - DNA, 19 bp, Mus musculus
  siRNA target sequence for E130119J17Rik (NM_172503.1,933-951).
gggcacgcatgctaatcct

SEQ ID NO: 774773 - DNA, 19 bp, Mus musculus
  siRNA target sequence for E130119J17Rik (NM_172503.1,1440-1458).
gtgcacgggtggatacttt

SEQ ID NO: 774774 - DNA, 19 bp, Mus musculus
  siRNA target sequence for E130119J17Rik (NM_172503.1,1491-1509).
ggctggcgtgtgccataat

SEQ ID NO: 774775 - DNA, 19 bp, Mus musculus
  siRNA target sequence for E130119J17Rik (NM_172503.1,1493-1511).
ctggcgtgtgccataatca

SEQ ID NO: 774776 - DNA, 19 bp, Mus musculus
  siRNA target sequence for E130119J17Rik (NM_172503.1,1496-1514).
gcgtgtgccataatcaaca

SEQ ID NO: 774777 - DNA, 19 bp, Mus musculus
  siRNA target sequence for E130119J17Rik (NM_172503.1,1828-1846).
cctgccggagggactgtat

SEQ ID NO: 774778 - DNA, 19 bp, Mus musculus
  siRNA target sequence for E130119J17Rik (NM_172503.1,1975-1993).
cggctttggagaagtgatt

SEQ ID NO: 774779 - DNA, 19 bp, Mus musculus
  siRNA target sequence for E130119J17Rik (NM_172503.1,2019-2037).
cctgtgcccgatacttgtt

SEQ ID NO: 774780 - DNA, 19 bp, Mus musculus
  siRNA target sequence for E130119J17Rik (NM_172503.1,2150-2168).
ctggactccatcatgagta

SEQ ID NO: 774781 - DNA, 19 bp, Mus musculus
  siRNA target sequence for E130119J17Rik (NM_172503.1,2244-2262).
ctgccaaaggagataccaa

SEQ ID NO: 774782 - DNA, 19 bp, Mus musculus
  siRNA target sequence for E130119J17Rik (NM_172503.1,2281-2299).
gggctccgtccagcaaaat

SEQ ID NO: 774783 - DNA, 19 bp, Mus musculus
  siRNA target sequence for E130119J17Rik (NM_172503.1,2282-2300).
ggctccgtccagcaaaata

SEQ ID NO: 774784 - DNA, 19 bp, Mus musculus
  siRNA target sequence for E130119J17Rik (NM_172503.1,2283-2301).
gctccgtccagcaaaatat

SEQ ID NO: 774785 - DNA, 19 bp, Mus musculus
  siRNA target sequence for E130119J17Rik (NM_172503.1,2286-2304).
ccgtccagcaaaatatcca

SEQ ID NO: 774786 - DNA, 19 bp, Mus musculus
  siRNA target sequence for E130119J17Rik (NM_172503.1,2508-2526).
cgctgatgagcatcatgaa

SEQ ID NO: 774787 - DNA, 19 bp, Mus musculus
  siRNA target sequence for E130119J17Rik (NM_172503.1,2603-2621).
ctgcgactgcagctagata

SEQ ID NO: 774788 - DNA, 19 bp, Mus musculus
  siRNA target sequence for E130119J17Rik (NM_172503.1,2808-2826).
cggttgcacggtatatgga

SEQ ID NO: 774789 - DNA, 19 bp, Mus musculus
  siRNA target sequence for E130119J17Rik (NM_172503.1,3142-3160).
cgcagtagccgcgtacata

SEQ ID NO: 774790 - DNA, 19 bp, Mus musculus
  siRNA target sequence for E130119J17Rik (NM_172503.1,3143-3161).
gcagtagccgcgtacataa

SEQ ID NO: 774791 - DNA, 19 bp, Mus musculus
  siRNA target sequence for E130119J17Rik (NM_172503.1,3146-3164).
gtagccgcgtacataacca

SEQ ID NO: 774792 - DNA, 19 bp, Mus musculus
  siRNA target sequence for E130119J17Rik (NM_172503.1,3271-3289).
ccagttcgcacagttctta

SEQ ID NO: 774793 - DNA, 19 bp, Mus musculus
  siRNA target sequence for E130119J17Rik (NM_172503.1,3274-3292).
gttcgcacagttcttagaa

SEQ ID NO: 774794 - DNA, 19 bp, Mus musculus
  siRNA target sequence for A730008H23 (NM_172505.1,1820-1838).
ccaggccaaatctcacaat

SEQ ID NO: 774795 - DNA, 19 bp, Mus musculus
  siRNA target sequence for A730008H23 (NM_172505.1,1821-1839).
caggccaaatctcacaata

SEQ ID NO: 774796 - DNA, 19 bp, Mus musculus
  siRNA target sequence for A730008H23 (NM_172505.1,1824-1842).
gccaaatctcacaatacct

SEQ ID NO: 774797 - DNA, 19 bp, Mus musculus
  siRNA target sequence for Boc (NM_172506.1,543-561).
gaagagagcggcctatact

SEQ ID NO: 774798 - DNA, 19 bp, Mus musculus
  siRNA target sequence for Boc (NM_172506.1,597-615).
gccttgctgatttgaatga

SEQ ID NO: 774799 - DNA, 19 bp, Mus musculus
  siRNA target sequence for Boc (NM_172506.1,724-742).
caacggaaaggagctaaat

SEQ ID NO: 774800 - DNA, 19 bp, Mus musculus
  siRNA target sequence for Boc (NM_172506.1,895-913).
ccaggactttaaattagat

SEQ ID NO: 774801 - DNA, 19 bp, Mus musculus
  siRNA target sequence for Boc (NM_172506.1,994-1012).
ggtccggtacagtgtcaaa

SEQ ID NO: 774802 - DNA, 19 bp, Mus musculus
  siRNA target sequence for Boc (NM_172506.1,1035-1053).
gagacaactacctgatcat

SEQ ID NO: 774803 - DNA, 19 bp, Mus musculus
  siRNA target sequence for Boc (NM_172506.1,1056-1074).
catccgggaatctccaaat

SEQ ID NO: 774804 - DNA, 19 bp, Mus musculus
  siRNA target sequence for Boc (NM_172506.1,1059-1077).
ccgggaatctccaaattgt

SEQ ID NO: 774805 - DNA, 19 bp, Mus musculus
  siRNA target sequence for Boc (NM_172506.1,1061-1079).
gggaatctccaaattgtca

SEQ ID NO: 774806 - DNA, 19 bp, Mus musculus
  siRNA target sequence for Boc (NM_172506.1,1223-1241).
gcccagaccgtcattgtca

SEQ ID NO: 774807 - DNA, 19 bp, Mus musculus
  siRNA target sequence for Boc (NM_172506.1,1344-1362).
ctcgcttcctgctgagtaa

SEQ ID NO: 774808 - DNA, 19 bp, Mus musculus
  siRNA target sequence for Boc (NM_172506.1,1346-1364).
cgcttcctgctgagtaatt

SEQ ID NO: 774809 - DNA, 19 bp, Mus musculus
  siRNA target sequence for Boc (NM_172506.1,1562-1580).
cccccaccctctgtactat

SEQ ID NO: 774810 - DNA, 19 bp, Mus musculus
  siRNA target sequence for Boc (NM_172506.1,1761-1779).
gacccgggagggataccaa

SEQ ID NO: 774811 - DNA, 19 bp, Mus musculus
  siRNA target sequence for Boc (NM_172506.1,2019-2037).
ggacacccatcctgtacta

SEQ ID NO: 774812 - DNA, 19 bp, Mus musculus
  siRNA target sequence for Boc (NM_172506.1,2156-2174).
gagatggcagcctacaact

SEQ ID NO: 774813 - DNA, 19 bp, Mus musculus
  siRNA target sequence for Boc (NM_172506.1,2369-2387).
gagacctccgtgtacgtaa

SEQ ID NO: 774814 - DNA, 19 bp, Mus musculus
  siRNA target sequence for Boc (NM_172506.1,2427-2445).
ctttccgtgtagagtacaa

SEQ ID NO: 774815 - DNA, 19 bp, Mus musculus
  siRNA target sequence for Boc (NM_172506.1,2435-2453).
gtagagtacaagaagctaa

SEQ ID NO: 774816 - DNA, 19 bp, Mus musculus
  siRNA target sequence for Boc (NM_172506.1,2438-2456).
gagtacaagaagctaaaaa

SEQ ID NO: 774817 - DNA, 19 bp, Mus musculus
  siRNA target sequence for Boc (NM_172506.1,2520-2538).
caggcctagagaaaggtat

SEQ ID NO: 774818 - DNA, 19 bp, Mus musculus
  siRNA target sequence for Boc (NM_172506.1,2552-2570).
cgagttcgtgctttgaaca

SEQ ID NO: 774819 - DNA, 19 bp, Mus musculus
  siRNA target sequence for Boc (NM_172506.1,2553-2571).
gagttcgtgctttgaacat

SEQ ID NO: 774820 - DNA, 19 bp, Mus musculus
  siRNA target sequence for Boc (NM_172506.1,2555-2573).
gttcgtgctttgaacatgt

SEQ ID NO: 774821 - DNA, 19 bp, Mus musculus
  siRNA target sequence for Boc (NM_172506.1,2623-2641).
ctacagtggccgtgtatat

SEQ ID NO: 774822 - DNA, 19 bp, Mus musculus
  siRNA target sequence for Boc (NM_172506.1,2649-2667).
ccgtggcaggaccttacat

SEQ ID NO: 774823 - DNA, 19 bp, Mus musculus
  siRNA target sequence for Boc (NM_172506.1,2651-2669).
gtggcaggaccttacatca

SEQ ID NO: 774824 - DNA, 19 bp, Mus musculus
  siRNA target sequence for Boc (NM_172506.1,2684-2702).
gtcaatgagaccactatta

SEQ ID NO: 774825 - DNA, 19 bp, Mus musculus
  siRNA target sequence for Boc (NM_172506.1,2938-2956).
gaccaaagctcggaaattt

SEQ ID NO: 774826 - DNA, 19 bp, Mus musculus
  siRNA target sequence for Boc (NM_172506.1,3066-3084).
gcgacctgccctatctgat

SEQ ID NO: 774827 - DNA, 19 bp, Mus musculus
  siRNA target sequence for Boc (NM_172506.1,3067-3085).
cgacctgccctatctgatt

SEQ ID NO: 774828 - DNA, 19 bp, Mus musculus
  siRNA target sequence for Boc (NM_172506.1,3102-3120).
gctctatagtcctcatcat

SEQ ID NO: 774829 - DNA, 19 bp, Mus musculus
  siRNA target sequence for Boc (NM_172506.1,3213-3231).
cttcgtgccagtacacaat

SEQ ID NO: 774830 - DNA, 19 bp, Mus musculus
  siRNA target sequence for Boc (NM_172506.1,3432-3450).
ggcagcccattgttagcaa

SEQ ID NO: 774831 - DNA, 19 bp, Mus musculus
  siRNA target sequence for Boc (NM_172506.1,3503-3521).
ggagtaggagctttcttat

SEQ ID NO: 774832 - DNA, 19 bp, Mus musculus
  siRNA target sequence for Boc (NM_172506.1,3504-3522).
gagtaggagctttcttata

SEQ ID NO: 774833 - DNA, 19 bp, Mus musculus
  siRNA target sequence for Boc (NM_172506.1,3506-3524).
gtaggagctttcttataca

SEQ ID NO: 774834 - DNA, 19 bp, Mus musculus
  siRNA target sequence for Boc (NM_172506.1,3614-3632).
gtgaggcgaacgtctgaaa

SEQ ID NO: 774835 - DNA, 19 bp, Mus musculus
  siRNA target sequence for Boc (NM_172506.1,3616-3634).
gaggcgaacgtctgaaagt

SEQ ID NO: 774836 - DNA, 19 bp, Mus musculus
  siRNA target sequence for Boc (NM_172506.1,3655-3673).
ggaccctccatatcattca

SEQ ID NO: 774837 - DNA, 19 bp, Mus musculus
  siRNA target sequence for Boc (NM_172506.1,3682-3700).
gtgctgtttaggtcttgta

SEQ ID NO: 774838 - DNA, 19 bp, Mus musculus
  siRNA target sequence for Boc (NM_172506.1,3813-3831).
ctagcccatcagttcatgt

SEQ ID NO: 774839 - DNA, 19 bp, Mus musculus
  siRNA target sequence for B130024B19Rik (NM_172508.2,618-636).
catgattcccttcactaat

SEQ ID NO: 774840 - DNA, 19 bp, Mus musculus
  siRNA target sequence for B130024B19Rik (NM_172508.2,652-670).
cacccaatgttgtacttct

SEQ ID NO: 774841 - DNA, 19 bp, Mus musculus
  siRNA target sequence for B130024B19Rik (NM_172508.2,663-681).
gtacttctccaggaaagat

SEQ ID NO: 774842 - DNA, 19 bp, Mus musculus
  siRNA target sequence for B130024B19Rik (NM_172508.2,745-763).
gctgtgcataccatgttga

SEQ ID NO: 774843 - DNA, 19 bp, Mus musculus
  siRNA target sequence for B130024B19Rik (NM_172508.2,748-766).
gtgcataccatgttgacta

SEQ ID NO: 774844 - DNA, 19 bp, Mus musculus
  siRNA target sequence for B130024B19Rik (NM_172508.2,995-1013).
gtttcgccactgcatatga

SEQ ID NO: 774845 - DNA, 19 bp, Mus musculus
  siRNA target sequence for B130024B19Rik (NM_172508.2,1006-1024).
gcatatgacttcttataca

SEQ ID NO: 774846 - DNA, 19 bp, Mus musculus
  siRNA target sequence for B130024B19Rik (NM_172508.2,1070-1088).
ccaatgcctcgggctatat

SEQ ID NO: 774847 - DNA, 19 bp, Mus musculus
  siRNA target sequence for B130024B19Rik (NM_172508.2,1076-1094).
cctcgggctatatgtatga

SEQ ID NO: 774848 - DNA, 19 bp, Mus musculus
  siRNA target sequence for B130024B19Rik (NM_172508.2,1077-1095).
ctcgggctatatgtatgaa

SEQ ID NO: 774849 - DNA, 19 bp, Mus musculus
  siRNA target sequence for B130024B19Rik (NM_172508.2,1081-1099).
ggctatatgtatgaaactt

SEQ ID NO: 774850 - DNA, 19 bp, Mus musculus
  siRNA target sequence for B130024B19Rik (NM_172508.2,1089-1107).
gtatgaaacttcctataga

SEQ ID NO: 774851 - DNA, 19 bp, Mus musculus
  siRNA target sequence for B130024B19Rik (NM_172508.2,1112-1130).
gatgggggttccagtactt

SEQ ID NO: 774852 - DNA, 19 bp, Mus musculus
  siRNA target sequence for B130024B19Rik (NM_172508.2,1169-1187).
ctggaagtctcattctgat

SEQ ID NO: 774853 - DNA, 19 bp, Mus musculus
  siRNA target sequence for B130024B19Rik (NM_172508.2,1201-1219).
cttcaggaggcctatttat

SEQ ID NO: 774854 - DNA, 19 bp, Mus musculus
  siRNA target sequence for B130024B19Rik (NM_172508.2,1223-1241).
ccaagcaagttctaagcat

SEQ ID NO: 774855 - DNA, 19 bp, Mus musculus
  siRNA target sequence for B130024B19Rik (NM_172508.2,1300-1318).
gttgcatacggcagctata

SEQ ID NO: 774856 - DNA, 19 bp, Mus musculus
  siRNA target sequence for B130024B19Rik (NM_172508.2,1303-1321).
gcatacggcagctatacca

SEQ ID NO: 774857 - DNA, 19 bp, Mus musculus
  siRNA target sequence for B130024B19Rik (NM_172508.2,1325-1343).
gatccctgttccagtacat

SEQ ID NO: 774858 - DNA, 19 bp, Mus musculus
  siRNA target sequence for B130024B19Rik (NM_172508.2,1335-1353).
ccagtacatgtttcttgtt

SEQ ID NO: 774859 - DNA, 19 bp, Mus musculus
  siRNA target sequence for B130024B19Rik (NM_172508.2,1382-1400).
gccatccatggcttaagca

SEQ ID NO: 774860 - DNA, 19 bp, Mus musculus
  siRNA target sequence for B130024B19Rik (NM_172508.2,1383-1401).
ccatccatggcttaagcaa

SEQ ID NO: 774861 - DNA, 19 bp, Mus musculus
  siRNA target sequence for B130024B19Rik (NM_172508.2,1388-1406).
catggcttaagcaacactt

SEQ ID NO: 774862 - DNA, 19 bp, Mus musculus
  siRNA target sequence for B130024B19Rik (NM_172508.2,1489-1507).
ccagaaagtcaattagtgt

SEQ ID NO: 774863 - DNA, 19 bp, Mus musculus
  siRNA target sequence for B130024B19Rik (NM_172508.2,1548-1566).
gctggctgaccaaatcaga

SEQ ID NO: 774864 - DNA, 19 bp, Mus musculus
  siRNA target sequence for B130024B19Rik (NM_172508.2,1549-1567).
ctggctgaccaaatcagaa

SEQ ID NO: 774865 - DNA, 19 bp, Mus musculus
  siRNA target sequence for B130024B19Rik (NM_172508.2,1620-1638).
cacgctacacaccgaattt

SEQ ID NO: 774866 - DNA, 19 bp, Mus musculus
  siRNA target sequence for B130024B19Rik (NM_172508.2,1632-1650).
cgaatttctctggtatgat

SEQ ID NO: 774867 - DNA, 19 bp, Mus musculus
  siRNA target sequence for B130024B19Rik (NM_172508.2,1644-1662).
gtatgatgccagcttgaaa

SEQ ID NO: 774868 - DNA, 19 bp, Mus musculus
  siRNA target sequence for B130024B19Rik (NM_172508.2,1684-1702).
ggtaccccaacattgcatt

SEQ ID NO: 774869 - DNA, 19 bp, Mus musculus
  siRNA target sequence for B130024B19Rik (NM_172508.2,1685-1703).
gtaccccaacattgcatta

SEQ ID NO: 774870 - DNA, 19 bp, Mus musculus
  siRNA target sequence for B130024B19Rik (NM_172508.2,1688-1706).
ccccaacattgcattattt

SEQ ID NO: 774871 - DNA, 19 bp, Mus musculus
  siRNA target sequence for B130024B19Rik (NM_172508.2,1689-1707).
cccaacattgcattatttt

SEQ ID NO: 774872 - DNA, 19 bp, Mus musculus
  siRNA target sequence for B130024B19Rik (NM_172508.2,1691-1709).
caacattgcattattttga

SEQ ID NO: 774873 - DNA, 19 bp, Mus musculus
  siRNA target sequence for B130024B19Rik (NM_172508.2,1717-1735).
ggtgttgtgacttatggaa

SEQ ID NO: 774874 - DNA, 19 bp, Mus musculus
  siRNA target sequence for B130024B19Rik (NM_172508.2,1736-1754).
gtgcactacctgcagaaat

SEQ ID NO: 774875 - DNA, 19 bp, Mus musculus
  siRNA target sequence for B130024B19Rik (NM_172508.2,1789-1807).
cttggagggcgtgcaatat

SEQ ID NO: 774876 - DNA, 19 bp, Mus musculus
  siRNA target sequence for B130024B19Rik (NM_172508.2,1793-1811).
gagggcgtgcaatatatga

SEQ ID NO: 774877 - DNA, 19 bp, Mus musculus
  siRNA target sequence for B130024B19Rik (NM_172508.2,1795-1813).
gggcgtgcaatatatgaca

SEQ ID NO: 774878 - DNA, 19 bp, Mus musculus
  siRNA target sequence for B130024B19Rik (NM_172508.2,1796-1814).
ggcgtgcaatatatgacat

SEQ ID NO: 774879 - DNA, 19 bp, Mus musculus
  siRNA target sequence for B130024B19Rik (NM_172508.2,1797-1815).
gcgtgcaatatatgacatt

SEQ ID NO: 774880 - DNA, 19 bp, Mus musculus
  siRNA target sequence for B130024B19Rik (NM_172508.2,1842-1860).
gatcaaagggtggagaaat

SEQ ID NO: 774881 - DNA, 19 bp, Mus musculus
  siRNA target sequence for B130024B19Rik (NM_172508.2,1882-1900).
cctgaccaaaactctttca

SEQ ID NO: 774882 - DNA, 19 bp, Mus musculus
  siRNA target sequence for B130024B19Rik (NM_172508.2,1911-1929).
caatggtgtgccgttcatt

SEQ ID NO: 774883 - DNA, 19 bp, Mus musculus
  siRNA target sequence for B130024B19Rik (NM_172508.2,1916-1934).
gtgtgccgttcattactga

SEQ ID NO: 774884 - DNA, 19 bp, Mus musculus
  siRNA target sequence for B130024B19Rik (NM_172508.2,1937-1955).
ccctgtatgggccaaagta

SEQ ID NO: 774885 - DNA, 19 bp, Mus musculus
  siRNA target sequence for B130024B19Rik (NM_172508.2,1947-1965).
gccaaagtacacctacttt

SEQ ID NO: 774886 - DNA, 19 bp, Mus musculus
  siRNA target sequence for B130024B19Rik (NM_172508.2,1948-1966).
ccaaagtacacctacttta

SEQ ID NO: 774887 - DNA, 19 bp, Mus musculus
  siRNA target sequence for B130024B19Rik (NM_172508.2,1987-2005).
ccagctgtgtctaagagtt

SEQ ID NO: 774888 - DNA, 19 bp, Mus musculus
  siRNA target sequence for B130024B19Rik (NM_172508.2,1995-2013).
gtctaagagttgcttttct

SEQ ID NO: 774889 - DNA, 19 bp, Mus musculus
  siRNA target sequence for B130024B19Rik (NM_172508.2,2048-2066).
caaaatggtcaaagtataa

SEQ ID NO: 774890 - DNA, 19 bp, Mus musculus
  siRNA target sequence for B130024B19Rik (NM_172508.2,2143-2161).
gaaggcgtaggagcatata

SEQ ID NO: 774891 - DNA, 19 bp, Mus musculus
  siRNA target sequence for B130024B19Rik (NM_172508.2,2182-2200).
cacattcaacggaatctca

SEQ ID NO: 774892 - DNA, 19 bp, Mus musculus
  siRNA target sequence for B130024B19Rik (NM_172508.2,2349-2367).
gcagcgagacggtctctat

SEQ ID NO: 774893 - DNA, 19 bp, Mus musculus
  siRNA target sequence for B130024B19Rik (NM_172508.2,2350-2368).
cagcgagacggtctctata

SEQ ID NO: 774894 - DNA, 19 bp, Mus musculus
  siRNA target sequence for B130024B19Rik (NM_172508.2,2354-2372).
gagacggtctctataaaat

SEQ ID NO: 774895 - DNA, 19 bp, Mus musculus
  siRNA target sequence for B130024B19Rik (NM_172508.2,2356-2374).
gacggtctctataaaatgt

SEQ ID NO: 774896 - DNA, 19 bp, Mus musculus
  siRNA target sequence for B130024B19Rik (NM_172508.2,2359-2377).
ggtctctataaaatgtact

SEQ ID NO: 774897 - DNA, 19 bp, Mus musculus
  siRNA target sequence for B130024B19Rik (NM_172508.2,2382-2400).
ggatgataccggttatagt

SEQ ID NO: 774898 - DNA, 19 bp, Mus musculus
  siRNA target sequence for B130024B19Rik (NM_172508.2,2386-2404).
gataccggttatagtgaaa

SEQ ID NO: 774899 - DNA, 19 bp, Mus musculus
  siRNA target sequence for B130024B19Rik (NM_172508.2,2412-2430).
ctttgcctcagtgatgtat

SEQ ID NO: 774900 - DNA, 19 bp, Mus musculus
  siRNA target sequence for B130024B19Rik (NM_172508.2,2443-2461).
ccctacaacgggacaaatt

SEQ ID NO: 774901 - DNA, 19 bp, Mus musculus
  siRNA target sequence for B130024B19Rik (NM_172508.2,2444-2462).
cctacaacgggacaaatta

SEQ ID NO: 774902 - DNA, 19 bp, Mus musculus
  siRNA target sequence for B130024B19Rik (NM_172508.2,2445-2463).
ctacaacgggacaaattat

SEQ ID NO: 774903 - DNA, 19 bp, Mus musculus
  siRNA target sequence for B130024B19Rik (NM_172508.2,2502-2520).
ggcagcttacctcttcata

SEQ ID NO: 774904 - DNA, 19 bp, Mus musculus
  siRNA target sequence for B130024B19Rik (NM_172508.2,2572-2590).
ctggatgtgttcatagcta

SEQ ID NO: 774905 - DNA, 19 bp, Mus musculus
  siRNA target sequence for B130024B19Rik (NM_172508.2,2715-2733).
cgctgtccctgaagtgaaa

SEQ ID NO: 774906 - DNA, 19 bp, Mus musculus
  siRNA target sequence for B130024B19Rik (NM_172508.2,2744-2762).
ctatcgtggagcagaatct

SEQ ID NO: 774907 - DNA, 19 bp, Mus musculus
  siRNA target sequence for B130024B19Rik (NM_172508.2,2791-2809).
cttgagaagcagatcctat

SEQ ID NO: 774908 - DNA, 19 bp, Mus musculus
  siRNA target sequence for B130024B19Rik (NM_172508.2,2817-2835).
ccagaacacagctagcttt

SEQ ID NO: 774909 - DNA, 19 bp, Mus musculus
  siRNA target sequence for B130024B19Rik (NM_172508.2,2818-2836).
cagaacacagctagcttta

SEQ ID NO: 774910 - DNA, 19 bp, Mus musculus
  siRNA target sequence for B130024B19Rik (NM_172508.2,2820-2838).
gaacacagctagctttaga

SEQ ID NO: 774911 - DNA, 19 bp, Mus musculus
  siRNA target sequence for B130024B19Rik (NM_172508.2,2848-2866).
gagcgcctactgaggtttt

SEQ ID NO: 774912 - DNA, 19 bp, Mus musculus
  siRNA target sequence for B130024B19Rik (NM_172508.2,2850-2868).
gcgcctactgaggttttca

SEQ ID NO: 774913 - DNA, 19 bp, Mus musculus
  siRNA target sequence for B130024B19Rik (NM_172508.2,2896-2914).
gacagaatttttgctatat

SEQ ID NO: 774914 - DNA, 19 bp, Mus musculus
  siRNA target sequence for B130024B19Rik (NM_172508.2,2955-2973).
ccgaaaggcgggtaagcat

SEQ ID NO: 774915 - DNA, 19 bp, Mus musculus
  siRNA target sequence for B130024B19Rik (NM_172508.2,2956-2974).
cgaaaggcgggtaagcatt

SEQ ID NO: 774916 - DNA, 19 bp, Mus musculus
  siRNA target sequence for B130024B19Rik (NM_172508.2,2957-2975).
gaaaggcgggtaagcatta

SEQ ID NO: 774917 - DNA, 19 bp, Mus musculus
  siRNA target sequence for B130024B19Rik (NM_172508.2,2962-2980).
gcgggtaagcattacaagt

SEQ ID NO: 774918 - DNA, 19 bp, Mus musculus
  siRNA target sequence for B130024B19Rik (NM_172508.2,2985-3003).
ggatgcggttcctgatatt

SEQ ID NO: 774919 - DNA, 19 bp, Mus musculus
  siRNA target sequence for B130024B19Rik (NM_172508.2,2986-3004).
gatgcggttcctgatattt

SEQ ID NO: 774920 - DNA, 19 bp, Mus musculus
  siRNA target sequence for B130024B19Rik (NM_172508.2,3006-3024).
cgcacagattgaagttaat

SEQ ID NO: 774921 - DNA, 19 bp, Mus musculus
  siRNA target sequence for B130024B19Rik (NM_172508.2,3234-3252).
cttcttgatcctcaacatt

SEQ ID NO: 774922 - DNA, 19 bp, Mus musculus
  siRNA target sequence for B130024B19Rik (NM_172508.2,3273-3291).
ggcaatgcaactgacttat

SEQ ID NO: 774923 - DNA, 19 bp, Mus musculus
  siRNA target sequence for B130024B19Rik (NM_172508.2,3274-3292).
gcaatgcaactgacttatt

SEQ ID NO: 774924 - DNA, 19 bp, Mus musculus
  siRNA target sequence for B130024B19Rik (NM_172508.2,3334-3352).
gcggtcctcctaatagata

SEQ ID NO: 774925 - DNA, 19 bp, Mus musculus
  siRNA target sequence for A930031D07Rik (NM_172510.1,315-333).
catctccctggtttttgct

SEQ ID NO: 774926 - DNA, 19 bp, Mus musculus
  siRNA target sequence for A930031D07Rik (NM_172510.1,347-365).
gccatgacgtgaaggtatt

SEQ ID NO: 774927 - DNA, 19 bp, Mus musculus
  siRNA target sequence for A930031D07Rik (NM_172510.1,543-561).
caactgctttcctgctaat

SEQ ID NO: 774928 - DNA, 19 bp, Mus musculus
  siRNA target sequence for A930031D07Rik (NM_172510.1,626-644).
cccagccttggataaacca

SEQ ID NO: 774929 - DNA, 19 bp, Mus musculus
  siRNA target sequence for A930031D07Rik (NM_172510.1,677-695).
ccgagaaccacgtatccta

SEQ ID NO: 774930 - DNA, 19 bp, Mus musculus
  siRNA target sequence for A930031D07Rik (NM_172510.1,678-696).
cgagaaccacgtatcctat

SEQ ID NO: 774931 - DNA, 19 bp, Mus musculus
  siRNA target sequence for A930031D07Rik (NM_172510.1,951-969).
ggcccagggcagttacagt

SEQ ID NO: 774932 - DNA, 19 bp, Mus musculus
  siRNA target sequence for A930031D07Rik (NM_172510.1,952-970).
gcccagggcagttacagtt

SEQ ID NO: 774933 - DNA, 19 bp, Mus musculus
  siRNA target sequence for A930031D07Rik (NM_172510.1,1061-1079).
cagttcttacccaagacaa

SEQ ID NO: 774934 - DNA, 19 bp, Mus musculus
  siRNA target sequence for Gabpb2 (NM_172512.1,344-362).
cagcccagtatggtcatta

SEQ ID NO: 774935 - DNA, 19 bp, Mus musculus
  siRNA target sequence for Gabpb2 (NM_172512.1,349-367).
cagtatggtcattattcca

SEQ ID NO: 774936 - DNA, 19 bp, Mus musculus
  siRNA target sequence for Gabpb2 (NM_172512.1,421-439).
gacaggacccctttgcata

SEQ ID NO: 774937 - DNA, 19 bp, Mus musculus
  siRNA target sequence for Gabpb2 (NM_172512.1,561-579).
ggatgtcgtcgagttactt

SEQ ID NO: 774938 - DNA, 19 bp, Mus musculus
  siRNA target sequence for Gabpb2 (NM_172512.1,562-580).
gatgtcgtcgagttactta

SEQ ID NO: 774939 - DNA, 19 bp, Mus musculus
  siRNA target sequence for Gabpb2 (NM_172512.1,565-583).
gtcgtcgagttacttatca

SEQ ID NO: 774940 - DNA, 19 bp, Mus musculus
  siRNA target sequence for Gabpb2 (NM_172512.1,567-585).
cgtcgagttacttatcaaa

SEQ ID NO: 774941 - DNA, 19 bp, Mus musculus
  siRNA target sequence for Gabpb2 (NM_172512.1,568-586).
gtcgagttacttatcaaat

SEQ ID NO: 774942 - DNA, 19 bp, Mus musculus
  siRNA target sequence for Gabpb2 (NM_172512.1,570-588).
cgagttacttatcaaatat

SEQ ID NO: 774943 - DNA, 19 bp, Mus musculus
  siRNA target sequence for Gabpb2 (NM_172512.1,592-610).
gctgatgtctacgctttta

SEQ ID NO: 774944 - DNA, 19 bp, Mus musculus
  siRNA target sequence for Gabpb2 (NM_172512.1,595-613).
gatgtctacgcttttagca

SEQ ID NO: 774945 - DNA, 19 bp, Mus musculus
  siRNA target sequence for Gabpb2 (NM_172512.1,598-616).
gtctacgcttttagcaaat

SEQ ID NO: 774946 - DNA, 19 bp, Mus musculus
  siRNA target sequence for Gabpb2 (NM_172512.1,691-709).
cagaatcaggtgaacacta

SEQ ID NO: 774947 - DNA, 19 bp, Mus musculus
  siRNA target sequence for Gabpb2 (NM_172512.1,748-766).
gtgactgctccgttcatct

SEQ ID NO: 774948 - DNA, 19 bp, Mus musculus
  siRNA target sequence for Gabpb2 (NM_172512.1,783-801).
cattaacctcgctagcttt

SEQ ID NO: 774949 - DNA, 19 bp, Mus musculus
  siRNA target sequence for Gabpb2 (NM_172512.1,828-846).
ctcagctcatttagaagaa

SEQ ID NO: 774950 - DNA, 19 bp, Mus musculus
  siRNA target sequence for Gabpb2 (NM_172512.1,932-950).
gagtccctctgggtaacat

SEQ ID NO: 774951 - DNA, 19 bp, Mus musculus
  siRNA target sequence for Gabpb2 (NM_172512.1,979-997).
ggccagccatttattgtaa

SEQ ID NO: 774952 - DNA, 19 bp, Mus musculus
  siRNA target sequence for Gabpb2 (NM_172512.1,981-999).
ccagccatttattgtaact

SEQ ID NO: 774953 - DNA, 19 bp, Mus musculus
  siRNA target sequence for Gabpb2 (NM_172512.1,982-1000).
cagccatttattgtaacta

SEQ ID NO: 774954 - DNA, 19 bp, Mus musculus
  siRNA target sequence for Gabpb2 (NM_172512.1,1042-1060).
gttgcagaggagacaataa

SEQ ID NO: 774955 - DNA, 19 bp, Mus musculus
  siRNA target sequence for Gabpb2 (NM_172512.1,1287-1305).
gcagaccaacggagttgaa

SEQ ID NO: 774956 - DNA, 19 bp, Mus musculus
  siRNA target sequence for Gabpb2 (NM_172512.1,1290-1308).
gaccaacggagttgaagtt

SEQ ID NO: 774957 - DNA, 19 bp, Mus musculus
  siRNA target sequence for Gabpb2 (NM_172512.1,1292-1310).
ccaacggagttgaagttga

SEQ ID NO: 774958 - DNA, 19 bp, Mus musculus
  siRNA target sequence for Gabpb2 (NM_172512.1,1293-1311).
caacggagttgaagttgat

SEQ ID NO: 774959 - DNA, 19 bp, Mus musculus
  siRNA target sequence for Gabpb2 (NM_172512.1,1371-1389).
ggtagaaagagcaacacaa

SEQ ID NO: 774960 - DNA, 19 bp, Mus musculus
  siRNA target sequence for Gabpb2 (NM_172512.1,1379-1397).
gagcaacacaagtcatgaa

SEQ ID NO: 774961 - DNA, 19 bp, Mus musculus
  siRNA target sequence for Gabpb2 (NM_172512.1,1381-1399).
gcaacacaagtcatgaagt

SEQ ID NO: 774962 - DNA, 19 bp, Mus musculus
  siRNA target sequence for Gabpb2 (NM_172512.1,1409-1427).
ccacggagcctcacactaa

SEQ ID NO: 774963 - DNA, 19 bp, Mus musculus
  siRNA target sequence for Gabpb2 (NM_172512.1,1413-1431).
ggagcctcacactaacgtt

SEQ ID NO: 774964 - DNA, 19 bp, Mus musculus
  siRNA target sequence for Gabpb2 (NM_172512.1,1418-1436).
ctcacactaacgtttccat

SEQ ID NO: 774965 - DNA, 19 bp, Mus musculus
  siRNA target sequence for Gabpb2 (NM_172512.1,1422-1440).
cactaacgtttccatagaa

SEQ ID NO: 774966 - DNA, 19 bp, Mus musculus
  siRNA target sequence for BC049806 (NM_172513.1,240-258).
cactcagattaccagttat

SEQ ID NO: 774967 - DNA, 19 bp, Mus musculus
  siRNA target sequence for BC049806 (NM_172513.1,263-281).
caaccttgcaccggaaaaa

SEQ ID NO: 774968 - DNA, 19 bp, Mus musculus
  siRNA target sequence for BC049806 (NM_172513.1,285-303).
ccttgtaccagctctctat

SEQ ID NO: 774969 - DNA, 19 bp, Mus musculus
  siRNA target sequence for BC049806 (NM_172513.1,286-304).
cttgtaccagctctctata

SEQ ID NO: 774970 - DNA, 19 bp, Mus musculus
  siRNA target sequence for BC049806 (NM_172513.1,307-325).
gttattcaggattcaaaca

SEQ ID NO: 774971 - DNA, 19 bp, Mus musculus
  siRNA target sequence for BC049806 (NM_172513.1,355-373).
ctgtttgagctctatcgta

SEQ ID NO: 774972 - DNA, 19 bp, Mus musculus
  siRNA target sequence for BC049806 (NM_172513.1,406-424).
cagttcctgcccgaattga

SEQ ID NO: 774973 - DNA, 19 bp, Mus musculus
  siRNA target sequence for BC049806 (NM_172513.1,408-426).
gttcctgcccgaattgatt

SEQ ID NO: 774974 - DNA, 19 bp, Mus musculus
  siRNA target sequence for BC049806 (NM_172513.1,417-435).
cgaattgatttgggtttat

SEQ ID NO: 774975 - DNA, 19 bp, Mus musculus
  siRNA target sequence for BC049806 (NM_172513.1,418-436).
gaattgatttgggtttatt

SEQ ID NO: 774976 - DNA, 19 bp, Mus musculus
  siRNA target sequence for BC049806 (NM_172513.1,429-447).
ggtttatttgcgacttaca

SEQ ID NO: 774977 - DNA, 19 bp, Mus musculus
  siRNA target sequence for BC049806 (NM_172513.1,438-456).
gcgacttacagttagtaga

SEQ ID NO: 774978 - DNA, 19 bp, Mus musculus
  siRNA target sequence for BC049806 (NM_172513.1,490-508).
ctcctaggaatttataatt

SEQ ID NO: 774979 - DNA, 19 bp, Mus musculus
  siRNA target sequence for BC049806 (NM_172513.1,569-587).
ctaagccttcaatatacca

SEQ ID NO: 774980 - DNA, 19 bp, Mus musculus
  siRNA target sequence for BC049806 (NM_172513.1,618-636).
gacagaaggggcattatgt

SEQ ID NO: 774981 - DNA, 19 bp, Mus musculus
  siRNA target sequence for BC049806 (NM_172513.1,643-661).
gatctcatcagggttgttt

SEQ ID NO: 774982 - DNA, 19 bp, Mus musculus
  siRNA target sequence for BC049806 (NM_172513.1,646-664).
ctcatcagggttgtttaca

SEQ ID NO: 774983 - DNA, 19 bp, Mus musculus
  siRNA target sequence for BC049806 (NM_172513.1,706-724).
cggtttgaagtcctaagtt

SEQ ID NO: 774984 - DNA, 19 bp, Mus musculus
  siRNA target sequence for BC049806 (NM_172513.1,707-725).
ggtttgaagtcctaagttt

SEQ ID NO: 774985 - DNA, 19 bp, Mus musculus
  siRNA target sequence for BC049806 (NM_172513.1,708-726).
gtttgaagtcctaagtttt

SEQ ID NO: 774986 - DNA, 19 bp, Mus musculus
  siRNA target sequence for BC049806 (NM_172513.1,762-780).
gcctgcatcatcttaccaa

SEQ ID NO: 774987 - DNA, 19 bp, Mus musculus
  siRNA target sequence for BC049806 (NM_172513.1,763-781).
cctgcatcatcttaccaat

SEQ ID NO: 774988 - DNA, 19 bp, Mus musculus
  siRNA target sequence for BC049806 (NM_172513.1,767-785).
catcatcttaccaatctct

SEQ ID NO: 774989 - DNA, 19 bp, Mus musculus
  siRNA target sequence for BC049806 (NM_172513.1,855-873).
ctgtggtcgaattgtatta

SEQ ID NO: 774990 - DNA, 19 bp, Mus musculus
  siRNA target sequence for BC049806 (NM_172513.1,857-875).
gtggtcgaattgtattaga

SEQ ID NO: 774991 - DNA, 19 bp, Mus musculus
  siRNA target sequence for BC049806 (NM_172513.1,907-925).
gtttactatgccatgtata

SEQ ID NO: 774992 - DNA, 19 bp, Mus musculus
  siRNA target sequence for BC049806 (NM_172513.1,912-930).
ctatgccatgtataatgga

SEQ ID NO: 774993 - DNA, 19 bp, Mus musculus
  siRNA target sequence for BC049806 (NM_172513.1,976-994).
gctcagctagaactctttt

SEQ ID NO: 774994 - DNA, 19 bp, Mus musculus
  siRNA target sequence for BC049806 (NM_172513.1,1020-1038).
catgaaaaattcattacca

SEQ ID NO: 774995 - DNA, 19 bp, Mus musculus
  siRNA target sequence for BC049806 (NM_172513.1,1096-1114).
ccaacagtgccgagaattt

SEQ ID NO: 774996 - DNA, 19 bp, Mus musculus
  siRNA target sequence for BC049806 (NM_172513.1,1197-1215).
gtccttaaacatgaatgat

SEQ ID NO: 774997 - DNA, 19 bp, Mus musculus
  siRNA target sequence for BC049806 (NM_172513.1,1293-1311).
gggaagcttgcggaaagta

SEQ ID NO: 774998 - DNA, 19 bp, Mus musculus
  siRNA target sequence for BC049806 (NM_172513.1,1318-1336).
gggcgttccgccaaagaca

SEQ ID NO: 774999 - DNA, 19 bp, Mus musculus
  siRNA target sequence for BC049806 (NM_172513.1,1319-1337).
ggcgttccgccaaagacaa

SEQ ID NO: 775000 - DNA, 19 bp, Mus musculus
  siRNA target sequence for BC049806 (NM_172513.1,1320-1338).
gcgttccgccaaagacaaa

SEQ ID NO: 775001 - DNA, 19 bp, Mus musculus
  siRNA target sequence for BC049806 (NM_172513.1,1322-1340).
gttccgccaaagacaaaga

SEQ ID NO: 775002 - DNA, 19 bp, Mus musculus
  siRNA target sequence for BC049806 (NM_172513.1,1345-1363).
gcattagccatcaaatcca

SEQ ID NO: 775003 - DNA, 19 bp, Mus musculus
  siRNA target sequence for BC049806 (NM_172513.1,1368-1386).
gagccctcgagattcagta

SEQ ID NO: 775004 - DNA, 19 bp, Mus musculus
  siRNA target sequence for BC049806 (NM_172513.1,1371-1389).
ccctcgagattcagtagtt

SEQ ID NO: 775005 - DNA, 19 bp, Mus musculus
  siRNA target sequence for BC049806 (NM_172513.1,1391-1409).
gaaagcagtttgtacaaca

SEQ ID NO: 775006 - DNA, 19 bp, Mus musculus
  siRNA target sequence for BC049806 (NM_172513.1,1445-1463).
caccgatgaagaaacactt

SEQ ID NO: 775007 - DNA, 19 bp, Mus musculus
  siRNA target sequence for BC049806 (NM_172513.1,1496-1514).
ccaatagtctgagtctaat

SEQ ID NO: 775008 - DNA, 19 bp, Mus musculus
  siRNA target sequence for BC049806 (NM_172513.1,1522-1540).
gccagtgcttcctcaagta

SEQ ID NO: 775009 - DNA, 19 bp, Mus musculus
  siRNA target sequence for BC049806 (NM_172513.1,1523-1541).
ccagtgcttcctcaagtaa

SEQ ID NO: 775010 - DNA, 19 bp, Mus musculus
  siRNA target sequence for BC049806 (NM_172513.1,1524-1542).
cagtgcttcctcaagtaaa

SEQ ID NO: 775011 - DNA, 19 bp, Mus musculus
  siRNA target sequence for BC049806 (NM_172513.1,1528-1546).
gcttcctcaagtaaatctt

SEQ ID NO: 775012 - DNA, 19 bp, Mus musculus
  siRNA target sequence for BC049806 (NM_172513.1,1538-1556).
gtaaatcttttgactatgt

SEQ ID NO: 775013 - DNA, 19 bp, Mus musculus
  siRNA target sequence for BC049806 (NM_172513.1,1612-1630).
ctagcagctacaaatgcta

SEQ ID NO: 775014 - DNA, 19 bp, Mus musculus
  siRNA target sequence for BC049806 (NM_172513.1,1618-1636).
gctacaaatgctaatcgat

SEQ ID NO: 775015 - DNA, 19 bp, Mus musculus
  siRNA target sequence for BC049806 (NM_172513.1,1619-1637).
ctacaaatgctaatcgata

SEQ ID NO: 775016 - DNA, 19 bp, Mus musculus
  siRNA target sequence for BC049806 (NM_172513.1,1627-1645).
gctaatcgatattcaacta

SEQ ID NO: 775017 - DNA, 19 bp, Mus musculus
  siRNA target sequence for BC049806 (NM_172513.1,1640-1658).
caactatcagtctacaaga

SEQ ID NO: 775018 - DNA, 19 bp, Mus musculus
  siRNA target sequence for BC049806 (NM_172513.1,1727-1745).
ctcgatccccaagtttcaa

SEQ ID NO: 775019 - DNA, 19 bp, Mus musculus
  siRNA target sequence for BC049806 (NM_172513.1,1729-1747).
cgatccccaagtttcaata

SEQ ID NO: 775020 - DNA, 19 bp, Mus musculus
  siRNA target sequence for BC049806 (NM_172513.1,1730-1748).
gatccccaagtttcaatat

SEQ ID NO: 775021 - DNA, 19 bp, Mus musculus
  siRNA target sequence for BC049806 (NM_172513.1,1733-1751).
ccccaagtttcaatatgca

SEQ ID NO: 775022 - DNA, 19 bp, Mus musculus
  siRNA target sequence for AI661017 (NM_172514.1,385-403).
gtcgacaccagtagcaaat

SEQ ID NO: 775023 - DNA, 19 bp, Mus musculus
  siRNA target sequence for AI661017 (NM_172514.1,641-659).
caaaccagtgtgatgtaca

SEQ ID NO: 775024 - DNA, 19 bp, Mus musculus
  siRNA target sequence for AI661017 (NM_172514.1,652-670).
gatgtacaaggagaactta

SEQ ID NO: 775025 - DNA, 19 bp, Mus musculus
  siRNA target sequence for AI661017 (NM_172514.1,655-673).
gtacaaggagaacttagtt

SEQ ID NO: 775026 - DNA, 19 bp, Mus musculus
  siRNA target sequence for AI661017 (NM_172514.1,667-685).
cttagttagaatatttaga

SEQ ID NO: 775027 - DNA, 19 bp, Mus musculus
  siRNA target sequence for AI661017 (NM_172514.1,727-745).
cccccgagcctctaagtct

SEQ ID NO: 775028 - DNA, 19 bp, Mus musculus
  siRNA target sequence for AI661017 (NM_172514.1,728-746).
ccccgagcctctaagtctt

SEQ ID NO: 775029 - DNA, 19 bp, Mus musculus
  siRNA target sequence for AI661017 (NM_172514.1,744-762).
cttggctgcatggaagtat

SEQ ID NO: 775030 - DNA, 19 bp, Mus musculus
  siRNA target sequence for AI661017 (NM_172514.1,747-765).
ggctgcatggaagtatctt

SEQ ID NO: 775031 - DNA, 19 bp, Mus musculus
  siRNA target sequence for AI661017 (NM_172514.1,875-893).
gtcacagacacttcagaat

SEQ ID NO: 775032 - DNA, 19 bp, Mus musculus
  siRNA target sequence for AI661017 (NM_172514.1,956-974).
caacttcaggtgaaagcat

SEQ ID NO: 775033 - DNA, 19 bp, Mus musculus
  siRNA target sequence for AI661017 (NM_172514.1,971-989).
gcatcagggcacttcgaaa

SEQ ID NO: 775034 - DNA, 19 bp, Mus musculus
  siRNA target sequence for AI661017 (NM_172514.1,972-990).
catcagggcacttcgaaaa

SEQ ID NO: 775035 - DNA, 19 bp, Mus musculus
  siRNA target sequence for AI661017 (NM_172514.1,1052-1070).
ctagcagtgtgcttagtca

SEQ ID NO: 775036 - DNA, 19 bp, Mus musculus
  siRNA target sequence for AI661017 (NM_172514.1,1067-1085).
gtcatttctgcatacacaa

SEQ ID NO: 775037 - DNA, 19 bp, Mus musculus
  siRNA target sequence for AI661017 (NM_172514.1,1132-1150).
gctgatcacaatagcttat

SEQ ID NO: 775038 - DNA, 19 bp, Mus musculus
  siRNA target sequence for AI661017 (NM_172514.1,1195-1213).
cacctcctgtgctagattt

SEQ ID NO: 775039 - DNA, 19 bp, Mus musculus
  siRNA target sequence for AI661017 (NM_172514.1,1197-1215).
cctcctgtgctagatttga

SEQ ID NO: 775040 - DNA, 19 bp, Mus musculus
  siRNA target sequence for BC050789 (NM_172515.1,600-618).
gtgggaaatgccttttgat

SEQ ID NO: 775041 - DNA, 19 bp, Mus musculus
  siRNA target sequence for BC050789 (NM_172515.1,764-782).
ctgaaccaattaatatcga

SEQ ID NO: 775042 - DNA, 19 bp, Mus musculus
  siRNA target sequence for BC050789 (NM_172515.1,766-784).
gaaccaattaatatcgaat

SEQ ID NO: 775043 - DNA, 19 bp, Mus musculus
  siRNA target sequence for BC050789 (NM_172515.1,769-787).
ccaattaatatcgaattca

SEQ ID NO: 775044 - DNA, 19 bp, Mus musculus
  siRNA target sequence for BC050789 (NM_172515.1,790-808).
gaagacagcctgtcatata

SEQ ID NO: 775045 - DNA, 19 bp, Mus musculus
  siRNA target sequence for BC050789 (NM_172515.1,859-877).
cgtaccatgctaccaaata

SEQ ID NO: 775046 - DNA, 19 bp, Mus musculus
  siRNA target sequence for BC050789 (NM_172515.1,863-881).
ccatgctaccaaatacatt

SEQ ID NO: 775047 - DNA, 19 bp, Mus musculus
  siRNA target sequence for BC050789 (NM_172515.1,911-929).
cacagtgcactcagaatga

SEQ ID NO: 775048 - DNA, 19 bp, Mus musculus
  siRNA target sequence for BC050789 (NM_172515.1,1011-1029).
gagacctccaccatctcta

SEQ ID NO: 775049 - DNA, 19 bp, Mus musculus
  siRNA target sequence for BC050789 (NM_172515.1,1022-1040).
catctctaacaatagtaga

SEQ ID NO: 775050 - DNA, 19 bp, Mus musculus
  siRNA target sequence for BC050789 (NM_172515.1,1025-1043).
ctctaacaatagtagaact

SEQ ID NO: 775051 - DNA, 19 bp, Mus musculus
  siRNA target sequence for BC050789 (NM_172515.1,1113-1131).
ctcagagagtcaactaagt

SEQ ID NO: 775052 - DNA, 19 bp, Mus musculus
  siRNA target sequence for BC050789 (NM_172515.1,1119-1137).
gagtcaactaagttctaca

SEQ ID NO: 775053 - DNA, 19 bp, Mus musculus
  siRNA target sequence for BC050789 (NM_172515.1,1121-1139).
gtcaactaagttctacatt

SEQ ID NO: 775054 - DNA, 19 bp, Mus musculus
  siRNA target sequence for BC050789 (NM_172515.1,1123-1141).
caactaagttctacattta

SEQ ID NO: 775055 - DNA, 19 bp, Mus musculus
  siRNA target sequence for BC050789 (NM_172515.1,1133-1151).
ctacatttacggattatca

SEQ ID NO: 775056 - DNA, 19 bp, Mus musculus
  siRNA target sequence for BC050789 (NM_172515.1,1158-1176).
cttcccgtgtgaaaatgaa

SEQ ID NO: 775057 - DNA, 19 bp, Mus musculus
  siRNA target sequence for BC050789 (NM_172515.1,1163-1181).
cgtgtgaaaatgaaatcca

SEQ ID NO: 775058 - DNA, 19 bp, Mus musculus
  siRNA target sequence for BC050789 (NM_172515.1,1185-1203).
ccatcttattttcaacaaa

SEQ ID NO: 775059 - DNA, 19 bp, Mus musculus
  siRNA target sequence for BC050789 (NM_172515.1,1218-1236).
cttaagtctctgtttgaga

SEQ ID NO: 775060 - DNA, 19 bp, Mus musculus
  siRNA target sequence for BC050789 (NM_172515.1,1238-1256).
caaattccaggtatcacaa

SEQ ID NO: 775061 - DNA, 19 bp, Mus musculus
  siRNA target sequence for BC050789 (NM_172515.1,1248-1266).
gtatcacaaggatgacata

SEQ ID NO: 775062 - DNA, 19 bp, Mus musculus
  siRNA target sequence for BC050789 (NM_172515.1,1285-1303).
gtggagtcttgcacttatt

SEQ ID NO: 775063 - DNA, 19 bp, Mus musculus
  siRNA target sequence for BC050789 (NM_172515.1,1290-1308).
gtcttgcacttattctgat

SEQ ID NO: 775064 - DNA, 19 bp, Mus musculus
  siRNA target sequence for BC050789 (NM_172515.1,1295-1313).
gcacttattctgatgaatt

SEQ ID NO: 775065 - DNA, 19 bp, Mus musculus
  siRNA target sequence for BC050789 (NM_172515.1,1304-1322).
ctgatgaattcaaaaaaat

SEQ ID NO: 775066 - DNA, 19 bp, Mus musculus
  siRNA target sequence for BC050789 (NM_172515.1,1431-1449).
gccaaccatagattcatct

SEQ ID NO: 775067 - DNA, 19 bp, Mus musculus
  siRNA target sequence for BC050789 (NM_172515.1,1432-1450).
ccaaccatagattcatcta

SEQ ID NO: 775068 - DNA, 19 bp, Mus musculus
  siRNA target sequence for BC050789 (NM_172515.1,1482-1500).
caccaacacatcattgaaa

SEQ ID NO: 775069 - DNA, 19 bp, Mus musculus
  siRNA target sequence for BC050789 (NM_172515.1,1510-1528).
caaaatgagaggtcaaact

SEQ ID NO: 775070 - DNA, 19 bp, Mus musculus
  siRNA target sequence for BC050789 (NM_172515.1,1521-1539).
gtcaaacttgggaaattca

SEQ ID NO: 775071 - DNA, 19 bp, Mus musculus
  siRNA target sequence for BC050789 (NM_172515.1,1564-1582).
caaaaagtcaccattagga

SEQ ID NO: 775072 - DNA, 19 bp, Mus musculus
  siRNA target sequence for BC050789 (NM_172515.1,1572-1590).
caccattaggaaaaaactt

SEQ ID NO: 775073 - DNA, 19 bp, Mus musculus
  siRNA target sequence for BC050789 (NM_172515.1,1574-1592).
ccattaggaaaaaacttat

SEQ ID NO: 775074 - DNA, 19 bp, Mus musculus
  siRNA target sequence for BC050789 (NM_172515.1,1609-1627).
ggacccaagaagttttatt

SEQ ID NO: 775075 - DNA, 19 bp, Mus musculus
  siRNA target sequence for BC050789 (NM_172515.1,1698-1716).
gataacatccacagtttca

SEQ ID NO: 775076 - DNA, 19 bp, Mus musculus
  siRNA target sequence for BC050789 (NM_172515.1,1850-1868).
gaccatcaacagcaaatat

SEQ ID NO: 775077 - DNA, 19 bp, Mus musculus
  siRNA target sequence for BC050789 (NM_172515.1,1861-1879).
gcaaatattcctatttcca

SEQ ID NO: 775078 - DNA, 19 bp, Mus musculus
  siRNA target sequence for BC050789 (NM_172515.1,1914-1932).
ctcttacacccgatcaaaa

SEQ ID NO: 775079 - DNA, 19 bp, Mus musculus
  siRNA target sequence for BC050789 (NM_172515.1,2039-2057).
gacaagccttagacacttt

SEQ ID NO: 775080 - DNA, 19 bp, Mus musculus
  siRNA target sequence for BC050789 (NM_172515.1,2114-2132).
gcctaccctcagaagagtt

SEQ ID NO: 775081 - DNA, 19 bp, Mus musculus
  siRNA target sequence for BC050789 (NM_172515.1,2134-2152).
caggcattcaatgacaatt

SEQ ID NO: 775082 - DNA, 19 bp, Mus musculus
  siRNA target sequence for BC050789 (NM_172515.1,2136-2154).
ggcattcaatgacaatttt

SEQ ID NO: 775083 - DNA, 19 bp, Mus musculus
  siRNA target sequence for BC050789 (NM_172515.1,2234-2252).
ctggaagaaatcctgaaat

SEQ ID NO: 775084 - DNA, 19 bp, Mus musculus
  siRNA target sequence for Rbbp5 (NM_172517.1,1589-1607).
ctaaaggatcaaaaggtaa

SEQ ID NO: 775085 - DNA, 19 bp, Mus musculus
  siRNA target sequence for Rbbp5 (NM_172517.1,1621-1639).
ccatttaaaccgaaactct

SEQ ID NO: 775086 - DNA, 19 bp, Mus musculus
  siRNA target sequence for Rbbp5 (NM_172517.1,1622-1640).
catttaaaccgaaactcta

SEQ ID NO: 775087 - DNA, 19 bp, Mus musculus
  siRNA target sequence for Rbbp5 (NM_172517.1,1641-1659).
caaaggggacagaggttta

SEQ ID NO: 775088 - DNA, 19 bp, Mus musculus
  siRNA target sequence for Rbbp5 (NM_172517.1,1670-1688).
gatcaacgaagggtaaagt

SEQ ID NO: 775089 - DNA, 19 bp, Mus musculus
  siRNA target sequence for 6720460I06Rik (NM_172518.2,303-321).
ggccgtggaccaagaagaa

SEQ ID NO: 775090 - DNA, 19 bp, Mus musculus
  siRNA target sequence for 6720460I06Rik (NM_172518.2,382-400).
gaaacaagacataataggt

SEQ ID NO: 775091 - DNA, 19 bp, Mus musculus
  siRNA target sequence for 6720460I06Rik (NM_172518.2,478-496).
gctctggtctgcaaacagt

SEQ ID NO: 775092 - DNA, 19 bp, Mus musculus
  siRNA target sequence for 6720460I06Rik (NM_172518.2,493-511).
cagtggtatcgacttatca

SEQ ID NO: 775093 - DNA, 19 bp, Mus musculus
  siRNA target sequence for 6720460I06Rik (NM_172518.2,495-513).
gtggtatcgacttatcaaa

SEQ ID NO: 775094 - DNA, 19 bp, Mus musculus
  siRNA target sequence for 6720460I06Rik (NM_172518.2,519-537).
ggcccaccagtgttaccat

SEQ ID NO: 775095 - DNA, 19 bp, Mus musculus
  siRNA target sequence for 6720460I06Rik (NM_172518.2,627-645).
ccacagtgcgtgctattat

SEQ ID NO: 775096 - DNA, 19 bp, Mus musculus
  siRNA target sequence for 6720460I06Rik (NM_172518.2,630-648).
cagtgcgtgctattatgat

SEQ ID NO: 775097 - DNA, 19 bp, Mus musculus
  siRNA target sequence for 6720460I06Rik (NM_172518.2,646-664).
gatgccaatcagtctatgt

SEQ ID NO: 775098 - DNA, 19 bp, Mus musculus
  siRNA target sequence for 6720460I06Rik (NM_172518.2,695-713).
gcaatgctgccttcaatga

SEQ ID NO: 775099 - DNA, 19 bp, Mus musculus
  siRNA target sequence for 6720460I06Rik (NM_172518.2,717-735).
ctggaggctagacctaaat

SEQ ID NO: 775100 - DNA, 19 bp, Mus musculus
  siRNA target sequence for 6720460I06Rik (NM_172518.2,722-740).
ggctagacctaaatagcaa

SEQ ID NO: 775101 - DNA, 19 bp, Mus musculus
  siRNA target sequence for 6720460I06Rik (NM_172518.2,760-778).
gcctcagggtcctatcctt

SEQ ID NO: 775102 - DNA, 19 bp, Mus musculus
  siRNA target sequence for 6720460I06Rik (NM_172518.2,816-834).
cttgctagtgctatttggt

SEQ ID NO: 775103 - DNA, 19 bp, Mus musculus
  siRNA target sequence for 6720460I06Rik (NM_172518.2,897-915).
cacgtactcgccgtctaaa

SEQ ID NO: 775104 - DNA, 19 bp, Mus musculus
  siRNA target sequence for 6720460I06Rik (NM_172518.2,899-917).
cgtactcgccgtctaaaaa

SEQ ID NO: 775105 - DNA, 19 bp, Mus musculus
  siRNA target sequence for 6720460I06Rik (NM_172518.2,966-984).
ccattcctcctgtgtgata

SEQ ID NO: 775106 - DNA, 19 bp, Mus musculus
  siRNA target sequence for 6720460I06Rik (NM_172518.2,1117-1135).
ggccagtctcagattgtta

SEQ ID NO: 775107 - DNA, 19 bp, Mus musculus
  siRNA target sequence for 6720460I06Rik (NM_172518.2,1119-1137).
ccagtctcagattgttata

SEQ ID NO: 775108 - DNA, 19 bp, Mus musculus
  siRNA target sequence for 6720460I06Rik (NM_172518.2,1122-1140).
gtctcagattgttatagat

SEQ ID NO: 775109 - DNA, 19 bp, Mus musculus
  siRNA target sequence for 6720460I06Rik (NM_172518.2,1178-1196).
ccaatgcgctgttcaaaga

SEQ ID NO: 775110 - DNA, 19 bp, Mus musculus
  siRNA target sequence for 6720460I06Rik (NM_172518.2,1179-1197).
caatgcgctgttcaaagat

SEQ ID NO: 775111 - DNA, 19 bp, Mus musculus
  siRNA target sequence for 6720460I06Rik (NM_172518.2,1237-1255).
cagccactcaaggtagaaa

SEQ ID NO: 775112 - DNA, 19 bp, Mus musculus
  siRNA target sequence for 6720460I06Rik (NM_172518.2,1459-1477).
gacgaagcgccctgtgtta

SEQ ID NO: 775113 - DNA, 19 bp, Mus musculus
  siRNA target sequence for 6720460I06Rik (NM_172518.2,1575-1593).
cattctcaatggtggaaat

SEQ ID NO: 775114 - DNA, 19 bp, Mus musculus
  siRNA target sequence for 6720460I06Rik (NM_172518.2,1618-1636).
gggggtgcttccttagaca

SEQ ID NO: 775115 - DNA, 19 bp, Mus musculus
  siRNA target sequence for 6720460I06Rik (NM_172518.2,1676-1694).
ctgacggctacgacctaaa

SEQ ID NO: 775116 - DNA, 19 bp, Mus musculus
  siRNA target sequence for 6720460I06Rik (NM_172518.2,1680-1698).
cggctacgacctaaaagta

SEQ ID NO: 775117 - DNA, 19 bp, Mus musculus
  siRNA target sequence for 6720460I06Rik (NM_172518.2,1689-1707).
cctaaaagtaggactttct

SEQ ID NO: 775118 - DNA, 19 bp, Mus musculus
  siRNA target sequence for 6720460I06Rik (NM_172518.2,1746-1764).
cctgaggttaagttccatt

SEQ ID NO: 775119 - DNA, 19 bp, Mus musculus
  siRNA target sequence for 6720460I06Rik (NM_172518.2,1749-1767).
gaggttaagttccattgat

SEQ ID NO: 775120 - DNA, 19 bp, Mus musculus
  siRNA target sequence for 6720460I06Rik (NM_172518.2,1751-1769).
ggttaagttccattgatct

SEQ ID NO: 775121 - DNA, 19 bp, Mus musculus
  siRNA target sequence for 6720460I06Rik (NM_172518.2,1785-1803).
gtctgcttccagtagtagt

SEQ ID NO: 775122 - DNA, 19 bp, Mus musculus
  siRNA target sequence for 6720460I06Rik (NM_172518.2,1802-1820).
gtcacgtggatagtataga

SEQ ID NO: 775123 - DNA, 19 bp, Mus musculus
  siRNA target sequence for 6720460I06Rik (NM_172518.2,1804-1822).
cacgtggatagtatagaca

SEQ ID NO: 775124 - DNA, 19 bp, Mus musculus
  siRNA target sequence for 6720460I06Rik (NM_172518.2,1929-1947).
cctgcgtcggagtttggaa

SEQ ID NO: 775125 - DNA, 19 bp, Mus musculus
  siRNA target sequence for 6720460I06Rik (NM_172518.2,1948-1966).
gccatcaaagcgatgtcat

SEQ ID NO: 775126 - DNA, 19 bp, Mus musculus
  siRNA target sequence for 6720460I06Rik (NM_172518.2,1953-1971).
caaagcgatgtcatccaaa

SEQ ID NO: 775127 - DNA, 19 bp, Mus musculus
  siRNA target sequence for 6720460I06Rik (NM_172518.2,2138-2156).
ctccacagtcccttaatgt

SEQ ID NO: 775128 - DNA, 19 bp, Mus musculus
  siRNA target sequence for 6720460I06Rik (NM_172518.2,2177-2195).
gtatgaactgcaaacctat

SEQ ID NO: 775129 - DNA, 19 bp, Mus musculus
  siRNA target sequence for 6720460I06Rik (NM_172518.2,2240-2258).
gagtcaagtggaaagtgtt

SEQ ID NO: 775130 - DNA, 19 bp, Mus musculus
  siRNA target sequence for 6720460I06Rik (NM_172518.2,2317-2335).
cgaggcgagctcatcgtat

SEQ ID NO: 775131 - DNA, 19 bp, Mus musculus
  siRNA target sequence for 6720460I06Rik (NM_172518.2,2318-2336).
gaggcgagctcatcgtatt

SEQ ID NO: 775132 - DNA, 19 bp, Mus musculus
  siRNA target sequence for 6720460I06Rik (NM_172518.2,2322-2340).
cgagctcatcgtatttgga

SEQ ID NO: 775133 - DNA, 19 bp, Mus musculus
  siRNA target sequence for 6720460I06Rik (NM_172518.2,2367-2385).
gaagtactacccaaagaca

SEQ ID NO: 775134 - DNA, 19 bp, Mus musculus
  siRNA target sequence for 6720460I06Rik (NM_172518.2,2382-2400).
gacaaacgccttgtacttt

SEQ ID NO: 775135 - DNA, 19 bp, Mus musculus
  siRNA target sequence for 6720460I06Rik (NM_172518.2,2384-2402).
caaacgccttgtactttgt

SEQ ID NO: 775136 - DNA, 19 bp, Mus musculus
  siRNA target sequence for 6720460I06Rik (NM_172518.2,2397-2415).
ctttgtgcgcgcaaagaga

SEQ ID NO: 775137 - DNA, 19 bp, Mus musculus
  siRNA target sequence for 6430573B13Rik (NM_172520.1,723-741).
gcaggtgtatcataacgaa

SEQ ID NO: 775138 - DNA, 19 bp, Mus musculus
  siRNA target sequence for 6430573B13Rik (NM_172520.1,1054-1072).
ccaggacccgtcgatctaa

SEQ ID NO: 775139 - DNA, 19 bp, Mus musculus
  siRNA target sequence for 6430573B13Rik (NM_172520.1,1055-1073).
caggacccgtcgatctaaa

SEQ ID NO: 775140 - DNA, 19 bp, Mus musculus
  siRNA target sequence for 6430573B13Rik (NM_172520.1,1058-1076).
gacccgtcgatctaaacga

SEQ ID NO: 775141 - DNA, 19 bp, Mus musculus
  siRNA target sequence for 6430573B13Rik (NM_172520.1,1161-1179).
gtcccgcttcctccttaat

SEQ ID NO: 775142 - DNA, 19 bp, Mus musculus
  siRNA target sequence for 6430573B13Rik (NM_172520.1,1552-1570).
gacaagcagtggctatttt

SEQ ID NO: 775143 - DNA, 19 bp, Mus musculus
  siRNA target sequence for 6430573B13Rik (NM_172520.1,1859-1877).
gggttacccgcctcaagat

SEQ ID NO: 775144 - DNA, 19 bp, Mus musculus
  siRNA target sequence for 6430573B13Rik (NM_172520.1,1907-1925).
caccgggctcccaagatga

SEQ ID NO: 775145 - DNA, 19 bp, Mus musculus
  siRNA target sequence for 6430573B13Rik (NM_172520.1,2001-2019).
gcggacggaggaactaatt

SEQ ID NO: 775146 - DNA, 19 bp, Mus musculus
  siRNA target sequence for 6430573B13Rik (NM_172520.1,2003-2021).
ggacggaggaactaattca

SEQ ID NO: 775147 - DNA, 19 bp, Mus musculus
  siRNA target sequence for 6430573B13Rik (NM_172520.1,2023-2041).
ctaagcaagaagatccatt

SEQ ID NO: 775148 - DNA, 19 bp, Mus musculus
  siRNA target sequence for 6430573B13Rik (NM_172520.1,2128-2146).
gcaccgccagccaaactga

SEQ ID NO: 775149 - DNA, 19 bp, Mus musculus
  siRNA target sequence for 6430573B13Rik (NM_172520.1,2166-2184).
gtaccttcacctcttcaat

SEQ ID NO: 775150 - DNA, 19 bp, Mus musculus
  siRNA target sequence for 6430573B13Rik (NM_172520.1,2208-2226).
gaaggagctcgggaagttt

SEQ ID NO: 775151 - DNA, 19 bp, Mus musculus
  siRNA target sequence for 6430573B13Rik (NM_172520.1,2217-2235).
cgggaagtttgccgttttt

SEQ ID NO: 775152 - DNA, 19 bp, Mus musculus
  siRNA target sequence for 6430573B13Rik (NM_172520.1,2291-2309).
gcatcccaggccatgtgtt

SEQ ID NO: 775153 - DNA, 19 bp, Mus musculus
  siRNA target sequence for 6430573B13Rik (NM_172520.1,2377-2395).
gagaagcaacggtggattt

SEQ ID NO: 775154 - DNA, 19 bp, Mus musculus
  siRNA target sequence for 6430573B13Rik (NM_172520.1,2379-2397).
gaagcaacggtggatttca

SEQ ID NO: 775155 - DNA, 19 bp, Mus musculus
  siRNA target sequence for Nut (NM_172521.1,133-151).
cattaccaggaccagatat

SEQ ID NO: 775156 - DNA, 19 bp, Mus musculus
  siRNA target sequence for Nut (NM_172521.1,181-199).
ctttcagtgcgcttccttt

SEQ ID NO: 775157 - DNA, 19 bp, Mus musculus
  siRNA target sequence for Nut (NM_172521.1,422-440).
ccagaaccttatagttact

SEQ ID NO: 775158 - DNA, 19 bp, Mus musculus
  siRNA target sequence for Nut (NM_172521.1,509-527).
gtatgtgaccgcctctaat

SEQ ID NO: 775159 - DNA, 19 bp, Mus musculus
  siRNA target sequence for Nut (NM_172521.1,513-531).
gtgaccgcctctaatgtga

SEQ ID NO: 775160 - DNA, 19 bp, Mus musculus
  siRNA target sequence for Nut (NM_172521.1,711-729).
ggtgaccttgcctatgctt

SEQ ID NO: 775161 - DNA, 19 bp, Mus musculus
  siRNA target sequence for Nut (NM_172521.1,757-775).
gctggcagcgctacaaagt

SEQ ID NO: 775162 - DNA, 19 bp, Mus musculus
  siRNA target sequence for Nut (NM_172521.1,983-1001).
cgaggaagaaacacagata

SEQ ID NO: 775163 - DNA, 19 bp, Mus musculus
  siRNA target sequence for Nut (NM_172521.1,1004-1022).
gaatgcacagttgatgaat

SEQ ID NO: 775164 - DNA, 19 bp, Mus musculus
  siRNA target sequence for Nut (NM_172521.1,1040-1058).
ccctatagcccctttgaaa

SEQ ID NO: 775165 - DNA, 19 bp, Mus musculus
  siRNA target sequence for Nut (NM_172521.1,1093-1111).
gccagcagccagtgtacat

SEQ ID NO: 775166 - DNA, 19 bp, Mus musculus
  siRNA target sequence for Nut (NM_172521.1,1646-1664).
gggggctgcgggcattgtt

SEQ ID NO: 775167 - DNA, 19 bp, Mus musculus
  siRNA target sequence for Nut (NM_172521.1,1656-1674).
ggcattgttcgcattggaa

SEQ ID NO: 775168 - DNA, 19 bp, Mus musculus
  siRNA target sequence for Nut (NM_172521.1,1657-1675).
gcattgttcgcattggaaa

SEQ ID NO: 775169 - DNA, 19 bp, Mus musculus
  siRNA target sequence for Nut (NM_172521.1,1658-1676).
cattgttcgcattggaaaa

SEQ ID NO: 775170 - DNA, 19 bp, Mus musculus
  siRNA target sequence for Nut (NM_172521.1,1694-1712).
gcaggcaagagaaatacat

SEQ ID NO: 775171 - DNA, 19 bp, Mus musculus
  siRNA target sequence for Nut (NM_172521.1,1710-1728).
catggtgggcaggaacaaa

SEQ ID NO: 775172 - DNA, 19 bp, Mus musculus
  siRNA target sequence for Nut (NM_172521.1,1714-1732).
gtgggcaggaacaaacact

SEQ ID NO: 775173 - DNA, 19 bp, Mus musculus
  siRNA target sequence for Nut (NM_172521.1,1953-1971).
gaggttttaccttgttgtt

SEQ ID NO: 775174 - DNA, 19 bp, Mus musculus
  siRNA target sequence for Nut (NM_172521.1,1991-2009).
catgagagcccccaatttt

SEQ ID NO: 775175 - DNA, 19 bp, Mus musculus
  siRNA target sequence for Nut (NM_172521.1,1994-2012).
gagagcccccaattttgat

SEQ ID NO: 775176 - DNA, 19 bp, Mus musculus
  siRNA target sequence for Nut (NM_172521.1,1996-2014).
gagcccccaattttgatgt

SEQ ID NO: 775177 - DNA, 19 bp, Mus musculus
  siRNA target sequence for Nut (NM_172521.1,2201-2219).
gagttacagtcaaaaccat

SEQ ID NO: 775178 - DNA, 19 bp, Mus musculus
  siRNA target sequence for Nut (NM_172521.1,2307-2325).
cttcccttacaaattgaga

SEQ ID NO: 775179 - DNA, 19 bp, Mus musculus
  siRNA target sequence for Nut (NM_172521.1,2364-2382).
gaggaccaggcattgaatt

SEQ ID NO: 775180 - DNA, 19 bp, Mus musculus
  siRNA target sequence for Nut (NM_172521.1,2366-2384).
ggaccaggcattgaattct

SEQ ID NO: 775181 - DNA, 19 bp, Mus musculus
  siRNA target sequence for Nut (NM_172521.1,2367-2385).
gaccaggcattgaattcta

SEQ ID NO: 775182 - DNA, 19 bp, Mus musculus
  siRNA target sequence for Nut (NM_172521.1,2369-2387).
ccaggcattgaattctaga

SEQ ID NO: 775183 - DNA, 19 bp, Mus musculus
  siRNA target sequence for Nut (NM_172521.1,2370-2388).
caggcattgaattctagaa

SEQ ID NO: 775184 - DNA, 19 bp, Mus musculus
  siRNA target sequence for Nut (NM_172521.1,2373-2391).
gcattgaattctagaaaca

SEQ ID NO: 775185 - DNA, 19 bp, Mus musculus
  siRNA target sequence for Nut (NM_172521.1,2395-2413).
cttctctaggtcctagaaa

SEQ ID NO: 775186 - DNA, 19 bp, Mus musculus
  siRNA target sequence for Nut (NM_172521.1,2400-2418).
ctaggtcctagaaaaaaca

SEQ ID NO: 775187 - DNA, 19 bp, Mus musculus
  siRNA target sequence for Nut (NM_172521.1,2500-2518).
gcagcttgccaggatcttt

SEQ ID NO: 775188 - DNA, 19 bp, Mus musculus
  siRNA target sequence for Nut (NM_172521.1,2571-2589).
caagcgctgagccctaaaa

SEQ ID NO: 775189 - DNA, 19 bp, Mus musculus
  siRNA target sequence for Nut (NM_172521.1,2574-2592).
gcgctgagccctaaaacca

SEQ ID NO: 775190 - DNA, 19 bp, Mus musculus
  siRNA target sequence for Nut (NM_172521.1,2575-2593).
cgctgagccctaaaaccat

SEQ ID NO: 775191 - DNA, 19 bp, Mus musculus
  siRNA target sequence for Nut (NM_172521.1,2576-2594).
gctgagccctaaaaccata

SEQ ID NO: 775192 - DNA, 19 bp, Mus musculus
  siRNA target sequence for Nut (NM_172521.1,2690-2708).
cacatgccaaggcaatctt

SEQ ID NO: 775193 - DNA, 19 bp, Mus musculus
  siRNA target sequence for Nut (NM_172521.1,2692-2710).
catgccaaggcaatcttct

SEQ ID NO: 775194 - DNA, 19 bp, Mus musculus
  siRNA target sequence for Nut (NM_172521.1,2761-2779).
cagagagcagaggtaatct

SEQ ID NO: 775195 - DNA, 19 bp, Mus musculus
  siRNA target sequence for Nut (NM_172521.1,2765-2783).
gagcagaggtaatctactt

SEQ ID NO: 775196 - DNA, 19 bp, Mus musculus
  siRNA target sequence for Nut (NM_172521.1,2788-2806).
ctctgttggaaaacataga

SEQ ID NO: 775197 - DNA, 19 bp, Mus musculus
  siRNA target sequence for Nut (NM_172521.1,2810-2828).
ggtcaccatactagatgtt

SEQ ID NO: 775198 - DNA, 19 bp, Mus musculus
  siRNA target sequence for Nut (NM_172521.1,2811-2829).
gtcaccatactagatgtta

SEQ ID NO: 775199 - DNA, 19 bp, Mus musculus
  siRNA target sequence for Nut (NM_172521.1,2813-2831).
caccatactagatgttaaa

SEQ ID NO: 775200 - DNA, 19 bp, Mus musculus
  siRNA target sequence for Nut (NM_172521.1,2864-2882).
ggattcctgcttatcaaat

SEQ ID NO: 775201 - DNA, 19 bp, Mus musculus
  siRNA target sequence for Nut (NM_172521.1,2941-2959).
ccgaccttgttcctttaca

SEQ ID NO: 775202 - DNA, 19 bp, Mus musculus
  siRNA target sequence for Nut (NM_172521.1,2942-2960).
cgaccttgttcctttacaa

SEQ ID NO: 775203 - DNA, 19 bp, Mus musculus
  siRNA target sequence for Nut (NM_172521.1,2980-2998).
cacatgagacaaccaaatt

SEQ ID NO: 775204 - DNA, 19 bp, Mus musculus
  siRNA target sequence for Nut (NM_172521.1,3009-3027).
cagggccagggaagtactt

SEQ ID NO: 775205 - DNA, 19 bp, Mus musculus
  siRNA target sequence for Nut (NM_172521.1,3038-3056).
ggcaaccagggatgcttat

SEQ ID NO: 775206 - DNA, 19 bp, Mus musculus
  siRNA target sequence for Nut (NM_172521.1,3039-3057).
gcaaccagggatgcttata

SEQ ID NO: 775207 - DNA, 19 bp, Mus musculus
  siRNA target sequence for Nut (NM_172521.1,3040-3058).
caaccagggatgcttatat

SEQ ID NO: 775208 - DNA, 19 bp, Mus musculus
  siRNA target sequence for Nut (NM_172521.1,3043-3061).
ccagggatgcttatatttt

SEQ ID NO: 775209 - DNA, 19 bp, Mus musculus
  siRNA target sequence for Nut (NM_172521.1,3231-3249).
ggtcagggaattgtgaaaa

SEQ ID NO: 775210 - DNA, 19 bp, Mus musculus
  siRNA target sequence for Nut (NM_172521.1,3254-3272).
ccgccactctactgaagta

SEQ ID NO: 775211 - DNA, 19 bp, Mus musculus
  siRNA target sequence for Nut (NM_172521.1,3256-3274).
gccactctactgaagtaga

SEQ ID NO: 775212 - DNA, 19 bp, Mus musculus
  siRNA target sequence for Nut (NM_172521.1,3329-3347).
gagtccagctactgttgta

SEQ ID NO: 775213 - DNA, 19 bp, Mus musculus
  siRNA target sequence for Nut (NM_172521.1,3331-3349).
gtccagctactgttgtaga

SEQ ID NO: 775214 - DNA, 19 bp, Mus musculus
  siRNA target sequence for Nut (NM_172521.1,3357-3375).
cagcaaggagctcagttta

SEQ ID NO: 775215 - DNA, 19 bp, Mus musculus
  siRNA target sequence for Nut (NM_172521.1,3447-3465).
ggttttgtcaccagcaaaa

SEQ ID NO: 775216 - DNA, 19 bp, Mus musculus
  siRNA target sequence for Slc18a2 (NM_172523.1,161-179).
gcaagctgatcctgttcat

SEQ ID NO: 775217 - DNA, 19 bp, Mus musculus
  siRNA target sequence for Slc18a2 (NM_172523.1,219-237).
cgtcgtagttcccatcatt

SEQ ID NO: 775218 - DNA, 19 bp, Mus musculus
  siRNA target sequence for Slc18a2 (NM_172523.1,563-581).
gacttctaaccaacagaat

SEQ ID NO: 775219 - DNA, 19 bp, Mus musculus
  siRNA target sequence for Slc18a2 (NM_172523.1,576-594).
cagaattggctatccaatt

SEQ ID NO: 775220 - DNA, 19 bp, Mus musculus
  siRNA target sequence for Slc18a2 (NM_172523.1,585-603).
ctatccaattcccatgttt

SEQ ID NO: 775221 - DNA, 19 bp, Mus musculus
  siRNA target sequence for Slc18a2 (NM_172523.1,608-626).
gattctgcattatgtttat

SEQ ID NO: 775222 - DNA, 19 bp, Mus musculus
  siRNA target sequence for Slc18a2 (NM_172523.1,612-630).
ctgcattatgtttatctca

SEQ ID NO: 775223 - DNA, 19 bp, Mus musculus
  siRNA target sequence for Slc18a2 (NM_172523.1,740-758).
gcgtgtacacagatgatga

SEQ ID NO: 775224 - DNA, 19 bp, Mus musculus
  siRNA target sequence for Slc18a2 (NM_172523.1,830-848).
gaagtgtgctctatgagtt

SEQ ID NO: 775225 - DNA, 19 bp, Mus musculus
  siRNA target sequence for Slc18a2 (NM_172523.1,833-851).
gtgtgctctatgagtttgt

SEQ ID NO: 775226 - DNA, 19 bp, Mus musculus
  siRNA target sequence for Slc18a2 (NM_172523.1,891-909).
gctcttggatggagctatt

SEQ ID NO: 775227 - DNA, 19 bp, Mus musculus
  siRNA target sequence for Slc18a2 (NM_172523.1,1124-1142).
cgagcatctcttatctcat

SEQ ID NO: 775228 - DNA, 19 bp, Mus musculus
  siRNA target sequence for Slc18a2 (NM_172523.1,1138-1156).
ctcattggaaccaatattt

SEQ ID NO: 775229 - DNA, 19 bp, Mus musculus
  siRNA target sequence for Slc18a2 (NM_172523.1,1140-1158).
cattggaaccaatattttt

SEQ ID NO: 775230 - DNA, 19 bp, Mus musculus
  siRNA target sequence for Slc18a2 (NM_172523.1,1221-1239).
gatcagcattttatgtatt

SEQ ID NO: 775231 - DNA, 19 bp, Mus musculus
  siRNA target sequence for Slc18a2 (NM_172523.1,1377-1395).
gtatgccattgcagatgta

SEQ ID NO: 775232 - DNA, 19 bp, Mus musculus
  siRNA target sequence for Slc18a2 (NM_172523.1,1429-1447).
gctggtggtgctattgcaa

SEQ ID NO: 775233 - DNA, 19 bp, Mus musculus
  siRNA target sequence for Slc18a2 (NM_172523.1,1430-1448).
ctggtggtgctattgcaaa

SEQ ID NO: 775234 - DNA, 19 bp, Mus musculus
  siRNA target sequence for Slc18a2 (NM_172523.1,1462-1480).
ccttggctcatgacaatta

SEQ ID NO: 775235 - DNA, 19 bp, Mus musculus
  siRNA target sequence for Slc18a2 (NM_172523.1,1473-1491).
gacaattattgggataatt

SEQ ID NO: 775236 - DNA, 19 bp, Mus musculus
  siRNA target sequence for Slc18a2 (NM_172523.1,1475-1493).
caattattgggataattga

SEQ ID NO: 775237 - DNA, 19 bp, Mus musculus
  siRNA target sequence for Slc18a2 (NM_172523.1,1483-1501).
gggataattgatattgttt

SEQ ID NO: 775238 - DNA, 19 bp, Mus musculus
  siRNA target sequence for Slc18a2 (NM_172523.1,1579-1597).
cccattaagacaaagatgt

SEQ ID NO: 775239 - DNA, 19 bp, Mus musculus
  siRNA target sequence for Slc18a2 (NM_172523.1,1593-1611).
gatgtacactcagaataat

SEQ ID NO: 775240 - DNA, 19 bp, Mus musculus
  siRNA target sequence for 9530066K23Rik (NM_172524.1,234-252).
gagggtcaggaagaagtat

SEQ ID NO: 775241 - DNA, 19 bp, Mus musculus
  siRNA target sequence for 9530066K23Rik (NM_172524.1,301-319).
ggcaccagtgtcatcctta

SEQ ID NO: 775242 - DNA, 19 bp, Mus musculus
  siRNA target sequence for 9530066K23Rik (NM_172524.1,354-372).
ggccacaagggcagtgaat

SEQ ID NO: 775243 - DNA, 19 bp, Mus musculus
  siRNA target sequence for 9530066K23Rik (NM_172524.1,507-525).
cctcataagtgccatcttt

SEQ ID NO: 775244 - DNA, 19 bp, Mus musculus
  siRNA target sequence for 9530066K23Rik (NM_172524.1,508-526).
ctcataagtgccatctttt

SEQ ID NO: 775245 - DNA, 19 bp, Mus musculus
  siRNA target sequence for 9530066K23Rik (NM_172524.1,540-558).
gggagagagcctgaatcta

SEQ ID NO: 775246 - DNA, 19 bp, Mus musculus
  siRNA target sequence for 9530066K23Rik (NM_172524.1,596-614).
gcacagtgatggtcataca

SEQ ID NO: 775247 - DNA, 19 bp, Mus musculus
  siRNA target sequence for 9530066K23Rik (NM_172524.1,740-758).
cacgttacgggcaaaggaa

SEQ ID NO: 775248 - DNA, 19 bp, Mus musculus
  siRNA target sequence for 9530066K23Rik (NM_172524.1,742-760).
cgttacgggcaaaggaata

SEQ ID NO: 775249 - DNA, 19 bp, Mus musculus
  siRNA target sequence for 9530066K23Rik (NM_172524.1,743-761).
gttacgggcaaaggaatat

SEQ ID NO: 775250 - DNA, 19 bp, Mus musculus
  siRNA target sequence for 9530066K23Rik (NM_172524.1,829-847).
gtcaccattaggaacttct

SEQ ID NO: 775251 - DNA, 19 bp, Mus musculus
  siRNA target sequence for 9530066K23Rik (NM_172524.1,936-954).
caacagggcactggatatt

SEQ ID NO: 775252 - DNA, 19 bp, Mus musculus
  siRNA target sequence for 9530066K23Rik (NM_172524.1,976-994).
cccatctactacgttttct

SEQ ID NO: 775253 - DNA, 19 bp, Mus musculus
  siRNA target sequence for 9530066K23Rik (NM_172524.1,977-995).
ccatctactacgttttctt

SEQ ID NO: 775254 - DNA, 19 bp, Mus musculus
  siRNA target sequence for 9530066K23Rik (NM_172524.1,1092-1110).
catcatcctgggtgttttt

SEQ ID NO: 775255 - DNA, 19 bp, Mus musculus
  siRNA target sequence for 9530066K23Rik (NM_172524.1,1129-1147).
gatttggacatcaaccaaa

SEQ ID NO: 775256 - DNA, 19 bp, Mus musculus
  siRNA target sequence for 9530066K23Rik (NM_172524.1,1199-1217).
ccacagtcattaaactaga

SEQ ID NO: 775257 - DNA, 19 bp, Mus musculus
  siRNA target sequence for 9530066K23Rik (NM_172524.1,1200-1218).
cacagtcattaaactagaa

SEQ ID NO: 775258 - DNA, 19 bp, Mus musculus
  siRNA target sequence for 9530066K23Rik (NM_172524.1,1202-1220).
cagtcattaaactagaaga

SEQ ID NO: 775259 - DNA, 19 bp, Mus musculus
  siRNA target sequence for 9530066K23Rik (NM_172524.1,1285-1303).
gtatttatgaccgattctt

SEQ ID NO: 775260 - DNA, 19 bp, Mus musculus
  siRNA target sequence for A430025D11Rik (NM_172526.1,725-743).
gactgctagggccattcta

SEQ ID NO: 775261 - DNA, 19 bp, Mus musculus
  siRNA target sequence for A430025D11Rik (NM_172526.1,729-747).
gctagggccattctacaat

SEQ ID NO: 775262 - DNA, 19 bp, Mus musculus
  siRNA target sequence for A430025D11Rik (NM_172526.1,841-859).
caggctacagtgcttcaaa

SEQ ID NO: 775263 - DNA, 19 bp, Mus musculus
  siRNA target sequence for A430025D11Rik (NM_172526.1,845-863).
ctacagtgcttcaaaatct

SEQ ID NO: 775264 - DNA, 19 bp, Mus musculus
  siRNA target sequence for A430025D11Rik (NM_172526.1,958-976).
gagcagggtcgcagcttta

SEQ ID NO: 775265 - DNA, 19 bp, Mus musculus
  siRNA target sequence for A430025D11Rik (NM_172526.1,977-995).
gcggcctggcattttcact

SEQ ID NO: 775266 - DNA, 19 bp, Mus musculus
  siRNA target sequence for A430025D11Rik (NM_172526.1,1018-1036).
gctgcctgggacagctatt

SEQ ID NO: 775267 - DNA, 19 bp, Mus musculus
  siRNA target sequence for A430025D11Rik (NM_172526.1,1019-1037).
ctgcctgggacagctattt

SEQ ID NO: 775268 - DNA, 19 bp, Mus musculus
  siRNA target sequence for A430025D11Rik (NM_172526.1,1023-1041).
ctgggacagctatttgcat

SEQ ID NO: 775269 - DNA, 19 bp, Mus musculus
  siRNA target sequence for A430025D11Rik (NM_172526.1,1132-1150).
catgaccaggccttgaaat

SEQ ID NO: 775270 - DNA, 19 bp, Mus musculus
  siRNA target sequence for A430025D11Rik (NM_172526.1,1135-1153).
gaccaggccttgaaatact

SEQ ID NO: 775271 - DNA, 19 bp, Mus musculus
  siRNA target sequence for A430025D11Rik (NM_172526.1,1143-1161).
cttgaaatactataaggaa

SEQ ID NO: 775272 - DNA, 19 bp, Mus musculus
  siRNA target sequence for A430025D11Rik (NM_172526.1,1179-1197).
gcacgaaccaagttctgta

SEQ ID NO: 775273 - DNA, 19 bp, Mus musculus
  siRNA target sequence for A430025D11Rik (NM_172526.1,1425-1443).
gaacacggccactgtgtta

SEQ ID NO: 775274 - DNA, 19 bp, Mus musculus
  siRNA target sequence for A430025D11Rik (NM_172526.1,1507-1525).
gaggaatatcccttcatca

SEQ ID NO: 775275 - DNA, 19 bp, Mus musculus
  siRNA target sequence for A430025D11Rik (NM_172526.1,1509-1527).
ggaatatcccttcatcata

SEQ ID NO: 775276 - DNA, 19 bp, Mus musculus
  siRNA target sequence for Nudt15 (NM_172527.1,656-674).
gctttgcctccgtggtaaa

SEQ ID NO: 775277 - DNA, 19 bp, Mus musculus
  siRNA target sequence for Nudt15 (NM_172527.1,657-675).
ctttgcctccgtggtaaat

SEQ ID NO: 775278 - DNA, 19 bp, Mus musculus
  siRNA target sequence for Nudt15 (NM_172527.1,729-747).
ggtggatatgactcatgat

SEQ ID NO: 775279 - DNA, 19 bp, Mus musculus
  siRNA target sequence for Nudt15 (NM_172527.1,730-748).
gtggatatgactcatgatt

SEQ ID NO: 775280 - DNA, 19 bp, Mus musculus
  siRNA target sequence for Nudt15 (NM_172527.1,745-763).
gattcggagccgaggaata

SEQ ID NO: 775281 - DNA, 19 bp, Mus musculus
  siRNA target sequence for Nudt15 (NM_172527.1,749-767).
cggagccgaggaatatgga

SEQ ID NO: 775282 - DNA, 19 bp, Mus musculus
  siRNA target sequence for Nudt15 (NM_172527.1,794-812).
gggttccatgggaagaatt

SEQ ID NO: 775283 - DNA, 19 bp, Mus musculus
  siRNA target sequence for Nudt15 (NM_172527.1,839-857).
ctctccgctgtctaaaaga

SEQ ID NO: 775284 - DNA, 19 bp, Mus musculus
  siRNA target sequence for Nudt15 (NM_172527.1,848-866).
gtctaaaagagcaaggtta

SEQ ID NO: 775285 - DNA, 19 bp, Mus musculus
  siRNA target sequence for Nudt15 (NM_172527.1,859-877).
caaggttatgacccattta

SEQ ID NO: 775286 - DNA, 19 bp, Mus musculus
  siRNA target sequence for Nudt15 (NM_172527.1,863-881).
gttatgacccatttaaaga

SEQ ID NO: 775287 - DNA, 19 bp, Mus musculus
  siRNA target sequence for Lrrc1 (NM_172528.2,142-160).
cgtgtcccggaatgatata

SEQ ID NO: 775288 - DNA, 19 bp, Mus musculus
  siRNA target sequence for Lrrc1 (NM_172528.2,150-168).
ggaatgatatacctgaaat

SEQ ID NO: 775289 - DNA, 19 bp, Mus musculus
  siRNA target sequence for Lrrc1 (NM_172528.2,173-191).
gaaagcatcgccttctgta

SEQ ID NO: 775290 - DNA, 19 bp, Mus musculus
  siRNA target sequence for Lrrc1 (NM_172528.2,254-272).
gaactacagaacttaacgt

SEQ ID NO: 775291 - DNA, 19 bp, Mus musculus
  siRNA target sequence for Lrrc1 (NM_172528.2,260-278).
cagaacttaacgtgtcttt

SEQ ID NO: 775292 - DNA, 19 bp, Mus musculus
  siRNA target sequence for Lrrc1 (NM_172528.2,262-280).
gaacttaacgtgtctttct

SEQ ID NO: 775293 - DNA, 19 bp, Mus musculus
  siRNA target sequence for Lrrc1 (NM_172528.2,301-319).
gtctctgccagagaatatt

SEQ ID NO: 775294 - DNA, 19 bp, Mus musculus
  siRNA target sequence for Lrrc1 (NM_172528.2,311-329).
gagaatattggaaatctct

SEQ ID NO: 775295 - DNA, 19 bp, Mus musculus
  siRNA target sequence for Lrrc1 (NM_172528.2,313-331).
gaatattggaaatctctat

SEQ ID NO: 775296 - DNA, 19 bp, Mus musculus
  siRNA target sequence for Lrrc1 (NM_172528.2,354-372).
gagagaatcttcttacata

SEQ ID NO: 775297 - DNA, 19 bp, Mus musculus
  siRNA target sequence for Lrrc1 (NM_172528.2,380-398).
gactctcttacccaactaa

SEQ ID NO: 775298 - DNA, 19 bp, Mus musculus
  siRNA target sequence for Lrrc1 (NM_172528.2,518-536).
caggaaatcggcaatctga

SEQ ID NO: 775299 - DNA, 19 bp, Mus musculus
  siRNA target sequence for Lrrc1 (NM_172528.2,604-622).
gacttctttgacatactta

SEQ ID NO: 775300 - DNA, 19 bp, Mus musculus
  siRNA target sequence for Lrrc1 (NM_172528.2,606-624).
cttctttgacatacttagt

SEQ ID NO: 775301 - DNA, 19 bp, Mus musculus
  siRNA target sequence for Lrrc1 (NM_172528.2,631-649).
ccagaacttgctagaaaca

SEQ ID NO: 775302 - DNA, 19 bp, Mus musculus
  siRNA target sequence for Lrrc1 (NM_172528.2,671-689).
ctaaagaagctgtcaatct

SEQ ID NO: 775303 - DNA, 19 bp, Mus musculus
  siRNA target sequence for Lrrc1 (NM_172528.2,728-746).
gcaattggggattgtgaaa

SEQ ID NO: 775304 - DNA, 19 bp, Mus musculus
  siRNA target sequence for Lrrc1 (NM_172528.2,729-747).
caattggggattgtgaaaa

SEQ ID NO: 775305 - DNA, 19 bp, Mus musculus
  siRNA target sequence for Lrrc1 (NM_172528.2,749-767).
ctcacggagttagttctta

SEQ ID NO: 775306 - DNA, 19 bp, Mus musculus
  siRNA target sequence for Lrrc1 (NM_172528.2,753-771).
cggagttagttcttacaga

SEQ ID NO: 775307 - DNA, 19 bp, Mus musculus
  siRNA target sequence for Lrrc1 (NM_172528.2,754-772).
ggagttagttcttacagaa

SEQ ID NO: 775308 - DNA, 19 bp, Mus musculus
  siRNA target sequence for Lrrc1 (NM_172528.2,775-793).
ccggctcctgactttacct

SEQ ID NO: 775309 - DNA, 19 bp, Mus musculus
  siRNA target sequence for Lrrc1 (NM_172528.2,776-794).
cggctcctgactttaccta

SEQ ID NO: 775310 - DNA, 19 bp, Mus musculus
  siRNA target sequence for Lrrc1 (NM_172528.2,814-832).
gaagttgagcaacttgaat

SEQ ID NO: 775311 - DNA, 19 bp, Mus musculus
  siRNA target sequence for Lrrc1 (NM_172528.2,834-852).
cagacaggaataaattagt

SEQ ID NO: 775312 - DNA, 19 bp, Mus musculus
  siRNA target sequence for Lrrc1 (NM_172528.2,851-869).
gtgtcattgccaaaagaga

SEQ ID NO: 775313 - DNA, 19 bp, Mus musculus
  siRNA target sequence for Lrrc1 (NM_172528.2,942-960).
cacaggccgtggaacttca

SEQ ID NO: 775314 - DNA, 19 bp, Mus musculus
  siRNA target sequence for Lrrc1 (NM_172528.2,1091-1109).
gccaccggggagaagattt

SEQ ID NO: 775315 - DNA, 19 bp, Mus musculus
  siRNA target sequence for Lrrc1 (NM_172528.2,1092-1110).
ccaccggggagaagatttt

SEQ ID NO: 775316 - DNA, 19 bp, Mus musculus
  siRNA target sequence for Lrrc1 (NM_172528.2,1093-1111).
caccggggagaagatttta

SEQ ID NO: 775317 - DNA, 19 bp, Mus musculus
  siRNA target sequence for Lrrc1 (NM_172528.2,1105-1123).
gattttaacgtgtgtctta

SEQ ID NO: 775318 - DNA, 19 bp, Mus musculus
  siRNA target sequence for Lrrc1 (NM_172528.2,1226-1244).
cgctcggtccacagagtta

SEQ ID NO: 775319 - DNA, 19 bp, Mus musculus
  siRNA target sequence for Lrrc1 (NM_172528.2,1245-1263).
gtgcaatccggtttttgga

SEQ ID NO: 775320 - DNA, 19 bp, Mus musculus
  siRNA target sequence for Mdcp1 (NM_172529.1,101-119).
gtggaggagcctaacacat

SEQ ID NO: 775321 - DNA, 19 bp, Mus musculus
  siRNA target sequence for Mdcp1 (NM_172529.1,236-254).
gtggagtccacgtacaagt

SEQ ID NO: 775322 - DNA, 19 bp, Mus musculus
  siRNA target sequence for Mdcp1 (NM_172529.1,241-259).
gtccacgtacaagtatgaa

SEQ ID NO: 775323 - DNA, 19 bp, Mus musculus
  siRNA target sequence for Mdcp1 (NM_172529.1,243-261).
ccacgtacaagtatgaatt

SEQ ID NO: 775324 - DNA, 19 bp, Mus musculus
  siRNA target sequence for Mdcp1 (NM_172529.1,343-361).
gtgggaaatcatcaacaat

SEQ ID NO: 775325 - DNA, 19 bp, Mus musculus
  siRNA target sequence for Mdcp1 (NM_172529.1,347-365).
gaaatcatcaacaatacct

SEQ ID NO: 775326 - DNA, 19 bp, Mus musculus
  siRNA target sequence for Mdcp1 (NM_172529.1,502-520).
ctgtgtctatgcattgaca

SEQ ID NO: 775327 - DNA, 19 bp, Mus musculus
  siRNA target sequence for Mdcp1 (NM_172529.1,504-522).
gtgtctatgcattgacatt

SEQ ID NO: 775328 - DNA, 19 bp, Mus musculus
  siRNA target sequence for Mdcp1 (NM_172529.1,540-558).
gccatccccactctttgtt

SEQ ID NO: 775329 - DNA, 19 bp, Mus musculus
  siRNA target sequence for Mdcp1 (NM_172529.1,545-563).
ccccactctttgttagtgt

SEQ ID NO: 775330 - DNA, 19 bp, Mus musculus
  siRNA target sequence for Mdcp1 (NM_172529.1,546-564).
cccactctttgttagtgta

SEQ ID NO: 775331 - DNA, 19 bp, Mus musculus
  siRNA target sequence for Mdcp1 (NM_172529.1,639-657).
cacagggctatgagaagtt

SEQ ID NO: 775332 - DNA, 19 bp, Mus musculus
  siRNA target sequence for Mdcp1 (NM_172529.1,644-662).
ggctatgagaagttgctaa

SEQ ID NO: 775333 - DNA, 19 bp, Mus musculus
  siRNA target sequence for Mdcp1 (NM_172529.1,655-673).
gttgctaagggtacttttt

SEQ ID NO: 775334 - DNA, 19 bp, Mus musculus
  siRNA target sequence for Mdcp1 (NM_172529.1,674-692).
gaggatgctggctacttaa

SEQ ID NO: 775335 - DNA, 19 bp, Mus musculus
  siRNA target sequence for Mdcp1 (NM_172529.1,756-774).
ctctggacaactgtagaaa

SEQ ID NO: 775336 - DNA, 19 bp, Mus musculus
  siRNA target sequence for D030051D21 (NM_172531.1,90-108).
ggaaatcccttgacacaaa

SEQ ID NO: 775337 - DNA, 19 bp, Mus musculus
  siRNA target sequence for D030051D21 (NM_172531.1,91-109).
gaaatcccttgacacaaat

SEQ ID NO: 775338 - DNA, 19 bp, Mus musculus
  siRNA target sequence for D030051D21 (NM_172531.1,361-379).
catgcgcaagaacttgaat

SEQ ID NO: 775339 - DNA, 19 bp, Mus musculus
  siRNA target sequence for D030051D21 (NM_172531.1,666-684).
gaatcagcagtgagctaaa

SEQ ID NO: 775340 - DNA, 19 bp, Mus musculus
  siRNA target sequence for D030051D21 (NM_172531.1,821-839).
gccaagctctcctccttat

SEQ ID NO: 775341 - DNA, 19 bp, Mus musculus
  siRNA target sequence for D030051D21 (NM_172531.1,823-841).
caagctctcctccttatct

SEQ ID NO: 775342 - DNA, 19 bp, Mus musculus
  siRNA target sequence for D030051D21 (NM_172531.1,915-933).
ctcaaactgtggatgattt

SEQ ID NO: 775343 - DNA, 19 bp, Mus musculus
  siRNA target sequence for D030051D21 (NM_172531.1,940-958).
ggagaagtggcgcaagtat

SEQ ID NO: 775344 - DNA, 19 bp, Mus musculus
  siRNA target sequence for D030051D21 (NM_172531.1,941-959).
gagaagtggcgcaagtatt

SEQ ID NO: 775345 - DNA, 19 bp, Mus musculus
  siRNA target sequence for D030051D21 (NM_172531.1,993-1011).
ctcccccaccggagaacaa

SEQ ID NO: 775346 - DNA, 19 bp, Mus musculus
  siRNA target sequence for D030051D21 (NM_172531.1,1013-1031).
ctgggttatgtgtctgtaa

SEQ ID NO: 775347 - DNA, 19 bp, Mus musculus
  siRNA target sequence for D030051D21 (NM_172531.1,1015-1033).
gggttatgtgtctgtaagt

SEQ ID NO: 775348 - DNA, 19 bp, Mus musculus
  siRNA target sequence for D030051D21 (NM_172531.1,1118-1136).
cggaagtggctggaacatt

SEQ ID NO: 775349 - DNA, 19 bp, Mus musculus
  siRNA target sequence for D030051D21 (NM_172531.1,1188-1206).
ccacatcgaacttatcgaa

SEQ ID NO: 775350 - DNA, 19 bp, Mus musculus
  siRNA target sequence for D030051D21 (NM_172531.1,1228-1246).
cgagaacaacagactgaat

SEQ ID NO: 775351 - DNA, 19 bp, Mus musculus
  siRNA target sequence for D030051D21 (NM_172531.1,1237-1255).
cagactgaatgtgtttcat

SEQ ID NO: 775352 - DNA, 19 bp, Mus musculus
  siRNA target sequence for D030051D21 (NM_172531.1,1239-1257).
gactgaatgtgtttcatta

SEQ ID NO: 775353 - DNA, 19 bp, Mus musculus
  siRNA target sequence for 4932408B21 (NM_172535.1,115-133).
ctccaccgcccactatgaa

SEQ ID NO: 775354 - DNA, 19 bp, Mus musculus
  siRNA target sequence for 4932408B21 (NM_172535.1,177-195).
cagaagggtcagatgtgat

SEQ ID NO: 775355 - DNA, 19 bp, Mus musculus
  siRNA target sequence for 4932408B21 (NM_172535.1,247-265).
cgtggagaggcatagtgaa

SEQ ID NO: 775356 - DNA, 19 bp, Mus musculus
  siRNA target sequence for 4932408B21 (NM_172535.1,248-266).
gtggagaggcatagtgaat

SEQ ID NO: 775357 - DNA, 19 bp, Mus musculus
  siRNA target sequence for 4932408B21 (NM_172535.1,253-271).
gaggcatagtgaatttagt

SEQ ID NO: 775358 - DNA, 19 bp, Mus musculus
  siRNA target sequence for 4932408B21 (NM_172535.1,255-273).
ggcatagtgaatttagtct

SEQ ID NO: 775359 - DNA, 19 bp, Mus musculus
  siRNA target sequence for 4932408B21 (NM_172535.1,339-357).
gatctcaggatcaagatta

SEQ ID NO: 775360 - DNA, 19 bp, Mus musculus
  siRNA target sequence for 4932408B21 (NM_172535.1,441-459).
cgtcagtgagagagtctat

SEQ ID NO: 775361 - DNA, 19 bp, Mus musculus
  siRNA target sequence for 4932408B21 (NM_172535.1,452-470).
gagtctatagcaacagtaa

SEQ ID NO: 775362 - DNA, 19 bp, Mus musculus
  siRNA target sequence for 4932408B21 (NM_172535.1,485-503).
cctgcaggccaggaaatta

SEQ ID NO: 775363 - DNA, 19 bp, Mus musculus
  siRNA target sequence for 4932408B21 (NM_172535.1,488-506).
gcaggccaggaaattataa

SEQ ID NO: 775364 - DNA, 19 bp, Mus musculus
  siRNA target sequence for 4932408B21 (NM_172535.1,489-507).
caggccaggaaattataat

SEQ ID NO: 775365 - DNA, 19 bp, Mus musculus
  siRNA target sequence for 4932408B21 (NM_172535.1,518-536).
gttgatgctccatttagat

SEQ ID NO: 775366 - DNA, 19 bp, Mus musculus
  siRNA target sequence for 4932408B21 (NM_172535.1,544-562).
ggagcactttgcacactta

SEQ ID NO: 775367 - DNA, 19 bp, Mus musculus
  siRNA target sequence for 4932408B21 (NM_172535.1,545-563).
gagcactttgcacacttat

SEQ ID NO: 775368 - DNA, 19 bp, Mus musculus
  siRNA target sequence for 4932408B21 (NM_172535.1,547-565).
gcactttgcacacttatta

SEQ ID NO: 775369 - DNA, 19 bp, Mus musculus
  siRNA target sequence for 4932408B21 (NM_172535.1,550-568).
ctttgcacacttattacat

SEQ ID NO: 775370 - DNA, 19 bp, Mus musculus
  siRNA target sequence for 4932408B21 (NM_172535.1,573-591).
cacattatgtactgcaaat

SEQ ID NO: 775371 - DNA, 19 bp, Mus musculus
  siRNA target sequence for 4932408B21 (NM_172535.1,614-632).
gggaataatgaatctctaa

SEQ ID NO: 775372 - DNA, 19 bp, Mus musculus
  siRNA target sequence for 4932408B21 (NM_172535.1,615-633).
ggaataatgaatctctaat

SEQ ID NO: 775373 - DNA, 19 bp, Mus musculus
  siRNA target sequence for 4932408B21 (NM_172535.1,616-634).
gaataatgaatctctaata

SEQ ID NO: 775374 - DNA, 19 bp, Mus musculus
  siRNA target sequence for 4932408B21 (NM_172535.1,627-645).
ctctaatacaatatggaat

SEQ ID NO: 775375 - DNA, 19 bp, Mus musculus
  siRNA target sequence for 4932408B21 (NM_172535.1,662-680).
gttcaagtggaggtgtttt

SEQ ID NO: 775376 - DNA, 19 bp, Mus musculus
  siRNA target sequence for 4932408B21 (NM_172535.1,665-683).
caagtggaggtgttttcca

SEQ ID NO: 775377 - DNA, 19 bp, Mus musculus
  siRNA target sequence for 4932408B21 (NM_172535.1,681-699).
ccacacttcctgaccaata

SEQ ID NO: 775378 - DNA, 19 bp, Mus musculus
  siRNA target sequence for 4932408B21 (NM_172535.1,682-700).
cacacttcctgaccaatat

SEQ ID NO: 775379 - DNA, 19 bp, Mus musculus
  siRNA target sequence for 4932408B21 (NM_172535.1,781-799).
ggaggtagcagttgagata

SEQ ID NO: 775380 - DNA, 19 bp, Mus musculus
  siRNA target sequence for 4932408B21 (NM_172535.1,784-802).
ggtagcagttgagataata

SEQ ID NO: 775381 - DNA, 19 bp, Mus musculus
  siRNA target sequence for 4932408B21 (NM_172535.1,831-849).
gaggatttagacataaaat

SEQ ID NO: 775382 - DNA, 19 bp, Mus musculus
  siRNA target sequence for 4932408B21 (NM_172535.1,852-870).
caggactagaatatcacaa

SEQ ID NO: 775383 - DNA, 19 bp, Mus musculus
  siRNA target sequence for 4932408B21 (NM_172535.1,871-889).
cgctggaacacaaactgta

SEQ ID NO: 775384 - DNA, 19 bp, Mus musculus
  siRNA target sequence for 4932408B21 (NM_172535.1,927-945).
gggacacccagacagtttt

SEQ ID NO: 775385 - DNA, 19 bp, Mus musculus
  siRNA target sequence for 4932408B21 (NM_172535.1,958-976).
gctacaacaaactacaaat

SEQ ID NO: 775386 - DNA, 19 bp, Mus musculus
  siRNA target sequence for 4932408B21 (NM_172535.1,962-980).
caacaaactacaaatacca

SEQ ID NO: 775387 - DNA, 19 bp, Mus musculus
  siRNA target sequence for 4932408B21 (NM_172535.1,984-1002).
ccactcagatgactaaaat

SEQ ID NO: 775388 - DNA, 19 bp, Mus musculus
  siRNA target sequence for 4932408B21 (NM_172535.1,985-1003).
cactcagatgactaaaatt

SEQ ID NO: 775389 - DNA, 19 bp, Mus musculus
  siRNA target sequence for 4932408B21 (NM_172535.1,1017-1035).
caaacatgaccgataaact

SEQ ID NO: 775390 - DNA, 19 bp, Mus musculus
  siRNA target sequence for 4932408B21 (NM_172535.1,1083-1101).
ggttgcatgcggttatagt

SEQ ID NO: 775391 - DNA, 19 bp, Mus musculus
  siRNA target sequence for 4932408B21 (NM_172535.1,1087-1105).
gcatgcggttatagtgata

SEQ ID NO: 775392 - DNA, 19 bp, Mus musculus
  siRNA target sequence for 4932408B21 (NM_172535.1,1091-1109).
gcggttatagtgatacaga

SEQ ID NO: 775393 - DNA, 19 bp, Mus musculus
  siRNA target sequence for 4932408B21 (NM_172535.1,1126-1144).
gcacgctaagcgctatgta

SEQ ID NO: 775394 - DNA, 19 bp, Mus musculus
  siRNA target sequence for 4932408B21 (NM_172535.1,1129-1147).
cgctaagcgctatgtagaa

SEQ ID NO: 775395 - DNA, 19 bp, Mus musculus
  siRNA target sequence for 4932408B21 (NM_172535.1,1135-1153).
gcgctatgtagaaagctta

SEQ ID NO: 775396 - DNA, 19 bp, Mus musculus
  siRNA target sequence for 4932408B21 (NM_172535.1,1136-1154).
cgctatgtagaaagcttaa

SEQ ID NO: 775397 - DNA, 19 bp, Mus musculus
  siRNA target sequence for 4932408B21 (NM_172535.1,1192-1210).
gcaagaactcctgaagatt

SEQ ID NO: 775398 - DNA, 19 bp, Mus musculus
  siRNA target sequence for 4932408B21 (NM_172535.1,1227-1245).
ggatacgaatggactatta

SEQ ID NO: 775399 - DNA, 19 bp, Mus musculus
  siRNA target sequence for 4932408B21 (NM_172535.1,1247-1265).
cggaggcacaaccctaaaa

SEQ ID NO: 775400 - DNA, 19 bp, Mus musculus
  siRNA target sequence for 4932408B21 (NM_172535.1,1249-1267).
gaggcacaaccctaaaaca

SEQ ID NO: 775401 - DNA, 19 bp, Mus musculus
  siRNA target sequence for 4932408B21 (NM_172535.1,1252-1270).
gcacaaccctaaaacaact

SEQ ID NO: 775402 - DNA, 19 bp, Mus musculus
  siRNA target sequence for 4932408B21 (NM_172535.1,1308-1326).
ggcggcaagaagaagttga

SEQ ID NO: 775403 - DNA, 19 bp, Mus musculus
  siRNA target sequence for 4932408B21 (NM_172535.1,1309-1327).
gcggcaagaagaagttgaa

SEQ ID NO: 775404 - DNA, 19 bp, Mus musculus
  siRNA target sequence for 4932408B21 (NM_172535.1,1372-1390).
gtgtgagctattggaaaaa

SEQ ID NO: 775405 - DNA, 19 bp, Mus musculus
  siRNA target sequence for 4932408B21 (NM_172535.1,1406-1424).
gcttccatcgggagacata

SEQ ID NO: 775406 - DNA, 19 bp, Mus musculus
  siRNA target sequence for 4932408B21 (NM_172535.1,1455-1473).
cagctatccaagcttttct

SEQ ID NO: 775407 - DNA, 19 bp, Mus musculus
  siRNA target sequence for 4932408B21 (NM_172535.1,1466-1484).
gcttttctggataagtgtt

SEQ ID NO: 775408 - DNA, 19 bp, Mus musculus
  siRNA target sequence for 4932408B21 (NM_172535.1,1506-1524).
gaggtgatggcaaaaccat

SEQ ID NO: 775409 - DNA, 19 bp, Mus musculus
  siRNA target sequence for 4932408B21 (NM_172535.1,1532-1550).
gatacacagttcacgataa

SEQ ID NO: 775410 - DNA, 19 bp, Mus musculus
  siRNA target sequence for 4932408B21 (NM_172535.1,1648-1666).
gaaggaacatgagtgtaaa

SEQ ID NO: 775411 - DNA, 19 bp, Mus musculus
  siRNA target sequence for 4932408B21 (NM_172535.1,1652-1670).
gaacatgagtgtaaactga

SEQ ID NO: 775412 - DNA, 19 bp, Mus musculus
  siRNA target sequence for 4932408B21 (NM_172535.1,1660-1678).
gtgtaaactgactcaagaa

SEQ ID NO: 775413 - DNA, 19 bp, Mus musculus
  siRNA target sequence for 4932408B21 (NM_172535.1,1698-1716).
gagaagttgaccttatgat

SEQ ID NO: 775414 - DNA, 19 bp, Mus musculus
  siRNA target sequence for 4932408B21 (NM_172535.1,1719-1737).
gaggagtcaaacctcataa

SEQ ID NO: 775415 - DNA, 19 bp, Mus musculus
  siRNA target sequence for 4932408B21 (NM_172535.1,1739-1757).
ctcgaaggactcagaaaga

SEQ ID NO: 775416 - DNA, 19 bp, Mus musculus
  siRNA target sequence for 4932408B21 (NM_172535.1,1745-1763).
ggactcagaaagagaatca

SEQ ID NO: 775417 - DNA, 19 bp, Mus musculus
  siRNA target sequence for 4932408B21 (NM_172535.1,1758-1776).
gaatcacaacgctctttat

SEQ ID NO: 775418 - DNA, 19 bp, Mus musculus
  siRNA target sequence for 4932408B21 (NM_172535.1,1764-1782).
caacgctctttattcacta

SEQ ID NO: 775419 - DNA, 19 bp, Mus musculus
  siRNA target sequence for 4932408B21 (NM_172535.1,1767-1785).
cgctctttattcactacat

SEQ ID NO: 775420 - DNA, 19 bp, Mus musculus
  siRNA target sequence for 4932408B21 (NM_172535.1,1783-1801).
catcaaaactcctctgttt

SEQ ID NO: 775421 - DNA, 19 bp, Mus musculus
  siRNA target sequence for 4932408B21 (NM_172535.1,1786-1804).
caaaactcctctgtttaat

SEQ ID NO: 775422 - DNA, 19 bp, Mus musculus
  siRNA target sequence for 4932408B21 (NM_172535.1,1808-1826).
gaagttgcaaagtacctta

SEQ ID NO: 775423 - DNA, 19 bp, Mus musculus
  siRNA target sequence for 4932408B21 (NM_172535.1,1833-1851).
ctcaagacccactgaagtt

SEQ ID NO: 775424 - DNA, 19 bp, Mus musculus
  siRNA target sequence for 4932408B21 (NM_172535.1,1846-1864).
gaagttttatgatacgatt

SEQ ID NO: 775425 - DNA, 19 bp, Mus musculus
  siRNA target sequence for 4932408B21 (NM_172535.1,1872-1890).
gccacagttgccaaaatta

SEQ ID NO: 775426 - DNA, 19 bp, Mus musculus
  siRNA target sequence for 4932408B21 (NM_172535.1,1873-1891).
ccacagttgccaaaattat

SEQ ID NO: 775427 - DNA, 19 bp, Mus musculus
  siRNA target sequence for 4932408B21 (NM_172535.1,1940-1958).
cgctgccgccactgcataa

SEQ ID NO: 775428 - DNA, 19 bp, Mus musculus
  siRNA target sequence for 4932408B21 (NM_172535.1,1944-1962).
gccgccactgcataaacct

SEQ ID NO: 775429 - DNA, 19 bp, Mus musculus
  siRNA target sequence for 4932408B21 (NM_172535.1,1974-1992).
ctcagaggcgggaatcgtt

SEQ ID NO: 775430 - DNA, 19 bp, Mus musculus
  siRNA target sequence for 4932408B21 (NM_172535.1,1980-1998).
ggcgggaatcgtttttgaa

SEQ ID NO: 775431 - DNA, 19 bp, Mus musculus
  siRNA target sequence for 4932408B21 (NM_172535.1,1982-2000).
cgggaatcgtttttgaagt

SEQ ID NO: 775432 - DNA, 19 bp, Mus musculus
  siRNA target sequence for 4932408B21 (NM_172535.1,1985-2003).
gaatcgtttttgaagtaca

SEQ ID NO: 775433 - DNA, 19 bp, Mus musculus
  siRNA target sequence for 4932408B21 (NM_172535.1,1996-2014).
gaagtacaagtgtttactt

SEQ ID NO: 775434 - DNA, 19 bp, Mus musculus
  siRNA target sequence for 4932408B21 (NM_172535.1,2036-2054).
gctgattatggggataact

SEQ ID NO: 775435 - DNA, 19 bp, Mus musculus
  siRNA target sequence for 4932408B21 (NM_172535.1,2048-2066).
gataactcccagattgctt

SEQ ID NO: 775436 - DNA, 19 bp, Mus musculus
  siRNA target sequence for 4932408B21 (NM_172535.1,2075-2093).
cagcttcaggatattaaat

SEQ ID NO: 775437 - DNA, 19 bp, Mus musculus
  siRNA target sequence for 4932408B21 (NM_172535.1,2081-2099).
caggatattaaatacttga

SEQ ID NO: 775438 - DNA, 19 bp, Mus musculus
  siRNA target sequence for 4932408B21 (NM_172535.1,2161-2179).
catggtcaggtgggataaa

SEQ ID NO: 775439 - DNA, 19 bp, Mus musculus
  siRNA target sequence for 4932408B21 (NM_172535.1,2239-2257).
cctcaggctaccgagtatt

SEQ ID NO: 775440 - DNA, 19 bp, Mus musculus
  siRNA target sequence for 4932408B21 (NM_172535.1,2242-2260).
caggctaccgagtattgaa

SEQ ID NO: 775441 - DNA, 19 bp, Mus musculus
  siRNA target sequence for 4932408B21 (NM_172535.1,2244-2262).
ggctaccgagtattgaaaa

SEQ ID NO: 775442 - DNA, 19 bp, Mus musculus
  siRNA target sequence for 4932408B21 (NM_172535.1,2266-2284).
gtatggacaccattttgtt

SEQ ID NO: 775443 - DNA, 19 bp, Mus musculus
  siRNA target sequence for 4932408B21 (NM_172535.1,2336-2354).
ccaacgttggcgtcactta

SEQ ID NO: 775444 - DNA, 19 bp, Mus musculus
  siRNA target sequence for 4932408B21 (NM_172535.1,2340-2358).
cgttggcgtcacttatact

SEQ ID NO: 775445 - DNA, 19 bp, Mus musculus
  siRNA target sequence for 4932408B21 (NM_172535.1,2341-2359).
gttggcgtcacttatactt

SEQ ID NO: 775446 - DNA, 19 bp, Mus musculus
  siRNA target sequence for 4932408B21 (NM_172535.1,2344-2362).
ggcgtcacttatacttaat

SEQ ID NO: 775447 - DNA, 19 bp, Mus musculus
  siRNA target sequence for 4932408B21 (NM_172535.1,2404-2422).
gagtccacccaaaatcata

SEQ ID NO: 775448 - DNA, 19 bp, Mus musculus
  siRNA target sequence for 4932408B21 (NM_172535.1,2406-2424).
gtccacccaaaatcataat

SEQ ID NO: 775449 - DNA, 19 bp, Mus musculus
  siRNA target sequence for 4932408B21 (NM_172535.1,2408-2426).
ccacccaaaatcataataa

SEQ ID NO: 775450 - DNA, 19 bp, Mus musculus
  siRNA target sequence for 4932408B21 (NM_172535.1,2419-2437).
cataataacccgtaggatt

SEQ ID NO: 775451 - DNA, 19 bp, Mus musculus
  siRNA target sequence for BC016271 (NM_172536.1,156-174).
ccacactaccagacaacat

SEQ ID NO: 775452 - DNA, 19 bp, Mus musculus
  siRNA target sequence for BC016271 (NM_172536.1,161-179).
ctaccagacaacatcaagt

SEQ ID NO: 775453 - DNA, 19 bp, Mus musculus
  siRNA target sequence for BC016271 (NM_172536.1,269-287).
ccagggacttccttgttct

SEQ ID NO: 775454 - DNA, 19 bp, Mus musculus
  siRNA target sequence for BC016271 (NM_172536.1,476-494).
gaaggcgtggggacttgtt

SEQ ID NO: 775455 - DNA, 19 bp, Mus musculus
  siRNA target sequence for BC016271 (NM_172536.1,537-555).
gacggggtagtcagtatga

SEQ ID NO: 775456 - DNA, 19 bp, Mus musculus
  siRNA target sequence for BC016271 (NM_172536.1,586-604).
ggagccgcttgggagtata

SEQ ID NO: 775457 - DNA, 19 bp, Mus musculus
  siRNA target sequence for BC016271 (NM_172536.1,589-607).
gccgcttgggagtatagct

SEQ ID NO: 775458 - DNA, 19 bp, Mus musculus
  siRNA target sequence for BC016271 (NM_172536.1,590-608).
ccgcttgggagtatagcta

SEQ ID NO: 775459 - DNA, 19 bp, Mus musculus
  siRNA target sequence for BC016271 (NM_172536.1,591-609).
cgcttgggagtatagctat

SEQ ID NO: 775460 - DNA, 19 bp, Mus musculus
  siRNA target sequence for BC016271 (NM_172536.1,783-801).
ctccctgtgagcagatcat

SEQ ID NO: 775461 - DNA, 19 bp, Mus musculus
  siRNA target sequence for BC016271 (NM_172536.1,802-820).
ggtccgtacccgatcagtt

SEQ ID NO: 775462 - DNA, 19 bp, Mus musculus
  siRNA target sequence for BC016271 (NM_172536.1,933-951).
ggatgttggtggtaaatgt

SEQ ID NO: 775463 - DNA, 19 bp, Mus musculus
  siRNA target sequence for BC016271 (NM_172536.1,957-975).
ggagaaacaagacatatgt

SEQ ID NO: 775464 - DNA, 19 bp, Mus musculus
  siRNA target sequence for BC016271 (NM_172536.1,967-985).
gacatatgtaggtacactt

SEQ ID NO: 775465 - DNA, 19 bp, Mus musculus
  siRNA target sequence for BC016271 (NM_172536.1,1084-1102).
gcgtcccagcagtaacaca

SEQ ID NO: 775466 - DNA, 19 bp, Mus musculus
  siRNA target sequence for BC016271 (NM_172536.1,1268-1286).
gccaataagcggaaaagca

SEQ ID NO: 775467 - DNA, 19 bp, Mus musculus
  siRNA target sequence for BC016271 (NM_172536.1,1269-1287).
ccaataagcggaaaagcaa

SEQ ID NO: 775468 - DNA, 19 bp, Mus musculus
  siRNA target sequence for BC016271 (NM_172536.1,1338-1356).
gcaagcgtgtccgtacaaa

SEQ ID NO: 775469 - DNA, 19 bp, Mus musculus
  siRNA target sequence for BC016271 (NM_172536.1,1339-1357).
caagcgtgtccgtacaaat

SEQ ID NO: 775470 - DNA, 19 bp, Mus musculus
  siRNA target sequence for BC016271 (NM_172536.1,1343-1361).
cgtgtccgtacaaattcca

SEQ ID NO: 775471 - DNA, 19 bp, Mus musculus
  siRNA target sequence for BC016271 (NM_172536.1,1344-1362).
gtgtccgtacaaattccat

SEQ ID NO: 775472 - DNA, 19 bp, Mus musculus
  siRNA target sequence for BC016271 (NM_172536.1,1405-1423).
cactcttgtggacagaaat

SEQ ID NO: 775473 - DNA, 19 bp, Mus musculus
  siRNA target sequence for BC016271 (NM_172536.1,1481-1499).
cacatcaatgggcttaagt

SEQ ID NO: 775474 - DNA, 19 bp, Mus musculus
  siRNA target sequence for BC016271 (NM_172536.1,1656-1674).
ccaaagttcggcttgttga

SEQ ID NO: 775475 - DNA, 19 bp, Mus musculus
  siRNA target sequence for BC016271 (NM_172536.1,1685-1703).
ccttccccttcgagcaaat

SEQ ID NO: 775476 - DNA, 19 bp, Mus musculus
  siRNA target sequence for BC016271 (NM_172536.1,1686-1704).
cttccccttcgagcaaatt

SEQ ID NO: 775477 - DNA, 19 bp, Mus musculus
  siRNA target sequence for BC016271 (NM_172536.1,1707-1725).
gcacaaaaggcctctgtaa

SEQ ID NO: 775478 - DNA, 19 bp, Mus musculus
  siRNA target sequence for BC016271 (NM_172536.1,1756-1774).
ccctggagccttatccaat

SEQ ID NO: 775479 - DNA, 19 bp, Mus musculus
  siRNA target sequence for BC016271 (NM_172536.1,1793-1811).
ccctcggtaatggatgaaa

SEQ ID NO: 775480 - DNA, 19 bp, Mus musculus
  siRNA target sequence for BC016271 (NM_172536.1,1795-1813).
ctcggtaatggatgaaaca

SEQ ID NO: 775481 - DNA, 19 bp, Mus musculus
  siRNA target sequence for BC016271 (NM_172536.1,1950-1968).
cacaacagatctacacttt

SEQ ID NO: 775482 - DNA, 19 bp, Mus musculus
  siRNA target sequence for BC016271 (NM_172536.1,2022-2040).
ccaccgtggtccaagcaat

SEQ ID NO: 775483 - DNA, 19 bp, Mus musculus
  siRNA target sequence for BC016271 (NM_172536.1,2069-2087).
cagcccaagcccactgtta

SEQ ID NO: 775484 - DNA, 19 bp, Mus musculus
  siRNA target sequence for BC016271 (NM_172536.1,2203-2221).
ggtatgccgagcagaagaa

SEQ ID NO: 775485 - DNA, 19 bp, Mus musculus
  siRNA target sequence for BC016271 (NM_172536.1,2208-2226).
gccgagcagaagaaggtaa

SEQ ID NO: 775486 - DNA, 19 bp, Mus musculus
  siRNA target sequence for BC016271 (NM_172536.1,2244-2262).
cagcaggagatggaatcaa

SEQ ID NO: 775487 - DNA, 19 bp, Mus musculus
  siRNA target sequence for BC016271 (NM_172536.1,2297-2315).
caccaaagccggttagcta

SEQ ID NO: 775488 - DNA, 19 bp, Mus musculus
  siRNA target sequence for BC016271 (NM_172536.1,2304-2322).
gccggttagctagtatcaa

SEQ ID NO: 775489 - DNA, 19 bp, Mus musculus
  siRNA target sequence for BC016271 (NM_172536.1,2329-2347).
ggctgataagatttacagt

SEQ ID NO: 775490 - DNA, 19 bp, Mus musculus
  siRNA target sequence for BC016271 (NM_172536.1,2330-2348).
gctgataagatttacagtt

SEQ ID NO: 775491 - DNA, 19 bp, Mus musculus
  siRNA target sequence for BC016271 (NM_172536.1,2383-2401).
cagcagccgcctagatagt

SEQ ID NO: 775492 - DNA, 19 bp, Mus musculus
  siRNA target sequence for BC016271 (NM_172536.1,2461-2479).
cagctcagtcaaaaccaat

SEQ ID NO: 775493 - DNA, 19 bp, Mus musculus
  siRNA target sequence for BC016271 (NM_172536.1,2556-2574).
ccgagcagctggttaaaga

SEQ ID NO: 775494 - DNA, 19 bp, Mus musculus
  siRNA target sequence for BC016271 (NM_172536.1,2557-2575).
cgagcagctggttaaagaa

SEQ ID NO: 775495 - DNA, 19 bp, Mus musculus
  siRNA target sequence for BC016271 (NM_172536.1,2614-2632).
caaagactccccatattat

SEQ ID NO: 775496 - DNA, 19 bp, Mus musculus
  siRNA target sequence for BC016271 (NM_172536.1,2714-2732).
gagggccagcccctaaaga

SEQ ID NO: 775497 - DNA, 19 bp, Mus musculus
  siRNA target sequence for BC016271 (NM_172536.1,2755-2773).
gagcgtagaagggaaagta

SEQ ID NO: 775498 - DNA, 19 bp, Mus musculus
  siRNA target sequence for BC016271 (NM_172536.1,2757-2775).
gcgtagaagggaaagtaaa

SEQ ID NO: 775499 - DNA, 19 bp, Mus musculus
  siRNA target sequence for BC016271 (NM_172536.1,2766-2784).
ggaaagtaaagaatgatgt

SEQ ID NO: 775500 - DNA, 19 bp, Mus musculus
  siRNA target sequence for BC016271 (NM_172536.1,2801-2819).
ccggagctgagcaattcca

SEQ ID NO: 775501 - DNA, 19 bp, Mus musculus
  siRNA target sequence for BC016271 (NM_172536.1,2955-2973).
cttatcggcagcagtatga

SEQ ID NO: 775502 - DNA, 19 bp, Mus musculus
  siRNA target sequence for BC016271 (NM_172536.1,3020-3038).
cggggactggacaagaaga

SEQ ID NO: 775503 - DNA, 19 bp, Mus musculus
  siRNA target sequence for BC016271 (NM_172536.1,3199-3217).
catcattcccaagttagat

SEQ ID NO: 775504 - DNA, 19 bp, Mus musculus
  siRNA target sequence for BC016271 (NM_172536.1,3211-3229).
gttagatgactcatcaaaa

SEQ ID NO: 775505 - DNA, 19 bp, Mus musculus
  siRNA target sequence for BC016271 (NM_172536.1,3334-3352).
ggcagaggtggatccaata

SEQ ID NO: 775506 - DNA, 19 bp, Mus musculus
  siRNA target sequence for BC016271 (NM_172536.1,3336-3354).
cagaggtggatccaatact

SEQ ID NO: 775507 - DNA, 19 bp, Mus musculus
  siRNA target sequence for BC016271 (NM_172536.1,3338-3356).
gaggtggatccaatactct

SEQ ID NO: 775508 - DNA, 19 bp, Mus musculus
  siRNA target sequence for BC016271 (NM_172536.1,3376-3394).
gtctcgaatgtggacatat

SEQ ID NO: 775509 - DNA, 19 bp, Mus musculus
  siRNA target sequence for BC016271 (NM_172536.1,3385-3403).
gtggacatatgtttatcct

SEQ ID NO: 775510 - DNA, 19 bp, Mus musculus
  siRNA target sequence for BC016271 (NM_172536.1,3395-3413).
gtttatcctgccaaatact

SEQ ID NO: 775511 - DNA, 19 bp, Mus musculus
  siRNA target sequence for BC016271 (NM_172536.1,3446-3464).
gaggaacgggaccgaaaat

SEQ ID NO: 775512 - DNA, 19 bp, Mus musculus
  siRNA target sequence for BC016271 (NM_172536.1,3448-3466).
ggaacgggaccgaaaatta

SEQ ID NO: 775513 - DNA, 19 bp, Mus musculus
  siRNA target sequence for BC016271 (NM_172536.1,3449-3467).
gaacgggaccgaaaattaa

SEQ ID NO: 775514 - DNA, 19 bp, Mus musculus
  siRNA target sequence for BC016271 (NM_172536.1,3453-3471).
gggaccgaaaattaaagga

SEQ ID NO: 775515 - DNA, 19 bp, Mus musculus
  siRNA target sequence for BC016271 (NM_172536.1,3724-3742).
gaactacccaggttcctat

SEQ ID NO: 775516 - DNA, 19 bp, Mus musculus
  siRNA target sequence for BC016271 (NM_172536.1,3820-3838).
ccccagtgtgagctgtaaa

SEQ ID NO: 775517 - DNA, 19 bp, Mus musculus
  siRNA target sequence for BC016271 (NM_172536.1,3878-3896).
catgccagtcactacaaga

SEQ ID NO: 775518 - DNA, 19 bp, Mus musculus
  siRNA target sequence for BC016271 (NM_172536.1,3898-3916).
caagtctcccacgataagt

SEQ ID NO: 775519 - DNA, 19 bp, Mus musculus
  siRNA target sequence for BC016271 (NM_172536.1,3901-3919).
gtctcccacgataagtgat

SEQ ID NO: 775520 - DNA, 19 bp, Mus musculus
  siRNA target sequence for BC016271 (NM_172536.1,3903-3921).
ctcccacgataagtgataa

SEQ ID NO: 775521 - DNA, 19 bp, Mus musculus
  siRNA target sequence for BC016271 (NM_172536.1,3905-3923).
cccacgataagtgataaaa

SEQ ID NO: 775522 - DNA, 19 bp, Mus musculus
  siRNA target sequence for BC016271 (NM_172536.1,3907-3925).
cacgataagtgataaaaat

SEQ ID NO: 775523 - DNA, 19 bp, Mus musculus
  siRNA target sequence for BC016271 (NM_172536.1,4073-4091).
caccacttgggctattcct

SEQ ID NO: 775524 - DNA, 19 bp, Mus musculus
  siRNA target sequence for BC016271 (NM_172536.1,4121-4139).
gccgcagggctttcttcta

SEQ ID NO: 775525 - DNA, 19 bp, Mus musculus
  siRNA target sequence for Sema6d (NM_172537.2,905-923).
ccctcaacacggttgacta

SEQ ID NO: 775526 - DNA, 19 bp, Mus musculus
  siRNA target sequence for Sema6d (NM_172537.2,906-924).
cctcaacacggttgactat

SEQ ID NO: 775527 - DNA, 19 bp, Mus musculus
  siRNA target sequence for Sema6d (NM_172537.2,912-930).
cacggttgactatcactat

SEQ ID NO: 775528 - DNA, 19 bp, Mus musculus
  siRNA target sequence for Sema6d (NM_172537.2,915-933).
ggttgactatcactattca

SEQ ID NO: 775529 - DNA, 19 bp, Mus musculus
  siRNA target sequence for Sema6d (NM_172537.2,936-954).
gcaatatccggtttttaga

SEQ ID NO: 775530 - DNA, 19 bp, Mus musculus
  siRNA target sequence for Sema6d (NM_172537.2,958-976).
cgcccttcaggcaacgaat

SEQ ID NO: 775531 - DNA, 19 bp, Mus musculus
  siRNA target sequence for Sema6d (NM_172537.2,999-1017).
gctgatgttgaaaattcga

SEQ ID NO: 775532 - DNA, 19 bp, Mus musculus
  siRNA target sequence for Sema6d (NM_172537.2,1036-1054).
ggcagggatcaagtctata

SEQ ID NO: 775533 - DNA, 19 bp, Mus musculus
  siRNA target sequence for Sema6d (NM_172537.2,1038-1056).
cagggatcaagtctataca

SEQ ID NO: 775534 - DNA, 19 bp, Mus musculus
  siRNA target sequence for Sema6d (NM_172537.2,1048-1066).
gtctatacagtgaacttaa

SEQ ID NO: 775535 - DNA, 19 bp, Mus musculus
  siRNA target sequence for Sema6d (NM_172537.2,1133-1151).
gagaaaattgtgctatgaa

SEQ ID NO: 775536 - DNA, 19 bp, Mus musculus
  siRNA target sequence for Sema6d (NM_172537.2,1176-1194).
caacttcatcaaagtcttt

SEQ ID NO: 775537 - DNA, 19 bp, Mus musculus
  siRNA target sequence for Sema6d (NM_172537.2,1245-1263).
cccgatgtgcagatactat

SEQ ID NO: 775538 - DNA, 19 bp, Mus musculus
  siRNA target sequence for Sema6d (NM_172537.2,1246-1264).
ccgatgtgcagatactata

SEQ ID NO: 775539 - DNA, 19 bp, Mus musculus
  siRNA target sequence for Sema6d (NM_172537.2,1265-1283).
ggttgagaacgttagagta

SEQ ID NO: 775540 - DNA, 19 bp, Mus musculus
  siRNA target sequence for Sema6d (NM_172537.2,1266-1284).
gttgagaacgttagagtat

SEQ ID NO: 775541 - DNA, 19 bp, Mus musculus
  siRNA target sequence for Sema6d (NM_172537.2,1269-1287).
gagaacgttagagtatgat

SEQ ID NO: 775542 - DNA, 19 bp, Mus musculus
  siRNA target sequence for Sema6d (NM_172537.2,1438-1456).
gcccttcgcacaataaaat

SEQ ID NO: 775543 - DNA, 19 bp, Mus musculus
  siRNA target sequence for Sema6d (NM_172537.2,1444-1462).
cgcacaataaaatacgatt

SEQ ID NO: 775544 - DNA, 19 bp, Mus musculus
  siRNA target sequence for Sema6d (NM_172537.2,1448-1466).
caataaaatacgattccaa

SEQ ID NO: 775545 - DNA, 19 bp, Mus musculus
  siRNA target sequence for Sema6d (NM_172537.2,1492-1510).
catgccatagaatatggaa

SEQ ID NO: 775546 - DNA, 19 bp, Mus musculus
  siRNA target sequence for Sema6d (NM_172537.2,1496-1514).
ccatagaatatggaaacta

SEQ ID NO: 775547 - DNA, 19 bp, Mus musculus
  siRNA target sequence for Sema6d (NM_172537.2,1497-1515).
catagaatatggaaactat

SEQ ID NO: 775548 - DNA, 19 bp, Mus musculus
  siRNA target sequence for Sema6d (NM_172537.2,1540-1558).
gccgtggaacataataact

SEQ ID NO: 775549 - DNA, 19 bp, Mus musculus
  siRNA target sequence for Sema6d (NM_172537.2,1541-1559).
ccgtggaacataataactt

SEQ ID NO: 775550 - DNA, 19 bp, Mus musculus
  siRNA target sequence for Sema6d (NM_172537.2,1542-1560).
cgtggaacataataactta

SEQ ID NO: 775551 - DNA, 19 bp, Mus musculus
  siRNA target sequence for Sema6d (NM_172537.2,1557-1575).
cttaggcaaggctgtgtat

SEQ ID NO: 775552 - DNA, 19 bp, Mus musculus
  siRNA target sequence for Sema6d (NM_172537.2,1578-1596).
ccgcgtggctcgcatttgt

SEQ ID NO: 775553 - DNA, 19 bp, Mus musculus
  siRNA target sequence for Sema6d (NM_172537.2,1579-1597).
cgcgtggctcgcatttgta

SEQ ID NO: 775554 - DNA, 19 bp, Mus musculus
  siRNA target sequence for Sema6d (NM_172537.2,1580-1598).
gcgtggctcgcatttgtaa

SEQ ID NO: 775555 - DNA, 19 bp, Mus musculus
  siRNA target sequence for Sema6d (NM_172537.2,1581-1599).
cgtggctcgcatttgtaaa

SEQ ID NO: 775556 - DNA, 19 bp, Mus musculus
  siRNA target sequence for Sema6d (NM_172537.2,1586-1604).
ctcgcatttgtaaaaacga

SEQ ID NO: 775557 - DNA, 19 bp, Mus musculus
  siRNA target sequence for Sema6d (NM_172537.2,1673-1691).
ccgttcctggagattcctt

SEQ ID NO: 775558 - DNA, 19 bp, Mus musculus
  siRNA target sequence for Sema6d (NM_172537.2,1701-1719).
cgacgtcctgcagtctata

SEQ ID NO: 775559 - DNA, 19 bp, Mus musculus
  siRNA target sequence for Sema6d (NM_172537.2,1702-1720).
gacgtcctgcagtctataa

SEQ ID NO: 775560 - DNA, 19 bp, Mus musculus
  siRNA target sequence for Sema6d (NM_172537.2,1710-1728).
gcagtctataacagacata

SEQ ID NO: 775561 - DNA, 19 bp, Mus musculus
  siRNA target sequence for Sema6d (NM_172537.2,1711-1729).
cagtctataacagacataa

SEQ ID NO: 775562 - DNA, 19 bp, Mus musculus
  siRNA target sequence for Sema6d (NM_172537.2,1715-1733).
ctataacagacataatcca

SEQ ID NO: 775563 - DNA, 19 bp, Mus musculus
  siRNA target sequence for Sema6d (NM_172537.2,1798-1816).
gcagtctgtgcctttagca

SEQ ID NO: 775564 - DNA, 19 bp, Mus musculus
  siRNA target sequence for Sema6d (NM_172537.2,1819-1837).
gacgacattgagaaagtgt

SEQ ID NO: 775565 - DNA, 19 bp, Mus musculus
  siRNA target sequence for Sema6d (NM_172537.2,1836-1854).
gttcaaagggcggttcaaa

SEQ ID NO: 775566 - DNA, 19 bp, Mus musculus
  siRNA target sequence for Sema6d (NM_172537.2,1883-1901).
cagcagttcccgaagacaa

SEQ ID NO: 775567 - DNA, 19 bp, Mus musculus
  siRNA target sequence for Sema6d (NM_172537.2,1940-1958).
gcctcgcagaagcttacaa

SEQ ID NO: 775568 - DNA, 19 bp, Mus musculus
  siRNA target sequence for Sema6d (NM_172537.2,1942-1960).
ctcgcagaagcttacaaga

SEQ ID NO: 775569 - DNA, 19 bp, Mus musculus
  siRNA target sequence for Sema6d (NM_172537.2,2044-2062).
gagccctggttcacaaaga

SEQ ID NO: 775570 - DNA, 19 bp, Mus musculus
  siRNA target sequence for Sema6d (NM_172537.2,2105-2123).
cagcagggccataccaaaa

SEQ ID NO: 775571 - DNA, 19 bp, Mus musculus
  siRNA target sequence for Sema6d (NM_172537.2,2107-2125).
gcagggccataccaaaact

SEQ ID NO: 775572 - DNA, 19 bp, Mus musculus
  siRNA target sequence for Sema6d (NM_172537.2,2108-2126).
cagggccataccaaaacta

SEQ ID NO: 775573 - DNA, 19 bp, Mus musculus
  siRNA target sequence for Sema6d (NM_172537.2,2149-2167).
gaagctggcgtggtactta

SEQ ID NO: 775574 - DNA, 19 bp, Mus musculus
  siRNA target sequence for Sema6d (NM_172537.2,2153-2171).
ctggcgtggtacttaaagt

SEQ ID NO: 775575 - DNA, 19 bp, Mus musculus
  siRNA target sequence for Sema6d (NM_172537.2,2155-2173).
ggcgtggtacttaaagttt

SEQ ID NO: 775576 - DNA, 19 bp, Mus musculus
  siRNA target sequence for Sema6d (NM_172537.2,2156-2174).
gcgtggtacttaaagtttt

SEQ ID NO: 775577 - DNA, 19 bp, Mus musculus
  siRNA target sequence for Sema6d (NM_172537.2,2186-2204).
gtcctttctctctgaatga

SEQ ID NO: 775578 - DNA, 19 bp, Mus musculus
  siRNA target sequence for Sema6d (NM_172537.2,2207-2225).
gtgtattactcgaagagat

SEQ ID NO: 775579 - DNA, 19 bp, Mus musculus
  siRNA target sequence for Sema6d (NM_172537.2,2217-2235).
cgaagagattgaagcttat

SEQ ID NO: 775580 - DNA, 19 bp, Mus musculus
  siRNA target sequence for Sema6d (NM_172537.2,2298-2316).
caaggatcaccatgcttta

SEQ ID NO: 775581 - DNA, 19 bp, Mus musculus
  siRNA target sequence for Sema6d (NM_172537.2,2367-2385).
gcgctacggatcgtgtaaa

SEQ ID NO: 775582 - DNA, 19 bp, Mus musculus
  siRNA target sequence for Sema6d (NM_172537.2,2368-2386).
cgctacggatcgtgtaaaa

SEQ ID NO: 775583 - DNA, 19 bp, Mus musculus
  siRNA target sequence for Sema6d (NM_172537.2,2369-2387).
gctacggatcgtgtaaaaa

SEQ ID NO: 775584 - DNA, 19 bp, Mus musculus
  siRNA target sequence for Sema6d (NM_172537.2,2373-2391).
cggatcgtgtaaaaagtct

SEQ ID NO: 775585 - DNA, 19 bp, Mus musculus
  siRNA target sequence for Sema6d (NM_172537.2,2409-2427).
cccgtactgtggttggtta

SEQ ID NO: 775586 - DNA, 19 bp, Mus musculus
  siRNA target sequence for Sema6d (NM_172537.2,2410-2428).
ccgtactgtggttggttaa

SEQ ID NO: 775587 - DNA, 19 bp, Mus musculus
  siRNA target sequence for Sema6d (NM_172537.2,2469-2487).
gttaaccgaagacttcttt

SEQ ID NO: 775588 - DNA, 19 bp, Mus musculus
  siRNA target sequence for Sema6d (NM_172537.2,2474-2492).
ccgaagacttctttgcttt

SEQ ID NO: 775589 - DNA, 19 bp, Mus musculus
  siRNA target sequence for Sema6d (NM_172537.2,2588-2606).
ctggagaatccaatcagat

SEQ ID NO: 775590 - DNA, 19 bp, Mus musculus
  siRNA target sequence for Sema6d (NM_172537.2,2635-2653).
gtgtttgccgcttttgtct

SEQ ID NO: 775591 - DNA, 19 bp, Mus musculus
  siRNA target sequence for Sema6d (NM_172537.2,2801-2819).
gccccgtcaaggaatacca

SEQ ID NO: 775592 - DNA, 19 bp, Mus musculus
  siRNA target sequence for Sema6d (NM_172537.2,3110-3128).
gtgccatcgttcttccaaa

SEQ ID NO: 775593 - DNA, 19 bp, Mus musculus
  siRNA target sequence for Sema6d (NM_172537.2,3130-3148).
gccactcacgactacaata

SEQ ID NO: 775594 - DNA, 19 bp, Mus musculus
  siRNA target sequence for Sema6d (NM_172537.2,3330-3348).
gatccatatggctcatcaa

SEQ ID NO: 775595 - DNA, 19 bp, Mus musculus
  siRNA target sequence for Sema6d (NM_172537.2,3406-3424).
cgggaggcatctctatact

SEQ ID NO: 775596 - DNA, 19 bp, Mus musculus
  siRNA target sequence for Sema6d (NM_172537.2,3435-3453).
cacactccccagaaatagt

SEQ ID NO: 775597 - DNA, 19 bp, Mus musculus
  siRNA target sequence for Sema6d (NM_172537.2,3512-3530).
gacaaaggggttatcacaa

SEQ ID NO: 775598 - DNA, 19 bp, Mus musculus
  siRNA target sequence for Sema6d (NM_172537.2,3557-3575).
ctgccgtgcctaaaaactt

SEQ ID NO: 775599 - DNA, 19 bp, Mus musculus
  siRNA target sequence for Sema6d (NM_172537.2,3559-3577).
gccgtgcctaaaaacttaa

SEQ ID NO: 775600 - DNA, 19 bp, Mus musculus
  siRNA target sequence for Sema6d (NM_172537.2,3560-3578).
ccgtgcctaaaaacttaaa

SEQ ID NO: 775601 - DNA, 19 bp, Mus musculus
  siRNA target sequence for Sema6d (NM_172537.2,3564-3582).
gcctaaaaacttaaactca

SEQ ID NO: 775602 - DNA, 19 bp, Mus musculus
  siRNA target sequence for Sema6d (NM_172537.2,3602-3620).
ctagacagccgagtatgaa

SEQ ID NO: 775603 - DNA, 19 bp, Mus musculus
  siRNA target sequence for Sema6d (NM_172537.2,3650-3668).
gggcgaaggtggactatat

SEQ ID NO: 775604 - DNA, 19 bp, Mus musculus
  siRNA target sequence for Sema6d (NM_172537.2,3745-3763).
cccaggacgggactaaaga

SEQ ID NO: 775605 - DNA, 19 bp, Mus musculus
  siRNA target sequence for AI854408 (NM_172538.2,66-84).
gaggtggtttttgagaatt

SEQ ID NO: 775606 - DNA, 19 bp, Mus musculus
  siRNA target sequence for AI854408 (NM_172538.2,285-303).
gatgacttactccataagt

SEQ ID NO: 775607 - DNA, 19 bp, Mus musculus
  siRNA target sequence for AI854408 (NM_172538.2,459-477).
ctggcaaccccgaacactt

SEQ ID NO: 775608 - DNA, 19 bp, Mus musculus
  siRNA target sequence for AI854408 (NM_172538.2,525-543).
cccacgtgctggattgtgt

SEQ ID NO: 775609 - DNA, 19 bp, Mus musculus
  siRNA target sequence for AI854408 (NM_172538.2,554-572).
ggtgtggggaataattcta

SEQ ID NO: 775610 - DNA, 19 bp, Mus musculus
  siRNA target sequence for AI854408 (NM_172538.2,555-573).
gtgtggggaataattctat

SEQ ID NO: 775611 - DNA, 19 bp, Mus musculus
  siRNA target sequence for AI854408 (NM_172538.2,584-602).
gatcatacgagttttgaaa

SEQ ID NO: 775612 - DNA, 19 bp, Mus musculus
  siRNA target sequence for AI854408 (NM_172538.2,587-605).
catacgagttttgaaatta

SEQ ID NO: 775613 - DNA, 19 bp, Mus musculus
  siRNA target sequence for AI854408 (NM_172538.2,591-609).
cgagttttgaaattatgga

SEQ ID NO: 775614 - DNA, 19 bp, Mus musculus
  siRNA target sequence for AI854408 (NM_172538.2,710-728).
gcgtctcatccaagaaact

SEQ ID NO: 775615 - DNA, 19 bp, Mus musculus
  siRNA target sequence for AI854408 (NM_172538.2,712-730).
gtctcatccaagaaactga

SEQ ID NO: 775616 - DNA, 19 bp, Mus musculus
  siRNA target sequence for AI854408 (NM_172538.2,723-741).
gaaactgaagtcatttcca

SEQ ID NO: 775617 - DNA, 19 bp, Mus musculus
  siRNA target sequence for AI854408 (NM_172538.2,836-854).
gaccgtaagagccaacttt

SEQ ID NO: 775618 - DNA, 19 bp, Mus musculus
  siRNA target sequence for AI854408 (NM_172538.2,838-856).
ccgtaagagccaactttca

SEQ ID NO: 775619 - DNA, 19 bp, Mus musculus
  siRNA target sequence for AI854408 (NM_172538.2,839-857).
cgtaagagccaactttcaa

SEQ ID NO: 775620 - DNA, 19 bp, Mus musculus
  siRNA target sequence for AI854408 (NM_172538.2,865-883).
ggctagctaccttgtacat

SEQ ID NO: 775621 - DNA, 19 bp, Mus musculus
  siRNA target sequence for AI854408 (NM_172538.2,1143-1161).
gcacttctgcctcatcata

SEQ ID NO: 775622 - DNA, 19 bp, Mus musculus
  siRNA target sequence for AI854408 (NM_172538.2,1269-1287).
gtcccccagcgcttatcca

SEQ ID NO: 775623 - DNA, 19 bp, Mus musculus
  siRNA target sequence for AI854408 (NM_172538.2,1360-1378).
cactactgaatgaagtaat

SEQ ID NO: 775624 - DNA, 19 bp, Mus musculus
  siRNA target sequence for AI854408 (NM_172538.2,1395-1413).
cttgaaaagctcgtttgta

SEQ ID NO: 775625 - DNA, 19 bp, Mus musculus
  siRNA target sequence for AI854408 (NM_172538.2,1398-1416).
gaaaagctcgtttgtacta

SEQ ID NO: 775626 - DNA, 19 bp, Mus musculus
  siRNA target sequence for AI854408 (NM_172538.2,1403-1421).
gctcgtttgtactaaagaa

SEQ ID NO: 775627 - DNA, 19 bp, Mus musculus
  siRNA target sequence for AI854408 (NM_172538.2,1450-1468).
cgatactagagcagaaatt

SEQ ID NO: 775628 - DNA, 19 bp, Mus musculus
  siRNA target sequence for AI854408 (NM_172538.2,1542-1560).
ctccggaggaacacagata

SEQ ID NO: 775629 - DNA, 19 bp, Mus musculus
  siRNA target sequence for AI854408 (NM_172538.2,1619-1637).
gcggccagctctacacatt

SEQ ID NO: 775630 - DNA, 19 bp, Mus musculus
  siRNA target sequence for AI854408 (NM_172538.2,1712-1730).
ccgaaaggacgatttctat

SEQ ID NO: 775631 - DNA, 19 bp, Mus musculus
  siRNA target sequence for AI854408 (NM_172538.2,1714-1732).
gaaaggacgatttctatca

SEQ ID NO: 775632 - DNA, 19 bp, Mus musculus
  siRNA target sequence for AI854408 (NM_172538.2,1869-1887).
gaccacgctgtgttgacat

SEQ ID NO: 775633 - DNA, 19 bp, Mus musculus
  siRNA target sequence for AI854408 (NM_172538.2,1904-1922).
cccagtggaatctgtaagt

SEQ ID NO: 775634 - DNA, 19 bp, Mus musculus
  siRNA target sequence for AI854408 (NM_172538.2,1932-1950).
ccacccatgaattcagata

SEQ ID NO: 775635 - DNA, 19 bp, Mus musculus
  siRNA target sequence for AI854408 (NM_172538.2,1951-1969).
cagaaaaagtcaatagtaa

SEQ ID NO: 775636 - DNA, 19 bp, Mus musculus
  siRNA target sequence for AI854408 (NM_172538.2,1961-1979).
caatagtaatgctactgaa

SEQ ID NO: 775637 - DNA, 19 bp, Mus musculus
  siRNA target sequence for AI854408 (NM_172538.2,2052-2070).
gaggggccaagcaaagaca

SEQ ID NO: 775638 - DNA, 19 bp, Mus musculus
  siRNA target sequence for AI854408 (NM_172538.2,2098-2116).
caggagccgaggaaaccat

SEQ ID NO: 775639 - DNA, 19 bp, Mus musculus
  siRNA target sequence for AI854408 (NM_172538.2,2235-2253).
cagttgccaccagaattca

SEQ ID NO: 775640 - DNA, 19 bp, Mus musculus
  siRNA target sequence for AI854408 (NM_172538.2,2289-2307).
cggtccctgtcctttacca

SEQ ID NO: 775641 - DNA, 19 bp, Mus musculus
  siRNA target sequence for AI854408 (NM_172538.2,2306-2324).
caccatgcaggaacaaact

SEQ ID NO: 775642 - DNA, 19 bp, Mus musculus
  siRNA target sequence for AI854408 (NM_172538.2,2308-2326).
ccatgcaggaacaaacttt

SEQ ID NO: 775643 - DNA, 19 bp, Mus musculus
  siRNA target sequence for AI854408 (NM_172538.2,2309-2327).
catgcaggaacaaactttt

SEQ ID NO: 775644 - DNA, 19 bp, Mus musculus
  siRNA target sequence for 2010310D06Rik (NM_172541.1,172-190).
ctccaggccaactgtacaa

SEQ ID NO: 775645 - DNA, 19 bp, Mus musculus
  siRNA target sequence for 2010310D06Rik (NM_172541.1,417-435).
ggctaagttcgcttacaaa

SEQ ID NO: 775646 - DNA, 19 bp, Mus musculus
  siRNA target sequence for 2010310D06Rik (NM_172541.1,419-437).
ctaagttcgcttacaaaga

SEQ ID NO: 775647 - DNA, 19 bp, Mus musculus
  siRNA target sequence for 2010310D06Rik (NM_172541.1,436-454).
gacgagtacgagaaattca

SEQ ID NO: 775648 - DNA, 19 bp, Mus musculus
  siRNA target sequence for 2010310D06Rik (NM_172541.1,544-562).
ctgctggtctggtattatt

SEQ ID NO: 775649 - DNA, 19 bp, Mus musculus
  siRNA target sequence for 2010310D06Rik (NM_172541.1,674-692).
ggccagatggactcatgta

SEQ ID NO: 775650 - DNA, 19 bp, Mus musculus
  siRNA target sequence for 2010310D06Rik (NM_172541.1,704-722).
ggaaccagttcctgtcttt

SEQ ID NO: 775651 - DNA, 19 bp, Mus musculus
  siRNA target sequence for 2010310D06Rik (NM_172541.1,894-912).
cttctggcaactcttcaat

SEQ ID NO: 775652 - DNA, 19 bp, Mus musculus
  siRNA target sequence for 2010310D06Rik (NM_172541.1,909-927).
caatgcgctgacattgttt

SEQ ID NO: 775653 - DNA, 19 bp, Mus musculus
  siRNA target sequence for 2010310D06Rik (NM_172541.1,913-931).
gcgctgacattgtttaact

SEQ ID NO: 775654 - DNA, 19 bp, Mus musculus
  siRNA target sequence for 2010310D06Rik (NM_172541.1,1025-1043).
gagtggtgcatcagaagtt

SEQ ID NO: 775655 - DNA, 19 bp, Mus musculus
  siRNA target sequence for 2010310D06Rik (NM_172541.1,1051-1069).
cagcagcacgggaacaaga

SEQ ID NO: 775656 - DNA, 19 bp, Mus musculus
  siRNA target sequence for 5930437A14Rik (NM_172542.1,88-106).
ggccgtcccagctcacaaa

SEQ ID NO: 775657 - DNA, 19 bp, Mus musculus
  siRNA target sequence for 5930437A14Rik (NM_172542.1,91-109).
cgtcccagctcacaaacat

SEQ ID NO: 775658 - DNA, 19 bp, Mus musculus
  siRNA target sequence for 5930437A14Rik (NM_172542.1,188-206).
gccatcttgcggaagatct

SEQ ID NO: 775659 - DNA, 19 bp, Mus musculus
  siRNA target sequence for 5930437A14Rik (NM_172542.1,366-384).
gtgacaggattcttctaca

SEQ ID NO: 775660 - DNA, 19 bp, Mus musculus
  siRNA target sequence for 5930437A14Rik (NM_172542.1,377-395).
cttctacagccagatgatt

SEQ ID NO: 775661 - DNA, 19 bp, Mus musculus
  siRNA target sequence for 5930437A14Rik (NM_172542.1,387-405).
cagatgattccttacagat

SEQ ID NO: 775662 - DNA, 19 bp, Mus musculus
  siRNA target sequence for 5930437A14Rik (NM_172542.1,422-440).
gctgatgtgggtttctata

SEQ ID NO: 775663 - DNA, 19 bp, Mus musculus
  siRNA target sequence for 5930437A14Rik (NM_172542.1,498-516).
caggaaagccactagtgaa

SEQ ID NO: 775664 - DNA, 19 bp, Mus musculus
  siRNA target sequence for 5930437A14Rik (NM_172542.1,514-532).
gaagacatcccgaatgact

SEQ ID NO: 775665 - DNA, 19 bp, Mus musculus
  siRNA target sequence for 5930437A14Rik (NM_172542.1,775-793).
ctgcagggcagccaatcta

SEQ ID NO: 775666 - DNA, 19 bp, Mus musculus
  siRNA target sequence for 5930437A14Rik (NM_172542.1,813-831).
gcacgcagctcctgattct

SEQ ID NO: 775667 - DNA, 19 bp, Mus musculus
  siRNA target sequence for 5930437A14Rik (NM_172542.1,814-832).
cacgcagctcctgattcta

SEQ ID NO: 775668 - DNA, 19 bp, Mus musculus
  siRNA target sequence for 5930437A14Rik (NM_172542.1,964-982).
ccttggctgccccatcaaa

SEQ ID NO: 775669 - DNA, 19 bp, Mus musculus
  siRNA target sequence for 5930437A14Rik (NM_172542.1,1075-1093).
gatcctacgagttgcaaat

SEQ ID NO: 775670 - DNA, 19 bp, Mus musculus
  siRNA target sequence for 5930437A14Rik (NM_172542.1,1216-1234).
ctccgcatcttgtggtaat

SEQ ID NO: 775671 - DNA, 19 bp, Mus musculus
  siRNA target sequence for 5930437A14Rik (NM_172542.1,1219-1237).
cgcatcttgtggtaataga

SEQ ID NO: 775672 - DNA, 19 bp, Mus musculus
  siRNA target sequence for 5930437A14Rik (NM_172542.1,1251-1269).
cgcgactcaggtgtttact

SEQ ID NO: 775673 - DNA, 19 bp, Mus musculus
  siRNA target sequence for 5930437A14Rik (NM_172542.1,1253-1271).
cgactcaggtgtttactga

SEQ ID NO: 775674 - DNA, 19 bp, Mus musculus
  siRNA target sequence for 5930437A14Rik (NM_172542.1,1254-1272).
gactcaggtgtttactgaa

SEQ ID NO: 775675 - DNA, 19 bp, Mus musculus
  siRNA target sequence for 5930437A14Rik (NM_172542.1,1425-1443).
gggtgacctgtcagaagtt

SEQ ID NO: 775676 - DNA, 19 bp, Mus musculus
  siRNA target sequence for 5930437A14Rik (NM_172542.1,1441-1459).
gttgaaagcttctggtatt

SEQ ID NO: 775677 - DNA, 19 bp, Mus musculus
  siRNA target sequence for 5930437A14Rik (NM_172542.1,1444-1462).
gaaagcttctggtatttct

SEQ ID NO: 775678 - DNA, 19 bp, Mus musculus
  siRNA target sequence for 5930437A14Rik (NM_172542.1,1464-1482).
ccccggtgtccaatgacat

SEQ ID NO: 775679 - DNA, 19 bp, Mus musculus
  siRNA target sequence for 5930437A14Rik (NM_172542.1,1570-1588).
gtgcaatgggccttgcata

SEQ ID NO: 775680 - DNA, 19 bp, Mus musculus
  siRNA target sequence for 5930437A14Rik (NM_172542.1,1637-1655).
gatggcatcaccttaccat

SEQ ID NO: 775681 - DNA, 19 bp, Mus musculus
  siRNA target sequence for 5930437A14Rik (NM_172542.1,1885-1903).
cactccatgtgaaaacact

SEQ ID NO: 775682 - DNA, 19 bp, Mus musculus
  siRNA target sequence for 5730593F17Rik (NM_172543.1,258-276).
gttcggtggccccagaaaa

SEQ ID NO: 775683 - DNA, 19 bp, Mus musculus
  siRNA target sequence for 5730593F17Rik (NM_172543.1,382-400).
cttcacctgctgtaccaat

SEQ ID NO: 775684 - DNA, 19 bp, Mus musculus
  siRNA target sequence for 5730593F17Rik (NM_172543.1,936-954).
catccatccacggtaacaa

SEQ ID NO: 775685 - DNA, 19 bp, Mus musculus
  siRNA target sequence for Nrxn3 (NM_172544.1,775-793).
ccttaaagaggttgtttat

SEQ ID NO: 775686 - DNA, 19 bp, Mus musculus
  siRNA target sequence for Nrxn3 (NM_172544.1,962-980).
cgtatgggctccatttcct

SEQ ID NO: 775687 - DNA, 19 bp, Mus musculus
  siRNA target sequence for Nrxn3 (NM_172544.1,1001-1019).
cccaacggcctgattctct

SEQ ID NO: 775688 - DNA, 19 bp, Mus musculus
  siRNA target sequence for Nrxn3 (NM_172544.1,1002-1020).
ccaacggcctgattctctt

SEQ ID NO: 775689 - DNA, 19 bp, Mus musculus
  siRNA target sequence for Nrxn3 (NM_172544.1,1049-1067).
gatgtccggagccaaaaga

SEQ ID NO: 775690 - DNA, 19 bp, Mus musculus
  siRNA target sequence for Nrxn3 (NM_172544.1,1052-1070).
gtccggagccaaaagaaca

SEQ ID NO: 775691 - DNA, 19 bp, Mus musculus
  siRNA target sequence for Nrxn3 (NM_172544.1,1392-1410).
gcatccgcgacctgttcat

SEQ ID NO: 775692 - DNA, 19 bp, Mus musculus
  siRNA target sequence for Nrxn3 (NM_172544.1,1509-1527).
gctacccctgcaagaacaa

SEQ ID NO: 775693 - DNA, 19 bp, Mus musculus
  siRNA target sequence for Nrxn3 (NM_172544.1,1787-1805).
cgtgtcaagctcatggtta

SEQ ID NO: 775694 - DNA, 19 bp, Mus musculus
  siRNA target sequence for Nrxn3 (NM_172544.1,1796-1814).
ctcatggttaacttagact

SEQ ID NO: 775695 - DNA, 19 bp, Mus musculus
  siRNA target sequence for Nrxn3 (NM_172544.1,1802-1820).
gttaacttagactgtatca

SEQ ID NO: 775696 - DNA, 19 bp, Mus musculus
  siRNA target sequence for Nrxn3 (NM_172544.1,1903-1921).
ggtagtgcggagaggaaaa

SEQ ID NO: 775697 - DNA, 19 bp, Mus musculus
  siRNA target sequence for Nrxn3 (NM_172544.1,1904-1922).
gtagtgcggagaggaaaaa

SEQ ID NO: 775698 - DNA, 19 bp, Mus musculus
  siRNA target sequence for Nrxn3 (NM_172544.1,1930-1948).
gctaacagtggatgatgat

SEQ ID NO: 775699 - DNA, 19 bp, Mus musculus
  siRNA target sequence for Nrxn3 (NM_172544.1,1982-2000).
cgcctggaattccacaata

SEQ ID NO: 775700 - DNA, 19 bp, Mus musculus
  siRNA target sequence for Nrxn3 (NM_172544.1,1987-2005).
ggaattccacaatattgaa

SEQ ID NO: 775701 - DNA, 19 bp, Mus musculus
  siRNA target sequence for Nrxn3 (NM_172544.1,1988-2006).
gaattccacaatattgaaa

SEQ ID NO: 775702 - DNA, 19 bp, Mus musculus
  siRNA target sequence for Nrxn3 (NM_172544.1,2083-2101).
caatggcttactgtacatt

SEQ ID NO: 775703 - DNA, 19 bp, Mus musculus
  siRNA target sequence for Nrxn3 (NM_172544.1,2147-2165).
cgctttggactgagaaaca

SEQ ID NO: 775704 - DNA, 19 bp, Mus musculus
  siRNA target sequence for Nrxn3 (NM_172544.1,2170-2188).
cgccgaccctgtcactttt

SEQ ID NO: 775705 - DNA, 19 bp, Mus musculus
  siRNA target sequence for Nrxn3 (NM_172544.1,2171-2189).
gccgaccctgtcactttta

SEQ ID NO: 775706 - DNA, 19 bp, Mus musculus
  siRNA target sequence for Nrxn3 (NM_172544.1,2172-2190).
ccgaccctgtcacttttaa

SEQ ID NO: 775707 - DNA, 19 bp, Mus musculus
  siRNA target sequence for Nrxn3 (NM_172544.1,2174-2192).
gaccctgtcacttttaaga

SEQ ID NO: 775708 - DNA, 19 bp, Mus musculus
  siRNA target sequence for Nrxn3 (NM_172544.1,2367-2385).
gcaatggtcccaatgtgat

SEQ ID NO: 775709 - DNA, 19 bp, Mus musculus
  siRNA target sequence for Nrxn3 (NM_172544.1,2500-2518).
catcaatggtgccaaaaat

SEQ ID NO: 775710 - DNA, 19 bp, Mus musculus
  siRNA target sequence for Nrxn3 (NM_172544.1,2510-2528).
gccaaaaatctggatttga

SEQ ID NO: 775711 - DNA, 19 bp, Mus musculus
  siRNA target sequence for Nrxn3 (NM_172544.1,2640-2658).
gacgcctgcctgatctcat

SEQ ID NO: 775712 - DNA, 19 bp, Mus musculus
  siRNA target sequence for Nrxn3 (NM_172544.1,2689-2707).
cgagcgaggctgtgaagtt

SEQ ID NO: 775713 - DNA, 19 bp, Mus musculus
  siRNA target sequence for Nrxn3 (NM_172544.1,2849-2867).
gaccctggtgcaacataca

SEQ ID NO: 775714 - DNA, 19 bp, Mus musculus
  siRNA target sequence for Nrxn3 (NM_172544.1,3097-3115).
gagaactcctgtcaatgat

SEQ ID NO: 775715 - DNA, 19 bp, Mus musculus
  siRNA target sequence for Nrxn3 (NM_172544.1,3185-3203).
gtgaatgagcactatccta

SEQ ID NO: 775716 - DNA, 19 bp, Mus musculus
  siRNA target sequence for Nrxn3 (NM_172544.1,3221-3239).
gaacgcctccaaatggtaa

SEQ ID NO: 775717 - DNA, 19 bp, Mus musculus
  siRNA target sequence for Nrxn3 (NM_172544.1,3225-3243).
gcctccaaatggtaaaaca

SEQ ID NO: 775718 - DNA, 19 bp, Mus musculus
  siRNA target sequence for Nrxn3 (NM_172544.1,3384-3402).
ggctctattatgatggttt

SEQ ID NO: 775719 - DNA, 19 bp, Mus musculus
  siRNA target sequence for Nrxn3 (NM_172544.1,3422-3440).
gctgagaacaaccctaata

SEQ ID NO: 775720 - DNA, 19 bp, Mus musculus
  siRNA target sequence for Nrxn3 (NM_172544.1,3425-3443).
gagaacaaccctaatatta

SEQ ID NO: 775721 - DNA, 19 bp, Mus musculus
  siRNA target sequence for Nrxn3 (NM_172544.1,3427-3445).
gaacaaccctaatattaaa

SEQ ID NO: 775722 - DNA, 19 bp, Mus musculus
  siRNA target sequence for Nrxn3 (NM_172544.1,3507-3525).
cgtccatgccacctgaaat

SEQ ID NO: 775723 - DNA, 19 bp, Mus musculus
  siRNA target sequence for Nrxn3 (NM_172544.1,3604-3622).
gcccacgtcagatgatctt

SEQ ID NO: 775724 - DNA, 19 bp, Mus musculus
  siRNA target sequence for Nrxn3 (NM_172544.1,3606-3624).
ccacgtcagatgatcttgt

SEQ ID NO: 775725 - DNA, 19 bp, Mus musculus
  siRNA target sequence for Nrxn3 (NM_172544.1,3607-3625).
cacgtcagatgatcttgtt

SEQ ID NO: 775726 - DNA, 19 bp, Mus musculus
  siRNA target sequence for Nrxn3 (NM_172544.1,3610-3628).
gtcagatgatcttgtttca

SEQ ID NO: 775727 - DNA, 19 bp, Mus musculus
  siRNA target sequence for Nrxn3 (NM_172544.1,3838-3856).
ggacgaggggtcctatcaa

SEQ ID NO: 775728 - DNA, 19 bp, Mus musculus
  siRNA target sequence for Nrxn3 (NM_172544.1,3860-3878).
gacgagacgaggaactaca

SEQ ID NO: 775729 - DNA, 19 bp, Mus musculus
  siRNA target sequence for Nrxn3 (NM_172544.1,3863-3881).
gagacgaggaactacatca

SEQ ID NO: 775730 - DNA, 19 bp, Mus musculus
  siRNA target sequence for Nrxn3 (NM_172544.1,3897-3915).
gcaacggcacgctcatgaa

SEQ ID NO: 775731 - DNA, 19 bp, Mus musculus
  siRNA target sequence for Nrxn3 (NM_172544.1,3939-3957).
gcggccataagaaacagaa

SEQ ID NO: 775732 - DNA, 19 bp, Mus musculus
  siRNA target sequence for Nrxn3 (NM_172544.1,3940-3958).
cggccataagaaacagaaa

SEQ ID NO: 775733 - DNA, 19 bp, Mus musculus
  siRNA target sequence for 9230102N17Rik (NM_172545.1,1274-1292).
gaatccagtatcaagaaga

SEQ ID NO: 775734 - DNA, 19 bp, Mus musculus
  siRNA target sequence for 9230102N17Rik (NM_172545.1,1388-1406).
ggttccgaggcttgtaagt

SEQ ID NO: 775735 - DNA, 19 bp, Mus musculus
  siRNA target sequence for 9230102N17Rik (NM_172545.1,1686-1704).
caaacagcgtggtcaagta

SEQ ID NO: 775736 - DNA, 19 bp, Mus musculus
  siRNA target sequence for 9230102N17Rik (NM_172545.1,1711-1729).
gatgcgcccatccaacaaa

SEQ ID NO: 775737 - DNA, 19 bp, Mus musculus
  siRNA target sequence for 9230102N17Rik (NM_172545.1,1730-1748).
gcaccgctcttggtgttat

SEQ ID NO: 775738 - DNA, 19 bp, Mus musculus
  siRNA target sequence for 9230102N17Rik (NM_172545.1,1734-1752).
cgctcttggtgttatgtga

SEQ ID NO: 775739 - DNA, 19 bp, Mus musculus
  siRNA target sequence for 9230102N17Rik (NM_172545.1,1845-1863).
gcagcatctctcatcgttt

SEQ ID NO: 775740 - DNA, 19 bp, Mus musculus
  siRNA target sequence for 9230102N17Rik (NM_172545.1,1875-1893).
gtgcctctcgagtcaacaa

SEQ ID NO: 775741 - DNA, 19 bp, Mus musculus
  siRNA target sequence for 9230102N17Rik (NM_172545.1,2175-2193).
ccttggaaagtgctctaat

SEQ ID NO: 775742 - DNA, 19 bp, Mus musculus
  siRNA target sequence for 9230102N17Rik (NM_172545.1,2234-2252).
ccaaagcagctgtacttct

SEQ ID NO: 775743 - DNA, 19 bp, Mus musculus
  siRNA target sequence for 9230102N17Rik (NM_172545.1,2301-2319).
gaattgatcccaacttcaa

SEQ ID NO: 775744 - DNA, 19 bp, Mus musculus
  siRNA target sequence for 9230102N17Rik (NM_172545.1,2334-2352).
gtaagcgttccccattaca

SEQ ID NO: 775745 - DNA, 19 bp, Mus musculus
  siRNA target sequence for 9230102N17Rik (NM_172545.1,2402-2420).
gcgggtgccaatattgaca

SEQ ID NO: 775746 - DNA, 19 bp, Mus musculus
  siRNA target sequence for 9230102N17Rik (NM_172545.1,2582-2600).
gttcagtatctgctttcaa

SEQ ID NO: 775747 - DNA, 19 bp, Mus musculus
  siRNA target sequence for 9230102N17Rik (NM_172545.1,2724-2742).
gggacaacgaggagaacat

SEQ ID NO: 775748 - DNA, 19 bp, Mus musculus
  siRNA target sequence for 9230102N17Rik (NM_172545.1,2776-2794).
ggacatagctgaaatactt

SEQ ID NO: 775749 - DNA, 19 bp, Mus musculus
  siRNA target sequence for 9230102N17Rik (NM_172545.1,2810-2828).
gacctgcatgctgtgaata

SEQ ID NO: 775750 - DNA, 19 bp, Mus musculus
  siRNA target sequence for 9230102N17Rik (NM_172545.1,2907-2925).
cagatgttactctgaaaaa

SEQ ID NO: 775751 - DNA, 19 bp, Mus musculus
  siRNA target sequence for 9230102N17Rik (NM_172545.1,3116-3134).
ctgtgtcctaccaactata

SEQ ID NO: 775752 - DNA, 19 bp, Mus musculus
  siRNA target sequence for 9230102N17Rik (NM_172545.1,3123-3141).
ctaccaactataagtatgt

SEQ ID NO: 775753 - DNA, 19 bp, Mus musculus
  siRNA target sequence for 9230102N17Rik (NM_172545.1,3155-3173).
gtgacatcccccatgaaca

SEQ ID NO: 775754 - DNA, 19 bp, Mus musculus
  siRNA target sequence for 9230102N17Rik (NM_172545.1,3159-3177).
catcccccatgaacattga

SEQ ID NO: 775755 - DNA, 19 bp, Mus musculus
  siRNA target sequence for 9230102N17Rik (NM_172545.1,3199-3217).
gtactgcgtgtgtgtagat

SEQ ID NO: 775756 - DNA, 19 bp, Mus musculus
  siRNA target sequence for 9230102N17Rik (NM_172545.1,3256-3274).
catgcgctgctggtatgat

SEQ ID NO: 775757 - DNA, 19 bp, Mus musculus
  siRNA target sequence for 9230102N17Rik (NM_172545.1,3284-3302).
cgacttctgcctgagttta

SEQ ID NO: 775758 - DNA, 19 bp, Mus musculus
  siRNA target sequence for 9230102N17Rik (NM_172545.1,3308-3326).
gcagaaccacccttgatct

SEQ ID NO: 775759 - DNA, 19 bp, Mus musculus
  siRNA target sequence for 9230102N17Rik (NM_172545.1,3309-3327).
cagaaccacccttgatctt

SEQ ID NO: 775760 - DNA, 19 bp, Mus musculus
  siRNA target sequence for 9230102N17Rik (NM_172545.1,3322-3340).
gatcttcgagtgcaatcat

SEQ ID NO: 775761 - DNA, 19 bp, Mus musculus
  siRNA target sequence for 9230102N17Rik (NM_172545.1,3366-3384).
gcaatcgtgtggtgcaaaa

SEQ ID NO: 775762 - DNA, 19 bp, Mus musculus
  siRNA target sequence for 9230102N17Rik (NM_172545.1,3367-3385).
caatcgtgtggtgcaaaat

SEQ ID NO: 775763 - DNA, 19 bp, Mus musculus
  siRNA target sequence for 9230102N17Rik (NM_172545.1,3393-3411).
gggcaaggctgcagcttta

SEQ ID NO: 775764 - DNA, 19 bp, Mus musculus
  siRNA target sequence for 9230102N17Rik (NM_172545.1,3468-3486).
cctttgtctgcgaatacgt

SEQ ID NO: 775765 - DNA, 19 bp, Mus musculus
  siRNA target sequence for 9230102N17Rik (NM_172545.1,3469-3487).
ctttgtctgcgaatacgta

SEQ ID NO: 775766 - DNA, 19 bp, Mus musculus
  siRNA target sequence for 9230102N17Rik (NM_172545.1,3644-3662).
cctgtgcgagtgttcatgt

SEQ ID NO: 775767 - DNA, 19 bp, Mus musculus
  siRNA target sequence for 9130014G24 (NM_172547.1,235-253).
cgtatatgccacctttaca

SEQ ID NO: 775768 - DNA, 19 bp, Mus musculus
  siRNA target sequence for 9130014G24 (NM_172547.1,244-262).
cacctttacaccactctat

SEQ ID NO: 775769 - DNA, 19 bp, Mus musculus
  siRNA target sequence for 9130014G24 (NM_172547.1,252-270).
caccactctatttgtttga

SEQ ID NO: 775770 - DNA, 19 bp, Mus musculus
  siRNA target sequence for 9130014G24 (NM_172547.1,254-272).
ccactctatttgtttgaaa

SEQ ID NO: 775771 - DNA, 19 bp, Mus musculus
  siRNA target sequence for 9130014G24 (NM_172547.1,300-318).
cgaattctgcggagaaact

SEQ ID NO: 775772 - DNA, 19 bp, Mus musculus
  siRNA target sequence for 9130014G24 (NM_172547.1,301-319).
gaattctgcggagaaactt

SEQ ID NO: 775773 - DNA, 19 bp, Mus musculus
  siRNA target sequence for 9130014G24 (NM_172547.1,313-331).
gaaacttagggaatatggt

SEQ ID NO: 775774 - DNA, 19 bp, Mus musculus
  siRNA target sequence for 9130014G24 (NM_172547.1,321-339).
gggaatatggtctttctca

SEQ ID NO: 775775 - DNA, 19 bp, Mus musculus
  siRNA target sequence for 9130014G24 (NM_172547.1,424-442).
gaaactcattcgccataaa

SEQ ID NO: 775776 - DNA, 19 bp, Mus musculus
  siRNA target sequence for 9130014G24 (NM_172547.1,496-514).
gcagttccttgagatttca

SEQ ID NO: 775777 - DNA, 19 bp, Mus musculus
  siRNA target sequence for 9130014G24 (NM_172547.1,497-515).
cagttccttgagatttcaa

SEQ ID NO: 775778 - DNA, 19 bp, Mus musculus
  siRNA target sequence for 9130014G24 (NM_172547.1,499-517).
gttccttgagatttcaagt

SEQ ID NO: 775779 - DNA, 19 bp, Mus musculus
  siRNA target sequence for 9130014G24 (NM_172547.1,534-552).
gaatgactccatttacgat

SEQ ID NO: 775780 - DNA, 19 bp, Mus musculus
  siRNA target sequence for 9130014G24 (NM_172547.1,618-636).
ctcccctcgtggaaaatga

SEQ ID NO: 775781 - DNA, 19 bp, Mus musculus
  siRNA target sequence for 9130014G24 (NM_172547.1,695-713).
ggcaatattgcattgcaaa

SEQ ID NO: 775782 - DNA, 19 bp, Mus musculus
  siRNA target sequence for 9130014G24 (NM_172547.1,753-771).
cggacttccaccaacttga

SEQ ID NO: 775783 - DNA, 19 bp, Mus musculus
  siRNA target sequence for 9130014G24 (NM_172547.1,763-781).
ccaacttgaggctactagt

SEQ ID NO: 775784 - DNA, 19 bp, Mus musculus
  siRNA target sequence for 9130014G24 (NM_172547.1,764-782).
caacttgaggctactagtt

SEQ ID NO: 775785 - DNA, 19 bp, Mus musculus
  siRNA target sequence for 9130014G24 (NM_172547.1,854-872).
ggggttgccaaagagatat

SEQ ID NO: 775786 - DNA, 19 bp, Mus musculus
  siRNA target sequence for 9130014G24 (NM_172547.1,873-891).
ggttagacttcgaagactt

SEQ ID NO: 775787 - DNA, 19 bp, Mus musculus
  siRNA target sequence for 9130014G24 (NM_172547.1,923-941).
cacaagccacattcttatt

SEQ ID NO: 775788 - DNA, 19 bp, Mus musculus
  siRNA target sequence for 9130014G24 (NM_172547.1,925-943).
caagccacattcttattgt

SEQ ID NO: 775789 - DNA, 19 bp, Mus musculus
  siRNA target sequence for 9130014G24 (NM_172547.1,982-1000).
gcgtgtgccttactatcta

SEQ ID NO: 775790 - DNA, 19 bp, Mus musculus
  siRNA target sequence for 9130014G24 (NM_172547.1,983-1001).
cgtgtgccttactatctat

SEQ ID NO: 775791 - DNA, 19 bp, Mus musculus
  siRNA target sequence for 9130014G24 (NM_172547.1,1009-1027).
cagcctgaagcctatagaa

SEQ ID NO: 775792 - DNA, 19 bp, Mus musculus
  siRNA target sequence for 9130014G24 (NM_172547.1,1011-1029).
gcctgaagcctatagaact

SEQ ID NO: 775793 - DNA, 19 bp, Mus musculus
  siRNA target sequence for 9130014G24 (NM_172547.1,1012-1030).
cctgaagcctatagaacta

SEQ ID NO: 775794 - DNA, 19 bp, Mus musculus
  siRNA target sequence for 9130014G24 (NM_172547.1,1063-1081).
ggaatctggagccttaaca

SEQ ID NO: 775795 - DNA, 19 bp, Mus musculus
  siRNA target sequence for 9130014G24 (NM_172547.1,1064-1082).
gaatctggagccttaacaa

SEQ ID NO: 775796 - DNA, 19 bp, Mus musculus
  siRNA target sequence for 9130014G24 (NM_172547.1,1140-1158).
ccctgaagcctcttagtgt

SEQ ID NO: 775797 - DNA, 19 bp, Mus musculus
  siRNA target sequence for 9130014G24 (NM_172547.1,1141-1159).
cctgaagcctcttagtgtt

SEQ ID NO: 775798 - DNA, 19 bp, Mus musculus
  siRNA target sequence for 9130014G24 (NM_172547.1,1155-1173).
gtgttgttctgagaattca

SEQ ID NO: 775799 - DNA, 19 bp, Mus musculus
  siRNA target sequence for D130071N24Rik (NM_172554.1,62-80).
ccacccggaggaaatcaaa

SEQ ID NO: 775800 - DNA, 19 bp, Mus musculus
  siRNA target sequence for D130071N24Rik (NM_172554.1,115-133).
ctcttggtcggaaaactca

SEQ ID NO: 775801 - DNA, 19 bp, Mus musculus
  siRNA target sequence for D130071N24Rik (NM_172554.1,121-139).
gtcggaaaactcatattga

SEQ ID NO: 775802 - DNA, 19 bp, Mus musculus
  siRNA target sequence for D130071N24Rik (NM_172554.1,161-179).
cgtcaaggcgacacaatat

SEQ ID NO: 775803 - DNA, 19 bp, Mus musculus
  siRNA target sequence for D130071N24Rik (NM_172554.1,167-185).
ggcgacacaatatggaata

SEQ ID NO: 775804 - DNA, 19 bp, Mus musculus
  siRNA target sequence for D130071N24Rik (NM_172554.1,169-187).
cgacacaatatggaatata

SEQ ID NO: 775805 - DNA, 19 bp, Mus musculus
  siRNA target sequence for D130071N24Rik (NM_172554.1,206-224).
ggtggaagcgggttacgat

SEQ ID NO: 775806 - DNA, 19 bp, Mus musculus
  siRNA target sequence for D130071N24Rik (NM_172554.1,271-289).
ccatcaataacagaataga

SEQ ID NO: 775807 - DNA, 19 bp, Mus musculus
  siRNA target sequence for D130071N24Rik (NM_172554.1,294-312).
gtcaaatactatatttcga

SEQ ID NO: 775808 - DNA, 19 bp, Mus musculus
  siRNA target sequence for D130071N24Rik (NM_172554.1,296-314).
caaatactatatttcgaaa

SEQ ID NO: 775809 - DNA, 19 bp, Mus musculus
  siRNA target sequence for D130071N24Rik (NM_172554.1,362-380).
gcactgggccacaagacaa

SEQ ID NO: 775810 - DNA, 19 bp, Mus musculus
  siRNA target sequence for D130071N24Rik (NM_172554.1,376-394).
gacaaggccatttatccat

SEQ ID NO: 775811 - DNA, 19 bp, Mus musculus
  siRNA target sequence for D130071N24Rik (NM_172554.1,417-435).
ggtgcagacccctccttaa

SEQ ID NO: 775812 - DNA, 19 bp, Mus musculus
  siRNA target sequence for D130071N24Rik (NM_172554.1,418-436).
gtgcagacccctccttaat

SEQ ID NO: 775813 - DNA, 19 bp, Mus musculus
  siRNA target sequence for D130071N24Rik (NM_172554.1,421-439).
cagacccctccttaattga

SEQ ID NO: 775814 - DNA, 19 bp, Mus musculus
  siRNA target sequence for D130071N24Rik (NM_172554.1,476-494).
gttcggacatacctcaatt

SEQ ID NO: 775815 - DNA, 19 bp, Mus musculus
  siRNA target sequence for D130071N24Rik (NM_172554.1,487-505).
cctcaattgttgcttatct

SEQ ID NO: 775816 - DNA, 19 bp, Mus musculus
  siRNA target sequence for D130071N24Rik (NM_172554.1,488-506).
ctcaattgttgcttatctt

SEQ ID NO: 775817 - DNA, 19 bp, Mus musculus
  siRNA target sequence for D130071N24Rik (NM_172554.1,511-529).
caaaaggacaggatgtaga

SEQ ID NO: 775818 - DNA, 19 bp, Mus musculus
  siRNA target sequence for D130071N24Rik (NM_172554.1,516-534).
ggacaggatgtagatatga

SEQ ID NO: 775819 - DNA, 19 bp, Mus musculus
  siRNA target sequence for D130071N24Rik (NM_172554.1,517-535).
gacaggatgtagatatgat

SEQ ID NO: 775820 - DNA, 19 bp, Mus musculus
  siRNA target sequence for D130071N24Rik (NM_172554.1,586-604).
gtgtggatccaactagatt

SEQ ID NO: 775821 - DNA, 19 bp, Mus musculus
  siRNA target sequence for D130071N24Rik (NM_172554.1,590-608).
ggatccaactagattgctt

SEQ ID NO: 775822 - DNA, 19 bp, Mus musculus
  siRNA target sequence for D130071N24Rik (NM_172554.1,591-609).
gatccaactagattgcttt

SEQ ID NO: 775823 - DNA, 19 bp, Mus musculus
  siRNA target sequence for D130071N24Rik (NM_172554.1,601-619).
gattgcttttaacattcaa

SEQ ID NO: 775824 - DNA, 19 bp, Mus musculus
  siRNA target sequence for D130071N24Rik (NM_172554.1,605-623).
gcttttaacattcaatgtt

SEQ ID NO: 775825 - DNA, 19 bp, Mus musculus
  siRNA target sequence for D130071N24Rik (NM_172554.1,749-767).
gggtgagtcagcacttgat

SEQ ID NO: 775826 - DNA, 19 bp, Mus musculus
  siRNA target sequence for D130071N24Rik (NM_172554.1,789-807).
gtgtggatgatcaaccatt

SEQ ID NO: 775827 - DNA, 19 bp, Mus musculus
  siRNA target sequence for D130071N24Rik (NM_172554.1,822-840).
caagcgaaagggtatgaca

SEQ ID NO: 775828 - DNA, 19 bp, Mus musculus
  siRNA target sequence for D130071N24Rik (NM_172554.1,861-879).
ctgaaggctgacaaggaat

SEQ ID NO: 775829 - DNA, 19 bp, Mus musculus
  siRNA target sequence for D130071N24Rik (NM_172554.1,920-938).
ctggctggtcgggtttata

SEQ ID NO: 775830 - DNA, 19 bp, Mus musculus
  siRNA target sequence for D130071N24Rik (NM_172554.1,942-960).
gacctagacattgattctt

SEQ ID NO: 775831 - DNA, 19 bp, Mus musculus
  siRNA target sequence for D130071N24Rik (NM_172554.1,963-981).
ctcattaaagggttaatgt

SEQ ID NO: 775832 - DNA, 19 bp, Mus musculus
  siRNA target sequence for D130071N24Rik (NM_172554.1,965-983).
cattaaagggttaatgtat

SEQ ID NO: 775833 - DNA, 19 bp, Mus musculus
  siRNA target sequence for D130071N24Rik (NM_172554.1,1021-1039).
ccttctttgaccattcaat

SEQ ID NO: 775834 - DNA, 19 bp, Mus musculus
  siRNA target sequence for D130071N24Rik (NM_172554.1,1048-1066).
cattgccccttgggatata

SEQ ID NO: 775835 - DNA, 19 bp, Mus musculus
  siRNA target sequence for D130071N24Rik (NM_172554.1,1270-1288).
gaagtctggacctcagtat

SEQ ID NO: 775836 - DNA, 19 bp, Mus musculus
  siRNA target sequence for D130071N24Rik (NM_172554.1,1317-1335).
ccagtgaggtccaaacact

SEQ ID NO: 775837 - DNA, 19 bp, Mus musculus
  siRNA target sequence for D130071N24Rik (NM_172554.1,1349-1367).
ccgctgtatagcgaaattt

SEQ ID NO: 775838 - DNA, 19 bp, Mus musculus
  siRNA target sequence for D130071N24Rik (NM_172554.1,1354-1372).
gtatagcgaaatttgatca

SEQ ID NO: 775839 - DNA, 19 bp, Mus musculus
  siRNA target sequence for D130071N24Rik (NM_172554.1,1398-1416).
gtaggtgcaggcaaccata

SEQ ID NO: 775840 - DNA, 19 bp, Mus musculus
  siRNA target sequence for D130071N24Rik (NM_172554.1,1407-1425).
ggcaaccataggtacttta

SEQ ID NO: 775841 - DNA, 19 bp, Mus musculus
  siRNA target sequence for D130071N24Rik (NM_172554.1,1408-1426).
gcaaccataggtactttat

SEQ ID NO: 775842 - DNA, 19 bp, Mus musculus
  siRNA target sequence for D130071N24Rik (NM_172554.1,1526-1544).
gttttggacatacataact

SEQ ID NO: 775843 - DNA, 19 bp, Mus musculus
  siRNA target sequence for D130071N24Rik (NM_172554.1,1584-1602).
ctcaacagtgtgtttcact

SEQ ID NO: 775844 - DNA, 19 bp, Mus musculus
  siRNA target sequence for D130071N24Rik (NM_172554.1,1632-1650).
cagctgtaccagataacat

SEQ ID NO: 775845 - DNA, 19 bp, Mus musculus
  siRNA target sequence for D130071N24Rik (NM_172554.1,1640-1658).
ccagataacatgtttaggt

SEQ ID NO: 775846 - DNA, 19 bp, Mus musculus
  siRNA target sequence for D130071N24Rik (NM_172554.1,1641-1659).
cagataacatgtttaggta

SEQ ID NO: 775847 - DNA, 19 bp, Mus musculus
  siRNA target sequence for D130071N24Rik (NM_172554.1,1643-1661).
gataacatgtttaggtatt

SEQ ID NO: 775848 - DNA, 19 bp, Mus musculus
  siRNA target sequence for D130071N24Rik (NM_172554.1,1651-1669).
gtttaggtattactacaaa

SEQ ID NO: 775849 - DNA, 19 bp, Mus musculus
  siRNA target sequence for D130071N24Rik (NM_172554.1,1656-1674).
ggtattactacaaatgaaa

SEQ ID NO: 775850 - DNA, 19 bp, Mus musculus
  siRNA target sequence for D130071N24Rik (NM_172554.1,1720-1738).
ctattgaaagcccattcaa

SEQ ID NO: 775851 - DNA, 19 bp, Mus musculus
  siRNA target sequence for D130071N24Rik (NM_172554.1,1749-1767).
gtaaggaatattatagact

SEQ ID NO: 775852 - DNA, 19 bp, Mus musculus
  siRNA target sequence for D130071N24Rik (NM_172554.1,1789-1807).
gcctctttcgtcctgttat

SEQ ID NO: 775853 - DNA, 19 bp, Mus musculus
  siRNA target sequence for D130071N24Rik (NM_172554.1,1817-1835).
gaccaggcagtacactata

SEQ ID NO: 775854 - DNA, 19 bp, Mus musculus
  siRNA target sequence for D130071N24Rik (NM_172554.1,1819-1837).
ccaggcagtacactataga

SEQ ID NO: 775855 - DNA, 19 bp, Mus musculus
  siRNA target sequence for D130071N24Rik (NM_172554.1,1822-1840).
ggcagtacactatagaata

SEQ ID NO: 775856 - DNA, 19 bp, Mus musculus
  siRNA target sequence for D130071N24Rik (NM_172554.1,1823-1841).
gcagtacactatagaatat

SEQ ID NO: 775857 - DNA, 19 bp, Mus musculus
  siRNA target sequence for 9830165K03Rik (NM_172560.1,1481-1499).
ggtgctgcggggacttcaa

SEQ ID NO: 775858 - DNA, 19 bp, Mus musculus
  siRNA target sequence for 9830165K03Rik (NM_172560.1,1548-1566).
gtgacccgcctggaacaaa

SEQ ID NO: 775859 - DNA, 19 bp, Mus musculus
  siRNA target sequence for 9830165K03Rik (NM_172560.1,2774-2792).
ggaagacccgggatctgat

SEQ ID NO: 775860 - DNA, 19 bp, Mus musculus
  siRNA target sequence for 9830165K03Rik (NM_172560.1,2826-2844).
gaaggcctcaagaactttt

SEQ ID NO: 775861 - DNA, 19 bp, Mus musculus
  siRNA target sequence for 9830165K03Rik (NM_172560.1,3030-3048).
gggcttccctcaaccaatt

SEQ ID NO: 775862 - DNA, 19 bp, Mus musculus
  siRNA target sequence for 9830165K03Rik (NM_172560.1,3031-3049).
ggcttccctcaaccaattt

SEQ ID NO: 775863 - DNA, 19 bp, Mus musculus
  siRNA target sequence for 9830165K03Rik (NM_172560.1,3191-3209).
ggaacacagtggaactgat

SEQ ID NO: 775864 - DNA, 19 bp, Mus musculus
  siRNA target sequence for D930024B17 (NM_172566.1,686-704).
ggtgatcatcgatgagtta

SEQ ID NO: 775865 - DNA, 19 bp, Mus musculus
  siRNA target sequence for D930024B17 (NM_172566.1,687-705).
gtgatcatcgatgagttaa

SEQ ID NO: 775866 - DNA, 19 bp, Mus musculus
  siRNA target sequence for D930024B17 (NM_172566.1,689-707).
gatcatcgatgagttaata

SEQ ID NO: 775867 - DNA, 19 bp, Mus musculus
  siRNA target sequence for D930024B17 (NM_172566.1,852-870).
cgggaccttgagatgttca

SEQ ID NO: 775868 - DNA, 19 bp, Mus musculus
  siRNA target sequence for D930024B17 (NM_172566.1,1071-1089).
ctccagatcttcactgtta

SEQ ID NO: 775869 - DNA, 19 bp, Mus musculus
  siRNA target sequence for D930024B17 (NM_172566.1,1111-1129).
gccagatccctcaaacctt

SEQ ID NO: 775870 - DNA, 19 bp, Mus musculus
  siRNA target sequence for D930024B17 (NM_172566.1,1153-1171).
gagactactcccacttact

SEQ ID NO: 775871 - DNA, 19 bp, Mus musculus
  siRNA target sequence for D930024B17 (NM_172566.1,1155-1173).
gactactcccacttactga

SEQ ID NO: 775872 - DNA, 19 bp, Mus musculus
  siRNA target sequence for D930024B17 (NM_172566.1,1157-1175).
ctactcccacttactgaaa

SEQ ID NO: 775873 - DNA, 19 bp, Mus musculus
  siRNA target sequence for D930024B17 (NM_172566.1,1185-1203).
gtatcggtcgacagagtaa

SEQ ID NO: 775874 - DNA, 19 bp, Mus musculus
  siRNA target sequence for D930024B17 (NM_172566.1,1189-1207).
cggtcgacagagtaaagca

SEQ ID NO: 775875 - DNA, 19 bp, Mus musculus
  siRNA target sequence for D930024B17 (NM_172566.1,1230-1248).
catgaccacgtcatcactt

SEQ ID NO: 775876 - DNA, 19 bp, Mus musculus
  siRNA target sequence for D930024B17 (NM_172566.1,1440-1458).
ccatgggagctctttgtaa

SEQ ID NO: 775877 - DNA, 19 bp, Mus musculus
  siRNA target sequence for D930024B17 (NM_172566.1,1446-1464).
gagctctttgtaaagtact

SEQ ID NO: 775878 - DNA, 19 bp, Mus musculus
  siRNA target sequence for D930024B17 (NM_172566.1,1460-1478).
gtactaccatgccaagaat

SEQ ID NO: 775879 - DNA, 19 bp, Mus musculus
  siRNA target sequence for D930024B17 (NM_172566.1,1472-1490).
caagaatggccgtgcatat

SEQ ID NO: 775880 - DNA, 19 bp, Mus musculus
  siRNA target sequence for D930024B17 (NM_172566.1,1522-1540).
cctttgctctgcctataat

SEQ ID NO: 775881 - DNA, 19 bp, Mus musculus
  siRNA target sequence for D930024B17 (NM_172566.1,1836-1854).
cgccagctcaagaacatca

SEQ ID NO: 775882 - DNA, 19 bp, Mus musculus
  siRNA target sequence for D11Ertd768e (NM_172567.1,263-281).
ccggagaagcaagttgatt

SEQ ID NO: 775883 - DNA, 19 bp, Mus musculus
  siRNA target sequence for D11Ertd768e (NM_172567.1,264-282).
cggagaagcaagttgatta

SEQ ID NO: 775884 - DNA, 19 bp, Mus musculus
  siRNA target sequence for D11Ertd768e (NM_172567.1,265-283).
ggagaagcaagttgattat

SEQ ID NO: 775885 - DNA, 19 bp, Mus musculus
  siRNA target sequence for D11Ertd768e (NM_172567.1,287-305).
gtcaatgcccataaatact

SEQ ID NO: 775886 - DNA, 19 bp, Mus musculus
  siRNA target sequence for D11Ertd768e (NM_172567.1,336-354).
ggtttttcaaggatagaca

SEQ ID NO: 775887 - DNA, 19 bp, Mus musculus
  siRNA target sequence for D11Ertd768e (NM_172567.1,351-369).
gacactggctttttactga

SEQ ID NO: 775888 - DNA, 19 bp, Mus musculus
  siRNA target sequence for D11Ertd768e (NM_172567.1,547-565).
cggtcacctagaaattagt

SEQ ID NO: 775889 - DNA, 19 bp, Mus musculus
  siRNA target sequence for D11Ertd768e (NM_172567.1,641-659).
ccaattttacaaactaaca

SEQ ID NO: 775890 - DNA, 19 bp, Mus musculus
  siRNA target sequence for D11Ertd768e (NM_172567.1,665-683).
ccaaacctcttcgtttact

SEQ ID NO: 775891 - DNA, 19 bp, Mus musculus
  siRNA target sequence for D11Ertd768e (NM_172567.1,696-714).
ctgccacggctattgaact

SEQ ID NO: 775892 - DNA, 19 bp, Mus musculus
  siRNA target sequence for D11Ertd768e (NM_172567.1,710-728).
gaactgctcaagacaaatt

SEQ ID NO: 775893 - DNA, 19 bp, Mus musculus
  siRNA target sequence for D11Ertd768e (NM_172567.1,774-792).
gtgatgaagatcagagtta

SEQ ID NO: 775894 - DNA, 19 bp, Mus musculus
  siRNA target sequence for D11Ertd768e (NM_172567.1,812-830).
cttgatgtcatcgttctta

SEQ ID NO: 775895 - DNA, 19 bp, Mus musculus
  siRNA target sequence for D11Ertd768e (NM_172567.1,815-833).
gatgtcatcgttcttatat

SEQ ID NO: 775896 - DNA, 19 bp, Mus musculus
  siRNA target sequence for D11Ertd768e (NM_172567.1,820-838).
catcgttcttatatttgtt

SEQ ID NO: 775897 - DNA, 19 bp, Mus musculus
  siRNA target sequence for D11Ertd768e (NM_172567.1,913-931).
gatgcttcttcgagactat

SEQ ID NO: 775898 - DNA, 19 bp, Mus musculus
  siRNA target sequence for D11Ertd768e (NM_172567.1,926-944).
gactatggccgctatgaca

SEQ ID NO: 775899 - DNA, 19 bp, Mus musculus
  siRNA target sequence for D11Ertd768e (NM_172567.1,937-955).
ctatgacatggctcaactt

SEQ ID NO: 775900 - DNA, 19 bp, Mus musculus
  siRNA target sequence for D11Ertd768e (NM_172567.1,1004-1022).
gatggcaccagagtttact

SEQ ID NO: 775901 - DNA, 19 bp, Mus musculus
  siRNA target sequence for D11Ertd768e (NM_172567.1,1007-1025).
ggcaccagagtttacttct

SEQ ID NO: 775902 - DNA, 19 bp, Mus musculus
  siRNA target sequence for D11Ertd768e (NM_172567.1,1139-1157).
gtctggattcagtgcaaat

SEQ ID NO: 775903 - DNA, 19 bp, Mus musculus
  siRNA target sequence for 4933417C16Rik (NM_172568.1,267-285).
gagactggcaacattacta

SEQ ID NO: 775904 - DNA, 19 bp, Mus musculus
  siRNA target sequence for 4933417C16Rik (NM_172568.1,269-287).
gactggcaacattactata

SEQ ID NO: 775905 - DNA, 19 bp, Mus musculus
  siRNA target sequence for 4933417C16Rik (NM_172568.1,301-319).
ctcatttgactgcttactt

SEQ ID NO: 775906 - DNA, 19 bp, Mus musculus
  siRNA target sequence for 4933417C16Rik (NM_172568.1,382-400).
gctccattctgctctgata

SEQ ID NO: 775907 - DNA, 19 bp, Mus musculus
  siRNA target sequence for 4933417C16Rik (NM_172568.1,404-422).
gacatcccggcaaacttgt

SEQ ID NO: 775908 - DNA, 19 bp, Mus musculus
  siRNA target sequence for 4933417C16Rik (NM_172568.1,413-431).
gcaaacttgtccatgtcat

SEQ ID NO: 775909 - DNA, 19 bp, Mus musculus
  siRNA target sequence for 4933417C16Rik (NM_172568.1,421-439).
gtccatgtcatctatccta

SEQ ID NO: 775910 - DNA, 19 bp, Mus musculus
  siRNA target sequence for 4933417C16Rik (NM_172568.1,457-475).
ggaggaaaacctaaggttt

SEQ ID NO: 775911 - DNA, 19 bp, Mus musculus
  siRNA target sequence for 4933417C16Rik (NM_172568.1,493-511).
ctcacccatcagaaataga

SEQ ID NO: 775912 - DNA, 19 bp, Mus musculus
  siRNA target sequence for 4933417C16Rik (NM_172568.1,604-622).
ggcagatctaccaaatcca

SEQ ID NO: 775913 - DNA, 19 bp, Mus musculus
  siRNA target sequence for 4933417C16Rik (NM_172568.1,660-678).
ctacaagacgacatttaca

SEQ ID NO: 775914 - DNA, 19 bp, Mus musculus
  siRNA target sequence for 4933417C16Rik (NM_172568.1,698-716).
gggtccctgcaggaaaata

SEQ ID NO: 775915 - DNA, 19 bp, Mus musculus
  siRNA target sequence for 4933417C16Rik (NM_172568.1,699-717).
ggtccctgcaggaaaatat

SEQ ID NO: 775916 - DNA, 19 bp, Mus musculus
  siRNA target sequence for 4933417C16Rik (NM_172568.1,700-718).
gtccctgcaggaaaatata

SEQ ID NO: 775917 - DNA, 19 bp, Mus musculus
  siRNA target sequence for 4933417C16Rik (NM_172568.1,734-752).
gcagtatctgattttgcaa

SEQ ID NO: 775918 - DNA, 19 bp, Mus musculus
  siRNA target sequence for 4933417C16Rik (NM_172568.1,735-753).
cagtatctgattttgcaaa

SEQ ID NO: 775919 - DNA, 19 bp, Mus musculus
  siRNA target sequence for 4933417C16Rik (NM_172568.1,832-850).
gaagctcaggaaattgcaa

SEQ ID NO: 775920 - DNA, 19 bp, Mus musculus
  siRNA target sequence for 4933417C16Rik (NM_172568.1,895-913).
gtgtcgaatctgtcagata

SEQ ID NO: 775921 - DNA, 19 bp, Mus musculus
  siRNA target sequence for 4933417C16Rik (NM_172568.1,952-970).
cggctgtgtgggaagtcta

SEQ ID NO: 775922 - DNA, 19 bp, Mus musculus
  siRNA target sequence for 4933417C16Rik (NM_172568.1,980-998).
caccaagagtgcctgaaaa

SEQ ID NO: 775923 - DNA, 19 bp, Mus musculus
  siRNA target sequence for 4933417C16Rik (NM_172568.1,1028-1046).
gcagatctaggcactgtaa

SEQ ID NO: 775924 - DNA, 19 bp, Mus musculus
  siRNA target sequence for 4933417C16Rik (NM_172568.1,1029-1047).
cagatctaggcactgtaaa

SEQ ID NO: 775925 - DNA, 19 bp, Mus musculus
  siRNA target sequence for 4933417C16Rik (NM_172568.1,1031-1049).
gatctaggcactgtaaaga

SEQ ID NO: 775926 - DNA, 19 bp, Mus musculus
  siRNA target sequence for 4933417C16Rik (NM_172568.1,1268-1286).
caacccagaccggaagaaa

SEQ ID NO: 775927 - DNA, 19 bp, Mus musculus
  siRNA target sequence for 4933417C16Rik (NM_172568.1,1296-1314).
ccgagtcgggagatggtaa

SEQ ID NO: 775928 - DNA, 19 bp, Mus musculus
  siRNA target sequence for 4933417C16Rik (NM_172568.1,1297-1315).
cgagtcgggagatggtaat

SEQ ID NO: 775929 - DNA, 19 bp, Mus musculus
  siRNA target sequence for 4933417C16Rik (NM_172568.1,1300-1318).
gtcgggagatggtaatgca

SEQ ID NO: 775930 - DNA, 19 bp, Mus musculus
  siRNA target sequence for 1110033G01Rik (NM_172571.2,354-372).
gcatggacgatgatctctt

SEQ ID NO: 775931 - DNA, 19 bp, Mus musculus
  siRNA target sequence for 1110033G01Rik (NM_172571.2,355-373).
catggacgatgatctcttt

SEQ ID NO: 775932 - DNA, 19 bp, Mus musculus
  siRNA target sequence for 1110033G01Rik (NM_172571.2,427-445).
gaaagaaggacctagcaat

SEQ ID NO: 775933 - DNA, 19 bp, Mus musculus
  siRNA target sequence for 1110033G01Rik (NM_172571.2,431-449).
gaaggacctagcaatcaca

SEQ ID NO: 775934 - DNA, 19 bp, Mus musculus
  siRNA target sequence for 1110033G01Rik (NM_172571.2,451-469).
gcctgctggcacattaaca

SEQ ID NO: 775935 - DNA, 19 bp, Mus musculus
  siRNA target sequence for 1110033G01Rik (NM_172571.2,522-540).
gcaagactgggcttcagta

SEQ ID NO: 775936 - DNA, 19 bp, Mus musculus
  siRNA target sequence for 1110033G01Rik (NM_172571.2,530-548).
gggcttcagtataagaagt

SEQ ID NO: 775937 - DNA, 19 bp, Mus musculus
  siRNA target sequence for 1110033G01Rik (NM_172571.2,708-726).
cgcccatcaggaagaaaga

SEQ ID NO: 775938 - DNA, 19 bp, Mus musculus
  siRNA target sequence for 1110033G01Rik (NM_172571.2,916-934).
ccagttagacaagaagtat

SEQ ID NO: 775939 - DNA, 19 bp, Mus musculus
  siRNA target sequence for 1110033G01Rik (NM_172571.2,1388-1406).
gcctcctcaccaaaagcat

SEQ ID NO: 775940 - DNA, 19 bp, Mus musculus
  siRNA target sequence for 1110033G01Rik (NM_172571.2,1580-1598).
ggagaagcctcgaaaccaa

SEQ ID NO: 775941 - DNA, 19 bp, Mus musculus
  siRNA target sequence for 1110033G01Rik (NM_172571.2,1588-1606).
ctcgaaaccaactacacaa

SEQ ID NO: 775942 - DNA, 19 bp, Mus musculus
  siRNA target sequence for 1110033G01Rik (NM_172571.2,2032-2050).
catcgaggatgcacataga

SEQ ID NO: 775943 - DNA, 19 bp, Mus musculus
  siRNA target sequence for 1110033G01Rik (NM_172571.2,2043-2061).
cacatagaagccgtatcaa

SEQ ID NO: 775944 - DNA, 19 bp, Mus musculus
  siRNA target sequence for 1110033G01Rik (NM_172571.2,2054-2072).
cgtatcaaggtgctagaaa

SEQ ID NO: 775945 - DNA, 19 bp, Mus musculus
  siRNA target sequence for 1110033G01Rik (NM_172571.2,2126-2144).
gctcagcatgcgtcatatt

SEQ ID NO: 775946 - DNA, 19 bp, Mus musculus
  siRNA target sequence for 1110033G01Rik (NM_172571.2,2770-2788).
gtcagtcatgaataagtgt

SEQ ID NO: 775947 - DNA, 19 bp, Mus musculus
  siRNA target sequence for 1110033G01Rik (NM_172571.2,2813-2831).
gcagagtgggctgagtatt

SEQ ID NO: 775948 - DNA, 19 bp, Mus musculus
  siRNA target sequence for 1110033G01Rik (NM_172571.2,2814-2832).
cagagtgggctgagtattt

SEQ ID NO: 775949 - DNA, 19 bp, Mus musculus
  siRNA target sequence for 1110033G01Rik (NM_172571.2,3038-3056).
gagaaggacaggttacaca

SEQ ID NO: 775950 - DNA, 19 bp, Mus musculus
  siRNA target sequence for 1110033G01Rik (NM_172571.2,3481-3499).
cgacttcttggagaatgaa

SEQ ID NO: 775951 - DNA, 19 bp, Mus musculus
  siRNA target sequence for 4732465I17Rik (NM_172572.1,525-543).
ggcctcagctgacaagaat

SEQ ID NO: 775952 - DNA, 19 bp, Mus musculus
  siRNA target sequence for 4732465I17Rik (NM_172572.1,827-845).
gggagggcaagcgacaaaa

SEQ ID NO: 775953 - DNA, 19 bp, Mus musculus
  siRNA target sequence for 4732465I17Rik (NM_172572.1,829-847).
gagggcaagcgacaaaact

SEQ ID NO: 775954 - DNA, 19 bp, Mus musculus
  siRNA target sequence for 4732465I17Rik (NM_172572.1,974-992).
gcaagatgcccaagattgt

SEQ ID NO: 775955 - DNA, 19 bp, Mus musculus
  siRNA target sequence for 4732465I17Rik (NM_172572.1,1134-1152).
ccgcaagaggatatctgtt

SEQ ID NO: 775956 - DNA, 19 bp, Mus musculus
  siRNA target sequence for 4732465I17Rik (NM_172572.1,1221-1239).
gcggtgccggcatgtcaaa

SEQ ID NO: 775957 - DNA, 19 bp, Mus musculus
  siRNA target sequence for 4732465I17Rik (NM_172572.1,1295-1313).
ccttcgactcctccttttt

SEQ ID NO: 775958 - DNA, 19 bp, Mus musculus
  siRNA target sequence for 4732465I17Rik (NM_172572.1,1299-1317).
cgactcctccttttttagt

SEQ ID NO: 775959 - DNA, 19 bp, Mus musculus
  siRNA target sequence for 4732465I17Rik (NM_172572.1,1339-1357).
cctgacgatgtctttgagt

SEQ ID NO: 775960 - DNA, 19 bp, Mus musculus
  siRNA target sequence for 4732465I17Rik (NM_172572.1,1428-1446).
gcacatcccgctaaaagaa

SEQ ID NO: 775961 - DNA, 19 bp, Mus musculus
  siRNA target sequence for 4732465I17Rik (NM_172572.1,1429-1447).
cacatcccgctaaaagaat

SEQ ID NO: 775962 - DNA, 19 bp, Mus musculus
  siRNA target sequence for 4732465I17Rik (NM_172572.1,1492-1510).
cgcattgcctccaaagtaa

SEQ ID NO: 775963 - DNA, 19 bp, Mus musculus
  siRNA target sequence for 4732465I17Rik (NM_172572.1,1493-1511).
gcattgcctccaaagtaaa

SEQ ID NO: 775964 - DNA, 19 bp, Mus musculus
  siRNA target sequence for 4732465I17Rik (NM_172572.1,1566-1584).
ctggctcaaccgaagctat

SEQ ID NO: 775965 - DNA, 19 bp, Mus musculus
  siRNA target sequence for 4732465I17Rik (NM_172572.1,1664-1682).
cgttcgttcacatcatcat

SEQ ID NO: 775966 - DNA, 19 bp, Mus musculus
  siRNA target sequence for 4732465I17Rik (NM_172572.1,1823-1841).
gctcgattgacctcattca

SEQ ID NO: 775967 - DNA, 19 bp, Mus musculus
  siRNA target sequence for 4732465I17Rik (NM_172572.1,1869-1887).
ccggaaggaccagcaaatt

SEQ ID NO: 775968 - DNA, 19 bp, Mus musculus
  siRNA target sequence for 4732465I17Rik (NM_172572.1,1871-1889).
ggaaggaccagcaaattga

SEQ ID NO: 775969 - DNA, 19 bp, Mus musculus
  siRNA target sequence for 4732465I17Rik (NM_172572.1,1901-1919).
ggagggagcgcgacattga

SEQ ID NO: 775970 - DNA, 19 bp, Mus musculus
  siRNA target sequence for 4732465I17Rik (NM_172572.1,1994-2012).
ctttagccacgttcgtaaa

SEQ ID NO: 775971 - DNA, 19 bp, Mus musculus
  siRNA target sequence for 4732465I17Rik (NM_172572.1,2007-2025).
cgtaaagtggcagaatgat

SEQ ID NO: 775972 - DNA, 19 bp, Mus musculus
  siRNA target sequence for 4732465I17Rik (NM_172572.1,2008-2026).
gtaaagtggcagaatgata

SEQ ID NO: 775973 - DNA, 19 bp, Mus musculus
  siRNA target sequence for 4732465I17Rik (NM_172572.1,2194-2212).
ggcttgttgcacatagact

SEQ ID NO: 775974 - DNA, 19 bp, Mus musculus
  siRNA target sequence for 4732465I17Rik (NM_172572.1,2400-2418).
ccggatctggctgtcttta

SEQ ID NO: 775975 - DNA, 19 bp, Mus musculus
  siRNA target sequence for 4732465I17Rik (NM_172572.1,2401-2419).
cggatctggctgtctttat

SEQ ID NO: 775976 - DNA, 19 bp, Mus musculus
  siRNA target sequence for 4732465I17Rik (NM_172572.1,2449-2467).
gtgtctgtggtcttccaaa

SEQ ID NO: 775977 - DNA, 19 bp, Mus musculus
  siRNA target sequence for 4732465I17Rik (NM_172572.1,2893-2911).
gtgctgtggctgtacatct

SEQ ID NO: 775978 - DNA, 19 bp, Mus musculus
  siRNA target sequence for 4732465I17Rik (NM_172572.1,2963-2981).
gccgcttctgtgagaagta

SEQ ID NO: 775979 - DNA, 19 bp, Mus musculus
  siRNA target sequence for Itpk1 (NM_172584.1,149-167).
ggaagcgagggatagaagt

SEQ ID NO: 775980 - DNA, 19 bp, Mus musculus
  siRNA target sequence for Itpk1 (NM_172584.1,269-287).
gccagtccctggaattggt

SEQ ID NO: 775981 - DNA, 19 bp, Mus musculus
  siRNA target sequence for Itpk1 (NM_172584.1,374-392).
ccaagtcctacgaacttat

SEQ ID NO: 775982 - DNA, 19 bp, Mus musculus
  siRNA target sequence for Itpk1 (NM_172584.1,399-417).
gatcgaggcctacatgaaa

SEQ ID NO: 775983 - DNA, 19 bp, Mus musculus
  siRNA target sequence for Itpk1 (NM_172584.1,402-420).
cgaggcctacatgaaagat

SEQ ID NO: 775984 - DNA, 19 bp, Mus musculus
  siRNA target sequence for Itpk1 (NM_172584.1,551-569).
ctcatgagatggctattgt

SEQ ID NO: 775985 - DNA, 19 bp, Mus musculus
  siRNA target sequence for Itpk1 (NM_172584.1,708-726).
ctctgcgggcacatcagat

SEQ ID NO: 775986 - DNA, 19 bp, Mus musculus
  siRNA target sequence for Itpk1 (NM_172584.1,727-745).
cgtgagtccatcttcttca

SEQ ID NO: 775987 - DNA, 19 bp, Mus musculus
  siRNA target sequence for Itpk1 (NM_172584.1,821-839).
ggccaagcgatgaggttat

SEQ ID NO: 775988 - DNA, 19 bp, Mus musculus
  siRNA target sequence for Itpk1 (NM_172584.1,870-888).
gctgggagtgtcactgttt

SEQ ID NO: 775989 - DNA, 19 bp, Mus musculus
  siRNA target sequence for Itpk1 (NM_172584.1,875-893).
gagtgtcactgtttggaat

SEQ ID NO: 775990 - DNA, 19 bp, Mus musculus
  siRNA target sequence for AI256361 (NM_172585.1,346-364).
ctgatcaggacgctaaagt

SEQ ID NO: 775991 - DNA, 19 bp, Mus musculus
  siRNA target sequence for AI256361 (NM_172585.1,407-425).
cagctctcatctgatgaat

SEQ ID NO: 775992 - DNA, 19 bp, Mus musculus
  siRNA target sequence for AI256361 (NM_172585.1,437-455).
gcaaaccacttctcaaaca

SEQ ID NO: 775993 - DNA, 19 bp, Mus musculus
  siRNA target sequence for AI256361 (NM_172585.1,475-493).
ctcaggtcccaacaactaa

SEQ ID NO: 775994 - DNA, 19 bp, Mus musculus
  siRNA target sequence for AI256361 (NM_172585.1,484-502).
caacaactaaggtttcaga

SEQ ID NO: 775995 - DNA, 19 bp, Mus musculus
  siRNA target sequence for AI256361 (NM_172585.1,501-519).
gagctaaaccctaatgcaa

SEQ ID NO: 775996 - DNA, 19 bp, Mus musculus
  siRNA target sequence for AI256361 (NM_172585.1,526-544).
gggggactcatatgttaca

SEQ ID NO: 775997 - DNA, 19 bp, Mus musculus
  siRNA target sequence for AI256361 (NM_172585.1,528-546).
gggactcatatgttacatt

SEQ ID NO: 775998 - DNA, 19 bp, Mus musculus
  siRNA target sequence for AI256361 (NM_172585.1,727-745).
ctctggaccattcagaata

SEQ ID NO: 775999 - DNA, 19 bp, Mus musculus
  siRNA target sequence for AI256361 (NM_172585.1,764-782).
caacgatacgggaggaaat

SEQ ID NO: 776000 - DNA, 19 bp, Mus musculus
  siRNA target sequence for AI256361 (NM_172585.1,807-825).
gaccctcgggaagtactta

SEQ ID NO: 776001 - DNA, 19 bp, Mus musculus
  siRNA target sequence for AI256361 (NM_172585.1,809-827).
ccctcgggaagtacttaaa

SEQ ID NO: 776002 - DNA, 19 bp, Mus musculus
  siRNA target sequence for AI256361 (NM_172585.1,810-828).
cctcgggaagtacttaaaa

SEQ ID NO: 776003 - DNA, 19 bp, Mus musculus
  siRNA target sequence for AI256361 (NM_172585.1,811-829).
ctcgggaagtacttaaaaa

SEQ ID NO: 776004 - DNA, 19 bp, Mus musculus
  siRNA target sequence for AI256361 (NM_172585.1,813-831).
cgggaagtacttaaaaaaa

SEQ ID NO: 776005 - DNA, 19 bp, Mus musculus
  siRNA target sequence for AI256361 (NM_172585.1,844-862).
gcttatctagggagaatct

SEQ ID NO: 776006 - DNA, 19 bp, Mus musculus
  siRNA target sequence for AI256361 (NM_172585.1,845-863).
cttatctagggagaatctt

SEQ ID NO: 776007 - DNA, 19 bp, Mus musculus
  siRNA target sequence for AI256361 (NM_172585.1,864-882).
gctagcgacatgtacctta

SEQ ID NO: 776008 - DNA, 19 bp, Mus musculus
  siRNA target sequence for AI256361 (NM_172585.1,865-883).
ctagcgacatgtaccttat

SEQ ID NO: 776009 - DNA, 19 bp, Mus musculus
  siRNA target sequence for AI256361 (NM_172585.1,890-908).
gatggacagtgatcagtat

SEQ ID NO: 776010 - DNA, 19 bp, Mus musculus
  siRNA target sequence for AI256361 (NM_172585.1,900-918).
gatcagtatgtgccaatta

SEQ ID NO: 776011 - DNA, 19 bp, Mus musculus
  siRNA target sequence for AI256361 (NM_172585.1,927-945).
gctaaccttgaccatatca

SEQ ID NO: 776012 - DNA, 19 bp, Mus musculus
  siRNA target sequence for AI256361 (NM_172585.1,928-946).
ctaaccttgaccatatcaa

SEQ ID NO: 776013 - DNA, 19 bp, Mus musculus
  siRNA target sequence for AI256361 (NM_172585.1,955-973).
gtactgatgtggatttgat

SEQ ID NO: 776014 - DNA, 19 bp, Mus musculus
  siRNA target sequence for AI256361 (NM_172585.1,975-993).
gttgaagtgctaagatctt

SEQ ID NO: 776015 - DNA, 19 bp, Mus musculus
  siRNA target sequence for AI256361 (NM_172585.1,1041-1059).
cagaaccggtgcatagtaa

SEQ ID NO: 776016 - DNA, 19 bp, Mus musculus
  siRNA target sequence for AI256361 (NM_172585.1,1043-1061).
gaaccggtgcatagtaata

SEQ ID NO: 776017 - DNA, 19 bp, Mus musculus
  siRNA target sequence for AI256361 (NM_172585.1,1056-1074).
gtaatactgcgtgagatat

SEQ ID NO: 776018 - DNA, 19 bp, Mus musculus
  siRNA target sequence for AI256361 (NM_172585.1,1142-1160).
ctgtgaatttgcctataat

SEQ ID NO: 776019 - DNA, 19 bp, Mus musculus
  siRNA target sequence for AI256361 (NM_172585.1,1152-1170).
gcctataatgataattggt

SEQ ID NO: 776020 - DNA, 19 bp, Mus musculus
  siRNA target sequence for AI256361 (NM_172585.1,1153-1171).
cctataatgataattggtt

SEQ ID NO: 776021 - DNA, 19 bp, Mus musculus
  siRNA target sequence for AI256361 (NM_172585.1,1154-1172).
ctataatgataattggttt

SEQ ID NO: 776022 - DNA, 19 bp, Mus musculus
  siRNA target sequence for AI256361 (NM_172585.1,1161-1179).
gataattggtttattacct

SEQ ID NO: 776023 - DNA, 19 bp, Mus musculus
  siRNA target sequence for AI256361 (NM_172585.1,1211-1229).
caaataccttcgagaagaa

SEQ ID NO: 776024 - DNA, 19 bp, Mus musculus
  siRNA target sequence for AI256361 (NM_172585.1,1273-1291).
caaaggcaatagcgataaa

SEQ ID NO: 776025 - DNA, 19 bp, Mus musculus
  siRNA target sequence for AI256361 (NM_172585.1,1279-1297).
caatagcgataaacacatt

SEQ ID NO: 776026 - DNA, 19 bp, Mus musculus
  siRNA target sequence for AI256361 (NM_172585.1,1321-1339).
ctctggacatgaaccttta

SEQ ID NO: 776027 - DNA, 19 bp, Mus musculus
  siRNA target sequence for AI256361 (NM_172585.1,1349-1367).
gcgctatgctacatcgttt

SEQ ID NO: 776028 - DNA, 19 bp, Mus musculus
  siRNA target sequence for AI256361 (NM_172585.1,1350-1368).
cgctatgctacatcgtttt

SEQ ID NO: 776029 - DNA, 19 bp, Mus musculus
  siRNA target sequence for AI256361 (NM_172585.1,1351-1369).
gctatgctacatcgtttta

SEQ ID NO: 776030 - DNA, 19 bp, Mus musculus
  siRNA target sequence for AI256361 (NM_172585.1,1425-1443).
ccccagacgtggtcaacaa

SEQ ID NO: 776031 - DNA, 19 bp, Mus musculus
  siRNA target sequence for AI256361 (NM_172585.1,1427-1445).
ccagacgtggtcaacaaca

SEQ ID NO: 776032 - DNA, 19 bp, Mus musculus
  siRNA target sequence for AI256361 (NM_172585.1,1435-1453).
ggtcaacaacacatagcta

SEQ ID NO: 776033 - DNA, 19 bp, Mus musculus
  siRNA target sequence for AI256361 (NM_172585.1,1436-1454).
gtcaacaacacatagctat

SEQ ID NO: 776034 - DNA, 19 bp, Mus musculus
  siRNA target sequence for AI256361 (NM_172585.1,1441-1459).
caacacatagctatcttga

SEQ ID NO: 776035 - DNA, 19 bp, Mus musculus
  siRNA target sequence for AI256361 (NM_172585.1,1455-1473).
cttgatccacccttggtaa

SEQ ID NO: 776036 - DNA, 19 bp, Mus musculus
  siRNA target sequence for AI256361 (NM_172585.1,1566-1584).
cctagaagcaggaatccta

SEQ ID NO: 776037 - DNA, 19 bp, Mus musculus
  siRNA target sequence for AI256361 (NM_172585.1,1570-1588).
gaagcaggaatcctagtaa

SEQ ID NO: 776038 - DNA, 19 bp, Mus musculus
  siRNA target sequence for AI256361 (NM_172585.1,1596-1614).
ctgcgccatgcgattccta

SEQ ID NO: 776039 - DNA, 19 bp, Mus musculus
  siRNA target sequence for AI256361 (NM_172585.1,1601-1619).
ccatgcgattcctagtaca

SEQ ID NO: 776040 - DNA, 19 bp, Mus musculus
  siRNA target sequence for AI256361 (NM_172585.1,1637-1655).
gctagaaagtccttcaata

SEQ ID NO: 776041 - DNA, 19 bp, Mus musculus
  siRNA target sequence for AI256361 (NM_172585.1,1645-1663).
gtccttcaatatttaactt

SEQ ID NO: 776042 - DNA, 19 bp, Mus musculus
  siRNA target sequence for AI256361 (NM_172585.1,1661-1679).
cttcactgcagatcgatta

SEQ ID NO: 776043 - DNA, 19 bp, Mus musculus
  siRNA target sequence for AI256361 (NM_172585.1,1664-1682).
cactgcagatcgattaatt

SEQ ID NO: 776044 - DNA, 19 bp, Mus musculus
  siRNA target sequence for AI256361 (NM_172585.1,1666-1684).
ctgcagatcgattaattaa

SEQ ID NO: 776045 - DNA, 19 bp, Mus musculus
  siRNA target sequence for AI256361 (NM_172585.1,1710-1728).
caagcagggcaaactagaa

SEQ ID NO: 776046 - DNA, 19 bp, Mus musculus
  siRNA target sequence for AI256361 (NM_172585.1,1778-1796).
gcgtgtggagccaagtagt

SEQ ID NO: 776047 - DNA, 19 bp, Mus musculus
  siRNA target sequence for AI256361 (NM_172585.1,1784-1802).
ggagccaagtagtcttgaa

SEQ ID NO: 776048 - DNA, 19 bp, Mus musculus
  siRNA target sequence for AI256361 (NM_172585.1,1785-1803).
gagccaagtagtcttgaat

SEQ ID NO: 776049 - DNA, 19 bp, Mus musculus
  siRNA target sequence for AI256361 (NM_172585.1,1838-1856).
ctttggctatcggaagaaa

SEQ ID NO: 776050 - DNA, 19 bp, Mus musculus
  siRNA target sequence for AI256361 (NM_172585.1,1844-1862).
ctatcggaagaaaagagaa

SEQ ID NO: 776051 - DNA, 19 bp, Mus musculus
  siRNA target sequence for AI256361 (NM_172585.1,1959-1977).
ggagctgcaggcaatttga

SEQ ID NO: 776052 - DNA, 19 bp, Mus musculus
  siRNA target sequence for AI256361 (NM_172585.1,2002-2020).
ggctttccagcttgatcat

SEQ ID NO: 776053 - DNA, 19 bp, Mus musculus
  siRNA target sequence for AI256361 (NM_172585.1,2012-2030).
cttgatcataggatcttca

SEQ ID NO: 776054 - DNA, 19 bp, Mus musculus
  siRNA target sequence for AI256361 (NM_172585.1,2141-2159).
cccttccccggtccattta

SEQ ID NO: 776055 - DNA, 19 bp, Mus musculus
  siRNA target sequence for AI256361 (NM_172585.1,2216-2234).
cccttctacccctactaca

SEQ ID NO: 776056 - DNA, 19 bp, Mus musculus
  siRNA target sequence for AI256361 (NM_172585.1,2227-2245).
ctactacaactgcatgtaa

SEQ ID NO: 776057 - DNA, 19 bp, Mus musculus
  siRNA target sequence for AI256361 (NM_172585.1,2279-2297).
gagaaagcccagttatgca

SEQ ID NO: 776058 - DNA, 19 bp, Mus musculus
  siRNA target sequence for AI256361 (NM_172585.1,2285-2303).
gcccagttatgcagagatt

SEQ ID NO: 776059 - DNA, 19 bp, Mus musculus
  siRNA target sequence for AI256361 (NM_172585.1,2341-2359).
cattgcaacccccaaaaga

SEQ ID NO: 776060 - DNA, 19 bp, Mus musculus
  siRNA target sequence for AI256361 (NM_172585.1,2430-2448).
gagccccctgcccttaagt

SEQ ID NO: 776061 - DNA, 19 bp, Mus musculus
  siRNA target sequence for 9630054P07Rik (NM_172586.2,348-366).
cacttaggagagaaccata

SEQ ID NO: 776062 - DNA, 19 bp, Mus musculus
  siRNA target sequence for 9630054P07Rik (NM_172586.2,362-380).
ccatagaagatgtacactt

SEQ ID NO: 776063 - DNA, 19 bp, Mus musculus
  siRNA target sequence for 9630054P07Rik (NM_172586.2,378-396).
cttcagaagaggaatgtaa

SEQ ID NO: 776064 - DNA, 19 bp, Mus musculus
  siRNA target sequence for 9630054P07Rik (NM_172586.2,432-450).
gccctcaaaagggtgaaaa

SEQ ID NO: 776065 - DNA, 19 bp, Mus musculus
  siRNA target sequence for 9630054P07Rik (NM_172586.2,433-451).
ccctcaaaagggtgaaaaa

SEQ ID NO: 776066 - DNA, 19 bp, Mus musculus
  siRNA target sequence for 9630054P07Rik (NM_172586.2,446-464).
gaaaaagatttatattcgt

SEQ ID NO: 776067 - DNA, 19 bp, Mus musculus
  siRNA target sequence for 9630054P07Rik (NM_172586.2,452-470).
gatttatattcgtgtacat

SEQ ID NO: 776068 - DNA, 19 bp, Mus musculus
  siRNA target sequence for 9630054P07Rik (NM_172586.2,471-489).
gagattactcaaatagata

SEQ ID NO: 776069 - DNA, 19 bp, Mus musculus
  siRNA target sequence for 9630054P07Rik (NM_172586.2,473-491).
gattactcaaatagataat

SEQ ID NO: 776070 - DNA, 19 bp, Mus musculus
  siRNA target sequence for 9630054P07Rik (NM_172586.2,503-521).
gtgccttgaacgtgaacaa

SEQ ID NO: 776071 - DNA, 19 bp, Mus musculus
  siRNA target sequence for 9630054P07Rik (NM_172586.2,505-523).
gccttgaacgtgaacaaaa

SEQ ID NO: 776072 - DNA, 19 bp, Mus musculus
  siRNA target sequence for 9630054P07Rik (NM_172586.2,507-525).
cttgaacgtgaacaaaact

SEQ ID NO: 776073 - DNA, 19 bp, Mus musculus
  siRNA target sequence for 9630054P07Rik (NM_172586.2,543-561).
cgaatgtgtgagagaacat

SEQ ID NO: 776074 - DNA, 19 bp, Mus musculus
  siRNA target sequence for 9630054P07Rik (NM_172586.2,729-747).
catgcaggtaaaaagtttt

SEQ ID NO: 776075 - DNA, 19 bp, Mus musculus
  siRNA target sequence for 9630054P07Rik (NM_172586.2,732-750).
gcaggtaaaaagttttata

SEQ ID NO: 776076 - DNA, 19 bp, Mus musculus
  siRNA target sequence for 9630054P07Rik (NM_172586.2,864-882).
cgaagtacaaatctcataa

SEQ ID NO: 776077 - DNA, 19 bp, Mus musculus
  siRNA target sequence for 9630054P07Rik (NM_172586.2,1039-1057).
ctgccttcattgtgcataa

SEQ ID NO: 776078 - DNA, 19 bp, Mus musculus
  siRNA target sequence for 9630054P07Rik (NM_172586.2,1041-1059).
gccttcattgtgcataaaa

SEQ ID NO: 776079 - DNA, 19 bp, Mus musculus
  siRNA target sequence for 9630054P07Rik (NM_172586.2,1046-1064).
cattgtgcataaaagagtt

SEQ ID NO: 776080 - DNA, 19 bp, Mus musculus
  siRNA target sequence for 9630054P07Rik (NM_172586.2,1178-1196).
ggagtgtatgagaagtttt

SEQ ID NO: 776081 - DNA, 19 bp, Mus musculus
  siRNA target sequence for 9630054P07Rik (NM_172586.2,1181-1199).
gtgtatgagaagttttact

SEQ ID NO: 776082 - DNA, 19 bp, Mus musculus
  siRNA target sequence for 9630054P07Rik (NM_172586.2,1198-1216).
ctcgaagtgccaacctaat

SEQ ID NO: 776083 - DNA, 19 bp, Mus musculus
  siRNA target sequence for 9630054P07Rik (NM_172586.2,1200-1218).
cgaagtgccaacctaatta

SEQ ID NO: 776084 - DNA, 19 bp, Mus musculus
  siRNA target sequence for 9630054P07Rik (NM_172586.2,1226-1244).
ggcaactcacactcatact

SEQ ID NO: 776085 - DNA, 19 bp, Mus musculus
  siRNA target sequence for 9630054P07Rik (NM_172586.2,1227-1245).
gcaactcacactcatactt

SEQ ID NO: 776086 - DNA, 19 bp, Mus musculus
  siRNA target sequence for 9630054P07Rik (NM_172586.2,1228-1246).
caactcacactcatacttt

SEQ ID NO: 776087 - DNA, 19 bp, Mus musculus
  siRNA target sequence for 9630054P07Rik (NM_172586.2,1282-1300).
gctcagactttattgtaca

SEQ ID NO: 776088 - DNA, 19 bp, Mus musculus
  siRNA target sequence for 9630054P07Rik (NM_172586.2,1283-1301).
ctcagactttattgtacat

SEQ ID NO: 776089 - DNA, 19 bp, Mus musculus
  siRNA target sequence for 9630054P07Rik (NM_172586.2,1351-1369).
gtgacttcctcctaggtat

SEQ ID NO: 776090 - DNA, 19 bp, Mus musculus
  siRNA target sequence for 9630054P07Rik (NM_172586.2,1405-1423).
cagaggagctccattataa

SEQ ID NO: 776091 - DNA, 19 bp, Mus musculus
  siRNA target sequence for 9630054P07Rik (NM_172586.2,1407-1425).
gaggagctccattataaat

SEQ ID NO: 776092 - DNA, 19 bp, Mus musculus
  siRNA target sequence for 9630054P07Rik (NM_172586.2,1412-1430).
gctccattataaatacagt

SEQ ID NO: 776093 - DNA, 19 bp, Mus musculus
  siRNA target sequence for 9630054P07Rik (NM_172586.2,1497-1515).
gaatacatctgtaacatga

SEQ ID NO: 776094 - DNA, 19 bp, Mus musculus
  siRNA target sequence for B830029I03Rik (NM_172590.1,353-371).
gatgacttcaggtttgcat

SEQ ID NO: 776095 - DNA, 19 bp, Mus musculus
  siRNA target sequence for B830029I03Rik (NM_172590.1,378-396).
gcgatgatggaattatagt

SEQ ID NO: 776096 - DNA, 19 bp, Mus musculus
  siRNA target sequence for B830029I03Rik (NM_172590.1,451-469).
gaagataacggctgtcatt

SEQ ID NO: 776097 - DNA, 19 bp, Mus musculus
  siRNA target sequence for B830029I03Rik (NM_172590.1,498-516).
ccagcagtcagcttctctt

SEQ ID NO: 776098 - DNA, 19 bp, Mus musculus
  siRNA target sequence for B830029I03Rik (NM_172590.1,664-682).
cgtgtggaaccgaaagtta

SEQ ID NO: 776099 - DNA, 19 bp, Mus musculus
  siRNA target sequence for B830029I03Rik (NM_172590.1,667-685).
gtggaaccgaaagttagat

SEQ ID NO: 776100 - DNA, 19 bp, Mus musculus
  siRNA target sequence for B830029I03Rik (NM_172590.1,769-787).
gggcagagaattgataatt

SEQ ID NO: 776101 - DNA, 19 bp, Mus musculus
  siRNA target sequence for B830029I03Rik (NM_172590.1,770-788).
ggcagagaattgataattt

SEQ ID NO: 776102 - DNA, 19 bp, Mus musculus
  siRNA target sequence for B830029I03Rik (NM_172590.1,772-790).
cagagaattgataattttt

SEQ ID NO: 776103 - DNA, 19 bp, Mus musculus
  siRNA target sequence for B830029I03Rik (NM_172590.1,817-835).
gccggaatgggatattatt

SEQ ID NO: 776104 - DNA, 19 bp, Mus musculus
  siRNA target sequence for B830029I03Rik (NM_172590.1,819-837).
cggaatgggatattattga

SEQ ID NO: 776105 - DNA, 19 bp, Mus musculus
  siRNA target sequence for B830029I03Rik (NM_172590.1,851-869).
cttgatcaccaggacaata

SEQ ID NO: 776106 - DNA, 19 bp, Mus musculus
  siRNA target sequence for 5832424M12 (NM_172591.2,117-135).
catggacagatatcaacta

SEQ ID NO: 776107 - DNA, 19 bp, Mus musculus
  siRNA target sequence for 5832424M12 (NM_172591.2,125-143).
gatatcaactaaagaacta

SEQ ID NO: 776108 - DNA, 19 bp, Mus musculus
  siRNA target sequence for 5832424M12 (NM_172591.2,185-203).
ctccagatcaatgacaaaa

SEQ ID NO: 776109 - DNA, 19 bp, Mus musculus
  siRNA target sequence for 5832424M12 (NM_172591.2,188-206).
cagatcaatgacaaaacta

SEQ ID NO: 776110 - DNA, 19 bp, Mus musculus
  siRNA target sequence for 5832424M12 (NM_172591.2,197-215).
gacaaaactagcgaaatct

SEQ ID NO: 776111 - DNA, 19 bp, Mus musculus
  siRNA target sequence for 5832424M12 (NM_172591.2,207-225).
gcgaaatctgcaagcaatt

SEQ ID NO: 776112 - DNA, 19 bp, Mus musculus
  siRNA target sequence for 5832424M12 (NM_172591.2,208-226).
cgaaatctgcaagcaatta

SEQ ID NO: 776113 - DNA, 19 bp, Mus musculus
  siRNA target sequence for 5832424M12 (NM_172591.2,249-267).
ccaatgtgggatgtattca

SEQ ID NO: 776114 - DNA, 19 bp, Mus musculus
  siRNA target sequence for 5832424M12 (NM_172591.2,250-268).
caatgtgggatgtattcaa

SEQ ID NO: 776115 - DNA, 19 bp, Mus musculus
  siRNA target sequence for 5832424M12 (NM_172591.2,257-275).
ggatgtattcaaaacatct

SEQ ID NO: 776116 - DNA, 19 bp, Mus musculus
  siRNA target sequence for 5832424M12 (NM_172591.2,258-276).
gatgtattcaaaacatcta

SEQ ID NO: 776117 - DNA, 19 bp, Mus musculus
  siRNA target sequence for 5832424M12 (NM_172591.2,360-378).
caagtcaagtctcataaga

SEQ ID NO: 776118 - DNA, 19 bp, Mus musculus
  siRNA target sequence for 5832424M12 (NM_172591.2,417-435).
caagccattcagaatataa

SEQ ID NO: 776119 - DNA, 19 bp, Mus musculus
  siRNA target sequence for 5832424M12 (NM_172591.2,446-464).
ccagaagtcgaaggaaaat

SEQ ID NO: 776120 - DNA, 19 bp, Mus musculus
  siRNA target sequence for 5832424M12 (NM_172591.2,447-465).
cagaagtcgaaggaaaatt

SEQ ID NO: 776121 - DNA, 19 bp, Mus musculus
  siRNA target sequence for 5832424M12 (NM_172591.2,452-470).
gtcgaaggaaaattacact

SEQ ID NO: 776122 - DNA, 19 bp, Mus musculus
  siRNA target sequence for 5832424M12 (NM_172591.2,467-485).
cactgccaaatgtgtagaa

SEQ ID NO: 776123 - DNA, 19 bp, Mus musculus
  siRNA target sequence for 5832424M12 (NM_172591.2,483-501).
gaacaggaacgtctgaaaa

SEQ ID NO: 776124 - DNA, 19 bp, Mus musculus
  siRNA target sequence for 5832424M12 (NM_172591.2,545-563).
gtctaagaaagctacagat

SEQ ID NO: 776125 - DNA, 19 bp, Mus musculus
  siRNA target sequence for 5832424M12 (NM_172591.2,581-599).
ggaaaagtatgcattaaca

SEQ ID NO: 776126 - DNA, 19 bp, Mus musculus
  siRNA target sequence for 5832424M12 (NM_172591.2,582-600).
gaaaagtatgcattaacaa

SEQ ID NO: 776127 - DNA, 19 bp, Mus musculus
  siRNA target sequence for 5832424M12 (NM_172591.2,587-605).
gtatgcattaacaaaagca

SEQ ID NO: 776128 - DNA, 19 bp, Mus musculus
  siRNA target sequence for 5832424M12 (NM_172591.2,661-679).
ctcacctcattcacataaa

SEQ ID NO: 776129 - DNA, 19 bp, Mus musculus
  siRNA target sequence for 5832424M12 (NM_172591.2,741-759).
catgaagagtttataaata

SEQ ID NO: 776130 - DNA, 19 bp, Mus musculus
  siRNA target sequence for 5832424M12 (NM_172591.2,794-812).
gaaatttgccgagtcaaaa

SEQ ID NO: 776131 - DNA, 19 bp, Mus musculus
  siRNA target sequence for 5832424M12 (NM_172591.2,824-842).
ggaaagacctggtcttatt

SEQ ID NO: 776132 - DNA, 19 bp, Mus musculus
  siRNA target sequence for 5832424M12 (NM_172591.2,829-847).
gacctggtcttattgaatt

SEQ ID NO: 776133 - DNA, 19 bp, Mus musculus
  siRNA target sequence for 5832424M12 (NM_172591.2,868-886).
gtgcagttgaaggcataaa

SEQ ID NO: 776134 - DNA, 19 bp, Mus musculus
  siRNA target sequence for 5832424M12 (NM_172591.2,909-927).
gctttgcctggaataatta

SEQ ID NO: 776135 - DNA, 19 bp, Mus musculus
  siRNA target sequence for 5832424M12 (NM_172591.2,963-981).
gatgcagattcgcttaata

SEQ ID NO: 776136 - DNA, 19 bp, Mus musculus
  siRNA target sequence for 5832424M12 (NM_172591.2,1009-1027).
gtattaaaccagaagcaaa

SEQ ID NO: 776137 - DNA, 19 bp, Mus musculus
  siRNA target sequence for 5832424M12 (NM_172591.2,1099-1117).
ggtaccggatagagatcaa

SEQ ID NO: 776138 - DNA, 19 bp, Mus musculus
  siRNA target sequence for 5832424M12 (NM_172591.2,1173-1191).
gtatccatagggaatataa

SEQ ID NO: 776139 - DNA, 19 bp, Mus musculus
  siRNA target sequence for 5832424M12 (NM_172591.2,1292-1310).
gaaagggaccaatgattta

SEQ ID NO: 776140 - DNA, 19 bp, Mus musculus
  siRNA target sequence for 5832424M12 (NM_172591.2,1337-1355).
gtcgcttgagtcatcttca

SEQ ID NO: 776141 - DNA, 19 bp, Mus musculus
  siRNA target sequence for 5832424M12 (NM_172591.2,1359-1377).
ccactaacttcgtcatcat

SEQ ID NO: 776142 - DNA, 19 bp, Mus musculus
  siRNA target sequence for 5832424M12 (NM_172591.2,1388-1406).
cacgacacctctctcttta

SEQ ID NO: 776143 - DNA, 19 bp, Mus musculus
  siRNA target sequence for 5832424M12 (NM_172591.2,1464-1482).
ctgagtgggatcaatgaaa

SEQ ID NO: 776144 - DNA, 19 bp, Mus musculus
  siRNA target sequence for 5832424M12 (NM_172591.2,1466-1484).
gagtgggatcaatgaaata

SEQ ID NO: 776145 - DNA, 19 bp, Mus musculus
  siRNA target sequence for 5832424M12 (NM_172591.2,1670-1688).
ggcaatcgcccttacagaa

SEQ ID NO: 776146 - DNA, 19 bp, Mus musculus
  siRNA target sequence for 5832424M12 (NM_172591.2,1671-1689).
gcaatcgcccttacagaat

SEQ ID NO: 776147 - DNA, 19 bp, Mus musculus
  siRNA target sequence for 5832424M12 (NM_172591.2,1742-1760).
cacgggagacgtgacaata

SEQ ID NO: 776148 - DNA, 19 bp, Mus musculus
  siRNA target sequence for 5832424M12 (NM_172591.2,1745-1763).
gggagacgtgacaatatca

SEQ ID NO: 776149 - DNA, 19 bp, Mus musculus
  siRNA target sequence for 5832424M12 (NM_172591.2,1746-1764).
ggagacgtgacaatatcat

SEQ ID NO: 776150 - DNA, 19 bp, Mus musculus
  siRNA target sequence for 5832424M12 (NM_172591.2,1747-1765).
gagacgtgacaatatcatt

SEQ ID NO: 776151 - DNA, 19 bp, Mus musculus
  siRNA target sequence for 5832424M12 (NM_172591.2,1768-1786).
ccagtgggattattaaagt

SEQ ID NO: 776152 - DNA, 19 bp, Mus musculus
  siRNA target sequence for 5832424M12 (NM_172591.2,1861-1879).
caaactcccagcttgtgtt

SEQ ID NO: 776153 - DNA, 19 bp, Mus musculus
  siRNA target sequence for 5832424M12 (NM_172591.2,1884-1902).
gatccatcacagtgtgatt

SEQ ID NO: 776154 - DNA, 19 bp, Mus musculus
  siRNA target sequence for 5832424M12 (NM_172591.2,1899-1917).
gattccaacacaaaagatt

SEQ ID NO: 776155 - DNA, 19 bp, Mus musculus
  siRNA target sequence for 5832424M12 (NM_172591.2,1955-1973).
gaagctatcagaacaaaat

SEQ ID NO: 776156 - DNA, 19 bp, Mus musculus
  siRNA target sequence for 5832424M12 (NM_172591.2,1958-1976).
gctatcagaacaaaatcca

SEQ ID NO: 776157 - DNA, 19 bp, Mus musculus
  siRNA target sequence for 5832424M12 (NM_172591.2,2036-2054).
gtccactcctctaaatctt

SEQ ID NO: 776158 - DNA, 19 bp, Mus musculus
  siRNA target sequence for 5832424M12 (NM_172591.2,2088-2106).
gatctgagagtggattata

SEQ ID NO: 776159 - DNA, 19 bp, Mus musculus
  siRNA target sequence for 5832424M12 (NM_172591.2,2171-2189).
ggatggaggtgtcacaaat

SEQ ID NO: 776160 - DNA, 19 bp, Mus musculus
  siRNA target sequence for 5832424M12 (NM_172591.2,2195-2213).
gtcccttcctcctgcaata

SEQ ID NO: 776161 - DNA, 19 bp, Mus musculus
  siRNA target sequence for 5832424M12 (NM_172591.2,2254-2272).
ggatttcggagaaatcaga

SEQ ID NO: 776162 - DNA, 19 bp, Mus musculus
  siRNA target sequence for 5832424M12 (NM_172591.2,2286-2304).
ggatccctcagagcaaaat

SEQ ID NO: 776163 - DNA, 19 bp, Mus musculus
  siRNA target sequence for 5832424M12 (NM_172591.2,2299-2317).
caaaatttgatctttcaga

SEQ ID NO: 776164 - DNA, 19 bp, Mus musculus
  siRNA target sequence for 5832424M12 (NM_172591.2,2316-2334).
gaaggacccagcaaaccta

SEQ ID NO: 776165 - DNA, 19 bp, Mus musculus
  siRNA target sequence for 5832424M12 (NM_172591.2,2335-2353).
caacactggcagtgcaatt

SEQ ID NO: 776166 - DNA, 19 bp, Mus musculus
  siRNA target sequence for 5832424M12 (NM_172591.2,2371-2389).
cgctctcaggagtggatat

SEQ ID NO: 776167 - DNA, 19 bp, Mus musculus
  siRNA target sequence for 5832424M12 (NM_172591.2,2399-2417).
gggtactggctatagactt

SEQ ID NO: 776168 - DNA, 19 bp, Mus musculus
  siRNA target sequence for 5832424M12 (NM_172591.2,2400-2418).
ggtactggctatagacttt

SEQ ID NO: 776169 - DNA, 19 bp, Mus musculus
  siRNA target sequence for 5832424M12 (NM_172591.2,2448-2466).
cgatacttggcagattgtt

SEQ ID NO: 776170 - DNA, 19 bp, Mus musculus
  siRNA target sequence for C230032K13Rik (NM_172595.1,95-113).
ctgatctccggataactga

SEQ ID NO: 776171 - DNA, 19 bp, Mus musculus
  siRNA target sequence for C230032K13Rik (NM_172595.1,115-133).
gcgtttctgtacatggatt

SEQ ID NO: 776172 - DNA, 19 bp, Mus musculus
  siRNA target sequence for C230032K13Rik (NM_172595.1,116-134).
cgtttctgtacatggatta

SEQ ID NO: 776173 - DNA, 19 bp, Mus musculus
  siRNA target sequence for C230032K13Rik (NM_172595.1,121-139).
ctgtacatggattatctgt

SEQ ID NO: 776174 - DNA, 19 bp, Mus musculus
  siRNA target sequence for C230032K13Rik (NM_172595.1,129-147).
ggattatctgtgttttcga

SEQ ID NO: 776175 - DNA, 19 bp, Mus musculus
  siRNA target sequence for C230032K13Rik (NM_172595.1,271-289).
gtgtcgaccacaggtttta

SEQ ID NO: 776176 - DNA, 19 bp, Mus musculus
  siRNA target sequence for C230032K13Rik (NM_172595.1,273-291).
gtcgaccacaggttttagt

SEQ ID NO: 776177 - DNA, 19 bp, Mus musculus
  siRNA target sequence for C230032K13Rik (NM_172595.1,309-327).
ccagaatgccgttttgaat

SEQ ID NO: 776178 - DNA, 19 bp, Mus musculus
  siRNA target sequence for C230032K13Rik (NM_172595.1,347-365).
ctgacaatatccggaaata

SEQ ID NO: 776179 - DNA, 19 bp, Mus musculus
  siRNA target sequence for C230032K13Rik (NM_172595.1,385-403).
ggatctcaaggggtcatat

SEQ ID NO: 776180 - DNA, 19 bp, Mus musculus
  siRNA target sequence for C230032K13Rik (NM_172595.1,386-404).
gatctcaaggggtcatatt

SEQ ID NO: 776181 - DNA, 19 bp, Mus musculus
  siRNA target sequence for C230032K13Rik (NM_172595.1,391-409).
caaggggtcatattcgtat

SEQ ID NO: 776182 - DNA, 19 bp, Mus musculus
  siRNA target sequence for C230032K13Rik (NM_172595.1,395-413).
gggtcatattcgtattaga

SEQ ID NO: 776183 - DNA, 19 bp, Mus musculus
  siRNA target sequence for C230032K13Rik (NM_172595.1,397-415).
gtcatattcgtattagaca

SEQ ID NO: 776184 - DNA, 19 bp, Mus musculus
  siRNA target sequence for C230032K13Rik (NM_172595.1,477-495).
cccacagctatgcacttta

SEQ ID NO: 776185 - DNA, 19 bp, Mus musculus
  siRNA target sequence for C230032K13Rik (NM_172595.1,488-506).
gcactttaccctttttgat

SEQ ID NO: 776186 - DNA, 19 bp, Mus musculus
  siRNA target sequence for C230032K13Rik (NM_172595.1,504-522).
gatattggccaatcatcaa

SEQ ID NO: 776187 - DNA, 19 bp, Mus musculus
  siRNA target sequence for C230032K13Rik (NM_172595.1,536-554).
ctcgctcagtacaagagat

SEQ ID NO: 776188 - DNA, 19 bp, Mus musculus
  siRNA target sequence for C230032K13Rik (NM_172595.1,539-557).
gctcagtacaagagatcaa

SEQ ID NO: 776189 - DNA, 19 bp, Mus musculus
  siRNA target sequence for C230032K13Rik (NM_172595.1,540-558).
ctcagtacaagagatcaaa

SEQ ID NO: 776190 - DNA, 19 bp, Mus musculus
  siRNA target sequence for C230032K13Rik (NM_172595.1,654-672).
ccagctcataaacttgtta

SEQ ID NO: 776191 - DNA, 19 bp, Mus musculus
  siRNA target sequence for C230032K13Rik (NM_172595.1,685-703).
cacgaggcagtgagaatgt

SEQ ID NO: 776192 - DNA, 19 bp, Mus musculus
  siRNA target sequence for LOC218811 (NM_172596.1,140-158).
gtatcatcagtcgagttat

SEQ ID NO: 776193 - DNA, 19 bp, Mus musculus
  siRNA target sequence for LOC218811 (NM_172596.1,303-321).
ccttgtggtcagactacat

SEQ ID NO: 776194 - DNA, 19 bp, Mus musculus
  siRNA target sequence for LOC218811 (NM_172596.1,304-322).
cttgtggtcagactacata

SEQ ID NO: 776195 - DNA, 19 bp, Mus musculus
  siRNA target sequence for LOC218811 (NM_172596.1,329-347).
gtttggccaaggtgatata

SEQ ID NO: 776196 - DNA, 19 bp, Mus musculus
  siRNA target sequence for LOC218811 (NM_172596.1,333-351).
ggccaaggtgatatacaga

SEQ ID NO: 776197 - DNA, 19 bp, Mus musculus
  siRNA target sequence for LOC218811 (NM_172596.1,334-352).
gccaaggtgatatacagaa

SEQ ID NO: 776198 - DNA, 19 bp, Mus musculus
  siRNA target sequence for LOC218811 (NM_172596.1,335-353).
ccaaggtgatatacagaat

SEQ ID NO: 776199 - DNA, 19 bp, Mus musculus
  siRNA target sequence for LOC218811 (NM_172596.1,456-474).
ggccctccccccacaagta

SEQ ID NO: 776200 - DNA, 19 bp, Mus musculus
  siRNA target sequence for LOC218811 (NM_172596.1,551-569).
ctatggtccaccaacatca

SEQ ID NO: 776201 - DNA, 19 bp, Mus musculus
  siRNA target sequence for LOC218811 (NM_172596.1,920-938).
gcagcaaaatggttccttt

SEQ ID NO: 776202 - DNA, 19 bp, Mus musculus
  siRNA target sequence for LOC218811 (NM_172596.1,948-966).
cgaggccctcaacctaatt

SEQ ID NO: 776203 - DNA, 19 bp, Mus musculus
  siRNA target sequence for LOC218811 (NM_172596.1,949-967).
gaggccctcaacctaatta

SEQ ID NO: 776204 - DNA, 19 bp, Mus musculus
  siRNA target sequence for LOC218811 (NM_172596.1,952-970).
gccctcaacctaattatga

SEQ ID NO: 776205 - DNA, 19 bp, Mus musculus
  siRNA target sequence for LOC218811 (NM_172596.1,954-972).
cctcaacctaattatgaga

SEQ ID NO: 776206 - DNA, 19 bp, Mus musculus
  siRNA target sequence for LOC218811 (NM_172596.1,1063-1081).
gccctattcaggttattga

SEQ ID NO: 776207 - DNA, 19 bp, Mus musculus
  siRNA target sequence for LOC218811 (NM_172596.1,1064-1082).
ccctattcaggttattgaa

SEQ ID NO: 776208 - DNA, 19 bp, Mus musculus
  siRNA target sequence for LOC218811 (NM_172596.1,1132-1150).
gacaggtgccacctttagt

SEQ ID NO: 776209 - DNA, 19 bp, Mus musculus
  siRNA target sequence for LOC218811 (NM_172596.1,1134-1152).
caggtgccacctttagtca

SEQ ID NO: 776210 - DNA, 19 bp, Mus musculus
  siRNA target sequence for LOC218811 (NM_172596.1,1199-1217).
cattcgatgcacatcctat

SEQ ID NO: 776211 - DNA, 19 bp, Mus musculus
  siRNA target sequence for LOC218811 (NM_172596.1,1203-1221).
cgatgcacatcctataata

SEQ ID NO: 776212 - DNA, 19 bp, Mus musculus
  siRNA target sequence for LOC218811 (NM_172596.1,1204-1222).
gatgcacatcctataatat

SEQ ID NO: 776213 - DNA, 19 bp, Mus musculus
  siRNA target sequence for LOC218811 (NM_172596.1,1214-1232).
ctataatatcccttgtact

SEQ ID NO: 776214 - DNA, 19 bp, Mus musculus
  siRNA target sequence for LOC218811 (NM_172596.1,1231-1249).
cttctgacatggctaaaca

SEQ ID NO: 776215 - DNA, 19 bp, Mus musculus
  siRNA target sequence for LOC218811 (NM_172596.1,1261-1279).
ctctggccgctgtcattaa

SEQ ID NO: 776216 - DNA, 19 bp, Mus musculus
  siRNA target sequence for LOC218811 (NM_172596.1,1265-1283).
ggccgctgtcattaaacca

SEQ ID NO: 776217 - DNA, 19 bp, Mus musculus
  siRNA target sequence for LOC218811 (NM_172596.1,1304-1322).
ggaggcttcaccgtatgtt

SEQ ID NO: 776218 - DNA, 19 bp, Mus musculus
  siRNA target sequence for LOC218811 (NM_172596.1,1354-1372).
gtaatcgctgcaaagcata

SEQ ID NO: 776219 - DNA, 19 bp, Mus musculus
  siRNA target sequence for LOC218811 (NM_172596.1,1483-1501).
gcaaacgtgtggatgctta

SEQ ID NO: 776220 - DNA, 19 bp, Mus musculus
  siRNA target sequence for LOC218811 (NM_172596.1,1514-1532).
gctgtctctgggatcttat

SEQ ID NO: 776221 - DNA, 19 bp, Mus musculus
  siRNA target sequence for LOC218811 (NM_172596.1,1541-1559).
ggctactgtagattactgt

SEQ ID NO: 776222 - DNA, 19 bp, Mus musculus
  siRNA target sequence for LOC218811 (NM_172596.1,1584-1602).
cctgccttcatctttatga

SEQ ID NO: 776223 - DNA, 19 bp, Mus musculus
  siRNA target sequence for LOC218811 (NM_172596.1,1601-1619).
gattgatgtctcctacaat

SEQ ID NO: 776224 - DNA, 19 bp, Mus musculus
  siRNA target sequence for LOC218811 (NM_172596.1,1659-1677).
ctcaagtcactcttagact

SEQ ID NO: 776225 - DNA, 19 bp, Mus musculus
  siRNA target sequence for LOC218811 (NM_172596.1,1790-1808).
gatggttgtatctgatgta

SEQ ID NO: 776226 - DNA, 19 bp, Mus musculus
  siRNA target sequence for LOC218811 (NM_172596.1,1801-1819).
ctgatgtagctgacatgtt

SEQ ID NO: 776227 - DNA, 19 bp, Mus musculus
  siRNA target sequence for LOC218811 (NM_172596.1,1832-1850).
ggatggcttcctagtcaat

SEQ ID NO: 776228 - DNA, 19 bp, Mus musculus
  siRNA target sequence for LOC218811 (NM_172596.1,1836-1854).
ggcttcctagtcaatgtca

SEQ ID NO: 776229 - DNA, 19 bp, Mus musculus
  siRNA target sequence for LOC218811 (NM_172596.1,1887-1905).
gatcagattccagaaatgt

SEQ ID NO: 776230 - DNA, 19 bp, Mus musculus
  siRNA target sequence for LOC218811 (NM_172596.1,2055-2073).
gatgataggaagttgatca

SEQ ID NO: 776231 - DNA, 19 bp, Mus musculus
  siRNA target sequence for LOC218811 (NM_172596.1,2171-2189).
cctcttccctaaccaatat

SEQ ID NO: 776232 - DNA, 19 bp, Mus musculus
  siRNA target sequence for LOC218811 (NM_172596.1,2312-2330).
gaaggtggttggctttgat

SEQ ID NO: 776233 - DNA, 19 bp, Mus musculus
  siRNA target sequence for LOC218811 (NM_172596.1,2339-2357).
gcgggttcggacaagtact

SEQ ID NO: 776234 - DNA, 19 bp, Mus musculus
  siRNA target sequence for LOC218811 (NM_172596.1,2358-2376).
ggtatccgtgctgtagatt

SEQ ID NO: 776235 - DNA, 19 bp, Mus musculus
  siRNA target sequence for LOC218811 (NM_172596.1,2359-2377).
gtatccgtgctgtagattt

SEQ ID NO: 776236 - DNA, 19 bp, Mus musculus
  siRNA target sequence for LOC218811 (NM_172596.1,2363-2381).
ccgtgctgtagatttcttt

SEQ ID NO: 776237 - DNA, 19 bp, Mus musculus
  siRNA target sequence for LOC218811 (NM_172596.1,2542-2560).
ggctccgcatccacaactt

SEQ ID NO: 776238 - DNA, 19 bp, Mus musculus
  siRNA target sequence for LOC218811 (NM_172596.1,2553-2571).
cacaacttggccctaaact

SEQ ID NO: 776239 - DNA, 19 bp, Mus musculus
  siRNA target sequence for LOC218811 (NM_172596.1,2583-2601).
ctggctgatctgtatcgaa

SEQ ID NO: 776240 - DNA, 19 bp, Mus musculus
  siRNA target sequence for LOC218811 (NM_172596.1,2611-2629).
ctgacacgctcatcaacta

SEQ ID NO: 776241 - DNA, 19 bp, Mus musculus
  siRNA target sequence for LOC218811 (NM_172596.1,2644-2662).
cataccgggctgttctgaa

SEQ ID NO: 776242 - DNA, 19 bp, Mus musculus
  siRNA target sequence for LOC218811 (NM_172596.1,2708-2726).
ccagatcctggcctgttat

SEQ ID NO: 776243 - DNA, 19 bp, Mus musculus
  siRNA target sequence for LOC218811 (NM_172596.1,2752-2770).
ctgcaggacagttgattct

SEQ ID NO: 776244 - DNA, 19 bp, Mus musculus
  siRNA target sequence for LOC218811 (NM_172596.1,2929-2947).
ggctcctaccactgacaaa

SEQ ID NO: 776245 - DNA, 19 bp, Mus musculus
  siRNA target sequence for LOC218811 (NM_172596.1,2931-2949).
ctcctaccactgacaaagt

SEQ ID NO: 776246 - DNA, 19 bp, Mus musculus
  siRNA target sequence for LOC218811 (NM_172596.1,3002-3020).
cctaagcagtggcgatata

SEQ ID NO: 776247 - DNA, 19 bp, Mus musculus
  siRNA target sequence for LOC218811 (NM_172596.1,3003-3021).
ctaagcagtggcgatatat

SEQ ID NO: 776248 - DNA, 19 bp, Mus musculus
  siRNA target sequence for LOC218811 (NM_172596.1,3007-3025).
gcagtggcgatatatattt

SEQ ID NO: 776249 - DNA, 19 bp, Mus musculus
  siRNA target sequence for LOC218811 (NM_172596.1,3010-3028).
gtggcgatatatatttgct

SEQ ID NO: 776250 - DNA, 19 bp, Mus musculus
  siRNA target sequence for LOC218811 (NM_172596.1,3153-3171).
gataatccactgtctaaga

SEQ ID NO: 776251 - DNA, 19 bp, Mus musculus
  siRNA target sequence for LOC218811 (NM_172596.1,3174-3192).
gttcgaggtctcatcgata

SEQ ID NO: 776252 - DNA, 19 bp, Mus musculus
  siRNA target sequence for LOC218811 (NM_172596.1,3204-3222).
cagagaatgcggtacatga

SEQ ID NO: 776253 - DNA, 19 bp, Mus musculus
  siRNA target sequence for LOC218811 (NM_172596.1,3214-3232).
ggtacatgaagcttatcgt

SEQ ID NO: 776254 - DNA, 19 bp, Mus musculus
  siRNA target sequence for D14Ertd436e (NM_172599.1,42-60).
gcccgaggctcctggtttt

SEQ ID NO: 776255 - DNA, 19 bp, Mus musculus
  siRNA target sequence for D14Ertd436e (NM_172599.1,182-200).
gcgtccagagcggtgattt

SEQ ID NO: 776256 - DNA, 19 bp, Mus musculus
  siRNA target sequence for D14Ertd436e (NM_172599.1,191-209).
gcggtgatttcgtctattt

SEQ ID NO: 776257 - DNA, 19 bp, Mus musculus
  siRNA target sequence for D14Ertd436e (NM_172599.1,194-212).
gtgatttcgtctatttcga

SEQ ID NO: 776258 - DNA, 19 bp, Mus musculus
  siRNA target sequence for D14Ertd436e (NM_172599.1,217-235).
cgcgaccgggagaggttta

SEQ ID NO: 776259 - DNA, 19 bp, Mus musculus
  siRNA target sequence for D14Ertd436e (NM_172599.1,218-236).
gcgaccgggagaggtttat

SEQ ID NO: 776260 - DNA, 19 bp, Mus musculus
  siRNA target sequence for D14Ertd436e (NM_172599.1,288-306).
gaaagaagtactaaaagct

SEQ ID NO: 776261 - DNA, 19 bp, Mus musculus
  siRNA target sequence for D14Ertd436e (NM_172599.1,328-346).
gatcagttgagatggaaaa

SEQ ID NO: 776262 - DNA, 19 bp, Mus musculus
  siRNA target sequence for D14Ertd436e (NM_172599.1,475-493).
cagcggcaccaagagaaaa

SEQ ID NO: 776263 - DNA, 19 bp, Mus musculus
  siRNA target sequence for D14Ertd436e (NM_172599.1,607-625).
gagctcacctccatcatat

SEQ ID NO: 776264 - DNA, 19 bp, Mus musculus
  siRNA target sequence for D14Ertd436e (NM_172599.1,778-796).
ggtgacaccagcattagca

SEQ ID NO: 776265 - DNA, 19 bp, Mus musculus
  siRNA target sequence for D14Ertd436e (NM_172599.1,779-797).
gtgacaccagcattagcat

SEQ ID NO: 776266 - DNA, 19 bp, Mus musculus
  siRNA target sequence for D14Ertd436e (NM_172599.1,806-824).
cgtggattagcctaccaaa

SEQ ID NO: 776267 - DNA, 19 bp, Mus musculus
  siRNA target sequence for D14Ertd436e (NM_172599.1,809-827).
ggattagcctaccaaacaa

SEQ ID NO: 776268 - DNA, 19 bp, Mus musculus
  siRNA target sequence for D14Ertd436e (NM_172599.1,834-852).
ctactctgcttactacaat

SEQ ID NO: 776269 - DNA, 19 bp, Mus musculus
  siRNA target sequence for D14Ertd436e (NM_172599.1,881-899).
gacctgacatggagcataa

SEQ ID NO: 776270 - DNA, 19 bp, Mus musculus
  siRNA target sequence for D14Ertd436e (NM_172599.1,884-902).
ctgacatggagcataacaa

SEQ ID NO: 776271 - DNA, 19 bp, Mus musculus
  siRNA target sequence for D14Ertd436e (NM_172599.1,938-956).
ccacgcagctcgtcaacat

SEQ ID NO: 776272 - DNA, 19 bp, Mus musculus
  siRNA target sequence for D14Ertd436e (NM_172599.1,939-957).
cacgcagctcgtcaacatt

SEQ ID NO: 776273 - DNA, 19 bp, Mus musculus
  siRNA target sequence for D14Ertd436e (NM_172599.1,941-959).
cgcagctcgtcaacattgt

SEQ ID NO: 776274 - DNA, 19 bp, Mus musculus
  siRNA target sequence for D14Ertd436e (NM_172599.1,966-984).
catacttgacatcaatctt

SEQ ID NO: 776275 - DNA, 19 bp, Mus musculus
  siRNA target sequence for D14Ertd436e (NM_172599.1,1045-1063).
cgcgcagtgaggaaactga

SEQ ID NO: 776276 - DNA, 19 bp, Mus musculus
  siRNA target sequence for D14Ertd436e (NM_172599.1,1046-1064).
gcgcagtgaggaaactgaa

SEQ ID NO: 776277 - DNA, 19 bp, Mus musculus
  siRNA target sequence for D14Ertd436e (NM_172599.1,1060-1078).
ctgaacgcaaacatccttt

SEQ ID NO: 776278 - DNA, 19 bp, Mus musculus
  siRNA target sequence for D14Ertd436e (NM_172599.1,1088-1106).
cttctcagcatgtaaatct

SEQ ID NO: 776279 - DNA, 19 bp, Mus musculus
  siRNA target sequence for D14Ertd436e (NM_172599.1,1181-1199).
ggtcaggaccctttgaagt

SEQ ID NO: 776280 - DNA, 19 bp, Mus musculus
  siRNA target sequence for D14Ertd436e (NM_172599.1,1182-1200).
gtcaggaccctttgaagtt

SEQ ID NO: 776281 - DNA, 19 bp, Mus musculus
  siRNA target sequence for 6720456H20Rik (NM_172600.2,341-359).
cgcttactgtgcgttttga

SEQ ID NO: 776282 - DNA, 19 bp, Mus musculus
  siRNA target sequence for 6720456H20Rik (NM_172600.2,370-388).
gccgcaaaggagagatcaa

SEQ ID NO: 776283 - DNA, 19 bp, Mus musculus
  siRNA target sequence for 6720456H20Rik (NM_172600.2,371-389).
ccgcaaaggagagatcaaa

SEQ ID NO: 776284 - DNA, 19 bp, Mus musculus
  siRNA target sequence for 6720456H20Rik (NM_172600.2,439-457).
cacacgatagtcctctata

SEQ ID NO: 776285 - DNA, 19 bp, Mus musculus
  siRNA target sequence for 6720456H20Rik (NM_172600.2,441-459).
cacgatagtcctctatata

SEQ ID NO: 776286 - DNA, 19 bp, Mus musculus
  siRNA target sequence for 6720456H20Rik (NM_172600.2,451-469).
ctctatatattatgcataa

SEQ ID NO: 776287 - DNA, 19 bp, Mus musculus
  siRNA target sequence for 6720456H20Rik (NM_172600.2,465-483).
cataataccctggattctt

SEQ ID NO: 776288 - DNA, 19 bp, Mus musculus
  siRNA target sequence for 6720456H20Rik (NM_172600.2,553-571).
ggcctgctgccctatgtct

SEQ ID NO: 776289 - DNA, 19 bp, Mus musculus
  siRNA target sequence for 6720456H20Rik (NM_172600.2,713-731).
ctacagtactgctttcaca

SEQ ID NO: 776290 - DNA, 19 bp, Mus musculus
  siRNA target sequence for 6720456H20Rik (NM_172600.2,721-739).
ctgctttcacaggtaataa

SEQ ID NO: 776291 - DNA, 19 bp, Mus musculus
  siRNA target sequence for 6720456H20Rik (NM_172600.2,747-765).
gaccgaactttcattcaat

SEQ ID NO: 776292 - DNA, 19 bp, Mus musculus
  siRNA target sequence for 6720456H20Rik (NM_172600.2,749-767).
ccgaactttcattcaatat

SEQ ID NO: 776293 - DNA, 19 bp, Mus musculus
  siRNA target sequence for 6720456H20Rik (NM_172600.2,787-805).
gcaaatatatgtttagcta

SEQ ID NO: 776294 - DNA, 19 bp, Mus musculus
  siRNA target sequence for 6720456H20Rik (NM_172600.2,813-831).
caggcggaagtcatcagta

SEQ ID NO: 776295 - DNA, 19 bp, Mus musculus
  siRNA target sequence for 6720456H20Rik (NM_172600.2,816-834).
gcggaagtcatcagtagta

SEQ ID NO: 776296 - DNA, 19 bp, Mus musculus
  siRNA target sequence for 6720456H20Rik (NM_172600.2,817-835).
cggaagtcatcagtagtat

SEQ ID NO: 776297 - DNA, 19 bp, Mus musculus
  siRNA target sequence for 6720456H20Rik (NM_172600.2,881-899).
ggagagcaaatttagatat

SEQ ID NO: 776298 - DNA, 19 bp, Mus musculus
  siRNA target sequence for 6720456H20Rik (NM_172600.2,989-1007).
cgcttgtgtctgagactaa

SEQ ID NO: 776299 - DNA, 19 bp, Mus musculus
  siRNA target sequence for 6720456H20Rik (NM_172600.2,1058-1076).
ccctttttgttgcttatca

SEQ ID NO: 776300 - DNA, 19 bp, Mus musculus
  siRNA target sequence for 6720456H20Rik (NM_172600.2,1059-1077).
cctttttgttgcttatcaa

SEQ ID NO: 776301 - DNA, 19 bp, Mus musculus
  siRNA target sequence for 6720456H20Rik (NM_172600.2,1069-1087).
gcttatcaagtatactcaa

SEQ ID NO: 776302 - DNA, 19 bp, Mus musculus
  siRNA target sequence for 6720456H20Rik (NM_172600.2,1075-1093).
caagtatactcaaattaca

SEQ ID NO: 776303 - DNA, 19 bp, Mus musculus
  siRNA target sequence for 6720456H20Rik (NM_172600.2,1112-1130).
ccaataacgtgattgatca

SEQ ID NO: 776304 - DNA, 19 bp, Mus musculus
  siRNA target sequence for 6720456H20Rik (NM_172600.2,1199-1217).
gaaacgctctccgttactt

SEQ ID NO: 776305 - DNA, 19 bp, Mus musculus
  siRNA target sequence for 6720456H20Rik (NM_172600.2,1205-1223).
ctctccgttacttgcatta

SEQ ID NO: 776306 - DNA, 19 bp, Mus musculus
  siRNA target sequence for 6720456H20Rik (NM_172600.2,1207-1225).
ctccgttacttgcattact

SEQ ID NO: 776307 - DNA, 19 bp, Mus musculus
  siRNA target sequence for 6720456H20Rik (NM_172600.2,1231-1249).
ggcttgagaccagatgttt

SEQ ID NO: 776308 - DNA, 19 bp, Mus musculus
  siRNA target sequence for 6720456H20Rik (NM_172600.2,1250-1268).
cactggtggatcaagaaat

SEQ ID NO: 776309 - DNA, 19 bp, Mus musculus
  siRNA target sequence for 6720456H20Rik (NM_172600.2,1252-1270).
ctggtggatcaagaaatga

SEQ ID NO: 776310 - DNA, 19 bp, Mus musculus
  siRNA target sequence for 6720456H20Rik (NM_172600.2,1264-1282).
gaaatgatgacctatgagt

SEQ ID NO: 776311 - DNA, 19 bp, Mus musculus
  siRNA target sequence for 6720456H20Rik (NM_172600.2,1272-1290).
gacctatgagtggtactta

SEQ ID NO: 776312 - DNA, 19 bp, Mus musculus
  siRNA target sequence for 6720456H20Rik (NM_172600.2,1344-1362).
ccctgtggaaggagtgtta

SEQ ID NO: 776313 - DNA, 19 bp, Mus musculus
  siRNA target sequence for 6720456H20Rik (NM_172600.2,1383-1401).
caacctctatcactttctt

SEQ ID NO: 776314 - DNA, 19 bp, Mus musculus
  siRNA target sequence for 6720456H20Rik (NM_172600.2,1386-1404).
cctctatcactttcttgaa

SEQ ID NO: 776315 - DNA, 19 bp, Mus musculus
  siRNA target sequence for 6720456H20Rik (NM_172600.2,1509-1527).
ggtgccttcaaagattgta

SEQ ID NO: 776316 - DNA, 19 bp, Mus musculus
  siRNA target sequence for 6720456H20Rik (NM_172600.2,1513-1531).
ccttcaaagattgtattca

SEQ ID NO: 776317 - DNA, 19 bp, Mus musculus
  siRNA target sequence for 6720456H20Rik (NM_172600.2,1533-1551).
cccagaggagtggattgaa

SEQ ID NO: 776318 - DNA, 19 bp, Mus musculus
  siRNA target sequence for 6720456H20Rik (NM_172600.2,1552-1570).
cgcacaagagccatctata

SEQ ID NO: 776319 - DNA, 19 bp, Mus musculus
  siRNA target sequence for 6720456H20Rik (NM_172600.2,1691-1709).
cagttcctgcagatgtgaa

SEQ ID NO: 776320 - DNA, 19 bp, Mus musculus
  siRNA target sequence for 6720456H20Rik (NM_172600.2,1717-1735).
ctctacacgcatgcatata

SEQ ID NO: 776321 - DNA, 19 bp, Mus musculus
  siRNA target sequence for 6720456H20Rik (NM_172600.2,1730-1748).
catataaactttataagga

SEQ ID NO: 776322 - DNA, 19 bp, Mus musculus
  siRNA target sequence for 6720456H20Rik (NM_172600.2,1765-1783).
gaggaacacccagtgaatt

SEQ ID NO: 776323 - DNA, 19 bp, Mus musculus
  siRNA target sequence for 6720456H20Rik (NM_172600.2,1777-1795).
gtgaattggcacaagaact

SEQ ID NO: 776324 - DNA, 19 bp, Mus musculus
  siRNA target sequence for 6720456H20Rik (NM_172600.2,1779-1797).
gaattggcacaagaactat

SEQ ID NO: 776325 - DNA, 19 bp, Mus musculus
  siRNA target sequence for 6720456H20Rik (NM_172600.2,1892-1910).
ctcagaaagcacaaaatga

SEQ ID NO: 776326 - DNA, 19 bp, Mus musculus
  siRNA target sequence for 6720456H20Rik (NM_172600.2,1912-1930).
ccacagcgagcagacatta

SEQ ID NO: 776327 - DNA, 19 bp, Mus musculus
  siRNA target sequence for 6720456H20Rik (NM_172600.2,1913-1931).
cacagcgagcagacattat

SEQ ID NO: 776328 - DNA, 19 bp, Mus musculus
  siRNA target sequence for 6720456H20Rik (NM_172600.2,1933-1951).
gctgctctcaagcatctaa

SEQ ID NO: 776329 - DNA, 19 bp, Mus musculus
  siRNA target sequence for A630038E17Rik (NM_172602.1,146-164).
gggacctctttggatgtat

SEQ ID NO: 776330 - DNA, 19 bp, Mus musculus
  siRNA target sequence for A630038E17Rik (NM_172602.1,173-191).
ccagttgccaaaactttta

SEQ ID NO: 776331 - DNA, 19 bp, Mus musculus
  siRNA target sequence for A630038E17Rik (NM_172602.1,240-258).
gggacatgaagaattatca

SEQ ID NO: 776332 - DNA, 19 bp, Mus musculus
  siRNA target sequence for A630038E17Rik (NM_172602.1,242-260).
gacatgaagaattatcata

SEQ ID NO: 776333 - DNA, 19 bp, Mus musculus
  siRNA target sequence for A630038E17Rik (NM_172602.1,257-275).
catatgagctggtataaga

SEQ ID NO: 776334 - DNA, 19 bp, Mus musculus
  siRNA target sequence for A630038E17Rik (NM_172602.1,274-292).
gaagaatggaactaatgct

SEQ ID NO: 776335 - DNA, 19 bp, Mus musculus
  siRNA target sequence for A630038E17Rik (NM_172602.1,290-308).
gctctgtttttagtataca

SEQ ID NO: 776336 - DNA, 19 bp, Mus musculus
  siRNA target sequence for A630038E17Rik (NM_172602.1,302-320).
gtatacaagctaaatagca

SEQ ID NO: 776337 - DNA, 19 bp, Mus musculus
  siRNA target sequence for A630038E17Rik (NM_172602.1,310-328).
gctaaatagcaattctact

SEQ ID NO: 776338 - DNA, 19 bp, Mus musculus
  siRNA target sequence for A630038E17Rik (NM_172602.1,413-431).
gacgctggtacgtactact

SEQ ID NO: 776339 - DNA, 19 bp, Mus musculus
  siRNA target sequence for A630038E17Rik (NM_172602.1,459-477).
gggacacccgacagatgtt

SEQ ID NO: 776340 - DNA, 19 bp, Mus musculus
  siRNA target sequence for A630038E17Rik (NM_172602.1,466-484).
ccgacagatgttttttgga

SEQ ID NO: 776341 - DNA, 19 bp, Mus musculus
  siRNA target sequence for A630038E17Rik (NM_172602.1,518-536).
cagcctccggccaaaccat

SEQ ID NO: 776342 - DNA, 19 bp, Mus musculus
  siRNA target sequence for A630038E17Rik (NM_172602.1,524-542).
ccggccaaaccatctgttt

SEQ ID NO: 776343 - DNA, 19 bp, Mus musculus
  siRNA target sequence for A630038E17Rik (NM_172602.1,525-543).
cggccaaaccatctgtttt

SEQ ID NO: 776344 - DNA, 19 bp, Mus musculus
  siRNA target sequence for A630038E17Rik (NM_172602.1,527-545).
gccaaaccatctgttttca

SEQ ID NO: 776345 - DNA, 19 bp, Mus musculus
  siRNA target sequence for A630038E17Rik (NM_172602.1,573-591).
gtctggtgaaagatttcta

SEQ ID NO: 776346 - DNA, 19 bp, Mus musculus
  siRNA target sequence for A630038E17Rik (NM_172602.1,593-611).
cctaaagaggtgactataa

SEQ ID NO: 776347 - DNA, 19 bp, Mus musculus
  siRNA target sequence for A630038E17Rik (NM_172602.1,618-636).
gatcatccaagaagattgt

SEQ ID NO: 776348 - DNA, 19 bp, Mus musculus
  siRNA target sequence for A630038E17Rik (NM_172602.1,696-714).
gtcagtatggagattcgaa

SEQ ID NO: 776349 - DNA, 19 bp, Mus musculus
  siRNA target sequence for A630038E17Rik (NM_172602.1,700-718).
gtatggagattcgaattca

SEQ ID NO: 776350 - DNA, 19 bp, Mus musculus
  siRNA target sequence for A630038E17Rik (NM_172602.1,759-777).
cgactgactttgaaccata

SEQ ID NO: 776351 - DNA, 19 bp, Mus musculus
  siRNA target sequence for A630038E17Rik (NM_172602.1,764-782).
gactttgaaccatatgcaa

SEQ ID NO: 776352 - DNA, 19 bp, Mus musculus
  siRNA target sequence for A630038E17Rik (NM_172602.1,813-831).
ctgaaaatgacacacaaat

SEQ ID NO: 776353 - DNA, 19 bp, Mus musculus
  siRNA target sequence for A630038E17Rik (NM_172602.1,863-881).
gttcacactgagaaggtaa

SEQ ID NO: 776354 - DNA, 19 bp, Mus musculus
  siRNA target sequence for A630038E17Rik (NM_172602.1,928-946).
gaccattgccatcaatttt

SEQ ID NO: 776355 - DNA, 19 bp, Mus musculus
  siRNA target sequence for A630038E17Rik (NM_172602.1,952-970).
gactgttaagttattcttt

SEQ ID NO: 776356 - DNA, 19 bp, Mus musculus
  siRNA target sequence for 4933417L10Rik (NM_172603.1,400-418).
cgcaattctacaagttgat

SEQ ID NO: 776357 - DNA, 19 bp, Mus musculus
  siRNA target sequence for 4933417L10Rik (NM_172603.1,402-420).
caattctacaagttgatga

SEQ ID NO: 776358 - DNA, 19 bp, Mus musculus
  siRNA target sequence for 4933417L10Rik (NM_172603.1,419-437).
gaagatcatggcacttaca

SEQ ID NO: 776359 - DNA, 19 bp, Mus musculus
  siRNA target sequence for 4933417L10Rik (NM_172603.1,422-440).
gatcatggcacttacaaat

SEQ ID NO: 776360 - DNA, 19 bp, Mus musculus
  siRNA target sequence for C130058N24Rik (NM_172604.1,368-386).
gcaaccgctgccagaagaa

SEQ ID NO: 776361 - DNA, 19 bp, Mus musculus
  siRNA target sequence for C130058N24Rik (NM_172604.1,373-391).
cgctgccagaagaacctat

SEQ ID NO: 776362 - DNA, 19 bp, Mus musculus
  siRNA target sequence for C130058N24Rik (NM_172604.1,377-395).
gccagaagaacctatcttt

SEQ ID NO: 776363 - DNA, 19 bp, Mus musculus
  siRNA target sequence for C130058N24Rik (NM_172604.1,459-477).
ggcctctctggtttttaga

SEQ ID NO: 776364 - DNA, 19 bp, Mus musculus
  siRNA target sequence for C130058N24Rik (NM_172604.1,507-525).
cttggcccagtccatctat

SEQ ID NO: 776365 - DNA, 19 bp, Mus musculus
  siRNA target sequence for C130058N24Rik (NM_172604.1,512-530).
cccagtccatctataataa

SEQ ID NO: 776366 - DNA, 19 bp, Mus musculus
  siRNA target sequence for C130058N24Rik (NM_172604.1,514-532).
cagtccatctataataaga

SEQ ID NO: 776367 - DNA, 19 bp, Mus musculus
  siRNA target sequence for C130058N24Rik (NM_172604.1,540-558).
gtcaatgcaagaaaatctt

SEQ ID NO: 776368 - DNA, 19 bp, Mus musculus
  siRNA target sequence for C130058N24Rik (NM_172604.1,571-589).
ccaaaagccctgatcaatt

SEQ ID NO: 776369 - DNA, 19 bp, Mus musculus
  siRNA target sequence for C130058N24Rik (NM_172604.1,579-597).
cctgatcaattgttccttt

SEQ ID NO: 776370 - DNA, 19 bp, Mus musculus
  siRNA target sequence for C130058N24Rik (NM_172604.1,896-914).
ctgctgtacaccagatcaa

SEQ ID NO: 776371 - DNA, 19 bp, Mus musculus
  siRNA target sequence for C130058N24Rik (NM_172604.1,899-917).
ctgtacaccagatcaactt

SEQ ID NO: 776372 - DNA, 19 bp, Mus musculus
  siRNA target sequence for C130058N24Rik (NM_172604.1,901-919).
gtacaccagatcaacttca

SEQ ID NO: 776373 - DNA, 19 bp, Mus musculus
  siRNA target sequence for C130058N24Rik (NM_172604.1,1052-1070).
ccaagactggcgaaatagt

SEQ ID NO: 776374 - DNA, 19 bp, Mus musculus
  siRNA target sequence for C130058N24Rik (NM_172604.1,1105-1123).
cagcgcattagccagaatt

SEQ ID NO: 776375 - DNA, 19 bp, Mus musculus
  siRNA target sequence for C130058N24Rik (NM_172604.1,1168-1186).
ctacagctggacaacatct

SEQ ID NO: 776376 - DNA, 19 bp, Mus musculus
  siRNA target sequence for C130058N24Rik (NM_172604.1,1176-1194).
ggacaacatctcttccttt

SEQ ID NO: 776377 - DNA, 19 bp, Mus musculus
  siRNA target sequence for C130058N24Rik (NM_172604.1,1309-1327).
gaaatcggcactatcttca

SEQ ID NO: 776378 - DNA, 19 bp, Mus musculus
  siRNA target sequence for C130058N24Rik (NM_172604.1,1319-1337).
ctatcttcaccaatatcaa

SEQ ID NO: 776379 - DNA, 19 bp, Mus musculus
  siRNA target sequence for C130058N24Rik (NM_172604.1,1426-1444).
gagctctactacctgaata

SEQ ID NO: 776380 - DNA, 19 bp, Mus musculus
  siRNA target sequence for C130058N24Rik (NM_172604.1,1501-1519).
ctcagtgcccggttagact

SEQ ID NO: 776381 - DNA, 19 bp, Mus musculus
  siRNA target sequence for C130058N24Rik (NM_172604.1,1505-1523).
gtgcccggttagacttcaa

SEQ ID NO: 776382 - DNA, 19 bp, Mus musculus
  siRNA target sequence for C130058N24Rik (NM_172604.1,1508-1526).
cccggttagacttcaatgt

SEQ ID NO: 776383 - DNA, 19 bp, Mus musculus
  siRNA target sequence for C130058N24Rik (NM_172604.1,1528-1546).
cgaaacctctccatgatca

SEQ ID NO: 776384 - DNA, 19 bp, Mus musculus
  siRNA target sequence for C130058N24Rik (NM_172604.1,1582-1600).
gaaatccttcgcaatgtca

SEQ ID NO: 776385 - DNA, 19 bp, Mus musculus
  siRNA target sequence for F830029L24Rik (NM_172606.1,222-240).
gacaccgccgaggaagata

SEQ ID NO: 776386 - DNA, 19 bp, Mus musculus
  siRNA target sequence for F830029L24Rik (NM_172606.1,224-242).
caccgccgaggaagatata

SEQ ID NO: 776387 - DNA, 19 bp, Mus musculus
  siRNA target sequence for F830029L24Rik (NM_172606.1,227-245).
cgccgaggaagatatatgt

SEQ ID NO: 776388 - DNA, 19 bp, Mus musculus
  siRNA target sequence for F830029L24Rik (NM_172606.1,228-246).
gccgaggaagatatatgta

SEQ ID NO: 776389 - DNA, 19 bp, Mus musculus
  siRNA target sequence for F830029L24Rik (NM_172606.1,301-319).
gtactggcagtattaaatt

SEQ ID NO: 776390 - DNA, 19 bp, Mus musculus
  siRNA target sequence for F830029L24Rik (NM_172606.1,354-372).
catagtcggaaagaatact

SEQ ID NO: 776391 - DNA, 19 bp, Mus musculus
  siRNA target sequence for F830029L24Rik (NM_172606.1,382-400).
gcaagcacagatttgcttt

SEQ ID NO: 776392 - DNA, 19 bp, Mus musculus
  siRNA target sequence for F830029L24Rik (NM_172606.1,386-404).
gcacagatttgctttcaca

SEQ ID NO: 776393 - DNA, 19 bp, Mus musculus
  siRNA target sequence for F830029L24Rik (NM_172606.1,396-414).
gctttcacaccaatttatt

SEQ ID NO: 776394 - DNA, 19 bp, Mus musculus
  siRNA target sequence for F830029L24Rik (NM_172606.1,433-451).
ggctaccaatccaagacat

SEQ ID NO: 776395 - DNA, 19 bp, Mus musculus
  siRNA target sequence for F830029L24Rik (NM_172606.1,434-452).
gctaccaatccaagacata

SEQ ID NO: 776396 - DNA, 19 bp, Mus musculus
  siRNA target sequence for F830029L24Rik (NM_172606.1,435-453).
ctaccaatccaagacatat

SEQ ID NO: 776397 - DNA, 19 bp, Mus musculus
  siRNA target sequence for F830029L24Rik (NM_172606.1,456-474).
gctggactggttacaagta

SEQ ID NO: 776398 - DNA, 19 bp, Mus musculus
  siRNA target sequence for F830029L24Rik (NM_172606.1,457-475).
ctggactggttacaagtat

SEQ ID NO: 776399 - DNA, 19 bp, Mus musculus
  siRNA target sequence for F830029L24Rik (NM_172606.1,489-507).
cgatactggtttcattaca

SEQ ID NO: 776400 - DNA, 19 bp, Mus musculus
  siRNA target sequence for F830029L24Rik (NM_172606.1,547-565).
cagcatgccgcatctacaa

SEQ ID NO: 776401 - DNA, 19 bp, Mus musculus
  siRNA target sequence for F830029L24Rik (NM_172606.1,549-567).
gcatgccgcatctacaagt

SEQ ID NO: 776402 - DNA, 19 bp, Mus musculus
  siRNA target sequence for F830029L24Rik (NM_172606.1,614-632).
catgctgtcaacggaaaat

SEQ ID NO: 776403 - DNA, 19 bp, Mus musculus
  siRNA target sequence for F830029L24Rik (NM_172606.1,618-636).
ctgtcaacggaaaatttgt

SEQ ID NO: 776404 - DNA, 19 bp, Mus musculus
  siRNA target sequence for F830029L24Rik (NM_172606.1,665-683).
ggtgacgtgcacactttgt

SEQ ID NO: 776405 - DNA, 19 bp, Mus musculus
  siRNA target sequence for F830029L24Rik (NM_172606.1,723-741).
cacgggggagccccaattt

SEQ ID NO: 776406 - DNA, 19 bp, Mus musculus
  siRNA target sequence for F830029L24Rik (NM_172606.1,772-790).
ctgctggacaccaccaaaa

SEQ ID NO: 776407 - DNA, 19 bp, Mus musculus
  siRNA target sequence for F830029L24Rik (NM_172606.1,976-994).
gagcccaagacgacatgaa

SEQ ID NO: 776408 - DNA, 19 bp, Mus musculus
  siRNA target sequence for F830029L24Rik (NM_172606.1,978-996).
gcccaagacgacatgaact

SEQ ID NO: 776409 - DNA, 19 bp, Mus musculus
  siRNA target sequence for F830029L24Rik (NM_172606.1,1029-1047).
gagcttacttgggaaagaa

SEQ ID NO: 776410 - DNA, 19 bp, Mus musculus
  siRNA target sequence for F830029L24Rik (NM_172606.1,1056-1074).
cttgatggatcactagttt

SEQ ID NO: 776411 - DNA, 19 bp, Mus musculus
  siRNA target sequence for F830029L24Rik (NM_172606.1,1091-1109).
ctgggtggtgtctttaaat

SEQ ID NO: 776412 - DNA, 19 bp, Mus musculus
  siRNA target sequence for F830029L24Rik (NM_172606.1,1098-1116).
gtgtctttaaatacattgt

SEQ ID NO: 776413 - DNA, 19 bp, Mus musculus
  siRNA target sequence for F830029L24Rik (NM_172606.1,1201-1219).
ctcattttgaaggtctaat

SEQ ID NO: 776414 - DNA, 19 bp, Mus musculus
  siRNA target sequence for F830029L24Rik (NM_172606.1,1220-1238).
cacaacgattgttggatat

SEQ ID NO: 776415 - DNA, 19 bp, Mus musculus
  siRNA target sequence for F830029L24Rik (NM_172606.1,1222-1240).
caacgattgttggatatat

SEQ ID NO: 776416 - DNA, 19 bp, Mus musculus
  siRNA target sequence for F830029L24Rik (NM_172606.1,1225-1243).
cgattgttggatatatact

SEQ ID NO: 776417 - DNA, 19 bp, Mus musculus
  siRNA target sequence for F830029L24Rik (NM_172606.1,1226-1244).
gattgttggatatatactt

SEQ ID NO: 776418 - DNA, 19 bp, Mus musculus
  siRNA target sequence for F830029L24Rik (NM_172606.1,1233-1251).
ggatatatacttttagcaa

SEQ ID NO: 776419 - DNA, 19 bp, Mus musculus
  siRNA target sequence for F830029L24Rik (NM_172606.1,1248-1266).
gcaataacactgataattt

SEQ ID NO: 776420 - DNA, 19 bp, Mus musculus
  siRNA target sequence for F830029L24Rik (NM_172606.1,1277-1295).
ggcaactcttgttaaattt

SEQ ID NO: 776421 - DNA, 19 bp, Mus musculus
  siRNA target sequence for F830029L24Rik (NM_172606.1,1324-1342).
gctatattgtggttaaggt

SEQ ID NO: 776422 - DNA, 19 bp, Mus musculus
  siRNA target sequence for F830029L24Rik (NM_172606.1,1332-1350).
gtggttaaggtctctttgt

SEQ ID NO: 776423 - DNA, 19 bp, Mus musculus
  siRNA target sequence for F830029L24Rik (NM_172606.1,1334-1352).
ggttaaggtctctttgtta

SEQ ID NO: 776424 - DNA, 19 bp, Mus musculus
  siRNA target sequence for F830029L24Rik (NM_172606.1,1389-1407).
ggctggtggctggatatct

SEQ ID NO: 776425 - DNA, 19 bp, Mus musculus
  siRNA target sequence for F830029L24Rik (NM_172606.1,1406-1424).
ctgttctctggaaatgttt

SEQ ID NO: 776426 - DNA, 19 bp, Mus musculus
  siRNA target sequence for F830029L24Rik (NM_172606.1,1468-1486).
cagggaccacgatgtttct

SEQ ID NO: 776427 - DNA, 19 bp, Mus musculus
  siRNA target sequence for F830029L24Rik (NM_172606.1,1554-1572).
cttcgacctggtgtcttat

SEQ ID NO: 776428 - DNA, 19 bp, Mus musculus
  siRNA target sequence for F830029L24Rik (NM_172606.1,1557-1575).
cgacctggtgtcttatggt

SEQ ID NO: 776429 - DNA, 19 bp, Mus musculus
  siRNA target sequence for F830029L24Rik (NM_172606.1,1644-1662).
catctccgaagatttattt

SEQ ID NO: 776430 - DNA, 19 bp, Mus musculus
  siRNA target sequence for F830029L24Rik (NM_172606.1,1649-1667).
ccgaagatttattttgtca

SEQ ID NO: 776431 - DNA, 19 bp, Mus musculus
  siRNA target sequence for F830029L24Rik (NM_172606.1,1697-1715).
gatgctctggcttcctata

SEQ ID NO: 776432 - DNA, 19 bp, Mus musculus
  siRNA target sequence for F830029L24Rik (NM_172606.1,1700-1718).
gctctggcttcctatacgt

SEQ ID NO: 776433 - DNA, 19 bp, Mus musculus
  siRNA target sequence for F830029L24Rik (NM_172606.1,1701-1719).
ctctggcttcctatacgta

SEQ ID NO: 776434 - DNA, 19 bp, Mus musculus
  siRNA target sequence for F830029L24Rik (NM_172606.1,1705-1723).
ggcttcctatacgtataat

SEQ ID NO: 776435 - DNA, 19 bp, Mus musculus
  siRNA target sequence for F830029L24Rik (NM_172606.1,1706-1724).
gcttcctatacgtataatt

SEQ ID NO: 776436 - DNA, 19 bp, Mus musculus
  siRNA target sequence for F830029L24Rik (NM_172606.1,1707-1725).
cttcctatacgtataatta

SEQ ID NO: 776437 - DNA, 19 bp, Mus musculus
  siRNA target sequence for F830029L24Rik (NM_172606.1,1710-1728).
cctatacgtataattaaga

SEQ ID NO: 776438 - DNA, 19 bp, Mus musculus
  siRNA target sequence for F830029L24Rik (NM_172606.1,1729-1747).
gtctcttgcctaattttct

SEQ ID NO: 776439 - DNA, 19 bp, Mus musculus
  siRNA target sequence for F830029L24Rik (NM_172606.1,1877-1895).
gcgtgcatggactgttact

SEQ ID NO: 776440 - DNA, 19 bp, Mus musculus
  siRNA target sequence for F830029L24Rik (NM_172606.1,1982-2000).
ccagcctgcacgaaacaat

SEQ ID NO: 776441 - DNA, 19 bp, Mus musculus
  siRNA target sequence for F830029L24Rik (NM_172606.1,1983-2001).
cagcctgcacgaaacaata

SEQ ID NO: 776442 - DNA, 19 bp, Mus musculus
  siRNA target sequence for F830029L24Rik (NM_172606.1,1985-2003).
gcctgcacgaaacaataat

SEQ ID NO: 776443 - DNA, 19 bp, Mus musculus
  siRNA target sequence for F830029L24Rik (NM_172606.1,2170-2188).
cctcgtggggatttattgt

SEQ ID NO: 776444 - DNA, 19 bp, Mus musculus
  siRNA target sequence for F830029L24Rik (NM_172606.1,2178-2196).
ggatttattgtgcataaca

SEQ ID NO: 776445 - DNA, 19 bp, Mus musculus
  siRNA target sequence for F830029L24Rik (NM_172606.1,2179-2197).
gatttattgtgcataacat

SEQ ID NO: 776446 - DNA, 19 bp, Mus musculus
  siRNA target sequence for 9130210N20Rik (NM_172607.2,415-433).
ctggcttgcaggactgtat

SEQ ID NO: 776447 - DNA, 19 bp, Mus musculus
  siRNA target sequence for 9130210N20Rik (NM_172607.2,425-443).
ggactgtatgcgctttctt

SEQ ID NO: 776448 - DNA, 19 bp, Mus musculus
  siRNA target sequence for 9130210N20Rik (NM_172607.2,525-543).
caccttcgagcccttgatt

SEQ ID NO: 776449 - DNA, 19 bp, Mus musculus
  siRNA target sequence for 9130210N20Rik (NM_172607.2,724-742).
cggataagaaactactaga

SEQ ID NO: 776450 - DNA, 19 bp, Mus musculus
  siRNA target sequence for 9130210N20Rik (NM_172607.2,776-794).
gggtttcacggcctcaatt

SEQ ID NO: 776451 - DNA, 19 bp, Mus musculus
  siRNA target sequence for 9130210N20Rik (NM_172607.2,777-795).
ggtttcacggcctcaattt

SEQ ID NO: 776452 - DNA, 19 bp, Mus musculus
  siRNA target sequence for 9130210N20Rik (NM_172607.2,778-796).
gtttcacggcctcaattta

SEQ ID NO: 776453 - DNA, 19 bp, Mus musculus
  siRNA target sequence for 9130210N20Rik (NM_172607.2,969-987).
cctgccagggtaaatttgt

SEQ ID NO: 776454 - DNA, 19 bp, Mus musculus
  siRNA target sequence for 9130210N20Rik (NM_172607.2,1042-1060).
gggagcgcgcagcatttgt

SEQ ID NO: 776455 - DNA, 19 bp, Mus musculus
  siRNA target sequence for 9130210N20Rik (NM_172607.2,1123-1141).
ggagtggccttcctaactt

SEQ ID NO: 776456 - DNA, 19 bp, Mus musculus
  siRNA target sequence for 9130210N20Rik (NM_172607.2,1352-1370).
cagtgaggtgaatgtcatt

SEQ ID NO: 776457 - DNA, 19 bp, Mus musculus
  siRNA target sequence for 9130210N20Rik (NM_172607.2,1444-1462).
gaggccagcctcgaatcaa

SEQ ID NO: 776458 - DNA, 19 bp, Mus musculus
  siRNA target sequence for 9130210N20Rik (NM_172607.2,1775-1793).
gcagagccctgcagtgtat

SEQ ID NO: 776459 - DNA, 19 bp, Mus musculus
  siRNA target sequence for BC021523 (NM_172611.1,538-556).
gatcgaactggaacagaaa

SEQ ID NO: 776460 - DNA, 19 bp, Mus musculus
  siRNA target sequence for BC021523 (NM_172611.1,847-865).
gaacctgtctgccttatct

SEQ ID NO: 776461 - DNA, 19 bp, Mus musculus
  siRNA target sequence for BC021523 (NM_172611.1,866-884).
gactggtactccatctaca

SEQ ID NO: 776462 - DNA, 19 bp, Mus musculus
  siRNA target sequence for BC021523 (NM_172611.1,896-914).
gccttcacggtatacatga

SEQ ID NO: 776463 - DNA, 19 bp, Mus musculus
  siRNA target sequence for BC021523 (NM_172611.1,897-915).
ccttcacggtatacatgaa

SEQ ID NO: 776464 - DNA, 19 bp, Mus musculus
  siRNA target sequence for BC021523 (NM_172611.1,898-916).
cttcacggtatacatgaat

SEQ ID NO: 776465 - DNA, 19 bp, Mus musculus
  siRNA target sequence for BC021523 (NM_172611.1,965-983).
ctgaggttgtccctcaatt

SEQ ID NO: 776466 - DNA, 19 bp, Mus musculus
  siRNA target sequence for BC021523 (NM_172611.1,969-987).
ggttgtccctcaattacct

SEQ ID NO: 776467 - DNA, 19 bp, Mus musculus
  siRNA target sequence for BC021523 (NM_172611.1,994-1012).
caggggctggcggatacaa

SEQ ID NO: 776468 - DNA, 19 bp, Mus musculus
  siRNA target sequence for BC021523 (NM_172611.1,1106-1124).
cagaaagcacagaatctct

SEQ ID NO: 776469 - DNA, 19 bp, Mus musculus
  siRNA target sequence for BC021523 (NM_172611.1,1315-1333).
caaacgctgcccaagactt

SEQ ID NO: 776470 - DNA, 19 bp, Mus musculus
  siRNA target sequence for BC021523 (NM_172611.1,1331-1349).
cttcgagccaagtatgaca

SEQ ID NO: 776471 - DNA, 19 bp, Mus musculus
  siRNA target sequence for BC021523 (NM_172611.1,1346-1364).
gacaccccctatatcatct

SEQ ID NO: 776472 - DNA, 19 bp, Mus musculus
  siRNA target sequence for BC021523 (NM_172611.1,1490-1508).
gatgctggacgctttcaca

SEQ ID NO: 776473 - DNA, 19 bp, Mus musculus
  siRNA target sequence for BC021523 (NM_172611.1,1520-1538).
gggaacttccacgaaatct

SEQ ID NO: 776474 - DNA, 19 bp, Mus musculus
  siRNA target sequence for BC021523 (NM_172611.1,1529-1547).
cacgaaatcttcaacttga

SEQ ID NO: 776475 - DNA, 19 bp, Mus musculus
  siRNA target sequence for BC021523 (NM_172611.1,1587-1605).
ggcgctgctgcctcattaa

SEQ ID NO: 776476 - DNA, 19 bp, Mus musculus
  siRNA target sequence for BC021523 (NM_172611.1,1638-1656).
ggaacggggttctgtatgt

SEQ ID NO: 776477 - DNA, 19 bp, Mus musculus
  siRNA target sequence for BC021523 (NM_172611.1,1686-1704).
ccaagtctgggtcatcaaa

SEQ ID NO: 776478 - DNA, 19 bp, Mus musculus
  siRNA target sequence for BC021523 (NM_172611.1,1777-1795).
ctcaggcatgggaattgct

SEQ ID NO: 776479 - DNA, 19 bp, Mus musculus
  siRNA target sequence for BC021523 (NM_172611.1,1856-1874).
gcctttgagaccattttca

SEQ ID NO: 776480 - DNA, 19 bp, Mus musculus
  siRNA target sequence for A830014L09Rik (NM_172612.1,187-205).
ggaagacggcgatgttaca

SEQ ID NO: 776481 - DNA, 19 bp, Mus musculus
  siRNA target sequence for A830014L09Rik (NM_172612.1,204-222).
caggtgctagcgaaagact

SEQ ID NO: 776482 - DNA, 19 bp, Mus musculus
  siRNA target sequence for A830014L09Rik (NM_172612.1,457-475).
gtcccagcacacgtgtttt

SEQ ID NO: 776483 - DNA, 19 bp, Mus musculus
  siRNA target sequence for A830014L09Rik (NM_172612.1,460-478).
ccagcacacgtgttttgct

SEQ ID NO: 776484 - DNA, 19 bp, Mus musculus
  siRNA target sequence for A830014L09Rik (NM_172612.1,461-479).
cagcacacgtgttttgctt

SEQ ID NO: 776485 - DNA, 19 bp, Mus musculus
  siRNA target sequence for A830014L09Rik (NM_172612.1,463-481).
gcacacgtgttttgcttat

SEQ ID NO: 776486 - DNA, 19 bp, Mus musculus
  siRNA target sequence for A830014L09Rik (NM_172612.1,464-482).
cacacgtgttttgcttatt

SEQ ID NO: 776487 - DNA, 19 bp, Mus musculus
  siRNA target sequence for A830014L09Rik (NM_172612.1,664-682).
ccatggtgtgtctgaacaa

SEQ ID NO: 776488 - DNA, 19 bp, Mus musculus
  siRNA target sequence for A830014L09Rik (NM_172612.1,669-687).
gtgtgtctgaacaagtcta

SEQ ID NO: 776489 - DNA, 19 bp, Mus musculus
  siRNA target sequence for A830014L09Rik (NM_172612.1,709-727).
ccgtccgaagcctttccaa

SEQ ID NO: 776490 - DNA, 19 bp, Mus musculus
  siRNA target sequence for 9330161C17Rik (NM_172614.2,169-187).
cccacacgctgattctcta

SEQ ID NO: 776491 - DNA, 19 bp, Mus musculus
  siRNA target sequence for 9330161C17Rik (NM_172614.2,324-342).
ctagcagctgtcgatttca

SEQ ID NO: 776492 - DNA, 19 bp, Mus musculus
  siRNA target sequence for 9330161C17Rik (NM_172614.2,333-351).
gtcgatttcatgaacttca

SEQ ID NO: 776493 - DNA, 19 bp, Mus musculus
  siRNA target sequence for 9330161C17Rik (NM_172614.2,336-354).
gatttcatgaacttcatgt

SEQ ID NO: 776494 - DNA, 19 bp, Mus musculus
  siRNA target sequence for 9330161C17Rik (NM_172614.2,728-746).
gggcacacatgtgtttttt

SEQ ID NO: 776495 - DNA, 19 bp, Mus musculus
  siRNA target sequence for 1700021K19Rik (NM_172615.1,307-325).
gccaactgccccaatgtct

SEQ ID NO: 776496 - DNA, 19 bp, Mus musculus
  siRNA target sequence for 1700021K19Rik (NM_172615.1,318-336).
caatgtctggtccaagtat

SEQ ID NO: 776497 - DNA, 19 bp, Mus musculus
  siRNA target sequence for 1700021K19Rik (NM_172615.1,366-384).
gcagaacatcctgtatcat

SEQ ID NO: 776498 - DNA, 19 bp, Mus musculus
  siRNA target sequence for 1700021K19Rik (NM_172615.1,407-425).
gttgccgccaggctgatta

SEQ ID NO: 776499 - DNA, 19 bp, Mus musculus
  siRNA target sequence for 1700021K19Rik (NM_172615.1,613-631).
ggggacagacagtacatca

SEQ ID NO: 776500 - DNA, 19 bp, Mus musculus
  siRNA target sequence for 1700021K19Rik (NM_172615.1,842-860).
gctatgctcagcattccta

SEQ ID NO: 776501 - DNA, 19 bp, Mus musculus
  siRNA target sequence for 1700021K19Rik (NM_172615.1,920-938).
gatctacttccttttcact

SEQ ID NO: 776502 - DNA, 19 bp, Mus musculus
  siRNA target sequence for 1700021K19Rik (NM_172615.1,1229-1247).
gcagcagctctcacttgtt

SEQ ID NO: 776503 - DNA, 19 bp, Mus musculus
  siRNA target sequence for 1700021K19Rik (NM_172615.1,1629-1647).
gatgagccagtgtctagaa

SEQ ID NO: 776504 - DNA, 19 bp, Mus musculus
  siRNA target sequence for 1700021K19Rik (NM_172615.1,1752-1770).
gtaccgggagactgagaat

SEQ ID NO: 776505 - DNA, 19 bp, Mus musculus
  siRNA target sequence for 1700021K19Rik (NM_172615.1,1852-1870).
gatgctgacgacttggaaa

SEQ ID NO: 776506 - DNA, 19 bp, Mus musculus
  siRNA target sequence for 1700021K19Rik (NM_172615.1,1856-1874).
ctgacgacttggaaatcca

SEQ ID NO: 776507 - DNA, 19 bp, Mus musculus
  siRNA target sequence for 1700021K19Rik (NM_172615.1,1900-1918).
gtctcaaacggcaaatcat

SEQ ID NO: 776508 - DNA, 19 bp, Mus musculus
  siRNA target sequence for 1700021K19Rik (NM_172615.1,2111-2129).
ggcagcacgcggacatcta

SEQ ID NO: 776509 - DNA, 19 bp, Mus musculus
  siRNA target sequence for 1700021K19Rik (NM_172615.1,2113-2131).
cagcacgcggacatctaca

SEQ ID NO: 776510 - DNA, 19 bp, Mus musculus
  siRNA target sequence for 1700021K19Rik (NM_172615.1,2180-2198).
cgcagatcatttttaatgt

SEQ ID NO: 776511 - DNA, 19 bp, Mus musculus
  siRNA target sequence for 1700021K19Rik (NM_172615.1,2224-2242).
gccgtggccaagcagaatt

SEQ ID NO: 776512 - DNA, 19 bp, Mus musculus
  siRNA target sequence for 1700021K19Rik (NM_172615.1,2266-2284).
cggacggaccccgactata

SEQ ID NO: 776513 - DNA, 19 bp, Mus musculus
  siRNA target sequence for 1700021K19Rik (NM_172615.1,2267-2285).
ggacggaccccgactatat

SEQ ID NO: 776514 - DNA, 19 bp, Mus musculus
  siRNA target sequence for 1700021K19Rik (NM_172615.1,2305-2323).
gagtacctaggcaagtact

SEQ ID NO: 776515 - DNA, 19 bp, Mus musculus
  siRNA target sequence for 1700021K19Rik (NM_172615.1,2385-2403).
ggacttcagcaagtactat

SEQ ID NO: 776516 - DNA, 19 bp, Mus musculus
  siRNA target sequence for 1700021K19Rik (NM_172615.1,2489-2507).
ggaaggtcaagctgcttaa

SEQ ID NO: 776517 - DNA, 19 bp, Mus musculus
  siRNA target sequence for 1700021K19Rik (NM_172615.1,2493-2511).
ggtcaagctgcttaaccaa

SEQ ID NO: 776518 - DNA, 19 bp, Mus musculus
  siRNA target sequence for 1700021K19Rik (NM_172615.1,2740-2758).
caggccaagggcttcatct

SEQ ID NO: 776519 - DNA, 19 bp, Mus musculus
  siRNA target sequence for 1700021K19Rik (NM_172615.1,2794-2812).
ccttttgagctgcataagt

SEQ ID NO: 776520 - DNA, 19 bp, Mus musculus
  siRNA target sequence for 1700021K19Rik (NM_172615.1,2829-2847).
gtgtaaagcgtgttaccat

SEQ ID NO: 776521 - DNA, 19 bp, Mus musculus
  siRNA target sequence for 1700021K19Rik (NM_172615.1,2836-2854).
gcgtgttaccataaaactt

SEQ ID NO: 776522 - DNA, 19 bp, Mus musculus
  siRNA target sequence for 1700021K19Rik (NM_172615.1,2931-2949).
gtcctacctgtctgactat

SEQ ID NO: 776523 - DNA, 19 bp, Mus musculus
  siRNA target sequence for C330027C09Rik (NM_172616.1,81-99).
cggctcgtcggcatggatt

SEQ ID NO: 776524 - DNA, 19 bp, Mus musculus
  siRNA target sequence for C330027C09Rik (NM_172616.1,215-233).
cacacgactgtttacatca

SEQ ID NO: 776525 - DNA, 19 bp, Mus musculus
  siRNA target sequence for C330027C09Rik (NM_172616.1,237-255).
cagatattaccaagtgaat

SEQ ID NO: 776526 - DNA, 19 bp, Mus musculus
  siRNA target sequence for C330027C09Rik (NM_172616.1,260-278).
gagctgccttgtagaactt

SEQ ID NO: 776527 - DNA, 19 bp, Mus musculus
  siRNA target sequence for C330027C09Rik (NM_172616.1,279-297).
ctcgaagacccaaacataa

SEQ ID NO: 776528 - DNA, 19 bp, Mus musculus
  siRNA target sequence for C330027C09Rik (NM_172616.1,281-299).
cgaagacccaaacataagt

SEQ ID NO: 776529 - DNA, 19 bp, Mus musculus
  siRNA target sequence for C330027C09Rik (NM_172616.1,306-324).
ctgatcttaagtattatca

SEQ ID NO: 776530 - DNA, 19 bp, Mus musculus
  siRNA target sequence for C330027C09Rik (NM_172616.1,308-326).
gatcttaagtattatcagt

SEQ ID NO: 776531 - DNA, 19 bp, Mus musculus
  siRNA target sequence for C330027C09Rik (NM_172616.1,332-350).
gtctcaactggctatagat

SEQ ID NO: 776532 - DNA, 19 bp, Mus musculus
  siRNA target sequence for C330027C09Rik (NM_172616.1,334-352).
ctcaactggctatagataa

SEQ ID NO: 776533 - DNA, 19 bp, Mus musculus
  siRNA target sequence for C330027C09Rik (NM_172616.1,339-357).
ctggctatagataatgaaa

SEQ ID NO: 776534 - DNA, 19 bp, Mus musculus
  siRNA target sequence for C330027C09Rik (NM_172616.1,446-464).
gtttttacagtgcattcaa

SEQ ID NO: 776535 - DNA, 19 bp, Mus musculus
  siRNA target sequence for C330027C09Rik (NM_172616.1,465-483).
ctgctgcaaaggttaacat

SEQ ID NO: 776536 - DNA, 19 bp, Mus musculus
  siRNA target sequence for C330027C09Rik (NM_172616.1,467-485).
gctgcaaaggttaacatat

SEQ ID NO: 776537 - DNA, 19 bp, Mus musculus
  siRNA target sequence for C330027C09Rik (NM_172616.1,468-486).
ctgcaaaggttaacatata

SEQ ID NO: 776538 - DNA, 19 bp, Mus musculus
  siRNA target sequence for C330027C09Rik (NM_172616.1,470-488).
gcaaaggttaacatataat

SEQ ID NO: 776539 - DNA, 19 bp, Mus musculus
  siRNA target sequence for C330027C09Rik (NM_172616.1,500-518).
ccattctggtgcccatata

SEQ ID NO: 776540 - DNA, 19 bp, Mus musculus
  siRNA target sequence for C330027C09Rik (NM_172616.1,510-528).
gcccatatagatgacttaa

SEQ ID NO: 776541 - DNA, 19 bp, Mus musculus
  siRNA target sequence for C330027C09Rik (NM_172616.1,512-530).
ccatatagatgacttaatt

SEQ ID NO: 776542 - DNA, 19 bp, Mus musculus
  siRNA target sequence for C330027C09Rik (NM_172616.1,519-537).
gatgacttaattacattct

SEQ ID NO: 776543 - DNA, 19 bp, Mus musculus
  siRNA target sequence for C330027C09Rik (NM_172616.1,588-606).
ggactattggcaaatcttt

SEQ ID NO: 776544 - DNA, 19 bp, Mus musculus
  siRNA target sequence for C330027C09Rik (NM_172616.1,607-625).
gtcggcacaatctttctgt

SEQ ID NO: 776545 - DNA, 19 bp, Mus musculus
  siRNA target sequence for C330027C09Rik (NM_172616.1,611-629).
gcacaatctttctgttcaa

SEQ ID NO: 776546 - DNA, 19 bp, Mus musculus
  siRNA target sequence for C330027C09Rik (NM_172616.1,612-630).
cacaatctttctgttcaaa

SEQ ID NO: 776547 - DNA, 19 bp, Mus musculus
  siRNA target sequence for C330027C09Rik (NM_172616.1,788-806).
cattcatcagactttccaa

SEQ ID NO: 776548 - DNA, 19 bp, Mus musculus
  siRNA target sequence for C330027C09Rik (NM_172616.1,831-849).
ggtgatggtaccctaacaa

SEQ ID NO: 776549 - DNA, 19 bp, Mus musculus
  siRNA target sequence for C330027C09Rik (NM_172616.1,834-852).
gatggtaccctaacaagaa

SEQ ID NO: 776550 - DNA, 19 bp, Mus musculus
  siRNA target sequence for C330027C09Rik (NM_172616.1,870-888).
ctgatggatctccttaaaa

SEQ ID NO: 776551 - DNA, 19 bp, Mus musculus
  siRNA target sequence for C330027C09Rik (NM_172616.1,879-897).
ctccttaaaaaccctaaaa

SEQ ID NO: 776552 - DNA, 19 bp, Mus musculus
  siRNA target sequence for C330027C09Rik (NM_172616.1,890-908).
ccctaaaattgctgattat

SEQ ID NO: 776553 - DNA, 19 bp, Mus musculus
  siRNA target sequence for C330027C09Rik (NM_172616.1,917-935).
gtatgagcacttttcttca

SEQ ID NO: 776554 - DNA, 19 bp, Mus musculus
  siRNA target sequence for C330027C09Rik (NM_172616.1,934-952).
catgtcttagtcaagtact

SEQ ID NO: 776555 - DNA, 19 bp, Mus musculus
  siRNA target sequence for C330027C09Rik (NM_172616.1,955-973).
gacttctaaatgcaaaaga

SEQ ID NO: 776556 - DNA, 19 bp, Mus musculus
  siRNA target sequence for C330027C09Rik (NM_172616.1,1027-1045).
ctcagctgcgccatgtact

SEQ ID NO: 776557 - DNA, 19 bp, Mus musculus
  siRNA target sequence for C330027C09Rik (NM_172616.1,1041-1059).
gtactcagtcagatgatgt

SEQ ID NO: 776558 - DNA, 19 bp, Mus musculus
  siRNA target sequence for C330027C09Rik (NM_172616.1,1067-1085).
gtctccatctggcaacatt

SEQ ID NO: 776559 - DNA, 19 bp, Mus musculus
  siRNA target sequence for C330027C09Rik (NM_172616.1,1069-1087).
ctccatctggcaacattct

SEQ ID NO: 776560 - DNA, 19 bp, Mus musculus
  siRNA target sequence for C330027C09Rik (NM_172616.1,1112-1130).
gcctactgcggctctactt

SEQ ID NO: 776561 - DNA, 19 bp, Mus musculus
  siRNA target sequence for C330027C09Rik (NM_172616.1,1231-1249).
gttcctcaactgaccattt

SEQ ID NO: 776562 - DNA, 19 bp, Mus musculus
  siRNA target sequence for C330027C09Rik (NM_172616.1,1262-1280).
gcttcctacaattcttgat

SEQ ID NO: 776563 - DNA, 19 bp, Mus musculus
  siRNA target sequence for C330027C09Rik (NM_172616.1,1305-1323).
ctggatgagaccttagtaa

SEQ ID NO: 776564 - DNA, 19 bp, Mus musculus
  siRNA target sequence for C330027C09Rik (NM_172616.1,1324-1342).
gaaataagtgtgaaaggat

SEQ ID NO: 776565 - DNA, 19 bp, Mus musculus
  siRNA target sequence for C330027C09Rik (NM_172616.1,1378-1396).
gagacgactctctgaaaat

SEQ ID NO: 776566 - DNA, 19 bp, Mus musculus
  siRNA target sequence for C330027C09Rik (NM_172616.1,1382-1400).
cgactctctgaaaatgcat

SEQ ID NO: 776567 - DNA, 19 bp, Mus musculus
  siRNA target sequence for C330027C09Rik (NM_172616.1,1486-1504).
caaaggtagccgattctga

SEQ ID NO: 776568 - DNA, 19 bp, Mus musculus
  siRNA target sequence for C330027C09Rik (NM_172616.1,1511-1529).
caaacttgctgctgatgta

SEQ ID NO: 776569 - DNA, 19 bp, Mus musculus
  siRNA target sequence for C330027C09Rik (NM_172616.1,1576-1594).
ctggtatggaagtaagctt

SEQ ID NO: 776570 - DNA, 19 bp, Mus musculus
  siRNA target sequence for C330027C09Rik (NM_172616.1,1583-1601).
ggaagtaagcttctacaaa

SEQ ID NO: 776571 - DNA, 19 bp, Mus musculus
  siRNA target sequence for C330027C09Rik (NM_172616.1,1584-1602).
gaagtaagcttctacaaaa

SEQ ID NO: 776572 - DNA, 19 bp, Mus musculus
  siRNA target sequence for C330027C09Rik (NM_172616.1,1610-1628).
ggatccgcggttgattact

SEQ ID NO: 776573 - DNA, 19 bp, Mus musculus
  siRNA target sequence for C330027C09Rik (NM_172616.1,1616-1634).
gcggttgattactccttta

SEQ ID NO: 776574 - DNA, 19 bp, Mus musculus
  siRNA target sequence for C330027C09Rik (NM_172616.1,1629-1647).
cctttagcttttgctttaa

SEQ ID NO: 776575 - DNA, 19 bp, Mus musculus
  siRNA target sequence for C330027C09Rik (NM_172616.1,1727-1745).
cgtacttggagaaagtata

SEQ ID NO: 776576 - DNA, 19 bp, Mus musculus
  siRNA target sequence for C330027C09Rik (NM_172616.1,1746-1764).
gcagcaaacaatgtataca

SEQ ID NO: 776577 - DNA, 19 bp, Mus musculus
  siRNA target sequence for C330027C09Rik (NM_172616.1,1811-1829).
cttaaatcatggtttttca

SEQ ID NO: 776578 - DNA, 19 bp, Mus musculus
  siRNA target sequence for C330027C09Rik (NM_172616.1,1850-1868).
gcctcctccttcaaaagat

SEQ ID NO: 776579 - DNA, 19 bp, Mus musculus
  siRNA target sequence for C330027C09Rik (NM_172616.1,1922-1940).
gatggtaaaggatcagatt

SEQ ID NO: 776580 - DNA, 19 bp, Mus musculus
  siRNA target sequence for C330027C09Rik (NM_172616.1,1925-1943).
ggtaaaggatcagattagt

SEQ ID NO: 776581 - DNA, 19 bp, Mus musculus
  siRNA target sequence for C330027C09Rik (NM_172616.1,1937-1955).
gattagtgatataagaata

SEQ ID NO: 776582 - DNA, 19 bp, Mus musculus
  siRNA target sequence for C330027C09Rik (NM_172616.1,1942-1960).
gtgatataagaatatctga

SEQ ID NO: 776583 - DNA, 19 bp, Mus musculus
  siRNA target sequence for C330027C09Rik (NM_172616.1,1967-1985).
ggatgtttatgagatgaaa

SEQ ID NO: 776584 - DNA, 19 bp, Mus musculus
  siRNA target sequence for C330027C09Rik (NM_172616.1,2063-2081).
cagactgatcgctcagtat

SEQ ID NO: 776585 - DNA, 19 bp, Mus musculus
  siRNA target sequence for C330027C09Rik (NM_172616.1,2105-2123).
gacagaggcacgaacactt

SEQ ID NO: 776586 - DNA, 19 bp, Mus musculus
  siRNA target sequence for C330027C09Rik (NM_172616.1,2116-2134).
gaacacttgcgggtatgtt

SEQ ID NO: 776587 - DNA, 19 bp, Mus musculus
  siRNA target sequence for C330027C09Rik (NM_172616.1,2126-2144).
gggtatgttacgagaagtt

SEQ ID NO: 776588 - DNA, 19 bp, Mus musculus
  siRNA target sequence for C330027C09Rik (NM_172616.1,2203-2221).
gagcccaaaatgatattga

SEQ ID NO: 776589 - DNA, 19 bp, Mus musculus
  siRNA target sequence for C330027C09Rik (NM_172616.1,2287-2305).
cctacatggaacttgttca

SEQ ID NO: 776590 - DNA, 19 bp, Mus musculus
  siRNA target sequence for C330027C09Rik (NM_172616.1,2359-2377).
ctctgaataaacacattga

SEQ ID NO: 776591 - DNA, 19 bp, Mus musculus
  siRNA target sequence for C330027C09Rik (NM_172616.1,2370-2388).
cacattgagacaatgaaaa

SEQ ID NO: 776592 - DNA, 19 bp, Mus musculus
  siRNA target sequence for C330027C09Rik (NM_172616.1,2397-2415).
gaggcgctcaagcaacaaa

SEQ ID NO: 776593 - DNA, 19 bp, Mus musculus
  siRNA target sequence for C330027C09Rik (NM_172616.1,2399-2417).
ggcgctcaagcaacaaaat

SEQ ID NO: 776594 - DNA, 19 bp, Mus musculus
  siRNA target sequence for C330027C09Rik (NM_172616.1,2477-2495).
gttagcagaccgagaatgt

SEQ ID NO: 776595 - DNA, 19 bp, Mus musculus
  siRNA target sequence for C330027C09Rik (NM_172616.1,2487-2505).
cgagaatgtaaactatcaa

SEQ ID NO: 776596 - DNA, 19 bp, Mus musculus
  siRNA target sequence for C330027C09Rik (NM_172616.1,2577-2595).
gaaaccattgatatcctta

SEQ ID NO: 776597 - DNA, 19 bp, Mus musculus
  siRNA target sequence for C330027C09Rik (NM_172616.1,2581-2599).
ccattgatatccttagaaa

SEQ ID NO: 776598 - DNA, 19 bp, Mus musculus
  siRNA target sequence for C330027C09Rik (NM_172616.1,2582-2600).
cattgatatccttagaaaa

SEQ ID NO: 776599 - DNA, 19 bp, Mus musculus
  siRNA target sequence for C330027C09Rik (NM_172616.1,2699-2717).
ggagtctttgttgaaactt

SEQ ID NO: 776600 - DNA, 19 bp, Mus musculus
  siRNA target sequence for C330027C09Rik (NM_172616.1,2720-2738).
gcaagaggagttgaacaaa

SEQ ID NO: 776601 - DNA, 19 bp, Mus musculus
  siRNA target sequence for C330027C09Rik (NM_172616.1,2743-2761).
ctcacatgatagcaatgat

SEQ ID NO: 776602 - DNA, 19 bp, Mus musculus
  siRNA target sequence for C330027C09Rik (NM_172616.1,2765-2783).
cagtttaagtggtggaaaa

SEQ ID NO: 776603 - DNA, 19 bp, Mus musculus
  siRNA target sequence for C330027C09Rik (NM_172616.1,2767-2785).
gtttaagtggtggaaaaat

SEQ ID NO: 776604 - DNA, 19 bp, Mus musculus
  siRNA target sequence for C330027C09Rik (NM_172616.1,2793-2811).
gaaactgtgaaccttagta

SEQ ID NO: 776605 - DNA, 19 bp, Mus musculus
  siRNA target sequence for 2810027J07 (NM_172617.1,443-461).
cgggaccactgcgtacatt

SEQ ID NO: 776606 - DNA, 19 bp, Mus musculus
  siRNA target sequence for 2810027J07 (NM_172617.1,468-486).
gtgacgatacagaaagagt

SEQ ID NO: 776607 - DNA, 19 bp, Mus musculus
  siRNA target sequence for 2810027J07 (NM_172617.1,472-490).
cgatacagaaagagtcttt

SEQ ID NO: 776608 - DNA, 19 bp, Mus musculus
  siRNA target sequence for 2810027J07 (NM_172617.1,857-875).
caccactgcccatcactta

SEQ ID NO: 776609 - DNA, 19 bp, Mus musculus
  siRNA target sequence for 2810027J07 (NM_172617.1,859-877).
ccactgcccatcacttaaa

SEQ ID NO: 776610 - DNA, 19 bp, Mus musculus
  siRNA target sequence for 2810027J07 (NM_172617.1,862-880).
ctgcccatcacttaaaggt

SEQ ID NO: 776611 - DNA, 19 bp, Mus musculus
  siRNA target sequence for 2810027J07 (NM_172617.1,908-926).
cccatacaggtgtgacttt

SEQ ID NO: 776612 - DNA, 19 bp, Mus musculus
  siRNA target sequence for 2810027J07 (NM_172617.1,955-973).
gctatgggctaaaaagtca

SEQ ID NO: 776613 - DNA, 19 bp, Mus musculus
  siRNA target sequence for 2810027J07 (NM_172617.1,956-974).
ctatgggctaaaaagtcat

SEQ ID NO: 776614 - DNA, 19 bp, Mus musculus
  siRNA target sequence for 2810027J07 (NM_172617.1,1222-1240).
gcgccaccaactacaagaa

SEQ ID NO: 776615 - DNA, 19 bp, Mus musculus
  siRNA target sequence for 2810027J07 (NM_172617.1,1223-1241).
cgccaccaactacaagaat

SEQ ID NO: 776616 - DNA, 19 bp, Mus musculus
  siRNA target sequence for 2810027J07 (NM_172617.1,1226-1244).
caccaactacaagaatcat

SEQ ID NO: 776617 - DNA, 19 bp, Mus musculus
  siRNA target sequence for 2810027J07 (NM_172617.1,1228-1246).
ccaactacaagaatcatgt

SEQ ID NO: 776618 - DNA, 19 bp, Mus musculus
  siRNA target sequence for 2810027J07 (NM_172617.1,1313-1331).
gtactcgagcctgtacaaa

SEQ ID NO: 776619 - DNA, 19 bp, Mus musculus
  siRNA target sequence for 2810027J07 (NM_172617.1,1543-1561).
cttacctttcggaagtgaa

SEQ ID NO: 776620 - DNA, 19 bp, Mus musculus
  siRNA target sequence for 2810027J07 (NM_172617.1,1736-1754).
caccatccccggtcatcat

SEQ ID NO: 776621 - DNA, 19 bp, Mus musculus
  siRNA target sequence for 2810027J07 (NM_172617.1,1738-1756).
ccatccccggtcatcatga

SEQ ID NO: 776622 - DNA, 19 bp, Mus musculus
  siRNA target sequence for 2810027J07 (NM_172617.1,1739-1757).
catccccggtcatcatgaa

SEQ ID NO: 776623 - DNA, 19 bp, Mus musculus
  siRNA target sequence for 2810027J07 (NM_172617.1,1816-1834).
ctcagcccgtcacaatcat

SEQ ID NO: 776624 - DNA, 19 bp, Mus musculus
  siRNA target sequence for 2810027J07 (NM_172617.1,1818-1836).
cagcccgtcacaatcatta

SEQ ID NO: 776625 - DNA, 19 bp, Mus musculus
  siRNA target sequence for 2810027J07 (NM_172617.1,1821-1839).
cccgtcacaatcattacct

SEQ ID NO: 776626 - DNA, 19 bp, Mus musculus
  siRNA target sequence for 2810027J07 (NM_172617.1,1867-1885).
gcgtggcgtctcttcatca

SEQ ID NO: 776627 - DNA, 19 bp, Mus musculus
  siRNA target sequence for 5031403H21Rik (NM_172623.1,161-179).
gtctgggggtccacagtat

SEQ ID NO: 776628 - DNA, 19 bp, Mus musculus
  siRNA target sequence for 5031403H21Rik (NM_172623.1,176-194).
gtatctgaagagcttcata

SEQ ID NO: 776629 - DNA, 19 bp, Mus musculus
  siRNA target sequence for 5031403H21Rik (NM_172623.1,273-291).
ggcaaacagccccaagtaa

SEQ ID NO: 776630 - DNA, 19 bp, Mus musculus
  siRNA target sequence for 5031403H21Rik (NM_172623.1,336-354).
gggaattacagcacacaat

SEQ ID NO: 776631 - DNA, 19 bp, Mus musculus
  siRNA target sequence for 5031403H21Rik (NM_172623.1,388-406).
caccatgactcaactaaca

SEQ ID NO: 776632 - DNA, 19 bp, Mus musculus
  siRNA target sequence for 5031403H21Rik (NM_172623.1,410-428).
gatgactcagcgttctact

SEQ ID NO: 776633 - DNA, 19 bp, Mus musculus
  siRNA target sequence for 5031403H21Rik (NM_172623.1,427-445).
ctggtgtggtccatattat

SEQ ID NO: 776634 - DNA, 19 bp, Mus musculus
  siRNA target sequence for 5031403H21Rik (NM_172623.1,546-564).
gcacagccaccatctttat

SEQ ID NO: 776635 - DNA, 19 bp, Mus musculus
  siRNA target sequence for 5031403H21Rik (NM_172623.1,759-777).
gccagggacgagagtacat

SEQ ID NO: 776636 - DNA, 19 bp, Mus musculus
  siRNA target sequence for 5031403H21Rik (NM_172623.1,787-805).
gatggagctttcaaaacta

SEQ ID NO: 776637 - DNA, 19 bp, Mus musculus
  siRNA target sequence for 5031403H21Rik (NM_172623.1,839-857).
cacatctcagggtatgaga

SEQ ID NO: 776638 - DNA, 19 bp, Mus musculus
  siRNA target sequence for D030070L09Rik (NM_172625.1,375-393).
ggcaactgaacgatcctaa

SEQ ID NO: 776639 - DNA, 19 bp, Mus musculus
  siRNA target sequence for D430044G18Rik (NM_172628.1,75-93).
ctggggtccaggtaaagaa

SEQ ID NO: 776640 - DNA, 19 bp, Mus musculus
  siRNA target sequence for D430044G18Rik (NM_172628.1,126-144).
ggacacgtcctcacttgaa

SEQ ID NO: 776641 - DNA, 19 bp, Mus musculus
  siRNA target sequence for D430044G18Rik (NM_172628.1,127-145).
gacacgtcctcacttgaaa

SEQ ID NO: 776642 - DNA, 19 bp, Mus musculus
  siRNA target sequence for D430044G18Rik (NM_172628.1,291-309).
ggaagtccacgcgctattt

SEQ ID NO: 776643 - DNA, 19 bp, Mus musculus
  siRNA target sequence for D430044G18Rik (NM_172628.1,292-310).
gaagtccacgcgctattta

SEQ ID NO: 776644 - DNA, 19 bp, Mus musculus
  siRNA target sequence for D430044G18Rik (NM_172628.1,297-315).
ccacgcgctatttaaggat

SEQ ID NO: 776645 - DNA, 19 bp, Mus musculus
  siRNA target sequence for D430044G18Rik (NM_172628.1,517-535).
gacaatcacttggaaaaca

SEQ ID NO: 776646 - DNA, 19 bp, Mus musculus
  siRNA target sequence for D430044G18Rik (NM_172628.1,519-537).
caatcacttggaaaacata

SEQ ID NO: 776647 - DNA, 19 bp, Mus musculus
  siRNA target sequence for D430044G18Rik (NM_172628.1,774-792).
gaatcacccaggaatctgt

SEQ ID NO: 776648 - DNA, 19 bp, Mus musculus
  siRNA target sequence for D430044G18Rik (NM_172628.1,998-1016).
ccaggagcatcgatcttga

SEQ ID NO: 776649 - DNA, 19 bp, Mus musculus
  siRNA target sequence for D430044G18Rik (NM_172628.1,999-1017).
caggagcatcgatcttgat

SEQ ID NO: 776650 - DNA, 19 bp, Mus musculus
  siRNA target sequence for D430044G18Rik (NM_172628.1,1002-1020).
gagcatcgatcttgattct

SEQ ID NO: 776651 - DNA, 19 bp, Mus musculus
  siRNA target sequence for D430044G18Rik (NM_172628.1,1105-1123).
gagtgttccggcttcctat

SEQ ID NO: 776652 - DNA, 19 bp, Mus musculus
  siRNA target sequence for D430044G18Rik (NM_172628.1,1124-1142).
gttcgctcgctcatactga

SEQ ID NO: 776653 - DNA, 19 bp, Mus musculus
  siRNA target sequence for D430044G18Rik (NM_172628.1,1132-1150).
gctcatactgacatcactt

SEQ ID NO: 776654 - DNA, 19 bp, Mus musculus
  siRNA target sequence for D430044G18Rik (NM_172628.1,1135-1153).
catactgacatcacttcta

SEQ ID NO: 776655 - DNA, 19 bp, Mus musculus
  siRNA target sequence for D430044G18Rik (NM_172628.1,1469-1487).
gctacaccgaccactttaa

SEQ ID NO: 776656 - DNA, 19 bp, Mus musculus
  siRNA target sequence for D430044G18Rik (NM_172628.1,1482-1500).
ctttaagagcctctatgat

SEQ ID NO: 776657 - DNA, 19 bp, Mus musculus
  siRNA target sequence for D430044G18Rik (NM_172628.1,1561-1579).
gcctacctagagacttcaa

SEQ ID NO: 776658 - DNA, 19 bp, Mus musculus
  siRNA target sequence for D430044G18Rik (NM_172628.1,1742-1760).
ctgctctgtacatcaactt

SEQ ID NO: 776659 - DNA, 19 bp, Mus musculus
  siRNA target sequence for D430044G18Rik (NM_172628.1,1776-1794).
gaggcagaggctaagacat

SEQ ID NO: 776660 - DNA, 19 bp, Mus musculus
  siRNA target sequence for D430044G18Rik (NM_172628.1,1778-1796).
ggcagaggctaagacataa

SEQ ID NO: 776661 - DNA, 19 bp, Mus musculus
  siRNA target sequence for D430044G18Rik (NM_172628.1,1798-1816).
gggcccaccttgcttgaaa

SEQ ID NO: 776662 - DNA, 19 bp, Mus musculus
  siRNA target sequence for D430044G18Rik (NM_172628.1,1862-1880).
cgaagaatgagctagatgt

SEQ ID NO: 776663 - DNA, 19 bp, Mus musculus
  siRNA target sequence for D430044G18Rik (NM_172628.1,2073-2091).
gtatgacaagaagtatctt

SEQ ID NO: 776664 - DNA, 19 bp, Mus musculus
  siRNA target sequence for D430044G18Rik (NM_172628.1,2100-2118).
cgcagtggcctctgttcaa

SEQ ID NO: 776665 - DNA, 19 bp, Mus musculus
  siRNA target sequence for D430044G18Rik (NM_172628.1,2101-2119).
gcagtggcctctgttcaaa

SEQ ID NO: 776666 - DNA, 19 bp, Mus musculus
  siRNA target sequence for D430044G18Rik (NM_172628.1,2106-2124).
ggcctctgttcaaaaacgt

SEQ ID NO: 776667 - DNA, 19 bp, Mus musculus
  siRNA target sequence for D430044G18Rik (NM_172628.1,2199-2217).
cctgggtgttccttcttca

SEQ ID NO: 776668 - DNA, 19 bp, Mus musculus
  siRNA target sequence for D430044G18Rik (NM_172628.1,2315-2333).
gtctcatcctgtctaagat

SEQ ID NO: 776669 - DNA, 19 bp, Mus musculus
  siRNA target sequence for D430044G18Rik (NM_172628.1,2317-2335).
ctcatcctgtctaagatgt

SEQ ID NO: 776670 - DNA, 19 bp, Mus musculus
  siRNA target sequence for D430044G18Rik (NM_172628.1,2385-2403).
ccatgtgttagggaaacta

SEQ ID NO: 776671 - DNA, 19 bp, Mus musculus
  siRNA target sequence for D430044G18Rik (NM_172628.1,2415-2433).
ggaagccttcgaatcttct

SEQ ID NO: 776672 - DNA, 19 bp, Mus musculus
  siRNA target sequence for D430044G18Rik (NM_172628.1,2562-2580).
gggacttgcgtttgaagat

SEQ ID NO: 776673 - DNA, 19 bp, Mus musculus
  siRNA target sequence for D430044G18Rik (NM_172628.1,2564-2582).
gacttgcgtttgaagatga

SEQ ID NO: 776674 - DNA, 19 bp, Mus musculus
  siRNA target sequence for D430044G18Rik (NM_172628.1,2638-2656).
gagatggggaacatacgta

SEQ ID NO: 776675 - DNA, 19 bp, Mus musculus
  siRNA target sequence for D430044G18Rik (NM_172628.1,2737-2755).
caggctgtccggctgtatt

SEQ ID NO: 776676 - DNA, 19 bp, Mus musculus
  siRNA target sequence for D430044G18Rik (NM_172628.1,2926-2944).
ccgatgcgtgcattaccta

SEQ ID NO: 776677 - DNA, 19 bp, Mus musculus
  siRNA target sequence for D430044G18Rik (NM_172628.1,2927-2945).
cgatgcgtgcattacctat

SEQ ID NO: 776678 - DNA, 19 bp, Mus musculus
  siRNA target sequence for D430044G18Rik (NM_172628.1,2932-2950).
cgtgcattacctatcatga

SEQ ID NO: 776679 - DNA, 19 bp, Mus musculus
  siRNA target sequence for D430044G18Rik (NM_172628.1,2933-2951).
gtgcattacctatcatgaa

SEQ ID NO: 776680 - DNA, 19 bp, Mus musculus
  siRNA target sequence for D430044G18Rik (NM_172628.1,2935-2953).
gcattacctatcatgaaca

SEQ ID NO: 776681 - DNA, 19 bp, Mus musculus
  siRNA target sequence for D430044G18Rik (NM_172628.1,3011-3029).
gtcccttgggcagctttat

SEQ ID NO: 776682 - DNA, 19 bp, Mus musculus
  siRNA target sequence for D430044G18Rik (NM_172628.1,3015-3033).
cttgggcagctttatagga

SEQ ID NO: 776683 - DNA, 19 bp, Mus musculus
  siRNA target sequence for 9430028L06Rik (NM_172629.1,534-552).
gcaaaggcgtttaccataa

SEQ ID NO: 776684 - DNA, 19 bp, Mus musculus
  siRNA target sequence for 9430028L06Rik (NM_172629.1,535-553).
caaaggcgtttaccataaa

SEQ ID NO: 776685 - DNA, 19 bp, Mus musculus
  siRNA target sequence for 9430028L06Rik (NM_172629.1,540-558).
gcgtttaccataaagaaga

SEQ ID NO: 776686 - DNA, 19 bp, Mus musculus
  siRNA target sequence for 9430028L06Rik (NM_172629.1,573-591).
gtccccattcggcaattct

SEQ ID NO: 776687 - DNA, 19 bp, Mus musculus
  siRNA target sequence for 9430028L06Rik (NM_172629.1,622-640).
ctgtgactgatgtatacgt

SEQ ID NO: 776688 - DNA, 19 bp, Mus musculus
  siRNA target sequence for 9430028L06Rik (NM_172629.1,723-741).
gatatcacctcttctctat

SEQ ID NO: 776689 - DNA, 19 bp, Mus musculus
  siRNA target sequence for 9430028L06Rik (NM_172629.1,771-789).
gtgatggtcctcattcagt

SEQ ID NO: 776690 - DNA, 19 bp, Mus musculus
  siRNA target sequence for 9430028L06Rik (NM_172629.1,773-791).
gatggtcctcattcagttt

SEQ ID NO: 776691 - DNA, 19 bp, Mus musculus
  siRNA target sequence for 9430028L06Rik (NM_172629.1,777-795).
gtcctcattcagtttggaa

SEQ ID NO: 776692 - DNA, 19 bp, Mus musculus
  siRNA target sequence for 9430028L06Rik (NM_172629.1,906-924).
ggtgtgactgagaggaaat

SEQ ID NO: 776693 - DNA, 19 bp, Mus musculus
  siRNA target sequence for 9430028L06Rik (NM_172629.1,978-996).
gggctgtctgcctatcaaa

SEQ ID NO: 776694 - DNA, 19 bp, Mus musculus
  siRNA target sequence for 9430028L06Rik (NM_172629.1,1039-1057).
caaagagctacaattacgt

SEQ ID NO: 776695 - DNA, 19 bp, Mus musculus
  siRNA target sequence for 9430028L06Rik (NM_172629.1,1083-1101).
cgcctggtcccatttctga

SEQ ID NO: 776696 - DNA, 19 bp, Mus musculus
  siRNA target sequence for 9430028L06Rik (NM_172629.1,1122-1140).
gattgggtgtggacagata

SEQ ID NO: 776697 - DNA, 19 bp, Mus musculus
  siRNA target sequence for 9430028L06Rik (NM_172629.1,1176-1194).
gacatttacgcgcacattt

SEQ ID NO: 776698 - DNA, 19 bp, Mus musculus
  siRNA target sequence for 9430028L06Rik (NM_172629.1,1178-1196).
catttacgcgcacattttt

SEQ ID NO: 776699 - DNA, 19 bp, Mus musculus
  siRNA target sequence for 9430028L06Rik (NM_172629.1,1184-1202).
cgcgcacatttttatctta

SEQ ID NO: 776700 - DNA, 19 bp, Mus musculus
  siRNA target sequence for 9430028L06Rik (NM_172629.1,1210-1228).
ggcgagagtcggaaaaggt

SEQ ID NO: 776701 - DNA, 19 bp, Mus musculus
  siRNA target sequence for 9430028L06Rik (NM_172629.1,1211-1229).
gcgagagtcggaaaaggta

SEQ ID NO: 776702 - DNA, 19 bp, Mus musculus
  siRNA target sequence for 9430028L06Rik (NM_172629.1,1212-1230).
cgagagtcggaaaaggtaa

SEQ ID NO: 776703 - DNA, 19 bp, Mus musculus
  siRNA target sequence for 9430028L06Rik (NM_172629.1,1213-1231).
gagagtcggaaaaggtaaa

SEQ ID NO: 776704 - DNA, 19 bp, Mus musculus
  siRNA target sequence for 9430028L06Rik (NM_172629.1,1267-1285).
ctcgagcgcaggtctgtta

SEQ ID NO: 776705 - DNA, 19 bp, Mus musculus
  siRNA target sequence for 9430028L06Rik (NM_172629.1,1269-1287).
cgagcgcaggtctgttaca

SEQ ID NO: 776706 - DNA, 19 bp, Mus musculus
  siRNA target sequence for 9430028L06Rik (NM_172629.1,1270-1288).
gagcgcaggtctgttacaa

SEQ ID NO: 776707 - DNA, 19 bp, Mus musculus
  siRNA target sequence for 9430028L06Rik (NM_172629.1,1272-1290).
gcgcaggtctgttacaaga

SEQ ID NO: 776708 - DNA, 19 bp, Mus musculus
  siRNA target sequence for 9430028L06Rik (NM_172629.1,1273-1291).
cgcaggtctgttacaagat

SEQ ID NO: 776709 - DNA, 19 bp, Mus musculus
  siRNA target sequence for 9430028L06Rik (NM_172629.1,1346-1364).
ctgccgtgagccagaaata

SEQ ID NO: 776710 - DNA, 19 bp, Mus musculus
  siRNA target sequence for 9430028L06Rik (NM_172629.1,1348-1366).
gccgtgagccagaaataca

SEQ ID NO: 776711 - DNA, 19 bp, Mus musculus
  siRNA target sequence for D18Ertd653e (NM_172631.2,594-612).
gcgttcacagagtgcaaat

SEQ ID NO: 776712 - DNA, 19 bp, Mus musculus
  siRNA target sequence for D18Ertd653e (NM_172631.2,595-613).
cgttcacagagtgcaaatt

SEQ ID NO: 776713 - DNA, 19 bp, Mus musculus
  siRNA target sequence for D18Ertd653e (NM_172631.2,619-637).
gcaccagcggtaaatgctt

SEQ ID NO: 776714 - DNA, 19 bp, Mus musculus
  siRNA target sequence for D18Ertd653e (NM_172631.2,625-643).
gcggtaaatgcttgtatct

SEQ ID NO: 776715 - DNA, 19 bp, Mus musculus
  siRNA target sequence for D18Ertd653e (NM_172631.2,753-771).
gaattcgcgcagatcctta

SEQ ID NO: 776716 - DNA, 19 bp, Mus musculus
  siRNA target sequence for D18Ertd653e (NM_172631.2,758-776).
cgcgcagatccttatcatt

SEQ ID NO: 776717 - DNA, 19 bp, Mus musculus
  siRNA target sequence for D18Ertd653e (NM_172631.2,760-778).
cgcagatccttatcattgt

SEQ ID NO: 776718 - DNA, 19 bp, Mus musculus
  siRNA target sequence for D18Ertd653e (NM_172631.2,969-987).
cggggcagggataggttta

SEQ ID NO: 776719 - DNA, 19 bp, Mus musculus
  siRNA target sequence for D18Ertd653e (NM_172631.2,971-989).
gggcagggataggtttact

SEQ ID NO: 776720 - DNA, 19 bp, Mus musculus
  siRNA target sequence for D18Ertd653e (NM_172631.2,972-990).
ggcagggataggtttacta

SEQ ID NO: 776721 - DNA, 19 bp, Mus musculus
  siRNA target sequence for D18Ertd653e (NM_172631.2,982-1000).
ggtttactaccccatcttt

SEQ ID NO: 776722 - DNA, 19 bp, Mus musculus
  siRNA target sequence for D18Ertd653e (NM_172631.2,1047-1065).
gtgcagcacgagattgact

SEQ ID NO: 776723 - DNA, 19 bp, Mus musculus
  siRNA target sequence for D18Ertd653e (NM_172631.2,1187-1205).
gcccaatcgaaccgttttt

SEQ ID NO: 776724 - DNA, 19 bp, Mus musculus
  siRNA target sequence for D18Ertd653e (NM_172631.2,1189-1207).
ccaatcgaaccgtttttga

SEQ ID NO: 776725 - DNA, 19 bp, Mus musculus
  siRNA target sequence for D18Ertd653e (NM_172631.2,1288-1306).
gtagcagtaacggaagaat

SEQ ID NO: 776726 - DNA, 19 bp, Mus musculus
  siRNA target sequence for D18Ertd653e (NM_172631.2,1407-1425).
cagtttcagccgaacaact

SEQ ID NO: 776727 - DNA, 19 bp, Mus musculus
  siRNA target sequence for D18Ertd653e (NM_172631.2,1443-1461).
cccatcaagggcaaagaca

SEQ ID NO: 776728 - DNA, 19 bp, Mus musculus
  siRNA target sequence for Cbln2 (NM_172633.1,353-371).
cgtaccatgaccatctact

SEQ ID NO: 776729 - DNA, 19 bp, Mus musculus
  siRNA target sequence for Cbln2 (NM_172633.1,354-372).
gtaccatgaccatctactt

SEQ ID NO: 776730 - DNA, 19 bp, Mus musculus
  siRNA target sequence for Cbln2 (NM_172633.1,370-388).
cttcgaccaggtcttagta

SEQ ID NO: 776731 - DNA, 19 bp, Mus musculus
  siRNA target sequence for Cbln2 (NM_172633.1,374-392).
gaccaggtcttagtaaaca

SEQ ID NO: 776732 - DNA, 19 bp, Mus musculus
  siRNA target sequence for Cbln2 (NM_172633.1,407-425).
gaccttgcctccagtatat

SEQ ID NO: 776733 - DNA, 19 bp, Mus musculus
  siRNA target sequence for Cbln2 (NM_172633.1,409-427).
ccttgcctccagtatattt

SEQ ID NO: 776734 - DNA, 19 bp, Mus musculus
  siRNA target sequence for Cbln2 (NM_172633.1,492-510).
ctatccaggtcagcttaat

SEQ ID NO: 776735 - DNA, 19 bp, Mus musculus
  siRNA target sequence for Cbln2 (NM_172633.1,523-541).
cccggtgatctctgcattt

SEQ ID NO: 776736 - DNA, 19 bp, Mus musculus
  siRNA target sequence for Cbln2 (NM_172633.1,542-560).
gccggagaccaggatgtta

SEQ ID NO: 776737 - DNA, 19 bp, Mus musculus
  siRNA target sequence for Cbln2 (NM_172633.1,603-621).
gagaagacaaagttcatct

SEQ ID NO: 776738 - DNA, 19 bp, Mus musculus
  siRNA target sequence for Cbln2 (NM_172633.1,641-659).
ctcatgggaggctggaaat

SEQ ID NO: 776739 - DNA, 19 bp, Mus musculus
  siRNA target sequence for AV312086 (NM_172635.1,152-170).
ggattgtcctctagatgaa

SEQ ID NO: 776740 - DNA, 19 bp, Mus musculus
  siRNA target sequence for AV312086 (NM_172635.1,241-259).
ggtcaggtgcagttgatga

SEQ ID NO: 776741 - DNA, 19 bp, Mus musculus
  siRNA target sequence for AV312086 (NM_172635.1,242-260).
gtcaggtgcagttgatgat

SEQ ID NO: 776742 - DNA, 19 bp, Mus musculus
  siRNA target sequence for AV312086 (NM_172635.1,246-264).
ggtgcagttgatgatgatt

SEQ ID NO: 776743 - DNA, 19 bp, Mus musculus
  siRNA target sequence for AV312086 (NM_172635.1,426-444).
gaagatccagctatcatga

SEQ ID NO: 776744 - DNA, 19 bp, Mus musculus
  siRNA target sequence for AV312086 (NM_172635.1,455-473).
gaccaggccagttttacaa

SEQ ID NO: 776745 - DNA, 19 bp, Mus musculus
  siRNA target sequence for AV312086 (NM_172635.1,629-647).
cctttctgagcgagcttta

SEQ ID NO: 776746 - DNA, 19 bp, Mus musculus
  siRNA target sequence for AV312086 (NM_172635.1,656-674).
gtcaacatcacctatcatt

SEQ ID NO: 776747 - DNA, 19 bp, Mus musculus
  siRNA target sequence for AV312086 (NM_172635.1,685-703).
ctgttagagccgttcctat

SEQ ID NO: 776748 - DNA, 19 bp, Mus musculus
  siRNA target sequence for AV312086 (NM_172635.1,807-825).
ccctatggcgagaggatat

SEQ ID NO: 776749 - DNA, 19 bp, Mus musculus
  siRNA target sequence for AV312086 (NM_172635.1,809-827).
ctatggcgagaggatatct

SEQ ID NO: 776750 - DNA, 19 bp, Mus musculus
  siRNA target sequence for AV312086 (NM_172635.1,1009-1027).
ctgccatgaatcctaagtt

SEQ ID NO: 776751 - DNA, 19 bp, Mus musculus
  siRNA target sequence for AV312086 (NM_172635.1,1138-1156).
gacctcacctacaaaacct

SEQ ID NO: 776752 - DNA, 19 bp, Mus musculus
  siRNA target sequence for AV312086 (NM_172635.1,1161-1179).
cctcaggccccaatgttta

SEQ ID NO: 776753 - DNA, 19 bp, Mus musculus
  siRNA target sequence for AV312086 (NM_172635.1,1254-1272).
catcggaatctcaatggta

SEQ ID NO: 776754 - DNA, 19 bp, Mus musculus
  siRNA target sequence for AV312086 (NM_172635.1,1289-1307).
gcaccagtccagtcatcaa

SEQ ID NO: 776755 - DNA, 19 bp, Mus musculus
  siRNA target sequence for AV312086 (NM_172635.1,1295-1313).
gtccagtcatcaagatcat

SEQ ID NO: 776756 - DNA, 19 bp, Mus musculus
  siRNA target sequence for AV312086 (NM_172635.1,1317-1335).
cggaaggatccatatgcta

SEQ ID NO: 776757 - DNA, 19 bp, Mus musculus
  siRNA target sequence for AV312086 (NM_172635.1,1319-1337).
gaaggatccatatgctaat

SEQ ID NO: 776758 - DNA, 19 bp, Mus musculus
  siRNA target sequence for AV312086 (NM_172635.1,1322-1340).
ggatccatatgctaatcta

SEQ ID NO: 776759 - DNA, 19 bp, Mus musculus
  siRNA target sequence for AV312086 (NM_172635.1,1323-1341).
gatccatatgctaatctaa

SEQ ID NO: 776760 - DNA, 19 bp, Mus musculus
  siRNA target sequence for AV312086 (NM_172635.1,1326-1344).
ccatatgctaatctaatgt

SEQ ID NO: 776761 - DNA, 19 bp, Mus musculus
  siRNA target sequence for AV312086 (NM_172635.1,1327-1345).
catatgctaatctaatgtt

SEQ ID NO: 776762 - DNA, 19 bp, Mus musculus
  siRNA target sequence for AV312086 (NM_172635.1,1363-1381).
gggtctctaaaatacagat

SEQ ID NO: 776763 - DNA, 19 bp, Mus musculus
  siRNA target sequence for AV312086 (NM_172635.1,1404-1422).
ccctacctggatgatttct

SEQ ID NO: 776764 - DNA, 19 bp, Mus musculus
  siRNA target sequence for AV312086 (NM_172635.1,1405-1423).
cctacctggatgatttcta

SEQ ID NO: 776765 - DNA, 19 bp, Mus musculus
  siRNA target sequence for AV312086 (NM_172635.1,1406-1424).
ctacctggatgatttctat

SEQ ID NO: 776766 - DNA, 19 bp, Mus musculus
  siRNA target sequence for AV312086 (NM_172635.1,1528-1546).
ccaaactggagcatgctta

SEQ ID NO: 776767 - DNA, 19 bp, Mus musculus
  siRNA target sequence for AV312086 (NM_172635.1,1589-1607).
ctctagtgtgaataatcct

SEQ ID NO: 776768 - DNA, 19 bp, Mus musculus
  siRNA target sequence for AV312086 (NM_172635.1,1636-1654).
ctcgaagtgaggatgatga

SEQ ID NO: 776769 - DNA, 19 bp, Mus musculus
  siRNA target sequence for AV312086 (NM_172635.1,1642-1660).
gtgaggatgatgaaacaaa

SEQ ID NO: 776770 - DNA, 19 bp, Mus musculus
  siRNA target sequence for AV312086 (NM_172635.1,1671-1689).
gttcgggataagagaagaa

SEQ ID NO: 776771 - DNA, 19 bp, Mus musculus
  siRNA target sequence for AV312086 (NM_172635.1,1693-1711).
cccttgttataattgagaa

SEQ ID NO: 776772 - DNA, 19 bp, Mus musculus
  siRNA target sequence for AV312086 (NM_172635.1,1727-1745).
ccttgatgtggaggattat

SEQ ID NO: 776773 - DNA, 19 bp, Mus musculus
  siRNA target sequence for AV312086 (NM_172635.1,1731-1749).
gatgtggaggattatgaaa

SEQ ID NO: 776774 - DNA, 19 bp, Mus musculus
  siRNA target sequence for AV312086 (NM_172635.1,1750-1768).
ggcgctatctcctaagtct

SEQ ID NO: 776775 - DNA, 19 bp, Mus musculus
  siRNA target sequence for AV312086 (NM_172635.1,1751-1769).
gcgctatctcctaagtcta

SEQ ID NO: 776776 - DNA, 19 bp, Mus musculus
  siRNA target sequence for AV312086 (NM_172635.1,2182-2200).
gcttgtcactgctcctaat

SEQ ID NO: 776777 - DNA, 19 bp, Mus musculus
  siRNA target sequence for AV312086 (NM_172635.1,2190-2208).
ctgctcctaatcctactaa

SEQ ID NO: 776778 - DNA, 19 bp, Mus musculus
  siRNA target sequence for AV312086 (NM_172635.1,2235-2253).
gatcctgctatagaatcaa

SEQ ID NO: 776779 - DNA, 19 bp, Mus musculus
  siRNA target sequence for AV312086 (NM_172635.1,2288-2306).
ggcaacccgagaacttcta

SEQ ID NO: 776780 - DNA, 19 bp, Mus musculus
  siRNA target sequence for AV312086 (NM_172635.1,2335-2353).
caatctctatccctacaaa

SEQ ID NO: 776781 - DNA, 19 bp, Mus musculus
  siRNA target sequence for AV312086 (NM_172635.1,2339-2357).
ctctatccctacaaatcta

SEQ ID NO: 776782 - DNA, 19 bp, Mus musculus
  siRNA target sequence for AV312086 (NM_172635.1,2341-2359).
ctatccctacaaatctagt

SEQ ID NO: 776783 - DNA, 19 bp, Mus musculus
  siRNA target sequence for AV312086 (NM_172635.1,2396-2414).
gaacttgctggaaacaaaa

SEQ ID NO: 776784 - DNA, 19 bp, Mus musculus
  siRNA target sequence for 6030443O07Rik (NM_172638.1,95-113).
gctcagagcggaacttaca

SEQ ID NO: 776785 - DNA, 19 bp, Mus musculus
  siRNA target sequence for 6030443O07Rik (NM_172638.1,98-116).
cagagcggaacttacacaa

SEQ ID NO: 776786 - DNA, 19 bp, Mus musculus
  siRNA target sequence for 6030443O07Rik (NM_172638.1,100-118).
gagcggaacttacacaaat

SEQ ID NO: 776787 - DNA, 19 bp, Mus musculus
  siRNA target sequence for 6030443O07Rik (NM_172638.1,120-138).
ccttagagcgactagtaaa

SEQ ID NO: 776788 - DNA, 19 bp, Mus musculus
  siRNA target sequence for 6030443O07Rik (NM_172638.1,198-216).
gacaaggccgtggcattaa

SEQ ID NO: 776789 - DNA, 19 bp, Mus musculus
  siRNA target sequence for 6030443O07Rik (NM_172638.1,235-253).
cgatcaggatagtacagat

SEQ ID NO: 776790 - DNA, 19 bp, Mus musculus
  siRNA target sequence for 6030443O07Rik (NM_172638.1,271-289).
ggaagaacacagggaattt

SEQ ID NO: 776791 - DNA, 19 bp, Mus musculus
  siRNA target sequence for 6030443O07Rik (NM_172638.1,303-321).
cagttacagttgatgctat

SEQ ID NO: 776792 - DNA, 19 bp, Mus musculus
  siRNA target sequence for 6030443O07Rik (NM_172638.1,379-397).
caatcagtataccttagat

SEQ ID NO: 776793 - DNA, 19 bp, Mus musculus
  siRNA target sequence for 6030443O07Rik (NM_172638.1,385-403).
gtataccttagatttaaga

SEQ ID NO: 776794 - DNA, 19 bp, Mus musculus
  siRNA target sequence for 6030443O07Rik (NM_172638.1,453-471).
caggaaaaacagatcagat

SEQ ID NO: 776795 - DNA, 19 bp, Mus musculus
  siRNA target sequence for 6030443O07Rik (NM_172638.1,494-512).
cttaccactgcatatcact

SEQ ID NO: 776796 - DNA, 19 bp, Mus musculus
  siRNA target sequence for 6030443O07Rik (NM_172638.1,559-577).
gtcggttcacacagattgt

SEQ ID NO: 776797 - DNA, 19 bp, Mus musculus
  siRNA target sequence for 6030443O07Rik (NM_172638.1,561-579).
cggttcacacagattgtat

SEQ ID NO: 776798 - DNA, 19 bp, Mus musculus
  siRNA target sequence for 6030443O07Rik (NM_172638.1,675-693).
ctgatatagcagctgtatt

SEQ ID NO: 776799 - DNA, 19 bp, Mus musculus
  siRNA target sequence for 6030443O07Rik (NM_172638.1,677-695).
gatatagcagctgtattct

SEQ ID NO: 776800 - DNA, 19 bp, Mus musculus
  siRNA target sequence for 6030443O07Rik (NM_172638.1,700-718).
catgggcgttggttttgga

SEQ ID NO: 776801 - DNA, 19 bp, Mus musculus
  siRNA target sequence for 6030443O07Rik (NM_172638.1,705-723).
gcgttggttttggatcttt

SEQ ID NO: 776802 - DNA, 19 bp, Mus musculus
  siRNA target sequence for 6030443O07Rik (NM_172638.1,818-836).
ccttatagtccagtatttt

SEQ ID NO: 776803 - DNA, 19 bp, Mus musculus
  siRNA target sequence for 6030443O07Rik (NM_172638.1,878-896).
ctaggtctgtgcacatcta

SEQ ID NO: 776804 - DNA, 19 bp, Mus musculus
  siRNA target sequence for 6030443O07Rik (NM_172638.1,894-912).
ctatacatccagaaggtta

SEQ ID NO: 776805 - DNA, 19 bp, Mus musculus
  siRNA target sequence for 6030443O07Rik (NM_172638.1,960-978).
gtttggaaaaagagcttaa

SEQ ID NO: 776806 - DNA, 19 bp, Mus musculus
  siRNA target sequence for 6030443O07Rik (NM_172638.1,973-991).
gcttaaacagattccatta

SEQ ID NO: 776807 - DNA, 19 bp, Mus musculus
  siRNA target sequence for 6030443O07Rik (NM_172638.1,986-1004).
ccattagtagactttcaga

SEQ ID NO: 776808 - DNA, 19 bp, Mus musculus
  siRNA target sequence for 6030443O07Rik (NM_172638.1,1065-1083).
gtctgggcataaatgaact

SEQ ID NO: 776809 - DNA, 19 bp, Mus musculus
  siRNA target sequence for 6030443O07Rik (NM_172638.1,1164-1182).
gcctcagtctggtgatgat

SEQ ID NO: 776810 - DNA, 19 bp, Mus musculus
  siRNA target sequence for 6030443O07Rik (NM_172638.1,1240-1258).
ctcggtcctgcatcgatat

SEQ ID NO: 776811 - DNA, 19 bp, Mus musculus
  siRNA target sequence for 6030443O07Rik (NM_172638.1,1242-1260).
cggtcctgcatcgatatct

SEQ ID NO: 776812 - DNA, 19 bp, Mus musculus
  siRNA target sequence for 6030443O07Rik (NM_172638.1,1243-1261).
ggtcctgcatcgatatctt

SEQ ID NO: 776813 - DNA, 19 bp, Mus musculus
  siRNA target sequence for 6030443O07Rik (NM_172638.1,1254-1272).
gatatcttgtgcagatgaa

SEQ ID NO: 776814 - DNA, 19 bp, Mus musculus
  siRNA target sequence for 6030443O07Rik (NM_172638.1,1313-1331).
gccgaacagccaaatgaaa

SEQ ID NO: 776815 - DNA, 19 bp, Mus musculus
  siRNA target sequence for 6030443O07Rik (NM_172638.1,1358-1376).
cttgaaaagcaggcatatt

SEQ ID NO: 776816 - DNA, 19 bp, Mus musculus
  siRNA target sequence for 6030443O07Rik (NM_172638.1,1381-1399).
gacctacatccttcttcat

SEQ ID NO: 776817 - DNA, 19 bp, Mus musculus
  siRNA target sequence for 6030443O07Rik (NM_172638.1,1483-1501).
gcatgttaagtgtgatatt

SEQ ID NO: 776818 - DNA, 19 bp, Mus musculus
  siRNA target sequence for 6030443O07Rik (NM_172638.1,1527-1545).
gaactaaagtgaaagactt

SEQ ID NO: 776819 - DNA, 19 bp, Mus musculus
  siRNA target sequence for 6030443O07Rik (NM_172638.1,1562-1580).
ggaaaatggcaggaaataa

SEQ ID NO: 776820 - DNA, 19 bp, Mus musculus
  siRNA target sequence for 5330431N19Rik (NM_172639.1,101-119).
ggatggtgcactatttgtt

SEQ ID NO: 776821 - DNA, 19 bp, Mus musculus
  siRNA target sequence for 5330431N19Rik (NM_172639.1,180-198).
gaagtggcgtgtgaaaaat

SEQ ID NO: 776822 - DNA, 19 bp, Mus musculus
  siRNA target sequence for 5330431N19Rik (NM_172639.1,273-291).
cgagctcatcaaagaaagt

SEQ ID NO: 776823 - DNA, 19 bp, Mus musculus
  siRNA target sequence for 5330431N19Rik (NM_172639.1,274-292).
gagctcatcaaagaaagta

SEQ ID NO: 776824 - DNA, 19 bp, Mus musculus
  siRNA target sequence for 5330431N19Rik (NM_172639.1,313-331).
cgcaaggacaccaaaacaa

SEQ ID NO: 776825 - DNA, 19 bp, Mus musculus
  siRNA target sequence for 5330431N19Rik (NM_172639.1,336-354).
ccagtggcggattcgaaat

SEQ ID NO: 776826 - DNA, 19 bp, Mus musculus
  siRNA target sequence for 5330431N19Rik (NM_172639.1,359-377).
cctacccgaaggatgtgta

SEQ ID NO: 776827 - DNA, 19 bp, Mus musculus
  siRNA target sequence for 5330431N19Rik (NM_172639.1,360-378).
ctacccgaaggatgtgtat

SEQ ID NO: 776828 - DNA, 19 bp, Mus musculus
  siRNA target sequence for 5330431N19Rik (NM_172639.1,399-417).
ggagcgctgcgtcattgtt

SEQ ID NO: 776829 - DNA, 19 bp, Mus musculus
  siRNA target sequence for 5330431N19Rik (NM_172639.1,400-418).
gagcgctgcgtcattgtta

SEQ ID NO: 776830 - DNA, 19 bp, Mus musculus
  siRNA target sequence for 5330431N19Rik (NM_172639.1,402-420).
gcgctgcgtcattgttaga

SEQ ID NO: 776831 - DNA, 19 bp, Mus musculus
  siRNA target sequence for 5330431N19Rik (NM_172639.1,403-421).
cgctgcgtcattgttagaa

SEQ ID NO: 776832 - DNA, 19 bp, Mus musculus
  siRNA target sequence for 5330431N19Rik (NM_172639.1,419-437).
gaacgacaaacaaaaagta

SEQ ID NO: 776833 - DNA, 19 bp, Mus musculus
  siRNA target sequence for 5330431N19Rik (NM_172639.1,519-537).
ctgcaccctgataatctct

SEQ ID NO: 776834 - DNA, 19 bp, Mus musculus
  siRNA target sequence for 5330431N19Rik (NM_172639.1,521-539).
gcaccctgataatctctta

SEQ ID NO: 776835 - DNA, 19 bp, Mus musculus
  siRNA target sequence for 5330431N19Rik (NM_172639.1,522-540).
caccctgataatctcttat

SEQ ID NO: 776836 - DNA, 19 bp, Mus musculus
  siRNA target sequence for 5330431N19Rik (NM_172639.1,526-544).
ctgataatctcttatcaga

SEQ ID NO: 776837 - DNA, 19 bp, Mus musculus
  siRNA target sequence for 5330431N19Rik (NM_172639.1,561-579).
ggcggctgagtcagagtta

SEQ ID NO: 776838 - DNA, 19 bp, Mus musculus
  siRNA target sequence for 9930023K05Rik (NM_172641.1,429-447).
catgacagggagaagatta

SEQ ID NO: 776839 - DNA, 19 bp, Mus musculus
  siRNA target sequence for 9930023K05Rik (NM_172641.1,476-494).
ctgccagggtgttaaagca

SEQ ID NO: 776840 - DNA, 19 bp, Mus musculus
  siRNA target sequence for 9930023K05Rik (NM_172641.1,578-596).
catacccgagggtatcaga

SEQ ID NO: 776841 - DNA, 19 bp, Mus musculus
  siRNA target sequence for 9930023K05Rik (NM_172641.1,616-634).
gtcttccagagcatttaat

SEQ ID NO: 776842 - DNA, 19 bp, Mus musculus
  siRNA target sequence for 9930023K05Rik (NM_172641.1,621-639).
ccagagcatttaatacaaa

SEQ ID NO: 776843 - DNA, 19 bp, Mus musculus
  siRNA target sequence for 9930023K05Rik (NM_172641.1,658-676).
ggcaagctcatcttcatca

SEQ ID NO: 776844 - DNA, 19 bp, Mus musculus
  siRNA target sequence for 9930023K05Rik (NM_172641.1,714-732).
gaagaagagtactatctca

SEQ ID NO: 776845 - DNA, 19 bp, Mus musculus
  siRNA target sequence for 9930023K05Rik (NM_172641.1,795-813).
gactccatcgaatccaata

SEQ ID NO: 776846 - DNA, 19 bp, Mus musculus
  siRNA target sequence for 9930023K05Rik (NM_172641.1,797-815).
ctccatcgaatccaatagt

SEQ ID NO: 776847 - DNA, 19 bp, Mus musculus
  siRNA target sequence for 9930023K05Rik (NM_172641.1,814-832).
gtccggaccaaggtttcaa

SEQ ID NO: 776848 - DNA, 19 bp, Mus musculus
  siRNA target sequence for 9930023K05Rik (NM_172641.1,816-834).
ccggaccaaggtttcaaga

SEQ ID NO: 776849 - DNA, 19 bp, Mus musculus
  siRNA target sequence for 9930023K05Rik (NM_172641.1,845-863).
caattacgtgtcaatgaga

SEQ ID NO: 776850 - DNA, 19 bp, Mus musculus
  siRNA target sequence for 9930023K05Rik (NM_172641.1,1072-1090).
ctatattactcaacaacat

SEQ ID NO: 776851 - DNA, 19 bp, Mus musculus
  siRNA target sequence for AI848100 (NM_172645.1,150-168).
cgttgcatccgtcttctaa

SEQ ID NO: 776852 - DNA, 19 bp, Mus musculus
  siRNA target sequence for AI848100 (NM_172645.1,154-172).
gcatccgtcttctaatgga

SEQ ID NO: 776853 - DNA, 19 bp, Mus musculus
  siRNA target sequence for AI848100 (NM_172645.1,317-335).
ccttgcagcactaaaattt

SEQ ID NO: 776854 - DNA, 19 bp, Mus musculus
  siRNA target sequence for AI848100 (NM_172645.1,321-339).
gcagcactaaaatttggtt

SEQ ID NO: 776855 - DNA, 19 bp, Mus musculus
  siRNA target sequence for AI848100 (NM_172645.1,322-340).
cagcactaaaatttggttt

SEQ ID NO: 776856 - DNA, 19 bp, Mus musculus
  siRNA target sequence for AI848100 (NM_172645.1,354-372).
gtgagccaattcaagtgaa

SEQ ID NO: 776857 - DNA, 19 bp, Mus musculus
  siRNA target sequence for AI848100 (NM_172645.1,494-512).
gagcggaatgtccaaagtt

SEQ ID NO: 776858 - DNA, 19 bp, Mus musculus
  siRNA target sequence for AI848100 (NM_172645.1,496-514).
gcggaatgtccaaagtttt

SEQ ID NO: 776859 - DNA, 19 bp, Mus musculus
  siRNA target sequence for AI848100 (NM_172645.1,536-554).
gcaaaatacgtgaagatgt

SEQ ID NO: 776860 - DNA, 19 bp, Mus musculus
  siRNA target sequence for AI848100 (NM_172645.1,571-589).
ggtggagctgctatcacat

SEQ ID NO: 776861 - DNA, 19 bp, Mus musculus
  siRNA target sequence for AI848100 (NM_172645.1,574-592).
ggagctgctatcacatttt

SEQ ID NO: 776862 - DNA, 19 bp, Mus musculus
  siRNA target sequence for AI848100 (NM_172645.1,719-737).
gattatcccctggattata

SEQ ID NO: 776863 - DNA, 19 bp, Mus musculus
  siRNA target sequence for AI848100 (NM_172645.1,726-744).
ccctggattataatactgt

SEQ ID NO: 776864 - DNA, 19 bp, Mus musculus
  siRNA target sequence for AI848100 (NM_172645.1,743-761).
gtggaggataaatcttcaa

SEQ ID NO: 776865 - DNA, 19 bp, Mus musculus
  siRNA target sequence for AI848100 (NM_172645.1,745-763).
ggaggataaatcttcaaaa

SEQ ID NO: 776866 - DNA, 19 bp, Mus musculus
  siRNA target sequence for AI848100 (NM_172645.1,828-846).
gagcaaaaactgaagactt

SEQ ID NO: 776867 - DNA, 19 bp, Mus musculus
  siRNA target sequence for AI848100 (NM_172645.1,884-902).
gccacaactgaacctaaaa

SEQ ID NO: 776868 - DNA, 19 bp, Mus musculus
  siRNA target sequence for AI848100 (NM_172645.1,896-914).
cctaaaatgactgaatcaa

SEQ ID NO: 776869 - DNA, 19 bp, Mus musculus
  siRNA target sequence for AI848100 (NM_172645.1,908-926).
gaatcaactcgtgtttcaa

SEQ ID NO: 776870 - DNA, 19 bp, Mus musculus
  siRNA target sequence for AI848100 (NM_172645.1,930-948).
ctgttccatcacctgaata

SEQ ID NO: 776871 - DNA, 19 bp, Mus musculus
  siRNA target sequence for AI848100 (NM_172645.1,955-973).
caaggaagtccatacacat

SEQ ID NO: 776872 - DNA, 19 bp, Mus musculus
  siRNA target sequence for AI848100 (NM_172645.1,958-976).
ggaagtccatacacatgat

SEQ ID NO: 776873 - DNA, 19 bp, Mus musculus
  siRNA target sequence for AI848100 (NM_172645.1,1121-1139).
gagacacacatactttgta

SEQ ID NO: 776874 - DNA, 19 bp, Mus musculus
  siRNA target sequence for AI848100 (NM_172645.1,1142-1160).
gagctgacttcaatttgtt

SEQ ID NO: 776875 - DNA, 19 bp, Mus musculus
  siRNA target sequence for AI848100 (NM_172645.1,1144-1162).
gctgacttcaatttgttgt

SEQ ID NO: 776876 - DNA, 19 bp, Mus musculus
  siRNA target sequence for AI848100 (NM_172645.1,1147-1165).
gacttcaatttgttgtatt

SEQ ID NO: 776877 - DNA, 19 bp, Mus musculus
  siRNA target sequence for AI848100 (NM_172645.1,1167-1185).
ctagtttttcggagtacat

SEQ ID NO: 776878 - DNA, 19 bp, Mus musculus
  siRNA target sequence for AI848100 (NM_172645.1,1195-1213).
gtgctcagttagaattgct

SEQ ID NO: 776879 - DNA, 19 bp, Mus musculus
  siRNA target sequence for AI848100 (NM_172645.1,1227-1245).
gcagcaggactgtgagtaa

SEQ ID NO: 776880 - DNA, 19 bp, Mus musculus
  siRNA target sequence for AI848100 (NM_172645.1,1228-1246).
cagcaggactgtgagtaaa

SEQ ID NO: 776881 - DNA, 19 bp, Mus musculus
  siRNA target sequence for AI848100 (NM_172645.1,1266-1284).
ctcagccatcactactact

SEQ ID NO: 776882 - DNA, 19 bp, Mus musculus
  siRNA target sequence for AI848100 (NM_172645.1,1337-1355).
gatagcgagaacatggaaa

SEQ ID NO: 776883 - DNA, 19 bp, Mus musculus
  siRNA target sequence for AI848100 (NM_172645.1,1394-1412).
gtgcaccaggggcatttga

SEQ ID NO: 776884 - DNA, 19 bp, Mus musculus
  siRNA target sequence for AI848100 (NM_172645.1,1397-1415).
caccaggggcatttgataa

SEQ ID NO: 776885 - DNA, 19 bp, Mus musculus
  siRNA target sequence for AI848100 (NM_172645.1,1399-1417).
ccaggggcatttgataaat

SEQ ID NO: 776886 - DNA, 19 bp, Mus musculus
  siRNA target sequence for AI848100 (NM_172645.1,1403-1421).
gggcatttgataaatcaca

SEQ ID NO: 776887 - DNA, 19 bp, Mus musculus
  siRNA target sequence for AI848100 (NM_172645.1,1471-1489).
gtctcttctcttagatgtt

SEQ ID NO: 776888 - DNA, 19 bp, Mus musculus
  siRNA target sequence for AI848100 (NM_172645.1,1544-1562).
gaaggaggatatattccat

SEQ ID NO: 776889 - DNA, 19 bp, Mus musculus
  siRNA target sequence for AI848100 (NM_172645.1,1618-1636).
gaccgagagctttagttct

SEQ ID NO: 776890 - DNA, 19 bp, Mus musculus
  siRNA target sequence for AI848100 (NM_172645.1,1637-1655).
gctgagaagctctctgtta

SEQ ID NO: 776891 - DNA, 19 bp, Mus musculus
  siRNA target sequence for AI848100 (NM_172645.1,1645-1663).
gctctctgttatttatgaa

SEQ ID NO: 776892 - DNA, 19 bp, Mus musculus
  siRNA target sequence for AI848100 (NM_172645.1,1648-1666).
ctctgttatttatgaaaca

SEQ ID NO: 776893 - DNA, 19 bp, Mus musculus
  siRNA target sequence for AI848100 (NM_172645.1,1697-1715).
gtgaaagaagacatactct

SEQ ID NO: 776894 - DNA, 19 bp, Mus musculus
  siRNA target sequence for AI848100 (NM_172645.1,1798-1816).
ggaaaccaaacctagtata

SEQ ID NO: 776895 - DNA, 19 bp, Mus musculus
  siRNA target sequence for AI848100 (NM_172645.1,1809-1827).
ctagtatagctgatacact

SEQ ID NO: 776896 - DNA, 19 bp, Mus musculus
  siRNA target sequence for AI848100 (NM_172645.1,1812-1830).
gtatagctgatacactaaa

SEQ ID NO: 776897 - DNA, 19 bp, Mus musculus
  siRNA target sequence for AI848100 (NM_172645.1,1817-1835).
gctgatacactaaagcata

SEQ ID NO: 776898 - DNA, 19 bp, Mus musculus
  siRNA target sequence for AI848100 (NM_172645.1,1845-1863).
cagttatggatccttcatt

SEQ ID NO: 776899 - DNA, 19 bp, Mus musculus
  siRNA target sequence for AI848100 (NM_172645.1,1962-1980).
ctgatctgggatatggtaa

SEQ ID NO: 776900 - DNA, 19 bp, Mus musculus
  siRNA target sequence for AI848100 (NM_172645.1,1969-1987).
gggatatggtaatggaaat

SEQ ID NO: 776901 - DNA, 19 bp, Mus musculus
  siRNA target sequence for AI848100 (NM_172645.1,1991-2009).
gtgcatggatcaaatcaga

SEQ ID NO: 776902 - DNA, 19 bp, Mus musculus
  siRNA target sequence for AI848100 (NM_172645.1,2018-2036).
gtatttatgaggcttaata

SEQ ID NO: 776903 - DNA, 19 bp, Mus musculus
  siRNA target sequence for AI848100 (NM_172645.1,2028-2046).
ggcttaataatcgtattaa

SEQ ID NO: 776904 - DNA, 19 bp, Mus musculus
  siRNA target sequence for AI848100 (NM_172645.1,2048-2066).
gccttagaagttaacatgt

SEQ ID NO: 776905 - DNA, 19 bp, Mus musculus
  siRNA target sequence for AI848100 (NM_172645.1,2103-2121).
ggtaccgcaaacaaatgga

SEQ ID NO: 776906 - DNA, 19 bp, Mus musculus
  siRNA target sequence for AI848100 (NM_172645.1,2131-2149).
gaaggctttcaataagaca

SEQ ID NO: 776907 - DNA, 19 bp, Mus musculus
  siRNA target sequence for AI848100 (NM_172645.1,2136-2154).
ctttcaataagacaatagt

SEQ ID NO: 776908 - DNA, 19 bp, Mus musculus
  siRNA target sequence for AI848100 (NM_172645.1,2153-2171).
gttaagcttcagaatactt

SEQ ID NO: 776909 - DNA, 19 bp, Mus musculus
  siRNA target sequence for AI848100 (NM_172645.1,2191-2209).
ggatcagcggcaaactgaa

SEQ ID NO: 776910 - DNA, 19 bp, Mus musculus
  siRNA target sequence for AI848100 (NM_172645.1,2228-2246).
gcacaactgaccaacatga

SEQ ID NO: 776911 - DNA, 19 bp, Mus musculus
  siRNA target sequence for AI848100 (NM_172645.1,2249-2267).
cagcttgtttcaaacctat

SEQ ID NO: 776912 - DNA, 19 bp, Mus musculus
  siRNA target sequence for AI848100 (NM_172645.1,2307-2325).
gtcagagttaccttgtcat

SEQ ID NO: 776913 - DNA, 19 bp, Mus musculus
  siRNA target sequence for AI848100 (NM_172645.1,2368-2386).
gcaacgctgtcgaactact

SEQ ID NO: 776914 - DNA, 19 bp, Mus musculus
  siRNA target sequence for AI848100 (NM_172645.1,2369-2387).
caacgctgtcgaactactt

SEQ ID NO: 776915 - DNA, 19 bp, Mus musculus
  siRNA target sequence for AI848100 (NM_172645.1,2374-2392).
ctgtcgaactacttctcaa

SEQ ID NO: 776916 - DNA, 19 bp, Mus musculus
  siRNA target sequence for AI848100 (NM_172645.1,2376-2394).
gtcgaactacttctcaatt

SEQ ID NO: 776917 - DNA, 19 bp, Mus musculus
  siRNA target sequence for AI848100 (NM_172645.1,2379-2397).
gaactacttctcaatttga

SEQ ID NO: 776918 - DNA, 19 bp, Mus musculus
  siRNA target sequence for AI848100 (NM_172645.1,2388-2406).
ctcaatttgatggagatta

SEQ ID NO: 776919 - DNA, 19 bp, Mus musculus
  siRNA target sequence for AI848100 (NM_172645.1,2417-2435).
cttcccaaaagtaatcagt

SEQ ID NO: 776920 - DNA, 19 bp, Mus musculus
  siRNA target sequence for AI848100 (NM_172645.1,2444-2462).
cctaaaaggtgtttctctt

SEQ ID NO: 776921 - DNA, 19 bp, Mus musculus
  siRNA target sequence for AI848100 (NM_172645.1,2503-2521).
cctcatcagatccaaatct

SEQ ID NO: 776922 - DNA, 19 bp, Mus musculus
  siRNA target sequence for AI848100 (NM_172645.1,2546-2564).
gatccgaatgatttgtaca

SEQ ID NO: 776923 - DNA, 19 bp, Mus musculus
  siRNA target sequence for AI848100 (NM_172645.1,2602-2620).
gaaacgttgcaagtacaaa

SEQ ID NO: 776924 - DNA, 19 bp, Mus musculus
  siRNA target sequence for AI848100 (NM_172645.1,2607-2625).
gttgcaagtacaaaactga

SEQ ID NO: 776925 - DNA, 19 bp, Mus musculus
  siRNA target sequence for AI848100 (NM_172645.1,2654-2672).
ccattgcaccctatagcaa

SEQ ID NO: 776926 - DNA, 19 bp, Mus musculus
  siRNA target sequence for AI848100 (NM_172645.1,2655-2673).
cattgcaccctatagcaaa

SEQ ID NO: 776927 - DNA, 19 bp, Mus musculus
  siRNA target sequence for AI848100 (NM_172645.1,2659-2677).
gcaccctatagcaaatgga

SEQ ID NO: 776928 - DNA, 19 bp, Mus musculus
  siRNA target sequence for AI848100 (NM_172645.1,2664-2682).
ctatagcaaatggagatat

SEQ ID NO: 776929 - DNA, 19 bp, Mus musculus
  siRNA target sequence for AI848100 (NM_172645.1,2704-2722).
gaaccagagagatttttct

SEQ ID NO: 776930 - DNA, 19 bp, Mus musculus
  siRNA target sequence for AI848100 (NM_172645.1,2708-2726).
cagagagatttttctaaca

SEQ ID NO: 776931 - DNA, 19 bp, Mus musculus
  siRNA target sequence for AI848100 (NM_172645.1,2721-2739).
ctaacatgggagaagttta

SEQ ID NO: 776932 - DNA, 19 bp, Mus musculus
  siRNA target sequence for AI848100 (NM_172645.1,2735-2753).
gtttatcactcttcttaca

SEQ ID NO: 776933 - DNA, 19 bp, Mus musculus
  siRNA target sequence for AI848100 (NM_172645.1,2768-2786).
gagggcagctcggaaactt

SEQ ID NO: 776934 - DNA, 19 bp, Mus musculus
  siRNA target sequence for AI848100 (NM_172645.1,2773-2791).
cagctcggaaacttcatca

SEQ ID NO: 776935 - DNA, 19 bp, Mus musculus
  siRNA target sequence for AI848100 (NM_172645.1,2792-2810).
cagtcagaagagtcctatt

SEQ ID NO: 776936 - DNA, 19 bp, Mus musculus
  siRNA target sequence for AI848100 (NM_172645.1,2816-2834).
ggcatttcagcttgtacaa

SEQ ID NO: 776937 - DNA, 19 bp, Mus musculus
  siRNA target sequence for AI848100 (NM_172645.1,2818-2836).
catttcagcttgtacaagt

SEQ ID NO: 776938 - DNA, 19 bp, Mus musculus
  siRNA target sequence for AI848100 (NM_172645.1,2909-2927).
gaccaaggaaagttaataa

SEQ ID NO: 776939 - DNA, 19 bp, Mus musculus
  siRNA target sequence for AI848100 (NM_172645.1,2930-2948).
gctcttatacagactaagt

SEQ ID NO: 776940 - DNA, 19 bp, Mus musculus
  siRNA target sequence for AI848100 (NM_172645.1,2961-2979).
cgagcctgcatgacataat

SEQ ID NO: 776941 - DNA, 19 bp, Mus musculus
  siRNA target sequence for AI848100 (NM_172645.1,2964-2982).
gcctgcatgacataatcaa

SEQ ID NO: 776942 - DNA, 19 bp, Mus musculus
  siRNA target sequence for AW743433 (NM_172649.1,155-173).
ccccactagctgtgagatt

SEQ ID NO: 776943 - DNA, 19 bp, Mus musculus
  siRNA target sequence for AW743433 (NM_172649.1,193-211).
cgccacggagaaagcatat

SEQ ID NO: 776944 - DNA, 19 bp, Mus musculus
  siRNA target sequence for AW743433 (NM_172649.1,324-342).
gcaggtcggatggattcaa

SEQ ID NO: 776945 - DNA, 19 bp, Mus musculus
  siRNA target sequence for AW743433 (NM_172649.1,325-343).
caggtcggatggattcaaa

SEQ ID NO: 776946 - DNA, 19 bp, Mus musculus
  siRNA target sequence for AW743433 (NM_172649.1,332-350).
gatggattcaaattgtaga

SEQ ID NO: 776947 - DNA, 19 bp, Mus musculus
  siRNA target sequence for AW743433 (NM_172649.1,389-407).
ccccctttggaaatactca

SEQ ID NO: 776948 - DNA, 19 bp, Mus musculus
  siRNA target sequence for AW743433 (NM_172649.1,390-408).
cccctttggaaatactcaa

SEQ ID NO: 776949 - DNA, 19 bp, Mus musculus
  siRNA target sequence for AW743433 (NM_172649.1,425-443).
ctcagttccttgtgatcta

SEQ ID NO: 776950 - DNA, 19 bp, Mus musculus
  siRNA target sequence for AW743433 (NM_172649.1,491-509).
ctagagtgggagctttcaa

SEQ ID NO: 776951 - DNA, 19 bp, Mus musculus
  siRNA target sequence for AW743433 (NM_172649.1,503-521).
ctttcaacgtgggtaaaca

SEQ ID NO: 776952 - DNA, 19 bp, Mus musculus
  siRNA target sequence for AW743433 (NM_172649.1,532-550).
ctctatcctggctacaaaa

SEQ ID NO: 776953 - DNA, 19 bp, Mus musculus
  siRNA target sequence for AW743433 (NM_172649.1,581-599).
gttggcagcctcagactta

SEQ ID NO: 776954 - DNA, 19 bp, Mus musculus
  siRNA target sequence for AW743433 (NM_172649.1,658-676).
catctagcgctgagtgata

SEQ ID NO: 776955 - DNA, 19 bp, Mus musculus
  siRNA target sequence for AW743433 (NM_172649.1,661-679).
ctagcgctgagtgataaga

SEQ ID NO: 776956 - DNA, 19 bp, Mus musculus
  siRNA target sequence for AW743433 (NM_172649.1,664-682).
gcgctgagtgataagaaga

SEQ ID NO: 776957 - DNA, 19 bp, Mus musculus
  siRNA target sequence for AW743433 (NM_172649.1,692-710).
ccaaggacctgcacttagt

SEQ ID NO: 776958 - DNA, 19 bp, Mus musculus
  siRNA target sequence for AW743433 (NM_172649.1,743-761).
cccccaggccggattcatt

SEQ ID NO: 776959 - DNA, 19 bp, Mus musculus
  siRNA target sequence for AW743433 (NM_172649.1,744-762).
ccccaggccggattcattt

SEQ ID NO: 776960 - DNA, 19 bp, Mus musculus
  siRNA target sequence for AW743433 (NM_172649.1,746-764).
ccaggccggattcatttga

SEQ ID NO: 776961 - DNA, 19 bp, Mus musculus
  siRNA target sequence for AW743433 (NM_172649.1,798-816).
gtaccctgcaaccaagaaa

SEQ ID NO: 776962 - DNA, 19 bp, Mus musculus
  siRNA target sequence for AW743433 (NM_172649.1,838-856).
gccagtgaccgtttatcgt

SEQ ID NO: 776963 - DNA, 19 bp, Mus musculus
  siRNA target sequence for AW743433 (NM_172649.1,839-857).
ccagtgaccgtttatcgtt

SEQ ID NO: 776964 - DNA, 19 bp, Mus musculus
  siRNA target sequence for AW743433 (NM_172649.1,844-862).
gaccgtttatcgttttcct

SEQ ID NO: 776965 - DNA, 19 bp, Mus musculus
  siRNA target sequence for AW743433 (NM_172649.1,861-879).
ctgccttagaaatgttact

SEQ ID NO: 776966 - DNA, 19 bp, Mus musculus
  siRNA target sequence for AW743433 (NM_172649.1,863-881).
gccttagaaatgttactca

SEQ ID NO: 776967 - DNA, 19 bp, Mus musculus
  siRNA target sequence for AW743433 (NM_172649.1,912-930).
gcttgagtctgttgatgaa

SEQ ID NO: 776968 - DNA, 19 bp, Mus musculus
  siRNA target sequence for AW743433 (NM_172649.1,940-958).
cagttttgtgccagtaaat

SEQ ID NO: 776969 - DNA, 19 bp, Mus musculus
  siRNA target sequence for AW743433 (NM_172649.1,942-960).
gttttgtgccagtaaatta

SEQ ID NO: 776970 - DNA, 19 bp, Mus musculus
  siRNA target sequence for AW743433 (NM_172649.1,947-965).
gtgccagtaaattaaaact

SEQ ID NO: 776971 - DNA, 19 bp, Mus musculus
  siRNA target sequence for AW743433 (NM_172649.1,951-969).
cagtaaattaaaactacta

SEQ ID NO: 776972 - DNA, 19 bp, Mus musculus
  siRNA target sequence for AW743433 (NM_172649.1,979-997).
gaatctgtcagtcagttaa

SEQ ID NO: 776973 - DNA, 19 bp, Mus musculus
  siRNA target sequence for AW743433 (NM_172649.1,993-1011).
gttaaatacgcttgacttt

SEQ ID NO: 776974 - DNA, 19 bp, Mus musculus
  siRNA target sequence for AW743433 (NM_172649.1,1018-1036).
gacaccccgttctctgata

SEQ ID NO: 776975 - DNA, 19 bp, Mus musculus
  siRNA target sequence for AW743433 (NM_172649.1,1020-1038).
caccccgttctctgataat

SEQ ID NO: 776976 - DNA, 19 bp, Mus musculus
  siRNA target sequence for AW743433 (NM_172649.1,1022-1040).
ccccgttctctgataatga

SEQ ID NO: 776977 - DNA, 19 bp, Mus musculus
  siRNA target sequence for AW743433 (NM_172649.1,1023-1041).
cccgttctctgataatgat

SEQ ID NO: 776978 - DNA, 19 bp, Mus musculus
  siRNA target sequence for AW743433 (NM_172649.1,1025-1043).
cgttctctgataatgatct

SEQ ID NO: 776979 - DNA, 19 bp, Mus musculus
  siRNA target sequence for AW743433 (NM_172649.1,1039-1057).
gatctggctgtcttgctaa

SEQ ID NO: 776980 - DNA, 19 bp, Mus musculus
  siRNA target sequence for AW743433 (NM_172649.1,1127-1145).
ccaccgtgcgcttttctga

SEQ ID NO: 776981 - DNA, 19 bp, Mus musculus
  siRNA target sequence for AW743433 (NM_172649.1,1173-1191).
gaccttcctggagtatcta

SEQ ID NO: 776982 - DNA, 19 bp, Mus musculus
  siRNA target sequence for AW743433 (NM_172649.1,1179-1197).
cctggagtatctagagtat

SEQ ID NO: 776983 - DNA, 19 bp, Mus musculus
  siRNA target sequence for AW743433 (NM_172649.1,1183-1201).
gagtatctagagtatgaga

SEQ ID NO: 776984 - DNA, 19 bp, Mus musculus
  siRNA target sequence for AW743433 (NM_172649.1,1204-1222).
gatgcactgagcataagga

SEQ ID NO: 776985 - DNA, 19 bp, Mus musculus
  siRNA target sequence for AW743433 (NM_172649.1,1372-1390).
ctttcgaaggaaaaagaca

SEQ ID NO: 776986 - DNA, 19 bp, Mus musculus
  siRNA target sequence for AW743433 (NM_172649.1,1376-1394).
cgaaggaaaaagacatttt

SEQ ID NO: 776987 - DNA, 19 bp, Mus musculus
  siRNA target sequence for AW743433 (NM_172649.1,1598-1616).
gcggtgctacagataagaa

SEQ ID NO: 776988 - DNA, 19 bp, Mus musculus
  siRNA target sequence for AW743433 (NM_172649.1,1599-1617).
cggtgctacagataagaaa

SEQ ID NO: 776989 - DNA, 19 bp, Mus musculus
  siRNA target sequence for AW743433 (NM_172649.1,1839-1857).
ggggaaaggtggtattgca

SEQ ID NO: 776990 - DNA, 19 bp, Mus musculus
  siRNA target sequence for AW743433 (NM_172649.1,1864-1882).
gtagccaagtggatattta

SEQ ID NO: 776991 - DNA, 19 bp, Mus musculus
  siRNA target sequence for AW743433 (NM_172649.1,1868-1886).
ccaagtggatatttaaaca

SEQ ID NO: 776992 - DNA, 19 bp, Mus musculus
  siRNA target sequence for AW743433 (NM_172649.1,1888-1906).
gacctcagccctgaattgt

SEQ ID NO: 776993 - DNA, 19 bp, Mus musculus
  siRNA target sequence for AW743433 (NM_172649.1,1891-1909).
ctcagccctgaattgttga

SEQ ID NO: 776994 - DNA, 19 bp, Mus musculus
  siRNA target sequence for AW743433 (NM_172649.1,1905-1923).
gttgaaatgtgccaacaaa

SEQ ID NO: 776995 - DNA, 19 bp, Mus musculus
  siRNA target sequence for AW743433 (NM_172649.1,2063-2081).
cggaggaagctcgcttttt

SEQ ID NO: 776996 - DNA, 19 bp, Mus musculus
  siRNA target sequence for AW743433 (NM_172649.1,2071-2089).
gctcgctttttggttagat

SEQ ID NO: 776997 - DNA, 19 bp, Mus musculus
  siRNA target sequence for AW743433 (NM_172649.1,2076-2094).
ctttttggttagatccata

SEQ ID NO: 776998 - DNA, 19 bp, Mus musculus
  siRNA target sequence for AW743433 (NM_172649.1,2113-2131).
cttaatccacacgttcaaa

SEQ ID NO: 776999 - DNA, 19 bp, Mus musculus
  siRNA target sequence for AW743433 (NM_172649.1,2119-2137).
ccacacgttcaaaatggta

SEQ ID NO: 777000 - DNA, 19 bp, Mus musculus
  siRNA target sequence for AW743433 (NM_172649.1,2120-2138).
cacacgttcaaaatggtat

SEQ ID NO: 777001 - DNA, 19 bp, Mus musculus
  siRNA target sequence for AW743433 (NM_172649.1,2134-2152).
ggtatcgcgctgatgatgt

SEQ ID NO: 777002 - DNA, 19 bp, Mus musculus
  siRNA target sequence for AW743433 (NM_172649.1,2143-2161).
ctgatgatgtggaatacgt

SEQ ID NO: 777003 - DNA, 19 bp, Mus musculus
  siRNA target sequence for AW743433 (NM_172649.1,2160-2178).
gttcttggtgaaaaggttt

SEQ ID NO: 777004 - DNA, 19 bp, Mus musculus
  siRNA target sequence for AW743433 (NM_172649.1,2180-2198).
ctgctgctacttacctaat

SEQ ID NO: 777005 - DNA, 19 bp, Mus musculus
  siRNA target sequence for AW743433 (NM_172649.1,2183-2201).
ctgctacttacctaatgga

SEQ ID NO: 777006 - DNA, 19 bp, Mus musculus
  siRNA target sequence for AW743433 (NM_172649.1,2185-2203).
gctacttacctaatggata

SEQ ID NO: 777007 - DNA, 19 bp, Mus musculus
  siRNA target sequence for AW743433 (NM_172649.1,2186-2204).
ctacttacctaatggataa

SEQ ID NO: 777008 - DNA, 19 bp, Mus musculus
  siRNA target sequence for AW743433 (NM_172649.1,2307-2325).
gtcattggaggctgacatt

SEQ ID NO: 777009 - DNA, 19 bp, Mus musculus
  siRNA target sequence for AW743433 (NM_172649.1,2380-2398).
gtggaaggccccatctcta

SEQ ID NO: 777010 - DNA, 19 bp, Mus musculus
  siRNA target sequence for AW743433 (NM_172649.1,2382-2400).
ggaaggccccatctctata

SEQ ID NO: 777011 - DNA, 19 bp, Mus musculus
  siRNA target sequence for AW743433 (NM_172649.1,2478-2496).
cgcgtccatgcgcttttct

SEQ ID NO: 777012 - DNA, 19 bp, Mus musculus
  siRNA target sequence for AW743433 (NM_172649.1,2480-2498).
cgtccatgcgcttttctct

SEQ ID NO: 777013 - DNA, 19 bp, Mus musculus
  siRNA target sequence for AW743433 (NM_172649.1,2508-2526).
gaagccactcgcccttttt

SEQ ID NO: 777014 - DNA, 19 bp, Mus musculus
  siRNA target sequence for AW743433 (NM_172649.1,2512-2530).
ccactcgccctttttgaca

SEQ ID NO: 777015 - DNA, 19 bp, Mus musculus
  siRNA target sequence for AW743433 (NM_172649.1,2587-2605).
ggggaaatggatccaaatt

SEQ ID NO: 777016 - DNA, 19 bp, Mus musculus
  siRNA target sequence for AW743433 (NM_172649.1,2588-2606).
gggaaatggatccaaattt

SEQ ID NO: 777017 - DNA, 19 bp, Mus musculus
  siRNA target sequence for AW743433 (NM_172649.1,2692-2710).
gaagcagcaaacactcatt

SEQ ID NO: 777018 - DNA, 19 bp, Mus musculus
  siRNA target sequence for AW743433 (NM_172649.1,2835-2853).
ggaggccatttttcaagtt

SEQ ID NO: 777019 - DNA, 19 bp, Mus musculus
  siRNA target sequence for AW743433 (NM_172649.1,3041-3059).
cagctaaactcgtgcataa

SEQ ID NO: 777020 - DNA, 19 bp, Mus musculus
  siRNA target sequence for AW743433 (NM_172649.1,3044-3062).
ctaaactcgtgcataaagt

SEQ ID NO: 777021 - DNA, 19 bp, Mus musculus
  siRNA target sequence for 4632411B12Rik (NM_172652.1,296-314).
ccacccgcatgctctttgt

SEQ ID NO: 777022 - DNA, 19 bp, Mus musculus
  siRNA target sequence for 4632411B12Rik (NM_172652.1,297-315).
cacccgcatgctctttgta

SEQ ID NO: 777023 - DNA, 19 bp, Mus musculus
  siRNA target sequence for 4632411B12Rik (NM_172652.1,348-366).
gtcagacgttccaatagat

SEQ ID NO: 777024 - DNA, 19 bp, Mus musculus
  siRNA target sequence for 4632411B12Rik (NM_172652.1,350-368).
cagacgttccaatagatgt

SEQ ID NO: 777025 - DNA, 19 bp, Mus musculus
  siRNA target sequence for 4632411B12Rik (NM_172652.1,386-404).
ctcctgttccactttatga

SEQ ID NO: 777026 - DNA, 19 bp, Mus musculus
  siRNA target sequence for 4632411B12Rik (NM_172652.1,437-455).
gtgaacggcacgtgatctt

SEQ ID NO: 777027 - DNA, 19 bp, Mus musculus
  siRNA target sequence for 4632411B12Rik (NM_172652.1,531-549).
ggctcagaataagctattt

SEQ ID NO: 777028 - DNA, 19 bp, Mus musculus
  siRNA target sequence for 4632411B12Rik (NM_172652.1,532-550).
gctcagaataagctattta

SEQ ID NO: 777029 - DNA, 19 bp, Mus musculus
  siRNA target sequence for 4632411B12Rik (NM_172652.1,535-553).
cagaataagctatttaaca

SEQ ID NO: 777030 - DNA, 19 bp, Mus musculus
  siRNA target sequence for 4632411B12Rik (NM_172652.1,597-615).
caatgaaggggcttgcaat

SEQ ID NO: 777031 - DNA, 19 bp, Mus musculus
  siRNA target sequence for 4632411B12Rik (NM_172652.1,788-806).
ggaagatcccaactttgat

SEQ ID NO: 777032 - DNA, 19 bp, Mus musculus
  siRNA target sequence for 4632411B12Rik (NM_172652.1,789-807).
gaagatcccaactttgata

SEQ ID NO: 777033 - DNA, 19 bp, Mus musculus
  siRNA target sequence for 4632411B12Rik (NM_172652.1,792-810).
gatcccaactttgatagat

SEQ ID NO: 777034 - DNA, 19 bp, Mus musculus
  siRNA target sequence for 4632411B12Rik (NM_172652.1,820-838).
gtgtcgtccaacaccaaaa

SEQ ID NO: 777035 - DNA, 19 bp, Mus musculus
  siRNA target sequence for 4632411B12Rik (NM_172652.1,822-840).
gtcgtccaacaccaaaact

SEQ ID NO: 777036 - DNA, 19 bp, Mus musculus
  siRNA target sequence for 4632411B12Rik (NM_172652.1,896-914).
ctgttggtgtgctttcaca

SEQ ID NO: 777037 - DNA, 19 bp, Mus musculus
  siRNA target sequence for 4632411B12Rik (NM_172652.1,907-925).
ctttcacataacaaaccaa

SEQ ID NO: 777038 - DNA, 19 bp, Mus musculus
  siRNA target sequence for 4632411B12Rik (NM_172652.1,1049-1067).
ctgtagcgacccatctact

SEQ ID NO: 777039 - DNA, 19 bp, Mus musculus
  siRNA target sequence for 4632411B12Rik (NM_172652.1,1055-1073).
cgacccatctactgaacaa

SEQ ID NO: 777040 - DNA, 19 bp, Mus musculus
  siRNA target sequence for 4632411B12Rik (NM_172652.1,1056-1074).
gacccatctactgaacaat

SEQ ID NO: 777041 - DNA, 19 bp, Mus musculus
  siRNA target sequence for 4632411B12Rik (NM_172652.1,1098-1116).
gtgcctcgaacacatgatt

SEQ ID NO: 777042 - DNA, 19 bp, Mus musculus
  siRNA target sequence for 4632411B12Rik (NM_172652.1,1127-1145).
gaagcaaagtgctagagat

SEQ ID NO: 777043 - DNA, 19 bp, Mus musculus
  siRNA target sequence for 4632411B12Rik (NM_172652.1,1130-1148).
gcaaagtgctagagattca

SEQ ID NO: 777044 - DNA, 19 bp, Mus musculus
  siRNA target sequence for 4632411B12Rik (NM_172652.1,1423-1441).
gttgggggagctgatgata

SEQ ID NO: 777045 - DNA, 19 bp, Mus musculus
  siRNA target sequence for 4632411B12Rik (NM_172652.1,1427-1445).
ggggagctgatgataatct

SEQ ID NO: 777046 - DNA, 19 bp, Mus musculus
  siRNA target sequence for 4632411B12Rik (NM_172652.1,1429-1447).
ggagctgatgataatctca

SEQ ID NO: 777047 - DNA, 19 bp, Mus musculus
  siRNA target sequence for 4632411B12Rik (NM_172652.1,1438-1456).
gataatctcagaataagca

SEQ ID NO: 777048 - DNA, 19 bp, Mus musculus
  siRNA target sequence for 4632411B12Rik (NM_172652.1,1773-1791).
gacctctacccagaaatca

SEQ ID NO: 777049 - DNA, 19 bp, Mus musculus
  siRNA target sequence for 4632411B12Rik (NM_172652.1,1864-1882).
gcccaagttcccatttcat

SEQ ID NO: 777050 - DNA, 19 bp, Mus musculus
  siRNA target sequence for 4632411B12Rik (NM_172652.1,1866-1884).
ccaagttcccatttcatca

SEQ ID NO: 777051 - DNA, 19 bp, Mus musculus
  siRNA target sequence for 4632411B12Rik (NM_172652.1,1915-1933).
cttcgggtccagcttaaga

SEQ ID NO: 777052 - DNA, 19 bp, Mus musculus
  siRNA target sequence for 4632411B12Rik (NM_172652.1,1974-1992).
caagcgaccaaagatcaaa

SEQ ID NO: 777053 - DNA, 19 bp, Mus musculus
  siRNA target sequence for 4632411B12Rik (NM_172652.1,2131-2149).
ctcactacagccaagtcaa

SEQ ID NO: 777054 - DNA, 19 bp, Mus musculus
  siRNA target sequence for 4632411B12Rik (NM_172652.1,2204-2222).
gtgccacacctaatgctat

SEQ ID NO: 777055 - DNA, 19 bp, Mus musculus
  siRNA target sequence for 4632411B12Rik (NM_172652.1,2312-2330).
gcttcagcttacaggatat

SEQ ID NO: 777056 - DNA, 19 bp, Mus musculus
  siRNA target sequence for 4632411B12Rik (NM_172652.1,2718-2736).
ccagatgctaccatctagt

SEQ ID NO: 777057 - DNA, 19 bp, Mus musculus
  siRNA target sequence for 4632411B12Rik (NM_172652.1,2721-2739).
gatgctaccatctagttca

SEQ ID NO: 777058 - DNA, 19 bp, Mus musculus
  siRNA target sequence for 5330401P04Rik (NM_172654.1,103-121).
gtcagttcccagatgtaaa

SEQ ID NO: 777059 - DNA, 19 bp, Mus musculus
  siRNA target sequence for 5330401P04Rik (NM_172654.1,125-143).
ctgaaggaaacggacttaa

SEQ ID NO: 777060 - DNA, 19 bp, Mus musculus
  siRNA target sequence for 5330401P04Rik (NM_172654.1,130-148).
ggaaacggacttaattaaa

SEQ ID NO: 777061 - DNA, 19 bp, Mus musculus
  siRNA target sequence for 5330401P04Rik (NM_172654.1,136-154).
ggacttaattaaaacttct

SEQ ID NO: 777062 - DNA, 19 bp, Mus musculus
  siRNA target sequence for 5330401P04Rik (NM_172654.1,155-173).
gtgtcagactgctattgct

SEQ ID NO: 777063 - DNA, 19 bp, Mus musculus
  siRNA target sequence for 5330401P04Rik (NM_172654.1,243-261).
gcctgctcaatattgtata

SEQ ID NO: 777064 - DNA, 19 bp, Mus musculus
  siRNA target sequence for 5330401P04Rik (NM_172654.1,244-262).
cctgctcaatattgtatat

SEQ ID NO: 777065 - DNA, 19 bp, Mus musculus
  siRNA target sequence for 5330401P04Rik (NM_172654.1,297-315).
gcattttatcatttatcaa

SEQ ID NO: 777066 - DNA, 19 bp, Mus musculus
  siRNA target sequence for 5330401P04Rik (NM_172654.1,375-393).
gtccatatggagaaactgt

SEQ ID NO: 777067 - DNA, 19 bp, Mus musculus
  siRNA target sequence for 5330401P04Rik (NM_172654.1,420-438).
ggctccttccctacatagt

SEQ ID NO: 777068 - DNA, 19 bp, Mus musculus
  siRNA target sequence for 5330401P04Rik (NM_172654.1,441-459).
gcgtgagtcgaaacattgt

SEQ ID NO: 777069 - DNA, 19 bp, Mus musculus
  siRNA target sequence for 5330401P04Rik (NM_172654.1,447-465).
gtcgaaacattgtggattt

SEQ ID NO: 777070 - DNA, 19 bp, Mus musculus
  siRNA target sequence for 5330401P04Rik (NM_172654.1,552-570).
ccggtaccgtgttaggtat

SEQ ID NO: 777071 - DNA, 19 bp, Mus musculus
  siRNA target sequence for 5330401P04Rik (NM_172654.1,553-571).
cggtaccgtgttaggtatt

SEQ ID NO: 777072 - DNA, 19 bp, Mus musculus
  siRNA target sequence for 5330401P04Rik (NM_172654.1,555-573).
gtaccgtgttaggtattct

SEQ ID NO: 777073 - DNA, 19 bp, Mus musculus
  siRNA target sequence for 5330401P04Rik (NM_172654.1,558-576).
ccgtgttaggtattctaat

SEQ ID NO: 777074 - DNA, 19 bp, Mus musculus
  siRNA target sequence for 5330401P04Rik (NM_172654.1,562-580).
gttaggtattctaatgaca

SEQ ID NO: 777075 - DNA, 19 bp, Mus musculus
  siRNA target sequence for A730039N16Rik (NM_172655.1,280-298).
ctgccagcatgtacgaata

SEQ ID NO: 777076 - DNA, 19 bp, Mus musculus
  siRNA target sequence for A730039N16Rik (NM_172655.1,282-300).
gccagcatgtacgaataca

SEQ ID NO: 777077 - DNA, 19 bp, Mus musculus
  siRNA target sequence for A730039N16Rik (NM_172655.1,362-380).
cgattggataggactctat

SEQ ID NO: 777078 - DNA, 19 bp, Mus musculus
  siRNA target sequence for A730039N16Rik (NM_172655.1,367-385).
ggataggactctatcacat

SEQ ID NO: 777079 - DNA, 19 bp, Mus musculus
  siRNA target sequence for A730039N16Rik (NM_172655.1,368-386).
gataggactctatcacata

SEQ ID NO: 777080 - DNA, 19 bp, Mus musculus
  siRNA target sequence for A730039N16Rik (NM_172655.1,373-391).
gactctatcacatagatga

SEQ ID NO: 777081 - DNA, 19 bp, Mus musculus
  siRNA target sequence for A730039N16Rik (NM_172655.1,377-395).
ctatcacatagatgagaat

SEQ ID NO: 777082 - DNA, 19 bp, Mus musculus
  siRNA target sequence for A730039N16Rik (NM_172655.1,443-461).
ccaaaaaggacaaattgta

SEQ ID NO: 777083 - DNA, 19 bp, Mus musculus
  siRNA target sequence for A730039N16Rik (NM_172655.1,471-489).
gagcctgggccctacttca

SEQ ID NO: 777084 - DNA, 19 bp, Mus musculus
  siRNA target sequence for A730039N16Rik (NM_172655.1,492-510).
gaaccggagatcaaaatct

SEQ ID NO: 777085 - DNA, 19 bp, Mus musculus
  siRNA target sequence for A730039N16Rik (NM_172655.1,549-567).
gccacaaccccctgtatta

SEQ ID NO: 777086 - DNA, 19 bp, Mus musculus
  siRNA target sequence for A730039N16Rik (NM_172655.1,559-577).
cctgtattaccgtgaagaa

SEQ ID NO: 777087 - DNA, 19 bp, Mus musculus
  siRNA target sequence for A730039N16Rik (NM_172655.1,647-665).
cgtcagcttcacattgtca

SEQ ID NO: 777088 - DNA, 19 bp, Mus musculus
  siRNA target sequence for A730039N16Rik (NM_172655.1,704-722).
caatcctgacccttatctt

SEQ ID NO: 777089 - DNA, 19 bp, Mus musculus
  siRNA target sequence for A730039N16Rik (NM_172655.1,836-854).
gaaatactccttttttgca

SEQ ID NO: 777090 - DNA, 19 bp, Mus musculus
  siRNA target sequence for A730039N16Rik (NM_172655.1,921-939).
cgcttcctggggaaactaa

SEQ ID NO: 777091 - DNA, 19 bp, Mus musculus
  siRNA target sequence for A730039N16Rik (NM_172655.1,926-944).
cctggggaaactaaccatt

SEQ ID NO: 777092 - DNA, 19 bp, Mus musculus
  siRNA target sequence for D2Wsu81e (NM_172660.1,578-596).
gatgaggagggccaagata

SEQ ID NO: 777093 - DNA, 19 bp, Mus musculus
  siRNA target sequence for D2Wsu81e (NM_172660.1,684-702).
gtccacagtacctgagaaa

SEQ ID NO: 777094 - DNA, 19 bp, Mus musculus
  siRNA target sequence for D2Wsu81e (NM_172660.1,851-869).
gtcaactgtggaatgaaga

SEQ ID NO: 777095 - DNA, 19 bp, Mus musculus
  siRNA target sequence for D2Wsu81e (NM_172660.1,874-892).
ggtgaagattgacaagaaa

SEQ ID NO: 777096 - DNA, 19 bp, Mus musculus
  siRNA target sequence for D2Wsu81e (NM_172660.1,938-956).
ctcccagaatgcaagacat

SEQ ID NO: 777097 - DNA, 19 bp, Mus musculus
  siRNA target sequence for E330008O22Rik (NM_172662.1,134-152).
gaagtgtacaagattggat

SEQ ID NO: 777098 - DNA, 19 bp, Mus musculus
  siRNA target sequence for E330008O22Rik (NM_172662.1,163-181).
ctggatcagaaggtttgaa

SEQ ID NO: 777099 - DNA, 19 bp, Mus musculus
  siRNA target sequence for E330008O22Rik (NM_172662.1,179-197).
gaacaggccaatgagtatt

SEQ ID NO: 777100 - DNA, 19 bp, Mus musculus
  siRNA target sequence for E330008O22Rik (NM_172662.1,184-202).
ggccaatgagtattgtcat

SEQ ID NO: 777101 - DNA, 19 bp, Mus musculus
  siRNA target sequence for E330008O22Rik (NM_172662.1,203-221).
catcgaggcattttatgga

SEQ ID NO: 777102 - DNA, 19 bp, Mus musculus
  siRNA target sequence for E330008O22Rik (NM_172662.1,245-263).
gctgctccgagaagaatta

SEQ ID NO: 777103 - DNA, 19 bp, Mus musculus
  siRNA target sequence for E330008O22Rik (NM_172662.1,248-266).
gctccgagaagaattagat

SEQ ID NO: 777104 - DNA, 19 bp, Mus musculus
  siRNA target sequence for E330008O22Rik (NM_172662.1,313-331).
cacgcacagcagccttata

SEQ ID NO: 777105 - DNA, 19 bp, Mus musculus
  siRNA target sequence for E330008O22Rik (NM_172662.1,326-344).
cttatacttctcacagaat

SEQ ID NO: 777106 - DNA, 19 bp, Mus musculus
  siRNA target sequence for E330008O22Rik (NM_172662.1,435-453).
ctgaaaaagatcttatact

SEQ ID NO: 777107 - DNA, 19 bp, Mus musculus
  siRNA target sequence for E330008O22Rik (NM_172662.1,470-488).
ggtgtatcctgtcaagaaa

SEQ ID NO: 777108 - DNA, 19 bp, Mus musculus
  siRNA target sequence for E330008O22Rik (NM_172662.1,473-491).
gtatcctgtcaagaaatat

SEQ ID NO: 777109 - DNA, 19 bp, Mus musculus
  siRNA target sequence for E330008O22Rik (NM_172662.1,513-531).
ggatacaaccaaattctct

SEQ ID NO: 777110 - DNA, 19 bp, Mus musculus
  siRNA target sequence for E330008O22Rik (NM_172662.1,535-553).
gtttggtggctgatgttgt

SEQ ID NO: 777111 - DNA, 19 bp, Mus musculus
  siRNA target sequence for E330008O22Rik (NM_172662.1,546-564).
gatgttgtggtattcaatt

SEQ ID NO: 777112 - DNA, 19 bp, Mus musculus
  siRNA target sequence for E330008O22Rik (NM_172662.1,549-567).
gttgtggtattcaattcca

SEQ ID NO: 777113 - DNA, 19 bp, Mus musculus
  siRNA target sequence for E330008O22Rik (NM_172662.1,554-572).
ggtattcaattccagtttt

SEQ ID NO: 777114 - DNA, 19 bp, Mus musculus
  siRNA target sequence for E330008O22Rik (NM_172662.1,639-657).
gatctggaaagcattatca

SEQ ID NO: 777115 - DNA, 19 bp, Mus musculus
  siRNA target sequence for E330008O22Rik (NM_172662.1,713-731).
catgcccaagcacaaaata

SEQ ID NO: 777116 - DNA, 19 bp, Mus musculus
  siRNA target sequence for E330008O22Rik (NM_172662.1,831-849).
ccggagaactgtgaatcaa

SEQ ID NO: 777117 - DNA, 19 bp, Mus musculus
  siRNA target sequence for E330008O22Rik (NM_172662.1,834-852).
gagaactgtgaatcaaagt

SEQ ID NO: 777118 - DNA, 19 bp, Mus musculus
  siRNA target sequence for E330008O22Rik (NM_172662.1,896-914).
caacccatcagtccataaa

SEQ ID NO: 777119 - DNA, 19 bp, Mus musculus
  siRNA target sequence for E330008O22Rik (NM_172662.1,899-917).
cccatcagtccataaatca

SEQ ID NO: 777120 - DNA, 19 bp, Mus musculus
  siRNA target sequence for E330008O22Rik (NM_172662.1,1046-1064).
gacgttcttaaagatacta

SEQ ID NO: 777121 - DNA, 19 bp, Mus musculus
  siRNA target sequence for E330008O22Rik (NM_172662.1,1104-1122).
gtcctcggagagactttta

SEQ ID NO: 777122 - DNA, 19 bp, Mus musculus
  siRNA target sequence for E330008O22Rik (NM_172662.1,1186-1204).
gctacttaccccgtaaaga

SEQ ID NO: 777123 - DNA, 19 bp, Mus musculus
  siRNA target sequence for E330008O22Rik (NM_172662.1,1194-1212).
ccccgtaaagaagactatt

SEQ ID NO: 777124 - DNA, 19 bp, Mus musculus
  siRNA target sequence for E330008O22Rik (NM_172662.1,1230-1248).
gctgacgttgtcatctcaa

SEQ ID NO: 777125 - DNA, 19 bp, Mus musculus
  siRNA target sequence for E330008O22Rik (NM_172662.1,1246-1264).
caacagccaagcatgaatt

SEQ ID NO: 777126 - DNA, 19 bp, Mus musculus
  siRNA target sequence for E330008O22Rik (NM_172662.1,1340-1358).
gatctttccagctgagtat

SEQ ID NO: 777127 - DNA, 19 bp, Mus musculus
  siRNA target sequence for E330008O22Rik (NM_172662.1,1350-1368).
gctgagtatctgtattcca

SEQ ID NO: 777128 - DNA, 19 bp, Mus musculus
  siRNA target sequence for E330008O22Rik (NM_172662.1,1384-1402).
caaaacggctcaagagttt

SEQ ID NO: 777129 - DNA, 19 bp, Mus musculus
  siRNA target sequence for E330008O22Rik (NM_172662.1,1470-1488).
gccctacatggtaaattca

SEQ ID NO: 777130 - DNA, 19 bp, Mus musculus
  siRNA target sequence for D2Ertd694e (NM_172663.2,453-471).
cacctacagcgagctattt

SEQ ID NO: 777131 - DNA, 19 bp, Mus musculus
  siRNA target sequence for D2Ertd694e (NM_172663.2,455-473).
cctacagcgagctatttca

SEQ ID NO: 777132 - DNA, 19 bp, Mus musculus
  siRNA target sequence for D2Ertd694e (NM_172663.2,529-547).
cagagagcaacgtcaacta

SEQ ID NO: 777133 - DNA, 19 bp, Mus musculus
  siRNA target sequence for D2Ertd694e (NM_172663.2,531-549).
gagagcaacgtcaactatt

SEQ ID NO: 777134 - DNA, 19 bp, Mus musculus
  siRNA target sequence for D2Ertd694e (NM_172663.2,535-553).
gcaacgtcaactattacaa

SEQ ID NO: 777135 - DNA, 19 bp, Mus musculus
  siRNA target sequence for D2Ertd694e (NM_172663.2,536-554).
caacgtcaactattacaat

SEQ ID NO: 777136 - DNA, 19 bp, Mus musculus
  siRNA target sequence for D2Ertd694e (NM_172663.2,583-601).
ccaagcagttcattcatat

SEQ ID NO: 777137 - DNA, 19 bp, Mus musculus
  siRNA target sequence for D2Ertd694e (NM_172663.2,620-638).
caacgagcaaccagattat

SEQ ID NO: 777138 - DNA, 19 bp, Mus musculus
  siRNA target sequence for D2Ertd694e (NM_172663.2,623-641).
cgagcaaccagattatgat

SEQ ID NO: 777139 - DNA, 19 bp, Mus musculus
  siRNA target sequence for D2Ertd694e (NM_172663.2,630-648).
ccagattatgatatggatt

SEQ ID NO: 777140 - DNA, 19 bp, Mus musculus
  siRNA target sequence for D2Ertd694e (NM_172663.2,649-667).
cagaagatgagacattatt

SEQ ID NO: 777141 - DNA, 19 bp, Mus musculus
  siRNA target sequence for D2Ertd694e (NM_172663.2,651-669).
gaagatgagacattattaa

SEQ ID NO: 777142 - DNA, 19 bp, Mus musculus
  siRNA target sequence for D2Ertd694e (NM_172663.2,690-708).
gaaattaaacctttgcaat

SEQ ID NO: 777143 - DNA, 19 bp, Mus musculus
  siRNA target sequence for D2Ertd694e (NM_172663.2,719-737).
gattgacagacttgaaaaa

SEQ ID NO: 777144 - DNA, 19 bp, Mus musculus
  siRNA target sequence for D2Ertd694e (NM_172663.2,745-763).
ctaaccagcttgtaacact

SEQ ID NO: 777145 - DNA, 19 bp, Mus musculus
  siRNA target sequence for D2Ertd694e (NM_172663.2,752-770).
gcttgtaacacttcaagaa

SEQ ID NO: 777146 - DNA, 19 bp, Mus musculus
  siRNA target sequence for D2Ertd694e (NM_172663.2,868-886).
cccagattaagcaagagaa

SEQ ID NO: 777147 - DNA, 19 bp, Mus musculus
  siRNA target sequence for D2Ertd694e (NM_172663.2,902-920).
caacaatgatccttacgtt

SEQ ID NO: 777148 - DNA, 19 bp, Mus musculus
  siRNA target sequence for D2Ertd694e (NM_172663.2,1018-1036).
gcagagccataacaatttt

SEQ ID NO: 777149 - DNA, 19 bp, Mus musculus
  siRNA target sequence for D2Ertd694e (NM_172663.2,1068-1086).
cgggaattattgcacttaa

SEQ ID NO: 777150 - DNA, 19 bp, Mus musculus
  siRNA target sequence for D2Ertd694e (NM_172663.2,1070-1088).
ggaattattgcacttaaca

SEQ ID NO: 777151 - DNA, 19 bp, Mus musculus
  siRNA target sequence for D2Ertd694e (NM_172663.2,1087-1105).
cactggaagttgtggaaaa

SEQ ID NO: 777152 - DNA, 19 bp, Mus musculus
  siRNA target sequence for D2Ertd694e (NM_172663.2,1120-1138).
gagactatgggggtgaaat

SEQ ID NO: 777153 - DNA, 19 bp, Mus musculus
  siRNA target sequence for D2Ertd694e (NM_172663.2,1129-1147).
ggggtgaaatccttaatga

SEQ ID NO: 777154 - DNA, 19 bp, Mus musculus
  siRNA target sequence for D2Ertd694e (NM_172663.2,1130-1148).
gggtgaaatccttaatgaa

SEQ ID NO: 777155 - DNA, 19 bp, Mus musculus
  siRNA target sequence for D2Ertd694e (NM_172663.2,1151-1169).
gaaagttaatagatcagaa

SEQ ID NO: 777156 - DNA, 19 bp, Mus musculus
  siRNA target sequence for D2Ertd694e (NM_172663.2,1162-1180).
gatcagaaaaagagttata

SEQ ID NO: 777157 - DNA, 19 bp, Mus musculus
  siRNA target sequence for D2Ertd694e (NM_172663.2,1237-1255).
ctaagcaccctcatcattt

SEQ ID NO: 777158 - DNA, 19 bp, Mus musculus
  siRNA target sequence for D2Ertd694e (NM_172663.2,1276-1294).
ctgatgtggttcgtcaaaa

SEQ ID NO: 777159 - DNA, 19 bp, Mus musculus
  siRNA target sequence for D2Ertd694e (NM_172663.2,1284-1302).
gttcgtcaaaagaagaagt

SEQ ID NO: 777160 - DNA, 19 bp, Mus musculus
  siRNA target sequence for D2Ertd694e (NM_172663.2,1364-1382).
gcctgtgatcaataagagt

SEQ ID NO: 777161 - DNA, 19 bp, Mus musculus
  siRNA target sequence for D2Ertd694e (NM_172663.2,1500-1518).
cgggcaggatgccagtatt

SEQ ID NO: 777162 - DNA, 19 bp, Mus musculus
  siRNA target sequence for D2Ertd694e (NM_172663.2,1501-1519).
gggcaggatgccagtatta

SEQ ID NO: 777163 - DNA, 19 bp, Mus musculus
  siRNA target sequence for D2Ertd694e (NM_172663.2,1525-1543).
cgcgtttggaccaagctaa

SEQ ID NO: 777164 - DNA, 19 bp, Mus musculus
  siRNA target sequence for D2Ertd694e (NM_172663.2,1526-1544).
gcgtttggaccaagctaat

SEQ ID NO: 777165 - DNA, 19 bp, Mus musculus
  siRNA target sequence for D2Ertd694e (NM_172663.2,1527-1545).
cgtttggaccaagctaata

SEQ ID NO: 777166 - DNA, 19 bp, Mus musculus
  siRNA target sequence for D2Ertd694e (NM_172663.2,1528-1546).
gtttggaccaagctaataa

SEQ ID NO: 777167 - DNA, 19 bp, Mus musculus
  siRNA target sequence for D2Ertd694e (NM_172663.2,1589-1607).
gaggtataagcattgtctt

SEQ ID NO: 777168 - DNA, 19 bp, Mus musculus
  siRNA target sequence for D2Ertd694e (NM_172663.2,1663-1681).
gaggtggcagggtcataat

SEQ ID NO: 777169 - DNA, 19 bp, Mus musculus
  siRNA target sequence for D2Ertd694e (NM_172663.2,1706-1724).
ccccgtcctgaaacagata

SEQ ID NO: 777170 - DNA, 19 bp, Mus musculus
  siRNA target sequence for D2Ertd694e (NM_172663.2,1708-1726).
ccgtcctgaaacagataga

SEQ ID NO: 777171 - DNA, 19 bp, Mus musculus
  siRNA target sequence for D2Ertd694e (NM_172663.2,1753-1771).
gctcttcccaaactataga

SEQ ID NO: 777172 - DNA, 19 bp, Mus musculus
  siRNA target sequence for D2Ertd694e (NM_172663.2,1761-1779).
caaactatagacttttctt

SEQ ID NO: 777173 - DNA, 19 bp, Mus musculus
  siRNA target sequence for D2Ertd694e (NM_172663.2,1825-1843).
gactgtctctttctgaaat

SEQ ID NO: 777174 - DNA, 19 bp, Mus musculus
  siRNA target sequence for D2Ertd694e (NM_172663.2,1861-1879).
catgtcgactacagtgttt

SEQ ID NO: 777175 - DNA, 19 bp, Mus musculus
  siRNA target sequence for D2Ertd694e (NM_172663.2,1883-1901).
gccaaggctactaaatgta

SEQ ID NO: 777176 - DNA, 19 bp, Mus musculus
  siRNA target sequence for D2Ertd694e (NM_172663.2,1885-1903).
caaggctactaaatgtaca

SEQ ID NO: 777177 - DNA, 19 bp, Mus musculus
  siRNA target sequence for D2Ertd694e (NM_172663.2,1917-1935).
gaagaatgtacctcaagaa

SEQ ID NO: 777178 - DNA, 19 bp, Mus musculus
  siRNA target sequence for D2Ertd694e (NM_172663.2,1952-1970).
gagcagtaaaagagtttct

SEQ ID NO: 777179 - DNA, 19 bp, Mus musculus
  siRNA target sequence for D2Ertd694e (NM_172663.2,1975-1993).
catccgtagctttattgaa

SEQ ID NO: 777180 - DNA, 19 bp, Mus musculus
  siRNA target sequence for D2Ertd694e (NM_172663.2,1999-2017).
gcaagaacggcatatcagt

SEQ ID NO: 777181 - DNA, 19 bp, Mus musculus
  siRNA target sequence for D2Ertd694e (NM_172663.2,2000-2018).
caagaacggcatatcagta

SEQ ID NO: 777182 - DNA, 19 bp, Mus musculus
  siRNA target sequence for D2Ertd694e (NM_172663.2,2003-2021).
gaacggcatatcagtaaca

SEQ ID NO: 777183 - DNA, 19 bp, Mus musculus
  siRNA target sequence for D2Ertd694e (NM_172663.2,2092-2110).
cgcagcttcatcagaaaca

SEQ ID NO: 777184 - DNA, 19 bp, Mus musculus
  siRNA target sequence for D2Ertd694e (NM_172663.2,2097-2115).
cttcatcagaaacaacaat

SEQ ID NO: 777185 - DNA, 19 bp, Mus musculus
  siRNA target sequence for D2Ertd694e (NM_172663.2,2162-2180).
cacctctgactgtatgtct

SEQ ID NO: 777186 - DNA, 19 bp, Mus musculus
  siRNA target sequence for D2Ertd694e (NM_172663.2,2164-2182).
cctctgactgtatgtctaa

SEQ ID NO: 777187 - DNA, 19 bp, Mus musculus
  siRNA target sequence for D2Ertd694e (NM_172663.2,2165-2183).
ctctgactgtatgtctaaa

SEQ ID NO: 777188 - DNA, 19 bp, Mus musculus
  siRNA target sequence for D2Ertd694e (NM_172663.2,2306-2324).
gccttcaggaccctctaaa

SEQ ID NO: 777189 - DNA, 19 bp, Mus musculus
  siRNA target sequence for D2Ertd694e (NM_172663.2,2311-2329).
caggaccctctaaaacatt

SEQ ID NO: 777190 - DNA, 19 bp, Mus musculus
  siRNA target sequence for D2Ertd694e (NM_172663.2,2313-2331).
ggaccctctaaaacattat

SEQ ID NO: 777191 - DNA, 19 bp, Mus musculus
  siRNA target sequence for D2Ertd694e (NM_172663.2,2314-2332).
gaccctctaaaacattata

SEQ ID NO: 777192 - DNA, 19 bp, Mus musculus
  siRNA target sequence for D2Ertd694e (NM_172663.2,2394-2412).
gttggccacactactacaa

SEQ ID NO: 777193 - DNA, 19 bp, Mus musculus
  siRNA target sequence for D2Ertd694e (NM_172663.2,2485-2503).
cagtgcacctcaataacgt

SEQ ID NO: 777194 - DNA, 19 bp, Mus musculus
  siRNA target sequence for D2Ertd694e (NM_172663.2,2517-2535).
cctgtcaatgtgcatatca

SEQ ID NO: 777195 - DNA, 19 bp, Mus musculus
  siRNA target sequence for D2Ertd694e (NM_172663.2,2518-2536).
ctgtcaatgtgcatatcaa

SEQ ID NO: 777196 - DNA, 19 bp, Mus musculus
  siRNA target sequence for D2Ertd694e (NM_172663.2,2554-2572).
catcgccaacagccttaaa

SEQ ID NO: 777197 - DNA, 19 bp, Mus musculus
  siRNA target sequence for D2Ertd694e (NM_172663.2,2557-2575).
cgccaacagccttaaaact

SEQ ID NO: 777198 - DNA, 19 bp, Mus musculus
  siRNA target sequence for D2Ertd694e (NM_172663.2,2558-2576).
gccaacagccttaaaactt

SEQ ID NO: 777199 - DNA, 19 bp, Mus musculus
  siRNA target sequence for 9330160A12 (NM_172672.1,1176-1194).
gaagcagtggataaaacta

SEQ ID NO: 777200 - DNA, 19 bp, Mus musculus
  siRNA target sequence for 9330160A12 (NM_172672.1,1179-1197).
gcagtggataaaactattt

SEQ ID NO: 777201 - DNA, 19 bp, Mus musculus
  siRNA target sequence for 9330160A12 (NM_172672.1,1203-1221).
gactgtggcaagattgcat

SEQ ID NO: 777202 - DNA, 19 bp, Mus musculus
  siRNA target sequence for 9330160A12 (NM_172672.1,1207-1225).
gtggcaagattgcattcta

SEQ ID NO: 777203 - DNA, 19 bp, Mus musculus
  siRNA target sequence for 9330160A12 (NM_172672.1,1209-1227).
ggcaagattgcattctaca

SEQ ID NO: 777204 - DNA, 19 bp, Mus musculus
  siRNA target sequence for 9330160A12 (NM_172672.1,1303-1321).
gcaccaggttccaaatcat

SEQ ID NO: 777205 - DNA, 19 bp, Mus musculus
  siRNA target sequence for 9330160A12 (NM_172672.1,1342-1360).
ctctcgtggctgaagttta

SEQ ID NO: 777206 - DNA, 19 bp, Mus musculus
  siRNA target sequence for 9330160A12 (NM_172672.1,1353-1371).
gaagtttatggtatagaga

SEQ ID NO: 777207 - DNA, 19 bp, Mus musculus
  siRNA target sequence for 9330160A12 (NM_172672.1,1489-1507).
gcagcctaatactgacaaa

SEQ ID NO: 777208 - DNA, 19 bp, Mus musculus
  siRNA target sequence for 9330160A12 (NM_172672.1,1494-1512).
ctaatactgacaaatagaa

SEQ ID NO: 777209 - DNA, 19 bp, Mus musculus
  siRNA target sequence for 9330160A12 (NM_172672.1,1546-1564).
cattcaagatcgatttgct

SEQ ID NO: 777210 - DNA, 19 bp, Mus musculus
  siRNA target sequence for 9330160A12 (NM_172672.1,1578-1596).
gctgtgatcagcatcaact

SEQ ID NO: 777211 - DNA, 19 bp, Mus musculus
  siRNA target sequence for 9330160A12 (NM_172672.1,1597-1615).
ccctgggccagttatactt

SEQ ID NO: 777212 - DNA, 19 bp, Mus musculus
  siRNA target sequence for 9330160A12 (NM_172672.1,1657-1675).
cattacttgcccttaagat

SEQ ID NO: 777213 - DNA, 19 bp, Mus musculus
  siRNA target sequence for 9330160A12 (NM_172672.1,1665-1683).
gcccttaagatctacctta

SEQ ID NO: 777214 - DNA, 19 bp, Mus musculus
  siRNA target sequence for 9330160A12 (NM_172672.1,1666-1684).
cccttaagatctaccttaa

SEQ ID NO: 777215 - DNA, 19 bp, Mus musculus
  siRNA target sequence for 9330160A12 (NM_172672.1,1769-1787).
cttccccccaacaagactt

SEQ ID NO: 777216 - DNA, 19 bp, Mus musculus
  siRNA target sequence for D930033N23Rik (NM_172676.2,213-231).
gacgcctctgcccatttca

SEQ ID NO: 777217 - DNA, 19 bp, Mus musculus
  siRNA target sequence for D930033N23Rik (NM_172676.2,259-277).
cagtatcagctgagaacat

SEQ ID NO: 777218 - DNA, 19 bp, Mus musculus
  siRNA target sequence for D930033N23Rik (NM_172676.2,358-376).
caatcaagctccttcaaca

SEQ ID NO: 777219 - DNA, 19 bp, Mus musculus
  siRNA target sequence for D930033N23Rik (NM_172676.2,403-421).
ggctctactctgatcacta

SEQ ID NO: 777220 - DNA, 19 bp, Mus musculus
  siRNA target sequence for D930033N23Rik (NM_172676.2,412-430).
ctgatcactatggtttgta

SEQ ID NO: 777221 - DNA, 19 bp, Mus musculus
  siRNA target sequence for D930033N23Rik (NM_172676.2,481-499).
gccaacaagacgtttgcaa

SEQ ID NO: 777222 - DNA, 19 bp, Mus musculus
  siRNA target sequence for 9130022A11Rik (NM_172677.1,401-419).
gttctatcttgatttgact

SEQ ID NO: 777223 - DNA, 19 bp, Mus musculus
  siRNA target sequence for 9130022A11Rik (NM_172677.1,411-429).
gatttgactttgcttcata

SEQ ID NO: 777224 - DNA, 19 bp, Mus musculus
  siRNA target sequence for 9130022A11Rik (NM_172677.1,551-569).
cagctatccaccaatgtca

SEQ ID NO: 777225 - DNA, 19 bp, Mus musculus
  siRNA target sequence for 9130022A11Rik (NM_172677.1,573-591).
ccatatatgcctagttact

SEQ ID NO: 777226 - DNA, 19 bp, Mus musculus
  siRNA target sequence for 9130022A11Rik (NM_172677.1,654-672).
cagcctatgccatatctga

SEQ ID NO: 777227 - DNA, 19 bp, Mus musculus
  siRNA target sequence for 9130022A11Rik (NM_172677.1,748-766).
gaaatacccctccatttct

SEQ ID NO: 777228 - DNA, 19 bp, Mus musculus
  siRNA target sequence for 9130022A11Rik (NM_172677.1,768-786).
ggtcaacatggatttaact

SEQ ID NO: 777229 - DNA, 19 bp, Mus musculus
  siRNA target sequence for 9130022A11Rik (NM_172677.1,809-827).
ctctacatggggaacaagt

SEQ ID NO: 777230 - DNA, 19 bp, Mus musculus
  siRNA target sequence for 9130022A11Rik (NM_172677.1,836-854).
gggacaatcaacacaaaat

SEQ ID NO: 777231 - DNA, 19 bp, Mus musculus
  siRNA target sequence for 9130022A11Rik (NM_172677.1,837-855).
ggacaatcaacacaaaatt

SEQ ID NO: 777232 - DNA, 19 bp, Mus musculus
  siRNA target sequence for 9130022A11Rik (NM_172677.1,849-867).
caaaattctgcttatagta

SEQ ID NO: 777233 - DNA, 19 bp, Mus musculus
  siRNA target sequence for 9130022A11Rik (NM_172677.1,875-893).
cggctatccacctagttct

SEQ ID NO: 777234 - DNA, 19 bp, Mus musculus
  siRNA target sequence for 9130022A11Rik (NM_172677.1,920-938).
ggccggatttggcaatgat

SEQ ID NO: 777235 - DNA, 19 bp, Mus musculus
  siRNA target sequence for 9130022A11Rik (NM_172677.1,921-939).
gccggatttggcaatgata

SEQ ID NO: 777236 - DNA, 19 bp, Mus musculus
  siRNA target sequence for 9130022A11Rik (NM_172677.1,923-941).
cggatttggcaatgatact

SEQ ID NO: 777237 - DNA, 19 bp, Mus musculus
  siRNA target sequence for 9130022A11Rik (NM_172677.1,925-943).
gatttggcaatgatacttt

SEQ ID NO: 777238 - DNA, 19 bp, Mus musculus
  siRNA target sequence for 9130022A11Rik (NM_172677.1,930-948).
ggcaatgatactttgagta

SEQ ID NO: 777239 - DNA, 19 bp, Mus musculus
  siRNA target sequence for 9130022A11Rik (NM_172677.1,931-949).
gcaatgatactttgagtaa

SEQ ID NO: 777240 - DNA, 19 bp, Mus musculus
  siRNA target sequence for 9130022A11Rik (NM_172677.1,950-968).
ggtgcctggcattagtagt

SEQ ID NO: 777241 - DNA, 19 bp, Mus musculus
  siRNA target sequence for 9130022A11Rik (NM_172677.1,951-969).
gtgcctggcattagtagta

SEQ ID NO: 777242 - DNA, 19 bp, Mus musculus
  siRNA target sequence for 9130022A11Rik (NM_172677.1,978-996).
ggcatgactggactgaaaa

SEQ ID NO: 777243 - DNA, 19 bp, Mus musculus
  siRNA target sequence for 9130022A11Rik (NM_172677.1,979-997).
gcatgactggactgaaaat

SEQ ID NO: 777244 - DNA, 19 bp, Mus musculus
  siRNA target sequence for 9130022A11Rik (NM_172677.1,983-1001).
gactggactgaaaattggt

SEQ ID NO: 777245 - DNA, 19 bp, Mus musculus
  siRNA target sequence for 9130022A11Rik (NM_172677.1,1015-1033).
ctgcggtgacgaaaactgt

SEQ ID NO: 777246 - DNA, 19 bp, Mus musculus
  siRNA target sequence for 9130022A11Rik (NM_172677.1,1052-1070).
cagtggtatgactagcatt

SEQ ID NO: 777247 - DNA, 19 bp, Mus musculus
  siRNA target sequence for 9130022A11Rik (NM_172677.1,1056-1074).
ggtatgactagcattgcaa

SEQ ID NO: 777248 - DNA, 19 bp, Mus musculus
  siRNA target sequence for 9130022A11Rik (NM_172677.1,1066-1084).
gcattgcaaccaataatgt

SEQ ID NO: 777249 - DNA, 19 bp, Mus musculus
  siRNA target sequence for 9130022A11Rik (NM_172677.1,1097-1115).
cagtgcagcacctaaacca

SEQ ID NO: 777250 - DNA, 19 bp, Mus musculus
  siRNA target sequence for 9130022A11Rik (NM_172677.1,1136-1154).
cagaaagcctgcaaaacct

SEQ ID NO: 777251 - DNA, 19 bp, Mus musculus
  siRNA target sequence for 9130022A11Rik (NM_172677.1,1209-1227).
ccacctcctataaaacaca

SEQ ID NO: 777252 - DNA, 19 bp, Mus musculus
  siRNA target sequence for 9130022A11Rik (NM_172677.1,1290-1308).
gttctgcctcctcaaacta

SEQ ID NO: 777253 - DNA, 19 bp, Mus musculus
  siRNA target sequence for 9130022A11Rik (NM_172677.1,1316-1334).
gcagcctcagccattaatt

SEQ ID NO: 777254 - DNA, 19 bp, Mus musculus
  siRNA target sequence for 9130022A11Rik (NM_172677.1,1319-1337).
gcctcagccattaattcaa

SEQ ID NO: 777255 - DNA, 19 bp, Mus musculus
  siRNA target sequence for 9130022A11Rik (NM_172677.1,1452-1470).
ccacagttgcagaatcgtt

SEQ ID NO: 777256 - DNA, 19 bp, Mus musculus
  siRNA target sequence for 9130022A11Rik (NM_172677.1,1652-1670).
gaatggacgtgtgtttata

SEQ ID NO: 777257 - DNA, 19 bp, Mus musculus
  siRNA target sequence for 9130022A11Rik (NM_172677.1,1729-1747).
gtactgagcatggtaataa

SEQ ID NO: 777258 - DNA, 19 bp, Mus musculus
  siRNA target sequence for 9130022A11Rik (NM_172677.1,1779-1797).
gggaaaggcccactctatt

SEQ ID NO: 777259 - DNA, 19 bp, Mus musculus
  siRNA target sequence for 9130022A11Rik (NM_172677.1,1785-1803).
ggcccactctatttactct

SEQ ID NO: 777260 - DNA, 19 bp, Mus musculus
  siRNA target sequence for 9130022A11Rik (NM_172677.1,1833-1851).
ggagtggctgaaatgaagt

SEQ ID NO: 777261 - DNA, 19 bp, Mus musculus
  siRNA target sequence for 9130022A11Rik (NM_172677.1,1924-1942).
ggatctttgtcaaagatgt

SEQ ID NO: 777262 - DNA, 19 bp, Mus musculus
  siRNA target sequence for 9130022A11Rik (NM_172677.1,1938-1956).
gatgttcccaataaccaat

SEQ ID NO: 777263 - DNA, 19 bp, Mus musculus
  siRNA target sequence for 9130022A11Rik (NM_172677.1,1959-1977).
cgacatattcgcttagaaa

SEQ ID NO: 777264 - DNA, 19 bp, Mus musculus
  siRNA target sequence for 9130022A11Rik (NM_172677.1,1968-1986).
cgcttagaaaataatgaca

SEQ ID NO: 777265 - DNA, 19 bp, Mus musculus
  siRNA target sequence for 9130022A11Rik (NM_172677.1,1985-2003).
caacaaaccagtaaccaat

SEQ ID NO: 777266 - DNA, 19 bp, Mus musculus
  siRNA target sequence for 9130022A11Rik (NM_172677.1,1988-2006).
caaaccagtaaccaattca

SEQ ID NO: 777267 - DNA, 19 bp, Mus musculus
  siRNA target sequence for 9130022A11Rik (NM_172677.1,2037-2055).
gcaaagcaagtgcttaaaa

SEQ ID NO: 777268 - DNA, 19 bp, Mus musculus
  siRNA target sequence for 9130022A11Rik (NM_172677.1,2038-2056).
caaagcaagtgcttaaaat

SEQ ID NO: 777269 - DNA, 19 bp, Mus musculus
  siRNA target sequence for 4932438A13Rik (NM_172679.1,72-90).
cattgtccccagtatcact

SEQ ID NO: 777270 - DNA, 19 bp, Mus musculus
  siRNA target sequence for 4932438A13Rik (NM_172679.1,78-96).
ccccagtatcactcaatta

SEQ ID NO: 777271 - DNA, 19 bp, Mus musculus
  siRNA target sequence for 4932438A13Rik (NM_172679.1,80-98).
ccagtatcactcaattaga

SEQ ID NO: 777272 - DNA, 19 bp, Mus musculus
  siRNA target sequence for 4932438A13Rik (NM_172679.1,81-99).
cagtatcactcaattagaa

SEQ ID NO: 777273 - DNA, 19 bp, Mus musculus
  siRNA target sequence for 4932438A13Rik (NM_172679.1,83-101).
gtatcactcaattagaaga

SEQ ID NO: 777274 - DNA, 19 bp, Mus musculus
  siRNA target sequence for 4932438A13Rik (NM_172679.1,91-109).
caattagaagatttcctta

SEQ ID NO: 777275 - DNA, 19 bp, Mus musculus
  siRNA target sequence for 4932438A13Rik (NM_172679.1,115-133).
cacaattccaatgttgttt

SEQ ID NO: 777276 - DNA, 19 bp, Mus musculus
  siRNA target sequence for 4932438A13Rik (NM_172679.1,156-174).
gtcttgtggatggattatt

SEQ ID NO: 777277 - DNA, 19 bp, Mus musculus
  siRNA target sequence for 4932438A13Rik (NM_172679.1,186-204).
ctacaattctcggaatgtt

SEQ ID NO: 777278 - DNA, 19 bp, Mus musculus
  siRNA target sequence for 4932438A13Rik (NM_172679.1,194-212).
ctcggaatgttggtcttat

SEQ ID NO: 777279 - DNA, 19 bp, Mus musculus
  siRNA target sequence for 4932438A13Rik (NM_172679.1,196-214).
cggaatgttggtcttattt

SEQ ID NO: 777280 - DNA, 19 bp, Mus musculus
  siRNA target sequence for 4932438A13Rik (NM_172679.1,220-238).
ctggttcttaacagattgt

SEQ ID NO: 777281 - DNA, 19 bp, Mus musculus
  siRNA target sequence for 4932438A13Rik (NM_172679.1,223-241).
gttcttaacagattgtata

SEQ ID NO: 777282 - DNA, 19 bp, Mus musculus
  siRNA target sequence for 4932438A13Rik (NM_172679.1,247-265).
ggctatatccatattggtt

SEQ ID NO: 777283 - DNA, 19 bp, Mus musculus
  siRNA target sequence for 4932438A13Rik (NM_172679.1,255-273).
ccatattggttctttctct

SEQ ID NO: 777284 - DNA, 19 bp, Mus musculus
  siRNA target sequence for 4932438A13Rik (NM_172679.1,297-315).
catggttcgtgaaatatat

SEQ ID NO: 777285 - DNA, 19 bp, Mus musculus
  siRNA target sequence for 4932438A13Rik (NM_172679.1,325-343).
gaagacatgtctattagga

SEQ ID NO: 777286 - DNA, 19 bp, Mus musculus
  siRNA target sequence for 4932438A13Rik (NM_172679.1,414-432).
ggcagaaaccagattatat

SEQ ID NO: 777287 - DNA, 19 bp, Mus musculus
  siRNA target sequence for 4932438A13Rik (NM_172679.1,416-434).
cagaaaccagattatatat

SEQ ID NO: 777288 - DNA, 19 bp, Mus musculus
  siRNA target sequence for 4932438A13Rik (NM_172679.1,418-436).
gaaaccagattatatatca

SEQ ID NO: 777289 - DNA, 19 bp, Mus musculus
  siRNA target sequence for 4932438A13Rik (NM_172679.1,462-480).
ctacaatcggtctgatctt

SEQ ID NO: 777290 - DNA, 19 bp, Mus musculus
  siRNA target sequence for 4932438A13Rik (NM_172679.1,465-483).
caatcggtctgatctttat

SEQ ID NO: 777291 - DNA, 19 bp, Mus musculus
  siRNA target sequence for 4932438A13Rik (NM_172679.1,505-523).
ggtttggaaccaactataa

SEQ ID NO: 777292 - DNA, 19 bp, Mus musculus
  siRNA target sequence for 4932438A13Rik (NM_172679.1,569-587).
caagaacgcagtccaaaat

SEQ ID NO: 777293 - DNA, 19 bp, Mus musculus
  siRNA target sequence for 4932438A13Rik (NM_172679.1,572-590).
gaacgcagtccaaaattga

SEQ ID NO: 777294 - DNA, 19 bp, Mus musculus
  siRNA target sequence for 4932438A13Rik (NM_172679.1,641-659).
cacttatcccagtcattaa

SEQ ID NO: 777295 - DNA, 19 bp, Mus musculus
  siRNA target sequence for 4932438A13Rik (NM_172679.1,686-704).
cctttgggaatcattatca

SEQ ID NO: 777296 - DNA, 19 bp, Mus musculus
  siRNA target sequence for 4932438A13Rik (NM_172679.1,687-705).
ctttgggaatcattatcaa

SEQ ID NO: 777297 - DNA, 19 bp, Mus musculus
  siRNA target sequence for 4932438A13Rik (NM_172679.1,711-729).
gactctatgcatcaacttt

SEQ ID NO: 777298 - DNA, 19 bp, Mus musculus
  siRNA target sequence for 4932438A13Rik (NM_172679.1,713-731).
ctctatgcatcaactttga

SEQ ID NO: 777299 - DNA, 19 bp, Mus musculus
  siRNA target sequence for 4932438A13Rik (NM_172679.1,726-744).
ctttgatgatgcgttctta

SEQ ID NO: 777300 - DNA, 19 bp, Mus musculus
  siRNA target sequence for 4932438A13Rik (NM_172679.1,733-751).
gatgcgttcttaacgtata

SEQ ID NO: 777301 - DNA, 19 bp, Mus musculus
  siRNA target sequence for 4932438A13Rik (NM_172679.1,736-754).
gcgttcttaacgtatacta

SEQ ID NO: 777302 - DNA, 19 bp, Mus musculus
  siRNA target sequence for 4932438A13Rik (NM_172679.1,738-756).
gttcttaacgtatactaca

SEQ ID NO: 777303 - DNA, 19 bp, Mus musculus
  siRNA target sequence for 4932438A13Rik (NM_172679.1,741-759).
cttaacgtatactacaaaa

SEQ ID NO: 777304 - DNA, 19 bp, Mus musculus
  siRNA target sequence for 4932438A13Rik (NM_172679.1,845-863).
gatatgttggcctacaaaa

SEQ ID NO: 777305 - DNA, 19 bp, Mus musculus
  siRNA target sequence for 4932438A13Rik (NM_172679.1,900-918).
ggtgctgcagtcaaatgat

SEQ ID NO: 777306 - DNA, 19 bp, Mus musculus
  siRNA target sequence for 4932438A13Rik (NM_172679.1,906-924).
gcagtcaaatgatgttgat

SEQ ID NO: 777307 - DNA, 19 bp, Mus musculus
  siRNA target sequence for 4932438A13Rik (NM_172679.1,916-934).
gatgttgatctctactatt

SEQ ID NO: 777308 - DNA, 19 bp, Mus musculus
  siRNA target sequence for 4932438A13Rik (NM_172679.1,995-1013).
gcagtgaagactgtaaatt

SEQ ID NO: 777309 - DNA, 19 bp, Mus musculus
  siRNA target sequence for 4932438A13Rik (NM_172679.1,996-1014).
cagtgaagactgtaaatta

SEQ ID NO: 777310 - DNA, 19 bp, Mus musculus
  siRNA target sequence for 4932438A13Rik (NM_172679.1,998-1016).
gtgaagactgtaaattaca

SEQ ID NO: 777311 - DNA, 19 bp, Mus musculus
  siRNA target sequence for 4932438A13Rik (NM_172679.1,1054-1072).
ggtaaagggacagacttta

SEQ ID NO: 777312 - DNA, 19 bp, Mus musculus
  siRNA target sequence for 4932438A13Rik (NM_172679.1,1090-1108).
gacaggcagagagattgtt

SEQ ID NO: 777313 - DNA, 19 bp, Mus musculus
  siRNA target sequence for 4932438A13Rik (NM_172679.1,1127-1145).
cacctgattatcaagttct

SEQ ID NO: 777314 - DNA, 19 bp, Mus musculus
  siRNA target sequence for 4932438A13Rik (NM_172679.1,1198-1216).
gaactccgaatgaatatta

SEQ ID NO: 777315 - DNA, 19 bp, Mus musculus
  siRNA target sequence for 4932438A13Rik (NM_172679.1,1201-1219).
ctccgaatgaatattatta

SEQ ID NO: 777316 - DNA, 19 bp, Mus musculus
  siRNA target sequence for 4932438A13Rik (NM_172679.1,1234-1252).
gacttgctgtttaccaaaa

SEQ ID NO: 777317 - DNA, 19 bp, Mus musculus
  siRNA target sequence for 4932438A13Rik (NM_172679.1,1282-1300).
gtaggggctggctcatatt

SEQ ID NO: 777318 - DNA, 19 bp, Mus musculus
  siRNA target sequence for 4932438A13Rik (NM_172679.1,1286-1304).
gggctggctcatatttaga

SEQ ID NO: 777319 - DNA, 19 bp, Mus musculus
  siRNA target sequence for 4932438A13Rik (NM_172679.1,1287-1305).
ggctggctcatatttagaa

SEQ ID NO: 777320 - DNA, 19 bp, Mus musculus
  siRNA target sequence for 4932438A13Rik (NM_172679.1,1288-1306).
gctggctcatatttagaaa

SEQ ID NO: 777321 - DNA, 19 bp, Mus musculus
  siRNA target sequence for 4932438A13Rik (NM_172679.1,1316-1334).
cgatgacagttgacgaaaa

SEQ ID NO: 777322 - DNA, 19 bp, Mus musculus
  siRNA target sequence for 4932438A13Rik (NM_172679.1,1320-1338).
gacagttgacgaaaatggt

SEQ ID NO: 777323 - DNA, 19 bp, Mus musculus
  siRNA target sequence for 4932438A13Rik (NM_172679.1,1322-1340).
cagttgacgaaaatggtta

SEQ ID NO: 777324 - DNA, 19 bp, Mus musculus
  siRNA target sequence for 4932438A13Rik (NM_172679.1,1336-1354).
ggttatacccctgctatta

SEQ ID NO: 777325 - DNA, 19 bp, Mus musculus
  siRNA target sequence for 4932438A13Rik (NM_172679.1,1337-1355).
gttatacccctgctattaa

SEQ ID NO: 777326 - DNA, 19 bp, Mus musculus
  siRNA target sequence for 4932438A13Rik (NM_172679.1,1378-1396).
gctactaccagtatgcaat

SEQ ID NO: 777327 - DNA, 19 bp, Mus musculus
  siRNA target sequence for 4932438A13Rik (NM_172679.1,1379-1397).
ctactaccagtatgcaata

SEQ ID NO: 777328 - DNA, 19 bp, Mus musculus
  siRNA target sequence for 4932438A13Rik (NM_172679.1,1392-1410).
gcaatatcggaccctttta

SEQ ID NO: 777329 - DNA, 19 bp, Mus musculus
  siRNA target sequence for 4932438A13Rik (NM_172679.1,1469-1487).
cacagacatggcaatgtga

SEQ ID NO: 777330 - DNA, 19 bp, Mus musculus
  siRNA target sequence for 4932438A13Rik (NM_172679.1,1536-1554).
cttctttacagatctaatt

SEQ ID NO: 777331 - DNA, 19 bp, Mus musculus
  siRNA target sequence for 4932438A13Rik (NM_172679.1,1555-1573).
caagactggtctagtgata

SEQ ID NO: 777332 - DNA, 19 bp, Mus musculus
  siRNA target sequence for 4932438A13Rik (NM_172679.1,1560-1578).
ctggtctagtgataatgct

SEQ ID NO: 777333 - DNA, 19 bp, Mus musculus
  siRNA target sequence for 4932438A13Rik (NM_172679.1,1576-1594).
gctccagacattttctcat

SEQ ID NO: 777334 - DNA, 19 bp, Mus musculus
  siRNA target sequence for 4932438A13Rik (NM_172679.1,1577-1595).
ctccagacattttctcatt

SEQ ID NO: 777335 - DNA, 19 bp, Mus musculus
  siRNA target sequence for 4932438A13Rik (NM_172679.1,1644-1662).
gatttgggctgccaatcaa

SEQ ID NO: 777336 - DNA, 19 bp, Mus musculus
  siRNA target sequence for 4932438A13Rik (NM_172679.1,1649-1667).
gggctgccaatcaacataa

SEQ ID NO: 777337 - DNA, 19 bp, Mus musculus
  siRNA target sequence for 4932438A13Rik (NM_172679.1,1651-1669).
gctgccaatcaacataact

SEQ ID NO: 777338 - DNA, 19 bp, Mus musculus
  siRNA target sequence for 4932438A13Rik (NM_172679.1,1671-1689).
gatcgactgttccactaaa

SEQ ID NO: 777339 - DNA, 19 bp, Mus musculus
  siRNA target sequence for 4932438A13Rik (NM_172679.1,1674-1692).
cgactgttccactaaacaa

SEQ ID NO: 777340 - DNA, 19 bp, Mus musculus
  siRNA target sequence for 4932438A13Rik (NM_172679.1,1768-1786).
ccagctacgtgcaatacca

SEQ ID NO: 777341 - DNA, 19 bp, Mus musculus
  siRNA target sequence for 4932438A13Rik (NM_172679.1,1832-1850).
cagattgccaccctagtaa

SEQ ID NO: 777342 - DNA, 19 bp, Mus musculus
  siRNA target sequence for 4932438A13Rik (NM_172679.1,1842-1860).
ccctagtaaatattcatta

SEQ ID NO: 777343 - DNA, 19 bp, Mus musculus
  siRNA target sequence for 4932438A13Rik (NM_172679.1,1896-1914).
ggttcctgaaactggtatt

SEQ ID NO: 777344 - DNA, 19 bp, Mus musculus
  siRNA target sequence for 4932438A13Rik (NM_172679.1,1951-1969).
ccaaagtggcgcaacgtta

SEQ ID NO: 777345 - DNA, 19 bp, Mus musculus
  siRNA target sequence for 4932438A13Rik (NM_172679.1,1961-1979).
gcaacgttactcaggaaaa

SEQ ID NO: 777346 - DNA, 19 bp, Mus musculus
  siRNA target sequence for 4932438A13Rik (NM_172679.1,2014-2032).
gtcatgctcaccattgatt

SEQ ID NO: 777347 - DNA, 19 bp, Mus musculus
  siRNA target sequence for 4932438A13Rik (NM_172679.1,2037-2055).
ctggcatccaatttatcca

SEQ ID NO: 777348 - DNA, 19 bp, Mus musculus
  siRNA target sequence for 4932438A13Rik (NM_172679.1,2101-2119).
gaaacaatgctatctgtat

SEQ ID NO: 777349 - DNA, 19 bp, Mus musculus
  siRNA target sequence for 4932438A13Rik (NM_172679.1,2199-2217).
gcttccacctgacaaactt

SEQ ID NO: 777350 - DNA, 19 bp, Mus musculus
  siRNA target sequence for 4932438A13Rik (NM_172679.1,2235-2253).
ctccccagactctcaaata

SEQ ID NO: 777351 - DNA, 19 bp, Mus musculus
  siRNA target sequence for 4932438A13Rik (NM_172679.1,2259-2277).
ctatggacctctgctaaat

SEQ ID NO: 777352 - DNA, 19 bp, Mus musculus
  siRNA target sequence for 4932438A13Rik (NM_172679.1,2309-2327).
gagaagatgacatgtacat

SEQ ID NO: 777353 - DNA, 19 bp, Mus musculus
  siRNA target sequence for 4932438A13Rik (NM_172679.1,2387-2405).
ggtggaccgctgttggaat

SEQ ID NO: 777354 - DNA, 19 bp, Mus musculus
  siRNA target sequence for 4932438A13Rik (NM_172679.1,2469-2487).
ctgggatatcactgtactt

SEQ ID NO: 777355 - DNA, 19 bp, Mus musculus
  siRNA target sequence for 4932438A13Rik (NM_172679.1,2471-2489).
gggatatcactgtacttgt

SEQ ID NO: 777356 - DNA, 19 bp, Mus musculus
  siRNA target sequence for 4932438A13Rik (NM_172679.1,2565-2583).
ggagagactatgttttgaa

SEQ ID NO: 777357 - DNA, 19 bp, Mus musculus
  siRNA target sequence for 4932438A13Rik (NM_172679.1,2638-2656).
gtgtttgtcagtgataatt

SEQ ID NO: 777358 - DNA, 19 bp, Mus musculus
  siRNA target sequence for 4932438A13Rik (NM_172679.1,2640-2658).
gtttgtcagtgataattat

SEQ ID NO: 777359 - DNA, 19 bp, Mus musculus
  siRNA target sequence for 4932438A13Rik (NM_172679.1,2661-2679).
ggtaatgtcaaatgacata

SEQ ID NO: 777360 - DNA, 19 bp, Mus musculus
  siRNA target sequence for D630029K19Rik (NM_172680.2,152-170).
gggtctgcttcatttaagt

SEQ ID NO: 777361 - DNA, 19 bp, Mus musculus
  siRNA target sequence for D630029K19Rik (NM_172680.2,153-171).
ggtctgcttcatttaagta

SEQ ID NO: 777362 - DNA, 19 bp, Mus musculus
  siRNA target sequence for D630029K19Rik (NM_172680.2,158-176).
gcttcatttaagtacgata

SEQ ID NO: 777363 - DNA, 19 bp, Mus musculus
  siRNA target sequence for D630029K19Rik (NM_172680.2,159-177).
cttcatttaagtacgatat

SEQ ID NO: 777364 - DNA, 19 bp, Mus musculus
  siRNA target sequence for D630029K19Rik (NM_172680.2,214-232).
ctggtataggagaagtatt

SEQ ID NO: 777365 - DNA, 19 bp, Mus musculus
  siRNA target sequence for D630029K19Rik (NM_172680.2,320-338).
cacctttctcccgaatcat

SEQ ID NO: 777366 - DNA, 19 bp, Mus musculus
  siRNA target sequence for D630029K19Rik (NM_172680.2,322-340).
cctttctcccgaatcatca

SEQ ID NO: 777367 - DNA, 19 bp, Mus musculus
  siRNA target sequence for D630029K19Rik (NM_172680.2,323-341).
ctttctcccgaatcatcaa

SEQ ID NO: 777368 - DNA, 19 bp, Mus musculus
  siRNA target sequence for D630029K19Rik (NM_172680.2,401-419).
ccgcagtcacccaatgtgt

SEQ ID NO: 777369 - DNA, 19 bp, Mus musculus
  siRNA target sequence for D630029K19Rik (NM_172680.2,402-420).
cgcagtcacccaatgtgtt

SEQ ID NO: 777370 - DNA, 19 bp, Mus musculus
  siRNA target sequence for D630029K19Rik (NM_172680.2,495-513).
gatcaaggagtgtttcaga

SEQ ID NO: 777371 - DNA, 19 bp, Mus musculus
  siRNA target sequence for D630029K19Rik (NM_172680.2,521-539).
gtccctcgaagagattcaa

SEQ ID NO: 777372 - DNA, 19 bp, Mus musculus
  siRNA target sequence for D630029K19Rik (NM_172680.2,523-541).
ccctcgaagagattcaatt

SEQ ID NO: 777373 - DNA, 19 bp, Mus musculus
  siRNA target sequence for D630029K19Rik (NM_172680.2,524-542).
cctcgaagagattcaattt

SEQ ID NO: 777374 - DNA, 19 bp, Mus musculus
  siRNA target sequence for D630029K19Rik (NM_172680.2,549-567).
catcaactcctgttaacaa

SEQ ID NO: 777375 - DNA, 19 bp, Mus musculus
  siRNA target sequence for D630029K19Rik (NM_172680.2,557-575).
cctgttaacaaatcaaaca

SEQ ID NO: 777376 - DNA, 19 bp, Mus musculus
  siRNA target sequence for D630029K19Rik (NM_172680.2,600-618).
cgtgggagacacttgttgt

SEQ ID NO: 777377 - DNA, 19 bp, Mus musculus
  siRNA target sequence for D630029K19Rik (NM_172680.2,603-621).
gggagacacttgttgtgtt

SEQ ID NO: 777378 - DNA, 19 bp, Mus musculus
  siRNA target sequence for D630029K19Rik (NM_172680.2,617-635).
gtgttcgctatcaacctta

SEQ ID NO: 777379 - DNA, 19 bp, Mus musculus
  siRNA target sequence for D630029K19Rik (NM_172680.2,687-705).
ggacaactagtggtttgaa

SEQ ID NO: 777380 - DNA, 19 bp, Mus musculus
  siRNA target sequence for D630029K19Rik (NM_172680.2,688-706).
gacaactagtggtttgaaa

SEQ ID NO: 777381 - DNA, 19 bp, Mus musculus
  siRNA target sequence for D630029K19Rik (NM_172680.2,733-751).
caaccgtgatcgagagatt

SEQ ID NO: 777382 - DNA, 19 bp, Mus musculus
  siRNA target sequence for D630029K19Rik (NM_172680.2,769-787).
gggaaggtcacagttagat

SEQ ID NO: 777383 - DNA, 19 bp, Mus musculus
  siRNA target sequence for D630029K19Rik (NM_172680.2,770-788).
ggaaggtcacagttagatt

SEQ ID NO: 777384 - DNA, 19 bp, Mus musculus
  siRNA target sequence for D630029K19Rik (NM_172680.2,774-792).
ggtcacagttagattccaa

SEQ ID NO: 777385 - DNA, 19 bp, Mus musculus
  siRNA target sequence for D630029K19Rik (NM_172680.2,807-825).
gtgggaccattgatgtcaa

SEQ ID NO: 777386 - DNA, 19 bp, Mus musculus
  siRNA target sequence for D630029K19Rik (NM_172680.2,835-853).
gatggtcgctcatatttct

SEQ ID NO: 777387 - DNA, 19 bp, Mus musculus
  siRNA target sequence for D630029K19Rik (NM_172680.2,906-924).
ctgagtctcgagttgatta

SEQ ID NO: 777388 - DNA, 19 bp, Mus musculus
  siRNA target sequence for D630029K19Rik (NM_172680.2,908-926).
gagtctcgagttgattata

SEQ ID NO: 777389 - DNA, 19 bp, Mus musculus
  siRNA target sequence for D630029K19Rik (NM_172680.2,941-959).
ctcatgggtatcttcagta

SEQ ID NO: 777390 - DNA, 19 bp, Mus musculus
  siRNA target sequence for D630029K19Rik (NM_172680.2,946-964).
gggtatcttcagtaatgct

SEQ ID NO: 777391 - DNA, 19 bp, Mus musculus
  siRNA target sequence for D630029K19Rik (NM_172680.2,1013-1031).
gattcaagcatgactgata

SEQ ID NO: 777392 - DNA, 19 bp, Mus musculus
  siRNA target sequence for D630029K19Rik (NM_172680.2,1055-1073).
gatttgaaatgggatattt

SEQ ID NO: 777393 - DNA, 19 bp, Mus musculus
  siRNA target sequence for D630029K19Rik (NM_172680.2,1084-1102).
gatatcaagatcaactaca

SEQ ID NO: 777394 - DNA, 19 bp, Mus musculus
  siRNA target sequence for D630029K19Rik (NM_172680.2,1098-1116).
ctacaccagacttgataaa

SEQ ID NO: 777395 - DNA, 19 bp, Mus musculus
  siRNA target sequence for D630029K19Rik (NM_172680.2,1101-1119).
caccagacttgataaaaat

SEQ ID NO: 777396 - DNA, 19 bp, Mus musculus
  siRNA target sequence for D630029K19Rik (NM_172680.2,1129-1147).
gctccaagagtttttcaca

SEQ ID NO: 777397 - DNA, 19 bp, Mus musculus
  siRNA target sequence for D630029K19Rik (NM_172680.2,1138-1156).
gtttttcacacaacagttt

SEQ ID NO: 777398 - DNA, 19 bp, Mus musculus
  siRNA target sequence for D630029K19Rik (NM_172680.2,1144-1162).
cacacaacagtttgatact

SEQ ID NO: 777399 - DNA, 19 bp, Mus musculus
  siRNA target sequence for D630029K19Rik (NM_172680.2,1183-1201).
ctggggacctgttccttat

SEQ ID NO: 777400 - DNA, 19 bp, Mus musculus
  siRNA target sequence for D630029K19Rik (NM_172680.2,1185-1203).
ggggacctgttccttatct

SEQ ID NO: 777401 - DNA, 19 bp, Mus musculus
  siRNA target sequence for D630029K19Rik (NM_172680.2,1307-1325).
ggatgccacatatccttat

SEQ ID NO: 777402 - DNA, 19 bp, Mus musculus
  siRNA target sequence for D630029K19Rik (NM_172680.2,1308-1326).
gatgccacatatccttatt

SEQ ID NO: 777403 - DNA, 19 bp, Mus musculus
  siRNA target sequence for D630029K19Rik (NM_172680.2,1311-1329).
gccacatatccttatttca

SEQ ID NO: 777404 - DNA, 19 bp, Mus musculus
  siRNA target sequence for D630029K19Rik (NM_172680.2,1320-1338).
ccttatttcaggttccatt

SEQ ID NO: 777405 - DNA, 19 bp, Mus musculus
  siRNA target sequence for D630029K19Rik (NM_172680.2,1321-1339).
cttatttcaggttccatta

SEQ ID NO: 777406 - DNA, 19 bp, Mus musculus
  siRNA target sequence for D630029K19Rik (NM_172680.2,1330-1348).
ggttccattaccagaagat

SEQ ID NO: 777407 - DNA, 19 bp, Mus musculus
  siRNA target sequence for D630029K19Rik (NM_172680.2,1368-1386).
ccatgagcttgcatggaaa

SEQ ID NO: 777408 - DNA, 19 bp, Mus musculus
  siRNA target sequence for D630029K19Rik (NM_172680.2,1415-1433).
ccaaatttccgttcaaaat

SEQ ID NO: 777409 - DNA, 19 bp, Mus musculus
  siRNA target sequence for D630029K19Rik (NM_172680.2,1476-1494).
ggactgaagctcaaaaaat

SEQ ID NO: 777410 - DNA, 19 bp, Mus musculus
  siRNA target sequence for D630029K19Rik (NM_172680.2,1509-1527).
ctagtgaccactctacata

SEQ ID NO: 777411 - DNA, 19 bp, Mus musculus
  siRNA target sequence for D630029K19Rik (NM_172680.2,1524-1542).
catacattgttcaaacact

SEQ ID NO: 777412 - DNA, 19 bp, Mus musculus
  siRNA target sequence for D630029K19Rik (NM_172680.2,1550-1568).
catctgggtcataatacca

SEQ ID NO: 777413 - DNA, 19 bp, Mus musculus
  siRNA target sequence for D630029K19Rik (NM_172680.2,1556-1574).
ggtcataataccatggtta

SEQ ID NO: 777414 - DNA, 19 bp, Mus musculus
  siRNA target sequence for D630029K19Rik (NM_172680.2,1626-1644).
caaggcgtcgccacgaaaa

SEQ ID NO: 777415 - DNA, 19 bp, Mus musculus
  siRNA target sequence for D630029K19Rik (NM_172680.2,1652-1670).
catggagttgccagtgtaa

SEQ ID NO: 777416 - DNA, 19 bp, Mus musculus
  siRNA target sequence for D630029K19Rik (NM_172680.2,1667-1685).
gtaaaagaatggttcaact

SEQ ID NO: 777417 - DNA, 19 bp, Mus musculus
  siRNA target sequence for D630029K19Rik (NM_172680.2,1673-1691).
gaatggttcaactatgtca

SEQ ID NO: 777418 - DNA, 19 bp, Mus musculus
  siRNA target sequence for D630029K19Rik (NM_172680.2,1711-1729).
gctaaacttacttcgtaat

SEQ ID NO: 777419 - DNA, 19 bp, Mus musculus
  siRNA target sequence for D630029K19Rik (NM_172680.2,1717-1735).
cttacttcgtaatgttgat

SEQ ID NO: 777420 - DNA, 19 bp, Mus musculus
  siRNA target sequence for D630029K19Rik (NM_172680.2,1725-1743).
gtaatgttgatgccaataa

SEQ ID NO: 777421 - DNA, 19 bp, Mus musculus
  siRNA target sequence for D630029K19Rik (NM_172680.2,1761-1779).
ctgtaaagaattctagttt

SEQ ID NO: 777422 - DNA, 19 bp, Mus musculus
  siRNA target sequence for D630029K19Rik (NM_172680.2,1825-1843).
gaccatcttcgcattacca

SEQ ID NO: 777423 - DNA, 19 bp, Mus musculus
  siRNA target sequence for D630029K19Rik (NM_172680.2,1845-1863).
ggatgcagctagaatttaa

SEQ ID NO: 777424 - DNA, 19 bp, Mus musculus
  siRNA target sequence for D630029K19Rik (NM_172680.2,1884-1902).
cacaggagccttcattaca

SEQ ID NO: 777425 - DNA, 19 bp, Mus musculus
  siRNA target sequence for D630029K19Rik (NM_172680.2,1888-1906).
ggagccttcattacaagat

SEQ ID NO: 777426 - DNA, 19 bp, Mus musculus
  siRNA target sequence for D630029K19Rik (NM_172680.2,1980-1998).
ccgagctcatcatgtttct

SEQ ID NO: 777427 - DNA, 19 bp, Mus musculus
  siRNA target sequence for D630029K19Rik (NM_172680.2,2006-2024).
ctggtgtcagcatatctca

SEQ ID NO: 777428 - DNA, 19 bp, Mus musculus
  siRNA target sequence for D630029K19Rik (NM_172680.2,2048-2066).
ccacctcggattttatcca

SEQ ID NO: 777429 - DNA, 19 bp, Mus musculus
  siRNA target sequence for D630029K19Rik (NM_172680.2,2090-2108).
cttattatacacgatgata

SEQ ID NO: 777430 - DNA, 19 bp, Mus musculus
  siRNA target sequence for D630029K19Rik (NM_172680.2,2129-2147).
gaagatagcatcacttaca

SEQ ID NO: 777431 - DNA, 19 bp, Mus musculus
  siRNA target sequence for D630029K19Rik (NM_172680.2,2153-2171).
gtggactggcgagacttta

SEQ ID NO: 777432 - DNA, 19 bp, Mus musculus
  siRNA target sequence for D630029K19Rik (NM_172680.2,2156-2174).
gactggcgagactttatgt

SEQ ID NO: 777433 - DNA, 19 bp, Mus musculus
  siRNA target sequence for D630029K19Rik (NM_172680.2,2189-2207).
ctggagcctactcttagat

SEQ ID NO: 777434 - DNA, 19 bp, Mus musculus
  siRNA target sequence for D630029K19Rik (NM_172680.2,2191-2209).
ggagcctactcttagatta

SEQ ID NO: 777435 - DNA, 19 bp, Mus musculus
  siRNA target sequence for D630029K19Rik (NM_172680.2,2192-2210).
gagcctactcttagattaa

SEQ ID NO: 777436 - DNA, 19 bp, Mus musculus
  siRNA target sequence for D630029K19Rik (NM_172680.2,2194-2212).
gcctactcttagattaatt

SEQ ID NO: 777437 - DNA, 19 bp, Mus musculus
  siRNA target sequence for D630029K19Rik (NM_172680.2,2195-2213).
cctactcttagattaattt

SEQ ID NO: 777438 - DNA, 19 bp, Mus musculus
  siRNA target sequence for D930015E06Rik (NM_172681.2,491-509).
gcatccttcagagttattt

SEQ ID NO: 777439 - DNA, 19 bp, Mus musculus
  siRNA target sequence for D930015E06Rik (NM_172681.2,529-547).
gagcatcgaaagctcttta

SEQ ID NO: 777440 - DNA, 19 bp, Mus musculus
  siRNA target sequence for D930015E06Rik (NM_172681.2,570-588).
gagtcttctcctatcatgt

SEQ ID NO: 777441 - DNA, 19 bp, Mus musculus
  siRNA target sequence for D930015E06Rik (NM_172681.2,637-655).
gctgccgaacgcatacttt

SEQ ID NO: 777442 - DNA, 19 bp, Mus musculus
  siRNA target sequence for D930015E06Rik (NM_172681.2,695-713).
caggcagagaccactaata

SEQ ID NO: 777443 - DNA, 19 bp, Mus musculus
  siRNA target sequence for D930015E06Rik (NM_172681.2,792-810).
ctgatgatgcgctacactt

SEQ ID NO: 777444 - DNA, 19 bp, Mus musculus
  siRNA target sequence for D930015E06Rik (NM_172681.2,801-819).
cgctacacttggagatgaa

SEQ ID NO: 777445 - DNA, 19 bp, Mus musculus
  siRNA target sequence for D930015E06Rik (NM_172681.2,867-885).
ctcaagccctgctagatca

SEQ ID NO: 777446 - DNA, 19 bp, Mus musculus
  siRNA target sequence for D930015E06Rik (NM_172681.2,881-899).
gatcacctctctattgtct

SEQ ID NO: 777447 - DNA, 19 bp, Mus musculus
  siRNA target sequence for D930015E06Rik (NM_172681.2,886-904).
cctctctattgtctatgta

SEQ ID NO: 777448 - DNA, 19 bp, Mus musculus
  siRNA target sequence for D930015E06Rik (NM_172681.2,982-1000).
gatacaggatatacatcat

SEQ ID NO: 777449 - DNA, 19 bp, Mus musculus
  siRNA target sequence for D930015E06Rik (NM_172681.2,995-1013).
catcatttctcacagaaaa

SEQ ID NO: 777450 - DNA, 19 bp, Mus musculus
  siRNA target sequence for D930015E06Rik (NM_172681.2,1037-1055).
ccagtactgctctctactt

SEQ ID NO: 777451 - DNA, 19 bp, Mus musculus
  siRNA target sequence for D930015E06Rik (NM_172681.2,1050-1068).
ctacttccacgacaaactt

SEQ ID NO: 777452 - DNA, 19 bp, Mus musculus
  siRNA target sequence for D930015E06Rik (NM_172681.2,1078-1096).
cgcctcgtttacttgcaaa

SEQ ID NO: 777453 - DNA, 19 bp, Mus musculus
  siRNA target sequence for D930015E06Rik (NM_172681.2,1179-1197).
ctgtggtgcaggggtattt

SEQ ID NO: 777454 - DNA, 19 bp, Mus musculus
  siRNA target sequence for D930015E06Rik (NM_172681.2,1183-1201).
ggtgcaggggtatttcaga

SEQ ID NO: 777455 - DNA, 19 bp, Mus musculus
  siRNA target sequence for D930015E06Rik (NM_172681.2,1184-1202).
gtgcaggggtatttcagaa

SEQ ID NO: 777456 - DNA, 19 bp, Mus musculus
  siRNA target sequence for D930015E06Rik (NM_172681.2,1212-1230).
ctacagcccagtttcacat

SEQ ID NO: 777457 - DNA, 19 bp, Mus musculus
  siRNA target sequence for D930015E06Rik (NM_172681.2,1253-1271).
ggagtctggtcaatatggt

SEQ ID NO: 777458 - DNA, 19 bp, Mus musculus
  siRNA target sequence for D930015E06Rik (NM_172681.2,1254-1272).
gagtctggtcaatatggta

SEQ ID NO: 777459 - DNA, 19 bp, Mus musculus
  siRNA target sequence for D930015E06Rik (NM_172681.2,1269-1287).
ggtaccgcagccattttga

SEQ ID NO: 777460 - DNA, 19 bp, Mus musculus
  siRNA target sequence for D930015E06Rik (NM_172681.2,1324-1342).
ggagaccaagcacatttta

SEQ ID NO: 777461 - DNA, 19 bp, Mus musculus
  siRNA target sequence for D930015E06Rik (NM_172681.2,1330-1348).
caagcacattttaaaggtt

SEQ ID NO: 777462 - DNA, 19 bp, Mus musculus
  siRNA target sequence for D930015E06Rik (NM_172681.2,1357-1375).
ccgaggccctttatttcta

SEQ ID NO: 777463 - DNA, 19 bp, Mus musculus
  siRNA target sequence for D930015E06Rik (NM_172681.2,1376-1394).
cccccaggctgttggaata

SEQ ID NO: 777464 - DNA, 19 bp, Mus musculus
  siRNA target sequence for D930015E06Rik (NM_172681.2,1377-1395).
ccccaggctgttggaatat

SEQ ID NO: 777465 - DNA, 19 bp, Mus musculus
  siRNA target sequence for D930015E06Rik (NM_172681.2,1380-1398).
caggctgttggaatatatt

SEQ ID NO: 777466 - DNA, 19 bp, Mus musculus
  siRNA target sequence for D930015E06Rik (NM_172681.2,1413-1431).
ctgttaaaggcattgtctt

SEQ ID NO: 777467 - DNA, 19 bp, Mus musculus
  siRNA target sequence for D930015E06Rik (NM_172681.2,1435-1453).
cctgttcaccaatgtattt

SEQ ID NO: 777468 - DNA, 19 bp, Mus musculus
  siRNA target sequence for D930015E06Rik (NM_172681.2,1467-1485).
caggtgccatttttgcaat

SEQ ID NO: 777469 - DNA, 19 bp, Mus musculus
  siRNA target sequence for D930015E06Rik (NM_172681.2,1481-1499).
gcaatacctctgcagattt

SEQ ID NO: 777470 - DNA, 19 bp, Mus musculus
  siRNA target sequence for D930015E06Rik (NM_172681.2,1551-1569).
gtggcatgcattatttcat

SEQ ID NO: 777471 - DNA, 19 bp, Mus musculus
  siRNA target sequence for D930015E06Rik (NM_172681.2,1576-1594).
gtcaaaaacagaaaatcct

SEQ ID NO: 777472 - DNA, 19 bp, Mus musculus
  siRNA target sequence for D930015E06Rik (NM_172681.2,1630-1648).
ctgggacatggattctgaa

SEQ ID NO: 777473 - DNA, 19 bp, Mus musculus
  siRNA target sequence for D930015E06Rik (NM_172681.2,1639-1657).
ggattctgaacttgcaaat

SEQ ID NO: 777474 - DNA, 19 bp, Mus musculus
  siRNA target sequence for D930015E06Rik (NM_172681.2,1652-1670).
gcaaataagctgtatgaaa

SEQ ID NO: 777475 - DNA, 19 bp, Mus musculus
  siRNA target sequence for D930015E06Rik (NM_172681.2,1723-1741).
gtctcagtttgcatttaca

SEQ ID NO: 777476 - DNA, 19 bp, Mus musculus
  siRNA target sequence for D930015E06Rik (NM_172681.2,1754-1772).
gagacagagccgtttgtct

SEQ ID NO: 777477 - DNA, 19 bp, Mus musculus
  siRNA target sequence for D930015E06Rik (NM_172681.2,1799-1817).
cccaaccttgtgttgaact

SEQ ID NO: 777478 - DNA, 19 bp, Mus musculus
  siRNA target sequence for D930015E06Rik (NM_172681.2,1800-1818).
ccaaccttgtgttgaactt

SEQ ID NO: 777479 - DNA, 19 bp, Mus musculus
  siRNA target sequence for D930015E06Rik (NM_172681.2,1836-1854).
ggaacagtgcggtgaagta

SEQ ID NO: 777480 - DNA, 19 bp, Mus musculus
  siRNA target sequence for D930015E06Rik (NM_172681.2,1840-1858).
cagtgcggtgaagtacttt

SEQ ID NO: 777481 - DNA, 19 bp, Mus musculus
  siRNA target sequence for D930015E06Rik (NM_172681.2,1842-1860).
gtgcggtgaagtactttgt

SEQ ID NO: 777482 - DNA, 19 bp, Mus musculus
  siRNA target sequence for D930015E06Rik (NM_172681.2,1937-1955).
gtgcgcctgctccacaaat

SEQ ID NO: 777483 - DNA, 19 bp, Mus musculus
  siRNA target sequence for D930015E06Rik (NM_172681.2,1940-1958).
cgcctgctccacaaatggt

SEQ ID NO: 777484 - DNA, 19 bp, Mus musculus
  siRNA target sequence for D930015E06Rik (NM_172681.2,1965-1983).
cagatatgcagatggttaa

SEQ ID NO: 777485 - DNA, 19 bp, Mus musculus
  siRNA target sequence for D930015E06Rik (NM_172681.2,2050-2068).
cagtttgggagctcttcat

SEQ ID NO: 777486 - DNA, 19 bp, Mus musculus
  siRNA target sequence for D930015E06Rik (NM_172681.2,2150-2168).
ctgatcaggaataacttga

SEQ ID NO: 777487 - DNA, 19 bp, Mus musculus
  siRNA target sequence for D930015E06Rik (NM_172681.2,2205-2223).
cacaagagctcttgaaagt

SEQ ID NO: 777488 - DNA, 19 bp, Mus musculus
  siRNA target sequence for D930015E06Rik (NM_172681.2,2218-2236).
gaaagtgggaggaagactt

SEQ ID NO: 777489 - DNA, 19 bp, Mus musculus
  siRNA target sequence for D930015E06Rik (NM_172681.2,2250-2268).
gctctctccgatttaaggt

SEQ ID NO: 777490 - DNA, 19 bp, Mus musculus
  siRNA target sequence for D930015E06Rik (NM_172681.2,2277-2295).
ccaccctgatggattgtca

SEQ ID NO: 777491 - DNA, 19 bp, Mus musculus
  siRNA target sequence for D930015E06Rik (NM_172681.2,2361-2379).
gacctcttcccataactgt

SEQ ID NO: 777492 - DNA, 19 bp, Mus musculus
  siRNA target sequence for D930015E06Rik (NM_172681.2,2380-2398).
gacatccttgaaaatcaat

SEQ ID NO: 777493 - DNA, 19 bp, Mus musculus
  siRNA target sequence for D930015E06Rik (NM_172681.2,2485-2503).
cgtgtttactccagacttt

SEQ ID NO: 777494 - DNA, 19 bp, Mus musculus
  siRNA target sequence for D930015E06Rik (NM_172681.2,2561-2579).
cacttcacactcaatgtga

SEQ ID NO: 777495 - DNA, 19 bp, Mus musculus
  siRNA target sequence for D930015E06Rik (NM_172681.2,2650-2668).
gaggctcactgtcttcttt

SEQ ID NO: 777496 - DNA, 19 bp, Mus musculus
  siRNA target sequence for D930015E06Rik (NM_172681.2,2681-2699).
ctgctgggtgtgattctaa

SEQ ID NO: 777497 - DNA, 19 bp, Mus musculus
  siRNA target sequence for D930015E06Rik (NM_172681.2,2683-2701).
gctgggtgtgattctaata

SEQ ID NO: 777498 - DNA, 19 bp, Mus musculus
  siRNA target sequence for D930015E06Rik (NM_172681.2,2728-2746).
gatggaattcatgaaaaca

SEQ ID NO: 777499 - DNA, 19 bp, Mus musculus
  siRNA target sequence for D930015E06Rik (NM_172681.2,2787-2805).
gtgatccagtggctatgat

SEQ ID NO: 777500 - DNA, 19 bp, Mus musculus
  siRNA target sequence for D930015E06Rik (NM_172681.2,2966-2984).
cataaatgctccttctact

SEQ ID NO: 777501 - DNA, 19 bp, Mus musculus
  siRNA target sequence for D930015E06Rik (NM_172681.2,3118-3136).
ctgggtcagcctcagatat

SEQ ID NO: 777502 - DNA, 19 bp, Mus musculus
  siRNA target sequence for D930015E06Rik (NM_172681.2,3174-3192).
cccttcccaaaaatgtact

SEQ ID NO: 777503 - DNA, 19 bp, Mus musculus
  siRNA target sequence for D930015E06Rik (NM_172681.2,3220-3238).
cacagttgtcactaacact

SEQ ID NO: 777504 - DNA, 19 bp, Mus musculus
  siRNA target sequence for D930015E06Rik (NM_172681.2,3237-3255).
ctccttcagaatgtagtat

SEQ ID NO: 777505 - DNA, 19 bp, Mus musculus
  siRNA target sequence for D930015E06Rik (NM_172681.2,3260-3278).
gagggagtacacacatata

SEQ ID NO: 777506 - DNA, 19 bp, Mus musculus
  siRNA target sequence for D930015E06Rik (NM_172681.2,3650-3668).
gccctcaactggaataaaa

SEQ ID NO: 777507 - DNA, 19 bp, Mus musculus
  siRNA target sequence for D930015E06Rik (NM_172681.2,3671-3689).
cgaccttgtaggagaaaca

SEQ ID NO: 777508 - DNA, 19 bp, Mus musculus
  siRNA target sequence for D930015E06Rik (NM_172681.2,3672-3690).
gaccttgtaggagaaacaa

SEQ ID NO: 777509 - DNA, 19 bp, Mus musculus
  siRNA target sequence for D930015E06Rik (NM_172681.2,3790-3808).
cggcgctggggagaaatgt

SEQ ID NO: 777510 - DNA, 19 bp, Mus musculus
  siRNA target sequence for D930015E06Rik (NM_172681.2,3922-3940).
cgtctgcagctctacagat

SEQ ID NO: 777511 - DNA, 19 bp, Mus musculus
  siRNA target sequence for D930015E06Rik (NM_172681.2,4198-4216).
ggaactgaacgattacaat

SEQ ID NO: 777512 - DNA, 19 bp, Mus musculus
  siRNA target sequence for D930015E06Rik (NM_172681.2,4257-4275).
cctgctcctcgaaagttca

SEQ ID NO: 777513 - DNA, 19 bp, Mus musculus
  siRNA target sequence for D930015E06Rik (NM_172681.2,4431-4449).
ccccacaaagtgaagtgta

SEQ ID NO: 777514 - DNA, 19 bp, Mus musculus
  siRNA target sequence for D930015E06Rik (NM_172681.2,4432-4450).
cccacaaagtgaagtgtat

SEQ ID NO: 777515 - DNA, 19 bp, Mus musculus
  siRNA target sequence for D930015E06Rik (NM_172681.2,4436-4454).
caaagtgaagtgtatgaaa

SEQ ID NO: 777516 - DNA, 19 bp, Mus musculus
  siRNA target sequence for D930015E06Rik (NM_172681.2,4541-4559).
ccgttccgtgcctacatga

SEQ ID NO: 777517 - DNA, 19 bp, Mus musculus
  siRNA target sequence for D930015E06Rik (NM_172681.2,4542-4560).
cgttccgtgcctacatgaa

SEQ ID NO: 777518 - DNA, 19 bp, Mus musculus
  siRNA target sequence for 9930021J17Rik (NM_172682.1,142-160).
cagctcgtcagctacattt

SEQ ID NO: 777519 - DNA, 19 bp, Mus musculus
  siRNA target sequence for 9930021J17Rik (NM_172682.1,145-163).
ctcgtcagctacatttaca

SEQ ID NO: 777520 - DNA, 19 bp, Mus musculus
  siRNA target sequence for 9930021J17Rik (NM_172682.1,167-185).
gatttttggtaccagtatt

SEQ ID NO: 777521 - DNA, 19 bp, Mus musculus
  siRNA target sequence for 9930021J17Rik (NM_172682.1,188-206).
ctcctgcactccataaggt

SEQ ID NO: 777522 - DNA, 19 bp, Mus musculus
  siRNA target sequence for 9930021J17Rik (NM_172682.1,362-380).
ccccttttcggctttgtgt

SEQ ID NO: 777523 - DNA, 19 bp, Mus musculus
  siRNA target sequence for 9930021J17Rik (NM_172682.1,420-438).
ctgtgaagatgtgatgtta

SEQ ID NO: 777524 - DNA, 19 bp, Mus musculus
  siRNA target sequence for 9930021J17Rik (NM_172682.1,430-448).
gtgatgttacagctagttt

SEQ ID NO: 777525 - DNA, 19 bp, Mus musculus
  siRNA target sequence for 9930021J17Rik (NM_172682.1,432-450).
gatgttacagctagtttta

SEQ ID NO: 777526 - DNA, 19 bp, Mus musculus
  siRNA target sequence for 9930021J17Rik (NM_172682.1,885-903).
ggagagccgagaaaactca

SEQ ID NO: 777527 - DNA, 19 bp, Mus musculus
  siRNA target sequence for 9930021J17Rik (NM_172682.1,922-940).
ctcccacagcagagtgtta

SEQ ID NO: 777528 - DNA, 19 bp, Mus musculus
  siRNA target sequence for 9930021J17Rik (NM_172682.1,1068-1086).
cccaccagcacctattgat

SEQ ID NO: 777529 - DNA, 19 bp, Mus musculus
  siRNA target sequence for 9930021J17Rik (NM_172682.1,1091-1109).
ccaaacacatccaagagat

SEQ ID NO: 777530 - DNA, 19 bp, Mus musculus
  siRNA target sequence for 9930021J17Rik (NM_172682.1,1535-1553).
ctggcgtagccttagcatt

SEQ ID NO: 777531 - DNA, 19 bp, Mus musculus
  siRNA target sequence for 9930021J17Rik (NM_172682.1,1538-1556).
gcgtagccttagcattaga

SEQ ID NO: 777532 - DNA, 19 bp, Mus musculus
  siRNA target sequence for 9930021J17Rik (NM_172682.1,1586-1604).
cggaaccccagtcagaatt

SEQ ID NO: 777533 - DNA, 19 bp, Mus musculus
  siRNA target sequence for 9930021J17Rik (NM_172682.1,1640-1658).
cacagtacgaccagatcat

SEQ ID NO: 777534 - DNA, 19 bp, Mus musculus
  siRNA target sequence for 9930021J17Rik (NM_172682.1,1644-1662).
gtacgaccagatcattcaa

SEQ ID NO: 777535 - DNA, 19 bp, Mus musculus
  siRNA target sequence for 9930021J17Rik (NM_172682.1,1818-1836).
cgggtcatccccatttggt

SEQ ID NO: 777536 - DNA, 19 bp, Mus musculus
  siRNA target sequence for 9930021J17Rik (NM_172682.1,1843-1861).
gaggatactgcctttagca

SEQ ID NO: 777537 - DNA, 19 bp, Mus musculus
  siRNA target sequence for 9930021J17Rik (NM_172682.1,1892-1910).
cgttcacaggcccattcat

SEQ ID NO: 777538 - DNA, 19 bp, Mus musculus
  siRNA target sequence for 9930021J17Rik (NM_172682.1,2080-2098).
gtccttgcatcggtgaaaa

SEQ ID NO: 777539 - DNA, 19 bp, Mus musculus
  siRNA target sequence for 9930021J17Rik (NM_172682.1,2087-2105).
catcggtgaaaaacaagat

SEQ ID NO: 777540 - DNA, 19 bp, Mus musculus
  siRNA target sequence for 9930021J17Rik (NM_172682.1,2413-2431).
caagaacactccattctgt

SEQ ID NO: 777541 - DNA, 19 bp, Mus musculus
  siRNA target sequence for C230004D03Rik (NM_172684.1,97-115).
gaggaagacgccttaaaat

SEQ ID NO: 777542 - DNA, 19 bp, Mus musculus
  siRNA target sequence for C230004D03Rik (NM_172684.1,103-121).
gacgccttaaaatgtacaa

SEQ ID NO: 777543 - DNA, 19 bp, Mus musculus
  siRNA target sequence for C230004D03Rik (NM_172684.1,105-123).
cgccttaaaatgtacaata

SEQ ID NO: 777544 - DNA, 19 bp, Mus musculus
  siRNA target sequence for C230004D03Rik (NM_172684.1,196-214).
gcacttcaggagttaataa

SEQ ID NO: 777545 - DNA, 19 bp, Mus musculus
  siRNA target sequence for C230004D03Rik (NM_172684.1,313-331).
cgcaccaagaacattctat

SEQ ID NO: 777546 - DNA, 19 bp, Mus musculus
  siRNA target sequence for C230004D03Rik (NM_172684.1,352-370).
caggtactaaatttagcaa

SEQ ID NO: 777547 - DNA, 19 bp, Mus musculus
  siRNA target sequence for C230004D03Rik (NM_172684.1,425-443).
catggacgaactctcattt

SEQ ID NO: 777548 - DNA, 19 bp, Mus musculus
  siRNA target sequence for C230004D03Rik (NM_172684.1,429-447).
gacgaactctcatttttgt

SEQ ID NO: 777549 - DNA, 19 bp, Mus musculus
  siRNA target sequence for C230004D03Rik (NM_172684.1,431-449).
cgaactctcatttttgtct

SEQ ID NO: 777550 - DNA, 19 bp, Mus musculus
  siRNA target sequence for C230004D03Rik (NM_172684.1,477-495).
gagtttcttgctttgacat

SEQ ID NO: 777551 - DNA, 19 bp, Mus musculus
  siRNA target sequence for C230004D03Rik (NM_172684.1,486-504).
gctttgacattcagtgaaa

SEQ ID NO: 777552 - DNA, 19 bp, Mus musculus
  siRNA target sequence for C230004D03Rik (NM_172684.1,509-527).
gaaaaacgctgcgtactat

SEQ ID NO: 777553 - DNA, 19 bp, Mus musculus
  siRNA target sequence for C230004D03Rik (NM_172684.1,519-537).
gcgtactatgcgttagcaa

SEQ ID NO: 777554 - DNA, 19 bp, Mus musculus
  siRNA target sequence for C230004D03Rik (NM_172684.1,520-538).
cgtactatgcgttagcaat

SEQ ID NO: 777555 - DNA, 19 bp, Mus musculus
  siRNA target sequence for C230004D03Rik (NM_172684.1,521-539).
gtactatgcgttagcaata

SEQ ID NO: 777556 - DNA, 19 bp, Mus musculus
  siRNA target sequence for C230004D03Rik (NM_172684.1,597-615).
cccaacactccagtgaaaa

SEQ ID NO: 777557 - DNA, 19 bp, Mus musculus
  siRNA target sequence for C230004D03Rik (NM_172684.1,649-667).
ccaccatttcaaattttca

SEQ ID NO: 777558 - DNA, 19 bp, Mus musculus
  siRNA target sequence for C230004D03Rik (NM_172684.1,672-690).
caggtcaacaggacatatt

SEQ ID NO: 777559 - DNA, 19 bp, Mus musculus
  siRNA target sequence for C230004D03Rik (NM_172684.1,675-693).
gtcaacaggacatattgct

SEQ ID NO: 777560 - DNA, 19 bp, Mus musculus
  siRNA target sequence for C230004D03Rik (NM_172684.1,711-729).
ggtcctatgcggcagataa

SEQ ID NO: 777561 - DNA, 19 bp, Mus musculus
  siRNA target sequence for C230004D03Rik (NM_172684.1,715-733).
ctatgcggcagataagtct

SEQ ID NO: 777562 - DNA, 19 bp, Mus musculus
  siRNA target sequence for C230004D03Rik (NM_172684.1,780-798).
ctagatatgctagaagaat

SEQ ID NO: 777563 - DNA, 19 bp, Mus musculus
  siRNA target sequence for C230004D03Rik (NM_172684.1,788-806).
gctagaagaatcaccattt

SEQ ID NO: 777564 - DNA, 19 bp, Mus musculus
  siRNA target sequence for B230312A22Rik (NM_172691.1,457-475).
gggtctaccaggtatccat

SEQ ID NO: 777565 - DNA, 19 bp, Mus musculus
  siRNA target sequence for B230312A22Rik (NM_172691.1,596-614).
ccctgaagaaccatctact

SEQ ID NO: 777566 - DNA, 19 bp, Mus musculus
  siRNA target sequence for B230312A22Rik (NM_172691.1,696-714).
gtggagcacggaggtaata

SEQ ID NO: 777567 - DNA, 19 bp, Mus musculus
  siRNA target sequence for B230312A22Rik (NM_172691.1,699-717).
gagcacggaggtaatacca

SEQ ID NO: 777568 - DNA, 19 bp, Mus musculus
  siRNA target sequence for B230312A22Rik (NM_172691.1,752-770).
ctggctctcatcaaatgct

SEQ ID NO: 777569 - DNA, 19 bp, Mus musculus
  siRNA target sequence for B230312A22Rik (NM_172691.1,870-888).
cacacacttgacactgatt

SEQ ID NO: 777570 - DNA, 19 bp, Mus musculus
  siRNA target sequence for B230312A22Rik (NM_172691.1,874-892).
cacttgacactgatttgca

SEQ ID NO: 777571 - DNA, 19 bp, Mus musculus
  siRNA target sequence for B230312A22Rik (NM_172691.1,881-899).
cactgatttgcacaatctt

SEQ ID NO: 777572 - DNA, 19 bp, Mus musculus
  siRNA target sequence for B230312A22Rik (NM_172691.1,1134-1152).
cctcttgctgccaatagtt

SEQ ID NO: 777573 - DNA, 19 bp, Mus musculus
  siRNA target sequence for B230312A22Rik (NM_172691.1,1424-1442).
gggctttactgcagagatt

SEQ ID NO: 777574 - DNA, 19 bp, Mus musculus
  siRNA target sequence for B230312A22Rik (NM_172691.1,1865-1883).
cacggggctcccctatgaa

SEQ ID NO: 777575 - DNA, 19 bp, Mus musculus
  siRNA target sequence for B230312A22Rik (NM_172691.1,1907-1925).
ccataatccacgttattca

SEQ ID NO: 777576 - DNA, 19 bp, Mus musculus
  siRNA target sequence for Galnt12 (NM_172693.2,381-399).
cagagaggtgaaatacgat

SEQ ID NO: 777577 - DNA, 19 bp, Mus musculus
  siRNA target sequence for Galnt12 (NM_172693.2,387-405).
ggtgaaatacgattatgat

SEQ ID NO: 777578 - DNA, 19 bp, Mus musculus
  siRNA target sequence for Galnt12 (NM_172693.2,388-406).
gtgaaatacgattatgata

SEQ ID NO: 777579 - DNA, 19 bp, Mus musculus
  siRNA target sequence for Galnt12 (NM_172693.2,458-476).
cactccttcggacagttta

SEQ ID NO: 777580 - DNA, 19 bp, Mus musculus
  siRNA target sequence for Galnt12 (NM_172693.2,460-478).
ctccttcggacagtttaca

SEQ ID NO: 777581 - DNA, 19 bp, Mus musculus
  siRNA target sequence for Galnt12 (NM_172693.2,462-480).
ccttcggacagtttacagt

SEQ ID NO: 777582 - DNA, 19 bp, Mus musculus
  siRNA target sequence for Galnt12 (NM_172693.2,690-708).
ctgtcactgtgaatgtcat

SEQ ID NO: 777583 - DNA, 19 bp, Mus musculus
  siRNA target sequence for Galnt12 (NM_172693.2,758-776).
cagtcgtgtgccctgttat

SEQ ID NO: 777584 - DNA, 19 bp, Mus musculus
  siRNA target sequence for Galnt12 (NM_172693.2,762-780).
cgtgtgccctgttatcgat

SEQ ID NO: 777585 - DNA, 19 bp, Mus musculus
  siRNA target sequence for Galnt12 (NM_172693.2,768-786).
ccctgttatcgatgtgatt

SEQ ID NO: 777586 - DNA, 19 bp, Mus musculus
  siRNA target sequence for Galnt12 (NM_172693.2,787-805).
gactggaacacctttgagt

SEQ ID NO: 777587 - DNA, 19 bp, Mus musculus
  siRNA target sequence for Galnt12 (NM_172693.2,829-847).
cagattggcggctttgact

SEQ ID NO: 777588 - DNA, 19 bp, Mus musculus
  siRNA target sequence for Galnt12 (NM_172693.2,901-919).
cggtcgccgatcgatgtta

SEQ ID NO: 777589 - DNA, 19 bp, Mus musculus
  siRNA target sequence for Galnt12 (NM_172693.2,902-920).
ggtcgccgatcgatgttat

SEQ ID NO: 777590 - DNA, 19 bp, Mus musculus
  siRNA target sequence for Galnt12 (NM_172693.2,948-966).
gtttgctgtgagtaagaga

SEQ ID NO: 777591 - DNA, 19 bp, Mus musculus
  siRNA target sequence for Galnt12 (NM_172693.2,952-970).
gctgtgagtaagagatatt

SEQ ID NO: 777592 - DNA, 19 bp, Mus musculus
  siRNA target sequence for Galnt12 (NM_172693.2,1256-1274).
gggctaagctccagtgtaa

SEQ ID NO: 777593 - DNA, 19 bp, Mus musculus
  siRNA target sequence for Galnt12 (NM_172693.2,1257-1275).
ggctaagctccagtgtaaa

SEQ ID NO: 777594 - DNA, 19 bp, Mus musculus
  siRNA target sequence for Galnt12 (NM_172693.2,1373-1391).
ggtactgccttgactacaa

SEQ ID NO: 777595 - DNA, 19 bp, Mus musculus
  siRNA target sequence for Galnt12 (NM_172693.2,1374-1392).
gtactgccttgactacaat

SEQ ID NO: 777596 - DNA, 19 bp, Mus musculus
  siRNA target sequence for Galnt12 (NM_172693.2,1418-1436).
gccaccaggtccttctgta

SEQ ID NO: 777597 - DNA, 19 bp, Mus musculus
  siRNA target sequence for Galnt12 (NM_172693.2,1454-1472).
gtcagaaccagtttttcga

SEQ ID NO: 777598 - DNA, 19 bp, Mus musculus
  siRNA target sequence for Galnt12 (NM_172693.2,1462-1480).
cagtttttcgagtatacga

SEQ ID NO: 777599 - DNA, 19 bp, Mus musculus
  siRNA target sequence for Galnt12 (NM_172693.2,1473-1491).
gtatacgacccggaaagaa

SEQ ID NO: 777600 - DNA, 19 bp, Mus musculus
  siRNA target sequence for Galnt12 (NM_172693.2,1531-1549).
gtggaggacgggaaggata

SEQ ID NO: 777601 - DNA, 19 bp, Mus musculus
  siRNA target sequence for Galnt12 (NM_172693.2,1608-1626).
ggaggatggcactttagtt

SEQ ID NO: 777602 - DNA, 19 bp, Mus musculus
  siRNA target sequence for Galnt12 (NM_172693.2,1677-1695).
cggctttgcaccatactta

SEQ ID NO: 777603 - DNA, 19 bp, Mus musculus
  siRNA target sequence for Galnt12 (NM_172693.2,1699-1717).
gactgtaccaactcagata

SEQ ID NO: 777604 - DNA, 19 bp, Mus musculus
  siRNA target sequence for 2410002M20Rik (NM_172697.1,435-453).
ccttgaaaatgcttcagat

SEQ ID NO: 777605 - DNA, 19 bp, Mus musculus
  siRNA target sequence for 2410002M20Rik (NM_172697.1,513-531).
ggatgctgggggcacttta

SEQ ID NO: 777606 - DNA, 19 bp, Mus musculus
  siRNA target sequence for 2410002M20Rik (NM_172697.1,541-559).
cacaggaactgcaattgat

SEQ ID NO: 777607 - DNA, 19 bp, Mus musculus
  siRNA target sequence for 2410002M20Rik (NM_172697.1,546-564).
gaactgcaattgattgcta

SEQ ID NO: 777608 - DNA, 19 bp, Mus musculus
  siRNA target sequence for 2410002M20Rik (NM_172697.1,551-569).
gcaattgattgctacaagt

SEQ ID NO: 777609 - DNA, 19 bp, Mus musculus
  siRNA target sequence for 2410002M20Rik (NM_172697.1,552-570).
caattgattgctacaagta

SEQ ID NO: 777610 - DNA, 19 bp, Mus musculus
  siRNA target sequence for 2410002M20Rik (NM_172697.1,583-601).
gtacaatgactatcgaaaa

SEQ ID NO: 777611 - DNA, 19 bp, Mus musculus
  siRNA target sequence for 2410002M20Rik (NM_172697.1,590-608).
gactatcgaaaaatcaaga

SEQ ID NO: 777612 - DNA, 19 bp, Mus musculus
  siRNA target sequence for 2410002M20Rik (NM_172697.1,613-631).
gaaccgaaatggagagttt

SEQ ID NO: 777613 - DNA, 19 bp, Mus musculus
  siRNA target sequence for 2410002M20Rik (NM_172697.1,641-659).
catgtagatgagttcattt

SEQ ID NO: 777614 - DNA, 19 bp, Mus musculus
  siRNA target sequence for 2410002M20Rik (NM_172697.1,675-693).
gtgagagagtctgtgatat

SEQ ID NO: 777615 - DNA, 19 bp, Mus musculus
  siRNA target sequence for 2410002M20Rik (NM_172697.1,679-697).
gagagtctgtgatatcatt

SEQ ID NO: 777616 - DNA, 19 bp, Mus musculus
  siRNA target sequence for 2410002M20Rik (NM_172697.1,753-771).
gagttagtgccctagaaga

SEQ ID NO: 777617 - DNA, 19 bp, Mus musculus
  siRNA target sequence for 2410002M20Rik (NM_172697.1,929-947).
cccagaaggcggagtagat

SEQ ID NO: 777618 - DNA, 19 bp, Mus musculus
  siRNA target sequence for 2410002M20Rik (NM_172697.1,938-956).
cggagtagatcccctaaaa

SEQ ID NO: 777619 - DNA, 19 bp, Mus musculus
  siRNA target sequence for 2410002M20Rik (NM_172697.1,940-958).
gagtagatcccctaaaaga

SEQ ID NO: 777620 - DNA, 19 bp, Mus musculus
  siRNA target sequence for 2410002M20Rik (NM_172697.1,1037-1055).
cacaggtcccgctctaaat

SEQ ID NO: 777621 - DNA, 19 bp, Mus musculus
  siRNA target sequence for 2410002M20Rik (NM_172697.1,1067-1085).
caccgtagtcacagacata

SEQ ID NO: 777622 - DNA, 19 bp, Mus musculus
  siRNA target sequence for 2410002M20Rik (NM_172697.1,1069-1087).
ccgtagtcacagacataga

SEQ ID NO: 777623 - DNA, 19 bp, Mus musculus
  siRNA target sequence for 2410002M20Rik (NM_172697.1,1070-1088).
cgtagtcacagacatagaa

SEQ ID NO: 777624 - DNA, 19 bp, Mus musculus
  siRNA target sequence for 2410002M20Rik (NM_172697.1,1103-1121).
cctgaaaggtctaagaaaa

SEQ ID NO: 777625 - DNA, 19 bp, Mus musculus
  siRNA target sequence for 1810007P19Rik (NM_172701.1,235-253).
catggacgaactgttcaaa

SEQ ID NO: 777626 - DNA, 19 bp, Mus musculus
  siRNA target sequence for 1810007P19Rik (NM_172701.1,277-295).
ggccttgcggactgtgtat

SEQ ID NO: 777627 - DNA, 19 bp, Mus musculus
  siRNA target sequence for 1810007P19Rik (NM_172701.1,279-297).
ccttgcggactgtgtatga

SEQ ID NO: 777628 - DNA, 19 bp, Mus musculus
  siRNA target sequence for 1810007P19Rik (NM_172701.1,361-379).
gatgaccatggctttcaaa

SEQ ID NO: 777629 - DNA, 19 bp, Mus musculus
  siRNA target sequence for 1810007P19Rik (NM_172701.1,468-486).
ctcccaccgtcatacatca

SEQ ID NO: 777630 - DNA, 19 bp, Mus musculus
  siRNA target sequence for 1810007P19Rik (NM_172701.1,595-613).
ccgagtgtccacatttcta

SEQ ID NO: 777631 - DNA, 19 bp, Mus musculus
  siRNA target sequence for 1810007P19Rik (NM_172701.1,596-614).
cgagtgtccacatttctaa

SEQ ID NO: 777632 - DNA, 19 bp, Mus musculus
  siRNA target sequence for 1810007P19Rik (NM_172701.1,745-763).
ccggcatggcggagactat

SEQ ID NO: 777633 - DNA, 19 bp, Mus musculus
  siRNA target sequence for 1810007P19Rik (NM_172701.1,1001-1019).
ggattccgactgaatctgt

SEQ ID NO: 777634 - DNA, 19 bp, Mus musculus
  siRNA target sequence for 1810007P19Rik (NM_172701.1,1002-1020).
gattccgactgaatctgtt

SEQ ID NO: 777635 - DNA, 19 bp, Mus musculus
  siRNA target sequence for 1810007P19Rik (NM_172701.1,1007-1025).
cgactgaatctgtttacga

SEQ ID NO: 777636 - DNA, 19 bp, Mus musculus
  siRNA target sequence for 1810007P19Rik (NM_172701.1,1132-1150).
ccggatcatgggtgagttt

SEQ ID NO: 777637 - DNA, 19 bp, Mus musculus
  siRNA target sequence for E030019A03Rik (NM_172704.1,123-141).
cctaccggaggctgtgtat

SEQ ID NO: 777638 - DNA, 19 bp, Mus musculus
  siRNA target sequence for E030019A03Rik (NM_172704.1,127-145).
ccggaggctgtgtatgctt

SEQ ID NO: 777639 - DNA, 19 bp, Mus musculus
  siRNA target sequence for E030019A03Rik (NM_172704.1,189-207).
cggagcggctgtttaacct

SEQ ID NO: 777640 - DNA, 19 bp, Mus musculus
  siRNA target sequence for E030019A03Rik (NM_172704.1,246-264).
caagagctatctatgatat

SEQ ID NO: 777641 - DNA, 19 bp, Mus musculus
  siRNA target sequence for E030019A03Rik (NM_172704.1,249-267).
gagctatctatgatatata

SEQ ID NO: 777642 - DNA, 19 bp, Mus musculus
  siRNA target sequence for E030019A03Rik (NM_172704.1,409-427).
catcagcgttggagtagat

SEQ ID NO: 777643 - DNA, 19 bp, Mus musculus
  siRNA target sequence for E030019A03Rik (NM_172704.1,432-450).
ctgacctttttgatcgtta

SEQ ID NO: 777644 - DNA, 19 bp, Mus musculus
  siRNA target sequence for E030019A03Rik (NM_172704.1,480-498).
gtggcttcccgcagattga

SEQ ID NO: 777645 - DNA, 19 bp, Mus musculus
  siRNA target sequence for E030019A03Rik (NM_172704.1,482-500).
ggcttcccgcagattgaga

SEQ ID NO: 777646 - DNA, 19 bp, Mus musculus
  siRNA target sequence for E030019A03Rik (NM_172704.1,483-501).
gcttcccgcagattgagat

SEQ ID NO: 777647 - DNA, 19 bp, Mus musculus
  siRNA target sequence for E030019A03Rik (NM_172704.1,484-502).
cttcccgcagattgagatt

SEQ ID NO: 777648 - DNA, 19 bp, Mus musculus
  siRNA target sequence for E030019A03Rik (NM_172704.1,487-505).
cccgcagattgagattaat

SEQ ID NO: 777649 - DNA, 19 bp, Mus musculus
  siRNA target sequence for E030019A03Rik (NM_172704.1,679-697).
ccaggggcctttatttggt

SEQ ID NO: 777650 - DNA, 19 bp, Mus musculus
  siRNA target sequence for E030019A03Rik (NM_172704.1,936-954).
cctttgcactcatcagtta

SEQ ID NO: 777651 - DNA, 19 bp, Mus musculus
  siRNA target sequence for E030019A03Rik (NM_172704.1,937-955).
ctttgcactcatcagttat

SEQ ID NO: 777652 - DNA, 19 bp, Mus musculus
  siRNA target sequence for E030019A03Rik (NM_172704.1,976-994).
cgaccagactcgagtgaaa

SEQ ID NO: 777653 - DNA, 19 bp, Mus musculus
  siRNA target sequence for 9330182L06Rik (NM_172706.1,886-904).
gaacgacaggcatccttat

SEQ ID NO: 777654 - DNA, 19 bp, Mus musculus
  siRNA target sequence for 9330182L06Rik (NM_172706.1,895-913).
gcatccttatgggttctaa

SEQ ID NO: 777655 - DNA, 19 bp, Mus musculus
  siRNA target sequence for 9330182L06Rik (NM_172706.1,918-936).
gtcaagcccgtgctagtaa

SEQ ID NO: 777656 - DNA, 19 bp, Mus musculus
  siRNA target sequence for 9330182L06Rik (NM_172706.1,923-941).
gcccgtgctagtaaagaat

SEQ ID NO: 777657 - DNA, 19 bp, Mus musculus
  siRNA target sequence for 9330182L06Rik (NM_172706.1,1061-1079).
gggtgctaaagaatgtatt

SEQ ID NO: 777658 - DNA, 19 bp, Mus musculus
  siRNA target sequence for 9330182L06Rik (NM_172706.1,1062-1080).
ggtgctaaagaatgtatta

SEQ ID NO: 777659 - DNA, 19 bp, Mus musculus
  siRNA target sequence for 9330182L06Rik (NM_172706.1,1140-1158).
ccctgcactaccaaagact

SEQ ID NO: 777660 - DNA, 19 bp, Mus musculus
  siRNA target sequence for 9330182L06Rik (NM_172706.1,1141-1159).
cctgcactaccaaagacta

SEQ ID NO: 777661 - DNA, 19 bp, Mus musculus
  siRNA target sequence for 9330182L06Rik (NM_172706.1,1142-1160).
ctgcactaccaaagactat

SEQ ID NO: 777662 - DNA, 19 bp, Mus musculus
  siRNA target sequence for 9330182L06Rik (NM_172706.1,1147-1165).
ctaccaaagactatttcca

SEQ ID NO: 777663 - DNA, 19 bp, Mus musculus
  siRNA target sequence for 9330182L06Rik (NM_172706.1,1155-1173).
gactatttccagatccata

SEQ ID NO: 777664 - DNA, 19 bp, Mus musculus
  siRNA target sequence for 9330182L06Rik (NM_172706.1,1191-1209).
gggaagacacagataatgt

SEQ ID NO: 777665 - DNA, 19 bp, Mus musculus
  siRNA target sequence for 9330182L06Rik (NM_172706.1,1192-1210).
ggaagacacagataatgta

SEQ ID NO: 777666 - DNA, 19 bp, Mus musculus
  siRNA target sequence for 9330182L06Rik (NM_172706.1,1242-1260).
gatctcacagatgctatta

SEQ ID NO: 777667 - DNA, 19 bp, Mus musculus
  siRNA target sequence for 9330182L06Rik (NM_172706.1,1304-1322).
cccaggattctataacaat

SEQ ID NO: 777668 - DNA, 19 bp, Mus musculus
  siRNA target sequence for 9330182L06Rik (NM_172706.1,1346-1364).
ccctccggggacgttttca

SEQ ID NO: 777669 - DNA, 19 bp, Mus musculus
  siRNA target sequence for 9330182L06Rik (NM_172706.1,1348-1366).
ctccggggacgttttcaga

SEQ ID NO: 777670 - DNA, 19 bp, Mus musculus
  siRNA target sequence for 9330182L06Rik (NM_172706.1,1410-1428).
gcacttgggtttgaatata

SEQ ID NO: 777671 - DNA, 19 bp, Mus musculus
  siRNA target sequence for 9330182L06Rik (NM_172706.1,1411-1429).
cacttgggtttgaatataa

SEQ ID NO: 777672 - DNA, 19 bp, Mus musculus
  siRNA target sequence for 9330182L06Rik (NM_172706.1,1445-1463).
ccctgccaacatgaaaact

SEQ ID NO: 777673 - DNA, 19 bp, Mus musculus
  siRNA target sequence for 9330182L06Rik (NM_172706.1,1486-1504).
ccaagtgcgatggaatgaa

SEQ ID NO: 777674 - DNA, 19 bp, Mus musculus
  siRNA target sequence for 9330182L06Rik (NM_172706.1,1545-1563).
ggaggctctgacaatgact

SEQ ID NO: 777675 - DNA, 19 bp, Mus musculus
  siRNA target sequence for 9330182L06Rik (NM_172706.1,1546-1564).
gaggctctgacaatgacta

SEQ ID NO: 777676 - DNA, 19 bp, Mus musculus
  siRNA target sequence for 9330182L06Rik (NM_172706.1,1549-1567).
gctctgacaatgactatct

SEQ ID NO: 777677 - DNA, 19 bp, Mus musculus
  siRNA target sequence for 9330182L06Rik (NM_172706.1,1577-1595).
cttgcacatcccaggattt

SEQ ID NO: 777678 - DNA, 19 bp, Mus musculus
  siRNA target sequence for 9330182L06Rik (NM_172706.1,1583-1601).
catcccaggatttaaacca

SEQ ID NO: 777679 - DNA, 19 bp, Mus musculus
  siRNA target sequence for 9330182L06Rik (NM_172706.1,1631-1649).
ggaactgggaaggataaca

SEQ ID NO: 777680 - DNA, 19 bp, Mus musculus
  siRNA target sequence for 9330182L06Rik (NM_172706.1,1632-1650).
gaactgggaaggataacat

SEQ ID NO: 777681 - DNA, 19 bp, Mus musculus
  siRNA target sequence for 9330182L06Rik (NM_172706.1,1638-1656).
ggaaggataacatttgtgt

SEQ ID NO: 777682 - DNA, 19 bp, Mus musculus
  siRNA target sequence for 9330182L06Rik (NM_172706.1,1639-1657).
gaaggataacatttgtgtt

SEQ ID NO: 777683 - DNA, 19 bp, Mus musculus
  siRNA target sequence for 9330182L06Rik (NM_172706.1,1642-1660).
ggataacatttgtgtttga

SEQ ID NO: 777684 - DNA, 19 bp, Mus musculus
  siRNA target sequence for 9330182L06Rik (NM_172706.1,1688-1706).
gtacttcatggtggatata

SEQ ID NO: 777685 - DNA, 19 bp, Mus musculus
  siRNA target sequence for 9330182L06Rik (NM_172706.1,1691-1709).
cttcatggtggatataaat

SEQ ID NO: 777686 - DNA, 19 bp, Mus musculus
  siRNA target sequence for 9330182L06Rik (NM_172706.1,1694-1712).
catggtggatataaataga

SEQ ID NO: 777687 - DNA, 19 bp, Mus musculus
  siRNA target sequence for 9330182L06Rik (NM_172706.1,1761-1779).
gcttatacgcatgtcatat

SEQ ID NO: 777688 - DNA, 19 bp, Mus musculus
  siRNA target sequence for 9330182L06Rik (NM_172706.1,1762-1780).
cttatacgcatgtcatatt

SEQ ID NO: 777689 - DNA, 19 bp, Mus musculus
  siRNA target sequence for 9330182L06Rik (NM_172706.1,1768-1786).
cgcatgtcatattcaagaa

SEQ ID NO: 777690 - DNA, 19 bp, Mus musculus
  siRNA target sequence for 9330182L06Rik (NM_172706.1,1769-1787).
gcatgtcatattcaagaat

SEQ ID NO: 777691 - DNA, 19 bp, Mus musculus
  siRNA target sequence for 9330182L06Rik (NM_172706.1,1781-1799).
caagaatgcaacgtttaca

SEQ ID NO: 777692 - DNA, 19 bp, Mus musculus
  siRNA target sequence for 9330182L06Rik (NM_172706.1,1788-1806).
gcaacgtttacatttacat

SEQ ID NO: 777693 - DNA, 19 bp, Mus musculus
  siRNA target sequence for 9330182L06Rik (NM_172706.1,1820-1838).
gacaaaccaaggtcaagat

SEQ ID NO: 777694 - DNA, 19 bp, Mus musculus
  siRNA target sequence for 9330182L06Rik (NM_172706.1,1826-1844).
ccaaggtcaagataacaga

SEQ ID NO: 777695 - DNA, 19 bp, Mus musculus
  siRNA target sequence for 9330182L06Rik (NM_172706.1,1841-1859).
cagacgattcatcaatgat

SEQ ID NO: 777696 - DNA, 19 bp, Mus musculus
  siRNA target sequence for 9330182L06Rik (NM_172706.1,1843-1861).
gacgattcatcaatgatgt

SEQ ID NO: 777697 - DNA, 19 bp, Mus musculus
  siRNA target sequence for 9330182L06Rik (NM_172706.1,1863-1881).
gtgaagatttattctatca

SEQ ID NO: 777698 - DNA, 19 bp, Mus musculus
  siRNA target sequence for 9330182L06Rik (NM_172706.1,1865-1883).
gaagatttattctatcaca

SEQ ID NO: 777699 - DNA, 19 bp, Mus musculus
  siRNA target sequence for 9330182L06Rik (NM_172706.1,1946-1964).
gtcggcctcatcatgtgta

SEQ ID NO: 777700 - DNA, 19 bp, Mus musculus
  siRNA target sequence for 9330182L06Rik (NM_172706.1,1972-1990).
ccccaggccactacattga

SEQ ID NO: 777701 - DNA, 19 bp, Mus musculus
  siRNA target sequence for 9330182L06Rik (NM_172706.1,1974-1992).
ccaggccactacattgaga

SEQ ID NO: 777702 - DNA, 19 bp, Mus musculus
  siRNA target sequence for 9330182L06Rik (NM_172706.1,1975-1993).
caggccactacattgagaa

SEQ ID NO: 777703 - DNA, 19 bp, Mus musculus
  siRNA target sequence for 9330182L06Rik (NM_172706.1,2079-2097).
gggcctggaagtaaaagca

SEQ ID NO: 777704 - DNA, 19 bp, Mus musculus
  siRNA target sequence for 9330182L06Rik (NM_172706.1,2102-2120).
ggaccactcgctttgctat

SEQ ID NO: 777705 - DNA, 19 bp, Mus musculus
  siRNA target sequence for 9330182L06Rik (NM_172706.1,2103-2121).
gaccactcgctttgctata

SEQ ID NO: 777706 - DNA, 19 bp, Mus musculus
  siRNA target sequence for 9330182L06Rik (NM_172706.1,2116-2134).
gctatagcgactgcttttt

SEQ ID NO: 777707 - DNA, 19 bp, Mus musculus
  siRNA target sequence for 9330182L06Rik (NM_172706.1,2188-2206).
gtgtaggctcgctgatgaa

SEQ ID NO: 777708 - DNA, 19 bp, Mus musculus
  siRNA target sequence for 9330182L06Rik (NM_172706.1,2219-2237).
cacctccaagggaacgaaa

SEQ ID NO: 777709 - DNA, 19 bp, Mus musculus
  siRNA target sequence for 9330182L06Rik (NM_172706.1,2224-2242).
ccaagggaacgaaatactt

SEQ ID NO: 777710 - DNA, 19 bp, Mus musculus
  siRNA target sequence for 9330182L06Rik (NM_172706.1,2243-2261).
ccatttcttcaatatcagt

SEQ ID NO: 777711 - DNA, 19 bp, Mus musculus
  siRNA target sequence for 9330182L06Rik (NM_172706.1,2288-2306).
ggctctctgtaccaacaat

SEQ ID NO: 777712 - DNA, 19 bp, Mus musculus
  siRNA target sequence for 9330182L06Rik (NM_172706.1,2289-2307).
gctctctgtaccaacaata

SEQ ID NO: 777713 - DNA, 19 bp, Mus musculus
  siRNA target sequence for 9330182L06Rik (NM_172706.1,2292-2310).
ctctgtaccaacaatattt

SEQ ID NO: 777714 - DNA, 19 bp, Mus musculus
  siRNA target sequence for 9330182L06Rik (NM_172706.1,2296-2314).
gtaccaacaatatttcaga

SEQ ID NO: 777715 - DNA, 19 bp, Mus musculus
  siRNA target sequence for 9330182L06Rik (NM_172706.1,2300-2318).
caacaatatttcagacttt

SEQ ID NO: 777716 - DNA, 19 bp, Mus musculus
  siRNA target sequence for 9330182L06Rik (NM_172706.1,2340-2358).
gggtcagatgattacacaa

SEQ ID NO: 777717 - DNA, 19 bp, Mus musculus
  siRNA target sequence for 9330182L06Rik (NM_172706.1,2341-2359).
ggtcagatgattacacaaa

SEQ ID NO: 777718 - DNA, 19 bp, Mus musculus
  siRNA target sequence for 9330182L06Rik (NM_172706.1,2342-2360).
gtcagatgattacacaaat

SEQ ID NO: 777719 - DNA, 19 bp, Mus musculus
  siRNA target sequence for 9330182L06Rik (NM_172706.1,2382-2400).
cagtcaactattattcctt

SEQ ID NO: 777720 - DNA, 19 bp, Mus musculus
  siRNA target sequence for 9330182L06Rik (NM_172706.1,2425-2443).
ccctgtcgtcacagtctat

SEQ ID NO: 777721 - DNA, 19 bp, Mus musculus
  siRNA target sequence for 9330182L06Rik (NM_172706.1,2427-2445).
ctgtcgtcacagtctatca

SEQ ID NO: 777722 - DNA, 19 bp, Mus musculus
  siRNA target sequence for 9330182L06Rik (NM_172706.1,2429-2447).
gtcgtcacagtctatcatt

SEQ ID NO: 777723 - DNA, 19 bp, Mus musculus
  siRNA target sequence for 9330182L06Rik (NM_172706.1,2440-2458).
ctatcattctggcagatat

SEQ ID NO: 777724 - DNA, 19 bp, Mus musculus
  siRNA target sequence for A930013K19 (NM_172708.1,70-88).
ctggtctacaaggacaaat

SEQ ID NO: 777725 - DNA, 19 bp, Mus musculus
  siRNA target sequence for A930013K19 (NM_172708.1,75-93).
ctacaaggacaaatgtgaa

SEQ ID NO: 777726 - DNA, 19 bp, Mus musculus
  siRNA target sequence for A930013K19 (NM_172708.1,214-232).
gttatgctgggcttcgata

SEQ ID NO: 777727 - DNA, 19 bp, Mus musculus
  siRNA target sequence for A930013K19 (NM_172708.1,440-458).
ctgttccgaatggattcat

SEQ ID NO: 777728 - DNA, 19 bp, Mus musculus
  siRNA target sequence for A930013K19 (NM_172708.1,488-506).
gggctggagtcttcttctt

SEQ ID NO: 777729 - DNA, 19 bp, Mus musculus
  siRNA target sequence for A930013K19 (NM_172708.1,984-1002).
cagccactcctcttactct

SEQ ID NO: 777730 - DNA, 19 bp, Mus musculus
  siRNA target sequence for A930013K19 (NM_172708.1,1449-1467).
caaggtcatggctacttca

SEQ ID NO: 777731 - DNA, 19 bp, Mus musculus
  siRNA target sequence for A930013K19 (NM_172708.1,1549-1567).
gagatgcccacgtatgtga

SEQ ID NO: 777732 - DNA, 19 bp, Mus musculus
  siRNA target sequence for A930013K19 (NM_172708.1,1663-1681).
cgctatgcccagattgaca

SEQ ID NO: 777733 - DNA, 19 bp, Mus musculus
  siRNA target sequence for A930013K19 (NM_172708.1,1665-1683).
ctatgcccagattgacatt

SEQ ID NO: 777734 - DNA, 19 bp, Mus musculus
  siRNA target sequence for Otop1 (NM_172709.1,419-437).
gttgttcgcgtttatcact

SEQ ID NO: 777735 - DNA, 19 bp, Mus musculus
  siRNA target sequence for Otop1 (NM_172709.1,451-469).
gcttgaaagtcgcatactt

SEQ ID NO: 777736 - DNA, 19 bp, Mus musculus
  siRNA target sequence for Otop1 (NM_172709.1,455-473).
gaaagtcgcatacttcatt

SEQ ID NO: 777737 - DNA, 19 bp, Mus musculus
  siRNA target sequence for Otop1 (NM_172709.1,459-477).
gtcgcatacttcattggat

SEQ ID NO: 777738 - DNA, 19 bp, Mus musculus
  siRNA target sequence for Otop1 (NM_172709.1,493-511).
cagccaccgagggagtttt

SEQ ID NO: 777739 - DNA, 19 bp, Mus musculus
  siRNA target sequence for Otop1 (NM_172709.1,526-544).
cagtgcataccctattgca

SEQ ID NO: 777740 - DNA, 19 bp, Mus musculus
  siRNA target sequence for Otop1 (NM_172709.1,535-553).
ccctattgcaggtgtattt

SEQ ID NO: 777741 - DNA, 19 bp, Mus musculus
  siRNA target sequence for Otop1 (NM_172709.1,559-577).
ggggccatgctaaggatat

SEQ ID NO: 777742 - DNA, 19 bp, Mus musculus
  siRNA target sequence for Otop1 (NM_172709.1,655-673).
gcgtcctgaatgaatcaaa

SEQ ID NO: 777743 - DNA, 19 bp, Mus musculus
  siRNA target sequence for Otop1 (NM_172709.1,670-688).
caaagcaccagctgaatga

SEQ ID NO: 777744 - DNA, 19 bp, Mus musculus
  siRNA target sequence for Otop1 (NM_172709.1,720-738).
ggcaacatcaccatcgttt

SEQ ID NO: 777745 - DNA, 19 bp, Mus musculus
  siRNA target sequence for Otop1 (NM_172709.1,721-739).
gcaacatcaccatcgtttt

SEQ ID NO: 777746 - DNA, 19 bp, Mus musculus
  siRNA target sequence for Otop1 (NM_172709.1,725-743).
catcaccatcgttttggat

SEQ ID NO: 777747 - DNA, 19 bp, Mus musculus
  siRNA target sequence for Otop1 (NM_172709.1,790-808).
ccctctcccatgggattta

SEQ ID NO: 777748 - DNA, 19 bp, Mus musculus
  siRNA target sequence for Otop1 (NM_172709.1,792-810).
ctctcccatgggatttact

SEQ ID NO: 777749 - DNA, 19 bp, Mus musculus
  siRNA target sequence for Otop1 (NM_172709.1,796-814).
cccatgggatttactatct

SEQ ID NO: 777750 - DNA, 19 bp, Mus musculus
  siRNA target sequence for Otop1 (NM_172709.1,798-816).
catgggatttactatctgt

SEQ ID NO: 777751 - DNA, 19 bp, Mus musculus
  siRNA target sequence for Otop1 (NM_172709.1,1033-1051).
gcgagtcggctctcatcat

SEQ ID NO: 777752 - DNA, 19 bp, Mus musculus
  siRNA target sequence for Otop1 (NM_172709.1,1035-1053).
gagtcggctctcatcatgt

SEQ ID NO: 777753 - DNA, 19 bp, Mus musculus
  siRNA target sequence for Otop1 (NM_172709.1,1039-1057).
cggctctcatcatgttcta

SEQ ID NO: 777754 - DNA, 19 bp, Mus musculus
  siRNA target sequence for Otop1 (NM_172709.1,1040-1058).
ggctctcatcatgttctat

SEQ ID NO: 777755 - DNA, 19 bp, Mus musculus
  siRNA target sequence for Otop1 (NM_172709.1,1041-1059).
gctctcatcatgttctatt

SEQ ID NO: 777756 - DNA, 19 bp, Mus musculus
  siRNA target sequence for Otop1 (NM_172709.1,1042-1060).
ctctcatcatgttctattt

SEQ ID NO: 777757 - DNA, 19 bp, Mus musculus
  siRNA target sequence for Otop1 (NM_172709.1,1044-1062).
ctcatcatgttctatttgt

SEQ ID NO: 777758 - DNA, 19 bp, Mus musculus
  siRNA target sequence for Otop1 (NM_172709.1,1101-1119).
ctagtcggaagctggattt

SEQ ID NO: 777759 - DNA, 19 bp, Mus musculus
  siRNA target sequence for Otop1 (NM_172709.1,1104-1122).
gtcggaagctggatttaca

SEQ ID NO: 777760 - DNA, 19 bp, Mus musculus
  siRNA target sequence for Otop1 (NM_172709.1,1162-1180).
cgcgcaagctggatgttga

SEQ ID NO: 777761 - DNA, 19 bp, Mus musculus
  siRNA target sequence for Otop1 (NM_172709.1,1317-1335).
gtccaaaacattttcatca

SEQ ID NO: 777762 - DNA, 19 bp, Mus musculus
  siRNA target sequence for Otop1 (NM_172709.1,1634-1652).
caacatctcgctttggatt

SEQ ID NO: 777763 - DNA, 19 bp, Mus musculus
  siRNA target sequence for Otop1 (NM_172709.1,1666-1684).
gctgccgtcccgagtatga

SEQ ID NO: 777764 - DNA, 19 bp, Mus musculus
  siRNA target sequence for Otop1 (NM_172709.1,1669-1687).
gccgtcccgagtatgacaa

SEQ ID NO: 777765 - DNA, 19 bp, Mus musculus
  siRNA target sequence for Otop1 (NM_172709.1,1685-1703).
caacggattggaggaaatt

SEQ ID NO: 777766 - DNA, 19 bp, Mus musculus
  siRNA target sequence for Otop1 (NM_172709.1,1711-1729).
gctttgaaccctggataat

SEQ ID NO: 777767 - DNA, 19 bp, Mus musculus
  siRNA target sequence for Otop1 (NM_172709.1,1712-1730).
ctttgaaccctggataatt

SEQ ID NO: 777768 - DNA, 19 bp, Mus musculus
  siRNA target sequence for Otop1 (NM_172709.1,1743-1761).
gccatgcccttttccattt

SEQ ID NO: 777769 - DNA, 19 bp, Mus musculus
  siRNA target sequence for Otop1 (NM_172709.1,1785-1803).
gccctctttgaggtctatt

SEQ ID NO: 777770 - DNA, 19 bp, Mus musculus
  siRNA target sequence for Otop1 (NM_172709.1,1787-1805).
cctctttgaggtctattgt

SEQ ID NO: 777771 - DNA, 19 bp, Mus musculus
  siRNA target sequence for Otop1 (NM_172709.1,1788-1806).
ctctttgaggtctattgta

SEQ ID NO: 777772 - DNA, 19 bp, Mus musculus
  siRNA target sequence for Otop1 (NM_172709.1,1794-1812).
gaggtctattgtaagatct

SEQ ID NO: 777773 - DNA, 19 bp, Mus musculus
  siRNA target sequence for 2310045A20Rik (NM_172710.1,588-606).
gtccgaggggaggagaatt

SEQ ID NO: 777774 - DNA, 19 bp, Mus musculus
  siRNA target sequence for 2310045A20Rik (NM_172710.1,611-629).
gcacgcagtagcgaagaat

SEQ ID NO: 777775 - DNA, 19 bp, Mus musculus
  siRNA target sequence for 2310045A20Rik (NM_172710.1,612-630).
cacgcagtagcgaagaatt

SEQ ID NO: 777776 - DNA, 19 bp, Mus musculus
  siRNA target sequence for 2310045A20Rik (NM_172710.1,615-633).
gcagtagcgaagaattaca

SEQ ID NO: 777777 - DNA, 19 bp, Mus musculus
  siRNA target sequence for 2310045A20Rik (NM_172710.1,644-662).
gacggtcccgccttttgaa

SEQ ID NO: 777778 - DNA, 19 bp, Mus musculus
  siRNA target sequence for 2310045A20Rik (NM_172710.1,655-673).
cttttgaacggcctttcaa

SEQ ID NO: 777779 - DNA, 19 bp, Mus musculus
  siRNA target sequence for 2310045A20Rik (NM_172710.1,881-899).
ccccatggtcaccatttca

SEQ ID NO: 777780 - DNA, 19 bp, Mus musculus
  siRNA target sequence for 2310045A20Rik (NM_172710.1,943-961).
gaattctgtactttgttga

SEQ ID NO: 777781 - DNA, 19 bp, Mus musculus
  siRNA target sequence for 2310045A20Rik (NM_172710.1,977-995).
cggcacgccttctgtgttt

SEQ ID NO: 777782 - DNA, 19 bp, Mus musculus
  siRNA target sequence for 2310045A20Rik (NM_172710.1,1007-1025).
cggcagtttgcacattcaa

SEQ ID NO: 777783 - DNA, 19 bp, Mus musculus
  siRNA target sequence for 2310045A20Rik (NM_172710.1,1042-1060).
gagaagacctggctgtaaa

SEQ ID NO: 777784 - DNA, 19 bp, Mus musculus
  siRNA target sequence for 2310045A20Rik (NM_172710.1,1044-1062).
gaagacctggctgtaaaaa

SEQ ID NO: 777785 - DNA, 19 bp, Mus musculus
  siRNA target sequence for 2310045A20Rik (NM_172710.1,1131-1149).
gtcactgccagcattggat

SEQ ID NO: 777786 - DNA, 19 bp, Mus musculus
  siRNA target sequence for 2310045A20Rik (NM_172710.1,1142-1160).
cattggatgggacttgaaa

SEQ ID NO: 777787 - DNA, 19 bp, Mus musculus
  siRNA target sequence for 2310045A20Rik (NM_172710.1,1147-1165).
gatgggacttgaaaagcta

SEQ ID NO: 777788 - DNA, 19 bp, Mus musculus
  siRNA target sequence for 2310045A20Rik (NM_172710.1,1167-1185).
cataatcagaccattagct

SEQ ID NO: 777789 - DNA, 19 bp, Mus musculus
  siRNA target sequence for 2310045A20Rik (NM_172710.1,1253-1271).
cggcatcgaagggtttttt

SEQ ID NO: 777790 - DNA, 19 bp, Mus musculus
  siRNA target sequence for 2310045A20Rik (NM_172710.1,1307-1325).
cccggcacaggttcttaat

SEQ ID NO: 777791 - DNA, 19 bp, Mus musculus
  siRNA target sequence for 2310045A20Rik (NM_172710.1,1347-1365).
gctgaacaaatcaagctat

SEQ ID NO: 777792 - DNA, 19 bp, Mus musculus
  siRNA target sequence for 2310045A20Rik (NM_172710.1,1348-1366).
ctgaacaaatcaagctata

SEQ ID NO: 777793 - DNA, 19 bp, Mus musculus
  siRNA target sequence for 2310045A20Rik (NM_172710.1,1383-1401).
gaggtccaggatataatat

SEQ ID NO: 777794 - DNA, 19 bp, Mus musculus
  siRNA target sequence for 2310045A20Rik (NM_172710.1,1588-1606).
ccgtgccatggaaccaaaa

SEQ ID NO: 777795 - DNA, 19 bp, Mus musculus
  siRNA target sequence for 2310045A20Rik (NM_172710.1,1601-1619).
ccaaaatgactccgtatta

SEQ ID NO: 777796 - DNA, 19 bp, Mus musculus
  siRNA target sequence for 2310045A20Rik (NM_172710.1,1620-1638).
gaaatcggtgcaaggatat

SEQ ID NO: 777797 - DNA, 19 bp, Mus musculus
  siRNA target sequence for 2310045A20Rik (NM_172710.1,1671-1689).
gatggccttcaccaaatta

SEQ ID NO: 777798 - DNA, 19 bp, Mus musculus
  siRNA target sequence for 2310045A20Rik (NM_172710.1,1720-1738).
gctgctgtggataccataa

SEQ ID NO: 777799 - DNA, 19 bp, Mus musculus
  siRNA target sequence for 2310045A20Rik (NM_172710.1,1724-1742).
ctgtggataccataaagca

SEQ ID NO: 777800 - DNA, 19 bp, Mus musculus
  siRNA target sequence for 2310045A20Rik (NM_172710.1,1751-1769).
cctcaccgtcttctatgaa

SEQ ID NO: 777801 - DNA, 19 bp, Mus musculus
  siRNA target sequence for 2310045A20Rik (NM_172710.1,1752-1770).
ctcaccgtcttctatgaaa

SEQ ID NO: 777802 - DNA, 19 bp, Mus musculus
  siRNA target sequence for 2310045A20Rik (NM_172710.1,1763-1781).
ctatgaaactggattaaat

SEQ ID NO: 777803 - DNA, 19 bp, Mus musculus
  siRNA target sequence for 2310045A20Rik (NM_172710.1,1797-1815).
ctgcagggcatgctataca

SEQ ID NO: 777804 - DNA, 19 bp, Mus musculus
  siRNA target sequence for 2310045A20Rik (NM_172710.1,1799-1817).
gcagggcatgctatacagt

SEQ ID NO: 777805 - DNA, 19 bp, Mus musculus
  siRNA target sequence for 2310045A20Rik (NM_172710.1,1843-1861).
gactgtcatcaatgaatct

SEQ ID NO: 777806 - DNA, 19 bp, Mus musculus
  siRNA target sequence for 2310045A20Rik (NM_172710.1,1931-1949).
caacattgctacaaagaca

SEQ ID NO: 777807 - DNA, 19 bp, Mus musculus
  siRNA target sequence for 2310045A20Rik (NM_172710.1,1942-1960).
caaagacaccccttgatca

SEQ ID NO: 777808 - DNA, 19 bp, Mus musculus
  siRNA target sequence for 2310045A20Rik (NM_172710.1,1973-1991).
gggagaccaggcatatgtt

SEQ ID NO: 777809 - DNA, 19 bp, Mus musculus
  siRNA target sequence for 2310045A20Rik (NM_172710.1,1977-1995).
gaccaggcatatgttgaaa

SEQ ID NO: 777810 - DNA, 19 bp, Mus musculus
  siRNA target sequence for 2310045A20Rik (NM_172710.1,1979-1997).
ccaggcatatgttgaaact

SEQ ID NO: 777811 - DNA, 19 bp, Mus musculus
  siRNA target sequence for 2310045A20Rik (NM_172710.1,1980-1998).
caggcatatgttgaaacta

SEQ ID NO: 777812 - DNA, 19 bp, Mus musculus
  siRNA target sequence for 2310045A20Rik (NM_172710.1,1996-2014).
ctattaggctcaaagatga

SEQ ID NO: 777813 - DNA, 19 bp, Mus musculus
  siRNA target sequence for 2310045A20Rik (NM_172710.1,2003-2021).
gctcaaagatgatgaaata

SEQ ID NO: 777814 - DNA, 19 bp, Mus musculus
  siRNA target sequence for 2310045A20Rik (NM_172710.1,2043-2061).
gatggcgatgtctttatgt

SEQ ID NO: 777815 - DNA, 19 bp, Mus musculus
  siRNA target sequence for 2310045A20Rik (NM_172710.1,2334-2352).
ggatggtattaccacaaat

SEQ ID NO: 777816 - DNA, 19 bp, Mus musculus
  siRNA target sequence for 2310045A20Rik (NM_172710.1,2335-2353).
gatggtattaccacaaatt

SEQ ID NO: 777817 - DNA, 19 bp, Mus musculus
  siRNA target sequence for 2310045A20Rik (NM_172710.1,2345-2363).
ccacaaattcaggaaaaat

SEQ ID NO: 777818 - DNA, 19 bp, Mus musculus
  siRNA target sequence for 2310045A20Rik (NM_172710.1,2367-2385).
gccaaagcagccaagtact

SEQ ID NO: 777819 - DNA, 19 bp, Mus musculus
  siRNA target sequence for 2310045A20Rik (NM_172710.1,2373-2391).
gcagccaagtactggttaa

SEQ ID NO: 777820 - DNA, 19 bp, Mus musculus
  siRNA target sequence for 2310045A20Rik (NM_172710.1,2374-2392).
cagccaagtactggttaaa

SEQ ID NO: 777821 - DNA, 19 bp, Mus musculus
  siRNA target sequence for 2310045A20Rik (NM_172710.1,2384-2402).
ctggttaaaggcagaagaa

SEQ ID NO: 777822 - DNA, 19 bp, Mus musculus
  siRNA target sequence for 2310045A20Rik (NM_172710.1,2411-2429).
cccagatgcgtcttacaat

SEQ ID NO: 777823 - DNA, 19 bp, Mus musculus
  siRNA target sequence for 2310045A20Rik (NM_172710.1,2413-2431).
cagatgcgtcttacaatct

SEQ ID NO: 777824 - DNA, 19 bp, Mus musculus
  siRNA target sequence for 2310045A20Rik (NM_172710.1,2491-2509).
ctggtgaatacttccataa

SEQ ID NO: 777825 - DNA, 19 bp, Mus musculus
  siRNA target sequence for 2310045A20Rik (NM_172710.1,2526-2544).
cacatcgaagggacattgt

SEQ ID NO: 777826 - DNA, 19 bp, Mus musculus
  siRNA target sequence for 2310045A20Rik (NM_172710.1,2545-2563).
ggtgttccctttactatat

SEQ ID NO: 777827 - DNA, 19 bp, Mus musculus
  siRNA target sequence for 2310045A20Rik (NM_172710.1,2595-2613).
ccagagaaagctgttgtat

SEQ ID NO: 777828 - DNA, 19 bp, Mus musculus
  siRNA target sequence for 2310045A20Rik (NM_172710.1,2742-2760).
gaagtgtcacagacaaatt

SEQ ID NO: 777829 - DNA, 19 bp, Mus musculus
  siRNA target sequence for 2310045A20Rik (NM_172710.1,2798-2816).
gagatacttgggcgttaat

SEQ ID NO: 777830 - DNA, 19 bp, Mus musculus
  siRNA target sequence for 2310045A20Rik (NM_172710.1,2818-2836).
gtgtttggcgatactataa

SEQ ID NO: 777831 - DNA, 19 bp, Mus musculus
  siRNA target sequence for 2310045A20Rik (NM_172710.1,2825-2843).
gcgatactataatttctct

SEQ ID NO: 777832 - DNA, 19 bp, Mus musculus
  siRNA target sequence for 2310045A20Rik (NM_172710.1,2862-2880).
ccttcatttgcgtatctga

SEQ ID NO: 777833 - DNA, 19 bp, Mus musculus
  siRNA target sequence for 2310045A20Rik (NM_172710.1,2863-2881).
cttcatttgcgtatctgaa

SEQ ID NO: 777834 - DNA, 19 bp, Mus musculus
  siRNA target sequence for 2310045A20Rik (NM_172710.1,2866-2884).
catttgcgtatctgaaaat

SEQ ID NO: 777835 - DNA, 19 bp, Mus musculus
  siRNA target sequence for 2310045A20Rik (NM_172710.1,2885-2903).
gggagacctttactactat

SEQ ID NO: 777836 - DNA, 19 bp, Mus musculus
  siRNA target sequence for 2310045A20Rik (NM_172710.1,2990-3008).
caacctcgccgcactgata

SEQ ID NO: 777837 - DNA, 19 bp, Mus musculus
  siRNA target sequence for 2310045A20Rik (NM_172710.1,3112-3130).
gctggagtctcagtaatga

SEQ ID NO: 777838 - DNA, 19 bp, Mus musculus
  siRNA target sequence for 2310045A20Rik (NM_172710.1,3151-3169).
ccttggcctggctttacct

SEQ ID NO: 777839 - DNA, 19 bp, Mus musculus
  siRNA target sequence for 2310045A20Rik (NM_172710.1,3201-3219).
cactctgccctgatctact

SEQ ID NO: 777840 - DNA, 19 bp, Mus musculus
  siRNA target sequence for 2310045A20Rik (NM_172710.1,3253-3271).
cctggatggtgctttatct

SEQ ID NO: 777841 - DNA, 19 bp, Mus musculus
  siRNA target sequence for AA591032 (NM_172713.1,177-195).
gcaacctgccgcagttaca

SEQ ID NO: 777842 - DNA, 19 bp, Mus musculus
  siRNA target sequence for AA591032 (NM_172713.1,232-250).
ggagttccttcagcaatat

SEQ ID NO: 777843 - DNA, 19 bp, Mus musculus
  siRNA target sequence for AA591032 (NM_172713.1,242-260).
cagcaatataaccactata

SEQ ID NO: 777844 - DNA, 19 bp, Mus musculus
  siRNA target sequence for AA591032 (NM_172713.1,244-262).
gcaatataaccactataaa

SEQ ID NO: 777845 - DNA, 19 bp, Mus musculus
  siRNA target sequence for AA591032 (NM_172713.1,315-333).
cagagctggtgatgttcat

SEQ ID NO: 777846 - DNA, 19 bp, Mus musculus
  siRNA target sequence for AA591032 (NM_172713.1,356-374).
ccggagcatctcagtaact

SEQ ID NO: 777847 - DNA, 19 bp, Mus musculus
  siRNA target sequence for AA591032 (NM_172713.1,357-375).
cggagcatctcagtaactt

SEQ ID NO: 777848 - DNA, 19 bp, Mus musculus
  siRNA target sequence for AA591032 (NM_172713.1,428-446).
gatctccgcatgacgtttt

SEQ ID NO: 777849 - DNA, 19 bp, Mus musculus
  siRNA target sequence for AA591032 (NM_172713.1,431-449).
ctccgcatgacgttttgca

SEQ ID NO: 777850 - DNA, 19 bp, Mus musculus
  siRNA target sequence for AA591032 (NM_172713.1,433-451).
ccgcatgacgttttgcaaa

SEQ ID NO: 777851 - DNA, 19 bp, Mus musculus
  siRNA target sequence for AA591032 (NM_172713.1,447-465).
gcaaagccttgatcttact

SEQ ID NO: 777852 - DNA, 19 bp, Mus musculus
  siRNA target sequence for AA591032 (NM_172713.1,479-497).
ctcatcaatccatcaagtt

SEQ ID NO: 777853 - DNA, 19 bp, Mus musculus
  siRNA target sequence for AA591032 (NM_172713.1,484-502).
caatccatcaagtttgcta

SEQ ID NO: 777854 - DNA, 19 bp, Mus musculus
  siRNA target sequence for AA591032 (NM_172713.1,495-513).
gtttgctagagctcttctt

SEQ ID NO: 777855 - DNA, 19 bp, Mus musculus
  siRNA target sequence for AA591032 (NM_172713.1,623-641).
gtgctgcagaacttcatgt

SEQ ID NO: 777856 - DNA, 19 bp, Mus musculus
  siRNA target sequence for AA591032 (NM_172713.1,665-683).
gcaaccgcagccaagatgt

SEQ ID NO: 777857 - DNA, 19 bp, Mus musculus
  siRNA target sequence for AA591032 (NM_172713.1,766-784).
ctccaagatcaccaagata

SEQ ID NO: 777858 - DNA, 19 bp, Mus musculus
  siRNA target sequence for AA591032 (NM_172713.1,942-960).
cgatgaaagtgctgaagaa

SEQ ID NO: 777859 - DNA, 19 bp, Mus musculus
  siRNA target sequence for AA591032 (NM_172713.1,999-1017).
cagctattcacttgattca

SEQ ID NO: 777860 - DNA, 19 bp, Mus musculus
  siRNA target sequence for AA591032 (NM_172713.1,1241-1259).
cccccagagattattcagt

SEQ ID NO: 777861 - DNA, 19 bp, Mus musculus
  siRNA target sequence for AA591032 (NM_172713.1,1272-1290).
cggtggccaacaattttgt

SEQ ID NO: 777862 - DNA, 19 bp, Mus musculus
  siRNA target sequence for AA591032 (NM_172713.1,1315-1333).
catgaccgtagggatcaat

SEQ ID NO: 777863 - DNA, 19 bp, Mus musculus
  siRNA target sequence for AA591032 (NM_172713.1,1320-1338).
ccgtagggatcaatgctat

SEQ ID NO: 777864 - DNA, 19 bp, Mus musculus
  siRNA target sequence for AA591032 (NM_172713.1,1321-1339).
cgtagggatcaatgctata

SEQ ID NO: 777865 - DNA, 19 bp, Mus musculus
  siRNA target sequence for AA591032 (NM_172713.1,1322-1340).
gtagggatcaatgctataa

SEQ ID NO: 777866 - DNA, 19 bp, Mus musculus
  siRNA target sequence for AA591032 (NM_172713.1,1391-1409).
gacctggctcagtataaga

SEQ ID NO: 777867 - DNA, 19 bp, Mus musculus
  siRNA target sequence for AA591032 (NM_172713.1,1418-1436).
gataagaatgtgatgatgt

SEQ ID NO: 777868 - DNA, 19 bp, Mus musculus
  siRNA target sequence for AA591032 (NM_172713.1,1454-1472).
catctcttccggacattga

SEQ ID NO: 777869 - DNA, 19 bp, Mus musculus
  siRNA target sequence for AA591032 (NM_172713.1,1687-1705).
cgtgcaccactcttctgat

SEQ ID NO: 777870 - DNA, 19 bp, Mus musculus
  siRNA target sequence for AA591032 (NM_172713.1,1780-1798).
cagcaccagtcgagtttta

SEQ ID NO: 777871 - DNA, 19 bp, Mus musculus
  siRNA target sequence for AA591032 (NM_172713.1,1859-1877).
ccggggaaagcccagaaaa

SEQ ID NO: 777872 - DNA, 19 bp, Mus musculus
  siRNA target sequence for AA591032 (NM_172713.1,1870-1888).
ccagaaaaggaaatactta

SEQ ID NO: 777873 - DNA, 19 bp, Mus musculus
  siRNA target sequence for AA591032 (NM_172713.1,1937-1955).
gacattgaacgccttcata

SEQ ID NO: 777874 - DNA, 19 bp, Mus musculus
  siRNA target sequence for AA591032 (NM_172713.1,1939-1957).
cattgaacgccttcataaa

SEQ ID NO: 777875 - DNA, 19 bp, Mus musculus
  siRNA target sequence for AA591032 (NM_172713.1,2010-2028).
cagaccgaaaggagtttgt

SEQ ID NO: 777876 - DNA, 19 bp, Mus musculus
  siRNA target sequence for AA591032 (NM_172713.1,2012-2030).
gaccgaaaggagtttgtga

SEQ ID NO: 777877 - DNA, 19 bp, Mus musculus
  siRNA target sequence for AA591032 (NM_172713.1,2117-2135).
cagaatgtccggtcaaaaa

SEQ ID NO: 777878 - DNA, 19 bp, Mus musculus
  siRNA target sequence for AA591032 (NM_172713.1,2171-2189).
cgagatgcacttctgaaaa

SEQ ID NO: 777879 - DNA, 19 bp, Mus musculus
  siRNA target sequence for AA591032 (NM_172713.1,2172-2190).
gagatgcacttctgaaaaa

SEQ ID NO: 777880 - DNA, 19 bp, Mus musculus
  siRNA target sequence for AI461788 (NM_172714.1,654-672).
ccaatgtccagcagattca

SEQ ID NO: 777881 - DNA, 19 bp, Mus musculus
  siRNA target sequence for AI461788 (NM_172714.1,692-710).
cattatgtccgacttgtta

SEQ ID NO: 777882 - DNA, 19 bp, Mus musculus
  siRNA target sequence for AI461788 (NM_172714.1,847-865).
ggccgttaagcaagttgtt

SEQ ID NO: 777883 - DNA, 19 bp, Mus musculus
  siRNA target sequence for AI461788 (NM_172714.1,1057-1075).
gttacagcagtcttcatat

SEQ ID NO: 777884 - DNA, 19 bp, Mus musculus
  siRNA target sequence for AI461788 (NM_172714.1,1125-1143).
cacaggcaaggcttccatt

SEQ ID NO: 777885 - DNA, 19 bp, Mus musculus
  siRNA target sequence for AI461788 (NM_172714.1,1129-1147).
ggcaaggcttccattcaat

SEQ ID NO: 777886 - DNA, 19 bp, Mus musculus
  siRNA target sequence for AI461788 (NM_172714.1,1180-1198).
cagaaaaccctgtaactgt

SEQ ID NO: 777887 - DNA, 19 bp, Mus musculus
  siRNA target sequence for AI461788 (NM_172714.1,1191-1209).
gtaactgtacaaaatcact

SEQ ID NO: 777888 - DNA, 19 bp, Mus musculus
  siRNA target sequence for AI461788 (NM_172714.1,1200-1218).
caaaatcactgtgtttgaa

SEQ ID NO: 777889 - DNA, 19 bp, Mus musculus
  siRNA target sequence for AI461788 (NM_172714.1,1244-1262).
ggtgaattctgcaacaact

SEQ ID NO: 777890 - DNA, 19 bp, Mus musculus
  siRNA target sequence for AI461788 (NM_172714.1,1261-1279).
ctgcaactgtaccaattgt

SEQ ID NO: 777891 - DNA, 19 bp, Mus musculus
  siRNA target sequence for AI461788 (NM_172714.1,1263-1281).
gcaactgtaccaattgtta

SEQ ID NO: 777892 - DNA, 19 bp, Mus musculus
  siRNA target sequence for AI461788 (NM_172714.1,1295-1313).
cacgagaatgagagacaaa

SEQ ID NO: 777893 - DNA, 19 bp, Mus musculus
  siRNA target sequence for AI461788 (NM_172714.1,1424-1442).
cgctcggggtgtcttaaaa

SEQ ID NO: 777894 - DNA, 19 bp, Mus musculus
  siRNA target sequence for AI461788 (NM_172714.1,1425-1443).
gctcggggtgtcttaaaaa

SEQ ID NO: 777895 - DNA, 19 bp, Mus musculus
  siRNA target sequence for AI461788 (NM_172714.1,1428-1446).
cggggtgtcttaaaaacta

SEQ ID NO: 777896 - DNA, 19 bp, Mus musculus
  siRNA target sequence for AI461788 (NM_172714.1,1494-1512).
gcatcggctgtaagaattt

SEQ ID NO: 777897 - DNA, 19 bp, Mus musculus
  siRNA target sequence for AI461788 (NM_172714.1,1495-1513).
catcggctgtaagaatttt

SEQ ID NO: 777898 - DNA, 19 bp, Mus musculus
  siRNA target sequence for AI461788 (NM_172714.1,1498-1516).
cggctgtaagaattttgaa

SEQ ID NO: 777899 - DNA, 19 bp, Mus musculus
  siRNA target sequence for AI461788 (NM_172714.1,1550-1568).
gcagatgcggctgaagtaa

SEQ ID NO: 777900 - DNA, 19 bp, Mus musculus
  siRNA target sequence for AI461788 (NM_172714.1,1669-1687).
gccgtttacatttgtaact

SEQ ID NO: 777901 - DNA, 19 bp, Mus musculus
  siRNA target sequence for AI461788 (NM_172714.1,1670-1688).
ccgtttacatttgtaacta

SEQ ID NO: 777902 - DNA, 19 bp, Mus musculus
  siRNA target sequence for AI461788 (NM_172714.1,1671-1689).
cgtttacatttgtaactaa

SEQ ID NO: 777903 - DNA, 19 bp, Mus musculus
  siRNA target sequence for AI461788 (NM_172714.1,1672-1690).
gtttacatttgtaactaaa

SEQ ID NO: 777904 - DNA, 19 bp, Mus musculus
  siRNA target sequence for AI461788 (NM_172714.1,1697-1715).
gctgaagccacgtgtaatt

SEQ ID NO: 777905 - DNA, 19 bp, Mus musculus
  siRNA target sequence for AI461788 (NM_172714.1,1765-1783).
ggcagcagagcggatgata

SEQ ID NO: 777906 - DNA, 19 bp, Mus musculus
  siRNA target sequence for AI461788 (NM_172714.1,1776-1794).
ggatgatacttgaggaatt

SEQ ID NO: 777907 - DNA, 19 bp, Mus musculus
  siRNA target sequence for AI461788 (NM_172714.1,1780-1798).
gatacttgaggaatttgga

SEQ ID NO: 777908 - DNA, 19 bp, Mus musculus
  siRNA target sequence for AI461788 (NM_172714.1,1790-1808).
gaatttggacgatgtttga

SEQ ID NO: 777909 - DNA, 19 bp, Mus musculus
  siRNA target sequence for AI461788 (NM_172714.1,1803-1821).
gtttgatgagcgtcatcaa

SEQ ID NO: 777910 - DNA, 19 bp, Mus musculus
  siRNA target sequence for 2310035N15Rik (NM_172716.2,326-344).
gattaaactctgggatata

SEQ ID NO: 777911 - DNA, 19 bp, Mus musculus
  siRNA target sequence for 2310035N15Rik (NM_172716.2,427-445).
ggagctgcctggtgaagta

SEQ ID NO: 777912 - DNA, 19 bp, Mus musculus
  siRNA target sequence for 2310035N15Rik (NM_172716.2,428-446).
gagctgcctggtgaagtat

SEQ ID NO: 777913 - DNA, 19 bp, Mus musculus
  siRNA target sequence for 2310035N15Rik (NM_172716.2,492-510).
cagagccacccattacagt

SEQ ID NO: 777914 - DNA, 19 bp, Mus musculus
  siRNA target sequence for 2310035N15Rik (NM_172716.2,494-512).
gagccacccattacagtat

SEQ ID NO: 777915 - DNA, 19 bp, Mus musculus
  siRNA target sequence for 2310035N15Rik (NM_172716.2,496-514).
gccacccattacagtatat

SEQ ID NO: 777916 - DNA, 19 bp, Mus musculus
  siRNA target sequence for 2310035N15Rik (NM_172716.2,526-544).
gaaccatgcaggacattgt

SEQ ID NO: 777917 - DNA, 19 bp, Mus musculus
  siRNA target sequence for 2310035N15Rik (NM_172716.2,583-601).
ggaaacagagggaattcta

SEQ ID NO: 777918 - DNA, 19 bp, Mus musculus
  siRNA target sequence for 2310035N15Rik (NM_172716.2,584-602).
gaaacagagggaattctat

SEQ ID NO: 777919 - DNA, 19 bp, Mus musculus
  siRNA target sequence for 2310035N15Rik (NM_172716.2,592-610).
gggaattctatcacaaact

SEQ ID NO: 777920 - DNA, 19 bp, Mus musculus
  siRNA target sequence for 2310035N15Rik (NM_172716.2,641-659).
ggaggcgtgctcagcaaaa

SEQ ID NO: 777921 - DNA, 19 bp, Mus musculus
  siRNA target sequence for 2310035N15Rik (NM_172716.2,665-683).
cttagatccccgaaatggt

SEQ ID NO: 777922 - DNA, 19 bp, Mus musculus
  siRNA target sequence for 2310035N15Rik (NM_172716.2,693-711).
gcagacgacaattcaaata

SEQ ID NO: 777923 - DNA, 19 bp, Mus musculus
  siRNA target sequence for 2310035N15Rik (NM_172716.2,760-778).
gtgacgagcaggtaagcat

SEQ ID NO: 777924 - DNA, 19 bp, Mus musculus
  siRNA target sequence for 2310035N15Rik (NM_172716.2,775-793).
gcatctgtctggaatgcaa

SEQ ID NO: 777925 - DNA, 19 bp, Mus musculus
  siRNA target sequence for 2310035N15Rik (NM_172716.2,855-873).
ctgcacctgaaaaaattta

SEQ ID NO: 777926 - DNA, 19 bp, Mus musculus
  siRNA target sequence for 2310035N15Rik (NM_172716.2,885-903).
cttaacctctcctccttta

SEQ ID NO: 777927 - DNA, 19 bp, Mus musculus
  siRNA target sequence for 2310035N15Rik (NM_172716.2,908-926).
gctggacattttatgcaat

SEQ ID NO: 777928 - DNA, 19 bp, Mus musculus
  siRNA target sequence for 2310035N15Rik (NM_172716.2,959-977).
gttcgtggttgttacaaga

SEQ ID NO: 777929 - DNA, 19 bp, Mus musculus
  siRNA target sequence for 2310035N15Rik (NM_172716.2,994-1012).
cacccctcctgctacacta

SEQ ID NO: 777930 - DNA, 19 bp, Mus musculus
  siRNA target sequence for 5730484M20Rik (NM_172717.1,170-188).
gaaccccagatccttcttt

SEQ ID NO: 777931 - DNA, 19 bp, Mus musculus
  siRNA target sequence for 5730484M20Rik (NM_172717.1,219-237).
gaggctgtgacctctcttt

SEQ ID NO: 777932 - DNA, 19 bp, Mus musculus
  siRNA target sequence for 5730484M20Rik (NM_172717.1,234-252).
ctttccccagcaataaact

SEQ ID NO: 777933 - DNA, 19 bp, Mus musculus
  siRNA target sequence for 5730484M20Rik (NM_172717.1,256-274).
ctctggagatcactgtaaa

SEQ ID NO: 777934 - DNA, 19 bp, Mus musculus
  siRNA target sequence for 5730484M20Rik (NM_172717.1,325-343).
caatggaacagtgatcaat

SEQ ID NO: 777935 - DNA, 19 bp, Mus musculus
  siRNA target sequence for 5730484M20Rik (NM_172717.1,330-348).
gaacagtgatcaataagct

SEQ ID NO: 777936 - DNA, 19 bp, Mus musculus
  siRNA target sequence for 5730484M20Rik (NM_172717.1,384-402).
gcggggatatcatctattt

SEQ ID NO: 777937 - DNA, 19 bp, Mus musculus
  siRNA target sequence for 5730484M20Rik (NM_172717.1,387-405).
gggatatcatctatttggt

SEQ ID NO: 777938 - DNA, 19 bp, Mus musculus
  siRNA target sequence for 5730484M20Rik (NM_172717.1,434-452).
gtggcatacctctatgaat

SEQ ID NO: 777939 - DNA, 19 bp, Mus musculus
  siRNA target sequence for 5730484M20Rik (NM_172717.1,437-455).
gcatacctctatgaatctt

SEQ ID NO: 777940 - DNA, 19 bp, Mus musculus
  siRNA target sequence for 5730484M20Rik (NM_172717.1,557-575).
ccccaggttccactattgt

SEQ ID NO: 777941 - DNA, 19 bp, Mus musculus
  siRNA target sequence for 5730484M20Rik (NM_172717.1,559-577).
ccaggttccactattgtca

SEQ ID NO: 777942 - DNA, 19 bp, Mus musculus
  siRNA target sequence for 5730484M20Rik (NM_172717.1,676-694).
ctctgcagggcaaaagcat

SEQ ID NO: 777943 - DNA, 19 bp, Mus musculus
  siRNA target sequence for 5730484M20Rik (NM_172717.1,741-759).
gcagttcacttgttgcaaa

SEQ ID NO: 777944 - DNA, 19 bp, Mus musculus
  siRNA target sequence for 5730484M20Rik (NM_172717.1,742-760).
cagttcacttgttgcaaat

SEQ ID NO: 777945 - DNA, 19 bp, Mus musculus
  siRNA target sequence for 5730484M20Rik (NM_172717.1,771-789).
ctagcctttctccagtttt

SEQ ID NO: 777946 - DNA, 19 bp, Mus musculus
  siRNA target sequence for 5730484M20Rik (NM_172717.1,794-812).
gacaaagaagcatcctttt

SEQ ID NO: 777947 - DNA, 19 bp, Mus musculus
  siRNA target sequence for 5730484M20Rik (NM_172717.1,825-843).
gtaaagaccatgaggaatt

SEQ ID NO: 777948 - DNA, 19 bp, Mus musculus
  siRNA target sequence for 5730484M20Rik (NM_172717.1,884-902).
gacacgaacctccagttat

SEQ ID NO: 777949 - DNA, 19 bp, Mus musculus
  siRNA target sequence for 5730484M20Rik (NM_172717.1,888-906).
cgaacctccagttattagt

SEQ ID NO: 777950 - DNA, 19 bp, Mus musculus
  siRNA target sequence for 5730484M20Rik (NM_172717.1,983-1001).
gagacactaacctgtatca

SEQ ID NO: 777951 - DNA, 19 bp, Mus musculus
  siRNA target sequence for 5730484M20Rik (NM_172717.1,1118-1136).
ccagtggagcggatttgca

SEQ ID NO: 777952 - DNA, 19 bp, Mus musculus
  siRNA target sequence for 5730484M20Rik (NM_172717.1,1119-1137).
cagtggagcggatttgcaa

SEQ ID NO: 777953 - DNA, 19 bp, Mus musculus
  siRNA target sequence for 5730484M20Rik (NM_172717.1,1121-1139).
gtggagcggatttgcaaaa

SEQ ID NO: 777954 - DNA, 19 bp, Mus musculus
  siRNA target sequence for 5730484M20Rik (NM_172717.1,1218-1236).
gtatggatgcaaggaataa

SEQ ID NO: 777955 - DNA, 19 bp, Mus musculus
  siRNA target sequence for 5730484M20Rik (NM_172717.1,1270-1288).
gaggtctttctctgatgaa

SEQ ID NO: 777956 - DNA, 19 bp, Mus musculus
  siRNA target sequence for 5730484M20Rik (NM_172717.1,1460-1478).
ggggaggcaccttcaacat

SEQ ID NO: 777957 - DNA, 19 bp, Mus musculus
  siRNA target sequence for 5730484M20Rik (NM_172717.1,1523-1541).
ggaagccatgccatatgca

SEQ ID NO: 777958 - DNA, 19 bp, Mus musculus
  siRNA target sequence for 5730484M20Rik (NM_172717.1,1728-1746).
gagtgctgaacaataacaa

SEQ ID NO: 777959 - DNA, 19 bp, Mus musculus
  siRNA target sequence for 5730484M20Rik (NM_172717.1,1755-1773).
cggacatcctgaagaatta

SEQ ID NO: 777960 - DNA, 19 bp, Mus musculus
  siRNA target sequence for 5730484M20Rik (NM_172717.1,1827-1845).
ctctgcagcgaggtgtatt

SEQ ID NO: 777961 - DNA, 19 bp, Mus musculus
  siRNA target sequence for 5730484M20Rik (NM_172717.1,1861-1879).
cagaatcactggaaatact

SEQ ID NO: 777962 - DNA, 19 bp, Mus musculus
  siRNA target sequence for 5730484M20Rik (NM_172717.1,1927-1945).
ccagtatcgtcagaacatt

SEQ ID NO: 777963 - DNA, 19 bp, Mus musculus
  siRNA target sequence for 5730484M20Rik (NM_172717.1,1955-1973).
gagttgccagtgactgtaa

SEQ ID NO: 777964 - DNA, 19 bp, Mus musculus
  siRNA target sequence for 5730484M20Rik (NM_172717.1,2024-2042).
gctcaccatgcaatgaaat

SEQ ID NO: 777965 - DNA, 19 bp, Mus musculus
  siRNA target sequence for 5730484M20Rik (NM_172717.1,2033-2051).
gcaatgaaattcaatcaca

SEQ ID NO: 777966 - DNA, 19 bp, Mus musculus
  siRNA target sequence for 5730484M20Rik (NM_172717.1,2034-2052).
caatgaaattcaatcacat

SEQ ID NO: 777967 - DNA, 19 bp, Mus musculus
  siRNA target sequence for D5Bwg1524e (NM_172718.1,110-128).
gaagccgttaccagaaagt

SEQ ID NO: 777968 - DNA, 19 bp, Mus musculus
  siRNA target sequence for D5Bwg1524e (NM_172718.1,441-459).
gggtcctggacaaaatcgt

SEQ ID NO: 777969 - DNA, 19 bp, Mus musculus
  siRNA target sequence for D5Bwg1524e (NM_172718.1,469-487).
ggtggaaaacagcagtaaa

SEQ ID NO: 777970 - DNA, 19 bp, Mus musculus
  siRNA target sequence for D5Bwg1524e (NM_172718.1,557-575).
ccatgtgccctggagtata

SEQ ID NO: 777971 - DNA, 19 bp, Mus musculus
  siRNA target sequence for D5Bwg1524e (NM_172718.1,569-587).
gagtataccaagatgaaga

SEQ ID NO: 777972 - DNA, 19 bp, Mus musculus
  siRNA target sequence for D5Bwg1524e (NM_172718.1,730-748).
cgaccggccatctatctct

SEQ ID NO: 777973 - DNA, 19 bp, Mus musculus
  siRNA target sequence for D5Bwg1524e (NM_172718.1,982-1000).
ccgcttagaggagatagtt

SEQ ID NO: 777974 - DNA, 19 bp, Mus musculus
  siRNA target sequence for D5Bwg1524e (NM_172718.1,983-1001).
cgcttagaggagatagttt

SEQ ID NO: 777975 - DNA, 19 bp, Mus musculus
  siRNA target sequence for D5Bwg1524e (NM_172718.1,984-1002).
gcttagaggagatagttta

SEQ ID NO: 777976 - DNA, 19 bp, Mus musculus
  siRNA target sequence for D5Bwg1524e (NM_172718.1,1178-1196).
cgaggaaaggggaaggtat

SEQ ID NO: 777977 - DNA, 19 bp, Mus musculus
  siRNA target sequence for D5Bwg1524e (NM_172718.1,1188-1206).
ggaaggtatttcctaagtt

SEQ ID NO: 777978 - DNA, 19 bp, Mus musculus
  siRNA target sequence for D5Bwg1524e (NM_172718.1,1299-1317).
ctggcacgcagtctgaatt

SEQ ID NO: 777979 - DNA, 19 bp, Mus musculus
  siRNA target sequence for D5Bwg1524e (NM_172718.1,1302-1320).
gcacgcagtctgaattcgt

SEQ ID NO: 777980 - DNA, 19 bp, Mus musculus
  siRNA target sequence for D5Bwg1524e (NM_172718.1,1690-1708).
gctgcgtctcatctactat

SEQ ID NO: 777981 - DNA, 19 bp, Mus musculus
  siRNA target sequence for D5Bwg1524e (NM_172718.1,1818-1836).
cctgctacgcacaaaccat

SEQ ID NO: 777982 - DNA, 19 bp, Mus musculus
  siRNA target sequence for D5Bwg1524e (NM_172718.1,2040-2058).
gcagcacacaggtatttga

SEQ ID NO: 777983 - DNA, 19 bp, Mus musculus
  siRNA target sequence for D5Bwg1524e (NM_172718.1,2583-2601).
cctcctctgccaataacga

SEQ ID NO: 777984 - DNA, 19 bp, Mus musculus
  siRNA target sequence for D5Bwg1524e (NM_172718.1,2668-2686).
cctgcaccgcattgagaaa

SEQ ID NO: 777985 - DNA, 19 bp, Mus musculus
  siRNA target sequence for D5Bwg1524e (NM_172718.1,2906-2924).
catggaggcgccatggata

SEQ ID NO: 777986 - DNA, 19 bp, Mus musculus
  siRNA target sequence for D5Bwg1524e (NM_172718.1,2987-3005).
catcagaacggcgattaca

SEQ ID NO: 777987 - DNA, 19 bp, Mus musculus
  siRNA target sequence for D5Bwg1524e (NM_172718.1,2997-3015).
gcgattacacccacttcta

SEQ ID NO: 777988 - DNA, 19 bp, Mus musculus
  siRNA target sequence for D5Bwg1524e (NM_172718.1,2999-3017).
gattacacccacttctact

SEQ ID NO: 777989 - DNA, 19 bp, Mus musculus
  siRNA target sequence for D5Bwg1524e (NM_172718.1,3120-3138).
cccactacgtgctgttcat

SEQ ID NO: 777990 - DNA, 19 bp, Mus musculus
  siRNA target sequence for D5Bwg1524e (NM_172718.1,3198-3216).
ctgacattatcaagttctt

SEQ ID NO: 777991 - DNA, 19 bp, Mus musculus
  siRNA target sequence for D5Bwg1524e (NM_172718.1,3267-3285).
gggacctcgtgcataaggt

SEQ ID NO: 777992 - DNA, 19 bp, Mus musculus
  siRNA target sequence for D5Bwg1524e (NM_172718.1,3277-3295).
gcataaggtgcagattcta

SEQ ID NO: 777993 - DNA, 19 bp, Mus musculus
  siRNA target sequence for D5Bwg1524e (NM_172718.1,3284-3302).
gtgcagattctaattgaga

SEQ ID NO: 777994 - DNA, 19 bp, Mus musculus
  siRNA target sequence for 4930438M06Rik (NM_172721.1,332-350).
ggatgacgtgcccttcttt

SEQ ID NO: 777995 - DNA, 19 bp, Mus musculus
  siRNA target sequence for 4930438M06Rik (NM_172721.1,368-386).
cgaactggccatcaatata

SEQ ID NO: 777996 - DNA, 19 bp, Mus musculus
  siRNA target sequence for 4930438M06Rik (NM_172721.1,369-387).
gaactggccatcaatatat

SEQ ID NO: 777997 - DNA, 19 bp, Mus musculus
  siRNA target sequence for 4930438M06Rik (NM_172721.1,423-441).
gctcaggtgagcaagacat

SEQ ID NO: 777998 - DNA, 19 bp, Mus musculus
  siRNA target sequence for 4930438M06Rik (NM_172721.1,560-578).
cgccaaggagcacacatta

SEQ ID NO: 777999 - DNA, 19 bp, Mus musculus
  siRNA target sequence for 4930438M06Rik (NM_172721.1,561-579).
gccaaggagcacacattaa

SEQ ID NO: 778000 - DNA, 19 bp, Mus musculus
  siRNA target sequence for 4930438M06Rik (NM_172721.1,627-645).
gttcccgacgctgttttgt

SEQ ID NO: 778001 - DNA, 19 bp, Mus musculus
  siRNA target sequence for 4930438M06Rik (NM_172721.1,772-790).
ctggaatgcagccatatgt

SEQ ID NO: 778002 - DNA, 19 bp, Mus musculus
  siRNA target sequence for 4930438M06Rik (NM_172721.1,774-792).
ggaatgcagccatatgtct

SEQ ID NO: 778003 - DNA, 19 bp, Mus musculus
  siRNA target sequence for 4930438M06Rik (NM_172721.1,834-852).
gaggatgggatccttaaca

SEQ ID NO: 778004 - DNA, 19 bp, Mus musculus
  siRNA target sequence for 4930438M06Rik (NM_172721.1,836-854).
ggatgggatccttaacatt

SEQ ID NO: 778005 - DNA, 19 bp, Mus musculus
  siRNA target sequence for 4930438M06Rik (NM_172721.1,837-855).
gatgggatccttaacattt

SEQ ID NO: 778006 - DNA, 19 bp, Mus musculus
  siRNA target sequence for 4930438M06Rik (NM_172721.1,868-886).
ccggaaggttccctatctt

SEQ ID NO: 778007 - DNA, 19 bp, Mus musculus
  siRNA target sequence for 4930438M06Rik (NM_172721.1,869-887).
cggaaggttccctatcttt

SEQ ID NO: 778008 - DNA, 19 bp, Mus musculus
  siRNA target sequence for 4930438M06Rik (NM_172721.1,874-892).
ggttccctatctttcgttt

SEQ ID NO: 778009 - DNA, 19 bp, Mus musculus
  siRNA target sequence for 4930438M06Rik (NM_172721.1,875-893).
gttccctatctttcgtttt

SEQ ID NO: 778010 - DNA, 19 bp, Mus musculus
  siRNA target sequence for 4930438M06Rik (NM_172721.1,896-914).
gcatgacgcaagaatacaa

SEQ ID NO: 778011 - DNA, 19 bp, Mus musculus
  siRNA target sequence for 4930438M06Rik (NM_172721.1,918-936).
cttgcgctgagccaagaaa

SEQ ID NO: 778012 - DNA, 19 bp, Mus musculus
  siRNA target sequence for 4930438M06Rik (NM_172721.1,958-976).
ctgcttttgacgttgtgat

SEQ ID NO: 778013 - DNA, 19 bp, Mus musculus
  siRNA target sequence for 4930438M06Rik (NM_172721.1,961-979).
cttttgacgttgtgatgtt

SEQ ID NO: 778014 - DNA, 19 bp, Mus musculus
  siRNA target sequence for 4930438M06Rik (NM_172721.1,1035-1053).
ctggttgactaccttgaaa

SEQ ID NO: 778015 - DNA, 19 bp, Mus musculus
  siRNA target sequence for 4930438M06Rik (NM_172721.1,1037-1055).
ggttgactaccttgaaata

SEQ ID NO: 778016 - DNA, 19 bp, Mus musculus
  siRNA target sequence for 4930438M06Rik (NM_172721.1,1132-1150).
cagccagaacccttcatta

SEQ ID NO: 778017 - DNA, 19 bp, Mus musculus
  siRNA target sequence for 4930438M06Rik (NM_172721.1,1135-1153).
ccagaacccttcattatgt

SEQ ID NO: 778018 - DNA, 19 bp, Mus musculus
  siRNA target sequence for 4930438M06Rik (NM_172721.1,1216-1234).
gtctaggatgggtgtatga

SEQ ID NO: 778019 - DNA, 19 bp, Mus musculus
  siRNA target sequence for 4930438M06Rik (NM_172721.1,1292-1310).
caatgcacttggagacttt

SEQ ID NO: 778020 - DNA, 19 bp, Mus musculus
  siRNA target sequence for 4930438M06Rik (NM_172721.1,1556-1574).
gcgctatctctccttcaat

SEQ ID NO: 778021 - DNA, 19 bp, Mus musculus
  siRNA target sequence for 4930438M06Rik (NM_172721.1,1557-1575).
cgctatctctccttcaata

SEQ ID NO: 778022 - DNA, 19 bp, Mus musculus
  siRNA target sequence for 4930438M06Rik (NM_172721.1,1670-1688).
gatccatgcctatgaattt

SEQ ID NO: 778023 - DNA, 19 bp, Mus musculus
  siRNA target sequence for 4930438M06Rik (NM_172721.1,1732-1750).
gcttaccccgtgacatcat

SEQ ID NO: 778024 - DNA, 19 bp, Mus musculus
  siRNA target sequence for 4930438M06Rik (NM_172721.1,1780-1798).
ctttcccccatgacagtat

SEQ ID NO: 778025 - DNA, 19 bp, Mus musculus
  siRNA target sequence for C330023M02Rik (NM_172722.1,59-77).
gcccatttacgattatctt

SEQ ID NO: 778026 - DNA, 19 bp, Mus musculus
  siRNA target sequence for C330023M02Rik (NM_172722.1,61-79).
ccatttacgattatcttga

SEQ ID NO: 778027 - DNA, 19 bp, Mus musculus
  siRNA target sequence for C330023M02Rik (NM_172722.1,62-80).
catttacgattatcttgat

SEQ ID NO: 778028 - DNA, 19 bp, Mus musculus
  siRNA target sequence for C330023M02Rik (NM_172722.1,68-86).
cgattatcttgataatgga

SEQ ID NO: 778029 - DNA, 19 bp, Mus musculus
  siRNA target sequence for C330023M02Rik (NM_172722.1,100-118).
caattcagcaagctgataa

SEQ ID NO: 778030 - DNA, 19 bp, Mus musculus
  siRNA target sequence for C330023M02Rik (NM_172722.1,112-130).
ctgataaactgttgaagaa

SEQ ID NO: 778031 - DNA, 19 bp, Mus musculus
  siRNA target sequence for C330023M02Rik (NM_172722.1,258-276).
caggccctgacgattctct

SEQ ID NO: 778032 - DNA, 19 bp, Mus musculus
  siRNA target sequence for C330023M02Rik (NM_172722.1,387-405).
gtgggcgagtacaagaaga

SEQ ID NO: 778033 - DNA, 19 bp, Mus musculus
  siRNA target sequence for C330023M02Rik (NM_172722.1,413-431).
ggctggcatggctctgtat

SEQ ID NO: 778034 - DNA, 19 bp, Mus musculus
  siRNA target sequence for C330023M02Rik (NM_172722.1,414-432).
gctggcatggctctgtata

SEQ ID NO: 778035 - DNA, 19 bp, Mus musculus
  siRNA target sequence for C330023M02Rik (NM_172722.1,415-433).
ctggcatggctctgtataa

SEQ ID NO: 778036 - DNA, 19 bp, Mus musculus
  siRNA target sequence for C330023M02Rik (NM_172722.1,417-435).
ggcatggctctgtataaga

SEQ ID NO: 778037 - DNA, 19 bp, Mus musculus
  siRNA target sequence for C330023M02Rik (NM_172722.1,418-436).
gcatggctctgtataagat

SEQ ID NO: 778038 - DNA, 19 bp, Mus musculus
  siRNA target sequence for C330023M02Rik (NM_172722.1,419-437).
catggctctgtataagatt

SEQ ID NO: 778039 - DNA, 19 bp, Mus musculus
  siRNA target sequence for C330023M02Rik (NM_172722.1,442-460).
ccaaaaacccttactactt

SEQ ID NO: 778040 - DNA, 19 bp, Mus musculus
  siRNA target sequence for C330023M02Rik (NM_172722.1,475-493).
gcttgatcatgcaatctat

SEQ ID NO: 778041 - DNA, 19 bp, Mus musculus
  siRNA target sequence for C330023M02Rik (NM_172722.1,507-525).
gagaacctctccaaaacca

SEQ ID NO: 778042 - DNA, 19 bp, Mus musculus
  siRNA target sequence for C330023M02Rik (NM_172722.1,650-668).
ggatgtcattagaggaaaa

SEQ ID NO: 778043 - DNA, 19 bp, Mus musculus
  siRNA target sequence for C330023M02Rik (NM_172722.1,700-718).
gtcgggaaaacaaatgcat

SEQ ID NO: 778044 - DNA, 19 bp, Mus musculus
  siRNA target sequence for C330023M02Rik (NM_172722.1,766-784).
cccgacgcctccttctgaa

SEQ ID NO: 778045 - DNA, 19 bp, Mus musculus
  siRNA target sequence for C330023M02Rik (NM_172722.1,767-785).
ccgacgcctccttctgaaa

SEQ ID NO: 778046 - DNA, 19 bp, Mus musculus
  siRNA target sequence for C330023M02Rik (NM_172722.1,768-786).
cgacgcctccttctgaaaa

SEQ ID NO: 778047 - DNA, 19 bp, Mus musculus
  siRNA target sequence for C330023M02Rik (NM_172722.1,769-787).
gacgcctccttctgaaaaa

SEQ ID NO: 778048 - DNA, 19 bp, Mus musculus
  siRNA target sequence for C330023M02Rik (NM_172722.1,806-824).
ctatctgacttatttcgat

SEQ ID NO: 778049 - DNA, 19 bp, Mus musculus
  siRNA target sequence for C330023M02Rik (NM_172722.1,869-887).
gggggaacactccttagaa

SEQ ID NO: 778050 - DNA, 19 bp, Mus musculus
  siRNA target sequence for C330023M02Rik (NM_172722.1,880-898).
ccttagaaggggaagtaca

SEQ ID NO: 778051 - DNA, 19 bp, Mus musculus
  siRNA target sequence for C330023M02Rik (NM_172722.1,973-991).
gaggcccacacctagctaa

SEQ ID NO: 778052 - DNA, 19 bp, Mus musculus
  siRNA target sequence for C330023M02Rik (NM_172722.1,1013-1031).
gcggagccaaggctgtaat

SEQ ID NO: 778053 - DNA, 19 bp, Mus musculus
  siRNA target sequence for C330023M02Rik (NM_172722.1,1023-1041).
ggctgtaatgacgaataca

SEQ ID NO: 778054 - DNA, 19 bp, Mus musculus
  siRNA target sequence for C330023M02Rik (NM_172722.1,1024-1042).
gctgtaatgacgaatacaa

SEQ ID NO: 778055 - DNA, 19 bp, Mus musculus
  siRNA target sequence for C330023M02Rik (NM_172722.1,1146-1164).
gcccagtgcacacaattca

SEQ ID NO: 778056 - DNA, 19 bp, Mus musculus
  siRNA target sequence for C330023M02Rik (NM_172722.1,1147-1165).
cccagtgcacacaattcat

SEQ ID NO: 778057 - DNA, 19 bp, Mus musculus
  siRNA target sequence for C330023M02Rik (NM_172722.1,1148-1166).
ccagtgcacacaattcatt

SEQ ID NO: 778058 - DNA, 19 bp, Mus musculus
  siRNA target sequence for C330023M02Rik (NM_172722.1,1149-1167).
cagtgcacacaattcatta

SEQ ID NO: 778059 - DNA, 19 bp, Mus musculus
  siRNA target sequence for C330023M02Rik (NM_172722.1,1153-1171).
gcacacaattcattaacca

SEQ ID NO: 778060 - DNA, 19 bp, Mus musculus
  siRNA target sequence for C330023M02Rik (NM_172722.1,1195-1213).
cgacgccgacagaggataa

SEQ ID NO: 778061 - DNA, 19 bp, Mus musculus
  siRNA target sequence for C330023M02Rik (NM_172722.1,1198-1216).
cgccgacagaggataagct

SEQ ID NO: 778062 - DNA, 19 bp, Mus musculus
  siRNA target sequence for C330023M02Rik (NM_172722.1,1199-1217).
gccgacagaggataagctt

SEQ ID NO: 778063 - DNA, 19 bp, Mus musculus
  siRNA target sequence for C330023M02Rik (NM_172722.1,1326-1344).
gtcaaagaactgatgttaa

SEQ ID NO: 778064 - DNA, 19 bp, Mus musculus
  siRNA target sequence for C330006K01Rik (NM_172725.1,363-381).
cagtagcttctgacttctt

SEQ ID NO: 778065 - DNA, 19 bp, Mus musculus
  siRNA target sequence for C330006K01Rik (NM_172725.1,365-383).
gtagcttctgacttcttca

SEQ ID NO: 778066 - DNA, 19 bp, Mus musculus
  siRNA target sequence for C330006K01Rik (NM_172725.1,1008-1026).
gcttcccaagtctgttcaa

SEQ ID NO: 778067 - DNA, 19 bp, Mus musculus
  siRNA target sequence for C330006K01Rik (NM_172725.1,1050-1068).
ctctcacagcggagtttgt

SEQ ID NO: 778068 - DNA, 19 bp, Mus musculus
  siRNA target sequence for C330006K01Rik (NM_172725.1,1631-1649).
cgagccagcgtgttcactt

SEQ ID NO: 778069 - DNA, 19 bp, Mus musculus
  siRNA target sequence for C330006K01Rik (NM_172725.1,1706-1724).
gcggaacagatcaacaagt

SEQ ID NO: 778070 - DNA, 19 bp, Mus musculus
  siRNA target sequence for C330006K01Rik (NM_172725.1,1707-1725).
cggaacagatcaacaagtt

SEQ ID NO: 778071 - DNA, 19 bp, Mus musculus
  siRNA target sequence for C330006K01Rik (NM_172725.1,1709-1727).
gaacagatcaacaagttct

SEQ ID NO: 778072 - DNA, 19 bp, Mus musculus
  siRNA target sequence for E130309D02Rik (NM_172726.2,451-469).
cagcccaagagactgaatt

SEQ ID NO: 778073 - DNA, 19 bp, Mus musculus
  siRNA target sequence for E130309D02Rik (NM_172726.2,478-496).
gagctccagcttcttgaaa

SEQ ID NO: 778074 - DNA, 19 bp, Mus musculus
  siRNA target sequence for E130309D02Rik (NM_172726.2,531-549).
ctctgtgcggcagatcatt

SEQ ID NO: 778075 - DNA, 19 bp, Mus musculus
  siRNA target sequence for E130309D02Rik (NM_172726.2,533-551).
ctgtgcggcagatcatttt

SEQ ID NO: 778076 - DNA, 19 bp, Mus musculus
  siRNA target sequence for E130309D02Rik (NM_172726.2,867-885).
ggacttgcttgaaatgatt

SEQ ID NO: 778077 - DNA, 19 bp, Mus musculus
  siRNA target sequence for E130309D02Rik (NM_172726.2,904-922).
gacccgaggctgattctca

SEQ ID NO: 778078 - DNA, 19 bp, Mus musculus
  siRNA target sequence for E130309D02Rik (NM_172726.2,949-967).
gccaacctgcccataggat

SEQ ID NO: 778079 - DNA, 19 bp, Mus musculus
  siRNA target sequence for E130309D02Rik (NM_172726.2,1015-1033).
gcccctctggcttacaaaa

SEQ ID NO: 778080 - DNA, 19 bp, Mus musculus
  siRNA target sequence for E130309D02Rik (NM_172726.2,1112-1130).
cgcacttgctgtactcaaa

SEQ ID NO: 778081 - DNA, 19 bp, Mus musculus
  siRNA target sequence for E130309D02Rik (NM_172726.2,1235-1253).
cgcttgtggaggagatcaa

SEQ ID NO: 778082 - DNA, 19 bp, Mus musculus
  siRNA target sequence for E130309D02Rik (NM_172726.2,1475-1493).
ggttctacccgcatatcca

SEQ ID NO: 778083 - DNA, 19 bp, Mus musculus
  siRNA target sequence for E130309D02Rik (NM_172726.2,1476-1494).
gttctacccgcatatccat

SEQ ID NO: 778084 - DNA, 19 bp, Mus musculus
  siRNA target sequence for D330028D13Rik (NM_172727.1,138-156).
ggagtaccggagaattgtt

SEQ ID NO: 778085 - DNA, 19 bp, Mus musculus
  siRNA target sequence for D330028D13Rik (NM_172727.1,162-180).
ggatgatggagggaaactt

SEQ ID NO: 778086 - DNA, 19 bp, Mus musculus
  siRNA target sequence for D330028D13Rik (NM_172727.1,261-279).
gtcaccaacaggaatggat

SEQ ID NO: 778087 - DNA, 19 bp, Mus musculus
  siRNA target sequence for D330028D13Rik (NM_172727.1,314-332).
gtacccataggtataaaca

SEQ ID NO: 778088 - DNA, 19 bp, Mus musculus
  siRNA target sequence for D330028D13Rik (NM_172727.1,407-425).
gcaaggcttaccactatgt

SEQ ID NO: 778089 - DNA, 19 bp, Mus musculus
  siRNA target sequence for D330028D13Rik (NM_172727.1,487-505).
gccgctcttggcttcacat

SEQ ID NO: 778090 - DNA, 19 bp, Mus musculus
  siRNA target sequence for D330028D13Rik (NM_172727.1,649-667).
gcggcaatgggaggtttaa

SEQ ID NO: 778091 - DNA, 19 bp, Mus musculus
  siRNA target sequence for D330028D13Rik (NM_172727.1,651-669).
ggcaatgggaggtttaact

SEQ ID NO: 778092 - DNA, 19 bp, Mus musculus
  siRNA target sequence for D330028D13Rik (NM_172727.1,692-710).
gctacatgcgcttagatga

SEQ ID NO: 778093 - DNA, 19 bp, Mus musculus
  siRNA target sequence for D330028D13Rik (NM_172727.1,724-742).
gcaccctcggttgaagttt

SEQ ID NO: 778094 - DNA, 19 bp, Mus musculus
  siRNA target sequence for D330028D13Rik (NM_172727.1,725-743).
caccctcggttgaagtttt

SEQ ID NO: 778095 - DNA, 19 bp, Mus musculus
  siRNA target sequence for D330028D13Rik (NM_172727.1,728-746).
cctcggttgaagttttgga

SEQ ID NO: 778096 - DNA, 19 bp, Mus musculus
  siRNA target sequence for D330028D13Rik (NM_172727.1,786-804).
catgcacgcaccatctact

SEQ ID NO: 778097 - DNA, 19 bp, Mus musculus
  siRNA target sequence for D330028D13Rik (NM_172727.1,792-810).
cgcaccatctacttcttct

SEQ ID NO: 778098 - DNA, 19 bp, Mus musculus
  siRNA target sequence for D330028D13Rik (NM_172727.1,818-836).
cactagcaggcggtaatga

SEQ ID NO: 778099 - DNA, 19 bp, Mus musculus
  siRNA target sequence for D330028D13Rik (NM_172727.1,886-904).
gatatggcatactttgaaa

SEQ ID NO: 778100 - DNA, 19 bp, Mus musculus
  siRNA target sequence for C130022K22Rik (NM_172730.1,3081-3099).
cacagaagatcatagacaa

SEQ ID NO: 778101 - DNA, 19 bp, Mus musculus
  siRNA target sequence for C130022K22Rik (NM_172730.1,3129-3147).
cgagagagtcccaaatcga

SEQ ID NO: 778102 - DNA, 19 bp, Mus musculus
  siRNA target sequence for C130022K22Rik (NM_172730.1,3265-3283).
catgagaaaggatttacca

SEQ ID NO: 778103 - DNA, 19 bp, Mus musculus
  siRNA target sequence for C130022K22Rik (NM_172730.1,3292-3310).
ggagatggataaaaatctt

SEQ ID NO: 778104 - DNA, 19 bp, Mus musculus
  siRNA target sequence for C130022K22Rik (NM_172730.1,3313-3331).
ggggagactttttgttagt

SEQ ID NO: 778105 - DNA, 19 bp, Mus musculus
  siRNA target sequence for C130022K22Rik (NM_172730.1,3495-3513).
cctttgcccgagacaaaga

SEQ ID NO: 778106 - DNA, 19 bp, Mus musculus
  siRNA target sequence for C130022K22Rik (NM_172730.1,3559-3577).
gacaacagatcagagaata

SEQ ID NO: 778107 - DNA, 19 bp, Mus musculus
  siRNA target sequence for C130022K22Rik (NM_172730.1,3629-3647).
gcaaagcttcgacaaaaga

SEQ ID NO: 778108 - DNA, 19 bp, Mus musculus
  siRNA target sequence for C130022K22Rik (NM_172730.1,3766-3784).
caaggtggaggtcatcatt

SEQ ID NO: 778109 - DNA, 19 bp, Mus musculus
  siRNA target sequence for C130022K22Rik (NM_172730.1,3832-3850).
ggaccgagggaaagacttt

SEQ ID NO: 778110 - DNA, 19 bp, Mus musculus
  siRNA target sequence for C130022K22Rik (NM_172730.1,3911-3929).
gccccaccttcaaattact

SEQ ID NO: 778111 - DNA, 19 bp, Mus musculus
  siRNA target sequence for C130022K22Rik (NM_172730.1,3915-3933).
caccttcaaattactttgt

SEQ ID NO: 778112 - DNA, 19 bp, Mus musculus
  siRNA target sequence for C130022K22Rik (NM_172730.1,4109-4127).
gatatgatatcttattata

SEQ ID NO: 778113 - DNA, 19 bp, Mus musculus
  siRNA target sequence for 1110054L24Rik (NM_172735.1,33-51).
gctgtttgctgcgagtatt

SEQ ID NO: 778114 - DNA, 19 bp, Mus musculus
  siRNA target sequence for 1110054L24Rik (NM_172735.1,40-58).
gctgcgagtattgaaaaga

SEQ ID NO: 778115 - DNA, 19 bp, Mus musculus
  siRNA target sequence for 1110054L24Rik (NM_172735.1,205-223).
gaacagtctccattggaat

SEQ ID NO: 778116 - DNA, 19 bp, Mus musculus
  siRNA target sequence for 1110054L24Rik (NM_172735.1,295-313).
gagctgtctccacttatct

SEQ ID NO: 778117 - DNA, 19 bp, Mus musculus
  siRNA target sequence for 1110054L24Rik (NM_172735.1,304-322).
ccacttatctgcgctaaat

SEQ ID NO: 778118 - DNA, 19 bp, Mus musculus
  siRNA target sequence for 1110054L24Rik (NM_172735.1,305-323).
cacttatctgcgctaaata

SEQ ID NO: 778119 - DNA, 19 bp, Mus musculus
  siRNA target sequence for 1110054L24Rik (NM_172735.1,325-343).
ggttgggtcacagttgaat

SEQ ID NO: 778120 - DNA, 19 bp, Mus musculus
  siRNA target sequence for 1110054L24Rik (NM_172735.1,393-411).
gcagcccacgtttgacttt

SEQ ID NO: 778121 - DNA, 19 bp, Mus musculus
  siRNA target sequence for 1110054L24Rik (NM_172735.1,455-473).
gcagtgcccatgagaagtt

SEQ ID NO: 778122 - DNA, 19 bp, Mus musculus
  siRNA target sequence for 1110054L24Rik (NM_172735.1,460-478).
gcccatgagaagttctgtt

SEQ ID NO: 778123 - DNA, 19 bp, Mus musculus
  siRNA target sequence for 1110054L24Rik (NM_172735.1,461-479).
cccatgagaagttctgttt

SEQ ID NO: 778124 - DNA, 19 bp, Mus musculus
  siRNA target sequence for 1110054L24Rik (NM_172735.1,491-509).
gcccctctccagatagatt

SEQ ID NO: 778125 - DNA, 19 bp, Mus musculus
  siRNA target sequence for 1110054L24Rik (NM_172735.1,610-628).
ccagaggacttgaaaacta

SEQ ID NO: 778126 - DNA, 19 bp, Mus musculus
  siRNA target sequence for 1110054L24Rik (NM_172735.1,691-709).
cacgccgatgacaggaaaa

SEQ ID NO: 778127 - DNA, 19 bp, Mus musculus
  siRNA target sequence for 1110054L24Rik (NM_172735.1,693-711).
cgccgatgacaggaaaact

SEQ ID NO: 778128 - DNA, 19 bp, Mus musculus
  siRNA target sequence for 1110054L24Rik (NM_172735.1,694-712).
gccgatgacaggaaaacta

SEQ ID NO: 778129 - DNA, 19 bp, Mus musculus
  siRNA target sequence for 1110054L24Rik (NM_172735.1,696-714).
cgatgacaggaaaactaca

SEQ ID NO: 778130 - DNA, 19 bp, Mus musculus
  siRNA target sequence for 1110054L24Rik (NM_172735.1,804-822).
gctctccctgataacatgt

SEQ ID NO: 778131 - DNA, 19 bp, Mus musculus
  siRNA target sequence for 1110054L24Rik (NM_172735.1,805-823).
ctctccctgataacatgtt

SEQ ID NO: 778132 - DNA, 19 bp, Mus musculus
  siRNA target sequence for 1110054L24Rik (NM_172735.1,851-869).
ggggctttcagcagattga

SEQ ID NO: 778133 - DNA, 19 bp, Mus musculus
  siRNA target sequence for 1110054L24Rik (NM_172735.1,852-870).
gggctttcagcagattgaa

SEQ ID NO: 778134 - DNA, 19 bp, Mus musculus
  siRNA target sequence for 1110054L24Rik (NM_172735.1,1149-1167).
catgggaacaggagattct

SEQ ID NO: 778135 - DNA, 19 bp, Mus musculus
  siRNA target sequence for 1110054L24Rik (NM_172735.1,1247-1265).
ctccccgaagcttctttga

SEQ ID NO: 778136 - DNA, 19 bp, Mus musculus
  siRNA target sequence for 1110054L24Rik (NM_172735.1,1268-1286).
ccacctctcagcatagaga

SEQ ID NO: 778137 - DNA, 19 bp, Mus musculus
  siRNA target sequence for 1110054L24Rik (NM_172735.1,1269-1287).
cacctctcagcatagagat

SEQ ID NO: 778138 - DNA, 19 bp, Mus musculus
  siRNA target sequence for 1110054L24Rik (NM_172735.1,1289-1307).
ggtgcccgtgggtgaatat

SEQ ID NO: 778139 - DNA, 19 bp, Mus musculus
  siRNA target sequence for 1110054L24Rik (NM_172735.1,1310-1328).
cactcgtcaaagaaaccaa

SEQ ID NO: 778140 - DNA, 19 bp, Mus musculus
  siRNA target sequence for AW049671 (NM_172736.1,596-614).
ctggcatggatgagagtat

SEQ ID NO: 778141 - DNA, 19 bp, Mus musculus
  siRNA target sequence for AW049671 (NM_172736.1,679-697).
catgggacacatagtctaa

SEQ ID NO: 778142 - DNA, 19 bp, Mus musculus
  siRNA target sequence for AW049671 (NM_172736.1,788-806).
gcgagcctgccaaacctaa

SEQ ID NO: 778143 - DNA, 19 bp, Mus musculus
  siRNA target sequence for AW049671 (NM_172736.1,819-837).
gttatggacccgcatgaaa

SEQ ID NO: 778144 - DNA, 19 bp, Mus musculus
  siRNA target sequence for AW049671 (NM_172736.1,845-863).
ctgggactgggggtctaaa

SEQ ID NO: 778145 - DNA, 19 bp, Mus musculus
  siRNA target sequence for AW049671 (NM_172736.1,848-866).
ggactgggggtctaaaatt

SEQ ID NO: 778146 - DNA, 19 bp, Mus musculus
  siRNA target sequence for AW049671 (NM_172736.1,849-867).
gactgggggtctaaaattt

SEQ ID NO: 778147 - DNA, 19 bp, Mus musculus
  siRNA target sequence for AW049671 (NM_172736.1,851-869).
ctgggggtctaaaatttaa

SEQ ID NO: 778148 - DNA, 19 bp, Mus musculus
  siRNA target sequence for AW049671 (NM_172736.1,853-871).
gggggtctaaaatttaaca

SEQ ID NO: 778149 - DNA, 19 bp, Mus musculus
  siRNA target sequence for AW049671 (NM_172736.1,1021-1039).
gattggcctcaggatatga

SEQ ID NO: 778150 - DNA, 19 bp, Mus musculus
  siRNA target sequence for AW049671 (NM_172736.1,1027-1045).
cctcaggatatgaaggaat

SEQ ID NO: 778151 - DNA, 19 bp, Mus musculus
  siRNA target sequence for AW049671 (NM_172736.1,1028-1046).
ctcaggatatgaaggaata

SEQ ID NO: 778152 - DNA, 19 bp, Mus musculus
  siRNA target sequence for AW049671 (NM_172736.1,1437-1455).
gtctcccacgagacacttt

SEQ ID NO: 778153 - DNA, 19 bp, Mus musculus
  siRNA target sequence for AW049671 (NM_172736.1,1587-1605).
ggcgcagcgtggaaagaga

SEQ ID NO: 778154 - DNA, 19 bp, Mus musculus
  siRNA target sequence for AW049671 (NM_172736.1,1612-1630).
ctagctcccaccaaacgta

SEQ ID NO: 778155 - DNA, 19 bp, Mus musculus
  siRNA target sequence for AW049671 (NM_172736.1,1666-1684).
ccagagcgtgagcttaaga

SEQ ID NO: 778156 - DNA, 19 bp, Mus musculus
  siRNA target sequence for AW049671 (NM_172736.1,1667-1685).
cagagcgtgagcttaagaa

SEQ ID NO: 778157 - DNA, 19 bp, Mus musculus
  siRNA target sequence for AW049671 (NM_172736.1,2063-2081).
gtgaccatgaagaattcaa

SEQ ID NO: 778158 - DNA, 19 bp, Mus musculus
  siRNA target sequence for AW049671 (NM_172736.1,2088-2106).
ccaaacacagcttaagtca

SEQ ID NO: 778159 - DNA, 19 bp, Mus musculus
  siRNA target sequence for AW049671 (NM_172736.1,2105-2123).
cactgtacgcggaaaactt

SEQ ID NO: 778160 - DNA, 19 bp, Mus musculus
  siRNA target sequence for AW049671 (NM_172736.1,2126-2144).
caggcaatgtgggtgaatt

SEQ ID NO: 778161 - DNA, 19 bp, Mus musculus
  siRNA target sequence for AW049671 (NM_172736.1,2128-2146).
ggcaatgtgggtgaattta

SEQ ID NO: 778162 - DNA, 19 bp, Mus musculus
  siRNA target sequence for AW049671 (NM_172736.1,2130-2148).
caatgtgggtgaatttact

SEQ ID NO: 778163 - DNA, 19 bp, Mus musculus
  siRNA target sequence for AW049671 (NM_172736.1,2155-2173).
cgaatcctctactacatct

SEQ ID NO: 778164 - DNA, 19 bp, Mus musculus
  siRNA target sequence for AW049671 (NM_172736.1,2156-2174).
gaatcctctactacatctt

SEQ ID NO: 778165 - DNA, 19 bp, Mus musculus
  siRNA target sequence for AW049671 (NM_172736.1,2494-2512).
ctcccagtcccctgttcat

SEQ ID NO: 778166 - DNA, 19 bp, Mus musculus
  siRNA target sequence for D430041B17 (NM_172737.1,122-140).
gggcgcaccgggagatcaa

SEQ ID NO: 778167 - DNA, 19 bp, Mus musculus
  siRNA target sequence for D430041B17 (NM_172737.1,388-406).
ctgcactactccacactat

SEQ ID NO: 778168 - DNA, 19 bp, Mus musculus
  siRNA target sequence for D430041B17 (NM_172737.1,500-518).
gactggctgagaaagatct

SEQ ID NO: 778169 - DNA, 19 bp, Mus musculus
  siRNA target sequence for D430041B17 (NM_172737.1,662-680).
ccaacccacggcgtgttat

SEQ ID NO: 778170 - DNA, 19 bp, Mus musculus
  siRNA target sequence for D430041B17 (NM_172737.1,712-730).
cgagcttcccgctatgagt

SEQ ID NO: 778171 - DNA, 19 bp, Mus musculus
  siRNA target sequence for D430041B17 (NM_172737.1,713-731).
gagcttcccgctatgagtt

SEQ ID NO: 778172 - DNA, 19 bp, Mus musculus
  siRNA target sequence for 6430596G11Rik (NM_172739.1,669-687).
ggtggccactgggtaaaca

SEQ ID NO: 778173 - DNA, 19 bp, Mus musculus
  siRNA target sequence for 6430596G11Rik (NM_172739.1,670-688).
gtggccactgggtaaacaa

SEQ ID NO: 778174 - DNA, 19 bp, Mus musculus
  siRNA target sequence for 6430596G11Rik (NM_172739.1,672-690).
ggccactgggtaaacaagt

SEQ ID NO: 778175 - DNA, 19 bp, Mus musculus
  siRNA target sequence for 6430596G11Rik (NM_172739.1,680-698).
ggtaaacaagtccttttgt

SEQ ID NO: 778176 - DNA, 19 bp, Mus musculus
  siRNA target sequence for 6430596G11Rik (NM_172739.1,686-704).
caagtccttttgtctatgt

SEQ ID NO: 778177 - DNA, 19 bp, Mus musculus
  siRNA target sequence for 6430596G11Rik (NM_172739.1,777-795).
gcccttggaaggattgtta

SEQ ID NO: 778178 - DNA, 19 bp, Mus musculus
  siRNA target sequence for 6430596G11Rik (NM_172739.1,821-839).
ccagcacactacatacact

SEQ ID NO: 778179 - DNA, 19 bp, Mus musculus
  siRNA target sequence for 6430596G11Rik (NM_172739.1,827-845).
cactacatacactactata

SEQ ID NO: 778180 - DNA, 19 bp, Mus musculus
  siRNA target sequence for 6430596G11Rik (NM_172739.1,829-847).
ctacatacactactataga

SEQ ID NO: 778181 - DNA, 19 bp, Mus musculus
  siRNA target sequence for 6430596G11Rik (NM_172739.1,836-854).
cactactatagaaacacta

SEQ ID NO: 778182 - DNA, 19 bp, Mus musculus
  siRNA target sequence for B230312I18Rik (NM_172740.1,862-880).
gagggttcatactaacgaa

SEQ ID NO: 778183 - DNA, 19 bp, Mus musculus
  siRNA target sequence for B230312I18Rik (NM_172740.1,864-882).
gggttcatactaacgaaaa

SEQ ID NO: 778184 - DNA, 19 bp, Mus musculus
  siRNA target sequence for B230312I18Rik (NM_172740.1,1674-1692).
cacgtgagtctcaactaat

SEQ ID NO: 778185 - DNA, 19 bp, Mus musculus
  siRNA target sequence for B230312I18Rik (NM_172740.1,1734-1752).
gtaaggaatgccgaataga

SEQ ID NO: 778186 - DNA, 19 bp, Mus musculus
  siRNA target sequence for B230312I18Rik (NM_172740.1,1738-1756).
ggaatgccgaatagacttt

SEQ ID NO: 778187 - DNA, 19 bp, Mus musculus
  siRNA target sequence for B230312I18Rik (NM_172740.1,1744-1762).
ccgaatagactttaatcat

SEQ ID NO: 778188 - DNA, 19 bp, Mus musculus
  siRNA target sequence for B230312I18Rik (NM_172740.1,1760-1778).
catcattcgcaaattttta

SEQ ID NO: 778189 - DNA, 19 bp, Mus musculus
  siRNA target sequence for 4931406P16Rik (NM_172741.1,643-661).
cagcagggcatctctaagt

SEQ ID NO: 778190 - DNA, 19 bp, Mus musculus
  siRNA target sequence for 4931406P16Rik (NM_172741.1,755-773).
ccatgcagctcaaagatgt

SEQ ID NO: 778191 - DNA, 19 bp, Mus musculus
  siRNA target sequence for 4931406P16Rik (NM_172741.1,803-821).
gattgacctcagccataaa

SEQ ID NO: 778192 - DNA, 19 bp, Mus musculus
  siRNA target sequence for 4931406P16Rik (NM_172741.1,910-928).
gtgttggggcgatgtttct

SEQ ID NO: 778193 - DNA, 19 bp, Mus musculus
  siRNA target sequence for 4931406P16Rik (NM_172741.1,1011-1029).
ggtagttgtgccagaaaaa

SEQ ID NO: 778194 - DNA, 19 bp, Mus musculus
  siRNA target sequence for 4931406P16Rik (NM_172741.1,1099-1117).
gcagctgaggcgacatcta

SEQ ID NO: 778195 - DNA, 19 bp, Mus musculus
  siRNA target sequence for 4931406P16Rik (NM_172741.1,1102-1120).
gctgaggcgacatctagat

SEQ ID NO: 778196 - DNA, 19 bp, Mus musculus
  siRNA target sequence for 4931406P16Rik (NM_172741.1,1103-1121).
ctgaggcgacatctagatt

SEQ ID NO: 778197 - DNA, 19 bp, Mus musculus
  siRNA target sequence for 4931406P16Rik (NM_172741.1,1105-1123).
gaggcgacatctagattga

SEQ ID NO: 778198 - DNA, 19 bp, Mus musculus
  siRNA target sequence for 4931406P16Rik (NM_172741.1,1107-1125).
ggcgacatctagattgaga

SEQ ID NO: 778199 - DNA, 19 bp, Mus musculus
  siRNA target sequence for 4931406P16Rik (NM_172741.1,1154-1172).
gaatcgaagtccaacaact

SEQ ID NO: 778200 - DNA, 19 bp, Mus musculus
  siRNA target sequence for 4931406P16Rik (NM_172741.1,1158-1176).
cgaagtccaacaactcttt

SEQ ID NO: 778201 - DNA, 19 bp, Mus musculus
  siRNA target sequence for 4931406P16Rik (NM_172741.1,1159-1177).
gaagtccaacaactctttt

SEQ ID NO: 778202 - DNA, 19 bp, Mus musculus
  siRNA target sequence for 4931406P16Rik (NM_172741.1,1207-1225).
cagctaaaagagctaaaca

SEQ ID NO: 778203 - DNA, 19 bp, Mus musculus
  siRNA target sequence for 4931406P16Rik (NM_172741.1,1209-1227).
gctaaaagagctaaacata

SEQ ID NO: 778204 - DNA, 19 bp, Mus musculus
  siRNA target sequence for 4931406P16Rik (NM_172741.1,1276-1294).
ggccactgtgaatatgcaa

SEQ ID NO: 778205 - DNA, 19 bp, Mus musculus
  siRNA target sequence for 4931406P16Rik (NM_172741.1,1459-1477).
ggggtctcctttaatgagt

SEQ ID NO: 778206 - DNA, 19 bp, Mus musculus
  siRNA target sequence for 4931406P16Rik (NM_172741.1,1554-1572).
cacacctagggatgatctt

SEQ ID NO: 778207 - DNA, 19 bp, Mus musculus
  siRNA target sequence for 4931406P16Rik (NM_172741.1,1658-1676).
cagggctggtggttgttga

SEQ ID NO: 778208 - DNA, 19 bp, Mus musculus
  siRNA target sequence for 4931406P16Rik (NM_172741.1,1675-1693).
gacacagcacagattgaaa

SEQ ID NO: 778209 - DNA, 19 bp, Mus musculus
  siRNA target sequence for 4931406P16Rik (NM_172741.1,1753-1771).
ccatccacatggtgcttaa

SEQ ID NO: 778210 - DNA, 19 bp, Mus musculus
  siRNA target sequence for 4931406P16Rik (NM_172741.1,1754-1772).
catccacatggtgcttaaa

SEQ ID NO: 778211 - DNA, 19 bp, Mus musculus
  siRNA target sequence for 4931406P16Rik (NM_172741.1,1836-1854).
ggtggatgtgctttacaca

SEQ ID NO: 778212 - DNA, 19 bp, Mus musculus
  siRNA target sequence for 4931406P16Rik (NM_172741.1,1853-1871).
cagccgtgctagacctaaa

SEQ ID NO: 778213 - DNA, 19 bp, Mus musculus
  siRNA target sequence for 4931406P16Rik (NM_172741.1,1897-1915).
gctttaccctgtatacaga

SEQ ID NO: 778214 - DNA, 19 bp, Mus musculus
  siRNA target sequence for 4931406P16Rik (NM_172741.1,2014-2032).
ctgacatcccggttcacaa

SEQ ID NO: 778215 - DNA, 19 bp, Mus musculus
  siRNA target sequence for 4931406P16Rik (NM_172741.1,2023-2041).
cggttcacaaagaaagtgt

SEQ ID NO: 778216 - DNA, 19 bp, Mus musculus
  siRNA target sequence for 4931406P16Rik (NM_172741.1,2111-2129).
ccaaaatgatgggcaataa

SEQ ID NO: 778217 - DNA, 19 bp, Mus musculus
  siRNA target sequence for 4931406P16Rik (NM_172741.1,2118-2136).
gatgggcaataatattgat

SEQ ID NO: 778218 - DNA, 19 bp, Mus musculus
  siRNA target sequence for 4931406P16Rik (NM_172741.1,2138-2156).
cacggttacagagcatttt

SEQ ID NO: 778219 - DNA, 19 bp, Mus musculus
  siRNA target sequence for 4931406P16Rik (NM_172741.1,2140-2158).
cggttacagagcattttga

SEQ ID NO: 778220 - DNA, 19 bp, Mus musculus
  siRNA target sequence for 4931406P16Rik (NM_172741.1,2194-2212).
cagtcgtctcagaattcca

SEQ ID NO: 778221 - DNA, 19 bp, Mus musculus
  siRNA target sequence for 4931406P16Rik (NM_172741.1,2199-2217).
gtctcagaattccagtaat

SEQ ID NO: 778222 - DNA, 19 bp, Mus musculus
  siRNA target sequence for 4931406P16Rik (NM_172741.1,2319-2337).
gcaggaagtgatagatttt

SEQ ID NO: 778223 - DNA, 19 bp, Mus musculus
  siRNA target sequence for 4931406P16Rik (NM_172741.1,2382-2400).
ggtgacaaggcgtaactct

SEQ ID NO: 778224 - DNA, 19 bp, Mus musculus
  siRNA target sequence for 4931406P16Rik (NM_172741.1,2383-2401).
gtgacaaggcgtaactcta

SEQ ID NO: 778225 - DNA, 19 bp, Mus musculus
  siRNA target sequence for 4931406P16Rik (NM_172741.1,2755-2773).
ggtctagtgagcagctata

SEQ ID NO: 778226 - DNA, 19 bp, Mus musculus
  siRNA target sequence for 4931406P16Rik (NM_172741.1,2756-2774).
gtctagtgagcagctatat

SEQ ID NO: 778227 - DNA, 19 bp, Mus musculus
  siRNA target sequence for 4931406P16Rik (NM_172741.1,2768-2786).
gctatatggacaatatgat

SEQ ID NO: 778228 - DNA, 19 bp, Mus musculus
  siRNA target sequence for 4931406P16Rik (NM_172741.1,2837-2855).
caaaccgtgaccaaagtga

SEQ ID NO: 778229 - DNA, 19 bp, Mus musculus
  siRNA target sequence for 4931406P16Rik (NM_172741.1,2961-2979).
gaagcggcaagctcaacat

SEQ ID NO: 778230 - DNA, 19 bp, Mus musculus
  siRNA target sequence for 4931406P16Rik (NM_172741.1,3274-3292).
gacgtgaaccaggataaca

SEQ ID NO: 778231 - DNA, 19 bp, Mus musculus
  siRNA target sequence for 4931406P16Rik (NM_172741.1,3286-3304).
gataacaaaaccaaaacgt

SEQ ID NO: 778232 - DNA, 19 bp, Mus musculus
  siRNA target sequence for 4931406P16Rik (NM_172741.1,3448-3466).
gccaatgactgcaatacca

SEQ ID NO: 778233 - DNA, 19 bp, Mus musculus
  siRNA target sequence for 4931406P16Rik (NM_172741.1,3467-3485).
cctccttcacctatgttca

SEQ ID NO: 778234 - DNA, 19 bp, Mus musculus
  siRNA target sequence for BB128963 (NM_172742.1,171-189).
gttctccgagacgtactta

SEQ ID NO: 778235 - DNA, 19 bp, Mus musculus
  siRNA target sequence for BB128963 (NM_172742.1,274-292).
gagtttgccatcagcaaaa

SEQ ID NO: 778236 - DNA, 19 bp, Mus musculus
  siRNA target sequence for BB128963 (NM_172742.1,307-325).
gatgaaaagggcttgaaat

SEQ ID NO: 778237 - DNA, 19 bp, Mus musculus
  siRNA target sequence for BB128963 (NM_172742.1,361-379).
gcgaaggatcgcactcttt

SEQ ID NO: 778238 - DNA, 19 bp, Mus musculus
  siRNA target sequence for BB128963 (NM_172742.1,426-444).
cggctccaggaagtctttt

SEQ ID NO: 778239 - DNA, 19 bp, Mus musculus
  siRNA target sequence for BB128963 (NM_172742.1,526-544).
ctgctgcctcggagaaact

SEQ ID NO: 778240 - DNA, 19 bp, Mus musculus
  siRNA target sequence for BB128963 (NM_172742.1,670-688).
ctctccggaacacacataa

SEQ ID NO: 778241 - DNA, 19 bp, Mus musculus
  siRNA target sequence for BB128963 (NM_172742.1,674-692).
ccggaacacacataaaatt

SEQ ID NO: 778242 - DNA, 19 bp, Mus musculus
  siRNA target sequence for BB128963 (NM_172742.1,859-877).
gaccagagcaggatgtact

SEQ ID NO: 778243 - DNA, 19 bp, Mus musculus
  siRNA target sequence for BB128963 (NM_172742.1,958-976).
ctgtgtagacgaagcattt

SEQ ID NO: 778244 - DNA, 19 bp, Mus musculus
  siRNA target sequence for BB128963 (NM_172742.1,979-997).
ggaacgccattaagcaaat

SEQ ID NO: 778245 - DNA, 19 bp, Mus musculus
  siRNA target sequence for BB128963 (NM_172742.1,980-998).
gaacgccattaagcaaatt

SEQ ID NO: 778246 - DNA, 19 bp, Mus musculus
  siRNA target sequence for BB128963 (NM_172742.1,983-1001).
cgccattaagcaaattttt

SEQ ID NO: 778247 - DNA, 19 bp, Mus musculus
  siRNA target sequence for BB128963 (NM_172742.1,984-1002).
gccattaagcaaattttta

SEQ ID NO: 778248 - DNA, 19 bp, Mus musculus
  siRNA target sequence for BB128963 (NM_172742.1,1011-1029).
caaaatatggttatctact

SEQ ID NO: 778249 - DNA, 19 bp, Mus musculus
  siRNA target sequence for A430081P20Rik (NM_172743.1,595-613).
ggcatgaggacctactact

SEQ ID NO: 778250 - DNA, 19 bp, Mus musculus
  siRNA target sequence for A430081P20Rik (NM_172743.1,596-614).
gcatgaggacctactactt

SEQ ID NO: 778251 - DNA, 19 bp, Mus musculus
  siRNA target sequence for A430081P20Rik (NM_172743.1,992-1010).
cacagcgagccgagaagaa

SEQ ID NO: 778252 - DNA, 19 bp, Mus musculus
  siRNA target sequence for A430081P20Rik (NM_172743.1,1008-1026).
gaacggggtgccaccttat

SEQ ID NO: 778253 - DNA, 19 bp, Mus musculus
  siRNA target sequence for A430081P20Rik (NM_172743.1,1076-1094).
ccagggccaacccagaaaa

SEQ ID NO: 778254 - DNA, 19 bp, Mus musculus
  siRNA target sequence for A430081P20Rik (NM_172743.1,1077-1095).
cagggccaacccagaaaaa

SEQ ID NO: 778255 - DNA, 19 bp, Mus musculus
  siRNA target sequence for A430081P20Rik (NM_172743.1,1213-1231).
ctgtccttcccggaaaact

SEQ ID NO: 778256 - DNA, 19 bp, Mus musculus
  siRNA target sequence for A430081P20Rik (NM_172743.1,1245-1263).
caagagcactagacatctt

SEQ ID NO: 778257 - DNA, 19 bp, Mus musculus
  siRNA target sequence for A430081P20Rik (NM_172743.1,1294-1312).
ctgcccagcgactacaagt

SEQ ID NO: 778258 - DNA, 19 bp, Mus musculus
  siRNA target sequence for A430081P20Rik (NM_172743.1,1675-1693).
ggtcatgctgccaagaact

SEQ ID NO: 778259 - DNA, 19 bp, Mus musculus
  siRNA target sequence for A430081P20Rik (NM_172743.1,1720-1738).
ccctccatgggctacatga

SEQ ID NO: 778260 - DNA, 19 bp, Mus musculus
  siRNA target sequence for A430081P20Rik (NM_172743.1,1749-1767).
gagcgctcccagcttacat

SEQ ID NO: 778261 - DNA, 19 bp, Mus musculus
  siRNA target sequence for A430081P20Rik (NM_172743.1,1835-1853).
caggccgagaccttcttaa

SEQ ID NO: 778262 - DNA, 19 bp, Mus musculus
  siRNA target sequence for A430081P20Rik (NM_172743.1,1878-1896).
gatcgccgagagtgacatt

SEQ ID NO: 778263 - DNA, 19 bp, Mus musculus
  siRNA target sequence for A430081P20Rik (NM_172743.1,1883-1901).
ccgagagtgacattgatgt

SEQ ID NO: 778264 - DNA, 19 bp, Mus musculus
  siRNA target sequence for A430081P20Rik (NM_172743.1,2124-2142).
gtccacggagatggaaaat

SEQ ID NO: 778265 - DNA, 19 bp, Mus musculus
  siRNA target sequence for A430081P20Rik (NM_172743.1,2127-2145).
cacggagatggaaaatgca

SEQ ID NO: 778266 - DNA, 19 bp, Mus musculus
  siRNA target sequence for A430081P20Rik (NM_172743.1,2282-2300).
caggcctgagtgcgaataa

SEQ ID NO: 778267 - DNA, 19 bp, Mus musculus
  siRNA target sequence for A430081P20Rik (NM_172743.1,2287-2305).
ctgagtgcgaataaagaga

SEQ ID NO: 778268 - DNA, 19 bp, Mus musculus
  siRNA target sequence for A430081P20Rik (NM_172743.1,2293-2311).
gcgaataaagagaactaca

SEQ ID NO: 778269 - DNA, 19 bp, Mus musculus
  siRNA target sequence for A430081P20Rik (NM_172743.1,2316-2334).
cctggtgggatctgtcaaa

SEQ ID NO: 778270 - DNA, 19 bp, Mus musculus
  siRNA target sequence for A430081P20Rik (NM_172743.1,2322-2340).
gggatctgtcaaaaatcca

SEQ ID NO: 778271 - DNA, 19 bp, Mus musculus
  siRNA target sequence for A430081P20Rik (NM_172743.1,2345-2363).
gaaaaacggtgcctttgtt

SEQ ID NO: 778272 - DNA, 19 bp, Mus musculus
  siRNA target sequence for A430081P20Rik (NM_172743.1,2591-2609).
caccacttcctgaactcta

SEQ ID NO: 778273 - DNA, 19 bp, Mus musculus
  siRNA target sequence for A430081P20Rik (NM_172743.1,2738-2756).
gtgtgaatggggacttgaa

SEQ ID NO: 778274 - DNA, 19 bp, Mus musculus
  siRNA target sequence for A430081P20Rik (NM_172743.1,2944-2962).
gggctgaatgccgaaaaca

SEQ ID NO: 778275 - DNA, 19 bp, Mus musculus
  siRNA target sequence for A430081P20Rik (NM_172743.1,3183-3201).
gaagcgagaacaagagttt

SEQ ID NO: 778276 - DNA, 19 bp, Mus musculus
  siRNA target sequence for A430081P20Rik (NM_172743.1,3359-3377).
ccatccccgagcgatatgt

SEQ ID NO: 778277 - DNA, 19 bp, Mus musculus
  siRNA target sequence for A430081P20Rik (NM_172743.1,3441-3459).
gaagatacggaatatcctt

SEQ ID NO: 778278 - DNA, 19 bp, Mus musculus
  siRNA target sequence for A430081P20Rik (NM_172743.1,3538-3556).
gagcaggaacggataatca

SEQ ID NO: 778279 - DNA, 19 bp, Mus musculus
  siRNA target sequence for A430081P20Rik (NM_172743.1,3547-3565).
cggataatcaacatttcct

SEQ ID NO: 778280 - DNA, 19 bp, Mus musculus
  siRNA target sequence for A430081P20Rik (NM_172743.1,3548-3566).
ggataatcaacatttccta

SEQ ID NO: 778281 - DNA, 19 bp, Mus musculus
  siRNA target sequence for A430081P20Rik (NM_172743.1,3549-3567).
gataatcaacatttcctat

SEQ ID NO: 778282 - DNA, 19 bp, Mus musculus
  siRNA target sequence for A430081P20Rik (NM_172743.1,3604-3622).
gtagcagcccaggcaataa

SEQ ID NO: 778283 - DNA, 19 bp, Mus musculus
  siRNA target sequence for 4732427B05 (NM_172744.1,343-361).
ctaagccactctgaatcta

SEQ ID NO: 778284 - DNA, 19 bp, Mus musculus
  siRNA target sequence for 4732427B05 (NM_172744.1,347-365).
gccactctgaatctataaa

SEQ ID NO: 778285 - DNA, 19 bp, Mus musculus
  siRNA target sequence for 4732427B05 (NM_172744.1,445-463).
gttgaacctcaatccttta

SEQ ID NO: 778286 - DNA, 19 bp, Mus musculus
  siRNA target sequence for 4732427B05 (NM_172744.1,448-466).
gaacctcaatcctttaact

SEQ ID NO: 778287 - DNA, 19 bp, Mus musculus
  siRNA target sequence for 4732427B05 (NM_172744.1,452-470).
ctcaatcctttaactgtaa

SEQ ID NO: 778288 - DNA, 19 bp, Mus musculus
  siRNA target sequence for 4732427B05 (NM_172744.1,514-532).
caaggacaacttttgcata

SEQ ID NO: 778289 - DNA, 19 bp, Mus musculus
  siRNA target sequence for 4732427B05 (NM_172744.1,569-587).
cgcttccggggacaacaaa

SEQ ID NO: 778290 - DNA, 19 bp, Mus musculus
  siRNA target sequence for 4732427B05 (NM_172744.1,571-589).
cttccggggacaacaaaga

SEQ ID NO: 778291 - DNA, 19 bp, Mus musculus
  siRNA target sequence for 4732427B05 (NM_172744.1,657-675).
ccttggtaagcatcgaaaa

SEQ ID NO: 778292 - DNA, 19 bp, Mus musculus
  siRNA target sequence for 4732427B05 (NM_172744.1,676-694).
gggcaagaatcaatcagta

SEQ ID NO: 778293 - DNA, 19 bp, Mus musculus
  siRNA target sequence for 4732427B05 (NM_172744.1,782-800).
gaattggagagggtatatt

SEQ ID NO: 778294 - DNA, 19 bp, Mus musculus
  siRNA target sequence for 4732427B05 (NM_172744.1,808-826).
ccatctggcaaatcagaaa

SEQ ID NO: 778295 - DNA, 19 bp, Mus musculus
  siRNA target sequence for 4732427B05 (NM_172744.1,922-940).
gagcatacacctcctaaaa

SEQ ID NO: 778296 - DNA, 19 bp, Mus musculus
  siRNA target sequence for 4732427B05 (NM_172744.1,924-942).
gcatacacctcctaaaagt

SEQ ID NO: 778297 - DNA, 19 bp, Mus musculus
  siRNA target sequence for 4732427B05 (NM_172744.1,934-952).
cctaaaagtggctgcaaaa

SEQ ID NO: 778298 - DNA, 19 bp, Mus musculus
  siRNA target sequence for 4732427B05 (NM_172744.1,1019-1037).
cagtaaactcagtagtata

SEQ ID NO: 778299 - DNA, 19 bp, Mus musculus
  siRNA target sequence for 4732427B05 (NM_172744.1,1021-1039).
gtaaactcagtagtatata

SEQ ID NO: 778300 - DNA, 19 bp, Mus musculus
  siRNA target sequence for 4732427B05 (NM_172744.1,1026-1044).
ctcagtagtatataaagct

SEQ ID NO: 778301 - DNA, 19 bp, Mus musculus
  siRNA target sequence for 4732427B05 (NM_172744.1,1065-1083).
gccaggaagtcccaattct

SEQ ID NO: 778302 - DNA, 19 bp, Mus musculus
  siRNA target sequence for 4732427B05 (NM_172744.1,1066-1084).
ccaggaagtcccaattctt

SEQ ID NO: 778303 - DNA, 19 bp, Mus musculus
  siRNA target sequence for 4732427B05 (NM_172744.1,1076-1094).
ccaattcttgttctgtaaa

SEQ ID NO: 778304 - DNA, 19 bp, Mus musculus
  siRNA target sequence for 4732427B05 (NM_172744.1,1077-1095).
caattcttgttctgtaaat

SEQ ID NO: 778305 - DNA, 19 bp, Mus musculus
  siRNA target sequence for 4732427B05 (NM_172744.1,1082-1100).
cttgttctgtaaatgatct

SEQ ID NO: 778306 - DNA, 19 bp, Mus musculus
  siRNA target sequence for 4732427B05 (NM_172744.1,1096-1114).
gatctcacgcatagtaact

SEQ ID NO: 778307 - DNA, 19 bp, Mus musculus
  siRNA target sequence for 4732427B05 (NM_172744.1,1157-1175).
ccagtaacactgttgatga

SEQ ID NO: 778308 - DNA, 19 bp, Mus musculus
  siRNA target sequence for 4732427B05 (NM_172744.1,1210-1228).
ggtccatctaagaacttca

SEQ ID NO: 778309 - DNA, 19 bp, Mus musculus
  siRNA target sequence for 4732427B05 (NM_172744.1,1284-1302).
gcttgaaggccttctgttt

SEQ ID NO: 778310 - DNA, 19 bp, Mus musculus
  siRNA target sequence for 4732427B05 (NM_172744.1,1299-1317).
gtttcctgcagaatactat

SEQ ID NO: 778311 - DNA, 19 bp, Mus musculus
  siRNA target sequence for 4732427B05 (NM_172744.1,1303-1321).
cctgcagaatactatgtta

SEQ ID NO: 778312 - DNA, 19 bp, Mus musculus
  siRNA target sequence for 4732427B05 (NM_172744.1,1331-1349).
gtcgtatgtcagattgtca

SEQ ID NO: 778313 - DNA, 19 bp, Mus musculus
  siRNA target sequence for 4732427B05 (NM_172744.1,1382-1400).
gtcatttgggtgtcaaaaa

SEQ ID NO: 778314 - DNA, 19 bp, Mus musculus
  siRNA target sequence for 4732427B05 (NM_172744.1,1458-1476).
cactgaccagagtgaaagt

SEQ ID NO: 778315 - DNA, 19 bp, Mus musculus
  siRNA target sequence for 4732427B05 (NM_172744.1,1603-1621).
ggacacagagggaaacgaa

SEQ ID NO: 778316 - DNA, 19 bp, Mus musculus
  siRNA target sequence for 4732427B05 (NM_172744.1,1702-1720).
ggcaaattcaccaagcata

SEQ ID NO: 778317 - DNA, 19 bp, Mus musculus
  siRNA target sequence for 4732427B05 (NM_172744.1,1728-1746).
gaacagaggcgtggttatt

SEQ ID NO: 778318 - DNA, 19 bp, Mus musculus
  siRNA target sequence for 4732427B05 (NM_172744.1,1731-1749).
cagaggcgtggttattcat

SEQ ID NO: 778319 - DNA, 19 bp, Mus musculus
  siRNA target sequence for 4732427B05 (NM_172744.1,1736-1754).
gcgtggttattcatggtaa

SEQ ID NO: 778320 - DNA, 19 bp, Mus musculus
  siRNA target sequence for 4732427B05 (NM_172744.1,1757-1775).
gccgaaggcgagtcagatt

SEQ ID NO: 778321 - DNA, 19 bp, Mus musculus
  siRNA target sequence for 4732427B05 (NM_172744.1,1766-1784).
gagtcagattgcgtttgat

SEQ ID NO: 778322 - DNA, 19 bp, Mus musculus
  siRNA target sequence for 4732427B05 (NM_172744.1,1768-1786).
gtcagattgcgtttgatgt

SEQ ID NO: 778323 - DNA, 19 bp, Mus musculus
  siRNA target sequence for B130036O03 (NM_172746.2,493-511).
gatgagatgcgaaaattca

SEQ ID NO: 778324 - DNA, 19 bp, Mus musculus
  siRNA target sequence for B130036O03 (NM_172746.2,558-576).
cgccatcgtgcgacagaaa

SEQ ID NO: 778325 - DNA, 19 bp, Mus musculus
  siRNA target sequence for B130036O03 (NM_172746.2,559-577).
gccatcgtgcgacagaaat

SEQ ID NO: 778326 - DNA, 19 bp, Mus musculus
  siRNA target sequence for B130036O03 (NM_172746.2,560-578).
ccatcgtgcgacagaaatt

SEQ ID NO: 778327 - DNA, 19 bp, Mus musculus
  siRNA target sequence for B130036O03 (NM_172746.2,561-579).
catcgtgcgacagaaattt

SEQ ID NO: 778328 - DNA, 19 bp, Mus musculus
  siRNA target sequence for B130036O03 (NM_172746.2,565-583).
gtgcgacagaaatttttga

SEQ ID NO: 778329 - DNA, 19 bp, Mus musculus
  siRNA target sequence for B130036O03 (NM_172746.2,588-606).
cgtgggtcgggatcatctt

SEQ ID NO: 778330 - DNA, 19 bp, Mus musculus
  siRNA target sequence for B130036O03 (NM_172746.2,694-712).
ccagactttatcaaagtga

SEQ ID NO: 778331 - DNA, 19 bp, Mus musculus
  siRNA target sequence for B130036O03 (NM_172746.2,695-713).
cagactttatcaaagtgaa

SEQ ID NO: 778332 - DNA, 19 bp, Mus musculus
  siRNA target sequence for B130036O03 (NM_172746.2,728-746).
cctgcagtgacccaaagaa

SEQ ID NO: 778333 - DNA, 19 bp, Mus musculus
  siRNA target sequence for B130036O03 (NM_172746.2,731-749).
gcagtgacccaaagaagaa

SEQ ID NO: 778334 - DNA, 19 bp, Mus musculus
  siRNA target sequence for B130036O03 (NM_172746.2,747-765).
gaaaaggttccgctttaat

SEQ ID NO: 778335 - DNA, 19 bp, Mus musculus
  siRNA target sequence for B130036O03 (NM_172746.2,806-824).
gctcaggaccctcaacaaa

SEQ ID NO: 778336 - DNA, 19 bp, Mus musculus
  siRNA target sequence for B130036O03 (NM_172746.2,848-866).
gtctaagaagagccttaaa

SEQ ID NO: 778337 - DNA, 19 bp, Mus musculus
  siRNA target sequence for B130036O03 (NM_172746.2,1556-1574).
gcagcagggatgacagtaa

SEQ ID NO: 778338 - DNA, 19 bp, Mus musculus
  siRNA target sequence for B130036O03 (NM_172746.2,1597-1615).
gctcaaggcactacaaagt

SEQ ID NO: 778339 - DNA, 19 bp, Mus musculus
  siRNA target sequence for B130036O03 (NM_172746.2,1623-1641).
cctaggcagcagtaatggt

SEQ ID NO: 778340 - DNA, 19 bp, Mus musculus
  siRNA target sequence for B130036O03 (NM_172746.2,1737-1755).
cggccaggcccgaagttgt

SEQ ID NO: 778341 - DNA, 19 bp, Mus musculus
  siRNA target sequence for B130036O03 (NM_172746.2,1738-1756).
ggccaggcccgaagttgtt

SEQ ID NO: 778342 - DNA, 19 bp, Mus musculus
  siRNA target sequence for B130036O03 (NM_172746.2,1740-1758).
ccaggcccgaagttgttca

SEQ ID NO: 778343 - DNA, 19 bp, Mus musculus
  siRNA target sequence for B130036O03 (NM_172746.2,1741-1759).
caggcccgaagttgttcat

SEQ ID NO: 778344 - DNA, 19 bp, Mus musculus
  siRNA target sequence for B130036O03 (NM_172746.2,1884-1902).
cccagctgtggctagacta

SEQ ID NO: 778345 - DNA, 19 bp, Mus musculus
  siRNA target sequence for B130036O03 (NM_172746.2,1886-1904).
cagctgtggctagactaaa

SEQ ID NO: 778346 - DNA, 19 bp, Mus musculus
  siRNA target sequence for B130036O03 (NM_172746.2,1895-1913).
ctagactaaagcgttacat

SEQ ID NO: 778347 - DNA, 19 bp, Mus musculus
  siRNA target sequence for B130036O03 (NM_172746.2,1922-1940).
gtggtgcccaccgaaacta

SEQ ID NO: 778348 - DNA, 19 bp, Mus musculus
  siRNA target sequence for B130036O03 (NM_172746.2,1925-1943).
gtgcccaccgaaactacaa

SEQ ID NO: 778349 - DNA, 19 bp, Mus musculus
  siRNA target sequence for B130036O03 (NM_172746.2,2168-2186).
cctccccaggagagactta

SEQ ID NO: 778350 - DNA, 19 bp, Mus musculus
  siRNA target sequence for B130036O03 (NM_172746.2,2169-2187).
ctccccaggagagacttat

SEQ ID NO: 778351 - DNA, 19 bp, Mus musculus
  siRNA target sequence for B130036O03 (NM_172746.2,2240-2258).
ggtcccatatgcgtgatat

SEQ ID NO: 778352 - DNA, 19 bp, Mus musculus
  siRNA target sequence for B130036O03 (NM_172746.2,2243-2261).
cccatatgcgtgatatcat

SEQ ID NO: 778353 - DNA, 19 bp, Mus musculus
  siRNA target sequence for B130036O03 (NM_172746.2,2245-2263).
catatgcgtgatatcatca

SEQ ID NO: 778354 - DNA, 19 bp, Mus musculus
  siRNA target sequence for 6820429M01 (NM_172749.1,220-238).
gacatgcccctctcattca

SEQ ID NO: 778355 - DNA, 19 bp, Mus musculus
  siRNA target sequence for 6820429M01 (NM_172749.1,251-269).
gtcagcgccactttcctaa

SEQ ID NO: 778356 - DNA, 19 bp, Mus musculus
  siRNA target sequence for 6820429M01 (NM_172749.1,422-440).
ccacctgtggcaaggattt

SEQ ID NO: 778357 - DNA, 19 bp, Mus musculus
  siRNA target sequence for 6820429M01 (NM_172749.1,454-472).
gccctccagagccatatga

SEQ ID NO: 778358 - DNA, 19 bp, Mus musculus
  siRNA target sequence for 6820429M01 (NM_172749.1,682-700).
gatccacctaccaaacaaa

SEQ ID NO: 778359 - DNA, 19 bp, Mus musculus
  siRNA target sequence for 6820429M01 (NM_172749.1,701-719).
gacaaggcttagaaatgca

SEQ ID NO: 778360 - DNA, 19 bp, Mus musculus
  siRNA target sequence for 6820429M01 (NM_172749.1,717-735).
gcagccagattctaaagga

SEQ ID NO: 778361 - DNA, 19 bp, Mus musculus
  siRNA target sequence for 6820429M01 (NM_172749.1,797-815).
cgagcaaccttcttagcaa

SEQ ID NO: 778362 - DNA, 19 bp, Mus musculus
  siRNA target sequence for 6820429M01 (NM_172749.1,798-816).
gagcaaccttcttagcaat

SEQ ID NO: 778363 - DNA, 19 bp, Mus musculus
  siRNA target sequence for 6820429M01 (NM_172749.1,800-818).
gcaaccttcttagcaattt

SEQ ID NO: 778364 - DNA, 19 bp, Mus musculus
  siRNA target sequence for 6820429M01 (NM_172749.1,804-822).
ccttcttagcaatttggaa

SEQ ID NO: 778365 - DNA, 19 bp, Mus musculus
  siRNA target sequence for 6820429M01 (NM_172749.1,833-851).
ctgaatcagtagtgaactt

SEQ ID NO: 778366 - DNA, 19 bp, Mus musculus
  siRNA target sequence for 6820429M01 (NM_172749.1,835-853).
gaatcagtagtgaacttca

SEQ ID NO: 778367 - DNA, 19 bp, Mus musculus
  siRNA target sequence for 6820429M01 (NM_172749.1,889-907).
gagggggagcgaaagtaca

SEQ ID NO: 778368 - DNA, 19 bp, Mus musculus
  siRNA target sequence for 6820429M01 (NM_172749.1,921-939).
cgggaagacctataagcat

SEQ ID NO: 778369 - DNA, 19 bp, Mus musculus
  siRNA target sequence for 6820429M01 (NM_172749.1,988-1006).
ccttgttccatctgtttca

SEQ ID NO: 778370 - DNA, 19 bp, Mus musculus
  siRNA target sequence for 6820429M01 (NM_172749.1,1211-1229).
gttggggtcagctatctaa

SEQ ID NO: 778371 - DNA, 19 bp, Mus musculus
  siRNA target sequence for 6820429M01 (NM_172749.1,1296-1314).
ggaatatcgacctttctgt

SEQ ID NO: 778372 - DNA, 19 bp, Mus musculus
  siRNA target sequence for 6820429M01 (NM_172749.1,1297-1315).
gaatatcgacctttctgtt

SEQ ID NO: 778373 - DNA, 19 bp, Mus musculus
  siRNA target sequence for 6820429M01 (NM_172749.1,1352-1370).
gtctcatcaaccatcgaaa

SEQ ID NO: 778374 - DNA, 19 bp, Mus musculus
  siRNA target sequence for 6820429M01 (NM_172749.1,1354-1372).
ctcatcaaccatcgaaaaa

SEQ ID NO: 778375 - DNA, 19 bp, Mus musculus
  siRNA target sequence for 6820429M01 (NM_172749.1,1373-1391).
gccaccaaacaggtatcta

SEQ ID NO: 778376 - DNA, 19 bp, Mus musculus
  siRNA target sequence for 6820429M01 (NM_172749.1,1443-1461).
ccatattcgtgctcatcat

SEQ ID NO: 778377 - DNA, 19 bp, Mus musculus
  siRNA target sequence for 6820429M01 (NM_172749.1,1444-1462).
catattcgtgctcatcata

SEQ ID NO: 778378 - DNA, 19 bp, Mus musculus
  siRNA target sequence for 6820429M01 (NM_172749.1,1526-1544).
ccgagaatactccaaaagt

SEQ ID NO: 778379 - DNA, 19 bp, Mus musculus
  siRNA target sequence for 6820429M01 (NM_172749.1,1570-1588).
gaccatcgtccctataagt

SEQ ID NO: 778380 - DNA, 19 bp, Mus musculus
  siRNA target sequence for 6820429M01 (NM_172749.1,1572-1590).
ccatcgtccctataagtgt

SEQ ID NO: 778381 - DNA, 19 bp, Mus musculus
  siRNA target sequence for 6820429M01 (NM_172749.1,1660-1678).
gagtaccagtgttcacttt

SEQ ID NO: 778382 - DNA, 19 bp, Mus musculus
  siRNA target sequence for 6820429M01 (NM_172749.1,1737-1755).
ggctacacgccgaagtaca

SEQ ID NO: 778383 - DNA, 19 bp, Mus musculus
  siRNA target sequence for 6820429M01 (NM_172749.1,1775-1793).
cacccagccctgtcaagaa

SEQ ID NO: 778384 - DNA, 19 bp, Mus musculus
  siRNA target sequence for 6820429M01 (NM_172749.1,1788-1806).
caagaaagaacaacatgat

SEQ ID NO: 778385 - DNA, 19 bp, Mus musculus
  siRNA target sequence for 6820429M01 (NM_172749.1,1916-1934).
gtagcatttgtggaatgtt

SEQ ID NO: 778386 - DNA, 19 bp, Mus musculus
  siRNA target sequence for 6820429M01 (NM_172749.1,1919-1937).
gcatttgtggaatgttgtt

SEQ ID NO: 778387 - DNA, 19 bp, Mus musculus
  siRNA target sequence for 6820429M01 (NM_172749.1,1928-1946).
gaatgttgtttgaagatct

SEQ ID NO: 778388 - DNA, 19 bp, Mus musculus
  siRNA target sequence for 6820429M01 (NM_172749.1,1932-1950).
gttgtttgaagatctcaaa

SEQ ID NO: 778389 - DNA, 19 bp, Mus musculus
  siRNA target sequence for 6820429M01 (NM_172749.1,2007-2025).
cacggtgtcaccaactaga

SEQ ID NO: 778390 - DNA, 19 bp, Mus musculus
  siRNA target sequence for 6820429M01 (NM_172749.1,2010-2028).
ggtgtcaccaactagaaca

SEQ ID NO: 778391 - DNA, 19 bp, Mus musculus
  siRNA target sequence for 6820429M01 (NM_172749.1,2017-2035).
ccaactagaacatttgctt

SEQ ID NO: 778392 - DNA, 19 bp, Mus musculus
  siRNA target sequence for 6820429M01 (NM_172749.1,2066-2084).
caggcagccttattaacca

SEQ ID NO: 778393 - DNA, 19 bp, Mus musculus
  siRNA target sequence for 6820429M01 (NM_172749.1,2068-2086).
ggcagccttattaaccata

SEQ ID NO: 778394 - DNA, 19 bp, Mus musculus
  siRNA target sequence for 6820429M01 (NM_172749.1,2124-2142).
ctgtgccaagcatttccat

SEQ ID NO: 778395 - DNA, 19 bp, Mus musculus
  siRNA target sequence for 6820429M01 (NM_172749.1,2277-2295).
cgacgaggacccagattct

SEQ ID NO: 778396 - DNA, 19 bp, Mus musculus
  siRNA target sequence for 6820429M01 (NM_172749.1,2278-2296).
gacgaggacccagattctt

SEQ ID NO: 778397 - DNA, 19 bp, Mus musculus
  siRNA target sequence for 6820429M01 (NM_172749.1,2375-2393).
ctagaggcaacgaatgtgt

SEQ ID NO: 778398 - DNA, 19 bp, Mus musculus
  siRNA target sequence for 6820429M01 (NM_172749.1,2381-2399).
gcaacgaatgtgtgcttaa

SEQ ID NO: 778399 - DNA, 19 bp, Mus musculus
  siRNA target sequence for 6820429M01 (NM_172749.1,2382-2400).
caacgaatgtgtgcttaaa

SEQ ID NO: 778400 - DNA, 19 bp, Mus musculus
  siRNA target sequence for 6820429M01 (NM_172749.1,2411-2429).
cctgttttctgggtgataa

SEQ ID NO: 778401 - DNA, 19 bp, Mus musculus
  siRNA target sequence for 6820429M01 (NM_172749.1,2412-2430).
ctgttttctgggtgataaa

SEQ ID NO: 778402 - DNA, 19 bp, Mus musculus
  siRNA target sequence for 6820429M01 (NM_172749.1,2697-2715).
ccctccaggcatctatcaa

SEQ ID NO: 778403 - DNA, 19 bp, Mus musculus
  siRNA target sequence for 6820429M01 (NM_172749.1,2698-2716).
cctccaggcatctatcaat

SEQ ID NO: 778404 - DNA, 19 bp, Mus musculus
  siRNA target sequence for 6820429M01 (NM_172749.1,2724-2742).
ctgtccaaaggaatttgat

SEQ ID NO: 778405 - DNA, 19 bp, Mus musculus
  siRNA target sequence for 6820429M01 (NM_172749.1,2819-2837).
gcctgtgcggtatgatctt

SEQ ID NO: 778406 - DNA, 19 bp, Mus musculus
  siRNA target sequence for 6820429M01 (NM_172749.1,2820-2838).
cctgtgcggtatgatcttt

SEQ ID NO: 778407 - DNA, 19 bp, Mus musculus
  siRNA target sequence for 6820429M01 (NM_172749.1,3020-3038).
gagcaggttatggtcatat

SEQ ID NO: 778408 - DNA, 19 bp, Mus musculus
  siRNA target sequence for 6820429M01 (NM_172749.1,3022-3040).
gcaggttatggtcatattt

SEQ ID NO: 778409 - DNA, 19 bp, Mus musculus
  siRNA target sequence for 6820429M01 (NM_172749.1,3152-3170).
gtgatgcaacagaaatggt

SEQ ID NO: 778410 - DNA, 19 bp, Mus musculus
  siRNA target sequence for 6820429M01 (NM_172749.1,3198-3216).
gacctccgtctcagaagaa

SEQ ID NO: 778411 - DNA, 19 bp, Mus musculus
  siRNA target sequence for 6820429M01 (NM_172749.1,3214-3232).
gaaggtggggacataaagt

SEQ ID NO: 778412 - DNA, 19 bp, Mus musculus
  siRNA target sequence for 6820429M01 (NM_172749.1,3304-3322).
caccctcgccctttccaat

SEQ ID NO: 778413 - DNA, 19 bp, Mus musculus
  siRNA target sequence for 6820429M01 (NM_172749.1,3307-3325).
cctcgccctttccaatgta

SEQ ID NO: 778414 - DNA, 19 bp, Mus musculus
  siRNA target sequence for 6820429M01 (NM_172749.1,3308-3326).
ctcgccctttccaatgtaa

SEQ ID NO: 778415 - DNA, 19 bp, Mus musculus
  siRNA target sequence for 6820429M01 (NM_172749.1,3435-3453).
ggctgcctaccggaatcat

SEQ ID NO: 778416 - DNA, 19 bp, Mus musculus
  siRNA target sequence for Arhgef10 (NM_172751.1,484-502).
gacgttccgagggaaaact

SEQ ID NO: 778417 - DNA, 19 bp, Mus musculus
  siRNA target sequence for Arhgef10 (NM_172751.1,513-531).
gccagatgaaatgatttat

SEQ ID NO: 778418 - DNA, 19 bp, Mus musculus
  siRNA target sequence for Arhgef10 (NM_172751.1,584-602).
ggagttccagcgaattcga

SEQ ID NO: 778419 - DNA, 19 bp, Mus musculus
  siRNA target sequence for Arhgef10 (NM_172751.1,585-603).
gagttccagcgaattcgaa

SEQ ID NO: 778420 - DNA, 19 bp, Mus musculus
  siRNA target sequence for Arhgef10 (NM_172751.1,793-811).
cggaagatgcagaagctta

SEQ ID NO: 778421 - DNA, 19 bp, Mus musculus
  siRNA target sequence for Arhgef10 (NM_172751.1,899-917).
ccttggtctctcaagatca

SEQ ID NO: 778422 - DNA, 19 bp, Mus musculus
  siRNA target sequence for Arhgef10 (NM_172751.1,1020-1038).
ggttgtgagaagatacatt

SEQ ID NO: 778423 - DNA, 19 bp, Mus musculus
  siRNA target sequence for Arhgef10 (NM_172751.1,1075-1093).
gatgctctccggaggattt

SEQ ID NO: 778424 - DNA, 19 bp, Mus musculus
  siRNA target sequence for Arhgef10 (NM_172751.1,1085-1103).
ggaggattttggagcaata

SEQ ID NO: 778425 - DNA, 19 bp, Mus musculus
  siRNA target sequence for Arhgef10 (NM_172751.1,1088-1106).
ggattttggagcaatatga

SEQ ID NO: 778426 - DNA, 19 bp, Mus musculus
  siRNA target sequence for Arhgef10 (NM_172751.1,1238-1256).
gggatgtcgtggaaacaat

SEQ ID NO: 778427 - DNA, 19 bp, Mus musculus
  siRNA target sequence for Arhgef10 (NM_172751.1,1253-1271).
caatcggcgacgtttttgt

SEQ ID NO: 778428 - DNA, 19 bp, Mus musculus
  siRNA target sequence for Arhgef10 (NM_172751.1,1572-1590).
gaagctaaacgagagaaaa

SEQ ID NO: 778429 - DNA, 19 bp, Mus musculus
  siRNA target sequence for Arhgef10 (NM_172751.1,1600-1618).
gaccagcgatgcgaaatca

SEQ ID NO: 778430 - DNA, 19 bp, Mus musculus
  siRNA target sequence for Arhgef10 (NM_172751.1,1602-1620).
ccagcgatgcgaaatcaaa

SEQ ID NO: 778431 - DNA, 19 bp, Mus musculus
  siRNA target sequence for Arhgef10 (NM_172751.1,1605-1623).
gcgatgcgaaatcaaacaa

SEQ ID NO: 778432 - DNA, 19 bp, Mus musculus
  siRNA target sequence for Arhgef10 (NM_172751.1,1606-1624).
cgatgcgaaatcaaacaaa

SEQ ID NO: 778433 - DNA, 19 bp, Mus musculus
  siRNA target sequence for Arhgef10 (NM_172751.1,1607-1625).
gatgcgaaatcaaacaaat

SEQ ID NO: 778434 - DNA, 19 bp, Mus musculus
  siRNA target sequence for Arhgef10 (NM_172751.1,1611-1629).
cgaaatcaaacaaatagca

SEQ ID NO: 778435 - DNA, 19 bp, Mus musculus
  siRNA target sequence for Arhgef10 (NM_172751.1,1800-1818).
ctcacggaactcacatgaa

SEQ ID NO: 778436 - DNA, 19 bp, Mus musculus
  siRNA target sequence for Arhgef10 (NM_172751.1,1873-1891).
cacgtggatgtgattcagt

SEQ ID NO: 778437 - DNA, 19 bp, Mus musculus
  siRNA target sequence for Arhgef10 (NM_172751.1,1878-1896).
ggatgtgattcagtacaat

SEQ ID NO: 778438 - DNA, 19 bp, Mus musculus
  siRNA target sequence for Arhgef10 (NM_172751.1,1968-1986).
caacgcgaagccacacaaa

SEQ ID NO: 778439 - DNA, 19 bp, Mus musculus
  siRNA target sequence for Arhgef10 (NM_172751.1,1971-1989).
cgcgaagccacacaaagtt

SEQ ID NO: 778440 - DNA, 19 bp, Mus musculus
  siRNA target sequence for Arhgef10 (NM_172751.1,1972-1990).
gcgaagccacacaaagttt

SEQ ID NO: 778441 - DNA, 19 bp, Mus musculus
  siRNA target sequence for Arhgef10 (NM_172751.1,1973-1991).
cgaagccacacaaagttta

SEQ ID NO: 778442 - DNA, 19 bp, Mus musculus
  siRNA target sequence for Arhgef10 (NM_172751.1,2084-2102).
gagggagctatcagaactt

SEQ ID NO: 778443 - DNA, 19 bp, Mus musculus
  siRNA target sequence for Arhgef10 (NM_172751.1,2086-2104).
gggagctatcagaacttaa

SEQ ID NO: 778444 - DNA, 19 bp, Mus musculus
  siRNA target sequence for Arhgef10 (NM_172751.1,2087-2105).
ggagctatcagaacttaaa

SEQ ID NO: 778445 - DNA, 19 bp, Mus musculus
  siRNA target sequence for Arhgef10 (NM_172751.1,2090-2108).
gctatcagaacttaaacca

SEQ ID NO: 778446 - DNA, 19 bp, Mus musculus
  siRNA target sequence for Arhgef10 (NM_172751.1,2135-2153).
gcttacagcggctgatact

SEQ ID NO: 778447 - DNA, 19 bp, Mus musculus
  siRNA target sequence for Arhgef10 (NM_172751.1,2186-2204).
gctgccggatccagttaca

SEQ ID NO: 778448 - DNA, 19 bp, Mus musculus
  siRNA target sequence for Arhgef10 (NM_172751.1,2244-2262).
cttcactgctgtgttcaat

SEQ ID NO: 778449 - DNA, 19 bp, Mus musculus
  siRNA target sequence for Arhgef10 (NM_172751.1,2433-2451).
gcagccagagttcaagatt

SEQ ID NO: 778450 - DNA, 19 bp, Mus musculus
  siRNA target sequence for Arhgef10 (NM_172751.1,2436-2454).
gccagagttcaagattgaa

SEQ ID NO: 778451 - DNA, 19 bp, Mus musculus
  siRNA target sequence for Arhgef10 (NM_172751.1,2437-2455).
ccagagttcaagattgaat

SEQ ID NO: 778452 - DNA, 19 bp, Mus musculus
  siRNA target sequence for Arhgef10 (NM_172751.1,2448-2466).
gattgaatgtgcagcttat

SEQ ID NO: 778453 - DNA, 19 bp, Mus musculus
  siRNA target sequence for Arhgef10 (NM_172751.1,2560-2578).
ggtcaggtcgccattgtct

SEQ ID NO: 778454 - DNA, 19 bp, Mus musculus
  siRNA target sequence for Arhgef10 (NM_172751.1,2587-2605).
ggttccaaccccaaagtca

SEQ ID NO: 778455 - DNA, 19 bp, Mus musculus
  siRNA target sequence for Arhgef10 (NM_172751.1,2629-2647).
cgcatcctgtgtatggtat

SEQ ID NO: 778456 - DNA, 19 bp, Mus musculus
  siRNA target sequence for Arhgef10 (NM_172751.1,2936-2954).
cggaaccccagcaagtgat

SEQ ID NO: 778457 - DNA, 19 bp, Mus musculus
  siRNA target sequence for Arhgef10 (NM_172751.1,3017-3035).
cgggagggcaggtgttcat

SEQ ID NO: 778458 - DNA, 19 bp, Mus musculus
  siRNA target sequence for Arhgef10 (NM_172751.1,3041-3059).
gcgtggagactcacactat

SEQ ID NO: 778459 - DNA, 19 bp, Mus musculus
  siRNA target sequence for Arhgef10 (NM_172751.1,3042-3060).
cgtggagactcacactata

SEQ ID NO: 778460 - DNA, 19 bp, Mus musculus
  siRNA target sequence for Arhgef10 (NM_172751.1,3050-3068).
ctcacactatagagaatca

SEQ ID NO: 778461 - DNA, 19 bp, Mus musculus
  siRNA target sequence for Arhgef10 (NM_172751.1,3195-3213).
gcaggatgtcaacattgat

SEQ ID NO: 778462 - DNA, 19 bp, Mus musculus
  siRNA target sequence for Arhgef10 (NM_172751.1,3414-3432).
ctcagccacggcgtttcaa

SEQ ID NO: 778463 - DNA, 19 bp, Mus musculus
  siRNA target sequence for Arhgef10 (NM_172751.1,3416-3434).
cagccacggcgtttcaaaa

SEQ ID NO: 778464 - DNA, 19 bp, Mus musculus
  siRNA target sequence for Arhgef10 (NM_172751.1,3419-3437).
ccacggcgtttcaaaacaa

SEQ ID NO: 778465 - DNA, 19 bp, Mus musculus
  siRNA target sequence for Arhgef10 (NM_172751.1,3545-3563).
cctacacatccgtttggtt

SEQ ID NO: 778466 - DNA, 19 bp, Mus musculus
  siRNA target sequence for Arhgef10 (NM_172751.1,3573-3591).
cctaggattgccaactcaa

SEQ ID NO: 778467 - DNA, 19 bp, Mus musculus
  siRNA target sequence for Arhgef10 (NM_172751.1,3574-3592).
ctaggattgccaactcaaa

SEQ ID NO: 778468 - DNA, 19 bp, Mus musculus
  siRNA target sequence for Arhgef10 (NM_172751.1,3584-3602).
caactcaaaagaatgatct

SEQ ID NO: 778469 - DNA, 19 bp, Mus musculus
  siRNA target sequence for Arhgef10 (NM_172751.1,3819-3837).
ggaggacctggtttcttca

SEQ ID NO: 778470 - DNA, 19 bp, Mus musculus
  siRNA target sequence for 9430041O17Rik (NM_172752.2,224-242).
cgtgccgccatgtctgtta

SEQ ID NO: 778471 - DNA, 19 bp, Mus musculus
  siRNA target sequence for 9430041O17Rik (NM_172752.2,232-250).
catgtctgttacgttaaca

SEQ ID NO: 778472 - DNA, 19 bp, Mus musculus
  siRNA target sequence for 9430041O17Rik (NM_172752.2,254-272).
gtgaagagagttcaaagtt

SEQ ID NO: 778473 - DNA, 19 bp, Mus musculus
  siRNA target sequence for 9430041O17Rik (NM_172752.2,266-284).
caaagttctccaaacctat

SEQ ID NO: 778474 - DNA, 19 bp, Mus musculus
  siRNA target sequence for 9430041O17Rik (NM_172752.2,314-332).
gattcagcaaaaggtttta

SEQ ID NO: 778475 - DNA, 19 bp, Mus musculus
  siRNA target sequence for 9430041O17Rik (NM_172752.2,343-361).
gccaaacctgcaagacaaa

SEQ ID NO: 778476 - DNA, 19 bp, Mus musculus
  siRNA target sequence for 9430041O17Rik (NM_172752.2,411-429).
ccgtgagtccagtgagtta

SEQ ID NO: 778477 - DNA, 19 bp, Mus musculus
  siRNA target sequence for 9430041O17Rik (NM_172752.2,413-431).
gtgagtccagtgagttact

SEQ ID NO: 778478 - DNA, 19 bp, Mus musculus
  siRNA target sequence for 9430041O17Rik (NM_172752.2,415-433).
gagtccagtgagttactat

SEQ ID NO: 778479 - DNA, 19 bp, Mus musculus
  siRNA target sequence for 9430041O17Rik (NM_172752.2,417-435).
gtccagtgagttactatca

SEQ ID NO: 778480 - DNA, 19 bp, Mus musculus
  siRNA target sequence for 9430041O17Rik (NM_172752.2,419-437).
ccagtgagttactatcaga

SEQ ID NO: 778481 - DNA, 19 bp, Mus musculus
  siRNA target sequence for 9430041O17Rik (NM_172752.2,474-492).
cgctgaactccagcattat

SEQ ID NO: 778482 - DNA, 19 bp, Mus musculus
  siRNA target sequence for 9430041O17Rik (NM_172752.2,476-494).
ctgaactccagcattatca

SEQ ID NO: 778483 - DNA, 19 bp, Mus musculus
  siRNA target sequence for 9430041O17Rik (NM_172752.2,500-518).
cacggcaggtctcttgatt

SEQ ID NO: 778484 - DNA, 19 bp, Mus musculus
  siRNA target sequence for 9430041O17Rik (NM_172752.2,502-520).
cggcaggtctcttgattct

SEQ ID NO: 778485 - DNA, 19 bp, Mus musculus
  siRNA target sequence for 9430041O17Rik (NM_172752.2,571-589).
ctccatcccgctctataga

SEQ ID NO: 778486 - DNA, 19 bp, Mus musculus
  siRNA target sequence for 9430041O17Rik (NM_172752.2,701-719).
ccaaaggactggtacaaga

SEQ ID NO: 778487 - DNA, 19 bp, Mus musculus
  siRNA target sequence for 9430041O17Rik (NM_172752.2,855-873).
cctacagacctctttcgaa

SEQ ID NO: 778488 - DNA, 19 bp, Mus musculus
  siRNA target sequence for 9430041O17Rik (NM_172752.2,856-874).
ctacagacctctttcgaaa

SEQ ID NO: 778489 - DNA, 19 bp, Mus musculus
  siRNA target sequence for 9430041O17Rik (NM_172752.2,891-909).
gcaccgatgcgtttaagga

SEQ ID NO: 778490 - DNA, 19 bp, Mus musculus
  siRNA target sequence for 9430041O17Rik (NM_172752.2,950-968).
ccaagagatcagtcttcaa

SEQ ID NO: 778491 - DNA, 19 bp, Mus musculus
  siRNA target sequence for 9430041O17Rik (NM_172752.2,1006-1024).
ggacaccaggaaatttcga

SEQ ID NO: 778492 - DNA, 19 bp, Mus musculus
  siRNA target sequence for 9430041O17Rik (NM_172752.2,1007-1025).
gacaccaggaaatttcgat

SEQ ID NO: 778493 - DNA, 19 bp, Mus musculus
  siRNA target sequence for 9430041O17Rik (NM_172752.2,1026-1044).
cggagccaaggagtatttt

SEQ ID NO: 778494 - DNA, 19 bp, Mus musculus
  siRNA target sequence for 9430041O17Rik (NM_172752.2,1031-1049).
ccaaggagtatttttgaat

SEQ ID NO: 778495 - DNA, 19 bp, Mus musculus
  siRNA target sequence for 9430041O17Rik (NM_172752.2,1254-1272).
ctaaaaaggctctggatta

SEQ ID NO: 778496 - DNA, 19 bp, Mus musculus
  siRNA target sequence for 9430041O17Rik (NM_172752.2,1300-1318).
caacgaggtctccatctat

SEQ ID NO: 778497 - DNA, 19 bp, Mus musculus
  siRNA target sequence for 9430041O17Rik (NM_172752.2,1304-1322).
gaggtctccatctatcagt

SEQ ID NO: 778498 - DNA, 19 bp, Mus musculus
  siRNA target sequence for 9430041O17Rik (NM_172752.2,1488-1506).
ccacctttacgaagtcttt

SEQ ID NO: 778499 - DNA, 19 bp, Mus musculus
  siRNA target sequence for 9430041O17Rik (NM_172752.2,1491-1509).
cctttacgaagtctttcat

SEQ ID NO: 778500 - DNA, 19 bp, Mus musculus
  siRNA target sequence for 9430041O17Rik (NM_172752.2,1492-1510).
ctttacgaagtctttcatt

SEQ ID NO: 778501 - DNA, 19 bp, Mus musculus
  siRNA target sequence for 9430041O17Rik (NM_172752.2,1530-1548).
cctcgagagcacaagatca

SEQ ID NO: 778502 - DNA, 19 bp, Mus musculus
  siRNA target sequence for 9430041O17Rik (NM_172752.2,1547-1565).
cacgagtcccctagaagtt

SEQ ID NO: 778503 - DNA, 19 bp, Mus musculus
  siRNA target sequence for 9430041O17Rik (NM_172752.2,1556-1574).
cctagaagttactcatcta

SEQ ID NO: 778504 - DNA, 19 bp, Mus musculus
  siRNA target sequence for 9430041O17Rik (NM_172752.2,1677-1695).
ctaaggagctgtcatttaa

SEQ ID NO: 778505 - DNA, 19 bp, Mus musculus
  siRNA target sequence for 9430041O17Rik (NM_172752.2,1769-1787).
ggcattttcccaatctcat

SEQ ID NO: 778506 - DNA, 19 bp, Mus musculus
  siRNA target sequence for 9430041O17Rik (NM_172752.2,1783-1801).
ctcatacgtagagaaacta

SEQ ID NO: 778507 - DNA, 19 bp, Mus musculus
  siRNA target sequence for 9430041O17Rik (NM_172752.2,1885-1903).
cttcaatgcagacacaaat

SEQ ID NO: 778508 - DNA, 19 bp, Mus musculus
  siRNA target sequence for 9430041O17Rik (NM_172752.2,1919-1937).
cgaaagggcgacaggatta

SEQ ID NO: 778509 - DNA, 19 bp, Mus musculus
  siRNA target sequence for 9430041O17Rik (NM_172752.2,1924-1942).
gggcgacaggattattctt

SEQ ID NO: 778510 - DNA, 19 bp, Mus musculus
  siRNA target sequence for 9430041O17Rik (NM_172752.2,1926-1944).
gcgacaggattattcttct

SEQ ID NO: 778511 - DNA, 19 bp, Mus musculus
  siRNA target sequence for 9430041O17Rik (NM_172752.2,2205-2223).
gtgatgtcgttgatgtcat

SEQ ID NO: 778512 - DNA, 19 bp, Mus musculus
  siRNA target sequence for 9430041O17Rik (NM_172752.2,2245-2263).
gtttgtgggaacttcaaga

SEQ ID NO: 778513 - DNA, 19 bp, Mus musculus
  siRNA target sequence for 9430041O17Rik (NM_172752.2,2268-2286).
ccaaattctttggtacttt

SEQ ID NO: 778514 - DNA, 19 bp, Mus musculus
  siRNA target sequence for C030036P15Rik (NM_172757.3,653-671).
gtggcagagcagtgtctat

SEQ ID NO: 778515 - DNA, 19 bp, Mus musculus
  siRNA target sequence for C030036P15Rik (NM_172757.3,656-674).
gcagagcagtgtctatatt

SEQ ID NO: 778516 - DNA, 19 bp, Mus musculus
  siRNA target sequence for C030036P15Rik (NM_172757.3,696-714).
gattgtgttacagtactta

SEQ ID NO: 778517 - DNA, 19 bp, Mus musculus
  siRNA target sequence for C030036P15Rik (NM_172757.3,700-718).
gtgttacagtacttacgta

SEQ ID NO: 778518 - DNA, 19 bp, Mus musculus
  siRNA target sequence for C030036P15Rik (NM_172757.3,719-737).
ggttccccaccagtattga

SEQ ID NO: 778519 - DNA, 19 bp, Mus musculus
  siRNA target sequence for C030036P15Rik (NM_172757.3,745-763).
gtctccgtagcgtattgtt

SEQ ID NO: 778520 - DNA, 19 bp, Mus musculus
  siRNA target sequence for C030036P15Rik (NM_172757.3,747-765).
ctccgtagcgtattgttta

SEQ ID NO: 778521 - DNA, 19 bp, Mus musculus
  siRNA target sequence for C030036P15Rik (NM_172757.3,749-767).
ccgtagcgtattgtttaca

SEQ ID NO: 778522 - DNA, 19 bp, Mus musculus
  siRNA target sequence for C030036P15Rik (NM_172757.3,751-769).
gtagcgtattgtttacaga

SEQ ID NO: 778523 - DNA, 19 bp, Mus musculus
  siRNA target sequence for C030036P15Rik (NM_172757.3,850-868).
cctgtcgcctctatggaat

SEQ ID NO: 778524 - DNA, 19 bp, Mus musculus
  siRNA target sequence for C030036P15Rik (NM_172757.3,851-869).
ctgtcgcctctatggaata

SEQ ID NO: 778525 - DNA, 19 bp, Mus musculus
  siRNA target sequence for C030036P15Rik (NM_172757.3,853-871).
gtcgcctctatggaataca

SEQ ID NO: 778526 - DNA, 19 bp, Mus musculus
  siRNA target sequence for C030036P15Rik (NM_172757.3,855-873).
cgcctctatggaatacatt

SEQ ID NO: 778527 - DNA, 19 bp, Mus musculus
  siRNA target sequence for C030036P15Rik (NM_172757.3,857-875).
cctctatggaatacattct

SEQ ID NO: 778528 - DNA, 19 bp, Mus musculus
  siRNA target sequence for C030036P15Rik (NM_172757.3,905-923).
ggaacctaaaggacattat

SEQ ID NO: 778529 - DNA, 19 bp, Mus musculus
  siRNA target sequence for C030036P15Rik (NM_172757.3,906-924).
gaacctaaaggacattatt

SEQ ID NO: 778530 - DNA, 19 bp, Mus musculus
  siRNA target sequence for C030036P15Rik (NM_172757.3,909-927).
cctaaaggacattattcca

SEQ ID NO: 778531 - DNA, 19 bp, Mus musculus
  siRNA target sequence for C030036P15Rik (NM_172757.3,933-951).
gagtcaggcagaaatcatt

SEQ ID NO: 778532 - DNA, 19 bp, Mus musculus
  siRNA target sequence for C030036P15Rik (NM_172757.3,935-953).
gtcaggcagaaatcattaa

SEQ ID NO: 778533 - DNA, 19 bp, Mus musculus
  siRNA target sequence for C030036P15Rik (NM_172757.3,998-1016).
gcaacatggtcattcagat

SEQ ID NO: 778534 - DNA, 19 bp, Mus musculus
  siRNA target sequence for C030036P15Rik (NM_172757.3,1027-1045).
gaaacccagcggctaaaga

SEQ ID NO: 778535 - DNA, 19 bp, Mus musculus
  siRNA target sequence for C030036P15Rik (NM_172757.3,1058-1076).
gtgaggacatcctagcaaa

SEQ ID NO: 778536 - DNA, 19 bp, Mus musculus
  siRNA target sequence for C030036P15Rik (NM_172757.3,1063-1081).
gacatcctagcaaatgcta

SEQ ID NO: 778537 - DNA, 19 bp, Mus musculus
  siRNA target sequence for C030036P15Rik (NM_172757.3,1224-1242).
gactgctctggaagttatt

SEQ ID NO: 778538 - DNA, 19 bp, Mus musculus
  siRNA target sequence for C030036P15Rik (NM_172757.3,1229-1247).
ctctggaagttattgtcaa

SEQ ID NO: 778539 - DNA, 19 bp, Mus musculus
  siRNA target sequence for C030036P15Rik (NM_172757.3,1291-1309).
ctgtctagtagtgatgaaa

SEQ ID NO: 778540 - DNA, 19 bp, Mus musculus
  siRNA target sequence for C030036P15Rik (NM_172757.3,1370-1388).
gcctgtcccacgagattca

SEQ ID NO: 778541 - DNA, 19 bp, Mus musculus
  siRNA target sequence for C030036P15Rik (NM_172757.3,1372-1390).
ctgtcccacgagattcact

SEQ ID NO: 778542 - DNA, 19 bp, Mus musculus
  siRNA target sequence for C030036P15Rik (NM_172757.3,1423-1441).
gtttttgagaaaacatctt

SEQ ID NO: 778543 - DNA, 19 bp, Mus musculus
  siRNA target sequence for C030036P15Rik (NM_172757.3,1453-1471).
gttgcagttgacatatgtt

SEQ ID NO: 778544 - DNA, 19 bp, Mus musculus
  siRNA target sequence for C030036P15Rik (NM_172757.3,1456-1474).
gcagttgacatatgttcta

SEQ ID NO: 778545 - DNA, 19 bp, Mus musculus
  siRNA target sequence for C030036P15Rik (NM_172757.3,1459-1477).
gttgacatatgttctaaga

SEQ ID NO: 778546 - DNA, 19 bp, Mus musculus
  siRNA target sequence for C030036P15Rik (NM_172757.3,1487-1505).
ggaaacctttgattaggaa

SEQ ID NO: 778547 - DNA, 19 bp, Mus musculus
  siRNA target sequence for C030036P15Rik (NM_172757.3,1521-1539).
gtgtagagcccttatgtgt

SEQ ID NO: 778548 - DNA, 19 bp, Mus musculus
  siRNA target sequence for C030036P15Rik (NM_172757.3,1788-1806).
cattggggttcgagtgaat

SEQ ID NO: 778549 - DNA, 19 bp, Mus musculus
  siRNA target sequence for C030036P15Rik (NM_172757.3,1984-2002).
gaaaaggcttcagttcaaa

SEQ ID NO: 778550 - DNA, 19 bp, Mus musculus
  siRNA target sequence for C030036P15Rik (NM_172757.3,1989-2007).
ggcttcagttcaaattaaa

SEQ ID NO: 778551 - DNA, 19 bp, Mus musculus
  siRNA target sequence for C030036P15Rik (NM_172757.3,2016-2034).
ggctttgaaagaattccaa

SEQ ID NO: 778552 - DNA, 19 bp, Mus musculus
  siRNA target sequence for C030036P15Rik (NM_172757.3,2062-2080).
gaagggaggggcaagtaca

SEQ ID NO: 778553 - DNA, 19 bp, Mus musculus
  siRNA target sequence for C030036P15Rik (NM_172757.3,2096-2114).
gtgttctcgacaatgtgaa

SEQ ID NO: 778554 - DNA, 19 bp, Mus musculus
  siRNA target sequence for C030036P15Rik (NM_172757.3,2103-2121).
cgacaatgtgaagatgaat

SEQ ID NO: 778555 - DNA, 19 bp, Mus musculus
  siRNA target sequence for C030036P15Rik (NM_172757.3,2118-2136).
gaatttgagacggtttatt

SEQ ID NO: 778556 - DNA, 19 bp, Mus musculus
  siRNA target sequence for C030036P15Rik (NM_172757.3,2142-2160).
ccaggaaactgttgagaaa

SEQ ID NO: 778557 - DNA, 19 bp, Mus musculus
  siRNA target sequence for A530090G11Rik (NM_172766.2,166-184).
gtcacagtacaggaatcat

SEQ ID NO: 778558 - DNA, 19 bp, Mus musculus
  siRNA target sequence for A530090G11Rik (NM_172766.2,202-220).
gtggtaccagggttagtct

SEQ ID NO: 778559 - DNA, 19 bp, Mus musculus
  siRNA target sequence for A530090G11Rik (NM_172766.2,237-255).
gaggatcccgagatattct

SEQ ID NO: 778560 - DNA, 19 bp, Mus musculus
  siRNA target sequence for A530090G11Rik (NM_172766.2,244-262).
ccgagatattctttgatgt

SEQ ID NO: 778561 - DNA, 19 bp, Mus musculus
  siRNA target sequence for A530090G11Rik (NM_172766.2,274-292).
ccacatggcaggaagtatt

SEQ ID NO: 778562 - DNA, 19 bp, Mus musculus
  siRNA target sequence for A530090G11Rik (NM_172766.2,369-387).
ctcatccttgccctattca

SEQ ID NO: 778563 - DNA, 19 bp, Mus musculus
  siRNA target sequence for A530090G11Rik (NM_172766.2,371-389).
catccttgccctattcagt

SEQ ID NO: 778564 - DNA, 19 bp, Mus musculus
  siRNA target sequence for A530090G11Rik (NM_172766.2,437-455).
cttccgagatggacacttt

SEQ ID NO: 778565 - DNA, 19 bp, Mus musculus
  siRNA target sequence for A530090G11Rik (NM_172766.2,477-495).
cgtcagctctgcttcaagt

SEQ ID NO: 778566 - DNA, 19 bp, Mus musculus
  siRNA target sequence for A530090G11Rik (NM_172766.2,498-516).
cagtacaagcggtatctca

SEQ ID NO: 778567 - DNA, 19 bp, Mus musculus
  siRNA target sequence for A530090G11Rik (NM_172766.2,537-555).
caccggctgctgaaacaga

SEQ ID NO: 778568 - DNA, 19 bp, Mus musculus
  siRNA target sequence for A530090G11Rik (NM_172766.2,667-685).
ggacccagcagcgttactt

SEQ ID NO: 778569 - DNA, 19 bp, Mus musculus
  siRNA target sequence for A530090G11Rik (NM_172766.2,670-688).
cccagcagcgttacttgaa

SEQ ID NO: 778570 - DNA, 19 bp, Mus musculus
  siRNA target sequence for A530090G11Rik (NM_172766.2,671-689).
ccagcagcgttacttgaaa

SEQ ID NO: 778571 - DNA, 19 bp, Mus musculus
  siRNA target sequence for A530090G11Rik (NM_172766.2,822-840).
ctttccaccacggatatga

SEQ ID NO: 778572 - DNA, 19 bp, Mus musculus
  siRNA target sequence for A530090G11Rik (NM_172766.2,827-845).
caccacggatatgaaaact

SEQ ID NO: 778573 - DNA, 19 bp, Mus musculus
  siRNA target sequence for A530090G11Rik (NM_172766.2,867-885).
gacagtgacctgaagttaa

SEQ ID NO: 778574 - DNA, 19 bp, Mus musculus
  siRNA target sequence for A530090G11Rik (NM_172766.2,873-891).
gacctgaagttaatgttaa

SEQ ID NO: 778575 - DNA, 19 bp, Mus musculus
  siRNA target sequence for A530090G11Rik (NM_172766.2,899-917).
ccatgagaagcggaaacat

SEQ ID NO: 778576 - DNA, 19 bp, Mus musculus
  siRNA target sequence for A530090G11Rik (NM_172766.2,965-983).
catcatgactcgagtaaat

SEQ ID NO: 778577 - DNA, 19 bp, Mus musculus
  siRNA target sequence for A530090G11Rik (NM_172766.2,1112-1130).
gcccctaagcagtactgaa

SEQ ID NO: 778578 - DNA, 19 bp, Mus musculus
  siRNA target sequence for A530090G11Rik (NM_172766.2,1208-1226).
gccttgccttggaatcaat

SEQ ID NO: 778579 - DNA, 19 bp, Mus musculus
  siRNA target sequence for A530090G11Rik (NM_172766.2,1210-1228).
cttgccttggaatcaatga

SEQ ID NO: 778580 - DNA, 19 bp, Mus musculus
  siRNA target sequence for A530090G11Rik (NM_172766.2,1249-1267).
ctcttctgttagagatctt

SEQ ID NO: 778581 - DNA, 19 bp, Mus musculus
  siRNA target sequence for A530090G11Rik (NM_172766.2,1421-1439).
ccgagcggttccttctagt

SEQ ID NO: 778582 - DNA, 19 bp, Mus musculus
  siRNA target sequence for A530090G11Rik (NM_172766.2,1422-1440).
cgagcggttccttctagtt

SEQ ID NO: 778583 - DNA, 19 bp, Mus musculus
  siRNA target sequence for A530090G11Rik (NM_172766.2,1492-1510).
gtcaatctcaagataatga

SEQ ID NO: 778584 - DNA, 19 bp, Mus musculus
  siRNA target sequence for A530090G11Rik (NM_172766.2,1652-1670).
ggagaaacgggtttttcaa

SEQ ID NO: 778585 - DNA, 19 bp, Mus musculus
  siRNA target sequence for A530090G11Rik (NM_172766.2,1655-1673).
gaaacgggtttttcaagaa

SEQ ID NO: 778586 - DNA, 19 bp, Mus musculus
  siRNA target sequence for A530090G11Rik (NM_172766.2,1674-1692).
caggagcgttacaggtata

SEQ ID NO: 778587 - DNA, 19 bp, Mus musculus
  siRNA target sequence for A530090G11Rik (NM_172766.2,1719-1737).
cgcatgcatggctttgagt

SEQ ID NO: 778588 - DNA, 19 bp, Mus musculus
  siRNA target sequence for A530090G11Rik (NM_172766.2,1752-1770).
gtgaagggcgtgtttgaca

SEQ ID NO: 778589 - DNA, 19 bp, Mus musculus
  siRNA target sequence for A530090G11Rik (NM_172766.2,1818-1836).
gaccggcctgcctatgtca

SEQ ID NO: 778590 - DNA, 19 bp, Mus musculus
  siRNA target sequence for A530090G11Rik (NM_172766.2,1827-1845).
gcctatgtcaccattctgt

SEQ ID NO: 778591 - DNA, 19 bp, Mus musculus
  siRNA target sequence for A530090G11Rik (NM_172766.2,1975-1993).
gtggcgcactggatcgatt

SEQ ID NO: 778592 - DNA, 19 bp, Mus musculus
  siRNA target sequence for A530090G11Rik (NM_172766.2,1979-1997).
cgcactggatcgattgcat

SEQ ID NO: 778593 - DNA, 19 bp, Mus musculus
  siRNA target sequence for A530090G11Rik (NM_172766.2,1980-1998).
gcactggatcgattgcatt

SEQ ID NO: 778594 - DNA, 19 bp, Mus musculus
  siRNA target sequence for A530090G11Rik (NM_172766.2,1986-2004).
gatcgattgcattatgaga

SEQ ID NO: 778595 - DNA, 19 bp, Mus musculus
  siRNA target sequence for A530090G11Rik (NM_172766.2,1990-2008).
gattgcattatgagaaaga

SEQ ID NO: 778596 - DNA, 19 bp, Mus musculus
  siRNA target sequence for A530090G11Rik (NM_172766.2,2010-2028).
ccttgtgtgaaatatgaca

SEQ ID NO: 778597 - DNA, 19 bp, Mus musculus
  siRNA target sequence for A530090G11Rik (NM_172766.2,2011-2029).
cttgtgtgaaatatgacat

SEQ ID NO: 778598 - DNA, 19 bp, Mus musculus
  siRNA target sequence for A530090G11Rik (NM_172766.2,2078-2096).
gtttgaacggattcatcaa

SEQ ID NO: 778599 - DNA, 19 bp, Mus musculus
  siRNA target sequence for A530090G11Rik (NM_172766.2,2409-2427).
cagctagggacgatgcttt

SEQ ID NO: 778600 - DNA, 19 bp, Mus musculus
  siRNA target sequence for A530090G11Rik (NM_172766.2,2648-2666).
ggcagttatggcaacagtt

SEQ ID NO: 778601 - DNA, 19 bp, Mus musculus
  siRNA target sequence for A530090G11Rik (NM_172766.2,2810-2828).
ctccaccacagccgttatt

SEQ ID NO: 778602 - DNA, 19 bp, Mus musculus
  siRNA target sequence for A530090G11Rik (NM_172766.2,2812-2830).
ccaccacagccgttattca

SEQ ID NO: 778603 - DNA, 19 bp, Mus musculus
  siRNA target sequence for A530090G11Rik (NM_172766.2,2933-2951).
ccgtatccagggtaaggat

SEQ ID NO: 778604 - DNA, 19 bp, Mus musculus
  siRNA target sequence for A530090G11Rik (NM_172766.2,2995-3013).
gccagacggttttgagaat

SEQ ID NO: 778605 - DNA, 19 bp, Mus musculus
  siRNA target sequence for A530090G11Rik (NM_172766.2,2999-3017).
gacggttttgagaatcact

SEQ ID NO: 778606 - DNA, 19 bp, Mus musculus
  siRNA target sequence for A530090G11Rik (NM_172766.2,3010-3028).
gaatcactccagacatgat

SEQ ID NO: 778607 - DNA, 19 bp, Mus musculus
  siRNA target sequence for A530090G11Rik (NM_172766.2,3051-3069).
gttaccacagtcaaactga

SEQ ID NO: 778608 - DNA, 19 bp, Mus musculus
  siRNA target sequence for A530090G11Rik (NM_172766.2,3237-3255).
gatctcaagccgacagaaa

SEQ ID NO: 778609 - DNA, 19 bp, Mus musculus
  siRNA target sequence for A530090G11Rik (NM_172766.2,3246-3264).
ccgacagaaactgcaaatt

SEQ ID NO: 778610 - DNA, 19 bp, Mus musculus
  siRNA target sequence for A530090G11Rik (NM_172766.2,3281-3299).
gccagctcttggtgtaagt

SEQ ID NO: 778611 - DNA, 19 bp, Mus musculus
  siRNA target sequence for A530090G11Rik (NM_172766.2,3283-3301).
cagctcttggtgtaagtgt

SEQ ID NO: 778612 - DNA, 19 bp, Mus musculus
  siRNA target sequence for A530090G11Rik (NM_172766.2,3400-3418).
caggccagaccattactgt

SEQ ID NO: 778613 - DNA, 19 bp, Mus musculus
  siRNA target sequence for A530090G11Rik (NM_172766.2,3462-3480).
ggaactgtccattcttcaa

SEQ ID NO: 778614 - DNA, 19 bp, Mus musculus
  siRNA target sequence for A530090G11Rik (NM_172766.2,3482-3500).
ggtgtccttacccagtata

SEQ ID NO: 778615 - DNA, 19 bp, Mus musculus
  siRNA target sequence for A530090G11Rik (NM_172766.2,3585-3603).
cgacaggttcctgttaaca

SEQ ID NO: 778616 - DNA, 19 bp, Mus musculus
  siRNA target sequence for A530090G11Rik (NM_172766.2,3588-3606).
caggttcctgttaacacta

SEQ ID NO: 778617 - DNA, 19 bp, Mus musculus
  siRNA target sequence for A530090G11Rik (NM_172766.2,3744-3762).
gggctgggtcgcaacatca

SEQ ID NO: 778618 - DNA, 19 bp, Mus musculus
  siRNA target sequence for A530090G11Rik (NM_172766.2,3961-3979).
cagctccatctcctaaaca

SEQ ID NO: 778619 - DNA, 19 bp, Mus musculus
  siRNA target sequence for 5830475I06Rik (NM_172767.2,191-209).
cactgtggtctaatcacta

SEQ ID NO: 778620 - DNA, 19 bp, Mus musculus
  siRNA target sequence for 5830475I06Rik (NM_172767.2,218-236).
gagacagtaccactgaaaa

SEQ ID NO: 778621 - DNA, 19 bp, Mus musculus
  siRNA target sequence for 5830475I06Rik (NM_172767.2,220-238).
gacagtaccactgaaaaat

SEQ ID NO: 778622 - DNA, 19 bp, Mus musculus
  siRNA target sequence for 5830475I06Rik (NM_172767.2,249-267).
cattgtccatcaatgaatt

SEQ ID NO: 778623 - DNA, 19 bp, Mus musculus
  siRNA target sequence for 5830475I06Rik (NM_172767.2,276-294).
ctgtggtggcaaccttaaa

SEQ ID NO: 778624 - DNA, 19 bp, Mus musculus
  siRNA target sequence for 5830475I06Rik (NM_172767.2,288-306).
ccttaaattacgagaatga

SEQ ID NO: 778625 - DNA, 19 bp, Mus musculus
  siRNA target sequence for 5830475I06Rik (NM_172767.2,326-344).
gcgacctttgtgtttccta

SEQ ID NO: 778626 - DNA, 19 bp, Mus musculus
  siRNA target sequence for 5830475I06Rik (NM_172767.2,617-635).
ccagcaatcttgaatccaa

SEQ ID NO: 778627 - DNA, 19 bp, Mus musculus
  siRNA target sequence for 5830475I06Rik (NM_172767.2,659-677).
gcaaacagttgcttgaaca

SEQ ID NO: 778628 - DNA, 19 bp, Mus musculus
  siRNA target sequence for 5830475I06Rik (NM_172767.2,739-757).
cacttcccagcatggtatt

SEQ ID NO: 778629 - DNA, 19 bp, Mus musculus
  siRNA target sequence for 5830475I06Rik (NM_172767.2,741-759).
cttcccagcatggtattga

SEQ ID NO: 778630 - DNA, 19 bp, Mus musculus
  siRNA target sequence for 5830475I06Rik (NM_172767.2,767-785).
cagtccaactgctctttga

SEQ ID NO: 778631 - DNA, 19 bp, Mus musculus
  siRNA target sequence for 5830475I06Rik (NM_172767.2,780-798).
ctttgagccctattcagta

SEQ ID NO: 778632 - DNA, 19 bp, Mus musculus
  siRNA target sequence for 5830475I06Rik (NM_172767.2,871-889).
cctgatttactacaatgaa

SEQ ID NO: 778633 - DNA, 19 bp, Mus musculus
  siRNA target sequence for 5830475I06Rik (NM_172767.2,1013-1031).
gcctgtggagaatttgtgt

SEQ ID NO: 778634 - DNA, 19 bp, Mus musculus
  siRNA target sequence for 5830475I06Rik (NM_172767.2,1137-1155).
gtttgcctatgggttgtta

SEQ ID NO: 778635 - DNA, 19 bp, Mus musculus
  siRNA target sequence for 5830475I06Rik (NM_172767.2,1267-1285).
caacttagggggtactgaa

SEQ ID NO: 778636 - DNA, 19 bp, Mus musculus
  siRNA target sequence for 5830475I06Rik (NM_172767.2,1291-1309).
gacacccctctgcaacatt

SEQ ID NO: 778637 - DNA, 19 bp, Mus musculus
  siRNA target sequence for 5830475I06Rik (NM_172767.2,1293-1311).
cacccctctgcaacattta

SEQ ID NO: 778638 - DNA, 19 bp, Mus musculus
  siRNA target sequence for 5830475I06Rik (NM_172767.2,1295-1313).
cccctctgcaacatttaca

SEQ ID NO: 778639 - DNA, 19 bp, Mus musculus
  siRNA target sequence for 5830475I06Rik (NM_172767.2,1376-1394).
gacacatttagtgtcatta

SEQ ID NO: 778640 - DNA, 19 bp, Mus musculus
  siRNA target sequence for 5830475I06Rik (NM_172767.2,1390-1408).
cattagagaagttaagtta

SEQ ID NO: 778641 - DNA, 19 bp, Mus musculus
  siRNA target sequence for 5830475I06Rik (NM_172767.2,1451-1469).
ggagcctcgaccagtttaa

SEQ ID NO: 778642 - DNA, 19 bp, Mus musculus
  siRNA target sequence for 5830475I06Rik (NM_172767.2,1452-1470).
gagcctcgaccagtttaat

SEQ ID NO: 778643 - DNA, 19 bp, Mus musculus
  siRNA target sequence for 5830475I06Rik (NM_172767.2,1454-1472).
gcctcgaccagtttaatca

SEQ ID NO: 778644 - DNA, 19 bp, Mus musculus
  siRNA target sequence for 5830475I06Rik (NM_172767.2,1458-1476).
cgaccagtttaatcaaaaa

SEQ ID NO: 778645 - DNA, 19 bp, Mus musculus
  siRNA target sequence for 5830475I06Rik (NM_172767.2,1542-1560).
ctcttgggtctctcaagtt

SEQ ID NO: 778646 - DNA, 19 bp, Mus musculus
  siRNA target sequence for 5830475I06Rik (NM_172767.2,1579-1597).
ggataacatctctctaagt

SEQ ID NO: 778647 - DNA, 19 bp, Mus musculus
  siRNA target sequence for 5830475I06Rik (NM_172767.2,1580-1598).
gataacatctctctaagtt

SEQ ID NO: 778648 - DNA, 19 bp, Mus musculus
  siRNA target sequence for 5830475I06Rik (NM_172767.2,1608-1626).
ctcctggtttgtctgttaa

SEQ ID NO: 778649 - DNA, 19 bp, Mus musculus
  siRNA target sequence for 5830475I06Rik (NM_172767.2,1631-1649).
ctttctccagagcaactta

SEQ ID NO: 778650 - DNA, 19 bp, Mus musculus
  siRNA target sequence for 5830475I06Rik (NM_172767.2,1640-1658).
gagcaacttaccatcttta

SEQ ID NO: 778651 - DNA, 19 bp, Mus musculus
  siRNA target sequence for 5830475I06Rik (NM_172767.2,1763-1781).
gaaaacagggtgacatttt

SEQ ID NO: 778652 - DNA, 19 bp, Mus musculus
  siRNA target sequence for 5830475I06Rik (NM_172767.2,1790-1808).
cccaaggcaaatgacaatt

SEQ ID NO: 778653 - DNA, 19 bp, Mus musculus
  siRNA target sequence for 5830475I06Rik (NM_172767.2,1825-1843).
ggctgcaaagtccttgatt

SEQ ID NO: 778654 - DNA, 19 bp, Mus musculus
  siRNA target sequence for 5830475I06Rik (NM_172767.2,1840-1858).
gattcagactaaggatttt

SEQ ID NO: 778655 - DNA, 19 bp, Mus musculus
  siRNA target sequence for 5830475I06Rik (NM_172767.2,1938-1956).
cagccttcattgccataaa

SEQ ID NO: 778656 - DNA, 19 bp, Mus musculus
  siRNA target sequence for 5830475I06Rik (NM_172767.2,2017-2035).
gatggctggatctagtagt

SEQ ID NO: 778657 - DNA, 19 bp, Mus musculus
  siRNA target sequence for 5830475I06Rik (NM_172767.2,2039-2057).
cggttctactccagtttct

SEQ ID NO: 778658 - DNA, 19 bp, Mus musculus
  siRNA target sequence for 5830475I06Rik (NM_172767.2,2094-2112).
gtgtaccagcatatgattt

SEQ ID NO: 778659 - DNA, 19 bp, Mus musculus
  siRNA target sequence for 5830475I06Rik (NM_172767.2,2096-2114).
gtaccagcatatgatttat

SEQ ID NO: 778660 - DNA, 19 bp, Mus musculus
  siRNA target sequence for 5830475I06Rik (NM_172767.2,2099-2117).
ccagcatatgatttatgtt

SEQ ID NO: 778661 - DNA, 19 bp, Mus musculus
  siRNA target sequence for 5830475I06Rik (NM_172767.2,2129-2147).
gctaatcttgtcctcaaaa

SEQ ID NO: 778662 - DNA, 19 bp, Mus musculus
  siRNA target sequence for 5830475I06Rik (NM_172767.2,2130-2148).
ctaatcttgtcctcaaaaa

SEQ ID NO: 778663 - DNA, 19 bp, Mus musculus
  siRNA target sequence for 5830475I06Rik (NM_172767.2,2151-2169).
ctgcgtgttctgctataca

SEQ ID NO: 778664 - DNA, 19 bp, Mus musculus
  siRNA target sequence for 5830475I06Rik (NM_172767.2,2153-2171).
gcgtgttctgctatacaga

SEQ ID NO: 778665 - DNA, 19 bp, Mus musculus
  siRNA target sequence for 5830475I06Rik (NM_172767.2,2154-2172).
cgtgttctgctatacagaa

SEQ ID NO: 778666 - DNA, 19 bp, Mus musculus
  siRNA target sequence for 5830475I06Rik (NM_172767.2,2311-2329).
cctgggcactaagtcaaaa

SEQ ID NO: 778667 - DNA, 19 bp, Mus musculus
  siRNA target sequence for 5830475I06Rik (NM_172767.2,2316-2334).
gcactaagtcaaaagacat

SEQ ID NO: 778668 - DNA, 19 bp, Mus musculus
  siRNA target sequence for 5830475I06Rik (NM_172767.2,2408-2426).
gccaacggcacagacttaa

SEQ ID NO: 778669 - DNA, 19 bp, Mus musculus
  siRNA target sequence for 5830475I06Rik (NM_172767.2,2413-2431).
cggcacagacttaaagtgt

SEQ ID NO: 778670 - DNA, 19 bp, Mus musculus
  siRNA target sequence for 5830475I06Rik (NM_172767.2,2513-2531).
gccaatagtctcctgaaat

SEQ ID NO: 778671 - DNA, 19 bp, Mus musculus
  siRNA target sequence for 5830475I06Rik (NM_172767.2,2514-2532).
ccaatagtctcctgaaatt

SEQ ID NO: 778672 - DNA, 19 bp, Mus musculus
  siRNA target sequence for 5830475I06Rik (NM_172767.2,2524-2542).
cctgaaattatctgtgaat

SEQ ID NO: 778673 - DNA, 19 bp, Mus musculus
  siRNA target sequence for A930008A22Rik (NM_172768.1,440-458).
gtgagggagcggaaagaat

SEQ ID NO: 778674 - DNA, 19 bp, Mus musculus
  siRNA target sequence for A930008A22Rik (NM_172768.1,734-752).
ggtcggagcggtggtaaaa

SEQ ID NO: 778675 - DNA, 19 bp, Mus musculus
  siRNA target sequence for A930008A22Rik (NM_172768.1,735-753).
gtcggagcggtggtaaaaa

SEQ ID NO: 778676 - DNA, 19 bp, Mus musculus
  siRNA target sequence for A930008A22Rik (NM_172768.1,737-755).
cggagcggtggtaaaaatt

SEQ ID NO: 778677 - DNA, 19 bp, Mus musculus
  siRNA target sequence for A930008A22Rik (NM_172768.1,741-759).
gcggtggtaaaaattccaa

SEQ ID NO: 778678 - DNA, 19 bp, Mus musculus
  siRNA target sequence for A930008A22Rik (NM_172768.1,765-783).
gccagagttggtacaatgt

SEQ ID NO: 778679 - DNA, 19 bp, Mus musculus
  siRNA target sequence for A930008A22Rik (NM_172768.1,795-813).
cttacaagcagagaaatga

SEQ ID NO: 778680 - DNA, 19 bp, Mus musculus
  siRNA target sequence for A930008A22Rik (NM_172768.1,847-865).
cacggagcgcctcattgtt

SEQ ID NO: 778681 - DNA, 19 bp, Mus musculus
  siRNA target sequence for A930008A22Rik (NM_172768.1,849-867).
cggagcgcctcattgttga

SEQ ID NO: 778682 - DNA, 19 bp, Mus musculus
  siRNA target sequence for A930008A22Rik (NM_172768.1,850-868).
ggagcgcctcattgttgat

SEQ ID NO: 778683 - DNA, 19 bp, Mus musculus
  siRNA target sequence for A930008A22Rik (NM_172768.1,856-874).
cctcattgttgattactct

SEQ ID NO: 778684 - DNA, 19 bp, Mus musculus
  siRNA target sequence for A930008A22Rik (NM_172768.1,857-875).
ctcattgttgattactctt

SEQ ID NO: 778685 - DNA, 19 bp, Mus musculus
  siRNA target sequence for A930008A22Rik (NM_172768.1,908-926).
cgactctacctctcagaaa

SEQ ID NO: 778686 - DNA, 19 bp, Mus musculus
  siRNA target sequence for A930008A22Rik (NM_172768.1,970-988).
gctgacagtccgtttgaaa

SEQ ID NO: 778687 - DNA, 19 bp, Mus musculus
  siRNA target sequence for A930008A22Rik (NM_172768.1,975-993).
cagtccgtttgaaagatat

SEQ ID NO: 778688 - DNA, 19 bp, Mus musculus
  siRNA target sequence for A930008A22Rik (NM_172768.1,977-995).
gtccgtttgaaagatatct

SEQ ID NO: 778689 - DNA, 19 bp, Mus musculus
  siRNA target sequence for A930008A22Rik (NM_172768.1,989-1007).
gatatctgctccatgacta

SEQ ID NO: 778690 - DNA, 19 bp, Mus musculus
  siRNA target sequence for A930008A22Rik (NM_172768.1,1046-1064).
gtctgcactgattcagaaa

SEQ ID NO: 778691 - DNA, 19 bp, Mus musculus
  siRNA target sequence for A930008A22Rik (NM_172768.1,1050-1068).
gcactgattcagaaaagca

SEQ ID NO: 778692 - DNA, 19 bp, Mus musculus
  siRNA target sequence for A930008A22Rik (NM_172768.1,1091-1109).
cgggacaggacgtacatga

SEQ ID NO: 778693 - DNA, 19 bp, Mus musculus
  siRNA target sequence for A930008A22Rik (NM_172768.1,1098-1116).
ggacgtacatgatgatgtt

SEQ ID NO: 778694 - DNA, 19 bp, Mus musculus
  siRNA target sequence for A930008A22Rik (NM_172768.1,1127-1145).
cagaatgctctccttgaaa

SEQ ID NO: 778695 - DNA, 19 bp, Mus musculus
  siRNA target sequence for A930008A22Rik (NM_172768.1,1204-1222).
gggcctaaccagtgatgat

SEQ ID NO: 778696 - DNA, 19 bp, Mus musculus
  siRNA target sequence for A930008A22Rik (NM_172768.1,1358-1376).
cccaagaagtccattacca

SEQ ID NO: 778697 - DNA, 19 bp, Mus musculus
  siRNA target sequence for A930008A22Rik (NM_172768.1,1359-1377).
ccaagaagtccattaccaa

SEQ ID NO: 778698 - DNA, 19 bp, Mus musculus
  siRNA target sequence for A930008A22Rik (NM_172768.1,1404-1422).
gtgaagcccctgtttcgtt

SEQ ID NO: 778699 - DNA, 19 bp, Mus musculus
  siRNA target sequence for A930008A22Rik (NM_172768.1,1458-1476).
gggatggttccctagagaa

SEQ ID NO: 778700 - DNA, 19 bp, Mus musculus
  siRNA target sequence for A930008A22Rik (NM_172768.1,1536-1554).
ccccttcgctggacttcaa

SEQ ID NO: 778701 - DNA, 19 bp, Mus musculus
  siRNA target sequence for A930008A22Rik (NM_172768.1,1573-1591).
caccgagctcagtgattct

SEQ ID NO: 778702 - DNA, 19 bp, Mus musculus
  siRNA target sequence for A930008A22Rik (NM_172768.1,1579-1597).
gctcagtgattcttcagat

SEQ ID NO: 778703 - DNA, 19 bp, Mus musculus
  siRNA target sequence for A930008A22Rik (NM_172768.1,1580-1598).
ctcagtgattcttcagata

SEQ ID NO: 778704 - DNA, 19 bp, Mus musculus
  siRNA target sequence for A930008A22Rik (NM_172768.1,1634-1652).
gacctgagtggaagacaat

SEQ ID NO: 778705 - DNA, 19 bp, Mus musculus
  siRNA target sequence for A930008A22Rik (NM_172768.1,1739-1757).
cagcggcgtttctctgata

SEQ ID NO: 778706 - DNA, 19 bp, Mus musculus
  siRNA target sequence for A930008A22Rik (NM_172768.1,1742-1760).
cggcgtttctctgatatca

SEQ ID NO: 778707 - DNA, 19 bp, Mus musculus
  siRNA target sequence for A930008A22Rik (NM_172768.1,1743-1761).
ggcgtttctctgatatcat

SEQ ID NO: 778708 - DNA, 19 bp, Mus musculus
  siRNA target sequence for A930008A22Rik (NM_172768.1,1745-1763).
cgtttctctgatatcatct

SEQ ID NO: 778709 - DNA, 19 bp, Mus musculus
  siRNA target sequence for A930008A22Rik (NM_172768.1,1746-1764).
gtttctctgatatcatctt

SEQ ID NO: 778710 - DNA, 19 bp, Mus musculus
  siRNA target sequence for A930008A22Rik (NM_172768.1,1802-1820).
cgagtgattctctacacta

SEQ ID NO: 778711 - DNA, 19 bp, Mus musculus
  siRNA target sequence for A930008A22Rik (NM_172768.1,1803-1821).
gagtgattctctacactat

SEQ ID NO: 778712 - DNA, 19 bp, Mus musculus
  siRNA target sequence for A930008A22Rik (NM_172768.1,1805-1823).
gtgattctctacactatca

SEQ ID NO: 778713 - DNA, 19 bp, Mus musculus
  siRNA target sequence for A930008A22Rik (NM_172768.1,1816-1834).
cactatcaccctcactaat

SEQ ID NO: 778714 - DNA, 19 bp, Mus musculus
  siRNA target sequence for A930008A22Rik (NM_172768.1,1890-1908).
gtcaggagagcgaatgcta

SEQ ID NO: 778715 - DNA, 19 bp, Mus musculus
  siRNA target sequence for A930008A22Rik (NM_172768.1,1899-1917).
gcgaatgctacgtgataga

SEQ ID NO: 778716 - DNA, 19 bp, Mus musculus
  siRNA target sequence for A930008A22Rik (NM_172768.1,1900-1918).
cgaatgctacgtgatagat

SEQ ID NO: 778717 - DNA, 19 bp, Mus musculus
  siRNA target sequence for A930008A22Rik (NM_172768.1,2048-2066).
ccctgggggtttgtgaaaa

SEQ ID NO: 778718 - DNA, 19 bp, Mus musculus
  siRNA target sequence for A930008A22Rik (NM_172768.1,2052-2070).
gggggtttgtgaaaacgtt

SEQ ID NO: 778719 - DNA, 19 bp, Mus musculus
  siRNA target sequence for A930008A22Rik (NM_172768.1,2067-2085).
cgttcatcgagaagaactt

SEQ ID NO: 778720 - DNA, 19 bp, Mus musculus
  siRNA target sequence for A930008A22Rik (NM_172768.1,2101-2119).
ggactacttccgtcattta

SEQ ID NO: 778721 - DNA, 19 bp, Mus musculus
  siRNA target sequence for A930008A22Rik (NM_172768.1,2148-2166).
cctacttggctgagataca

SEQ ID NO: 778722 - DNA, 19 bp, Mus musculus
  siRNA target sequence for A930008A22Rik (NM_172768.1,2367-2385).
gttttcacctacaaagtgt

SEQ ID NO: 778723 - DNA, 19 bp, Mus musculus
  siRNA target sequence for A930008A22Rik (NM_172768.1,2541-2559).
cagaatgggcccagctatt

SEQ ID NO: 778724 - DNA, 19 bp, Mus musculus
  siRNA target sequence for A930008A22Rik (NM_172768.1,2644-2662).
gaaggactcgcttatcaat

SEQ ID NO: 778725 - DNA, 19 bp, Mus musculus
  siRNA target sequence for A930008A22Rik (NM_172768.1,2647-2665).
ggactcgcttatcaatctt

SEQ ID NO: 778726 - DNA, 19 bp, Mus musculus
  siRNA target sequence for A930008A22Rik (NM_172768.1,2652-2670).
cgcttatcaatcttcagaa

SEQ ID NO: 778727 - DNA, 19 bp, Mus musculus
  siRNA target sequence for E330017O07Rik (NM_172770.1,155-173).
ccagtttaatccaagagat

SEQ ID NO: 778728 - DNA, 19 bp, Mus musculus
  siRNA target sequence for E330017O07Rik (NM_172770.1,264-282).
gtgcaggaccactctgaat

SEQ ID NO: 778729 - DNA, 19 bp, Mus musculus
  siRNA target sequence for E330017O07Rik (NM_172770.1,291-309).
gatcagtcctccacaaact

SEQ ID NO: 778730 - DNA, 19 bp, Mus musculus
  siRNA target sequence for E330017O07Rik (NM_172770.1,310-328).
cccgagaatgcagatgaaa

SEQ ID NO: 778731 - DNA, 19 bp, Mus musculus
  siRNA target sequence for E330017O07Rik (NM_172770.1,311-329).
ccgagaatgcagatgaaat

SEQ ID NO: 778732 - DNA, 19 bp, Mus musculus
  siRNA target sequence for E330017O07Rik (NM_172770.1,528-546).
ccgagcccaggcttttata

SEQ ID NO: 778733 - DNA, 19 bp, Mus musculus
  siRNA target sequence for E330017O07Rik (NM_172770.1,529-547).
cgagcccaggcttttataa

SEQ ID NO: 778734 - DNA, 19 bp, Mus musculus
  siRNA target sequence for E330017O07Rik (NM_172770.1,530-548).
gagcccaggcttttataaa

SEQ ID NO: 778735 - DNA, 19 bp, Mus musculus
  siRNA target sequence for E330017O07Rik (NM_172770.1,599-617).
gtgatgagaattgtacaaa

SEQ ID NO: 778736 - DNA, 19 bp, Mus musculus
  siRNA target sequence for E330017O07Rik (NM_172770.1,646-664).
gtggccctgaagaactaca

SEQ ID NO: 778737 - DNA, 19 bp, Mus musculus
  siRNA target sequence for E330017O07Rik (NM_172770.1,666-684).
caaggctaaagaatgttat

SEQ ID NO: 778738 - DNA, 19 bp, Mus musculus
  siRNA target sequence for E330017O07Rik (NM_172770.1,670-688).
gctaaagaatgttatcaga

SEQ ID NO: 778739 - DNA, 19 bp, Mus musculus
  siRNA target sequence for E330017O07Rik (NM_172770.1,723-741).
ggtgaaagaacacctaaat

SEQ ID NO: 778740 - DNA, 19 bp, Mus musculus
  siRNA target sequence for E330017O07Rik (NM_172770.1,735-753).
cctaaatcaagtaactctt

SEQ ID NO: 778741 - DNA, 19 bp, Mus musculus
  siRNA target sequence for E330017O07Rik (NM_172770.1,815-833).
cagcagtgacgaccaaaaa

SEQ ID NO: 778742 - DNA, 19 bp, Mus musculus
  siRNA target sequence for E330017O07Rik (NM_172770.1,818-836).
cagtgacgaccaaaaatct

SEQ ID NO: 778743 - DNA, 19 bp, Mus musculus
  siRNA target sequence for E330017O07Rik (NM_172770.1,860-878).
gccagacacccttgttcta

SEQ ID NO: 778744 - DNA, 19 bp, Mus musculus
  siRNA target sequence for E330017O07Rik (NM_172770.1,861-879).
ccagacacccttgttctat

SEQ ID NO: 778745 - DNA, 19 bp, Mus musculus
  siRNA target sequence for E330017O07Rik (NM_172770.1,925-943).
gagcgaacgttgttcagaa

SEQ ID NO: 778746 - DNA, 19 bp, Mus musculus
  siRNA target sequence for E330017O07Rik (NM_172770.1,1029-1047).
gctttgcgtatctgttcta

SEQ ID NO: 778747 - DNA, 19 bp, Mus musculus
  siRNA target sequence for E330017O07Rik (NM_172770.1,1030-1048).
ctttgcgtatctgttctaa

SEQ ID NO: 778748 - DNA, 19 bp, Mus musculus
  siRNA target sequence for E330017O07Rik (NM_172770.1,1034-1052).
gcgtatctgttctaaaact

SEQ ID NO: 778749 - DNA, 19 bp, Mus musculus
  siRNA target sequence for E330017O07Rik (NM_172770.1,1036-1054).
gtatctgttctaaaactct

SEQ ID NO: 778750 - DNA, 19 bp, Mus musculus
  siRNA target sequence for E330017O07Rik (NM_172770.1,1145-1163).
ccagaatcctggtgattca

SEQ ID NO: 778751 - DNA, 19 bp, Mus musculus
  siRNA target sequence for E330017O07Rik (NM_172770.1,1148-1166).
gaatcctggtgattcaaca

SEQ ID NO: 778752 - DNA, 19 bp, Mus musculus
  siRNA target sequence for E330017O07Rik (NM_172770.1,1401-1419).
gaatcgagagcccaagata

SEQ ID NO: 778753 - DNA, 19 bp, Mus musculus
  siRNA target sequence for E330017O07Rik (NM_172770.1,1405-1423).
cgagagcccaagataacca

SEQ ID NO: 778754 - DNA, 19 bp, Mus musculus
  siRNA target sequence for E330017O07Rik (NM_172770.1,1450-1468).
gctctgttgggaaacatca

SEQ ID NO: 778755 - DNA, 19 bp, Mus musculus
  siRNA target sequence for E330017O07Rik (NM_172770.1,1497-1515).
gatagctcatgaagaattt

SEQ ID NO: 778756 - DNA, 19 bp, Mus musculus
  siRNA target sequence for E330017O07Rik (NM_172770.1,1549-1567).
gaagaggacatggacttat

SEQ ID NO: 778757 - DNA, 19 bp, Mus musculus
  siRNA target sequence for E330017O07Rik (NM_172770.1,1588-1606).
ctcctaggactcatcatga

SEQ ID NO: 778758 - DNA, 19 bp, Mus musculus
  siRNA target sequence for E330017O07Rik (NM_172770.1,1591-1609).
ctaggactcatcatgaact

SEQ ID NO: 778759 - DNA, 19 bp, Mus musculus
  siRNA target sequence for E330017O07Rik (NM_172770.1,1594-1612).
ggactcatcatgaacttgt

SEQ ID NO: 778760 - DNA, 19 bp, Mus musculus
  siRNA target sequence for E330017O07Rik (NM_172770.1,1634-1652).
ctgagatgtgggttgtgaa

SEQ ID NO: 778761 - DNA, 19 bp, Mus musculus
  siRNA target sequence for E330017O07Rik (NM_172770.1,1723-1741).
ctgagccggaccctttctt

SEQ ID NO: 778762 - DNA, 19 bp, Mus musculus
  siRNA target sequence for E330017O07Rik (NM_172770.1,1829-1847).
cacgttacgccataaagat

SEQ ID NO: 778763 - DNA, 19 bp, Mus musculus
  siRNA target sequence for E330017O07Rik (NM_172770.1,1832-1850).
gttacgccataaagatact

SEQ ID NO: 778764 - DNA, 19 bp, Mus musculus
  siRNA target sequence for E330017O07Rik (NM_172770.1,1877-1895).
cagctcgggaagaagtagt

SEQ ID NO: 778765 - DNA, 19 bp, Mus musculus
  siRNA target sequence for E330017O07Rik (NM_172770.1,1891-1909).
gtagtgagacttgataaaa

SEQ ID NO: 778766 - DNA, 19 bp, Mus musculus
  siRNA target sequence for E330017O07Rik (NM_172770.1,1896-1914).
gagacttgataaaaagttt

SEQ ID NO: 778767 - DNA, 19 bp, Mus musculus
  siRNA target sequence for E330017O07Rik (NM_172770.1,2157-2175).
gcttcacgggatacaagtt

SEQ ID NO: 778768 - DNA, 19 bp, Mus musculus
  siRNA target sequence for E330017O07Rik (NM_172770.1,2190-2208).
gaaacacttgaatgattct

SEQ ID NO: 778769 - DNA, 19 bp, Mus musculus
  siRNA target sequence for 4631416G20Rik (NM_172773.1,177-195).
ggtacaacttagcgatttt

SEQ ID NO: 778770 - DNA, 19 bp, Mus musculus
  siRNA target sequence for 4631416G20Rik (NM_172773.1,254-272).
gtggacatggtagattcaa

SEQ ID NO: 778771 - DNA, 19 bp, Mus musculus
  siRNA target sequence for 4631416G20Rik (NM_172773.1,256-274).
ggacatggtagattcaaat

SEQ ID NO: 778772 - DNA, 19 bp, Mus musculus
  siRNA target sequence for 4631416G20Rik (NM_172773.1,257-275).
gacatggtagattcaaata

SEQ ID NO: 778773 - DNA, 19 bp, Mus musculus
  siRNA target sequence for 4631416G20Rik (NM_172773.1,388-406).
gtggattctcggctctttt

SEQ ID NO: 778774 - DNA, 19 bp, Mus musculus
  siRNA target sequence for 4631416G20Rik (NM_172773.1,390-408).
ggattctcggctctttttt

SEQ ID NO: 778775 - DNA, 19 bp, Mus musculus
  siRNA target sequence for 4631416G20Rik (NM_172773.1,430-448).
gattcccggtgggtacatt

SEQ ID NO: 778776 - DNA, 19 bp, Mus musculus
  siRNA target sequence for 4631416G20Rik (NM_172773.1,645-663).
gaagcaagcttcttaccat

SEQ ID NO: 778777 - DNA, 19 bp, Mus musculus
  siRNA target sequence for 4631416G20Rik (NM_172773.1,745-763).
cgtcttctatctttttggt

SEQ ID NO: 778778 - DNA, 19 bp, Mus musculus
  siRNA target sequence for 4631416G20Rik (NM_172773.1,746-764).
gtcttctatctttttggta

SEQ ID NO: 778779 - DNA, 19 bp, Mus musculus
  siRNA target sequence for 4631416G20Rik (NM_172773.1,767-785).
gttggaattgtctggttta

SEQ ID NO: 778780 - DNA, 19 bp, Mus musculus
  siRNA target sequence for 4631416G20Rik (NM_172773.1,770-788).
ggaattgtctggtttattt

SEQ ID NO: 778781 - DNA, 19 bp, Mus musculus
  siRNA target sequence for 4631416G20Rik (NM_172773.1,818-836).
gaaactcacaagacaatct

SEQ ID NO: 778782 - DNA, 19 bp, Mus musculus
  siRNA target sequence for 4631416G20Rik (NM_172773.1,837-855).
cccattatgaaaaagaata

SEQ ID NO: 778783 - DNA, 19 bp, Mus musculus
  siRNA target sequence for 4631416G20Rik (NM_172773.1,902-920).
ccgtgggggtccatcttga

SEQ ID NO: 778784 - DNA, 19 bp, Mus musculus
  siRNA target sequence for 4631416G20Rik (NM_172773.1,903-921).
cgtgggggtccatcttgaa

SEQ ID NO: 778785 - DNA, 19 bp, Mus musculus
  siRNA target sequence for 4631416G20Rik (NM_172773.1,939-957).
caattgtggtagcacattt

SEQ ID NO: 778786 - DNA, 19 bp, Mus musculus
  siRNA target sequence for 4631416G20Rik (NM_172773.1,950-968).
gcacatttctcctacaact

SEQ ID NO: 778787 - DNA, 19 bp, Mus musculus
  siRNA target sequence for 4631416G20Rik (NM_172773.1,958-976).
ctcctacaactggtctttt

SEQ ID NO: 778788 - DNA, 19 bp, Mus musculus
  siRNA target sequence for 4631416G20Rik (NM_172773.1,969-987).
ggtctttttacaccttatt

SEQ ID NO: 778789 - DNA, 19 bp, Mus musculus
  siRNA target sequence for 4631416G20Rik (NM_172773.1,988-1006).
gacgctactgccaacttat

SEQ ID NO: 778790 - DNA, 19 bp, Mus musculus
  siRNA target sequence for 4631416G20Rik (NM_172773.1,990-1008).
cgctactgccaacttatat

SEQ ID NO: 778791 - DNA, 19 bp, Mus musculus
  siRNA target sequence for 4631416G20Rik (NM_172773.1,1097-1115).
ggtcaagccgctgactatt

SEQ ID NO: 778792 - DNA, 19 bp, Mus musculus
  siRNA target sequence for 4631416G20Rik (NM_172773.1,1120-1138).
ggtcaagtggaacttttca

SEQ ID NO: 778793 - DNA, 19 bp, Mus musculus
  siRNA target sequence for 4631416G20Rik (NM_172773.1,1195-1213).
cctagtcgcggctggattt

SEQ ID NO: 778794 - DNA, 19 bp, Mus musculus
  siRNA target sequence for 4631416G20Rik (NM_172773.1,1196-1214).
ctagtcgcggctggattta

SEQ ID NO: 778795 - DNA, 19 bp, Mus musculus
  siRNA target sequence for 4631416G20Rik (NM_172773.1,1236-1254).
ccgttgcgttcctaaccat

SEQ ID NO: 778796 - DNA, 19 bp, Mus musculus
  siRNA target sequence for 4631416G20Rik (NM_172773.1,1237-1255).
cgttgcgttcctaaccata

SEQ ID NO: 778797 - DNA, 19 bp, Mus musculus
  siRNA target sequence for 4631416G20Rik (NM_172773.1,1241-1259).
gcgttcctaaccatatcca

SEQ ID NO: 778798 - DNA, 19 bp, Mus musculus
  siRNA target sequence for 4631416G20Rik (NM_172773.1,1277-1295).
gcctcttctggatttagca

SEQ ID NO: 778799 - DNA, 19 bp, Mus musculus
  siRNA target sequence for 4631416G20Rik (NM_172773.1,1293-1311).
gcatcaaccatctggatat

SEQ ID NO: 778800 - DNA, 19 bp, Mus musculus
  siRNA target sequence for 4631416G20Rik (NM_172773.1,1306-1324).
ggatatcgctccttcgtat

SEQ ID NO: 778801 - DNA, 19 bp, Mus musculus
  siRNA target sequence for 4631416G20Rik (NM_172773.1,1377-1395).
cgggacccatcattgctaa

SEQ ID NO: 778802 - DNA, 19 bp, Mus musculus
  siRNA target sequence for 4631416G20Rik (NM_172773.1,1383-1401).
ccatcattgctaaaagtct

SEQ ID NO: 778803 - DNA, 19 bp, Mus musculus
  siRNA target sequence for 4631416G20Rik (NM_172773.1,1402-1420).
gacccctgataacactatt

SEQ ID NO: 778804 - DNA, 19 bp, Mus musculus
  siRNA target sequence for 6620401K05Rik (NM_172774.1,173-191).
cggtctgtctcgatccatt

SEQ ID NO: 778805 - DNA, 19 bp, Mus musculus
  siRNA target sequence for 6620401K05Rik (NM_172774.1,177-195).
ctgtctcgatccattgaga

SEQ ID NO: 778806 - DNA, 19 bp, Mus musculus
  siRNA target sequence for 6620401K05Rik (NM_172774.1,260-278).
cggtgagcacgcggaattt

SEQ ID NO: 778807 - DNA, 19 bp, Mus musculus
  siRNA target sequence for 6620401K05Rik (NM_172774.1,261-279).
ggtgagcacgcggaattta

SEQ ID NO: 778808 - DNA, 19 bp, Mus musculus
  siRNA target sequence for 6620401K05Rik (NM_172774.1,378-396).
cgattagatgggttaccaa

SEQ ID NO: 778809 - DNA, 19 bp, Mus musculus
  siRNA target sequence for 6620401K05Rik (NM_172774.1,379-397).
gattagatgggttaccaaa

SEQ ID NO: 778810 - DNA, 19 bp, Mus musculus
  siRNA target sequence for 6620401K05Rik (NM_172774.1,389-407).
gttaccaaatagtcctata

SEQ ID NO: 778811 - DNA, 19 bp, Mus musculus
  siRNA target sequence for 6620401K05Rik (NM_172774.1,423-441).
gatattccagttaaagata

SEQ ID NO: 778812 - DNA, 19 bp, Mus musculus
  siRNA target sequence for 6620401K05Rik (NM_172774.1,456-474).
gtacttcagatacaataca

SEQ ID NO: 778813 - DNA, 19 bp, Mus musculus
  siRNA target sequence for 6620401K05Rik (NM_172774.1,464-482).
gatacaatacaaagaactt

SEQ ID NO: 778814 - DNA, 19 bp, Mus musculus
  siRNA target sequence for 6620401K05Rik (NM_172774.1,563-581).
gacagaatccgttctagaa

SEQ ID NO: 778815 - DNA, 19 bp, Mus musculus
  siRNA target sequence for 6620401K05Rik (NM_172774.1,675-693).
cagtctgaactgcagttta

SEQ ID NO: 778816 - DNA, 19 bp, Mus musculus
  siRNA target sequence for 6620401K05Rik (NM_172774.1,731-749).
gagcaacggacgaacaaat

SEQ ID NO: 778817 - DNA, 19 bp, Mus musculus
  siRNA target sequence for 6620401K05Rik (NM_172774.1,733-751).
gcaacggacgaacaaataa

SEQ ID NO: 778818 - DNA, 19 bp, Mus musculus
  siRNA target sequence for 6620401K05Rik (NM_172774.1,793-811).
gctcttctgtggttctcaa

SEQ ID NO: 778819 - DNA, 19 bp, Mus musculus
  siRNA target sequence for 6620401K05Rik (NM_172774.1,930-948).
ggccaagaggtttcagata

SEQ ID NO: 778820 - DNA, 19 bp, Mus musculus
  siRNA target sequence for 6620401K05Rik (NM_172774.1,931-949).
gccaagaggtttcagataa

SEQ ID NO: 778821 - DNA, 19 bp, Mus musculus
  siRNA target sequence for 6620401K05Rik (NM_172774.1,1032-1050).
gatgctcaaggttctattt

SEQ ID NO: 778822 - DNA, 19 bp, Mus musculus
  siRNA target sequence for 6620401K05Rik (NM_172774.1,1155-1173).
ccaccagggctcagtactt

SEQ ID NO: 778823 - DNA, 19 bp, Mus musculus
  siRNA target sequence for 6620401K05Rik (NM_172774.1,1156-1174).
caccagggctcagtacttt

SEQ ID NO: 778824 - DNA, 19 bp, Mus musculus
  siRNA target sequence for 6620401K05Rik (NM_172774.1,1256-1274).
ggcattcactggattaaat

SEQ ID NO: 778825 - DNA, 19 bp, Mus musculus
  siRNA target sequence for 6620401K05Rik (NM_172774.1,1446-1464).
ggggactctgcgacacata

SEQ ID NO: 778826 - DNA, 19 bp, Mus musculus
  siRNA target sequence for 6620401K05Rik (NM_172774.1,1621-1639).
ccgccagggaaggaaactt

SEQ ID NO: 778827 - DNA, 19 bp, Mus musculus
  siRNA target sequence for 6620401K05Rik (NM_172774.1,1780-1798).
gcctgtgcctcaaagtttt

SEQ ID NO: 778828 - DNA, 19 bp, Mus musculus
  siRNA target sequence for 6620401K05Rik (NM_172774.1,1998-2016).
ctgtacatgtacatcacat

SEQ ID NO: 778829 - DNA, 19 bp, Mus musculus
  siRNA target sequence for 6620401K05Rik (NM_172774.1,2058-2076).
ctggaacaagaggtagtat

SEQ ID NO: 778830 - DNA, 19 bp, Mus musculus
  siRNA target sequence for 6620401K05Rik (NM_172774.1,2422-2440).
gtgctgcggagactgattt

SEQ ID NO: 778831 - DNA, 19 bp, Mus musculus
  siRNA target sequence for E430029F06 (NM_172777.1,1858-1876).
ccattctggaacttatcga

SEQ ID NO: 778832 - DNA, 19 bp, Mus musculus
  siRNA target sequence for E430029F06 (NM_172777.1,1859-1877).
cattctggaacttatcgaa

SEQ ID NO: 778833 - DNA, 19 bp, Mus musculus
  siRNA target sequence for E430029F06 (NM_172777.1,1865-1883).
ggaacttatcgaaaaagca

SEQ ID NO: 778834 - DNA, 19 bp, Mus musculus
  siRNA target sequence for E430029F06 (NM_172777.1,1866-1884).
gaacttatcgaaaaagcat

SEQ ID NO: 778835 - DNA, 19 bp, Mus musculus
  siRNA target sequence for E430029F06 (NM_172777.1,1913-1931).
catggttgcattgttaaca

SEQ ID NO: 778836 - DNA, 19 bp, Mus musculus
  siRNA target sequence for E430029F06 (NM_172777.1,1930-1948).
cacacaatccttcactttt

SEQ ID NO: 778837 - DNA, 19 bp, Mus musculus
  siRNA target sequence for 9830160H19Rik (NM_172784.1,672-690).
cccgctgctacctgttcaa

SEQ ID NO: 778838 - DNA, 19 bp, Mus musculus
  siRNA target sequence for 9830160H19Rik (NM_172784.1,674-692).
cgctgctacctgttcaact

SEQ ID NO: 778839 - DNA, 19 bp, Mus musculus
  siRNA target sequence for 9830160H19Rik (NM_172784.1,852-870).
ccacagacggggtagttct

SEQ ID NO: 778840 - DNA, 19 bp, Mus musculus
  siRNA target sequence for 9830160H19Rik (NM_172784.1,853-871).
cacagacggggtagttcta

SEQ ID NO: 778841 - DNA, 19 bp, Mus musculus
  siRNA target sequence for 9830160H19Rik (NM_172784.1,855-873).
cagacggggtagttctaga

SEQ ID NO: 778842 - DNA, 19 bp, Mus musculus
  siRNA target sequence for 9830160H19Rik (NM_172784.1,895-913).
ccacgccattgtcctttat

SEQ ID NO: 778843 - DNA, 19 bp, Mus musculus
  siRNA target sequence for 9830160H19Rik (NM_172784.1,1112-1130).
gcttgctcgcgctaccatt

SEQ ID NO: 778844 - DNA, 19 bp, Mus musculus
  siRNA target sequence for 9830160H19Rik (NM_172784.1,1113-1131).
cttgctcgcgctaccattt

SEQ ID NO: 778845 - DNA, 19 bp, Mus musculus
  siRNA target sequence for 9830160H19Rik (NM_172784.1,1159-1177).
catagcgttggcttgtgat

SEQ ID NO: 778846 - DNA, 19 bp, Mus musculus
  siRNA target sequence for 9830160H19Rik (NM_172784.1,1281-1299).
gagccatgggattaaatga

SEQ ID NO: 778847 - DNA, 19 bp, Mus musculus
  siRNA target sequence for 9830160H19Rik (NM_172784.1,1348-1366).
caaccaacccgctactgta

SEQ ID NO: 778848 - DNA, 19 bp, Mus musculus
  siRNA target sequence for 9830160H19Rik (NM_172784.1,1404-1422).
cgccagagagtcagatcaa

SEQ ID NO: 778849 - DNA, 19 bp, Mus musculus
  siRNA target sequence for 9830160H19Rik (NM_172784.1,1540-1558).
gctacctctggcattaggt

SEQ ID NO: 778850 - DNA, 19 bp, Mus musculus
  siRNA target sequence for D730019B10 (NM_172785.1,545-563).
gaggacacacctacatcaa

SEQ ID NO: 778851 - DNA, 19 bp, Mus musculus
  siRNA target sequence for D730019B10 (NM_172785.1,550-568).
cacacctacatcaaggttt

SEQ ID NO: 778852 - DNA, 19 bp, Mus musculus
  siRNA target sequence for D730019B10 (NM_172785.1,552-570).
cacctacatcaaggttttt

SEQ ID NO: 778853 - DNA, 19 bp, Mus musculus
  siRNA target sequence for D730019B10 (NM_172785.1,600-618).
gtctgatactcctatcaga

SEQ ID NO: 778854 - DNA, 19 bp, Mus musculus
  siRNA target sequence for D730019B10 (NM_172785.1,649-667).
caagctgtgttggtgtata

SEQ ID NO: 778855 - DNA, 19 bp, Mus musculus
  siRNA target sequence for D730019B10 (NM_172785.1,951-969).
ctgtccctatggcaagaaa

SEQ ID NO: 778856 - DNA, 19 bp, Mus musculus
  siRNA target sequence for D730019B10 (NM_172785.1,980-998).
gggtcaagtgcagattcta

SEQ ID NO: 778857 - DNA, 19 bp, Mus musculus
  siRNA target sequence for D730019B10 (NM_172785.1,1107-1125).
ccggagccgtcctacaaca

SEQ ID NO: 778858 - DNA, 19 bp, Mus musculus
  siRNA target sequence for D730019B10 (NM_172785.1,1184-1202).
cggtcctggcagctttgaa

SEQ ID NO: 778859 - DNA, 19 bp, Mus musculus
  siRNA target sequence for D730019B10 (NM_172785.1,1185-1203).
ggtcctggcagctttgaat

SEQ ID NO: 778860 - DNA, 19 bp, Mus musculus
  siRNA target sequence for D730019B10 (NM_172785.1,1186-1204).
gtcctggcagctttgaata

SEQ ID NO: 778861 - DNA, 19 bp, Mus musculus
  siRNA target sequence for D730019B10 (NM_172785.1,1515-1533).
gcccagctcctattgttat

SEQ ID NO: 778862 - DNA, 19 bp, Mus musculus
  siRNA target sequence for L3mbtl3 (NM_172787.1,112-130).
gcacaagtggtcaagagtt

SEQ ID NO: 778863 - DNA, 19 bp, Mus musculus
  siRNA target sequence for L3mbtl3 (NM_172787.1,113-131).
cacaagtggtcaagagttt

SEQ ID NO: 778864 - DNA, 19 bp, Mus musculus
  siRNA target sequence for L3mbtl3 (NM_172787.1,118-136).
gtggtcaagagtttgatgt

SEQ ID NO: 778865 - DNA, 19 bp, Mus musculus
  siRNA target sequence for L3mbtl3 (NM_172787.1,173-191).
cctaccagggagtgattta

SEQ ID NO: 778866 - DNA, 19 bp, Mus musculus
  siRNA target sequence for L3mbtl3 (NM_172787.1,174-192).
ctaccagggagtgatttaa

SEQ ID NO: 778867 - DNA, 19 bp, Mus musculus
  siRNA target sequence for L3mbtl3 (NM_172787.1,194-212).
gtttcgagtaaatgagttt

SEQ ID NO: 778868 - DNA, 19 bp, Mus musculus
  siRNA target sequence for L3mbtl3 (NM_172787.1,234-252).
gacgaaagcgagatggaaa

SEQ ID NO: 778869 - DNA, 19 bp, Mus musculus
  siRNA target sequence for L3mbtl3 (NM_172787.1,323-341).
gagctccaggcccgtattt

SEQ ID NO: 778870 - DNA, 19 bp, Mus musculus
  siRNA target sequence for L3mbtl3 (NM_172787.1,326-344).
ctccaggcccgtatttcca

SEQ ID NO: 778871 - DNA, 19 bp, Mus musculus
  siRNA target sequence for L3mbtl3 (NM_172787.1,444-462).
cagttttgtgagaactgtt

SEQ ID NO: 778872 - DNA, 19 bp, Mus musculus
  siRNA target sequence for L3mbtl3 (NM_172787.1,487-505).
gtctttcgggaggaaagta

SEQ ID NO: 778873 - DNA, 19 bp, Mus musculus
  siRNA target sequence for L3mbtl3 (NM_172787.1,489-507).
ctttcgggaggaaagtatt

SEQ ID NO: 778874 - DNA, 19 bp, Mus musculus
  siRNA target sequence for L3mbtl3 (NM_172787.1,523-541).
ctcggcatgccaaagacaa

SEQ ID NO: 778875 - DNA, 19 bp, Mus musculus
  siRNA target sequence for L3mbtl3 (NM_172787.1,559-577).
gggatggaggcgaagacaa

SEQ ID NO: 778876 - DNA, 19 bp, Mus musculus
  siRNA target sequence for L3mbtl3 (NM_172787.1,582-600).
gaggaagatcctaagtgta

SEQ ID NO: 778877 - DNA, 19 bp, Mus musculus
  siRNA target sequence for L3mbtl3 (NM_172787.1,592-610).
ctaagtgtagtcgaaagaa

SEQ ID NO: 778878 - DNA, 19 bp, Mus musculus
  siRNA target sequence for L3mbtl3 (NM_172787.1,735-753).
ggggattctgccgtcttaa

SEQ ID NO: 778879 - DNA, 19 bp, Mus musculus
  siRNA target sequence for L3mbtl3 (NM_172787.1,755-773).
gcaaggcttgcctcctaaa

SEQ ID NO: 778880 - DNA, 19 bp, Mus musculus
  siRNA target sequence for L3mbtl3 (NM_172787.1,830-848).
gcctacgaagctgttcaaa

SEQ ID NO: 778881 - DNA, 19 bp, Mus musculus
  siRNA target sequence for L3mbtl3 (NM_172787.1,918-936).
gaccaccaggcaatgtact

SEQ ID NO: 778882 - DNA, 19 bp, Mus musculus
  siRNA target sequence for L3mbtl3 (NM_172787.1,951-969).
gctgaggtttgtggatata

SEQ ID NO: 778883 - DNA, 19 bp, Mus musculus
  siRNA target sequence for L3mbtl3 (NM_172787.1,954-972).
gaggtttgtggatatagga

SEQ ID NO: 778884 - DNA, 19 bp, Mus musculus
  siRNA target sequence for L3mbtl3 (NM_172787.1,956-974).
ggtttgtggatataggata

SEQ ID NO: 778885 - DNA, 19 bp, Mus musculus
  siRNA target sequence for L3mbtl3 (NM_172787.1,957-975).
gtttgtggatataggataa

SEQ ID NO: 778886 - DNA, 19 bp, Mus musculus
  siRNA target sequence for L3mbtl3 (NM_172787.1,961-979).
gtggatataggataaaact

SEQ ID NO: 778887 - DNA, 19 bp, Mus musculus
  siRNA target sequence for L3mbtl3 (NM_172787.1,964-982).
gatataggataaaacttca

SEQ ID NO: 778888 - DNA, 19 bp, Mus musculus
  siRNA target sequence for L3mbtl3 (NM_172787.1,978-996).
cttcactttgacggttatt

SEQ ID NO: 778889 - DNA, 19 bp, Mus musculus
  siRNA target sequence for L3mbtl3 (NM_172787.1,983-1001).
ctttgacggttattctgat

SEQ ID NO: 778890 - DNA, 19 bp, Mus musculus
  siRNA target sequence for L3mbtl3 (NM_172787.1,989-1007).
cggttattctgattgctat

SEQ ID NO: 778891 - DNA, 19 bp, Mus musculus
  siRNA target sequence for L3mbtl3 (NM_172787.1,1084-1102).
ctccaaaagggtataaaga

SEQ ID NO: 778892 - DNA, 19 bp, Mus musculus
  siRNA target sequence for L3mbtl3 (NM_172787.1,1087-1105).
caaaagggtataaagaaga

SEQ ID NO: 778893 - DNA, 19 bp, Mus musculus
  siRNA target sequence for L3mbtl3 (NM_172787.1,1092-1110).
gggtataaagaagaagaat

SEQ ID NO: 778894 - DNA, 19 bp, Mus musculus
  siRNA target sequence for L3mbtl3 (NM_172787.1,1118-1136).
gcagtcctaccttaagact

SEQ ID NO: 778895 - DNA, 19 bp, Mus musculus
  siRNA target sequence for L3mbtl3 (NM_172787.1,1148-1166).
ggctgctcccaagtcatta

SEQ ID NO: 778896 - DNA, 19 bp, Mus musculus
  siRNA target sequence for L3mbtl3 (NM_172787.1,1150-1168).
ctgctcccaagtcattatt

SEQ ID NO: 778897 - DNA, 19 bp, Mus musculus
  siRNA target sequence for L3mbtl3 (NM_172787.1,1153-1171).
ctcccaagtcattatttga

SEQ ID NO: 778898 - DNA, 19 bp, Mus musculus
  siRNA target sequence for L3mbtl3 (NM_172787.1,1220-1238).
gctcgaggctgcagacaaa

SEQ ID NO: 778899 - DNA, 19 bp, Mus musculus
  siRNA target sequence for L3mbtl3 (NM_172787.1,1221-1239).
ctcgaggctgcagacaaaa

SEQ ID NO: 778900 - DNA, 19 bp, Mus musculus
  siRNA target sequence for L3mbtl3 (NM_172787.1,1260-1278).
gttgctacggtaacagata

SEQ ID NO: 778901 - DNA, 19 bp, Mus musculus
  siRNA target sequence for L3mbtl3 (NM_172787.1,1264-1282).
ctacggtaacagatatggt

SEQ ID NO: 778902 - DNA, 19 bp, Mus musculus
  siRNA target sequence for L3mbtl3 (NM_172787.1,1275-1293).
gatatggtggacaatcgtt

SEQ ID NO: 778903 - DNA, 19 bp, Mus musculus
  siRNA target sequence for L3mbtl3 (NM_172787.1,1315-1333).
gggatgagagctatgacta

SEQ ID NO: 778904 - DNA, 19 bp, Mus musculus
  siRNA target sequence for L3mbtl3 (NM_172787.1,1317-1335).
gatgagagctatgactatt

SEQ ID NO: 778905 - DNA, 19 bp, Mus musculus
  siRNA target sequence for L3mbtl3 (NM_172787.1,1366-1384).
cagtcggctggtgtaaaga

SEQ ID NO: 778906 - DNA, 19 bp, Mus musculus
  siRNA target sequence for L3mbtl3 (NM_172787.1,1411-1429).
caggctattctcatgtgaa

SEQ ID NO: 778907 - DNA, 19 bp, Mus musculus
  siRNA target sequence for L3mbtl3 (NM_172787.1,1414-1432).
gctattctcatgtgaaaca

SEQ ID NO: 778908 - DNA, 19 bp, Mus musculus
  siRNA target sequence for L3mbtl3 (NM_172787.1,1477-1495).
ctcctgcaagagctttcaa

SEQ ID NO: 778909 - DNA, 19 bp, Mus musculus
  siRNA target sequence for L3mbtl3 (NM_172787.1,1591-1609).
cggatgaccaccggataaa

SEQ ID NO: 778910 - DNA, 19 bp, Mus musculus
  siRNA target sequence for L3mbtl3 (NM_172787.1,1627-1645).
ggagcagttgctatgacta

SEQ ID NO: 778911 - DNA, 19 bp, Mus musculus
  siRNA target sequence for L3mbtl3 (NM_172787.1,1726-1744).
gccctgcagaattaatgga

SEQ ID NO: 778912 - DNA, 19 bp, Mus musculus
  siRNA target sequence for L3mbtl3 (NM_172787.1,1727-1745).
ccctgcagaattaatggaa

SEQ ID NO: 778913 - DNA, 19 bp, Mus musculus
  siRNA target sequence for L3mbtl3 (NM_172787.1,1757-1775).
cggaggatgtccaactcta

SEQ ID NO: 778914 - DNA, 19 bp, Mus musculus
  siRNA target sequence for L3mbtl3 (NM_172787.1,1781-1799).
caggggtgttggtcatttt

SEQ ID NO: 778915 - DNA, 19 bp, Mus musculus
  siRNA target sequence for L3mbtl3 (NM_172787.1,1783-1801).
ggggtgttggtcattttaa

SEQ ID NO: 778916 - DNA, 19 bp, Mus musculus
  siRNA target sequence for L3mbtl3 (NM_172787.1,1784-1802).
gggtgttggtcattttaaa

SEQ ID NO: 778917 - DNA, 19 bp, Mus musculus
  siRNA target sequence for L3mbtl3 (NM_172787.1,1835-1853).
caactgtccctattcagaa

SEQ ID NO: 778918 - DNA, 19 bp, Mus musculus
  siRNA target sequence for L3mbtl3 (NM_172787.1,1840-1858).
gtccctattcagaaatcaa

SEQ ID NO: 778919 - DNA, 19 bp, Mus musculus
  siRNA target sequence for L3mbtl3 (NM_172787.1,1901-1919).
cacctctccacctactact

SEQ ID NO: 778920 - DNA, 19 bp, Mus musculus
  siRNA target sequence for L3mbtl3 (NM_172787.1,1922-1940).
ctcgttcccaaggagtaaa

SEQ ID NO: 778921 - DNA, 19 bp, Mus musculus
  siRNA target sequence for L3mbtl3 (NM_172787.1,2402-2420).
gcgacgctcagcagtattt

SEQ ID NO: 778922 - DNA, 19 bp, Mus musculus
  siRNA target sequence for L3mbtl3 (NM_172787.1,2505-2523).
gctagtagagtttccaaat

SEQ ID NO: 778923 - DNA, 19 bp, Mus musculus
  siRNA target sequence for L3mbtl3 (NM_172787.1,2532-2550).
gacgaggtgtcagaattca

SEQ ID NO: 778924 - DNA, 19 bp, Mus musculus
  siRNA target sequence for L3mbtl3 (NM_172787.1,2538-2556).
gtgtcagaattcattcaga

SEQ ID NO: 778925 - DNA, 19 bp, Mus musculus
  siRNA target sequence for L3mbtl3 (NM_172787.1,2558-2576).
cttgcctgggtgtgaagaa

SEQ ID NO: 778926 - DNA, 19 bp, Mus musculus
  siRNA target sequence for L3mbtl3 (NM_172787.1,2610-2628).
ggagaagcatttttactca

SEQ ID NO: 778927 - DNA, 19 bp, Mus musculus
  siRNA target sequence for L3mbtl3 (NM_172787.1,2627-2645).
catgacccaaacagacatt

SEQ ID NO: 778928 - DNA, 19 bp, Mus musculus
  siRNA target sequence for L3mbtl3 (NM_172787.1,2646-2664).
gttaaaatcatgagcatta

SEQ ID NO: 778929 - DNA, 19 bp, Mus musculus
  siRNA target sequence for L3mbtl3 (NM_172787.1,2676-2694).
gctctcaaaattttcaact

SEQ ID NO: 778930 - DNA, 19 bp, Mus musculus
  siRNA target sequence for 4831416G18Rik (NM_172788.2,294-312).
cactaaggacgaagtttta

SEQ ID NO: 778931 - DNA, 19 bp, Mus musculus
  siRNA target sequence for 4831416G18Rik (NM_172788.2,321-339).
ccggagagtggatgataat

SEQ ID NO: 778932 - DNA, 19 bp, Mus musculus
  siRNA target sequence for 4831416G18Rik (NM_172788.2,322-340).
cggagagtggatgataatt

SEQ ID NO: 778933 - DNA, 19 bp, Mus musculus
  siRNA target sequence for 4831416G18Rik (NM_172788.2,350-368).
gcatgctaggagacaagat

SEQ ID NO: 778934 - DNA, 19 bp, Mus musculus
  siRNA target sequence for 4831416G18Rik (NM_172788.2,453-471).
cactgcctacaactatgat

SEQ ID NO: 778935 - DNA, 19 bp, Mus musculus
  siRNA target sequence for 4831416G18Rik (NM_172788.2,610-628).
ctcagcgtgacgcacaaat

SEQ ID NO: 778936 - DNA, 19 bp, Mus musculus
  siRNA target sequence for 4831416G18Rik (NM_172788.2,960-978).
caagggagcctcactaaaa

SEQ ID NO: 778937 - DNA, 19 bp, Mus musculus
  siRNA target sequence for 4831416G18Rik (NM_172788.2,963-981).
gggagcctcactaaaaaca

SEQ ID NO: 778938 - DNA, 19 bp, Mus musculus
  siRNA target sequence for 4831416G18Rik (NM_172788.2,1046-1064).
ctgggttaccctggaataa

SEQ ID NO: 778939 - DNA, 19 bp, Mus musculus
  siRNA target sequence for 4831416G18Rik (NM_172788.2,1172-1190).
ccacactacaggatcacat

SEQ ID NO: 778940 - DNA, 19 bp, Mus musculus
  siRNA target sequence for 4831416G18Rik (NM_172788.2,1699-1717).
ccccagtcggccatggata

SEQ ID NO: 778941 - DNA, 19 bp, Mus musculus
  siRNA target sequence for 4831416G18Rik (NM_172788.2,1777-1795).
ggttcctgccccatagaga

SEQ ID NO: 778942 - DNA, 19 bp, Mus musculus
  siRNA target sequence for 4831416G18Rik (NM_172788.2,1843-1861).
ggctccttggatctgaatt

SEQ ID NO: 778943 - DNA, 19 bp, Mus musculus
  siRNA target sequence for 4831416G18Rik (NM_172788.2,1844-1862).
gctccttggatctgaattt

SEQ ID NO: 778944 - DNA, 19 bp, Mus musculus
  siRNA target sequence for G431002C21Rik (NM_172790.1,318-336).
gtggctgacccctcttcat

SEQ ID NO: 778945 - DNA, 19 bp, Mus musculus
  siRNA target sequence for G431002C21Rik (NM_172790.1,383-401).
cacactcagcggatgtgaa

SEQ ID NO: 778946 - DNA, 19 bp, Mus musculus
  siRNA target sequence for G431002C21Rik (NM_172790.1,565-583).
gtgaacctgctcctgaata

SEQ ID NO: 778947 - DNA, 19 bp, Mus musculus
  siRNA target sequence for G431002C21Rik (NM_172790.1,594-612).
cctgaatgtctgcgataaa

SEQ ID NO: 778948 - DNA, 19 bp, Mus musculus
  siRNA target sequence for G431002C21Rik (NM_172790.1,595-613).
ctgaatgtctgcgataaaa

SEQ ID NO: 778949 - DNA, 19 bp, Mus musculus
  siRNA target sequence for G431002C21Rik (NM_172790.1,641-659).
cttttctagggcatttaga

SEQ ID NO: 778950 - DNA, 19 bp, Mus musculus
  siRNA target sequence for G431002C21Rik (NM_172790.1,743-761).
ccagtggccagattgaagt

SEQ ID NO: 778951 - DNA, 19 bp, Mus musculus
  siRNA target sequence for G431002C21Rik (NM_172790.1,795-813).
cgatgagcccaatgctttt

SEQ ID NO: 778952 - DNA, 19 bp, Mus musculus
  siRNA target sequence for G431002C21Rik (NM_172790.1,993-1011).
cgtcaactaccagagtaaa

SEQ ID NO: 778953 - DNA, 19 bp, Mus musculus
  siRNA target sequence for G431002C21Rik (NM_172790.1,996-1014).
caactaccagagtaaagaa

SEQ ID NO: 778954 - DNA, 19 bp, Mus musculus
  siRNA target sequence for G431002C21Rik (NM_172790.1,1115-1133).
gaaacacgcccctacatgt

SEQ ID NO: 778955 - DNA, 19 bp, Mus musculus
  siRNA target sequence for G431002C21Rik (NM_172790.1,1176-1194).
gaccaatggcgcagatact

SEQ ID NO: 778956 - DNA, 19 bp, Mus musculus
  siRNA target sequence for G431002C21Rik (NM_172790.1,1202-1220).
gcggtatccacgacatgtt

SEQ ID NO: 778957 - DNA, 19 bp, Mus musculus
  siRNA target sequence for G431002C21Rik (NM_172790.1,1280-1298).
caggtcagctgtatagcat

SEQ ID NO: 778958 - DNA, 19 bp, Mus musculus
  siRNA target sequence for G431002C21Rik (NM_172790.1,1565-1583).
gctgttcgccacttcacta

SEQ ID NO: 778959 - DNA, 19 bp, Mus musculus
  siRNA target sequence for G431002C21Rik (NM_172790.1,1566-1584).
ctgttcgccacttcactat

SEQ ID NO: 778960 - DNA, 19 bp, Mus musculus
  siRNA target sequence for G431002C21Rik (NM_172790.1,1698-1716).
ggagttcttattggataat

SEQ ID NO: 778961 - DNA, 19 bp, Mus musculus
  siRNA target sequence for G431002C21Rik (NM_172790.1,1794-1812).
cctcgaactgctcttagaa

SEQ ID NO: 778962 - DNA, 19 bp, Mus musculus
  siRNA target sequence for G431002C21Rik (NM_172790.1,1795-1813).
ctcgaactgctcttagaaa

SEQ ID NO: 778963 - DNA, 19 bp, Mus musculus
  siRNA target sequence for G431002C21Rik (NM_172790.1,2099-2117).
ccctgcacttgctgattga

SEQ ID NO: 778964 - DNA, 19 bp, Mus musculus
  siRNA target sequence for G431002C21Rik (NM_172790.1,2101-2119).
ctgcacttgctgattgaca

SEQ ID NO: 778965 - DNA, 19 bp, Mus musculus
  siRNA target sequence for G431002C21Rik (NM_172790.1,2196-2214).
ccatgtggactgtgtacat

SEQ ID NO: 778966 - DNA, 19 bp, Mus musculus
  siRNA target sequence for G431002C21Rik (NM_172790.1,2322-2340).
ggaccacgatgcatttgta

SEQ ID NO: 778967 - DNA, 19 bp, Mus musculus
  siRNA target sequence for G431002C21Rik (NM_172790.1,2449-2467).
gatgctggtgtcgattaca

SEQ ID NO: 778968 - DNA, 19 bp, Mus musculus
  siRNA target sequence for G431002C21Rik (NM_172790.1,2495-2513).
cctacactggacatgaaga

SEQ ID NO: 778969 - DNA, 19 bp, Mus musculus
  siRNA target sequence for G431002C21Rik (NM_172790.1,2533-2551).
gaacacagcccgttctcat

SEQ ID NO: 778970 - DNA, 19 bp, Mus musculus
  siRNA target sequence for G431002C21Rik (NM_172790.1,2536-2554).
cacagcccgttctcatact

SEQ ID NO: 778971 - DNA, 19 bp, Mus musculus
  siRNA target sequence for G431002C21Rik (NM_172790.1,2581-2599).
cactgtgcagtaattaata

SEQ ID NO: 778972 - DNA, 19 bp, Mus musculus
  siRNA target sequence for G431002C21Rik (NM_172790.1,2736-2754).
gcaccaagccgaagtgaat

SEQ ID NO: 778973 - DNA, 19 bp, Mus musculus
  siRNA target sequence for G431002C21Rik (NM_172790.1,2897-2915).
gtagcaagggccatgagaa

SEQ ID NO: 778974 - DNA, 19 bp, Mus musculus
  siRNA target sequence for G431002C21Rik (NM_172790.1,2944-2962).
caagaccttggccttatca

SEQ ID NO: 778975 - DNA, 19 bp, Mus musculus
  siRNA target sequence for G431002C21Rik (NM_172790.1,3096-3114).
ggcctgcgctcctaacaaa

SEQ ID NO: 778976 - DNA, 19 bp, Mus musculus
  siRNA target sequence for G431002C21Rik (NM_172790.1,3099-3117).
ctgcgctcctaacaaagat

SEQ ID NO: 778977 - DNA, 19 bp, Mus musculus
  siRNA target sequence for D330012D11Rik (NM_172793.1,148-166).
ggggtttctgaagcaaata

SEQ ID NO: 778978 - DNA, 19 bp, Mus musculus
  siRNA target sequence for D330012D11Rik (NM_172793.1,248-266).
ggccctgaggagtccattt

SEQ ID NO: 778979 - DNA, 19 bp, Mus musculus
  siRNA target sequence for D330012D11Rik (NM_172793.1,292-310).
gttcccatgtcgcttatca

SEQ ID NO: 778980 - DNA, 19 bp, Mus musculus
  siRNA target sequence for D330012D11Rik (NM_172793.1,295-313).
cccatgtcgcttatcatca

SEQ ID NO: 778981 - DNA, 19 bp, Mus musculus
  siRNA target sequence for D330012D11Rik (NM_172793.1,296-314).
ccatgtcgcttatcatcat

SEQ ID NO: 778982 - DNA, 19 bp, Mus musculus
  siRNA target sequence for D330012D11Rik (NM_172793.1,297-315).
catgtcgcttatcatcata

SEQ ID NO: 778983 - DNA, 19 bp, Mus musculus
  siRNA target sequence for D330012D11Rik (NM_172793.1,424-442).
ccgaaacaggaccttattt

SEQ ID NO: 778984 - DNA, 19 bp, Mus musculus
  siRNA target sequence for D330012D11Rik (NM_172793.1,426-444).
gaaacaggaccttatttga

SEQ ID NO: 778985 - DNA, 19 bp, Mus musculus
  siRNA target sequence for D330012D11Rik (NM_172793.1,465-483).
gaagcgtgaacctacacat

SEQ ID NO: 778986 - DNA, 19 bp, Mus musculus
  siRNA target sequence for D330012D11Rik (NM_172793.1,470-488).
gtgaacctacacatcctta

SEQ ID NO: 778987 - DNA, 19 bp, Mus musculus
  siRNA target sequence for D330012D11Rik (NM_172793.1,519-537).
ggtgccgctttctttctga

SEQ ID NO: 778988 - DNA, 19 bp, Mus musculus
  siRNA target sequence for D330012D11Rik (NM_172793.1,782-800).
ggagcccatagcaatgtgt

SEQ ID NO: 778989 - DNA, 19 bp, Mus musculus
  siRNA target sequence for D330012D11Rik (NM_172793.1,788-806).
catagcaatgtgtcttgta

SEQ ID NO: 778990 - DNA, 19 bp, Mus musculus
  siRNA target sequence for D330012D11Rik (NM_172793.1,792-810).
gcaatgtgtcttgtataat

SEQ ID NO: 778991 - DNA, 19 bp, Mus musculus
  siRNA target sequence for D330012D11Rik (NM_172793.1,919-937).
cctgccgctcagtctgatt

SEQ ID NO: 778992 - DNA, 19 bp, Mus musculus
  siRNA target sequence for D330012D11Rik (NM_172793.1,953-971).
gcgctgcgatatttttaca

SEQ ID NO: 778993 - DNA, 19 bp, Mus musculus
  siRNA target sequence for D330012D11Rik (NM_172793.1,954-972).
cgctgcgatatttttacaa

SEQ ID NO: 778994 - DNA, 19 bp, Mus musculus
  siRNA target sequence for D330012D11Rik (NM_172793.1,1177-1195).
gggggtgcccagtattgca

SEQ ID NO: 778995 - DNA, 19 bp, Mus musculus
  siRNA target sequence for D330012D11Rik (NM_172793.1,1596-1614).
gtgaacatccggatcctat

SEQ ID NO: 778996 - DNA, 19 bp, Mus musculus
  siRNA target sequence for 9830137M10Rik (NM_172796.1,283-301).
ggtcttacccagatttgat

SEQ ID NO: 778997 - DNA, 19 bp, Mus musculus
  siRNA target sequence for 9830137M10Rik (NM_172796.1,286-304).
cttacccagatttgatcat

SEQ ID NO: 778998 - DNA, 19 bp, Mus musculus
  siRNA target sequence for 9830137M10Rik (NM_172796.1,417-435).
ggaggaggagtgattgtta

SEQ ID NO: 778999 - DNA, 19 bp, Mus musculus
  siRNA target sequence for 9830137M10Rik (NM_172796.1,418-436).
gaggaggagtgattgttat

SEQ ID NO: 779000 - DNA, 19 bp, Mus musculus
  siRNA target sequence for 9830137M10Rik (NM_172796.1,421-439).
gaggagtgattgttataca

SEQ ID NO: 779001 - DNA, 19 bp, Mus musculus
  siRNA target sequence for 9830137M10Rik (NM_172796.1,541-559).
ccaagcaacaggaggataa

SEQ ID NO: 779002 - DNA, 19 bp, Mus musculus
  siRNA target sequence for 9830137M10Rik (NM_172796.1,546-564).
caacaggaggataagtttt

SEQ ID NO: 779003 - DNA, 19 bp, Mus musculus
  siRNA target sequence for 9830137M10Rik (NM_172796.1,551-569).
ggaggataagttttacatt

SEQ ID NO: 779004 - DNA, 19 bp, Mus musculus
  siRNA target sequence for 9830137M10Rik (NM_172796.1,649-667).
gtcgatctctcacttctaa

SEQ ID NO: 779005 - DNA, 19 bp, Mus musculus
  siRNA target sequence for 9830137M10Rik (NM_172796.1,898-916).
ccgaaaatgcccaaaaata

SEQ ID NO: 779006 - DNA, 19 bp, Mus musculus
  siRNA target sequence for 5330435L01Rik (NM_172800.2,152-170).
gatgtaccgccatacttca

SEQ ID NO: 779007 - DNA, 19 bp, Mus musculus
  siRNA target sequence for 5330435L01Rik (NM_172800.2,155-173).
gtaccgccatacttcaaga

SEQ ID NO: 779008 - DNA, 19 bp, Mus musculus
  siRNA target sequence for 5330435L01Rik (NM_172800.2,302-320).
gagtacaggtacatgatta

SEQ ID NO: 779009 - DNA, 19 bp, Mus musculus
  siRNA target sequence for 5330435L01Rik (NM_172800.2,438-456).
gcgagaagcgccaaagtgt

SEQ ID NO: 779010 - DNA, 19 bp, Mus musculus
  siRNA target sequence for 5330435L01Rik (NM_172800.2,628-646).
ctacgtgcaggcggttaat

SEQ ID NO: 779011 - DNA, 19 bp, Mus musculus
  siRNA target sequence for 5330435L01Rik (NM_172800.2,864-882).
gtggcatcagcgactacaa

SEQ ID NO: 779012 - DNA, 19 bp, Mus musculus
  siRNA target sequence for 5330435L01Rik (NM_172800.2,1695-1713).
ccctggccgtggagactaa

SEQ ID NO: 779013 - DNA, 19 bp, Mus musculus
  siRNA target sequence for 5330435L01Rik (NM_172800.2,1696-1714).
cctggccgtggagactaat

SEQ ID NO: 779014 - DNA, 19 bp, Mus musculus
  siRNA target sequence for 5330435L01Rik (NM_172800.2,1769-1787).
ggggacattggcacgtata

SEQ ID NO: 779015 - DNA, 19 bp, Mus musculus
  siRNA target sequence for 5330435L01Rik (NM_172800.2,1772-1790).
gacattggcacgtatacct

SEQ ID NO: 779016 - DNA, 19 bp, Mus musculus
  siRNA target sequence for 5330435L01Rik (NM_172800.2,1966-1984).
ggagatgtcagaaaacaat

SEQ ID NO: 779017 - DNA, 19 bp, Mus musculus
  siRNA target sequence for 5330435L01Rik (NM_172800.2,2074-2092).
ccgcctgtgcgctgtcaat

SEQ ID NO: 779018 - DNA, 19 bp, Mus musculus
  siRNA target sequence for 5330435L01Rik (NM_172800.2,2099-2117).
ggcaaaggacagttcagta

SEQ ID NO: 779019 - DNA, 19 bp, Mus musculus
  siRNA target sequence for 5330435L01Rik (NM_172800.2,2198-2216).
caatccatcatgatccaat

SEQ ID NO: 779020 - DNA, 19 bp, Mus musculus
  siRNA target sequence for 5330435L01Rik (NM_172800.2,2288-2306).
ctacctgttgggtaccaat

SEQ ID NO: 779021 - DNA, 19 bp, Mus musculus
  siRNA target sequence for 5330435L01Rik (NM_172800.2,2294-2312).
gttgggtaccaatttaaga

SEQ ID NO: 779022 - DNA, 19 bp, Mus musculus
  siRNA target sequence for 5330435L01Rik (NM_172800.2,2348-2366).
gaggacctcatcatatgga

SEQ ID NO: 779023 - DNA, 19 bp, Mus musculus
  siRNA target sequence for 5330435L01Rik (NM_172800.2,2479-2497).
gcatgcagaagccacaaat

SEQ ID NO: 779024 - DNA, 19 bp, Mus musculus
  siRNA target sequence for 5330435L01Rik (NM_172800.2,2480-2498).
catgcagaagccacaaatt

SEQ ID NO: 779025 - DNA, 19 bp, Mus musculus
  siRNA target sequence for 5330435L01Rik (NM_172800.2,2528-2546).
ccaagcccgcagttcatca

SEQ ID NO: 779026 - DNA, 19 bp, Mus musculus
  siRNA target sequence for 5330435L01Rik (NM_172800.2,2529-2547).
caagcccgcagttcatcaa

SEQ ID NO: 779027 - DNA, 19 bp, Mus musculus
  siRNA target sequence for 5330435L01Rik (NM_172800.2,2614-2632).
gaccgccagacccaacttt

SEQ ID NO: 779028 - DNA, 19 bp, Mus musculus
  siRNA target sequence for 5330435L01Rik (NM_172800.2,2656-2674).
cgtgtccggcctgaaaaaa

SEQ ID NO: 779029 - DNA, 19 bp, Mus musculus
  siRNA target sequence for 5330435L01Rik (NM_172800.2,2915-2933).
cactacctgcccaacgtaa

SEQ ID NO: 779030 - DNA, 19 bp, Mus musculus
  siRNA target sequence for 5330435L01Rik (NM_172800.2,2959-2977).
cacagcactcactacctat

SEQ ID NO: 779031 - DNA, 19 bp, Mus musculus
  siRNA target sequence for 5330435L01Rik (NM_172800.2,2963-2981).
gcactcactacctatacta

SEQ ID NO: 779032 - DNA, 19 bp, Mus musculus
  siRNA target sequence for 5330435L01Rik (NM_172800.2,3019-3037).
ggtgtcggcctccactatt

SEQ ID NO: 779033 - DNA, 19 bp, Mus musculus
  siRNA target sequence for 5330435L01Rik (NM_172800.2,3020-3038).
gtgtcggcctccactattt

SEQ ID NO: 779034 - DNA, 19 bp, Mus musculus
  siRNA target sequence for 5330435L01Rik (NM_172800.2,3022-3040).
gtcggcctccactatttca

SEQ ID NO: 779035 - DNA, 19 bp, Mus musculus
  siRNA target sequence for 5330435L01Rik (NM_172800.2,3294-3312).
gcatgcgccaagtgaacat

SEQ ID NO: 779036 - DNA, 19 bp, Mus musculus
  siRNA target sequence for 5330435L01Rik (NM_172800.2,3330-3348).
ccagtcaaccttctagaaa

SEQ ID NO: 779037 - DNA, 19 bp, Mus musculus
  siRNA target sequence for 5330435L01Rik (NM_172800.2,3440-3458).
cccctcccagaaatggaat

SEQ ID NO: 779038 - DNA, 19 bp, Mus musculus
  siRNA target sequence for 5330435L01Rik (NM_172800.2,3441-3459).
ccctcccagaaatggaata

SEQ ID NO: 779039 - DNA, 19 bp, Mus musculus
  siRNA target sequence for 5330435L01Rik (NM_172800.2,3477-3495).
cggtgggctacaagatcaa

SEQ ID NO: 779040 - DNA, 19 bp, Mus musculus
  siRNA target sequence for 5330435L01Rik (NM_172800.2,3548-3566).
cgagtggagcgagaataca

SEQ ID NO: 779041 - DNA, 19 bp, Mus musculus
  siRNA target sequence for 5330435L01Rik (NM_172800.2,3551-3569).
gtggagcgagaatacacta

SEQ ID NO: 779042 - DNA, 19 bp, Mus musculus
  siRNA target sequence for 5330435L01Rik (NM_172800.2,3553-3571).
ggagcgagaatacactatt

SEQ ID NO: 779043 - DNA, 19 bp, Mus musculus
  siRNA target sequence for 5330435L01Rik (NM_172800.2,3754-3772).
cccggaggcagatcgaaat

SEQ ID NO: 779044 - DNA, 19 bp, Mus musculus
  siRNA target sequence for 5330435L01Rik (NM_172800.2,3839-3857).
ctggtagaaggcaactcat

SEQ ID NO: 779045 - DNA, 19 bp, Mus musculus
  siRNA target sequence for 5330435L01Rik (NM_172800.2,3961-3979).
cctggagcggacactagat

SEQ ID NO: 779046 - DNA, 19 bp, Mus musculus
  siRNA target sequence for 5330435L01Rik (NM_172800.2,3964-3982).
ggagcggacactagatgat

SEQ ID NO: 779047 - DNA, 19 bp, Mus musculus
  siRNA target sequence for 5330435L01Rik (NM_172800.2,4184-4202).
ccggagtctgtctacctat

SEQ ID NO: 779048 - DNA, 19 bp, Mus musculus
  siRNA target sequence for 5330435L01Rik (NM_172800.2,4185-4203).
cggagtctgtctacctatt

SEQ ID NO: 779049 - DNA, 19 bp, Mus musculus
  siRNA target sequence for 5330435L01Rik (NM_172800.2,4488-4506).
cctttacgtcctacaagtt

SEQ ID NO: 779050 - DNA, 19 bp, Mus musculus
  siRNA target sequence for 5330435L01Rik (NM_172800.2,4656-4674).
ctccatctgaggacaagat

SEQ ID NO: 779051 - DNA, 19 bp, Mus musculus
  siRNA target sequence for 5330435L01Rik (NM_172800.2,4658-4676).
ccatctgaggacaagatca

SEQ ID NO: 779052 - DNA, 19 bp, Mus musculus
  siRNA target sequence for 5330435L01Rik (NM_172800.2,4743-4761).
ctcttcgaggcatcaacaa

SEQ ID NO: 779053 - DNA, 19 bp, Mus musculus
  siRNA target sequence for 5330435L01Rik (NM_172800.2,4871-4889).
gagatccgaatgagcatat

SEQ ID NO: 779054 - DNA, 19 bp, Mus musculus
  siRNA target sequence for 5330435L01Rik (NM_172800.2,5046-5064).
gagacatccaaggatacaa

SEQ ID NO: 779055 - DNA, 19 bp, Mus musculus
  siRNA target sequence for 5330435L01Rik (NM_172800.2,5053-5071).
ccaaggatacaagatttat

SEQ ID NO: 779056 - DNA, 19 bp, Mus musculus
  siRNA target sequence for 5330435L01Rik (NM_172800.2,5127-5145).
ctgagaacagcgtgaaact

SEQ ID NO: 779057 - DNA, 19 bp, Mus musculus
  siRNA target sequence for 5330435L01Rik (NM_172800.2,5292-5310).
ccactacctcagtgaatgt

SEQ ID NO: 779058 - DNA, 19 bp, Mus musculus
  siRNA target sequence for 5330435L01Rik (NM_172800.2,5390-5408).
ggggtcagcaagattgtga

SEQ ID NO: 779059 - DNA, 19 bp, Mus musculus
  siRNA target sequence for 5330435L01Rik (NM_172800.2,5462-5480).
gagggcatgacgtatcgtt

SEQ ID NO: 779060 - DNA, 19 bp, Mus musculus
  siRNA target sequence for 5330435L01Rik (NM_172800.2,5472-5490).
cgtatcgtttccgaatcaa

SEQ ID NO: 779061 - DNA, 19 bp, Mus musculus
  siRNA target sequence for 5330435L01Rik (NM_172800.2,5473-5491).
gtatcgtttccgaatcaaa

SEQ ID NO: 779062 - DNA, 19 bp, Mus musculus
  siRNA target sequence for 5330435L01Rik (NM_172800.2,5503-5521).
cacctatgggcctgagatt

SEQ ID NO: 779063 - DNA, 19 bp, Mus musculus
  siRNA target sequence for 5330435L01Rik (NM_172800.2,5642-5660).
cccatcacgcgctacgtaa

SEQ ID NO: 779064 - DNA, 19 bp, Mus musculus
  siRNA target sequence for 5330435L01Rik (NM_172800.2,5643-5661).
ccatcacgcgctacgtaat

SEQ ID NO: 779065 - DNA, 19 bp, Mus musculus
  siRNA target sequence for 5330435L01Rik (NM_172800.2,5755-5773).
gaagccaggcgtaagctat

SEQ ID NO: 779066 - DNA, 19 bp, Mus musculus
  siRNA target sequence for 5330435L01Rik (NM_172800.2,5759-5777).
ccaggcgtaagctatgact

SEQ ID NO: 779067 - DNA, 19 bp, Mus musculus
  siRNA target sequence for 5330435L01Rik (NM_172800.2,5760-5778).
caggcgtaagctatgactt

SEQ ID NO: 779068 - DNA, 19 bp, Mus musculus
  siRNA target sequence for 5330435L01Rik (NM_172800.2,5848-5866).
gaaagccagccccttttat

SEQ ID NO: 779069 - DNA, 19 bp, Mus musculus
  siRNA target sequence for 5330435L01Rik (NM_172800.2,5948-5966).
ggtcagagcaagaagtact

SEQ ID NO: 779070 - DNA, 19 bp, Mus musculus
  siRNA target sequence for 5330435L01Rik (NM_172800.2,6011-6029).
ggccacggggagatgctaa

SEQ ID NO: 779071 - DNA, 19 bp, Mus musculus
  siRNA target sequence for 5330435L01Rik (NM_172800.2,6071-6089).
cgtcggctgtccgtaaaga

SEQ ID NO: 779072 - DNA, 19 bp, Mus musculus
  siRNA target sequence for 5330435L01Rik (NM_172800.2,6072-6090).
gtcggctgtccgtaaagaa

SEQ ID NO: 779073 - DNA, 19 bp, Mus musculus
  siRNA target sequence for 5330435L01Rik (NM_172800.2,6074-6092).
cggctgtccgtaaagaact

SEQ ID NO: 779074 - DNA, 19 bp, Mus musculus
  siRNA target sequence for 5330435L01Rik (NM_172800.2,6141-6159).
gtccaggtagcctacatta

SEQ ID NO: 779075 - DNA, 19 bp, Mus musculus
  siRNA target sequence for 5330435L01Rik (NM_172800.2,6143-6161).
ccaggtagcctacattact

SEQ ID NO: 779076 - DNA, 19 bp, Mus musculus
  siRNA target sequence for 5330435L01Rik (NM_172800.2,6151-6169).
cctacattactctgatgaa

SEQ ID NO: 779077 - DNA, 19 bp, Mus musculus
  siRNA target sequence for 5330435L01Rik (NM_172800.2,6321-6339).
gtgaccccacatattacaa

SEQ ID NO: 779078 - DNA, 19 bp, Mus musculus
  siRNA target sequence for Otop2 (NM_172801.1,385-403).
cccgtgaggtgtggaaaaa

SEQ ID NO: 779079 - DNA, 19 bp, Mus musculus
  siRNA target sequence for Otop2 (NM_172801.1,547-565).
cgctatggatagtcttcta

SEQ ID NO: 779080 - DNA, 19 bp, Mus musculus
  siRNA target sequence for Otop2 (NM_172801.1,694-712).
gctactattccagtttctt

SEQ ID NO: 779081 - DNA, 19 bp, Mus musculus
  siRNA target sequence for Otop2 (NM_172801.1,695-713).
ctactattccagtttcttt

SEQ ID NO: 779082 - DNA, 19 bp, Mus musculus
  siRNA target sequence for Otop2 (NM_172801.1,797-815).
cgctaaagactgtatccat

SEQ ID NO: 779083 - DNA, 19 bp, Mus musculus
  siRNA target sequence for Otop2 (NM_172801.1,832-850).
cccggtgtgggctcatgtt

SEQ ID NO: 779084 - DNA, 19 bp, Mus musculus
  siRNA target sequence for Otop2 (NM_172801.1,834-852).
cggtgtgggctcatgttca

SEQ ID NO: 779085 - DNA, 19 bp, Mus musculus
  siRNA target sequence for Otop2 (NM_172801.1,1103-1121).
gtatgtcatgtggaagaat

SEQ ID NO: 779086 - DNA, 19 bp, Mus musculus
  siRNA target sequence for Otop2 (NM_172801.1,1296-1314).
caggccctggtcatctact

SEQ ID NO: 779087 - DNA, 19 bp, Mus musculus
  siRNA target sequence for Otop2 (NM_172801.1,1310-1328).
ctactacagctttaacatt

SEQ ID NO: 779088 - DNA, 19 bp, Mus musculus
  siRNA target sequence for Otop2 (NM_172801.1,1361-1379).
gagtggttcagtcatctat

SEQ ID NO: 779089 - DNA, 19 bp, Mus musculus
  siRNA target sequence for Otop2 (NM_172801.1,1365-1383).
ggttcagtcatctatcgtt

SEQ ID NO: 779090 - DNA, 19 bp, Mus musculus
  siRNA target sequence for Otop2 (NM_172801.1,1366-1384).
gttcagtcatctatcgttt

SEQ ID NO: 779091 - DNA, 19 bp, Mus musculus
  siRNA target sequence for Otop2 (NM_172801.1,1369-1387).
cagtcatctatcgttttga

SEQ ID NO: 779092 - DNA, 19 bp, Mus musculus
  siRNA target sequence for Otop2 (NM_172801.1,1392-1410).
cgggccatggaccatcata

SEQ ID NO: 779093 - DNA, 19 bp, Mus musculus
  siRNA target sequence for Otop2 (NM_172801.1,1393-1411).
gggccatggaccatcataa

SEQ ID NO: 779094 - DNA, 19 bp, Mus musculus
  siRNA target sequence for Otop2 (NM_172801.1,1395-1413).
gccatggaccatcataaga

SEQ ID NO: 779095 - DNA, 19 bp, Mus musculus
  siRNA target sequence for Otop2 (NM_172801.1,1470-1488).
gctatctcctactactcta

SEQ ID NO: 779096 - DNA, 19 bp, Mus musculus
  siRNA target sequence for Otop2 (NM_172801.1,1543-1561).
cccacgctctactcatgat

SEQ ID NO: 779097 - DNA, 19 bp, Mus musculus
  siRNA target sequence for Otop2 (NM_172801.1,1795-1813).
gacgtcggtgcctgaaaga

SEQ ID NO: 779098 - DNA, 19 bp, Mus musculus
  siRNA target sequence for Otop2 (NM_172801.1,1797-1815).
cgtcggtgcctgaaagaca

SEQ ID NO: 779099 - DNA, 19 bp, Mus musculus
  siRNA target sequence for Otop2 (NM_172801.1,1798-1816).
gtcggtgcctgaaagacat

SEQ ID NO: 779100 - DNA, 19 bp, Mus musculus
  siRNA target sequence for Otop2 (NM_172801.1,1940-1958).
caacatctgcctacctttt

SEQ ID NO: 779101 - DNA, 19 bp, Mus musculus
  siRNA target sequence for Otop2 (NM_172801.1,1990-2008).
gtctactggaggtctatgt

SEQ ID NO: 779102 - DNA, 19 bp, Mus musculus
  siRNA target sequence for Fscn2 (NM_172802.1,215-233).
gtttggccttgttaacgat

SEQ ID NO: 779103 - DNA, 19 bp, Mus musculus
  siRNA target sequence for Fscn2 (NM_172802.1,377-395).
ctacctgtcagcagaagaa

SEQ ID NO: 779104 - DNA, 19 bp, Mus musculus
  siRNA target sequence for Fscn2 (NM_172802.1,693-711).
gcactagtcaccctcattt

SEQ ID NO: 779105 - DNA, 19 bp, Mus musculus
  siRNA target sequence for Fscn2 (NM_172802.1,694-712).
cactagtcaccctcatttt

SEQ ID NO: 779106 - DNA, 19 bp, Mus musculus
  siRNA target sequence for Fscn2 (NM_172802.1,723-741).
cggtactgcctcaagtctt

SEQ ID NO: 779107 - DNA, 19 bp, Mus musculus
  siRNA target sequence for Fscn2 (NM_172802.1,724-742).
ggtactgcctcaagtctta

SEQ ID NO: 779108 - DNA, 19 bp, Mus musculus
  siRNA target sequence for Fscn2 (NM_172802.1,725-743).
gtactgcctcaagtcttat

SEQ ID NO: 779109 - DNA, 19 bp, Mus musculus
  siRNA target sequence for Fscn2 (NM_172802.1,910-928).
ggcccagcaaggatgaact

SEQ ID NO: 779110 - DNA, 19 bp, Mus musculus
  siRNA target sequence for Fscn2 (NM_172802.1,1048-1066).
cattcctgatgcaaatcga

SEQ ID NO: 779111 - DNA, 19 bp, Mus musculus
  siRNA target sequence for Fscn2 (NM_172802.1,1165-1183).
ccaacaccatgtttgaaat

SEQ ID NO: 779112 - DNA, 19 bp, Mus musculus
  siRNA target sequence for Fscn2 (NM_172802.1,1216-1234).
ccagcaacgggcgttttgt

SEQ ID NO: 779113 - DNA, 19 bp, Mus musculus
  siRNA target sequence for Fscn2 (NM_172802.1,1280-1298).
gggcgaggacgagctattt

SEQ ID NO: 779114 - DNA, 19 bp, Mus musculus
  siRNA target sequence for Fscn2 (NM_172802.1,1281-1299).
ggcgaggacgagctattta

SEQ ID NO: 779115 - DNA, 19 bp, Mus musculus
  siRNA target sequence for Fscn2 (NM_172802.1,1426-1444).
gggatggcgcctatcagat

SEQ ID NO: 779116 - DNA, 19 bp, Mus musculus
  siRNA target sequence for Fscn2 (NM_172802.1,1427-1445).
ggatggcgcctatcagatt

SEQ ID NO: 779117 - DNA, 19 bp, Mus musculus
  siRNA target sequence for Fscn2 (NM_172802.1,1428-1446).
gatggcgcctatcagatta

SEQ ID NO: 779118 - DNA, 19 bp, Mus musculus
  siRNA target sequence for Fscn2 (NM_172802.1,1503-1521).
ggtgacttggcggaagatt

SEQ ID NO: 779119 - DNA, 19 bp, Mus musculus
  siRNA target sequence for 4933430J11 (NM_172808.1,223-241).
cttgttcggcactttttct

SEQ ID NO: 779120 - DNA, 19 bp, Mus musculus
  siRNA target sequence for 4933430J11 (NM_172808.1,294-312).
catggtcctggctggaaat

SEQ ID NO: 779121 - DNA, 19 bp, Mus musculus
  siRNA target sequence for 4933430J11 (NM_172808.1,298-316).
gtcctggctggaaattatt

SEQ ID NO: 779122 - DNA, 19 bp, Mus musculus
  siRNA target sequence for 4933430J11 (NM_172808.1,301-319).
ctggctggaaattattcca

SEQ ID NO: 779123 - DNA, 19 bp, Mus musculus
  siRNA target sequence for 4933430J11 (NM_172808.1,389-407).
gggtcaatcgggagatgat

SEQ ID NO: 779124 - DNA, 19 bp, Mus musculus
  siRNA target sequence for 4933430J11 (NM_172808.1,390-408).
ggtcaatcgggagatgatt

SEQ ID NO: 779125 - DNA, 19 bp, Mus musculus
  siRNA target sequence for 4933430J11 (NM_172808.1,402-420).
gatgattgtcagggtattt

SEQ ID NO: 779126 - DNA, 19 bp, Mus musculus
  siRNA target sequence for 4933430J11 (NM_172808.1,462-480).
gacaactggatccacattt

SEQ ID NO: 779127 - DNA, 19 bp, Mus musculus
  siRNA target sequence for 4933430J11 (NM_172808.1,464-482).
caactggatccacatttat

SEQ ID NO: 779128 - DNA, 19 bp, Mus musculus
  siRNA target sequence for 4933430J11 (NM_172808.1,492-510).
gagggtttggtgaagaaat

SEQ ID NO: 779129 - DNA, 19 bp, Mus musculus
  siRNA target sequence for 4933430J11 (NM_172808.1,677-695).
cgaacagatccgaaaatct

SEQ ID NO: 779130 - DNA, 19 bp, Mus musculus
  siRNA target sequence for 4933430J11 (NM_172808.1,678-696).
gaacagatccgaaaatcta

SEQ ID NO: 779131 - DNA, 19 bp, Mus musculus
  siRNA target sequence for 4933430J11 (NM_172808.1,716-734).
caacagcgtgattattgct

SEQ ID NO: 779132 - DNA, 19 bp, Mus musculus
  siRNA target sequence for 4933430J11 (NM_172808.1,752-770).
gctgctaaagccatatctt

SEQ ID NO: 779133 - DNA, 19 bp, Mus musculus
  siRNA target sequence for 4933430J11 (NM_172808.1,800-818).
gagaatgggagcaatcgtt

SEQ ID NO: 779134 - DNA, 19 bp, Mus musculus
  siRNA target sequence for 4933430J11 (NM_172808.1,802-820).
gaatgggagcaatcgttta

SEQ ID NO: 779135 - DNA, 19 bp, Mus musculus
  siRNA target sequence for 4933430J11 (NM_172808.1,872-890).
cgacccagatcgctgtttt

SEQ ID NO: 779136 - DNA, 19 bp, Mus musculus
  siRNA target sequence for 4933430J11 (NM_172808.1,883-901).
gctgttttggggttgatga

SEQ ID NO: 779137 - DNA, 19 bp, Mus musculus
  siRNA target sequence for 4933430J11 (NM_172808.1,923-941).
cgtcgttgacccacttact

SEQ ID NO: 779138 - DNA, 19 bp, Mus musculus
  siRNA target sequence for 4933430J11 (NM_172808.1,943-961).
ccaagtcctgtactgaaat

SEQ ID NO: 779139 - DNA, 19 bp, Mus musculus
  siRNA target sequence for 4933430J11 (NM_172808.1,944-962).
caagtcctgtactgaaata

SEQ ID NO: 779140 - DNA, 19 bp, Mus musculus
  siRNA target sequence for 4933430J11 (NM_172808.1,947-965).
gtcctgtactgaaatacta

SEQ ID NO: 779141 - DNA, 19 bp, Mus musculus
  siRNA target sequence for 4933430J11 (NM_172808.1,969-987).
gtgcagcctacctacgttt

SEQ ID NO: 779142 - DNA, 19 bp, Mus musculus
  siRNA target sequence for 4933430J11 (NM_172808.1,988-1006).
gtgcaaaagacttctatca

SEQ ID NO: 779143 - DNA, 19 bp, Mus musculus
  siRNA target sequence for 4933430J11 (NM_172808.1,998-1016).
cttctatcaagtaaacatt

SEQ ID NO: 779144 - DNA, 19 bp, Mus musculus
  siRNA target sequence for 4933430J11 (NM_172808.1,1001-1019).
ctatcaagtaaacattagt

SEQ ID NO: 779145 - DNA, 19 bp, Mus musculus
  siRNA target sequence for 4933430J11 (NM_172808.1,1018-1036).
gtggacatgggcttaataa

SEQ ID NO: 779146 - DNA, 19 bp, Mus musculus
  siRNA target sequence for 4933430J11 (NM_172808.1,1020-1038).
ggacatgggcttaataata

SEQ ID NO: 779147 - DNA, 19 bp, Mus musculus
  siRNA target sequence for 4933430J11 (NM_172808.1,1023-1041).
catgggcttaataatacaa

SEQ ID NO: 779148 - DNA, 19 bp, Mus musculus
  siRNA target sequence for 4933430J11 (NM_172808.1,1028-1046).
gcttaataatacaagcaat

SEQ ID NO: 779149 - DNA, 19 bp, Mus musculus
  siRNA target sequence for 4933430J11 (NM_172808.1,1056-1074).
gtcatttgtagattcaaat

SEQ ID NO: 779150 - DNA, 19 bp, Mus musculus
  siRNA target sequence for 4933430J11 (NM_172808.1,1212-1230).
gggaacaaactcattataa

SEQ ID NO: 779151 - DNA, 19 bp, Mus musculus
  siRNA target sequence for 4933430J11 (NM_172808.1,1263-1281).
caaggcatcgtgttcaaga

SEQ ID NO: 779152 - DNA, 19 bp, Mus musculus
  siRNA target sequence for 4933430J11 (NM_172808.1,1662-1680).
cacccgatgccattggttt

SEQ ID NO: 779153 - DNA, 19 bp, Mus musculus
  siRNA target sequence for 4933430J11 (NM_172808.1,1711-1729).
ccggcttcgctgtcatgaa

SEQ ID NO: 779154 - DNA, 19 bp, Mus musculus
  siRNA target sequence for 4933430J11 (NM_172808.1,1712-1730).
cggcttcgctgtcatgaaa

SEQ ID NO: 779155 - DNA, 19 bp, Mus musculus
  siRNA target sequence for 4933430J11 (NM_172808.1,1747-1765).
cctcctgccgccaaaagca

SEQ ID NO: 779156 - DNA, 19 bp, Mus musculus
  siRNA target sequence for 4933430J11 (NM_172808.1,1777-1795).
ccaatcgggattgttttca

SEQ ID NO: 779157 - DNA, 19 bp, Mus musculus
  siRNA target sequence for 4933430J11 (NM_172808.1,1827-1845).
gtctttcaacccaatgaga

SEQ ID NO: 779158 - DNA, 19 bp, Mus musculus
  siRNA target sequence for 4933430J11 (NM_172808.1,1833-1851).
caacccaatgagaagtatt

SEQ ID NO: 779159 - DNA, 19 bp, Mus musculus
  siRNA target sequence for 4933430J11 (NM_172808.1,1867-1885).
cacactacagcccaaagat

SEQ ID NO: 779160 - DNA, 19 bp, Mus musculus
  siRNA target sequence for 4933430J11 (NM_172808.1,1877-1895).
cccaaagatccgctttcaa

SEQ ID NO: 779161 - DNA, 19 bp, Mus musculus
  siRNA target sequence for 4933430J11 (NM_172808.1,1878-1896).
ccaaagatccgctttcaaa

SEQ ID NO: 779162 - DNA, 19 bp, Mus musculus
  siRNA target sequence for 4933430J11 (NM_172808.1,1959-1977).
caggagtgctacactttca

SEQ ID NO: 779163 - DNA, 19 bp, Mus musculus
  siRNA target sequence for 4933430J11 (NM_172808.1,1961-1979).
ggagtgctacactttcaaa

SEQ ID NO: 779164 - DNA, 19 bp, Mus musculus
  siRNA target sequence for 4933430J11 (NM_172808.1,2046-2064).
ccccatacccggcaatctt

SEQ ID NO: 779165 - DNA, 19 bp, Mus musculus
  siRNA target sequence for 4933430J11 (NM_172808.1,2088-2106).
cctttccccccaatctcta

SEQ ID NO: 779166 - DNA, 19 bp, Mus musculus
  siRNA target sequence for E130115J16Rik (NM_172809.1,1303-1321).
catgaatctggccaatgtt

SEQ ID NO: 779167 - DNA, 19 bp, Mus musculus
  siRNA target sequence for E130115J16Rik (NM_172809.1,1312-1330).
ggccaatgttggaatctca

SEQ ID NO: 779168 - DNA, 19 bp, Mus musculus
  siRNA target sequence for E130115J16Rik (NM_172809.1,1313-1331).
gccaatgttggaatctcaa

SEQ ID NO: 779169 - DNA, 19 bp, Mus musculus
  siRNA target sequence for E130115J16Rik (NM_172809.1,1314-1332).
ccaatgttggaatctcaaa

SEQ ID NO: 779170 - DNA, 19 bp, Mus musculus
  siRNA target sequence for E130115J16Rik (NM_172809.1,1471-1489).
cagcttagcagcaatctct

SEQ ID NO: 779171 - DNA, 19 bp, Mus musculus
  siRNA target sequence for E130115J16Rik (NM_172809.1,1478-1496).
gcagcaatctctacactaa

SEQ ID NO: 779172 - DNA, 19 bp, Mus musculus
  siRNA target sequence for E130115J16Rik (NM_172809.1,1569-1587).
gcaggcggtgtctttacat

SEQ ID NO: 779173 - DNA, 19 bp, Mus musculus
  siRNA target sequence for E130115J16Rik (NM_172809.1,1604-1622).
ggacagaaaaactggtatt

SEQ ID NO: 779174 - DNA, 19 bp, Mus musculus
  siRNA target sequence for E130115J16Rik (NM_172809.1,1627-1645).
gtgactgctagtgagaata

SEQ ID NO: 779175 - DNA, 19 bp, Mus musculus
  siRNA target sequence for E130115J16Rik (NM_172809.1,1657-1675).
catgaacggccaaattcta

SEQ ID NO: 779176 - DNA, 19 bp, Mus musculus
  siRNA target sequence for E130115J16Rik (NM_172809.1,1660-1678).
gaacggccaaattctatca

SEQ ID NO: 779177 - DNA, 19 bp, Mus musculus
  siRNA target sequence for E130115J16Rik (NM_172809.1,1664-1682).
ggccaaattctatcaagat

SEQ ID NO: 779178 - DNA, 19 bp, Mus musculus
  siRNA target sequence for E130115J16Rik (NM_172809.1,1665-1683).
gccaaattctatcaagatt

SEQ ID NO: 779179 - DNA, 19 bp, Mus musculus
  siRNA target sequence for E130115J16Rik (NM_172809.1,1667-1685).
caaattctatcaagattct

SEQ ID NO: 779180 - DNA, 19 bp, Mus musculus
  siRNA target sequence for E130115J16Rik (NM_172809.1,1684-1702).
ctgggaacggctataagta

SEQ ID NO: 779181 - DNA, 19 bp, Mus musculus
  siRNA target sequence for E130115J16Rik (NM_172809.1,1687-1705).
ggaacggctataagtaact

SEQ ID NO: 779182 - DNA, 19 bp, Mus musculus
  siRNA target sequence for E130115J16Rik (NM_172809.1,1688-1706).
gaacggctataagtaacta

SEQ ID NO: 779183 - DNA, 19 bp, Mus musculus
  siRNA target sequence for E130115J16Rik (NM_172809.1,1692-1710).
ggctataagtaactattgt

SEQ ID NO: 779184 - DNA, 19 bp, Mus musculus
  siRNA target sequence for E130115J16Rik (NM_172809.1,1700-1718).
gtaactattgtaaaaagat

SEQ ID NO: 779185 - DNA, 19 bp, Mus musculus
  siRNA target sequence for E130115J16Rik (NM_172809.1,1728-1746).
cagtgtcacctgtgtaaca

SEQ ID NO: 779186 - DNA, 19 bp, Mus musculus
  siRNA target sequence for E130115J16Rik (NM_172809.1,1736-1754).
cctgtgtaacatatcatat

SEQ ID NO: 779187 - DNA, 19 bp, Mus musculus
  siRNA target sequence for E130115J16Rik (NM_172809.1,1741-1759).
gtaacatatcatataaaca

SEQ ID NO: 779188 - DNA, 19 bp, Mus musculus
  siRNA target sequence for E130115J16Rik (NM_172809.1,1770-1788).
ggatgagagcacgaaagat

SEQ ID NO: 779189 - DNA, 19 bp, Mus musculus
  siRNA target sequence for E130115J16Rik (NM_172809.1,1799-1817).
cgtcgtggttggtatgtaa

SEQ ID NO: 779190 - DNA, 19 bp, Mus musculus
  siRNA target sequence for E130115J16Rik (NM_172809.1,1803-1821).
gtggttggtatgtaacagt

SEQ ID NO: 779191 - DNA, 19 bp, Mus musculus
  siRNA target sequence for E130115J16Rik (NM_172809.1,1841-1859).
gtagtaaactggattcttt

SEQ ID NO: 779192 - DNA, 19 bp, Mus musculus
  siRNA target sequence for E130115J16Rik (NM_172809.1,1851-1869).
ggattctttggctgatgaa

SEQ ID NO: 779193 - DNA, 19 bp, Mus musculus
  siRNA target sequence for E130115J16Rik (NM_172809.1,1856-1874).
ctttggctgatgaactgaa

SEQ ID NO: 779194 - DNA, 19 bp, Mus musculus
  siRNA target sequence for E130115J16Rik (NM_172809.1,1891-1909).
ggactagccatgcctttat

SEQ ID NO: 779195 - DNA, 19 bp, Mus musculus
  siRNA target sequence for E130115J16Rik (NM_172809.1,2041-2059).
gacaaccgcaggagcataa

SEQ ID NO: 779196 - DNA, 19 bp, Mus musculus
  siRNA target sequence for E130115J16Rik (NM_172809.1,2093-2111).
cggccttgtggaatgaata

SEQ ID NO: 779197 - DNA, 19 bp, Mus musculus
  siRNA target sequence for E130115J16Rik (NM_172809.1,2094-2112).
ggccttgtggaatgaatat

SEQ ID NO: 779198 - DNA, 19 bp, Mus musculus
  siRNA target sequence for E130115J16Rik (NM_172809.1,2100-2118).
gtggaatgaatatcttatt

SEQ ID NO: 779199 - DNA, 19 bp, Mus musculus
  siRNA target sequence for E130115J16Rik (NM_172809.1,2121-2139).
gaatgttgttcccaaaact

SEQ ID NO: 779200 - DNA, 19 bp, Mus musculus
  siRNA target sequence for E130115J16Rik (NM_172809.1,2128-2146).
gttcccaaaacttatgcta

SEQ ID NO: 779201 - DNA, 19 bp, Mus musculus
  siRNA target sequence for E130115J16Rik (NM_172809.1,2143-2161).
gctactctcatcctagatt

SEQ ID NO: 779202 - DNA, 19 bp, Mus musculus
  siRNA target sequence for E130115J16Rik (NM_172809.1,2149-2167).
ctcatcctagattcaataa

SEQ ID NO: 779203 - DNA, 19 bp, Mus musculus
  siRNA target sequence for E130115J16Rik (NM_172809.1,2271-2289).
gttgggtccactgtttagt

SEQ ID NO: 779204 - DNA, 19 bp, Mus musculus
  siRNA target sequence for E130115J16Rik (NM_172809.1,2274-2292).
gggtccactgtttagtgaa

SEQ ID NO: 779205 - DNA, 19 bp, Mus musculus
  siRNA target sequence for E130115J16Rik (NM_172809.1,2295-2313).
gttccagcatgctgtcatt

SEQ ID NO: 779206 - DNA, 19 bp, Mus musculus
  siRNA target sequence for E130115J16Rik (NM_172809.1,2360-2378).
cagaacttgacggaagttt

SEQ ID NO: 779207 - DNA, 19 bp, Mus musculus
  siRNA target sequence for E130115J16Rik (NM_172809.1,2387-2405).
cgcgatctgtgctcaacta

SEQ ID NO: 779208 - DNA, 19 bp, Mus musculus
  siRNA target sequence for E130115J16Rik (NM_172809.1,2492-2510).
gtgcgtctcctgtgagaaa

SEQ ID NO: 779209 - DNA, 19 bp, Mus musculus
  siRNA target sequence for E130115J16Rik (NM_172809.1,2676-2694).
ctcgtctgtctctgatcaa

SEQ ID NO: 779210 - DNA, 19 bp, Mus musculus
  siRNA target sequence for E130115J16Rik (NM_172809.1,2678-2696).
cgtctgtctctgatcaaga

SEQ ID NO: 779211 - DNA, 19 bp, Mus musculus
  siRNA target sequence for E130115J16Rik (NM_172809.1,2743-2761).
ggtcttgaagcaagactta

SEQ ID NO: 779212 - DNA, 19 bp, Mus musculus
  siRNA target sequence for E130115J16Rik (NM_172809.1,2744-2762).
gtcttgaagcaagacttat

SEQ ID NO: 779213 - DNA, 19 bp, Mus musculus
  siRNA target sequence for E130115J16Rik (NM_172809.1,2782-2800).
caccttctagctgctttaa

SEQ ID NO: 779214 - DNA, 19 bp, Mus musculus
  siRNA target sequence for E130320D18 (NM_172811.1,163-181).
ctacaatgcatctcaagat

SEQ ID NO: 779215 - DNA, 19 bp, Mus musculus
  siRNA target sequence for E130320D18 (NM_172811.1,214-232).
ccacatcctggagatgtat

SEQ ID NO: 779216 - DNA, 19 bp, Mus musculus
  siRNA target sequence for E130320D18 (NM_172811.1,254-272).
gcgctccagaacagatcta

SEQ ID NO: 779217 - DNA, 19 bp, Mus musculus
  siRNA target sequence for E130320D18 (NM_172811.1,255-273).
cgctccagaacagatctaa

SEQ ID NO: 779218 - DNA, 19 bp, Mus musculus
  siRNA target sequence for E130320D18 (NM_172811.1,267-285).
gatctaaaaagggcatttt

SEQ ID NO: 779219 - DNA, 19 bp, Mus musculus
  siRNA target sequence for E130320D18 (NM_172811.1,287-305).
cctgagacatacatccatt

SEQ ID NO: 779220 - DNA, 19 bp, Mus musculus
  siRNA target sequence for E130320D18 (NM_172811.1,290-308).
gagacatacatccatttga

SEQ ID NO: 779221 - DNA, 19 bp, Mus musculus
  siRNA target sequence for E130320D18 (NM_172811.1,455-473).
cagctgcagcaaatgacat

SEQ ID NO: 779222 - DNA, 19 bp, Mus musculus
  siRNA target sequence for E130320D18 (NM_172811.1,602-620).
gtgcgggacgacaatggaa

SEQ ID NO: 779223 - DNA, 19 bp, Mus musculus
  siRNA target sequence for E130320D18 (NM_172811.1,606-624).
gggacgacaatggaaacat

SEQ ID NO: 779224 - DNA, 19 bp, Mus musculus
  siRNA target sequence for E130320D18 (NM_172811.1,610-628).
cgacaatggaaacatttta

SEQ ID NO: 779225 - DNA, 19 bp, Mus musculus
  siRNA target sequence for E130320D18 (NM_172811.1,667-685).
ccatgaagtggcttctaaa

SEQ ID NO: 779226 - DNA, 19 bp, Mus musculus
  siRNA target sequence for E130320D18 (NM_172811.1,796-814).
gaactttgtctgtaacatt

SEQ ID NO: 779227 - DNA, 19 bp, Mus musculus
  siRNA target sequence for E130320D18 (NM_172811.1,1076-1094).
ggagtagcagtgatggata

SEQ ID NO: 779228 - DNA, 19 bp, Mus musculus
  siRNA target sequence for E130320D18 (NM_172811.1,1077-1095).
gagtagcagtgatggatat

SEQ ID NO: 779229 - DNA, 19 bp, Mus musculus
  siRNA target sequence for E130320D18 (NM_172811.1,1242-1260).
cactcacgtcggtcctaaa

SEQ ID NO: 779230 - DNA, 19 bp, Mus musculus
  siRNA target sequence for E130320D18 (NM_172811.1,1244-1262).
ctcacgtcggtcctaaata

SEQ ID NO: 779231 - DNA, 19 bp, Mus musculus
  siRNA target sequence for E130320D18 (NM_172811.1,1246-1264).
cacgtcggtcctaaataaa

SEQ ID NO: 779232 - DNA, 19 bp, Mus musculus
  siRNA target sequence for E130320D18 (NM_172811.1,1248-1266).
cgtcggtcctaaataaagt

SEQ ID NO: 779233 - DNA, 19 bp, Mus musculus
  siRNA target sequence for E130320D18 (NM_172811.1,1272-1290).
ctgcaaaggaagtgaatca

SEQ ID NO: 779234 - DNA, 19 bp, Mus musculus
  siRNA target sequence for E130320D18 (NM_172811.1,1274-1292).
gcaaaggaagtgaatcaca

SEQ ID NO: 779235 - DNA, 19 bp, Mus musculus
  siRNA target sequence for E130320D18 (NM_172811.1,1275-1293).
caaaggaagtgaatcacaa

SEQ ID NO: 779236 - DNA, 19 bp, Mus musculus
  siRNA target sequence for E130320D18 (NM_172811.1,1308-1326).
gggtgtccttaaagttact

SEQ ID NO: 779237 - DNA, 19 bp, Mus musculus
  siRNA target sequence for E130320D18 (NM_172811.1,1343-1361).
caggtgcagaagaactttt

SEQ ID NO: 779238 - DNA, 19 bp, Mus musculus
  siRNA target sequence for E130320D18 (NM_172811.1,1383-1401).
cagcaatagcacggaaaat

SEQ ID NO: 779239 - DNA, 19 bp, Mus musculus
  siRNA target sequence for E130320D18 (NM_172811.1,1535-1553).
gaaggcaaccttttagaga

SEQ ID NO: 779240 - DNA, 19 bp, Mus musculus
  siRNA target sequence for E130320D18 (NM_172811.1,1583-1601).
ggcgtctcggagtacaagt

SEQ ID NO: 779241 - DNA, 19 bp, Mus musculus
  siRNA target sequence for E130320D18 (NM_172811.1,1677-1695).
cacgctgccacatacgatt

SEQ ID NO: 779242 - DNA, 19 bp, Mus musculus
  siRNA target sequence for E130320D18 (NM_172811.1,1679-1697).
cgctgccacatacgattta

SEQ ID NO: 779243 - DNA, 19 bp, Mus musculus
  siRNA target sequence for E130320D18 (NM_172811.1,1683-1701).
gccacatacgatttacctt

SEQ ID NO: 779244 - DNA, 19 bp, Mus musculus
  siRNA target sequence for E130320D18 (NM_172811.1,1699-1717).
cttccgacacagatcatct

SEQ ID NO: 779245 - DNA, 19 bp, Mus musculus
  siRNA target sequence for E130320D18 (NM_172811.1,1702-1720).
ccgacacagatcatctcaa

SEQ ID NO: 779246 - DNA, 19 bp, Mus musculus
  siRNA target sequence for E130320D18 (NM_172811.1,1718-1736).
caagaatccagagataaat

SEQ ID NO: 779247 - DNA, 19 bp, Mus musculus
  siRNA target sequence for E130320D18 (NM_172811.1,1819-1837).
ggtgtacaagggtgataat

SEQ ID NO: 779248 - DNA, 19 bp, Mus musculus
  siRNA target sequence for E130320D18 (NM_172811.1,1820-1838).
gtgtacaagggtgataata

SEQ ID NO: 779249 - DNA, 19 bp, Mus musculus
  siRNA target sequence for E130320D18 (NM_172811.1,1850-1868).
gatgctaaatattatctga

SEQ ID NO: 779250 - DNA, 19 bp, Mus musculus
  siRNA target sequence for E130320D18 (NM_172811.1,1904-1922).
gaactccaagcgtccaaaa

SEQ ID NO: 779251 - DNA, 19 bp, Mus musculus
  siRNA target sequence for E130320D18 (NM_172811.1,2059-2077).
cctaagctccctgtttaga

SEQ ID NO: 779252 - DNA, 19 bp, Mus musculus
  siRNA target sequence for E130320D18 (NM_172811.1,2071-2089).
gtttagactccttatacca

SEQ ID NO: 779253 - DNA, 19 bp, Mus musculus
  siRNA target sequence for C820005L12Rik (NM_172814.1,82-100).
ccgtcgctggagcacaaaa

SEQ ID NO: 779254 - DNA, 19 bp, Mus musculus
  siRNA target sequence for C820005L12Rik (NM_172814.1,84-102).
gtcgctggagcacaaaaga

SEQ ID NO: 779255 - DNA, 19 bp, Mus musculus
  siRNA target sequence for C820005L12Rik (NM_172814.1,86-104).
cgctggagcacaaaagagt

SEQ ID NO: 779256 - DNA, 19 bp, Mus musculus
  siRNA target sequence for C820005L12Rik (NM_172814.1,161-179).
ggtgctcttgcagaacttt

SEQ ID NO: 779257 - DNA, 19 bp, Mus musculus
  siRNA target sequence for C820005L12Rik (NM_172814.1,218-236).
ggggagagtccagaacaaa

SEQ ID NO: 779258 - DNA, 19 bp, Mus musculus
  siRNA target sequence for C820005L12Rik (NM_172814.1,223-241).
gagtccagaacaaattcga

SEQ ID NO: 779259 - DNA, 19 bp, Mus musculus
  siRNA target sequence for C820005L12Rik (NM_172814.1,239-257).
cgagcaccgagtggaataa

SEQ ID NO: 779260 - DNA, 19 bp, Mus musculus
  siRNA target sequence for C820005L12Rik (NM_172814.1,240-258).
gagcaccgagtggaataat

SEQ ID NO: 779261 - DNA, 19 bp, Mus musculus
  siRNA target sequence for C820005L12Rik (NM_172814.1,242-260).
gcaccgagtggaataatca

SEQ ID NO: 779262 - DNA, 19 bp, Mus musculus
  siRNA target sequence for C820005L12Rik (NM_172814.1,327-345).
caggggagatcattactat

SEQ ID NO: 779263 - DNA, 19 bp, Mus musculus
  siRNA target sequence for C820005L12Rik (NM_172814.1,329-347).
ggggagatcattactataa

SEQ ID NO: 779264 - DNA, 19 bp, Mus musculus
  siRNA target sequence for C820005L12Rik (NM_172814.1,331-349).
ggagatcattactataagt

SEQ ID NO: 779265 - DNA, 19 bp, Mus musculus
  siRNA target sequence for C820005L12Rik (NM_172814.1,332-350).
gagatcattactataagtt

SEQ ID NO: 779266 - DNA, 19 bp, Mus musculus
  siRNA target sequence for C820005L12Rik (NM_172814.1,342-360).
ctataagttttcaggattt

SEQ ID NO: 779267 - DNA, 19 bp, Mus musculus
  siRNA target sequence for C820005L12Rik (NM_172814.1,387-405).
ctttggactggctgacaat

SEQ ID NO: 779268 - DNA, 19 bp, Mus musculus
  siRNA target sequence for C820005L12Rik (NM_172814.1,391-409).
ggactggctgacaatagaa

SEQ ID NO: 779269 - DNA, 19 bp, Mus musculus
  siRNA target sequence for C820005L12Rik (NM_172814.1,392-410).
gactggctgacaatagaaa

SEQ ID NO: 779270 - DNA, 19 bp, Mus musculus
  siRNA target sequence for C820005L12Rik (NM_172814.1,394-412).
ctggctgacaatagaaaca

SEQ ID NO: 779271 - DNA, 19 bp, Mus musculus
  siRNA target sequence for C820005L12Rik (NM_172814.1,396-414).
ggctgacaatagaaacata

SEQ ID NO: 779272 - DNA, 19 bp, Mus musculus
  siRNA target sequence for C820005L12Rik (NM_172814.1,450-468).
caattccgccaccatatat

SEQ ID NO: 779273 - DNA, 19 bp, Mus musculus
  siRNA target sequence for C820005L12Rik (NM_172814.1,474-492).
cccaagaccacgtttggat

SEQ ID NO: 779274 - DNA, 19 bp, Mus musculus
  siRNA target sequence for C820005L12Rik (NM_172814.1,745-763).
gtcccgcttcaccaaagtt

SEQ ID NO: 779275 - DNA, 19 bp, Mus musculus
  siRNA target sequence for C820005L12Rik (NM_172814.1,747-765).
cccgcttcaccaaagttta

SEQ ID NO: 779276 - DNA, 19 bp, Mus musculus
  siRNA target sequence for C820005L12Rik (NM_172814.1,749-767).
cgcttcaccaaagtttaca

SEQ ID NO: 779277 - DNA, 19 bp, Mus musculus
  siRNA target sequence for C820005L12Rik (NM_172814.1,818-836).
ctaggagacgagatagact

SEQ ID NO: 779278 - DNA, 19 bp, Mus musculus
  siRNA target sequence for C820005L12Rik (NM_172814.1,849-867).
catgcggacaatggttaaa

SEQ ID NO: 779279 - DNA, 19 bp, Mus musculus
  siRNA target sequence for C820005L12Rik (NM_172814.1,852-870).
gcggacaatggttaaaata

SEQ ID NO: 779280 - DNA, 19 bp, Mus musculus
  siRNA target sequence for C820005L12Rik (NM_172814.1,854-872).
ggacaatggttaaaatact

SEQ ID NO: 779281 - DNA, 19 bp, Mus musculus
  siRNA target sequence for C820005L12Rik (NM_172814.1,855-873).
gacaatggttaaaatactt

SEQ ID NO: 779282 - DNA, 19 bp, Mus musculus
  siRNA target sequence for C820005L12Rik (NM_172814.1,857-875).
caatggttaaaatacttct

SEQ ID NO: 779283 - DNA, 19 bp, Mus musculus
  siRNA target sequence for C820005L12Rik (NM_172814.1,871-889).
cttctatggcaccttcaat

SEQ ID NO: 779284 - DNA, 19 bp, Mus musculus
  siRNA target sequence for C820005L12Rik (NM_172814.1,874-892).
ctatggcaccttcaattct

SEQ ID NO: 779285 - DNA, 19 bp, Mus musculus
  siRNA target sequence for C820005L12Rik (NM_172814.1,893-911).
cccaactaccccgactttt

SEQ ID NO: 779286 - DNA, 19 bp, Mus musculus
  siRNA target sequence for C820005L12Rik (NM_172814.1,895-913).
caactaccccgacttttat

SEQ ID NO: 779287 - DNA, 19 bp, Mus musculus
  siRNA target sequence for C820005L12Rik (NM_172814.1,898-916).
ctaccccgacttttatcct

SEQ ID NO: 779288 - DNA, 19 bp, Mus musculus
  siRNA target sequence for C820005L12Rik (NM_172814.1,940-958).
gatagacactggtgatcat

SEQ ID NO: 779289 - DNA, 19 bp, Mus musculus
  siRNA target sequence for C820005L12Rik (NM_172814.1,950-968).
ggtgatcatcggaaagtca

SEQ ID NO: 779290 - DNA, 19 bp, Mus musculus
  siRNA target sequence for C820005L12Rik (NM_172814.1,951-969).
gtgatcatcggaaagtcat

SEQ ID NO: 779291 - DNA, 19 bp, Mus musculus
  siRNA target sequence for C820005L12Rik (NM_172814.1,975-993).
ggttcactgactttaaact

SEQ ID NO: 779292 - DNA, 19 bp, Mus musculus
  siRNA target sequence for C820005L12Rik (NM_172814.1,999-1017).
gtaccgggtatggtgatta

SEQ ID NO: 779293 - DNA, 19 bp, Mus musculus
  siRNA target sequence for C820005L12Rik (NM_172814.1,1002-1020).
ccgggtatggtgattatgt

SEQ ID NO: 779294 - DNA, 19 bp, Mus musculus
  siRNA target sequence for C820005L12Rik (NM_172814.1,1004-1022).
gggtatggtgattatgtca

SEQ ID NO: 779295 - DNA, 19 bp, Mus musculus
  siRNA target sequence for C820005L12Rik (NM_172814.1,1011-1029).
gtgattatgtcaaaatata

SEQ ID NO: 779296 - DNA, 19 bp, Mus musculus
  siRNA target sequence for C820005L12Rik (NM_172814.1,1066-1084).
ggtgctaactgctttcgat

SEQ ID NO: 779297 - DNA, 19 bp, Mus musculus
  siRNA target sequence for C820005L12Rik (NM_172814.1,1067-1085).
gtgctaactgctttcgatt

SEQ ID NO: 779298 - DNA, 19 bp, Mus musculus
  siRNA target sequence for C820005L12Rik (NM_172814.1,1094-1112).
cctctgacggtcgtttctt

SEQ ID NO: 779299 - DNA, 19 bp, Mus musculus
  siRNA target sequence for C820005L12Rik (NM_172814.1,1114-1132).
ctccggacagataagagta

SEQ ID NO: 779300 - DNA, 19 bp, Mus musculus
  siRNA target sequence for C820005L12Rik (NM_172814.1,1117-1135).
cggacagataagagtacat

SEQ ID NO: 779301 - DNA, 19 bp, Mus musculus
  siRNA target sequence for C820005L12Rik (NM_172814.1,1118-1136).
ggacagataagagtacatt

SEQ ID NO: 779302 - DNA, 19 bp, Mus musculus
  siRNA target sequence for C820005L12Rik (NM_172814.1,1119-1137).
gacagataagagtacattt

SEQ ID NO: 779303 - DNA, 19 bp, Mus musculus
  siRNA target sequence for C820005L12Rik (NM_172814.1,1121-1139).
cagataagagtacatttct

SEQ ID NO: 779304 - DNA, 19 bp, Mus musculus
  siRNA target sequence for C820005L12Rik (NM_172814.1,1164-1182).
gagggttcaacgctactta

SEQ ID NO: 779305 - DNA, 19 bp, Mus musculus
  siRNA target sequence for C820005L12Rik (NM_172814.1,1168-1186).
gttcaacgctacttaccaa

SEQ ID NO: 779306 - DNA, 19 bp, Mus musculus
  siRNA target sequence for C820005L12Rik (NM_172814.1,1184-1202).
caagtcgatggcttctgtt

SEQ ID NO: 779307 - DNA, 19 bp, Mus musculus
  siRNA target sequence for C820005L12Rik (NM_172814.1,1281-1299).
caaacggaagggatgaaat

SEQ ID NO: 779308 - DNA, 19 bp, Mus musculus
  siRNA target sequence for C820005L12Rik (NM_172814.1,1372-1390).
ctgcaactaccaaaaccat

SEQ ID NO: 779309 - DNA, 19 bp, Mus musculus
  siRNA target sequence for C820005L12Rik (NM_172814.1,1395-1413).
cgaacggctctgatgaaaa

SEQ ID NO: 779310 - DNA, 19 bp, Mus musculus
  siRNA target sequence for C820005L12Rik (NM_172814.1,1396-1414).
gaacggctctgatgaaaaa

SEQ ID NO: 779311 - DNA, 19 bp, Mus musculus
  siRNA target sequence for C820005L12Rik (NM_172814.1,1434-1452).
cagggaatttccactgtaa

SEQ ID NO: 779312 - DNA, 19 bp, Mus musculus
  siRNA target sequence for C820005L12Rik (NM_172814.1,1541-1559).
gtgcctaccagagtcataa

SEQ ID NO: 779313 - DNA, 19 bp, Mus musculus
  siRNA target sequence for C820005L12Rik (NM_172814.1,1592-1610).
ctgctgctcgtcattgcat

SEQ ID NO: 779314 - DNA, 19 bp, Mus musculus
  siRNA target sequence for C820005L12Rik (NM_172814.1,1614-1632).
ggtgcacttgcaagcttta

SEQ ID NO: 779315 - DNA, 19 bp, Mus musculus
  siRNA target sequence for C820005L12Rik (NM_172814.1,1645-1663).
gtttgaacggagatcattt

SEQ ID NO: 779316 - DNA, 19 bp, Mus musculus
  siRNA target sequence for C820005L12Rik (NM_172814.1,1750-1768).
cccacccgtagaagatttt

SEQ ID NO: 779317 - DNA, 19 bp, Mus musculus
  siRNA target sequence for C820005L12Rik (NM_172814.1,1791-1809).
cttccgttttagaaaacct

SEQ ID NO: 779318 - DNA, 19 bp, Mus musculus
  siRNA target sequence for C820005L12Rik (NM_172814.1,1823-1841).
cgatctcagctgggattta

SEQ ID NO: 779319 - DNA, 19 bp, Mus musculus
  siRNA target sequence for C820005L12Rik (NM_172814.1,1842-1860).
cttcaatcaggcttcctat

SEQ ID NO: 779320 - DNA, 19 bp, Mus musculus
  siRNA target sequence for C820005L12Rik (NM_172814.1,1865-1883).
ggcagatctagcaacattt

SEQ ID NO: 779321 - DNA, 19 bp, Mus musculus
  siRNA target sequence for C820005L12Rik (NM_172814.1,1869-1887).
gatctagcaacatttggaa

SEQ ID NO: 779322 - DNA, 19 bp, Mus musculus
  siRNA target sequence for C820005L12Rik (NM_172814.1,1875-1893).
gcaacatttggaatcgtat

SEQ ID NO: 779323 - DNA, 19 bp, Mus musculus
  siRNA target sequence for C820005L12Rik (NM_172814.1,1876-1894).
caacatttggaatcgtatt

SEQ ID NO: 779324 - DNA, 19 bp, Mus musculus
  siRNA target sequence for C820005L12Rik (NM_172814.1,1879-1897).
catttggaatcgtattttt

SEQ ID NO: 779325 - DNA, 19 bp, Mus musculus
  siRNA target sequence for C820005L12Rik (NM_172814.1,1884-1902).
ggaatcgtatttttaattt

SEQ ID NO: 779326 - DNA, 19 bp, Mus musculus
  siRNA target sequence for C820005L12Rik (NM_172814.1,2000-2018).
cgccctcacagaagcttat

SEQ ID NO: 779327 - DNA, 19 bp, Mus musculus
  siRNA target sequence for C820005L12Rik (NM_172814.1,2001-2019).
gccctcacagaagcttatt

SEQ ID NO: 779328 - DNA, 19 bp, Mus musculus
  siRNA target sequence for C820005L12Rik (NM_172814.1,2003-2021).
cctcacagaagcttattct

SEQ ID NO: 779329 - DNA, 19 bp, Mus musculus
  siRNA target sequence for C820005L12Rik (NM_172814.1,2144-2162).
ggatcaggtgggaattcct

SEQ ID NO: 779330 - DNA, 19 bp, Mus musculus
  siRNA target sequence for C820005L12Rik (NM_172814.1,2245-2263).
ccagctcacaagtgcttta

SEQ ID NO: 779331 - DNA, 19 bp, Mus musculus
  siRNA target sequence for C820005L12Rik (NM_172814.1,2246-2264).
cagctcacaagtgctttaa

SEQ ID NO: 779332 - DNA, 19 bp, Mus musculus
  siRNA target sequence for C820005L12Rik (NM_172814.1,2284-2302).
gcgctgggtccgctttaca

SEQ ID NO: 779333 - DNA, 19 bp, Mus musculus
  siRNA target sequence for C820005L12Rik (NM_172814.1,2286-2304).
gctgggtccgctttacact

SEQ ID NO: 779334 - DNA, 19 bp, Mus musculus
  siRNA target sequence for C820005L12Rik (NM_172814.1,2287-2305).
ctgggtccgctttacacta

SEQ ID NO: 779335 - DNA, 19 bp, Mus musculus
  siRNA target sequence for C820005L12Rik (NM_172814.1,2383-2401).
cgatgacgtcgaaatgcta

SEQ ID NO: 779336 - DNA, 19 bp, Mus musculus
  siRNA target sequence for C820005L12Rik (NM_172814.1,2384-2402).
gatgacgtcgaaatgctaa

SEQ ID NO: 779337 - DNA, 19 bp, Mus musculus
  siRNA target sequence for C820005L12Rik (NM_172814.1,2389-2407).
cgtcgaaatgctaattcca

SEQ ID NO: 779338 - DNA, 19 bp, Mus musculus
  siRNA target sequence for C820005L12Rik (NM_172814.1,2581-2599).
gataccagacacttgctta

SEQ ID NO: 779339 - DNA, 19 bp, Mus musculus
  siRNA target sequence for 2610028F08Rik (NM_172815.1,881-899).
cgtttttgcctcttctcat

SEQ ID NO: 779340 - DNA, 19 bp, Mus musculus
  siRNA target sequence for 2610028F08Rik (NM_172815.1,895-913).
ctcatttgccctcatcatt

SEQ ID NO: 779341 - DNA, 19 bp, Mus musculus
  siRNA target sequence for 2610028F08Rik (NM_172815.1,897-915).
catttgccctcatcattct

SEQ ID NO: 779342 - DNA, 19 bp, Mus musculus
  siRNA target sequence for 2610028F08Rik (NM_172815.1,1035-1053).
gccgatgtcaacagaagtt

SEQ ID NO: 779343 - DNA, 19 bp, Mus musculus
  siRNA target sequence for 2610028F08Rik (NM_172815.1,1108-1126).
ctgcccatcagggtattat

SEQ ID NO: 779344 - DNA, 19 bp, Mus musculus
  siRNA target sequence for 2610028F08Rik (NM_172815.1,1111-1129).
cccatcagggtattatgga

SEQ ID NO: 779345 - DNA, 19 bp, Mus musculus
  siRNA target sequence for 2610028F08Rik (NM_172815.1,1133-1151).
cgagccccagatatgaaca

SEQ ID NO: 779346 - DNA, 19 bp, Mus musculus
  siRNA target sequence for 2610028F08Rik (NM_172815.1,1213-1231).
gtgcaaagtaggcttttat

SEQ ID NO: 779347 - DNA, 19 bp, Mus musculus
  siRNA target sequence for 2610028F08Rik (NM_172815.1,1239-1257).
gaggccgctgctttgatga

SEQ ID NO: 779348 - DNA, 19 bp, Mus musculus
  siRNA target sequence for 2610028F08Rik (NM_172815.1,1243-1261).
ccgctgctttgatgaatgt

SEQ ID NO: 779349 - DNA, 19 bp, Mus musculus
  siRNA target sequence for 2610028F08Rik (NM_172815.1,1269-1287).
gttttgcaccgttagatga

SEQ ID NO: 779350 - DNA, 19 bp, Mus musculus
  siRNA target sequence for 2610028F08Rik (NM_172815.1,1288-1306).
gactatggaatgtgtagaa

SEQ ID NO: 779351 - DNA, 19 bp, Mus musculus
  siRNA target sequence for 2610028F08Rik (NM_172815.1,1354-1372).
caaccgcacgtgtggattt

SEQ ID NO: 779352 - DNA, 19 bp, Mus musculus
  siRNA target sequence for 2610028F08Rik (NM_172815.1,1357-1375).
ccgcacgtgtggatttaaa

SEQ ID NO: 779353 - DNA, 19 bp, Mus musculus
  siRNA target sequence for 2610028F08Rik (NM_172815.1,1390-1408).
cagaacacggcagattgtt

SEQ ID NO: 779354 - DNA, 19 bp, Mus musculus
  siRNA target sequence for 2610028F08Rik (NM_172815.1,1392-1410).
gaacacggcagattgttaa

SEQ ID NO: 779355 - DNA, 19 bp, Mus musculus
  siRNA target sequence for 2610028F08Rik (NM_172815.1,1414-1432).
gccagcaaaagacacaata

SEQ ID NO: 779356 - DNA, 19 bp, Mus musculus
  siRNA target sequence for 2610028F08Rik (NM_172815.1,1418-1436).
gcaaaagacacaataccat

SEQ ID NO: 779357 - DNA, 19 bp, Mus musculus
  siRNA target sequence for C130026N12Rik (NM_172821.1,113-131).
gaaattctgaacttgatca

SEQ ID NO: 779358 - DNA, 19 bp, Mus musculus
  siRNA target sequence for C130026N12Rik (NM_172821.1,276-294).
caatcctctttcaggaaat

SEQ ID NO: 779359 - DNA, 19 bp, Mus musculus
  siRNA target sequence for C130026N12Rik (NM_172821.1,338-356).
gtcagtctggtatttctca

SEQ ID NO: 779360 - DNA, 19 bp, Mus musculus
  siRNA target sequence for C130026N12Rik (NM_172821.1,346-364).
ggtatttctcatcaattca

SEQ ID NO: 779361 - DNA, 19 bp, Mus musculus
  siRNA target sequence for C130026N12Rik (NM_172821.1,441-459).
ggacagtgaagtagaattt

SEQ ID NO: 779362 - DNA, 19 bp, Mus musculus
  siRNA target sequence for C130026N12Rik (NM_172821.1,512-530).
cctttagctccgagaactt

SEQ ID NO: 779363 - DNA, 19 bp, Mus musculus
  siRNA target sequence for C130026N12Rik (NM_172821.1,544-562).
ggagaggagggcaacacta

SEQ ID NO: 779364 - DNA, 19 bp, Mus musculus
  siRNA target sequence for F630022B06Rik (NM_172822.1,169-187).
gtggcagcccaggtgattt

SEQ ID NO: 779365 - DNA, 19 bp, Mus musculus
  siRNA target sequence for F630022B06Rik (NM_172822.1,230-248).
cccagactggctacataca

SEQ ID NO: 779366 - DNA, 19 bp, Mus musculus
  siRNA target sequence for F630022B06Rik (NM_172822.1,747-765).
cttcaaccggccaaccttt

SEQ ID NO: 779367 - DNA, 19 bp, Mus musculus
  siRNA target sequence for F630022B06Rik (NM_172822.1,932-950).
gatccacaggcgtctttct

SEQ ID NO: 779368 - DNA, 19 bp, Mus musculus
  siRNA target sequence for F630022B06Rik (NM_172822.1,953-971).
cacctgccaacttcttgta

SEQ ID NO: 779369 - DNA, 19 bp, Mus musculus
  siRNA target sequence for F630022B06Rik (NM_172822.1,959-977).
ccaacttcttgtactacaa

SEQ ID NO: 779370 - DNA, 19 bp, Mus musculus
  siRNA target sequence for F630022B06Rik (NM_172822.1,1167-1185).
gtctagctccaagtcttat

SEQ ID NO: 779371 - DNA, 19 bp, Mus musculus
  siRNA target sequence for F630022B06Rik (NM_172822.1,1233-1251).
ccatcaagaggctagattt

SEQ ID NO: 779372 - DNA, 19 bp, Mus musculus
  siRNA target sequence for F630022B06Rik (NM_172822.1,1445-1463).
cccactacacacttctctt

SEQ ID NO: 779373 - DNA, 19 bp, Mus musculus
  siRNA target sequence for F630022B06Rik (NM_172822.1,1622-1640).
ggccctgtcggctctttgt

SEQ ID NO: 779374 - DNA, 19 bp, Mus musculus
  siRNA target sequence for F630022B06Rik (NM_172822.1,1679-1697).
gccgttttcccctcaagaa

SEQ ID NO: 779375 - DNA, 19 bp, Mus musculus
  siRNA target sequence for F630022B06Rik (NM_172822.1,1680-1698).
ccgttttcccctcaagaat

SEQ ID NO: 779376 - DNA, 19 bp, Mus musculus
  siRNA target sequence for F630022B06Rik (NM_172822.1,1769-1787).
ggaggaagcaccttagtct

SEQ ID NO: 779377 - DNA, 19 bp, Mus musculus
  siRNA target sequence for G630039H03Rik (NM_172824.1,145-163).
cctggagctaagttaccaa

SEQ ID NO: 779378 - DNA, 19 bp, Mus musculus
  siRNA target sequence for G630039H03Rik (NM_172824.1,175-193).
gggacccacgtaagaaaaa

SEQ ID NO: 779379 - DNA, 19 bp, Mus musculus
  siRNA target sequence for G630039H03Rik (NM_172824.1,176-194).
ggacccacgtaagaaaaat

SEQ ID NO: 779380 - DNA, 19 bp, Mus musculus
  siRNA target sequence for G630039H03Rik (NM_172824.1,177-195).
gacccacgtaagaaaaata

SEQ ID NO: 779381 - DNA, 19 bp, Mus musculus
  siRNA target sequence for G630039H03Rik (NM_172824.1,180-198).
ccacgtaagaaaaatagca

SEQ ID NO: 779382 - DNA, 19 bp, Mus musculus
  siRNA target sequence for G630039H03Rik (NM_172824.1,330-348).
ggtatattcggaaaacaga

SEQ ID NO: 779383 - DNA, 19 bp, Mus musculus
  siRNA target sequence for G630039H03Rik (NM_172824.1,350-368).
gcaattctaaacctttaga

SEQ ID NO: 779384 - DNA, 19 bp, Mus musculus
  siRNA target sequence for G630039H03Rik (NM_172824.1,351-369).
caattctaaacctttagaa

SEQ ID NO: 779385 - DNA, 19 bp, Mus musculus
  siRNA target sequence for G630039H03Rik (NM_172824.1,421-439).
gtggtccgaaaggaaatat

SEQ ID NO: 779386 - DNA, 19 bp, Mus musculus
  siRNA target sequence for G630039H03Rik (NM_172824.1,423-441).
ggtccgaaaggaaatatta

SEQ ID NO: 779387 - DNA, 19 bp, Mus musculus
  siRNA target sequence for G630039H03Rik (NM_172824.1,424-442).
gtccgaaaggaaatattat

SEQ ID NO: 779388 - DNA, 19 bp, Mus musculus
  siRNA target sequence for G630039H03Rik (NM_172824.1,501-519).
gcgttggtcactacaagat

SEQ ID NO: 779389 - DNA, 19 bp, Mus musculus
  siRNA target sequence for G630039H03Rik (NM_172824.1,503-521).
gttggtcactacaagatca

SEQ ID NO: 779390 - DNA, 19 bp, Mus musculus
  siRNA target sequence for G630039H03Rik (NM_172824.1,506-524).
ggtcactacaagatcatta

SEQ ID NO: 779391 - DNA, 19 bp, Mus musculus
  siRNA target sequence for G630039H03Rik (NM_172824.1,507-525).
gtcactacaagatcattat

SEQ ID NO: 779392 - DNA, 19 bp, Mus musculus
  siRNA target sequence for G630039H03Rik (NM_172824.1,527-545).
gaatgtactcaccgataat

SEQ ID NO: 779393 - DNA, 19 bp, Mus musculus
  siRNA target sequence for G630039H03Rik (NM_172824.1,534-552).
ctcaccgataatataccaa

SEQ ID NO: 779394 - DNA, 19 bp, Mus musculus
  siRNA target sequence for G630039H03Rik (NM_172824.1,636-654).
gtgccataccatgtctaat

SEQ ID NO: 779395 - DNA, 19 bp, Mus musculus
  siRNA target sequence for G630039H03Rik (NM_172824.1,639-657).
ccataccatgtctaattca

SEQ ID NO: 779396 - DNA, 19 bp, Mus musculus
  siRNA target sequence for G630039H03Rik (NM_172824.1,728-746).
catcctgccccctaatggt

SEQ ID NO: 779397 - DNA, 19 bp, Mus musculus
  siRNA target sequence for G630039H03Rik (NM_172824.1,777-795).
ccagtttgaatcacaaagt

SEQ ID NO: 779398 - DNA, 19 bp, Mus musculus
  siRNA target sequence for G630039H03Rik (NM_172824.1,827-845).
ccagggatccgtttagtgt

SEQ ID NO: 779399 - DNA, 19 bp, Mus musculus
  siRNA target sequence for G630039H03Rik (NM_172824.1,910-928).
ctggatcttacgagttgta

SEQ ID NO: 779400 - DNA, 19 bp, Mus musculus
  siRNA target sequence for G630039H03Rik (NM_172824.1,912-930).
ggatcttacgagttgtatt

SEQ ID NO: 779401 - DNA, 19 bp, Mus musculus
  siRNA target sequence for G630039H03Rik (NM_172824.1,1027-1045).
gacagtcaggcataccaaa

SEQ ID NO: 779402 - DNA, 19 bp, Mus musculus
  siRNA target sequence for G630039H03Rik (NM_172824.1,1160-1178).
caaaaatagccaagaatgt

SEQ ID NO: 779403 - DNA, 19 bp, Mus musculus
  siRNA target sequence for G630039H03Rik (NM_172824.1,1281-1299).
gaggttggtgacagaagta

SEQ ID NO: 779404 - DNA, 19 bp, Mus musculus
  siRNA target sequence for G630039H03Rik (NM_172824.1,1305-1323).
gtgcgtatctggactttca

SEQ ID NO: 779405 - DNA, 19 bp, Mus musculus
  siRNA target sequence for Dact2 (NM_172826.2,755-773).
cacctcctgcgcatctgtt

SEQ ID NO: 779406 - DNA, 19 bp, Mus musculus
  siRNA target sequence for Dact2 (NM_172826.2,988-1006).
caggtgatctcgaaagagt

SEQ ID NO: 779407 - DNA, 19 bp, Mus musculus
  siRNA target sequence for Dact2 (NM_172826.2,1206-1224).
gaagccccgtgttttgaca

SEQ ID NO: 779408 - DNA, 19 bp, Mus musculus
  siRNA target sequence for Dact2 (NM_172826.2,1645-1663).
cccaacagcctcttaatga

SEQ ID NO: 779409 - DNA, 19 bp, Mus musculus
  siRNA target sequence for Dact2 (NM_172826.2,1647-1665).
caacagcctcttaatgact

SEQ ID NO: 779410 - DNA, 19 bp, Mus musculus
  siRNA target sequence for Dact2 (NM_172826.2,2389-2407).
ccagcagcaacgattcaga

SEQ ID NO: 779411 - DNA, 19 bp, Mus musculus
  siRNA target sequence for Dact2 (NM_172826.2,2538-2556).
ccccctgtgcccaaactgt

SEQ ID NO: 779412 - DNA, 19 bp, Mus musculus
  siRNA target sequence for C630049M13 (NM_172832.1,202-220).
cggaccccgagtgcaaatt

SEQ ID NO: 779413 - DNA, 19 bp, Mus musculus
  siRNA target sequence for C630049M13 (NM_172832.1,204-222).
gaccccgagtgcaaattgt

SEQ ID NO: 779414 - DNA, 19 bp, Mus musculus
  siRNA target sequence for C630049M13 (NM_172832.1,215-233).
caaattgtcgtctatgaga

SEQ ID NO: 779415 - DNA, 19 bp, Mus musculus
  siRNA target sequence for C630049M13 (NM_172832.1,376-394).
gggcagaagcgccatcttt

SEQ ID NO: 779416 - DNA, 19 bp, Mus musculus
  siRNA target sequence for C630049M13 (NM_172832.1,651-669).
gcgtcacacagcgctttat

SEQ ID NO: 779417 - DNA, 19 bp, Mus musculus
  siRNA target sequence for C630049M13 (NM_172832.1,652-670).
cgtcacacagcgctttatt

SEQ ID NO: 779418 - DNA, 19 bp, Mus musculus
  siRNA target sequence for C630049M13 (NM_172832.1,1282-1300).
gaccctcttccgttcctat

SEQ ID NO: 779419 - DNA, 19 bp, Mus musculus
  siRNA target sequence for C630049M13 (NM_172832.1,1286-1304).
ctcttccgttcctattact

SEQ ID NO: 779420 - DNA, 19 bp, Mus musculus
  siRNA target sequence for C630049M13 (NM_172832.1,1479-1497).
ggtaccaggacctggataa

SEQ ID NO: 779421 - DNA, 19 bp, Mus musculus
  siRNA target sequence for C630049M13 (NM_172832.1,1505-1523).
cagaaggacctaatccata

SEQ ID NO: 779422 - DNA, 19 bp, Mus musculus
  siRNA target sequence for 4932417K07 (NM_172834.1,581-599).
ggttcctgtccaagatcat

SEQ ID NO: 779423 - DNA, 19 bp, Mus musculus
  siRNA target sequence for 4932417K07 (NM_172834.1,607-625).
gatattggaaacaaaagga

SEQ ID NO: 779424 - DNA, 19 bp, Mus musculus
  siRNA target sequence for 4932417K07 (NM_172834.1,714-732).
cacagccataacctacatt

SEQ ID NO: 779425 - DNA, 19 bp, Mus musculus
  siRNA target sequence for 4932417K07 (NM_172834.1,716-734).
cagccataacctacattgt

SEQ ID NO: 779426 - DNA, 19 bp, Mus musculus
  siRNA target sequence for 4932417K07 (NM_172834.1,718-736).
gccataacctacattgtca

SEQ ID NO: 779427 - DNA, 19 bp, Mus musculus
  siRNA target sequence for 4932417K07 (NM_172834.1,757-775).
cgtggagctgggaccaaat

SEQ ID NO: 779428 - DNA, 19 bp, Mus musculus
  siRNA target sequence for 4932417K07 (NM_172834.1,760-778).
ggagctgggaccaaatcta

SEQ ID NO: 779429 - DNA, 19 bp, Mus musculus
  siRNA target sequence for 4932417K07 (NM_172834.1,761-779).
gagctgggaccaaatctaa

SEQ ID NO: 779430 - DNA, 19 bp, Mus musculus
  siRNA target sequence for 4932417K07 (NM_172834.1,767-785).
ggaccaaatctaaaatcta

SEQ ID NO: 779431 - DNA, 19 bp, Mus musculus
  siRNA target sequence for 4932417K07 (NM_172834.1,838-856).
gagggtggcgtgtttgaca

SEQ ID NO: 779432 - DNA, 19 bp, Mus musculus
  siRNA target sequence for 4932417K07 (NM_172834.1,921-939).
catcgggcatggcaacata

SEQ ID NO: 779433 - DNA, 19 bp, Mus musculus
  siRNA target sequence for 4932417K07 (NM_172834.1,975-993).
gatcctgtgcccctttact

SEQ ID NO: 779434 - DNA, 19 bp, Mus musculus
  siRNA target sequence for 4932417K07 (NM_172834.1,1019-1037).
gcaactggctggatgagaa

SEQ ID NO: 779435 - DNA, 19 bp, Mus musculus
  siRNA target sequence for 4932417K07 (NM_172834.1,1095-1113).
gcggctgaaaaaatatcct

SEQ ID NO: 779436 - DNA, 19 bp, Mus musculus
  siRNA target sequence for 4932417K07 (NM_172834.1,1131-1149).
gacaactgatctgaagaaa

SEQ ID NO: 779437 - DNA, 19 bp, Mus musculus
  siRNA target sequence for 4932417K07 (NM_172834.1,1165-1183).
cccatcttcatccagattt

SEQ ID NO: 779438 - DNA, 19 bp, Mus musculus
  siRNA target sequence for 4932417K07 (NM_172834.1,1166-1184).
ccatcttcatccagattta

SEQ ID NO: 779439 - DNA, 19 bp, Mus musculus
  siRNA target sequence for 4932417K07 (NM_172834.1,1196-1214).
ggaggacggatgagattct

SEQ ID NO: 779440 - DNA, 19 bp, Mus musculus
  siRNA target sequence for 4932417K07 (NM_172834.1,1197-1215).
gaggacggatgagattctt

SEQ ID NO: 779441 - DNA, 19 bp, Mus musculus
  siRNA target sequence for 4932417K07 (NM_172834.1,1236-1254).
gttcaagccaggcatcatt

SEQ ID NO: 779442 - DNA, 19 bp, Mus musculus
  siRNA target sequence for 4932417K07 (NM_172834.1,1279-1297).
gatctcggcaggttctata

SEQ ID NO: 779443 - DNA, 19 bp, Mus musculus
  siRNA target sequence for 4932417K07 (NM_172834.1,1282-1300).
ctcggcaggttctataaga

SEQ ID NO: 779444 - DNA, 19 bp, Mus musculus
  siRNA target sequence for 4932417K07 (NM_172834.1,1284-1302).
cggcaggttctataagatt

SEQ ID NO: 779445 - DNA, 19 bp, Mus musculus
  siRNA target sequence for 4932417K07 (NM_172834.1,1336-1354).
gggtggcatttagaaaaga

SEQ ID NO: 779446 - DNA, 19 bp, Mus musculus
  siRNA target sequence for 4932417K07 (NM_172834.1,1370-1388).
ccatcaataaggataaata

SEQ ID NO: 779447 - DNA, 19 bp, Mus musculus
  siRNA target sequence for 4932417K07 (NM_172834.1,1495-1513).
cggtatcgtgtgactgtat

SEQ ID NO: 779448 - DNA, 19 bp, Mus musculus
  siRNA target sequence for 4932417K07 (NM_172834.1,1589-1607).
gggagcggctgctttacaa

SEQ ID NO: 779449 - DNA, 19 bp, Mus musculus
  siRNA target sequence for 4932417K07 (NM_172834.1,1591-1609).
gagcggctgctttacaact

SEQ ID NO: 779450 - DNA, 19 bp, Mus musculus
  siRNA target sequence for 4932417K07 (NM_172834.1,1620-1638).
caccgacctgtttgagaaa

SEQ ID NO: 779451 - DNA, 19 bp, Mus musculus
  siRNA target sequence for 4932417K07 (NM_172834.1,1639-1657).
ggcaatgccgacgagttta

SEQ ID NO: 779452 - DNA, 19 bp, Mus musculus
  siRNA target sequence for 4932417K07 (NM_172834.1,1865-1883).
gcaatgccacgctcaagaa

SEQ ID NO: 779453 - DNA, 19 bp, Mus musculus
  siRNA target sequence for 4932417K07 (NM_172834.1,1866-1884).
caatgccacgctcaagaat

SEQ ID NO: 779454 - DNA, 19 bp, Mus musculus
  siRNA target sequence for 4932417K07 (NM_172834.1,1934-1952).
cagattctcgggtgtacat

SEQ ID NO: 779455 - DNA, 19 bp, Mus musculus
  siRNA target sequence for 4932417K07 (NM_172834.1,1936-1954).
gattctcgggtgtacatca

SEQ ID NO: 779456 - DNA, 19 bp, Mus musculus
  siRNA target sequence for 4932417K07 (NM_172834.1,1964-1982).
gagagaagtctgataccat

SEQ ID NO: 779457 - DNA, 19 bp, Mus musculus
  siRNA target sequence for 4932417K07 (NM_172834.1,1980-1998).
catcaagcaggttcttctt

SEQ ID NO: 779458 - DNA, 19 bp, Mus musculus
  siRNA target sequence for 4932417K07 (NM_172834.1,2039-2057).
gggtagatgagtttactct

SEQ ID NO: 779459 - DNA, 19 bp, Mus musculus
  siRNA target sequence for 4932417K07 (NM_172834.1,2189-2207).
ctaaccggtggctggataa

SEQ ID NO: 779460 - DNA, 19 bp, Mus musculus
  siRNA target sequence for 4932417K07 (NM_172834.1,2275-2293).
gtccactacgagattgaga

SEQ ID NO: 779461 - DNA, 19 bp, Mus musculus
  siRNA target sequence for 4932417K07 (NM_172834.1,2277-2295).
ccactacgagattgagatt

SEQ ID NO: 779462 - DNA, 19 bp, Mus musculus
  siRNA target sequence for 4932417K07 (NM_172834.1,2278-2296).
cactacgagattgagattt

SEQ ID NO: 779463 - DNA, 19 bp, Mus musculus
  siRNA target sequence for 4932417K07 (NM_172834.1,2410-2428).
cgggggtccaaggacattt

SEQ ID NO: 779464 - DNA, 19 bp, Mus musculus
  siRNA target sequence for 4932417K07 (NM_172834.1,2446-2464).
gacgtgggtgagatctaca

SEQ ID NO: 779465 - DNA, 19 bp, Mus musculus
  siRNA target sequence for 4932417K07 (NM_172834.1,2449-2467).
gtgggtgagatctacaaga

SEQ ID NO: 779466 - DNA, 19 bp, Mus musculus
  siRNA target sequence for 4932417K07 (NM_172834.1,2792-2810).
ggatgcaggaggtgattgt

SEQ ID NO: 779467 - DNA, 19 bp, Mus musculus
  siRNA target sequence for 4932417K07 (NM_172834.1,2915-2933).
cctacgaggtccaagtgat

SEQ ID NO: 779468 - DNA, 19 bp, Mus musculus
  siRNA target sequence for 4932417K07 (NM_172834.1,2981-2999).
ccatctacggtgaagagta

SEQ ID NO: 779469 - DNA, 19 bp, Mus musculus
  siRNA target sequence for 4932417K07 (NM_172834.1,2982-3000).
catctacggtgaagagtat

SEQ ID NO: 779470 - DNA, 19 bp, Mus musculus
  siRNA target sequence for 4932417K07 (NM_172834.1,3096-3114).
gggggctcttaccaagatt

SEQ ID NO: 779471 - DNA, 19 bp, Mus musculus
  siRNA target sequence for 4932417K07 (NM_172834.1,3169-3187).
gacatcaccgacgtgaata

SEQ ID NO: 779472 - DNA, 19 bp, Mus musculus
  siRNA target sequence for 4932417K07 (NM_172834.1,3207-3225).
cccatgccagcgatggtta

SEQ ID NO: 779473 - DNA, 19 bp, Mus musculus
  siRNA target sequence for 4932417K07 (NM_172834.1,3216-3234).
gcgatggttagcagttgaa

SEQ ID NO: 779474 - DNA, 19 bp, Mus musculus
  siRNA target sequence for 4932417K07 (NM_172834.1,3377-3395).
cattttccgtgaccataaa

SEQ ID NO: 779475 - DNA, 19 bp, Mus musculus
  siRNA target sequence for 4932417K07 (NM_172834.1,3460-3478).
gataacaacgccactatga

SEQ ID NO: 779476 - DNA, 19 bp, Mus musculus
  siRNA target sequence for BC028931 (NM_172835.2,255-273).
catcgttctgggctacaat

SEQ ID NO: 779477 - DNA, 19 bp, Mus musculus
  siRNA target sequence for BC028931 (NM_172835.2,412-430).
ggccagcacagcatctcat

SEQ ID NO: 779478 - DNA, 19 bp, Mus musculus
  siRNA target sequence for BC028931 (NM_172835.2,470-488).
cacatgacagcgacaaaga

SEQ ID NO: 779479 - DNA, 19 bp, Mus musculus
  siRNA target sequence for BC028931 (NM_172835.2,498-516).
gattggccgctctactgaa

SEQ ID NO: 779480 - DNA, 19 bp, Mus musculus
  siRNA target sequence for BC028931 (NM_172835.2,502-520).
ggccgctctactgaaaaca

SEQ ID NO: 779481 - DNA, 19 bp, Mus musculus
  siRNA target sequence for BC028931 (NM_172835.2,505-523).
cgctctactgaaaacatga

SEQ ID NO: 779482 - DNA, 19 bp, Mus musculus
  siRNA target sequence for BC028931 (NM_172835.2,506-524).
gctctactgaaaacatgat

SEQ ID NO: 779483 - DNA, 19 bp, Mus musculus
  siRNA target sequence for BC028931 (NM_172835.2,597-615).
ccgctatgcctgcagaatt

SEQ ID NO: 779484 - DNA, 19 bp, Mus musculus
  siRNA target sequence for BC028931 (NM_172835.2,599-617).
gctatgcctgcagaattct

SEQ ID NO: 779485 - DNA, 19 bp, Mus musculus
  siRNA target sequence for BC028931 (NM_172835.2,635-653).
cctatactgcccgaatcta

SEQ ID NO: 779486 - DNA, 19 bp, Mus musculus
  siRNA target sequence for BC028931 (NM_172835.2,671-689).
cctctagcaacatctttct

SEQ ID NO: 779487 - DNA, 19 bp, Mus musculus
  siRNA target sequence for BC028931 (NM_172835.2,694-712).
gagcgggcagccaaatgga

SEQ ID NO: 779488 - DNA, 19 bp, Mus musculus
  siRNA target sequence for BC028931 (NM_172835.2,727-745).
ctgatggacggcttgacaa

SEQ ID NO: 779489 - DNA, 19 bp, Mus musculus
  siRNA target sequence for BC028931 (NM_172835.2,974-992).
gggcacccacactgaaaca

SEQ ID NO: 779490 - DNA, 19 bp, Mus musculus
  siRNA target sequence for BC028931 (NM_172835.2,1349-1367).
cgcacggcacccatgcttt

SEQ ID NO: 779491 - DNA, 19 bp, Mus musculus
  siRNA target sequence for BC028931 (NM_172835.2,1415-1433).
gctgtgtccgcctcatttt

SEQ ID NO: 779492 - DNA, 19 bp, Mus musculus
  siRNA target sequence for BC028931 (NM_172835.2,1418-1436).
gtgtccgcctcattttcca

SEQ ID NO: 779493 - DNA, 19 bp, Mus musculus
  siRNA target sequence for 9930021J03Rik (NM_172836.1,73-91).
cccatctcaccaaacagta

SEQ ID NO: 779494 - DNA, 19 bp, Mus musculus
  siRNA target sequence for 9930021J03Rik (NM_172836.1,78-96).
ctcaccaaacagtaactca

SEQ ID NO: 779495 - DNA, 19 bp, Mus musculus
  siRNA target sequence for 9930021J03Rik (NM_172836.1,97-115).
gctccagcaagctcaaata

SEQ ID NO: 779496 - DNA, 19 bp, Mus musculus
  siRNA target sequence for 9930021J03Rik (NM_172836.1,104-122).
caagctcaaatattgtgaa

SEQ ID NO: 779497 - DNA, 19 bp, Mus musculus
  siRNA target sequence for 9930021J03Rik (NM_172836.1,151-169).
gcaagaactgcaaatacgt

SEQ ID NO: 779498 - DNA, 19 bp, Mus musculus
  siRNA target sequence for 9930021J03Rik (NM_172836.1,184-202).
gcaagtgtacctttgagtt

SEQ ID NO: 779499 - DNA, 19 bp, Mus musculus
  siRNA target sequence for 9930021J03Rik (NM_172836.1,236-254).
ggacacgacctcctgtttt

SEQ ID NO: 779500 - DNA, 19 bp, Mus musculus
  siRNA target sequence for 9930021J03Rik (NM_172836.1,237-255).
gacacgacctcctgtttta

SEQ ID NO: 779501 - DNA, 19 bp, Mus musculus
  siRNA target sequence for 9930021J03Rik (NM_172836.1,239-257).
cacgacctcctgttttagt

SEQ ID NO: 779502 - DNA, 19 bp, Mus musculus
  siRNA target sequence for 9930021J03Rik (NM_172836.1,241-259).
cgacctcctgttttagtca

SEQ ID NO: 779503 - DNA, 19 bp, Mus musculus
  siRNA target sequence for 9930021J03Rik (NM_172836.1,268-286).
gatacctcttccagaatta

SEQ ID NO: 779504 - DNA, 19 bp, Mus musculus
  siRNA target sequence for 9930021J03Rik (NM_172836.1,327-345).
gaacactgtggccatatca

SEQ ID NO: 779505 - DNA, 19 bp, Mus musculus
  siRNA target sequence for 9930021J03Rik (NM_172836.1,334-352).
gtggccatatcaactgtaa

SEQ ID NO: 779506 - DNA, 19 bp, Mus musculus
  siRNA target sequence for 9930021J03Rik (NM_172836.1,336-354).
ggccatatcaactgtaaaa

SEQ ID NO: 779507 - DNA, 19 bp, Mus musculus
  siRNA target sequence for 9930021J03Rik (NM_172836.1,366-384).
cgcatcatctgttctcatt

SEQ ID NO: 779508 - DNA, 19 bp, Mus musculus
  siRNA target sequence for 9930021J03Rik (NM_172836.1,656-674).
gtccagggaaaatagttaa

SEQ ID NO: 779509 - DNA, 19 bp, Mus musculus
  siRNA target sequence for 9930021J03Rik (NM_172836.1,659-677).
cagggaaaatagttaatat

SEQ ID NO: 779510 - DNA, 19 bp, Mus musculus
  siRNA target sequence for 9930021J03Rik (NM_172836.1,692-710).
ctatgccaaaccagcatat

SEQ ID NO: 779511 - DNA, 19 bp, Mus musculus
  siRNA target sequence for 9930021J03Rik (NM_172836.1,705-723).
gcatatgtccccttcatta

SEQ ID NO: 779512 - DNA, 19 bp, Mus musculus
  siRNA target sequence for 9930021J03Rik (NM_172836.1,711-729).
gtccccttcattagtaaaa

SEQ ID NO: 779513 - DNA, 19 bp, Mus musculus
  siRNA target sequence for 9930021J03Rik (NM_172836.1,715-733).
ccttcattagtaaaaagta

SEQ ID NO: 779514 - DNA, 19 bp, Mus musculus
  siRNA target sequence for 9930021J03Rik (NM_172836.1,734-752).
ctctcggtaacaattctat

SEQ ID NO: 779515 - DNA, 19 bp, Mus musculus
  siRNA target sequence for 9930021J03Rik (NM_172836.1,738-756).
cggtaacaattctattgca

SEQ ID NO: 779516 - DNA, 19 bp, Mus musculus
  siRNA target sequence for 9930021J03Rik (NM_172836.1,818-836).
cgttcagtgaaccttgtat

SEQ ID NO: 779517 - DNA, 19 bp, Mus musculus
  siRNA target sequence for 9930021J03Rik (NM_172836.1,819-837).
gttcagtgaaccttgtatt

SEQ ID NO: 779518 - DNA, 19 bp, Mus musculus
  siRNA target sequence for 9930021J03Rik (NM_172836.1,880-898).
ggaactcaaatcatgatga

SEQ ID NO: 779519 - DNA, 19 bp, Mus musculus
  siRNA target sequence for 9930021J03Rik (NM_172836.1,941-959).
gtagccacgtcctccttat

SEQ ID NO: 779520 - DNA, 19 bp, Mus musculus
  siRNA target sequence for 9930021J03Rik (NM_172836.1,946-964).
cacgtcctccttatctcta

SEQ ID NO: 779521 - DNA, 19 bp, Mus musculus
  siRNA target sequence for 9930021J03Rik (NM_172836.1,949-967).
gtcctccttatctctacta

SEQ ID NO: 779522 - DNA, 19 bp, Mus musculus
  siRNA target sequence for 9930021J03Rik (NM_172836.1,951-969).
cctccttatctctactaat

SEQ ID NO: 779523 - DNA, 19 bp, Mus musculus
  siRNA target sequence for 9930021J03Rik (NM_172836.1,955-973).
cttatctctactaatccaa

SEQ ID NO: 779524 - DNA, 19 bp, Mus musculus
  siRNA target sequence for 9930021J03Rik (NM_172836.1,979-997).
ggacctcccttagttctta

SEQ ID NO: 779525 - DNA, 19 bp, Mus musculus
  siRNA target sequence for 9930021J03Rik (NM_172836.1,1017-1035).
ggctacaccagtagataat

SEQ ID NO: 779526 - DNA, 19 bp, Mus musculus
  siRNA target sequence for 9930021J03Rik (NM_172836.1,1047-1065).
gatcatacagacatcaaat

SEQ ID NO: 779527 - DNA, 19 bp, Mus musculus
  siRNA target sequence for 9930021J03Rik (NM_172836.1,1050-1068).
catacagacatcaaatagt

SEQ ID NO: 779528 - DNA, 19 bp, Mus musculus
  siRNA target sequence for 9930021J03Rik (NM_172836.1,1084-1102).
cctttaaagccttctgtaa

SEQ ID NO: 779529 - DNA, 19 bp, Mus musculus
  siRNA target sequence for 9930021J03Rik (NM_172836.1,1092-1110).
gccttctgtaagaaactct

SEQ ID NO: 779530 - DNA, 19 bp, Mus musculus
  siRNA target sequence for 9930021J03Rik (NM_172836.1,1163-1181).
caccaccacacatcataaa

SEQ ID NO: 779531 - DNA, 19 bp, Mus musculus
  siRNA target sequence for 9930021J03Rik (NM_172836.1,1213-1231).
ccaccggcagcgttgactt

SEQ ID NO: 779532 - DNA, 19 bp, Mus musculus
  siRNA target sequence for 9930021J03Rik (NM_172836.1,1218-1236).
ggcagcgttgacttcagta

SEQ ID NO: 779533 - DNA, 19 bp, Mus musculus
  siRNA target sequence for 9930021J03Rik (NM_172836.1,1219-1237).
gcagcgttgacttcagtaa

SEQ ID NO: 779534 - DNA, 19 bp, Mus musculus
  siRNA target sequence for 9930021J03Rik (NM_172836.1,1222-1240).
gcgttgacttcagtaatta

SEQ ID NO: 779535 - DNA, 19 bp, Mus musculus
  siRNA target sequence for 9930021J03Rik (NM_172836.1,1249-1267).
ccagctactctcttagcta

SEQ ID NO: 779536 - DNA, 19 bp, Mus musculus
  siRNA target sequence for 9930021J03Rik (NM_172836.1,1250-1268).
cagctactctcttagctaa

SEQ ID NO: 779537 - DNA, 19 bp, Mus musculus
  siRNA target sequence for 9930021J03Rik (NM_172836.1,1252-1270).
gctactctcttagctaaaa

SEQ ID NO: 779538 - DNA, 19 bp, Mus musculus
  siRNA target sequence for 9930021J03Rik (NM_172836.1,1316-1334).
gtagcacatcggtacttca

SEQ ID NO: 779539 - DNA, 19 bp, Mus musculus
  siRNA target sequence for 9930021J03Rik (NM_172836.1,1339-1357).
gatacctctgtcaaaaagt

SEQ ID NO: 779540 - DNA, 19 bp, Mus musculus
  siRNA target sequence for 9930021J03Rik (NM_172836.1,1368-1386).
cccagaaggagccatttta

SEQ ID NO: 779541 - DNA, 19 bp, Mus musculus
  siRNA target sequence for 9930021J03Rik (NM_172836.1,1369-1387).
ccagaaggagccattttaa

SEQ ID NO: 779542 - DNA, 19 bp, Mus musculus
  siRNA target sequence for AW210596 (NM_172838.1,282-300).
gggcagtcaccagatgtat

SEQ ID NO: 779543 - DNA, 19 bp, Mus musculus
  siRNA target sequence for AW210596 (NM_172838.1,297-315).
gtatctccatattttttgt

SEQ ID NO: 779544 - DNA, 19 bp, Mus musculus
  siRNA target sequence for AW210596 (NM_172838.1,327-345).
catactttgctcaggatta

SEQ ID NO: 779545 - DNA, 19 bp, Mus musculus
  siRNA target sequence for AW210596 (NM_172838.1,548-566).
ggatttgcactttgttact

SEQ ID NO: 779546 - DNA, 19 bp, Mus musculus
  siRNA target sequence for AW210596 (NM_172838.1,578-596).
gccatggtgggcaagtatt

SEQ ID NO: 779547 - DNA, 19 bp, Mus musculus
  siRNA target sequence for AW210596 (NM_172838.1,579-597).
ccatggtgggcaagtattt

SEQ ID NO: 779548 - DNA, 19 bp, Mus musculus
  siRNA target sequence for AW210596 (NM_172838.1,680-698).
ctcctcatcgaacagtttt

SEQ ID NO: 779549 - DNA, 19 bp, Mus musculus
  siRNA target sequence for AW210596 (NM_172838.1,683-701).
ctcatcgaacagttttcct

SEQ ID NO: 779550 - DNA, 19 bp, Mus musculus
  siRNA target sequence for AW210596 (NM_172838.1,757-775).
cgctctgatgcgtccaatt

SEQ ID NO: 779551 - DNA, 19 bp, Mus musculus
  siRNA target sequence for AW210596 (NM_172838.1,758-776).
gctctgatgcgtccaatta

SEQ ID NO: 779552 - DNA, 19 bp, Mus musculus
  siRNA target sequence for AW210596 (NM_172838.1,808-826).
gaatcacaaccgtgaatct

SEQ ID NO: 779553 - DNA, 19 bp, Mus musculus
  siRNA target sequence for AW210596 (NM_172838.1,908-926).
cagcaggaatacggttttt

SEQ ID NO: 779554 - DNA, 19 bp, Mus musculus
  siRNA target sequence for AW210596 (NM_172838.1,910-928).
gcaggaatacggtttttta

SEQ ID NO: 779555 - DNA, 19 bp, Mus musculus
  siRNA target sequence for AW210596 (NM_172838.1,954-972).
ccgtctctgttctgttcat

SEQ ID NO: 779556 - DNA, 19 bp, Mus musculus
  siRNA target sequence for AW210596 (NM_172838.1,979-997).
cggctgcagccctctcttt

SEQ ID NO: 779557 - DNA, 19 bp, Mus musculus
  siRNA target sequence for AW210596 (NM_172838.1,981-999).
gctgcagccctctctttgt

SEQ ID NO: 779558 - DNA, 19 bp, Mus musculus
  siRNA target sequence for AW210596 (NM_172838.1,1000-1018).
gtacctagtgccttatgct

SEQ ID NO: 779559 - DNA, 19 bp, Mus musculus
  siRNA target sequence for AW210596 (NM_172838.1,1062-1080).
ccatcctcggggtaatcga

SEQ ID NO: 779560 - DNA, 19 bp, Mus musculus
  siRNA target sequence for AW210596 (NM_172838.1,1063-1081).
catcctcggggtaatcgat

SEQ ID NO: 779561 - DNA, 19 bp, Mus musculus
  siRNA target sequence for AW210596 (NM_172838.1,1066-1084).
cctcggggtaatcgatatt

SEQ ID NO: 779562 - DNA, 19 bp, Mus musculus
  siRNA target sequence for AW210596 (NM_172838.1,1069-1087).
cggggtaatcgatattgtt

SEQ ID NO: 779563 - DNA, 19 bp, Mus musculus
  siRNA target sequence for AW210596 (NM_172838.1,1079-1097).
gatattgttggcaatatca

SEQ ID NO: 779564 - DNA, 19 bp, Mus musculus
  siRNA target sequence for AW210596 (NM_172838.1,1117-1135).
cagaaggtgtctgaagaat

SEQ ID NO: 779565 - DNA, 19 bp, Mus musculus
  siRNA target sequence for AW210596 (NM_172838.1,1236-1254).
gtacctttggctactttga

SEQ ID NO: 779566 - DNA, 19 bp, Mus musculus
  siRNA target sequence for AW210596 (NM_172838.1,1282-1300).
cgtgactgcagagatagta

SEQ ID NO: 779567 - DNA, 19 bp, Mus musculus
  siRNA target sequence for AW210596 (NM_172838.1,1323-1341).
cacttggcgtggtctactt

SEQ ID NO: 779568 - DNA, 19 bp, Mus musculus
  siRNA target sequence for AW210596 (NM_172838.1,1431-1449).
gtggatttgccatgatatt

SEQ ID NO: 779569 - DNA, 19 bp, Mus musculus
  siRNA target sequence for AW210596 (NM_172838.1,1460-1478).
ctgcttggcttcgttagaa

SEQ ID NO: 779570 - DNA, 19 bp, Mus musculus
  siRNA target sequence for AW210596 (NM_172838.1,1462-1480).
gcttggcttcgttagaatt

SEQ ID NO: 779571 - DNA, 19 bp, Mus musculus
  siRNA target sequence for AW210596 (NM_172838.1,1466-1484).
ggcttcgttagaattgtca

SEQ ID NO: 779572 - DNA, 19 bp, Mus musculus
  siRNA target sequence for AW210596 (NM_172838.1,1467-1485).
gcttcgttagaattgtcaa

SEQ ID NO: 779573 - DNA, 19 bp, Mus musculus
  siRNA target sequence for AW210596 (NM_172838.1,1508-1526).
cctttcccggtcaaagact

SEQ ID NO: 779574 - DNA, 19 bp, Mus musculus
  siRNA target sequence for AW210596 (NM_172838.1,1527-1545).
cagatcccaagctacaact

SEQ ID NO: 779575 - DNA, 19 bp, Mus musculus
  siRNA target sequence for AW210596 (NM_172838.1,1572-1590).
ctgtagcaagggagttaga

SEQ ID NO: 779576 - DNA, 19 bp, Mus musculus
  siRNA target sequence for AW210596 (NM_172838.1,1578-1596).
caagggagttagatcagaa

SEQ ID NO: 779577 - DNA, 19 bp, Mus musculus
  siRNA target sequence for AMACO (NM_172840.1,235-253).
gtggccagcaaattaatgt

SEQ ID NO: 779578 - DNA, 19 bp, Mus musculus
  siRNA target sequence for AMACO (NM_172840.1,266-284).
cggtcgacatcctgtttct

SEQ ID NO: 779579 - DNA, 19 bp, Mus musculus
  siRNA target sequence for AMACO (NM_172840.1,270-288).
cgacatcctgtttctgtta

SEQ ID NO: 779580 - DNA, 19 bp, Mus musculus
  siRNA target sequence for AMACO (NM_172840.1,391-409).
ggagccttgcagtttggtt

SEQ ID NO: 779581 - DNA, 19 bp, Mus musculus
  siRNA target sequence for AMACO (NM_172840.1,430-448).
cccttggactccttctcaa

SEQ ID NO: 779582 - DNA, 19 bp, Mus musculus
  siRNA target sequence for AMACO (NM_172840.1,446-464).
caactcgacaggaagtgaa

SEQ ID NO: 779583 - DNA, 19 bp, Mus musculus
  siRNA target sequence for AMACO (NM_172840.1,470-488).
gcatcaaggggatagtttt

SEQ ID NO: 779584 - DNA, 19 bp, Mus musculus
  siRNA target sequence for AMACO (NM_172840.1,563-581).
ctgtgccccagattcttat

SEQ ID NO: 779585 - DNA, 19 bp, Mus musculus
  siRNA target sequence for AMACO (NM_172840.1,1091-1109).
cattcggaggggaagtcaa

SEQ ID NO: 779586 - DNA, 19 bp, Mus musculus
  siRNA target sequence for AMACO (NM_172840.1,1272-1290).
cagttatggcaggaatcta

SEQ ID NO: 779587 - DNA, 19 bp, Mus musculus
  siRNA target sequence for AMACO (NM_172840.1,1274-1292).
gttatggcaggaatctaat

SEQ ID NO: 779588 - DNA, 19 bp, Mus musculus
  siRNA target sequence for AMACO (NM_172840.1,1446-1464).
caggccacgcagagtagta

SEQ ID NO: 779589 - DNA, 19 bp, Mus musculus
  siRNA target sequence for AMACO (NM_172840.1,1448-1466).
ggccacgcagagtagtagt

SEQ ID NO: 779590 - DNA, 19 bp, Mus musculus
  siRNA target sequence for AMACO (NM_172840.1,1449-1467).
gccacgcagagtagtagtt

SEQ ID NO: 779591 - DNA, 19 bp, Mus musculus
  siRNA target sequence for AMACO (NM_172840.1,1462-1480).
gtagttctgctcactgaat

SEQ ID NO: 779592 - DNA, 19 bp, Mus musculus
  siRNA target sequence for AMACO (NM_172840.1,1592-1610).
gtagcccgaagcatgtgat

SEQ ID NO: 779593 - DNA, 19 bp, Mus musculus
  siRNA target sequence for AMACO (NM_172840.1,1739-1757).
ctgtgggacgtgagaactt

SEQ ID NO: 779594 - DNA, 19 bp, Mus musculus
  siRNA target sequence for AMACO (NM_172840.1,1787-1805).
gcaccctccggtttgatgt

SEQ ID NO: 779595 - DNA, 19 bp, Mus musculus
  siRNA target sequence for AMACO (NM_172840.1,1790-1808).
ccctccggtttgatgtgaa

SEQ ID NO: 779596 - DNA, 19 bp, Mus musculus
  siRNA target sequence for AMACO (NM_172840.1,1791-1809).
cctccggtttgatgtgaat

SEQ ID NO: 779597 - DNA, 19 bp, Mus musculus
  siRNA target sequence for AMACO (NM_172840.1,2092-2110).
ggcatctcagtcttggtta

SEQ ID NO: 779598 - DNA, 19 bp, Mus musculus
  siRNA target sequence for AMACO (NM_172840.1,2218-2236).
ctcatcgagtggctatgta

SEQ ID NO: 779599 - DNA, 19 bp, Mus musculus
  siRNA target sequence for AMACO (NM_172840.1,2220-2238).
catcgagtggctatgtaga

SEQ ID NO: 779600 - DNA, 19 bp, Mus musculus
  siRNA target sequence for E430019B13Rik (NM_172842.2,604-622).
cagttgagtggtttcagta

SEQ ID NO: 779601 - DNA, 19 bp, Mus musculus
  siRNA target sequence for E430019B13Rik (NM_172842.2,682-700).
ggttcccttcagatgcata

SEQ ID NO: 779602 - DNA, 19 bp, Mus musculus
  siRNA target sequence for E430019B13Rik (NM_172842.2,697-715).
catagagtgtccgttcata

SEQ ID NO: 779603 - DNA, 19 bp, Mus musculus
  siRNA target sequence for E430019B13Rik (NM_172842.2,701-719).
gagtgtccgttcatactgt

SEQ ID NO: 779604 - DNA, 19 bp, Mus musculus
  siRNA target sequence for E430019B13Rik (NM_172842.2,709-727).
gttcatactgtggagtatt

SEQ ID NO: 779605 - DNA, 19 bp, Mus musculus
  siRNA target sequence for E430019B13Rik (NM_172842.2,774-792).
cctggcctcctcaacacat

SEQ ID NO: 779606 - DNA, 19 bp, Mus musculus
  siRNA target sequence for E430019B13Rik (NM_172842.2,777-795).
ggcctcctcaacacatcat

SEQ ID NO: 779607 - DNA, 19 bp, Mus musculus
  siRNA target sequence for E430019B13Rik (NM_172842.2,779-797).
cctcctcaacacatcatgt

SEQ ID NO: 779608 - DNA, 19 bp, Mus musculus
  siRNA target sequence for E430019B13Rik (NM_172842.2,843-861).
gtcaaatgattatgtcaat

SEQ ID NO: 779609 - DNA, 19 bp, Mus musculus
  siRNA target sequence for E430019B13Rik (NM_172842.2,877-895).
gacacctgtgagactctaa

SEQ ID NO: 779610 - DNA, 19 bp, Mus musculus
  siRNA target sequence for E430019B13Rik (NM_172842.2,879-897).
cacctgtgagactctaact

SEQ ID NO: 779611 - DNA, 19 bp, Mus musculus
  siRNA target sequence for E430019B13Rik (NM_172842.2,888-906).
gactctaactcgcatagaa

SEQ ID NO: 779612 - DNA, 19 bp, Mus musculus
  siRNA target sequence for E430019B13Rik (NM_172842.2,989-1007).
ccacggaccacgatggttt

SEQ ID NO: 779613 - DNA, 19 bp, Mus musculus
  siRNA target sequence for E430019B13Rik (NM_172842.2,990-1008).
cacggaccacgatggtttt

SEQ ID NO: 779614 - DNA, 19 bp, Mus musculus
  siRNA target sequence for E430019B13Rik (NM_172842.2,1041-1059).
cagcgacggagacgattta

SEQ ID NO: 779615 - DNA, 19 bp, Mus musculus
  siRNA target sequence for E430019B13Rik (NM_172842.2,1044-1062).
cgacggagacgatttatct

SEQ ID NO: 779616 - DNA, 19 bp, Mus musculus
  siRNA target sequence for E430019B13Rik (NM_172842.2,1143-1161).
gtgctgcagagattatgaa

SEQ ID NO: 779617 - DNA, 19 bp, Mus musculus
  siRNA target sequence for E430019B13Rik (NM_172842.2,1146-1164).
ctgcagagattatgaaaat

SEQ ID NO: 779618 - DNA, 19 bp, Mus musculus
  siRNA target sequence for E430019B13Rik (NM_172842.2,1476-1494).
ctaccctgctgggtcttta

SEQ ID NO: 779619 - DNA, 19 bp, Mus musculus
  siRNA target sequence for A130072J07 (NM_172843.1,1271-1289).
ggagactcacaaaatgttt

SEQ ID NO: 779620 - DNA, 19 bp, Mus musculus
  siRNA target sequence for A130072J07 (NM_172843.1,1329-1347).
ccagagtcacaccgaataa

SEQ ID NO: 779621 - DNA, 19 bp, Mus musculus
  siRNA target sequence for A130072J07 (NM_172843.1,1416-1434).
gagctcaggagcatacaga

SEQ ID NO: 779622 - DNA, 19 bp, Mus musculus
  siRNA target sequence for A130072J07 (NM_172843.1,1460-1478).
gaggaaccagcgttagaga

SEQ ID NO: 779623 - DNA, 19 bp, Mus musculus
  siRNA target sequence for A130072J07 (NM_172843.1,1566-1584).
gcggagacgccctagatct

SEQ ID NO: 779624 - DNA, 19 bp, Mus musculus
  siRNA target sequence for A130072J07 (NM_172843.1,1855-1873).
cgaggctggaagtcatgaa

SEQ ID NO: 779625 - DNA, 19 bp, Mus musculus
  siRNA target sequence for A130072J07 (NM_172843.1,1907-1925).
gttgcacaggatacattga

SEQ ID NO: 779626 - DNA, 19 bp, Mus musculus
  siRNA target sequence for A130072J07 (NM_172843.1,1913-1931).
caggatacattgagaaaga

SEQ ID NO: 779627 - DNA, 19 bp, Mus musculus
  siRNA target sequence for A130072J07 (NM_172843.1,1920-1938).
cattgagaaagactgataa

SEQ ID NO: 779628 - DNA, 19 bp, Mus musculus
  siRNA target sequence for A130072J07 (NM_172843.1,1953-1971).
cctatggttccgtgtttct

SEQ ID NO: 779629 - DNA, 19 bp, Mus musculus
  siRNA target sequence for A130072J07 (NM_172843.1,2005-2023).
cgtcaacagctactattct

SEQ ID NO: 779630 - DNA, 19 bp, Mus musculus
  siRNA target sequence for A130072J07 (NM_172843.1,2081-2099).
ggccaactgaaggagaaat

SEQ ID NO: 779631 - DNA, 19 bp, Mus musculus
  siRNA target sequence for A130072J07 (NM_172843.1,2082-2100).
gccaactgaaggagaaatt

SEQ ID NO: 779632 - DNA, 19 bp, Mus musculus
  siRNA target sequence for A130072J07 (NM_172843.1,2124-2142).
ggcagcgaggacgtaagtt

SEQ ID NO: 779633 - DNA, 19 bp, Mus musculus
  siRNA target sequence for A130072J07 (NM_172843.1,2125-2143).
gcagcgaggacgtaagttt

SEQ ID NO: 779634 - DNA, 19 bp, Mus musculus
  siRNA target sequence for A130072J07 (NM_172843.1,2354-2372).
cttagcgatgggtttgaga

SEQ ID NO: 779635 - DNA, 19 bp, Mus musculus
  siRNA target sequence for A130072J07 (NM_172843.1,2418-2436).
ccggctccaccctgatctt

SEQ ID NO: 779636 - DNA, 19 bp, Mus musculus
  siRNA target sequence for A130072J07 (NM_172843.1,2500-2518).
gctggaggaggaaacgtta

SEQ ID NO: 779637 - DNA, 19 bp, Mus musculus
  siRNA target sequence for A130072J07 (NM_172843.1,2677-2695).
gcccgtcaggaacatagaa

SEQ ID NO: 779638 - DNA, 19 bp, Mus musculus
  siRNA target sequence for A130072J07 (NM_172843.1,2696-2714).
gagcgaggctgccttttgt

SEQ ID NO: 779639 - DNA, 19 bp, Mus musculus
  siRNA target sequence for A230079K17Rik (NM_172846.1,172-190).
gatttgagcgcaaaatact

SEQ ID NO: 779640 - DNA, 19 bp, Mus musculus
  siRNA target sequence for A230079K17Rik (NM_172846.1,177-195).
gagcgcaaaatactttgaa

SEQ ID NO: 779641 - DNA, 19 bp, Mus musculus
  siRNA target sequence for A230079K17Rik (NM_172846.1,179-197).
gcgcaaaatactttgaaga

SEQ ID NO: 779642 - DNA, 19 bp, Mus musculus
  siRNA target sequence for A230079K17Rik (NM_172846.1,180-198).
cgcaaaatactttgaagaa

SEQ ID NO: 779643 - DNA, 19 bp, Mus musculus
  siRNA target sequence for A230079K17Rik (NM_172846.1,200-218).
ctggaaagcactattacat

SEQ ID NO: 779644 - DNA, 19 bp, Mus musculus
  siRNA target sequence for A230079K17Rik (NM_172846.1,202-220).
ggaaagcactattacatca

SEQ ID NO: 779645 - DNA, 19 bp, Mus musculus
  siRNA target sequence for A230079K17Rik (NM_172846.1,227-245).
gttgctactttaagttctt

SEQ ID NO: 779646 - DNA, 19 bp, Mus musculus
  siRNA target sequence for A230079K17Rik (NM_172846.1,258-276).
ccacagtctgaggataaga

SEQ ID NO: 779647 - DNA, 19 bp, Mus musculus
  siRNA target sequence for A230079K17Rik (NM_172846.1,261-279).
cagtctgaggataagacaa

SEQ ID NO: 779648 - DNA, 19 bp, Mus musculus
  siRNA target sequence for A230079K17Rik (NM_172846.1,355-373).
gacatgcaggaagaacttt

SEQ ID NO: 779649 - DNA, 19 bp, Mus musculus
  siRNA target sequence for A230079K17Rik (NM_172846.1,382-400).
ggtcctcaaatagaacaaa

SEQ ID NO: 779650 - DNA, 19 bp, Mus musculus
  siRNA target sequence for A230079K17Rik (NM_172846.1,383-401).
gtcctcaaatagaacaaaa

SEQ ID NO: 779651 - DNA, 19 bp, Mus musculus
  siRNA target sequence for A230079K17Rik (NM_172846.1,437-455).
ggaaagattcgcaaatagt

SEQ ID NO: 779652 - DNA, 19 bp, Mus musculus
  siRNA target sequence for A230079K17Rik (NM_172846.1,446-464).
cgcaaatagtcgaaaaggt

SEQ ID NO: 779653 - DNA, 19 bp, Mus musculus
  siRNA target sequence for A230079K17Rik (NM_172846.1,447-465).
gcaaatagtcgaaaaggtt

SEQ ID NO: 779654 - DNA, 19 bp, Mus musculus
  siRNA target sequence for A230079K17Rik (NM_172846.1,498-516).
ggctgaacaagtgaagatt

SEQ ID NO: 779655 - DNA, 19 bp, Mus musculus
  siRNA target sequence for A230079K17Rik (NM_172846.1,523-541).
gagtacgcccagaaaactt

SEQ ID NO: 779656 - DNA, 19 bp, Mus musculus
  siRNA target sequence for A230079K17Rik (NM_172846.1,542-560).
ccaatgaactaaaaaatgt

SEQ ID NO: 779657 - DNA, 19 bp, Mus musculus
  siRNA target sequence for A230079K17Rik (NM_172846.1,569-587).
ctttagacaaggcaattgt

SEQ ID NO: 779658 - DNA, 19 bp, Mus musculus
  siRNA target sequence for A230079K17Rik (NM_172846.1,579-597).
ggcaattgtggccctaaat

SEQ ID NO: 779659 - DNA, 19 bp, Mus musculus
  siRNA target sequence for A230079K17Rik (NM_172846.1,590-608).
ccctaaatgccctggataa

SEQ ID NO: 779660 - DNA, 19 bp, Mus musculus
  siRNA target sequence for A230079K17Rik (NM_172846.1,591-609).
cctaaatgccctggataaa

SEQ ID NO: 779661 - DNA, 19 bp, Mus musculus
  siRNA target sequence for A230079K17Rik (NM_172846.1,669-687).
gaacgctgtgtgtatcctt

SEQ ID NO: 779662 - DNA, 19 bp, Mus musculus
  siRNA target sequence for A230079K17Rik (NM_172846.1,740-758).
gcttcctaaagcgactaat

SEQ ID NO: 779663 - DNA, 19 bp, Mus musculus
  siRNA target sequence for A230079K17Rik (NM_172846.1,741-759).
cttcctaaagcgactaatt

SEQ ID NO: 779664 - DNA, 19 bp, Mus musculus
  siRNA target sequence for A230079K17Rik (NM_172846.1,745-763).
ctaaagcgactaattaaca

SEQ ID NO: 779665 - DNA, 19 bp, Mus musculus
  siRNA target sequence for A230079K17Rik (NM_172846.1,751-769).
cgactaattaacattgaca

SEQ ID NO: 779666 - DNA, 19 bp, Mus musculus
  siRNA target sequence for A230079K17Rik (NM_172846.1,752-770).
gactaattaacattgacaa

SEQ ID NO: 779667 - DNA, 19 bp, Mus musculus
  siRNA target sequence for A230079K17Rik (NM_172846.1,800-818).
ggctcaagaagattttaaa

SEQ ID NO: 779668 - DNA, 19 bp, Mus musculus
  siRNA target sequence for A230079K17Rik (NM_172846.1,886-904).
gtgattgccttgaataact

SEQ ID NO: 779669 - DNA, 19 bp, Mus musculus
  siRNA target sequence for A230079K17Rik (NM_172846.1,1004-1022).
gaggtttacaactgattga

SEQ ID NO: 779670 - DNA, 19 bp, Mus musculus
  siRNA target sequence for A230079K17Rik (NM_172846.1,1046-1064).
cgtcctacagagacattgt

SEQ ID NO: 779671 - DNA, 19 bp, Mus musculus
  siRNA target sequence for A230079K17Rik (NM_172846.1,1047-1065).
gtcctacagagacattgtt

SEQ ID NO: 779672 - DNA, 19 bp, Mus musculus
  siRNA target sequence for A230079K17Rik (NM_172846.1,1055-1073).
gagacattgttactgaaaa

SEQ ID NO: 779673 - DNA, 19 bp, Mus musculus
  siRNA target sequence for A230079K17Rik (NM_172846.1,1205-1223).
gcgtctgtggtgacacatt

SEQ ID NO: 779674 - DNA, 19 bp, Mus musculus
  siRNA target sequence for A230079K17Rik (NM_172846.1,1242-1260).
cgcctacatcggagtctta

SEQ ID NO: 779675 - DNA, 19 bp, Mus musculus
  siRNA target sequence for A230079K17Rik (NM_172846.1,1243-1261).
gcctacatcggagtcttaa

SEQ ID NO: 779676 - DNA, 19 bp, Mus musculus
  siRNA target sequence for A230079K17Rik (NM_172846.1,1307-1325).
gcactcgggcagaaatcat

SEQ ID NO: 779677 - DNA, 19 bp, Mus musculus
  siRNA target sequence for A230079K17Rik (NM_172846.1,1312-1330).
cgggcagaaatcatcttgt

SEQ ID NO: 779678 - DNA, 19 bp, Mus musculus
  siRNA target sequence for A230079K17Rik (NM_172846.1,1329-1347).
gtcacccaatttttcctta

SEQ ID NO: 779679 - DNA, 19 bp, Mus musculus
  siRNA target sequence for A230079K17Rik (NM_172846.1,1374-1392).
gattcgccggtggcataat

SEQ ID NO: 779680 - DNA, 19 bp, Mus musculus
  siRNA target sequence for A230079K17Rik (NM_172846.1,1420-1438).
gcagaaaatgccattttga

SEQ ID NO: 779681 - DNA, 19 bp, Mus musculus
  siRNA target sequence for A230079K17Rik (NM_172846.1,1528-1546).
gagatttctgctcaagata

SEQ ID NO: 779682 - DNA, 19 bp, Mus musculus
  siRNA target sequence for A230079K17Rik (NM_172846.1,1537-1555).
gctcaagatagcaattaca

SEQ ID NO: 779683 - DNA, 19 bp, Mus musculus
  siRNA target sequence for A230079K17Rik (NM_172846.1,1543-1561).
gatagcaattacaccaaaa

SEQ ID NO: 779684 - DNA, 19 bp, Mus musculus
  siRNA target sequence for A230079K17Rik (NM_172846.1,1603-1621).
cagaatgtccctgaaacat

SEQ ID NO: 779685 - DNA, 19 bp, Mus musculus
  siRNA target sequence for A230079K17Rik (NM_172846.1,1629-1647).
caatttgagggcaatgcta

SEQ ID NO: 779686 - DNA, 19 bp, Mus musculus
  siRNA target sequence for A230079K17Rik (NM_172846.1,1670-1688).
gagggcaatattacatcaa

SEQ ID NO: 779687 - DNA, 19 bp, Mus musculus
  siRNA target sequence for A230079K17Rik (NM_172846.1,1672-1690).
gggcaatattacatcaaaa

SEQ ID NO: 779688 - DNA, 19 bp, Mus musculus
  siRNA target sequence for A230079K17Rik (NM_172846.1,1683-1701).
catcaaaatcgatgatact

SEQ ID NO: 779689 - DNA, 19 bp, Mus musculus
  siRNA target sequence for C230030N03 (NM_172847.1,1531-1549).
gtacctgtgtgcaacagaa

SEQ ID NO: 779690 - DNA, 19 bp, Mus musculus
  siRNA target sequence for C230030N03 (NM_172847.1,1616-1634).
gtgtcattggctctttaga

SEQ ID NO: 779691 - DNA, 19 bp, Mus musculus
  siRNA target sequence for C230030N03 (NM_172847.1,1677-1695).
gaaggccttgcaaagtctt

SEQ ID NO: 779692 - DNA, 19 bp, Mus musculus
  siRNA target sequence for C230030N03 (NM_172847.1,1682-1700).
ccttgcaaagtcttttgga

SEQ ID NO: 779693 - DNA, 19 bp, Mus musculus
  siRNA target sequence for C230030N03 (NM_172847.1,1698-1716).
ggacttcccaacattggaa

SEQ ID NO: 779694 - DNA, 19 bp, Mus musculus
  siRNA target sequence for C230030N03 (NM_172847.1,1706-1724).
caacattggaagtatctca

SEQ ID NO: 779695 - DNA, 19 bp, Mus musculus
  siRNA target sequence for C230030N03 (NM_172847.1,1829-1847).
gctgcaaattcattatgat

SEQ ID NO: 779696 - DNA, 19 bp, Mus musculus
  siRNA target sequence for C230030N03 (NM_172847.1,1830-1848).
ctgcaaattcattatgata

SEQ ID NO: 779697 - DNA, 19 bp, Mus musculus
  siRNA target sequence for C230030N03 (NM_172847.1,1884-1902).
gaaggctcactgtctcata

SEQ ID NO: 779698 - DNA, 19 bp, Mus musculus
  siRNA target sequence for C230030N03 (NM_172847.1,1887-1905).
ggctcactgtctcatagaa

SEQ ID NO: 779699 - DNA, 19 bp, Mus musculus
  siRNA target sequence for C230030N03 (NM_172847.1,1937-1955).
caagcgccacggcttatga

SEQ ID NO: 779700 - DNA, 19 bp, Mus musculus
  siRNA target sequence for C230030N03 (NM_172847.1,1977-1995).
gcccgtgtttggcaatgaa

SEQ ID NO: 779701 - DNA, 19 bp, Mus musculus
  siRNA target sequence for C230030N03 (NM_172847.1,1978-1996).
cccgtgtttggcaatgaat

SEQ ID NO: 779702 - DNA, 19 bp, Mus musculus
  siRNA target sequence for C230030N03 (NM_172847.1,1980-1998).
cgtgtttggcaatgaatgt

SEQ ID NO: 779703 - DNA, 19 bp, Mus musculus
  siRNA target sequence for C230030N03 (NM_172847.1,2093-2111).
cttcttcggatgacacttt

SEQ ID NO: 779704 - DNA, 19 bp, Mus musculus
  siRNA target sequence for C230030N03 (NM_172847.1,2245-2263).
gcggagaatgcggaaatct

SEQ ID NO: 779705 - DNA, 19 bp, Mus musculus
  siRNA target sequence for C230030N03 (NM_172847.1,2282-2300).
gtagagggtcccctttcaa

SEQ ID NO: 779706 - DNA, 19 bp, Mus musculus
  siRNA target sequence for B230363K08Rik (NM_172848.2,493-511).
ggttctgtctgaacaatgt

SEQ ID NO: 779707 - DNA, 19 bp, Mus musculus
  siRNA target sequence for B230363K08Rik (NM_172848.2,543-561).
gtcccagccccatttcaga

SEQ ID NO: 779708 - DNA, 19 bp, Mus musculus
  siRNA target sequence for B230363K08Rik (NM_172848.2,547-565).
cagccccatttcagatact

SEQ ID NO: 779709 - DNA, 19 bp, Mus musculus
  siRNA target sequence for B230363K08Rik (NM_172848.2,593-611).
cctgggttgtaagatcaaa

SEQ ID NO: 779710 - DNA, 19 bp, Mus musculus
  siRNA target sequence for B230363K08Rik (NM_172848.2,597-615).
ggttgtaagatcaaagtga

SEQ ID NO: 779711 - DNA, 19 bp, Mus musculus
  siRNA target sequence for B230363K08Rik (NM_172848.2,664-682).
ggtacggaaagggaaacaa

SEQ ID NO: 779712 - DNA, 19 bp, Mus musculus
  siRNA target sequence for B230363K08Rik (NM_172848.2,701-719).
catacaggctgcagctaaa

SEQ ID NO: 779713 - DNA, 19 bp, Mus musculus
  siRNA target sequence for B230363K08Rik (NM_172848.2,792-810).
gtacacttcggctatgtct

SEQ ID NO: 779714 - DNA, 19 bp, Mus musculus
  siRNA target sequence for B230363K08Rik (NM_172848.2,822-840).
gtcgcagagcggcaaatca

SEQ ID NO: 779715 - DNA, 19 bp, Mus musculus
  siRNA target sequence for B230363K08Rik (NM_172848.2,909-927).
gacccgagcttctcatgtt

SEQ ID NO: 779716 - DNA, 19 bp, Mus musculus
  siRNA target sequence for B230363K08Rik (NM_172848.2,1296-1314).
cccactcaccctatcatca

SEQ ID NO: 779717 - DNA, 19 bp, Mus musculus
  siRNA target sequence for B230363K08Rik (NM_172848.2,1533-1551).
ctcatattgcccattgagt

SEQ ID NO: 779718 - DNA, 19 bp, Mus musculus
  siRNA target sequence for B230363K08Rik (NM_172848.2,1606-1624).
ctcccatgacggagtactt

SEQ ID NO: 779719 - DNA, 19 bp, Mus musculus
  siRNA target sequence for B230363K08Rik (NM_172848.2,1667-1685).
ctgtctagagcccattgat

SEQ ID NO: 779720 - DNA, 19 bp, Mus musculus
  siRNA target sequence for B230363K08Rik (NM_172848.2,1738-1756).
gcctgaggaactataccaa

SEQ ID NO: 779721 - DNA, 19 bp, Mus musculus
  siRNA target sequence for B230363K08Rik (NM_172848.2,1905-1923).
gaagccttcgccgtttata

SEQ ID NO: 779722 - DNA, 19 bp, Mus musculus
  siRNA target sequence for B230363K08Rik (NM_172848.2,1909-1927).
ccttcgccgtttataaggt

SEQ ID NO: 779723 - DNA, 19 bp, Mus musculus
  siRNA target sequence for 9430031J16Rik (NM_172849.1,623-641).
gatgatgagtgctaatcct

SEQ ID NO: 779724 - DNA, 19 bp, Mus musculus
  siRNA target sequence for 9430031J16Rik (NM_172849.1,654-672).
ctggacacctttttccaat

SEQ ID NO: 779725 - DNA, 19 bp, Mus musculus
  siRNA target sequence for 9430031J16Rik (NM_172849.1,656-674).
ggacacctttttccaatat

SEQ ID NO: 779726 - DNA, 19 bp, Mus musculus
  siRNA target sequence for 9430031J16Rik (NM_172849.1,657-675).
gacacctttttccaatata

SEQ ID NO: 779727 - DNA, 19 bp, Mus musculus
  siRNA target sequence for 9430031J16Rik (NM_172849.1,661-679).
cctttttccaatatattga

SEQ ID NO: 779728 - DNA, 19 bp, Mus musculus
  siRNA target sequence for 9430031J16Rik (NM_172849.1,686-704).
gggaatgaaagcatacgat

SEQ ID NO: 779729 - DNA, 19 bp, Mus musculus
  siRNA target sequence for 9430031J16Rik (NM_172849.1,697-715).
catacgatggcctggttat

SEQ ID NO: 779730 - DNA, 19 bp, Mus musculus
  siRNA target sequence for 9430031J16Rik (NM_172849.1,708-726).
ctggttattcaaaatgcat

SEQ ID NO: 779731 - DNA, 19 bp, Mus musculus
  siRNA target sequence for 9430031J16Rik (NM_172849.1,731-749).
cattgctcgcgagaatgat

SEQ ID NO: 779732 - DNA, 19 bp, Mus musculus
  siRNA target sequence for 9430031J16Rik (NM_172849.1,747-765).
gatcgcctgagaaatgaga

SEQ ID NO: 779733 - DNA, 19 bp, Mus musculus
  siRNA target sequence for 9430031J16Rik (NM_172849.1,801-819).
cgtcgacgacaggaagaaa

SEQ ID NO: 779734 - DNA, 19 bp, Mus musculus
  siRNA target sequence for 9430031J16Rik (NM_172849.1,804-822).
cgacgacaggaagaaacaa

SEQ ID NO: 779735 - DNA, 19 bp, Mus musculus
  siRNA target sequence for 9430031J16Rik (NM_172849.1,807-825).
cgacaggaagaaacaatca

SEQ ID NO: 779736 - DNA, 19 bp, Mus musculus
  siRNA target sequence for 9430031J16Rik (NM_172849.1,1044-1062).
gaccccagcactaagctta

SEQ ID NO: 779737 - DNA, 19 bp, Mus musculus
  siRNA target sequence for 9430031J16Rik (NM_172849.1,1088-1106).
cactgcagccagtaagagt

SEQ ID NO: 779738 - DNA, 19 bp, Mus musculus
  siRNA target sequence for 9430031J16Rik (NM_172849.1,1295-1313).
gaatcctaatactcaactt

SEQ ID NO: 779739 - DNA, 19 bp, Mus musculus
  siRNA target sequence for 9430031J16Rik (NM_172849.1,1318-1336).
cgtctttcgatgaaaccta

SEQ ID NO: 779740 - DNA, 19 bp, Mus musculus
  siRNA target sequence for 9430031J16Rik (NM_172849.1,1364-1382).
ctctctcccgcgagattca

SEQ ID NO: 779741 - DNA, 19 bp, Mus musculus
  siRNA target sequence for 9430031J16Rik (NM_172849.1,1539-1557).
ctgggccatgattccaaat

SEQ ID NO: 779742 - DNA, 19 bp, Mus musculus
  siRNA target sequence for 9430031J16Rik (NM_172849.1,1541-1559).
gggccatgattccaaatgt

SEQ ID NO: 779743 - DNA, 19 bp, Mus musculus
  siRNA target sequence for 9430031J16Rik (NM_172849.1,1614-1632).
ctggactttgtcaagtctt

SEQ ID NO: 779744 - DNA, 19 bp, Mus musculus
  siRNA target sequence for 9430031J16Rik (NM_172849.1,1652-1670).
gggtctgctttgtgacata

SEQ ID NO: 779745 - DNA, 19 bp, Mus musculus
  siRNA target sequence for 9430031J16Rik (NM_172849.1,1771-1789).
cccctctggaggtcacaaa

SEQ ID NO: 779746 - DNA, 19 bp, Mus musculus
  siRNA target sequence for 9430031J16Rik (NM_172849.1,1939-1957).
cacctccatccactttgta

SEQ ID NO: 779747 - DNA, 19 bp, Mus musculus
  siRNA target sequence for 9430031J16Rik (NM_172849.1,1971-1989).
ccccatggctatccaaaaa

SEQ ID NO: 779748 - DNA, 19 bp, Mus musculus
  siRNA target sequence for 9430031J16Rik (NM_172849.1,2157-2175).
gtcaatgctgcggtgaata

SEQ ID NO: 779749 - DNA, 19 bp, Mus musculus
  siRNA target sequence for 9430031J16Rik (NM_172849.1,2159-2177).
caatgctgcggtgaataca

SEQ ID NO: 779750 - DNA, 19 bp, Mus musculus
  siRNA target sequence for 9430031J16Rik (NM_172849.1,2163-2181).
gctgcggtgaatacataca

SEQ ID NO: 779751 - DNA, 19 bp, Mus musculus
  siRNA target sequence for 9430031J16Rik (NM_172849.1,2235-2253).
ctcaccagcctctttacct

SEQ ID NO: 779752 - DNA, 19 bp, Mus musculus
  siRNA target sequence for 9430031J16Rik (NM_172849.1,2347-2365).
gcacggagccgttaccaaa

SEQ ID NO: 779753 - DNA, 19 bp, Mus musculus
  siRNA target sequence for 9430031J16Rik (NM_172849.1,2350-2368).
cggagccgttaccaaagtt

SEQ ID NO: 779754 - DNA, 19 bp, Mus musculus
  siRNA target sequence for 9430031J16Rik (NM_172849.1,2375-2393).
caaagagagaggtcattat

SEQ ID NO: 779755 - DNA, 19 bp, Mus musculus
  siRNA target sequence for 9430031J16Rik (NM_172849.1,2405-2423).
ctctagagagccagtgaaa

SEQ ID NO: 779756 - DNA, 19 bp, Mus musculus
  siRNA target sequence for 9430031J16Rik (NM_172849.1,2415-2433).
ccagtgaaagctcaagaat

SEQ ID NO: 779757 - DNA, 19 bp, Mus musculus
  siRNA target sequence for 9430031J16Rik (NM_172849.1,2549-2567).
gcggtctgcatctacatca

SEQ ID NO: 779758 - DNA, 19 bp, Mus musculus
  siRNA target sequence for 9430031J16Rik (NM_172849.1,2624-2642).
ccaggtaccatcatcgtta

SEQ ID NO: 779759 - DNA, 19 bp, Mus musculus
  siRNA target sequence for 4930483I10 (NM_172850.1,394-412).
ggatacggcgagttctctt

SEQ ID NO: 779760 - DNA, 19 bp, Mus musculus
  siRNA target sequence for 4930483I10 (NM_172850.1,498-516).
cttcacaggcacgttttat

SEQ ID NO: 779761 - DNA, 19 bp, Mus musculus
  siRNA target sequence for 4930483I10 (NM_172850.1,537-555).
cgggaccatgcacacaaaa

SEQ ID NO: 779762 - DNA, 19 bp, Mus musculus
  siRNA target sequence for 4930483I10 (NM_172850.1,538-556).
gggaccatgcacacaaaaa

SEQ ID NO: 779763 - DNA, 19 bp, Mus musculus
  siRNA target sequence for 4930483I10 (NM_172850.1,689-707).
gcggtttctccttggtaaa

SEQ ID NO: 779764 - DNA, 19 bp, Mus musculus
  siRNA target sequence for 4930483I10 (NM_172850.1,691-709).
ggtttctccttggtaaact

SEQ ID NO: 779765 - DNA, 19 bp, Mus musculus
  siRNA target sequence for 4930483I10 (NM_172850.1,692-710).
gtttctccttggtaaacta

SEQ ID NO: 779766 - DNA, 19 bp, Mus musculus
  siRNA target sequence for 4930483I10 (NM_172850.1,703-721).
gtaaactaccccgaattct

SEQ ID NO: 779767 - DNA, 19 bp, Mus musculus
  siRNA target sequence for 4930483I10 (NM_172850.1,724-742).
gccttcctcacaaaatcga

SEQ ID NO: 779768 - DNA, 19 bp, Mus musculus
  siRNA target sequence for 4930483I10 (NM_172850.1,795-813).
gcaggaccccttcttctat

SEQ ID NO: 779769 - DNA, 19 bp, Mus musculus
  siRNA target sequence for 4930483I10 (NM_172850.1,801-819).
ccccttcttctatgactat

SEQ ID NO: 779770 - DNA, 19 bp, Mus musculus
  siRNA target sequence for 4930483I10 (NM_172850.1,803-821).
ccttcttctatgactataa

SEQ ID NO: 779771 - DNA, 19 bp, Mus musculus
  siRNA target sequence for 4930483I10 (NM_172850.1,810-828).
ctatgactataaacagtat

SEQ ID NO: 779772 - DNA, 19 bp, Mus musculus
  siRNA target sequence for 4930483I10 (NM_172850.1,825-843).
gtatctcctgaatgatgaa

SEQ ID NO: 779773 - DNA, 19 bp, Mus musculus
  siRNA target sequence for 4930483I10 (NM_172850.1,859-877).
gagatgcacgtctattcga

SEQ ID NO: 779774 - DNA, 19 bp, Mus musculus
  siRNA target sequence for 4930483I10 (NM_172850.1,1153-1171).
gctgaggaaggggactata

SEQ ID NO: 779775 - DNA, 19 bp, Mus musculus
  siRNA target sequence for 4930483I10 (NM_172850.1,1162-1180).
ggggactataactggattt

SEQ ID NO: 779776 - DNA, 19 bp, Mus musculus
  siRNA target sequence for 4930483I10 (NM_172850.1,1167-1185).
ctataactggatttttgga

SEQ ID NO: 779777 - DNA, 19 bp, Mus musculus
  siRNA target sequence for 4930483I10 (NM_172850.1,1245-1263).
ggccgctgcggcaatgcat

SEQ ID NO: 779778 - DNA, 19 bp, Mus musculus
  siRNA target sequence for 4930483I10 (NM_172850.1,1246-1264).
gccgctgcggcaatgcatt

SEQ ID NO: 779779 - DNA, 19 bp, Mus musculus
  siRNA target sequence for 4930483I10 (NM_172850.1,1250-1268).
ctgcggcaatgcattctca

SEQ ID NO: 779780 - DNA, 19 bp, Mus musculus
  siRNA target sequence for 4930483I10 (NM_172850.1,1331-1349).
gcatcacgcccctcagtat

SEQ ID NO: 779781 - DNA, 19 bp, Mus musculus
  siRNA target sequence for 4930483I10 (NM_172850.1,1350-1368).
gtgcttcctccagtattat

SEQ ID NO: 779782 - DNA, 19 bp, Mus musculus
  siRNA target sequence for 4930483I10 (NM_172850.1,1411-1429).
cttcaggaatctcctaaat

SEQ ID NO: 779783 - DNA, 19 bp, Mus musculus
  siRNA target sequence for 4930483I10 (NM_172850.1,1431-1449).
cttggtcacccccaaaatt

SEQ ID NO: 779784 - DNA, 19 bp, Mus musculus
  siRNA target sequence for 4930483I10 (NM_172850.1,1434-1452).
ggtcacccccaaaatttca

SEQ ID NO: 779785 - DNA, 19 bp, Mus musculus
  siRNA target sequence for 4930483I10 (NM_172850.1,1458-1476).
gcttgcggatgcaaacata

SEQ ID NO: 779786 - DNA, 19 bp, Mus musculus
  siRNA target sequence for 4930483I10 (NM_172850.1,1468-1486).
gcaaacatagattatctct

SEQ ID NO: 779787 - DNA, 19 bp, Mus musculus
  siRNA target sequence for 4930483I10 (NM_172850.1,1513-1531).
ggagatgaattgaagacaa

SEQ ID NO: 779788 - DNA, 19 bp, Mus musculus
  siRNA target sequence for 4930483I10 (NM_172850.1,1574-1592).
ccagcaacatgcttcacaa

SEQ ID NO: 779789 - DNA, 19 bp, Mus musculus
  siRNA target sequence for 4930483I10 (NM_172850.1,1620-1638).
cagcactgacgtagagaaa

SEQ ID NO: 779790 - DNA, 19 bp, Mus musculus
  siRNA target sequence for 4930483I10 (NM_172850.1,1622-1640).
gcactgacgtagagaaaga

SEQ ID NO: 779791 - DNA, 19 bp, Mus musculus
  siRNA target sequence for 4930483I10 (NM_172850.1,1680-1698).
gtacagcgtcgatacaaat

SEQ ID NO: 779792 - DNA, 19 bp, Mus musculus
  siRNA target sequence for 4930483I10 (NM_172850.1,1685-1703).
gcgtcgatacaaatttcga

SEQ ID NO: 779793 - DNA, 19 bp, Mus musculus
  siRNA target sequence for 4930483I10 (NM_172850.1,1715-1733).
gcctgcggaactacactat

SEQ ID NO: 779794 - DNA, 19 bp, Mus musculus
  siRNA target sequence for 4930483I10 (NM_172850.1,1716-1734).
cctgcggaactacactatt

SEQ ID NO: 779795 - DNA, 19 bp, Mus musculus
  siRNA target sequence for 4930483I10 (NM_172850.1,1717-1735).
ctgcggaactacactatta

SEQ ID NO: 779796 - DNA, 19 bp, Mus musculus
  siRNA target sequence for 4930483I10 (NM_172850.1,1719-1737).
gcggaactacactattaat

SEQ ID NO: 779797 - DNA, 19 bp, Mus musculus
  siRNA target sequence for 4930483I10 (NM_172850.1,1794-1812).
cccctgcttcccatacaaa

SEQ ID NO: 779798 - DNA, 19 bp, Mus musculus
  siRNA target sequence for 4930483I10 (NM_172850.1,1858-1876).
cgttggatgaccatcacat

SEQ ID NO: 779799 - DNA, 19 bp, Mus musculus
  siRNA target sequence for 4930483I10 (NM_172850.1,1859-1877).
gttggatgaccatcacatt

SEQ ID NO: 779800 - DNA, 19 bp, Mus musculus
  siRNA target sequence for 4930483I10 (NM_172850.1,1886-1904).
gcagaggtgccgatcctaa

SEQ ID NO: 779801 - DNA, 19 bp, Mus musculus
  siRNA target sequence for 4930483I10 (NM_172850.1,1964-1982).
gggtgaggctgctactgat

SEQ ID NO: 779802 - DNA, 19 bp, Mus musculus
  siRNA target sequence for 4930483I10 (NM_172850.1,2092-2110).
ctgctccacgtgatcacta

SEQ ID NO: 779803 - DNA, 19 bp, Mus musculus
  siRNA target sequence for 4930483I10 (NM_172850.1,2133-2151).
cgaggactacgtgtacaaa

SEQ ID NO: 779804 - DNA, 19 bp, Mus musculus
  siRNA target sequence for 4930483I10 (NM_172850.1,2399-2417).
ggaatgacctggttgtgaa

SEQ ID NO: 779805 - DNA, 19 bp, Mus musculus
  siRNA target sequence for 4930483I10 (NM_172850.1,2516-2534).
ggagcgtcgagaacaagat

SEQ ID NO: 779806 - DNA, 19 bp, Mus musculus
  siRNA target sequence for 4930483I10 (NM_172850.1,2517-2535).
gagcgtcgagaacaagatt

SEQ ID NO: 779807 - DNA, 19 bp, Mus musculus
  siRNA target sequence for 4930483I10 (NM_172850.1,2626-2644).
gtcgactatggctacttca

SEQ ID NO: 779808 - DNA, 19 bp, Mus musculus
  siRNA target sequence for 4930483I10 (NM_172850.1,2696-2714).
cagcagagcgggaggtatt

SEQ ID NO: 779809 - DNA, 19 bp, Mus musculus
  siRNA target sequence for 4930483I10 (NM_172850.1,2699-2717).
cagagcgggaggtattcat

SEQ ID NO: 779810 - DNA, 19 bp, Mus musculus
  siRNA target sequence for 4930483I10 (NM_172850.1,2737-2755).
gagtacttaggcttgcaat

SEQ ID NO: 779811 - DNA, 19 bp, Mus musculus
  siRNA target sequence for 4930483I10 (NM_172850.1,2882-2900).
cctcggagaagcagtcaat

SEQ ID NO: 779812 - DNA, 19 bp, Mus musculus
  siRNA target sequence for 4930483I10 (NM_172850.1,2883-2901).
ctcggagaagcagtcaatt

SEQ ID NO: 779813 - DNA, 19 bp, Mus musculus
  siRNA target sequence for 4930483I10 (NM_172850.1,2893-2911).
cagtcaattcccttttaca

SEQ ID NO: 779814 - DNA, 19 bp, Mus musculus
  siRNA target sequence for 4930483I10 (NM_172850.1,2980-2998).
ctgacttgtagcaagtact

SEQ ID NO: 779815 - DNA, 19 bp, Mus musculus
  siRNA target sequence for 4932431K08Rik (NM_172854.1,184-202).
ctgtgtggcccgacagtaa

SEQ ID NO: 779816 - DNA, 19 bp, Mus musculus
  siRNA target sequence for 4932431K08Rik (NM_172854.1,188-206).
gtggcccgacagtaaggta

SEQ ID NO: 779817 - DNA, 19 bp, Mus musculus
  siRNA target sequence for 4932431K08Rik (NM_172854.1,190-208).
ggcccgacagtaaggtatt

SEQ ID NO: 779818 - DNA, 19 bp, Mus musculus
  siRNA target sequence for 4932431K08Rik (NM_172854.1,192-210).
cccgacagtaaggtattca

SEQ ID NO: 779819 - DNA, 19 bp, Mus musculus
  siRNA target sequence for 4932431K08Rik (NM_172854.1,194-212).
cgacagtaaggtattcagt

SEQ ID NO: 779820 - DNA, 19 bp, Mus musculus
  siRNA target sequence for 4932431K08Rik (NM_172854.1,249-267).
gactgccgctgcaaatgca

SEQ ID NO: 779821 - DNA, 19 bp, Mus musculus
  siRNA target sequence for 4932431K08Rik (NM_172854.1,804-822).
ggcagagatctcaacaaat

SEQ ID NO: 779822 - DNA, 19 bp, Mus musculus
  siRNA target sequence for 4932431K08Rik (NM_172854.1,805-823).
gcagagatctcaacaaata

SEQ ID NO: 779823 - DNA, 19 bp, Mus musculus
  siRNA target sequence for 4932431K08Rik (NM_172854.1,981-999).
cgaggcttcacctactaca

SEQ ID NO: 779824 - DNA, 19 bp, Mus musculus
  siRNA target sequence for 4932431K08Rik (NM_172854.1,982-1000).
gaggcttcacctactacaa

SEQ ID NO: 779825 - DNA, 19 bp, Mus musculus
  siRNA target sequence for 4932431K08Rik (NM_172854.1,1114-1132).
ccaaacttccggaacctaa

SEQ ID NO: 779826 - DNA, 19 bp, Mus musculus
  siRNA target sequence for 4932431K08Rik (NM_172854.1,1129-1147).
ctaactctgccaaacatga

SEQ ID NO: 779827 - DNA, 19 bp, Mus musculus
  siRNA target sequence for 4932431K08Rik (NM_172854.1,1501-1519).
gcctggtggagtttcgaaa

SEQ ID NO: 779828 - DNA, 19 bp, Mus musculus
  siRNA target sequence for 4932431K08Rik (NM_172854.1,1511-1529).
gtttcgaaacctggaaaat

SEQ ID NO: 779829 - DNA, 19 bp, Mus musculus
  siRNA target sequence for 4932431K08Rik (NM_172854.1,1536-1554).
caaggccgatggagtaata

SEQ ID NO: 779830 - DNA, 19 bp, Mus musculus
  siRNA target sequence for 4932431K08Rik (NM_172854.1,1539-1557).
ggccgatggagtaatatgt

SEQ ID NO: 779831 - DNA, 19 bp, Mus musculus
  siRNA target sequence for 4932431K08Rik (NM_172854.1,1540-1558).
gccgatggagtaatatgta

SEQ ID NO: 779832 - DNA, 19 bp, Mus musculus
  siRNA target sequence for 4932431K08Rik (NM_172854.1,1542-1560).
cgatggagtaatatgtata

SEQ ID NO: 779833 - DNA, 19 bp, Mus musculus
  siRNA target sequence for 4932431K08Rik (NM_172854.1,1546-1564).
ggagtaatatgtataaact

SEQ ID NO: 779834 - DNA, 19 bp, Mus musculus
  siRNA target sequence for 4932431K08Rik (NM_172854.1,1547-1565).
gagtaatatgtataaacta

SEQ ID NO: 779835 - DNA, 19 bp, Mus musculus
  siRNA target sequence for 4932431K08Rik (NM_172854.1,1602-1620).
cagggtgccttctactaca

SEQ ID NO: 779836 - DNA, 19 bp, Mus musculus
  siRNA target sequence for 4932431K08Rik (NM_172854.1,1622-1640).
ccgtgccttcaccaagaat

SEQ ID NO: 779837 - DNA, 19 bp, Mus musculus
  siRNA target sequence for 4932431K08Rik (NM_172854.1,1623-1641).
cgtgccttcaccaagaata

SEQ ID NO: 779838 - DNA, 19 bp, Mus musculus
  siRNA target sequence for 4932431K08Rik (NM_172854.1,1624-1642).
gtgccttcaccaagaatat

SEQ ID NO: 779839 - DNA, 19 bp, Mus musculus
  siRNA target sequence for 4932431K08Rik (NM_172854.1,1732-1750).
gtggccactcggacattga

SEQ ID NO: 779840 - DNA, 19 bp, Mus musculus
  siRNA target sequence for 4932431K08Rik (NM_172854.1,2027-2045).
gcccttcctcaatgagtat

SEQ ID NO: 779841 - DNA, 19 bp, Mus musculus
  siRNA target sequence for 4932431K08Rik (NM_172854.1,2028-2046).
cccttcctcaatgagtatt

SEQ ID NO: 779842 - DNA, 19 bp, Mus musculus
  siRNA target sequence for 4932431K08Rik (NM_172854.1,2033-2051).
cctcaatgagtattcctat

SEQ ID NO: 779843 - DNA, 19 bp, Mus musculus
  siRNA target sequence for 4932431K08Rik (NM_172854.1,2034-2052).
ctcaatgagtattcctata

SEQ ID NO: 779844 - DNA, 19 bp, Mus musculus
  siRNA target sequence for 4932431K08Rik (NM_172854.1,2108-2126).
ccaccagctcacttacact

SEQ ID NO: 779845 - DNA, 19 bp, Mus musculus
  siRNA target sequence for 2810039F03Rik (NM_172859.1,238-256).
caccccagatgtcaacata

SEQ ID NO: 779846 - DNA, 19 bp, Mus musculus
  siRNA target sequence for 2810039F03Rik (NM_172859.1,240-258).
ccccagatgtcaacatata

SEQ ID NO: 779847 - DNA, 19 bp, Mus musculus
  siRNA target sequence for 2810039F03Rik (NM_172859.1,242-260).
ccagatgtcaacatatatt

SEQ ID NO: 779848 - DNA, 19 bp, Mus musculus
  siRNA target sequence for 2810039F03Rik (NM_172859.1,243-261).
cagatgtcaacatatatta

SEQ ID NO: 779849 - DNA, 19 bp, Mus musculus
  siRNA target sequence for 2810039F03Rik (NM_172859.1,245-263).
gatgtcaacatatattaca

SEQ ID NO: 779850 - DNA, 19 bp, Mus musculus
  siRNA target sequence for 2810039F03Rik (NM_172859.1,299-317).
gttggttctggtgaaaata

SEQ ID NO: 779851 - DNA, 19 bp, Mus musculus
  siRNA target sequence for 2810039F03Rik (NM_172859.1,302-320).
ggttctggtgaaaataata

SEQ ID NO: 779852 - DNA, 19 bp, Mus musculus
  siRNA target sequence for 2810039F03Rik (NM_172859.1,308-326).
ggtgaaaataatacattta

SEQ ID NO: 779853 - DNA, 19 bp, Mus musculus
  siRNA target sequence for 2810039F03Rik (NM_172859.1,396-414).
gcagacagagtggaattgt

SEQ ID NO: 779854 - DNA, 19 bp, Mus musculus
  siRNA target sequence for 2810039F03Rik (NM_172859.1,448-466).
gaagatggtctcttctgaa

SEQ ID NO: 779855 - DNA, 19 bp, Mus musculus
  siRNA target sequence for 2810039F03Rik (NM_172859.1,519-537).
ggtttgtcggaccaaaact

SEQ ID NO: 779856 - DNA, 19 bp, Mus musculus
  siRNA target sequence for 2810039F03Rik (NM_172859.1,520-538).
gtttgtcggaccaaaacta

SEQ ID NO: 779857 - DNA, 19 bp, Mus musculus
  siRNA target sequence for 2810039F03Rik (NM_172859.1,547-565).
gtataagaatgctgaaaat

SEQ ID NO: 779858 - DNA, 19 bp, Mus musculus
  siRNA target sequence for 2810039F03Rik (NM_172859.1,570-588).
caacttggaacgttaacct

SEQ ID NO: 779859 - DNA, 19 bp, Mus musculus
  siRNA target sequence for 2810039F03Rik (NM_172859.1,617-635).
gaaagagcagaccctaaaa

SEQ ID NO: 779860 - DNA, 19 bp, Mus musculus
  siRNA target sequence for 2810039F03Rik (NM_172859.1,829-847).
ggcttcccgtccatctgat

SEQ ID NO: 779861 - DNA, 19 bp, Mus musculus
  siRNA target sequence for 2810039F03Rik (NM_172859.1,834-852).
cccgtccatctgatccatt

SEQ ID NO: 779862 - DNA, 19 bp, Mus musculus
  siRNA target sequence for 2810039F03Rik (NM_172859.1,1025-1043).
caggccagcctctacttaa

SEQ ID NO: 779863 - DNA, 19 bp, Mus musculus
  siRNA target sequence for 2810039F03Rik (NM_172859.1,1082-1100).
cctgctcatctgagatact

SEQ ID NO: 779864 - DNA, 19 bp, Mus musculus
  siRNA target sequence for 2810039F03Rik (NM_172859.1,1360-1378).
gtccataacaaggtttaga

SEQ ID NO: 779865 - DNA, 19 bp, Mus musculus
  siRNA target sequence for 2810039F03Rik (NM_172859.1,1362-1380).
ccataacaaggtttagaat

SEQ ID NO: 779866 - DNA, 19 bp, Mus musculus
  siRNA target sequence for 2810039F03Rik (NM_172859.1,1368-1386).
caaggtttagaatgcataa

SEQ ID NO: 779867 - DNA, 19 bp, Mus musculus
  siRNA target sequence for 2810039F03Rik (NM_172859.1,1440-1458).
cctggcagtccctaaacgt

SEQ ID NO: 779868 - DNA, 19 bp, Mus musculus
  siRNA target sequence for 2810039F03Rik (NM_172859.1,1473-1491).
ctgccagtgggtctaagaa

SEQ ID NO: 779869 - DNA, 19 bp, Mus musculus
  siRNA target sequence for 2810039F03Rik (NM_172859.1,1680-1698).
ggtcctatgctcagaacaa

SEQ ID NO: 779870 - DNA, 19 bp, Mus musculus
  siRNA target sequence for 2810039F03Rik (NM_172859.1,1788-1806).
gactgaactatattcaagt

SEQ ID NO: 779871 - DNA, 19 bp, Mus musculus
  siRNA target sequence for 2810039F03Rik (NM_172859.1,1878-1896).
gtgggaacgggctatatga

SEQ ID NO: 779872 - DNA, 19 bp, Mus musculus
  siRNA target sequence for 2810039F03Rik (NM_172859.1,1880-1898).
gggaacgggctatatgaca

SEQ ID NO: 779873 - DNA, 19 bp, Mus musculus
  siRNA target sequence for 2810039F03Rik (NM_172859.1,1938-1956).
cagacacccccgaaagtat

SEQ ID NO: 779874 - DNA, 19 bp, Mus musculus
  siRNA target sequence for 2810039F03Rik (NM_172859.1,1940-1958).
gacacccccgaaagtatca

SEQ ID NO: 779875 - DNA, 19 bp, Mus musculus
  siRNA target sequence for 2810039F03Rik (NM_172859.1,1944-1962).
cccccgaaagtatcaagaa

SEQ ID NO: 779876 - DNA, 19 bp, Mus musculus
  siRNA target sequence for 2810039F03Rik (NM_172859.1,1980-1998).
ccaaaagcttccttgtgaa

SEQ ID NO: 779877 - DNA, 19 bp, Mus musculus
  siRNA target sequence for 2810039F03Rik (NM_172859.1,2006-2024).
ccgctcacacctgaaaaca

SEQ ID NO: 779878 - DNA, 19 bp, Mus musculus
  siRNA target sequence for 2810039F03Rik (NM_172859.1,2007-2025).
cgctcacacctgaaaacaa

SEQ ID NO: 779879 - DNA, 19 bp, Mus musculus
  siRNA target sequence for 2810039F03Rik (NM_172859.1,2102-2120).
gaccctaactgctgtgata

SEQ ID NO: 779880 - DNA, 19 bp, Mus musculus
  siRNA target sequence for 2810039F03Rik (NM_172859.1,2104-2122).
ccctaactgctgtgatagt

SEQ ID NO: 779881 - DNA, 19 bp, Mus musculus
  siRNA target sequence for 2810039F03Rik (NM_172859.1,2127-2145).
gtcgacctgctgttattgt

SEQ ID NO: 779882 - DNA, 19 bp, Mus musculus
  siRNA target sequence for 2810039F03Rik (NM_172859.1,2147-2165).
gctgttgtgaataaacact

SEQ ID NO: 779883 - DNA, 19 bp, Mus musculus
  siRNA target sequence for 2810039F03Rik (NM_172859.1,2213-2231).
cagtggggaccgttcagaa

SEQ ID NO: 779884 - DNA, 19 bp, Mus musculus
  siRNA target sequence for 2810039F03Rik (NM_172859.1,2331-2349).
gaggccagacagcatatga

SEQ ID NO: 779885 - DNA, 19 bp, Mus musculus
  siRNA target sequence for 2810039F03Rik (NM_172859.1,2333-2351).
ggccagacagcatatgaca

SEQ ID NO: 779886 - DNA, 19 bp, Mus musculus
  siRNA target sequence for 2810039F03Rik (NM_172859.1,2385-2403).
ctctctttgccgctaagtt

SEQ ID NO: 779887 - DNA, 19 bp, Mus musculus
  siRNA target sequence for 2810039F03Rik (NM_172859.1,2387-2405).
ctctttgccgctaagttca

SEQ ID NO: 779888 - DNA, 19 bp, Mus musculus
  siRNA target sequence for 6030440P17Rik (NM_172862.1,91-109).
ccaacacactgttgaaatt

SEQ ID NO: 779889 - DNA, 19 bp, Mus musculus
  siRNA target sequence for 6030440P17Rik (NM_172862.1,101-119).
gttgaaattgaagtaatct

SEQ ID NO: 779890 - DNA, 19 bp, Mus musculus
  siRNA target sequence for 6030440P17Rik (NM_172862.1,147-165).
ccttcactgttcacctaaa

SEQ ID NO: 779891 - DNA, 19 bp, Mus musculus
  siRNA target sequence for 6030440P17Rik (NM_172862.1,274-292).
gtccttgctgatatacgat

SEQ ID NO: 779892 - DNA, 19 bp, Mus musculus
  siRNA target sequence for 6030440P17Rik (NM_172862.1,354-372).
cggcctgcaaccccaaata

SEQ ID NO: 779893 - DNA, 19 bp, Mus musculus
  siRNA target sequence for 6030440P17Rik (NM_172862.1,402-420).
gtgccagtgagaacatcaa

SEQ ID NO: 779894 - DNA, 19 bp, Mus musculus
  siRNA target sequence for 6030440P17Rik (NM_172862.1,424-442).
cactttgacccgatacaga

SEQ ID NO: 779895 - DNA, 19 bp, Mus musculus
  siRNA target sequence for 6030440P17Rik (NM_172862.1,511-529).
cttcttcacatcatccaaa

SEQ ID NO: 779896 - DNA, 19 bp, Mus musculus
  siRNA target sequence for 6030440P17Rik (NM_172862.1,522-540).
catccaaaatgattacatt

SEQ ID NO: 779897 - DNA, 19 bp, Mus musculus
  siRNA target sequence for 6030440P17Rik (NM_172862.1,537-555).
cattagactccatatactt

SEQ ID NO: 779898 - DNA, 19 bp, Mus musculus
  siRNA target sequence for 6030440P17Rik (NM_172862.1,623-641).
ctaatgagccccatcgtta

SEQ ID NO: 779899 - DNA, 19 bp, Mus musculus
  siRNA target sequence for 6030440P17Rik (NM_172862.1,858-876).
cgagagttgggaatcacaa

SEQ ID NO: 779900 - DNA, 19 bp, Mus musculus
  siRNA target sequence for 6030440P17Rik (NM_172862.1,859-877).
gagagttgggaatcacaaa

SEQ ID NO: 779901 - DNA, 19 bp, Mus musculus
  siRNA target sequence for 6030440P17Rik (NM_172862.1,863-881).
gttgggaatcacaaatgct

SEQ ID NO: 779902 - DNA, 19 bp, Mus musculus
  siRNA target sequence for 6030440P17Rik (NM_172862.1,889-907).
gctggactacaatgaagta

SEQ ID NO: 779903 - DNA, 19 bp, Mus musculus
  siRNA target sequence for 6030440P17Rik (NM_172862.1,890-908).
ctggactacaatgaagtaa

SEQ ID NO: 779904 - DNA, 19 bp, Mus musculus
  siRNA target sequence for 6030440P17Rik (NM_172862.1,1157-1175).
cgagttcctctgtacgttt

SEQ ID NO: 779905 - DNA, 19 bp, Mus musculus
  siRNA target sequence for 6030440P17Rik (NM_172862.1,1212-1230).
ggcagcatttcgacttgaa

SEQ ID NO: 779906 - DNA, 19 bp, Mus musculus
  siRNA target sequence for 6030440P17Rik (NM_172862.1,1233-1251).
cagagctccgactcacatt

SEQ ID NO: 779907 - DNA, 19 bp, Mus musculus
  siRNA target sequence for 6030440P17Rik (NM_172862.1,1356-1374).
gacgcctggctgtgaactt

SEQ ID NO: 779908 - DNA, 19 bp, Mus musculus
  siRNA target sequence for 6030440P17Rik (NM_172862.1,1492-1510).
gagtgaaccaacctacaat

SEQ ID NO: 779909 - DNA, 19 bp, Mus musculus
  siRNA target sequence for 6030440P17Rik (NM_172862.1,1494-1512).
gtgaaccaacctacaatca

SEQ ID NO: 779910 - DNA, 19 bp, Mus musculus
  siRNA target sequence for 6030440P17Rik (NM_172862.1,1565-1583).
ggcacctacacagtaaagt

SEQ ID NO: 779911 - DNA, 19 bp, Mus musculus
  siRNA target sequence for 6030440P17Rik (NM_172862.1,1566-1584).
gcacctacacagtaaagtt

SEQ ID NO: 779912 - DNA, 19 bp, Mus musculus
  siRNA target sequence for 6030440P17Rik (NM_172862.1,1663-1681).
ccttgacattcgattccaa

SEQ ID NO: 779913 - DNA, 19 bp, Mus musculus
  siRNA target sequence for 6030440P17Rik (NM_172862.1,1883-1901).
gagaaggtgttcttatgca

SEQ ID NO: 779914 - DNA, 19 bp, Mus musculus
  siRNA target sequence for 6030440P17Rik (NM_172862.1,1933-1951).
cccagcgaatgcggaatat

SEQ ID NO: 779915 - DNA, 19 bp, Mus musculus
  siRNA target sequence for 6030440P17Rik (NM_172862.1,1970-1988).
ccttcactcttacatagat

SEQ ID NO: 779916 - DNA, 19 bp, Mus musculus
  siRNA target sequence for 6030440P17Rik (NM_172862.1,1971-1989).
cttcactcttacatagatt

SEQ ID NO: 779917 - DNA, 19 bp, Mus musculus
  siRNA target sequence for 6030440P17Rik (NM_172862.1,1974-1992).
cactcttacatagattcaa

SEQ ID NO: 779918 - DNA, 19 bp, Mus musculus
  siRNA target sequence for 6030440P17Rik (NM_172862.1,1976-1994).
ctcttacatagattcaaaa

SEQ ID NO: 779919 - DNA, 19 bp, Mus musculus
  siRNA target sequence for 6030440P17Rik (NM_172862.1,1986-2004).
gattcaaaatcgtggataa

SEQ ID NO: 779920 - DNA, 19 bp, Mus musculus
  siRNA target sequence for 6030440P17Rik (NM_172862.1,2082-2100).
ctgttctcttagtgaatca

SEQ ID NO: 779921 - DNA, 19 bp, Mus musculus
  siRNA target sequence for 6030440P17Rik (NM_172862.1,2101-2119).
gcctggatccgatggtttt

SEQ ID NO: 779922 - DNA, 19 bp, Mus musculus
  siRNA target sequence for 6030440P17Rik (NM_172862.1,2102-2120).
cctggatccgatggtttta

SEQ ID NO: 779923 - DNA, 19 bp, Mus musculus
  siRNA target sequence for 6030440P17Rik (NM_172862.1,2103-2121).
ctggatccgatggttttaa

SEQ ID NO: 779924 - DNA, 19 bp, Mus musculus
  siRNA target sequence for 6030440P17Rik (NM_172862.1,2155-2173).
gggccgagagtggtacata

SEQ ID NO: 779925 - DNA, 19 bp, Mus musculus
  siRNA target sequence for 6030440P17Rik (NM_172862.1,2157-2175).
gccgagagtggtacataca

SEQ ID NO: 779926 - DNA, 19 bp, Mus musculus
  siRNA target sequence for 6030440P17Rik (NM_172862.1,2159-2177).
cgagagtggtacatacaca

SEQ ID NO: 779927 - DNA, 19 bp, Mus musculus
  siRNA target sequence for 6030440P17Rik (NM_172862.1,2232-2250).
gcctggagtaccagtatca

SEQ ID NO: 779928 - DNA, 19 bp, Mus musculus
  siRNA target sequence for 6030440P17Rik (NM_172862.1,2441-2459).
ctgccctgggagctcaata

SEQ ID NO: 779929 - DNA, 19 bp, Mus musculus
  siRNA target sequence for 6030440P17Rik (NM_172862.1,2619-2637).
ccccgcagagccactacaa

SEQ ID NO: 779930 - DNA, 19 bp, Mus musculus
  siRNA target sequence for 9430053K19 (NM_172863.1,263-281).
ccatgggacacagaagata

SEQ ID NO: 779931 - DNA, 19 bp, Mus musculus
  siRNA target sequence for 9430053K19 (NM_172863.1,460-478).
cccaggactgtcagaatct

SEQ ID NO: 779932 - DNA, 19 bp, Mus musculus
  siRNA target sequence for 9430053K19 (NM_172863.1,549-567).
gggagaaccgcttgataga

SEQ ID NO: 779933 - DNA, 19 bp, Mus musculus
  siRNA target sequence for 4931433A13 (NM_172864.1,752-770).
gaatgcctctagcgtaaaa

SEQ ID NO: 779934 - DNA, 19 bp, Mus musculus
  siRNA target sequence for 4931433A13 (NM_172864.1,764-782).
cgtaaaagatgcctacatt

SEQ ID NO: 779935 - DNA, 19 bp, Mus musculus
  siRNA target sequence for 4931433A13 (NM_172864.1,814-832).
ccctctcacaagttgagaa

SEQ ID NO: 779936 - DNA, 19 bp, Mus musculus
  siRNA target sequence for 4931433A13 (NM_172864.1,815-833).
cctctcacaagttgagaaa

SEQ ID NO: 779937 - DNA, 19 bp, Mus musculus
  siRNA target sequence for 4931433A13 (NM_172864.1,952-970).
gcctcatcggaaaatcaaa

SEQ ID NO: 779938 - DNA, 19 bp, Mus musculus
  siRNA target sequence for 4931433A13 (NM_172864.1,973-991).
ctttggtcgactttttcaa

SEQ ID NO: 779939 - DNA, 19 bp, Mus musculus
  siRNA target sequence for 4931433A13 (NM_172864.1,981-999).
gactttttcaacaatgtgt

SEQ ID NO: 779940 - DNA, 19 bp, Mus musculus
  siRNA target sequence for 4931433A13 (NM_172864.1,998-1016).
gtccacaagcgttgaagta

SEQ ID NO: 779941 - DNA, 19 bp, Mus musculus
  siRNA target sequence for 4931433A13 (NM_172864.1,1118-1136).
ggagtaccagtcctttaca

SEQ ID NO: 779942 - DNA, 19 bp, Mus musculus
  siRNA target sequence for 4931433A13 (NM_172864.1,1129-1147).
cctttacagaccttcacaa

SEQ ID NO: 779943 - DNA, 19 bp, Mus musculus
  siRNA target sequence for 4931433A13 (NM_172864.1,1220-1238).
cgtgcgcctctcctatgaa

SEQ ID NO: 779944 - DNA, 19 bp, Mus musculus
  siRNA target sequence for 4931433A13 (NM_172864.1,1512-1530).
cttgaaccagacagcaata

SEQ ID NO: 779945 - DNA, 19 bp, Mus musculus
  siRNA target sequence for 4931433A13 (NM_172864.1,1518-1536).
ccagacagcaataaagaat

SEQ ID NO: 779946 - DNA, 19 bp, Mus musculus
  siRNA target sequence for 4931433A13 (NM_172864.1,1578-1596).
ggccataggaaagtaatca

SEQ ID NO: 779947 - DNA, 19 bp, Mus musculus
  siRNA target sequence for 4931433A13 (NM_172864.1,1586-1604).
gaaagtaatcacggatata

SEQ ID NO: 779948 - DNA, 19 bp, Mus musculus
  siRNA target sequence for 4931433A13 (NM_172864.1,1614-1632).
cccgactcattcgagatta

SEQ ID NO: 779949 - DNA, 19 bp, Mus musculus
  siRNA target sequence for 4931433A13 (NM_172864.1,1615-1633).
ccgactcattcgagattaa

SEQ ID NO: 779950 - DNA, 19 bp, Mus musculus
  siRNA target sequence for 4931433A13 (NM_172864.1,1617-1635).
gactcattcgagattaaca

SEQ ID NO: 779951 - DNA, 19 bp, Mus musculus
  siRNA target sequence for 4931433A13 (NM_172864.1,1636-1654).
ggatgggatccgtctttga

SEQ ID NO: 779952 - DNA, 19 bp, Mus musculus
  siRNA target sequence for 4931433A13 (NM_172864.1,1653-1671).
gagaaccgaagtggaataa

SEQ ID NO: 779953 - DNA, 19 bp, Mus musculus
  siRNA target sequence for 4931433A13 (NM_172864.1,1655-1673).
gaaccgaagtggaataaat

SEQ ID NO: 779954 - DNA, 19 bp, Mus musculus
  siRNA target sequence for 4931433A13 (NM_172864.1,1658-1676).
ccgaagtggaataaattgt

SEQ ID NO: 779955 - DNA, 19 bp, Mus musculus
  siRNA target sequence for 4931433A13 (NM_172864.1,1695-1713).
gcagactgcacgatttgtt

SEQ ID NO: 779956 - DNA, 19 bp, Mus musculus
  siRNA target sequence for 4931433A13 (NM_172864.1,1698-1716).
gactgcacgatttgttttt

SEQ ID NO: 779957 - DNA, 19 bp, Mus musculus
  siRNA target sequence for 4931433A13 (NM_172864.1,1835-1853).
cattgacattccctttgat

SEQ ID NO: 779958 - DNA, 19 bp, Mus musculus
  siRNA target sequence for 4931433A13 (NM_172864.1,1851-1869).
gatgtgccctcgactttct

SEQ ID NO: 779959 - DNA, 19 bp, Mus musculus
  siRNA target sequence for 4931433A13 (NM_172864.1,1864-1882).
ctttcttgcacctagatct

SEQ ID NO: 779960 - DNA, 19 bp, Mus musculus
  siRNA target sequence for 4931433A13 (NM_172864.1,1889-1907).
gaaacccctgtctagatta

SEQ ID NO: 779961 - DNA, 19 bp, Mus musculus
  siRNA target sequence for 4931433A13 (NM_172864.1,1961-1979).
gggcgaagacccttttctt

SEQ ID NO: 779962 - DNA, 19 bp, Mus musculus
  siRNA target sequence for 4931433A13 (NM_172864.1,1962-1980).
ggcgaagacccttttcttt

SEQ ID NO: 779963 - DNA, 19 bp, Mus musculus
  siRNA target sequence for 4931433A13 (NM_172864.1,1992-2010).
ggtacgtcgtccattcata

SEQ ID NO: 779964 - DNA, 19 bp, Mus musculus
  siRNA target sequence for 4931433A13 (NM_172864.1,1993-2011).
gtacgtcgtccattcatat

SEQ ID NO: 779965 - DNA, 19 bp, Mus musculus
  siRNA target sequence for 4931433A13 (NM_172864.1,1996-2014).
cgtcgtccattcatattat

SEQ ID NO: 779966 - DNA, 19 bp, Mus musculus
  siRNA target sequence for 4931433A13 (NM_172864.1,2048-2066).
ggtgaagacgtcagaaatt

SEQ ID NO: 779967 - DNA, 19 bp, Mus musculus
  siRNA target sequence for 4931433A13 (NM_172864.1,2089-2107).
cagggatagccaatatcct

SEQ ID NO: 779968 - DNA, 19 bp, Mus musculus
  siRNA target sequence for 4931433A13 (NM_172864.1,2154-2172).
gaaggtgaggtgatataca

SEQ ID NO: 779969 - DNA, 19 bp, Mus musculus
  siRNA target sequence for 4931433A13 (NM_172864.1,2197-2215).
ctgacaccggacgacttat

SEQ ID NO: 779970 - DNA, 19 bp, Mus musculus
  siRNA target sequence for 4931433A13 (NM_172864.1,2271-2289).
cagaggtcgcctttcttca

SEQ ID NO: 779971 - DNA, 19 bp, Mus musculus
  siRNA target sequence for 4931433A13 (NM_172864.1,2273-2291).
gaggtcgcctttcttcaat

SEQ ID NO: 779972 - DNA, 19 bp, Mus musculus
  siRNA target sequence for 4931433A13 (NM_172864.1,2275-2293).
ggtcgcctttcttcaatga

SEQ ID NO: 779973 - DNA, 19 bp, Mus musculus
  siRNA target sequence for 4931433A13 (NM_172864.1,2303-2321).
cactgttgggggatggaat

SEQ ID NO: 779974 - DNA, 19 bp, Mus musculus
  siRNA target sequence for 4931433A13 (NM_172864.1,2371-2389).
gctgcggaccgaaaaggta

SEQ ID NO: 779975 - DNA, 19 bp, Mus musculus
  siRNA target sequence for 4931433A13 (NM_172864.1,2437-2455).
gccgagaggacggaaatgt

SEQ ID NO: 779976 - DNA, 19 bp, Mus musculus
  siRNA target sequence for 4931433A13 (NM_172864.1,2445-2463).
gacggaaatgtcgatatct

SEQ ID NO: 779977 - DNA, 19 bp, Mus musculus
  siRNA target sequence for 4931433A13 (NM_172864.1,2493-2511).
gcccagtcccagaatatct

SEQ ID NO: 779978 - DNA, 19 bp, Mus musculus
  siRNA target sequence for 4931433A13 (NM_172864.1,2518-2536).
ccatgatcacctacatcaa

SEQ ID NO: 779979 - DNA, 19 bp, Mus musculus
  siRNA target sequence for 4931433A13 (NM_172864.1,2607-2625).
gaaatcccttggaccttaa

SEQ ID NO: 779980 - DNA, 19 bp, Mus musculus
  siRNA target sequence for 4931433A13 (NM_172864.1,2626-2644).
gtcacccttccttgaatga

SEQ ID NO: 779981 - DNA, 19 bp, Mus musculus
  siRNA target sequence for 4931433A13 (NM_172864.1,2646-2664).
gtatcgagtgtgaactact

SEQ ID NO: 779982 - DNA, 19 bp, Mus musculus
  siRNA target sequence for 4931433A13 (NM_172864.1,2650-2668).
cgagtgtgaactactactt

SEQ ID NO: 779983 - DNA, 19 bp, Mus musculus
  siRNA target sequence for 4931433A13 (NM_172864.1,2696-2714).
cgtccagcagcgcaaagaa

SEQ ID NO: 779984 - DNA, 19 bp, Mus musculus
  siRNA target sequence for 4931433A13 (NM_172864.1,2697-2715).
gtccagcagcgcaaagaaa

SEQ ID NO: 779985 - DNA, 19 bp, Mus musculus
  siRNA target sequence for 4931433A13 (NM_172864.1,2717-2735).
ccgtgagcaagaaaagata

SEQ ID NO: 779986 - DNA, 19 bp, Mus musculus
  siRNA target sequence for 4931433A13 (NM_172864.1,2721-2739).
gagcaagaaaagatagata

SEQ ID NO: 779987 - DNA, 19 bp, Mus musculus
  siRNA target sequence for 4931433A13 (NM_172864.1,2766-2784).
gcgaaaatctatcaaaaga

SEQ ID NO: 779988 - DNA, 19 bp, Mus musculus
  siRNA target sequence for 4931433A13 (NM_172864.1,2862-2880).
ctcggcctcagcaaagtct

SEQ ID NO: 779989 - DNA, 19 bp, Mus musculus
  siRNA target sequence for 4932703L02Rik (NM_172865.1,174-192).
ctttggacctccttttgga

SEQ ID NO: 779990 - DNA, 19 bp, Mus musculus
  siRNA target sequence for 4932703L02Rik (NM_172865.1,206-224).
cagaacttcatccactaaa

SEQ ID NO: 779991 - DNA, 19 bp, Mus musculus
  siRNA target sequence for 4932703L02Rik (NM_172865.1,253-271).
caaaggagtgatagaatca

SEQ ID NO: 779992 - DNA, 19 bp, Mus musculus
  siRNA target sequence for 4932703L02Rik (NM_172865.1,257-275).
ggagtgatagaatcaacat

SEQ ID NO: 779993 - DNA, 19 bp, Mus musculus
  siRNA target sequence for 4932703L02Rik (NM_172865.1,352-370).
gaactacctcctctgaatt

SEQ ID NO: 779994 - DNA, 19 bp, Mus musculus
  siRNA target sequence for 4932703L02Rik (NM_172865.1,379-397).
catgcattttattacagtt

SEQ ID NO: 779995 - DNA, 19 bp, Mus musculus
  siRNA target sequence for 4932703L02Rik (NM_172865.1,466-484).
cctcggatagccaagaact

SEQ ID NO: 779996 - DNA, 19 bp, Mus musculus
  siRNA target sequence for 4932703L02Rik (NM_172865.1,467-485).
ctcggatagccaagaacta

SEQ ID NO: 779997 - DNA, 19 bp, Mus musculus
  siRNA target sequence for 4932703L02Rik (NM_172865.1,516-534).
cattggctccagtttttat

SEQ ID NO: 779998 - DNA, 19 bp, Mus musculus
  siRNA target sequence for 4932703L02Rik (NM_172865.1,535-553).
cctgagttaggaagttaca

SEQ ID NO: 779999 - DNA, 19 bp, Mus musculus
  siRNA target sequence for 4932703L02Rik (NM_172865.1,564-582).
cccttctgtcatagaaact

SEQ ID NO: 780000 - DNA, 19 bp, Mus musculus
  siRNA target sequence for 4932703L02Rik (NM_172865.1,657-675).
caatggcgaagctactgat

SEQ ID NO: 780001 - DNA, 19 bp, Mus musculus
  siRNA target sequence for 4932703L02Rik (NM_172865.1,662-680).
gcgaagctactgatcactt

SEQ ID NO: 780002 - DNA, 19 bp, Mus musculus
  siRNA target sequence for 4932703L02Rik (NM_172865.1,696-714).
ggataaagctcataaatat

SEQ ID NO: 780003 - DNA, 19 bp, Mus musculus
  siRNA target sequence for 4932703L02Rik (NM_172865.1,703-721).
gctcataaatataatctga

SEQ ID NO: 780004 - DNA, 19 bp, Mus musculus
  siRNA target sequence for 4932703L02Rik (NM_172865.1,760-778).
gatcaaaacatgcatcaaa

SEQ ID NO: 780005 - DNA, 19 bp, Mus musculus
  siRNA target sequence for 4932703L02Rik (NM_172865.1,763-781).
caaaacatgcatcaaaata

SEQ ID NO: 780006 - DNA, 19 bp, Mus musculus
  siRNA target sequence for 4932703L02Rik (NM_172865.1,783-801).
caagtatattatagacaaa

SEQ ID NO: 780007 - DNA, 19 bp, Mus musculus
  siRNA target sequence for 4932703L02Rik (NM_172865.1,806-824).
gaaaccatccagcctttta

SEQ ID NO: 780008 - DNA, 19 bp, Mus musculus
  siRNA target sequence for 4932703L02Rik (NM_172865.1,855-873).
gcccatgttttatgtctat

SEQ ID NO: 780009 - DNA, 19 bp, Mus musculus
  siRNA target sequence for 4932703L02Rik (NM_172865.1,896-914).
caatatgggccaatctgtt

SEQ ID NO: 780010 - DNA, 19 bp, Mus musculus
  siRNA target sequence for 4932703L02Rik (NM_172865.1,963-981).
gtttattgcacttctagta

SEQ ID NO: 780011 - DNA, 19 bp, Mus musculus
  siRNA target sequence for 4932703L02Rik (NM_172865.1,976-994).
ctagtagaagaaaagcata

SEQ ID NO: 780012 - DNA, 19 bp, Mus musculus
  siRNA target sequence for 4932703L02Rik (NM_172865.1,1011-1029).
gagtggttttgatggtatt

SEQ ID NO: 780013 - DNA, 19 bp, Mus musculus
  siRNA target sequence for 4932703L02Rik (NM_172865.1,1013-1031).
gtggttttgatggtattta

SEQ ID NO: 780014 - DNA, 19 bp, Mus musculus
  siRNA target sequence for 4932703L02Rik (NM_172865.1,1044-1062).
cacaaatggctttacatat

SEQ ID NO: 780015 - DNA, 19 bp, Mus musculus
  siRNA target sequence for 4932703L02Rik (NM_172865.1,1070-1088).
ctcatcagaattggaataa

SEQ ID NO: 780016 - DNA, 19 bp, Mus musculus
  siRNA target sequence for 4932703L02Rik (NM_172865.1,1083-1101).
gaataacctgaaatccttt

SEQ ID NO: 780017 - DNA, 19 bp, Mus musculus
  siRNA target sequence for 4932703L02Rik (NM_172865.1,1138-1156).
ggcccaggatacatagata

SEQ ID NO: 780018 - DNA, 19 bp, Mus musculus
  siRNA target sequence for 4932703L02Rik (NM_172865.1,1185-1203).
cacccggaacagagtcaat

SEQ ID NO: 780019 - DNA, 19 bp, Mus musculus
  siRNA target sequence for 4932703L02Rik (NM_172865.1,1239-1257).
ccagacccaccccagttta

SEQ ID NO: 780020 - DNA, 19 bp, Mus musculus
  siRNA target sequence for 4932703L02Rik (NM_172865.1,1240-1258).
cagacccaccccagtttaa

SEQ ID NO: 780021 - DNA, 19 bp, Mus musculus
  siRNA target sequence for 4932703L02Rik (NM_172865.1,1246-1264).
caccccagtttaatttcca

SEQ ID NO: 780022 - DNA, 19 bp, Mus musculus
  siRNA target sequence for 4932703L02Rik (NM_172865.1,1322-1340).
gaactgctaacacgatata

SEQ ID NO: 780023 - DNA, 19 bp, Mus musculus
  siRNA target sequence for 4932703L02Rik (NM_172865.1,1325-1343).
ctgctaacacgatatacct

SEQ ID NO: 780024 - DNA, 19 bp, Mus musculus
  siRNA target sequence for 4932703L02Rik (NM_172865.1,1354-1372).
cctcataagccaagtcttt

SEQ ID NO: 780025 - DNA, 19 bp, Mus musculus
  siRNA target sequence for 4932703L02Rik (NM_172865.1,1355-1373).
ctcataagccaagtcttta

SEQ ID NO: 780026 - DNA, 19 bp, Mus musculus
  siRNA target sequence for 4932703L02Rik (NM_172865.1,1362-1380).
gccaagtctttatctagaa

SEQ ID NO: 780027 - DNA, 19 bp, Mus musculus
  siRNA target sequence for 4932703L02Rik (NM_172865.1,1385-1403).
ctcgaaagtggtctgaaaa

SEQ ID NO: 780028 - DNA, 19 bp, Mus musculus
  siRNA target sequence for 4932703L02Rik (NM_172865.1,1387-1405).
cgaaagtggtctgaaaaat

SEQ ID NO: 780029 - DNA, 19 bp, Mus musculus
  siRNA target sequence for 4932703L02Rik (NM_172865.1,1414-1432).
gaaagaatgacgtatgcat

SEQ ID NO: 780030 - DNA, 19 bp, Mus musculus
  siRNA target sequence for 4932703L02Rik (NM_172865.1,1424-1442).
cgtatgcattggatcaaca

SEQ ID NO: 780031 - DNA, 19 bp, Mus musculus
  siRNA target sequence for 1110029E03Rik (NM_172866.1,329-347).
gaggggccagtgtatcctt

SEQ ID NO: 780032 - DNA, 19 bp, Mus musculus
  siRNA target sequence for 1110029E03Rik (NM_172866.1,335-353).
ccagtgtatcctttctact

SEQ ID NO: 780033 - DNA, 19 bp, Mus musculus
  siRNA target sequence for 1110029E03Rik (NM_172866.1,349-367).
ctactccacccaaaattct

SEQ ID NO: 780034 - DNA, 19 bp, Mus musculus
  siRNA target sequence for 1110029E03Rik (NM_172866.1,352-370).
ctccacccaaaattctgtt

SEQ ID NO: 780035 - DNA, 19 bp, Mus musculus
  siRNA target sequence for 1110029E03Rik (NM_172866.1,389-407).
ccctggagagtccaaatca

SEQ ID NO: 780036 - DNA, 19 bp, Mus musculus
  siRNA target sequence for 1110029E03Rik (NM_172866.1,390-408).
cctggagagtccaaatcat

SEQ ID NO: 780037 - DNA, 19 bp, Mus musculus
  siRNA target sequence for 1110029E03Rik (NM_172866.1,396-414).
gagtccaaatcatattcct

SEQ ID NO: 780038 - DNA, 19 bp, Mus musculus
  siRNA target sequence for 1110029E03Rik (NM_172866.1,453-471).
cggggtcagtcagtcaaat

SEQ ID NO: 780039 - DNA, 19 bp, Mus musculus
  siRNA target sequence for 1110029E03Rik (NM_172866.1,454-472).
ggggtcagtcagtcaaata

SEQ ID NO: 780040 - DNA, 19 bp, Mus musculus
  siRNA target sequence for 1110029E03Rik (NM_172866.1,465-483).
gtcaaatatgtctacaaat

SEQ ID NO: 780041 - DNA, 19 bp, Mus musculus
  siRNA target sequence for 1110029E03Rik (NM_172866.1,548-566).
cgtgctgactggtcttcaa

SEQ ID NO: 780042 - DNA, 19 bp, Mus musculus
  siRNA target sequence for 1110029E03Rik (NM_172866.1,598-616).
cgccatccagtccattctt

SEQ ID NO: 780043 - DNA, 19 bp, Mus musculus
  siRNA target sequence for 1110029E03Rik (NM_172866.1,599-617).
gccatccagtccattctta

SEQ ID NO: 780044 - DNA, 19 bp, Mus musculus
  siRNA target sequence for 1110029E03Rik (NM_172866.1,601-619).
catccagtccattcttaga

SEQ ID NO: 780045 - DNA, 19 bp, Mus musculus
  siRNA target sequence for 1110029E03Rik (NM_172866.1,698-716).
cagcctccatctgtacaat

SEQ ID NO: 780046 - DNA, 19 bp, Mus musculus
  siRNA target sequence for 1110029E03Rik (NM_172866.1,702-720).
ctccatctgtacaatatca

SEQ ID NO: 780047 - DNA, 19 bp, Mus musculus
  siRNA target sequence for 1110029E03Rik (NM_172866.1,741-759).
gggacgttcggtatcttca

SEQ ID NO: 780048 - DNA, 19 bp, Mus musculus
  siRNA target sequence for 1110029E03Rik (NM_172866.1,742-760).
ggacgttcggtatcttcaa

SEQ ID NO: 780049 - DNA, 19 bp, Mus musculus
  siRNA target sequence for 1110029E03Rik (NM_172866.1,743-761).
gacgttcggtatcttcaaa

SEQ ID NO: 780050 - DNA, 19 bp, Mus musculus
  siRNA target sequence for 1110029E03Rik (NM_172866.1,746-764).
gttcggtatcttcaaatct

SEQ ID NO: 780051 - DNA, 19 bp, Mus musculus
  siRNA target sequence for 1110029E03Rik (NM_172866.1,783-801).
gacgtggtgggaaccttaa

SEQ ID NO: 780052 - DNA, 19 bp, Mus musculus
  siRNA target sequence for 1110029E03Rik (NM_172866.1,788-806).
ggtgggaaccttaaattta

SEQ ID NO: 780053 - DNA, 19 bp, Mus musculus
  siRNA target sequence for 1110029E03Rik (NM_172866.1,862-880).
gggtacagcccgaatacca

SEQ ID NO: 780054 - DNA, 19 bp, Mus musculus
  siRNA target sequence for 1110029E03Rik (NM_172866.1,939-957).
caggagtcctgcctacata

SEQ ID NO: 780055 - DNA, 19 bp, Mus musculus
  siRNA target sequence for 1110029E03Rik (NM_172866.1,1027-1045).
ccttgaagtggcgattaca

SEQ ID NO: 780056 - DNA, 19 bp, Mus musculus
  siRNA target sequence for 1110029E03Rik (NM_172866.1,1064-1082).
ccgagaaccaggattggta

SEQ ID NO: 780057 - DNA, 19 bp, Mus musculus
  siRNA target sequence for 1110029E03Rik (NM_172866.1,1190-1208).
ccccaccctggtctcatat

SEQ ID NO: 780058 - DNA, 19 bp, Mus musculus
  siRNA target sequence for 1110029E03Rik (NM_172866.1,1193-1211).
caccctggtctcatatgct

SEQ ID NO: 780059 - DNA, 19 bp, Mus musculus
  siRNA target sequence for 1110029E03Rik (NM_172866.1,1220-1238).
ccctagcaccagcagtata

SEQ ID NO: 780060 - DNA, 19 bp, Mus musculus
  siRNA target sequence for Zfp462 (NM_172867.1,364-382).
gttcttcactgcgaattct

SEQ ID NO: 780061 - DNA, 19 bp, Mus musculus
  siRNA target sequence for Zfp462 (NM_172867.1,440-458).
gtgggaagaagcttttcaa

SEQ ID NO: 780062 - DNA, 19 bp, Mus musculus
  siRNA target sequence for Zfp462 (NM_172867.1,473-491).
ccttttacaccggctttaa

SEQ ID NO: 780063 - DNA, 19 bp, Mus musculus
  siRNA target sequence for Zfp462 (NM_172867.1,633-651).
gcgagttgtccccattgaa

SEQ ID NO: 780064 - DNA, 19 bp, Mus musculus
  siRNA target sequence for Zfp462 (NM_172867.1,656-674).
gccgttccaaactgtcaaa

SEQ ID NO: 780065 - DNA, 19 bp, Mus musculus
  siRNA target sequence for Zfp462 (NM_172867.1,657-675).
ccgttccaaactgtcaaaa

SEQ ID NO: 780066 - DNA, 19 bp, Mus musculus
  siRNA target sequence for Zfp462 (NM_172867.1,658-676).
cgttccaaactgtcaaaat

SEQ ID NO: 780067 - DNA, 19 bp, Mus musculus
  siRNA target sequence for Zfp462 (NM_172867.1,688-706).
gtagttttccgctgtgata

SEQ ID NO: 780068 - DNA, 19 bp, Mus musculus
  siRNA target sequence for Zfp462 (NM_172867.1,691-709).
gttttccgctgtgataagt

SEQ ID NO: 780069 - DNA, 19 bp, Mus musculus
  siRNA target sequence for Zfp462 (NM_172867.1,735-753).
gagtctccagcaacacata

SEQ ID NO: 780070 - DNA, 19 bp, Mus musculus
  siRNA target sequence for Zfp462 (NM_172867.1,849-867).
caaggtgagccggaacttt

SEQ ID NO: 780071 - DNA, 19 bp, Mus musculus
  siRNA target sequence for Zfp462 (NM_172867.1,1029-1047).
gaagcgatttccatgtgaa

SEQ ID NO: 780072 - DNA, 19 bp, Mus musculus
  siRNA target sequence for Zfp462 (NM_172867.1,1105-1123).
ggcatgtcattgcatgata

SEQ ID NO: 780073 - DNA, 19 bp, Mus musculus
  siRNA target sequence for Zfp462 (NM_172867.1,1134-1152).
gagcaggaacgaaatccat

SEQ ID NO: 780074 - DNA, 19 bp, Mus musculus
  siRNA target sequence for Zfp462 (NM_172867.1,1235-1253).
ccttaaagagcgaaacagt

SEQ ID NO: 780075 - DNA, 19 bp, Mus musculus
  siRNA target sequence for Zfp462 (NM_172867.1,1236-1254).
cttaaagagcgaaacagta

SEQ ID NO: 780076 - DNA, 19 bp, Mus musculus
  siRNA target sequence for Zfp462 (NM_172867.1,1264-1282).
gtagtggctgccgacaaat

SEQ ID NO: 780077 - DNA, 19 bp, Mus musculus
  siRNA target sequence for Palm2 (NM_172868.1,322-340).
gcgcaggcagtctgaagaa

SEQ ID NO: 780078 - DNA, 19 bp, Mus musculus
  siRNA target sequence for Palm2 (NM_172868.1,362-380).
cttgaagataacattcaga

SEQ ID NO: 780079 - DNA, 19 bp, Mus musculus
  siRNA target sequence for Palm2 (NM_172868.1,429-447).
ccgccaaagagcagatcat

SEQ ID NO: 780080 - DNA, 19 bp, Mus musculus
  siRNA target sequence for Palm2 (NM_172868.1,505-523).
cactgctgatggagctata

SEQ ID NO: 780081 - DNA, 19 bp, Mus musculus
  siRNA target sequence for Palm2 (NM_172868.1,507-525).
ctgctgatggagctatata

SEQ ID NO: 780082 - DNA, 19 bp, Mus musculus
  siRNA target sequence for Palm2 (NM_172868.1,518-536).
gctatatacgccatggaaa

SEQ ID NO: 780083 - DNA, 19 bp, Mus musculus
  siRNA target sequence for Palm2 (NM_172868.1,618-636).
gaggagtcaaagtctatga

SEQ ID NO: 780084 - DNA, 19 bp, Mus musculus
  siRNA target sequence for Palm2 (NM_172868.1,621-639).
gagtcaaagtctatgatga

SEQ ID NO: 780085 - DNA, 19 bp, Mus musculus
  siRNA target sequence for Palm2 (NM_172868.1,631-649).
ctatgatgacggtaccaaa

SEQ ID NO: 780086 - DNA, 19 bp, Mus musculus
  siRNA target sequence for Palm2 (NM_172868.1,640-658).
cggtaccaaagtagtgtat

SEQ ID NO: 780087 - DNA, 19 bp, Mus musculus
  siRNA target sequence for Palm2 (NM_172868.1,642-660).
gtaccaaagtagtgtatga

SEQ ID NO: 780088 - DNA, 19 bp, Mus musculus
  siRNA target sequence for Palm2 (NM_172868.1,671-689).
ggaggcaccgtggtagaaa

SEQ ID NO: 780089 - DNA, 19 bp, Mus musculus
  siRNA target sequence for Palm2 (NM_172868.1,719-737).
gtggaagagttaattcaga

SEQ ID NO: 780090 - DNA, 19 bp, Mus musculus
  siRNA target sequence for Palm2 (NM_172868.1,743-761).
ggacagtcgagcttcagaa

SEQ ID NO: 780091 - DNA, 19 bp, Mus musculus
  siRNA target sequence for Palm2 (NM_172868.1,853-871).
gcaaaagtccaggaaagat

SEQ ID NO: 780092 - DNA, 19 bp, Mus musculus
  siRNA target sequence for Palm2 (NM_172868.1,1023-1041).
ccatcaaggcggaattagt

SEQ ID NO: 780093 - DNA, 19 bp, Mus musculus
  siRNA target sequence for Palm2 (NM_172868.1,1032-1050).
cggaattagtcctgattga

SEQ ID NO: 780094 - DNA, 19 bp, Mus musculus
  siRNA target sequence for Palm2 (NM_172868.1,1033-1051).
ggaattagtcctgattgat

SEQ ID NO: 780095 - DNA, 19 bp, Mus musculus
  siRNA target sequence for Palm2 (NM_172868.1,1233-1251).
gtcaatgctgtgttgtcat

SEQ ID NO: 780096 - DNA, 19 bp, Mus musculus
  siRNA target sequence for C130031J23 (NM_172872.2,272-290).
gtggagaccccgtatggtt

SEQ ID NO: 780097 - DNA, 19 bp, Mus musculus
  siRNA target sequence for C130031J23 (NM_172872.2,274-292).
ggagaccccgtatggtttt

SEQ ID NO: 780098 - DNA, 19 bp, Mus musculus
  siRNA target sequence for C130031J23 (NM_172872.2,279-297).
ccccgtatggttttcatct

SEQ ID NO: 780099 - DNA, 19 bp, Mus musculus
  siRNA target sequence for C130031J23 (NM_172872.2,374-392).
gccaagcaggctaagttta

SEQ ID NO: 780100 - DNA, 19 bp, Mus musculus
  siRNA target sequence for C130031J23 (NM_172872.2,376-394).
caagcaggctaagtttagt

SEQ ID NO: 780101 - DNA, 19 bp, Mus musculus
  siRNA target sequence for C130031J23 (NM_172872.2,379-397).
gcaggctaagtttagtact

SEQ ID NO: 780102 - DNA, 19 bp, Mus musculus
  siRNA target sequence for C130031J23 (NM_172872.2,393-411).
gtactctgccccgaaactt

SEQ ID NO: 780103 - DNA, 19 bp, Mus musculus
  siRNA target sequence for C130031J23 (NM_172872.2,446-464).
gttcctccccagcaaaact

SEQ ID NO: 780104 - DNA, 19 bp, Mus musculus
  siRNA target sequence for C130031J23 (NM_172872.2,846-864).
gggagttgggggaactaga

SEQ ID NO: 780105 - DNA, 19 bp, Mus musculus
  siRNA target sequence for C130031J23 (NM_172872.2,969-987).
gtgtccccatggatctaga

SEQ ID NO: 780106 - DNA, 19 bp, Mus musculus
  siRNA target sequence for C130031J23 (NM_172872.2,1366-1384).
gtgcactgtagcccattta

SEQ ID NO: 780107 - DNA, 19 bp, Mus musculus
  siRNA target sequence for C130031J23 (NM_172872.2,1368-1386).
gcactgtagcccatttaga

SEQ ID NO: 780108 - DNA, 19 bp, Mus musculus
  siRNA target sequence for C130031J23 (NM_172872.2,1377-1395).
cccatttagaagaaaagct

SEQ ID NO: 780109 - DNA, 19 bp, Mus musculus
  siRNA target sequence for C130031J23 (NM_172872.2,1472-1490).
ccccgagagtcccatgata

SEQ ID NO: 780110 - DNA, 19 bp, Mus musculus
  siRNA target sequence for C130031J23 (NM_172872.2,1473-1491).
cccgagagtcccatgataa

SEQ ID NO: 780111 - DNA, 19 bp, Mus musculus
  siRNA target sequence for C130031J23 (NM_172872.2,1475-1493).
cgagagtcccatgataaga

SEQ ID NO: 780112 - DNA, 19 bp, Mus musculus
  siRNA target sequence for C130031J23 (NM_172872.2,1561-1579).
cttcccatgggtccaaaat

SEQ ID NO: 780113 - DNA, 19 bp, Mus musculus
  siRNA target sequence for C130031J23 (NM_172872.2,1884-1902).
ccacaatcgggcagtatgt

SEQ ID NO: 780114 - DNA, 19 bp, Mus musculus
  siRNA target sequence for C130031J23 (NM_172872.2,1887-1905).
caatcgggcagtatgtgaa

SEQ ID NO: 780115 - DNA, 19 bp, Mus musculus
  siRNA target sequence for C130031J23 (NM_172872.2,1894-1912).
gcagtatgtgaagaagatt

SEQ ID NO: 780116 - DNA, 19 bp, Mus musculus
  siRNA target sequence for C130031J23 (NM_172872.2,2025-2043).
gttcccttaacctgttact

SEQ ID NO: 780117 - DNA, 19 bp, Mus musculus
  siRNA target sequence for C130031J23 (NM_172872.2,2147-2165).
ccgtcgaccagccttaaat

SEQ ID NO: 780118 - DNA, 19 bp, Mus musculus
  siRNA target sequence for C130031J23 (NM_172872.2,2151-2169).
cgaccagccttaaatccat

SEQ ID NO: 780119 - DNA, 19 bp, Mus musculus
  siRNA target sequence for C130031J23 (NM_172872.2,2201-2219).
ggaggtaatgggaccaaaa

SEQ ID NO: 780120 - DNA, 19 bp, Mus musculus
  siRNA target sequence for C130031J23 (NM_172872.2,2202-2220).
gaggtaatgggaccaaaaa

SEQ ID NO: 780121 - DNA, 19 bp, Mus musculus
  siRNA target sequence for C130031J23 (NM_172872.2,2204-2222).
ggtaatgggaccaaaaaga

SEQ ID NO: 780122 - DNA, 19 bp, Mus musculus
  siRNA target sequence for C130031J23 (NM_172872.2,2316-2334).
gtgagaccgagaagaaaca

SEQ ID NO: 780123 - DNA, 19 bp, Mus musculus
  siRNA target sequence for C130031J23 (NM_172872.2,2477-2495).
ccctcagaggaatttctta

SEQ ID NO: 780124 - DNA, 19 bp, Mus musculus
  siRNA target sequence for C130031J23 (NM_172872.2,2554-2572).
cctgaggcaaagcttgaat

SEQ ID NO: 780125 - DNA, 19 bp, Mus musculus
  siRNA target sequence for C130031J23 (NM_172872.2,2559-2577).
ggcaaagcttgaataccat

SEQ ID NO: 780126 - DNA, 19 bp, Mus musculus
  siRNA target sequence for C130031J23 (NM_172872.2,2656-2674).
gcctcactctccatatctt

SEQ ID NO: 780127 - DNA, 19 bp, Mus musculus
  siRNA target sequence for C130031J23 (NM_172872.2,2893-2911).
ggggaatgtgaacatacaa

SEQ ID NO: 780128 - DNA, 19 bp, Mus musculus
  siRNA target sequence for C130031J23 (NM_172872.2,3135-3153).
ctttgtccctcgttctgaa

SEQ ID NO: 780129 - DNA, 19 bp, Mus musculus
  siRNA target sequence for D030010E02 (NM_172873.1,1292-1310).
ccctgagtaccccaacaat

SEQ ID NO: 780130 - DNA, 19 bp, Mus musculus
  siRNA target sequence for D030010E02 (NM_172873.1,1293-1311).
cctgagtaccccaacaatt

SEQ ID NO: 780131 - DNA, 19 bp, Mus musculus
  siRNA target sequence for D030010E02 (NM_172873.1,1294-1312).
ctgagtaccccaacaatta

SEQ ID NO: 780132 - DNA, 19 bp, Mus musculus
  siRNA target sequence for D030010E02 (NM_172873.1,1400-1418).
cagcgacgaatgcatgtat

SEQ ID NO: 780133 - DNA, 19 bp, Mus musculus
  siRNA target sequence for D030010E02 (NM_172873.1,1402-1420).
gcgacgaatgcatgtatga

SEQ ID NO: 780134 - DNA, 19 bp, Mus musculus
  siRNA target sequence for D030010E02 (NM_172873.1,1404-1422).
gacgaatgcatgtatgact

SEQ ID NO: 780135 - DNA, 19 bp, Mus musculus
  siRNA target sequence for D030010E02 (NM_172873.1,1515-1533).
ctgcaggtggtcttcaagt

SEQ ID NO: 780136 - DNA, 19 bp, Mus musculus
  siRNA target sequence for D030010E02 (NM_172873.1,1605-1623).
gctgtgcgtggaaacttct

SEQ ID NO: 780137 - DNA, 19 bp, Mus musculus
  siRNA target sequence for D030010E02 (NM_172873.1,1641-1659).
ggcgcctaccccaacaata

SEQ ID NO: 780138 - DNA, 19 bp, Mus musculus
  siRNA target sequence for D030010E02 (NM_172873.1,2059-2077).
ccagtacggccctcattta

SEQ ID NO: 780139 - DNA, 19 bp, Mus musculus
  siRNA target sequence for D030010E02 (NM_172873.1,2060-2078).
cagtacggccctcatttat

SEQ ID NO: 780140 - DNA, 19 bp, Mus musculus
  siRNA target sequence for D030010E02 (NM_172873.1,2062-2080).
gtacggccctcatttattt

SEQ ID NO: 780141 - DNA, 19 bp, Mus musculus
  siRNA target sequence for D030010E02 (NM_172873.1,2065-2083).
cggccctcatttatttcca

SEQ ID NO: 780142 - DNA, 19 bp, Mus musculus
  siRNA target sequence for Podn (NM_172874.2,514-532).
gagccccgaggagaatgaa

SEQ ID NO: 780143 - DNA, 19 bp, Mus musculus
  siRNA target sequence for Podn (NM_172874.2,516-534).
gccccgaggagaatgaatt

SEQ ID NO: 780144 - DNA, 19 bp, Mus musculus
  siRNA target sequence for Podn (NM_172874.2,517-535).
ccccgaggagaatgaattt

SEQ ID NO: 780145 - DNA, 19 bp, Mus musculus
  siRNA target sequence for Podn (NM_172874.2,604-622).
cgactgtccccgagattgt

SEQ ID NO: 780146 - DNA, 19 bp, Mus musculus
  siRNA target sequence for Podn (NM_172874.2,836-854).
catcttactagcctcaatt

SEQ ID NO: 780147 - DNA, 19 bp, Mus musculus
  siRNA target sequence for Podn (NM_172874.2,933-951).
ccaattatctcactaagat

SEQ ID NO: 780148 - DNA, 19 bp, Mus musculus
  siRNA target sequence for Podn (NM_172874.2,1026-1044).
ggctgccggaccacatgtt

SEQ ID NO: 780149 - DNA, 19 bp, Mus musculus
  siRNA target sequence for Podn (NM_172874.2,1028-1046).
ctgccggaccacatgttca

SEQ ID NO: 780150 - DNA, 19 bp, Mus musculus
  siRNA target sequence for Podn (NM_172874.2,1030-1048).
gccggaccacatgttcaat

SEQ ID NO: 780151 - DNA, 19 bp, Mus musculus
  siRNA target sequence for Podn (NM_172874.2,1056-1074).
gcaacgtcgagatcctaat

SEQ ID NO: 780152 - DNA, 19 bp, Mus musculus
  siRNA target sequence for Podn (NM_172874.2,1191-1209).
gcaacctacgggaactcta

SEQ ID NO: 780153 - DNA, 19 bp, Mus musculus
  siRNA target sequence for Podn (NM_172874.2,1487-1505).
ctccacacagtgcatctat

SEQ ID NO: 780154 - DNA, 19 bp, Mus musculus
  siRNA target sequence for Podn (NM_172874.2,1490-1508).
cacacagtgcatctataca

SEQ ID NO: 780155 - DNA, 19 bp, Mus musculus
  siRNA target sequence for Podn (NM_172874.2,1494-1512).
cagtgcatctatacaacaa

SEQ ID NO: 780156 - DNA, 19 bp, Mus musculus
  siRNA target sequence for Podn (NM_172874.2,1548-1566).
gagtgcgcaccctcatgat

SEQ ID NO: 780157 - DNA, 19 bp, Mus musculus
  siRNA target sequence for Podn (NM_172874.2,1722-1740).
gcaaccgtctgcaaacact

SEQ ID NO: 780158 - DNA, 19 bp, Mus musculus
  siRNA target sequence for Podn (NM_172874.2,1743-1761).
ctccaggcctgccgaaaaa

SEQ ID NO: 780159 - DNA, 19 bp, Mus musculus
  siRNA target sequence for Podn (NM_172874.2,1746-1764).
caggcctgccgaaaaacgt

SEQ ID NO: 780160 - DNA, 19 bp, Mus musculus
  siRNA target sequence for Podn (NM_172874.2,2033-2051).
gactccactcccaacctta

SEQ ID NO: 780161 - DNA, 19 bp, Mus musculus
  siRNA target sequence for Podn (NM_172874.2,2044-2062).
caaccttaaggggatcttt

SEQ ID NO: 780162 - DNA, 19 bp, Mus musculus
  siRNA target sequence for Podn (NM_172874.2,2147-2165).
ggcaactttgagtttggta

SEQ ID NO: 780163 - DNA, 19 bp, Mus musculus
  siRNA target sequence for Podn (NM_172874.2,2148-2166).
gcaactttgagtttggtaa

SEQ ID NO: 780164 - DNA, 19 bp, Mus musculus
  siRNA target sequence for 4732496O08Rik (NM_172877.1,1161-1179).
gcaaagcgccttcatcaat

SEQ ID NO: 780165 - DNA, 19 bp, Mus musculus
  siRNA target sequence for 4732496O08Rik (NM_172877.1,1162-1180).
caaagcgccttcatcaata

SEQ ID NO: 780166 - DNA, 19 bp, Mus musculus
  siRNA target sequence for 4732496O08Rik (NM_172877.1,1239-1257).
gaacaccaagcatacttgt

SEQ ID NO: 780167 - DNA, 19 bp, Mus musculus
  siRNA target sequence for 4732496O08Rik (NM_172877.1,1245-1263).
caagcatacttgttacagt

SEQ ID NO: 780168 - DNA, 19 bp, Mus musculus
  siRNA target sequence for 4732496O08Rik (NM_172877.1,1377-1395).
caagaattggaactaaata

SEQ ID NO: 780169 - DNA, 19 bp, Mus musculus
  siRNA target sequence for 4732496O08Rik (NM_172877.1,1439-1457).
ggaccagatgagaaacctt

SEQ ID NO: 780170 - DNA, 19 bp, Mus musculus
  siRNA target sequence for 4732496O08Rik (NM_172877.1,1467-1485).
cttttaacacggattcaca

SEQ ID NO: 780171 - DNA, 19 bp, Mus musculus
  siRNA target sequence for 4732496O08Rik (NM_172877.1,1516-1534).
cggacatccagaagtgtat

SEQ ID NO: 780172 - DNA, 19 bp, Mus musculus
  siRNA target sequence for 4732496O08Rik (NM_172877.1,1670-1688).
catgtgcaagctttcacat

SEQ ID NO: 780173 - DNA, 19 bp, Mus musculus
  siRNA target sequence for 4732496O08Rik (NM_172877.1,1673-1691).
gtgcaagctttcacattta

SEQ ID NO: 780174 - DNA, 19 bp, Mus musculus
  siRNA target sequence for 4732496O08Rik (NM_172877.1,1904-1922).
caccagggtcaacttctat

SEQ ID NO: 780175 - DNA, 19 bp, Mus musculus
  siRNA target sequence for 4732496O08Rik (NM_172877.1,1906-1924).
ccagggtcaacttctatga

SEQ ID NO: 780176 - DNA, 19 bp, Mus musculus
  siRNA target sequence for 4732496O08Rik (NM_172877.1,2075-2093).
gcttatggagacactcatt

SEQ ID NO: 780177 - DNA, 19 bp, Mus musculus
  siRNA target sequence for 4732496O08Rik (NM_172877.1,2081-2099).
ggagacactcattactgta

SEQ ID NO: 780178 - DNA, 19 bp, Mus musculus
  siRNA target sequence for 4732496O08Rik (NM_172877.1,2082-2100).
gagacactcattactgtaa

SEQ ID NO: 780179 - DNA, 19 bp, Mus musculus
  siRNA target sequence for B230396O12Rik (NM_172878.1,218-236).
gggatgcctatggtgttta

SEQ ID NO: 780180 - DNA, 19 bp, Mus musculus
  siRNA target sequence for B230396O12Rik (NM_172878.1,238-256).
cagctggccacgctgttaa

SEQ ID NO: 780181 - DNA, 19 bp, Mus musculus
  siRNA target sequence for B230396O12Rik (NM_172878.1,240-258).
gctggccacgctgttaatt

SEQ ID NO: 780182 - DNA, 19 bp, Mus musculus
  siRNA target sequence for B230396O12Rik (NM_172878.1,433-451).
gatgccaaccagctagtaa

SEQ ID NO: 780183 - DNA, 19 bp, Mus musculus
  siRNA target sequence for B230396O12Rik (NM_172878.1,437-455).
ccaaccagctagtaaagaa

SEQ ID NO: 780184 - DNA, 19 bp, Mus musculus
  siRNA target sequence for B230396O12Rik (NM_172878.1,544-562).
catacacgggcattaagca

SEQ ID NO: 780185 - DNA, 19 bp, Mus musculus
  siRNA target sequence for B230396O12Rik (NM_172878.1,614-632).
ccatcgcctatctctcttt

SEQ ID NO: 780186 - DNA, 19 bp, Mus musculus
  siRNA target sequence for B230396O12Rik (NM_172878.1,748-766).
gaggaaccaggaaatgtga

SEQ ID NO: 780187 - DNA, 19 bp, Mus musculus
  siRNA target sequence for B230396O12Rik (NM_172878.1,861-879).
cactgttatcccagagatt

SEQ ID NO: 780188 - DNA, 19 bp, Mus musculus
  siRNA target sequence for B230396O12Rik (NM_172878.1,865-883).
gttatcccagagattctct

SEQ ID NO: 780189 - DNA, 19 bp, Mus musculus
  siRNA target sequence for B230396O12Rik (NM_172878.1,1011-1029).
ggggaaggcactgattaga

SEQ ID NO: 780190 - DNA, 19 bp, Mus musculus
  siRNA target sequence for B230396O12Rik (NM_172878.1,1013-1031).
ggaaggcactgattagaat

SEQ ID NO: 780191 - DNA, 19 bp, Mus musculus
  siRNA target sequence for B230396O12Rik (NM_172878.1,1017-1035).
ggcactgattagaataaat

SEQ ID NO: 780192 - DNA, 19 bp, Mus musculus
  siRNA target sequence for B230396O12Rik (NM_172878.1,1079-1097).
caggactgggcaagtatca

SEQ ID NO: 780193 - DNA, 19 bp, Mus musculus
  siRNA target sequence for B230396O12Rik (NM_172878.1,1168-1186).
ggcttgctccagcttaaaa

SEQ ID NO: 780194 - DNA, 19 bp, Mus musculus
  siRNA target sequence for B230396O12Rik (NM_172878.1,1169-1187).
gcttgctccagcttaaaaa

SEQ ID NO: 780195 - DNA, 19 bp, Mus musculus
  siRNA target sequence for B230396O12Rik (NM_172878.1,1170-1188).
cttgctccagcttaaaaaa

SEQ ID NO: 780196 - DNA, 19 bp, Mus musculus
  siRNA target sequence for B230396O12Rik (NM_172878.1,1246-1264).
gacctcggcttcctgttat

SEQ ID NO: 780197 - DNA, 19 bp, Mus musculus
  siRNA target sequence for B230396O12Rik (NM_172878.1,1354-1372).
gcactaagctactgttctt

SEQ ID NO: 780198 - DNA, 19 bp, Mus musculus
  siRNA target sequence for B230396O12Rik (NM_172878.1,1355-1373).
cactaagctactgttcttt

SEQ ID NO: 780199 - DNA, 19 bp, Mus musculus
  siRNA target sequence for B230396O12Rik (NM_172878.1,1385-1403).
ctgggggcaacaatcctta

SEQ ID NO: 780200 - DNA, 19 bp, Mus musculus
  siRNA target sequence for B230396O12Rik (NM_172878.1,1389-1407).
gggcaacaatccttaccat

SEQ ID NO: 780201 - DNA, 19 bp, Mus musculus
  siRNA target sequence for B230396O12Rik (NM_172878.1,1510-1528).
ccaagacagtcggaagatt

SEQ ID NO: 780202 - DNA, 19 bp, Mus musculus
  siRNA target sequence for B230396O12Rik (NM_172878.1,1511-1529).
caagacagtcggaagattt

SEQ ID NO: 780203 - DNA, 19 bp, Mus musculus
  siRNA target sequence for B230396O12Rik (NM_172878.1,1760-1778).
gccacagtgggctaaagaa

SEQ ID NO: 780204 - DNA, 19 bp, Mus musculus
  siRNA target sequence for B230396O12Rik (NM_172878.1,1761-1779).
ccacagtgggctaaagaaa

SEQ ID NO: 780205 - DNA, 19 bp, Mus musculus
  siRNA target sequence for 4932412H11 (NM_172879.1,345-363).
ctgaagatgggagtaatgt

SEQ ID NO: 780206 - DNA, 19 bp, Mus musculus
  siRNA target sequence for 4932412H11 (NM_172879.1,372-390).
gaggatttcctagatttga

SEQ ID NO: 780207 - DNA, 19 bp, Mus musculus
  siRNA target sequence for 4932412H11 (NM_172879.1,472-490).
gatttatgaagcaaatcct

SEQ ID NO: 780208 - DNA, 19 bp, Mus musculus
  siRNA target sequence for 4932412H11 (NM_172879.1,523-541).
cacaagccagcttgataga

SEQ ID NO: 780209 - DNA, 19 bp, Mus musculus
  siRNA target sequence for 4932412H11 (NM_172879.1,529-547).
ccagcttgatagaaacgaa

SEQ ID NO: 780210 - DNA, 19 bp, Mus musculus
  siRNA target sequence for 4932412H11 (NM_172879.1,566-584).
ccattttcagaaactaaca

SEQ ID NO: 780211 - DNA, 19 bp, Mus musculus
  siRNA target sequence for 4932412H11 (NM_172879.1,579-597).
ctaacatagcagatatcat

SEQ ID NO: 780212 - DNA, 19 bp, Mus musculus
  siRNA target sequence for 4932412H11 (NM_172879.1,632-650).
gggtcatcagagactaaga

SEQ ID NO: 780213 - DNA, 19 bp, Mus musculus
  siRNA target sequence for 4932412H11 (NM_172879.1,633-651).
ggtcatcagagactaagat

SEQ ID NO: 780214 - DNA, 19 bp, Mus musculus
  siRNA target sequence for 4932412H11 (NM_172879.1,643-661).
gactaagatggctgaagat

SEQ ID NO: 780215 - DNA, 19 bp, Mus musculus
  siRNA target sequence for 4932412H11 (NM_172879.1,659-677).
gattattacccagtcaaat

SEQ ID NO: 780216 - DNA, 19 bp, Mus musculus
  siRNA target sequence for 4932412H11 (NM_172879.1,739-757).
gaagtctgataactttaca

SEQ ID NO: 780217 - DNA, 19 bp, Mus musculus
  siRNA target sequence for 4932412H11 (NM_172879.1,771-789).
ccaagggtttacaagaatt

SEQ ID NO: 780218 - DNA, 19 bp, Mus musculus
  siRNA target sequence for 4932412H11 (NM_172879.1,955-973).
caacttaaagatactaaat

SEQ ID NO: 780219 - DNA, 19 bp, Mus musculus
  siRNA target sequence for 4932412H11 (NM_172879.1,974-992).
gccagttacaatgagatat

SEQ ID NO: 780220 - DNA, 19 bp, Mus musculus
  siRNA target sequence for 4932412H11 (NM_172879.1,978-996).
gttacaatgagatatcaca

SEQ ID NO: 780221 - DNA, 19 bp, Mus musculus
  siRNA target sequence for 4932412H11 (NM_172879.1,997-1015).
gatacccaaagaactacta

SEQ ID NO: 780222 - DNA, 19 bp, Mus musculus
  siRNA target sequence for 4932412H11 (NM_172879.1,1030-1048).
gagacaactcctcttaaat

SEQ ID NO: 780223 - DNA, 19 bp, Mus musculus
  siRNA target sequence for 4932412H11 (NM_172879.1,1034-1052).
caactcctcttaaatagta

SEQ ID NO: 780224 - DNA, 19 bp, Mus musculus
  siRNA target sequence for 4932412H11 (NM_172879.1,1039-1057).
cctcttaaatagtaatcat

SEQ ID NO: 780225 - DNA, 19 bp, Mus musculus
  siRNA target sequence for 4932412H11 (NM_172879.1,1042-1060).
cttaaatagtaatcatatt

SEQ ID NO: 780226 - DNA, 19 bp, Mus musculus
  siRNA target sequence for 4932412H11 (NM_172879.1,1055-1073).
catattgacactttacctt

SEQ ID NO: 780227 - DNA, 19 bp, Mus musculus
  siRNA target sequence for 4932412H11 (NM_172879.1,1071-1089).
cttctggcttagaacatct

SEQ ID NO: 780228 - DNA, 19 bp, Mus musculus
  siRNA target sequence for 4932412H11 (NM_172879.1,1076-1094).
ggcttagaacatcttagat

SEQ ID NO: 780229 - DNA, 19 bp, Mus musculus
  siRNA target sequence for 4932412H11 (NM_172879.1,1077-1095).
gcttagaacatcttagata

SEQ ID NO: 780230 - DNA, 19 bp, Mus musculus
  siRNA target sequence for 4932412H11 (NM_172879.1,1078-1096).
cttagaacatcttagatat

SEQ ID NO: 780231 - DNA, 19 bp, Mus musculus
  siRNA target sequence for 4932412H11 (NM_172879.1,1114-1132).
gggtaaaaatatgttaaca

SEQ ID NO: 780232 - DNA, 19 bp, Mus musculus
  siRNA target sequence for 4932412H11 (NM_172879.1,1131-1149).
catatataccagattcttt

SEQ ID NO: 780233 - DNA, 19 bp, Mus musculus
  siRNA target sequence for 4932412H11 (NM_172879.1,1139-1157).
ccagattctttgtctagtt

SEQ ID NO: 780234 - DNA, 19 bp, Mus musculus
  siRNA target sequence for 4932412H11 (NM_172879.1,1140-1158).
cagattctttgtctagttt

SEQ ID NO: 780235 - DNA, 19 bp, Mus musculus
  siRNA target sequence for 4932412H11 (NM_172879.1,1146-1164).
ctttgtctagtttgaaaaa

SEQ ID NO: 780236 - DNA, 19 bp, Mus musculus
  siRNA target sequence for 4932412H11 (NM_172879.1,1183-1201).
ggaatataaccaattaaca

SEQ ID NO: 780237 - DNA, 19 bp, Mus musculus
  siRNA target sequence for 4932412H11 (NM_172879.1,1184-1202).
gaatataaccaattaacaa

SEQ ID NO: 780238 - DNA, 19 bp, Mus musculus
  siRNA target sequence for 4932412H11 (NM_172879.1,1288-1306).
gagggaactgaaaaattta

SEQ ID NO: 780239 - DNA, 19 bp, Mus musculus
  siRNA target sequence for 4932412H11 (NM_172879.1,1311-1329).
gccttctaatggatcacaa

SEQ ID NO: 780240 - DNA, 19 bp, Mus musculus
  siRNA target sequence for 4932412H11 (NM_172879.1,1312-1330).
ccttctaatggatcacaat

SEQ ID NO: 780241 - DNA, 19 bp, Mus musculus
  siRNA target sequence for 4932412H11 (NM_172879.1,1313-1331).
cttctaatggatcacaata

SEQ ID NO: 780242 - DNA, 19 bp, Mus musculus
  siRNA target sequence for 4932412H11 (NM_172879.1,1321-1339).
ggatcacaataaacttact

SEQ ID NO: 780243 - DNA, 19 bp, Mus musculus
  siRNA target sequence for 4932412H11 (NM_172879.1,1322-1340).
gatcacaataaacttactt

SEQ ID NO: 780244 - DNA, 19 bp, Mus musculus
  siRNA target sequence for 4932412H11 (NM_172879.1,1416-1434).
cacccaaaattgagaattt

SEQ ID NO: 780245 - DNA, 19 bp, Mus musculus
  siRNA target sequence for 4932412H11 (NM_172879.1,1447-1465).
gctgcttaaccttgataaa

SEQ ID NO: 780246 - DNA, 19 bp, Mus musculus
  siRNA target sequence for 4932412H11 (NM_172879.1,1448-1466).
ctgcttaaccttgataaaa

SEQ ID NO: 780247 - DNA, 19 bp, Mus musculus
  siRNA target sequence for 4932412H11 (NM_172879.1,1497-1515).
cccactgcgtaaatttgga

SEQ ID NO: 780248 - DNA, 19 bp, Mus musculus
  siRNA target sequence for 4932412H11 (NM_172879.1,1498-1516).
ccactgcgtaaatttggaa

SEQ ID NO: 780249 - DNA, 19 bp, Mus musculus
  siRNA target sequence for 4932412H11 (NM_172879.1,1499-1517).
cactgcgtaaatttggaat

SEQ ID NO: 780250 - DNA, 19 bp, Mus musculus
  siRNA target sequence for 4932412H11 (NM_172879.1,1504-1522).
cgtaaatttggaatctctt

SEQ ID NO: 780251 - DNA, 19 bp, Mus musculus
  siRNA target sequence for 4932412H11 (NM_172879.1,1505-1523).
gtaaatttggaatctctta

SEQ ID NO: 780252 - DNA, 19 bp, Mus musculus
  siRNA target sequence for 4932412H11 (NM_172879.1,1513-1531).
ggaatctcttagtcttagt

SEQ ID NO: 780253 - DNA, 19 bp, Mus musculus
  siRNA target sequence for 4932412H11 (NM_172879.1,1518-1536).
ctcttagtcttagtgataa

SEQ ID NO: 780254 - DNA, 19 bp, Mus musculus
  siRNA target sequence for 4932412H11 (NM_172879.1,1558-1576).
gaaaatccgtaagcttaaa

SEQ ID NO: 780255 - DNA, 19 bp, Mus musculus
  siRNA target sequence for 4932412H11 (NM_172879.1,1565-1583).
cgtaagcttaaaaatttga

SEQ ID NO: 780256 - DNA, 19 bp, Mus musculus
  siRNA target sequence for 4932412H11 (NM_172879.1,1612-1630).
gataacaatgactgaagaa

SEQ ID NO: 780257 - DNA, 19 bp, Mus musculus
  siRNA target sequence for 4932412H11 (NM_172879.1,1633-1651).
ctcacatcttagtaatata

SEQ ID NO: 780258 - DNA, 19 bp, Mus musculus
  siRNA target sequence for 4932412H11 (NM_172879.1,1635-1653).
cacatcttagtaatataca

SEQ ID NO: 780259 - DNA, 19 bp, Mus musculus
  siRNA target sequence for 4932412H11 (NM_172879.1,1661-1679).
gagttttcaggcaatcaaa

SEQ ID NO: 780260 - DNA, 19 bp, Mus musculus
  siRNA target sequence for 4932412H11 (NM_172879.1,1683-1701).
cacatgttcctattgaaat

SEQ ID NO: 780261 - DNA, 19 bp, Mus musculus
  siRNA target sequence for 4932412H11 (NM_172879.1,1725-1743).
gagttgaactgaattataa

SEQ ID NO: 780262 - DNA, 19 bp, Mus musculus
  siRNA target sequence for 4932412H11 (NM_172879.1,1727-1745).
gttgaactgaattataaca

SEQ ID NO: 780263 - DNA, 19 bp, Mus musculus
  siRNA target sequence for 4932412H11 (NM_172879.1,1766-1784).
gggttgtgtgctttgcaat

SEQ ID NO: 780264 - DNA, 19 bp, Mus musculus
  siRNA target sequence for 4932412H11 (NM_172879.1,1776-1794).
ctttgcaatcacttgacta

SEQ ID NO: 780265 - DNA, 19 bp, Mus musculus
  siRNA target sequence for 4932412H11 (NM_172879.1,1781-1799).
caatcacttgactacttga

SEQ ID NO: 780266 - DNA, 19 bp, Mus musculus
  siRNA target sequence for 4932412H11 (NM_172879.1,1832-1850).
gtggacatgtcgttcagta

SEQ ID NO: 780267 - DNA, 19 bp, Mus musculus
  siRNA target sequence for 4932412H11 (NM_172879.1,1882-1900).
caaactcaccgtattttca

SEQ ID NO: 780268 - DNA, 19 bp, Mus musculus
  siRNA target sequence for 4932412H11 (NM_172879.1,1888-1906).
caccgtattttcaaaacat

SEQ ID NO: 780269 - DNA, 19 bp, Mus musculus
  siRNA target sequence for 4932412H11 (NM_172879.1,1890-1908).
ccgtattttcaaaacattt

SEQ ID NO: 780270 - DNA, 19 bp, Mus musculus
  siRNA target sequence for 4932412H11 (NM_172879.1,1914-1932).
ctctcactaatcttgaata

SEQ ID NO: 780271 - DNA, 19 bp, Mus musculus
  siRNA target sequence for 4932412H11 (NM_172879.1,1936-1954).
ggatcttgctaaaaaccaa

SEQ ID NO: 780272 - DNA, 19 bp, Mus musculus
  siRNA target sequence for 4932412H11 (NM_172879.1,1951-1969).
ccaaataatgacaattcca

SEQ ID NO: 780273 - DNA, 19 bp, Mus musculus
  siRNA target sequence for 4932412H11 (NM_172879.1,1952-1970).
caaataatgacaattccat

SEQ ID NO: 780274 - DNA, 19 bp, Mus musculus
  siRNA target sequence for 4932412H11 (NM_172879.1,1996-2014).
ccatgttctcattctatct

SEQ ID NO: 780275 - DNA, 19 bp, Mus musculus
  siRNA target sequence for 4932412H11 (NM_172879.1,2037-2055).
cgaaggaactgtgttcttt

SEQ ID NO: 780276 - DNA, 19 bp, Mus musculus
  siRNA target sequence for 4932412H11 (NM_172879.1,2067-2085).
gagtgcttgatatttcaga

SEQ ID NO: 780277 - DNA, 19 bp, Mus musculus
  siRNA target sequence for 4932412H11 (NM_172879.1,2220-2238).
gtcagacaagtgggaaaaa

SEQ ID NO: 780278 - DNA, 19 bp, Mus musculus
  siRNA target sequence for 4932412H11 (NM_172879.1,2306-2324).
gccatcaaagatattccaa

SEQ ID NO: 780279 - DNA, 19 bp, Mus musculus
  siRNA target sequence for 4932412H11 (NM_172879.1,2341-2359).
gagaagtctggttagtttt

SEQ ID NO: 780280 - DNA, 19 bp, Mus musculus
  siRNA target sequence for 4932412H11 (NM_172879.1,2363-2381).
gcgagcaacaatcaaataa

SEQ ID NO: 780281 - DNA, 19 bp, Mus musculus
  siRNA target sequence for 4932412H11 (NM_172879.1,2465-2483).
ggtatctacaaactttcat

SEQ ID NO: 780282 - DNA, 19 bp, Mus musculus
  siRNA target sequence for 4932412H11 (NM_172879.1,2525-2543).
ccgccaatggaaatctgta

SEQ ID NO: 780283 - DNA, 19 bp, Mus musculus
  siRNA target sequence for 4932412H11 (NM_172879.1,2526-2544).
cgccaatggaaatctgtaa

SEQ ID NO: 780284 - DNA, 19 bp, Mus musculus
  siRNA target sequence for 4932412H11 (NM_172879.1,2527-2545).
gccaatggaaatctgtaaa

SEQ ID NO: 780285 - DNA, 19 bp, Mus musculus
  siRNA target sequence for 4932412H11 (NM_172879.1,2557-2575).
gcatatgatcacatgctat

SEQ ID NO: 780286 - DNA, 19 bp, Mus musculus
  siRNA target sequence for 4932412H11 (NM_172879.1,2576-2594).
ctccaaagagcggatgaaa

SEQ ID NO: 780287 - DNA, 19 bp, Mus musculus
  siRNA target sequence for 4932412H11 (NM_172879.1,2578-2596).
ccaaagagcggatgaaaga

SEQ ID NO: 780288 - DNA, 19 bp, Mus musculus
  siRNA target sequence for 4932412H11 (NM_172879.1,2687-2705).
gcaagctcagcaaacaaca

SEQ ID NO: 780289 - DNA, 19 bp, Mus musculus
  siRNA target sequence for 4932412H11 (NM_172879.1,2688-2706).
caagctcagcaaacaacat

SEQ ID NO: 780290 - DNA, 19 bp, Mus musculus
  siRNA target sequence for 4932412H11 (NM_172879.1,2715-2733).
ggcccactactccattaaa

SEQ ID NO: 780291 - DNA, 19 bp, Mus musculus
  siRNA target sequence for 4932412H11 (NM_172879.1,2716-2734).
gcccactactccattaaat

SEQ ID NO: 780292 - DNA, 19 bp, Mus musculus
  siRNA target sequence for 4932412H11 (NM_172879.1,2718-2736).
ccactactccattaaatga

SEQ ID NO: 780293 - DNA, 19 bp, Mus musculus
  siRNA target sequence for 4932412H11 (NM_172879.1,2724-2742).
ctccattaaatgaaagaat

SEQ ID NO: 780294 - DNA, 19 bp, Mus musculus
  siRNA target sequence for 4932412H11 (NM_172879.1,2773-2791).
gaaggatgtacaattcaca

SEQ ID NO: 780295 - DNA, 19 bp, Mus musculus
  siRNA target sequence for 4932412H11 (NM_172879.1,2833-2851).
gataggtgcctatgatata

SEQ ID NO: 780296 - DNA, 19 bp, Mus musculus
  siRNA target sequence for 4932412H11 (NM_172879.1,2838-2856).
gtgcctatgatataatgga

SEQ ID NO: 780297 - DNA, 19 bp, Mus musculus
  siRNA target sequence for 4932412H11 (NM_172879.1,2867-2885).
gcgctgaacctttatacaa

SEQ ID NO: 780298 - DNA, 19 bp, Mus musculus
  siRNA target sequence for 4932412H11 (NM_172879.1,2869-2887).
gctgaacctttatacaagt

SEQ ID NO: 780299 - DNA, 19 bp, Mus musculus
  siRNA target sequence for Wdfy3 (NM_172882.2,3545-3563).
ccattaccggataagcaaa

SEQ ID NO: 780300 - DNA, 19 bp, Mus musculus
  siRNA target sequence for Wdfy3 (NM_172882.2,3546-3564).
cattaccggataagcaaaa

SEQ ID NO: 780301 - DNA, 19 bp, Mus musculus
  siRNA target sequence for Wdfy3 (NM_172882.2,3599-3617).
cttgacccgggtaaagtgt

SEQ ID NO: 780302 - DNA, 19 bp, Mus musculus
  siRNA target sequence for Wdfy3 (NM_172882.2,3664-3682).
cggtcactccggcttttgt

SEQ ID NO: 780303 - DNA, 19 bp, Mus musculus
  siRNA target sequence for Wdfy3 (NM_172882.2,3665-3683).
ggtcactccggcttttgtt

SEQ ID NO: 780304 - DNA, 19 bp, Mus musculus
  siRNA target sequence for Wdfy3 (NM_172882.2,3668-3686).
cactccggcttttgttgaa

SEQ ID NO: 780305 - DNA, 19 bp, Mus musculus
  siRNA target sequence for Wdfy3 (NM_172882.2,3670-3688).
ctccggcttttgttgaatt

SEQ ID NO: 780306 - DNA, 19 bp, Mus musculus
  siRNA target sequence for Wdfy3 (NM_172882.2,3740-3758).
ccataacgcccctaccaat

SEQ ID NO: 780307 - DNA, 19 bp, Mus musculus
  siRNA target sequence for Wdfy3 (NM_172882.2,3741-3759).
cataacgcccctaccaata

SEQ ID NO: 780308 - DNA, 19 bp, Mus musculus
  siRNA target sequence for Wdfy3 (NM_172882.2,3746-3764).
cgcccctaccaataacact

SEQ ID NO: 780309 - DNA, 19 bp, Mus musculus
  siRNA target sequence for Wdfy3 (NM_172882.2,3920-3938).
cgtgcggcgagcgaattca

SEQ ID NO: 780310 - DNA, 19 bp, Mus musculus
  siRNA target sequence for Wdfy3 (NM_172882.2,3921-3939).
gtgcggcgagcgaattcat

SEQ ID NO: 780311 - DNA, 19 bp, Mus musculus
  siRNA target sequence for Wdfy3 (NM_172882.2,3923-3941).
gcggcgagcgaattcatct

SEQ ID NO: 780312 - DNA, 19 bp, Mus musculus
  siRNA target sequence for Wdfy3 (NM_172882.2,3953-3971).
cgtgtgccttgccatagtt

SEQ ID NO: 780313 - DNA, 19 bp, Mus musculus
  siRNA target sequence for Wdfy3 (NM_172882.2,3965-3983).
catagttctgtctgcaaaa

SEQ ID NO: 780314 - DNA, 19 bp, Mus musculus
  siRNA target sequence for Wdfy3 (NM_172882.2,3978-3996).
gcaaaagaccggtccttaa

SEQ ID NO: 780315 - DNA, 19 bp, Mus musculus
  siRNA target sequence for Wdfy3 (NM_172882.2,3984-4002).
gaccggtccttaatcgttt

SEQ ID NO: 780316 - DNA, 19 bp, Mus musculus
  siRNA target sequence for Wdfy3 (NM_172882.2,4011-4029).
gaggagctactccaaaact

SEQ ID NO: 780317 - DNA, 19 bp, Mus musculus
  siRNA target sequence for Wdfy3 (NM_172882.2,4013-4031).
ggagctactccaaaactat

SEQ ID NO: 780318 - DNA, 19 bp, Mus musculus
  siRNA target sequence for Wdfy3 (NM_172882.2,4016-4034).
gctactccaaaactatgtt

SEQ ID NO: 780319 - DNA, 19 bp, Mus musculus
  siRNA target sequence for Wdfy3 (NM_172882.2,4023-4041).
caaaactatgttgatgatt

SEQ ID NO: 780320 - DNA, 19 bp, Mus musculus
  siRNA target sequence for Wdfy3 (NM_172882.2,4204-4222).
gcaccgtcaagctgcatta

SEQ ID NO: 780321 - DNA, 19 bp, Mus musculus
  siRNA target sequence for Wdfy3 (NM_172882.2,4207-4225).
ccgtcaagctgcattatgt

SEQ ID NO: 780322 - DNA, 19 bp, Mus musculus
  siRNA target sequence for Wdfy3 (NM_172882.2,4374-4392).
ccttctagcgtgactacta

SEQ ID NO: 780323 - DNA, 19 bp, Mus musculus
  siRNA target sequence for Wdfy3 (NM_172882.2,4375-4393).
cttctagcgtgactactat

SEQ ID NO: 780324 - DNA, 19 bp, Mus musculus
  siRNA target sequence for Wdfy3 (NM_172882.2,4378-4396).
ctagcgtgactactattta

SEQ ID NO: 780325 - DNA, 19 bp, Mus musculus
  siRNA target sequence for Wdfy3 (NM_172882.2,4381-4399).
gcgtgactactatttatga

SEQ ID NO: 780326 - DNA, 19 bp, Mus musculus
  siRNA target sequence for Wdfy3 (NM_172882.2,4382-4400).
cgtgactactatttatgaa

SEQ ID NO: 780327 - DNA, 19 bp, Mus musculus
  siRNA target sequence for Wdfy3 (NM_172882.2,4432-4450).
ctgtctgcgtgccatgtaa

SEQ ID NO: 780328 - DNA, 19 bp, Mus musculus
  siRNA target sequence for Wdfy3 (NM_172882.2,4436-4454).
ctgcgtgccatgtaaagat

SEQ ID NO: 780329 - DNA, 19 bp, Mus musculus
  siRNA target sequence for Wdfy3 (NM_172882.2,4534-4552).
ccgtgtcctccctaacagt

SEQ ID NO: 780330 - DNA, 19 bp, Mus musculus
  siRNA target sequence for Wdfy3 (NM_172882.2,4554-4572).
gcaagaatccggaaagtct

SEQ ID NO: 780331 - DNA, 19 bp, Mus musculus
  siRNA target sequence for Wdfy3 (NM_172882.2,4555-4573).
caagaatccggaaagtcta

SEQ ID NO: 780332 - DNA, 19 bp, Mus musculus
  siRNA target sequence for Wdfy3 (NM_172882.2,4563-4581).
cggaaagtctacaacaagt

SEQ ID NO: 780333 - DNA, 19 bp, Mus musculus
  siRNA target sequence for Wdfy3 (NM_172882.2,4565-4583).
gaaagtctacaacaagtta

SEQ ID NO: 780334 - DNA, 19 bp, Mus musculus
  siRNA target sequence for Wdfy3 (NM_172882.2,4639-4657).
ccgtgaagctggttcacaa

SEQ ID NO: 780335 - DNA, 19 bp, Mus musculus
  siRNA target sequence for Wdfy3 (NM_172882.2,4699-4717).
ccgctctcattggatactt

SEQ ID NO: 780336 - DNA, 19 bp, Mus musculus
  siRNA target sequence for Wdfy3 (NM_172882.2,4710-4728).
ggatacttgggagtaagaa

SEQ ID NO: 780337 - DNA, 19 bp, Mus musculus
  siRNA target sequence for Wdfy3 (NM_172882.2,4744-4762).
ctgtcgccactactttaca

SEQ ID NO: 780338 - DNA, 19 bp, Mus musculus
  siRNA target sequence for Wdfy3 (NM_172882.2,4746-4764).
gtcgccactactttacagt

SEQ ID NO: 780339 - DNA, 19 bp, Mus musculus
  siRNA target sequence for Wdfy3 (NM_172882.2,4913-4931).
gctggcaatgctgcttaaa

SEQ ID NO: 780340 - DNA, 19 bp, Mus musculus
  siRNA target sequence for Wdfy3 (NM_172882.2,5084-5102).
cgagctccatctctcttta

SEQ ID NO: 780341 - DNA, 19 bp, Mus musculus
  siRNA target sequence for Wdfy3 (NM_172882.2,5085-5103).
gagctccatctctctttat

SEQ ID NO: 780342 - DNA, 19 bp, Mus musculus
  siRNA target sequence for Wdfy3 (NM_172882.2,5090-5108).
ccatctctctttatttgaa

SEQ ID NO: 780343 - DNA, 19 bp, Mus musculus
  siRNA target sequence for Wdfy3 (NM_172882.2,5156-5174).
caagttgatgagggaattt

SEQ ID NO: 780344 - DNA, 19 bp, Mus musculus
  siRNA target sequence for Wdfy3 (NM_172882.2,5225-5243).
gcccaccatcgctgctatt

SEQ ID NO: 780345 - DNA, 19 bp, Mus musculus
  siRNA target sequence for Wdfy3 (NM_172882.2,5226-5244).
cccaccatcgctgctatta

SEQ ID NO: 780346 - DNA, 19 bp, Mus musculus
  siRNA target sequence for Wdfy3 (NM_172882.2,5230-5248).
ccatcgctgctattagcaa

SEQ ID NO: 780347 - DNA, 19 bp, Mus musculus
  siRNA target sequence for Wdfy3 (NM_172882.2,5297-5315).
caggtttggccagttcatt

SEQ ID NO: 780348 - DNA, 19 bp, Mus musculus
  siRNA target sequence for Wdfy3 (NM_172882.2,5304-5322).
ggccagttcatttcttcta

SEQ ID NO: 780349 - DNA, 19 bp, Mus musculus
  siRNA target sequence for Wdfy3 (NM_172882.2,5306-5324).
ccagttcatttcttctact

SEQ ID NO: 780350 - DNA, 19 bp, Mus musculus
  siRNA target sequence for Wdfy3 (NM_172882.2,5329-5347).
ccacctttgccgtttgtga

SEQ ID NO: 780351 - DNA, 19 bp, Mus musculus
  siRNA target sequence for Wdfy3 (NM_172882.2,5338-5356).
ccgtttgtgagaaattcgt

SEQ ID NO: 780352 - DNA, 19 bp, Mus musculus
  siRNA target sequence for Wdfy3 (NM_172882.2,5344-5362).
gtgagaaattcgtggttat

SEQ ID NO: 780353 - DNA, 19 bp, Mus musculus
  siRNA target sequence for Wdfy3 (NM_172882.2,5354-5372).
cgtggttatggaaataaat

SEQ ID NO: 780354 - DNA, 19 bp, Mus musculus
  siRNA target sequence for Wdfy3 (NM_172882.2,5423-5441).
gtctgctaaccttatactt

SEQ ID NO: 780355 - DNA, 19 bp, Mus musculus
  siRNA target sequence for Wdfy3 (NM_172882.2,5425-5443).
ctgctaaccttatactttt

SEQ ID NO: 780356 - DNA, 19 bp, Mus musculus
  siRNA target sequence for Wdfy3 (NM_172882.2,5544-5562).
ggtttcgactggatcatga

SEQ ID NO: 780357 - DNA, 19 bp, Mus musculus
  siRNA target sequence for Wdfy3 (NM_172882.2,5545-5563).
gtttcgactggatcatgat

SEQ ID NO: 780358 - DNA, 19 bp, Mus musculus
  siRNA target sequence for Wdfy3 (NM_172882.2,5630-5648).
gagtaaccagtccattcta

SEQ ID NO: 780359 - DNA, 19 bp, Mus musculus
  siRNA target sequence for Wdfy3 (NM_172882.2,5632-5650).
gtaaccagtccattctaat

SEQ ID NO: 780360 - DNA, 19 bp, Mus musculus
  siRNA target sequence for Wdfy3 (NM_172882.2,5641-5659).
ccattctaatcaagtttaa

SEQ ID NO: 780361 - DNA, 19 bp, Mus musculus
  siRNA target sequence for Wdfy3 (NM_172882.2,5697-5715).
gattccgtcctgacaaaca

SEQ ID NO: 780362 - DNA, 19 bp, Mus musculus
  siRNA target sequence for Wdfy3 (NM_172882.2,5702-5720).
cgtcctgacaaacaagatt

SEQ ID NO: 780363 - DNA, 19 bp, Mus musculus
  siRNA target sequence for Wdfy3 (NM_172882.2,5979-5997).
gattccatctggacattta

SEQ ID NO: 780364 - DNA, 19 bp, Mus musculus
  siRNA target sequence for Wdfy3 (NM_172882.2,6128-6146).
ctcgtggctccgagagtat

SEQ ID NO: 780365 - DNA, 19 bp, Mus musculus
  siRNA target sequence for Wdfy3 (NM_172882.2,6342-6360).
gcggacaccgggatgaata

SEQ ID NO: 780366 - DNA, 19 bp, Mus musculus
  siRNA target sequence for Wdfy3 (NM_172882.2,6345-6363).
gacaccgggatgaatagga

SEQ ID NO: 780367 - DNA, 19 bp, Mus musculus
  siRNA target sequence for Wdfy3 (NM_172882.2,6485-6503).
caagcagacgccactgatt

SEQ ID NO: 780368 - DNA, 19 bp, Mus musculus
  siRNA target sequence for Wdfy3 (NM_172882.2,6488-6506).
gcagacgccactgattgat

SEQ ID NO: 780369 - DNA, 19 bp, Mus musculus
  siRNA target sequence for Wdfy3 (NM_172882.2,6493-6511).
cgccactgattgatctgtt

SEQ ID NO: 780370 - DNA, 19 bp, Mus musculus
  siRNA target sequence for Wdfy3 (NM_172882.2,6496-6514).
cactgattgatctgttgtt

SEQ ID NO: 780371 - DNA, 19 bp, Mus musculus
  siRNA target sequence for Wdfy3 (NM_172882.2,6541-6559).
gaactcagcagaaagagtt

SEQ ID NO: 780372 - DNA, 19 bp, Mus musculus
  siRNA target sequence for Wdfy3 (NM_172882.2,6624-6642).
gatgcgtctctgcctatta

SEQ ID NO: 780373 - DNA, 19 bp, Mus musculus
  siRNA target sequence for Wdfy3 (NM_172882.2,6649-6667).
gaggaagctaccaggtatt

SEQ ID NO: 780374 - DNA, 19 bp, Mus musculus
  siRNA target sequence for Wdfy3 (NM_172882.2,6652-6670).
gaagctaccaggtattggt

SEQ ID NO: 780375 - DNA, 19 bp, Mus musculus
  siRNA target sequence for Wdfy3 (NM_172882.2,6668-6686).
ggtgaacaacgtgttttat

SEQ ID NO: 780376 - DNA, 19 bp, Mus musculus
  siRNA target sequence for Wdfy3 (NM_172882.2,6674-6692).
caacgtgttttatttcaca

SEQ ID NO: 780377 - DNA, 19 bp, Mus musculus
  siRNA target sequence for Wdfy3 (NM_172882.2,6696-6714).
cgcgtagtggacaagcttt

SEQ ID NO: 780378 - DNA, 19 bp, Mus musculus
  siRNA target sequence for Wdfy3 (NM_172882.2,6715-6733).
ggcaaggcatgttcaacaa

SEQ ID NO: 780379 - DNA, 19 bp, Mus musculus
  siRNA target sequence for Wdfy3 (NM_172882.2,6803-6821).
gtcgctggatgcagtgtat

SEQ ID NO: 780380 - DNA, 19 bp, Mus musculus
  siRNA target sequence for Wdfy3 (NM_172882.2,6805-6823).
cgctggatgcagtgtatca

SEQ ID NO: 780381 - DNA, 19 bp, Mus musculus
  siRNA target sequence for Wdfy3 (NM_172882.2,6901-6919).
ctctccgggtgcttactgt

SEQ ID NO: 780382 - DNA, 19 bp, Mus musculus
  siRNA target sequence for Wdfy3 (NM_172882.2,6916-6934).
ctgtgaaccggaacttaat

SEQ ID NO: 780383 - DNA, 19 bp, Mus musculus
  siRNA target sequence for Wdfy3 (NM_172882.2,6946-6964).
gaaaccacgaccaggaatt

SEQ ID NO: 780384 - DNA, 19 bp, Mus musculus
  siRNA target sequence for Wdfy3 (NM_172882.2,6950-6968).
ccacgaccaggaattcatt

SEQ ID NO: 780385 - DNA, 19 bp, Mus musculus
  siRNA target sequence for Wdfy3 (NM_172882.2,6951-6969).
cacgaccaggaattcatta

SEQ ID NO: 780386 - DNA, 19 bp, Mus musculus
  siRNA target sequence for Wdfy3 (NM_172882.2,6975-6993).
ctcgctcactgcctgatta

SEQ ID NO: 780387 - DNA, 19 bp, Mus musculus
  siRNA target sequence for Wdfy3 (NM_172882.2,6977-6995).
cgctcactgcctgattaat

SEQ ID NO: 780388 - DNA, 19 bp, Mus musculus
  siRNA target sequence for Wdfy3 (NM_172882.2,7048-7066).
ccacgtggcacatcatgat

SEQ ID NO: 780389 - DNA, 19 bp, Mus musculus
  siRNA target sequence for Wdfy3 (NM_172882.2,7049-7067).
cacgtggcacatcatgatt

SEQ ID NO: 780390 - DNA, 19 bp, Mus musculus
  siRNA target sequence for Wdfy3 (NM_172882.2,7156-7174).
ccgagctgatccacagtaa

SEQ ID NO: 780391 - DNA, 19 bp, Mus musculus
  siRNA target sequence for Wdfy3 (NM_172882.2,7158-7176).
gagctgatccacagtaaga

SEQ ID NO: 780392 - DNA, 19 bp, Mus musculus
  siRNA target sequence for Wdfy3 (NM_172882.2,7277-7295).
gaaatgctggcagaatcat

SEQ ID NO: 780393 - DNA, 19 bp, Mus musculus
  siRNA target sequence for Wdfy3 (NM_172882.2,7304-7322).
cgagaagaaatgcataagt

SEQ ID NO: 780394 - DNA, 19 bp, Mus musculus
  siRNA target sequence for Wdfy3 (NM_172882.2,7446-7464).
ccttccccgcaggagattt

SEQ ID NO: 780395 - DNA, 19 bp, Mus musculus
  siRNA target sequence for Wdfy3 (NM_172882.2,7513-7531).
cacagtacaaggagtatca

SEQ ID NO: 780396 - DNA, 19 bp, Mus musculus
  siRNA target sequence for Wdfy3 (NM_172882.2,7673-7691).
ctgcagaatgcgcaagaaa

SEQ ID NO: 780397 - DNA, 19 bp, Mus musculus
  siRNA target sequence for Wdfy3 (NM_172882.2,7675-7693).
gcagaatgcgcaagaaaat

SEQ ID NO: 780398 - DNA, 19 bp, Mus musculus
  siRNA target sequence for Wdfy3 (NM_172882.2,7678-7696).
gaatgcgcaagaaaatggt

SEQ ID NO: 780399 - DNA, 19 bp, Mus musculus
  siRNA target sequence for Wdfy3 (NM_172882.2,7695-7713).
gtgcgcaacgacatgttct

SEQ ID NO: 780400 - DNA, 19 bp, Mus musculus
  siRNA target sequence for Wdfy3 (NM_172882.2,7698-7716).
cgcaacgacatgttctaca

SEQ ID NO: 780401 - DNA, 19 bp, Mus musculus
  siRNA target sequence for Wdfy3 (NM_172882.2,7699-7717).
gcaacgacatgttctacaa

SEQ ID NO: 780402 - DNA, 19 bp, Mus musculus
  siRNA target sequence for Wdfy3 (NM_172882.2,7773-7791).
cggtaccgaagagctataa

SEQ ID NO: 780403 - DNA, 19 bp, Mus musculus
  siRNA target sequence for Wdfy3 (NM_172882.2,7778-7796).
ccgaagagctataagctat

SEQ ID NO: 780404 - DNA, 19 bp, Mus musculus
  siRNA target sequence for Wdfy3 (NM_172882.2,7792-7810).
gctatgacagtaaagagta

SEQ ID NO: 780405 - DNA, 19 bp, Mus musculus
  siRNA target sequence for Wdfy3 (NM_172882.2,8162-8180).
cgggaaagagcatttctat

SEQ ID NO: 780406 - DNA, 19 bp, Mus musculus
  siRNA target sequence for Wdfy3 (NM_172882.2,8201-8219).
gactgccaccagggaaata

SEQ ID NO: 780407 - DNA, 19 bp, Mus musculus
  siRNA target sequence for Wdfy3 (NM_172882.2,8212-8230).
gggaaataagggacattga

SEQ ID NO: 780408 - DNA, 19 bp, Mus musculus
  siRNA target sequence for Wdfy3 (NM_172882.2,8300-8318).
gagaacctgcagcatcttt

SEQ ID NO: 780409 - DNA, 19 bp, Mus musculus
  siRNA target sequence for Wdfy3 (NM_172882.2,8339-8357).
ggtgcataaaaggagatat

SEQ ID NO: 780410 - DNA, 19 bp, Mus musculus
  siRNA target sequence for Wdfy3 (NM_172882.2,8363-8381).
ccagcctatcgctgttgaa

SEQ ID NO: 780411 - DNA, 19 bp, Mus musculus
  siRNA target sequence for Wdfy3 (NM_172882.2,8366-8384).
gcctatcgctgttgaagtt

SEQ ID NO: 780412 - DNA, 19 bp, Mus musculus
  siRNA target sequence for Wdfy3 (NM_172882.2,8367-8385).
cctatcgctgttgaagttt

SEQ ID NO: 780413 - DNA, 19 bp, Mus musculus
  siRNA target sequence for Wdfy3 (NM_172882.2,8372-8390).
cgctgttgaagttttctct

SEQ ID NO: 780414 - DNA, 19 bp, Mus musculus
  siRNA target sequence for Wdfy3 (NM_172882.2,8427-8445).
ggaattcggaataaagtct

SEQ ID NO: 780415 - DNA, 19 bp, Mus musculus
  siRNA target sequence for Wdfy3 (NM_172882.2,8428-8446).
gaattcggaataaagtcta

SEQ ID NO: 780416 - DNA, 19 bp, Mus musculus
  siRNA target sequence for Wdfy3 (NM_172882.2,8529-8547).
caagggtctgggttactca

SEQ ID NO: 780417 - DNA, 19 bp, Mus musculus
  siRNA target sequence for Wdfy3 (NM_172882.2,8602-8620).
gcaacttccagtatttgat

SEQ ID NO: 780418 - DNA, 19 bp, Mus musculus
  siRNA target sequence for Wdfy3 (NM_172882.2,8636-8654).
ggcaggcagatcttacaat

SEQ ID NO: 780419 - DNA, 19 bp, Mus musculus
  siRNA target sequence for Wdfy3 (NM_172882.2,8638-8656).
caggcagatcttacaatga

SEQ ID NO: 780420 - DNA, 19 bp, Mus musculus
  siRNA target sequence for Wdfy3 (NM_172882.2,8778-8796).
cggctggcccagtacaaga

SEQ ID NO: 780421 - DNA, 19 bp, Mus musculus
  siRNA target sequence for Wdfy3 (NM_172882.2,8846-8864).
ctacggcacccactattca

SEQ ID NO: 780422 - DNA, 19 bp, Mus musculus
  siRNA target sequence for Wdfy3 (NM_172882.2,8849-8867).
cggcacccactattcatct

SEQ ID NO: 780423 - DNA, 19 bp, Mus musculus
  siRNA target sequence for Wdfy3 (NM_172882.2,8880-8898).
gcctcatacctcgtaagaa

SEQ ID NO: 780424 - DNA, 19 bp, Mus musculus
  siRNA target sequence for Wdfy3 (NM_172882.2,8881-8899).
cctcatacctcgtaagaat

SEQ ID NO: 780425 - DNA, 19 bp, Mus musculus
  siRNA target sequence for Wdfy3 (NM_172882.2,9012-9030).
gcggatgtgaaggaactta

SEQ ID NO: 780426 - DNA, 19 bp, Mus musculus
  siRNA target sequence for Wdfy3 (NM_172882.2,9081-9099).
gatctaggctgtaaacaaa

SEQ ID NO: 780427 - DNA, 19 bp, Mus musculus
  siRNA target sequence for Wdfy3 (NM_172882.2,9104-9122).
caccaagcttggagatgtt

SEQ ID NO: 780428 - DNA, 19 bp, Mus musculus
  siRNA target sequence for Wdfy3 (NM_172882.2,9106-9124).
ccaagcttggagatgttat

SEQ ID NO: 780429 - DNA, 19 bp, Mus musculus
  siRNA target sequence for Wdfy3 (NM_172882.2,9145-9163).
gggacccacgagagttcat

SEQ ID NO: 780430 - DNA, 19 bp, Mus musculus
  siRNA target sequence for Wdfy3 (NM_172882.2,9147-9165).
gacccacgagagttcatca

SEQ ID NO: 780431 - DNA, 19 bp, Mus musculus
  siRNA target sequence for Wdfy3 (NM_172882.2,9181-9199).
ctctggagtgtgattacgt

SEQ ID NO: 780432 - DNA, 19 bp, Mus musculus
  siRNA target sequence for Wdfy3 (NM_172882.2,9262-9280).
ccgtagaggctgtgaatgt

SEQ ID NO: 780433 - DNA, 19 bp, Mus musculus
  siRNA target sequence for Wdfy3 (NM_172882.2,9279-9297).
gtcttccatcacctttttt

SEQ ID NO: 780434 - DNA, 19 bp, Mus musculus
  siRNA target sequence for Wdfy3 (NM_172882.2,9281-9299).
cttccatcaccttttttat

SEQ ID NO: 780435 - DNA, 19 bp, Mus musculus
  siRNA target sequence for Wdfy3 (NM_172882.2,9303-9321).
gggcaagtggatatctaca

SEQ ID NO: 780436 - DNA, 19 bp, Mus musculus
  siRNA target sequence for Wdfy3 (NM_172882.2,9347-9365).
ggccaccatcgggttcatt

SEQ ID NO: 780437 - DNA, 19 bp, Mus musculus
  siRNA target sequence for Wdfy3 (NM_172882.2,9348-9366).
gccaccatcgggttcatta

SEQ ID NO: 780438 - DNA, 19 bp, Mus musculus
  siRNA target sequence for Wdfy3 (NM_172882.2,9349-9367).
ccaccatcgggttcattaa

SEQ ID NO: 780439 - DNA, 19 bp, Mus musculus
  siRNA target sequence for Wdfy3 (NM_172882.2,9352-9370).
ccatcgggttcattaacaa

SEQ ID NO: 780440 - DNA, 19 bp, Mus musculus
  siRNA target sequence for Wdfy3 (NM_172882.2,9433-9451).
ggctgaatggagacaacat

SEQ ID NO: 780441 - DNA, 19 bp, Mus musculus
  siRNA target sequence for Wdfy3 (NM_172882.2,9475-9493).
ccacaagtgacaagatctt

SEQ ID NO: 780442 - DNA, 19 bp, Mus musculus
  siRNA target sequence for Wdfy3 (NM_172882.2,9476-9494).
cacaagtgacaagatcttt

SEQ ID NO: 780443 - DNA, 19 bp, Mus musculus
  siRNA target sequence for Wdfy3 (NM_172882.2,9523-9541).
ccctaacgcctgtgaaaga

SEQ ID NO: 780444 - DNA, 19 bp, Mus musculus
  siRNA target sequence for Wdfy3 (NM_172882.2,9524-9542).
cctaacgcctgtgaaagaa

SEQ ID NO: 780445 - DNA, 19 bp, Mus musculus
  siRNA target sequence for Wdfy3 (NM_172882.2,9692-9710).
caaggcagtgactgtttat

SEQ ID NO: 780446 - DNA, 19 bp, Mus musculus
  siRNA target sequence for Wdfy3 (NM_172882.2,9903-9921).
gcctaccacataattgtca

SEQ ID NO: 780447 - DNA, 19 bp, Mus musculus
  siRNA target sequence for Wdfy3 (NM_172882.2,10003-10021).
ccgtctccgctctttgcat

SEQ ID NO: 780448 - DNA, 19 bp, Mus musculus
  siRNA target sequence for Wdfy3 (NM_172882.2,10004-10022).
cgtctccgctctttgcatt

SEQ ID NO: 780449 - DNA, 19 bp, Mus musculus
  siRNA target sequence for Wdfy3 (NM_172882.2,10005-10023).
gtctccgctctttgcatta

SEQ ID NO: 780450 - DNA, 19 bp, Mus musculus
  siRNA target sequence for Wdfy3 (NM_172882.2,10007-10025).
ctccgctctttgcattaat

SEQ ID NO: 780451 - DNA, 19 bp, Mus musculus
  siRNA target sequence for Wdfy3 (NM_172882.2,10067-10085).
ccacgtgtggagcatcaat

SEQ ID NO: 780452 - DNA, 19 bp, Mus musculus
  siRNA target sequence for Wdfy3 (NM_172882.2,10098-10116).
gtgagtgtgaacacattca

SEQ ID NO: 780453 - DNA, 19 bp, Mus musculus
  siRNA target sequence for Wdfy3 (NM_172882.2,10122-10140).
cggagccagcagattgtct

SEQ ID NO: 780454 - DNA, 19 bp, Mus musculus
  siRNA target sequence for Wdfy3 (NM_172882.2,10168-10186).
gggacacgcagaatgtcat

SEQ ID NO: 780455 - DNA, 19 bp, Mus musculus
  siRNA target sequence for Wdfy3 (NM_172882.2,10214-10232).
ccggttctggagaatggaa

SEQ ID NO: 780456 - DNA, 19 bp, Mus musculus
  siRNA target sequence for Wdfy3 (NM_172882.2,10215-10233).
cggttctggagaatggaat

SEQ ID NO: 780457 - DNA, 19 bp, Mus musculus
  siRNA target sequence for Wdfy3 (NM_172882.2,10496-10514).
cgaccagctcagtctagat

SEQ ID NO: 780458 - DNA, 19 bp, Mus musculus
  siRNA target sequence for Wdfy3 (NM_172882.2,10502-10520).
gctcagtctagatgagaaa

SEQ ID NO: 780459 - DNA, 19 bp, Mus musculus
  siRNA target sequence for Wdfy3 (NM_172882.2,10614-10632).
cgcagttacagcagattga

SEQ ID NO: 780460 - DNA, 19 bp, Mus musculus
  siRNA target sequence for Wdfy3 (NM_172882.2,10648-10666).
gggagcggcagctggtatt

SEQ ID NO: 780461 - DNA, 19 bp, Mus musculus
  siRNA target sequence for Wdfy3 (NM_172882.2,10650-10668).
gagcggcagctggtattca

SEQ ID NO: 780462 - DNA, 19 bp, Mus musculus
  siRNA target sequence for Wdfy3 (NM_172882.2,10652-10670).
gcggcagctggtattcaga

SEQ ID NO: 780463 - DNA, 19 bp, Mus musculus
  siRNA target sequence for Wdfy3 (NM_172882.2,10658-10676).
gctggtattcagaagcaaa

SEQ ID NO: 780464 - DNA, 19 bp, Mus musculus
  siRNA target sequence for Wdfy3 (NM_172882.2,10662-10680).
gtattcagaagcaaactga

SEQ ID NO: 780465 - DNA, 19 bp, Mus musculus
  siRNA target sequence for Wdfy3 (NM_172882.2,10732-10750).
ccgcgttgggtgtatccaa

SEQ ID NO: 780466 - DNA, 19 bp, Mus musculus
  siRNA target sequence for 4732482E20Rik (NM_172883.1,99-117).
gcctagtccccgagtgtat

SEQ ID NO: 780467 - DNA, 19 bp, Mus musculus
  siRNA target sequence for 4732482E20Rik (NM_172883.1,254-272).
cactaatatactttgtgtt

SEQ ID NO: 780468 - DNA, 19 bp, Mus musculus
  siRNA target sequence for 4732482E20Rik (NM_172883.1,339-357).
cctgggtgcatggttgaat

SEQ ID NO: 780469 - DNA, 19 bp, Mus musculus
  siRNA target sequence for 4732482E20Rik (NM_172883.1,340-358).
ctgggtgcatggttgaatt

SEQ ID NO: 780470 - DNA, 19 bp, Mus musculus
  siRNA target sequence for 4732482E20Rik (NM_172883.1,342-360).
gggtgcatggttgaatttt

SEQ ID NO: 780471 - DNA, 19 bp, Mus musculus
  siRNA target sequence for 4732482E20Rik (NM_172883.1,343-361).
ggtgcatggttgaattttt

SEQ ID NO: 780472 - DNA, 19 bp, Mus musculus
  siRNA target sequence for 4732482E20Rik (NM_172883.1,517-535).
cgagccacagctaacatga

SEQ ID NO: 780473 - DNA, 19 bp, Mus musculus
  siRNA target sequence for 4732482E20Rik (NM_172883.1,518-536).
gagccacagctaacatgat

SEQ ID NO: 780474 - DNA, 19 bp, Mus musculus
  siRNA target sequence for 4732482E20Rik (NM_172883.1,534-552).
gatcagcaccatgtcaaat

SEQ ID NO: 780475 - DNA, 19 bp, Mus musculus
  siRNA target sequence for 4732482E20Rik (NM_172883.1,537-555).
cagcaccatgtcaaatcct

SEQ ID NO: 780476 - DNA, 19 bp, Mus musculus
  siRNA target sequence for 4732482E20Rik (NM_172883.1,558-576).
gggcctccttattgcaaat

SEQ ID NO: 780477 - DNA, 19 bp, Mus musculus
  siRNA target sequence for 4732482E20Rik (NM_172883.1,584-602).
ctcctgccctagtcaagaa

SEQ ID NO: 780478 - DNA, 19 bp, Mus musculus
  siRNA target sequence for 4732482E20Rik (NM_172883.1,605-623).
cagatgacatccctatgat

SEQ ID NO: 780479 - DNA, 19 bp, Mus musculus
  siRNA target sequence for 4732482E20Rik (NM_172883.1,715-733).
ggggctgccaactctactt

SEQ ID NO: 780480 - DNA, 19 bp, Mus musculus
  siRNA target sequence for 4732482E20Rik (NM_172883.1,752-770).
ggctcaaactgctcataca

SEQ ID NO: 780481 - DNA, 19 bp, Mus musculus
  siRNA target sequence for 4732482E20Rik (NM_172883.1,756-774).
caaactgctcatacagaat

SEQ ID NO: 780482 - DNA, 19 bp, Mus musculus
  siRNA target sequence for 4732482E20Rik (NM_172883.1,811-829).
ggcattggtgtcttctcta

SEQ ID NO: 780483 - DNA, 19 bp, Mus musculus
  siRNA target sequence for 4732482E20Rik (NM_172883.1,863-881).
ccagtggctattctaatga

SEQ ID NO: 780484 - DNA, 19 bp, Mus musculus
  siRNA target sequence for 4732482E20Rik (NM_172883.1,972-990).
caccgaagccaccaagata

SEQ ID NO: 780485 - DNA, 19 bp, Mus musculus
  siRNA target sequence for 4732482E20Rik (NM_172883.1,1164-1182).
ctctgctggcttgatcttt

SEQ ID NO: 780486 - DNA, 19 bp, Mus musculus
  siRNA target sequence for 4732482E20Rik (NM_172883.1,1243-1261).
cgaacgggtccatcctttt

SEQ ID NO: 780487 - DNA, 19 bp, Mus musculus
  siRNA target sequence for 2900026A02Rik (NM_172884.1,781-799).
gcccaggagggatgaatca

SEQ ID NO: 780488 - DNA, 19 bp, Mus musculus
  siRNA target sequence for 2900026A02Rik (NM_172884.1,1045-1063).
ctcgccccagtggctaaaa

SEQ ID NO: 780489 - DNA, 19 bp, Mus musculus
  siRNA target sequence for 2900026A02Rik (NM_172884.1,1047-1065).
cgccccagtggctaaaaga

SEQ ID NO: 780490 - DNA, 19 bp, Mus musculus
  siRNA target sequence for 2900026A02Rik (NM_172884.1,1087-1105).
gagcctgtatgagaatcaa

SEQ ID NO: 780491 - DNA, 19 bp, Mus musculus
  siRNA target sequence for C630028F04 (NM_172885.1,853-871).
ctcccggtcacctaccata

SEQ ID NO: 780492 - DNA, 19 bp, Mus musculus
  siRNA target sequence for C630028F04 (NM_172885.1,857-875).
cggtcacctaccatatcaa

SEQ ID NO: 780493 - DNA, 19 bp, Mus musculus
  siRNA target sequence for C630028F04 (NM_172885.1,859-877).
gtcacctaccatatcaaca

SEQ ID NO: 780494 - DNA, 19 bp, Mus musculus
  siRNA target sequence for C630028F04 (NM_172885.1,861-879).
cacctaccatatcaacaat

SEQ ID NO: 780495 - DNA, 19 bp, Mus musculus
  siRNA target sequence for C630028F04 (NM_172885.1,1056-1074).
caacccatttggattcact

SEQ ID NO: 780496 - DNA, 19 bp, Mus musculus
  siRNA target sequence for C630028F04 (NM_172885.1,1066-1084).
ggattcactaacacattct

SEQ ID NO: 780497 - DNA, 19 bp, Mus musculus
  siRNA target sequence for C630028F04 (NM_172885.1,1574-1592).
gcaatgtggctgttcatta

SEQ ID NO: 780498 - DNA, 19 bp, Mus musculus
  siRNA target sequence for C630028F04 (NM_172885.1,1692-1710).
gaaaggagtgagcattgtt

SEQ ID NO: 780499 - DNA, 19 bp, Mus musculus
  siRNA target sequence for C630028F04 (NM_172885.1,2135-2153).
ctgacgaagacgtggttaa

SEQ ID NO: 780500 - DNA, 19 bp, Mus musculus
  siRNA target sequence for C630028F04 (NM_172885.1,2139-2157).
cgaagacgtggttaaggtt

SEQ ID NO: 780501 - DNA, 19 bp, Mus musculus
  siRNA target sequence for C630028F04 (NM_172885.1,2140-2158).
gaagacgtggttaaggttt

SEQ ID NO: 780502 - DNA, 19 bp, Mus musculus
  siRNA target sequence for C630028F04 (NM_172885.1,2159-2177).
ctgacagatgtgactatgt

SEQ ID NO: 780503 - DNA, 19 bp, Mus musculus
  siRNA target sequence for C630028F04 (NM_172885.1,2408-2426).
gaggctgcacccttcagta

SEQ ID NO: 780504 - DNA, 19 bp, Mus musculus
  siRNA target sequence for C630028F04 (NM_172885.1,2442-2460).
gcgagtcttgacccaattt

SEQ ID NO: 780505 - DNA, 19 bp, Mus musculus
  siRNA target sequence for C630028F04 (NM_172885.1,2524-2542).
gacatcacggagctgataa

SEQ ID NO: 780506 - DNA, 19 bp, Mus musculus
  siRNA target sequence for C630028F04 (NM_172885.1,2526-2544).
catcacggagctgataact

SEQ ID NO: 780507 - DNA, 19 bp, Mus musculus
  siRNA target sequence for C630028F04 (NM_172885.1,2613-2631).
gctgggcatgaccactatt

SEQ ID NO: 780508 - DNA, 19 bp, Mus musculus
  siRNA target sequence for C630028F04 (NM_172885.1,2618-2636).
gcatgaccactattcagat

SEQ ID NO: 780509 - DNA, 19 bp, Mus musculus
  siRNA target sequence for C630028F04 (NM_172885.1,2869-2887).
gtcacacccttggacattt

SEQ ID NO: 780510 - DNA, 19 bp, Mus musculus
  siRNA target sequence for C630028F04 (NM_172885.1,2950-2968).
caggaccccaaattcaagt

SEQ ID NO: 780511 - DNA, 19 bp, Mus musculus
  siRNA target sequence for C630028F04 (NM_172885.1,3019-3037).
gagatgctcatcagtgaat

SEQ ID NO: 780512 - DNA, 19 bp, Mus musculus
  siRNA target sequence for C630028F04 (NM_172885.1,3021-3039).
gatgctcatcagtgaatct

SEQ ID NO: 780513 - DNA, 19 bp, Mus musculus
  siRNA target sequence for C630028F04 (NM_172885.1,3215-3233).
gccccgaggggccattcta

SEQ ID NO: 780514 - DNA, 19 bp, Mus musculus
  siRNA target sequence for C630028F04 (NM_172885.1,3217-3235).
cccgaggggccattctaca

SEQ ID NO: 780515 - DNA, 19 bp, Mus musculus
  siRNA target sequence for C630028F04 (NM_172885.1,3443-3461).
ggctgagtgacctcgaaat

SEQ ID NO: 780516 - DNA, 19 bp, Mus musculus
  siRNA target sequence for C630028F04 (NM_172885.1,3444-3462).
gctgagtgacctcgaaatt

SEQ ID NO: 780517 - DNA, 19 bp, Mus musculus
  siRNA target sequence for C630028F04 (NM_172885.1,3496-3514).
gctatcttggtgttcttaa

SEQ ID NO: 780518 - DNA, 19 bp, Mus musculus
  siRNA target sequence for C630028F04 (NM_172885.1,3622-3640).
gagctgttggggaaccata

SEQ ID NO: 780519 - DNA, 19 bp, Mus musculus
  siRNA target sequence for C630028F04 (NM_172885.1,3897-3915).
caccatggtgttgagtaat

SEQ ID NO: 780520 - DNA, 19 bp, Mus musculus
  siRNA target sequence for C630028F04 (NM_172885.1,3911-3929).
gtaatgaggatgacattaa

SEQ ID NO: 780521 - DNA, 19 bp, Mus musculus
  siRNA target sequence for D930046M03 (NM_172887.1,271-289).
gtgtgatcagcctcatcaa

SEQ ID NO: 780522 - DNA, 19 bp, Mus musculus
  siRNA target sequence for D930046M03 (NM_172887.1,374-392).
ggccatgttgccgatcaat

SEQ ID NO: 780523 - DNA, 19 bp, Mus musculus
  siRNA target sequence for D930046M03 (NM_172887.1,376-394).
ccatgttgccgatcaatgt

SEQ ID NO: 780524 - DNA, 19 bp, Mus musculus
  siRNA target sequence for D930046M03 (NM_172887.1,417-435).
gagtatgtcctcaagagtt

SEQ ID NO: 780525 - DNA, 19 bp, Mus musculus
  siRNA target sequence for D930046M03 (NM_172887.1,454-472).
ctcaggccgagcgtaagat

SEQ ID NO: 780526 - DNA, 19 bp, Mus musculus
  siRNA target sequence for D930046M03 (NM_172887.1,459-477).
gccgagcgtaagattcgaa

SEQ ID NO: 780527 - DNA, 19 bp, Mus musculus
  siRNA target sequence for D930046M03 (NM_172887.1,460-478).
ccgagcgtaagattcgaat

SEQ ID NO: 780528 - DNA, 19 bp, Mus musculus
  siRNA target sequence for D930046M03 (NM_172887.1,465-483).
cgtaagattcgaatcatca

SEQ ID NO: 780529 - DNA, 19 bp, Mus musculus
  siRNA target sequence for D930046M03 (NM_172887.1,466-484).
gtaagattcgaatcatcat

SEQ ID NO: 780530 - DNA, 19 bp, Mus musculus
  siRNA target sequence for D930046M03 (NM_172887.1,645-663).
gacgagtcacacgaataca

SEQ ID NO: 780531 - DNA, 19 bp, Mus musculus
  siRNA target sequence for D930046M03 (NM_172887.1,666-684).
ccacgaacaagcaataagt

SEQ ID NO: 780532 - DNA, 19 bp, Mus musculus
  siRNA target sequence for D930046M03 (NM_172887.1,676-694).
gcaataagtccaaaagtga

SEQ ID NO: 780533 - DNA, 19 bp, Mus musculus
  siRNA target sequence for D930046M03 (NM_172887.1,677-695).
caataagtccaaaagtgat

SEQ ID NO: 780534 - DNA, 19 bp, Mus musculus
  siRNA target sequence for D930046M03 (NM_172887.1,699-717).
cagcagcgagactatttaa

SEQ ID NO: 780535 - DNA, 19 bp, Mus musculus
  siRNA target sequence for D930046M03 (NM_172887.1,726-744).
cgggaccttgccattgatt

SEQ ID NO: 780536 - DNA, 19 bp, Mus musculus
  siRNA target sequence for D930046M03 (NM_172887.1,785-803).
cccccttcatcctgtaatt

SEQ ID NO: 780537 - DNA, 19 bp, Mus musculus
  siRNA target sequence for D930046M03 (NM_172887.1,808-826).
gcttaatacatgatattat

SEQ ID NO: 780538 - DNA, 19 bp, Mus musculus
  siRNA target sequence for D930046M03 (NM_172887.1,871-889).
gtcccaacactggcaatat

SEQ ID NO: 780539 - DNA, 19 bp, Mus musculus
  siRNA target sequence for D930046M03 (NM_172887.1,880-898).
ctggcaatatgcacattgt

SEQ ID NO: 780540 - DNA, 19 bp, Mus musculus
  siRNA target sequence for D930046M03 (NM_172887.1,1110-1128).
caggaatgcgcgcattact

SEQ ID NO: 780541 - DNA, 19 bp, Mus musculus
  siRNA target sequence for D930046M03 (NM_172887.1,1112-1130).
ggaatgcgcgcattacttt

SEQ ID NO: 780542 - DNA, 19 bp, Mus musculus
  siRNA target sequence for D930046M03 (NM_172887.1,1280-1298).
ctcctctcggaaaaagcat

SEQ ID NO: 780543 - DNA, 19 bp, Mus musculus
  siRNA target sequence for D930046M03 (NM_172887.1,1369-1387).
ggcatgttttcctcaacaa

SEQ ID NO: 780544 - DNA, 19 bp, Mus musculus
  siRNA target sequence for D930046M03 (NM_172887.1,1390-1408).
gcttgtccaaccttaagaa

SEQ ID NO: 780545 - DNA, 19 bp, Mus musculus
  siRNA target sequence for D930046M03 (NM_172887.1,1391-1409).
cttgtccaaccttaagaat

SEQ ID NO: 780546 - DNA, 19 bp, Mus musculus
  siRNA target sequence for D930046M03 (NM_172887.1,1429-1447).
gcgttgccttggaatctct

SEQ ID NO: 780547 - DNA, 19 bp, Mus musculus
  siRNA target sequence for D930046M03 (NM_172887.1,1439-1457).
ggaatctctctacagatta

SEQ ID NO: 780548 - DNA, 19 bp, Mus musculus
  siRNA target sequence for D930046M03 (NM_172887.1,1462-1480).
gggtttacatgattcgaat

SEQ ID NO: 780549 - DNA, 19 bp, Mus musculus
  siRNA target sequence for D930046M03 (NM_172887.1,1469-1487).
catgattcgaatcaaatgt

SEQ ID NO: 780550 - DNA, 19 bp, Mus musculus
  siRNA target sequence for D930046M03 (NM_172887.1,1472-1490).
gattcgaatcaaatgtgaa

SEQ ID NO: 780551 - DNA, 19 bp, Mus musculus
  siRNA target sequence for D930046M03 (NM_172887.1,1502-1520).
cactcagagccgactcata

SEQ ID NO: 780552 - DNA, 19 bp, Mus musculus
  siRNA target sequence for D930046M03 (NM_172887.1,1506-1524).
cagagccgactcataacca

SEQ ID NO: 780553 - DNA, 19 bp, Mus musculus
  siRNA target sequence for D930046M03 (NM_172887.1,1744-1762).
ctgatagcctacaacaaaa

SEQ ID NO: 780554 - DNA, 19 bp, Mus musculus
  siRNA target sequence for D930046M03 (NM_172887.1,1863-1881).
gaagccaaaatgataggaa

SEQ ID NO: 780555 - DNA, 19 bp, Mus musculus
  siRNA target sequence for D930046M03 (NM_172887.1,1878-1896).
ggaatgtccttgtattact

SEQ ID NO: 780556 - DNA, 19 bp, Mus musculus
  siRNA target sequence for D930046M03 (NM_172887.1,1910-1928).
ggccgtaggcaatatctta

SEQ ID NO: 780557 - DNA, 19 bp, Mus musculus
  siRNA target sequence for D930046M03 (NM_172887.1,1911-1929).
gccgtaggcaatatcttaa

SEQ ID NO: 780558 - DNA, 19 bp, Mus musculus
  siRNA target sequence for D930046M03 (NM_172887.1,1973-1991).
cgtccagatgctaaacaaa

SEQ ID NO: 780559 - DNA, 19 bp, Mus musculus
  siRNA target sequence for D930046M03 (NM_172887.1,1992-2010).
gagccggaagatatgatca

SEQ ID NO: 780560 - DNA, 19 bp, Mus musculus
  siRNA target sequence for D930046M03 (NM_172887.1,2015-2033).
cgagagaaagcccaagata

SEQ ID NO: 780561 - DNA, 19 bp, Mus musculus
  siRNA target sequence for D930046M03 (NM_172887.1,2083-2101).
ggatgtccaaacttgaact

SEQ ID NO: 780562 - DNA, 19 bp, Mus musculus
  siRNA target sequence for D930046M03 (NM_172887.1,2087-2105).
gtccaaacttgaacttatt

SEQ ID NO: 780563 - DNA, 19 bp, Mus musculus
  siRNA target sequence for D930046M03 (NM_172887.1,2089-2107).
ccaaacttgaacttattga

SEQ ID NO: 780564 - DNA, 19 bp, Mus musculus
  siRNA target sequence for D930046M03 (NM_172887.1,2111-2129).
gctagccagactctctatt

SEQ ID NO: 780565 - DNA, 19 bp, Mus musculus
  siRNA target sequence for D930046M03 (NM_172887.1,2115-2133).
gccagactctctattcata

SEQ ID NO: 780566 - DNA, 19 bp, Mus musculus
  siRNA target sequence for D930046M03 (NM_172887.1,2119-2137).
gactctctattcatatgga

SEQ ID NO: 780567 - DNA, 19 bp, Mus musculus
  siRNA target sequence for D930046M03 (NM_172887.1,2234-2252).
cctgctccgggaagtaaat

SEQ ID NO: 780568 - DNA, 19 bp, Mus musculus
  siRNA target sequence for D930046M03 (NM_172887.1,2271-2289).
ctggactcctccctaaagt

SEQ ID NO: 780569 - DNA, 19 bp, Mus musculus
  siRNA target sequence for D930046M03 (NM_172887.1,2502-2520).
ctgtcggtgctgatactca

SEQ ID NO: 780570 - DNA, 19 bp, Mus musculus
  siRNA target sequence for D930046M03 (NM_172887.1,2564-2582).
cgatgacaggccaatgatt

SEQ ID NO: 780571 - DNA, 19 bp, Mus musculus
  siRNA target sequence for D930046M03 (NM_172887.1,2624-2642).
cattcatgtggcagtttca

SEQ ID NO: 780572 - DNA, 19 bp, Mus musculus
  siRNA target sequence for A230058J24 (NM_172889.1,60-78).
gcctccactcgctaacgta

SEQ ID NO: 780573 - DNA, 19 bp, Mus musculus
  siRNA target sequence for A230058J24 (NM_172889.1,375-393).
gcagttgcacggcgattta

SEQ ID NO: 780574 - DNA, 19 bp, Mus musculus
  siRNA target sequence for A230058J24 (NM_172889.1,692-710).
gttgtcaggtggcagataa

SEQ ID NO: 780575 - DNA, 19 bp, Mus musculus
  siRNA target sequence for A230058J24 (NM_172889.1,695-713).
gtcaggtggcagataagct

SEQ ID NO: 780576 - DNA, 19 bp, Mus musculus
  siRNA target sequence for A230058J24 (NM_172889.1,994-1012).
gtccgagctggcatttgga

SEQ ID NO: 780577 - DNA, 19 bp, Mus musculus
  siRNA target sequence for B430201G11Rik (NM_172894.2,687-705).
gagcggctacgctacaagt

SEQ ID NO: 780578 - DNA, 19 bp, Mus musculus
  siRNA target sequence for B430201G11Rik (NM_172894.2,698-716).
ctacaagtaccctagtgta

SEQ ID NO: 780579 - DNA, 19 bp, Mus musculus
  siRNA target sequence for B430201G11Rik (NM_172894.2,708-726).
cctagtgtagcctgtgaaa

SEQ ID NO: 780580 - DNA, 19 bp, Mus musculus
  siRNA target sequence for B430201G11Rik (NM_172894.2,709-727).
ctagtgtagcctgtgaaat

SEQ ID NO: 780581 - DNA, 19 bp, Mus musculus
  siRNA target sequence for B430201G11Rik (NM_172894.2,1650-1668).
cactatgtattcaacaact

SEQ ID NO: 780582 - DNA, 19 bp, Mus musculus
  siRNA target sequence for B430201G11Rik (NM_172894.2,1753-1771).
caaaccctatcgtgaaaca

SEQ ID NO: 780583 - DNA, 19 bp, Mus musculus
  siRNA target sequence for B430201G11Rik (NM_172894.2,2004-2022).
ctggccgagaccaacaaga

SEQ ID NO: 780584 - DNA, 19 bp, Mus musculus
  siRNA target sequence for B430201G11Rik (NM_172894.2,2085-2103).
cgcctcaaggagttcaact

SEQ ID NO: 780585 - DNA, 19 bp, Mus musculus
  siRNA target sequence for B430201G11Rik (NM_172894.2,2086-2104).
gcctcaaggagttcaactt

SEQ ID NO: 780586 - DNA, 19 bp, Mus musculus
  siRNA target sequence for B430201G11Rik (NM_172894.2,2107-2125).
ctgaggaggctgtattgca

SEQ ID NO: 780587 - DNA, 19 bp, Mus musculus
  siRNA target sequence for B430201G11Rik (NM_172894.2,2223-2241).
gtgaatgcaccatttgaca

SEQ ID NO: 780588 - DNA, 19 bp, Mus musculus
  siRNA target sequence for B430201G11Rik (NM_172894.2,2252-2270).
cattaccttctccctaaat

SEQ ID NO: 780589 - DNA, 19 bp, Mus musculus
  siRNA target sequence for B430201G11Rik (NM_172894.2,2292-2310).
gccaacctgcttgagatat

SEQ ID NO: 780590 - DNA, 19 bp, Mus musculus
  siRNA target sequence for B430201G11Rik (NM_172894.2,2321-2339).
ccggatccagcagtttgat

SEQ ID NO: 780591 - DNA, 19 bp, Mus musculus
  siRNA target sequence for B430201G11Rik (NM_172894.2,2324-2342).
gatccagcagtttgatgat

SEQ ID NO: 780592 - DNA, 19 bp, Mus musculus
  siRNA target sequence for B430201G11Rik (NM_172894.2,2796-2814).
ccctgccaggccttggtta

SEQ ID NO: 780593 - DNA, 19 bp, Mus musculus
  siRNA target sequence for B430201G11Rik (NM_172894.2,3014-3032).
cccaggagggcctatttca

SEQ ID NO: 780594 - DNA, 19 bp, Mus musculus
  siRNA target sequence for B430201G11Rik (NM_172894.2,3015-3033).
ccaggagggcctatttcat

SEQ ID NO: 780595 - DNA, 19 bp, Mus musculus
  siRNA target sequence for 4930401F20 (NM_172895.1,561-579).
gcctgtatgtcgatgatct

SEQ ID NO: 780596 - DNA, 19 bp, Mus musculus
  siRNA target sequence for 4930401F20 (NM_172895.1,675-693).
gctggattcgcctcatcaa

SEQ ID NO: 780597 - DNA, 19 bp, Mus musculus
  siRNA target sequence for 4930401F20 (NM_172895.1,678-696).
ggattcgcctcatcaacat

SEQ ID NO: 780598 - DNA, 19 bp, Mus musculus
  siRNA target sequence for 4930401F20 (NM_172895.1,698-716).
cttcgagggcctaaattat

SEQ ID NO: 780599 - DNA, 19 bp, Mus musculus
  siRNA target sequence for 4930401F20 (NM_172895.1,701-719).
cgagggcctaaattatcca

SEQ ID NO: 780600 - DNA, 19 bp, Mus musculus
  siRNA target sequence for 4930401F20 (NM_172895.1,702-720).
gagggcctaaattatccaa

SEQ ID NO: 780601 - DNA, 19 bp, Mus musculus
  siRNA target sequence for 4930401F20 (NM_172895.1,801-819).
ctcaaggcaaacttacagt

SEQ ID NO: 780602 - DNA, 19 bp, Mus musculus
  siRNA target sequence for 4930401F20 (NM_172895.1,808-826).
caaacttacagttgaagtt

SEQ ID NO: 780603 - DNA, 19 bp, Mus musculus
  siRNA target sequence for 4930401F20 (NM_172895.1,952-970).
gtcacaactgcaatcttct

SEQ ID NO: 780604 - DNA, 19 bp, Mus musculus
  siRNA target sequence for 4930401F20 (NM_172895.1,1026-1044).
gatccgaacctctaatcca

SEQ ID NO: 780605 - DNA, 19 bp, Mus musculus
  siRNA target sequence for 4930401F20 (NM_172895.1,1108-1126).
ccaggcccacaaatctgat

SEQ ID NO: 780606 - DNA, 19 bp, Mus musculus
  siRNA target sequence for 4930401F20 (NM_172895.1,1140-1158).
caagccagggtcgtctaat

SEQ ID NO: 780607 - DNA, 19 bp, Mus musculus
  siRNA target sequence for 4930401F20 (NM_172895.1,1143-1161).
gccagggtcgtctaatgga

SEQ ID NO: 780608 - DNA, 19 bp, Mus musculus
  siRNA target sequence for 4930401F20 (NM_172895.1,1145-1163).
cagggtcgtctaatggaaa

SEQ ID NO: 780609 - DNA, 19 bp, Mus musculus
  siRNA target sequence for 4930401F20 (NM_172895.1,1207-1225).
cacggtttcctctaatcaa

SEQ ID NO: 780610 - DNA, 19 bp, Mus musculus
  siRNA target sequence for 4930401F20 (NM_172895.1,1209-1227).
cggtttcctctaatcaact

SEQ ID NO: 780611 - DNA, 19 bp, Mus musculus
  siRNA target sequence for 4930401F20 (NM_172895.1,1421-1439).
gcatgtgtccccatcgaat

SEQ ID NO: 780612 - DNA, 19 bp, Mus musculus
  siRNA target sequence for 4930401F20 (NM_172895.1,1430-1448).
cccatcgaatcgaggaaaa

SEQ ID NO: 780613 - DNA, 19 bp, Mus musculus
  siRNA target sequence for 4930401F20 (NM_172895.1,1431-1449).
ccatcgaatcgaggaaaat

SEQ ID NO: 780614 - DNA, 19 bp, Mus musculus
  siRNA target sequence for 4930401F20 (NM_172895.1,1574-1592).
ggtgcacttggccatttct

SEQ ID NO: 780615 - DNA, 19 bp, Mus musculus
  siRNA target sequence for 4930401F20 (NM_172895.1,1575-1593).
gtgcacttggccatttctt

SEQ ID NO: 780616 - DNA, 19 bp, Mus musculus
  siRNA target sequence for 4930401F20 (NM_172895.1,1643-1661).
cccttgaagccccaagtta

SEQ ID NO: 780617 - DNA, 19 bp, Mus musculus
  siRNA target sequence for 4930401F20 (NM_172895.1,1734-1752).
ccatgcacaccaaaaagga

SEQ ID NO: 780618 - DNA, 19 bp, Mus musculus
  siRNA target sequence for 4930401F20 (NM_172895.1,1743-1761).
ccaaaaaggaccatctaat

SEQ ID NO: 780619 - DNA, 19 bp, Mus musculus
  siRNA target sequence for 4930401F20 (NM_172895.1,1744-1762).
caaaaaggaccatctaatt

SEQ ID NO: 780620 - DNA, 19 bp, Mus musculus
  siRNA target sequence for 4930401F20 (NM_172895.1,1750-1768).
ggaccatctaattgtaaat

SEQ ID NO: 780621 - DNA, 19 bp, Mus musculus
  siRNA target sequence for 4930401F20 (NM_172895.1,1836-1854).
gggatcccaggacattaca

SEQ ID NO: 780622 - DNA, 19 bp, Mus musculus
  siRNA target sequence for 4930401F20 (NM_172895.1,1912-1930).
gggagggcagaatacaaca

SEQ ID NO: 780623 - DNA, 19 bp, Mus musculus
  siRNA target sequence for 4930401F20 (NM_172895.1,2173-2191).
ggacaataggcctttctct

SEQ ID NO: 780624 - DNA, 19 bp, Mus musculus
  siRNA target sequence for 4930401F20 (NM_172895.1,2252-2270).
gaagccagctactatctct

SEQ ID NO: 780625 - DNA, 19 bp, Mus musculus
  siRNA target sequence for E330028A19Rik (NM_172896.1,513-531).
gatatgaccttcagatttt

SEQ ID NO: 780626 - DNA, 19 bp, Mus musculus
  siRNA target sequence for E330028A19Rik (NM_172896.1,637-655).
gttccagagcattcactat

SEQ ID NO: 780627 - DNA, 19 bp, Mus musculus
  siRNA target sequence for E330028A19Rik (NM_172896.1,641-659).
cagagcattcactattagt

SEQ ID NO: 780628 - DNA, 19 bp, Mus musculus
  siRNA target sequence for E330028A19Rik (NM_172896.1,646-664).
cattcactattagtattca

SEQ ID NO: 780629 - DNA, 19 bp, Mus musculus
  siRNA target sequence for E330028A19Rik (NM_172896.1,652-670).
ctattagtattcagaattt

SEQ ID NO: 780630 - DNA, 19 bp, Mus musculus
  siRNA target sequence for E330028A19Rik (NM_172896.1,711-729).
gagaaccttttccaatcaa

SEQ ID NO: 780631 - DNA, 19 bp, Mus musculus
  siRNA target sequence for E330028A19Rik (NM_172896.1,723-741).
caatcaaagggcactgaat

SEQ ID NO: 780632 - DNA, 19 bp, Mus musculus
  siRNA target sequence for E330028A19Rik (NM_172896.1,831-849).
ccagtgtttctgcacaaat

SEQ ID NO: 780633 - DNA, 19 bp, Mus musculus
  siRNA target sequence for E330028A19Rik (NM_172896.1,832-850).
cagtgtttctgcacaaatt

SEQ ID NO: 780634 - DNA, 19 bp, Mus musculus
  siRNA target sequence for E330028A19Rik (NM_172896.1,1229-1247).
gatgagtttccacagatta

SEQ ID NO: 780635 - DNA, 19 bp, Mus musculus
  siRNA target sequence for E330028A19Rik (NM_172896.1,1391-1409).
ctccatttgccgttgtact

SEQ ID NO: 780636 - DNA, 19 bp, Mus musculus
  siRNA target sequence for E330028A19Rik (NM_172896.1,1607-1625).
cattggaatgcttataaat

SEQ ID NO: 780637 - DNA, 19 bp, Mus musculus
  siRNA target sequence for E330028A19Rik (NM_172896.1,1741-1759).
gtatagagaaactcatgtt

SEQ ID NO: 780638 - DNA, 19 bp, Mus musculus
  siRNA target sequence for E330028A19Rik (NM_172896.1,1985-2003).
cgatgacaccttcttagta

SEQ ID NO: 780639 - DNA, 19 bp, Mus musculus
  siRNA target sequence for E330028A19Rik (NM_172896.1,2238-2256).
gacactaatctcagtgaat

SEQ ID NO: 780640 - DNA, 19 bp, Mus musculus
  siRNA target sequence for E330028A19Rik (NM_172896.1,2294-2312).
caactacacccttaacgtt

SEQ ID NO: 780641 - DNA, 19 bp, Mus musculus
  siRNA target sequence for E330028A19Rik (NM_172896.1,2309-2327).
cgttcttgtggcaaataat

SEQ ID NO: 780642 - DNA, 19 bp, Mus musculus
  siRNA target sequence for E330028A19Rik (NM_172896.1,2377-2395).
gcaatttacagcacttgaa

SEQ ID NO: 780643 - DNA, 19 bp, Mus musculus
  siRNA target sequence for E330028A19Rik (NM_172896.1,2483-2501).
ggtagcagcttgtagtatt

SEQ ID NO: 780644 - DNA, 19 bp, Mus musculus
  siRNA target sequence for E330028A19Rik (NM_172896.1,2484-2502).
gtagcagcttgtagtattt

SEQ ID NO: 780645 - DNA, 19 bp, Mus musculus
  siRNA target sequence for E330028A19Rik (NM_172896.1,2891-2909).
cctggtcagcctacaagtt

SEQ ID NO: 780646 - DNA, 19 bp, Mus musculus
  siRNA target sequence for E330028A19Rik (NM_172896.1,2892-2910).
ctggtcagcctacaagttt

SEQ ID NO: 780647 - DNA, 19 bp, Mus musculus
  siRNA target sequence for E330028A19Rik (NM_172896.1,3027-3045).
gaggaccttgcatctacat

SEQ ID NO: 780648 - DNA, 19 bp, Mus musculus
  siRNA target sequence for E330028A19Rik (NM_172896.1,3040-3058).
ctacatttactcagtgtaa

SEQ ID NO: 780649 - DNA, 19 bp, Mus musculus
  siRNA target sequence for E330028A19Rik (NM_172896.1,3067-3085).
gggcaatgaacctactgaa

SEQ ID NO: 780650 - DNA, 19 bp, Mus musculus
  siRNA target sequence for E330028A19Rik (NM_172896.1,3148-3166).
ccacatacgtacttggatt

SEQ ID NO: 780651 - DNA, 19 bp, Mus musculus
  siRNA target sequence for E330028A19Rik (NM_172896.1,3156-3174).
gtacttggattgcaaatta

SEQ ID NO: 780652 - DNA, 19 bp, Mus musculus
  siRNA target sequence for E330028A19Rik (NM_172896.1,3228-3246).
ccatgcttgcgcatcctaa

SEQ ID NO: 780653 - DNA, 19 bp, Mus musculus
  siRNA target sequence for 4930432E11 (NM_172897.1,91-109).
catcctactgcctgttaat

SEQ ID NO: 780654 - DNA, 19 bp, Mus musculus
  siRNA target sequence for 4930432E11 (NM_172897.1,95-113).
ctactgcctgttaatagct

SEQ ID NO: 780655 - DNA, 19 bp, Mus musculus
  siRNA target sequence for 4930432E11 (NM_172897.1,98-116).
ctgcctgttaatagcttat

SEQ ID NO: 780656 - DNA, 19 bp, Mus musculus
  siRNA target sequence for 4930432E11 (NM_172897.1,101-119).
cctgttaatagcttattgt

SEQ ID NO: 780657 - DNA, 19 bp, Mus musculus
  siRNA target sequence for 4930432E11 (NM_172897.1,149-167).
ccatcaccaggagttcata

SEQ ID NO: 780658 - DNA, 19 bp, Mus musculus
  siRNA target sequence for 4930432E11 (NM_172897.1,175-193).
gtacagttccctgtcattt

SEQ ID NO: 780659 - DNA, 19 bp, Mus musculus
  siRNA target sequence for 4930432E11 (NM_172897.1,183-201).
ccctgtcatttcttcatca

SEQ ID NO: 780660 - DNA, 19 bp, Mus musculus
  siRNA target sequence for 4930432E11 (NM_172897.1,387-405).
gagagtgtagtgagagttt

SEQ ID NO: 780661 - DNA, 19 bp, Mus musculus
  siRNA target sequence for 4930432E11 (NM_172897.1,389-407).
gagtgtagtgagagttttt

SEQ ID NO: 780662 - DNA, 19 bp, Mus musculus
  siRNA target sequence for 4930432E11 (NM_172897.1,539-557).
ctatgcttggaatttagat

SEQ ID NO: 780663 - DNA, 19 bp, Mus musculus
  siRNA target sequence for 4930432E11 (NM_172897.1,560-578).
cagtaagtttctcaatagt

SEQ ID NO: 780664 - DNA, 19 bp, Mus musculus
  siRNA target sequence for 4930432E11 (NM_172897.1,588-606).
cacccctcatccgtgatat

SEQ ID NO: 780665 - DNA, 19 bp, Mus musculus
  siRNA target sequence for 4930432E11 (NM_172897.1,646-664).
caggcagcgatggtatgtt

SEQ ID NO: 780666 - DNA, 19 bp, Mus musculus
  siRNA target sequence for 4930432E11 (NM_172897.1,648-666).
ggcagcgatggtatgttga

SEQ ID NO: 780667 - DNA, 19 bp, Mus musculus
  siRNA target sequence for 4930432E11 (NM_172897.1,649-667).
gcagcgatggtatgttgaa

SEQ ID NO: 780668 - DNA, 19 bp, Mus musculus
  siRNA target sequence for 4930432E11 (NM_172897.1,678-696).
ctcgcctctgggaacttgt

SEQ ID NO: 780669 - DNA, 19 bp, Mus musculus
  siRNA target sequence for 4930432E11 (NM_172897.1,695-713).
gttgaggcagcttactgtt

SEQ ID NO: 780670 - DNA, 19 bp, Mus musculus
  siRNA target sequence for 4930432E11 (NM_172897.1,765-783).
cagaacacgtctagtttct

SEQ ID NO: 780671 - DNA, 19 bp, Mus musculus
  siRNA target sequence for 4930432E11 (NM_172897.1,845-863).
gatacaacgggtcttttgt

SEQ ID NO: 780672 - DNA, 19 bp, Mus musculus
  siRNA target sequence for 4930432E11 (NM_172897.1,892-910).
ccacagaggacagtttact

SEQ ID NO: 780673 - DNA, 19 bp, Mus musculus
  siRNA target sequence for 4930432E11 (NM_172897.1,981-999).
gtggcttgggcctatcact

SEQ ID NO: 780674 - DNA, 19 bp, Mus musculus
  siRNA target sequence for 4930432E11 (NM_172897.1,1033-1051).
gctcggagctgctagtgtt

SEQ ID NO: 780675 - DNA, 19 bp, Mus musculus
  siRNA target sequence for 4930432E11 (NM_172897.1,1034-1052).
ctcggagctgctagtgttt

SEQ ID NO: 780676 - DNA, 19 bp, Mus musculus
  siRNA target sequence for 4930432E11 (NM_172897.1,1066-1084).
ccccatgcccagccaaata

SEQ ID NO: 780677 - DNA, 19 bp, Mus musculus
  siRNA target sequence for 4930432E11 (NM_172897.1,1067-1085).
cccatgcccagccaaatat

SEQ ID NO: 780678 - DNA, 19 bp, Mus musculus
  siRNA target sequence for 4930432E11 (NM_172897.1,1096-1114).
cttcggaaaactacaaaga

SEQ ID NO: 780679 - DNA, 19 bp, Mus musculus
  siRNA target sequence for 4930432E11 (NM_172897.1,1146-1164).
catttggtcggcagtaaaa

SEQ ID NO: 780680 - DNA, 19 bp, Mus musculus
  siRNA target sequence for 4930432E11 (NM_172897.1,1193-1211).
cggcattgtgagaatccta

SEQ ID NO: 780681 - DNA, 19 bp, Mus musculus
  siRNA target sequence for 4930432E11 (NM_172897.1,1194-1212).
ggcattgtgagaatcctat

SEQ ID NO: 780682 - DNA, 19 bp, Mus musculus
  siRNA target sequence for 4930432E11 (NM_172897.1,1312-1330).
cctatggtaaggacaacta

SEQ ID NO: 780683 - DNA, 19 bp, Mus musculus
  siRNA target sequence for 4930432E11 (NM_172897.1,1397-1415).
ctgtgtgtgtcccttaaaa

SEQ ID NO: 780684 - DNA, 19 bp, Mus musculus
  siRNA target sequence for 4930432E11 (NM_172897.1,1475-1493).
ctggcactatcaagattct

SEQ ID NO: 780685 - DNA, 19 bp, Mus musculus
  siRNA target sequence for 4930432E11 (NM_172897.1,1478-1496).
gcactatcaagattctaca

SEQ ID NO: 780686 - DNA, 19 bp, Mus musculus
  siRNA target sequence for 4930432E11 (NM_172897.1,1479-1497).
cactatcaagattctacaa

SEQ ID NO: 780687 - DNA, 19 bp, Mus musculus
  siRNA target sequence for 4930432E11 (NM_172897.1,1499-1517).
ggcagcaccatcgtctaat

SEQ ID NO: 780688 - DNA, 19 bp, Mus musculus
  siRNA target sequence for 4930432E11 (NM_172897.1,1552-1570).
gtgctgtcacttcatttga

SEQ ID NO: 780689 - DNA, 19 bp, Mus musculus
  siRNA target sequence for 4930432E11 (NM_172897.1,1634-1652).
cttccgtgggaaactcata

SEQ ID NO: 780690 - DNA, 19 bp, Mus musculus
  siRNA target sequence for 4930432E11 (NM_172897.1,1637-1655).
ccgtgggaaactcataact

SEQ ID NO: 780691 - DNA, 19 bp, Mus musculus
  siRNA target sequence for 4930432E11 (NM_172897.1,1641-1659).
gggaaactcataactcatt

SEQ ID NO: 780692 - DNA, 19 bp, Mus musculus
  siRNA target sequence for 4930432E11 (NM_172897.1,1642-1660).
ggaaactcataactcattt

SEQ ID NO: 780693 - DNA, 19 bp, Mus musculus
  siRNA target sequence for 4930432E11 (NM_172897.1,1649-1667).
cataactcattttgaatct

SEQ ID NO: 780694 - DNA, 19 bp, Mus musculus
  siRNA target sequence for 4930432E11 (NM_172897.1,1708-1726).
gtgacctgctcttgacttt

SEQ ID NO: 780695 - DNA, 19 bp, Mus musculus
  siRNA target sequence for 4930432E11 (NM_172897.1,1774-1792).
gttacctgataaacctaaa

SEQ ID NO: 780696 - DNA, 19 bp, Mus musculus
  siRNA target sequence for 4930432E11 (NM_172897.1,1778-1796).
cctgataaacctaaacact

SEQ ID NO: 780697 - DNA, 19 bp, Mus musculus
  siRNA target sequence for 4930432E11 (NM_172897.1,1779-1797).
ctgataaacctaaacactt

SEQ ID NO: 780698 - DNA, 19 bp, Mus musculus
  siRNA target sequence for 4930432E11 (NM_172897.1,1801-1819).
ccttcgaagaagatacgat

SEQ ID NO: 780699 - DNA, 19 bp, Mus musculus
  siRNA target sequence for 4930432E11 (NM_172897.1,1802-1820).
cttcgaagaagatacgata

SEQ ID NO: 780700 - DNA, 19 bp, Mus musculus
  siRNA target sequence for 4930432E11 (NM_172897.1,1875-1893).
gtacccaaattcatataca

SEQ ID NO: 780701 - DNA, 19 bp, Mus musculus
  siRNA target sequence for 4930432E11 (NM_172897.1,1919-1937).
ggggctagagactcttatt

SEQ ID NO: 780702 - DNA, 19 bp, Mus musculus
  siRNA target sequence for 4930432E11 (NM_172897.1,1920-1938).
gggctagagactcttatta

SEQ ID NO: 780703 - DNA, 19 bp, Mus musculus
  siRNA target sequence for 4930432E11 (NM_172897.1,1940-1958).
caaacgggccattgctttt

SEQ ID NO: 780704 - DNA, 19 bp, Mus musculus
  siRNA target sequence for 4930432E11 (NM_172897.1,1980-1998).
gtagaggagggcagacata

SEQ ID NO: 780705 - DNA, 19 bp, Mus musculus
  siRNA target sequence for 4930432E11 (NM_172897.1,1983-2001).
gaggagggcagacatacat

SEQ ID NO: 780706 - DNA, 19 bp, Mus musculus
  siRNA target sequence for 4930432E11 (NM_172897.1,2018-2036).
gagaactagattgtacttt

SEQ ID NO: 780707 - DNA, 19 bp, Mus musculus
  siRNA target sequence for 4930432E11 (NM_172897.1,2020-2038).
gaactagattgtactttga

SEQ ID NO: 780708 - DNA, 19 bp, Mus musculus
  siRNA target sequence for 4930432E11 (NM_172897.1,2095-2113).
ctgtccctgctcagttaaa

SEQ ID NO: 780709 - DNA, 19 bp, Mus musculus
  siRNA target sequence for 4930432E11 (NM_172897.1,2135-2153).
gaacccctaccggttactt

SEQ ID NO: 780710 - DNA, 19 bp, Mus musculus
  siRNA target sequence for 4930432E11 (NM_172897.1,2138-2156).
cccctaccggttacttaaa

SEQ ID NO: 780711 - DNA, 19 bp, Mus musculus
  siRNA target sequence for 4930432E11 (NM_172897.1,2140-2158).
cctaccggttacttaaaga

SEQ ID NO: 780712 - DNA, 19 bp, Mus musculus
  siRNA target sequence for 4930432E11 (NM_172897.1,2185-2203).
ccttcgctccagattgcta

SEQ ID NO: 780713 - DNA, 19 bp, Mus musculus
  siRNA target sequence for 4930432E11 (NM_172897.1,2189-2207).
cgctccagattgctacatt

SEQ ID NO: 780714 - DNA, 19 bp, Mus musculus
  siRNA target sequence for 4930432E11 (NM_172897.1,2194-2212).
cagattgctacattcctaa

SEQ ID NO: 780715 - DNA, 19 bp, Mus musculus
  siRNA target sequence for 4930432E11 (NM_172897.1,2275-2293).
gtttatcctatgaagagat

SEQ ID NO: 780716 - DNA, 19 bp, Mus musculus
  siRNA target sequence for 4930432E11 (NM_172897.1,2303-2321).
ggttcctgaaccattgaga

SEQ ID NO: 780717 - DNA, 19 bp, Mus musculus
  siRNA target sequence for 4930432E11 (NM_172897.1,2338-2356).
ccctgagtccagacgatat

SEQ ID NO: 780718 - DNA, 19 bp, Mus musculus
  siRNA target sequence for 4930432E11 (NM_172897.1,2342-2360).
gagtccagacgatatggaa

SEQ ID NO: 780719 - DNA, 19 bp, Mus musculus
  siRNA target sequence for 4930432E11 (NM_172897.1,2349-2367).
gacgatatggaaattcgaa

SEQ ID NO: 780720 - DNA, 19 bp, Mus musculus
  siRNA target sequence for 4930432E11 (NM_172897.1,2357-2375).
ggaaattcgaactagtaaa

SEQ ID NO: 780721 - DNA, 19 bp, Mus musculus
  siRNA target sequence for 4930432E11 (NM_172897.1,2424-2442).
gaaaggatgtccgataaaa

SEQ ID NO: 780722 - DNA, 19 bp, Mus musculus
  siRNA target sequence for 4930432E11 (NM_172897.1,2443-2461).
gctggatgggaaagagatt

SEQ ID NO: 780723 - DNA, 19 bp, Mus musculus
  siRNA target sequence for 4930432E11 (NM_172897.1,2447-2465).
gatgggaaagagatttagt

SEQ ID NO: 780724 - DNA, 19 bp, Mus musculus
  siRNA target sequence for 4930432E11 (NM_172897.1,2456-2474).
gagatttagtgatggaatt

SEQ ID NO: 780725 - DNA, 19 bp, Mus musculus
  siRNA target sequence for 4930432E11 (NM_172897.1,2458-2476).
gatttagtgatggaattat

SEQ ID NO: 780726 - DNA, 19 bp, Mus musculus
  siRNA target sequence for 4930432E11 (NM_172897.1,2521-2539).
ctacggaaaaatacaagaa

SEQ ID NO: 780727 - DNA, 19 bp, Mus musculus
  siRNA target sequence for 4930432E11 (NM_172897.1,2551-2569).
ctctggcagagatctttat

SEQ ID NO: 780728 - DNA, 19 bp, Mus musculus
  siRNA target sequence for 4930432E11 (NM_172897.1,2580-2598).
gtcccttcaaggattcgta

SEQ ID NO: 780729 - DNA, 19 bp, Mus musculus
  siRNA target sequence for 4930432E11 (NM_172897.1,2582-2600).
cccttcaaggattcgtatt

SEQ ID NO: 780730 - DNA, 19 bp, Mus musculus
  siRNA target sequence for 4930432E11 (NM_172897.1,2611-2629).
gtcgcctgctcaaagatat

SEQ ID NO: 780731 - DNA, 19 bp, Mus musculus
  siRNA target sequence for 4930432E11 (NM_172897.1,2613-2631).
cgcctgctcaaagatataa

SEQ ID NO: 780732 - DNA, 19 bp, Mus musculus
  siRNA target sequence for 4930432E11 (NM_172897.1,2615-2633).
cctgctcaaagatataact

SEQ ID NO: 780733 - DNA, 19 bp, Mus musculus
  siRNA target sequence for 4930432E11 (NM_172897.1,2661-2679).
gcctgggaaatgctagaaa

SEQ ID NO: 780734 - DNA, 19 bp, Mus musculus
  siRNA target sequence for 4930432E11 (NM_172897.1,2687-2705).
cttcataagccaggttttt

SEQ ID NO: 780735 - DNA, 19 bp, Mus musculus
  siRNA target sequence for 4930432E11 (NM_172897.1,2690-2708).
cataagccaggtttttact

SEQ ID NO: 780736 - DNA, 19 bp, Mus musculus
  siRNA target sequence for 4930432E11 (NM_172897.1,2753-2771).
ggccaaggtcgtacaactt

SEQ ID NO: 780737 - DNA, 19 bp, Mus musculus
  siRNA target sequence for 4930432E11 (NM_172897.1,2754-2772).
gccaaggtcgtacaacttt

SEQ ID NO: 780738 - DNA, 19 bp, Mus musculus
  siRNA target sequence for 4930432E11 (NM_172897.1,2755-2773).
ccaaggtcgtacaactttt

SEQ ID NO: 780739 - DNA, 19 bp, Mus musculus
  siRNA target sequence for 4930432E11 (NM_172897.1,2763-2781).
gtacaacttttgtccaaat

SEQ ID NO: 780740 - DNA, 19 bp, Mus musculus
  siRNA target sequence for 4930432E11 (NM_172897.1,2797-2815).
gcaaggctatgctgttaca

SEQ ID NO: 780741 - DNA, 19 bp, Mus musculus
  siRNA target sequence for 4930432E11 (NM_172897.1,2810-2828).
gttacaccagctaagacaa

SEQ ID NO: 780742 - DNA, 19 bp, Mus musculus
  siRNA target sequence for 4930432E11 (NM_172897.1,2830-2848).
cgcacgtctaccatcagtt

SEQ ID NO: 780743 - DNA, 19 bp, Mus musculus
  siRNA target sequence for 4930432E11 (NM_172897.1,2852-2870).
cgaagaagtggcagatgat

SEQ ID NO: 780744 - DNA, 19 bp, Mus musculus
  siRNA target sequence for 4930432E11 (NM_172897.1,2856-2874).
gaagtggcagatgattttt

SEQ ID NO: 780745 - DNA, 19 bp, Mus musculus
  siRNA target sequence for 4930432E11 (NM_172897.1,2915-2933).
ggacttgcatggctgtata

SEQ ID NO: 780746 - DNA, 19 bp, Mus musculus
  siRNA target sequence for 4930432E11 (NM_172897.1,2916-2934).
gacttgcatggctgtataa

SEQ ID NO: 780747 - DNA, 19 bp, Mus musculus
  siRNA target sequence for 4930432E11 (NM_172897.1,2978-2996).
ctcccttcgcttttctatt

SEQ ID NO: 780748 - DNA, 19 bp, Mus musculus
  siRNA target sequence for 4930432E11 (NM_172897.1,2981-2999).
ccttcgcttttctattgat

SEQ ID NO: 780749 - DNA, 19 bp, Mus musculus
  siRNA target sequence for 4930432E11 (NM_172897.1,2986-3004).
gcttttctattgatttgga

SEQ ID NO: 780750 - DNA, 19 bp, Mus musculus
  siRNA target sequence for 4930432E11 (NM_172897.1,3041-3059).
gtctgtgccaggctctaaa

SEQ ID NO: 780751 - DNA, 19 bp, Mus musculus
  siRNA target sequence for 4930432E11 (NM_172897.1,3047-3065).
gccaggctctaaaatggtt

SEQ ID NO: 780752 - DNA, 19 bp, Mus musculus
  siRNA target sequence for 4930432E11 (NM_172897.1,3199-3217).
gaaagggcaggagaattgt

SEQ ID NO: 780753 - DNA, 19 bp, Mus musculus
  siRNA target sequence for 4930432E11 (NM_172897.1,3208-3226).
ggagaattgtgcaagttga

SEQ ID NO: 780754 - DNA, 19 bp, Mus musculus
  siRNA target sequence for Kirrel2 (NM_172898.1,680-698).
gccctcctcgttttccttt

SEQ ID NO: 780755 - DNA, 19 bp, Mus musculus
  siRNA target sequence for Kirrel2 (NM_172898.1,720-738).
gctcatcgccccatttcct

SEQ ID NO: 780756 - DNA, 19 bp, Mus musculus
  siRNA target sequence for Kirrel2 (NM_172898.1,721-739).
ctcatcgccccatttccta

SEQ ID NO: 780757 - DNA, 19 bp, Mus musculus
  siRNA target sequence for Kirrel2 (NM_172898.1,883-901).
ctggatatcggggaattca

SEQ ID NO: 780758 - DNA, 19 bp, Mus musculus
  siRNA target sequence for Kirrel2 (NM_172898.1,943-961).
ggaagatgaggcatcgtat

SEQ ID NO: 780759 - DNA, 19 bp, Mus musculus
  siRNA target sequence for Kirrel2 (NM_172898.1,947-965).
gatgaggcatcgtatgagt

SEQ ID NO: 780760 - DNA, 19 bp, Mus musculus
  siRNA target sequence for Kirrel2 (NM_172898.1,1209-1227).
cagtggaaaacaccttatt

SEQ ID NO: 780761 - DNA, 19 bp, Mus musculus
  siRNA target sequence for Kirrel2 (NM_172898.1,1231-1249).
gaccccttccagtcatgat

SEQ ID NO: 780762 - DNA, 19 bp, Mus musculus
  siRNA target sequence for Kirrel2 (NM_172898.1,1250-1268).
gatggtgccaccttgatct

SEQ ID NO: 780763 - DNA, 19 bp, Mus musculus
  siRNA target sequence for Kirrel2 (NM_172898.1,1566-1584).
gcaccgcgctggaagtgtt

SEQ ID NO: 780764 - DNA, 19 bp, Mus musculus
  siRNA target sequence for Kirrel2 (NM_172898.1,1569-1587).
ccgcgctggaagtgttgta

SEQ ID NO: 780765 - DNA, 19 bp, Mus musculus
  siRNA target sequence for Kirrel2 (NM_172898.1,1570-1588).
cgcgctggaagtgttgtat

SEQ ID NO: 780766 - DNA, 19 bp, Mus musculus
  siRNA target sequence for Kirrel2 (NM_172898.1,1624-1642).
cgtggacgtggggaaagat

SEQ ID NO: 780767 - DNA, 19 bp, Mus musculus
  siRNA target sequence for Kirrel2 (NM_172898.1,1673-1691).
ccacttccacggataacct

SEQ ID NO: 780768 - DNA, 19 bp, Mus musculus
  siRNA target sequence for Kirrel2 (NM_172898.1,2081-2099).
caggagtccgactttacca

SEQ ID NO: 780769 - DNA, 19 bp, Mus musculus
  siRNA target sequence for Kirrel2 (NM_172898.1,2544-2562).
cagggactcctacttacta

SEQ ID NO: 780770 - DNA, 19 bp, Mus musculus
  siRNA target sequence for Kirrel2 (NM_172898.1,2550-2568).
ctcctacttactatgactt

SEQ ID NO: 780771 - DNA, 19 bp, Mus musculus
  siRNA target sequence for Kirrel2 (NM_172898.1,2610-2628).
gagcgagggcaggttatct

SEQ ID NO: 780772 - DNA, 19 bp, Mus musculus
  siRNA target sequence for Kirrel2 (NM_172898.1,2612-2630).
gcgagggcaggttatctta

SEQ ID NO: 780773 - DNA, 19 bp, Mus musculus
  siRNA target sequence for Kirrel2 (NM_172898.1,2649-2667).
ccttcaccagctacatgaa

SEQ ID NO: 780774 - DNA, 19 bp, Mus musculus
  siRNA target sequence for 1110014F24Rik (NM_172899.1,643-661).
caactatgggactaactct

SEQ ID NO: 780775 - DNA, 19 bp, Mus musculus
  siRNA target sequence for 1110014F24Rik (NM_172899.1,693-711).
gcggaccactcaactatga

SEQ ID NO: 780776 - DNA, 19 bp, Mus musculus
  siRNA target sequence for 1110014F24Rik (NM_172899.1,695-713).
ggaccactcaactatgaaa

SEQ ID NO: 780777 - DNA, 19 bp, Mus musculus
  siRNA target sequence for 1110014F24Rik (NM_172899.1,699-717).
cactcaactatgaaaccaa

SEQ ID NO: 780778 - DNA, 19 bp, Mus musculus
  siRNA target sequence for 1110014F24Rik (NM_172899.1,798-816).
ccttctggctcccatgaaa

SEQ ID NO: 780779 - DNA, 19 bp, Mus musculus
  siRNA target sequence for 1110014F24Rik (NM_172899.1,808-826).
cccatgaaagcttcagtaa

SEQ ID NO: 780780 - DNA, 19 bp, Mus musculus
  siRNA target sequence for 1110014F24Rik (NM_172899.1,869-887).
cagtcatggcagtaatggt

SEQ ID NO: 780781 - DNA, 19 bp, Mus musculus
  siRNA target sequence for 1110014F24Rik (NM_172899.1,1032-1050).
gggtcccgggacatagaaa

SEQ ID NO: 780782 - DNA, 19 bp, Mus musculus
  siRNA target sequence for 1110014F24Rik (NM_172899.1,1034-1052).
gtcccgggacatagaaaca

SEQ ID NO: 780783 - DNA, 19 bp, Mus musculus
  siRNA target sequence for 1110014F24Rik (NM_172899.1,1037-1055).
ccgggacatagaaacatct

SEQ ID NO: 780784 - DNA, 19 bp, Mus musculus
  siRNA target sequence for 1110014F24Rik (NM_172899.1,1038-1056).
cgggacatagaaacatcta

SEQ ID NO: 780785 - DNA, 19 bp, Mus musculus
  siRNA target sequence for 1110014F24Rik (NM_172899.1,1040-1058).
ggacatagaaacatctaat

SEQ ID NO: 780786 - DNA, 19 bp, Mus musculus
  siRNA target sequence for 1110014F24Rik (NM_172899.1,1135-1153).
gaaacaaacccgagtgtaa

SEQ ID NO: 780787 - DNA, 19 bp, Mus musculus
  siRNA target sequence for 1110014F24Rik (NM_172899.1,1193-1211).
gagtcaggaaagtaaagaa

SEQ ID NO: 780788 - DNA, 19 bp, Mus musculus
  siRNA target sequence for 1110014F24Rik (NM_172899.1,1256-1274).
gtccaatggtggcaatata

SEQ ID NO: 780789 - DNA, 19 bp, Mus musculus
  siRNA target sequence for 1110014F24Rik (NM_172899.1,1287-1305).
gtcaatggactcaacacta

SEQ ID NO: 780790 - DNA, 19 bp, Mus musculus
  siRNA target sequence for 1110014F24Rik (NM_172899.1,1321-1339).
ctaccttgcccttcaacat

SEQ ID NO: 780791 - DNA, 19 bp, Mus musculus
  siRNA target sequence for 1110014F24Rik (NM_172899.1,1329-1347).
cccttcaacattgacaatt

SEQ ID NO: 780792 - DNA, 19 bp, Mus musculus
  siRNA target sequence for 1110014F24Rik (NM_172899.1,1343-1361).
caatttctgggagaatctt

SEQ ID NO: 780793 - DNA, 19 bp, Mus musculus
  siRNA target sequence for 1110014F24Rik (NM_172899.1,1364-1382).
gtccaagacgcgcttcatt

SEQ ID NO: 780794 - DNA, 19 bp, Mus musculus
  siRNA target sequence for 1110014F24Rik (NM_172899.1,1366-1384).
ccaagacgcgcttcattaa

SEQ ID NO: 780795 - DNA, 19 bp, Mus musculus
  siRNA target sequence for 1110014F24Rik (NM_172899.1,1423-1441).
gcactcgggctttactcta

SEQ ID NO: 780796 - DNA, 19 bp, Mus musculus
  siRNA target sequence for 1110014F24Rik (NM_172899.1,1426-1444).
ctcgggctttactctactt

SEQ ID NO: 780797 - DNA, 19 bp, Mus musculus
  siRNA target sequence for 1110014F24Rik (NM_172899.1,1446-1464).
cgcaaactgtgggagaatt

SEQ ID NO: 780798 - DNA, 19 bp, Mus musculus
  siRNA target sequence for 1110014F24Rik (NM_172899.1,1470-1488).
cgcagcactcctttcttca

SEQ ID NO: 780799 - DNA, 19 bp, Mus musculus
  siRNA target sequence for 1110014F24Rik (NM_172899.1,1562-1580).
gcctgaagcaagacaagat

SEQ ID NO: 780800 - DNA, 19 bp, Mus musculus
  siRNA target sequence for 1110014F24Rik (NM_172899.1,1620-1638).
caggtgaatcctacttaca

SEQ ID NO: 780801 - DNA, 19 bp, Mus musculus
  siRNA target sequence for 1110014F24Rik (NM_172899.1,1623-1641).
gtgaatcctacttacaact

SEQ ID NO: 780802 - DNA, 19 bp, Mus musculus
  siRNA target sequence for 1110014F24Rik (NM_172899.1,1633-1651).
cttacaactggcaatacta

SEQ ID NO: 780803 - DNA, 19 bp, Mus musculus
  siRNA target sequence for Siglec10 (NM_172900.1,351-369).
catcagaaaaccatcactt

SEQ ID NO: 780804 - DNA, 19 bp, Mus musculus
  siRNA target sequence for Siglec10 (NM_172900.1,442-460).
ggggatatctctaaaaaga

SEQ ID NO: 780805 - DNA, 19 bp, Mus musculus
  siRNA target sequence for Siglec10 (NM_172900.1,467-485).
ccttgctaatcaaagatgt

SEQ ID NO: 780806 - DNA, 19 bp, Mus musculus
  siRNA target sequence for Siglec10 (NM_172900.1,468-486).
cttgctaatcaaagatgtt

SEQ ID NO: 780807 - DNA, 19 bp, Mus musculus
  siRNA target sequence for Siglec10 (NM_172900.1,491-509).
ggggagactcaacaaacta

SEQ ID NO: 780808 - DNA, 19 bp, Mus musculus
  siRNA target sequence for Siglec10 (NM_172900.1,492-510).
gggagactcaacaaactat

SEQ ID NO: 780809 - DNA, 19 bp, Mus musculus
  siRNA target sequence for Siglec10 (NM_172900.1,493-511).
ggagactcaacaaactatt

SEQ ID NO: 780810 - DNA, 19 bp, Mus musculus
  siRNA target sequence for Siglec10 (NM_172900.1,494-512).
gagactcaacaaactattt

SEQ ID NO: 780811 - DNA, 19 bp, Mus musculus
  siRNA target sequence for Siglec10 (NM_172900.1,496-514).
gactcaacaaactatttct

SEQ ID NO: 780812 - DNA, 19 bp, Mus musculus
  siRNA target sequence for Siglec10 (NM_172900.1,518-536).
ggatggagagaggatttga

SEQ ID NO: 780813 - DNA, 19 bp, Mus musculus
  siRNA target sequence for Siglec10 (NM_172900.1,584-602).
ctcagaagccagatatctt

SEQ ID NO: 780814 - DNA, 19 bp, Mus musculus
  siRNA target sequence for Siglec10 (NM_172900.1,586-604).
cagaagccagatatcttca

SEQ ID NO: 780815 - DNA, 19 bp, Mus musculus
  siRNA target sequence for Siglec10 (NM_172900.1,726-744).
cagaccgcacacatccaat

SEQ ID NO: 780816 - DNA, 19 bp, Mus musculus
  siRNA target sequence for Siglec10 (NM_172900.1,728-746).
gaccgcacacatccaatta

SEQ ID NO: 780817 - DNA, 19 bp, Mus musculus
  siRNA target sequence for Siglec10 (NM_172900.1,833-851).
ggactgtccgactaagagt

SEQ ID NO: 780818 - DNA, 19 bp, Mus musculus
  siRNA target sequence for Siglec10 (NM_172900.1,850-868).
gtggcctgtgagtatggta

SEQ ID NO: 780819 - DNA, 19 bp, Mus musculus
  siRNA target sequence for Siglec10 (NM_172900.1,940-958).
ggtgtggtggggatgtcat

SEQ ID NO: 780820 - DNA, 19 bp, Mus musculus
  siRNA target sequence for Siglec10 (NM_172900.1,941-959).
gtgtggtggggatgtcatt

SEQ ID NO: 780821 - DNA, 19 bp, Mus musculus
  siRNA target sequence for Siglec10 (NM_172900.1,943-961).
gtggtggggatgtcattta

SEQ ID NO: 780822 - DNA, 19 bp, Mus musculus
  siRNA target sequence for 9830160G03Rik (NM_172904.1,230-248).
gtatgactctgaagataga

SEQ ID NO: 780823 - DNA, 19 bp, Mus musculus
  siRNA target sequence for 9830160G03Rik (NM_172904.1,312-330).
cgtgaattaggggatgaat

SEQ ID NO: 780824 - DNA, 19 bp, Mus musculus
  siRNA target sequence for 9830160G03Rik (NM_172904.1,355-373).
ctctggggtatccttctta

SEQ ID NO: 780825 - DNA, 19 bp, Mus musculus
  siRNA target sequence for 9830160G03Rik (NM_172904.1,523-541).
gcgaggagtatgaatgcta

SEQ ID NO: 780826 - DNA, 19 bp, Mus musculus
  siRNA target sequence for 9830160G03Rik (NM_172904.1,524-542).
cgaggagtatgaatgctat

SEQ ID NO: 780827 - DNA, 19 bp, Mus musculus
  siRNA target sequence for 9830160G03Rik (NM_172904.1,528-546).
gagtatgaatgctatgtca

SEQ ID NO: 780828 - DNA, 19 bp, Mus musculus
  siRNA target sequence for 9830160G03Rik (NM_172904.1,584-602).
cttctgcatcacttgcaaa

SEQ ID NO: 780829 - DNA, 19 bp, Mus musculus
  siRNA target sequence for 9830160G03Rik (NM_172904.1,693-711).
gaggttcacaaaaatatgt

SEQ ID NO: 780830 - DNA, 19 bp, Mus musculus
  siRNA target sequence for 9830160G03Rik (NM_172904.1,728-746).
gataattgagatggaaaat

SEQ ID NO: 780831 - DNA, 19 bp, Mus musculus
  siRNA target sequence for 9830160G03Rik (NM_172904.1,801-819).
caggaacaaaactttgagt

SEQ ID NO: 780832 - DNA, 19 bp, Mus musculus
  siRNA target sequence for 9830160G03Rik (NM_172904.1,812-830).
ctttgagtgccattacaat

SEQ ID NO: 780833 - DNA, 19 bp, Mus musculus
  siRNA target sequence for 9830160G03Rik (NM_172904.1,844-862).
ccctcgctcaaaagtatga

SEQ ID NO: 780834 - DNA, 19 bp, Mus musculus
  siRNA target sequence for 9830160G03Rik (NM_172904.1,845-863).
cctcgctcaaaagtatgaa

SEQ ID NO: 780835 - DNA, 19 bp, Mus musculus
  siRNA target sequence for 9830160G03Rik (NM_172904.1,848-866).
cgctcaaaagtatgaagaa

SEQ ID NO: 780836 - DNA, 19 bp, Mus musculus
  siRNA target sequence for 9830160G03Rik (NM_172904.1,849-867).
gctcaaaagtatgaagaaa

SEQ ID NO: 780837 - DNA, 19 bp, Mus musculus
  siRNA target sequence for 9830160G03Rik (NM_172904.1,995-1013).
ggaaaaggtggagttctta

SEQ ID NO: 780838 - DNA, 19 bp, Mus musculus
  siRNA target sequence for 9830160G03Rik (NM_172904.1,996-1014).
gaaaaggtggagttcttaa

SEQ ID NO: 780839 - DNA, 19 bp, Mus musculus
  siRNA target sequence for 9830160G03Rik (NM_172904.1,1133-1151).
gctgatggacgccatcaat

SEQ ID NO: 780840 - DNA, 19 bp, Mus musculus
  siRNA target sequence for 9830160G03Rik (NM_172904.1,1134-1152).
ctgatggacgccatcaata

SEQ ID NO: 780841 - DNA, 19 bp, Mus musculus
  siRNA target sequence for 9830160G03Rik (NM_172904.1,1139-1157).
ggacgccatcaataccatt

SEQ ID NO: 780842 - DNA, 19 bp, Mus musculus
  siRNA target sequence for 9830160G03Rik (NM_172904.1,1221-1239).
cgtgtatgctggagcttat

SEQ ID NO: 780843 - DNA, 19 bp, Mus musculus
  siRNA target sequence for 9830160G03Rik (NM_172904.1,1303-1321).
gcaaggaccgagcagaatt

SEQ ID NO: 780844 - DNA, 19 bp, Mus musculus
  siRNA target sequence for 9830160G03Rik (NM_172904.1,1348-1366).
gctcagtgacaaatcttga

SEQ ID NO: 780845 - DNA, 19 bp, Mus musculus
  siRNA target sequence for 9830160G03Rik (NM_172904.1,1431-1449).
gagcacgcagtgtatatga

SEQ ID NO: 780846 - DNA, 19 bp, Mus musculus
  siRNA target sequence for 9830160G03Rik (NM_172904.1,1433-1451).
gcacgcagtgtatatgaca

SEQ ID NO: 780847 - DNA, 19 bp, Mus musculus
  siRNA target sequence for 9830160G03Rik (NM_172904.1,1624-1642).
cctgtgaatccctgataca

SEQ ID NO: 780848 - DNA, 19 bp, Mus musculus
  siRNA target sequence for 9830160G03Rik (NM_172904.1,1650-1668).
cctagacacagctatacca

SEQ ID NO: 780849 - DNA, 19 bp, Mus musculus
  siRNA target sequence for 9830160G03Rik (NM_172904.1,1735-1753).
caggaagctacttccaatt

SEQ ID NO: 780850 - DNA, 19 bp, Mus musculus
  siRNA target sequence for 9830160G03Rik (NM_172904.1,1741-1759).
gctacttccaattgaacaa

SEQ ID NO: 780851 - DNA, 19 bp, Mus musculus
  siRNA target sequence for 9830160G03Rik (NM_172904.1,1778-1796).
gctgaccatttctgaagat

SEQ ID NO: 780852 - DNA, 19 bp, Mus musculus
  siRNA target sequence for 9830160G03Rik (NM_172904.1,1847-1865).
gccgagcaagacgcaattt

SEQ ID NO: 780853 - DNA, 19 bp, Mus musculus
  siRNA target sequence for 9830160G03Rik (NM_172904.1,1848-1866).
ccgagcaagacgcaattta

SEQ ID NO: 780854 - DNA, 19 bp, Mus musculus
  siRNA target sequence for 9830160G03Rik (NM_172904.1,1878-1896).
gctgtcatggggaatctga

SEQ ID NO: 780855 - DNA, 19 bp, Mus musculus
  siRNA target sequence for 9830160G03Rik (NM_172904.1,2255-2273).
gatctgcaatggcatttca

SEQ ID NO: 780856 - DNA, 19 bp, Mus musculus
  siRNA target sequence for 9830160G03Rik (NM_172904.1,2267-2285).
catttcaatgccaaagcat

SEQ ID NO: 780857 - DNA, 19 bp, Mus musculus
  siRNA target sequence for 9830160G03Rik (NM_172904.1,2278-2296).
caaagcatgtcactttctt

SEQ ID NO: 780858 - DNA, 19 bp, Mus musculus
  siRNA target sequence for E030002O03Rik (NM_172905.2,144-162).
ctacccaacaactctatct

SEQ ID NO: 780859 - DNA, 19 bp, Mus musculus
  siRNA target sequence for E030002O03Rik (NM_172905.2,230-248).
gtccagggccaaggaatat

SEQ ID NO: 780860 - DNA, 19 bp, Mus musculus
  siRNA target sequence for E030002O03Rik (NM_172905.2,233-251).
cagggccaaggaatatgta

SEQ ID NO: 780861 - DNA, 19 bp, Mus musculus
  siRNA target sequence for E030002O03Rik (NM_172905.2,235-253).
gggccaaggaatatgtaca

SEQ ID NO: 780862 - DNA, 19 bp, Mus musculus
  siRNA target sequence for E030002O03Rik (NM_172905.2,661-679).
gcagaccccttgtggtaaa

SEQ ID NO: 780863 - DNA, 19 bp, Mus musculus
  siRNA target sequence for E030002O03Rik (NM_172905.2,664-682).
gaccccttgtggtaaagct

SEQ ID NO: 780864 - DNA, 19 bp, Mus musculus
  siRNA target sequence for E030002O03Rik (NM_172905.2,669-687).
cttgtggtaaagctcaatt

SEQ ID NO: 780865 - DNA, 19 bp, Mus musculus
  siRNA target sequence for E030002O03Rik (NM_172905.2,672-690).
gtggtaaagctcaattgga

SEQ ID NO: 780866 - DNA, 19 bp, Mus musculus
  siRNA target sequence for E030002O03Rik (NM_172905.2,681-699).
ctcaattggaggggtttat

SEQ ID NO: 780867 - DNA, 19 bp, Mus musculus
  siRNA target sequence for E030002O03Rik (NM_172905.2,688-706).
ggaggggtttatcatctaa

SEQ ID NO: 780868 - DNA, 19 bp, Mus musculus
  siRNA target sequence for E030002O03Rik (NM_172905.2,778-796).
ctgatggcaggtactttga

SEQ ID NO: 780869 - DNA, 19 bp, Mus musculus
  siRNA target sequence for E030002O03Rik (NM_172905.2,823-841).
gtgacctggtgctgcttaa

SEQ ID NO: 780870 - DNA, 19 bp, Mus musculus
  siRNA target sequence for E030002O03Rik (NM_172905.2,880-898).
gtggcaataccgtgtacaa

SEQ ID NO: 780871 - DNA, 19 bp, Mus musculus
  siRNA target sequence for E030002O03Rik (NM_172905.2,882-900).
ggcaataccgtgtacaaga

SEQ ID NO: 780872 - DNA, 19 bp, Mus musculus
  siRNA target sequence for E030002O03Rik (NM_172905.2,883-901).
gcaataccgtgtacaagaa

SEQ ID NO: 780873 - DNA, 19 bp, Mus musculus
  siRNA target sequence for E030002O03Rik (NM_172905.2,987-1005).
cctggtgccacctacaaca

SEQ ID NO: 780874 - DNA, 19 bp, Mus musculus
  siRNA target sequence for E030002O03Rik (NM_172905.2,1027-1045).
cgccttggactgacataga

SEQ ID NO: 780875 - DNA, 19 bp, Mus musculus
  siRNA target sequence for E030002O03Rik (NM_172905.2,1030-1048).
cttggactgacatagattt

SEQ ID NO: 780876 - DNA, 19 bp, Mus musculus
  siRNA target sequence for E030002O03Rik (NM_172905.2,1103-1121).
caatctggttgtaagtctt

SEQ ID NO: 780877 - DNA, 19 bp, Mus musculus
  siRNA target sequence for E030002O03Rik (NM_172905.2,1109-1127).
ggttgtaagtcttctcaat

SEQ ID NO: 780878 - DNA, 19 bp, Mus musculus
  siRNA target sequence for E030002O03Rik (NM_172905.2,1156-1174).
ggtataccagccagtataa

SEQ ID NO: 780879 - DNA, 19 bp, Mus musculus
  siRNA target sequence for E030002O03Rik (NM_172905.2,1169-1187).
gtataagcctgctctttca

SEQ ID NO: 780880 - DNA, 19 bp, Mus musculus
  siRNA target sequence for E030002O03Rik (NM_172905.2,1214-1232).
ctatgctttgcgttcacta

SEQ ID NO: 780881 - DNA, 19 bp, Mus musculus
  siRNA target sequence for E030002O03Rik (NM_172905.2,1324-1342).
ctctgcacggcatcaatta

SEQ ID NO: 780882 - DNA, 19 bp, Mus musculus
  siRNA target sequence for E030002O03Rik (NM_172905.2,1326-1344).
ctgcacggcatcaattact

SEQ ID NO: 780883 - DNA, 19 bp, Mus musculus
  siRNA target sequence for E030002O03Rik (NM_172905.2,1353-1371).
gatcacaggctctatgttt

SEQ ID NO: 780884 - DNA, 19 bp, Mus musculus
  siRNA target sequence for E030002O03Rik (NM_172905.2,1358-1376).
caggctctatgtttataat

SEQ ID NO: 780885 - DNA, 19 bp, Mus musculus
  siRNA target sequence for E030002O03Rik (NM_172905.2,1361-1379).
gctctatgtttataatgat

SEQ ID NO: 780886 - DNA, 19 bp, Mus musculus
  siRNA target sequence for E030002O03Rik (NM_172905.2,1377-1395).
gatggattcttaataaatt

SEQ ID NO: 780887 - DNA, 19 bp, Mus musculus
  siRNA target sequence for E030002O03Rik (NM_172905.2,1401-1419).
ctcaccttcctgacactaa

SEQ ID NO: 780888 - DNA, 19 bp, Mus musculus
  siRNA target sequence for E030002O03Rik (NM_172905.2,1459-1477).
gggctctagcgccatctaa

SEQ ID NO: 780889 - DNA, 19 bp, Mus musculus
  siRNA target sequence for E030002O03Rik (NM_172905.2,1460-1478).
ggctctagcgccatctaaa

SEQ ID NO: 780890 - DNA, 19 bp, Mus musculus
  siRNA target sequence for E030002O03Rik (NM_172905.2,1467-1485).
gcgccatctaaacctatta

SEQ ID NO: 780891 - DNA, 19 bp, Mus musculus
  siRNA target sequence for E030002O03Rik (NM_172905.2,1468-1486).
cgccatctaaacctattaa

SEQ ID NO: 780892 - DNA, 19 bp, Mus musculus
  siRNA target sequence for E030002O03Rik (NM_172905.2,1471-1489).
catctaaacctattaagct

SEQ ID NO: 780893 - DNA, 19 bp, Mus musculus
  siRNA target sequence for A630026L20 (NM_172906.1,252-270).
gaagacctaggtataacct

SEQ ID NO: 780894 - DNA, 19 bp, Mus musculus
  siRNA target sequence for A630026L20 (NM_172906.1,576-594).
gaagtacccctaaaagata

SEQ ID NO: 780895 - DNA, 19 bp, Mus musculus
  siRNA target sequence for A630026L20 (NM_172906.1,579-597).
gtacccctaaaagatatca

SEQ ID NO: 780896 - DNA, 19 bp, Mus musculus
  siRNA target sequence for A630026L20 (NM_172906.1,794-812).
cccagaacggggtaccaaa

SEQ ID NO: 780897 - DNA, 19 bp, Mus musculus
  siRNA target sequence for A630026L20 (NM_172906.1,795-813).
ccagaacggggtaccaaaa

SEQ ID NO: 780898 - DNA, 19 bp, Mus musculus
  siRNA target sequence for A630026L20 (NM_172906.1,796-814).
cagaacggggtaccaaaat

SEQ ID NO: 780899 - DNA, 19 bp, Mus musculus
  siRNA target sequence for A630026L20 (NM_172906.1,906-924).
ggcgaaggttggggaataa

SEQ ID NO: 780900 - DNA, 19 bp, Mus musculus
  siRNA target sequence for A630026L20 (NM_172906.1,908-926).
cgaaggttggggaataagt

SEQ ID NO: 780901 - DNA, 19 bp, Mus musculus
  siRNA target sequence for A630026L20 (NM_172906.1,933-951).
gctggtatgggtcaaaaga

SEQ ID NO: 780902 - DNA, 19 bp, Mus musculus
  siRNA target sequence for A630026L20 (NM_172906.1,934-952).
ctggtatgggtcaaaagaa

SEQ ID NO: 780903 - DNA, 19 bp, Mus musculus
  siRNA target sequence for A630026L20 (NM_172906.1,1043-1061).
ccattttcacttcaacaat

SEQ ID NO: 780904 - DNA, 19 bp, Mus musculus
  siRNA target sequence for BC047207 (NM_172907.2,406-424).
cagccatggtacactacat

SEQ ID NO: 780905 - DNA, 19 bp, Mus musculus
  siRNA target sequence for BC047207 (NM_172907.2,408-426).
gccatggtacactacatct

SEQ ID NO: 780906 - DNA, 19 bp, Mus musculus
  siRNA target sequence for BC047207 (NM_172907.2,471-489).
caaacaacaagggcatata

SEQ ID NO: 780907 - DNA, 19 bp, Mus musculus
  siRNA target sequence for BC047207 (NM_172907.2,478-496).
caagggcatatattcaaga

SEQ ID NO: 780908 - DNA, 19 bp, Mus musculus
  siRNA target sequence for BC047207 (NM_172907.2,481-499).
gggcatatattcaagactt

SEQ ID NO: 780909 - DNA, 19 bp, Mus musculus
  siRNA target sequence for BC047207 (NM_172907.2,543-561).
cagacccacacaagtgaat

SEQ ID NO: 780910 - DNA, 19 bp, Mus musculus
  siRNA target sequence for BC047207 (NM_172907.2,549-567).
cacacaagtgaatataaga

SEQ ID NO: 780911 - DNA, 19 bp, Mus musculus
  siRNA target sequence for BC047207 (NM_172907.2,720-738).
cgaaccctgttgaacacaa

SEQ ID NO: 780912 - DNA, 19 bp, Mus musculus
  siRNA target sequence for BC047207 (NM_172907.2,829-847).
gtaactctgcaaaagtgta

SEQ ID NO: 780913 - DNA, 19 bp, Mus musculus
  siRNA target sequence for BC047207 (NM_172907.2,889-907).
caaacttgcgggcattcat

SEQ ID NO: 780914 - DNA, 19 bp, Mus musculus
  siRNA target sequence for BC047207 (NM_172907.2,897-915).
cgggcattcatggaagata

SEQ ID NO: 780915 - DNA, 19 bp, Mus musculus
  siRNA target sequence for BC047207 (NM_172907.2,923-941).
gcctggtccccgtaagtta

SEQ ID NO: 780916 - DNA, 19 bp, Mus musculus
  siRNA target sequence for BC047207 (NM_172907.2,924-942).
cctggtccccgtaagttaa

SEQ ID NO: 780917 - DNA, 19 bp, Mus musculus
  siRNA target sequence for BC047207 (NM_172907.2,925-943).
ctggtccccgtaagttaat

SEQ ID NO: 780918 - DNA, 19 bp, Mus musculus
  siRNA target sequence for BC047207 (NM_172907.2,977-995).
ggtctaccaaagctttcta

SEQ ID NO: 780919 - DNA, 19 bp, Mus musculus
  siRNA target sequence for BC047207 (NM_172907.2,978-996).
gtctaccaaagctttctat

SEQ ID NO: 780920 - DNA, 19 bp, Mus musculus
  siRNA target sequence for BC047207 (NM_172907.2,980-998).
ctaccaaagctttctattt

SEQ ID NO: 780921 - DNA, 19 bp, Mus musculus
  siRNA target sequence for 6430596N04Rik (NM_172910.1,543-561).
caacgcagcacttcaatga

SEQ ID NO: 780922 - DNA, 19 bp, Mus musculus
  siRNA target sequence for 6430596N04Rik (NM_172910.1,546-564).
cgcagcacttcaatgaaga

SEQ ID NO: 780923 - DNA, 19 bp, Mus musculus
  siRNA target sequence for 6430596N04Rik (NM_172910.1,576-594).
ccgcacccaggaacatgaa

SEQ ID NO: 780924 - DNA, 19 bp, Mus musculus
  siRNA target sequence for 6430596N04Rik (NM_172910.1,577-595).
cgcacccaggaacatgaaa

SEQ ID NO: 780925 - DNA, 19 bp, Mus musculus
  siRNA target sequence for 6430596N04Rik (NM_172910.1,785-803).
cactcagagtgcatgatga

SEQ ID NO: 780926 - DNA, 19 bp, Mus musculus
  siRNA target sequence for 6430596N04Rik (NM_172910.1,963-981).
ccctgcaccgggatggttt

SEQ ID NO: 780927 - DNA, 19 bp, Mus musculus
  siRNA target sequence for 6430596N04Rik (NM_172910.1,1041-1059).
gcagaatccggcatttggt

SEQ ID NO: 780928 - DNA, 19 bp, Mus musculus
  siRNA target sequence for 6430596N04Rik (NM_172910.1,1057-1075).
ggtccactccgttcagaaa

SEQ ID NO: 780929 - DNA, 19 bp, Mus musculus
  siRNA target sequence for 6430596N04Rik (NM_172910.1,1060-1078).
ccactccgttcagaaactt

SEQ ID NO: 780930 - DNA, 19 bp, Mus musculus
  siRNA target sequence for 6430596N04Rik (NM_172910.1,1162-1180).
ccagagtcacctttccaaa

SEQ ID NO: 780931 - DNA, 19 bp, Mus musculus
  siRNA target sequence for 6430596N04Rik (NM_172910.1,1367-1385).
ggggacctctcactaaaga

SEQ ID NO: 780932 - DNA, 19 bp, Mus musculus
  siRNA target sequence for 6430596N04Rik (NM_172910.1,1370-1388).
gacctctcactaaagactt

SEQ ID NO: 780933 - DNA, 19 bp, Mus musculus
  siRNA target sequence for 6430596N04Rik (NM_172910.1,1375-1393).
ctcactaaagacttccaaa

SEQ ID NO: 780934 - DNA, 19 bp, Mus musculus
  siRNA target sequence for 6430596N04Rik (NM_172910.1,1712-1730).
gactccagccccaaaacat

SEQ ID NO: 780935 - DNA, 19 bp, Mus musculus
  siRNA target sequence for 6430596N04Rik (NM_172910.1,1759-1777).
gctgctgaggcccatcata

SEQ ID NO: 780936 - DNA, 19 bp, Mus musculus
  siRNA target sequence for 6430596N04Rik (NM_172910.1,1848-1866).
gcctgaacccatcaatcaa

SEQ ID NO: 780937 - DNA, 19 bp, Mus musculus
  siRNA target sequence for 6430596N04Rik (NM_172910.1,1973-1991).
gggcagttcgagtctgtat

SEQ ID NO: 780938 - DNA, 19 bp, Mus musculus
  siRNA target sequence for 6430596N04Rik (NM_172910.1,1975-1993).
gcagttcgagtctgtatgt

SEQ ID NO: 780939 - DNA, 19 bp, Mus musculus
  siRNA target sequence for 6430596N04Rik (NM_172910.1,1978-1996).
gttcgagtctgtatgtgaa

SEQ ID NO: 780940 - DNA, 19 bp, Mus musculus
  siRNA target sequence for 6430596N04Rik (NM_172910.1,2103-2121).
cccaagacgatgaatgtat

SEQ ID NO: 780941 - DNA, 19 bp, Mus musculus
  siRNA target sequence for 6430596N04Rik (NM_172910.1,2104-2122).
ccaagacgatgaatgtatt

SEQ ID NO: 780942 - DNA, 19 bp, Mus musculus
  siRNA target sequence for 6430596N04Rik (NM_172910.1,2169-2187).
cagctgtctcctacacaaa

SEQ ID NO: 780943 - DNA, 19 bp, Mus musculus
  siRNA target sequence for 6430596N04Rik (NM_172910.1,2370-2388).
gcaacaaggccatgaattt

SEQ ID NO: 780944 - DNA, 19 bp, Mus musculus
  siRNA target sequence for 6430596N04Rik (NM_172910.1,2529-2547).
ctgaattccccgatcatca

SEQ ID NO: 780945 - DNA, 19 bp, Mus musculus
  siRNA target sequence for 6430596N04Rik (NM_172910.1,2554-2572).
cccaaggtcagatgtagaa

SEQ ID NO: 780946 - DNA, 19 bp, Mus musculus
  siRNA target sequence for 6430596N04Rik (NM_172910.1,2622-2640).
ctgttggtgtgcaagtaga

SEQ ID NO: 780947 - DNA, 19 bp, Mus musculus
  siRNA target sequence for 6430596N04Rik (NM_172910.1,2689-2707).
cgctgtgcaggctgactta

SEQ ID NO: 780948 - DNA, 19 bp, Mus musculus
  siRNA target sequence for 6430596N04Rik (NM_172910.1,2832-2850).
cgcagggcctcttcagtta

SEQ ID NO: 780949 - DNA, 19 bp, Mus musculus
  siRNA target sequence for 6430596N04Rik (NM_172910.1,2967-2985).
gctcgtggtttctgaaact

SEQ ID NO: 780950 - DNA, 19 bp, Mus musculus
  siRNA target sequence for 6430596N04Rik (NM_172910.1,3201-3219).
ctggctattgggatatgct

SEQ ID NO: 780951 - DNA, 19 bp, Mus musculus
  siRNA target sequence for 6430596N04Rik (NM_172910.1,3322-3340).
gaagatcccccctccaata

SEQ ID NO: 780952 - DNA, 19 bp, Mus musculus
  siRNA target sequence for 4933409I22 (NM_172914.1,211-229).
gttcgagaaatattactct

SEQ ID NO: 780953 - DNA, 19 bp, Mus musculus
  siRNA target sequence for 4933409I22 (NM_172914.1,241-259).
cagggaccaccgaatgaca

SEQ ID NO: 780954 - DNA, 19 bp, Mus musculus
  siRNA target sequence for 4933409I22 (NM_172914.1,256-274).
gacacggttgtcagatatt

SEQ ID NO: 780955 - DNA, 19 bp, Mus musculus
  siRNA target sequence for 4933409I22 (NM_172914.1,305-323).
cgatccaggcgtaaatcca

SEQ ID NO: 780956 - DNA, 19 bp, Mus musculus
  siRNA target sequence for 4933409I22 (NM_172914.1,306-324).
gatccaggcgtaaatccaa

SEQ ID NO: 780957 - DNA, 19 bp, Mus musculus
  siRNA target sequence for 4933409I22 (NM_172914.1,397-415).
ggaagacacgagagatgaa

SEQ ID NO: 780958 - DNA, 19 bp, Mus musculus
  siRNA target sequence for 4933409I22 (NM_172914.1,398-416).
gaagacacgagagatgaaa

SEQ ID NO: 780959 - DNA, 19 bp, Mus musculus
  siRNA target sequence for 4933409I22 (NM_172914.1,481-499).
cgacattcggtggaatgaa

SEQ ID NO: 780960 - DNA, 19 bp, Mus musculus
  siRNA target sequence for 4933409I22 (NM_172914.1,484-502).
cattcggtggaatgaagtt

SEQ ID NO: 780961 - DNA, 19 bp, Mus musculus
  siRNA target sequence for 4933409I22 (NM_172914.1,530-548).
gatattctgaaaaccatat

SEQ ID NO: 780962 - DNA, 19 bp, Mus musculus
  siRNA target sequence for 4933409I22 (NM_172914.1,565-583).
cattttggccactcagaaa

SEQ ID NO: 780963 - DNA, 19 bp, Mus musculus
  siRNA target sequence for 4933409I22 (NM_172914.1,573-591).
ccactcagaaagtgatgaa

SEQ ID NO: 780964 - DNA, 19 bp, Mus musculus
  siRNA target sequence for 4933409I22 (NM_172914.1,574-592).
cactcagaaagtgatgaaa

SEQ ID NO: 780965 - DNA, 19 bp, Mus musculus
  siRNA target sequence for 4933409I22 (NM_172914.1,919-937).
cgagctacttgggaaaatt

SEQ ID NO: 780966 - DNA, 19 bp, Mus musculus
  siRNA target sequence for 4933409I22 (NM_172914.1,980-998).
catatcttgaacgataagt

SEQ ID NO: 780967 - DNA, 19 bp, Mus musculus
  siRNA target sequence for 4933409I22 (NM_172914.1,1026-1044).
ccccacaggtaatgatgta

SEQ ID NO: 780968 - DNA, 19 bp, Mus musculus
  siRNA target sequence for 4933409I22 (NM_172914.1,1114-1132).
cgcagagatgtctctaaaa

SEQ ID NO: 780969 - DNA, 19 bp, Mus musculus
  siRNA target sequence for 4933409I22 (NM_172914.1,1139-1157).
cggaaggcctggaataaga

SEQ ID NO: 780970 - DNA, 19 bp, Mus musculus
  siRNA target sequence for 4933409I22 (NM_172914.1,1145-1163).
gcctggaataagatgaaga

SEQ ID NO: 780971 - DNA, 19 bp, Mus musculus
  siRNA target sequence for 4933409I22 (NM_172914.1,1169-1187).
gatgagcagttgcagataa

SEQ ID NO: 780972 - DNA, 19 bp, Mus musculus
  siRNA target sequence for Hydin (NM_172916.2,449-467).
ggcaagtacaagaattata

SEQ ID NO: 780973 - DNA, 19 bp, Mus musculus
  siRNA target sequence for Hydin (NM_172916.2,475-493).
cgcagatcaccgaactctt

SEQ ID NO: 780974 - DNA, 19 bp, Mus musculus
  siRNA target sequence for Hydin (NM_172916.2,479-497).
gatcaccgaactcttagat

SEQ ID NO: 780975 - DNA, 19 bp, Mus musculus
  siRNA target sequence for Hydin (NM_172916.2,558-576).
ccctttccgtctgaaatca

SEQ ID NO: 780976 - DNA, 19 bp, Mus musculus
  siRNA target sequence for Hydin (NM_172916.2,559-577).
cctttccgtctgaaatcat

SEQ ID NO: 780977 - DNA, 19 bp, Mus musculus
  siRNA target sequence for Hydin (NM_172916.2,592-610).
ctccctgtgaagtctatga

SEQ ID NO: 780978 - DNA, 19 bp, Mus musculus
  siRNA target sequence for Hydin (NM_172916.2,644-662).
cccacggatggtaaaagtt

SEQ ID NO: 780979 - DNA, 19 bp, Mus musculus
  siRNA target sequence for Hydin (NM_172916.2,646-664).
cacggatggtaaaagttgt

SEQ ID NO: 780980 - DNA, 19 bp, Mus musculus
  siRNA target sequence for Hydin (NM_172916.2,649-667).
ggatggtaaaagttgttga

SEQ ID NO: 780981 - DNA, 19 bp, Mus musculus
  siRNA target sequence for Hydin (NM_172916.2,669-687).
gaaagctcaccttacttta

SEQ ID NO: 780982 - DNA, 19 bp, Mus musculus
  siRNA target sequence for Hydin (NM_172916.2,727-745).
ctggtgtgccatctgtatt

SEQ ID NO: 780983 - DNA, 19 bp, Mus musculus
  siRNA target sequence for Hydin (NM_172916.2,777-795).
gattacgcccacatgttga

SEQ ID NO: 780984 - DNA, 19 bp, Mus musculus
  siRNA target sequence for Hydin (NM_172916.2,796-814).
cctgcatcaccgaaagaga

SEQ ID NO: 780985 - DNA, 19 bp, Mus musculus
  siRNA target sequence for Hydin (NM_172916.2,818-836).
gttcattgtgccggtaaaa

SEQ ID NO: 780986 - DNA, 19 bp, Mus musculus
  siRNA target sequence for Hydin (NM_172916.2,931-949).
gaaacattggcaacaaaga

SEQ ID NO: 780987 - DNA, 19 bp, Mus musculus
  siRNA target sequence for Hydin (NM_172916.2,1075-1093).
gaaaactcattgtgactta

SEQ ID NO: 780988 - DNA, 19 bp, Mus musculus
  siRNA target sequence for Hydin (NM_172916.2,1080-1098).
ctcattgtgacttatgaca

SEQ ID NO: 780989 - DNA, 19 bp, Mus musculus
  siRNA target sequence for Hydin (NM_172916.2,1158-1176).
gacaagaattcgttgatca

SEQ ID NO: 780990 - DNA, 19 bp, Mus musculus
  siRNA target sequence for Hydin (NM_172916.2,1205-1223).
ccagcggtctataaccatt

SEQ ID NO: 780991 - DNA, 19 bp, Mus musculus
  siRNA target sequence for Hydin (NM_172916.2,1209-1227).
cggtctataaccattcaca

SEQ ID NO: 780992 - DNA, 19 bp, Mus musculus
  siRNA target sequence for Hydin (NM_172916.2,1210-1228).
ggtctataaccattcacaa

SEQ ID NO: 780993 - DNA, 19 bp, Mus musculus
  siRNA target sequence for Hydin (NM_172916.2,1211-1229).
gtctataaccattcacaat

SEQ ID NO: 780994 - DNA, 19 bp, Mus musculus
  siRNA target sequence for Hydin (NM_172916.2,1220-1238).
cattcacaatcgcactaat

SEQ ID NO: 780995 - DNA, 19 bp, Mus musculus
  siRNA target sequence for Hydin (NM_172916.2,1224-1242).
cacaatcgcactaatataa

SEQ ID NO: 780996 - DNA, 19 bp, Mus musculus
  siRNA target sequence for Hydin (NM_172916.2,1226-1244).
caatcgcactaatataatt

SEQ ID NO: 780997 - DNA, 19 bp, Mus musculus
  siRNA target sequence for Hydin (NM_172916.2,1508-1526).
ctcatccgctgaaatcact

SEQ ID NO: 780998 - DNA, 19 bp, Mus musculus
  siRNA target sequence for Hydin (NM_172916.2,1601-1619).
cttgcccctccgaatcaga

SEQ ID NO: 780999 - DNA, 19 bp, Mus musculus
  siRNA target sequence for Hydin (NM_172916.2,1662-1680).
ctggacattggcaaagttt

SEQ ID NO: 781000 - DNA, 19 bp, Mus musculus
  siRNA target sequence for Hydin (NM_172916.2,1665-1683).
gacattggcaaagttttca

SEQ ID NO: 781001 - DNA, 19 bp, Mus musculus
  siRNA target sequence for Hydin (NM_172916.2,1667-1685).
cattggcaaagttttcatt

SEQ ID NO: 781002 - DNA, 19 bp, Mus musculus
  siRNA target sequence for Hydin (NM_172916.2,1729-1747).
gcatcgatgccctctttaa

SEQ ID NO: 781003 - DNA, 19 bp, Mus musculus
  siRNA target sequence for Hydin (NM_172916.2,1748-1766).
cgtcatccccccaacttca

SEQ ID NO: 781004 - DNA, 19 bp, Mus musculus
  siRNA target sequence for Hydin (NM_172916.2,1795-1813).
ctaaagaaggcatcattga

SEQ ID NO: 781005 - DNA, 19 bp, Mus musculus
  siRNA target sequence for Hydin (NM_172916.2,1833-1851).
gtccagatctccttcagtt

SEQ ID NO: 781006 - DNA, 19 bp, Mus musculus
  siRNA target sequence for Hydin (NM_172916.2,1864-1882).
ggtacttcgaagaagagtt

SEQ ID NO: 781007 - DNA, 19 bp, Mus musculus
  siRNA target sequence for Hydin (NM_172916.2,1903-1921).
cccctgagcccgtgaaaat

SEQ ID NO: 781008 - DNA, 19 bp, Mus musculus
  siRNA target sequence for Hydin (NM_172916.2,1913-1931).
cgtgaaaatgaccattaga

SEQ ID NO: 781009 - DNA, 19 bp, Mus musculus
  siRNA target sequence for Hydin (NM_172916.2,1924-1942).
ccattagaggctgtgtaat

SEQ ID NO: 781010 - DNA, 19 bp, Mus musculus
  siRNA target sequence for Hydin (NM_172916.2,1925-1943).
cattagaggctgtgtaatt

SEQ ID NO: 781011 - DNA, 19 bp, Mus musculus
  siRNA target sequence for Hydin (NM_172916.2,1936-1954).
gtgtaattggacctacatt

SEQ ID NO: 781012 - DNA, 19 bp, Mus musculus
  siRNA target sequence for Hydin (NM_172916.2,1983-2001).
gggaatgtttcctatggat

SEQ ID NO: 781013 - DNA, 19 bp, Mus musculus
  siRNA target sequence for Hydin (NM_172916.2,2015-2033).
gatgtgttccctcaataat

SEQ ID NO: 781014 - DNA, 19 bp, Mus musculus
  siRNA target sequence for Hydin (NM_172916.2,2018-2036).
gtgttccctcaataataca

SEQ ID NO: 781015 - DNA, 19 bp, Mus musculus
  siRNA target sequence for Hydin (NM_172916.2,2042-2060).
ggtccccatgaccttcaaa

SEQ ID NO: 781016 - DNA, 19 bp, Mus musculus
  siRNA target sequence for Hydin (NM_172916.2,2129-2147).
gcaatggtccgggattaat

SEQ ID NO: 781017 - DNA, 19 bp, Mus musculus
  siRNA target sequence for Hydin (NM_172916.2,2130-2148).
caatggtccgggattaata

SEQ ID NO: 781018 - DNA, 19 bp, Mus musculus
  siRNA target sequence for Hydin (NM_172916.2,2134-2152).
ggtccgggattaatacaga

SEQ ID NO: 781019 - DNA, 19 bp, Mus musculus
  siRNA target sequence for Hydin (NM_172916.2,2135-2153).
gtccgggattaatacagaa

SEQ ID NO: 781020 - DNA, 19 bp, Mus musculus
  siRNA target sequence for Hydin (NM_172916.2,2248-2266).
ccaacaccgtgcagaaata

SEQ ID NO: 781021 - DNA, 19 bp, Mus musculus
  siRNA target sequence for Hydin (NM_172916.2,2310-2328).
gtgctggcactcttaatta

SEQ ID NO: 781022 - DNA, 19 bp, Mus musculus
  siRNA target sequence for Hydin (NM_172916.2,2416-2434).
ccatccagcttgtcaatca

SEQ ID NO: 781023 - DNA, 19 bp, Mus musculus
  siRNA target sequence for Hydin (NM_172916.2,2417-2435).
catccagcttgtcaatcat

SEQ ID NO: 781024 - DNA, 19 bp, Mus musculus
  siRNA target sequence for Hydin (NM_172916.2,2439-2457).
gaccttcctggatgctata

SEQ ID NO: 781025 - DNA, 19 bp, Mus musculus
  siRNA target sequence for Hydin (NM_172916.2,2466-2484).
cctcagctgtatgagaatt

SEQ ID NO: 781026 - DNA, 19 bp, Mus musculus
  siRNA target sequence for Hydin (NM_172916.2,2582-2600).
cgcacatcgatccatagtt

SEQ ID NO: 781027 - DNA, 19 bp, Mus musculus
  siRNA target sequence for Hydin (NM_172916.2,2583-2601).
gcacatcgatccatagttt

SEQ ID NO: 781028 - DNA, 19 bp, Mus musculus
  siRNA target sequence for Hydin (NM_172916.2,2584-2602).
cacatcgatccatagttta

SEQ ID NO: 781029 - DNA, 19 bp, Mus musculus
  siRNA target sequence for Hydin (NM_172916.2,2586-2604).
catcgatccatagtttaca

SEQ ID NO: 781030 - DNA, 19 bp, Mus musculus
  siRNA target sequence for Hydin (NM_172916.2,2589-2607).
cgatccatagtttacatct

SEQ ID NO: 781031 - DNA, 19 bp, Mus musculus
  siRNA target sequence for Hydin (NM_172916.2,2629-2647).
cccctctggcatgtaacat

SEQ ID NO: 781032 - DNA, 19 bp, Mus musculus
  siRNA target sequence for Hydin (NM_172916.2,2630-2648).
ccctctggcatgtaacata

SEQ ID NO: 781033 - DNA, 19 bp, Mus musculus
  siRNA target sequence for Hydin (NM_172916.2,2779-2797).
gggttcgcatggcaaacaa

SEQ ID NO: 781034 - DNA, 19 bp, Mus musculus
  siRNA target sequence for Hydin (NM_172916.2,2882-2900).
cgacatagtgacgttcaaa

SEQ ID NO: 781035 - DNA, 19 bp, Mus musculus
  siRNA target sequence for Hydin (NM_172916.2,2909-2927).
catcctggagattaagcat

SEQ ID NO: 781036 - DNA, 19 bp, Mus musculus
  siRNA target sequence for Hydin (NM_172916.2,2916-2934).
gagattaagcatagtaaca

SEQ ID NO: 781037 - DNA, 19 bp, Mus musculus
  siRNA target sequence for Hydin (NM_172916.2,2952-2970).
caggccaccgggattggtt

SEQ ID NO: 781038 - DNA, 19 bp, Mus musculus
  siRNA target sequence for Hydin (NM_172916.2,2960-2978).
cgggattggttctaccatt

SEQ ID NO: 781039 - DNA, 19 bp, Mus musculus
  siRNA target sequence for Hydin (NM_172916.2,2963-2981).
gattggttctaccattgtt

SEQ ID NO: 781040 - DNA, 19 bp, Mus musculus
  siRNA target sequence for Hydin (NM_172916.2,3028-3046).
gcctggatacccactatta

SEQ ID NO: 781041 - DNA, 19 bp, Mus musculus
  siRNA target sequence for Hydin (NM_172916.2,3144-3162).
gggaaaaagggctctactt

SEQ ID NO: 781042 - DNA, 19 bp, Mus musculus
  siRNA target sequence for Hydin (NM_172916.2,3383-3401).
catctgcgagtttatagct

SEQ ID NO: 781043 - DNA, 19 bp, Mus musculus
  siRNA target sequence for Hydin (NM_172916.2,3419-3437).
cgccaagcagctactatat

SEQ ID NO: 781044 - DNA, 19 bp, Mus musculus
  siRNA target sequence for Hydin (NM_172916.2,3422-3440).
caagcagctactatatcga

SEQ ID NO: 781045 - DNA, 19 bp, Mus musculus
  siRNA target sequence for Hydin (NM_172916.2,3626-3644).
cctcctgatcaagtttgat

SEQ ID NO: 781046 - DNA, 19 bp, Mus musculus
  siRNA target sequence for Hydin (NM_172916.2,3681-3699).
gaagaggttctgtcaatta

SEQ ID NO: 781047 - DNA, 19 bp, Mus musculus
  siRNA target sequence for Hydin (NM_172916.2,3684-3702).
gaggttctgtcaattaagt

SEQ ID NO: 781048 - DNA, 19 bp, Mus musculus
  siRNA target sequence for Hydin (NM_172916.2,3686-3704).
ggttctgtcaattaagtat

SEQ ID NO: 781049 - DNA, 19 bp, Mus musculus
  siRNA target sequence for Hydin (NM_172916.2,3692-3710).
gtcaattaagtatctagaa

SEQ ID NO: 781050 - DNA, 19 bp, Mus musculus
  siRNA target sequence for Hydin (NM_172916.2,3771-3789).
gaggtgatggacatagatt

SEQ ID NO: 781051 - DNA, 19 bp, Mus musculus
  siRNA target sequence for Hydin (NM_172916.2,3792-3810).
ggctgcatcctgaacgata

SEQ ID NO: 781052 - DNA, 19 bp, Mus musculus
  siRNA target sequence for Hydin (NM_172916.2,3796-3814).
gcatcctgaacgatactga

SEQ ID NO: 781053 - DNA, 19 bp, Mus musculus
  siRNA target sequence for Hydin (NM_172916.2,3847-3865).
gccccttggttgtgaaatt

SEQ ID NO: 781054 - DNA, 19 bp, Mus musculus
  siRNA target sequence for Hydin (NM_172916.2,3907-3925).
ggtttgcaccatgtatgaa

SEQ ID NO: 781055 - DNA, 19 bp, Mus musculus
  siRNA target sequence for Hydin (NM_172916.2,3927-3945).
ccctacagcgccttcttgt

SEQ ID NO: 781056 - DNA, 19 bp, Mus musculus
  siRNA target sequence for Hydin (NM_172916.2,3997-4015).
ccccacacactgtagagta

SEQ ID NO: 781057 - DNA, 19 bp, Mus musculus
  siRNA target sequence for Hydin (NM_172916.2,3998-4016).
cccacacactgtagagtat

SEQ ID NO: 781058 - DNA, 19 bp, Mus musculus
  siRNA target sequence for Hydin (NM_172916.2,4039-4057).
ccatcaagacgatccttat

SEQ ID NO: 781059 - DNA, 19 bp, Mus musculus
  siRNA target sequence for Hydin (NM_172916.2,4068-4086).
gctggacccgaagaaatca

SEQ ID NO: 781060 - DNA, 19 bp, Mus musculus
  siRNA target sequence for Hydin (NM_172916.2,4069-4087).
ctggacccgaagaaatcaa

SEQ ID NO: 781061 - DNA, 19 bp, Mus musculus
  siRNA target sequence for Hydin (NM_172916.2,4072-4090).
gacccgaagaaatcaaaaa

SEQ ID NO: 781062 - DNA, 19 bp, Mus musculus
  siRNA target sequence for Hydin (NM_172916.2,4109-4127).
ggtctcagaagcgataaaa

SEQ ID NO: 781063 - DNA, 19 bp, Mus musculus
  siRNA target sequence for Hydin (NM_172916.2,4110-4128).
gtctcagaagcgataaaat

SEQ ID NO: 781064 - DNA, 19 bp, Mus musculus
  siRNA target sequence for Hydin (NM_172916.2,4165-4183).
cggactacccagaatgcat

SEQ ID NO: 781065 - DNA, 19 bp, Mus musculus
  siRNA target sequence for Hydin (NM_172916.2,4180-4198).
gcatgtggatctatgaaca

SEQ ID NO: 781066 - DNA, 19 bp, Mus musculus
  siRNA target sequence for Hydin (NM_172916.2,4199-4217).
ggatgagatgctgtctatt

SEQ ID NO: 781067 - DNA, 19 bp, Mus musculus
  siRNA target sequence for Hydin (NM_172916.2,4203-4221).
gagatgctgtctattggaa

SEQ ID NO: 781068 - DNA, 19 bp, Mus musculus
  siRNA target sequence for Hydin (NM_172916.2,4273-4291).
gcagccatcagatatcgtt

SEQ ID NO: 781069 - DNA, 19 bp, Mus musculus
  siRNA target sequence for Hydin (NM_172916.2,4274-4292).
cagccatcagatatcgttt

SEQ ID NO: 781070 - DNA, 19 bp, Mus musculus
  siRNA target sequence for Hydin (NM_172916.2,4278-4296).
catcagatatcgtttacct

SEQ ID NO: 781071 - DNA, 19 bp, Mus musculus
  siRNA target sequence for Hydin (NM_172916.2,4351-4369).
gagggcccacctatgaagt

SEQ ID NO: 781072 - DNA, 19 bp, Mus musculus
  siRNA target sequence for Hydin (NM_172916.2,4354-4372).
ggcccacctatgaagtact

SEQ ID NO: 781073 - DNA, 19 bp, Mus musculus
  siRNA target sequence for Hydin (NM_172916.2,4355-4373).
gcccacctatgaagtacta

SEQ ID NO: 781074 - DNA, 19 bp, Mus musculus
  siRNA target sequence for Hydin (NM_172916.2,4395-4413).
gtcaactactcctttgaca

SEQ ID NO: 781075 - DNA, 19 bp, Mus musculus
  siRNA target sequence for Hydin (NM_172916.2,4410-4428).
gacacgaaggacattaact

SEQ ID NO: 781076 - DNA, 19 bp, Mus musculus
  siRNA target sequence for Hydin (NM_172916.2,4412-4430).
cacgaaggacattaactat

SEQ ID NO: 781077 - DNA, 19 bp, Mus musculus
  siRNA target sequence for Hydin (NM_172916.2,4485-4503).
gggaaagttggctttgagt

SEQ ID NO: 781078 - DNA, 19 bp, Mus musculus
  siRNA target sequence for Hydin (NM_172916.2,4486-4504).
ggaaagttggctttgagtt

SEQ ID NO: 781079 - DNA, 19 bp, Mus musculus
  siRNA target sequence for Hydin (NM_172916.2,4495-4513).
gctttgagttcaatgtact

SEQ ID NO: 781080 - DNA, 19 bp, Mus musculus
  siRNA target sequence for Hydin (NM_172916.2,4549-4567).
ctggagtaccacttatcct

SEQ ID NO: 781081 - DNA, 19 bp, Mus musculus
  siRNA target sequence for Hydin (NM_172916.2,4570-4588).
ctctgtcgggttttatcca

SEQ ID NO: 781082 - DNA, 19 bp, Mus musculus
  siRNA target sequence for Hydin (NM_172916.2,4579-4597).
gttttatccagtcgaataa

SEQ ID NO: 781083 - DNA, 19 bp, Mus musculus
  siRNA target sequence for Hydin (NM_172916.2,4591-4609).
cgaataaggagcaggtatt

SEQ ID NO: 781084 - DNA, 19 bp, Mus musculus
  siRNA target sequence for Hydin (NM_172916.2,4599-4617).
gagcaggtattgaaagttt

SEQ ID NO: 781085 - DNA, 19 bp, Mus musculus
  siRNA target sequence for Hydin (NM_172916.2,4651-4669).
gaaacttccagatacagat

SEQ ID NO: 781086 - DNA, 19 bp, Mus musculus
  siRNA target sequence for Hydin (NM_172916.2,4700-4718).
gtacggagagggcatcttt

SEQ ID NO: 781087 - DNA, 19 bp, Mus musculus
  siRNA target sequence for Hydin (NM_172916.2,4800-4818).
gtagaaaaagagtacacta

SEQ ID NO: 781088 - DNA, 19 bp, Mus musculus
  siRNA target sequence for Hydin (NM_172916.2,4868-4886).
ggaggagaccgctgaaata

SEQ ID NO: 781089 - DNA, 19 bp, Mus musculus
  siRNA target sequence for Hydin (NM_172916.2,4869-4887).
gaggagaccgctgaaataa

SEQ ID NO: 781090 - DNA, 19 bp, Mus musculus
  siRNA target sequence for Hydin (NM_172916.2,4871-4889).
ggagaccgctgaaataagt

SEQ ID NO: 781091 - DNA, 19 bp, Mus musculus
  siRNA target sequence for Hydin (NM_172916.2,4904-4922).
ggaagtagagcgactcata

SEQ ID NO: 781092 - DNA, 19 bp, Mus musculus
  siRNA target sequence for Hydin (NM_172916.2,4915-4933).
gactcatagtccaagacta

SEQ ID NO: 781093 - DNA, 19 bp, Mus musculus
  siRNA target sequence for Hydin (NM_172916.2,4947-4965).
cagagaagcatctccaata

SEQ ID NO: 781094 - DNA, 19 bp, Mus musculus
  siRNA target sequence for Hydin (NM_172916.2,4992-5010).
cggagttgccgaaaactca

SEQ ID NO: 781095 - DNA, 19 bp, Mus musculus
  siRNA target sequence for Hydin (NM_172916.2,5036-5054).
cctggacttcggctacatt

SEQ ID NO: 781096 - DNA, 19 bp, Mus musculus
  siRNA target sequence for Hydin (NM_172916.2,5039-5057).
ggacttcggctacattgta

SEQ ID NO: 781097 - DNA, 19 bp, Mus musculus
  siRNA target sequence for Hydin (NM_172916.2,5042-5060).
cttcggctacattgtactt

SEQ ID NO: 781098 - DNA, 19 bp, Mus musculus
  siRNA target sequence for Hydin (NM_172916.2,5071-5089).
gaacccacatcgtcaagat

SEQ ID NO: 781099 - DNA, 19 bp, Mus musculus
  siRNA target sequence for Hydin (NM_172916.2,5114-5132).
gtccttccacgcagagaaa

SEQ ID NO: 781100 - DNA, 19 bp, Mus musculus
  siRNA target sequence for Hydin (NM_172916.2,5163-5181).
gagctagaccgtgtaaaga

SEQ ID NO: 781101 - DNA, 19 bp, Mus musculus
  siRNA target sequence for Hydin (NM_172916.2,5243-5261).
ccctgtggggaacaaagaa

SEQ ID NO: 781102 - DNA, 19 bp, Mus musculus
  siRNA target sequence for Hydin (NM_172916.2,5320-5338).
cggtgatcatcccaagtat

SEQ ID NO: 781103 - DNA, 19 bp, Mus musculus
  siRNA target sequence for Hydin (NM_172916.2,5322-5340).
gtgatcatcccaagtatga

SEQ ID NO: 781104 - DNA, 19 bp, Mus musculus
  siRNA target sequence for Hydin (NM_172916.2,5341-5359).
ccctgtcgtgcaacaaaat

SEQ ID NO: 781105 - DNA, 19 bp, Mus musculus
  siRNA target sequence for Hydin (NM_172916.2,5347-5365).
cgtgcaacaaaatagagtt

SEQ ID NO: 781106 - DNA, 19 bp, Mus musculus
  siRNA target sequence for Hydin (NM_172916.2,5348-5366).
gtgcaacaaaatagagttt

SEQ ID NO: 781107 - DNA, 19 bp, Mus musculus
  siRNA target sequence for Hydin (NM_172916.2,5361-5379).
gagtttgccacgattcagt

SEQ ID NO: 781108 - DNA, 19 bp, Mus musculus
  siRNA target sequence for Hydin (NM_172916.2,5444-5462).
cgtccacaccccaaagtct

SEQ ID NO: 781109 - DNA, 19 bp, Mus musculus
  siRNA target sequence for Hydin (NM_172916.2,5452-5470).
ccccaaagtctactaacaa

SEQ ID NO: 781110 - DNA, 19 bp, Mus musculus
  siRNA target sequence for Hydin (NM_172916.2,5477-5495).
caaacacatgccaaagtat

SEQ ID NO: 781111 - DNA, 19 bp, Mus musculus
  siRNA target sequence for Hydin (NM_172916.2,5527-5545).
ccaagtctcggatctttga

SEQ ID NO: 781112 - DNA, 19 bp, Mus musculus
  siRNA target sequence for Hydin (NM_172916.2,5584-5602).
gggctaatgtgcaagtgaa

SEQ ID NO: 781113 - DNA, 19 bp, Mus musculus
  siRNA target sequence for Hydin (NM_172916.2,5585-5603).
ggctaatgtgcaagtgaaa

SEQ ID NO: 781114 - DNA, 19 bp, Mus musculus
  siRNA target sequence for Hydin (NM_172916.2,5586-5604).
gctaatgtgcaagtgaaat

SEQ ID NO: 781115 - DNA, 19 bp, Mus musculus
  siRNA target sequence for Hydin (NM_172916.2,5745-5763).
cccctcctgccttttgcat

SEQ ID NO: 781116 - DNA, 19 bp, Mus musculus
  siRNA target sequence for Hydin (NM_172916.2,5814-5832).
gagttttactccctagaat

SEQ ID NO: 781117 - DNA, 19 bp, Mus musculus
  siRNA target sequence for Hydin (NM_172916.2,5837-5855).
ccagcagtatctcttagaa

SEQ ID NO: 781118 - DNA, 19 bp, Mus musculus
  siRNA target sequence for Hydin (NM_172916.2,6064-6082).
gcacaaagaggacatcaat

SEQ ID NO: 781119 - DNA, 19 bp, Mus musculus
  siRNA target sequence for Hydin (NM_172916.2,6119-6137).
gcggcatctcacaattgaa

SEQ ID NO: 781120 - DNA, 19 bp, Mus musculus
  siRNA target sequence for Hydin (NM_172916.2,6130-6148).
caattgaagccaaaaacta

SEQ ID NO: 781121 - DNA, 19 bp, Mus musculus
  siRNA target sequence for Hydin (NM_172916.2,6190-6208).
catttcaaaccgacaagat

SEQ ID NO: 781122 - DNA, 19 bp, Mus musculus
  siRNA target sequence for Hydin (NM_172916.2,6285-6303).
cacctgggcatcgacattt

SEQ ID NO: 781123 - DNA, 19 bp, Mus musculus
  siRNA target sequence for Hydin (NM_172916.2,6331-6349).
ggaagggcatcgccattat

SEQ ID NO: 781124 - DNA, 19 bp, Mus musculus
  siRNA target sequence for Hydin (NM_172916.2,6413-6431).
cgcagcctgcctgaacatt

SEQ ID NO: 781125 - DNA, 19 bp, Mus musculus
  siRNA target sequence for Hydin (NM_172916.2,6546-6564).
gctcatgagtcttcaatga

SEQ ID NO: 781126 - DNA, 19 bp, Mus musculus
  siRNA target sequence for Hydin (NM_172916.2,6589-6607).
gactaagcactgagaactt

SEQ ID NO: 781127 - DNA, 19 bp, Mus musculus
  siRNA target sequence for Hydin (NM_172916.2,6600-6618).
gagaacttgggcaggttta

SEQ ID NO: 781128 - DNA, 19 bp, Mus musculus
  siRNA target sequence for Hydin (NM_172916.2,6631-6649).
ctctaataacccaggaata

SEQ ID NO: 781129 - DNA, 19 bp, Mus musculus
  siRNA target sequence for Hydin (NM_172916.2,6905-6923).
gctgagcaactgtttcaga

SEQ ID NO: 781130 - DNA, 19 bp, Mus musculus
  siRNA target sequence for Hydin (NM_172916.2,7003-7021).
gcagccgggagcacatcta

SEQ ID NO: 781131 - DNA, 19 bp, Mus musculus
  siRNA target sequence for Hydin (NM_172916.2,7004-7022).
cagccgggagcacatctat

SEQ ID NO: 781132 - DNA, 19 bp, Mus musculus
  siRNA target sequence for Hydin (NM_172916.2,7006-7024).
gccgggagcacatctatgt

SEQ ID NO: 781133 - DNA, 19 bp, Mus musculus
  siRNA target sequence for Hydin (NM_172916.2,7009-7027).
gggagcacatctatgtcat

SEQ ID NO: 781134 - DNA, 19 bp, Mus musculus
  siRNA target sequence for Hydin (NM_172916.2,7028-7046).
caacatgtctcaggattat

SEQ ID NO: 781135 - DNA, 19 bp, Mus musculus
  siRNA target sequence for Hydin (NM_172916.2,7060-7078).
cccaggagaaggctaaaaa

SEQ ID NO: 781136 - DNA, 19 bp, Mus musculus
  siRNA target sequence for Hydin (NM_172916.2,7210-7228).
cactccgggagagaaagaa

SEQ ID NO: 781137 - DNA, 19 bp, Mus musculus
  siRNA target sequence for Hydin (NM_172916.2,7311-7329).
ctaaaacggaaggtcaaaa

SEQ ID NO: 781138 - DNA, 19 bp, Mus musculus
  siRNA target sequence for Hydin (NM_172916.2,7377-7395).
gcacaaggcgccacaaaca

SEQ ID NO: 781139 - DNA, 19 bp, Mus musculus
  siRNA target sequence for Hydin (NM_172916.2,7378-7396).
cacaaggcgccacaaacaa

SEQ ID NO: 781140 - DNA, 19 bp, Mus musculus
  siRNA target sequence for Hydin (NM_172916.2,7413-7431).
gccaagatagaattaaaga

SEQ ID NO: 781141 - DNA, 19 bp, Mus musculus
  siRNA target sequence for Hydin (NM_172916.2,7466-7484).
gcacgcaacacttgaagaa

SEQ ID NO: 781142 - DNA, 19 bp, Mus musculus
  siRNA target sequence for Hydin (NM_172916.2,7467-7485).
cacgcaacacttgaagaaa

SEQ ID NO: 781143 - DNA, 19 bp, Mus musculus
  siRNA target sequence for Hydin (NM_172916.2,7508-7526).
gaccgaatacccactctta

SEQ ID NO: 781144 - DNA, 19 bp, Mus musculus
  siRNA target sequence for Hydin (NM_172916.2,7510-7528).
ccgaatacccactcttaat

SEQ ID NO: 781145 - DNA, 19 bp, Mus musculus
  siRNA target sequence for Hydin (NM_172916.2,7511-7529).
cgaatacccactcttaatt

SEQ ID NO: 781146 - DNA, 19 bp, Mus musculus
  siRNA target sequence for Hydin (NM_172916.2,7518-7536).
ccactcttaattccaattt

SEQ ID NO: 781147 - DNA, 19 bp, Mus musculus
  siRNA target sequence for Hydin (NM_172916.2,7670-7688).
gatgatggtacctcataca

SEQ ID NO: 781148 - DNA, 19 bp, Mus musculus
  siRNA target sequence for Hydin (NM_172916.2,7779-7797).
gagcgcttggagaaagaga

SEQ ID NO: 781149 - DNA, 19 bp, Mus musculus
  siRNA target sequence for Hydin (NM_172916.2,8095-8113).
cagcaaagcggcagtcttt

SEQ ID NO: 781150 - DNA, 19 bp, Mus musculus
  siRNA target sequence for Hydin (NM_172916.2,8115-8133).
gtcgccacggagatcctaa

SEQ ID NO: 781151 - DNA, 19 bp, Mus musculus
  siRNA target sequence for Hydin (NM_172916.2,8271-8289).
ggaagcaaacagaaattga

SEQ ID NO: 781152 - DNA, 19 bp, Mus musculus
  siRNA target sequence for Hydin (NM_172916.2,8479-8497).
caaacggagaggtaacctt

SEQ ID NO: 781153 - DNA, 19 bp, Mus musculus
  siRNA target sequence for Hydin (NM_172916.2,8504-8522).
gcacttctcctctctagat

SEQ ID NO: 781154 - DNA, 19 bp, Mus musculus
  siRNA target sequence for Hydin (NM_172916.2,8788-8806).
cactgacgatcctgaatga

SEQ ID NO: 781155 - DNA, 19 bp, Mus musculus
  siRNA target sequence for Hydin (NM_172916.2,8790-8808).
ctgacgatcctgaatgatt

SEQ ID NO: 781156 - DNA, 19 bp, Mus musculus
  siRNA target sequence for Hydin (NM_172916.2,8792-8810).
gacgatcctgaatgattct

SEQ ID NO: 781157 - DNA, 19 bp, Mus musculus
  siRNA target sequence for Hydin (NM_172916.2,8836-8854).
gtttccagcatgacataaa

SEQ ID NO: 781158 - DNA, 19 bp, Mus musculus
  siRNA target sequence for Hydin (NM_172916.2,8857-8875).
caagcacctactttctaga

SEQ ID NO: 781159 - DNA, 19 bp, Mus musculus
  siRNA target sequence for Hydin (NM_172916.2,8871-8889).
ctagagccggtcaacatga

SEQ ID NO: 781160 - DNA, 19 bp, Mus musculus
  siRNA target sequence for Hydin (NM_172916.2,8879-8897).
ggtcaacatgactctgaaa

SEQ ID NO: 781161 - DNA, 19 bp, Mus musculus
  siRNA target sequence for Hydin (NM_172916.2,8888-8906).
gactctgaaacccaatgaa

SEQ ID NO: 781162 - DNA, 19 bp, Mus musculus
  siRNA target sequence for Hydin (NM_172916.2,8963-8981).
cattgtctgctgcatcaaa

SEQ ID NO: 781163 - DNA, 19 bp, Mus musculus
  siRNA target sequence for Hydin (NM_172916.2,8993-9011).
gccagccatctttaagtta

SEQ ID NO: 781164 - DNA, 19 bp, Mus musculus
  siRNA target sequence for Hydin (NM_172916.2,9008-9026).
gttaagctgccaaggaatt

SEQ ID NO: 781165 - DNA, 19 bp, Mus musculus
  siRNA target sequence for Hydin (NM_172916.2,9022-9040).
gaattcgcccagaaattga

SEQ ID NO: 781166 - DNA, 19 bp, Mus musculus
  siRNA target sequence for Hydin (NM_172916.2,9049-9067).
ccaggcagttacattttga

SEQ ID NO: 781167 - DNA, 19 bp, Mus musculus
  siRNA target sequence for Hydin (NM_172916.2,9102-9120).
gtaattctccgcaatgtca

SEQ ID NO: 781168 - DNA, 19 bp, Mus musculus
  siRNA target sequence for Hydin (NM_172916.2,9161-9179).
cctaggggaggactttact

SEQ ID NO: 781169 - DNA, 19 bp, Mus musculus
  siRNA target sequence for Hydin (NM_172916.2,9203-9221).
gctacccaagggagagtat

SEQ ID NO: 781170 - DNA, 19 bp, Mus musculus
  siRNA target sequence for Hydin (NM_172916.2,9271-9289).
ccattcggattgaggtttt

SEQ ID NO: 781171 - DNA, 19 bp, Mus musculus
  siRNA target sequence for Hydin (NM_172916.2,9284-9302).
ggttttggacgcagaaaat

SEQ ID NO: 781172 - DNA, 19 bp, Mus musculus
  siRNA target sequence for Hydin (NM_172916.2,9290-9308).
ggacgcagaaaatcttgtt

SEQ ID NO: 781173 - DNA, 19 bp, Mus musculus
  siRNA target sequence for Hydin (NM_172916.2,9309-9327).
ggtgtcgttcagatcgaaa

SEQ ID NO: 781174 - DNA, 19 bp, Mus musculus
  siRNA target sequence for Hydin (NM_172916.2,9310-9328).
gtgtcgttcagatcgaaaa

SEQ ID NO: 781175 - DNA, 19 bp, Mus musculus
  siRNA target sequence for Hydin (NM_172916.2,9312-9330).
gtcgttcagatcgaaaaca

SEQ ID NO: 781176 - DNA, 19 bp, Mus musculus
  siRNA target sequence for Hydin (NM_172916.2,9318-9336).
cagatcgaaaacatcttga

SEQ ID NO: 781177 - DNA, 19 bp, Mus musculus
  siRNA target sequence for Hydin (NM_172916.2,9335-9353).
gatctttgcagaatcgtat

SEQ ID NO: 781178 - DNA, 19 bp, Mus musculus
  siRNA target sequence for Hydin (NM_172916.2,9338-9356).
ctttgcagaatcgtatgat

SEQ ID NO: 781179 - DNA, 19 bp, Mus musculus
  siRNA target sequence for Hydin (NM_172916.2,9452-9470).
gaaaaaccgtggaaaatat

SEQ ID NO: 781180 - DNA, 19 bp, Mus musculus
  siRNA target sequence for Hydin (NM_172916.2,9506-9524).
ggttttgccaacaaactta

SEQ ID NO: 781181 - DNA, 19 bp, Mus musculus
  siRNA target sequence for Hydin (NM_172916.2,9556-9574).
ggacactggcctcaataga

SEQ ID NO: 781182 - DNA, 19 bp, Mus musculus
  siRNA target sequence for Hydin (NM_172916.2,9557-9575).
gacactggcctcaatagat

SEQ ID NO: 781183 - DNA, 19 bp, Mus musculus
  siRNA target sequence for Hydin (NM_172916.2,9641-9659).
cctgcgctgccagattatt

SEQ ID NO: 781184 - DNA, 19 bp, Mus musculus
  siRNA target sequence for Hydin (NM_172916.2,9690-9708).
gccagcatccctattaagt

SEQ ID NO: 781185 - DNA, 19 bp, Mus musculus
  siRNA target sequence for Hydin (NM_172916.2,9692-9710).
cagcatccctattaagttt

SEQ ID NO: 781186 - DNA, 19 bp, Mus musculus
  siRNA target sequence for Hydin (NM_172916.2,9746-9764).
cccctcctccatcatcaat

SEQ ID NO: 781187 - DNA, 19 bp, Mus musculus
  siRNA target sequence for Hydin (NM_172916.2,9747-9765).
ccctcctccatcatcaatt

SEQ ID NO: 781188 - DNA, 19 bp, Mus musculus
  siRNA target sequence for Hydin (NM_172916.2,9781-9799).
gcggtaccaggaaaagcat

SEQ ID NO: 781189 - DNA, 19 bp, Mus musculus
  siRNA target sequence for Hydin (NM_172916.2,9822-9840).
ggcataatcgacttcaaat

SEQ ID NO: 781190 - DNA, 19 bp, Mus musculus
  siRNA target sequence for Hydin (NM_172916.2,9823-9841).
gcataatcgacttcaaata

SEQ ID NO: 781191 - DNA, 19 bp, Mus musculus
  siRNA target sequence for Hydin (NM_172916.2,9868-9886).
gtccaattcttcaaaagaa

SEQ ID NO: 781192 - DNA, 19 bp, Mus musculus
  siRNA target sequence for Hydin (NM_172916.2,9916-9934).
cccgagagagtgaaagctt

SEQ ID NO: 781193 - DNA, 19 bp, Mus musculus
  siRNA target sequence for Hydin (NM_172916.2,10082-10100).
caccattgagtgttttgca

SEQ ID NO: 781194 - DNA, 19 bp, Mus musculus
  siRNA target sequence for Hydin (NM_172916.2,10122-10140).
gagtttctggccatcgata

SEQ ID NO: 781195 - DNA, 19 bp, Mus musculus
  siRNA target sequence for Hydin (NM_172916.2,10213-10231).
cctttgtgaccgacaacaa

SEQ ID NO: 781196 - DNA, 19 bp, Mus musculus
  siRNA target sequence for Hydin (NM_172916.2,10222-10240).
ccgacaacaacatcttgat

SEQ ID NO: 781197 - DNA, 19 bp, Mus musculus
  siRNA target sequence for Hydin (NM_172916.2,10223-10241).
cgacaacaacatcttgata

SEQ ID NO: 781198 - DNA, 19 bp, Mus musculus
  siRNA target sequence for Hydin (NM_172916.2,10323-10341).
gatgagaacaagttcatct

SEQ ID NO: 781199 - DNA, 19 bp, Mus musculus
  siRNA target sequence for Hydin (NM_172916.2,10571-10589).
cttcgaggccactttggat

SEQ ID NO: 781200 - DNA, 19 bp, Mus musculus
  siRNA target sequence for Hydin (NM_172916.2,10612-10630).
ggagccgaggtcttgtgtt

SEQ ID NO: 781201 - DNA, 19 bp, Mus musculus
  siRNA target sequence for Hydin (NM_172916.2,10615-10633).
gccgaggtcttgtgtttga

SEQ ID NO: 781202 - DNA, 19 bp, Mus musculus
  siRNA target sequence for Hydin (NM_172916.2,10616-10634).
ccgaggtcttgtgtttgat

SEQ ID NO: 781203 - DNA, 19 bp, Mus musculus
  siRNA target sequence for Hydin (NM_172916.2,10617-10635).
cgaggtcttgtgtttgata

SEQ ID NO: 781204 - DNA, 19 bp, Mus musculus
  siRNA target sequence for Hydin (NM_172916.2,10668-10686).
gtcatccggccaactctat

SEQ ID NO: 781205 - DNA, 19 bp, Mus musculus
  siRNA target sequence for Hydin (NM_172916.2,10670-10688).
catccggccaactctatat

SEQ ID NO: 781206 - DNA, 19 bp, Mus musculus
  siRNA target sequence for Hydin (NM_172916.2,10675-10693).
ggccaactctatataacca

SEQ ID NO: 781207 - DNA, 19 bp, Mus musculus
  siRNA target sequence for Hydin (NM_172916.2,10676-10694).
gccaactctatataaccaa

SEQ ID NO: 781208 - DNA, 19 bp, Mus musculus
  siRNA target sequence for Hydin (NM_172916.2,11114-11132).
ggagagctcggataagtct

SEQ ID NO: 781209 - DNA, 19 bp, Mus musculus
  siRNA target sequence for Hydin (NM_172916.2,11122-11140).
cggataagtctgaagtcat

SEQ ID NO: 781210 - DNA, 19 bp, Mus musculus
  siRNA target sequence for Hydin (NM_172916.2,11209-11227).
ggtactgtcatattggaat

SEQ ID NO: 781211 - DNA, 19 bp, Mus musculus
  siRNA target sequence for Hydin (NM_172916.2,11259-11277).
cacagccaagtgaatgtga

SEQ ID NO: 781212 - DNA, 19 bp, Mus musculus
  siRNA target sequence for Hydin (NM_172916.2,11285-11303).
cgagtggccccttttagct

SEQ ID NO: 781213 - DNA, 19 bp, Mus musculus
  siRNA target sequence for Hydin (NM_172916.2,11309-11327).
gtccttctccccacagatt

SEQ ID NO: 781214 - DNA, 19 bp, Mus musculus
  siRNA target sequence for Hydin (NM_172916.2,11357-11375).
cgtggtggtgaccttgaaa

SEQ ID NO: 781215 - DNA, 19 bp, Mus musculus
  siRNA target sequence for Hydin (NM_172916.2,11416-11434).
gcaagctttccaagatcat

SEQ ID NO: 781216 - DNA, 19 bp, Mus musculus
  siRNA target sequence for Hydin (NM_172916.2,11498-11516).
ggatgctccccgaaataca

SEQ ID NO: 781217 - DNA, 19 bp, Mus musculus
  siRNA target sequence for Hydin (NM_172916.2,11522-11540).
gaccttgaatacaaaacga

SEQ ID NO: 781218 - DNA, 19 bp, Mus musculus
  siRNA target sequence for Hydin (NM_172916.2,11634-11652).
gcttcatatcagtgtgaaa

SEQ ID NO: 781219 - DNA, 19 bp, Mus musculus
  siRNA target sequence for Hydin (NM_172916.2,11688-11706).
cagacccgagtgtttgagt

SEQ ID NO: 781220 - DNA, 19 bp, Mus musculus
  siRNA target sequence for Hydin (NM_172916.2,11690-11708).
gacccgagtgtttgagttt

SEQ ID NO: 781221 - DNA, 19 bp, Mus musculus
  siRNA target sequence for Hydin (NM_172916.2,11703-11721).
gagtttgacctcgttaaca

SEQ ID NO: 781222 - DNA, 19 bp, Mus musculus
  siRNA target sequence for Hydin (NM_172916.2,11705-11723).
gtttgacctcgttaacaca

SEQ ID NO: 781223 - DNA, 19 bp, Mus musculus
  siRNA target sequence for Hydin (NM_172916.2,11722-11740).
caggacaggtgctgttaga

SEQ ID NO: 781224 - DNA, 19 bp, Mus musculus
  siRNA target sequence for Hydin (NM_172916.2,11795-11813).
gcgtcaaggttcaagtcaa

SEQ ID NO: 781225 - DNA, 19 bp, Mus musculus
  siRNA target sequence for Hydin (NM_172916.2,11796-11814).
cgtcaaggttcaagtcaaa

SEQ ID NO: 781226 - DNA, 19 bp, Mus musculus
  siRNA target sequence for Hydin (NM_172916.2,11911-11929).
gcgttgtgcccgtaggaaa

SEQ ID NO: 781227 - DNA, 19 bp, Mus musculus
  siRNA target sequence for Hydin (NM_172916.2,11919-11937).
cccgtaggaaagactcaaa

SEQ ID NO: 781228 - DNA, 19 bp, Mus musculus
  siRNA target sequence for Hydin (NM_172916.2,11920-11938).
ccgtaggaaagactcaaaa

SEQ ID NO: 781229 - DNA, 19 bp, Mus musculus
  siRNA target sequence for Hydin (NM_172916.2,11984-12002).
ctccttgtactgccaaatt

SEQ ID NO: 781230 - DNA, 19 bp, Mus musculus
  siRNA target sequence for Hydin (NM_172916.2,12018-12036).
ggagaacaaggtcctattt

SEQ ID NO: 781231 - DNA, 19 bp, Mus musculus
  siRNA target sequence for Hydin (NM_172916.2,12021-12039).
gaacaaggtcctattttga

SEQ ID NO: 781232 - DNA, 19 bp, Mus musculus
  siRNA target sequence for Hydin (NM_172916.2,12142-12160).
ctgggcctctcgaacctaa

SEQ ID NO: 781233 - DNA, 19 bp, Mus musculus
  siRNA target sequence for Hydin (NM_172916.2,12144-12162).
gggcctctcgaacctaata

SEQ ID NO: 781234 - DNA, 19 bp, Mus musculus
  siRNA target sequence for Hydin (NM_172916.2,12157-12175).
ctaatacccgtgtgattga

SEQ ID NO: 781235 - DNA, 19 bp, Mus musculus
  siRNA target sequence for Hydin (NM_172916.2,12231-12249).
ccgaccaacagcacctatt

SEQ ID NO: 781236 - DNA, 19 bp, Mus musculus
  siRNA target sequence for Hydin (NM_172916.2,12233-12251).
gaccaacagcacctattct

SEQ ID NO: 781237 - DNA, 19 bp, Mus musculus
  siRNA target sequence for Hydin (NM_172916.2,12265-12283).
ctgaagagacggaaagtct

SEQ ID NO: 781238 - DNA, 19 bp, Mus musculus
  siRNA target sequence for Hydin (NM_172916.2,12288-12306).
caccctccggcctttgtgt

SEQ ID NO: 781239 - DNA, 19 bp, Mus musculus
  siRNA target sequence for Hydin (NM_172916.2,12294-12312).
ccggcctttgtgtgtctta

SEQ ID NO: 781240 - DNA, 19 bp, Mus musculus
  siRNA target sequence for Hydin (NM_172916.2,12409-12427).
ctatcccagagcataatat

SEQ ID NO: 781241 - DNA, 19 bp, Mus musculus
  siRNA target sequence for Hydin (NM_172916.2,12466-12484).
cccttatctctcttgacaa

SEQ ID NO: 781242 - DNA, 19 bp, Mus musculus
  siRNA target sequence for Hydin (NM_172916.2,12525-12543).
gcccgagagacagtaaaga

SEQ ID NO: 781243 - DNA, 19 bp, Mus musculus
  siRNA target sequence for Hydin (NM_172916.2,12526-12544).
cccgagagacagtaaagat

SEQ ID NO: 781244 - DNA, 19 bp, Mus musculus
  siRNA target sequence for Hydin (NM_172916.2,12584-12602).
ggacaactcccgctattct

SEQ ID NO: 781245 - DNA, 19 bp, Mus musculus
  siRNA target sequence for Hydin (NM_172916.2,12587-12605).
caactcccgctattctgaa

SEQ ID NO: 781246 - DNA, 19 bp, Mus musculus
  siRNA target sequence for Hydin (NM_172916.2,12592-12610).
cccgctattctgaaggatt

SEQ ID NO: 781247 - DNA, 19 bp, Mus musculus
  siRNA target sequence for Hydin (NM_172916.2,12595-12613).
gctattctgaaggattcaa

SEQ ID NO: 781248 - DNA, 19 bp, Mus musculus
  siRNA target sequence for Hydin (NM_172916.2,12659-12677).
gtccaggttcccagttgat

SEQ ID NO: 781249 - DNA, 19 bp, Mus musculus
  siRNA target sequence for Hydin (NM_172916.2,12662-12680).
caggttcccagttgatatt

SEQ ID NO: 781250 - DNA, 19 bp, Mus musculus
  siRNA target sequence for Hydin (NM_172916.2,12771-12789).
gccgagggctacactatga

SEQ ID NO: 781251 - DNA, 19 bp, Mus musculus
  siRNA target sequence for Hydin (NM_172916.2,12772-12790).
ccgagggctacactatgaa

SEQ ID NO: 781252 - DNA, 19 bp, Mus musculus
  siRNA target sequence for Hydin (NM_172916.2,12773-12791).
cgagggctacactatgaat

SEQ ID NO: 781253 - DNA, 19 bp, Mus musculus
  siRNA target sequence for Hydin (NM_172916.2,12866-12884).
ctacgaggtggagttgaat

SEQ ID NO: 781254 - DNA, 19 bp, Mus musculus
  siRNA target sequence for Hydin (NM_172916.2,12869-12887).
cgaggtggagttgaatgaa

SEQ ID NO: 781255 - DNA, 19 bp, Mus musculus
  siRNA target sequence for Hydin (NM_172916.2,12870-12888).
gaggtggagttgaatgaat

SEQ ID NO: 781256 - DNA, 19 bp, Mus musculus
  siRNA target sequence for Hydin (NM_172916.2,12875-12893).
ggagttgaatgaatgtgtt

SEQ ID NO: 781257 - DNA, 19 bp, Mus musculus
  siRNA target sequence for Hydin (NM_172916.2,12894-12912).
cagtgtgaattcagtttca

SEQ ID NO: 781258 - DNA, 19 bp, Mus musculus
  siRNA target sequence for Hydin (NM_172916.2,12961-12979).
caaaactcctgttgcaata

SEQ ID NO: 781259 - DNA, 19 bp, Mus musculus
  siRNA target sequence for Hydin (NM_172916.2,13042-13060).
cattccaaccgtatcagaa

SEQ ID NO: 781260 - DNA, 19 bp, Mus musculus
  siRNA target sequence for Hydin (NM_172916.2,13080-13098).
gaactcaaaatcaagatca

SEQ ID NO: 781261 - DNA, 19 bp, Mus musculus
  siRNA target sequence for Hydin (NM_172916.2,13100-13118).
ccatggcccaacattcgta

SEQ ID NO: 781262 - DNA, 19 bp, Mus musculus
  siRNA target sequence for Hydin (NM_172916.2,13101-13119).
catggcccaacattcgtat

SEQ ID NO: 781263 - DNA, 19 bp, Mus musculus
  siRNA target sequence for Hydin (NM_172916.2,13105-13123).
gcccaacattcgtatgcaa

SEQ ID NO: 781264 - DNA, 19 bp, Mus musculus
  siRNA target sequence for Hydin (NM_172916.2,13111-13129).
cattcgtatgcaacatctt

SEQ ID NO: 781265 - DNA, 19 bp, Mus musculus
  siRNA target sequence for Hydin (NM_172916.2,13162-13180).
ccttcaccagccacaactt

SEQ ID NO: 781266 - DNA, 19 bp, Mus musculus
  siRNA target sequence for Hydin (NM_172916.2,13204-13222).
ctgggatgcctccatataa

SEQ ID NO: 781267 - DNA, 19 bp, Mus musculus
  siRNA target sequence for Hydin (NM_172916.2,13207-13225).
ggatgcctccatataagca

SEQ ID NO: 781268 - DNA, 19 bp, Mus musculus
  siRNA target sequence for Hydin (NM_172916.2,13213-13231).
ctccatataagcaaatcct

SEQ ID NO: 781269 - DNA, 19 bp, Mus musculus
  siRNA target sequence for Hydin (NM_172916.2,13293-13311).
cacatcgaggtgaacttca

SEQ ID NO: 781270 - DNA, 19 bp, Mus musculus
  siRNA target sequence for Hydin (NM_172916.2,13394-13412).
catcccctttgaaatcaat

SEQ ID NO: 781271 - DNA, 19 bp, Mus musculus
  siRNA target sequence for Hydin (NM_172916.2,13449-13467).
ggcacagaaatgaagcttt

SEQ ID NO: 781272 - DNA, 19 bp, Mus musculus
  siRNA target sequence for Hydin (NM_172916.2,13483-13501).
ccaacaggatcgtgaagtt

SEQ ID NO: 781273 - DNA, 19 bp, Mus musculus
  siRNA target sequence for Hydin (NM_172916.2,13484-13502).
caacaggatcgtgaagtta

SEQ ID NO: 781274 - DNA, 19 bp, Mus musculus
  siRNA target sequence for Hydin (NM_172916.2,13518-13536).
ggacaggttgtgaggaaaa

SEQ ID NO: 781275 - DNA, 19 bp, Mus musculus
  siRNA target sequence for Hydin (NM_172916.2,13537-13555).
cagtctccctcgtcaacaa

SEQ ID NO: 781276 - DNA, 19 bp, Mus musculus
  siRNA target sequence for Hydin (NM_172916.2,13566-13584).
cagctcacctttaatcact

SEQ ID NO: 781277 - DNA, 19 bp, Mus musculus
  siRNA target sequence for Hydin (NM_172916.2,13581-13599).
cactcggtcctgttctcta

SEQ ID NO: 781278 - DNA, 19 bp, Mus musculus
  siRNA target sequence for Hydin (NM_172916.2,13671-13689).
gtctgtaaactagagatta

SEQ ID NO: 781279 - DNA, 19 bp, Mus musculus
  siRNA target sequence for Hydin (NM_172916.2,13675-13693).
gtaaactagagattacctt

SEQ ID NO: 781280 - DNA, 19 bp, Mus musculus
  siRNA target sequence for Hydin (NM_172916.2,13706-13724).
gcgagtccctcctttctct

SEQ ID NO: 781281 - DNA, 19 bp, Mus musculus
  siRNA target sequence for Hydin (NM_172916.2,13863-13881).
cgcattctcataatgaaca

SEQ ID NO: 781282 - DNA, 19 bp, Mus musculus
  siRNA target sequence for Hydin (NM_172916.2,13886-13904).
cgacgtgggtgcaaggttt

SEQ ID NO: 781283 - DNA, 19 bp, Mus musculus
  siRNA target sequence for Hydin (NM_172916.2,13887-13905).
gacgtgggtgcaaggttta

SEQ ID NO: 781284 - DNA, 19 bp, Mus musculus
  siRNA target sequence for Hydin (NM_172916.2,13890-13908).
gtgggtgcaaggtttaaat

SEQ ID NO: 781285 - DNA, 19 bp, Mus musculus
  siRNA target sequence for Hydin (NM_172916.2,13977-13995).
gaggtggctctagaagtaa

SEQ ID NO: 781286 - DNA, 19 bp, Mus musculus
  siRNA target sequence for Hydin (NM_172916.2,13979-13997).
ggtggctctagaagtaaca

SEQ ID NO: 781287 - DNA, 19 bp, Mus musculus
  siRNA target sequence for Hydin (NM_172916.2,14022-14040).
gagagtctctataaaaaca

SEQ ID NO: 781288 - DNA, 19 bp, Mus musculus
  siRNA target sequence for Hydin (NM_172916.2,14099-14117).
gggaccacctgtggtaaaa

SEQ ID NO: 781289 - DNA, 19 bp, Mus musculus
  siRNA target sequence for Hydin (NM_172916.2,14268-14286).
caaaacaagccctatgaga

SEQ ID NO: 781290 - DNA, 19 bp, Mus musculus
  siRNA target sequence for Hydin (NM_172916.2,14294-14312).
caagccccgaaccatgaat

SEQ ID NO: 781291 - DNA, 19 bp, Mus musculus
  siRNA target sequence for Hydin (NM_172916.2,14427-14445).
cgtgaggttccatgtaaga

SEQ ID NO: 781292 - DNA, 19 bp, Mus musculus
  siRNA target sequence for Hydin (NM_172916.2,14501-14519).
ccgggtcattgtggaaata

SEQ ID NO: 781293 - DNA, 19 bp, Mus musculus
  siRNA target sequence for Hydin (NM_172916.2,14551-14569).
ccctgaagggccttgatta

SEQ ID NO: 781294 - DNA, 19 bp, Mus musculus
  siRNA target sequence for Hydin (NM_172916.2,14555-14573).
gaagggccttgattacatt

SEQ ID NO: 781295 - DNA, 19 bp, Mus musculus
  siRNA target sequence for Hydin (NM_172916.2,14558-14576).
gggccttgattacattgat

SEQ ID NO: 781296 - DNA, 19 bp, Mus musculus
  siRNA target sequence for Hydin (NM_172916.2,14587-14605).
gctccaagaaagactacaa

SEQ ID NO: 781297 - DNA, 19 bp, Mus musculus
  siRNA target sequence for Hydin (NM_172916.2,14671-14689).
ccaacgagttcttatacta

SEQ ID NO: 781298 - DNA, 19 bp, Mus musculus
  siRNA target sequence for Hydin (NM_172916.2,14672-14690).
caacgagttcttatactat

SEQ ID NO: 781299 - DNA, 19 bp, Mus musculus
  siRNA target sequence for Hydin (NM_172916.2,14675-14693).
cgagttcttatactatact

SEQ ID NO: 781300 - DNA, 19 bp, Mus musculus
  siRNA target sequence for Hydin (NM_172916.2,14710-14728).
ccccttctggcattataaa

SEQ ID NO: 781301 - DNA, 19 bp, Mus musculus
  siRNA target sequence for Hydin (NM_172916.2,14748-14766).
ccagtccgccagagtgtat

SEQ ID NO: 781302 - DNA, 19 bp, Mus musculus
  siRNA target sequence for Hydin (NM_172916.2,14796-14814).
ccctactcagtgacctttt

SEQ ID NO: 781303 - DNA, 19 bp, Mus musculus
  siRNA target sequence for Hydin (NM_172916.2,14858-14876).
cgctgtgcctccaaactct

SEQ ID NO: 781304 - DNA, 19 bp, Mus musculus
  siRNA target sequence for Hydin (NM_172916.2,14869-14887).
caaactctgagggaacatt

SEQ ID NO: 781305 - DNA, 19 bp, Mus musculus
  siRNA target sequence for Hydin (NM_172916.2,14879-14897).
gggaacattctcatttgaa

SEQ ID NO: 781306 - DNA, 19 bp, Mus musculus
  siRNA target sequence for Hydin (NM_172916.2,14880-14898).
ggaacattctcatttgaat

SEQ ID NO: 781307 - DNA, 19 bp, Mus musculus
  siRNA target sequence for Hydin (NM_172916.2,14907-14925).
ctgaaagctggagaactat

SEQ ID NO: 781308 - DNA, 19 bp, Mus musculus
  siRNA target sequence for Hydin (NM_172916.2,15057-15075).
gcaaagttcaccaattata

SEQ ID NO: 781309 - DNA, 19 bp, Mus musculus
  siRNA target sequence for Hydin (NM_172916.2,15079-15097).
ggttgaagacagagtacta

SEQ ID NO: 781310 - DNA, 19 bp, Mus musculus
  siRNA target sequence for Hydin (NM_172916.2,15122-15140).
ccacacagaaaaagttatt

SEQ ID NO: 781311 - DNA, 19 bp, Mus musculus
  siRNA target sequence for Hydin (NM_172916.2,15176-15194).
cagcgtggaagtcttcttt

SEQ ID NO: 781312 - DNA, 19 bp, Mus musculus
  siRNA target sequence for Hydin (NM_172916.2,15178-15196).
gcgtggaagtcttctttga

SEQ ID NO: 781313 - DNA, 19 bp, Mus musculus
  siRNA target sequence for Hydin (NM_172916.2,15203-15221).
ccatctgggtgagactaaa

SEQ ID NO: 781314 - DNA, 19 bp, Mus musculus
  siRNA target sequence for Hydin (NM_172916.2,15266-15284).
cccactctttggaattgct

SEQ ID NO: 781315 - DNA, 19 bp, Mus musculus
  siRNA target sequence for Hydin (NM_172916.2,15319-15337).
gagccggatacaacatcat

SEQ ID NO: 781316 - DNA, 19 bp, Mus musculus
  siRNA target sequence for Hydin (NM_172916.2,15321-15339).
gccggatacaacatcatca

SEQ ID NO: 781317 - DNA, 19 bp, Mus musculus
  siRNA target sequence for Hydin (NM_172916.2,15322-15340).
ccggatacaacatcatcat

SEQ ID NO: 781318 - DNA, 19 bp, Mus musculus
  siRNA target sequence for Hydin (NM_172916.2,15446-15464).
caacatcacagtctacttt

SEQ ID NO: 781319 - DNA, 19 bp, Mus musculus
  siRNA target sequence for Hydin (NM_172916.2,15470-15488).
gaacccgtcgggcagtaaa

SEQ ID NO: 781320 - DNA, 19 bp, Mus musculus
  siRNA target sequence for Hydin (NM_172916.2,15490-15508).
ccccgatcacctctaagtt

SEQ ID NO: 781321 - DNA, 19 bp, Mus musculus
  siRNA target sequence for Hydin (NM_172916.2,15492-15510).
ccgatcacctctaagttga

SEQ ID NO: 781322 - DNA, 19 bp, Mus musculus
  siRNA target sequence for Hydin (NM_172916.2,15493-15511).
cgatcacctctaagttgat

SEQ ID NO: 781323 - DNA, 19 bp, Mus musculus
  siRNA target sequence for Hydin (NM_172916.2,15494-15512).
gatcacctctaagttgatt

SEQ ID NO: 781324 - DNA, 19 bp, Mus musculus
  siRNA target sequence for Hydin (NM_172916.2,15535-15553).
gcaccgaatctggaatcaa

SEQ ID NO: 781325 - DNA, 19 bp, Mus musculus
  siRNA target sequence for Hydin (NM_172916.2,15536-15554).
caccgaatctggaatcaaa

SEQ ID NO: 781326 - DNA, 19 bp, Mus musculus
  siRNA target sequence for Hydin (NM_172916.2,15546-15564).
ggaatcaaatgggtttatt

SEQ ID NO: 781327 - DNA, 19 bp, Mus musculus
  siRNA target sequence for A830048P05 (NM_172917.1,376-394).
cattgtcccagtatgactt

SEQ ID NO: 781328 - DNA, 19 bp, Mus musculus
  siRNA target sequence for A830048P05 (NM_172917.1,380-398).
gtcccagtatgacttacta

SEQ ID NO: 781329 - DNA, 19 bp, Mus musculus
  siRNA target sequence for A830048P05 (NM_172917.1,447-465).
cttccacagcccaactgta

SEQ ID NO: 781330 - DNA, 19 bp, Mus musculus
  siRNA target sequence for A830048P05 (NM_172917.1,670-688).
ctggagagccacttagtct

SEQ ID NO: 781331 - DNA, 19 bp, Mus musculus
  siRNA target sequence for A830048P05 (NM_172917.1,685-703).
gtcttcacgaacccattaa

SEQ ID NO: 781332 - DNA, 19 bp, Mus musculus
  siRNA target sequence for A830048P05 (NM_172917.1,687-705).
cttcacgaacccattaaga

SEQ ID NO: 781333 - DNA, 19 bp, Mus musculus
  siRNA target sequence for A830048P05 (NM_172917.1,692-710).
cgaacccattaagatagta

SEQ ID NO: 781334 - DNA, 19 bp, Mus musculus
  siRNA target sequence for A830048P05 (NM_172917.1,865-883).
ctttgatcacccttgagtt

SEQ ID NO: 781335 - DNA, 19 bp, Mus musculus
  siRNA target sequence for A830048P05 (NM_172917.1,900-918).
ggaagaggcgtctcttgtt

SEQ ID NO: 781336 - DNA, 19 bp, Mus musculus
  siRNA target sequence for A830048P05 (NM_172917.1,965-983).
gtcgcctgatcgttgttct

SEQ ID NO: 781337 - DNA, 19 bp, Mus musculus
  siRNA target sequence for A830048P05 (NM_172917.1,1153-1171).
gcgggaccgatgtctttct

SEQ ID NO: 781338 - DNA, 19 bp, Mus musculus
  siRNA target sequence for A830048P05 (NM_172917.1,1155-1173).
gggaccgatgtctttctga

SEQ ID NO: 781339 - DNA, 19 bp, Mus musculus
  siRNA target sequence for A830048P05 (NM_172917.1,1256-1274).
gattccaaatgaatccaat

SEQ ID NO: 781340 - DNA, 19 bp, Mus musculus
  siRNA target sequence for A830048P05 (NM_172917.1,1299-1317).
gaatccatcagtacatcta

SEQ ID NO: 781341 - DNA, 19 bp, Mus musculus
  siRNA target sequence for A830048P05 (NM_172917.1,1466-1484).
ccaagaccctgcaaatggt

SEQ ID NO: 781342 - DNA, 19 bp, Mus musculus
  siRNA target sequence for A830048P05 (NM_172917.1,1534-1552).
gccggcaaaggcacatcat

SEQ ID NO: 781343 - DNA, 19 bp, Mus musculus
  siRNA target sequence for A830048P05 (NM_172917.1,1536-1554).
cggcaaaggcacatcatct

SEQ ID NO: 781344 - DNA, 19 bp, Mus musculus
  siRNA target sequence for A830048P05 (NM_172917.1,1635-1653).
ctggacgctatgcatgttt

SEQ ID NO: 781345 - DNA, 19 bp, Mus musculus
  siRNA target sequence for A830048P05 (NM_172917.1,1638-1656).
gacgctatgcatgttttca

SEQ ID NO: 781346 - DNA, 19 bp, Mus musculus
  siRNA target sequence for A830048P05 (NM_172917.1,1872-1890).
cggaggacgcagtcagaaa

SEQ ID NO: 781347 - DNA, 19 bp, Mus musculus
  siRNA target sequence for A830048P05 (NM_172917.1,1874-1892).
gaggacgcagtcagaaaca

SEQ ID NO: 781348 - DNA, 19 bp, Mus musculus
  siRNA target sequence for A830048P05 (NM_172917.1,1956-1974).
cgagagcagttttacaagt

SEQ ID NO: 781349 - DNA, 19 bp, Mus musculus
  siRNA target sequence for A830048P05 (NM_172917.1,1987-2005).
ctgggaagtggattaaagt

SEQ ID NO: 781350 - DNA, 19 bp, Mus musculus
  siRNA target sequence for A830048P05 (NM_172917.1,1989-2007).
gggaagtggattaaagtct

SEQ ID NO: 781351 - DNA, 19 bp, Mus musculus
  siRNA target sequence for A830048P05 (NM_172917.1,2008-2026).
ggtacgaccgactcacttt

SEQ ID NO: 781352 - DNA, 19 bp, Mus musculus
  siRNA target sequence for A830048P05 (NM_172917.1,2033-2051).
gttgctggatcgaactgaa

SEQ ID NO: 781353 - DNA, 19 bp, Mus musculus
  siRNA target sequence for A830048P05 (NM_172917.1,2036-2054).
gctggatcgaactgaagat

SEQ ID NO: 781354 - DNA, 19 bp, Mus musculus
  siRNA target sequence for A830048P05 (NM_172917.1,2105-2123).
gggctttctgacactgaat

SEQ ID NO: 781355 - DNA, 19 bp, Mus musculus
  siRNA target sequence for A830048P05 (NM_172917.1,2229-2247).
cacggtcacaaccaaatca

SEQ ID NO: 781356 - DNA, 19 bp, Mus musculus
  siRNA target sequence for A830048P05 (NM_172917.1,2241-2259).
caaatcatcgcctatagca

SEQ ID NO: 781357 - DNA, 19 bp, Mus musculus
  siRNA target sequence for A830048P05 (NM_172917.1,2252-2270).
ctatagcagacccatctat

SEQ ID NO: 781358 - DNA, 19 bp, Mus musculus
  siRNA target sequence for A830048P05 (NM_172917.1,2287-2305).
gccttattttgcttcttga

SEQ ID NO: 781359 - DNA, 19 bp, Mus musculus
  siRNA target sequence for A830048P05 (NM_172917.1,2288-2306).
ccttattttgcttcttgat

SEQ ID NO: 781360 - DNA, 19 bp, Mus musculus
  siRNA target sequence for A830048P05 (NM_172917.1,2383-2401).
cagtcagggaccacttaat

SEQ ID NO: 781361 - DNA, 19 bp, Mus musculus
  siRNA target sequence for A830048P05 (NM_172917.1,2387-2405).
cagggaccacttaatagta

SEQ ID NO: 781362 - DNA, 19 bp, Mus musculus
  siRNA target sequence for A830048P05 (NM_172917.1,2391-2409).
gaccacttaatagtatttt

SEQ ID NO: 781363 - DNA, 19 bp, Mus musculus
  siRNA target sequence for A830048P05 (NM_172917.1,2470-2488).
cgtaccttctggaacaaat

SEQ ID NO: 781364 - DNA, 19 bp, Mus musculus
  siRNA target sequence for A830048P05 (NM_172917.1,2829-2847).
ggaaagaccgcctgtcata

SEQ ID NO: 781365 - DNA, 19 bp, Mus musculus
  siRNA target sequence for A830048P05 (NM_172917.1,2929-2947).
gggtccaatccagacttat

SEQ ID NO: 781366 - DNA, 19 bp, Mus musculus
  siRNA target sequence for A830048P05 (NM_172917.1,2931-2949).
gtccaatccagacttatct

SEQ ID NO: 781367 - DNA, 19 bp, Mus musculus
  siRNA target sequence for 2210010B09Rik (NM_172919.1,576-594).
caccattgcatcaggattt

SEQ ID NO: 781368 - DNA, 19 bp, Mus musculus
  siRNA target sequence for 2210010B09Rik (NM_172919.1,578-596).
ccattgcatcaggattttt

SEQ ID NO: 781369 - DNA, 19 bp, Mus musculus
  siRNA target sequence for 2210010B09Rik (NM_172919.1,647-665).
cacgaactctgctactaca

SEQ ID NO: 781370 - DNA, 19 bp, Mus musculus
  siRNA target sequence for 2210010B09Rik (NM_172919.1,653-671).
ctctgctactacacacaat

SEQ ID NO: 781371 - DNA, 19 bp, Mus musculus
  siRNA target sequence for 2210010B09Rik (NM_172919.1,709-727).
ccatgtgaaaactcatagt

SEQ ID NO: 781372 - DNA, 19 bp, Mus musculus
  siRNA target sequence for 2210010B09Rik (NM_172919.1,748-766).
cacccactcagatcatgat

SEQ ID NO: 781373 - DNA, 19 bp, Mus musculus
  siRNA target sequence for 2210010B09Rik (NM_172919.1,750-768).
cccactcagatcatgatgt

SEQ ID NO: 781374 - DNA, 19 bp, Mus musculus
  siRNA target sequence for 2210010B09Rik (NM_172919.1,821-839).
gcctttggacgatcttcaa

SEQ ID NO: 781375 - DNA, 19 bp, Mus musculus
  siRNA target sequence for 2210010B09Rik (NM_172919.1,828-846).
gacgatcttcaaatctcaa

SEQ ID NO: 781376 - DNA, 19 bp, Mus musculus
  siRNA target sequence for 2210010B09Rik (NM_172919.1,921-939).
caaggctagtggaacactt

SEQ ID NO: 781377 - DNA, 19 bp, Mus musculus
  siRNA target sequence for 2210010B09Rik (NM_172919.1,925-943).
gctagtggaacactttaga

SEQ ID NO: 781378 - DNA, 19 bp, Mus musculus
  siRNA target sequence for 2210010B09Rik (NM_172919.1,926-944).
ctagtggaacactttagaa

SEQ ID NO: 781379 - DNA, 19 bp, Mus musculus
  siRNA target sequence for 2210010B09Rik (NM_172919.1,1000-1018).
gcggtcaggccttataact

SEQ ID NO: 781380 - DNA, 19 bp, Mus musculus
  siRNA target sequence for 2210010B09Rik (NM_172919.1,1003-1021).
gtcaggccttataactcat

SEQ ID NO: 781381 - DNA, 19 bp, Mus musculus
  siRNA target sequence for 2210010B09Rik (NM_172919.1,1005-1023).
caggccttataactcatat

SEQ ID NO: 781382 - DNA, 19 bp, Mus musculus
  siRNA target sequence for 2210010B09Rik (NM_172919.1,1007-1025).
ggccttataactcatatat

SEQ ID NO: 781383 - DNA, 19 bp, Mus musculus
  siRNA target sequence for 2210010B09Rik (NM_172919.1,1083-1101).
catccccacgccttagtca

SEQ ID NO: 781384 - DNA, 19 bp, Mus musculus
  siRNA target sequence for 2210010B09Rik (NM_172919.1,1089-1107).
cacgccttagtcagcatat

SEQ ID NO: 781385 - DNA, 19 bp, Mus musculus
  siRNA target sequence for 2210010B09Rik (NM_172919.1,1091-1109).
cgccttagtcagcatataa

SEQ ID NO: 781386 - DNA, 19 bp, Mus musculus
  siRNA target sequence for 2210010B09Rik (NM_172919.1,1093-1111).
ccttagtcagcatataaga

SEQ ID NO: 781387 - DNA, 19 bp, Mus musculus
  siRNA target sequence for 2210010B09Rik (NM_172919.1,1094-1112).
cttagtcagcatataagaa

SEQ ID NO: 781388 - DNA, 19 bp, Mus musculus
  siRNA target sequence for 2210010B09Rik (NM_172919.1,1183-1201).
gaaccatgtaggaagaact

SEQ ID NO: 781389 - DNA, 19 bp, Mus musculus
  siRNA target sequence for 2210010B09Rik (NM_172919.1,1245-1263).
ccttccattcttactcaaa

SEQ ID NO: 781390 - DNA, 19 bp, Mus musculus
  siRNA target sequence for 2210010B09Rik (NM_172919.1,1246-1264).
cttccattcttactcaaat

SEQ ID NO: 781391 - DNA, 19 bp, Mus musculus
  siRNA target sequence for 2210010B09Rik (NM_172919.1,1258-1276).
ctcaaatctacgtagacat

SEQ ID NO: 781392 - DNA, 19 bp, Mus musculus
  siRNA target sequence for 2210010B09Rik (NM_172919.1,1348-1366).
cctacataaccatataaga

SEQ ID NO: 781393 - DNA, 19 bp, Mus musculus
  siRNA target sequence for 2210010B09Rik (NM_172919.1,1379-1397).
ggagagatgcctcatatat

SEQ ID NO: 781394 - DNA, 19 bp, Mus musculus
  siRNA target sequence for 2210010B09Rik (NM_172919.1,1432-1450).
ctacctgcgtagacactta

SEQ ID NO: 781395 - DNA, 19 bp, Mus musculus
  siRNA target sequence for 2210010B09Rik (NM_172919.1,1435-1453).
cctgcgtagacacttaaga

SEQ ID NO: 781396 - DNA, 19 bp, Mus musculus
  siRNA target sequence for 2210010B09Rik (NM_172919.1,1436-1454).
ctgcgtagacacttaagaa

SEQ ID NO: 781397 - DNA, 19 bp, Mus musculus
  siRNA target sequence for 2210010B09Rik (NM_172919.1,1438-1456).
gcgtagacacttaagaact

SEQ ID NO: 781398 - DNA, 19 bp, Mus musculus
  siRNA target sequence for 2210010B09Rik (NM_172919.1,1504-1522).
ccttaactcctcgtactta

SEQ ID NO: 781399 - DNA, 19 bp, Mus musculus
  siRNA target sequence for 2210010B09Rik (NM_172919.1,1513-1531).
ctcgtacttacgtaagcat

SEQ ID NO: 781400 - DNA, 19 bp, Mus musculus
  siRNA target sequence for 2210010B09Rik (NM_172919.1,1528-1546).
gcatctaaccattcataca

SEQ ID NO: 781401 - DNA, 19 bp, Mus musculus
  siRNA target sequence for 2210010B09Rik (NM_172919.1,1601-1619).
ctgctacacgaccacttaa

SEQ ID NO: 781402 - DNA, 19 bp, Mus musculus
  siRNA target sequence for 2210010B09Rik (NM_172919.1,1603-1621).
gctacacgaccacttaaaa

SEQ ID NO: 781403 - DNA, 19 bp, Mus musculus
  siRNA target sequence for 2210010B09Rik (NM_172919.1,1604-1622).
ctacacgaccacttaaaaa

SEQ ID NO: 781404 - DNA, 19 bp, Mus musculus
  siRNA target sequence for 2210010B09Rik (NM_172919.1,1673-1691).
cagtatttctcatacctta

SEQ ID NO: 781405 - DNA, 19 bp, Mus musculus
  siRNA target sequence for 2210010B09Rik (NM_172919.1,1675-1693).
gtatttctcataccttaat

SEQ ID NO: 781406 - DNA, 19 bp, Mus musculus
  siRNA target sequence for 2210010B09Rik (NM_172919.1,1709-1727).
cacaccggaacaaaacctt

SEQ ID NO: 781407 - DNA, 19 bp, Mus musculus
  siRNA target sequence for 2210010B09Rik (NM_172919.1,1711-1729).
caccggaacaaaaccttat

SEQ ID NO: 781408 - DNA, 19 bp, Mus musculus
  siRNA target sequence for 2210010B09Rik (NM_172919.1,1765-1783).
ctcaagccgaactgaacat

SEQ ID NO: 781409 - DNA, 19 bp, Mus musculus
  siRNA target sequence for 2210010B09Rik (NM_172919.1,1767-1785).
caagccgaactgaacatat

SEQ ID NO: 781410 - DNA, 19 bp, Mus musculus
  siRNA target sequence for 2210010B09Rik (NM_172919.1,1855-1873).
cctcattcaccacgtaaaa

SEQ ID NO: 781411 - DNA, 19 bp, Mus musculus
  siRNA target sequence for 2210010B09Rik (NM_172919.1,1856-1874).
ctcattcaccacgtaaaaa

SEQ ID NO: 781412 - DNA, 19 bp, Mus musculus
  siRNA target sequence for 2210010B09Rik (NM_172919.1,1888-1906).
gaaaccttttgttgagaat

SEQ ID NO: 781413 - DNA, 19 bp, Mus musculus
  siRNA target sequence for 1100001I19Rik (NM_172920.1,844-862).
gtaggggagttcagcaatt

SEQ ID NO: 781414 - DNA, 19 bp, Mus musculus
  siRNA target sequence for 1100001I19Rik (NM_172920.1,868-886).
caagaagaactcatagaat

SEQ ID NO: 781415 - DNA, 19 bp, Mus musculus
  siRNA target sequence for 1100001I19Rik (NM_172920.1,1004-1022).
gtctaagagccagaacaaa

SEQ ID NO: 781416 - DNA, 19 bp, Mus musculus
  siRNA target sequence for 1100001I19Rik (NM_172920.1,1196-1214).
ctcccctgtgcaacatctt

SEQ ID NO: 781417 - DNA, 19 bp, Mus musculus
  siRNA target sequence for 1100001I19Rik (NM_172920.1,1222-1240).
gattccaagcctcacttta

SEQ ID NO: 781418 - DNA, 19 bp, Mus musculus
  siRNA target sequence for C130036J11 (NM_172921.1,607-625).
gctggccagtcgtaagtca

SEQ ID NO: 781419 - DNA, 19 bp, Mus musculus
  siRNA target sequence for C130036J11 (NM_172921.1,630-648).
ggatgctgctttttatagt

SEQ ID NO: 781420 - DNA, 19 bp, Mus musculus
  siRNA target sequence for C130036J11 (NM_172921.1,657-675).
gggtctcttttacagtttt

SEQ ID NO: 781421 - DNA, 19 bp, Mus musculus
  siRNA target sequence for C130036J11 (NM_172921.1,659-677).
gtctcttttacagttttca

SEQ ID NO: 781422 - DNA, 19 bp, Mus musculus
  siRNA target sequence for C130036J11 (NM_172921.1,692-710).
ctacggaccatgttcaagt

SEQ ID NO: 781423 - DNA, 19 bp, Mus musculus
  siRNA target sequence for C130036J11 (NM_172921.1,775-793).
cctaccagtttcaccaaaa

SEQ ID NO: 781424 - DNA, 19 bp, Mus musculus
  siRNA target sequence for C130036J11 (NM_172921.1,990-1008).
ggtatggtggggacttcat

SEQ ID NO: 781425 - DNA, 19 bp, Mus musculus
  siRNA target sequence for C130036J11 (NM_172921.1,1184-1202).
cagggctacgacagaatca

SEQ ID NO: 781426 - DNA, 19 bp, Mus musculus
  siRNA target sequence for C130036J11 (NM_172921.1,1187-1205).
ggctacgacagaatcatct

SEQ ID NO: 781427 - DNA, 19 bp, Mus musculus
  siRNA target sequence for C130036J11 (NM_172921.1,1188-1206).
gctacgacagaatcatctt

SEQ ID NO: 781428 - DNA, 19 bp, Mus musculus
  siRNA target sequence for C130036J11 (NM_172921.1,1247-1265).
gaatgtgccctggttctaa

SEQ ID NO: 781429 - DNA, 19 bp, Mus musculus
  siRNA target sequence for C130036J11 (NM_172921.1,1253-1271).
gccctggttctaaattcaa

SEQ ID NO: 781430 - DNA, 19 bp, Mus musculus
  siRNA target sequence for C130036J11 (NM_172921.1,1255-1273).
cctggttctaaattcaagt

SEQ ID NO: 781431 - DNA, 19 bp, Mus musculus
  siRNA target sequence for C130036J11 (NM_172921.1,1299-1317).
cccaggaccaagaagcttt

SEQ ID NO: 781432 - DNA, 19 bp, Mus musculus
  siRNA target sequence for C130036J11 (NM_172921.1,1304-1322).
gaccaagaagctttctact

SEQ ID NO: 781433 - DNA, 19 bp, Mus musculus
  siRNA target sequence for C130036J11 (NM_172921.1,1359-1377).
cctacatgcagtcaaagaa

SEQ ID NO: 781434 - DNA, 19 bp, Mus musculus
  siRNA target sequence for C130036J11 (NM_172921.1,1378-1396).
caaggatgtttcctatctt

SEQ ID NO: 781435 - DNA, 19 bp, Mus musculus
  siRNA target sequence for C130036J11 (NM_172921.1,1390-1408).
ctatcttagccaacaagaa

SEQ ID NO: 781436 - DNA, 19 bp, Mus musculus
  siRNA target sequence for C130036J11 (NM_172921.1,1463-1481).
gcgattagtgtctccaaat

SEQ ID NO: 781437 - DNA, 19 bp, Mus musculus
  siRNA target sequence for C130036J11 (NM_172921.1,1545-1563).
gtgggcacgtctggaaaaa

SEQ ID NO: 781438 - DNA, 19 bp, Mus musculus
  siRNA target sequence for C130036J11 (NM_172921.1,1585-1603).
cagtctggctccaatcaaa

SEQ ID NO: 781439 - DNA, 19 bp, Mus musculus
  siRNA target sequence for C130036J11 (NM_172921.1,1595-1613).
ccaatcaaaatgaaagact

SEQ ID NO: 781440 - DNA, 19 bp, Mus musculus
  siRNA target sequence for C130036J11 (NM_172921.1,1612-1630).
ctgcctgaggggaaaattt

SEQ ID NO: 781441 - DNA, 19 bp, Mus musculus
  siRNA target sequence for C130036J11 (NM_172921.1,1614-1632).
gcctgaggggaaaatttat

SEQ ID NO: 781442 - DNA, 19 bp, Mus musculus
  siRNA target sequence for C130036J11 (NM_172921.1,1620-1638).
ggggaaaatttatctatct

SEQ ID NO: 781443 - DNA, 19 bp, Mus musculus
  siRNA target sequence for C130036J11 (NM_172921.1,1621-1639).
gggaaaatttatctatcta

SEQ ID NO: 781444 - DNA, 19 bp, Mus musculus
  siRNA target sequence for C130036J11 (NM_172921.1,1658-1676).
cgccagtggatggaatact

SEQ ID NO: 781445 - DNA, 19 bp, Mus musculus
  siRNA target sequence for C130036J11 (NM_172921.1,1659-1677).
gccagtggatggaatactt

SEQ ID NO: 781446 - DNA, 19 bp, Mus musculus
  siRNA target sequence for C130036J11 (NM_172921.1,1661-1679).
cagtggatggaatacttca

SEQ ID NO: 781447 - DNA, 19 bp, Mus musculus
  siRNA target sequence for C130036J11 (NM_172921.1,1663-1681).
gtggatggaatacttcaaa

SEQ ID NO: 781448 - DNA, 19 bp, Mus musculus
  siRNA target sequence for C130036J11 (NM_172921.1,1669-1687).
ggaatacttcaaaagcaaa

SEQ ID NO: 781449 - DNA, 19 bp, Mus musculus
  siRNA target sequence for C130036J11 (NM_172921.1,1690-1708).
caacagtatgtctcagtat

SEQ ID NO: 781450 - DNA, 19 bp, Mus musculus
  siRNA target sequence for C130036J11 (NM_172921.1,1695-1713).
gtatgtctcagtataagct

SEQ ID NO: 781451 - DNA, 19 bp, Mus musculus
  siRNA target sequence for C130036J11 (NM_172921.1,1778-1796).
ctcttctttaccatagtct

SEQ ID NO: 781452 - DNA, 19 bp, Mus musculus
  siRNA target sequence for C130036J11 (NM_172921.1,1801-1819).
gcacaaaccacgagcatta

SEQ ID NO: 781453 - DNA, 19 bp, Mus musculus
  siRNA target sequence for C130036J11 (NM_172921.1,1802-1820).
cacaaaccacgagcattat

SEQ ID NO: 781454 - DNA, 19 bp, Mus musculus
  siRNA target sequence for C130036J11 (NM_172921.1,1808-1826).
ccacgagcattattcacaa

SEQ ID NO: 781455 - DNA, 19 bp, Mus musculus
  siRNA target sequence for C130036J11 (NM_172921.1,1809-1827).
cacgagcattattcacaaa

SEQ ID NO: 781456 - DNA, 19 bp, Mus musculus
  siRNA target sequence for C130036J11 (NM_172921.1,1811-1829).
cgagcattattcacaaaat

SEQ ID NO: 781457 - DNA, 19 bp, Mus musculus
  siRNA target sequence for C130036J11 (NM_172921.1,1822-1840).
cacaaaatgttactatcat

SEQ ID NO: 781458 - DNA, 19 bp, Mus musculus
  siRNA target sequence for C130036J11 (NM_172921.1,1842-1860).
ccctagaacaatgttcatt

SEQ ID NO: 781459 - DNA, 19 bp, Mus musculus
  siRNA target sequence for C130036J11 (NM_172921.1,1843-1861).
cctagaacaatgttcatta

SEQ ID NO: 781460 - DNA, 19 bp, Mus musculus
  siRNA target sequence for C130036J11 (NM_172921.1,1854-1872).
gttcattacccctagtgtt

SEQ ID NO: 781461 - DNA, 19 bp, Mus musculus
  siRNA target sequence for C130036J11 (NM_172921.1,1857-1875).
cattacccctagtgttagt

SEQ ID NO: 781462 - DNA, 19 bp, Mus musculus
  siRNA target sequence for E330026B02Rik (NM_172927.1,298-316).
gtgtgtgaaccaagattct

SEQ ID NO: 781463 - DNA, 19 bp, Mus musculus
  siRNA target sequence for E330026B02Rik (NM_172927.1,359-377).
gatcacctagggcttaagt

SEQ ID NO: 781464 - DNA, 19 bp, Mus musculus
  siRNA target sequence for E330026B02Rik (NM_172927.1,425-443).
cccatagaggccaacaagt

SEQ ID NO: 781465 - DNA, 19 bp, Mus musculus
  siRNA target sequence for E330026B02Rik (NM_172927.1,468-486).
gcgatgctctccacaatga

SEQ ID NO: 781466 - DNA, 19 bp, Mus musculus
  siRNA target sequence for E330026B02Rik (NM_172927.1,494-512).
ctgggcaccttcaagaaca

SEQ ID NO: 781467 - DNA, 19 bp, Mus musculus
  siRNA target sequence for E330026B02Rik (NM_172927.1,590-608).
gaggctcacaggacctatt

SEQ ID NO: 781468 - DNA, 19 bp, Mus musculus
  siRNA target sequence for E330026B02Rik (NM_172927.1,716-734).
cgggaagatggggtgaaaa

SEQ ID NO: 781469 - DNA, 19 bp, Mus musculus
  siRNA target sequence for E330026B02Rik (NM_172927.1,719-737).
gaagatggggtgaaaatca

SEQ ID NO: 781470 - DNA, 19 bp, Mus musculus
  siRNA target sequence for E330026B02Rik (NM_172927.1,785-803).
gccacctctcagttccatt

SEQ ID NO: 781471 - DNA, 19 bp, Mus musculus
  siRNA target sequence for E330026B02Rik (NM_172927.1,833-851).
gtgtttgccccaaacatga

SEQ ID NO: 781472 - DNA, 19 bp, Mus musculus
  siRNA target sequence for E330026B02Rik (NM_172927.1,843-861).
caaacatgacagagatcat

SEQ ID NO: 781473 - DNA, 19 bp, Mus musculus
  siRNA target sequence for E330026B02Rik (NM_172927.1,873-891).
ctcagtacagggaaggaat

SEQ ID NO: 781474 - DNA, 19 bp, Mus musculus
  siRNA target sequence for E330026B02Rik (NM_172927.1,894-912).
cagatgacattattgtaga

SEQ ID NO: 781475 - DNA, 19 bp, Mus musculus
  siRNA target sequence for E330026B02Rik (NM_172927.1,986-1004).
ctagatcatcttaaagcat

SEQ ID NO: 781476 - DNA, 19 bp, Mus musculus
  siRNA target sequence for E330026B02Rik (NM_172927.1,1002-1020).
cattcctgggcgaaagcat

SEQ ID NO: 781477 - DNA, 19 bp, Mus musculus
  siRNA target sequence for E330026B02Rik (NM_172927.1,1028-1046).
ctggacataaaggaaaatt

SEQ ID NO: 781478 - DNA, 19 bp, Mus musculus
  siRNA target sequence for E330026B02Rik (NM_172927.1,1059-1077).
gcctggtgacctatagcaa

SEQ ID NO: 781479 - DNA, 19 bp, Mus musculus
  siRNA target sequence for E330026B02Rik (NM_172927.1,1064-1082).
gtgacctatagcaatgaga

SEQ ID NO: 781480 - DNA, 19 bp, Mus musculus
  siRNA target sequence for E330026B02Rik (NM_172927.1,1100-1118).
ctgagcacgggtaacaaca

SEQ ID NO: 781481 - DNA, 19 bp, Mus musculus
  siRNA target sequence for E330026B02Rik (NM_172927.1,1144-1162).
ggatctgtcccctcaagta

SEQ ID NO: 781482 - DNA, 19 bp, Mus musculus
  siRNA target sequence for E330026B02Rik (NM_172927.1,1270-1288).
gacccacagagcatcagaa

SEQ ID NO: 781483 - DNA, 19 bp, Mus musculus
  siRNA target sequence for E330026B02Rik (NM_172927.1,1328-1346).
ggagtgaccatctttacca

SEQ ID NO: 781484 - DNA, 19 bp, Mus musculus
  siRNA target sequence for E330026B02Rik (NM_172927.1,1514-1532).
cggactgagaccctcaaat

SEQ ID NO: 781485 - DNA, 19 bp, Mus musculus
  siRNA target sequence for E330026B02Rik (NM_172927.1,1552-1570).
ggaagccgatatctatcta

SEQ ID NO: 781486 - DNA, 19 bp, Mus musculus
  siRNA target sequence for E330026B02Rik (NM_172927.1,1558-1576).
cgatatctatctactcatt

SEQ ID NO: 781487 - DNA, 19 bp, Mus musculus
  siRNA target sequence for E330026B02Rik (NM_172927.1,1598-1616).
cccacagacttccatgaaa

SEQ ID NO: 781488 - DNA, 19 bp, Mus musculus
  siRNA target sequence for E330026B02Rik (NM_172927.1,1634-1652).
gaggtggtaggcatgttca

SEQ ID NO: 781489 - DNA, 19 bp, Mus musculus
  siRNA target sequence for E330026B02Rik (NM_172927.1,1637-1655).
gtggtaggcatgttcaaca

SEQ ID NO: 781490 - DNA, 19 bp, Mus musculus
  siRNA target sequence for E330026B02Rik (NM_172927.1,1718-1736).
gagatctctaagtatagta

SEQ ID NO: 781491 - DNA, 19 bp, Mus musculus
  siRNA target sequence for E330026B02Rik (NM_172927.1,1751-1769).
ggaaaggccatcgagaata

SEQ ID NO: 781492 - DNA, 19 bp, Mus musculus
  siRNA target sequence for E330026B02Rik (NM_172927.1,1775-1793).
cagatgggtgggaatacca

SEQ ID NO: 781493 - DNA, 19 bp, Mus musculus
  siRNA target sequence for E330026B02Rik (NM_172927.1,1967-1985).
gtcaaggaagccaaccaaa

SEQ ID NO: 781494 - DNA, 19 bp, Mus musculus
  siRNA target sequence for E330026B02Rik (NM_172927.1,2009-2027).
gaggaaaagcgagtttact

SEQ ID NO: 781495 - DNA, 19 bp, Mus musculus
  siRNA target sequence for E330026B02Rik (NM_172927.1,2041-2059).
cgatgccttgaggaacata

SEQ ID NO: 781496 - DNA, 19 bp, Mus musculus
  siRNA target sequence for E330026B02Rik (NM_172927.1,2042-2060).
gatgccttgaggaacataa

SEQ ID NO: 781497 - DNA, 19 bp, Mus musculus
  siRNA target sequence for E330026B02Rik (NM_172927.1,2145-2163).
gcagcatcggacctgaaaa

SEQ ID NO: 781498 - DNA, 19 bp, Mus musculus
  siRNA target sequence for E330026B02Rik (NM_172927.1,2148-2166).
gcatcggacctgaaaactt

SEQ ID NO: 781499 - DNA, 19 bp, Mus musculus
  siRNA target sequence for E330026B02Rik (NM_172927.1,2217-2235).
gggctgaccgggtgcaaat

SEQ ID NO: 781500 - DNA, 19 bp, Mus musculus
  siRNA target sequence for E330026B02Rik (NM_172927.1,2218-2236).
ggctgaccgggtgcaaatt

SEQ ID NO: 781501 - DNA, 19 bp, Mus musculus
  siRNA target sequence for E330026B02Rik (NM_172927.1,2246-2264).
cagttcagccacgaaaaca

SEQ ID NO: 781502 - DNA, 19 bp, Mus musculus
  siRNA target sequence for E330026B02Rik (NM_172927.1,2276-2294).
cagctcaacacgttcatgt

SEQ ID NO: 781503 - DNA, 19 bp, Mus musculus
  siRNA target sequence for E330026B02Rik (NM_172927.1,2314-2332).
cgccattgaccgaatgact

SEQ ID NO: 781504 - DNA, 19 bp, Mus musculus
  siRNA target sequence for E330026B02Rik (NM_172927.1,2522-2540).
gtattcggctccaatgtca

SEQ ID NO: 781505 - DNA, 19 bp, Mus musculus
  siRNA target sequence for E330026B02Rik (NM_172927.1,2561-2579).
ggaaagccagagatggttt

SEQ ID NO: 781506 - DNA, 19 bp, Mus musculus
  siRNA target sequence for E330026B02Rik (NM_172927.1,2566-2584).
gccagagatggttttctat

SEQ ID NO: 781507 - DNA, 19 bp, Mus musculus
  siRNA target sequence for E330026B02Rik (NM_172927.1,2568-2586).
cagagatggttttctatgt

SEQ ID NO: 781508 - DNA, 19 bp, Mus musculus
  siRNA target sequence for E330026B02Rik (NM_172927.1,2599-2617).
cattctgcagcatatcgaa

SEQ ID NO: 781509 - DNA, 19 bp, Mus musculus
  siRNA target sequence for E330026B02Rik (NM_172927.1,2643-2661).
gtccccgtgaagaatgcaa

SEQ ID NO: 781510 - DNA, 19 bp, Mus musculus
  siRNA target sequence for E330026B02Rik (NM_172927.1,2658-2676).
gcaagcggattgaagtttt

SEQ ID NO: 781511 - DNA, 19 bp, Mus musculus
  siRNA target sequence for E330026B02Rik (NM_172927.1,2662-2680).
gcggattgaagttttggat

SEQ ID NO: 781512 - DNA, 19 bp, Mus musculus
  siRNA target sequence for E330026B02Rik (NM_172927.1,2681-2699).
gtggtgtttgtcatcgata

SEQ ID NO: 781513 - DNA, 19 bp, Mus musculus
  siRNA target sequence for E330026B02Rik (NM_172927.1,2701-2719).
ctccggcagcattgactat

SEQ ID NO: 781514 - DNA, 19 bp, Mus musculus
  siRNA target sequence for E330026B02Rik (NM_172927.1,2704-2722).
cggcagcattgactatcaa

SEQ ID NO: 781515 - DNA, 19 bp, Mus musculus
  siRNA target sequence for E330026B02Rik (NM_172927.1,2720-2738).
caagaatataacatcatga

SEQ ID NO: 781516 - DNA, 19 bp, Mus musculus
  siRNA target sequence for E330026B02Rik (NM_172927.1,2793-2811).
ggtttggagccctgaagta

SEQ ID NO: 781517 - DNA, 19 bp, Mus musculus
  siRNA target sequence for E330026B02Rik (NM_172927.1,2794-2812).
gtttggagccctgaagtat

SEQ ID NO: 781518 - DNA, 19 bp, Mus musculus
  siRNA target sequence for E330026B02Rik (NM_172927.1,2823-2841).
ccgaagtgctgttttacct

SEQ ID NO: 781519 - DNA, 19 bp, Mus musculus
  siRNA target sequence for E330026B02Rik (NM_172927.1,2931-2949).
ccttctccgatcacatgtt

SEQ ID NO: 781520 - DNA, 19 bp, Mus musculus
  siRNA target sequence for E330026B02Rik (NM_172927.1,3009-3027).
ccgacggggaatctaatga

SEQ ID NO: 781521 - DNA, 19 bp, Mus musculus
  siRNA target sequence for E330026B02Rik (NM_172927.1,3132-3150).
cagggtcaagcgacaagta

SEQ ID NO: 781522 - DNA, 19 bp, Mus musculus
  siRNA target sequence for E330026B02Rik (NM_172927.1,3134-3152).
gggtcaagcgacaagtact

SEQ ID NO: 781523 - DNA, 19 bp, Mus musculus
  siRNA target sequence for E330026B02Rik (NM_172927.1,3135-3153).
ggtcaagcgacaagtacta

SEQ ID NO: 781524 - DNA, 19 bp, Mus musculus
  siRNA target sequence for E330026B02Rik (NM_172927.1,3141-3159).
gcgacaagtactactttgt

SEQ ID NO: 781525 - DNA, 19 bp, Mus musculus
  siRNA target sequence for E330026B02Rik (NM_172927.1,3142-3160).
cgacaagtactactttgta

SEQ ID NO: 781526 - DNA, 19 bp, Mus musculus
  siRNA target sequence for E330026B02Rik (NM_172927.1,3170-3188).
ggaggcctgaagggaatat

SEQ ID NO: 781527 - DNA, 19 bp, Mus musculus
  siRNA target sequence for E330026B02Rik (NM_172927.1,3213-3231).
gtaactcttcaaaagttga

SEQ ID NO: 781528 - DNA, 19 bp, Mus musculus
  siRNA target sequence for E330026B02Rik (NM_172927.1,3263-3281).
ctcatggatggttcaaaca

SEQ ID NO: 781529 - DNA, 19 bp, Mus musculus
  siRNA target sequence for E330026B02Rik (NM_172927.1,3391-3409).
cagctacaggtcagagttt

SEQ ID NO: 781530 - DNA, 19 bp, Mus musculus
  siRNA target sequence for E330026B02Rik (NM_172927.1,3393-3411).
gctacaggtcagagtttct

SEQ ID NO: 781531 - DNA, 19 bp, Mus musculus
  siRNA target sequence for E330026B02Rik (NM_172927.1,3457-3475).
gggcatccagcagatcttt

SEQ ID NO: 781532 - DNA, 19 bp, Mus musculus
  siRNA target sequence for E330026B02Rik (NM_172927.1,3702-3720).
ggaccgcggagaaaaaact

SEQ ID NO: 781533 - DNA, 19 bp, Mus musculus
  siRNA target sequence for AW260253 (NM_172930.2,189-207).
cgtcaccgttactttgctt

SEQ ID NO: 781534 - DNA, 19 bp, Mus musculus
  siRNA target sequence for AW260253 (NM_172930.2,190-208).
gtcaccgttactttgctta

SEQ ID NO: 781535 - DNA, 19 bp, Mus musculus
  siRNA target sequence for AW260253 (NM_172930.2,192-210).
caccgttactttgcttatt

SEQ ID NO: 781536 - DNA, 19 bp, Mus musculus
  siRNA target sequence for AW260253 (NM_172930.2,194-212).
ccgttactttgcttattgt

SEQ ID NO: 781537 - DNA, 19 bp, Mus musculus
  siRNA target sequence for AW260253 (NM_172930.2,205-223).
cttattgtgtccatgttaa

SEQ ID NO: 781538 - DNA, 19 bp, Mus musculus
  siRNA target sequence for AW260253 (NM_172930.2,265-283).
gtgaccgtgggaggttatt

SEQ ID NO: 781539 - DNA, 19 bp, Mus musculus
  siRNA target sequence for AW260253 (NM_172930.2,278-296).
gttattacccaggagttat

SEQ ID NO: 781540 - DNA, 19 bp, Mus musculus
  siRNA target sequence for AW260253 (NM_172930.2,328-346).
gggtcaaacctgattgaga

SEQ ID NO: 781541 - DNA, 19 bp, Mus musculus
  siRNA target sequence for AW260253 (NM_172930.2,367-385).
gcttctatcgtgtttatca

SEQ ID NO: 781542 - DNA, 19 bp, Mus musculus
  siRNA target sequence for AW260253 (NM_172930.2,436-454).
gccgccagacacattgatt

SEQ ID NO: 781543 - DNA, 19 bp, Mus musculus
  siRNA target sequence for AW260253 (NM_172930.2,437-455).
ccgccagacacattgattt

SEQ ID NO: 781544 - DNA, 19 bp, Mus musculus
  siRNA target sequence for AW260253 (NM_172930.2,439-457).
gccagacacattgatttga

SEQ ID NO: 781545 - DNA, 19 bp, Mus musculus
  siRNA target sequence for AW260253 (NM_172930.2,440-458).
ccagacacattgatttgaa

SEQ ID NO: 781546 - DNA, 19 bp, Mus musculus
  siRNA target sequence for AW260253 (NM_172930.2,441-459).
cagacacattgatttgaaa

SEQ ID NO: 781547 - DNA, 19 bp, Mus musculus
  siRNA target sequence for AW260253 (NM_172930.2,591-609).
ggtgaactgccctcaactt

SEQ ID NO: 781548 - DNA, 19 bp, Mus musculus
  siRNA target sequence for AW260253 (NM_172930.2,699-717).
cggctactatgagtacatt

SEQ ID NO: 781549 - DNA, 19 bp, Mus musculus
  siRNA target sequence for AW260253 (NM_172930.2,701-719).
gctactatgagtacattga

SEQ ID NO: 781550 - DNA, 19 bp, Mus musculus
  siRNA target sequence for AW260253 (NM_172930.2,702-720).
ctactatgagtacattgat

SEQ ID NO: 781551 - DNA, 19 bp, Mus musculus
  siRNA target sequence for AW260253 (NM_172930.2,817-835).
gcggtccttgggggattta

SEQ ID NO: 781552 - DNA, 19 bp, Mus musculus
  siRNA target sequence for AW260253 (NM_172930.2,818-836).
cggtccttgggggatttaa

SEQ ID NO: 781553 - DNA, 19 bp, Mus musculus
  siRNA target sequence for AW260253 (NM_172930.2,823-841).
cttgggggatttaaggata

SEQ ID NO: 781554 - DNA, 19 bp, Mus musculus
  siRNA target sequence for AW260253 (NM_172930.2,826-844).
gggggatttaaggatatga

SEQ ID NO: 781555 - DNA, 19 bp, Mus musculus
  siRNA target sequence for AW260253 (NM_172930.2,884-902).
cccatccaactgtttctta

SEQ ID NO: 781556 - DNA, 19 bp, Mus musculus
  siRNA target sequence for AW260253 (NM_172930.2,916-934).
caagtggcatcgtacaata

SEQ ID NO: 781557 - DNA, 19 bp, Mus musculus
  siRNA target sequence for AW260253 (NM_172930.2,919-937).
gtggcatcgtacaatacct

SEQ ID NO: 781558 - DNA, 19 bp, Mus musculus
  siRNA target sequence for AW260253 (NM_172930.2,962-980).
caccgtattctgcttatga

SEQ ID NO: 781559 - DNA, 19 bp, Mus musculus
  siRNA target sequence for AW260253 (NM_172930.2,964-982).
ccgtattctgcttatgact

SEQ ID NO: 781560 - DNA, 19 bp, Mus musculus
  siRNA target sequence for AW260253 (NM_172930.2,965-983).
cgtattctgcttatgactt

SEQ ID NO: 781561 - DNA, 19 bp, Mus musculus
  siRNA target sequence for AW260253 (NM_172930.2,1109-1127).
cctactacccaccttttga

SEQ ID NO: 781562 - DNA, 19 bp, Mus musculus
  siRNA target sequence for AW260253 (NM_172930.2,1110-1128).
ctactacccaccttttgaa

SEQ ID NO: 781563 - DNA, 19 bp, Mus musculus
  siRNA target sequence for 4632417D23 (NM_172934.1,686-704).
catcgtcttctggaagtat

SEQ ID NO: 781564 - DNA, 19 bp, Mus musculus
  siRNA target sequence for 4632417D23 (NM_172934.1,689-707).
cgtcttctggaagtattaa

SEQ ID NO: 781565 - DNA, 19 bp, Mus musculus
  siRNA target sequence for 4632417D23 (NM_172934.1,864-882).
ctccagacttggtataact

SEQ ID NO: 781566 - DNA, 19 bp, Mus musculus
  siRNA target sequence for 4632417D23 (NM_172934.1,869-887).
gacttggtataacttcaat

SEQ ID NO: 781567 - DNA, 19 bp, Mus musculus
  siRNA target sequence for 4632417D23 (NM_172934.1,871-889).
cttggtataacttcaatgt

SEQ ID NO: 781568 - DNA, 19 bp, Mus musculus
  siRNA target sequence for 4632417D23 (NM_172934.1,924-942).
gacaaacagtggactaact

SEQ ID NO: 781569 - DNA, 19 bp, Mus musculus
  siRNA target sequence for 4632417D23 (NM_172934.1,926-944).
caaacagtggactaactga

SEQ ID NO: 781570 - DNA, 19 bp, Mus musculus
  siRNA target sequence for 4632417D23 (NM_172934.1,975-993).
gtctacagaaaatggatat

SEQ ID NO: 781571 - DNA, 19 bp, Mus musculus
  siRNA target sequence for 4632417D23 (NM_172934.1,989-1007).
gatatggacttccatctat

SEQ ID NO: 781572 - DNA, 19 bp, Mus musculus
  siRNA target sequence for 4632417D23 (NM_172934.1,1377-1395).
gcattctcgtgagttctta

SEQ ID NO: 781573 - DNA, 19 bp, Mus musculus
  siRNA target sequence for 4632417D23 (NM_172934.1,1389-1407).
gttcttagtgcatggaaat

SEQ ID NO: 781574 - DNA, 19 bp, Mus musculus
  siRNA target sequence for 4632417D23 (NM_172934.1,1392-1410).
cttagtgcatggaaataga

SEQ ID NO: 781575 - DNA, 19 bp, Mus musculus
  siRNA target sequence for 4632417D23 (NM_172934.1,1433-1451).
ggtccttcgatctaccaaa

SEQ ID NO: 781576 - DNA, 19 bp, Mus musculus
  siRNA target sequence for 4632417D23 (NM_172934.1,1437-1455).
cttcgatctaccaaagcat

SEQ ID NO: 781577 - DNA, 19 bp, Mus musculus
  siRNA target sequence for Scml4 (NM_172938.2,345-363).
gccgtccataacctctatt

SEQ ID NO: 781578 - DNA, 19 bp, Mus musculus
  siRNA target sequence for Scml4 (NM_172938.2,347-365).
cgtccataacctctattct

SEQ ID NO: 781579 - DNA, 19 bp, Mus musculus
  siRNA target sequence for Scml4 (NM_172938.2,557-575).
cacagtatgcctctacata

SEQ ID NO: 781580 - DNA, 19 bp, Mus musculus
  siRNA target sequence for Scml4 (NM_172938.2,559-577).
cagtatgcctctacataaa

SEQ ID NO: 781581 - DNA, 19 bp, Mus musculus
  siRNA target sequence for Scml4 (NM_172938.2,565-583).
gcctctacataaacaaaca

SEQ ID NO: 781582 - DNA, 19 bp, Mus musculus
  siRNA target sequence for Scml4 (NM_172938.2,766-784).
ctgcttccttcgatggaaa

SEQ ID NO: 781583 - DNA, 19 bp, Mus musculus
  siRNA target sequence for Scml4 (NM_172938.2,1008-1026).
cgctacgccatggacttta

SEQ ID NO: 781584 - DNA, 19 bp, Mus musculus
  siRNA target sequence for Scml4 (NM_172938.2,1305-1323).
gacgtggtccggtttgtga

SEQ ID NO: 781585 - DNA, 19 bp, Mus musculus
  siRNA target sequence for Scml4 (NM_172938.2,1307-1325).
cgtggtccggtttgtgaaa

SEQ ID NO: 781586 - DNA, 19 bp, Mus musculus
  siRNA target sequence for Scml4 (NM_172938.2,1367-1385).
cagaaagcacgagattgat

SEQ ID NO: 781587 - DNA, 19 bp, Mus musculus
  siRNA target sequence for Scml4 (NM_172938.2,1461-1479).
ctctgctatcacattgaca

SEQ ID NO: 781588 - DNA, 19 bp, Mus musculus
  siRNA target sequence for AW050020 (NM_172943.2,499-517).
cgtcccgggacaactacaa

SEQ ID NO: 781589 - DNA, 19 bp, Mus musculus
  siRNA target sequence for AW050020 (NM_172943.2,610-628).
ggaccaccaagcggaaata

SEQ ID NO: 781590 - DNA, 19 bp, Mus musculus
  siRNA target sequence for AW050020 (NM_172943.2,790-808).
ccgagaagggcctgtacaa

SEQ ID NO: 781591 - DNA, 19 bp, Mus musculus
  siRNA target sequence for AW050020 (NM_172943.2,831-849).
cccctgcgcaacaagtact

SEQ ID NO: 781592 - DNA, 19 bp, Mus musculus
  siRNA target sequence for AW050020 (NM_172943.2,832-850).
ccctgcgcaacaagtactt

SEQ ID NO: 781593 - DNA, 19 bp, Mus musculus
  siRNA target sequence for AW050020 (NM_172943.2,834-852).
ctgcgcaacaagtacttct

SEQ ID NO: 781594 - DNA, 19 bp, Mus musculus
  siRNA target sequence for AW050020 (NM_172943.2,1114-1132).
gcgactcggcactttgctt

SEQ ID NO: 781595 - DNA, 19 bp, Mus musculus
  siRNA target sequence for AW050020 (NM_172943.2,1221-1239).
gggtatgctgctgatgaaa

SEQ ID NO: 781596 - DNA, 19 bp, Mus musculus
  siRNA target sequence for AW050020 (NM_172943.2,1222-1240).
ggtatgctgctgatgaaat

SEQ ID NO: 781597 - DNA, 19 bp, Mus musculus
  siRNA target sequence for AW050020 (NM_172943.2,1311-1329).
gatgcaccgcgattggaaa

SEQ ID NO: 781598 - DNA, 19 bp, Mus musculus
  siRNA target sequence for AW050020 (NM_172943.2,1314-1332).
gcaccgcgattggaaacaa

SEQ ID NO: 781599 - DNA, 19 bp, Mus musculus
  siRNA target sequence for AW050020 (NM_172943.2,1317-1335).
ccgcgattggaaacaaaat

SEQ ID NO: 781600 - DNA, 19 bp, Mus musculus
  siRNA target sequence for AW050020 (NM_172943.2,1547-1565).
ctattggcgcaaatcctat

SEQ ID NO: 781601 - DNA, 19 bp, Mus musculus
  siRNA target sequence for B930093C12Rik (NM_172945.1,903-921).
cggggagcgctcgacaaat

SEQ ID NO: 781602 - DNA, 19 bp, Mus musculus
  siRNA target sequence for B930093C12Rik (NM_172945.1,906-924).
ggagcgctcgacaaatcct

SEQ ID NO: 781603 - DNA, 19 bp, Mus musculus
  siRNA target sequence for 6330509G02Rik (NM_172946.1,81-99).
cctcaccagaaatcagata

SEQ ID NO: 781604 - DNA, 19 bp, Mus musculus
  siRNA target sequence for 6330509G02Rik (NM_172946.1,282-300).
ggccagtgagcagcattat

SEQ ID NO: 781605 - DNA, 19 bp, Mus musculus
  siRNA target sequence for 6330509G02Rik (NM_172946.1,287-305).
gtgagcagcattatcagat

SEQ ID NO: 781606 - DNA, 19 bp, Mus musculus
  siRNA target sequence for 6330509G02Rik (NM_172946.1,516-534).
gcctaccaagagtaaagtt

SEQ ID NO: 781607 - DNA, 19 bp, Mus musculus
  siRNA target sequence for 6330509G02Rik (NM_172946.1,544-562).
ctcccctcagccattataa

SEQ ID NO: 781608 - DNA, 19 bp, Mus musculus
  siRNA target sequence for 6330509G02Rik (NM_172946.1,581-599).
caaaagtctcccaaaagta

SEQ ID NO: 781609 - DNA, 19 bp, Mus musculus
  siRNA target sequence for 6330509G02Rik (NM_172946.1,626-644).
ccaaacaggcagtagtgaa

SEQ ID NO: 781610 - DNA, 19 bp, Mus musculus
  siRNA target sequence for 6330509G02Rik (NM_172946.1,670-688).
gcccacggcaccattcaga

SEQ ID NO: 781611 - DNA, 19 bp, Mus musculus
  siRNA target sequence for 6330509G02Rik (NM_172946.1,719-737).
gggaaggttcattctttaa

SEQ ID NO: 781612 - DNA, 19 bp, Mus musculus
  siRNA target sequence for 6330509G02Rik (NM_172946.1,765-783).
cgtctctctccggtttgat

SEQ ID NO: 781613 - DNA, 19 bp, Mus musculus
  siRNA target sequence for 6330509G02Rik (NM_172946.1,798-816).
cacggatgagggctgttta

SEQ ID NO: 781614 - DNA, 19 bp, Mus musculus
  siRNA target sequence for 6330509G02Rik (NM_172946.1,800-818).
cggatgagggctgtttaga

SEQ ID NO: 781615 - DNA, 19 bp, Mus musculus
  siRNA target sequence for 6330509G02Rik (NM_172946.1,841-859).
gatatcgaagtcagactta

SEQ ID NO: 781616 - DNA, 19 bp, Mus musculus
  siRNA target sequence for 6330509G02Rik (NM_172946.1,847-865).
gaagtcagacttatcatga

SEQ ID NO: 781617 - DNA, 19 bp, Mus musculus
  siRNA target sequence for 6330509G02Rik (NM_172946.1,850-868).
gtcagacttatcatgagaa

SEQ ID NO: 781618 - DNA, 19 bp, Mus musculus
  siRNA target sequence for 6330509G02Rik (NM_172946.1,864-882).
gagaagatcctgcagtatt

SEQ ID NO: 781619 - DNA, 19 bp, Mus musculus
  siRNA target sequence for 1110032E16Rik (NM_172947.1,159-177).
ccaaaatgctggctctaaa

SEQ ID NO: 781620 - DNA, 19 bp, Mus musculus
  siRNA target sequence for 1110032E16Rik (NM_172947.1,212-230).
gacatcttgcttataaact

SEQ ID NO: 781621 - DNA, 19 bp, Mus musculus
  siRNA target sequence for 1110032E16Rik (NM_172947.1,220-238).
gcttataaacttacagtat

SEQ ID NO: 781622 - DNA, 19 bp, Mus musculus
  siRNA target sequence for 1110032E16Rik (NM_172947.1,229-247).
cttacagtatgtttcagaa

SEQ ID NO: 781623 - DNA, 19 bp, Mus musculus
  siRNA target sequence for 1110032E16Rik (NM_172947.1,285-303).
ccctagcttcactcaatgt

SEQ ID NO: 781624 - DNA, 19 bp, Mus musculus
  siRNA target sequence for 1110032E16Rik (NM_172947.1,287-305).
ctagcttcactcaatgtta

SEQ ID NO: 781625 - DNA, 19 bp, Mus musculus
  siRNA target sequence for 1110032E16Rik (NM_172947.1,290-308).
gcttcactcaatgttagta

SEQ ID NO: 781626 - DNA, 19 bp, Mus musculus
  siRNA target sequence for C330018B01 (NM_172948.1,337-355).
ggcaaggaggcgagtatct

SEQ ID NO: 781627 - DNA, 19 bp, Mus musculus
  siRNA target sequence for C330018B01 (NM_172948.1,405-423).
ccacggtaccgtgtactat

SEQ ID NO: 781628 - DNA, 19 bp, Mus musculus
  siRNA target sequence for C330018B01 (NM_172948.1,409-427).
ggtaccgtgtactatgaga

SEQ ID NO: 781629 - DNA, 19 bp, Mus musculus
  siRNA target sequence for C330018B01 (NM_172948.1,507-525).
gaaggccaagctctttata

SEQ ID NO: 781630 - DNA, 19 bp, Mus musculus
  siRNA target sequence for C330018B01 (NM_172948.1,680-698).
cgtatgcagagaactttat

SEQ ID NO: 781631 - DNA, 19 bp, Mus musculus
  siRNA target sequence for C330018B01 (NM_172948.1,732-750).
caactccgatgagtttgaa

SEQ ID NO: 781632 - DNA, 19 bp, Mus musculus
  siRNA target sequence for C330018B01 (NM_172948.1,754-772).
gccattaaggccatcatga

SEQ ID NO: 781633 - DNA, 19 bp, Mus musculus
  siRNA target sequence for C330018B01 (NM_172948.1,755-773).
ccattaaggccatcatgaa

SEQ ID NO: 781634 - DNA, 19 bp, Mus musculus
  siRNA target sequence for C330018B01 (NM_172948.1,776-794).
cccaggtagacccatatct

SEQ ID NO: 781635 - DNA, 19 bp, Mus musculus
  siRNA target sequence for C330018B01 (NM_172948.1,788-806).
catatctgccctatgaata

SEQ ID NO: 781636 - DNA, 19 bp, Mus musculus
  siRNA target sequence for C330018B01 (NM_172948.1,793-811).
ctgccctatgaatatacct

SEQ ID NO: 781637 - DNA, 19 bp, Mus musculus
  siRNA target sequence for C330018B01 (NM_172948.1,899-917).
ctgcccagagtccatttgt

SEQ ID NO: 781638 - DNA, 19 bp, Mus musculus
  siRNA target sequence for C330018B01 (NM_172948.1,901-919).
gcccagagtccatttgtct

SEQ ID NO: 781639 - DNA, 19 bp, Mus musculus
  siRNA target sequence for C330018B01 (NM_172948.1,903-921).
ccagagtccatttgtctta

SEQ ID NO: 781640 - DNA, 19 bp, Mus musculus
  siRNA target sequence for C330018B01 (NM_172948.1,1045-1063).
ctggaccatggattgatct

SEQ ID NO: 781641 - DNA, 19 bp, Mus musculus
  siRNA target sequence for C330018B01 (NM_172948.1,1087-1105).
ctcaacagccagaattcgt

SEQ ID NO: 781642 - DNA, 19 bp, Mus musculus
  siRNA target sequence for C330018B01 (NM_172948.1,1183-1201).
caagagtgctacctacaaa

SEQ ID NO: 781643 - DNA, 19 bp, Mus musculus
  siRNA target sequence for D11Ertd759e (NM_172949.1,416-434).
cactccctaacttagcaat

SEQ ID NO: 781644 - DNA, 19 bp, Mus musculus
  siRNA target sequence for D11Ertd759e (NM_172949.1,421-439).
cctaacttagcaatcagta

SEQ ID NO: 781645 - DNA, 19 bp, Mus musculus
  siRNA target sequence for D11Ertd759e (NM_172949.1,453-471).
gctacagtcctatagtgat

SEQ ID NO: 781646 - DNA, 19 bp, Mus musculus
  siRNA target sequence for D11Ertd759e (NM_172949.1,484-502).
ctgtctatcatagaaatca

SEQ ID NO: 781647 - DNA, 19 bp, Mus musculus
  siRNA target sequence for D11Ertd759e (NM_172949.1,538-556).
ggcatggacttgaatgtgt

SEQ ID NO: 781648 - DNA, 19 bp, Mus musculus
  siRNA target sequence for D11Ertd759e (NM_172949.1,598-616).
gtcttaaaggccttcagta

SEQ ID NO: 781649 - DNA, 19 bp, Mus musculus
  siRNA target sequence for D11Ertd759e (NM_172949.1,678-696).
gcggctgcgactgaacaaa

SEQ ID NO: 781650 - DNA, 19 bp, Mus musculus
  siRNA target sequence for D11Ertd759e (NM_172949.1,680-698).
ggctgcgactgaacaaaga

SEQ ID NO: 781651 - DNA, 19 bp, Mus musculus
  siRNA target sequence for D11Ertd759e (NM_172949.1,707-725).
gggaaattgatgtgcaata

SEQ ID NO: 781652 - DNA, 19 bp, Mus musculus
  siRNA target sequence for D11Ertd759e (NM_172949.1,873-891).
gagcctcaaggatactcta

SEQ ID NO: 781653 - DNA, 19 bp, Mus musculus
  siRNA target sequence for Pip3ap (NM_172958.2,989-1007).
gcttcttggatggaattta

SEQ ID NO: 781654 - DNA, 19 bp, Mus musculus
  siRNA target sequence for Pip3ap (NM_172958.2,1024-1042).
ccaccctacgagatggtta

SEQ ID NO: 781655 - DNA, 19 bp, Mus musculus
  siRNA target sequence for Pip3ap (NM_172958.2,1025-1043).
caccctacgagatggttaa

SEQ ID NO: 781656 - DNA, 19 bp, Mus musculus
  siRNA target sequence for Pip3ap (NM_172958.2,1027-1045).
ccctacgagatggttaaaa

SEQ ID NO: 781657 - DNA, 19 bp, Mus musculus
  siRNA target sequence for Pip3ap (NM_172958.2,1029-1047).
ctacgagatggttaaaact

SEQ ID NO: 781658 - DNA, 19 bp, Mus musculus
  siRNA target sequence for Pip3ap (NM_172958.2,1032-1050).
cgagatggttaaaactgaa

SEQ ID NO: 781659 - DNA, 19 bp, Mus musculus
  siRNA target sequence for Pip3ap (NM_172958.2,1038-1056).
ggttaaaactgaagactta

SEQ ID NO: 781660 - DNA, 19 bp, Mus musculus
  siRNA target sequence for Pip3ap (NM_172958.2,1039-1057).
gttaaaactgaagacttat

SEQ ID NO: 781661 - DNA, 19 bp, Mus musculus
  siRNA target sequence for Pip3ap (NM_172958.2,1089-1107).
gagtgcatactgtaaattt

SEQ ID NO: 781662 - DNA, 19 bp, Mus musculus
  siRNA target sequence for Pip3ap (NM_172958.2,1091-1109).
gtgcatactgtaaatttaa

SEQ ID NO: 781663 - DNA, 19 bp, Mus musculus
  siRNA target sequence for Pip3ap (NM_172958.2,1110-1128).
gcaactgtttctgatagat

SEQ ID NO: 781664 - DNA, 19 bp, Mus musculus
  siRNA target sequence for Pip3ap (NM_172958.2,1111-1129).
caactgtttctgatagata

SEQ ID NO: 781665 - DNA, 19 bp, Mus musculus
  siRNA target sequence for Pip3ap (NM_172958.2,1114-1132).
ctgtttctgatagataaca

SEQ ID NO: 781666 - DNA, 19 bp, Mus musculus
  siRNA target sequence for Pip3ap (NM_172958.2,1116-1134).
gtttctgatagataacagt

SEQ ID NO: 781667 - DNA, 19 bp, Mus musculus
  siRNA target sequence for Pip3ap (NM_172958.2,1126-1144).
gataacagttcggaatttt

SEQ ID NO: 781668 - DNA, 19 bp, Mus musculus
  siRNA target sequence for Pip3ap (NM_172958.2,1270-1288).
ctgttggaagagaatgctt

SEQ ID NO: 781669 - DNA, 19 bp, Mus musculus
  siRNA target sequence for Pip3ap (NM_172958.2,1310-1328).
cctctctggtgcaagtgat

SEQ ID NO: 781670 - DNA, 19 bp, Mus musculus
  siRNA target sequence for Pip3ap (NM_172958.2,1365-1383).
gagcctcatccaaaaggaa

SEQ ID NO: 781671 - DNA, 19 bp, Mus musculus
  siRNA target sequence for Pip3ap (NM_172958.2,1407-1425).
cttggaccgctgtaaccat

SEQ ID NO: 781672 - DNA, 19 bp, Mus musculus
  siRNA target sequence for Pip3ap (NM_172958.2,1534-1552).
ctgactgttttgtcagata

SEQ ID NO: 781673 - DNA, 19 bp, Mus musculus
  siRNA target sequence for Pip3ap (NM_172958.2,1545-1563).
gtcagatagcctgtatata

SEQ ID NO: 781674 - DNA, 19 bp, Mus musculus
  siRNA target sequence for Pip3ap (NM_172958.2,1549-1567).
gatagcctgtatataccta

SEQ ID NO: 781675 - DNA, 19 bp, Mus musculus
  siRNA target sequence for Pip3ap (NM_172958.2,1553-1571).
gcctgtatatacctatttt

SEQ ID NO: 781676 - DNA, 19 bp, Mus musculus
  siRNA target sequence for Pip3ap (NM_172958.2,1594-1612).
cctcatcaaaaagatacta

SEQ ID NO: 781677 - DNA, 19 bp, Mus musculus
  siRNA target sequence for Pip3ap (NM_172958.2,1670-1688).
gggactggtcagtacagtt

SEQ ID NO: 781678 - DNA, 19 bp, Mus musculus
  siRNA target sequence for Pip3ap (NM_172958.2,1671-1689).
ggactggtcagtacagttt

SEQ ID NO: 781679 - DNA, 19 bp, Mus musculus
  siRNA target sequence for Pip3ap (NM_172958.2,1674-1692).
ctggtcagtacagtttgaa

SEQ ID NO: 781680 - DNA, 19 bp, Mus musculus
  siRNA target sequence for Pip3ap (NM_172958.2,1699-1717).
gcacagacgttacttagaa

SEQ ID NO: 781681 - DNA, 19 bp, Mus musculus
  siRNA target sequence for Pip3ap (NM_172958.2,1766-1784).
gatcacgtttcaaacatca

SEQ ID NO: 781682 - DNA, 19 bp, Mus musculus
  siRNA target sequence for Pip3ap (NM_172958.2,1780-1798).
catcaacgacaactttctt

SEQ ID NO: 781683 - DNA, 19 bp, Mus musculus
  siRNA target sequence for Pip3ap (NM_172958.2,1801-1819).
ccacttacccagtctaagt

SEQ ID NO: 781684 - DNA, 19 bp, Mus musculus
  siRNA target sequence for Pip3ap (NM_172958.2,1825-1843).
cccaaaagaggatttttca

SEQ ID NO: 781685 - DNA, 19 bp, Mus musculus
  siRNA target sequence for Pip3ap (NM_172958.2,1875-1893).
cctaggcaagagaattagt

SEQ ID NO: 781686 - DNA, 19 bp, Mus musculus
  siRNA target sequence for Pip3ap (NM_172958.2,1876-1894).
ctaggcaagagaattagta

SEQ ID NO: 781687 - DNA, 19 bp, Mus musculus
  siRNA target sequence for Pip3ap (NM_172958.2,1880-1898).
gcaagagaattagtaaact

SEQ ID NO: 781688 - DNA, 19 bp, Mus musculus
  siRNA target sequence for Pip3ap (NM_172958.2,1881-1899).
caagagaattagtaaactt

SEQ ID NO: 781689 - DNA, 19 bp, Mus musculus
  siRNA target sequence for Pip3ap (NM_172958.2,1980-1998).
cctgttgttgcctcacatt

SEQ ID NO: 781690 - DNA, 19 bp, Mus musculus
  siRNA target sequence for Pip3ap (NM_172958.2,2019-2037).
gtgggctcagcgctattta

SEQ ID NO: 781691 - DNA, 19 bp, Mus musculus
  siRNA target sequence for Pip3ap (NM_172958.2,2022-2040).
ggctcagcgctatttacgt

SEQ ID NO: 781692 - DNA, 19 bp, Mus musculus
  siRNA target sequence for Pip3ap (NM_172958.2,2023-2041).
gctcagcgctatttacgtt

SEQ ID NO: 781693 - DNA, 19 bp, Mus musculus
  siRNA target sequence for Pip3ap (NM_172958.2,2028-2046).
gcgctatttacgttggatt

SEQ ID NO: 781694 - DNA, 19 bp, Mus musculus
  siRNA target sequence for Pip3ap (NM_172958.2,2080-2098).
gccaccatgggcaaactct

SEQ ID NO: 781695 - DNA, 19 bp, Mus musculus
  siRNA target sequence for Pip3ap (NM_172958.2,2082-2100).
caccatgggcaaactctta

SEQ ID NO: 781696 - DNA, 19 bp, Mus musculus
  siRNA target sequence for Pip3ap (NM_172958.2,2285-2303).
ctttaggaggcgaagatga

SEQ ID NO: 781697 - DNA, 19 bp, Mus musculus
  siRNA target sequence for Pip3ap (NM_172958.2,2309-2327).
ccaaacgagaagatgagtt

SEQ ID NO: 781698 - DNA, 19 bp, Mus musculus
  siRNA target sequence for 1110012J17Rik (NM_172963.3,232-250).
caggaactgcagaagtata

SEQ ID NO: 781699 - DNA, 19 bp, Mus musculus
  siRNA target sequence for 1110012J17Rik (NM_172963.3,494-512).
cacccttcggagactcaat

SEQ ID NO: 781700 - DNA, 19 bp, Mus musculus
  siRNA target sequence for 1110012J17Rik (NM_172963.3,587-605).
ctgagattgaagatcacaa

SEQ ID NO: 781701 - DNA, 19 bp, Mus musculus
  siRNA target sequence for 1110012J17Rik (NM_172963.3,1063-1081).
gagtgcctggtgaccataa

SEQ ID NO: 781702 - DNA, 19 bp, Mus musculus
  siRNA target sequence for 1110012J17Rik (NM_172963.3,1220-1238).
cgagtgagccccacttgtt

SEQ ID NO: 781703 - DNA, 19 bp, Mus musculus
  siRNA target sequence for 1110012J17Rik (NM_172963.3,1679-1697).
cgtggagcgacgagaagaa

SEQ ID NO: 781704 - DNA, 19 bp, Mus musculus
  siRNA target sequence for 1110012J17Rik (NM_172963.3,1680-1698).
gtggagcgacgagaagaat

SEQ ID NO: 781705 - DNA, 19 bp, Mus musculus
  siRNA target sequence for 1110012J17Rik (NM_172963.3,1949-1967).
cacactccctggtacagat

SEQ ID NO: 781706 - DNA, 19 bp, Mus musculus
  siRNA target sequence for 1110012J17Rik (NM_172963.3,1997-2015).
cagacgggggaccacttaa

SEQ ID NO: 781707 - DNA, 19 bp, Mus musculus
  siRNA target sequence for 1110012J17Rik (NM_172963.3,1999-2017).
gacgggggaccacttaaca

SEQ ID NO: 781708 - DNA, 19 bp, Mus musculus
  siRNA target sequence for 1110012J17Rik (NM_172963.3,2001-2019).
cgggggaccacttaacaaa

SEQ ID NO: 781709 - DNA, 19 bp, Mus musculus
  siRNA target sequence for 1110012J17Rik (NM_172963.3,2579-2597).
ccgactccatcccatttga

SEQ ID NO: 781710 - DNA, 19 bp, Mus musculus
  siRNA target sequence for 1110012J17Rik (NM_172963.3,2714-2732).
gccttgccgaggaagaaga

SEQ ID NO: 781711 - DNA, 19 bp, Mus musculus
  siRNA target sequence for 1110012J17Rik (NM_172963.3,2735-2753).
gtcgcaagggcaatcttca

SEQ ID NO: 781712 - DNA, 19 bp, Mus musculus
  siRNA target sequence for 1110012J17Rik (NM_172963.3,2871-2889).
gtctcccgacgacttgaaa

SEQ ID NO: 781713 - DNA, 19 bp, Mus musculus
  siRNA target sequence for 1110012J17Rik (NM_172963.3,2873-2891).
ctcccgacgacttgaaata

SEQ ID NO: 781714 - DNA, 19 bp, Mus musculus
  siRNA target sequence for 1110012J17Rik (NM_172963.3,2875-2893).
cccgacgacttgaaataca

SEQ ID NO: 781715 - DNA, 19 bp, Mus musculus
  siRNA target sequence for 1110012J17Rik (NM_172963.3,2876-2894).
ccgacgacttgaaatacat

SEQ ID NO: 781716 - DNA, 19 bp, Mus musculus
  siRNA target sequence for 1110012J17Rik (NM_172963.3,2877-2895).
cgacgacttgaaatacatt

SEQ ID NO: 781717 - DNA, 19 bp, Mus musculus
  siRNA target sequence for 1110012J17Rik (NM_172963.3,3025-3043).
gatccctcctggtatctga

SEQ ID NO: 781718 - DNA, 19 bp, Mus musculus
  siRNA target sequence for 1110012J17Rik (NM_172963.3,3172-3190).
cgggttgacagtatagcat

SEQ ID NO: 781719 - DNA, 19 bp, Mus musculus
  siRNA target sequence for 1110012J17Rik (NM_172963.3,3400-3418).
cctctgaacagcctagata

SEQ ID NO: 781720 - DNA, 19 bp, Mus musculus
  siRNA target sequence for 1110012J17Rik (NM_172963.3,3401-3419).
ctctgaacagcctagatat

SEQ ID NO: 781721 - DNA, 19 bp, Mus musculus
  siRNA target sequence for 1110012J17Rik (NM_172963.3,3403-3421).
ctgaacagcctagatatgt

SEQ ID NO: 781722 - DNA, 19 bp, Mus musculus
  siRNA target sequence for 1110012J17Rik (NM_172963.3,3410-3428).
gcctagatatgtctaagaa

SEQ ID NO: 781723 - DNA, 19 bp, Mus musculus
  siRNA target sequence for 1110012J17Rik (NM_172963.3,3412-3430).
ctagatatgtctaagaaca

SEQ ID NO: 781724 - DNA, 19 bp, Mus musculus
  siRNA target sequence for 1110012J17Rik (NM_172963.3,3548-3566).
cgcagaccatccagacaat

SEQ ID NO: 781725 - DNA, 19 bp, Mus musculus
  siRNA target sequence for 1110012J17Rik (NM_172963.3,3759-3777).
gtacggttctcccaaactt

SEQ ID NO: 781726 - DNA, 19 bp, Mus musculus
  siRNA target sequence for 1110012J17Rik (NM_172963.3,4108-4126).
ccagtgagacaggacttat

SEQ ID NO: 781727 - DNA, 19 bp, Mus musculus
  siRNA target sequence for 1110012J17Rik (NM_172963.3,4327-4345).
ctagagccctgcttttcca

SEQ ID NO: 781728 - DNA, 19 bp, Mus musculus
  siRNA target sequence for E130310N06 (NM_172964.1,214-232).
catccgctcagcagaaaat

SEQ ID NO: 781729 - DNA, 19 bp, Mus musculus
  siRNA target sequence for E130310N06 (NM_172964.1,239-257).
ctcgctgccgacgaatcaa

SEQ ID NO: 781730 - DNA, 19 bp, Mus musculus
  siRNA target sequence for E130310N06 (NM_172964.1,241-259).
cgctgccgacgaatcaaca

SEQ ID NO: 781731 - DNA, 19 bp, Mus musculus
  siRNA target sequence for E130310N06 (NM_172964.1,258-276).
caggatgctctccaatgaa

SEQ ID NO: 781732 - DNA, 19 bp, Mus musculus
  siRNA target sequence for E130310N06 (NM_172964.1,282-300).
gcatcctccctcctttagt

SEQ ID NO: 781733 - DNA, 19 bp, Mus musculus
  siRNA target sequence for E130310N06 (NM_172964.1,467-485).
cggagtggctacaagatgt

SEQ ID NO: 781734 - DNA, 19 bp, Mus musculus
  siRNA target sequence for E130310N06 (NM_172964.1,478-496).
caagatgtgggattgtcaa

SEQ ID NO: 781735 - DNA, 19 bp, Mus musculus
  siRNA target sequence for E130310N06 (NM_172964.1,532-550).
gcgctcctgtctacattga

SEQ ID NO: 781736 - DNA, 19 bp, Mus musculus
  siRNA target sequence for E130310N06 (NM_172964.1,534-552).
gctcctgtctacattgact

SEQ ID NO: 781737 - DNA, 19 bp, Mus musculus
  siRNA target sequence for E130310N06 (NM_172964.1,569-587).
cagtgaaaaagagatacaa

SEQ ID NO: 781738 - DNA, 19 bp, Mus musculus
  siRNA target sequence for E130310N06 (NM_172964.1,581-599).
gatacaacacatatactca

SEQ ID NO: 781739 - DNA, 19 bp, Mus musculus
  siRNA target sequence for E130310N06 (NM_172964.1,660-678).
cgaatctcctcctagtgat

SEQ ID NO: 781740 - DNA, 19 bp, Mus musculus
  siRNA target sequence for E130310N06 (NM_172964.1,779-797).
gtagtaccaccctatccaa

SEQ ID NO: 781741 - DNA, 19 bp, Mus musculus
  siRNA target sequence for E130310N06 (NM_172964.1,877-895).
gctgttcacaccaatggat

SEQ ID NO: 781742 - DNA, 19 bp, Mus musculus
  siRNA target sequence for E130310N06 (NM_172964.1,915-933).
ggttcagagcacattgagt

SEQ ID NO: 781743 - DNA, 19 bp, Mus musculus
  siRNA target sequence for E130310N06 (NM_172964.1,988-1006).
gaggtctcttactcagaaa

SEQ ID NO: 781744 - DNA, 19 bp, Mus musculus
  siRNA target sequence for E130310N06 (NM_172964.1,1015-1033).
gaaatgcctgatagaaata

SEQ ID NO: 781745 - DNA, 19 bp, Mus musculus
  siRNA target sequence for E130310N06 (NM_172964.1,1037-1055).
ggaagaagtcggacattaa

SEQ ID NO: 781746 - DNA, 19 bp, Mus musculus
  siRNA target sequence for E130310N06 (NM_172964.1,1044-1062).
gtcggacattaagaaagaa

SEQ ID NO: 781747 - DNA, 19 bp, Mus musculus
  siRNA target sequence for E130310N06 (NM_172964.1,1050-1068).
cattaagaaagaagactat

SEQ ID NO: 781748 - DNA, 19 bp, Mus musculus
  siRNA target sequence for E130310N06 (NM_172964.1,1178-1196).
cagccttcttcgatgcttt

SEQ ID NO: 781749 - DNA, 19 bp, Mus musculus
  siRNA target sequence for E130310N06 (NM_172964.1,1188-1206).
cgatgcttttgggatacaa

SEQ ID NO: 781750 - DNA, 19 bp, Mus musculus
  siRNA target sequence for E130310N06 (NM_172964.1,1238-1256).
gccgagacaacgggatttt

SEQ ID NO: 781751 - DNA, 19 bp, Mus musculus
  siRNA target sequence for E130310N06 (NM_172964.1,1271-1289).
cagtcctcctggacaatga

SEQ ID NO: 781752 - DNA, 19 bp, Mus musculus
  siRNA target sequence for E130310N06 (NM_172964.1,1299-1317).
ggaccctgcagtgaaagtt

SEQ ID NO: 781753 - DNA, 19 bp, Mus musculus
  siRNA target sequence for E130310N06 (NM_172964.1,1315-1333).
gttcccctggtgttacaaa

SEQ ID NO: 781754 - DNA, 19 bp, Mus musculus
  siRNA target sequence for E130310N06 (NM_172964.1,1318-1336).
cccctggtgttacaaaaat

SEQ ID NO: 781755 - DNA, 19 bp, Mus musculus
  siRNA target sequence for E130310N06 (NM_172964.1,1361-1379).
gtctggaatcggaaggaat

SEQ ID NO: 781756 - DNA, 19 bp, Mus musculus
  siRNA target sequence for E130310N06 (NM_172964.1,1363-1381).
ctggaatcggaaggaattt

SEQ ID NO: 781757 - DNA, 19 bp, Mus musculus
  siRNA target sequence for E130310N06 (NM_172964.1,1393-1411).
ggatgtactgccaaagtca

SEQ ID NO: 781758 - DNA, 19 bp, Mus musculus
  siRNA target sequence for E130310N06 (NM_172964.1,1533-1551).
cttccctgttgaatatata

SEQ ID NO: 781759 - DNA, 19 bp, Mus musculus
  siRNA target sequence for E130310N06 (NM_172964.1,1900-1918).
gccaccatgctgttgaaga

SEQ ID NO: 781760 - DNA, 19 bp, Mus musculus
  siRNA target sequence for E130310N06 (NM_172964.1,1921-1939).
cagctcccgagtatgaaga

SEQ ID NO: 781761 - DNA, 19 bp, Mus musculus
  siRNA target sequence for E130310N06 (NM_172964.1,1960-1978).
ctggatcgagaggtttcaa

SEQ ID NO: 781762 - DNA, 19 bp, Mus musculus
  siRNA target sequence for E130310N06 (NM_172964.1,2127-2145).
cctggcgaaatttcagtat

SEQ ID NO: 781763 - DNA, 19 bp, Mus musculus
  siRNA target sequence for E130310N06 (NM_172964.1,2131-2149).
gcgaaatttcagtatgaga

SEQ ID NO: 781764 - DNA, 19 bp, Mus musculus
  siRNA target sequence for E130310N06 (NM_172964.1,2132-2150).
cgaaatttcagtatgagaa

SEQ ID NO: 781765 - DNA, 19 bp, Mus musculus
  siRNA target sequence for E130310N06 (NM_172964.1,2184-2202).
gaaccaaaggttatatgaa

SEQ ID NO: 781766 - DNA, 19 bp, Mus musculus
  siRNA target sequence for E130310N06 (NM_172964.1,2187-2205).
ccaaaggttatatgaagtt

SEQ ID NO: 781767 - DNA, 19 bp, Mus musculus
  siRNA target sequence for E130310N06 (NM_172964.1,2228-2246).
gtttagatcctgatgcata

SEQ ID NO: 781768 - DNA, 19 bp, Mus musculus
  siRNA target sequence for E130310N06 (NM_172964.1,2253-2271).
ggatgtgtatcatataaat

SEQ ID NO: 781769 - DNA, 19 bp, Mus musculus
  siRNA target sequence for 2610304F09Rik (NM_172965.1,169-187).
ccaccttcacagattgcaa

SEQ ID NO: 781770 - DNA, 19 bp, Mus musculus
  siRNA target sequence for 2610304F09Rik (NM_172965.1,193-211).
ggttccgcaggactgataa

SEQ ID NO: 781771 - DNA, 19 bp, Mus musculus
  siRNA target sequence for 2610304F09Rik (NM_172965.1,194-212).
gttccgcaggactgataaa

SEQ ID NO: 781772 - DNA, 19 bp, Mus musculus
  siRNA target sequence for 2610304F09Rik (NM_172965.1,197-215).
ccgcaggactgataaacca

SEQ ID NO: 781773 - DNA, 19 bp, Mus musculus
  siRNA target sequence for 2610304F09Rik (NM_172965.1,213-231).
ccaagttgccacagttaat

SEQ ID NO: 781774 - DNA, 19 bp, Mus musculus
  siRNA target sequence for 2610304F09Rik (NM_172965.1,335-353).
cctatccacaggtacagat

SEQ ID NO: 781775 - DNA, 19 bp, Mus musculus
  siRNA target sequence for 2610304F09Rik (NM_172965.1,522-540).
gtcacttcccccgaaagtt

SEQ ID NO: 781776 - DNA, 19 bp, Mus musculus
  siRNA target sequence for 2610304F09Rik (NM_172965.1,545-563).
ggcaggttactgttaccat

SEQ ID NO: 781777 - DNA, 19 bp, Mus musculus
  siRNA target sequence for 2610304F09Rik (NM_172965.1,629-647).
ccagtaacctgcatcacat

SEQ ID NO: 781778 - DNA, 19 bp, Mus musculus
  siRNA target sequence for 2610304F09Rik (NM_172965.1,630-648).
cagtaacctgcatcacatt

SEQ ID NO: 781779 - DNA, 19 bp, Mus musculus
  siRNA target sequence for 2610304F09Rik (NM_172965.1,753-771).
gatgtccagctctaaagta

SEQ ID NO: 781780 - DNA, 19 bp, Mus musculus
  siRNA target sequence for 2610304F09Rik (NM_172965.1,978-996).
gctcagtcggcccacttta

SEQ ID NO: 781781 - DNA, 19 bp, Mus musculus
  siRNA target sequence for 2610304F09Rik (NM_172965.1,979-997).
ctcagtcggcccactttat

SEQ ID NO: 781782 - DNA, 19 bp, Mus musculus
  siRNA target sequence for 2610304F09Rik (NM_172965.1,981-999).
cagtcggcccactttatct

SEQ ID NO: 781783 - DNA, 19 bp, Mus musculus
  siRNA target sequence for 2610304F09Rik (NM_172965.1,983-1001).
gtcggcccactttatctat

SEQ ID NO: 781784 - DNA, 19 bp, Mus musculus
  siRNA target sequence for 2610304F09Rik (NM_172965.1,1012-1030).
ccatctgcagccattagta

SEQ ID NO: 781785 - DNA, 19 bp, Mus musculus
  siRNA target sequence for 2610304F09Rik (NM_172965.1,1051-1069).
cgagatgtgacaacaagaa

SEQ ID NO: 781786 - DNA, 19 bp, Mus musculus
  siRNA target sequence for 2610304F09Rik (NM_172965.1,1054-1072).
gatgtgacaacaagaatca

SEQ ID NO: 781787 - DNA, 19 bp, Mus musculus
  siRNA target sequence for 2610304F09Rik (NM_172965.1,1240-1258).
caagctcccacaagtacaa

SEQ ID NO: 781788 - DNA, 19 bp, Mus musculus
  siRNA target sequence for 2610304F09Rik (NM_172965.1,1313-1331).
caaatatcccagttgctaa

SEQ ID NO: 781789 - DNA, 19 bp, Mus musculus
  siRNA target sequence for 2610304F09Rik (NM_172965.1,1419-1437).
ccatcgggcctctccaaat

SEQ ID NO: 781790 - DNA, 19 bp, Mus musculus
  siRNA target sequence for 2610304F09Rik (NM_172965.1,1578-1596).
ccggcagtacccagtttct

SEQ ID NO: 781791 - DNA, 19 bp, Mus musculus
  siRNA target sequence for 2610304F09Rik (NM_172965.1,1691-1709).
cctcacatgcccgacatat

SEQ ID NO: 781792 - DNA, 19 bp, Mus musculus
  siRNA target sequence for 2610304F09Rik (NM_172965.1,1694-1712).
cacatgcccgacatatcca

SEQ ID NO: 781793 - DNA, 19 bp, Mus musculus
  siRNA target sequence for 2610304F09Rik (NM_172965.1,1904-1922).
cagatggagctacaattgt

SEQ ID NO: 781794 - DNA, 19 bp, Mus musculus
  siRNA target sequence for 2610304F09Rik (NM_172965.1,1921-1939).
gtagccaaccctattagca

SEQ ID NO: 781795 - DNA, 19 bp, Mus musculus
  siRNA target sequence for 2610304F09Rik (NM_172965.1,2070-2088).
gatggcagtccggaaaact

SEQ ID NO: 781796 - DNA, 19 bp, Mus musculus
  siRNA target sequence for 2610304F09Rik (NM_172965.1,2115-2133).
ggctactcctcgagtagaa

SEQ ID NO: 781797 - DNA, 19 bp, Mus musculus
  siRNA target sequence for 2610304F09Rik (NM_172965.1,2116-2134).
gctactcctcgagtagaaa

SEQ ID NO: 781798 - DNA, 19 bp, Mus musculus
  siRNA target sequence for 2610304F09Rik (NM_172965.1,2189-2207).
ccgaagtgcatgtgtctat

SEQ ID NO: 781799 - DNA, 19 bp, Mus musculus
  siRNA target sequence for 2610304F09Rik (NM_172965.1,2190-2208).
cgaagtgcatgtgtctata

SEQ ID NO: 781800 - DNA, 19 bp, Mus musculus
  siRNA target sequence for 2610304F09Rik (NM_172965.1,2304-2322).
gaccattcccagcatgatt

SEQ ID NO: 781801 - DNA, 19 bp, Mus musculus
  siRNA target sequence for 2610304F09Rik (NM_172965.1,2556-2574).
cacggtgtctccatctctt

SEQ ID NO: 781802 - DNA, 19 bp, Mus musculus
  siRNA target sequence for 2610304F09Rik (NM_172965.1,2768-2786).
ccaaagagtacattgatga

SEQ ID NO: 781803 - DNA, 19 bp, Mus musculus
  siRNA target sequence for 2610304F09Rik (NM_172965.1,2815-2833).
cccagacctcccattactt

SEQ ID NO: 781804 - DNA, 19 bp, Mus musculus
  siRNA target sequence for 2610304F09Rik (NM_172965.1,2864-2882).
ctgcttatcaccactttca

SEQ ID NO: 781805 - DNA, 19 bp, Mus musculus
  siRNA target sequence for 2610304F09Rik (NM_172965.1,2866-2884).
gcttatcaccactttcaga

SEQ ID NO: 781806 - DNA, 19 bp, Mus musculus
  siRNA target sequence for 2610304F09Rik (NM_172965.1,2891-2909).
gtgacgtccgggtcaaaga

SEQ ID NO: 781807 - DNA, 19 bp, Mus musculus
  siRNA target sequence for 2610304F09Rik (NM_172965.1,2925-2943).
gctacaggaaatagctaat

SEQ ID NO: 781808 - DNA, 19 bp, Mus musculus
  siRNA target sequence for 2610304F09Rik (NM_172965.1,2929-2947).
caggaaatagctaatcaga

SEQ ID NO: 781809 - DNA, 19 bp, Mus musculus
  siRNA target sequence for 2610304F09Rik (NM_172965.1,3022-3040).
gaacacgacgtttatgaaa

SEQ ID NO: 781810 - DNA, 19 bp, Mus musculus
  siRNA target sequence for 2610304F09Rik (NM_172965.1,3094-3112).
gacgatctacatcgaataa

SEQ ID NO: 781811 - DNA, 19 bp, Mus musculus
  siRNA target sequence for 2610304F09Rik (NM_172965.1,3096-3114).
cgatctacatcgaataaat

SEQ ID NO: 781812 - DNA, 19 bp, Mus musculus
  siRNA target sequence for 2610304F09Rik (NM_172965.1,3132-3150).
catgcagcggtgtaaacta

SEQ ID NO: 781813 - DNA, 19 bp, Mus musculus
  siRNA target sequence for 2610304F09Rik (NM_172965.1,3172-3190).
gccagagactctatgctta

SEQ ID NO: 781814 - DNA, 19 bp, Mus musculus
  siRNA target sequence for 2610304F09Rik (NM_172965.1,3173-3191).
ccagagactctatgcttaa

SEQ ID NO: 781815 - DNA, 19 bp, Mus musculus
  siRNA target sequence for 2610304F09Rik (NM_172965.1,3176-3194).
gagactctatgcttaaggt

SEQ ID NO: 781816 - DNA, 19 bp, Mus musculus
  siRNA target sequence for 9130023G24Rik (NM_172966.1,112-130).
ggatgatttgacgttactt

SEQ ID NO: 781817 - DNA, 19 bp, Mus musculus
  siRNA target sequence for 9130023G24Rik (NM_172966.1,166-184).
cgatgtcacagccaaagtt

SEQ ID NO: 781818 - DNA, 19 bp, Mus musculus
  siRNA target sequence for 9130023G24Rik (NM_172966.1,202-220).
cttctgcaaaccatgtcta

SEQ ID NO: 781819 - DNA, 19 bp, Mus musculus
  siRNA target sequence for 9130023G24Rik (NM_172966.1,534-552).
gcgacctgaagtttaataa

SEQ ID NO: 781820 - DNA, 19 bp, Mus musculus
  siRNA target sequence for 9130023G24Rik (NM_172966.1,595-613).
gtaccagggggagattaat

SEQ ID NO: 781821 - DNA, 19 bp, Mus musculus
  siRNA target sequence for 9130023G24Rik (NM_172966.1,640-658).
ctctgtggaagtcatcaaa

SEQ ID NO: 781822 - DNA, 19 bp, Mus musculus
  siRNA target sequence for 9130023G24Rik (NM_172966.1,687-705).
gagccctctacaactttga

SEQ ID NO: 781823 - DNA, 19 bp, Mus musculus
  siRNA target sequence for 9130023G24Rik (NM_172966.1,704-722).
gaccttcgagacaaggata

SEQ ID NO: 781824 - DNA, 19 bp, Mus musculus
  siRNA target sequence for 9130023G24Rik (NM_172966.1,787-805).
gaacaaaggacatcagtta

SEQ ID NO: 781825 - DNA, 19 bp, Mus musculus
  siRNA target sequence for 9130023G24Rik (NM_172966.1,790-808).
caaaggacatcagttatca

SEQ ID NO: 781826 - DNA, 19 bp, Mus musculus
  siRNA target sequence for 9130023G24Rik (NM_172966.1,848-866).
ggcaaagcgaccaacacat

SEQ ID NO: 781827 - DNA, 19 bp, Mus musculus
  siRNA target sequence for 9130023G24Rik (NM_172966.1,971-989).
caccagatggtggaaatca

SEQ ID NO: 781828 - DNA, 19 bp, Mus musculus
  siRNA target sequence for 9130023G24Rik (NM_172966.1,1147-1165).
ccagcaacacctttcaaat

SEQ ID NO: 781829 - DNA, 19 bp, Mus musculus
  siRNA target sequence for 9130023G24Rik (NM_172966.1,1175-1193).
gtagccctacacacttact

SEQ ID NO: 781830 - DNA, 19 bp, Mus musculus
  siRNA target sequence for 9130023G24Rik (NM_172966.1,1298-1316).
cgaactggcatctttccaa

SEQ ID NO: 781831 - DNA, 19 bp, Mus musculus
  siRNA target sequence for 9130023G24Rik (NM_172966.1,1349-1367).
gctagaaagacatctagtt

SEQ ID NO: 781832 - DNA, 19 bp, Mus musculus
  siRNA target sequence for 9130023G24Rik (NM_172966.1,1462-1480).
gcaaagtggacccttcaaa

SEQ ID NO: 781833 - DNA, 19 bp, Mus musculus
  siRNA target sequence for 9130023G24Rik (NM_172966.1,1463-1481).
caaagtggacccttcaaat

SEQ ID NO: 781834 - DNA, 19 bp, Mus musculus
  siRNA target sequence for 9130023G24Rik (NM_172966.1,1467-1485).
gtggacccttcaaatctgt

SEQ ID NO: 781835 - DNA, 19 bp, Mus musculus
  siRNA target sequence for 9130023G24Rik (NM_172966.1,1568-1586).
cggagcagcatgagaaaaa

SEQ ID NO: 781836 - DNA, 19 bp, Mus musculus
  siRNA target sequence for 9130023G24Rik (NM_172966.1,1614-1632).
ctgggatccccactttcat

SEQ ID NO: 781837 - DNA, 19 bp, Mus musculus
  siRNA target sequence for 9130023G24Rik (NM_172966.1,1713-1731).
cttccccgacaccgataat

SEQ ID NO: 781838 - DNA, 19 bp, Mus musculus
  siRNA target sequence for 9130023G24Rik (NM_172966.1,1716-1734).
ccccgacaccgataatggt

SEQ ID NO: 781839 - DNA, 19 bp, Mus musculus
  siRNA target sequence for 9130023G24Rik (NM_172966.1,1732-1750).
ggtggagatggggtctaaa

SEQ ID NO: 781840 - DNA, 19 bp, Mus musculus
  siRNA target sequence for 9130023G24Rik (NM_172966.1,1735-1753).
ggagatggggtctaaatct

SEQ ID NO: 781841 - DNA, 19 bp, Mus musculus
  siRNA target sequence for 9130023G24Rik (NM_172966.1,1736-1754).
gagatggggtctaaatcta

SEQ ID NO: 781842 - DNA, 19 bp, Mus musculus
  siRNA target sequence for 9130023G24Rik (NM_172966.1,1738-1756).
gatggggtctaaatctatt

SEQ ID NO: 781843 - DNA, 19 bp, Mus musculus
  siRNA target sequence for 9130023G24Rik (NM_172966.1,1742-1760).
gggtctaaatctatttaca

SEQ ID NO: 781844 - DNA, 19 bp, Mus musculus
  siRNA target sequence for 9130023G24Rik (NM_172966.1,1744-1762).
gtctaaatctatttacact

SEQ ID NO: 781845 - DNA, 19 bp, Mus musculus
  siRNA target sequence for 9130023G24Rik (NM_172966.1,1772-1790).
gccctgacctgcatcaaca

SEQ ID NO: 781846 - DNA, 19 bp, Mus musculus
  siRNA target sequence for 9130023G24Rik (NM_172966.1,1818-1836).
caggcaattccatcatcat

SEQ ID NO: 781847 - DNA, 19 bp, Mus musculus
  siRNA target sequence for 9130023G24Rik (NM_172966.1,1831-1849).
catcatggaaggcaaagaa

SEQ ID NO: 781848 - DNA, 19 bp, Mus musculus
  siRNA target sequence for 9130023G24Rik (NM_172966.1,1906-1924).
cctcgtgaaaccagaaaat

SEQ ID NO: 781849 - DNA, 19 bp, Mus musculus
  siRNA target sequence for 9130023G24Rik (NM_172966.1,1907-1925).
ctcgtgaaaccagaaaatt

SEQ ID NO: 781850 - DNA, 19 bp, Mus musculus
  siRNA target sequence for 9130023G24Rik (NM_172966.1,1910-1928).
gtgaaaccagaaaattcaa

SEQ ID NO: 781851 - DNA, 19 bp, Mus musculus
  siRNA target sequence for 9130023G24Rik (NM_172966.1,1935-1953).
gcactgaaaagcaagtcaa

SEQ ID NO: 781852 - DNA, 19 bp, Mus musculus
  siRNA target sequence for 9130023G24Rik (NM_172966.1,1936-1954).
cactgaaaagcaagtcaaa

SEQ ID NO: 781853 - DNA, 19 bp, Mus musculus
  siRNA target sequence for 4930503L19Rik (NM_172967.1,644-662).
gcccacagctcgtttgtgt

SEQ ID NO: 781854 - DNA, 19 bp, Mus musculus
  siRNA target sequence for 4930503L19Rik (NM_172967.1,645-663).
cccacagctcgtttgtgta

SEQ ID NO: 781855 - DNA, 19 bp, Mus musculus
  siRNA target sequence for 4930503L19Rik (NM_172967.1,646-664).
ccacagctcgtttgtgtat

SEQ ID NO: 781856 - DNA, 19 bp, Mus musculus
  siRNA target sequence for 4930503L19Rik (NM_172967.1,647-665).
cacagctcgtttgtgtata

SEQ ID NO: 781857 - DNA, 19 bp, Mus musculus
  siRNA target sequence for 4930503L19Rik (NM_172967.1,694-712).
ggccctgcaggcctatatt

SEQ ID NO: 781858 - DNA, 19 bp, Mus musculus
  siRNA target sequence for 4930503L19Rik (NM_172967.1,700-718).
gcaggcctatattgatgat

SEQ ID NO: 781859 - DNA, 19 bp, Mus musculus
  siRNA target sequence for 4930503L19Rik (NM_172967.1,703-721).
ggcctatattgatgatttt

SEQ ID NO: 781860 - DNA, 19 bp, Mus musculus
  siRNA target sequence for 4930503L19Rik (NM_172967.1,744-762).
gtgcaaacgctgtcaaagt

SEQ ID NO: 781861 - DNA, 19 bp, Mus musculus
  siRNA target sequence for 4930503L19Rik (NM_172967.1,763-781).
gaacactgacggtgagatt

SEQ ID NO: 781862 - DNA, 19 bp, Mus musculus
  siRNA target sequence for 4930503L19Rik (NM_172967.1,768-786).
ctgacggtgagattggtaa

SEQ ID NO: 781863 - DNA, 19 bp, Mus musculus
  siRNA target sequence for 4930503L19Rik (NM_172967.1,782-800).
ggtaatgggctgcaatttt

SEQ ID NO: 781864 - DNA, 19 bp, Mus musculus
  siRNA target sequence for 4930503L19Rik (NM_172967.1,812-830).
catatacccgacaatgctt

SEQ ID NO: 781865 - DNA, 19 bp, Mus musculus
  siRNA target sequence for 4930503L19Rik (NM_172967.1,818-836).
cccgacaatgcttttgtca

SEQ ID NO: 781866 - DNA, 19 bp, Mus musculus
  siRNA target sequence for 4930503L19Rik (NM_172967.1,819-837).
ccgacaatgcttttgtcaa

SEQ ID NO: 781867 - DNA, 19 bp, Mus musculus
  siRNA target sequence for 4930503L19Rik (NM_172967.1,820-838).
cgacaatgcttttgtcaat

SEQ ID NO: 781868 - DNA, 19 bp, Mus musculus
  siRNA target sequence for 4930503L19Rik (NM_172967.1,854-872).
cactttaaccccttatact

SEQ ID NO: 781869 - DNA, 19 bp, Mus musculus
  siRNA target sequence for 4930503L19Rik (NM_172967.1,856-874).
ctttaaccccttatactat

SEQ ID NO: 781870 - DNA, 19 bp, Mus musculus
  siRNA target sequence for 4930503L19Rik (NM_172967.1,879-897).
gagagactgttaatgacat

SEQ ID NO: 781871 - DNA, 19 bp, Mus musculus
  siRNA target sequence for 4930503L19Rik (NM_172967.1,904-922).
cattagcctgacaactgat

SEQ ID NO: 781872 - DNA, 19 bp, Mus musculus
  siRNA target sequence for 4930503L19Rik (NM_172967.1,913-931).
gacaactgatgatttgtta

SEQ ID NO: 781873 - DNA, 19 bp, Mus musculus
  siRNA target sequence for 4930503L19Rik (NM_172967.1,938-956).
ccagcggatggatgctttt

SEQ ID NO: 781874 - DNA, 19 bp, Mus musculus
  siRNA target sequence for 4930503L19Rik (NM_172967.1,941-959).
gcggatggatgcttttcct

SEQ ID NO: 781875 - DNA, 19 bp, Mus musculus
  siRNA target sequence for 4930503L19Rik (NM_172967.1,975-993).
ctgatcaccgaccaaacaa

SEQ ID NO: 781876 - DNA, 19 bp, Mus musculus
  siRNA target sequence for 4930503L19Rik (NM_172967.1,977-995).
gatcaccgaccaaacaaga

SEQ ID NO: 781877 - DNA, 19 bp, Mus musculus
  siRNA target sequence for 4930503L19Rik (NM_172967.1,980-998).
caccgaccaaacaagaaat

SEQ ID NO: 781878 - DNA, 19 bp, Mus musculus
  siRNA target sequence for 4930503L19Rik (NM_172967.1,983-1001).
cgaccaaacaagaaataca

SEQ ID NO: 781879 - DNA, 19 bp, Mus musculus
  siRNA target sequence for 4930503L19Rik (NM_172967.1,1013-1031).
gattcatcagacattaaga

SEQ ID NO: 781880 - DNA, 19 bp, Mus musculus
  siRNA target sequence for 4930503L19Rik (NM_172967.1,1030-1048).
gaatagtccaagtttttat

SEQ ID NO: 781881 - DNA, 19 bp, Mus musculus
  siRNA target sequence for 4930503L19Rik (NM_172967.1,1066-1084).
gagcaagaataatatagtt

SEQ ID NO: 781882 - DNA, 19 bp, Mus musculus
  siRNA target sequence for 4930503L19Rik (NM_172967.1,1134-1152).
gaaccccaaaacctattaa

SEQ ID NO: 781883 - DNA, 19 bp, Mus musculus
  siRNA target sequence for 4930503L19Rik (NM_172967.1,1145-1163).
cctattaacagagaaaata

SEQ ID NO: 781884 - DNA, 19 bp, Mus musculus
  siRNA target sequence for 4930503L19Rik (NM_172967.1,1167-1185).
gtgtttcggaatcatcttt

SEQ ID NO: 781885 - DNA, 19 bp, Mus musculus
  siRNA target sequence for 4930503L19Rik (NM_172967.1,1283-1301).
gtctcaggggtaactagta

SEQ ID NO: 781886 - DNA, 19 bp, Mus musculus
  siRNA target sequence for 4930503L19Rik (NM_172967.1,1285-1303).
ctcaggggtaactagtata

SEQ ID NO: 781887 - DNA, 19 bp, Mus musculus
  siRNA target sequence for 4930503L19Rik (NM_172967.1,1296-1314).
ctagtatacctgacgttaa

SEQ ID NO: 781888 - DNA, 19 bp, Mus musculus
  siRNA target sequence for 4930503L19Rik (NM_172967.1,1304-1322).
cctgacgttaagtatccaa

SEQ ID NO: 781889 - DNA, 19 bp, Mus musculus
  siRNA target sequence for 4930503L19Rik (NM_172967.1,1305-1323).
ctgacgttaagtatccaat

SEQ ID NO: 781890 - DNA, 19 bp, Mus musculus
  siRNA target sequence for 4930503L19Rik (NM_172967.1,1307-1325).
gacgttaagtatccaattt

SEQ ID NO: 781891 - DNA, 19 bp, Mus musculus
  siRNA target sequence for 4930503L19Rik (NM_172967.1,1320-1338).
caatttggctccataatca

SEQ ID NO: 781892 - DNA, 19 bp, Mus musculus
  siRNA target sequence for 4930503L19Rik (NM_172967.1,1326-1344).
ggctccataatcaagactt

SEQ ID NO: 781893 - DNA, 19 bp, Mus musculus
  siRNA target sequence for 4930503L19Rik (NM_172967.1,1371-1389).
gttataaattacttaacga

SEQ ID NO: 781894 - DNA, 19 bp, Mus musculus
  siRNA target sequence for 4930503L19Rik (NM_172967.1,1394-1412).
gaatatcgccctatacata

SEQ ID NO: 781895 - DNA, 19 bp, Mus musculus
  siRNA target sequence for 4930503L19Rik (NM_172967.1,1505-1523).
gagtatgaaggattaggta

SEQ ID NO: 781896 - DNA, 19 bp, Mus musculus
  siRNA target sequence for 4930503L19Rik (NM_172967.1,1507-1525).
gtatgaaggattaggtaat

SEQ ID NO: 781897 - DNA, 19 bp, Mus musculus
  siRNA target sequence for 4930503L19Rik (NM_172967.1,1511-1529).
gaaggattaggtaatgaat

SEQ ID NO: 781898 - DNA, 19 bp, Mus musculus
  siRNA target sequence for 4930503L19Rik (NM_172967.1,1521-1539).
gtaatgaatttaaatgtca

SEQ ID NO: 781899 - DNA, 19 bp, Mus musculus
  siRNA target sequence for 4930503L19Rik (NM_172967.1,1589-1607).
gacaaaattgagttgctta

SEQ ID NO: 781900 - DNA, 19 bp, Mus musculus
  siRNA target sequence for 4930503L19Rik (NM_172967.1,1683-1701).
gctccttagataaacttga

SEQ ID NO: 781901 - DNA, 19 bp, Mus musculus
  siRNA target sequence for 4930503L19Rik (NM_172967.1,1684-1702).
ctccttagataaacttgaa

SEQ ID NO: 781902 - DNA, 19 bp, Mus musculus
  siRNA target sequence for 4930503L19Rik (NM_172967.1,1766-1784).
gacagtcctcaacaaagtt

SEQ ID NO: 781903 - DNA, 19 bp, Mus musculus
  siRNA target sequence for 4930503L19Rik (NM_172967.1,1782-1800).
gttccaggacacaatgtgt

SEQ ID NO: 781904 - DNA, 19 bp, Mus musculus
  siRNA target sequence for 4930503L19Rik (NM_172967.1,1797-1815).
gtgtgaatgcgtttcttga

SEQ ID NO: 781905 - DNA, 19 bp, Mus musculus
  siRNA target sequence for 4930503L19Rik (NM_172967.1,1805-1823).
gcgtttcttgaggactttt

SEQ ID NO: 781906 - DNA, 19 bp, Mus musculus
  siRNA target sequence for 4930503L19Rik (NM_172967.1,1806-1824).
cgtttcttgaggacttttt

SEQ ID NO: 781907 - DNA, 19 bp, Mus musculus
  siRNA target sequence for 4930503L19Rik (NM_172967.1,1916-1934).
gtacaggaaagttttaata

SEQ ID NO: 781908 - DNA, 19 bp, Mus musculus
  siRNA target sequence for 4930503L19Rik (NM_172967.1,1919-1937).
caggaaagttttaataaga

SEQ ID NO: 781909 - DNA, 19 bp, Mus musculus
  siRNA target sequence for 4930503L19Rik (NM_172967.1,1981-1999).
ggatgatttggctaaatta

SEQ ID NO: 781910 - DNA, 19 bp, Mus musculus
  siRNA target sequence for 4930503L19Rik (NM_172967.1,1985-2003).
gatttggctaaattacaga

SEQ ID NO: 781911 - DNA, 19 bp, Mus musculus
  siRNA target sequence for 4930503L19Rik (NM_172967.1,2009-2027).
gaaaatatgatgcctatta

SEQ ID NO: 781912 - DNA, 19 bp, Mus musculus
  siRNA target sequence for 4930503L19Rik (NM_172967.1,2039-2057).
cacaaggccttacaacatt

SEQ ID NO: 781913 - DNA, 19 bp, Mus musculus
  siRNA target sequence for Inpp4a (NM_172971.1,1426-1444).
cttcgaatgcatcaaatga

SEQ ID NO: 781914 - DNA, 19 bp, Mus musculus
  siRNA target sequence for Inpp4a (NM_172971.1,1624-1642).
cgtccttacaagaagttat

SEQ ID NO: 781915 - DNA, 19 bp, Mus musculus
  siRNA target sequence for Inpp4a (NM_172971.1,1628-1646).
cttacaagaagttatcaat

SEQ ID NO: 781916 - DNA, 19 bp, Mus musculus
  siRNA target sequence for Inpp4a (NM_172971.1,1652-1670).
gagcttggtgcggttaaat

SEQ ID NO: 781917 - DNA, 19 bp, Mus musculus
  siRNA target sequence for Inpp4a (NM_172971.1,1998-2016).
gtcacccagaagaacttga

SEQ ID NO: 781918 - DNA, 19 bp, Mus musculus
  siRNA target sequence for Inpp4a (NM_172971.1,2025-2043).
gtgcccatccgagacttaa

SEQ ID NO: 781919 - DNA, 19 bp, Mus musculus
  siRNA target sequence for Inpp4a (NM_172971.1,2083-2101).
ctctaagccccaatctact

SEQ ID NO: 781920 - DNA, 19 bp, Mus musculus
  siRNA target sequence for Inpp4a (NM_172971.1,2089-2107).
gccccaatctactgattgt

SEQ ID NO: 781921 - DNA, 19 bp, Mus musculus
  siRNA target sequence for Cops7b (NM_172974.1,182-200).
cctcttggagcagttcatt

SEQ ID NO: 781922 - DNA, 19 bp, Mus musculus
  siRNA target sequence for Cops7b (NM_172974.1,183-201).
ctcttggagcagttcattt

SEQ ID NO: 781923 - DNA, 19 bp, Mus musculus
  siRNA target sequence for Cops7b (NM_172974.1,260-278).
ggctcctggagtttatgtt

SEQ ID NO: 781924 - DNA, 19 bp, Mus musculus
  siRNA target sequence for Cops7b (NM_172974.1,328-346).
ctaatgctgcgtatttgca

SEQ ID NO: 781925 - DNA, 19 bp, Mus musculus
  siRNA target sequence for Cops7b (NM_172974.1,369-387).
ggtacatacccggattaca

SEQ ID NO: 781926 - DNA, 19 bp, Mus musculus
  siRNA target sequence for Cops7b (NM_172974.1,370-388).
gtacatacccggattacat

SEQ ID NO: 781927 - DNA, 19 bp, Mus musculus
  siRNA target sequence for Cops7b (NM_172974.1,418-436).
gtgtggctcagcagaacaa

SEQ ID NO: 781928 - DNA, 19 bp, Mus musculus
  siRNA target sequence for Cops7b (NM_172974.1,455-473).
cgtgagcttggcatcaaga

SEQ ID NO: 781929 - DNA, 19 bp, Mus musculus
  siRNA target sequence for Cops7b (NM_172974.1,465-483).
gcatcaagaatgaagtgta

SEQ ID NO: 781930 - DNA, 19 bp, Mus musculus
  siRNA target sequence for Cops7b (NM_172974.1,529-547).
gggaactagaagaccttat

SEQ ID NO: 781931 - DNA, 19 bp, Mus musculus
  siRNA target sequence for Cops7b (NM_172974.1,531-549).
gaactagaagaccttatca

SEQ ID NO: 781932 - DNA, 19 bp, Mus musculus
  siRNA target sequence for Cops7b (NM_172974.1,633-651).
gacatccggaagaaagata

SEQ ID NO: 781933 - DNA, 19 bp, Mus musculus
  siRNA target sequence for Cops7b (NM_172974.1,783-801).
gccgaggttagcaacatta

SEQ ID NO: 781934 - DNA, 19 bp, Mus musculus
  siRNA target sequence for Cops7b (NM_172974.1,784-802).
ccgaggttagcaacattaa

SEQ ID NO: 781935 - DNA, 19 bp, Mus musculus
  siRNA target sequence for Cops7b (NM_172974.1,892-910).
ggcaacccactaagaagat

SEQ ID NO: 781936 - DNA, 19 bp, Mus musculus
  siRNA target sequence for AI426938 (NM_172977.1,215-233).
ctgccgtgaagctgcaata

SEQ ID NO: 781937 - DNA, 19 bp, Mus musculus
  siRNA target sequence for AI426938 (NM_172977.1,307-325).
gccgtgctggagcttatct

SEQ ID NO: 781938 - DNA, 19 bp, Mus musculus
  siRNA target sequence for AI426938 (NM_172977.1,424-442).
gttgctgagtgcaaggaaa

SEQ ID NO: 781939 - DNA, 19 bp, Mus musculus
  siRNA target sequence for AI426938 (NM_172977.1,467-485).
ccatcagccagactttcat

SEQ ID NO: 781940 - DNA, 19 bp, Mus musculus
  siRNA target sequence for AI426938 (NM_172977.1,524-542).
ccccaatgcggggtttcaa

SEQ ID NO: 781941 - DNA, 19 bp, Mus musculus
  siRNA target sequence for AI426938 (NM_172977.1,525-543).
cccaatgcggggtttcaaa

SEQ ID NO: 781942 - DNA, 19 bp, Mus musculus
  siRNA target sequence for AI426938 (NM_172977.1,532-550).
cggggtttcaaatacacta

SEQ ID NO: 781943 - DNA, 19 bp, Mus musculus
  siRNA target sequence for AI426938 (NM_172977.1,560-578).
caatgggttgtgatgcaaa

SEQ ID NO: 781944 - DNA, 19 bp, Mus musculus
  siRNA target sequence for AI426938 (NM_172977.1,685-703).
ggagaccgtctttatgaga

SEQ ID NO: 781945 - DNA, 19 bp, Mus musculus
  siRNA target sequence for AI426938 (NM_172977.1,692-710).
gtctttatgagactagtta

SEQ ID NO: 781946 - DNA, 19 bp, Mus musculus
  siRNA target sequence for AI426938 (NM_172977.1,694-712).
ctttatgagactagttata

SEQ ID NO: 781947 - DNA, 19 bp, Mus musculus
  siRNA target sequence for AI426938 (NM_172977.1,704-722).
ctagttatagactgtctaa

SEQ ID NO: 781948 - DNA, 19 bp, Mus musculus
  siRNA target sequence for AI426938 (NM_172977.1,749-767).
gggattttgctgagtttca

SEQ ID NO: 781949 - DNA, 19 bp, Mus musculus
  siRNA target sequence for AI426938 (NM_172977.1,801-819).
ggaatggtcgagtatctgt

SEQ ID NO: 781950 - DNA, 19 bp, Mus musculus
  siRNA target sequence for AI426938 (NM_172977.1,802-820).
gaatggtcgagtatctgta

SEQ ID NO: 781951 - DNA, 19 bp, Mus musculus
  siRNA target sequence for AI426938 (NM_172977.1,874-892).
ctggctgtcctctttgaga

SEQ ID NO: 781952 - DNA, 19 bp, Mus musculus
  siRNA target sequence for AI426938 (NM_172977.1,885-903).
ctttgagaacgggaatata

SEQ ID NO: 781953 - DNA, 19 bp, Mus musculus
  siRNA target sequence for AI426938 (NM_172977.1,948-966).
ctcttcatgcaacactatt

SEQ ID NO: 781954 - DNA, 19 bp, Mus musculus
  siRNA target sequence for AI426938 (NM_172977.1,1004-1022).
gggaatatgagcacaataa

SEQ ID NO: 781955 - DNA, 19 bp, Mus musculus
  siRNA target sequence for AI426938 (NM_172977.1,1005-1023).
ggaatatgagcacaataat

SEQ ID NO: 781956 - DNA, 19 bp, Mus musculus
  siRNA target sequence for AI426938 (NM_172977.1,1006-1024).
gaatatgagcacaataata

SEQ ID NO: 781957 - DNA, 19 bp, Mus musculus
  siRNA target sequence for AI426938 (NM_172977.1,1052-1070).
gtgcttttggacctgtaaa

SEQ ID NO: 781958 - DNA, 19 bp, Mus musculus
  siRNA target sequence for AI426938 (NM_172977.1,1096-1114).
gtgaaaggctactttactt

SEQ ID NO: 781959 - DNA, 19 bp, Mus musculus
  siRNA target sequence for AI426938 (NM_172977.1,1098-1116).
gaaaggctactttacttta

SEQ ID NO: 781960 - DNA, 19 bp, Mus musculus
  siRNA target sequence for AI426938 (NM_172977.1,1189-1207).
cacccctaccagaagtgta

SEQ ID NO: 781961 - DNA, 19 bp, Mus musculus
  siRNA target sequence for AI426938 (NM_172977.1,1234-1252).
ggctcctatgtgttttggt

SEQ ID NO: 781962 - DNA, 19 bp, Mus musculus
  siRNA target sequence for AI426938 (NM_172977.1,1269-1287).
caaggcaggtctgaatgtt

SEQ ID NO: 781963 - DNA, 19 bp, Mus musculus
  siRNA target sequence for AI426938 (NM_172977.1,1274-1292).
caggtctgaatgttcacaa

SEQ ID NO: 781964 - DNA, 19 bp, Mus musculus
  siRNA target sequence for AI426938 (NM_172977.1,1320-1338).
gcccatcgtctccattact

SEQ ID NO: 781965 - DNA, 19 bp, Mus musculus
  siRNA target sequence for AI426938 (NM_172977.1,1362-1380).
gtacacctgctctagtgat

SEQ ID NO: 781966 - DNA, 19 bp, Mus musculus
  siRNA target sequence for AI426938 (NM_172977.1,1383-1401).
gaaggtgaggcagttgatt

SEQ ID NO: 781967 - DNA, 19 bp, Mus musculus
  siRNA target sequence for AI426938 (NM_172977.1,1391-1409).
ggcagttgattcccatttt

SEQ ID NO: 781968 - DNA, 19 bp, Mus musculus
  siRNA target sequence for AI426938 (NM_172977.1,1507-1525).
gcttatctggccatcatca

SEQ ID NO: 781969 - DNA, 19 bp, Mus musculus
  siRNA target sequence for AI426938 (NM_172977.1,1546-1564).
ggcctccatcctgtgaata

SEQ ID NO: 781970 - DNA, 19 bp, Mus musculus
  siRNA target sequence for AI426938 (NM_172977.1,1631-1649).
cttcagttcagaatctctt

SEQ ID NO: 781971 - DNA, 19 bp, Mus musculus
  siRNA target sequence for AI426938 (NM_172977.1,1671-1689).
cctggtccgctggaaaatt

SEQ ID NO: 781972 - DNA, 19 bp, Mus musculus
  siRNA target sequence for AI426938 (NM_172977.1,1672-1690).
ctggtccgctggaaaattt

SEQ ID NO: 781973 - DNA, 19 bp, Mus musculus
  siRNA target sequence for AI426938 (NM_172977.1,1674-1692).
ggtccgctggaaaatttta

SEQ ID NO: 781974 - DNA, 19 bp, Mus musculus
  siRNA target sequence for AI426938 (NM_172977.1,1675-1693).
gtccgctggaaaattttaa

SEQ ID NO: 781975 - DNA, 19 bp, Mus musculus
  siRNA target sequence for AI426938 (NM_172977.1,1677-1695).
ccgctggaaaattttaaaa

SEQ ID NO: 781976 - DNA, 19 bp, Mus musculus
  siRNA target sequence for AI426938 (NM_172977.1,1769-1787).
ggcgttttaagcttttcct

SEQ ID NO: 781977 - DNA, 19 bp, Mus musculus
  siRNA target sequence for AI426938 (NM_172977.1,1770-1788).
gcgttttaagcttttcctt

SEQ ID NO: 781978 - DNA, 19 bp, Mus musculus
  siRNA target sequence for AI426938 (NM_172977.1,1785-1803).
ccttctaaggattttgtat

SEQ ID NO: 781979 - DNA, 19 bp, Mus musculus
  siRNA target sequence for AI426938 (NM_172977.1,1789-1807).
ctaaggattttgtatcagt

SEQ ID NO: 781980 - DNA, 19 bp, Mus musculus
  siRNA target sequence for AI426938 (NM_172977.1,1793-1811).
ggattttgtatcagtcaat

SEQ ID NO: 781981 - DNA, 19 bp, Mus musculus
  siRNA target sequence for AI426938 (NM_172977.1,2114-2132).
gggtcctgggagaagtgta

SEQ ID NO: 781982 - DNA, 19 bp, Mus musculus
  siRNA target sequence for AI426938 (NM_172977.1,2240-2258).
gacatatctccaagaagat

SEQ ID NO: 781983 - DNA, 19 bp, Mus musculus
  siRNA target sequence for AI426938 (NM_172977.1,2294-2312).
gtaaggagatcttaccatt

SEQ ID NO: 781984 - DNA, 19 bp, Mus musculus
  siRNA target sequence for AI426938 (NM_172977.1,2298-2316).
ggagatcttaccattcaca

SEQ ID NO: 781985 - DNA, 19 bp, Mus musculus
  siRNA target sequence for AI426938 (NM_172977.1,2320-2338).
cgcaagcaagctgtttgtt

SEQ ID NO: 781986 - DNA, 19 bp, Mus musculus
  siRNA target sequence for AI426938 (NM_172977.1,2325-2343).
gcaagctgtttgttccaat

SEQ ID NO: 781987 - DNA, 19 bp, Mus musculus
  siRNA target sequence for AI426938 (NM_172977.1,2352-2370).
ctggctccggtgctttcta

SEQ ID NO: 781988 - DNA, 19 bp, Mus musculus
  siRNA target sequence for AI426938 (NM_172977.1,2379-2397).
gtcctgccagagcttgata

SEQ ID NO: 781989 - DNA, 19 bp, Mus musculus
  siRNA target sequence for AI426938 (NM_172977.1,2381-2399).
cctgccagagcttgatata

SEQ ID NO: 781990 - DNA, 19 bp, Mus musculus
  siRNA target sequence for AI426938 (NM_172977.1,2385-2403).
ccagagcttgatatacaga

SEQ ID NO: 781991 - DNA, 19 bp, Mus musculus
  siRNA target sequence for AI426938 (NM_172977.1,2478-2496).
gagtccttgtcctttctgt

SEQ ID NO: 781992 - DNA, 19 bp, Mus musculus
  siRNA target sequence for D730046L02Rik (NM_172979.1,146-164).
ccttagccaaaattgcatt

SEQ ID NO: 781993 - DNA, 19 bp, Mus musculus
  siRNA target sequence for D730046L02Rik (NM_172979.1,197-215).
cgaggcctcagaaacaaaa

SEQ ID NO: 781994 - DNA, 19 bp, Mus musculus
  siRNA target sequence for D730046L02Rik (NM_172979.1,233-251).
ctcagcacactatagaaga

SEQ ID NO: 781995 - DNA, 19 bp, Mus musculus
  siRNA target sequence for D730046L02Rik (NM_172979.1,240-258).
cactatagaagatgtgaaa

SEQ ID NO: 781996 - DNA, 19 bp, Mus musculus
  siRNA target sequence for D730046L02Rik (NM_172979.1,320-338).
gtgatatctccaatctcat

SEQ ID NO: 781997 - DNA, 19 bp, Mus musculus
  siRNA target sequence for D730046L02Rik (NM_172979.1,344-362).
caactccttctcctttgaa

SEQ ID NO: 781998 - DNA, 19 bp, Mus musculus
  siRNA target sequence for D730046L02Rik (NM_172979.1,437-455).
cctcctccacatattctgt

SEQ ID NO: 781999 - DNA, 19 bp, Mus musculus
  siRNA target sequence for D730046L02Rik (NM_172979.1,528-546).
ggtctccgaacattccaat

SEQ ID NO: 782000 - DNA, 19 bp, Mus musculus
  siRNA target sequence for D730046L02Rik (NM_172979.1,529-547).
gtctccgaacattccaatt

SEQ ID NO: 782001 - DNA, 19 bp, Mus musculus
  siRNA target sequence for D730046L02Rik (NM_172979.1,531-549).
ctccgaacattccaattct

SEQ ID NO: 782002 - DNA, 19 bp, Mus musculus
  siRNA target sequence for D730046L02Rik (NM_172979.1,534-552).
cgaacattccaattctaca

SEQ ID NO: 782003 - DNA, 19 bp, Mus musculus
  siRNA target sequence for D730046L02Rik (NM_172979.1,535-553).
gaacattccaattctacaa

SEQ ID NO: 782004 - DNA, 19 bp, Mus musculus
  siRNA target sequence for D730046L02Rik (NM_172979.1,584-602).
ctttggacaatgacacaat

SEQ ID NO: 782005 - DNA, 19 bp, Mus musculus
  siRNA target sequence for D730046L02Rik (NM_172979.1,603-621).
gaacagtcctgaagatatt

SEQ ID NO: 782006 - DNA, 19 bp, Mus musculus
  siRNA target sequence for D730046L02Rik (NM_172979.1,616-634).
gatatttccactacagtaa

SEQ ID NO: 782007 - DNA, 19 bp, Mus musculus
  siRNA target sequence for D730046L02Rik (NM_172979.1,700-718).
ctccccacaaacaatgaca

SEQ ID NO: 782008 - DNA, 19 bp, Mus musculus
  siRNA target sequence for D730046L02Rik (NM_172979.1,715-733).
gacaactttgctggtttta

SEQ ID NO: 782009 - DNA, 19 bp, Mus musculus
  siRNA target sequence for D730046L02Rik (NM_172979.1,728-746).
gttttaccccgtatcaaga

SEQ ID NO: 782010 - DNA, 19 bp, Mus musculus
  siRNA target sequence for D730046L02Rik (NM_172979.1,777-795).
caccaataattcaaaactt

SEQ ID NO: 782011 - DNA, 19 bp, Mus musculus
  siRNA target sequence for D730046L02Rik (NM_172979.1,779-797).
ccaataattcaaaactttt

SEQ ID NO: 782012 - DNA, 19 bp, Mus musculus
  siRNA target sequence for D730046L02Rik (NM_172979.1,970-988).
ccagttctgcgattagaca

SEQ ID NO: 782013 - DNA, 19 bp, Mus musculus
  siRNA target sequence for D730046L02Rik (NM_172979.1,971-989).
cagttctgcgattagacaa

SEQ ID NO: 782014 - DNA, 19 bp, Mus musculus
  siRNA target sequence for D730046L02Rik (NM_172979.1,987-1005).
caatgcaccagaaccttat

SEQ ID NO: 782015 - DNA, 19 bp, Mus musculus
  siRNA target sequence for D730046L02Rik (NM_172979.1,1006-1024).
gatgtcaattttggaaatt

SEQ ID NO: 782016 - DNA, 19 bp, Mus musculus
  siRNA target sequence for D730046L02Rik (NM_172979.1,1009-1027).
gtcaattttggaaattcta

SEQ ID NO: 782017 - DNA, 19 bp, Mus musculus
  siRNA target sequence for D730046L02Rik (NM_172979.1,1114-1132).
ccacttcgcccctcaatat

SEQ ID NO: 782018 - DNA, 19 bp, Mus musculus
  siRNA target sequence for AI836810 (NM_172988.1,326-344).
gttctgaccatgttttatt

SEQ ID NO: 782019 - DNA, 19 bp, Mus musculus
  siRNA target sequence for AI836810 (NM_172988.1,446-464).
gaggtggtccagtatgcta

SEQ ID NO: 782020 - DNA, 19 bp, Mus musculus
  siRNA target sequence for AI836810 (NM_172988.1,500-518).
gagaacagtatgtcctata

SEQ ID NO: 782021 - DNA, 19 bp, Mus musculus
  siRNA target sequence for AI836810 (NM_172988.1,513-531).
cctataccatgtggaattt

SEQ ID NO: 782022 - DNA, 19 bp, Mus musculus
  siRNA target sequence for AI836810 (NM_172988.1,571-589).
cacgcagacggctgtgttt

SEQ ID NO: 782023 - DNA, 19 bp, Mus musculus
  siRNA target sequence for AI836810 (NM_172988.1,575-593).
cagacggctgtgtttcgaa

SEQ ID NO: 782024 - DNA, 19 bp, Mus musculus
  siRNA target sequence for AI836810 (NM_172988.1,579-597).
cggctgtgtttcgaactta

SEQ ID NO: 782025 - DNA, 19 bp, Mus musculus
  siRNA target sequence for AI836810 (NM_172988.1,825-843).
ggtcagagagacctatgaa

SEQ ID NO: 782026 - DNA, 19 bp, Mus musculus
  siRNA target sequence for AI836810 (NM_172988.1,856-874).
ccaggctcgtcagtttaaa

SEQ ID NO: 782027 - DNA, 19 bp, Mus musculus
  siRNA target sequence for AI836810 (NM_172988.1,859-877).
ggctcgtcagtttaaacct

SEQ ID NO: 782028 - DNA, 19 bp, Mus musculus
  siRNA target sequence for AI836810 (NM_172988.1,864-882).
gtcagtttaaaccttgtat

SEQ ID NO: 782029 - DNA, 19 bp, Mus musculus
  siRNA target sequence for AI836810 (NM_172988.1,866-884).
cagtttaaaccttgtatta

SEQ ID NO: 782030 - DNA, 19 bp, Mus musculus
  siRNA target sequence for AI836810 (NM_172988.1,910-928).
catacgactggaagtcaat

SEQ ID NO: 782031 - DNA, 19 bp, Mus musculus
  siRNA target sequence for AI836810 (NM_172988.1,914-932).
cgactggaagtcaatagtt

SEQ ID NO: 782032 - DNA, 19 bp, Mus musculus
  siRNA target sequence for AI836810 (NM_172988.1,930-948).
gttctcttctggattatta

SEQ ID NO: 782033 - DNA, 19 bp, Mus musculus
  siRNA target sequence for AI836810 (NM_172988.1,1072-1090).
gatggatgctcttaacaaa

SEQ ID NO: 782034 - DNA, 19 bp, Mus musculus
  siRNA target sequence for AI836810 (NM_172988.1,1119-1137).
ggccacataatgggtattt

SEQ ID NO: 782035 - DNA, 19 bp, Mus musculus
  siRNA target sequence for AI836810 (NM_172988.1,1120-1138).
gccacataatgggtatttt

SEQ ID NO: 782036 - DNA, 19 bp, Mus musculus
  siRNA target sequence for AI836810 (NM_172988.1,1122-1140).
cacataatgggtattttga

SEQ ID NO: 782037 - DNA, 19 bp, Mus musculus
  siRNA target sequence for AI836810 (NM_172988.1,1187-1205).
ctaccagacctgtgtagat

SEQ ID NO: 782038 - DNA, 19 bp, Mus musculus
  siRNA target sequence for AI836810 (NM_172988.1,1242-1260).
gtgatcctctgcaatatat

SEQ ID NO: 782039 - DNA, 19 bp, Mus musculus
  siRNA target sequence for AI836810 (NM_172988.1,1337-1355).
gtccagtggcttaatctgt

SEQ ID NO: 782040 - DNA, 19 bp, Mus musculus
  siRNA target sequence for AI836810 (NM_172988.1,1392-1410).
gatttagcaggtttctaaa

SEQ ID NO: 782041 - DNA, 19 bp, Mus musculus
  siRNA target sequence for AI836810 (NM_172988.1,1411-1429).
ggtgtgtgggtctgagtta

SEQ ID NO: 782042 - DNA, 19 bp, Mus musculus
  siRNA target sequence for AI836810 (NM_172988.1,1426-1444).
gttagtacgccttgagtta

SEQ ID NO: 782043 - DNA, 19 bp, Mus musculus
  siRNA target sequence for AI836810 (NM_172988.1,1430-1448).
gtacgccttgagttatcct

SEQ ID NO: 782044 - DNA, 19 bp, Mus musculus
  siRNA target sequence for AI836810 (NM_172988.1,1449-1467).
gcagccactttcttaatga

SEQ ID NO: 782045 - DNA, 19 bp, Mus musculus
  siRNA target sequence for AI836810 (NM_172988.1,1468-1486).
cacttgcttggaggttatt

SEQ ID NO: 782046 - DNA, 19 bp, Mus musculus
  siRNA target sequence for AI836810 (NM_172988.1,1478-1496).
gaggttatttctgaaatgt

SEQ ID NO: 782047 - DNA, 19 bp, Mus musculus
  siRNA target sequence for AI836810 (NM_172988.1,1499-1517).
ccaaatctacaagacttaa

SEQ ID NO: 782048 - DNA, 19 bp, Mus musculus
  siRNA target sequence for AI836810 (NM_172988.1,1556-1574).
ggccatattgccaagttat

SEQ ID NO: 782049 - DNA, 19 bp, Mus musculus
  siRNA target sequence for AI836810 (NM_172988.1,1578-1596).
gcctcaagaggcttgttct

SEQ ID NO: 782050 - DNA, 19 bp, Mus musculus
  siRNA target sequence for AI836810 (NM_172988.1,1675-1693).
cagctgtgtgatgattgaa

SEQ ID NO: 782051 - DNA, 19 bp, Mus musculus
  siRNA target sequence for AI836810 (NM_172988.1,1680-1698).
gtgtgatgattgaagatta

SEQ ID NO: 782052 - DNA, 19 bp, Mus musculus
  siRNA target sequence for AI836810 (NM_172988.1,1903-1921).
gcagaaactctttcttaca

SEQ ID NO: 782053 - DNA, 19 bp, Mus musculus
  siRNA target sequence for AI836810 (NM_172988.1,1984-2002).
gcaactggacatattagga

SEQ ID NO: 782054 - DNA, 19 bp, Mus musculus
  siRNA target sequence for AI836810 (NM_172988.1,1990-2008).
ggacatattaggaacaaga

SEQ ID NO: 782055 - DNA, 19 bp, Mus musculus
  siRNA target sequence for AI836810 (NM_172988.1,2019-2037).
cagcatccttgagaaaact

SEQ ID NO: 782056 - DNA, 19 bp, Mus musculus
  siRNA target sequence for AI836810 (NM_172988.1,2038-2056).
cctggaatcttgcaaagat

SEQ ID NO: 782057 - DNA, 19 bp, Mus musculus
  siRNA target sequence for AI836810 (NM_172988.1,2041-2059).
ggaatcttgcaaagatctt

SEQ ID NO: 782058 - DNA, 19 bp, Mus musculus
  siRNA target sequence for AI836810 (NM_172988.1,2042-2060).
gaatcttgcaaagatcttt

SEQ ID NO: 782059 - DNA, 19 bp, Mus musculus
  siRNA target sequence for AI836810 (NM_172988.1,2066-2084).
cttgacgtgtccttctgtt

SEQ ID NO: 782060 - DNA, 19 bp, Mus musculus
  siRNA target sequence for AI836810 (NM_172988.1,2082-2100).
gttcccagattgataacaa

SEQ ID NO: 782061 - DNA, 19 bp, Mus musculus
  siRNA target sequence for AI836810 (NM_172988.1,2120-2138).
gcgagctttccgaaagtct

SEQ ID NO: 782062 - DNA, 19 bp, Mus musculus
  siRNA target sequence for AI836810 (NM_172988.1,2121-2139).
cgagctttccgaaagtctt

SEQ ID NO: 782063 - DNA, 19 bp, Mus musculus
  siRNA target sequence for AI836810 (NM_172988.1,2124-2142).
gctttccgaaagtcttcat

SEQ ID NO: 782064 - DNA, 19 bp, Mus musculus
  siRNA target sequence for AI836810 (NM_172988.1,2130-2148).
cgaaagtcttcataaagaa

SEQ ID NO: 782065 - DNA, 19 bp, Mus musculus
  siRNA target sequence for Pank4 (NM_172990.1,120-138).
gcgcttcgccattgatata

SEQ ID NO: 782066 - DNA, 19 bp, Mus musculus
  siRNA target sequence for Pank4 (NM_172990.1,123-141).
cttcgccattgatataggt

SEQ ID NO: 782067 - DNA, 19 bp, Mus musculus
  siRNA target sequence for Pank4 (NM_172990.1,170-188).
ccaccgtacagcacaaagt

SEQ ID NO: 782068 - DNA, 19 bp, Mus musculus
  siRNA target sequence for Pank4 (NM_172990.1,191-209).
ccaaagtgagatcttttga

SEQ ID NO: 782069 - DNA, 19 bp, Mus musculus
  siRNA target sequence for Pank4 (NM_172990.1,238-256).
catgagccaccctatgaga

SEQ ID NO: 782070 - DNA, 19 bp, Mus musculus
  siRNA target sequence for Pank4 (NM_172990.1,278-296).
cagctcgcctgcatttcat

SEQ ID NO: 782071 - DNA, 19 bp, Mus musculus
  siRNA target sequence for Pank4 (NM_172990.1,283-301).
cgcctgcatttcatcaagt

SEQ ID NO: 782072 - DNA, 19 bp, Mus musculus
  siRNA target sequence for Pank4 (NM_172990.1,385-403).
gggggtggagcctacaagt

SEQ ID NO: 782073 - DNA, 19 bp, Mus musculus
  siRNA target sequence for Pank4 (NM_172990.1,386-404).
ggggtggagcctacaagtt

SEQ ID NO: 782074 - DNA, 19 bp, Mus musculus
  siRNA target sequence for Pank4 (NM_172990.1,502-520).
ccgcatgaggccttcatgt

SEQ ID NO: 782075 - DNA, 19 bp, Mus musculus
  siRNA target sequence for Pank4 (NM_172990.1,503-521).
cgcatgaggccttcatgta

SEQ ID NO: 782076 - DNA, 19 bp, Mus musculus
  siRNA target sequence for Pank4 (NM_172990.1,538-556).
ccagagtttcgatttcaga

SEQ ID NO: 782077 - DNA, 19 bp, Mus musculus
  siRNA target sequence for Pank4 (NM_172990.1,543-561).
gtttcgatttcagacaaat

SEQ ID NO: 782078 - DNA, 19 bp, Mus musculus
  siRNA target sequence for Pank4 (NM_172990.1,557-575).
caaatcaccccaacatctt

SEQ ID NO: 782079 - DNA, 19 bp, Mus musculus
  siRNA target sequence for Pank4 (NM_172990.1,959-977).
gcttggacagggtctactt

SEQ ID NO: 782080 - DNA, 19 bp, Mus musculus
  siRNA target sequence for Pank4 (NM_172990.1,1019-1037).
caatcacctacagcattaa

SEQ ID NO: 782081 - DNA, 19 bp, Mus musculus
  siRNA target sequence for Pank4 (NM_172990.1,1025-1043).
cctacagcattaacttctt

SEQ ID NO: 782082 - DNA, 19 bp, Mus musculus
  siRNA target sequence for Pank4 (NM_172990.1,1120-1138).
gccgagcaagacaatccta

SEQ ID NO: 782083 - DNA, 19 bp, Mus musculus
  siRNA target sequence for Pank4 (NM_172990.1,1121-1139).
ccgagcaagacaatcctaa

SEQ ID NO: 782084 - DNA, 19 bp, Mus musculus
  siRNA target sequence for Pank4 (NM_172990.1,1218-1236).
ggcaaggagcggcacattt

SEQ ID NO: 782085 - DNA, 19 bp, Mus musculus
  siRNA target sequence for Pank4 (NM_172990.1,1491-1509).
gcaccagccctttgcttat

SEQ ID NO: 782086 - DNA, 19 bp, Mus musculus
  siRNA target sequence for Pank4 (NM_172990.1,1541-1559).
caagagaacactgtttgaa

SEQ ID NO: 782087 - DNA, 19 bp, Mus musculus
  siRNA target sequence for Pank4 (NM_172990.1,1609-1627).
ggcctcgcactaaaatgct

SEQ ID NO: 782088 - DNA, 19 bp, Mus musculus
  siRNA target sequence for Pank4 (NM_172990.1,1610-1628).
gcctcgcactaaaatgctt

SEQ ID NO: 782089 - DNA, 19 bp, Mus musculus
  siRNA target sequence for Pank4 (NM_172990.1,1696-1714).
ctcttagctgggaatgtct

SEQ ID NO: 782090 - DNA, 19 bp, Mus musculus
  siRNA target sequence for Pank4 (NM_172990.1,1758-1776).
cccccagtttgggtttgaa

SEQ ID NO: 782091 - DNA, 19 bp, Mus musculus
  siRNA target sequence for Pank4 (NM_172990.1,1805-1823).
cctggctcgtggattccta

SEQ ID NO: 782092 - DNA, 19 bp, Mus musculus
  siRNA target sequence for Pank4 (NM_172990.1,1856-1874).
ctcataaatgtgccttaat

SEQ ID NO: 782093 - DNA, 19 bp, Mus musculus
  siRNA target sequence for Pank4 (NM_172990.1,1868-1886).
ccttaattttcgcagataa

SEQ ID NO: 782094 - DNA, 19 bp, Mus musculus
  siRNA target sequence for Pank4 (NM_172990.1,1878-1896).
cgcagataacagtggaata

SEQ ID NO: 782095 - DNA, 19 bp, Mus musculus
  siRNA target sequence for Pank4 (NM_172990.1,1880-1898).
cagataacagtggaataga

SEQ ID NO: 782096 - DNA, 19 bp, Mus musculus
  siRNA target sequence for Pank4 (NM_172990.1,1882-1900).
gataacagtggaatagaca

SEQ ID NO: 782097 - DNA, 19 bp, Mus musculus
  siRNA target sequence for Pank4 (NM_172990.1,1889-1907).
gtggaatagacatcatttt

SEQ ID NO: 782098 - DNA, 19 bp, Mus musculus
  siRNA target sequence for Pank4 (NM_172990.1,1924-1942).
gtcagggagctactcttta

SEQ ID NO: 782099 - DNA, 19 bp, Mus musculus
  siRNA target sequence for C030048B08Rik (NM_172991.2,439-457).
cggtcaaggtatatacaat

SEQ ID NO: 782100 - DNA, 19 bp, Mus musculus
  siRNA target sequence for C030048B08Rik (NM_172991.2,543-561).
ggtgcgattgaacagtata

SEQ ID NO: 782101 - DNA, 19 bp, Mus musculus
  siRNA target sequence for C030048B08Rik (NM_172991.2,544-562).
gtgcgattgaacagtataa

SEQ ID NO: 782102 - DNA, 19 bp, Mus musculus
  siRNA target sequence for C030048B08Rik (NM_172991.2,557-575).
gtataacgctctagatgaa

SEQ ID NO: 782103 - DNA, 19 bp, Mus musculus
  siRNA target sequence for C030048B08Rik (NM_172991.2,573-591).
gaatacccagcggaagatt

SEQ ID NO: 782104 - DNA, 19 bp, Mus musculus
  siRNA target sequence for C030048B08Rik (NM_172991.2,631-649).
gtgcaagggtagctaagaa

SEQ ID NO: 782105 - DNA, 19 bp, Mus musculus
  siRNA target sequence for C030048B08Rik (NM_172991.2,692-710).
gtgctacgctccagaattt

SEQ ID NO: 782106 - DNA, 19 bp, Mus musculus
  siRNA target sequence for C030048B08Rik (NM_172991.2,694-712).
gctacgctccagaatttga

SEQ ID NO: 782107 - DNA, 19 bp, Mus musculus
  siRNA target sequence for C030048B08Rik (NM_172991.2,752-770).
ggcttatattacaagagtt

SEQ ID NO: 782108 - DNA, 19 bp, Mus musculus
  siRNA target sequence for C030048B08Rik (NM_172991.2,753-771).
gcttatattacaagagtta

SEQ ID NO: 782109 - DNA, 19 bp, Mus musculus
  siRNA target sequence for C030048B08Rik (NM_172991.2,787-805).
gttacatggcgaagaagaa

SEQ ID NO: 782110 - DNA, 19 bp, Mus musculus
  siRNA target sequence for C030048B08Rik (NM_172991.2,858-876).
cctatgcctggatttggta

SEQ ID NO: 782111 - DNA, 19 bp, Mus musculus
  siRNA target sequence for C030048B08Rik (NM_172991.2,873-891).
ggtacagctgctttaaaca

SEQ ID NO: 782112 - DNA, 19 bp, Mus musculus
  siRNA target sequence for C030048B08Rik (NM_172991.2,993-1011).
gaacatgtggacagagtat

SEQ ID NO: 782113 - DNA, 19 bp, Mus musculus
  siRNA target sequence for C030048B08Rik (NM_172991.2,1008-1026).
gtatcagactcctgtaata

SEQ ID NO: 782114 - DNA, 19 bp, Mus musculus
  siRNA target sequence for C030048B08Rik (NM_172991.2,1252-1270).
caagcagtaacgaggtttt

SEQ ID NO: 782115 - DNA, 19 bp, Mus musculus
  siRNA target sequence for C030048B08Rik (NM_172991.2,1255-1273).
gcagtaacgaggttttgat

SEQ ID NO: 782116 - DNA, 19 bp, Mus musculus
  siRNA target sequence for C030048B08Rik (NM_172991.2,1256-1274).
cagtaacgaggttttgatt

SEQ ID NO: 782117 - DNA, 19 bp, Mus musculus
  siRNA target sequence for C030048B08Rik (NM_172991.2,1291-1309).
gtatccccacagtagatct

SEQ ID NO: 782118 - DNA, 19 bp, Mus musculus
  siRNA target sequence for C030048B08Rik (NM_172991.2,1311-1329).
caggacgactccttgaata

SEQ ID NO: 782119 - DNA, 19 bp, Mus musculus
  siRNA target sequence for C030048B08Rik (NM_172991.2,1314-1332).
gacgactccttgaatacaa

SEQ ID NO: 782120 - DNA, 19 bp, Mus musculus
  siRNA target sequence for C030048B08Rik (NM_172991.2,1340-1358).
cttaattcggaggaaactt

SEQ ID NO: 782121 - DNA, 19 bp, Mus musculus
  siRNA target sequence for C030048B08Rik (NM_172991.2,1385-1403).
gcctccagaggacaatata

SEQ ID NO: 782122 - DNA, 19 bp, Mus musculus
  siRNA target sequence for C030048B08Rik (NM_172991.2,1386-1404).
cctccagaggacaatataa

SEQ ID NO: 782123 - DNA, 19 bp, Mus musculus
  siRNA target sequence for C030048B08Rik (NM_172991.2,1387-1405).
ctccagaggacaatataaa

SEQ ID NO: 782124 - DNA, 19 bp, Mus musculus
  siRNA target sequence for 1110054G21Rik (NM_172992.2,140-158).
ctatagtctggtatcagaa

SEQ ID NO: 782125 - DNA, 19 bp, Mus musculus
  siRNA target sequence for 1110054G21Rik (NM_172992.2,166-184).
ggagcctatgatcaacaaa

SEQ ID NO: 782126 - DNA, 19 bp, Mus musculus
  siRNA target sequence for 1110054G21Rik (NM_172992.2,167-185).
gagcctatgatcaacaaat

SEQ ID NO: 782127 - DNA, 19 bp, Mus musculus
  siRNA target sequence for 1110054G21Rik (NM_172992.2,211-229).
gaaatcaagggcttaagga

SEQ ID NO: 782128 - DNA, 19 bp, Mus musculus
  siRNA target sequence for 1110054G21Rik (NM_172992.2,220-238).
ggcttaaggaataaaccaa

SEQ ID NO: 782129 - DNA, 19 bp, Mus musculus
  siRNA target sequence for 1110054G21Rik (NM_172992.2,287-305).
gagggtctgcatttgctaa

SEQ ID NO: 782130 - DNA, 19 bp, Mus musculus
  siRNA target sequence for 1110054G21Rik (NM_172992.2,336-354).
gacaaggaaagggattgtt

SEQ ID NO: 782131 - DNA, 19 bp, Mus musculus
  siRNA target sequence for 1110054G21Rik (NM_172992.2,347-365).
ggattgttcgagttgtctt

SEQ ID NO: 782132 - DNA, 19 bp, Mus musculus
  siRNA target sequence for 1110054G21Rik (NM_172992.2,348-366).
gattgttcgagttgtcttt

SEQ ID NO: 782133 - DNA, 19 bp, Mus musculus
  siRNA target sequence for 1110054G21Rik (NM_172992.2,378-396).
ctcccgctggtggttacaa

SEQ ID NO: 782134 - DNA, 19 bp, Mus musculus
  siRNA target sequence for 1110054G21Rik (NM_172992.2,380-398).
cccgctggtggttacaagt

SEQ ID NO: 782135 - DNA, 19 bp, Mus musculus
  siRNA target sequence for 1110054G21Rik (NM_172992.2,381-399).
ccgctggtggttacaagta

SEQ ID NO: 782136 - DNA, 19 bp, Mus musculus
  siRNA target sequence for 1110054G21Rik (NM_172992.2,382-400).
cgctggtggttacaagtaa

SEQ ID NO: 782137 - DNA, 19 bp, Mus musculus
  siRNA target sequence for 1110054G21Rik (NM_172992.2,444-462).
ccaagttgctgcaatagta

SEQ ID NO: 782138 - DNA, 19 bp, Mus musculus
  siRNA target sequence for 1110054G21Rik (NM_172992.2,445-463).
caagttgctgcaatagtat

SEQ ID NO: 782139 - DNA, 19 bp, Mus musculus
  siRNA target sequence for 1110054G21Rik (NM_172992.2,448-466).
gttgctgcaatagtattat

SEQ ID NO: 782140 - DNA, 19 bp, Mus musculus
  siRNA target sequence for 1110054G21Rik (NM_172992.2,451-469).
gctgcaatagtattattct

SEQ ID NO: 782141 - DNA, 19 bp, Mus musculus
  siRNA target sequence for 1110054G21Rik (NM_172992.2,505-523).
gaagtgattgggccaatat

SEQ ID NO: 782142 - DNA, 19 bp, Mus musculus
  siRNA target sequence for 1110054G21Rik (NM_172992.2,545-563).
ccgtgcattgccagattgt

SEQ ID NO: 782143 - DNA, 19 bp, Mus musculus
  siRNA target sequence for 1110054G21Rik (NM_172992.2,549-567).
gcattgccagattgtttca

SEQ ID NO: 782144 - DNA, 19 bp, Mus musculus
  siRNA target sequence for 1110054G21Rik (NM_172992.2,555-573).
ccagattgtttcaacaaga

SEQ ID NO: 782145 - DNA, 19 bp, Mus musculus
  siRNA target sequence for 1110054G21Rik (NM_172992.2,607-625).
cgaagaaggaaattaagaa

SEQ ID NO: 782146 - DNA, 19 bp, Mus musculus
  siRNA target sequence for 1110054G21Rik (NM_172992.2,661-679).
ggttctagcaccacagata

SEQ ID NO: 782147 - DNA, 19 bp, Mus musculus
  siRNA target sequence for 1110054G21Rik (NM_172992.2,789-807).
ggcaaagaattcaattgat

SEQ ID NO: 782148 - DNA, 19 bp, Mus musculus
  siRNA target sequence for 1110054G21Rik (NM_172992.2,986-1004).
caaatgtctctgatgaagt

SEQ ID NO: 782149 - DNA, 19 bp, Mus musculus
  siRNA target sequence for 1110054G21Rik (NM_172992.2,1045-1063).
ggtcatgtggacagaactt

SEQ ID NO: 782150 - DNA, 19 bp, Mus musculus
  siRNA target sequence for 1110054G21Rik (NM_172992.2,1064-1082).
ctgaaagcggtcttcgaaa

SEQ ID NO: 782151 - DNA, 19 bp, Mus musculus
  siRNA target sequence for 1110054G21Rik (NM_172992.2,1066-1084).
gaaagcggtcttcgaaata

SEQ ID NO: 782152 - DNA, 19 bp, Mus musculus
  siRNA target sequence for 1110054G21Rik (NM_172992.2,1070-1088).
gcggtcttcgaaatagaaa

SEQ ID NO: 782153 - DNA, 19 bp, Mus musculus
  siRNA target sequence for 1110054G21Rik (NM_172992.2,1149-1167).
cagctctcgctgttcaagt

SEQ ID NO: 782154 - DNA, 19 bp, Mus musculus
  siRNA target sequence for 1110054G21Rik (NM_172992.2,1243-1261).
gcggaatgccgctcatctt

SEQ ID NO: 782155 - DNA, 19 bp, Mus musculus
  siRNA target sequence for 1110054G21Rik (NM_172992.2,1245-1263).
ggaatgccgctcatcttgt

SEQ ID NO: 782156 - DNA, 19 bp, Mus musculus
  siRNA target sequence for 1110054G21Rik (NM_172992.2,1246-1264).
gaatgccgctcatcttgta

SEQ ID NO: 782157 - DNA, 19 bp, Mus musculus
  siRNA target sequence for 1110054G21Rik (NM_172992.2,1281-1299).
gggaaaccctcagataaat

SEQ ID NO: 782158 - DNA, 19 bp, Mus musculus
  siRNA target sequence for 1110054G21Rik (NM_172992.2,1322-1340).
gagacgacccttttcatca

SEQ ID NO: 782159 - DNA, 19 bp, Mus musculus
  siRNA target sequence for 1110054G21Rik (NM_172992.2,1331-1349).
cttttcatcagagtcattt

SEQ ID NO: 782160 - DNA, 19 bp, Mus musculus
  siRNA target sequence for 1110054G21Rik (NM_172992.2,1364-1382).
gttcccacccaggattaga

SEQ ID NO: 782161 - DNA, 19 bp, Mus musculus
  siRNA target sequence for 1110054G21Rik (NM_172992.2,1403-1421).
gggaaggtaacgactgtaa

SEQ ID NO: 782162 - DNA, 19 bp, Mus musculus
  siRNA target sequence for 1110054G21Rik (NM_172992.2,1495-1513).
ggataccaggtatttggaa

SEQ ID NO: 782163 - DNA, 19 bp, Mus musculus
  siRNA target sequence for 1110054G21Rik (NM_172992.2,1534-1552).
ggcttgaccccatttgttt

SEQ ID NO: 782164 - DNA, 19 bp, Mus musculus
  siRNA target sequence for 1110054G21Rik (NM_172992.2,1535-1553).
gcttgaccccatttgtttt

SEQ ID NO: 782165 - DNA, 19 bp, Mus musculus
  siRNA target sequence for 1110054G21Rik (NM_172992.2,1593-1611).
ccattctgcgtcagaactt

SEQ ID NO: 782166 - DNA, 19 bp, Mus musculus
  siRNA target sequence for 1110054G21Rik (NM_172992.2,1598-1616).
ctgcgtcagaactttatgt

SEQ ID NO: 782167 - DNA, 19 bp, Mus musculus
  siRNA target sequence for 1110054G21Rik (NM_172992.2,1600-1618).
gcgtcagaactttatgtga

SEQ ID NO: 782168 - DNA, 19 bp, Mus musculus
  siRNA target sequence for 1110054G21Rik (NM_172992.2,1601-1619).
cgtcagaactttatgtgat

SEQ ID NO: 782169 - DNA, 19 bp, Mus musculus
  siRNA target sequence for 1110054G21Rik (NM_172992.2,1602-1620).
gtcagaactttatgtgatt

SEQ ID NO: 782170 - DNA, 19 bp, Mus musculus
  siRNA target sequence for 1110054G21Rik (NM_172992.2,1628-1646).
gctctaacgaagatgtcat

SEQ ID NO: 782171 - DNA, 19 bp, Mus musculus
  siRNA target sequence for 1110054G21Rik (NM_172992.2,1733-1751).
catataagcaacgattact

SEQ ID NO: 782172 - DNA, 19 bp, Mus musculus
  siRNA target sequence for 1110054G21Rik (NM_172992.2,1741-1759).
caacgattactctttgcaa

SEQ ID NO: 782173 - DNA, 19 bp, Mus musculus
  siRNA target sequence for 1110054G21Rik (NM_172992.2,1787-1805).
ggagagctcgcaaatctga

SEQ ID NO: 782174 - DNA, 19 bp, Mus musculus
  siRNA target sequence for 1110054G21Rik (NM_172992.2,1810-1828).
ccgcatttccggttgaaga

SEQ ID NO: 782175 - DNA, 19 bp, Mus musculus
  siRNA target sequence for 1110054G21Rik (NM_172992.2,1811-1829).
cgcatttccggttgaagaa

SEQ ID NO: 782176 - DNA, 19 bp, Mus musculus
  siRNA target sequence for 1110054G21Rik (NM_172992.2,1890-1908).
gcgatctgtggatgtcatt

SEQ ID NO: 782177 - DNA, 19 bp, Mus musculus
  siRNA target sequence for 1110054G21Rik (NM_172992.2,1892-1910).
gatctgtggatgtcattgt

SEQ ID NO: 782178 - DNA, 19 bp, Mus musculus
  siRNA target sequence for 1110054G21Rik (NM_172992.2,1916-1934).
cggccttcttactgacaat

SEQ ID NO: 782179 - DNA, 19 bp, Mus musculus
  siRNA target sequence for 1110054G21Rik (NM_172992.2,2046-2064).
cctgaggttcgttactctt

SEQ ID NO: 782180 - DNA, 19 bp, Mus musculus
  siRNA target sequence for 1110054G21Rik (NM_172992.2,2055-2073).
cgttactcttggatcagaa

SEQ ID NO: 782181 - DNA, 19 bp, Mus musculus
  siRNA target sequence for 1110054G21Rik (NM_172992.2,2088-2106).
cagcaatacctcaatccta

SEQ ID NO: 782182 - DNA, 19 bp, Mus musculus
  siRNA target sequence for 1110054G21Rik (NM_172992.2,2103-2121).
cctacttacggaacagata

SEQ ID NO: 782183 - DNA, 19 bp, Mus musculus
  siRNA target sequence for 1110054G21Rik (NM_172992.2,2104-2122).
ctacttacggaacagataa

SEQ ID NO: 782184 - DNA, 19 bp, Mus musculus
  siRNA target sequence for 1110054G21Rik (NM_172992.2,2116-2134).
cagataaacctctacttga

SEQ ID NO: 782185 - DNA, 19 bp, Mus musculus
  siRNA target sequence for 1110054G21Rik (NM_172992.2,2164-2182).
gagctgacccttgtgaata

SEQ ID NO: 782186 - DNA, 19 bp, Mus musculus
  siRNA target sequence for 1110054G21Rik (NM_172992.2,2187-2205).
gttaaagctggctacgaaa

SEQ ID NO: 782187 - DNA, 19 bp, Mus musculus
  siRNA target sequence for 1110054G21Rik (NM_172992.2,2223-2241).
cagtccctttaggttgtat

SEQ ID NO: 782188 - DNA, 19 bp, Mus musculus
  siRNA target sequence for 1110054G21Rik (NM_172992.2,2234-2252).
ggttgtatggacttacaat

SEQ ID NO: 782189 - DNA, 19 bp, Mus musculus
  siRNA target sequence for 1110054G21Rik (NM_172992.2,2238-2256).
gtatggacttacaatgaat

SEQ ID NO: 782190 - DNA, 19 bp, Mus musculus
  siRNA target sequence for 1110054G21Rik (NM_172992.2,2257-2275).
ccgctgctgtataacatca

SEQ ID NO: 782191 - DNA, 19 bp, Mus musculus
  siRNA target sequence for 1110054G21Rik (NM_172992.2,2341-2359).
ctgtggaagatcaaatcgt

SEQ ID NO: 782192 - DNA, 19 bp, Mus musculus
  siRNA target sequence for 2500002M11Rik (NM_172993.1,134-152).
cgtgggagctaagaataat

SEQ ID NO: 782193 - DNA, 19 bp, Mus musculus
  siRNA target sequence for 2500002M11Rik (NM_172993.1,135-153).
gtgggagctaagaataata

SEQ ID NO: 782194 - DNA, 19 bp, Mus musculus
  siRNA target sequence for 2500002M11Rik (NM_172993.1,158-176).
ccagtgctccataaaggat

SEQ ID NO: 782195 - DNA, 19 bp, Mus musculus
  siRNA target sequence for 2500002M11Rik (NM_172993.1,159-177).
cagtgctccataaaggata

SEQ ID NO: 782196 - DNA, 19 bp, Mus musculus
  siRNA target sequence for 2500002M11Rik (NM_172993.1,264-282).
gcaaccctccgaaaatcta

SEQ ID NO: 782197 - DNA, 19 bp, Mus musculus
  siRNA target sequence for 2500002M11Rik (NM_172993.1,336-354).
ggcgcaggtgaaaaggaaa

SEQ ID NO: 782198 - DNA, 19 bp, Mus musculus
  siRNA target sequence for 2500002M11Rik (NM_172993.1,337-355).
gcgcaggtgaaaaggaaaa

SEQ ID NO: 782199 - DNA, 19 bp, Mus musculus
  siRNA target sequence for 2500002M11Rik (NM_172993.1,376-394).
ggaacgtcaagcaagaaga

SEQ ID NO: 782200 - DNA, 19 bp, Mus musculus
  siRNA target sequence for 2500002M11Rik (NM_172993.1,409-427).
gcgagcttcctcaaaagaa

SEQ ID NO: 782201 - DNA, 19 bp, Mus musculus
  siRNA target sequence for 2500002M11Rik (NM_172993.1,500-518).
gaaggagccgccagtctat

SEQ ID NO: 782202 - DNA, 19 bp, Mus musculus
  siRNA target sequence for 2500002M11Rik (NM_172993.1,611-629).
catagagggtttaaagaaa

SEQ ID NO: 782203 - DNA, 19 bp, Mus musculus
  siRNA target sequence for 2500002M11Rik (NM_172993.1,656-674).
gtttacctgccatcattgt

SEQ ID NO: 782204 - DNA, 19 bp, Mus musculus
  siRNA target sequence for 2500002M11Rik (NM_172993.1,691-709).
cactggccggaatgaagta

SEQ ID NO: 782205 - DNA, 19 bp, Mus musculus
  siRNA target sequence for 2500002M11Rik (NM_172993.1,713-731).
cgtcatggccaatcataat

SEQ ID NO: 782206 - DNA, 19 bp, Mus musculus
  siRNA target sequence for 2500002M11Rik (NM_172993.1,714-732).
gtcatggccaatcataata

SEQ ID NO: 782207 - DNA, 19 bp, Mus musculus
  siRNA target sequence for 2500002M11Rik (NM_172993.1,726-744).
cataatagtctgccaattt

SEQ ID NO: 782208 - DNA, 19 bp, Mus musculus
  siRNA target sequence for 2500002M11Rik (NM_172993.1,783-801).
gagaggctgcgaacagttt

SEQ ID NO: 782209 - DNA, 19 bp, Mus musculus
  siRNA target sequence for 2500002M11Rik (NM_172993.1,787-805).
ggctgcgaacagttttaaa

SEQ ID NO: 782210 - DNA, 19 bp, Mus musculus
  siRNA target sequence for 2500002M11Rik (NM_172993.1,856-874).
ccagcattatgggatatct

SEQ ID NO: 782211 - DNA, 19 bp, Mus musculus
  siRNA target sequence for 2500002M11Rik (NM_172993.1,867-885).
ggatatctgtaccatgtta

SEQ ID NO: 782212 - DNA, 19 bp, Mus musculus
  siRNA target sequence for 2500002M11Rik (NM_172993.1,1121-1139).
gctggcctccgctgaacta

SEQ ID NO: 782213 - DNA, 19 bp, Mus musculus
  siRNA target sequence for 2500002M11Rik (NM_172993.1,1122-1140).
ctggcctccgctgaactaa

SEQ ID NO: 782214 - DNA, 19 bp, Mus musculus
  siRNA target sequence for 2500002M11Rik (NM_172993.1,1126-1144).
cctccgctgaactaaccaa

SEQ ID NO: 782215 - DNA, 19 bp, Mus musculus
  siRNA target sequence for 2500002M11Rik (NM_172993.1,1182-1200).
cctgatgaccggaagttaa

SEQ ID NO: 782216 - DNA, 19 bp, Mus musculus
  siRNA target sequence for 2500002M11Rik (NM_172993.1,1183-1201).
ctgatgaccggaagttaaa

SEQ ID NO: 782217 - DNA, 19 bp, Mus musculus
  siRNA target sequence for 2500002M11Rik (NM_172993.1,1188-1206).
gaccggaagttaaaatata

SEQ ID NO: 782218 - DNA, 19 bp, Mus musculus
  siRNA target sequence for 2500002M11Rik (NM_172993.1,1252-1270).
ggaagacggatatcaagaa

SEQ ID NO: 782219 - DNA, 19 bp, Mus musculus
  siRNA target sequence for B830028P19Rik (NM_172998.1,886-904).
ggtcggttctggtcatctt

SEQ ID NO: 782220 - DNA, 19 bp, Mus musculus
  siRNA target sequence for B830028P19Rik (NM_172998.1,969-987).
ctctacagcagcctcatat

SEQ ID NO: 782221 - DNA, 19 bp, Mus musculus
  siRNA target sequence for B830028P19Rik (NM_172998.1,1040-1058).
ggggatcgccgactttgta

SEQ ID NO: 782222 - DNA, 19 bp, Mus musculus
  siRNA target sequence for B830028P19Rik (NM_172998.1,1042-1060).
ggatcgccgactttgtact

SEQ ID NO: 782223 - DNA, 19 bp, Mus musculus
  siRNA target sequence for B830028P19Rik (NM_172998.1,1050-1068).
gactttgtactgaagtaca

SEQ ID NO: 782224 - DNA, 19 bp, Mus musculus
  siRNA target sequence for B830028P19Rik (NM_172998.1,1109-1127).
gatcatcctggctgtcaaa

SEQ ID NO: 782225 - DNA, 19 bp, Mus musculus
  siRNA target sequence for B830028P19Rik (NM_172998.1,1334-1352).
cctttgcacctcacagaat

SEQ ID NO: 782226 - DNA, 19 bp, Mus musculus
  siRNA target sequence for B830028P19Rik (NM_172998.1,1421-1439).
gttccgagatcccatgatt

SEQ ID NO: 782227 - DNA, 19 bp, Mus musculus
  siRNA target sequence for B830028P19Rik (NM_172998.1,1566-1584).
gcacacttgcaggtgtatt

SEQ ID NO: 782228 - DNA, 19 bp, Mus musculus
  siRNA target sequence for BC003332 (NM_173002.1,2223-2241).
gagccattcaactagtcaa

SEQ ID NO: 782229 - DNA, 19 bp, Mus musculus
  siRNA target sequence for BC003332 (NM_173002.1,2226-2244).
ccattcaactagtcaagaa

SEQ ID NO: 782230 - DNA, 19 bp, Mus musculus
  siRNA target sequence for BC003332 (NM_173002.1,2594-2612).
caggtaccaggaagtacta

SEQ ID NO: 782231 - DNA, 19 bp, Mus musculus
  siRNA target sequence for BC003332 (NM_173002.1,2597-2615).
gtaccaggaagtactatca

SEQ ID NO: 782232 - DNA, 19 bp, Mus musculus
  siRNA target sequence for AI426782 (NM_173007.1,347-365).
gaagattccgtgaagtgtt

SEQ ID NO: 782233 - DNA, 19 bp, Mus musculus
  siRNA target sequence for AI426782 (NM_173007.1,388-406).
caacctgctcttttggtta

SEQ ID NO: 782234 - DNA, 19 bp, Mus musculus
  siRNA target sequence for AI426782 (NM_173007.1,442-460).
gagggactacctgaataat

SEQ ID NO: 782235 - DNA, 19 bp, Mus musculus
  siRNA target sequence for AI426782 (NM_173007.1,444-462).
gggactacctgaataatgt

SEQ ID NO: 782236 - DNA, 19 bp, Mus musculus
  siRNA target sequence for AI426782 (NM_173007.1,497-515).
gcggtcatcttaacttact

SEQ ID NO: 782237 - DNA, 19 bp, Mus musculus
  siRNA target sequence for AI426782 (NM_173007.1,498-516).
cggtcatcttaacttactt

SEQ ID NO: 782238 - DNA, 19 bp, Mus musculus
  siRNA target sequence for AI426782 (NM_173007.1,523-541).
ggttcaccccgtcatgatt

SEQ ID NO: 782239 - DNA, 19 bp, Mus musculus
  siRNA target sequence for AI426782 (NM_173007.1,568-586).
gggaatgctgggatactgt

SEQ ID NO: 782240 - DNA, 19 bp, Mus musculus
  siRNA target sequence for AI426782 (NM_173007.1,588-606).
gaacggtgaaaagaaatct

SEQ ID NO: 782241 - DNA, 19 bp, Mus musculus
  siRNA target sequence for AI426782 (NM_173007.1,630-648).
gaacgttactcgtcatctt

SEQ ID NO: 782242 - DNA, 19 bp, Mus musculus
  siRNA target sequence for AI426782 (NM_173007.1,640-658).
cgtcatcttctgtgtagaa

SEQ ID NO: 782243 - DNA, 19 bp, Mus musculus
  siRNA target sequence for AI426782 (NM_173007.1,678-696).
catacgagcaggaggttat

SEQ ID NO: 782244 - DNA, 19 bp, Mus musculus
  siRNA target sequence for AI426782 (NM_173007.1,701-719).
ccagtacagtggtcagata

SEQ ID NO: 782245 - DNA, 19 bp, Mus musculus
  siRNA target sequence for AI426782 (NM_173007.1,707-725).
cagtggtcagatatggtta

SEQ ID NO: 782246 - DNA, 19 bp, Mus musculus
  siRNA target sequence for AI426782 (NM_173007.1,711-729).
ggtcagatatggttacttt

SEQ ID NO: 782247 - DNA, 19 bp, Mus musculus
  siRNA target sequence for AI426782 (NM_173007.1,714-732).
cagatatggttactttgaa

SEQ ID NO: 782248 - DNA, 19 bp, Mus musculus
  siRNA target sequence for AI426782 (NM_173007.1,762-780).
ggtatagatggcttacaca

SEQ ID NO: 782249 - DNA, 19 bp, Mus musculus
  siRNA target sequence for AI426782 (NM_173007.1,951-969).
gttgtgggaagaagatgta

SEQ ID NO: 782250 - DNA, 19 bp, Mus musculus
  siRNA target sequence for AI426782 (NM_173007.1,987-1005).
ccaaacaattgcaagttct

SEQ ID NO: 782251 - DNA, 19 bp, Mus musculus
  siRNA target sequence for AI426782 (NM_173007.1,988-1006).
caaacaattgcaagttcta

SEQ ID NO: 782252 - DNA, 19 bp, Mus musculus
  siRNA target sequence for AI426782 (NM_173007.1,1075-1093).
ggctctgtattatgataga

SEQ ID NO: 782253 - DNA, 19 bp, Mus musculus
  siRNA target sequence for AI426782 (NM_173007.1,1107-1125).
cagaccaaatgctatctct

SEQ ID NO: 782254 - DNA, 19 bp, Mus musculus
  siRNA target sequence for AI426782 (NM_173007.1,1111-1129).
ccaaatgctatctctgaaa

SEQ ID NO: 782255 - DNA, 19 bp, Mus musculus
  siRNA target sequence for AI426782 (NM_173007.1,1118-1136).
ctatctctgaaaaatgata

SEQ ID NO: 782256 - DNA, 19 bp, Mus musculus
  siRNA target sequence for AI426782 (NM_173007.1,1144-1162).
gcacttgtcatgtcattct

SEQ ID NO: 782257 - DNA, 19 bp, Mus musculus
  siRNA target sequence for AI426782 (NM_173007.1,1155-1173).
gtcattctgtggaactgtt

SEQ ID NO: 782258 - DNA, 19 bp, Mus musculus
  siRNA target sequence for Idh2 (NM_173011.1,271-289).
gatgttcagctcaagtatt

SEQ ID NO: 782259 - DNA, 19 bp, Mus musculus
  siRNA target sequence for Idh2 (NM_173011.1,407-425).
cccgtgtggaagagttcaa

SEQ ID NO: 782260 - DNA, 19 bp, Mus musculus
  siRNA target sequence for Idh2 (NM_173011.1,493-511).
gagccaatcatctgcaaaa

SEQ ID NO: 782261 - DNA, 19 bp, Mus musculus
  siRNA target sequence for Idh2 (NM_173011.1,566-584).
cccatggcgaccagtacaa

SEQ ID NO: 782262 - DNA, 19 bp, Mus musculus
  siRNA target sequence for Idh2 (NM_173011.1,607-625).
cgagctggcacgttcaagt

SEQ ID NO: 782263 - DNA, 19 bp, Mus musculus
  siRNA target sequence for Idh2 (NM_173011.1,608-626).
gagctggcacgttcaagtt

SEQ ID NO: 782264 - DNA, 19 bp, Mus musculus
  siRNA target sequence for Idh2 (NM_173011.1,746-764).
gctgcttccagtactctat

SEQ ID NO: 782265 - DNA, 19 bp, Mus musculus
  siRNA target sequence for Idh2 (NM_173011.1,815-833).
cctatgacgggcgtttcaa

SEQ ID NO: 782266 - DNA, 19 bp, Mus musculus
  siRNA target sequence for Idh2 (NM_173011.1,885-903).
gaataagatctggtatgaa

SEQ ID NO: 782267 - DNA, 19 bp, Mus musculus
  siRNA target sequence for Idh2 (NM_173011.1,928-946).
gcccaggtgctcaagtctt

SEQ ID NO: 782268 - DNA, 19 bp, Mus musculus
  siRNA target sequence for Idh2 (NM_173011.1,958-976).
gtgtgggcttgcaaaaact

SEQ ID NO: 782269 - DNA, 19 bp, Mus musculus
  siRNA target sequence for Idh2 (NM_173011.1,960-978).
gtgggcttgcaaaaactat

SEQ ID NO: 782270 - DNA, 19 bp, Mus musculus
  siRNA target sequence for Idh2 (NM_173011.1,1146-1164).
ccctattgccagcatcttt

SEQ ID NO: 782271 - DNA, 19 bp, Mus musculus
  siRNA target sequence for D030041N04Rik (NM_173012.1,419-437).
ggccttctacagttataat

SEQ ID NO: 782272 - DNA, 19 bp, Mus musculus
  siRNA target sequence for D030041N04Rik (NM_173012.1,539-557).
cttgcgtacagcctacatt

SEQ ID NO: 782273 - DNA, 19 bp, Mus musculus
  siRNA target sequence for D030041N04Rik (NM_173012.1,542-560).
gcgtacagcctacattaaa

SEQ ID NO: 782274 - DNA, 19 bp, Mus musculus
  siRNA target sequence for D030041N04Rik (NM_173012.1,543-561).
cgtacagcctacattaaaa

SEQ ID NO: 782275 - DNA, 19 bp, Mus musculus
  siRNA target sequence for D030041N04Rik (NM_173012.1,589-607).
ccagtctaacaggcaataa

SEQ ID NO: 782276 - DNA, 19 bp, Mus musculus
  siRNA target sequence for D030041N04Rik (NM_173012.1,590-608).
cagtctaacaggcaataat

SEQ ID NO: 782277 - DNA, 19 bp, Mus musculus
  siRNA target sequence for D030041N04Rik (NM_173012.1,592-610).
gtctaacaggcaataataa

SEQ ID NO: 782278 - DNA, 19 bp, Mus musculus
  siRNA target sequence for D030041N04Rik (NM_173012.1,628-646).
ccaggctcccacaaaaact

SEQ ID NO: 782279 - DNA, 19 bp, Mus musculus
  siRNA target sequence for D030041N04Rik (NM_173012.1,655-673).
cctgctggctacaacatgt

SEQ ID NO: 782280 - DNA, 19 bp, Mus musculus
  siRNA target sequence for D030041N04Rik (NM_173012.1,722-740).
ccctcagcctaccaaagaa

SEQ ID NO: 782281 - DNA, 19 bp, Mus musculus
  siRNA target sequence for D030041N04Rik (NM_173012.1,767-785).
gcggtcgttgagacaaaaa

SEQ ID NO: 782282 - DNA, 19 bp, Mus musculus
  siRNA target sequence for D030041N04Rik (NM_173012.1,768-786).
cggtcgttgagacaaaaaa

SEQ ID NO: 782283 - DNA, 19 bp, Mus musculus
  siRNA target sequence for D030041N04Rik (NM_173012.1,770-788).
gtcgttgagacaaaaaatt

SEQ ID NO: 782284 - DNA, 19 bp, Mus musculus
  siRNA target sequence for D030041N04Rik (NM_173012.1,778-796).
gacaaaaaattgtgaatga

SEQ ID NO: 782285 - DNA, 19 bp, Mus musculus
  siRNA target sequence for D030041N04Rik (NM_173012.1,795-813).
gaacttaaatactattaca

SEQ ID NO: 782286 - DNA, 19 bp, Mus musculus
  siRNA target sequence for D030041N04Rik (NM_173012.1,842-860).
caaagtcgctgccagaata

SEQ ID NO: 782287 - DNA, 19 bp, Mus musculus
  siRNA target sequence for D030041N04Rik (NM_173012.1,846-864).
gtcgctgccagaatagtgt

SEQ ID NO: 782288 - DNA, 19 bp, Mus musculus
  siRNA target sequence for D030041N04Rik (NM_173012.1,907-925).
gaagggtaggcaagaaaca

SEQ ID NO: 782289 - DNA, 19 bp, Mus musculus
  siRNA target sequence for D030041N04Rik (NM_173012.1,910-928).
gggtaggcaagaaacagat

SEQ ID NO: 782290 - DNA, 19 bp, Mus musculus
  siRNA target sequence for 6430517J16Rik (NM_173013.1,566-584).
ggctgcagctgcgactaaa

SEQ ID NO: 782291 - DNA, 19 bp, Mus musculus
  siRNA target sequence for 6430517J16Rik (NM_173013.1,567-585).
gctgcagctgcgactaaat

SEQ ID NO: 782292 - DNA, 19 bp, Mus musculus
  siRNA target sequence for 6430517J16Rik (NM_173013.1,659-677).
catcgcccttcgagttgtt

SEQ ID NO: 782293 - DNA, 19 bp, Mus musculus
  siRNA target sequence for 6430517J16Rik (NM_173013.1,767-785).
ctgtcaacggctttacagt

SEQ ID NO: 782294 - DNA, 19 bp, Mus musculus
  siRNA target sequence for 6430517J16Rik (NM_173013.1,1266-1284).
ggttgtgcgtgtactattt

SEQ ID NO: 782295 - DNA, 19 bp, Mus musculus
  siRNA target sequence for 6430517J16Rik (NM_173013.1,1347-1365).
cctgcgcaggccagtagtt

SEQ ID NO: 782296 - DNA, 19 bp, Mus musculus
  siRNA target sequence for 6430517J16Rik (NM_173013.1,1348-1366).
ctgcgcaggccagtagtta

SEQ ID NO: 782297 - DNA, 19 bp, Mus musculus
  siRNA target sequence for 6430517J16Rik (NM_173013.1,1508-1526).
ccactcgtgaccagaagaa

SEQ ID NO: 782298 - DNA, 19 bp, Mus musculus
  siRNA target sequence for 6430517J16Rik (NM_173013.1,1521-1539).
gaagaaggacacaagatct

SEQ ID NO: 782299 - DNA, 19 bp, Mus musculus
  siRNA target sequence for 6430517J16Rik (NM_173013.1,1582-1600).
cctggtgtggtcaacacaa

SEQ ID NO: 782300 - DNA, 19 bp, Mus musculus
  siRNA target sequence for 6430517J16Rik (NM_173013.1,1596-1614).
cacaaagcctcgtgtatca

SEQ ID NO: 782301 - DNA, 19 bp, Mus musculus
  siRNA target sequence for 6430517J16Rik (NM_173013.1,1602-1620).
gcctcgtgtatcacagaat

SEQ ID NO: 782302 - DNA, 19 bp, Mus musculus
  siRNA target sequence for 6430517J16Rik (NM_173013.1,2140-2158).
gagtcactgcccacactat

SEQ ID NO: 782303 - DNA, 19 bp, Mus musculus
  siRNA target sequence for 6430517J16Rik (NM_173013.1,2142-2160).
gtcactgcccacactatct

SEQ ID NO: 782304 - DNA, 19 bp, Mus musculus
  siRNA target sequence for 6430517J16Rik (NM_173013.1,2175-2193).
gcccgtggcggattctgat

SEQ ID NO: 782305 - DNA, 19 bp, Mus musculus
  siRNA target sequence for 6430517J16Rik (NM_173013.1,2178-2196).
cgtggcggattctgatgat

SEQ ID NO: 782306 - DNA, 19 bp, Mus musculus
  siRNA target sequence for 9430073I07 (NM_173016.2,102-120).
cggaggagaccgaacaaat

SEQ ID NO: 782307 - DNA, 19 bp, Mus musculus
  siRNA target sequence for 9430073I07 (NM_173016.2,111-129).
ccgaacaaatgattgagaa

SEQ ID NO: 782308 - DNA, 19 bp, Mus musculus
  siRNA target sequence for 9430073I07 (NM_173016.2,216-234).
gcttcggcggactcaacaa

SEQ ID NO: 782309 - DNA, 19 bp, Mus musculus
  siRNA target sequence for 9430073I07 (NM_173016.2,328-346).
ggtgcgacagggcaacatt

SEQ ID NO: 782310 - DNA, 19 bp, Mus musculus
  siRNA target sequence for 9430073I07 (NM_173016.2,332-350).
cgacagggcaacattgaca

SEQ ID NO: 782311 - DNA, 19 bp, Mus musculus
  siRNA target sequence for 9430073I07 (NM_173016.2,333-351).
gacagggcaacattgacaa

SEQ ID NO: 782312 - DNA, 19 bp, Mus musculus
  siRNA target sequence for 9430073I07 (NM_173016.2,367-385).
cttggtgccaggattcgaa

SEQ ID NO: 782313 - DNA, 19 bp, Mus musculus
  siRNA target sequence for 9430073I07 (NM_173016.2,371-389).
gtgccaggattcgaatgtt

SEQ ID NO: 782314 - DNA, 19 bp, Mus musculus
  siRNA target sequence for 9430073I07 (NM_173016.2,382-400).
cgaatgttctgggattgtt

SEQ ID NO: 782315 - DNA, 19 bp, Mus musculus
  siRNA target sequence for 9430073I07 (NM_173016.2,410-428).
ggggacagcgtaaaaggat

SEQ ID NO: 782316 - DNA, 19 bp, Mus musculus
  siRNA target sequence for 9430073I07 (NM_173016.2,411-429).
gggacagcgtaaaaggata

SEQ ID NO: 782317 - DNA, 19 bp, Mus musculus
  siRNA target sequence for 9430073I07 (NM_173016.2,443-461).
cgtgtcatggcatttgtca

SEQ ID NO: 782318 - DNA, 19 bp, Mus musculus
  siRNA target sequence for 9430073I07 (NM_173016.2,444-462).
gtgtcatggcatttgtcaa

SEQ ID NO: 782319 - DNA, 19 bp, Mus musculus
  siRNA target sequence for 9430073I07 (NM_173016.2,545-563).
gctgctttccccatgaatt

SEQ ID NO: 782320 - DNA, 19 bp, Mus musculus
  siRNA target sequence for 9430073I07 (NM_173016.2,546-564).
ctgctttccccatgaattt

SEQ ID NO: 782321 - DNA, 19 bp, Mus musculus
  siRNA target sequence for 9430073I07 (NM_173016.2,577-595).
cacgatgctctttgaaatt

SEQ ID NO: 782322 - DNA, 19 bp, Mus musculus
  siRNA target sequence for 9430073I07 (NM_173016.2,751-769).
cctctttgacagaaatgca

SEQ ID NO: 782323 - DNA, 19 bp, Mus musculus
  siRNA target sequence for 9430073I07 (NM_173016.2,803-821).
gaaggcgtggacatcgttt

SEQ ID NO: 782324 - DNA, 19 bp, Mus musculus
  siRNA target sequence for 9430073I07 (NM_173016.2,807-825).
gcgtggacatcgttttgga

SEQ ID NO: 782325 - DNA, 19 bp, Mus musculus
  siRNA target sequence for 9430073I07 (NM_173016.2,875-893).
ctggggacctacattttat

SEQ ID NO: 782326 - DNA, 19 bp, Mus musculus
  siRNA target sequence for 9430073I07 (NM_173016.2,896-914).
ggttcatccaacatggtaa

SEQ ID NO: 782327 - DNA, 19 bp, Mus musculus
  siRNA target sequence for 9430073I07 (NM_173016.2,918-936).
gagagaccaagagtttctt

SEQ ID NO: 782328 - DNA, 19 bp, Mus musculus
  siRNA target sequence for 9430073I07 (NM_173016.2,922-940).
gaccaagagtttctttagt

SEQ ID NO: 782329 - DNA, 19 bp, Mus musculus
  siRNA target sequence for 9430073I07 (NM_173016.2,934-952).
ctttagttttgcaaagtca

SEQ ID NO: 782330 - DNA, 19 bp, Mus musculus
  siRNA target sequence for 9430073I07 (NM_173016.2,1014-1032).
gattctcactcctcaatct

SEQ ID NO: 782331 - DNA, 19 bp, Mus musculus
  siRNA target sequence for 9430073I07 (NM_173016.2,1181-1199).
gggaacatcgggaagttaa

SEQ ID NO: 782332 - DNA, 19 bp, Mus musculus
  siRNA target sequence for 9430073I07 (NM_173016.2,1182-1200).
ggaacatcgggaagttaat

SEQ ID NO: 782333 - DNA, 19 bp, Mus musculus
  siRNA target sequence for 9430073I07 (NM_173016.2,1183-1201).
gaacatcgggaagttaatt

SEQ ID NO: 782334 - DNA, 19 bp, Mus musculus
  siRNA target sequence for E030027L10 (NM_173022.1,97-115).
cacctgggtatcttctctt

SEQ ID NO: 782335 - DNA, 19 bp, Mus musculus
  siRNA target sequence for E030027L10 (NM_173022.1,145-163).
gaacgagaggccaacaaga

SEQ ID NO: 782336 - DNA, 19 bp, Mus musculus
  siRNA target sequence for E030027L10 (NM_173022.1,243-261).
ctacctggggcagaaacta

SEQ ID NO: 782337 - DNA, 19 bp, Mus musculus
  siRNA target sequence for E030027L10 (NM_173022.1,309-327).
cacttccctgcataacgaa

SEQ ID NO: 782338 - DNA, 19 bp, Mus musculus
  siRNA target sequence for E030027L10 (NM_173022.1,314-332).
ccctgcataacgaactgaa

SEQ ID NO: 782339 - DNA, 19 bp, Mus musculus
  siRNA target sequence for E030027L10 (NM_173022.1,446-464).
cagacttctacgagaagat

SEQ ID NO: 782340 - DNA, 19 bp, Mus musculus
  siRNA target sequence for E030027L10 (NM_173022.1,826-844).
gccaagttcagcttttact

SEQ ID NO: 782341 - DNA, 19 bp, Mus musculus
  siRNA target sequence for E030027L10 (NM_173022.1,869-887).
cgaccgcgtccgaaatgaa

SEQ ID NO: 782342 - DNA, 19 bp, Mus musculus
  siRNA target sequence for E030027L10 (NM_173022.1,870-888).
gaccgcgtccgaaatgaaa

SEQ ID NO: 782343 - DNA, 19 bp, Mus musculus
  siRNA target sequence for E030027L10 (NM_173022.1,955-973).
gctgccaacgtctccttaa

SEQ ID NO: 782344 - DNA, 19 bp, Mus musculus
  siRNA target sequence for E030027L10 (NM_173022.1,956-974).
ctgccaacgtctccttaat

SEQ ID NO: 782345 - DNA, 19 bp, Mus musculus
  siRNA target sequence for E030027L10 (NM_173022.1,959-977).
ccaacgtctccttaatttt

SEQ ID NO: 782346 - DNA, 19 bp, Mus musculus
  siRNA target sequence for E030027L10 (NM_173022.1,960-978).
caacgtctccttaattttt

SEQ ID NO: 782347 - DNA, 19 bp, Mus musculus
  siRNA target sequence for E030027L10 (NM_173022.1,1105-1123).
cactggcccaatgttatca

SEQ ID NO: 782348 - DNA, 19 bp, Mus musculus
  siRNA target sequence for E030027L10 (NM_173022.1,1109-1127).
ggcccaatgttatcatgat

SEQ ID NO: 782349 - DNA, 19 bp, Mus musculus
  siRNA target sequence for E030027L10 (NM_173022.1,1235-1253).
ccatcgtcgtcatttttga

SEQ ID NO: 782350 - DNA, 19 bp, Mus musculus
  siRNA target sequence for E030027L10 (NM_173022.1,1267-1285).
gagagagactcccatttta

SEQ ID NO: 782351 - DNA, 19 bp, Mus musculus
  siRNA target sequence for 4932415G16Rik (NM_173023.1,189-207).
ggtaaggagcgaacttact

SEQ ID NO: 782352 - DNA, 19 bp, Mus musculus
  siRNA target sequence for 4932415G16Rik (NM_173023.1,194-212).
ggagcgaacttacttttct

SEQ ID NO: 782353 - DNA, 19 bp, Mus musculus
  siRNA target sequence for 4932415G16Rik (NM_173023.1,195-213).
gagcgaacttacttttctt

SEQ ID NO: 782354 - DNA, 19 bp, Mus musculus
  siRNA target sequence for 4932415G16Rik (NM_173023.1,197-215).
gcgaacttacttttcttgt

SEQ ID NO: 782355 - DNA, 19 bp, Mus musculus
  siRNA target sequence for 4932415G16Rik (NM_173023.1,231-249).
ctcacaggtctgcatacaa

SEQ ID NO: 782356 - DNA, 19 bp, Mus musculus
  siRNA target sequence for 4932415G16Rik (NM_173023.1,235-253).
caggtctgcatacaatcaa

SEQ ID NO: 782357 - DNA, 19 bp, Mus musculus
  siRNA target sequence for 4932415G16Rik (NM_173023.1,237-255).
ggtctgcatacaatcaagt

SEQ ID NO: 782358 - DNA, 19 bp, Mus musculus
  siRNA target sequence for 4932415G16Rik (NM_173023.1,284-302).
ccgctgtttcttcagaaat

SEQ ID NO: 782359 - DNA, 19 bp, Mus musculus
  siRNA target sequence for 4932415G16Rik (NM_173023.1,351-369).
ggccttgctcccaacatga

SEQ ID NO: 782360 - DNA, 19 bp, Mus musculus
  siRNA target sequence for 4932415G16Rik (NM_173023.1,352-370).
gccttgctcccaacatgat

SEQ ID NO: 782361 - DNA, 19 bp, Mus musculus
  siRNA target sequence for 4932415G16Rik (NM_173023.1,354-372).
cttgctcccaacatgataa

SEQ ID NO: 782362 - DNA, 19 bp, Mus musculus
  siRNA target sequence for 4932415G16Rik (NM_173023.1,357-375).
gctcccaacatgataatta

SEQ ID NO: 782363 - DNA, 19 bp, Mus musculus
  siRNA target sequence for 4932415G16Rik (NM_173023.1,360-378).
cccaacatgataattacga

SEQ ID NO: 782364 - DNA, 19 bp, Mus musculus
  siRNA target sequence for 4932415G16Rik (NM_173023.1,392-410).
cggtggctactattttaaa

SEQ ID NO: 782365 - DNA, 19 bp, Mus musculus
  siRNA target sequence for 4932415G16Rik (NM_173023.1,430-448).
gtcttgagtggttaattga

SEQ ID NO: 782366 - DNA, 19 bp, Mus musculus
  siRNA target sequence for 4932415G16Rik (NM_173023.1,432-450).
cttgagtggttaattgata

SEQ ID NO: 782367 - DNA, 19 bp, Mus musculus
  siRNA target sequence for 4932415G16Rik (NM_173023.1,437-455).
gtggttaattgatattcct

SEQ ID NO: 782368 - DNA, 19 bp, Mus musculus
  siRNA target sequence for 4932415G16Rik (NM_173023.1,554-572).
gaccttattggatcttgtt

SEQ ID NO: 782369 - DNA, 19 bp, Mus musculus
  siRNA target sequence for 4932415G16Rik (NM_173023.1,600-618).
ggacgtgtgcttacagaaa

SEQ ID NO: 782370 - DNA, 19 bp, Mus musculus
  siRNA target sequence for 4932415G16Rik (NM_173023.1,601-619).
gacgtgtgcttacagaaat

SEQ ID NO: 782371 - DNA, 19 bp, Mus musculus
  siRNA target sequence for 4932415G16Rik (NM_173023.1,623-641).
ggttagagatttatatcca

SEQ ID NO: 782372 - DNA, 19 bp, Mus musculus
  siRNA target sequence for 4932415G16Rik (NM_173023.1,639-657).
ccagaagtgaacgatatca

SEQ ID NO: 782373 - DNA, 19 bp, Mus musculus
  siRNA target sequence for 4932415G16Rik (NM_173023.1,678-696).
gccaatgatgtggctttaa

SEQ ID NO: 782374 - DNA, 19 bp, Mus musculus
  siRNA target sequence for 4932415G16Rik (NM_173023.1,679-697).
ccaatgatgtggctttaat

SEQ ID NO: 782375 - DNA, 19 bp, Mus musculus
  siRNA target sequence for 4932415G16Rik (NM_173023.1,680-698).
caatgatgtggctttaata

SEQ ID NO: 782376 - DNA, 19 bp, Mus musculus
  siRNA target sequence for 4932415G16Rik (NM_173023.1,691-709).
ctttaataggctttatgat

SEQ ID NO: 782377 - DNA, 19 bp, Mus musculus
  siRNA target sequence for 4932415G16Rik (NM_173023.1,707-725).
gatgaaaccatcatctaat

SEQ ID NO: 782378 - DNA, 19 bp, Mus musculus
  siRNA target sequence for 4932415G16Rik (NM_173023.1,710-728).
gaaaccatcatctaatggt

SEQ ID NO: 782379 - DNA, 19 bp, Mus musculus
  siRNA target sequence for 4932415G16Rik (NM_173023.1,726-744).
ggtgttttcataggaaaaa

SEQ ID NO: 782380 - DNA, 19 bp, Mus musculus
  siRNA target sequence for 4932415G16Rik (NM_173023.1,754-772).
gattttggacctataagga

SEQ ID NO: 782381 - DNA, 19 bp, Mus musculus
  siRNA target sequence for 4932415G16Rik (NM_173023.1,760-778).
ggacctataaggaatgcat

SEQ ID NO: 782382 - DNA, 19 bp, Mus musculus
  siRNA target sequence for 4932415G16Rik (NM_173023.1,761-779).
gacctataaggaatgcata

SEQ ID NO: 782383 - DNA, 19 bp, Mus musculus
  siRNA target sequence for 4932415G16Rik (NM_173023.1,788-806).
cctcacagagataatctat

SEQ ID NO: 782384 - DNA, 19 bp, Mus musculus
  siRNA target sequence for 4932415G16Rik (NM_173023.1,840-858).
gtgatagatctggttttaa

SEQ ID NO: 782385 - DNA, 19 bp, Mus musculus
  siRNA target sequence for 4932415G16Rik (NM_173023.1,849-867).
ctggttttaacaaatcatt

SEQ ID NO: 782386 - DNA, 19 bp, Mus musculus
  siRNA target sequence for 4932415G16Rik (NM_173023.1,890-908).
gggtctttatgtaagtagt

SEQ ID NO: 782387 - DNA, 19 bp, Mus musculus
  siRNA target sequence for 4932415G16Rik (NM_173023.1,921-939).
ccaaccacttcacagataa

SEQ ID NO: 782388 - DNA, 19 bp, Mus musculus
  siRNA target sequence for 4932415G16Rik (NM_173023.1,925-943).
ccacttcacagataaagct

SEQ ID NO: 782389 - DNA, 19 bp, Mus musculus
  siRNA target sequence for 4932415G16Rik (NM_173023.1,942-960).
ctttccagagcagagtttt

SEQ ID NO: 782390 - DNA, 19 bp, Mus musculus
  siRNA target sequence for 4932415G16Rik (NM_173023.1,988-1006).
gaggaaatctgtggtataa

SEQ ID NO: 782391 - DNA, 19 bp, Mus musculus
  siRNA target sequence for 4932415G16Rik (NM_173023.1,1027-1045).
gagaaagttttgaagttga

SEQ ID NO: 782392 - DNA, 19 bp, Mus musculus
  siRNA target sequence for 4932415G16Rik (NM_173023.1,1054-1072).
ctatcactttcaacagaaa

SEQ ID NO: 782393 - DNA, 19 bp, Mus musculus
  siRNA target sequence for 4932415G16Rik (NM_173023.1,1138-1156).
gtgtattctctactattaa

SEQ ID NO: 782394 - DNA, 19 bp, Mus musculus
  siRNA target sequence for 4932415G16Rik (NM_173023.1,1175-1193).
gcgtgtgataacattcctt

SEQ ID NO: 782395 - DNA, 19 bp, Mus musculus
  siRNA target sequence for 4932415G16Rik (NM_173023.1,1176-1194).
cgtgtgataacattcctta

SEQ ID NO: 782396 - DNA, 19 bp, Mus musculus
  siRNA target sequence for 4932415G16Rik (NM_173023.1,1209-1227).
gacagtggaatttatcttt

SEQ ID NO: 782397 - DNA, 19 bp, Mus musculus
  siRNA target sequence for 4932415G16Rik (NM_173023.1,1213-1231).
gtggaatttatcttttcaa

SEQ ID NO: 782398 - DNA, 19 bp, Mus musculus
  siRNA target sequence for 4932415G16Rik (NM_173023.1,1252-1270).
cctatgtcactgtagctat

SEQ ID NO: 782399 - DNA, 19 bp, Mus musculus
  siRNA target sequence for 4932415G16Rik (NM_173023.1,1287-1305).
ccaagccctcgaccaaaat

SEQ ID NO: 782400 - DNA, 19 bp, Mus musculus
  siRNA target sequence for 4932415G16Rik (NM_173023.1,1293-1311).
cctcgaccaaaatttccta

SEQ ID NO: 782401 - DNA, 19 bp, Mus musculus
  siRNA target sequence for 4932415G16Rik (NM_173023.1,1297-1315).
gaccaaaatttcctagttt

SEQ ID NO: 782402 - DNA, 19 bp, Mus musculus
  siRNA target sequence for 4932415G16Rik (NM_173023.1,1336-1354).
ctcttccacttggaatgat

SEQ ID NO: 782403 - DNA, 19 bp, Mus musculus
  siRNA target sequence for 4932415G16Rik (NM_173023.1,1383-1401).
gtttatggcagtcaaatat

SEQ ID NO: 782404 - DNA, 19 bp, Mus musculus
  siRNA target sequence for 4932415G16Rik (NM_173023.1,1417-1435).
gtggcaatacttttgaaat

SEQ ID NO: 782405 - DNA, 19 bp, Mus musculus
  siRNA target sequence for 4932415G16Rik (NM_173023.1,1436-1454).
gctgtgtaacttattctca

SEQ ID NO: 782406 - DNA, 19 bp, Mus musculus
  siRNA target sequence for 4932415G16Rik (NM_173023.1,1455-1473).
caccatgtaacaaagactt

SEQ ID NO: 782407 - DNA, 19 bp, Mus musculus
  siRNA target sequence for 4932415G16Rik (NM_173023.1,1458-1476).
catgtaacaaagacttcta

SEQ ID NO: 782408 - DNA, 19 bp, Mus musculus
  siRNA target sequence for 4932415G16Rik (NM_173023.1,1532-1550).
gaccaaggcaggcttaact

SEQ ID NO: 782409 - DNA, 19 bp, Mus musculus
  siRNA target sequence for 4932415G16Rik (NM_173023.1,1538-1556).
ggcaggcttaactacatat

SEQ ID NO: 782410 - DNA, 19 bp, Mus musculus
  siRNA target sequence for 4932415G16Rik (NM_173023.1,1539-1557).
gcaggcttaactacatata

SEQ ID NO: 782411 - DNA, 19 bp, Mus musculus
  siRNA target sequence for 4932415G16Rik (NM_173023.1,1543-1561).
gcttaactacatatagtga

SEQ ID NO: 782412 - DNA, 19 bp, Mus musculus
  siRNA target sequence for 4932415G16Rik (NM_173023.1,1605-1623).
caattgggatacatacaca

SEQ ID NO: 782413 - DNA, 19 bp, Mus musculus
  siRNA target sequence for 4932415G16Rik (NM_173023.1,1659-1677).
cttttagggcatggaaatt

SEQ ID NO: 782414 - DNA, 19 bp, Mus musculus
  siRNA target sequence for 4932415G16Rik (NM_173023.1,1709-1727).
gggatttgaagctatacta

SEQ ID NO: 782415 - DNA, 19 bp, Mus musculus
  siRNA target sequence for 4932415G16Rik (NM_173023.1,1725-1743).
ctagttccacaatatatct

SEQ ID NO: 782416 - DNA, 19 bp, Mus musculus
  siRNA target sequence for 4932415G16Rik (NM_173023.1,1744-1762).
ctaccaacgaaatgtattt

SEQ ID NO: 782417 - DNA, 19 bp, Mus musculus
  siRNA target sequence for 4932415G16Rik (NM_173023.1,1747-1765).
ccaacgaaatgtatttctt

SEQ ID NO: 782418 - DNA, 19 bp, Mus musculus
  siRNA target sequence for 4932415G16Rik (NM_173023.1,1768-1786).
cacatgtacctctgactat

SEQ ID NO: 782419 - DNA, 19 bp, Mus musculus
  siRNA target sequence for 4932415G16Rik (NM_173023.1,1781-1799).
gactatgcctaccaacata

SEQ ID NO: 782420 - DNA, 19 bp, Mus musculus
  siRNA target sequence for 4932415G16Rik (NM_173023.1,1800-1818).
cagtggaaaaagagattta

SEQ ID NO: 782421 - DNA, 19 bp, Mus musculus
  siRNA target sequence for 4932415G16Rik (NM_173023.1,1858-1876).
ctggacttgctaatatcaa

SEQ ID NO: 782422 - DNA, 19 bp, Mus musculus
  siRNA target sequence for 4932415G16Rik (NM_173023.1,1860-1878).
ggacttgctaatatcaaaa

SEQ ID NO: 782423 - DNA, 19 bp, Mus musculus
  siRNA target sequence for 4932415G16Rik (NM_173023.1,1907-1925).
gggatttcagacatctatt

SEQ ID NO: 782424 - DNA, 19 bp, Mus musculus
  siRNA target sequence for 4932415G16Rik (NM_173023.1,1921-1939).
ctattcacacagaaataat

SEQ ID NO: 782425 - DNA, 19 bp, Mus musculus
  siRNA target sequence for 4932415G16Rik (NM_173023.1,1968-1986).
gacagcccttgtttactta

SEQ ID NO: 782426 - DNA, 19 bp, Mus musculus
  siRNA target sequence for 4932415G16Rik (NM_173023.1,1978-1996).
gtttacttagcgatcttga

SEQ ID NO: 782427 - DNA, 19 bp, Mus musculus
  siRNA target sequence for 4932415G16Rik (NM_173023.1,1983-2001).
cttagcgatcttgaaatta

SEQ ID NO: 782428 - DNA, 19 bp, Mus musculus
  siRNA target sequence for 4932415G16Rik (NM_173023.1,1987-2005).
gcgatcttgaaattacata

SEQ ID NO: 782429 - DNA, 19 bp, Mus musculus
  siRNA target sequence for 4932415G16Rik (NM_173023.1,1988-2006).
cgatcttgaaattacatat

SEQ ID NO: 782430 - DNA, 19 bp, Mus musculus
  siRNA target sequence for 4932415G16Rik (NM_173023.1,2010-2028).
ggaaagttatactacacaa

SEQ ID NO: 782431 - DNA, 19 bp, Mus musculus
  siRNA target sequence for 4932415G16Rik (NM_173023.1,2011-2029).
gaaagttatactacacaat

SEQ ID NO: 782432 - DNA, 19 bp, Mus musculus
  siRNA target sequence for 4932415G16Rik (NM_173023.1,2049-2067).
cccctgcatgagcttaaat

SEQ ID NO: 782433 - DNA, 19 bp, Mus musculus
  siRNA target sequence for 4932415G16Rik (NM_173023.1,2051-2069).
cctgcatgagcttaaatct

SEQ ID NO: 782434 - DNA, 19 bp, Mus musculus
  siRNA target sequence for 4932415G16Rik (NM_173023.1,2052-2070).
ctgcatgagcttaaatcta

SEQ ID NO: 782435 - DNA, 19 bp, Mus musculus
  siRNA target sequence for 4932415G16Rik (NM_173023.1,2110-2128).
gcttcctgatcatgaacat

SEQ ID NO: 782436 - DNA, 19 bp, Mus musculus
  siRNA target sequence for 4932415G16Rik (NM_173023.1,2111-2129).
cttcctgatcatgaacatt

SEQ ID NO: 782437 - DNA, 19 bp, Mus musculus
  siRNA target sequence for 4932415G16Rik (NM_173023.1,2158-2176).
ctactatgcctcaagcaat

SEQ ID NO: 782438 - DNA, 19 bp, Mus musculus
  siRNA target sequence for 4932415G16Rik (NM_173023.1,2161-2179).
ctatgcctcaagcaataaa

SEQ ID NO: 782439 - DNA, 19 bp, Mus musculus
  siRNA target sequence for 4932415G16Rik (NM_173023.1,2165-2183).
gcctcaagcaataaaatca

SEQ ID NO: 782440 - DNA, 19 bp, Mus musculus
  siRNA target sequence for 4932415G16Rik (NM_173023.1,2166-2184).
cctcaagcaataaaatcaa

SEQ ID NO: 782441 - DNA, 19 bp, Mus musculus
  siRNA target sequence for 4932415G16Rik (NM_173023.1,2238-2256).
ggacggaaatggagcataa

SEQ ID NO: 782442 - DNA, 19 bp, Mus musculus
  siRNA target sequence for 4932415G16Rik (NM_173023.1,2249-2267).
gagcataagtacaagacaa

SEQ ID NO: 782443 - DNA, 19 bp, Mus musculus
  siRNA target sequence for 4932415G16Rik (NM_173023.1,2252-2270).
cataagtacaagacaatgt

SEQ ID NO: 782444 - DNA, 19 bp, Mus musculus
  siRNA target sequence for 4932415G16Rik (NM_173023.1,2278-2296).
ggattcaacaagatagtct

SEQ ID NO: 782445 - DNA, 19 bp, Mus musculus
  siRNA target sequence for 4932415G16Rik (NM_173023.1,2283-2301).
caacaagatagtcttgatt

SEQ ID NO: 782446 - DNA, 19 bp, Mus musculus
  siRNA target sequence for 4932415G16Rik (NM_173023.1,2289-2307).
gatagtcttgattttatgt

SEQ ID NO: 782447 - DNA, 19 bp, Mus musculus
  siRNA target sequence for 4932415G16Rik (NM_173023.1,2309-2327).
ccttaatcttgtgaagtat

SEQ ID NO: 782448 - DNA, 19 bp, Mus musculus
  siRNA target sequence for 4932415G16Rik (NM_173023.1,2310-2328).
cttaatcttgtgaagtata

SEQ ID NO: 782449 - DNA, 19 bp, Mus musculus
  siRNA target sequence for 4932415G16Rik (NM_173023.1,2334-2352).
gtgggaaacacaatagatt

SEQ ID NO: 782450 - DNA, 19 bp, Mus musculus
  siRNA target sequence for 4932415G16Rik (NM_173023.1,2336-2354).
gggaaacacaatagatttt

SEQ ID NO: 782451 - DNA, 19 bp, Mus musculus
  siRNA target sequence for 4932415G16Rik (NM_173023.1,2344-2362).
caatagattttcaatttaa

SEQ ID NO: 782452 - DNA, 19 bp, Mus musculus
  siRNA target sequence for 4932415G16Rik (NM_173023.1,2370-2388).
ccaaaagctatgtcaacat

SEQ ID NO: 782453 - DNA, 19 bp, Mus musculus
  siRNA target sequence for 4932415G16Rik (NM_173023.1,2392-2410).
ctatccctccagtcagtat

SEQ ID NO: 782454 - DNA, 19 bp, Mus musculus
  siRNA target sequence for 4932415G16Rik (NM_173023.1,2424-2442).
ccaggattggtggaagtta

SEQ ID NO: 782455 - DNA, 19 bp, Mus musculus
  siRNA target sequence for 4932415G16Rik (NM_173023.1,2425-2443).
caggattggtggaagttaa

SEQ ID NO: 782456 - DNA, 19 bp, Mus musculus
  siRNA target sequence for 4932415G16Rik (NM_173023.1,2452-2470).
gtgtttttgacctcaatga

SEQ ID NO: 782457 - DNA, 19 bp, Mus musculus
  siRNA target sequence for 4932415G16Rik (NM_173023.1,2541-2559).
ctttgggagggatcaagta

SEQ ID NO: 782458 - DNA, 19 bp, Mus musculus
  siRNA target sequence for 4932415G16Rik (NM_173023.1,2575-2593).
cactgctgccaaccataaa

SEQ ID NO: 782459 - DNA, 19 bp, Mus musculus
  siRNA target sequence for 4932415G16Rik (NM_173023.1,2730-2748).
ccatcccacatgggaattt

SEQ ID NO: 782460 - DNA, 19 bp, Mus musculus
  siRNA target sequence for 4932415G16Rik (NM_173023.1,2794-2812).
ccataccgagaaatcaatt

SEQ ID NO: 782461 - DNA, 19 bp, Mus musculus
  siRNA target sequence for 4932415G16Rik (NM_173023.1,2799-2817).
ccgagaaatcaatttcaca

SEQ ID NO: 782462 - DNA, 19 bp, Mus musculus
  siRNA target sequence for 4932415G16Rik (NM_173023.1,2840-2858).
caaacagtgtgctaatgtt

SEQ ID NO: 782463 - DNA, 19 bp, Mus musculus
  siRNA target sequence for 4932415G16Rik (NM_173023.1,2873-2891).
gtgcaactgctcagaacat

SEQ ID NO: 782464 - DNA, 19 bp, Mus musculus
  siRNA target sequence for 4932415G16Rik (NM_173023.1,2936-2954).
ggttcatcgtttcaagttt

SEQ ID NO: 782465 - DNA, 19 bp, Mus musculus
  siRNA target sequence for 4932415G16Rik (NM_173023.1,2960-2978).
cacacaatacccagttgtt

SEQ ID NO: 782466 - DNA, 19 bp, Mus musculus
  siRNA target sequence for 4932415G16Rik (NM_173023.1,3010-3028).
ccgcagaacctccgtattt

SEQ ID NO: 782467 - DNA, 19 bp, Mus musculus
  siRNA target sequence for 4932415G16Rik (NM_173023.1,3013-3031).
cagaacctccgtatttagt

SEQ ID NO: 782468 - DNA, 19 bp, Mus musculus
  siRNA target sequence for 4932415G16Rik (NM_173023.1,3015-3033).
gaacctccgtatttagtta

SEQ ID NO: 782469 - DNA, 19 bp, Mus musculus
  siRNA target sequence for 4932415G16Rik (NM_173023.1,3019-3037).
ctccgtatttagttaccat

SEQ ID NO: 782470 - DNA, 19 bp, Mus musculus
  siRNA target sequence for 4932415G16Rik (NM_173023.1,3034-3052).
ccatgactgaagtgaatat

SEQ ID NO: 782471 - DNA, 19 bp, Mus musculus
  siRNA target sequence for 4932415G16Rik (NM_173023.1,3077-3095).
caatgagccagaaaacgtt

SEQ ID NO: 782472 - DNA, 19 bp, Mus musculus
  siRNA target sequence for 4932415G16Rik (NM_173023.1,3216-3234).
gtcagcttttgtgagttaa

SEQ ID NO: 782473 - DNA, 19 bp, Mus musculus
  siRNA target sequence for 4932415G16Rik (NM_173023.1,3226-3244).
gtgagttaagtgaagaatt

SEQ ID NO: 782474 - DNA, 19 bp, Mus musculus
  siRNA target sequence for 4932415G16Rik (NM_173023.1,3310-3328).
ctgtagtgctaggagtatt

SEQ ID NO: 782475 - DNA, 19 bp, Mus musculus
  siRNA target sequence for 4932415G16Rik (NM_173023.1,3312-3330).
gtagtgctaggagtattaa

SEQ ID NO: 782476 - DNA, 19 bp, Mus musculus
  siRNA target sequence for 4932415G16Rik (NM_173023.1,3377-3395).
ggcattgaagaaatctatt

SEQ ID NO: 782477 - DNA, 19 bp, Mus musculus
  siRNA target sequence for 4932415G16Rik (NM_173023.1,3378-3396).
gcattgaagaaatctatta

SEQ ID NO: 782478 - DNA, 19 bp, Mus musculus
  siRNA target sequence for 4932415G16Rik (NM_173023.1,3405-3423).
cctggactcacctcaagta

SEQ ID NO: 782479 - DNA, 19 bp, Mus musculus
  siRNA target sequence for 9230110G02Rik (NM_173026.1,1409-1427).
cttagctcgccaccttttt

SEQ ID NO: 782480 - DNA, 19 bp, Mus musculus
  siRNA target sequence for 9230110G02Rik (NM_173026.1,1482-1500).
cagcttacagtgtataaga

SEQ ID NO: 782481 - DNA, 19 bp, Mus musculus
  siRNA target sequence for 9230110G02Rik (NM_173026.1,1484-1502).
gcttacagtgtataagaaa

SEQ ID NO: 782482 - DNA, 19 bp, Mus musculus
  siRNA target sequence for 9230110G02Rik (NM_173026.1,1532-1550).
ggacttagcagcacacaat

SEQ ID NO: 782483 - DNA, 19 bp, Mus musculus
  siRNA target sequence for 9230110G02Rik (NM_173026.1,1542-1560).
gcacacaatggaactacaa

SEQ ID NO: 782484 - DNA, 19 bp, Mus musculus
  siRNA target sequence for 9230110G02Rik (NM_173026.1,1581-1599).
gaagcaaccacaactttgt

SEQ ID NO: 782485 - DNA, 19 bp, Mus musculus
  siRNA target sequence for 9230110G02Rik (NM_173026.1,1724-1742).
gtcccctgtagaaggtata

SEQ ID NO: 782486 - DNA, 19 bp, Mus musculus
  siRNA target sequence for 9230110G02Rik (NM_173026.1,1727-1745).
ccctgtagaaggtatacct

SEQ ID NO: 782487 - DNA, 19 bp, Mus musculus
  siRNA target sequence for 9230110G02Rik (NM_173026.1,1744-1762).
ctgagccccaccctgaaat

SEQ ID NO: 782488 - DNA, 19 bp, Mus musculus
  siRNA target sequence for 9230110G02Rik (NM_173026.1,1764-1782).
ggaactgcaagcttagcaa

SEQ ID NO: 782489 - DNA, 19 bp, Mus musculus
  siRNA target sequence for 9230110G02Rik (NM_173026.1,1765-1783).
gaactgcaagcttagcaaa

SEQ ID NO: 782490 - DNA, 19 bp, Mus musculus
  siRNA target sequence for 9230110G02Rik (NM_173026.1,1833-1851).
gctagtgttcatcctaaaa

SEQ ID NO: 782491 - DNA, 19 bp, Mus musculus
  siRNA target sequence for 9230110G02Rik (NM_173026.1,1834-1852).
ctagtgttcatcctaaaat

SEQ ID NO: 782492 - DNA, 19 bp, Mus musculus
  siRNA target sequence for 9230110G02Rik (NM_173026.1,1839-1857).
gttcatcctaaaatctcaa

SEQ ID NO: 782493 - DNA, 19 bp, Mus musculus
  siRNA target sequence for 9230110G02Rik (NM_173026.1,1845-1863).
cctaaaatctcaaaagaga

SEQ ID NO: 782494 - DNA, 19 bp, Mus musculus
  siRNA target sequence for 9230110G02Rik (NM_173026.1,1920-1938).
gacatcggtgccaaagact

SEQ ID NO: 782495 - DNA, 19 bp, Mus musculus
  siRNA target sequence for 9230110G02Rik (NM_173026.1,1931-1949).
caaagactgtccagatcat

SEQ ID NO: 782496 - DNA, 19 bp, Mus musculus
  siRNA target sequence for 9230110G02Rik (NM_173026.1,1989-2007).
ctaactgaagctacagaaa

SEQ ID NO: 782497 - DNA, 19 bp, Mus musculus
  siRNA target sequence for 9230110G02Rik (NM_173026.1,2019-2037).
ggcccagatgatgatactt

SEQ ID NO: 782498 - DNA, 19 bp, Mus musculus
  siRNA target sequence for 9230110G02Rik (NM_173026.1,2049-2067).
cttaggcagcggtctgtta

SEQ ID NO: 782499 - DNA, 19 bp, Mus musculus
  siRNA target sequence for 9230110G02Rik (NM_173026.1,2053-2071).
ggcagcggtctgttaatga

SEQ ID NO: 782500 - DNA, 19 bp, Mus musculus
  siRNA target sequence for 9230110G02Rik (NM_173026.1,2077-2095).
gctatatccggctacacaa

SEQ ID NO: 782501 - DNA, 19 bp, Mus musculus
  siRNA target sequence for 9230110G02Rik (NM_173026.1,2098-2116).
gcatggagaaaaagttaca

SEQ ID NO: 782502 - DNA, 19 bp, Mus musculus
  siRNA target sequence for 9230110G02Rik (NM_173026.1,2153-2171).
ggtggcccagaaattagtt

SEQ ID NO: 782503 - DNA, 19 bp, Mus musculus
  siRNA target sequence for 9230110G02Rik (NM_173026.1,2156-2174).
ggcccagaaattagttcaa

SEQ ID NO: 782504 - DNA, 19 bp, Mus musculus
  siRNA target sequence for 9230110G02Rik (NM_173026.1,2221-2239).
ccgaagaaacggctcataa

SEQ ID NO: 782505 - DNA, 19 bp, Mus musculus
  siRNA target sequence for 9230110G02Rik (NM_173026.1,2222-2240).
cgaagaaacggctcataaa

SEQ ID NO: 782506 - DNA, 19 bp, Mus musculus
  siRNA target sequence for 9230110G02Rik (NM_173026.1,2223-2241).
gaagaaacggctcataaat

SEQ ID NO: 782507 - DNA, 19 bp, Mus musculus
  siRNA target sequence for 9230110G02Rik (NM_173026.1,2244-2262).
ggtgaatgtggaatggttt

SEQ ID NO: 782508 - DNA, 19 bp, Mus musculus
  siRNA target sequence for 9230110G02Rik (NM_173026.1,2258-2276).
ggtttttccgagacgatat

SEQ ID NO: 782509 - DNA, 19 bp, Mus musculus
  siRNA target sequence for 9230110G02Rik (NM_173026.1,2266-2284).
cgagacgatatgcctttat

SEQ ID NO: 782510 - DNA, 19 bp, Mus musculus
  siRNA target sequence for 9230110G02Rik (NM_173026.1,2269-2287).
gacgatatgcctttataat

SEQ ID NO: 782511 - DNA, 19 bp, Mus musculus
  siRNA target sequence for 9230110G02Rik (NM_173026.1,2329-2347).
cggtaagtaccccaaaaga

SEQ ID NO: 782512 - DNA, 19 bp, Mus musculus
  siRNA target sequence for 9230110G02Rik (NM_173026.1,2389-2407).
ccaacttctcggttactct

SEQ ID NO: 782513 - DNA, 19 bp, Mus musculus
  siRNA target sequence for 9230110G02Rik (NM_173026.1,2471-2489).
ggctatccttggacttgat

SEQ ID NO: 782514 - DNA, 19 bp, Mus musculus
  siRNA target sequence for D330038K10Rik (NM_173028.1,346-364).
caagccaagctacacttaa

SEQ ID NO: 782515 - DNA, 19 bp, Mus musculus
  siRNA target sequence for D330038K10Rik (NM_173028.1,349-367).
gccaagctacacttaaaat

SEQ ID NO: 782516 - DNA, 19 bp, Mus musculus
  siRNA target sequence for D330038K10Rik (NM_173028.1,351-369).
caagctacacttaaaatta

SEQ ID NO: 782517 - DNA, 19 bp, Mus musculus
  siRNA target sequence for D330038K10Rik (NM_173028.1,372-390).
cgactatcttaatcatgat

SEQ ID NO: 782518 - DNA, 19 bp, Mus musculus
  siRNA target sequence for D330038K10Rik (NM_173028.1,373-391).
gactatcttaatcatgatt

SEQ ID NO: 782519 - DNA, 19 bp, Mus musculus
  siRNA target sequence for D330038K10Rik (NM_173028.1,413-431).
gatctagtcaacaagacat

SEQ ID NO: 782520 - DNA, 19 bp, Mus musculus
  siRNA target sequence for D330038K10Rik (NM_173028.1,421-439).
caacaagacatcaatttca

SEQ ID NO: 782521 - DNA, 19 bp, Mus musculus
  siRNA target sequence for D330038K10Rik (NM_173028.1,477-495).
cttggatattgctatccat

SEQ ID NO: 782522 - DNA, 19 bp, Mus musculus
  siRNA target sequence for D330038K10Rik (NM_173028.1,487-505).
gctatccatatgacttaca

SEQ ID NO: 782523 - DNA, 19 bp, Mus musculus
  siRNA target sequence for D330038K10Rik (NM_173028.1,488-506).
ctatccatatgacttacaa

SEQ ID NO: 782524 - DNA, 19 bp, Mus musculus
  siRNA target sequence for D330038K10Rik (NM_173028.1,516-534).
gacagttgtggcatttcat

SEQ ID NO: 782525 - DNA, 19 bp, Mus musculus
  siRNA target sequence for D330038K10Rik (NM_173028.1,597-615).
ccgaaagcatccacctaat

SEQ ID NO: 782526 - DNA, 19 bp, Mus musculus
  siRNA target sequence for D330038K10Rik (NM_173028.1,598-616).
cgaaagcatccacctaatt

SEQ ID NO: 782527 - DNA, 19 bp, Mus musculus
  siRNA target sequence for D330038K10Rik (NM_173028.1,603-621).
gcatccacctaattataca

SEQ ID NO: 782528 - DNA, 19 bp, Mus musculus
  siRNA target sequence for D330038K10Rik (NM_173028.1,604-622).
catccacctaattatacaa

SEQ ID NO: 782529 - DNA, 19 bp, Mus musculus
  siRNA target sequence for D330038K10Rik (NM_173028.1,639-657).
ctttcagccaaatcacttt

SEQ ID NO: 782530 - DNA, 19 bp, Mus musculus
  siRNA target sequence for D330038K10Rik (NM_173028.1,781-799).
ggtgtcactataaatctca

SEQ ID NO: 782531 - DNA, 19 bp, Mus musculus
  siRNA target sequence for D330038K10Rik (NM_173028.1,825-843).
gacatttattccgttttat

SEQ ID NO: 782532 - DNA, 19 bp, Mus musculus
  siRNA target sequence for D330038K10Rik (NM_173028.1,827-845).
catttattccgttttatat

SEQ ID NO: 782533 - DNA, 19 bp, Mus musculus
  siRNA target sequence for D330038K10Rik (NM_173028.1,860-878).
gcaaataccatatatcagt

SEQ ID NO: 782534 - DNA, 19 bp, Mus musculus
  siRNA target sequence for D330038K10Rik (NM_173028.1,940-958).
cctgagaatgcctccaata

SEQ ID NO: 782535 - DNA, 19 bp, Mus musculus
  siRNA target sequence for D330038K10Rik (NM_173028.1,941-959).
ctgagaatgcctccaatat

SEQ ID NO: 782536 - DNA, 19 bp, Mus musculus
  siRNA target sequence for D330038K10Rik (NM_173028.1,950-968).
cctccaatattcttcttat

SEQ ID NO: 782537 - DNA, 19 bp, Mus musculus
  siRNA target sequence for D330038K10Rik (NM_173028.1,985-1003).
gaagatcctccaaaaagga

SEQ ID NO: 782538 - DNA, 19 bp, Mus musculus
  siRNA target sequence for D330038K10Rik (NM_173028.1,988-1006).
gatcctccaaaaaggatat

SEQ ID NO: 782539 - DNA, 19 bp, Mus musculus
  siRNA target sequence for D330038K10Rik (NM_173028.1,1014-1032).
caagcaagataattgtatt

SEQ ID NO: 782540 - DNA, 19 bp, Mus musculus
  siRNA target sequence for D330038K10Rik (NM_173028.1,1060-1078).
ggtattattgcagaagtta

SEQ ID NO: 782541 - DNA, 19 bp, Mus musculus
  siRNA target sequence for D330038K10Rik (NM_173028.1,1061-1079).
gtattattgcagaagttaa

SEQ ID NO: 782542 - DNA, 19 bp, Mus musculus
  siRNA target sequence for D330038K10Rik (NM_173028.1,1089-1107).
gcactctacagttattaca

SEQ ID NO: 782543 - DNA, 19 bp, Mus musculus
  siRNA target sequence for D330038K10Rik (NM_173028.1,1090-1108).
cactctacagttattacat

SEQ ID NO: 782544 - DNA, 19 bp, Mus musculus
  siRNA target sequence for D330038K10Rik (NM_173028.1,1129-1147).
gcagctacattcctattaa

SEQ ID NO: 782545 - DNA, 19 bp, Mus musculus
  siRNA target sequence for D330038K10Rik (NM_173028.1,1130-1148).
cagctacattcctattaat

SEQ ID NO: 782546 - DNA, 19 bp, Mus musculus
  siRNA target sequence for D330038K10Rik (NM_173028.1,1132-1150).
gctacattcctattaataa

SEQ ID NO: 782547 - DNA, 19 bp, Mus musculus
  siRNA target sequence for D330038K10Rik (NM_173028.1,1133-1151).
ctacattcctattaataaa

SEQ ID NO: 782548 - DNA, 19 bp, Mus musculus
  siRNA target sequence for D330038K10Rik (NM_173028.1,1375-1393).
gaaggcctgcagcgtatta

SEQ ID NO: 782549 - DNA, 19 bp, Mus musculus
  siRNA target sequence for D330038K10Rik (NM_173028.1,1378-1396).
ggcctgcagcgtattattt

SEQ ID NO: 782550 - DNA, 19 bp, Mus musculus
  siRNA target sequence for D330038K10Rik (NM_173028.1,1379-1397).
gcctgcagcgtattatttt

SEQ ID NO: 782551 - DNA, 19 bp, Mus musculus
  siRNA target sequence for D330038K10Rik (NM_173028.1,1380-1398).
cctgcagcgtattatttta

SEQ ID NO: 782552 - DNA, 19 bp, Mus musculus
  siRNA target sequence for D330038K10Rik (NM_173028.1,1381-1399).
ctgcagcgtattattttat

SEQ ID NO: 782553 - DNA, 19 bp, Mus musculus
  siRNA target sequence for D330038K10Rik (NM_173028.1,1384-1402).
cagcgtattattttattca

SEQ ID NO: 782554 - DNA, 19 bp, Mus musculus
  siRNA target sequence for D330038K10Rik (NM_173028.1,1405-1423).
gaagatccaagagtgttta

SEQ ID NO: 782555 - DNA, 19 bp, Mus musculus
  siRNA target sequence for D330038K10Rik (NM_173028.1,1415-1433).
gagtgtttaaagtaacgta

SEQ ID NO: 782556 - DNA, 19 bp, Mus musculus
  siRNA target sequence for D330038K10Rik (NM_173028.1,1419-1437).
gtttaaagtaacgtatgaa

SEQ ID NO: 782557 - DNA, 19 bp, Mus musculus
  siRNA target sequence for D330038K10Rik (NM_173028.1,1426-1444).
gtaacgtatgaaagtgaaa

SEQ ID NO: 782558 - DNA, 19 bp, Mus musculus
  siRNA target sequence for D330038K10Rik (NM_173028.1,1485-1503).
ggatgtcgggatttcactt

SEQ ID NO: 782559 - DNA, 19 bp, Mus musculus
  siRNA target sequence for D330038K10Rik (NM_173028.1,1491-1509).
cgggatttcacttgtcaat

SEQ ID NO: 782560 - DNA, 19 bp, Mus musculus
  siRNA target sequence for D330038K10Rik (NM_173028.1,1560-1578).
ggtttgggaggcaaaacca

SEQ ID NO: 782561 - DNA, 19 bp, Mus musculus
  siRNA target sequence for D330038K10Rik (NM_173028.1,1561-1579).
gtttgggaggcaaaaccaa

SEQ ID NO: 782562 - DNA, 19 bp, Mus musculus
  siRNA target sequence for D330038K10Rik (NM_173028.1,1661-1679).
cgcccttggaggacaaagt

SEQ ID NO: 782563 - DNA, 19 bp, Mus musculus
  siRNA target sequence for D330038K10Rik (NM_173028.1,1680-1698).
ggtcgagttggacaacatt

SEQ ID NO: 782564 - DNA, 19 bp, Mus musculus
  siRNA target sequence for D330038K10Rik (NM_173028.1,1692-1710).
caacattccggttcgttta

SEQ ID NO: 782565 - DNA, 19 bp, Mus musculus
  siRNA target sequence for D330038K10Rik (NM_173028.1,1695-1713).
cattccggttcgtttaaca

SEQ ID NO: 782566 - DNA, 19 bp, Mus musculus
  siRNA target sequence for D330038K10Rik (NM_173028.1,1715-1733).
ctagtggcaatgacatgaa

SEQ ID NO: 782567 - DNA, 19 bp, Mus musculus
  siRNA target sequence for D330038K10Rik (NM_173028.1,1773-1791).
cctgccagcactaaaagta

SEQ ID NO: 782568 - DNA, 19 bp, Mus musculus
  siRNA target sequence for D330038K10Rik (NM_173028.1,1780-1798).
gcactaaaagtagaatata

SEQ ID NO: 782569 - DNA, 19 bp, Mus musculus
  siRNA target sequence for D330038K10Rik (NM_173028.1,1807-1825).
gcacatcagtcgtcattca

SEQ ID NO: 782570 - DNA, 19 bp, Mus musculus
  siRNA target sequence for D330038K10Rik (NM_173028.1,1817-1835).
cgtcattcagaattcagat

SEQ ID NO: 782571 - DNA, 19 bp, Mus musculus
  siRNA target sequence for D330038K10Rik (NM_173028.1,1818-1836).
gtcattcagaattcagatt

SEQ ID NO: 782572 - DNA, 19 bp, Mus musculus
  siRNA target sequence for D330038K10Rik (NM_173028.1,1826-1844).
gaattcagatttatagaat

SEQ ID NO: 782573 - DNA, 19 bp, Mus musculus
  siRNA target sequence for D330038K10Rik (NM_173028.1,1841-1859).
gaatacagatccaaaatca

SEQ ID NO: 782574 - DNA, 19 bp, Mus musculus
  siRNA target sequence for D330038K10Rik (NM_173028.1,1858-1876).
cagattcatggtgctattt

SEQ ID NO: 782575 - DNA, 19 bp, Mus musculus
  siRNA target sequence for D330038K10Rik (NM_173028.1,1878-1896).
ccctttcgtgttttatcct

SEQ ID NO: 782576 - DNA, 19 bp, Mus musculus
  siRNA target sequence for D330038K10Rik (NM_173028.1,1879-1897).
cctttcgtgttttatccta

SEQ ID NO: 782577 - DNA, 19 bp, Mus musculus
  siRNA target sequence for D330038K10Rik (NM_173028.1,1880-1898).
ctttcgtgttttatcctat

SEQ ID NO: 782578 - DNA, 19 bp, Mus musculus
  siRNA target sequence for D330038K10Rik (NM_173028.1,1884-1902).
cgtgttttatcctattaaa

SEQ ID NO: 782579 - DNA, 19 bp, Mus musculus
  siRNA target sequence for D330038K10Rik (NM_173028.1,1887-1905).
gttttatcctattaaacct

SEQ ID NO: 782580 - DNA, 19 bp, Mus musculus
  siRNA target sequence for D330038K10Rik (NM_173028.1,1931-1949).
caccaaagccgtttacaga

SEQ ID NO: 782581 - DNA, 19 bp, Mus musculus
  siRNA target sequence for D330038K10Rik (NM_173028.1,1946-1964).
cagatgtcagtattgtcat

SEQ ID NO: 782582 - DNA, 19 bp, Mus musculus
  siRNA target sequence for D330038K10Rik (NM_173028.1,1982-2000).
cccaaatatcacgcattaa

SEQ ID NO: 782583 - DNA, 19 bp, Mus musculus
  siRNA target sequence for D330038K10Rik (NM_173028.1,1991-2009).
cacgcattaagtatttcaa

SEQ ID NO: 782584 - DNA, 19 bp, Mus musculus
  siRNA target sequence for D330038K10Rik (NM_173028.1,2036-2054).
gtttggatcttggatttgt

SEQ ID NO: 782585 - DNA, 19 bp, Mus musculus
  siRNA target sequence for D330038K10Rik (NM_173028.1,2238-2256).
cctgagctctggtagagat

SEQ ID NO: 782586 - DNA, 19 bp, Mus musculus
  siRNA target sequence for D330038K10Rik (NM_173028.1,2241-2259).
gagctctggtagagatgaa

SEQ ID NO: 782587 - DNA, 19 bp, Mus musculus
  siRNA target sequence for D330038K10Rik (NM_173028.1,2294-2312).
ctgttcattcgttaaatct

SEQ ID NO: 782588 - DNA, 19 bp, Mus musculus
  siRNA target sequence for D330038K10Rik (NM_173028.1,2333-2351).
ccaccctcacagatgtaca

SEQ ID NO: 782589 - DNA, 19 bp, Mus musculus
  siRNA target sequence for D330038K10Rik (NM_173028.1,2334-2352).
caccctcacagatgtacaa

SEQ ID NO: 782590 - DNA, 19 bp, Mus musculus
  siRNA target sequence for D330038K10Rik (NM_173028.1,2383-2401).
ctcaactaccagttccata

SEQ ID NO: 782591 - DNA, 19 bp, Mus musculus
  siRNA target sequence for D330038K10Rik (NM_173028.1,2388-2406).
ctaccagttccatacaaca

SEQ ID NO: 782592 - DNA, 19 bp, Mus musculus
  siRNA target sequence for D330038K10Rik (NM_173028.1,2391-2409).
ccagttccatacaacatct

SEQ ID NO: 782593 - DNA, 19 bp, Mus musculus
  siRNA target sequence for D330038K10Rik (NM_173028.1,2425-2443).
gtaataagacactattcca

SEQ ID NO: 782594 - DNA, 19 bp, Mus musculus
  siRNA target sequence for D330038K10Rik (NM_173028.1,2441-2459).
ccaaacaggctattaaaca

SEQ ID NO: 782595 - DNA, 19 bp, Mus musculus
  siRNA target sequence for D330038K10Rik (NM_173028.1,2442-2460).
caaacaggctattaaacaa

SEQ ID NO: 782596 - DNA, 19 bp, Mus musculus
  siRNA target sequence for D330038K10Rik (NM_173028.1,2506-2524).
ggcttaattagagaatttt

SEQ ID NO: 782597 - DNA, 19 bp, Mus musculus
  siRNA target sequence for D330038K10Rik (NM_173028.1,2540-2558).
cgtttttttatgaacctta

SEQ ID NO: 782598 - DNA, 19 bp, Mus musculus
  siRNA target sequence for D330038K10Rik (NM_173028.1,2597-2615).
gaatggcgctaggattgaa

SEQ ID NO: 782599 - DNA, 19 bp, Mus musculus
  siRNA target sequence for D330038K10Rik (NM_173028.1,2817-2835).
cattacagggattgttaca

SEQ ID NO: 782600 - DNA, 19 bp, Mus musculus
  siRNA target sequence for D330038K10Rik (NM_173028.1,2840-2858).
caattaaaggtgctcaaaa

SEQ ID NO: 782601 - DNA, 19 bp, Mus musculus
  siRNA target sequence for D330038K10Rik (NM_173028.1,2924-2942).
cgggtggcatcatagacat

SEQ ID NO: 782602 - DNA, 19 bp, Mus musculus
  siRNA target sequence for D330038K10Rik (NM_173028.1,2984-3002).
cttctgaagtagagagttt

SEQ ID NO: 782603 - DNA, 19 bp, Mus musculus
  siRNA target sequence for D330038K10Rik (NM_173028.1,3008-3026).
ctcccagattctttaatga

SEQ ID NO: 782604 - DNA, 19 bp, Mus musculus
  siRNA target sequence for D330038K10Rik (NM_173028.1,3054-3072).
gcgcgatggttcaggaaat

SEQ ID NO: 782605 - DNA, 19 bp, Mus musculus
  siRNA target sequence for Galnt13 (NM_173030.1,558-576).
gatgtgggtgcttgttgat

SEQ ID NO: 782606 - DNA, 19 bp, Mus musculus
  siRNA target sequence for Galnt13 (NM_173030.1,644-662).
ctgcgctgagggctgttat

SEQ ID NO: 782607 - DNA, 19 bp, Mus musculus
  siRNA target sequence for Galnt13 (NM_173030.1,646-664).
gcgctgagggctgttattt

SEQ ID NO: 782608 - DNA, 19 bp, Mus musculus
  siRNA target sequence for Galnt13 (NM_173030.1,776-794).
gtgacttgatcgcacttaa

SEQ ID NO: 782609 - DNA, 19 bp, Mus musculus
  siRNA target sequence for Galnt13 (NM_173030.1,800-818).
gtctgccggatgtgagatt

SEQ ID NO: 782610 - DNA, 19 bp, Mus musculus
  siRNA target sequence for Galnt13 (NM_173030.1,823-841).
ggatgcaagactaaagtct

SEQ ID NO: 782611 - DNA, 19 bp, Mus musculus
  siRNA target sequence for Galnt13 (NM_173030.1,863-881).
caagtgtagtcattgtgtt

SEQ ID NO: 782612 - DNA, 19 bp, Mus musculus
  siRNA target sequence for Galnt13 (NM_173030.1,904-922).
ctacttagaactgtctata

SEQ ID NO: 782613 - DNA, 19 bp, Mus musculus
  siRNA target sequence for Galnt13 (NM_173030.1,914-932).
ctgtctatagtgtcataaa

SEQ ID NO: 782614 - DNA, 19 bp, Mus musculus
  siRNA target sequence for Galnt13 (NM_173030.1,1012-1030).
gagaactacgtgaaaactt

SEQ ID NO: 782615 - DNA, 19 bp, Mus musculus
  siRNA target sequence for Galnt13 (NM_173030.1,1017-1035).
ctacgtgaaaactttagaa

SEQ ID NO: 782616 - DNA, 19 bp, Mus musculus
  siRNA target sequence for Galnt13 (NM_173030.1,1033-1051).
gaagtgccagtgaagatta

SEQ ID NO: 782617 - DNA, 19 bp, Mus musculus
  siRNA target sequence for Galnt13 (NM_173030.1,1115-1133).
gacaggtcataacttttct

SEQ ID NO: 782618 - DNA, 19 bp, Mus musculus
  siRNA target sequence for Galnt13 (NM_173030.1,1170-1188).
gcccttgctggcgagaata

SEQ ID NO: 782619 - DNA, 19 bp, Mus musculus
  siRNA target sequence for Galnt13 (NM_173030.1,1171-1189).
cccttgctggcgagaataa

SEQ ID NO: 782620 - DNA, 19 bp, Mus musculus
  siRNA target sequence for Galnt13 (NM_173030.1,1176-1194).
gctggcgagaataaaggaa

SEQ ID NO: 782621 - DNA, 19 bp, Mus musculus
  siRNA target sequence for Galnt13 (NM_173030.1,1212-1230).
gtgcccgatcattgatgtt

SEQ ID NO: 782622 - DNA, 19 bp, Mus musculus
  siRNA target sequence for Galnt13 (NM_173030.1,1214-1232).
gcccgatcattgatgttat

SEQ ID NO: 782623 - DNA, 19 bp, Mus musculus
  siRNA target sequence for Galnt13 (NM_173030.1,1215-1233).
cccgatcattgatgttatt

SEQ ID NO: 782624 - DNA, 19 bp, Mus musculus
  siRNA target sequence for Galnt13 (NM_173030.1,1216-1234).
ccgatcattgatgttatta

SEQ ID NO: 782625 - DNA, 19 bp, Mus musculus
  siRNA target sequence for Galnt13 (NM_173030.1,1235-1253).
gtgatgatacgtttgagta

SEQ ID NO: 782626 - DNA, 19 bp, Mus musculus
  siRNA target sequence for Galnt13 (NM_173030.1,1263-1281).
gtcagacatgacttatggt

SEQ ID NO: 782627 - DNA, 19 bp, Mus musculus
  siRNA target sequence for Galnt13 (NM_173030.1,1296-1314).
gctaaatttccgatggtat

SEQ ID NO: 782628 - DNA, 19 bp, Mus musculus
  siRNA target sequence for Galnt13 (NM_173030.1,1385-1403).
ctggtggcctattttctat

SEQ ID NO: 782629 - DNA, 19 bp, Mus musculus
  siRNA target sequence for Galnt13 (NM_173030.1,1527-1545).
ctctcatgtcggtcatgtt

SEQ ID NO: 782630 - DNA, 19 bp, Mus musculus
  siRNA target sequence for Galnt13 (NM_173030.1,1529-1547).
ctcatgtcggtcatgtttt

SEQ ID NO: 782631 - DNA, 19 bp, Mus musculus
  siRNA target sequence for Galnt13 (NM_173030.1,1534-1552).
gtcggtcatgtttttcgaa

SEQ ID NO: 782632 - DNA, 19 bp, Mus musculus
  siRNA target sequence for Galnt13 (NM_173030.1,1579-1597).
ggcactggccatgtcatta

SEQ ID NO: 782633 - DNA, 19 bp, Mus musculus
  siRNA target sequence for Galnt13 (NM_173030.1,1580-1598).
gcactggccatgtcattaa

SEQ ID NO: 782634 - DNA, 19 bp, Mus musculus
  siRNA target sequence for Galnt13 (NM_173030.1,1583-1601).
ctggccatgtcattaacaa

SEQ ID NO: 782635 - DNA, 19 bp, Mus musculus
  siRNA target sequence for Galnt13 (NM_173030.1,1585-1603).
ggccatgtcattaacaaga

SEQ ID NO: 782636 - DNA, 19 bp, Mus musculus
  siRNA target sequence for Galnt13 (NM_173030.1,1586-1604).
gccatgtcattaacaagaa

SEQ ID NO: 782637 - DNA, 19 bp, Mus musculus
  siRNA target sequence for Galnt13 (NM_173030.1,1728-1746).
gaagtgtaagcctttttct

SEQ ID NO: 782638 - DNA, 19 bp, Mus musculus
  siRNA target sequence for Galnt13 (NM_173030.1,1776-1794).
ccagatcccaagacgttat

SEQ ID NO: 782639 - DNA, 19 bp, Mus musculus
  siRNA target sequence for Galnt13 (NM_173030.1,1777-1795).
cagatcccaagacgttatt

SEQ ID NO: 782640 - DNA, 19 bp, Mus musculus
  siRNA target sequence for Galnt13 (NM_173030.1,1782-1800).
cccaagacgttattactca

SEQ ID NO: 782641 - DNA, 19 bp, Mus musculus
  siRNA target sequence for Galnt13 (NM_173030.1,1799-1817).
cacttggtgagatacgaaa

SEQ ID NO: 782642 - DNA, 19 bp, Mus musculus
  siRNA target sequence for Galnt13 (NM_173030.1,1864-1882).
gaaaaagtgggtatcttca

SEQ ID NO: 782643 - DNA, 19 bp, Mus musculus
  siRNA target sequence for Galnt13 (NM_173030.1,1956-1974).
ggaatgctgttcaaaccat

SEQ ID NO: 782644 - DNA, 19 bp, Mus musculus
  siRNA target sequence for Galnt13 (NM_173030.1,1962-1980).
ctgttcaaaccatccatta

SEQ ID NO: 782645 - DNA, 19 bp, Mus musculus
  siRNA target sequence for Galnt13 (NM_173030.1,1964-1982).
gttcaaaccatccattata

SEQ ID NO: 782646 - DNA, 19 bp, Mus musculus
  siRNA target sequence for Galnt13 (NM_173030.1,1976-1994).
cattatatggcctcgtata

SEQ ID NO: 782647 - DNA, 19 bp, Mus musculus
  siRNA target sequence for Galnt13 (NM_173030.1,1989-2007).
cgtatatacgccaacaata

SEQ ID NO: 782648 - DNA, 19 bp, Mus musculus
  siRNA target sequence for Galnt13 (NM_173030.1,1990-2008).
gtatatacgccaacaataa

SEQ ID NO: 782649 - DNA, 19 bp, Mus musculus
  siRNA target sequence for Galnt13 (NM_173030.1,1997-2015).
cgccaacaataaatgaaca

SEQ ID NO: 782650 - DNA, 19 bp, Mus musculus
  siRNA target sequence for Galnt13 (NM_173030.1,2078-2096).
gactcagtggccctgtaat

SEQ ID NO: 782651 - DNA, 19 bp, Mus musculus
  siRNA target sequence for Galnt13 (NM_173030.1,2086-2104).
ggccctgtaatcatgctaa

SEQ ID NO: 782652 - DNA, 19 bp, Mus musculus
  siRNA target sequence for Galnt13 (NM_173030.1,2087-2105).
gccctgtaatcatgctaaa

SEQ ID NO: 782653 - DNA, 19 bp, Mus musculus
  siRNA target sequence for Galnt13 (NM_173030.1,2109-2127).
ccaccacatgagaggaaat

SEQ ID NO: 782654 - DNA, 19 bp, Mus musculus
  siRNA target sequence for Galnt13 (NM_173030.1,2146-2164).
gctgagagactcactttga

SEQ ID NO: 782655 - DNA, 19 bp, Mus musculus
  siRNA target sequence for Galnt13 (NM_173030.1,2171-2189).
ctaacagtaaccaatgtct

SEQ ID NO: 782656 - DNA, 19 bp, Mus musculus
  siRNA target sequence for Galnt13 (NM_173030.1,2175-2193).
cagtaaccaatgtcttgat

SEQ ID NO: 782657 - DNA, 19 bp, Mus musculus
  siRNA target sequence for Galnt13 (NM_173030.1,2177-2195).
gtaaccaatgtcttgatga

SEQ ID NO: 782658 - DNA, 19 bp, Mus musculus
  siRNA target sequence for 4732416F18 (NM_173031.1,695-713).
gcaatcgggcacagataaa

SEQ ID NO: 782659 - DNA, 19 bp, Mus musculus
  siRNA target sequence for 4732416F18 (NM_173031.1,1032-1050).
ctcctgaaccgacaattgt

SEQ ID NO: 782660 - DNA, 19 bp, Mus musculus
  siRNA target sequence for 4732416F18 (NM_173031.1,1034-1052).
cctgaaccgacaattgtct

SEQ ID NO: 782661 - DNA, 19 bp, Mus musculus
  siRNA target sequence for 4732416F18 (NM_173031.1,1189-1207).
ggctggaaggggcattaca

SEQ ID NO: 782662 - DNA, 19 bp, Mus musculus
  siRNA target sequence for 4732416F18 (NM_173031.1,1380-1398).
gggtggcaccctcaaacta

SEQ ID NO: 782663 - DNA, 19 bp, Mus musculus
  siRNA target sequence for 4732416F18 (NM_173031.1,1382-1400).
gtggcaccctcaaactaca

SEQ ID NO: 782664 - DNA, 19 bp, Mus musculus
  siRNA target sequence for 4732416F18 (NM_173031.1,1494-1512).
cgggacatctccaagtcaa

SEQ ID NO: 782665 - DNA, 19 bp, Mus musculus
  siRNA target sequence for 4732416F18 (NM_173031.1,1528-1546).
cactcagccctaaaattgt

SEQ ID NO: 782666 - DNA, 19 bp, Mus musculus
  siRNA target sequence for 4732416F18 (NM_173031.1,1530-1548).
ctcagccctaaaattgtct

SEQ ID NO: 782667 - DNA, 19 bp, Mus musculus
  siRNA target sequence for 4732416F18 (NM_173031.1,1597-1615).
gctcccatactctcagtaa

SEQ ID NO: 782668 - DNA, 19 bp, Mus musculus
  siRNA target sequence for 4732416F18 (NM_173031.1,1600-1618).
cccatactctcagtaatgt

SEQ ID NO: 782669 - DNA, 19 bp, Mus musculus
  siRNA target sequence for 4732416F18 (NM_173031.1,1635-1653).
gctcaggagtctgaagaat

SEQ ID NO: 782670 - DNA, 19 bp, Mus musculus
  siRNA target sequence for 4732416F18 (NM_173031.1,1638-1656).
caggagtctgaagaatact

SEQ ID NO: 782671 - DNA, 19 bp, Mus musculus
  siRNA target sequence for 3010020C06 (NM_173033.2,179-197).
cagtctcaaagcagagtta

SEQ ID NO: 782672 - DNA, 19 bp, Mus musculus
  siRNA target sequence for 3010020C06 (NM_173033.2,276-294).
gcaccctcttatgaattta

SEQ ID NO: 782673 - DNA, 19 bp, Mus musculus
  siRNA target sequence for 3010020C06 (NM_173033.2,277-295).
caccctcttatgaatttaa

SEQ ID NO: 782674 - DNA, 19 bp, Mus musculus
  siRNA target sequence for 3010020C06 (NM_173033.2,413-431).
gctgactgcagcattgagt

SEQ ID NO: 782675 - DNA, 19 bp, Mus musculus
  siRNA target sequence for 3010020C06 (NM_173033.2,516-534).
cctgatgtgagccatgtta

SEQ ID NO: 782676 - DNA, 19 bp, Mus musculus
  siRNA target sequence for 3010020C06 (NM_173033.2,573-591).
ggagaggtgctcctgtatt

SEQ ID NO: 782677 - DNA, 19 bp, Mus musculus
  siRNA target sequence for 3010020C06 (NM_173033.2,574-592).
gagaggtgctcctgtatta

SEQ ID NO: 782678 - DNA, 19 bp, Mus musculus
  siRNA target sequence for 3010020C06 (NM_173033.2,669-687).
ggcaagattcggattgcta

SEQ ID NO: 782679 - DNA, 19 bp, Mus musculus
  siRNA target sequence for 3010020C06 (NM_173033.2,674-692).
gattcggattgctactgaa

SEQ ID NO: 782680 - DNA, 19 bp, Mus musculus
  siRNA target sequence for 3010020C06 (NM_173033.2,733-751).
gactctacgtggaagtcat

SEQ ID NO: 782681 - DNA, 19 bp, Mus musculus
  siRNA target sequence for 3010020C06 (NM_173033.2,752-770).
gctttcctgcccattattt

SEQ ID NO: 782682 - DNA, 19 bp, Mus musculus
  siRNA target sequence for 3010020C06 (NM_173033.2,753-771).
ctttcctgcccattattta

SEQ ID NO: 782683 - DNA, 19 bp, Mus musculus
  siRNA target sequence for 3010020C06 (NM_173033.2,758-776).
ctgcccattatttaaggat

SEQ ID NO: 782684 - DNA, 19 bp, Mus musculus
  siRNA target sequence for 3010020C06 (NM_173033.2,780-798).
ctgagcgaggatgatttta

SEQ ID NO: 782685 - DNA, 19 bp, Mus musculus
  siRNA target sequence for 3010020C06 (NM_173033.2,836-854).
gcgagtcggtgtgtttgaa

SEQ ID NO: 782686 - DNA, 19 bp, Mus musculus
  siRNA target sequence for 3010020C06 (NM_173033.2,883-901).
gtcaggtctcctacaagaa

SEQ ID NO: 782687 - DNA, 19 bp, Mus musculus
  siRNA target sequence for 3010020C06 (NM_173033.2,896-914).
caagaagcccggaatccat

SEQ ID NO: 782688 - DNA, 19 bp, Mus musculus
  siRNA target sequence for 3010020C06 (NM_173033.2,899-917).
gaagcccggaatccattta

SEQ ID NO: 782689 - DNA, 19 bp, Mus musculus
  siRNA target sequence for 3010020C06 (NM_173033.2,919-937).
cccctggtgaatttcataa

SEQ ID NO: 782690 - DNA, 19 bp, Mus musculus
  siRNA target sequence for 3010020C06 (NM_173033.2,924-942).
ggtgaatttcataaagaaa

SEQ ID NO: 782691 - DNA, 19 bp, Mus musculus
  siRNA target sequence for 3010020C06 (NM_173033.2,925-943).
gtgaatttcataaagaaat

SEQ ID NO: 782692 - DNA, 19 bp, Mus musculus
  siRNA target sequence for 3010020C06 (NM_173033.2,1010-1028).
ctatgaaagcaaaatagga

SEQ ID NO: 782693 - DNA, 19 bp, Mus musculus
  siRNA target sequence for 3010020C06 (NM_173033.2,1076-1094).
ccctagctacgttgacaaa

SEQ ID NO: 782694 - DNA, 19 bp, Mus musculus
  siRNA target sequence for 3010020C06 (NM_173033.2,1077-1095).
cctagctacgttgacaaaa

SEQ ID NO: 782695 - DNA, 19 bp, Mus musculus
  siRNA target sequence for 3010020C06 (NM_173033.2,1078-1096).
ctagctacgttgacaaaaa

SEQ ID NO: 782696 - DNA, 19 bp, Mus musculus
  siRNA target sequence for 3010020C06 (NM_173033.2,1081-1099).
gctacgttgacaaaaacct

SEQ ID NO: 782697 - DNA, 19 bp, Mus musculus
  siRNA target sequence for 3010020C06 (NM_173033.2,1082-1100).
ctacgttgacaaaaacctt

SEQ ID NO: 782698 - DNA, 19 bp, Mus musculus
  siRNA target sequence for 3010020C06 (NM_173033.2,1089-1107).
gacaaaaaccttgacattt

SEQ ID NO: 782699 - DNA, 19 bp, Mus musculus
  siRNA target sequence for 3010020C06 (NM_173033.2,1177-1195).
gagccaagggagtgtgtaa

SEQ ID NO: 782700 - DNA, 19 bp, Mus musculus
  siRNA target sequence for 3010020C06 (NM_173033.2,1293-1311).
gccctggcctacaacagtt

SEQ ID NO: 782701 - DNA, 19 bp, Mus musculus
  siRNA target sequence for 3010020C06 (NM_173033.2,1339-1357).
gagccccatgggaccaata

SEQ ID NO: 782702 - DNA, 19 bp, Mus musculus
  siRNA target sequence for 3010020C06 (NM_173033.2,1341-1359).
gccccatgggaccaataca

SEQ ID NO: 782703 - DNA, 19 bp, Mus musculus
  siRNA target sequence for 3010020C06 (NM_173033.2,1342-1360).
ccccatgggaccaatacaa

SEQ ID NO: 782704 - DNA, 19 bp, Mus musculus
  siRNA target sequence for 3010020C06 (NM_173033.2,1345-1363).
catgggaccaatacaaact

SEQ ID NO: 782705 - DNA, 19 bp, Mus musculus
  siRNA target sequence for AW413431 (NM_173037.1,1590-1608).
ggtcactttgccaagagat

SEQ ID NO: 782706 - DNA, 19 bp, Mus musculus
  siRNA target sequence for AW413431 (NM_173037.1,1761-1779).
ccattagcgatgatgaaga

SEQ ID NO: 782707 - DNA, 19 bp, Mus musculus
  siRNA target sequence for AW413431 (NM_173037.1,1862-1880).
gggttggcaggagatttct

SEQ ID NO: 782708 - DNA, 19 bp, Mus musculus
  siRNA target sequence for AW413431 (NM_173037.1,1863-1881).
ggttggcaggagatttctt

SEQ ID NO: 782709 - DNA, 19 bp, Mus musculus
  siRNA target sequence for AW413431 (NM_173037.1,1871-1889).
ggagatttcttcatctttt

SEQ ID NO: 782710 - DNA, 19 bp, Mus musculus
  siRNA target sequence for AW413431 (NM_173037.1,2059-2077).
gtctgagcagatattcaca

SEQ ID NO: 782711 - DNA, 19 bp, Mus musculus
  siRNA target sequence for AW413431 (NM_173037.1,2211-2229).
gaggagctgttcagttgaa

SEQ ID NO: 782712 - DNA, 19 bp, Mus musculus
  siRNA target sequence for AW413431 (NM_173037.1,2213-2231).
ggagctgttcagttgaagt

SEQ ID NO: 782713 - DNA, 19 bp, Mus musculus
  siRNA target sequence for AW413431 (NM_173037.1,2216-2234).
gctgttcagttgaagtcaa

SEQ ID NO: 782714 - DNA, 19 bp, Mus musculus
  siRNA target sequence for AW413431 (NM_173037.1,2227-2245).
gaagtcaagtgattttgca

SEQ ID NO: 782715 - DNA, 19 bp, Mus musculus
  siRNA target sequence for AW413431 (NM_173037.1,2272-2290).
ggagagggtctctaacaca

SEQ ID NO: 782716 - DNA, 19 bp, Mus musculus
  siRNA target sequence for AW413431 (NM_173037.1,2273-2291).
gagagggtctctaacacat

SEQ ID NO: 782717 - DNA, 19 bp, Mus musculus
  siRNA target sequence for AW413431 (NM_173037.1,2321-2339).
gccgatctccgaattacca

SEQ ID NO: 782718 - DNA, 19 bp, Mus musculus
  siRNA target sequence for AW413431 (NM_173037.1,2322-2340).
ccgatctccgaattaccat

SEQ ID NO: 782719 - DNA, 19 bp, Mus musculus
  siRNA target sequence for AW413431 (NM_173037.1,2407-2425).
ggacccgggacagaaaata

SEQ ID NO: 782720 - DNA, 19 bp, Mus musculus
  siRNA target sequence for AW413431 (NM_173037.1,2438-2456).
caaaccagtcctgacatat

SEQ ID NO: 782721 - DNA, 19 bp, Mus musculus
  siRNA target sequence for AW413431 (NM_173037.1,2443-2461).
cagtcctgacatatctaca

SEQ ID NO: 782722 - DNA, 19 bp, Mus musculus
  siRNA target sequence for AW413431 (NM_173037.1,2524-2542).
ccagccacctggaagcata

SEQ ID NO: 782723 - DNA, 19 bp, Mus musculus
  siRNA target sequence for AW413431 (NM_173037.1,2538-2556).
gcataaccacacaacagtt

SEQ ID NO: 782724 - DNA, 19 bp, Mus musculus
  siRNA target sequence for AW413431 (NM_173037.1,2554-2572).
gttccgggaggttctctta

SEQ ID NO: 782725 - DNA, 19 bp, Mus musculus
  siRNA target sequence for AW413431 (NM_173037.1,2740-2758).
ggggattgcccttctttca

SEQ ID NO: 782726 - DNA, 19 bp, Mus musculus
  siRNA target sequence for AW413431 (NM_173037.1,2762-2780).
gtgtaccctgaagaaatct

SEQ ID NO: 782727 - DNA, 19 bp, Mus musculus
  siRNA target sequence for AW413431 (NM_173037.1,2789-2807).
ctgttggccaaatatgaca

SEQ ID NO: 782728 - DNA, 19 bp, Mus musculus
  siRNA target sequence for AW413431 (NM_173037.1,2882-2900).
ggggacatggtctcgaaat

SEQ ID NO: 782729 - DNA, 19 bp, Mus musculus
  siRNA target sequence for AW413431 (NM_173037.1,2883-2901).
gggacatggtctcgaaata

SEQ ID NO: 782730 - DNA, 19 bp, Mus musculus
  siRNA target sequence for AW413431 (NM_173037.1,2895-2913).
cgaaataccgggaaccttt

SEQ ID NO: 782731 - DNA, 19 bp, Mus musculus
  siRNA target sequence for AW413431 (NM_173037.1,3093-3111).
ctgcagtccacgtagttgt

SEQ ID NO: 782732 - DNA, 19 bp, Mus musculus
  siRNA target sequence for E130107N23Rik (NM_173038.1,200-218).
gaagtttcatgcaagtatt

SEQ ID NO: 782733 - DNA, 19 bp, Mus musculus
  siRNA target sequence for E130107N23Rik (NM_173038.1,214-232).
gtattgtgtgaaaaataca

SEQ ID NO: 782734 - DNA, 19 bp, Mus musculus
  siRNA target sequence for E130107N23Rik (NM_173038.1,297-315).
gggctcgcctatgaaagat

SEQ ID NO: 782735 - DNA, 19 bp, Mus musculus
  siRNA target sequence for E130107N23Rik (NM_173038.1,329-347).
cgagcgtgctcgtgttgaa

SEQ ID NO: 782736 - DNA, 19 bp, Mus musculus
  siRNA target sequence for E130107N23Rik (NM_173038.1,410-428).
cagaactcgatctttctga

SEQ ID NO: 782737 - DNA, 19 bp, Mus musculus
  siRNA target sequence for E130107N23Rik (NM_173038.1,446-464).
ggcatgaggtcagtaagat

SEQ ID NO: 782738 - DNA, 19 bp, Mus musculus
  siRNA target sequence for E130107N23Rik (NM_173038.1,447-465).
gcatgaggtcagtaagatt

SEQ ID NO: 782739 - DNA, 19 bp, Mus musculus
  siRNA target sequence for E130107N23Rik (NM_173038.1,451-469).
gaggtcagtaagattgtgt

SEQ ID NO: 782740 - DNA, 19 bp, Mus musculus
  siRNA target sequence for E130107N23Rik (NM_173038.1,479-497).
ctcagctggagtttctaaa

SEQ ID NO: 782741 - DNA, 19 bp, Mus musculus
  siRNA target sequence for E130107N23Rik (NM_173038.1,516-534).
gagtctgtcagttctagaa

SEQ ID NO: 782742 - DNA, 19 bp, Mus musculus
  siRNA target sequence for E130107N23Rik (NM_173038.1,557-575).
ctggggttcgcaaacttgt

SEQ ID NO: 782743 - DNA, 19 bp, Mus musculus
  siRNA target sequence for E130107N23Rik (NM_173038.1,566-584).
gcaaacttgtcctcaacaa

SEQ ID NO: 782744 - DNA, 19 bp, Mus musculus
  siRNA target sequence for E130107N23Rik (NM_173038.1,651-669).
cctgtgccttaatgactat

SEQ ID NO: 782745 - DNA, 19 bp, Mus musculus
  siRNA target sequence for E130107N23Rik (NM_173038.1,736-754).
ctccaagactggactgaaa

SEQ ID NO: 782746 - DNA, 19 bp, Mus musculus
  siRNA target sequence for E130107N23Rik (NM_173038.1,757-775).
cgaaagctgggtgtaatgt

SEQ ID NO: 782747 - DNA, 19 bp, Mus musculus
  siRNA target sequence for E130107N23Rik (NM_173038.1,848-866).
ctaggttgttccctaatct

SEQ ID NO: 782748 - DNA, 19 bp, Mus musculus
  siRNA target sequence for E130107N23Rik (NM_173038.1,905-923).
gggaagacattgacaaact

SEQ ID NO: 782749 - DNA, 19 bp, Mus musculus
  siRNA target sequence for E130107N23Rik (NM_173038.1,929-947).
cattccccaagcttgaaga

SEQ ID NO: 782750 - DNA, 19 bp, Mus musculus
  siRNA target sequence for E130107N23Rik (NM_173038.1,951-969).
gagattgctaggaattcct

SEQ ID NO: 782751 - DNA, 19 bp, Mus musculus
  siRNA target sequence for E130107N23Rik (NM_173038.1,957-975).
gctaggaattcctcttcta

SEQ ID NO: 782752 - DNA, 19 bp, Mus musculus
  siRNA target sequence for E130107N23Rik (NM_173038.1,989-1007).
ccgaggaacgcaggaaatt

SEQ ID NO: 782753 - DNA, 19 bp, Mus musculus
  siRNA target sequence for E130107N23Rik (NM_173038.1,1019-1037).
gattgccctccgtttccaa

SEQ ID NO: 782754 - DNA, 19 bp, Mus musculus
  siRNA target sequence for E130107N23Rik (NM_173038.1,1025-1043).
cctccgtttccaaactcaa

SEQ ID NO: 782755 - DNA, 19 bp, Mus musculus
  siRNA target sequence for E130107N23Rik (NM_173038.1,1075-1093).
gattccgagaggtttttca

SEQ ID NO: 782756 - DNA, 19 bp, Mus musculus
  siRNA target sequence for E130107N23Rik (NM_173038.1,1137-1155).
gtatcatgagctcattaca

SEQ ID NO: 782757 - DNA, 19 bp, Mus musculus
  siRNA target sequence for E130107N23Rik (NM_173038.1,1205-1223).
gcagtgcgaaagtagaagt

SEQ ID NO: 782758 - DNA, 19 bp, Mus musculus
  siRNA target sequence for E130107N23Rik (NM_173038.1,1206-1224).
cagtgcgaaagtagaagtt

SEQ ID NO: 782759 - DNA, 19 bp, Mus musculus
  siRNA target sequence for E130107N23Rik (NM_173038.1,1208-1226).
gtgcgaaagtagaagttca

SEQ ID NO: 782760 - DNA, 19 bp, Mus musculus
  siRNA target sequence for E130107N23Rik (NM_173038.1,1319-1337).
ccagcagcatgcttctcta

SEQ ID NO: 782761 - DNA, 19 bp, Mus musculus
  siRNA target sequence for E130107N23Rik (NM_173038.1,1322-1340).
gcagcatgcttctctacta

SEQ ID NO: 782762 - DNA, 19 bp, Mus musculus
  siRNA target sequence for E130107N23Rik (NM_173038.1,1325-1343).
gcatgcttctctactactt

SEQ ID NO: 782763 - DNA, 19 bp, Mus musculus
  siRNA target sequence for E130107N23Rik (NM_173038.1,1326-1344).
catgcttctctactacttt

SEQ ID NO: 782764 - DNA, 19 bp, Mus musculus
  siRNA target sequence for E130107N23Rik (NM_173038.1,1363-1381).
ggcccagaggagatgaagt

SEQ ID NO: 782765 - DNA, 19 bp, Mus musculus
  siRNA target sequence for E130107N23Rik (NM_173038.1,1410-1428).
cattagggatggagataaa

SEQ ID NO: 782766 - DNA, 19 bp, Mus musculus
  siRNA target sequence for Sprr4 (NM_173070.1,80-98).
cacctcctaccaaatgtca

SEQ ID NO: 782767 - DNA, 19 bp, Mus musculus
  siRNA target sequence for Sprr4 (NM_173070.1,100-118).
gaggcatgtgtgcctaaaa

SEQ ID NO: 782768 - DNA, 19 bp, Mus musculus
  siRNA target sequence for Sprr4 (NM_173070.1,131-149).
gtgttcctcaggccaaaaa

SEQ ID NO: 782769 - DNA, 19 bp, Mus musculus
  siRNA target sequence for Stk18 (NM_173169.1,1467-1485).
ccaaaagcaatgtcaatgt

SEQ ID NO: 782770 - DNA, 19 bp, Mus musculus
  siRNA target sequence for Stk18 (NM_173169.1,1474-1492).
caatgtcaatgttttaact

SEQ ID NO: 782771 - DNA, 19 bp, Mus musculus
  siRNA target sequence for Stk18 (NM_173169.1,1511-1529).
ccaatagttaaggatcttt

SEQ ID NO: 782772 - DNA, 19 bp, Mus musculus
  siRNA target sequence for Stk18 (NM_173169.1,1512-1530).
caatagttaaggatctttt

SEQ ID NO: 782773 - DNA, 19 bp, Mus musculus
  siRNA target sequence for Stk18 (NM_173169.1,1526-1544).
cttttgaaagaccgtataa

SEQ ID NO: 782774 - DNA, 19 bp, Mus musculus
  siRNA target sequence for Stk18 (NM_173169.1,1531-1549).
gaaagaccgtataatgact

SEQ ID NO: 782775 - DNA, 19 bp, Mus musculus
  siRNA target sequence for Stk18 (NM_173169.1,1546-1564).
gactgagcagtataaggat

SEQ ID NO: 782776 - DNA, 19 bp, Mus musculus
  siRNA target sequence for Stk18 (NM_173169.1,1548-1566).
ctgagcagtataaggataa

SEQ ID NO: 782777 - DNA, 19 bp, Mus musculus
  siRNA target sequence for Stk18 (NM_173169.1,1561-1579).
ggataatcttttaaactta

SEQ ID NO: 782778 - DNA, 19 bp, Mus musculus
  siRNA target sequence for Stk18 (NM_173169.1,1562-1580).
gataatcttttaaacttat

SEQ ID NO: 782779 - DNA, 19 bp, Mus musculus
  siRNA target sequence for Stk18 (NM_173169.1,1576-1594).
cttattgaacaagtttgat

SEQ ID NO: 782780 - DNA, 19 bp, Mus musculus
  siRNA target sequence for 3110050N22Rik (NM_173181.1,75-93).
cttgttgccctgcaagatt

SEQ ID NO: 782781 - DNA, 19 bp, Mus musculus
  siRNA target sequence for 3110050N22Rik (NM_173181.1,111-129).
cccgttggctctgaaaaaa

SEQ ID NO: 782782 - DNA, 19 bp, Mus musculus
  siRNA target sequence for 3110050N22Rik (NM_173181.1,113-131).
cgttggctctgaaaaaaca

SEQ ID NO: 782783 - DNA, 19 bp, Mus musculus
  siRNA target sequence for 3110050N22Rik (NM_173181.1,114-132).
gttggctctgaaaaaacat

SEQ ID NO: 782784 - DNA, 19 bp, Mus musculus
  siRNA target sequence for 3110050N22Rik (NM_173181.1,133-151).
ggacctatttgccagaaaa

SEQ ID NO: 782785 - DNA, 19 bp, Mus musculus
  siRNA target sequence for 3110050N22Rik (NM_173181.1,158-176).
ctaagaagcggaagacttt

SEQ ID NO: 782786 - DNA, 19 bp, Mus musculus
  siRNA target sequence for 3110050N22Rik (NM_173181.1,162-180).
gaagcggaagacttttgat

SEQ ID NO: 782787 - DNA, 19 bp, Mus musculus
  siRNA target sequence for 3110050N22Rik (NM_173181.1,194-212).
gagctgaagggactgatat

SEQ ID NO: 782788 - DNA, 19 bp, Mus musculus
  siRNA target sequence for 3110050N22Rik (NM_173181.1,216-234).
cacggtcaaacctctcaaa

SEQ ID NO: 782789 - DNA, 19 bp, Mus musculus
  siRNA target sequence for 3110050N22Rik (NM_173181.1,368-386).
cctcttacgacccagatta

SEQ ID NO: 782790 - DNA, 19 bp, Mus musculus
  siRNA target sequence for 3110050N22Rik (NM_173181.1,404-422).
gccagaggagattcaatga

SEQ ID NO: 782791 - DNA, 19 bp, Mus musculus
  siRNA target sequence for 3110050N22Rik (NM_173181.1,408-426).
gaggagattcaatgaaaat

SEQ ID NO: 782792 - DNA, 19 bp, Mus musculus
  siRNA target sequence for 3110050N22Rik (NM_173181.1,427-445).
gcagccgacagacatataa

SEQ ID NO: 782793 - DNA, 19 bp, Mus musculus
  siRNA target sequence for 3110050N22Rik (NM_173181.1,428-446).
cagccgacagacatataaa

SEQ ID NO: 782794 - DNA, 19 bp, Mus musculus
  siRNA target sequence for 3110050N22Rik (NM_173181.1,432-450).
cgacagacatataaacttt

SEQ ID NO: 782795 - DNA, 19 bp, Mus musculus
  siRNA target sequence for 3110050N22Rik (NM_173181.1,457-475).
gaacaggcagcacgtatta

SEQ ID NO: 782796 - DNA, 19 bp, Mus musculus
  siRNA target sequence for 3110050N22Rik (NM_173181.1,460-478).
caggcagcacgtattagta

SEQ ID NO: 782797 - DNA, 19 bp, Mus musculus
  siRNA target sequence for 3110050N22Rik (NM_173181.1,462-480).
ggcagcacgtattagtaat

SEQ ID NO: 782798 - DNA, 19 bp, Mus musculus
  siRNA target sequence for 3110050N22Rik (NM_173181.1,464-482).
cagcacgtattagtaataa

SEQ ID NO: 782799 - DNA, 19 bp, Mus musculus
  siRNA target sequence for 3110050N22Rik (NM_173181.1,483-501).
gggcaaattttctactgat

SEQ ID NO: 782800 - DNA, 19 bp, Mus musculus
  siRNA target sequence for 3110050N22Rik (NM_173181.1,517-535).
gcttctcggccacagtata

SEQ ID NO: 782801 - DNA, 19 bp, Mus musculus
  siRNA target sequence for 3110050N22Rik (NM_173181.1,538-556).
ccgtctccgcttaaaaaat

SEQ ID NO: 782802 - DNA, 19 bp, Mus musculus
  siRNA target sequence for 3110050N22Rik (NM_173181.1,603-621).
gccaagtactactagcaaa

SEQ ID NO: 782803 - DNA, 19 bp, Mus musculus
  siRNA target sequence for 3110050N22Rik (NM_173181.1,604-622).
ccaagtactactagcaaaa

SEQ ID NO: 782804 - DNA, 19 bp, Mus musculus
  siRNA target sequence for 3110050N22Rik (NM_173181.1,608-626).
gtactactagcaaaacaat

SEQ ID NO: 782805 - DNA, 19 bp, Mus musculus
  siRNA target sequence for 3110050N22Rik (NM_173181.1,639-657).
cacgggtaaagcatcttca

SEQ ID NO: 782806 - DNA, 19 bp, Mus musculus
  siRNA target sequence for 3110050N22Rik (NM_173181.1,642-660).
gggtaaagcatcttcagtt

SEQ ID NO: 782807 - DNA, 19 bp, Mus musculus
  siRNA target sequence for 3110050N22Rik (NM_173181.1,644-662).
gtaaagcatcttcagttaa

SEQ ID NO: 782808 - DNA, 19 bp, Mus musculus
  siRNA target sequence for 3110050N22Rik (NM_173181.1,678-696).
caaacctcagaccttatct

SEQ ID NO: 782809 - DNA, 19 bp, Mus musculus
  siRNA target sequence for 3110050N22Rik (NM_173181.1,690-708).
cttatctccttctcataga

SEQ ID NO: 782810 - DNA, 19 bp, Mus musculus
  siRNA target sequence for 3110050N22Rik (NM_173181.1,761-779).
ctcctagtttggcaagaaa

SEQ ID NO: 782811 - DNA, 19 bp, Mus musculus
  siRNA target sequence for 3110050N22Rik (NM_173181.1,790-808).
ggggtgcttaccaacaaaa

SEQ ID NO: 782812 - DNA, 19 bp, Mus musculus
  siRNA target sequence for 3110050N22Rik (NM_173181.1,792-810).
ggtgcttaccaacaaaaga

SEQ ID NO: 782813 - DNA, 19 bp, Mus musculus
  siRNA target sequence for 3110050N22Rik (NM_173181.1,793-811).
gtgcttaccaacaaaagaa

SEQ ID NO: 782814 - DNA, 19 bp, Mus musculus
  siRNA target sequence for 3110050N22Rik (NM_173181.1,813-831).
gactttgactgagaactat

SEQ ID NO: 782815 - DNA, 19 bp, Mus musculus
  siRNA target sequence for 3110050N22Rik (NM_173181.1,837-855).
caggccagatggagactat

SEQ ID NO: 782816 - DNA, 19 bp, Mus musculus
  siRNA target sequence for 3110050N22Rik (NM_173181.1,841-859).
ccagatggagactatacat

SEQ ID NO: 782817 - DNA, 19 bp, Mus musculus
  siRNA target sequence for 3110050N22Rik (NM_173181.1,844-862).
gatggagactatacatctt

SEQ ID NO: 782818 - DNA, 19 bp, Mus musculus
  siRNA target sequence for 3110050N22Rik (NM_173181.1,850-868).
gactatacatcttcagtta

SEQ ID NO: 782819 - DNA, 19 bp, Mus musculus
  siRNA target sequence for 3110050N22Rik (NM_173181.1,865-883).
gttaatggtggaaacagta

SEQ ID NO: 782820 - DNA, 19 bp, Mus musculus
  siRNA target sequence for 3110050N22Rik (NM_173181.1,886-904).
ggcatcgagggaaattcat

SEQ ID NO: 782821 - DNA, 19 bp, Mus musculus
  siRNA target sequence for 3110050N22Rik (NM_173181.1,905-923).
ctggacacttaccaaaatt

SEQ ID NO: 782822 - DNA, 19 bp, Mus musculus
  siRNA target sequence for 3110050N22Rik (NM_173181.1,950-968).
ctgttgagtgggcaaagtt

SEQ ID NO: 782823 - DNA, 19 bp, Mus musculus
  siRNA target sequence for 3110050N22Rik (NM_173181.1,952-970).
gttgagtgggcaaagttct

SEQ ID NO: 782824 - DNA, 19 bp, Mus musculus
  siRNA target sequence for 3110050N22Rik (NM_173181.1,980-998).
gtggcattcgaagaatgat

SEQ ID NO: 782825 - DNA, 19 bp, Mus musculus
  siRNA target sequence for C530046L02Rik (NM_173186.2,279-297).
cccccagggtacaattgct

SEQ ID NO: 782826 - DNA, 19 bp, Mus musculus
  siRNA target sequence for C530046L02Rik (NM_173186.2,280-298).
ccccagggtacaattgctt

SEQ ID NO: 782827 - DNA, 19 bp, Mus musculus
  siRNA target sequence for C530046L02Rik (NM_173186.2,485-503).
cagcgtgtacagtgacatt

SEQ ID NO: 782828 - DNA, 19 bp, Mus musculus
  siRNA target sequence for C530046L02Rik (NM_173186.2,487-505).
gcgtgtacagtgacattgt

SEQ ID NO: 782829 - DNA, 19 bp, Mus musculus
  siRNA target sequence for C530046L02Rik (NM_173186.2,542-560).
gcccttgcctgagtttgta

SEQ ID NO: 782830 - DNA, 19 bp, Mus musculus
  siRNA target sequence for C530046L02Rik (NM_173186.2,544-562).
ccttgcctgagtttgtaga

SEQ ID NO: 782831 - DNA, 19 bp, Mus musculus
  siRNA target sequence for C530046L02Rik (NM_173186.2,714-732).
gaagctgagtgtttcgaaa

SEQ ID NO: 782832 - DNA, 19 bp, Mus musculus
  siRNA target sequence for C530046L02Rik (NM_173186.2,735-753).
gcctgccgcatcttatcct

SEQ ID NO: 782833 - DNA, 19 bp, Mus musculus
  siRNA target sequence for C530046L02Rik (NM_173186.2,801-819).
gagtcttcctgtatgacat

SEQ ID NO: 782834 - DNA, 19 bp, Mus musculus
  siRNA target sequence for C530046L02Rik (NM_173186.2,924-942).
ggggagctgcccctcaatt

SEQ ID NO: 782835 - DNA, 19 bp, Mus musculus
  siRNA target sequence for C530046L02Rik (NM_173186.2,925-943).
gggagctgcccctcaatta

SEQ ID NO: 782836 - DNA, 19 bp, Mus musculus
  siRNA target sequence for C530046L02Rik (NM_173186.2,927-945).
gagctgcccctcaattact

SEQ ID NO: 782837 - DNA, 19 bp, Mus musculus
  siRNA target sequence for C530046L02Rik (NM_173186.2,929-947).
gctgcccctcaattacttt

SEQ ID NO: 782838 - DNA, 19 bp, Mus musculus
  siRNA target sequence for C530046L02Rik (NM_173186.2,944-962).
ctttgcccgtgtttttgat

SEQ ID NO: 782839 - DNA, 19 bp, Mus musculus
  siRNA target sequence for C530046L02Rik (NM_173186.2,972-990).
gtagaaggctacaaagtat

SEQ ID NO: 782840 - DNA, 19 bp, Mus musculus
  siRNA target sequence for C530046L02Rik (NM_173186.2,1046-1064).
gccccttgagtcagacaat

SEQ ID NO: 782841 - DNA, 19 bp, Mus musculus
  siRNA target sequence for C530046L02Rik (NM_173186.2,1048-1066).
cccttgagtcagacaatgt

SEQ ID NO: 782842 - DNA, 19 bp, Mus musculus
  siRNA target sequence for C530046L02Rik (NM_173186.2,1074-1092).
gacatccgaatgtttgtca

SEQ ID NO: 782843 - DNA, 19 bp, Mus musculus
  siRNA target sequence for C530046L02Rik (NM_173186.2,1139-1157).
ctttgccatccgcctattt

SEQ ID NO: 782844 - DNA, 19 bp, Mus musculus
  siRNA target sequence for C530046L02Rik (NM_173186.2,1203-1221).
ctgaggcagaagggtataa

SEQ ID NO: 782845 - DNA, 19 bp, Mus musculus
  siRNA target sequence for C530046L02Rik (NM_173186.2,1205-1223).
gaggcagaagggtataact

SEQ ID NO: 782846 - DNA, 19 bp, Mus musculus
  siRNA target sequence for C530046L02Rik (NM_173186.2,1207-1225).
ggcagaagggtataactgt

SEQ ID NO: 782847 - DNA, 19 bp, Mus musculus
  siRNA target sequence for C530046L02Rik (NM_173186.2,1211-1229).
gaagggtataactgtcaaa

SEQ ID NO: 782848 - DNA, 19 bp, Mus musculus
  siRNA target sequence for C530046L02Rik (NM_173186.2,1437-1455).
ctcatcaagaccactcaaa

SEQ ID NO: 782849 - DNA, 19 bp, Mus musculus
  siRNA target sequence for C530046L02Rik (NM_173186.2,1487-1505).
ctggagcgagaggactaaa

SEQ ID NO: 782850 - DNA, 19 bp, Mus musculus
  siRNA target sequence for C530046L02Rik (NM_173186.2,1765-1783).
gcaatgactgcctcatcat

SEQ ID NO: 782851 - DNA, 19 bp, Mus musculus
  siRNA target sequence for 2310035C23Rik (NM_173187.1,228-246).
gcagtggtagcggagtaaa

SEQ ID NO: 782852 - DNA, 19 bp, Mus musculus
  siRNA target sequence for 2310035C23Rik (NM_173187.1,229-247).
cagtggtagcggagtaaat

SEQ ID NO: 782853 - DNA, 19 bp, Mus musculus
  siRNA target sequence for 2310035C23Rik (NM_173187.1,233-251).
ggtagcggagtaaatcctt

SEQ ID NO: 782854 - DNA, 19 bp, Mus musculus
  siRNA target sequence for 2310035C23Rik (NM_173187.1,234-252).
gtagcggagtaaatccttt

SEQ ID NO: 782855 - DNA, 19 bp, Mus musculus
  siRNA target sequence for 2310035C23Rik (NM_173187.1,460-478).
gacccctgcccgattgtca

SEQ ID NO: 782856 - DNA, 19 bp, Mus musculus
  siRNA target sequence for 2310035C23Rik (NM_173187.1,462-480).
cccctgcccgattgtcaat

SEQ ID NO: 782857 - DNA, 19 bp, Mus musculus
  siRNA target sequence for 2310035C23Rik (NM_173187.1,497-515).
cagctgttgcgcgatcaat

SEQ ID NO: 782858 - DNA, 19 bp, Mus musculus
  siRNA target sequence for 2310035C23Rik (NM_173187.1,500-518).
ctgttgcgcgatcaatact

SEQ ID NO: 782859 - DNA, 19 bp, Mus musculus
  siRNA target sequence for 2310035C23Rik (NM_173187.1,572-590).
ccacgactgcgcgattact

SEQ ID NO: 782860 - DNA, 19 bp, Mus musculus
  siRNA target sequence for 2310035C23Rik (NM_173187.1,573-591).
cacgactgcgcgattactt

SEQ ID NO: 782861 - DNA, 19 bp, Mus musculus
  siRNA target sequence for 2310035C23Rik (NM_173187.1,575-593).
cgactgcgcgattacttct

SEQ ID NO: 782862 - DNA, 19 bp, Mus musculus
  siRNA target sequence for 2310035C23Rik (NM_173187.1,728-746).
cgagctgggagcattagta

SEQ ID NO: 782863 - DNA, 19 bp, Mus musculus
  siRNA target sequence for 2310035C23Rik (NM_173187.1,744-762).
gtactcttgactcattaga

SEQ ID NO: 782864 - DNA, 19 bp, Mus musculus
  siRNA target sequence for 2310035C23Rik (NM_173187.1,747-765).
ctcttgactcattagactt

SEQ ID NO: 782865 - DNA, 19 bp, Mus musculus
  siRNA target sequence for 2310035C23Rik (NM_173187.1,857-875).
gccctccgagccaacctaa

SEQ ID NO: 782866 - DNA, 19 bp, Mus musculus
  siRNA target sequence for 2310035C23Rik (NM_173187.1,860-878).
ctccgagccaacctaacaa

SEQ ID NO: 782867 - DNA, 19 bp, Mus musculus
  siRNA target sequence for 2310035C23Rik (NM_173187.1,876-894).
caaaggctgcagaacatga

SEQ ID NO: 782868 - DNA, 19 bp, Mus musculus
  siRNA target sequence for 2310035C23Rik (NM_173187.1,952-970).
caaacctcttgaaaagaga

SEQ ID NO: 782869 - DNA, 19 bp, Mus musculus
  siRNA target sequence for 2310035C23Rik (NM_173187.1,979-997).
cttcctagtcaatgagttt

SEQ ID NO: 782870 - DNA, 19 bp, Mus musculus
  siRNA target sequence for 2310035C23Rik (NM_173187.1,983-1001).
ctagtcaatgagtttttgt

SEQ ID NO: 782871 - DNA, 19 bp, Mus musculus
  siRNA target sequence for 2310035C23Rik (NM_173187.1,1018-1036).
gcttacatcaataaccttt

SEQ ID NO: 782872 - DNA, 19 bp, Mus musculus
  siRNA target sequence for 2310035C23Rik (NM_173187.1,1019-1037).
cttacatcaataacctttt

SEQ ID NO: 782873 - DNA, 19 bp, Mus musculus
  siRNA target sequence for 2310035C23Rik (NM_173187.1,1049-1067).
gatgatcaggattttgaat

SEQ ID NO: 782874 - DNA, 19 bp, Mus musculus
  siRNA target sequence for 2310035C23Rik (NM_173187.1,1073-1091).
gatgatgtaggattaaaca

SEQ ID NO: 782875 - DNA, 19 bp, Mus musculus
  siRNA target sequence for 2310035C23Rik (NM_173187.1,1096-1114).
caaacccccagacttgtta

SEQ ID NO: 782876 - DNA, 19 bp, Mus musculus
  siRNA target sequence for 2310035C23Rik (NM_173187.1,1101-1119).
ccccagacttgttacaact

SEQ ID NO: 782877 - DNA, 19 bp, Mus musculus
  siRNA target sequence for 2310035C23Rik (NM_173187.1,1102-1120).
cccagacttgttacaactt

SEQ ID NO: 782878 - DNA, 19 bp, Mus musculus
  siRNA target sequence for 2310035C23Rik (NM_173187.1,1103-1121).
ccagacttgttacaacttt

SEQ ID NO: 782879 - DNA, 19 bp, Mus musculus
  siRNA target sequence for 2310035C23Rik (NM_173187.1,1118-1136).
ctttaccgagactttggaa

SEQ ID NO: 782880 - DNA, 19 bp, Mus musculus
  siRNA target sequence for 2310035C23Rik (NM_173187.1,1123-1141).
ccgagactttggaaatcat

SEQ ID NO: 782881 - DNA, 19 bp, Mus musculus
  siRNA target sequence for 2310035C23Rik (NM_173187.1,1199-1217).
gaggctcttacaccaattt

SEQ ID NO: 782882 - DNA, 19 bp, Mus musculus
  siRNA target sequence for 2310035C23Rik (NM_173187.1,1201-1219).
ggctcttacaccaatttta

SEQ ID NO: 782883 - DNA, 19 bp, Mus musculus
  siRNA target sequence for 2310035C23Rik (NM_173187.1,1226-1244).
gtccctccaacccttgata

SEQ ID NO: 782884 - DNA, 19 bp, Mus musculus
  siRNA target sequence for 2310035C23Rik (NM_173187.1,1245-1263).
ctcccctgcctatagagaa

SEQ ID NO: 782885 - DNA, 19 bp, Mus musculus
  siRNA target sequence for 2310035C23Rik (NM_173187.1,1266-1284).
ccttgctagtacagaaatt

SEQ ID NO: 782886 - DNA, 19 bp, Mus musculus
  siRNA target sequence for 2310035C23Rik (NM_173187.1,1267-1285).
cttgctagtacagaaatta

SEQ ID NO: 782887 - DNA, 19 bp, Mus musculus
  siRNA target sequence for 2310035C23Rik (NM_173187.1,1320-1338).
ggtcattgatggagcaaat

SEQ ID NO: 782888 - DNA, 19 bp, Mus musculus
  siRNA target sequence for 2310035C23Rik (NM_173187.1,1366-1384).
cctcaaagctgaacacttt

SEQ ID NO: 782889 - DNA, 19 bp, Mus musculus
  siRNA target sequence for 2310035C23Rik (NM_173187.1,1390-1408).
cccagcagttggtgattct

SEQ ID NO: 782890 - DNA, 19 bp, Mus musculus
  siRNA target sequence for 2310035C23Rik (NM_173187.1,1465-1483).
cccagctgtaaatagttca

SEQ ID NO: 782891 - DNA, 19 bp, Mus musculus
  siRNA target sequence for 2310035C23Rik (NM_173187.1,1501-1519).
ggatgttcatcttgaaata

SEQ ID NO: 782892 - DNA, 19 bp, Mus musculus
  siRNA target sequence for 2310035C23Rik (NM_173187.1,1633-1651).
cgatcagcccaataggaaa

SEQ ID NO: 782893 - DNA, 19 bp, Mus musculus
  siRNA target sequence for 2310035C23Rik (NM_173187.1,1634-1652).
gatcagcccaataggaaat

SEQ ID NO: 782894 - DNA, 19 bp, Mus musculus
  siRNA target sequence for 2310035C23Rik (NM_173187.1,1637-1655).
cagcccaataggaaattgt

SEQ ID NO: 782895 - DNA, 19 bp, Mus musculus
  siRNA target sequence for 2310035C23Rik (NM_173187.1,1639-1657).
gcccaataggaaattgtca

SEQ ID NO: 782896 - DNA, 19 bp, Mus musculus
  siRNA target sequence for 2310035C23Rik (NM_173187.1,1700-1718).
gcagatagtcggttaggat

SEQ ID NO: 782897 - DNA, 19 bp, Mus musculus
  siRNA target sequence for 2310035C23Rik (NM_173187.1,1819-1837).
ggagttgattcctctcata

SEQ ID NO: 782898 - DNA, 19 bp, Mus musculus
  siRNA target sequence for 2310035C23Rik (NM_173187.1,1820-1838).
gagttgattcctctcatat

SEQ ID NO: 782899 - DNA, 19 bp, Mus musculus
  siRNA target sequence for 2310035C23Rik (NM_173187.1,1825-1843).
gattcctctcatattgtgt

SEQ ID NO: 782900 - DNA, 19 bp, Mus musculus
  siRNA target sequence for 2310035C23Rik (NM_173187.1,1855-1873).
gcaccctgaacctaaagaa

SEQ ID NO: 782901 - DNA, 19 bp, Mus musculus
  siRNA target sequence for 2310035C23Rik (NM_173187.1,1875-1893).
gagaccagctcctccatat

SEQ ID NO: 782902 - DNA, 19 bp, Mus musculus
  siRNA target sequence for 2310035C23Rik (NM_173187.1,2011-2029).
gtgttgggaacagattaat

SEQ ID NO: 782903 - DNA, 19 bp, Mus musculus
  siRNA target sequence for 2310035C23Rik (NM_173187.1,2013-2031).
gttgggaacagattaatca

SEQ ID NO: 782904 - DNA, 19 bp, Mus musculus
  siRNA target sequence for 2310035C23Rik (NM_173187.1,2017-2035).
ggaacagattaatcacaaa

SEQ ID NO: 782905 - DNA, 19 bp, Mus musculus
  siRNA target sequence for 2310035C23Rik (NM_173187.1,2018-2036).
gaacagattaatcacaaat

SEQ ID NO: 782906 - DNA, 19 bp, Mus musculus
  siRNA target sequence for 2310035C23Rik (NM_173187.1,2080-2098).
ggcaccttaccttcctaaa

SEQ ID NO: 782907 - DNA, 19 bp, Mus musculus
  siRNA target sequence for 2310035C23Rik (NM_173187.1,2082-2100).
caccttaccttcctaaaga

SEQ ID NO: 782908 - DNA, 19 bp, Mus musculus
  siRNA target sequence for 2310035C23Rik (NM_173187.1,2084-2102).
ccttaccttcctaaagaaa

SEQ ID NO: 782909 - DNA, 19 bp, Mus musculus
  siRNA target sequence for 2310035C23Rik (NM_173187.1,2085-2103).
cttaccttcctaaagaaat

SEQ ID NO: 782910 - DNA, 19 bp, Mus musculus
  siRNA target sequence for 2310035C23Rik (NM_173187.1,2105-2123).
cgtagttccctggttcttt

SEQ ID NO: 782911 - DNA, 19 bp, Mus musculus
  siRNA target sequence for 2310035C23Rik (NM_173187.1,2197-2215).
cattatgggctacattgat

SEQ ID NO: 782912 - DNA, 19 bp, Mus musculus
  siRNA target sequence for 2310035C23Rik (NM_173187.1,2209-2227).
cattgatgatcctgacaaa

SEQ ID NO: 782913 - DNA, 19 bp, Mus musculus
  siRNA target sequence for 2310035C23Rik (NM_173187.1,2261-2279).
ctgggtgatccctcagaaa

SEQ ID NO: 782914 - DNA, 19 bp, Mus musculus
  siRNA target sequence for 2310035C23Rik (NM_173187.1,2263-2281).
gggtgatccctcagaaaga

SEQ ID NO: 782915 - DNA, 19 bp, Mus musculus
  siRNA target sequence for 2310035C23Rik (NM_173187.1,2289-2307).
gtgcaacacaccaagtatt

SEQ ID NO: 782916 - DNA, 19 bp, Mus musculus
  siRNA target sequence for 2310035C23Rik (NM_173187.1,2331-2349).
caactgaacttggaaactt

SEQ ID NO: 782917 - DNA, 19 bp, Mus musculus
  siRNA target sequence for 2310035C23Rik (NM_173187.1,2351-2369).
cagtctcatcttataccta

SEQ ID NO: 782918 - DNA, 19 bp, Mus musculus
  siRNA target sequence for 2310035C23Rik (NM_173187.1,2366-2384).
cctacactactgaacaaga

SEQ ID NO: 782919 - DNA, 19 bp, Mus musculus
  siRNA target sequence for 2310035C23Rik (NM_173187.1,2367-2385).
ctacactactgaacaagat

SEQ ID NO: 782920 - DNA, 19 bp, Mus musculus
  siRNA target sequence for 2310035C23Rik (NM_173187.1,2461-2479).
cttgatcccatctctcttt

SEQ ID NO: 782921 - DNA, 19 bp, Mus musculus
  siRNA target sequence for 2310035C23Rik (NM_173187.1,2469-2487).
catctctctttgcattagt

SEQ ID NO: 782922 - DNA, 19 bp, Mus musculus
  siRNA target sequence for 2310035C23Rik (NM_173187.1,2529-2547).
gtgaagtaccacatattga

SEQ ID NO: 782923 - DNA, 19 bp, Mus musculus
  siRNA target sequence for 2310035C23Rik (NM_173187.1,2687-2705).
ctctgggttgtcaatcaat

SEQ ID NO: 782924 - DNA, 19 bp, Mus musculus
  siRNA target sequence for 2310035C23Rik (NM_173187.1,2710-2728).
gccacagcttatagaaata

SEQ ID NO: 782925 - DNA, 19 bp, Mus musculus
  siRNA target sequence for 2310035C23Rik (NM_173187.1,2754-2772).
ctgcctgtgtccatgaatt

SEQ ID NO: 782926 - DNA, 19 bp, Mus musculus
  siRNA target sequence for 2310035C23Rik (NM_173187.1,2756-2774).
gcctgtgtccatgaattct

SEQ ID NO: 782927 - DNA, 19 bp, Mus musculus
  siRNA target sequence for 2310035C23Rik (NM_173187.1,2764-2782).
ccatgaattctccagattt

SEQ ID NO: 782928 - DNA, 19 bp, Mus musculus
  siRNA target sequence for 2310035C23Rik (NM_173187.1,2788-2806).
gcgtctttgccggacattt

SEQ ID NO: 782929 - DNA, 19 bp, Mus musculus
  siRNA target sequence for 2310035C23Rik (NM_173187.1,2797-2815).
ccggacatttggcaaaatt

SEQ ID NO: 782930 - DNA, 19 bp, Mus musculus
  siRNA target sequence for 2310035C23Rik (NM_173187.1,2936-2954).
ggagtcctcacgtgttaca

SEQ ID NO: 782931 - DNA, 19 bp, Mus musculus
  siRNA target sequence for 2310035C23Rik (NM_173187.1,2937-2955).
gagtcctcacgtgttacat

SEQ ID NO: 782932 - DNA, 19 bp, Mus musculus
  siRNA target sequence for 2310035C23Rik (NM_173187.1,3106-3124).
gtggtatggtgttgttcat

SEQ ID NO: 782933 - DNA, 19 bp, Mus musculus
  siRNA target sequence for 2310035C23Rik (NM_173187.1,3109-3127).
gtatggtgttgttcatact

SEQ ID NO: 782934 - DNA, 19 bp, Mus musculus
  siRNA target sequence for 2310035C23Rik (NM_173187.1,3272-3290).
ccagcatttggcactatta

SEQ ID NO: 782935 - DNA, 19 bp, Mus musculus
  siRNA target sequence for 2310035C23Rik (NM_173187.1,3273-3291).
cagcatttggcactattat

SEQ ID NO: 782936 - DNA, 19 bp, Mus musculus
  siRNA target sequence for 2310035C23Rik (NM_173187.1,3390-3408).
cagaggtcatccgaacatt

SEQ ID NO: 782937 - DNA, 19 bp, Mus musculus
  siRNA target sequence for 2310035C23Rik (NM_173187.1,3435-3453).
cccggttccgagatgagtt

SEQ ID NO: 782938 - DNA, 19 bp, Mus musculus
  siRNA target sequence for 2310035C23Rik (NM_173187.1,3436-3454).
ccggttccgagatgagttt

SEQ ID NO: 782939 - DNA, 19 bp, Mus musculus
  siRNA target sequence for 2310035C23Rik (NM_173187.1,3438-3456).
ggttccgagatgagtttgt

SEQ ID NO: 782940 - DNA, 19 bp, Mus musculus
  siRNA target sequence for 2310035C23Rik (NM_173187.1,3439-3457).
gttccgagatgagtttgtt

SEQ ID NO: 782941 - DNA, 19 bp, Mus musculus
  siRNA target sequence for 2310035C23Rik (NM_173187.1,3442-3460).
ccgagatgagtttgttata

SEQ ID NO: 782942 - DNA, 19 bp, Mus musculus
  siRNA target sequence for 2310035C23Rik (NM_173187.1,3451-3469).
gtttgttataccacattta

SEQ ID NO: 782943 - DNA, 19 bp, Mus musculus
  siRNA target sequence for 2310035C23Rik (NM_173187.1,3455-3473).
gttataccacatttacata

SEQ ID NO: 782944 - DNA, 19 bp, Mus musculus
  siRNA target sequence for 2310035C23Rik (NM_173187.1,3480-3498).
ccttggtgaacaacttaca

SEQ ID NO: 782945 - DNA, 19 bp, Mus musculus
  siRNA target sequence for 2310035C23Rik (NM_173187.1,3481-3499).
cttggtgaacaacttacaa

SEQ ID NO: 782946 - DNA, 19 bp, Mus musculus
  siRNA target sequence for 2310035C23Rik (NM_173187.1,3484-3502).
ggtgaacaacttacaaatt

SEQ ID NO: 782947 - DNA, 19 bp, Mus musculus
  siRNA target sequence for 2310035C23Rik (NM_173187.1,3487-3505).
gaacaacttacaaattgta

SEQ ID NO: 782948 - DNA, 19 bp, Mus musculus
  siRNA target sequence for 2310035C23Rik (NM_173187.1,3520-3538).
ggacattgcgactcatctt

SEQ ID NO: 782949 - DNA, 19 bp, Mus musculus
  siRNA target sequence for 2310035C23Rik (NM_173187.1,3521-3539).
gacattgcgactcatcttt

SEQ ID NO: 782950 - DNA, 19 bp, Mus musculus
  siRNA target sequence for 2310035C23Rik (NM_173187.1,3523-3541).
cattgcgactcatcttttt

SEQ ID NO: 782951 - DNA, 19 bp, Mus musculus
  siRNA target sequence for 2310035C23Rik (NM_173187.1,3554-3572).
gcactctcctgttgtttca

SEQ ID NO: 782952 - DNA, 19 bp, Mus musculus
  siRNA target sequence for 2310035C23Rik (NM_173187.1,3555-3573).
cactctcctgttgtttcat

SEQ ID NO: 782953 - DNA, 19 bp, Mus musculus
  siRNA target sequence for 2310035C23Rik (NM_173187.1,3723-3741).
ctccaggctcaatgtcaat

SEQ ID NO: 782954 - DNA, 19 bp, Mus musculus
  siRNA target sequence for 2310035C23Rik (NM_173187.1,3772-3790).
gaccaagtttttgaacaaa

SEQ ID NO: 782955 - DNA, 19 bp, Mus musculus
  siRNA target sequence for AW610627 (NM_173364.3,213-231).
ctattccgtcagctcttta

SEQ ID NO: 782956 - DNA, 19 bp, Mus musculus
  siRNA target sequence for AW610627 (NM_173364.3,232-250).
gacagcttcgctatcatga

SEQ ID NO: 782957 - DNA, 19 bp, Mus musculus
  siRNA target sequence for AW610627 (NM_173364.3,234-252).
cagcttcgctatcatgaat

SEQ ID NO: 782958 - DNA, 19 bp, Mus musculus
  siRNA target sequence for AW610627 (NM_173364.3,236-254).
gcttcgctatcatgaatct

SEQ ID NO: 782959 - DNA, 19 bp, Mus musculus
  siRNA target sequence for AW610627 (NM_173364.3,237-255).
cttcgctatcatgaatctt

SEQ ID NO: 782960 - DNA, 19 bp, Mus musculus
  siRNA target sequence for AW610627 (NM_173364.3,305-323).
gatgaggcctgatgttctt

SEQ ID NO: 782961 - DNA, 19 bp, Mus musculus
  siRNA target sequence for AW610627 (NM_173364.3,331-349).
cacagatgttagagttgtt

SEQ ID NO: 782962 - DNA, 19 bp, Mus musculus
  siRNA target sequence for AW610627 (NM_173364.3,537-555).
ctgcagcccgcacagatat

SEQ ID NO: 782963 - DNA, 19 bp, Mus musculus
  siRNA target sequence for AW610627 (NM_173364.3,559-577).
cccctgcatcacatctcaa

SEQ ID NO: 782964 - DNA, 19 bp, Mus musculus
  siRNA target sequence for AW610627 (NM_173364.3,564-582).
gcatcacatctcaagaaca

SEQ ID NO: 782965 - DNA, 19 bp, Mus musculus
  siRNA target sequence for AW610627 (NM_173364.3,599-617).
ccacttggagacttcacat

SEQ ID NO: 782966 - DNA, 19 bp, Mus musculus
  siRNA target sequence for AW610627 (NM_173364.3,633-651).
gacgtcctggctgaacaaa

SEQ ID NO: 782967 - DNA, 19 bp, Mus musculus
  siRNA target sequence for AW610627 (NM_173364.3,635-653).
cgtcctggctgaacaaact

SEQ ID NO: 782968 - DNA, 19 bp, Mus musculus
  siRNA target sequence for AW610627 (NM_173364.3,778-796).
cagctcagcgcaatcttta

SEQ ID NO: 782969 - DNA, 19 bp, Mus musculus
  siRNA target sequence for AW610627 (NM_173364.3,891-909).
ccatggggcgtgaacatct

SEQ ID NO: 782970 - DNA, 19 bp, Mus musculus
  siRNA target sequence for AW610627 (NM_173364.3,911-929).
cacggttcagcttaagaga

SEQ ID NO: 782971 - DNA, 19 bp, Mus musculus
  siRNA target sequence for AW610627 (NM_173364.3,951-969).
ggaggtaagcttcagatta

SEQ ID NO: 782972 - DNA, 19 bp, Mus musculus
  siRNA target sequence for AW610627 (NM_173364.3,995-1013).
gaaaccttctgaatacata

SEQ ID NO: 782973 - DNA, 19 bp, Mus musculus
  siRNA target sequence for AW610627 (NM_173364.3,1019-1037).
ctgtgtaaagacatcagta

SEQ ID NO: 782974 - DNA, 19 bp, Mus musculus
  siRNA target sequence for AW610627 (NM_173364.3,1066-1084).
cagggctcaaagaatcttt

SEQ ID NO: 782975 - DNA, 19 bp, Mus musculus
  siRNA target sequence for AW610627 (NM_173364.3,1068-1086).
gggctcaaagaatctttta

SEQ ID NO: 782976 - DNA, 19 bp, Mus musculus
  siRNA target sequence for AW610627 (NM_173364.3,1070-1088).
gctcaaagaatcttttaaa

SEQ ID NO: 782977 - DNA, 19 bp, Mus musculus
  siRNA target sequence for AW610627 (NM_173364.3,1112-1130).
ctgtggagactccatacaa

SEQ ID NO: 782978 - DNA, 19 bp, Mus musculus
  siRNA target sequence for AW610627 (NM_173364.3,1114-1132).
gtggagactccatacaaat

SEQ ID NO: 782979 - DNA, 19 bp, Mus musculus
  siRNA target sequence for AW610627 (NM_173364.3,1117-1135).
gagactccatacaaatgaa

SEQ ID NO: 782980 - DNA, 19 bp, Mus musculus
  siRNA target sequence for AW610627 (NM_173364.3,1145-1163).
ggaaggagccgacattagt

SEQ ID NO: 782981 - DNA, 19 bp, Mus musculus
  siRNA target sequence for AW610627 (NM_173364.3,1149-1167).
ggagccgacattagtcaaa

SEQ ID NO: 782982 - DNA, 19 bp, Mus musculus
  siRNA target sequence for AW610627 (NM_173364.3,1195-1213).
gaaacaatgatattcttga

SEQ ID NO: 782983 - DNA, 19 bp, Mus musculus
  siRNA target sequence for AW610627 (NM_173364.3,1294-1312).
gttcacaccattataataa

SEQ ID NO: 782984 - DNA, 19 bp, Mus musculus
  siRNA target sequence for AW610627 (NM_173364.3,1347-1365).
gggtttggtgtgtatcaga

SEQ ID NO: 782985 - DNA, 19 bp, Mus musculus
  siRNA target sequence for AW610627 (NM_173364.3,1348-1366).
ggtttggtgtgtatcagaa

SEQ ID NO: 782986 - DNA, 19 bp, Mus musculus
  siRNA target sequence for AW610627 (NM_173364.3,1349-1367).
gtttggtgtgtatcagaat

SEQ ID NO: 782987 - DNA, 19 bp, Mus musculus
  siRNA target sequence for AW610627 (NM_173364.3,1364-1382).
gaatactggactgaaagaa

SEQ ID NO: 782988 - DNA, 19 bp, Mus musculus
  siRNA target sequence for AW610627 (NM_173364.3,1498-1516).
cgttcaagtggcgttcaaa

SEQ ID NO: 782989 - DNA, 19 bp, Mus musculus
  siRNA target sequence for AW610627 (NM_173364.3,1517-1535).
ccgtatacggcatgagaaa

SEQ ID NO: 782990 - DNA, 19 bp, Mus musculus
  siRNA target sequence for AW610627 (NM_173364.3,1518-1536).
cgtatacggcatgagaaaa

SEQ ID NO: 782991 - DNA, 19 bp, Mus musculus
  siRNA target sequence for AW610627 (NM_173364.3,1519-1537).
gtatacggcatgagaaaat

SEQ ID NO: 782992 - DNA, 19 bp, Mus musculus
  siRNA target sequence for AW610627 (NM_173364.3,1554-1572).
ccttaccaatgcagcttat

SEQ ID NO: 782993 - DNA, 19 bp, Mus musculus
  siRNA target sequence for AW610627 (NM_173364.3,1600-1618).
cctaccgtctgcaccaaaa

SEQ ID NO: 782994 - DNA, 19 bp, Mus musculus
  siRNA target sequence for AW610627 (NM_173364.3,1601-1619).
ctaccgtctgcaccaaaaa

SEQ ID NO: 782995 - DNA, 19 bp, Mus musculus
  siRNA target sequence for AW610627 (NM_173364.3,1638-1656).
cgtggatccagtaagtaca

SEQ ID NO: 782996 - DNA, 19 bp, Mus musculus
  siRNA target sequence for AW610627 (NM_173364.3,1639-1657).
gtggatccagtaagtacaa

SEQ ID NO: 782997 - DNA, 19 bp, Mus musculus
  siRNA target sequence for AW610627 (NM_173364.3,1641-1659).
ggatccagtaagtacaaaa

SEQ ID NO: 782998 - DNA, 19 bp, Mus musculus
  siRNA target sequence for AW610627 (NM_173364.3,1642-1660).
gatccagtaagtacaaaaa

SEQ ID NO: 782999 - DNA, 19 bp, Mus musculus
  siRNA target sequence for AW610627 (NM_173364.3,1710-1728).
gagaggaaacacttacact

SEQ ID NO: 783000 - DNA, 19 bp, Mus musculus
  siRNA target sequence for AW610627 (NM_173364.3,1753-1771).
cctgtaagtcctatgctat

SEQ ID NO: 783001 - DNA, 19 bp, Mus musculus
  siRNA target sequence for AW610627 (NM_173364.3,1756-1774).
gtaagtcctatgctattga

SEQ ID NO: 783002 - DNA, 19 bp, Mus musculus
  siRNA target sequence for AW610627 (NM_173364.3,1816-1834).
ccagatgtaggaaaacctt

SEQ ID NO: 783003 - DNA, 19 bp, Mus musculus
  siRNA target sequence for AW610627 (NM_173364.3,1831-1849).
cctttcggtggaagtcaaa

SEQ ID NO: 783004 - DNA, 19 bp, Mus musculus
  siRNA target sequence for AW610627 (NM_173364.3,1846-1864).
caaacttttctcgtcatat

SEQ ID NO: 783005 - DNA, 19 bp, Mus musculus
  siRNA target sequence for AW610627 (NM_173364.3,1850-1868).
cttttctcgtcatatgaaa

SEQ ID NO: 783006 - DNA, 19 bp, Mus musculus
  siRNA target sequence for AW610627 (NM_173364.3,1872-1890).
catcacaaagaggtgtata

SEQ ID NO: 783007 - DNA, 19 bp, Mus musculus
  siRNA target sequence for AW610627 (NM_173364.3,1932-1950).
cagtctcaggttatctcta

SEQ ID NO: 783008 - DNA, 19 bp, Mus musculus
  siRNA target sequence for AW610627 (NM_173364.3,2065-2083).
gtggagaaacatttaccta

SEQ ID NO: 783009 - DNA, 19 bp, Mus musculus
  siRNA target sequence for AW610627 (NM_173364.3,2080-2098).
cctataggtcatcttatat

SEQ ID NO: 783010 - DNA, 19 bp, Mus musculus
  siRNA target sequence for AW610627 (NM_173364.3,2111-2129).
gcgaacgcaacatgctatt

SEQ ID NO: 783011 - DNA, 19 bp, Mus musculus
  siRNA target sequence for AW610627 (NM_173364.3,2112-2130).
cgaacgcaacatgctatta

SEQ ID NO: 783012 - DNA, 19 bp, Mus musculus
  siRNA target sequence for AW610627 (NM_173364.3,2113-2131).
gaacgcaacatgctattaa

SEQ ID NO: 783013 - DNA, 19 bp, Mus musculus
  siRNA target sequence for AW610627 (NM_173364.3,2116-2134).
cgcaacatgctattaaaat

SEQ ID NO: 783014 - DNA, 19 bp, Mus musculus
  siRNA target sequence for AW610627 (NM_173364.3,2144-2162).
gcatggctgcctaactttt

SEQ ID NO: 783015 - DNA, 19 bp, Mus musculus
  siRNA target sequence for AW610627 (NM_173364.3,2183-2201).
cattcctcggggtagtcat

SEQ ID NO: 783016 - DNA, 19 bp, Mus musculus
  siRNA target sequence for AW610627 (NM_173364.3,2187-2205).
cctcggggtagtcataata

SEQ ID NO: 783017 - DNA, 19 bp, Mus musculus
  siRNA target sequence for AW610627 (NM_173364.3,2191-2209).
ggggtagtcataatactga

SEQ ID NO: 783018 - DNA, 19 bp, Mus musculus
  siRNA target sequence for AW610627 (NM_173364.3,2208-2226).
gaggggtctaataagtgta

SEQ ID NO: 783019 - DNA, 19 bp, Mus musculus
  siRNA target sequence for AW610627 (NM_173364.3,2210-2228).
ggggtctaataagtgtaaa

SEQ ID NO: 783020 - DNA, 19 bp, Mus musculus
  siRNA target sequence for AW610627 (NM_173364.3,2211-2229).
gggtctaataagtgtaaat

SEQ ID NO: 783021 - DNA, 19 bp, Mus musculus
  siRNA target sequence for AW610627 (NM_173364.3,2212-2230).
ggtctaataagtgtaaata

SEQ ID NO: 783022 - DNA, 19 bp, Mus musculus
  siRNA target sequence for AW610627 (NM_173364.3,2331-2349).
cgatggagttccaatctct

SEQ ID NO: 783023 - DNA, 19 bp, Mus musculus
  siRNA target sequence for AW610627 (NM_173364.3,2332-2350).
gatggagttccaatctcta

SEQ ID NO: 783024 - DNA, 19 bp, Mus musculus
  siRNA target sequence for AW610627 (NM_173364.3,2348-2366).
ctaccgacatcagagaaaa

SEQ ID NO: 783025 - DNA, 19 bp, Mus musculus
  siRNA target sequence for AW610627 (NM_173364.3,2375-2393).
gcacaagcggtataagtat

SEQ ID NO: 783026 - DNA, 19 bp, Mus musculus
  siRNA target sequence for AW610627 (NM_173364.3,2384-2402).
gtataagtatcgtgaaagt

SEQ ID NO: 783027 - DNA, 19 bp, Mus musculus
  siRNA target sequence for AW610627 (NM_173364.3,2423-2441).
gtcaaaaattctcattgat

SEQ ID NO: 783028 - DNA, 19 bp, Mus musculus
  siRNA target sequence for AW610627 (NM_173364.3,2425-2443).
caaaaattctcattgatca

SEQ ID NO: 783029 - DNA, 19 bp, Mus musculus
  siRNA target sequence for AW610627 (NM_173364.3,2439-2457).
gatcagaagcccttttggt

SEQ ID NO: 783030 - DNA, 19 bp, Mus musculus
  siRNA target sequence for AW610627 (NM_173364.3,2448-2466).
cccttttggtgtcaagaat

SEQ ID NO: 783031 - DNA, 19 bp, Mus musculus
  siRNA target sequence for AW610627 (NM_173364.3,2491-2509).
gaagccttttagatcataa

SEQ ID NO: 783032 - DNA, 19 bp, Mus musculus
  siRNA target sequence for AW610627 (NM_173364.3,2543-2561).
caacttgtgtgaaaaatct

SEQ ID NO: 783033 - DNA, 19 bp, Mus musculus
  siRNA target sequence for AW610627 (NM_173364.3,2569-2587).
gaaactatcgacttgttaa

SEQ ID NO: 783034 - DNA, 19 bp, Mus musculus
  siRNA target sequence for AW610627 (NM_173364.3,2617-2635).
cacagtggcgtgataaaga

SEQ ID NO: 783035 - DNA, 19 bp, Mus musculus
  siRNA target sequence for AW610627 (NM_173364.3,2621-2639).
gtggcgtgataaagatttt

SEQ ID NO: 783036 - DNA, 19 bp, Mus musculus
  siRNA target sequence for AW610627 (NM_173364.3,2623-2641).
ggcgtgataaagattttgt

SEQ ID NO: 783037 - DNA, 19 bp, Mus musculus
  siRNA target sequence for AW610627 (NM_173364.3,2624-2642).
gcgtgataaagattttgtt

SEQ ID NO: 783038 - DNA, 19 bp, Mus musculus
  siRNA target sequence for AW610627 (NM_173364.3,2645-2663).
gatacatgcccgttctgtt

SEQ ID NO: 783039 - DNA, 19 bp, Mus musculus
  siRNA target sequence for AW610627 (NM_173364.3,2659-2677).
ctgttgaccagagaaaaca

SEQ ID NO: 783040 - DNA, 19 bp, Mus musculus
  siRNA target sequence for AW610627 (NM_173364.3,2684-2702).
cacgctgcagtctgaatat

SEQ ID NO: 783041 - DNA, 19 bp, Mus musculus
  siRNA target sequence for AW610627 (NM_173364.3,2720-2738).
gcctggcttatcttactgt

SEQ ID NO: 783042 - DNA, 19 bp, Mus musculus
  siRNA target sequence for AW610627 (NM_173364.3,2737-2755).
gtcaggatgtaaggttaaa

SEQ ID NO: 783043 - DNA, 19 bp, Mus musculus
  siRNA target sequence for AW610627 (NM_173364.3,2772-2790).
ggaaagctccgtaaagagt

SEQ ID NO: 783044 - DNA, 19 bp, Mus musculus
  siRNA target sequence for AW610627 (NM_173364.3,2789-2807).
gtgtgataacccttctgat

SEQ ID NO: 783045 - DNA, 19 bp, Mus musculus
  siRNA target sequence for AW610627 (NM_173364.3,2805-2823).
gatgagagttccaagtcaa

SEQ ID NO: 783046 - DNA, 19 bp, Mus musculus
  siRNA target sequence for AW610627 (NM_173364.3,2821-2839).
caattgcattccagaatgt

SEQ ID NO: 783047 - DNA, 19 bp, Mus musculus
  siRNA target sequence for AW610627 (NM_173364.3,2870-2888).
cagcacttgcgggaaaaca

SEQ ID NO: 783048 - DNA, 19 bp, Mus musculus
  siRNA target sequence for AW610627 (NM_173364.3,2872-2890).
gcacttgcgggaaaacatt

SEQ ID NO: 783049 - DNA, 19 bp, Mus musculus
  siRNA target sequence for AW610627 (NM_173364.3,2875-2893).
cttgcgggaaaacatttaa

SEQ ID NO: 783050 - DNA, 19 bp, Mus musculus
  siRNA target sequence for 1700006H02Rik (NM_173367.1,157-175).
catcgttccttaattcgtt

SEQ ID NO: 783051 - DNA, 19 bp, Mus musculus
  siRNA target sequence for B230314O19 (NM_173375.1,341-359).
cttgtcactgccattgaat

SEQ ID NO: 783052 - DNA, 19 bp, Mus musculus
  siRNA target sequence for B230314O19 (NM_173375.1,404-422).
gctcttgctagctgaaatt

SEQ ID NO: 783053 - DNA, 19 bp, Mus musculus
  siRNA target sequence for B230314O19 (NM_173375.1,495-513).
cactcaatctgcaataaca

SEQ ID NO: 783054 - DNA, 19 bp, Mus musculus
  siRNA target sequence for B230314O19 (NM_173375.1,499-517).
caatctgcaataacataat

SEQ ID NO: 783055 - DNA, 19 bp, Mus musculus
  siRNA target sequence for B230314O19 (NM_173375.1,520-538).
ccaagcgtatcccagatat

SEQ ID NO: 783056 - DNA, 19 bp, Mus musculus
  siRNA target sequence for B230314O19 (NM_173375.1,629-647).
ctatcggacagccttatct

SEQ ID NO: 783057 - DNA, 19 bp, Mus musculus
  siRNA target sequence for Tbc1d4 (NM_173380.1,708-726).
ccaacaccggggtgttcat

SEQ ID NO: 783058 - DNA, 19 bp, Mus musculus
  siRNA target sequence for Tbc1d4 (NM_173380.1,891-909).
gcatcaggcagttatccaa

SEQ ID NO: 783059 - DNA, 19 bp, Mus musculus
  siRNA target sequence for Tbc1d4 (NM_173380.1,1001-1019).
gtgatcgtgacccataaga

SEQ ID NO: 783060 - DNA, 19 bp, Mus musculus
  siRNA target sequence for Tbc1d4 (NM_173380.1,1346-1364).
gtcacaggcgtcatgcaaa

SEQ ID NO: 783061 - DNA, 19 bp, Mus musculus
  siRNA target sequence for Tbc1d4 (NM_173380.1,1501-1519).
cagtcccgacactaaatca

SEQ ID NO: 783062 - DNA, 19 bp, Mus musculus
  siRNA target sequence for Tbc1d4 (NM_173380.1,1503-1521).
gtcccgacactaaatcagt

SEQ ID NO: 783063 - DNA, 19 bp, Mus musculus
  siRNA target sequence for Tbc1d4 (NM_173380.1,1554-1572).
cttgttctcagggaataaa

SEQ ID NO: 783064 - DNA, 19 bp, Mus musculus
  siRNA target sequence for Tbc1d4 (NM_173380.1,1624-1642).
gagccagtacatctgttat

SEQ ID NO: 783065 - DNA, 19 bp, Mus musculus
  siRNA target sequence for Tbc1d4 (NM_173380.1,1626-1644).
gccagtacatctgttatgt

SEQ ID NO: 783066 - DNA, 19 bp, Mus musculus
  siRNA target sequence for Tbc1d4 (NM_173380.1,1728-1746).
gtgccaagacgcagattaa

SEQ ID NO: 783067 - DNA, 19 bp, Mus musculus
  siRNA target sequence for Tbc1d4 (NM_173380.1,1731-1749).
ccaagacgcagattaaact

SEQ ID NO: 783068 - DNA, 19 bp, Mus musculus
  siRNA target sequence for Tbc1d4 (NM_173380.1,1763-1781).
cccatgcactctttgcata

SEQ ID NO: 783069 - DNA, 19 bp, Mus musculus
  siRNA target sequence for Tbc1d4 (NM_173380.1,1783-1801).
gctctgtgagagaatcgaa

SEQ ID NO: 783070 - DNA, 19 bp, Mus musculus
  siRNA target sequence for Tbc1d4 (NM_173380.1,1815-1833).
ctcgagccaagctggtaat

SEQ ID NO: 783071 - DNA, 19 bp, Mus musculus
  siRNA target sequence for Tbc1d4 (NM_173380.1,1818-1836).
gagccaagctggtaatcca

SEQ ID NO: 783072 - DNA, 19 bp, Mus musculus
  siRNA target sequence for Tbc1d4 (NM_173380.1,1848-1866).
cttcgctgacggataacga

SEQ ID NO: 783073 - DNA, 19 bp, Mus musculus
  siRNA target sequence for Tbc1d4 (NM_173380.1,1864-1882).
cgagcaagctgacatcttt

SEQ ID NO: 783074 - DNA, 19 bp, Mus musculus
  siRNA target sequence for Tbc1d4 (NM_173380.1,1921-1939).
ggagaacgaacttgtgatt

SEQ ID NO: 783075 - DNA, 19 bp, Mus musculus
  siRNA target sequence for Tbc1d4 (NM_173380.1,2002-2020).
ggcgattatttcaaatagt

SEQ ID NO: 783076 - DNA, 19 bp, Mus musculus
  siRNA target sequence for Tbc1d4 (NM_173380.1,2005-2023).
gattatttcaaatagtaca

SEQ ID NO: 783077 - DNA, 19 bp, Mus musculus
  siRNA target sequence for Tbc1d4 (NM_173380.1,2060-2078).
cttgatgttctgaaaaaca

SEQ ID NO: 783078 - DNA, 19 bp, Mus musculus
  siRNA target sequence for Tbc1d4 (NM_173380.1,2081-2099).
gcgaagagatccttaactt

SEQ ID NO: 783079 - DNA, 19 bp, Mus musculus
  siRNA target sequence for Tbc1d4 (NM_173380.1,2546-2564).
gcatctcctgtgaacaagt

SEQ ID NO: 783080 - DNA, 19 bp, Mus musculus
  siRNA target sequence for Tbc1d4 (NM_173380.1,2654-2672).
cctctcattatcttcttgt

SEQ ID NO: 783081 - DNA, 19 bp, Mus musculus
  siRNA target sequence for Tbc1d4 (NM_173380.1,2730-2748).
gtctgtggaaaaaagctat

SEQ ID NO: 783082 - DNA, 19 bp, Mus musculus
  siRNA target sequence for 2810046L04Rik (NM_173382.1,480-498).
gacggtgctggatgaaatt

SEQ ID NO: 783083 - DNA, 19 bp, Mus musculus
  siRNA target sequence for 2810046L04Rik (NM_173382.1,484-502).
gtgctggatgaaattcgaa

SEQ ID NO: 783084 - DNA, 19 bp, Mus musculus
  siRNA target sequence for 2810046L04Rik (NM_173382.1,504-522).
ggctgttttaacggaatat

SEQ ID NO: 783085 - DNA, 19 bp, Mus musculus
  siRNA target sequence for 2810046L04Rik (NM_173382.1,505-523).
gctgttttaacggaatata

SEQ ID NO: 783086 - DNA, 19 bp, Mus musculus
  siRNA target sequence for 2810046L04Rik (NM_173382.1,506-524).
ctgttttaacggaatataa

SEQ ID NO: 783087 - DNA, 19 bp, Mus musculus
  siRNA target sequence for 2810046L04Rik (NM_173382.1,563-581).
gcgaacaggtggttgatct

SEQ ID NO: 783088 - DNA, 19 bp, Mus musculus
  siRNA target sequence for 2810046L04Rik (NM_173382.1,624-642).
gaaagcactccagcataaa

SEQ ID NO: 783089 - DNA, 19 bp, Mus musculus
  siRNA target sequence for 2810046L04Rik (NM_173382.1,629-647).
cactccagcataaaatggt

SEQ ID NO: 783090 - DNA, 19 bp, Mus musculus
  siRNA target sequence for 2810046L04Rik (NM_173382.1,721-739).
gagctcttggcctcaaaca

SEQ ID NO: 783091 - DNA, 19 bp, Mus musculus
  siRNA target sequence for 2810046L04Rik (NM_173382.1,753-771).
gaactctcgtcccattgaa

SEQ ID NO: 783092 - DNA, 19 bp, Mus musculus
  siRNA target sequence for 2810046L04Rik (NM_173382.1,758-776).
ctcgtcccattgaagattt

SEQ ID NO: 783093 - DNA, 19 bp, Mus musculus
  siRNA target sequence for 2810046L04Rik (NM_173382.1,760-778).
cgtcccattgaagatttat

SEQ ID NO: 783094 - DNA, 19 bp, Mus musculus
  siRNA target sequence for 2810046L04Rik (NM_173382.1,761-779).
gtcccattgaagatttatt

SEQ ID NO: 783095 - DNA, 19 bp, Mus musculus
  siRNA target sequence for 2810046L04Rik (NM_173382.1,772-790).
gatttattcagaatcaaca

SEQ ID NO: 783096 - DNA, 19 bp, Mus musculus
  siRNA target sequence for 2810046L04Rik (NM_173382.1,850-868).
gcccctcatgccatgattt

SEQ ID NO: 783097 - DNA, 19 bp, Mus musculus
  siRNA target sequence for 2810046L04Rik (NM_173382.1,909-927).
caaacccagtcgcatcaat

SEQ ID NO: 783098 - DNA, 19 bp, Mus musculus
  siRNA target sequence for 2810046L04Rik (NM_173382.1,913-931).
cccagtcgcatcaatggaa

SEQ ID NO: 783099 - DNA, 19 bp, Mus musculus
  siRNA target sequence for 2810046L04Rik (NM_173382.1,914-932).
ccagtcgcatcaatggaat

SEQ ID NO: 783100 - DNA, 19 bp, Mus musculus
  siRNA target sequence for 2810046L04Rik (NM_173382.1,915-933).
cagtcgcatcaatggaatt

SEQ ID NO: 783101 - DNA, 19 bp, Mus musculus
  siRNA target sequence for 2810046L04Rik (NM_173382.1,917-935).
gtcgcatcaatggaatttt

SEQ ID NO: 783102 - DNA, 19 bp, Mus musculus
  siRNA target sequence for 2810046L04Rik (NM_173382.1,1002-1020).
gattctcgggccatccaaa

SEQ ID NO: 783103 - DNA, 19 bp, Mus musculus
  siRNA target sequence for 2810046L04Rik (NM_173382.1,1126-1144).
gtaccattagccaatgtga

SEQ ID NO: 783104 - DNA, 19 bp, Mus musculus
  siRNA target sequence for 2810046L04Rik (NM_173382.1,1229-1247).
ctacacagagtcaaacatt

SEQ ID NO: 783105 - DNA, 19 bp, Mus musculus
  siRNA target sequence for 2810046L04Rik (NM_173382.1,1473-1491).
gcccgcaacgcctgttact

SEQ ID NO: 783106 - DNA, 19 bp, Mus musculus
  siRNA target sequence for 2810046L04Rik (NM_173382.1,1474-1492).
cccgcaacgcctgttactt

SEQ ID NO: 783107 - DNA, 19 bp, Mus musculus
  siRNA target sequence for 2810046L04Rik (NM_173382.1,1545-1563).
gccactgcccggtctatct

SEQ ID NO: 783108 - DNA, 19 bp, Mus musculus
  siRNA target sequence for 2810046L04Rik (NM_173382.1,1614-1632).
ggcttccagtgagacattt

SEQ ID NO: 783109 - DNA, 19 bp, Mus musculus
  siRNA target sequence for 2810046L04Rik (NM_173382.1,1931-1949).
cctctcttcccaatcgaaa

SEQ ID NO: 783110 - DNA, 19 bp, Mus musculus
  siRNA target sequence for 2810046L04Rik (NM_173382.1,1939-1957).
cccaatcgaaactcagatt

SEQ ID NO: 783111 - DNA, 19 bp, Mus musculus
  siRNA target sequence for 2810046L04Rik (NM_173382.1,1941-1959).
caatcgaaactcagattct

SEQ ID NO: 783112 - DNA, 19 bp, Mus musculus
  siRNA target sequence for 2810046L04Rik (NM_173382.1,1963-1981).
gcctcggccactaacaagt

SEQ ID NO: 783113 - DNA, 19 bp, Mus musculus
  siRNA target sequence for 2810046L04Rik (NM_173382.1,2098-2116).
gcacagtctccgttagcta

SEQ ID NO: 783114 - DNA, 19 bp, Mus musculus
  siRNA target sequence for 2810046L04Rik (NM_173382.1,2147-2165).
gctcctcaggctcactttt

SEQ ID NO: 783115 - DNA, 19 bp, Mus musculus
  siRNA target sequence for 2810046L04Rik (NM_173382.1,2209-2227).
gcaactatgcccgttatga

SEQ ID NO: 783116 - DNA, 19 bp, Mus musculus
  siRNA target sequence for 2810046L04Rik (NM_173382.1,2213-2231).
ctatgcccgttatgataaa

SEQ ID NO: 783117 - DNA, 19 bp, Mus musculus
  siRNA target sequence for 2810046L04Rik (NM_173382.1,2217-2235).
gcccgttatgataaaaagt

SEQ ID NO: 783118 - DNA, 19 bp, Mus musculus
  siRNA target sequence for 2810046L04Rik (NM_173382.1,2219-2237).
ccgttatgataaaaagtga

SEQ ID NO: 783119 - DNA, 19 bp, Mus musculus
  siRNA target sequence for 2810046L04Rik (NM_173382.1,2493-2511).
cacttcattgactaatagt

SEQ ID NO: 783120 - DNA, 19 bp, Mus musculus
  siRNA target sequence for 2810046L04Rik (NM_173382.1,2916-2934).
ggcacaagccggtttgtca

SEQ ID NO: 783121 - DNA, 19 bp, Mus musculus
  siRNA target sequence for 2810046L04Rik (NM_173382.1,2917-2935).
gcacaagccggtttgtcat

SEQ ID NO: 783122 - DNA, 19 bp, Mus musculus
  siRNA target sequence for 2810046L04Rik (NM_173382.1,3021-3039).
gtcgtccctgcaagagtta

SEQ ID NO: 783123 - DNA, 19 bp, Mus musculus
  siRNA target sequence for 2810046L04Rik (NM_173382.1,3023-3041).
cgtccctgcaagagttaca

SEQ ID NO: 783124 - DNA, 19 bp, Mus musculus
  siRNA target sequence for 2810046L04Rik (NM_173382.1,3056-3074).
cacagtcggctttgttaca

SEQ ID NO: 783125 - DNA, 19 bp, Mus musculus
  siRNA target sequence for 2810046L04Rik (NM_173382.1,3144-3162).
cacgccaggaacaccattt

SEQ ID NO: 783126 - DNA, 19 bp, Mus musculus
  siRNA target sequence for Cilp (NM_173385.1,554-572).
ccagaactgttccaattat

SEQ ID NO: 783127 - DNA, 19 bp, Mus musculus
  siRNA target sequence for Cilp (NM_173385.1,794-812).
ccccatgggccaggtaaat

SEQ ID NO: 783128 - DNA, 19 bp, Mus musculus
  siRNA target sequence for Cilp (NM_173385.1,797-815).
catgggccaggtaaatgct

SEQ ID NO: 783129 - DNA, 19 bp, Mus musculus
  siRNA target sequence for Cilp (NM_173385.1,1096-1114).
ccccatacattgtaatgaa

SEQ ID NO: 783130 - DNA, 19 bp, Mus musculus
  siRNA target sequence for Cilp (NM_173385.1,1179-1197).
cccagtccggacaagtact

SEQ ID NO: 783131 - DNA, 19 bp, Mus musculus
  siRNA target sequence for Cilp (NM_173385.1,1180-1198).
ccagtccggacaagtactt

SEQ ID NO: 783132 - DNA, 19 bp, Mus musculus
  siRNA target sequence for Cilp (NM_173385.1,1281-1299).
caagcaggggagtacttct

SEQ ID NO: 783133 - DNA, 19 bp, Mus musculus
  siRNA target sequence for Cilp (NM_173385.1,1284-1302).
gcaggggagtacttctgta

SEQ ID NO: 783134 - DNA, 19 bp, Mus musculus
  siRNA target sequence for Cilp (NM_173385.1,1285-1303).
caggggagtacttctgtaa

SEQ ID NO: 783135 - DNA, 19 bp, Mus musculus
  siRNA target sequence for Cilp (NM_173385.1,1349-1367).
cactgtcattgcacatgat

SEQ ID NO: 783136 - DNA, 19 bp, Mus musculus
  siRNA target sequence for Cilp (NM_173385.1,1387-1405).
ccccagagagctaccttat

SEQ ID NO: 783137 - DNA, 19 bp, Mus musculus
  siRNA target sequence for Cilp (NM_173385.1,1428-1446).
cagaacgccagcaattcct

SEQ ID NO: 783138 - DNA, 19 bp, Mus musculus
  siRNA target sequence for Cilp (NM_173385.1,1690-1708).
gctttggccatgtgtacat

SEQ ID NO: 783139 - DNA, 19 bp, Mus musculus
  siRNA target sequence for Cilp (NM_173385.1,1724-1742).
gagcatgactggctacaaa

SEQ ID NO: 783140 - DNA, 19 bp, Mus musculus
  siRNA target sequence for Cilp (NM_173385.1,1814-1832).
gtttgtcaacacaaccaaa

SEQ ID NO: 783141 - DNA, 19 bp, Mus musculus
  siRNA target sequence for Cilp (NM_173385.1,1861-1879).
cagtgttccacgagatcaa

SEQ ID NO: 783142 - DNA, 19 bp, Mus musculus
  siRNA target sequence for Cilp (NM_173385.1,1914-1932).
gccatggagaccaacatta

SEQ ID NO: 783143 - DNA, 19 bp, Mus musculus
  siRNA target sequence for Cilp (NM_173385.1,1976-1994).
ggagatcccatccaaaagt

SEQ ID NO: 783144 - DNA, 19 bp, Mus musculus
  siRNA target sequence for Cilp (NM_173385.1,1982-2000).
cccatccaaaagtttctat

SEQ ID NO: 783145 - DNA, 19 bp, Mus musculus
  siRNA target sequence for Cilp (NM_173385.1,2123-2141).
cacttttccccttagaaca

SEQ ID NO: 783146 - DNA, 19 bp, Mus musculus
  siRNA target sequence for Cilp (NM_173385.1,2130-2148).
ccccttagaacatatggta

SEQ ID NO: 783147 - DNA, 19 bp, Mus musculus
  siRNA target sequence for Cilp (NM_173385.1,2131-2149).
cccttagaacatatggtat

SEQ ID NO: 783148 - DNA, 19 bp, Mus musculus
  siRNA target sequence for Cilp (NM_173385.1,2175-2193).
gccacttccgagtcactta

SEQ ID NO: 783149 - DNA, 19 bp, Mus musculus
  siRNA target sequence for Cilp (NM_173385.1,2176-2194).
ccacttccgagtcacttaa

SEQ ID NO: 783150 - DNA, 19 bp, Mus musculus
  siRNA target sequence for Cilp (NM_173385.1,2177-2195).
cacttccgagtcacttaat

SEQ ID NO: 783151 - DNA, 19 bp, Mus musculus
  siRNA target sequence for Cilp (NM_173385.1,2301-2319).
gaggaaggggatttcaagt

SEQ ID NO: 783152 - DNA, 19 bp, Mus musculus
  siRNA target sequence for Cilp (NM_173385.1,2307-2325).
ggggatttcaagtttgaaa

SEQ ID NO: 783153 - DNA, 19 bp, Mus musculus
  siRNA target sequence for Cilp (NM_173385.1,2382-2400).
cgggagagaaggctcttta

SEQ ID NO: 783154 - DNA, 19 bp, Mus musculus
  siRNA target sequence for Cilp (NM_173385.1,2383-2401).
gggagagaaggctctttaa

SEQ ID NO: 783155 - DNA, 19 bp, Mus musculus
  siRNA target sequence for Cilp (NM_173385.1,2419-2437).
gccgaaggtgcttcattaa

SEQ ID NO: 783156 - DNA, 19 bp, Mus musculus
  siRNA target sequence for Cilp (NM_173385.1,2618-2636).
gtcccccgatgcttactct

SEQ ID NO: 783157 - DNA, 19 bp, Mus musculus
  siRNA target sequence for Cilp (NM_173385.1,2624-2642).
cgatgcttactctgtctat

SEQ ID NO: 783158 - DNA, 19 bp, Mus musculus
  siRNA target sequence for Cilp (NM_173385.1,2679-2697).
gttgagtcttctcctaaat

SEQ ID NO: 783159 - DNA, 19 bp, Mus musculus
  siRNA target sequence for Cilp (NM_173385.1,2722-2740).
ctcagccttacctcaacaa

SEQ ID NO: 783160 - DNA, 19 bp, Mus musculus
  siRNA target sequence for Cilp (NM_173385.1,2726-2744).
gccttacctcaacaaactt

SEQ ID NO: 783161 - DNA, 19 bp, Mus musculus
  siRNA target sequence for Cilp (NM_173385.1,2728-2746).
cttacctcaacaaacttaa

SEQ ID NO: 783162 - DNA, 19 bp, Mus musculus
  siRNA target sequence for Cilp (NM_173385.1,2766-2784).
gaggatccacgggttaaaa

SEQ ID NO: 783163 - DNA, 19 bp, Mus musculus
  siRNA target sequence for Cilp (NM_173385.1,2769-2787).
gatccacgggttaaaaaga

SEQ ID NO: 783164 - DNA, 19 bp, Mus musculus
  siRNA target sequence for Cilp (NM_173385.1,2837-2855).
gagcaatgggcctatctat

SEQ ID NO: 783165 - DNA, 19 bp, Mus musculus
  siRNA target sequence for Cilp (NM_173385.1,2847-2865).
cctatctatgcctttgaga

SEQ ID NO: 783166 - DNA, 19 bp, Mus musculus
  siRNA target sequence for Cilp (NM_173385.1,2848-2866).
ctatctatgcctttgagaa

SEQ ID NO: 783167 - DNA, 19 bp, Mus musculus
  siRNA target sequence for Cilp (NM_173385.1,2904-2922).
cacttccggttctatcaga

SEQ ID NO: 783168 - DNA, 19 bp, Mus musculus
  siRNA target sequence for Cilp (NM_173385.1,2925-2943).
gagggggatcgctatgact

SEQ ID NO: 783169 - DNA, 19 bp, Mus musculus
  siRNA target sequence for Cilp (NM_173385.1,2927-2945).
gggggatcgctatgactat

SEQ ID NO: 783170 - DNA, 19 bp, Mus musculus
  siRNA target sequence for Cilp (NM_173385.1,2928-2946).
ggggatcgctatgactata

SEQ ID NO: 783171 - DNA, 19 bp, Mus musculus
  siRNA target sequence for Cilp (NM_173385.1,2929-2947).
gggatcgctatgactataa

SEQ ID NO: 783172 - DNA, 19 bp, Mus musculus
  siRNA target sequence for Cilp (NM_173385.1,2931-2949).
gatcgctatgactataaca

SEQ ID NO: 783173 - DNA, 19 bp, Mus musculus
  siRNA target sequence for Cilp (NM_173385.1,3030-3048).
gcctgctatatcaaggtta

SEQ ID NO: 783174 - DNA, 19 bp, Mus musculus
  siRNA target sequence for Cilp (NM_173385.1,3031-3049).
cctgctatatcaaggttaa

SEQ ID NO: 783175 - DNA, 19 bp, Mus musculus
  siRNA target sequence for Cilp (NM_173385.1,3034-3052).
gctatatcaaggttaagat

SEQ ID NO: 783176 - DNA, 19 bp, Mus musculus
  siRNA target sequence for Cilp (NM_173385.1,3035-3053).
ctatatcaaggttaagatt

SEQ ID NO: 783177 - DNA, 19 bp, Mus musculus
  siRNA target sequence for Cilp (NM_173385.1,3202-3220).
gcagtggaatgctgtatga

SEQ ID NO: 783178 - DNA, 19 bp, Mus musculus
  siRNA target sequence for Cilp (NM_173385.1,3227-3245).
ccgtgtagaccgcacatta

SEQ ID NO: 783179 - DNA, 19 bp, Mus musculus
  siRNA target sequence for Cilp (NM_173385.1,3229-3247).
gtgtagaccgcacattagt

SEQ ID NO: 783180 - DNA, 19 bp, Mus musculus
  siRNA target sequence for Cilp (NM_173385.1,3236-3254).
ccgcacattagtaaaggtt

SEQ ID NO: 783181 - DNA, 19 bp, Mus musculus
  siRNA target sequence for Cilp (NM_173385.1,3237-3255).
cgcacattagtaaaggtta

SEQ ID NO: 783182 - DNA, 19 bp, Mus musculus
  siRNA target sequence for Cilp (NM_173385.1,3238-3256).
gcacattagtaaaggttat

SEQ ID NO: 783183 - DNA, 19 bp, Mus musculus
  siRNA target sequence for Cilp (NM_173385.1,3271-3289).
gccatcgagctagtgttaa

SEQ ID NO: 783184 - DNA, 19 bp, Mus musculus
  siRNA target sequence for Cilp (NM_173385.1,3273-3291).
catcgagctagtgttaact

SEQ ID NO: 783185 - DNA, 19 bp, Mus musculus
  siRNA target sequence for Cilp (NM_173385.1,3276-3294).
cgagctagtgttaactcta

SEQ ID NO: 783186 - DNA, 19 bp, Mus musculus
  siRNA target sequence for Cilp (NM_173385.1,3279-3297).
gctagtgttaactctatgt

SEQ ID NO: 783187 - DNA, 19 bp, Mus musculus
  siRNA target sequence for Cilp (NM_173385.1,3325-3343).
ccctggcagtcaacaatga

SEQ ID NO: 783188 - DNA, 19 bp, Mus musculus
  siRNA target sequence for Cilp (NM_173385.1,3342-3360).
gacaccagcgagtatacta

SEQ ID NO: 783189 - DNA, 19 bp, Mus musculus
  siRNA target sequence for Cilp (NM_173385.1,3385-3403).
gccacaattacggtatcta

SEQ ID NO: 783190 - DNA, 19 bp, Mus musculus
  siRNA target sequence for Cilp (NM_173385.1,3386-3404).
ccacaattacggtatctat

SEQ ID NO: 783191 - DNA, 19 bp, Mus musculus
  siRNA target sequence for Cilp (NM_173385.1,3387-3405).
cacaattacggtatctata

SEQ ID NO: 783192 - DNA, 19 bp, Mus musculus
  siRNA target sequence for Cilp (NM_173385.1,3389-3407).
caattacggtatctatact

SEQ ID NO: 783193 - DNA, 19 bp, Mus musculus
  siRNA target sequence for Cilp (NM_173385.1,3397-3415).
gtatctatactgttactga

SEQ ID NO: 783194 - DNA, 19 bp, Mus musculus
  siRNA target sequence for Cilp (NM_173385.1,3791-3809).
cagactgtcacttgttaat

SEQ ID NO: 783195 - DNA, 19 bp, Mus musculus
  siRNA target sequence for Cilp (NM_173385.1,3795-3813).
ctgtcacttgttaatttaa

SEQ ID NO: 783196 - DNA, 19 bp, Mus musculus
  siRNA target sequence for Cilp (NM_173385.1,3801-3819).
cttgttaatttaaacatat

SEQ ID NO: 783197 - DNA, 19 bp, Mus musculus
  siRNA target sequence for Cilp (NM_173385.1,3896-3914).
cacgatgacaaaacaaaga

SEQ ID NO: 783198 - DNA, 19 bp, Mus musculus
  siRNA target sequence for E330016A19Rik (NM_173386.1,596-614).
gaaccggacaagctaaaga

SEQ ID NO: 783199 - DNA, 19 bp, Mus musculus
  siRNA target sequence for E330016A19Rik (NM_173386.1,633-651).
gattgaaacgcaaagatat

SEQ ID NO: 783200 - DNA, 19 bp, Mus musculus
  siRNA target sequence for E330016A19Rik (NM_173386.1,664-682).
cgagacggtgaataaagtt

SEQ ID NO: 783201 - DNA, 19 bp, Mus musculus
  siRNA target sequence for E330016A19Rik (NM_173386.1,753-771).
gcagctactatgaacatgt

SEQ ID NO: 783202 - DNA, 19 bp, Mus musculus
  siRNA target sequence for E330016A19Rik (NM_173386.1,756-774).
gctactatgaacatgtgaa

SEQ ID NO: 783203 - DNA, 19 bp, Mus musculus
  siRNA target sequence for E330016A19Rik (NM_173386.1,772-790).
gaagatttctgctcctaat

SEQ ID NO: 783204 - DNA, 19 bp, Mus musculus
  siRNA target sequence for E330016A19Rik (NM_173386.1,780-798).
ctgctcctaatgaatttga

SEQ ID NO: 783205 - DNA, 19 bp, Mus musculus
  siRNA target sequence for E330016A19Rik (NM_173386.1,785-803).
cctaatgaatttgatgtta

SEQ ID NO: 783206 - DNA, 19 bp, Mus musculus
  siRNA target sequence for E330016A19Rik (NM_173386.1,825-843).
ggattgagctacaagaata

SEQ ID NO: 783207 - DNA, 19 bp, Mus musculus
  siRNA target sequence for E330016A19Rik (NM_173386.1,826-844).
gattgagctacaagaatat

SEQ ID NO: 783208 - DNA, 19 bp, Mus musculus
  siRNA target sequence for E330016A19Rik (NM_173386.1,855-873).
gtgctttctatcttgtgaa

SEQ ID NO: 783209 - DNA, 19 bp, Mus musculus
  siRNA target sequence for E330016A19Rik (NM_173386.1,871-889).
gaaattcaaaagaattcca

SEQ ID NO: 783210 - DNA, 19 bp, Mus musculus
  siRNA target sequence for E330016A19Rik (NM_173386.1,893-911).
ggaaatccgctgagtcatt

SEQ ID NO: 783211 - DNA, 19 bp, Mus musculus
  siRNA target sequence for E330016A19Rik (NM_173386.1,894-912).
gaaatccgctgagtcattt

SEQ ID NO: 783212 - DNA, 19 bp, Mus musculus
  siRNA target sequence for E330016A19Rik (NM_173386.1,901-919).
gctgagtcatttcttagaa

SEQ ID NO: 783213 - DNA, 19 bp, Mus musculus
  siRNA target sequence for E330016A19Rik (NM_173386.1,1033-1051).
ccctgctgtaacacttctt

SEQ ID NO: 783214 - DNA, 19 bp, Mus musculus
  siRNA target sequence for E330016A19Rik (NM_173386.1,1035-1053).
ctgctgtaacacttcttat

SEQ ID NO: 783215 - DNA, 19 bp, Mus musculus
  siRNA target sequence for E330016A19Rik (NM_173386.1,1106-1124).
ggcagctggcctattagta

SEQ ID NO: 783216 - DNA, 19 bp, Mus musculus
  siRNA target sequence for E330016A19Rik (NM_173386.1,1111-1129).
ctggcctattagtaccaaa

SEQ ID NO: 783217 - DNA, 19 bp, Mus musculus
  siRNA target sequence for E330016A19Rik (NM_173386.1,1114-1132).
gcctattagtaccaaagaa

SEQ ID NO: 783218 - DNA, 19 bp, Mus musculus
  siRNA target sequence for E330016A19Rik (NM_173386.1,1125-1143).
ccaaagaaggactacctat

SEQ ID NO: 783219 - DNA, 19 bp, Mus musculus
  siRNA target sequence for E330016A19Rik (NM_173386.1,1126-1144).
caaagaaggactacctatt

SEQ ID NO: 783220 - DNA, 19 bp, Mus musculus
  siRNA target sequence for E330016A19Rik (NM_173386.1,1149-1167).
gctggctgggcacaaaagt

SEQ ID NO: 783221 - DNA, 19 bp, Mus musculus
  siRNA target sequence for E330016A19Rik (NM_173386.1,1200-1218).
ctcgtacccaagaatgcaa

SEQ ID NO: 783222 - DNA, 19 bp, Mus musculus
  siRNA target sequence for BC042513 (NM_173388.1,183-201).
ggggttcgctgctcatcat

SEQ ID NO: 783223 - DNA, 19 bp, Mus musculus
  siRNA target sequence for BC042513 (NM_173388.1,232-250).
gtgtacgaagccagagaat

SEQ ID NO: 783224 - DNA, 19 bp, Mus musculus
  siRNA target sequence for BC042513 (NM_173388.1,327-345).
gtaaggcccaggatgagat

SEQ ID NO: 783225 - DNA, 19 bp, Mus musculus
  siRNA target sequence for BC042513 (NM_173388.1,565-583).
catgacgttcacttcgtta

SEQ ID NO: 783226 - DNA, 19 bp, Mus musculus
  siRNA target sequence for BC042513 (NM_173388.1,568-586).
gacgttcacttcgttaaca

SEQ ID NO: 783227 - DNA, 19 bp, Mus musculus
  siRNA target sequence for BC042513 (NM_173388.1,570-588).
cgttcacttcgttaacact

SEQ ID NO: 783228 - DNA, 19 bp, Mus musculus
  siRNA target sequence for BC042513 (NM_173388.1,604-622).
cgaccttcggtccacattt

SEQ ID NO: 783229 - DNA, 19 bp, Mus musculus
  siRNA target sequence for BC042513 (NM_173388.1,605-623).
gaccttcggtccacattta

SEQ ID NO: 783230 - DNA, 19 bp, Mus musculus
  siRNA target sequence for BC042513 (NM_173388.1,659-677).
gttaccttcccaggaataa

SEQ ID NO: 783231 - DNA, 19 bp, Mus musculus
  siRNA target sequence for BC042513 (NM_173388.1,663-681).
ccttcccaggaataaagct

SEQ ID NO: 783232 - DNA, 19 bp, Mus musculus
  siRNA target sequence for BC042513 (NM_173388.1,669-687).
caggaataaagctcatcta

SEQ ID NO: 783233 - DNA, 19 bp, Mus musculus
  siRNA target sequence for BC042513 (NM_173388.1,740-758).
ggcctggtttttttcaact

SEQ ID NO: 783234 - DNA, 19 bp, Mus musculus
  siRNA target sequence for BC042513 (NM_173388.1,1086-1104).
cacagctgcgacttatctt

SEQ ID NO: 783235 - DNA, 19 bp, Mus musculus
  siRNA target sequence for BC042513 (NM_173388.1,1088-1106).
cagctgcgacttatcttct

SEQ ID NO: 783236 - DNA, 19 bp, Mus musculus
  siRNA target sequence for BC042513 (NM_173388.1,1322-1340).
cgagacaggcagattcaga

SEQ ID NO: 783237 - DNA, 19 bp, Mus musculus
  siRNA target sequence for BC042513 (NM_173388.1,1455-1473).
caattgtgcgaggattcat

SEQ ID NO: 783238 - DNA, 19 bp, Mus musculus
  siRNA target sequence for BC013565 (NM_173390.2,56-74).
ggtccaacctaatacatca

SEQ ID NO: 783239 - DNA, 19 bp, Mus musculus
  siRNA target sequence for BC013565 (NM_173390.2,201-219).
gaccccgtggatgtatcta

SEQ ID NO: 783240 - DNA, 19 bp, Mus musculus
  siRNA target sequence for BC013565 (NM_173390.2,206-224).
cgtggatgtatctaaggaa

SEQ ID NO: 783241 - DNA, 19 bp, Mus musculus
  siRNA target sequence for BC013565 (NM_173390.2,239-257).
ggtgctgactccgactaaa

SEQ ID NO: 783242 - DNA, 19 bp, Mus musculus
  siRNA target sequence for BC013565 (NM_173390.2,309-327).
gtccttggccggaaagact

SEQ ID NO: 783243 - DNA, 19 bp, Mus musculus
  siRNA target sequence for BC013565 (NM_173390.2,336-354).
gatcacactcgaaatcact

SEQ ID NO: 783244 - DNA, 19 bp, Mus musculus
  siRNA target sequence for BC013565 (NM_173390.2,448-466).
ctaccagcagtgacaactt

SEQ ID NO: 783245 - DNA, 19 bp, Mus musculus
  siRNA target sequence for BC013565 (NM_173390.2,607-625).
gctgctcccccaacaagaa

SEQ ID NO: 783246 - DNA, 19 bp, Mus musculus
  siRNA target sequence for BC013565 (NM_173390.2,669-687).
cctcggagtctgtcctttt

SEQ ID NO: 783247 - DNA, 19 bp, Mus musculus
  siRNA target sequence for BC013565 (NM_173390.2,808-826).
ctgagccagcggacaacaa

SEQ ID NO: 783248 - DNA, 19 bp, Mus musculus
  siRNA target sequence for BC024502 (NM_173393.1,547-565).
gtgctagcttcctatcaca

SEQ ID NO: 783249 - DNA, 19 bp, Mus musculus
  siRNA target sequence for BC024502 (NM_173393.1,637-655).
cgcctcttcaccatctcat

SEQ ID NO: 783250 - DNA, 19 bp, Mus musculus
  siRNA target sequence for BC024502 (NM_173393.1,651-669).
ctcatcccgagttatctct

SEQ ID NO: 783251 - DNA, 19 bp, Mus musculus
  siRNA target sequence for BC024502 (NM_173393.1,653-671).
catcccgagttatctcttt

SEQ ID NO: 783252 - DNA, 19 bp, Mus musculus
  siRNA target sequence for BC024502 (NM_173393.1,686-704).
ccatcttccagctgtattt

SEQ ID NO: 783253 - DNA, 19 bp, Mus musculus
  siRNA target sequence for BC024502 (NM_173393.1,814-832).
gggatcgtgtacattttct

SEQ ID NO: 783254 - DNA, 19 bp, Mus musculus
  siRNA target sequence for BC024502 (NM_173393.1,857-875).
ggactcgataccgaatgtt

SEQ ID NO: 783255 - DNA, 19 bp, Mus musculus
  siRNA target sequence for BC024502 (NM_173393.1,867-885).
ccgaatgttcgcatactat

SEQ ID NO: 783256 - DNA, 19 bp, Mus musculus
  siRNA target sequence for BC024502 (NM_173393.1,868-886).
cgaatgttcgcatactata

SEQ ID NO: 783257 - DNA, 19 bp, Mus musculus
  siRNA target sequence for BC024502 (NM_173393.1,873-891).
gttcgcatactatacgata

SEQ ID NO: 783258 - DNA, 19 bp, Mus musculus
  siRNA target sequence for BC024502 (NM_173393.1,877-895).
gcatactatacgatagtct

SEQ ID NO: 783259 - DNA, 19 bp, Mus musculus
  siRNA target sequence for BC024502 (NM_173393.1,878-896).
catactatacgatagtctt

SEQ ID NO: 783260 - DNA, 19 bp, Mus musculus
  siRNA target sequence for BC024502 (NM_173393.1,976-994).
ctgtgttgtgtcttcgtta

SEQ ID NO: 783261 - DNA, 19 bp, Mus musculus
  siRNA target sequence for BC024502 (NM_173393.1,980-998).
gttgtgtcttcgttagctt

SEQ ID NO: 783262 - DNA, 19 bp, Mus musculus
  siRNA target sequence for BC024502 (NM_173393.1,1013-1031).
cgctcatgctcttatacta

SEQ ID NO: 783263 - DNA, 19 bp, Mus musculus
  siRNA target sequence for BC024502 (NM_173393.1,1014-1032).
gctcatgctcttatactat

SEQ ID NO: 783264 - DNA, 19 bp, Mus musculus
  siRNA target sequence for BC024502 (NM_173393.1,1107-1125).
ccctttgccccctgatgtt

SEQ ID NO: 783265 - DNA, 19 bp, Mus musculus
  siRNA target sequence for BC024502 (NM_173393.1,1203-1221).
ggacctcacggctgatact

SEQ ID NO: 783266 - DNA, 19 bp, Mus musculus
  siRNA target sequence for BC024502 (NM_173393.1,1204-1222).
gacctcacggctgatactt

SEQ ID NO: 783267 - DNA, 19 bp, Mus musculus
  siRNA target sequence for BC024502 (NM_173393.1,1220-1238).
cttgcctgccggtattcca

SEQ ID NO: 783268 - DNA, 19 bp, Mus musculus
  siRNA target sequence for BC024502 (NM_173393.1,1334-1352).
cctgggatgcgcactttgt

SEQ ID NO: 783269 - DNA, 19 bp, Mus musculus
  siRNA target sequence for BC024502 (NM_173393.1,1337-1355).
gggatgcgcactttgtaga

SEQ ID NO: 783270 - DNA, 19 bp, Mus musculus
  siRNA target sequence for BC024502 (NM_173393.1,1359-1377).
gaggctgcggaggactatt

SEQ ID NO: 783271 - DNA, 19 bp, Mus musculus
  siRNA target sequence for BC024502 (NM_173393.1,1361-1379).
ggctgcggaggactattaa

SEQ ID NO: 783272 - DNA, 19 bp, Mus musculus
  siRNA target sequence for BC024502 (NM_173393.1,1363-1381).
ctgcggaggactattaaca

SEQ ID NO: 783273 - DNA, 19 bp, Mus musculus
  siRNA target sequence for 4832406C22 (NM_173395.1,261-279).
gacaaggggatcaacagta

SEQ ID NO: 783274 - DNA, 19 bp, Mus musculus
  siRNA target sequence for 4832406C22 (NM_173395.1,521-539).
ggacccaggggcattgtta

SEQ ID NO: 783275 - DNA, 19 bp, Mus musculus
  siRNA target sequence for 4832406C22 (NM_173395.1,645-663).
cacgagcttgggatctact

SEQ ID NO: 783276 - DNA, 19 bp, Mus musculus
  siRNA target sequence for 4832406C22 (NM_173395.1,945-963).
caggcaggacactacactt

SEQ ID NO: 783277 - DNA, 19 bp, Mus musculus
  siRNA target sequence for 9430083K24Rik (NM_173399.2,93-111).
gaactaccagagacttcat

SEQ ID NO: 783278 - DNA, 19 bp, Mus musculus
  siRNA target sequence for 9430083K24Rik (NM_173399.2,122-140).
gtgactgtgtcattgtagt

SEQ ID NO: 783279 - DNA, 19 bp, Mus musculus
  siRNA target sequence for 9430083K24Rik (NM_173399.2,139-157).
gtggggaacaggcatttca

SEQ ID NO: 783280 - DNA, 19 bp, Mus musculus
  siRNA target sequence for 9430083K24Rik (NM_173399.2,240-258).
catgatccagctagatagt

SEQ ID NO: 783281 - DNA, 19 bp, Mus musculus
  siRNA target sequence for 9430083K24Rik (NM_173399.2,322-340).
ctaggggagagcaacgtta

SEQ ID NO: 783282 - DNA, 19 bp, Mus musculus
  siRNA target sequence for 9430083K24Rik (NM_173399.2,332-350).
gcaacgttatggatgtctt

SEQ ID NO: 783283 - DNA, 19 bp, Mus musculus
  siRNA target sequence for 9430083K24Rik (NM_173399.2,333-351).
caacgttatggatgtctta

SEQ ID NO: 783284 - DNA, 19 bp, Mus musculus
  siRNA target sequence for 9430083K24Rik (NM_173399.2,370-388).
catctgaactccgttgtta

SEQ ID NO: 783285 - DNA, 19 bp, Mus musculus
  siRNA target sequence for 9430083K24Rik (NM_173399.2,380-398).
ccgttgttaaggcatgtaa

SEQ ID NO: 783286 - DNA, 19 bp, Mus musculus
  siRNA target sequence for 9430083K24Rik (NM_173399.2,465-483).
ccgcatgcagcgctctttt

SEQ ID NO: 783287 - DNA, 19 bp, Mus musculus
  siRNA target sequence for 9430083K24Rik (NM_173399.2,466-484).
cgcatgcagcgctctttta

SEQ ID NO: 783288 - DNA, 19 bp, Mus musculus
  siRNA target sequence for 9430083K24Rik (NM_173399.2,467-485).
gcatgcagcgctcttttat

SEQ ID NO: 783289 - DNA, 19 bp, Mus musculus
  siRNA target sequence for 9430083K24Rik (NM_173399.2,608-626).
ccatgagacgccttcacaa

SEQ ID NO: 783290 - DNA, 19 bp, Mus musculus
  siRNA target sequence for 9430083K24Rik (NM_173399.2,619-637).
cttcacaagcgcaaacagt

SEQ ID NO: 783291 - DNA, 19 bp, Mus musculus
  siRNA target sequence for 9430083K24Rik (NM_173399.2,755-773).
cggattctctgaaaattgt

SEQ ID NO: 783292 - DNA, 19 bp, Mus musculus
  siRNA target sequence for 9430083K24Rik (NM_173399.2,765-783).
gaaaattgtggataatcct

SEQ ID NO: 783293 - DNA, 19 bp, Mus musculus
  siRNA target sequence for 9430083K24Rik (NM_173399.2,816-834).
cggtgccatgatgtttgat

SEQ ID NO: 783294 - DNA, 19 bp, Mus musculus
  siRNA target sequence for 9430083K24Rik (NM_173399.2,828-846).
gtttgatcggccttttggt

SEQ ID NO: 783295 - DNA, 19 bp, Mus musculus
  siRNA target sequence for 9430083K24Rik (NM_173399.2,918-936).
ggttgaaacgagttttgaa

SEQ ID NO: 783296 - DNA, 19 bp, Mus musculus
  siRNA target sequence for 9430083K24Rik (NM_173399.2,958-976).
ggcagtttccagtgtgaaa

SEQ ID NO: 783297 - DNA, 19 bp, Mus musculus
  siRNA target sequence for 9430083K24Rik (NM_173399.2,1122-1140).
ggtcagtgccgagaagata

SEQ ID NO: 783298 - DNA, 19 bp, Mus musculus
  siRNA target sequence for 9430083K24Rik (NM_173399.2,1218-1236).
cttggaagtcacgaataat

SEQ ID NO: 783299 - DNA, 19 bp, Mus musculus
  siRNA target sequence for 9430083K24Rik (NM_173399.2,1221-1239).
ggaagtcacgaataatcta

SEQ ID NO: 783300 - DNA, 19 bp, Mus musculus
  siRNA target sequence for 9430083K24Rik (NM_173399.2,1227-1245).
cacgaataatctagaacat

SEQ ID NO: 783301 - DNA, 19 bp, Mus musculus
  siRNA target sequence for 9430083K24Rik (NM_173399.2,1229-1247).
cgaataatctagaacataa

SEQ ID NO: 783302 - DNA, 19 bp, Mus musculus
  siRNA target sequence for 9430083K24Rik (NM_173399.2,1278-1296).
caagagcagggggagtaat

SEQ ID NO: 783303 - DNA, 19 bp, Mus musculus
  siRNA target sequence for 9430083K24Rik (NM_173399.2,1284-1302).
cagggggagtaatttcagt

SEQ ID NO: 783304 - DNA, 19 bp, Mus musculus
  siRNA target sequence for 9430083K24Rik (NM_173399.2,1361-1379).
gcgaggccccttatctgtt

SEQ ID NO: 783305 - DNA, 19 bp, Mus musculus
  siRNA target sequence for 9430083K24Rik (NM_173399.2,1520-1538).
gctaccaaggagaacaatt

SEQ ID NO: 783306 - DNA, 19 bp, Mus musculus
  siRNA target sequence for 9430083K24Rik (NM_173399.2,1531-1549).
gaacaattcgggatggatt

SEQ ID NO: 783307 - DNA, 19 bp, Mus musculus
  siRNA target sequence for 9430083K24Rik (NM_173399.2,1534-1552).
caattcgggatggattttt

SEQ ID NO: 783308 - DNA, 19 bp, Mus musculus
  siRNA target sequence for 9430083K24Rik (NM_173399.2,1618-1636).
gccagtaactttccatatt

SEQ ID NO: 783309 - DNA, 19 bp, Mus musculus
  siRNA target sequence for 9430083K24Rik (NM_173399.2,1619-1637).
ccagtaactttccatatta

SEQ ID NO: 783310 - DNA, 19 bp, Mus musculus
  siRNA target sequence for 9430083K24Rik (NM_173399.2,1638-1656).
ccgacgaatagctccaaaa

SEQ ID NO: 783311 - DNA, 19 bp, Mus musculus
  siRNA target sequence for 9430083K24Rik (NM_173399.2,1639-1657).
cgacgaatagctccaaaaa

SEQ ID NO: 783312 - DNA, 19 bp, Mus musculus
  siRNA target sequence for 9430083K24Rik (NM_173399.2,1640-1658).
gacgaatagctccaaaaat

SEQ ID NO: 783313 - DNA, 19 bp, Mus musculus
  siRNA target sequence for 9430083K24Rik (NM_173399.2,1683-1701).
ctcgcagatctctgaaaat

SEQ ID NO: 783314 - DNA, 19 bp, Mus musculus
  siRNA target sequence for 9430083K24Rik (NM_173399.2,1703-1721).
cagccagttcccagctaat

SEQ ID NO: 783315 - DNA, 19 bp, Mus musculus
  siRNA target sequence for 9430083K24Rik (NM_173399.2,1709-1727).
gttcccagctaatgatgaa

SEQ ID NO: 783316 - DNA, 19 bp, Mus musculus
  siRNA target sequence for 9430083K24Rik (NM_173399.2,1823-1841).
ccttatcggagcacaatgt

SEQ ID NO: 783317 - DNA, 19 bp, Mus musculus
  siRNA target sequence for 9430083K24Rik (NM_173399.2,1851-1869).
ggagggagctcgaaagtat

SEQ ID NO: 783318 - DNA, 19 bp, Mus musculus
  siRNA target sequence for 9430083K24Rik (NM_173399.2,1861-1879).
cgaaagtatgcctgcaaaa

SEQ ID NO: 783319 - DNA, 19 bp, Mus musculus
  siRNA target sequence for 9430083K24Rik (NM_173399.2,1862-1880).
gaaagtatgcctgcaaaat

SEQ ID NO: 783320 - DNA, 19 bp, Mus musculus
  siRNA target sequence for 9430083K24Rik (NM_173399.2,1986-2004).
gtccagccacctatataaa

SEQ ID NO: 783321 - DNA, 19 bp, Mus musculus
  siRNA target sequence for 9430083K24Rik (NM_173399.2,1988-2006).
ccagccacctatataaaca

SEQ ID NO: 783322 - DNA, 19 bp, Mus musculus
  siRNA target sequence for 6230416J20Rik (NM_173400.1,959-977).
cactcatggttgtggaaaa

SEQ ID NO: 783323 - DNA, 19 bp, Mus musculus
  siRNA target sequence for 6230416J20Rik (NM_173400.1,979-997).
gagagagacgttattagtt

SEQ ID NO: 783324 - DNA, 19 bp, Mus musculus
  siRNA target sequence for 6230416J20Rik (NM_173400.1,1098-1116).
gttgcagataggaaatgtt

SEQ ID NO: 783325 - DNA, 19 bp, Mus musculus
  siRNA target sequence for 6230416J20Rik (NM_173400.1,1262-1280).
gggaaagattatcacatat

SEQ ID NO: 783326 - DNA, 19 bp, Mus musculus
  siRNA target sequence for 6230416J20Rik (NM_173400.1,1285-1303).
catatgaggcataaagtaa

SEQ ID NO: 783327 - DNA, 19 bp, Mus musculus
  siRNA target sequence for 6230416J20Rik (NM_173400.1,1316-1334).
ctgcagtgagacagtctat

SEQ ID NO: 783328 - DNA, 19 bp, Mus musculus
  siRNA target sequence for 6230416J20Rik (NM_173400.1,1391-1409).
ctttcagactaattaaaga

SEQ ID NO: 783329 - DNA, 19 bp, Mus musculus
  siRNA target sequence for 6230416J20Rik (NM_173400.1,1439-1457).
ccatgtctcctcttacgtt

SEQ ID NO: 783330 - DNA, 19 bp, Mus musculus
  siRNA target sequence for 6230416J20Rik (NM_173400.1,1440-1458).
catgtctcctcttacgttt

SEQ ID NO: 783331 - DNA, 19 bp, Mus musculus
  siRNA target sequence for 6230416J20Rik (NM_173400.1,1443-1461).
gtctcctcttacgtttgat

SEQ ID NO: 783332 - DNA, 19 bp, Mus musculus
  siRNA target sequence for 6230416J20Rik (NM_173400.1,1467-1485).
gtcagaggaagtatatgca

SEQ ID NO: 783333 - DNA, 19 bp, Mus musculus
  siRNA target sequence for 6230416J20Rik (NM_173400.1,1483-1501).
gcaaagagtatacttttta

SEQ ID NO: 783334 - DNA, 19 bp, Mus musculus
  siRNA target sequence for 6230416J20Rik (NM_173400.1,1488-1506).
gagtatactttttaagtat

SEQ ID NO: 783335 - DNA, 19 bp, Mus musculus
  siRNA target sequence for 6230416J20Rik (NM_173400.1,1630-1648).
gccgcgtcctcagatacaa

SEQ ID NO: 783336 - DNA, 19 bp, Mus musculus
  siRNA target sequence for 6230416J20Rik (NM_173400.1,1631-1649).
ccgcgtcctcagatacaaa

SEQ ID NO: 783337 - DNA, 19 bp, Mus musculus
  siRNA target sequence for 6230416J20Rik (NM_173400.1,1633-1651).
gcgtcctcagatacaaaca

SEQ ID NO: 783338 - DNA, 19 bp, Mus musculus
  siRNA target sequence for 6230416J20Rik (NM_173400.1,1635-1653).
gtcctcagatacaaacagt

SEQ ID NO: 783339 - DNA, 19 bp, Mus musculus
  siRNA target sequence for 6230416J20Rik (NM_173400.1,1663-1681).
cttgagaaggatccaaata

SEQ ID NO: 783340 - DNA, 19 bp, Mus musculus
  siRNA target sequence for 6230416J20Rik (NM_173400.1,1696-1714).
gagaaaaccttgacatata

SEQ ID NO: 783341 - DNA, 19 bp, Mus musculus
  siRNA target sequence for 6230416J20Rik (NM_173400.1,1741-1759).
gactctcctctatcagata

SEQ ID NO: 783342 - DNA, 19 bp, Mus musculus
  siRNA target sequence for 6230416J20Rik (NM_173400.1,1743-1761).
ctctcctctatcagatact

SEQ ID NO: 783343 - DNA, 19 bp, Mus musculus
  siRNA target sequence for 6230416J20Rik (NM_173400.1,1767-1785).
gaattcacaaagtagtgtt

SEQ ID NO: 783344 - DNA, 19 bp, Mus musculus
  siRNA target sequence for 6230416J20Rik (NM_173400.1,1814-1832).
gtgagccattccagaaaga

SEQ ID NO: 783345 - DNA, 19 bp, Mus musculus
  siRNA target sequence for 6230416J20Rik (NM_173400.1,1920-1938).
gctgattgacactttaatt

SEQ ID NO: 783346 - DNA, 19 bp, Mus musculus
  siRNA target sequence for 6230416J20Rik (NM_173400.1,1921-1939).
ctgattgacactttaattt

SEQ ID NO: 783347 - DNA, 19 bp, Mus musculus
  siRNA target sequence for 6230416J20Rik (NM_173400.1,1923-1941).
gattgacactttaatttct

SEQ ID NO: 783348 - DNA, 19 bp, Mus musculus
  siRNA target sequence for 6230416J20Rik (NM_173400.1,1970-1988).
cccggactccagagaactt

SEQ ID NO: 783349 - DNA, 19 bp, Mus musculus
  siRNA target sequence for 6230416J20Rik (NM_173400.1,1972-1990).
cggactccagagaacttga

SEQ ID NO: 783350 - DNA, 19 bp, Mus musculus
  siRNA target sequence for 6230416J20Rik (NM_173400.1,1981-1999).
gagaacttgataactgata

SEQ ID NO: 783351 - DNA, 19 bp, Mus musculus
  siRNA target sequence for 6230416J20Rik (NM_173400.1,1983-2001).
gaacttgataactgatatt

SEQ ID NO: 783352 - DNA, 19 bp, Mus musculus
  siRNA target sequence for 6230416J20Rik (NM_173400.1,2045-2063).
gttcagatgggattctagt

SEQ ID NO: 783353 - DNA, 19 bp, Mus musculus
  siRNA target sequence for 6230416J20Rik (NM_173400.1,2083-2101).
gtgtcgtcagagtcttcat

SEQ ID NO: 783354 - DNA, 19 bp, Mus musculus
  siRNA target sequence for 6230416J20Rik (NM_173400.1,2099-2117).
catctacactgcataatca

SEQ ID NO: 783355 - DNA, 19 bp, Mus musculus
  siRNA target sequence for 6230416J20Rik (NM_173400.1,2109-2127).
gcataatcagagggaattt

SEQ ID NO: 783356 - DNA, 19 bp, Mus musculus
  siRNA target sequence for 6230416J20Rik (NM_173400.1,2110-2128).
cataatcagagggaattta

SEQ ID NO: 783357 - DNA, 19 bp, Mus musculus
  siRNA target sequence for 6230416J20Rik (NM_173400.1,2122-2140).
gaatttagcctggctattt

SEQ ID NO: 783358 - DNA, 19 bp, Mus musculus
  siRNA target sequence for 6230416J20Rik (NM_173400.1,2149-2167).
gattttgatcggtcttatt

SEQ ID NO: 783359 - DNA, 19 bp, Mus musculus
  siRNA target sequence for 6230416J20Rik (NM_173400.1,2189-2207).
cagatcagcttaaaggttt

SEQ ID NO: 783360 - DNA, 19 bp, Mus musculus
  siRNA target sequence for 6230416J20Rik (NM_173400.1,2214-2232).
gaaacatctggtaacaagt

SEQ ID NO: 783361 - DNA, 19 bp, Mus musculus
  siRNA target sequence for 6230416J20Rik (NM_173400.1,2238-2256).
cagagaacccccaacagaa

SEQ ID NO: 783362 - DNA, 19 bp, Mus musculus
  siRNA target sequence for 6230416J20Rik (NM_173400.1,2292-2310).
gaagcaagatttagaatgt

SEQ ID NO: 783363 - DNA, 19 bp, Mus musculus
  siRNA target sequence for 6230416J20Rik (NM_173400.1,2366-2384).
gcagtggaatagatgtgat

SEQ ID NO: 783364 - DNA, 19 bp, Mus musculus
  siRNA target sequence for 6230416J20Rik (NM_173400.1,2371-2389).
ggaatagatgtgatgagta

SEQ ID NO: 783365 - DNA, 19 bp, Mus musculus
  siRNA target sequence for 6230416J20Rik (NM_173400.1,2377-2395).
gatgtgatgagtagaagta

SEQ ID NO: 783366 - DNA, 19 bp, Mus musculus
  siRNA target sequence for 6230416J20Rik (NM_173400.1,2454-2472).
cacacataaaactctgtta

SEQ ID NO: 783367 - DNA, 19 bp, Mus musculus
  siRNA target sequence for 6230416J20Rik (NM_173400.1,2489-2507).
ggttgagtggtattggtat

SEQ ID NO: 783368 - DNA, 19 bp, Mus musculus
  siRNA target sequence for 6230416J20Rik (NM_173400.1,2490-2508).
gttgagtggtattggtata

SEQ ID NO: 783369 - DNA, 19 bp, Mus musculus
  siRNA target sequence for 6230416J20Rik (NM_173400.1,2495-2513).
gtggtattggtatattaca

SEQ ID NO: 783370 - DNA, 19 bp, Mus musculus
  siRNA target sequence for 6230416J20Rik (NM_173400.1,2498-2516).
gtattggtatattacatga

SEQ ID NO: 783371 - DNA, 19 bp, Mus musculus
  siRNA target sequence for 6230416J20Rik (NM_173400.1,2530-2548).
gttggtcgcctaagtctta

SEQ ID NO: 783372 - DNA, 19 bp, Mus musculus
  siRNA target sequence for 6230416J20Rik (NM_173400.1,2533-2551).
ggtcgcctaagtcttaata

SEQ ID NO: 783373 - DNA, 19 bp, Mus musculus
  siRNA target sequence for 6230416J20Rik (NM_173400.1,2558-2576).
ctagttcagagactagttt

SEQ ID NO: 783374 - DNA, 19 bp, Mus musculus
  siRNA target sequence for 6230416J20Rik (NM_173400.1,2561-2579).
gttcagagactagttttaa

SEQ ID NO: 783375 - DNA, 19 bp, Mus musculus
  siRNA target sequence for 6230416J20Rik (NM_173400.1,2564-2582).
cagagactagttttaatct

SEQ ID NO: 783376 - DNA, 19 bp, Mus musculus
  siRNA target sequence for 6230416J20Rik (NM_173400.1,2636-2654).
gacaagctattccagaatt

SEQ ID NO: 783377 - DNA, 19 bp, Mus musculus
  siRNA target sequence for 6230416J20Rik (NM_173400.1,2641-2659).
gctattccagaattagatt

SEQ ID NO: 783378 - DNA, 19 bp, Mus musculus
  siRNA target sequence for 6230416J20Rik (NM_173400.1,2744-2762).
ccaagacacttgaacaaca

SEQ ID NO: 783379 - DNA, 19 bp, Mus musculus
  siRNA target sequence for 6230416J20Rik (NM_173400.1,2823-2841).
ggacactcaggatttgttt

SEQ ID NO: 783380 - DNA, 19 bp, Mus musculus
  siRNA target sequence for 6230416J20Rik (NM_173400.1,2824-2842).
gacactcaggatttgttta

SEQ ID NO: 783381 - DNA, 19 bp, Mus musculus
  siRNA target sequence for 6230416J20Rik (NM_173400.1,2826-2844).
cactcaggatttgtttatt

SEQ ID NO: 783382 - DNA, 19 bp, Mus musculus
  siRNA target sequence for 6230416J20Rik (NM_173400.1,2869-2887).
gtgccacttgatggaaaaa

SEQ ID NO: 783383 - DNA, 19 bp, Mus musculus
  siRNA target sequence for 6230416J20Rik (NM_173400.1,2890-2908).
cagactgtatcactaacta

SEQ ID NO: 783384 - DNA, 19 bp, Mus musculus
  siRNA target sequence for 6230416J20Rik (NM_173400.1,2896-2914).
gtatcactaactaaagctt

SEQ ID NO: 783385 - DNA, 19 bp, Mus musculus
  siRNA target sequence for 6230416J20Rik (NM_173400.1,2917-2935).
ctggtggagcaaaaattga

SEQ ID NO: 783386 - DNA, 19 bp, Mus musculus
  siRNA target sequence for 6230416J20Rik (NM_173400.1,2948-2966).
catgtagccttggagaatt

SEQ ID NO: 783387 - DNA, 19 bp, Mus musculus
  siRNA target sequence for Fbxo6a (NM_173401.1,357-375).
ctgactggaagatcttcta

SEQ ID NO: 783388 - DNA, 19 bp, Mus musculus
  siRNA target sequence for Fbxo6a (NM_173401.1,419-437).
gctgaagagggatttgagt

SEQ ID NO: 783389 - DNA, 19 bp, Mus musculus
  siRNA target sequence for Fbxo6a (NM_173401.1,420-438).
ctgaagagggatttgagtt

SEQ ID NO: 783390 - DNA, 19 bp, Mus musculus
  siRNA target sequence for Fbxo6a (NM_173401.1,452-470).
gtgaacggaggcgatgaat

SEQ ID NO: 783391 - DNA, 19 bp, Mus musculus
  siRNA target sequence for Fbxo6a (NM_173401.1,475-493).
ggtagaggatctctctaaa

SEQ ID NO: 783392 - DNA, 19 bp, Mus musculus
  siRNA target sequence for Fbxo6a (NM_173401.1,736-754).
gccggacccggtgatgatt

SEQ ID NO: 783393 - DNA, 19 bp, Mus musculus
  siRNA target sequence for Fbxo6a (NM_173401.1,746-764).
gtgatgattcagcagaaaa

SEQ ID NO: 783394 - DNA, 19 bp, Mus musculus
  siRNA target sequence for Bmp3 (NM_173404.1,701-719).
gtctatggctaggttactt

SEQ ID NO: 783395 - DNA, 19 bp, Mus musculus
  siRNA target sequence for Bmp3 (NM_173404.1,703-721).
ctatggctaggttacttct

SEQ ID NO: 783396 - DNA, 19 bp, Mus musculus
  siRNA target sequence for Bmp3 (NM_173404.1,1034-1052).
ccaagtcggagaacatttt

SEQ ID NO: 783397 - DNA, 19 bp, Mus musculus
  siRNA target sequence for Bmp3 (NM_173404.1,1038-1056).
gtcggagaacattttgtca

SEQ ID NO: 783398 - DNA, 19 bp, Mus musculus
  siRNA target sequence for Bmp3 (NM_173404.1,1142-1160).
gacaacacatccagataga

SEQ ID NO: 783399 - DNA, 19 bp, Mus musculus
  siRNA target sequence for Bmp3 (NM_173404.1,1168-1186).
gcatggatcctcaaatcca

SEQ ID NO: 783400 - DNA, 19 bp, Mus musculus
  siRNA target sequence for Bmp3 (NM_173404.1,1203-1221).
gggtcatctgtctgtagat

SEQ ID NO: 783401 - DNA, 19 bp, Mus musculus
  siRNA target sequence for Bmp3 (NM_173404.1,1283-1301).
gaaaggccaagcaaaatga

SEQ ID NO: 783402 - DNA, 19 bp, Mus musculus
  siRNA target sequence for Bmp3 (NM_173404.1,1309-1327).
ctcatagggtttaacatta

SEQ ID NO: 783403 - DNA, 19 bp, Mus musculus
  siRNA target sequence for Bmp3 (NM_173404.1,1372-1390).
gaaccttatatcttggtat

SEQ ID NO: 783404 - DNA, 19 bp, Mus musculus
  siRNA target sequence for Bmp3 (NM_173404.1,1426-1444).
gtggtatccagcttacaga

SEQ ID NO: 783405 - DNA, 19 bp, Mus musculus
  siRNA target sequence for Bmp3 (NM_173404.1,1441-1459).
cagagacaccgagatttca

SEQ ID NO: 783406 - DNA, 19 bp, Mus musculus
  siRNA target sequence for Bmp3 (NM_173404.1,1566-1584).
gctacctggggcagagtat

SEQ ID NO: 783407 - DNA, 19 bp, Mus musculus
  siRNA target sequence for Bmp3 (NM_173404.1,1571-1589).
ctggggcagagtatcagta

SEQ ID NO: 783408 - DNA, 19 bp, Mus musculus
  siRNA target sequence for Bmp3 (NM_173404.1,1642-1660).
cagccccctgagaagagta

SEQ ID NO: 783409 - DNA, 19 bp, Mus musculus
  siRNA target sequence for Bmp3 (NM_173404.1,1698-1716).
gggacagacgctgcaattt

SEQ ID NO: 783410 - DNA, 19 bp, Mus musculus
  siRNA target sequence for Bmp3 (NM_173404.1,1700-1718).
gacagacgctgcaatttga

SEQ ID NO: 783411 - DNA, 19 bp, Mus musculus
  siRNA target sequence for Bmp3 (NM_173404.1,1772-1790).
gtgccaggaggtaccttaa

SEQ ID NO: 783412 - DNA, 19 bp, Mus musculus
  siRNA target sequence for Bmp3 (NM_173404.1,1809-1827).
cggctggagcgaatggatt

SEQ ID NO: 783413 - DNA, 19 bp, Mus musculus
  siRNA target sequence for Bmp3 (NM_173404.1,1815-1833).
gagcgaatggattatctct

SEQ ID NO: 783414 - DNA, 19 bp, Mus musculus
  siRNA target sequence for Bmp3 (NM_173404.1,1881-1899).
catgccaaagtctttgaaa

SEQ ID NO: 783415 - DNA, 19 bp, Mus musculus
  siRNA target sequence for Bmp3 (NM_173404.1,1885-1903).
ccaaagtctttgaaaccat

SEQ ID NO: 783416 - DNA, 19 bp, Mus musculus
  siRNA target sequence for Bmp3 (NM_173404.1,1970-1988).
gctgtgtgccggaaaagat

SEQ ID NO: 783417 - DNA, 19 bp, Mus musculus
  siRNA target sequence for Bmp3 (NM_173404.1,2061-2079).
cgactcctgtgcttgtaga

SEQ ID NO: 783418 - DNA, 19 bp, Mus musculus
  siRNA target sequence for AI591476 (NM_173406.1,148-166).
cagacccacgtgttttaga

SEQ ID NO: 783419 - DNA, 19 bp, Mus musculus
  siRNA target sequence for AI591476 (NM_173406.1,150-168).
gacccacgtgttttagaaa

SEQ ID NO: 783420 - DNA, 19 bp, Mus musculus
  siRNA target sequence for AI591476 (NM_173406.1,190-208).
cctatgtggccctcagtta

SEQ ID NO: 783421 - DNA, 19 bp, Mus musculus
  siRNA target sequence for AI591476 (NM_173406.1,200-218).
cctcagttacatcaataga

SEQ ID NO: 783422 - DNA, 19 bp, Mus musculus
  siRNA target sequence for AI591476 (NM_173406.1,201-219).
ctcagttacatcaatagat

SEQ ID NO: 783423 - DNA, 19 bp, Mus musculus
  siRNA target sequence for BC030335 (NM_173408.1,322-340).
cgggaccccagcaacaagt

SEQ ID NO: 783424 - DNA, 19 bp, Mus musculus
  siRNA target sequence for BC030335 (NM_173408.1,398-416).
cagctggggatattcttgt

SEQ ID NO: 783425 - DNA, 19 bp, Mus musculus
  siRNA target sequence for BC030335 (NM_173408.1,401-419).
ctggggatattcttgtcaa

SEQ ID NO: 783426 - DNA, 19 bp, Mus musculus
  siRNA target sequence for BC030335 (NM_173408.1,587-605).
gcatggagcgcttttgcaa

SEQ ID NO: 783427 - DNA, 19 bp, Mus musculus
  siRNA target sequence for BC030335 (NM_173408.1,588-606).
catggagcgcttttgcaat

SEQ ID NO: 783428 - DNA, 19 bp, Mus musculus
  siRNA target sequence for BC030335 (NM_173408.1,603-621).
caatgacctatgtgttgat

SEQ ID NO: 783429 - DNA, 19 bp, Mus musculus
  siRNA target sequence for BC030335 (NM_173408.1,614-632).
gtgttgatcctacagaatt

SEQ ID NO: 783430 - DNA, 19 bp, Mus musculus
  siRNA target sequence for BC030335 (NM_173408.1,664-682).
gctgctaccatgtgcaaat

SEQ ID NO: 783431 - DNA, 19 bp, Mus musculus
  siRNA target sequence for BC030335 (NM_173408.1,667-685).
gctaccatgtgcaaattca

SEQ ID NO: 783432 - DNA, 19 bp, Mus musculus
  siRNA target sequence for BC030335 (NM_173408.1,753-771).
gttccctagcctcttaaca

SEQ ID NO: 783433 - DNA, 19 bp, Mus musculus
  siRNA target sequence for BC030335 (NM_173408.1,799-817).
gatctctaccggtttacat

SEQ ID NO: 783434 - DNA, 19 bp, Mus musculus
  siRNA target sequence for BC030335 (NM_173408.1,851-869).
ggtcactgcatcgtgaaat

SEQ ID NO: 783435 - DNA, 19 bp, Mus musculus
  siRNA target sequence for BC030335 (NM_173408.1,873-891).
cattgccctatggaaacta

SEQ ID NO: 783436 - DNA, 19 bp, Mus musculus
  siRNA target sequence for BC030335 (NM_173408.1,877-895).
gccctatggaaactagtat

SEQ ID NO: 783437 - DNA, 19 bp, Mus musculus
  siRNA target sequence for BC030335 (NM_173408.1,879-897).
cctatggaaactagtattt

SEQ ID NO: 783438 - DNA, 19 bp, Mus musculus
  siRNA target sequence for BC030335 (NM_173408.1,884-902).
ggaaactagtatttacaca

SEQ ID NO: 783439 - DNA, 19 bp, Mus musculus
  siRNA target sequence for BC030335 (NM_173408.1,924-942).
ccagtggctaaatttccta

SEQ ID NO: 783440 - DNA, 19 bp, Mus musculus
  siRNA target sequence for BC030335 (NM_173408.1,925-943).
cagtggctaaatttcctaa

SEQ ID NO: 783441 - DNA, 19 bp, Mus musculus
  siRNA target sequence for BC030335 (NM_173408.1,1052-1070).
cctggccgagtctctttga

SEQ ID NO: 783442 - DNA, 19 bp, Mus musculus
  siRNA target sequence for BC030335 (NM_173408.1,1058-1076).
cgagtctctttgatacctt

SEQ ID NO: 783443 - DNA, 19 bp, Mus musculus
  siRNA target sequence for BC030335 (NM_173408.1,1059-1077).
gagtctctttgataccttt

SEQ ID NO: 783444 - DNA, 19 bp, Mus musculus
  siRNA target sequence for BC030500 (NM_173411.1,222-240).
gaaattccggagtacaagt

SEQ ID NO: 783445 - DNA, 19 bp, Mus musculus
  siRNA target sequence for BC030500 (NM_173411.1,427-445).
cgcgtggacagcgttgtta

SEQ ID NO: 783446 - DNA, 19 bp, Mus musculus
  siRNA target sequence for 1700009B20Rik (NM_173412.1,351-369).
cggaaccgactgaaccttt

SEQ ID NO: 783447 - DNA, 19 bp, Mus musculus
  siRNA target sequence for D330025I23Rik (NM_173413.2,506-524).
gtgcaaagtcgagtacaaa

SEQ ID NO: 783448 - DNA, 19 bp, Mus musculus
  siRNA target sequence for D330025I23Rik (NM_173413.2,509-527).
caaagtcgagtacaaatgt

SEQ ID NO: 783449 - DNA, 19 bp, Mus musculus
  siRNA target sequence for D330025I23Rik (NM_173413.2,513-531).
gtcgagtacaaatgtagaa

SEQ ID NO: 783450 - DNA, 19 bp, Mus musculus
  siRNA target sequence for D330025I23Rik (NM_173413.2,515-533).
cgagtacaaatgtagaaga

SEQ ID NO: 783451 - DNA, 19 bp, Mus musculus
  siRNA target sequence for D330025I23Rik (NM_173413.2,547-565).
cttgcacgggatataatga

SEQ ID NO: 783452 - DNA, 19 bp, Mus musculus
  siRNA target sequence for D330025I23Rik (NM_173413.2,554-572).
gggatataatgacaaaact

SEQ ID NO: 783453 - DNA, 19 bp, Mus musculus
  siRNA target sequence for D330025I23Rik (NM_173413.2,556-574).
gatataatgacaaaactca

SEQ ID NO: 783454 - DNA, 19 bp, Mus musculus
  siRNA target sequence for D330025I23Rik (NM_173413.2,585-603).
gaacgacagcaattcatca

SEQ ID NO: 783455 - DNA, 19 bp, Mus musculus
  siRNA target sequence for D330025I23Rik (NM_173413.2,608-626).
caggtgggccagtgaagat

SEQ ID NO: 783456 - DNA, 19 bp, Mus musculus
  siRNA target sequence for D330025I23Rik (NM_173413.2,631-649).
gagagccggtctaagaaga

SEQ ID NO: 783457 - DNA, 19 bp, Mus musculus
  siRNA target sequence for 6030463G20Rik (NM_173414.1,281-299).
ccaaccgcttcgatgacta

SEQ ID NO: 783458 - DNA, 19 bp, Mus musculus
  siRNA target sequence for 6030463G20Rik (NM_173414.1,357-375).
caccatcgaacgcattctt

SEQ ID NO: 783459 - DNA, 19 bp, Mus musculus
  siRNA target sequence for 6030463G20Rik (NM_173414.1,820-838).
ctcgcccaggaggtattga

SEQ ID NO: 783460 - DNA, 19 bp, Mus musculus
  siRNA target sequence for 6030463G20Rik (NM_173414.1,832-850).
gtattgaccccaacacaaa

SEQ ID NO: 783461 - DNA, 19 bp, Mus musculus
  siRNA target sequence for 6030463G20Rik (NM_173414.1,842-860).
caacacaaattaaagcaat

SEQ ID NO: 783462 - DNA, 19 bp, Mus musculus
  siRNA target sequence for 6030463G20Rik (NM_173414.1,919-937).
cccctgatgtattcttact

SEQ ID NO: 783463 - DNA, 19 bp, Mus musculus
  siRNA target sequence for 6030463G20Rik (NM_173414.1,920-938).
ccctgatgtattcttacta

SEQ ID NO: 783464 - DNA, 19 bp, Mus musculus
  siRNA target sequence for 6030463G20Rik (NM_173414.1,932-950).
cttactacggaacagaata

SEQ ID NO: 783465 - DNA, 19 bp, Mus musculus
  siRNA target sequence for 6030463G20Rik (NM_173414.1,1104-1122).
gaccatcgagagagagaat

SEQ ID NO: 783466 - DNA, 19 bp, Mus musculus
  siRNA target sequence for 6030463G20Rik (NM_173414.1,1143-1161).
cggcgctccaggaattgct

SEQ ID NO: 783467 - DNA, 19 bp, Mus musculus
  siRNA target sequence for 6030463G20Rik (NM_173414.1,1145-1163).
gcgctccaggaattgctta

SEQ ID NO: 783468 - DNA, 19 bp, Mus musculus
  siRNA target sequence for 6030463G20Rik (NM_173414.1,1146-1164).
cgctccaggaattgcttat

SEQ ID NO: 783469 - DNA, 19 bp, Mus musculus
  siRNA target sequence for 6030463G20Rik (NM_173414.1,1330-1348).
ggaaactcgaaatatatct

SEQ ID NO: 783470 - DNA, 19 bp, Mus musculus
  siRNA target sequence for 6030463G20Rik (NM_173414.1,1347-1365).
ctaccgtgcccaaaggttt

SEQ ID NO: 783471 - DNA, 19 bp, Mus musculus
  siRNA target sequence for 6030463G20Rik (NM_173414.1,1403-1421).
cccgggtccttgaaagcat

SEQ ID NO: 783472 - DNA, 19 bp, Mus musculus
  siRNA target sequence for 6030463G20Rik (NM_173414.1,1447-1465).
ggaactgtttgctttctca

SEQ ID NO: 783473 - DNA, 19 bp, Mus musculus
  siRNA target sequence for A430092C04 (NM_173416.1,269-287).
cggggactcccgtgtcatt

SEQ ID NO: 783474 - DNA, 19 bp, Mus musculus
  siRNA target sequence for A430092C04 (NM_173416.1,282-300).
gtcattggaaggtttgaat

SEQ ID NO: 783475 - DNA, 19 bp, Mus musculus
  siRNA target sequence for A430092C04 (NM_173416.1,452-470).
ggagtcactccctatcctt

SEQ ID NO: 783476 - DNA, 19 bp, Mus musculus
  siRNA target sequence for A430092C04 (NM_173416.1,482-500).
cgtgtggcacccaaaggat

SEQ ID NO: 783477 - DNA, 19 bp, Mus musculus
  siRNA target sequence for A430092C04 (NM_173416.1,522-540).
gcgcagggtgtctccattt

SEQ ID NO: 783478 - DNA, 19 bp, Mus musculus
  siRNA target sequence for A430092C04 (NM_173416.1,529-547).
gtgtctccatttttcctaa

SEQ ID NO: 783479 - DNA, 19 bp, Mus musculus
  siRNA target sequence for A430092C04 (NM_173416.1,634-652).
ggctggtggtggcaataga

SEQ ID NO: 783480 - DNA, 19 bp, Mus musculus
  siRNA target sequence for A430092C04 (NM_173416.1,636-654).
ctggtggtggcaatagaca

SEQ ID NO: 783481 - DNA, 19 bp, Mus musculus
  siRNA target sequence for A430092C04 (NM_173416.1,653-671).
cagcaaccttcattcgtat

SEQ ID NO: 783482 - DNA, 19 bp, Mus musculus
  siRNA target sequence for A430092C04 (NM_173416.1,655-673).
gcaaccttcattcgtatat

SEQ ID NO: 783483 - DNA, 19 bp, Mus musculus
  siRNA target sequence for A430092C04 (NM_173416.1,720-738).
gtgtttcctgtgaattgct

SEQ ID NO: 783484 - DNA, 19 bp, Mus musculus
  siRNA target sequence for A430092C04 (NM_173416.1,763-781).
ggaactcgcaggttgctat

SEQ ID NO: 783485 - DNA, 19 bp, Mus musculus
  siRNA target sequence for A430092C04 (NM_173416.1,764-782).
gaactcgcaggttgctata

SEQ ID NO: 783486 - DNA, 19 bp, Mus musculus
  siRNA target sequence for A430092C04 (NM_173416.1,787-805).
ccgaacttccactccataa

SEQ ID NO: 783487 - DNA, 19 bp, Mus musculus
  siRNA target sequence for A430092C04 (NM_173416.1,792-810).
cttccactccataagcttt

SEQ ID NO: 783488 - DNA, 19 bp, Mus musculus
  siRNA target sequence for A430092C04 (NM_173416.1,795-813).
ccactccataagctttgta

SEQ ID NO: 783489 - DNA, 19 bp, Mus musculus
  siRNA target sequence for A430092C04 (NM_173416.1,806-824).
gctttgtagcttaaatgca

SEQ ID NO: 783490 - DNA, 19 bp, Mus musculus
  siRNA target sequence for A430092C04 (NM_173416.1,807-825).
ctttgtagcttaaatgcat

SEQ ID NO: 783491 - DNA, 19 bp, Mus musculus
  siRNA target sequence for A430092C04 (NM_173416.1,857-875).
cgatggctctgttcatact

SEQ ID NO: 783492 - DNA, 19 bp, Mus musculus
  siRNA target sequence for A430092C04 (NM_173416.1,954-972).
ctgactcacatacatttca

SEQ ID NO: 783493 - DNA, 19 bp, Mus musculus
  siRNA target sequence for A430092C04 (NM_173416.1,985-1003).
ctgaacagagttctcttat

SEQ ID NO: 783494 - DNA, 19 bp, Mus musculus
  siRNA target sequence for A430092C04 (NM_173416.1,1032-1050).
ggaactggccaagattctt

SEQ ID NO: 783495 - DNA, 19 bp, Mus musculus
  siRNA target sequence for A430092C04 (NM_173416.1,1041-1059).
caagattcttcacatttga

SEQ ID NO: 783496 - DNA, 19 bp, Mus musculus
  siRNA target sequence for A430092C04 (NM_173416.1,1076-1094).
gaaagcaattaccataaca

SEQ ID NO: 783497 - DNA, 19 bp, Mus musculus
  siRNA target sequence for A430092C04 (NM_173416.1,1121-1139).
ggttcctgatttaatagca

SEQ ID NO: 783498 - DNA, 19 bp, Mus musculus
  siRNA target sequence for A430092C04 (NM_173416.1,1122-1140).
gttcctgatttaatagcat

SEQ ID NO: 783499 - DNA, 19 bp, Mus musculus
  siRNA target sequence for A430092C04 (NM_173416.1,1164-1182).
gccgtggcttccaatacgt

SEQ ID NO: 783500 - DNA, 19 bp, Mus musculus
  siRNA target sequence for A430092C04 (NM_173416.1,1174-1192).
ccaatacgtgtaacgtaat

SEQ ID NO: 783501 - DNA, 19 bp, Mus musculus
  siRNA target sequence for A430092C04 (NM_173416.1,1175-1193).
caatacgtgtaacgtaatt

SEQ ID NO: 783502 - DNA, 19 bp, Mus musculus
  siRNA target sequence for A430092C04 (NM_173416.1,1180-1198).
cgtgtaacgtaattttgat

SEQ ID NO: 783503 - DNA, 19 bp, Mus musculus
  siRNA target sequence for A430092C04 (NM_173416.1,1183-1201).
gtaacgtaattttgatcta

SEQ ID NO: 783504 - DNA, 19 bp, Mus musculus
  siRNA target sequence for A430092C04 (NM_173416.1,1212-1230).
ccatcttctatgccaaata

SEQ ID NO: 783505 - DNA, 19 bp, Mus musculus
  siRNA target sequence for A430092C04 (NM_173416.1,1233-1251).
cagcaaattcagttagaga

SEQ ID NO: 783506 - DNA, 19 bp, Mus musculus
  siRNA target sequence for A430092C04 (NM_173416.1,1283-1301).
gacagacagactattatta

SEQ ID NO: 783507 - DNA, 19 bp, Mus musculus
  siRNA target sequence for A430092C04 (NM_173416.1,1285-1303).
cagacagactattattaat

SEQ ID NO: 783508 - DNA, 19 bp, Mus musculus
  siRNA target sequence for A430092C04 (NM_173416.1,1364-1382).
gtatactgttcgtctgata

SEQ ID NO: 783509 - DNA, 19 bp, Mus musculus
  siRNA target sequence for A430092C04 (NM_173416.1,1374-1392).
cgtctgatagttagagaaa

SEQ ID NO: 783510 - DNA, 19 bp, Mus musculus
  siRNA target sequence for A430092C04 (NM_173416.1,1395-1413).
gcccagggaagcgaatctt

SEQ ID NO: 783511 - DNA, 19 bp, Mus musculus
  siRNA target sequence for A430092C04 (NM_173416.1,1406-1424).
cgaatcttctggaacatct

SEQ ID NO: 783512 - DNA, 19 bp, Mus musculus
  siRNA target sequence for A430092C04 (NM_173416.1,1447-1465).
ccgacttcactgctttgtt

SEQ ID NO: 783513 - DNA, 19 bp, Mus musculus
  siRNA target sequence for A430092C04 (NM_173416.1,1454-1472).
cactgctttgttaagtaaa

SEQ ID NO: 783514 - DNA, 19 bp, Mus musculus
  siRNA target sequence for A430092C04 (NM_173416.1,1573-1591).
ctggaagagcccttattca

SEQ ID NO: 783515 - DNA, 19 bp, Mus musculus
  siRNA target sequence for A430092C04 (NM_173416.1,1579-1597).
gagcccttattcaagaaat

SEQ ID NO: 783516 - DNA, 19 bp, Mus musculus
  siRNA target sequence for A430092C04 (NM_173416.1,1732-1750).
ctcaaagggagaacttaca

SEQ ID NO: 783517 - DNA, 19 bp, Mus musculus
  siRNA target sequence for A430092C04 (NM_173416.1,1738-1756).
gggagaacttacaaaaaga

SEQ ID NO: 783518 - DNA, 19 bp, Mus musculus
  siRNA target sequence for A430092C04 (NM_173416.1,1812-1830).
gcgatgcagcagtatcttt

SEQ ID NO: 783519 - DNA, 19 bp, Mus musculus
  siRNA target sequence for A430092C04 (NM_173416.1,1814-1832).
gatgcagcagtatctttct

SEQ ID NO: 783520 - DNA, 19 bp, Mus musculus
  siRNA target sequence for A430092C04 (NM_173416.1,1886-1904).
ctcgcaggatgctccatat

SEQ ID NO: 783521 - DNA, 19 bp, Mus musculus
  siRNA target sequence for A430092C04 (NM_173416.1,1888-1906).
cgcaggatgctccatatgt

SEQ ID NO: 783522 - DNA, 19 bp, Mus musculus
  siRNA target sequence for A430092C04 (NM_173416.1,1889-1907).
gcaggatgctccatatgtt

SEQ ID NO: 783523 - DNA, 19 bp, Mus musculus
  siRNA target sequence for A430092C04 (NM_173416.1,1899-1917).
ccatatgttcacctcattt

SEQ ID NO: 783524 - DNA, 19 bp, Mus musculus
  siRNA target sequence for A430092C04 (NM_173416.1,1937-1955).
gaggaacttccactataca

SEQ ID NO: 783525 - DNA, 19 bp, Mus musculus
  siRNA target sequence for A930010E21Rik (NM_173418.1,155-173).
ctatgtctttgggaaagat

SEQ ID NO: 783526 - DNA, 19 bp, Mus musculus
  siRNA target sequence for A930010E21Rik (NM_173418.1,255-273).
caacatgagcagtttggaa

SEQ ID NO: 783527 - DNA, 19 bp, Mus musculus
  siRNA target sequence for A930010E21Rik (NM_173418.1,353-371).
gactagaggggaacaaact

SEQ ID NO: 783528 - DNA, 19 bp, Mus musculus
  siRNA target sequence for A930010E21Rik (NM_173418.1,363-381).
gaacaaactccgttcagta

SEQ ID NO: 783529 - DNA, 19 bp, Mus musculus
  siRNA target sequence for A930010E21Rik (NM_173418.1,429-447).
caaacacaaccggattgat

SEQ ID NO: 783530 - DNA, 19 bp, Mus musculus
  siRNA target sequence for A930010E21Rik (NM_173418.1,484-502).
ctgatataccttgacatat

SEQ ID NO: 783531 - DNA, 19 bp, Mus musculus
  siRNA target sequence for A930010E21Rik (NM_173418.1,507-525).
caacaggttgacagttgta

SEQ ID NO: 783532 - DNA, 19 bp, Mus musculus
  siRNA target sequence for A930010E21Rik (NM_173418.1,512-530).
ggttgacagttgtatccaa

SEQ ID NO: 783533 - DNA, 19 bp, Mus musculus
  siRNA target sequence for A930010E21Rik (NM_173418.1,595-613).
ctttccaatatggtattgt

SEQ ID NO: 783534 - DNA, 19 bp, Mus musculus
  siRNA target sequence for A930010E21Rik (NM_173418.1,607-625).
gtattgtcgctgcacaata

SEQ ID NO: 783535 - DNA, 19 bp, Mus musculus
  siRNA target sequence for A930010E21Rik (NM_173418.1,612-630).
gtcgctgcacaataatcct

SEQ ID NO: 783536 - DNA, 19 bp, Mus musculus
  siRNA target sequence for A930010E21Rik (NM_173418.1,653-671).
ggggacttgctcagtttgt

SEQ ID NO: 783537 - DNA, 19 bp, Mus musculus
  siRNA target sequence for A930010E21Rik (NM_173418.1,656-674).
gacttgctcagtttgtcaa

SEQ ID NO: 783538 - DNA, 19 bp, Mus musculus
  siRNA target sequence for A930010E21Rik (NM_173418.1,677-695).
ccgttggtccccctttcat

SEQ ID NO: 783539 - DNA, 19 bp, Mus musculus
  siRNA target sequence for A930010E21Rik (NM_173418.1,678-696).
cgttggtccccctttcata

SEQ ID NO: 783540 - DNA, 19 bp, Mus musculus
  siRNA target sequence for A930010E21Rik (NM_173418.1,688-706).
cctttcatactggtgaatt

SEQ ID NO: 783541 - DNA, 19 bp, Mus musculus
  siRNA target sequence for A930010E21Rik (NM_173418.1,740-758).
cagggcagcttttacatga

SEQ ID NO: 783542 - DNA, 19 bp, Mus musculus
  siRNA target sequence for A930010E21Rik (NM_173418.1,761-779).
ctgagctcggagtttgtat

SEQ ID NO: 783543 - DNA, 19 bp, Mus musculus
  siRNA target sequence for A930010E21Rik (NM_173418.1,763-781).
gagctcggagtttgtatga

SEQ ID NO: 783544 - DNA, 19 bp, Mus musculus
  siRNA target sequence for A930010E21Rik (NM_173418.1,834-852).
cgtgactctgcaatgtttt

SEQ ID NO: 783545 - DNA, 19 bp, Mus musculus
  siRNA target sequence for A930010E21Rik (NM_173418.1,861-879).
cagtccctcaccaaccatt

SEQ ID NO: 783546 - DNA, 19 bp, Mus musculus
  siRNA target sequence for A930010E21Rik (NM_173418.1,865-883).
ccctcaccaaccattgcat

SEQ ID NO: 783547 - DNA, 19 bp, Mus musculus
  siRNA target sequence for A930010E21Rik (NM_173418.1,897-915).
gagcacgtggagagaattt

SEQ ID NO: 783548 - DNA, 19 bp, Mus musculus
  siRNA target sequence for A930010E21Rik (NM_173418.1,902-920).
cgtggagagaatttgatgt

SEQ ID NO: 783549 - DNA, 19 bp, Mus musculus
  siRNA target sequence for A930010E21Rik (NM_173418.1,921-939).
gttggcctcgccaattgca

SEQ ID NO: 783550 - DNA, 19 bp, Mus musculus
  siRNA target sequence for A930010E21Rik (NM_173418.1,929-947).
cgccaattgcagaaggtat

SEQ ID NO: 783551 - DNA, 19 bp, Mus musculus
  siRNA target sequence for A930010E21Rik (NM_173418.1,937-955).
gcagaaggtatcattctgt

SEQ ID NO: 783552 - DNA, 19 bp, Mus musculus
  siRNA target sequence for A930010E21Rik (NM_173418.1,982-1000).
ctggtagatggcggtaatt

SEQ ID NO: 783553 - DNA, 19 bp, Mus musculus
  siRNA target sequence for A930010E21Rik (NM_173418.1,984-1002).
ggtagatggcggtaattat

SEQ ID NO: 783554 - DNA, 19 bp, Mus musculus
  siRNA target sequence for A930010E21Rik (NM_173418.1,985-1003).
gtagatggcggtaattata

SEQ ID NO: 783555 - DNA, 19 bp, Mus musculus
  siRNA target sequence for A930010E21Rik (NM_173418.1,988-1006).
gatggcggtaattatacct

SEQ ID NO: 783556 - DNA, 19 bp, Mus musculus
  siRNA target sequence for A930010E21Rik (NM_173418.1,1032-1050).
gagctcccttgtcatctta

SEQ ID NO: 783557 - DNA, 19 bp, Mus musculus
  siRNA target sequence for A930010E21Rik (NM_173418.1,1034-1052).
gctcccttgtcatcttact

SEQ ID NO: 783558 - DNA, 19 bp, Mus musculus
  siRNA target sequence for A930010E21Rik (NM_173418.1,1071-1089).
ggccatgcctggattgcat

SEQ ID NO: 783559 - DNA, 19 bp, Mus musculus
  siRNA target sequence for A930010E21Rik (NM_173418.1,1072-1090).
gccatgcctggattgcatt

SEQ ID NO: 783560 - DNA, 19 bp, Mus musculus
  siRNA target sequence for A930010E21Rik (NM_173418.1,1073-1091).
ccatgcctggattgcattt

SEQ ID NO: 783561 - DNA, 19 bp, Mus musculus
  siRNA target sequence for A930010E21Rik (NM_173418.1,1209-1227).
caccctctatattacatct

SEQ ID NO: 783562 - DNA, 19 bp, Mus musculus
  siRNA target sequence for A930010E21Rik (NM_173418.1,1212-1230).
cctctatattacatctgat

SEQ ID NO: 783563 - DNA, 19 bp, Mus musculus
  siRNA target sequence for A930010E21Rik (NM_173418.1,1261-1279).
ggccctggaatcaacacat

SEQ ID NO: 783564 - DNA, 19 bp, Mus musculus
  siRNA target sequence for A930010E21Rik (NM_173418.1,1484-1502).
cccagggtccatacaactt

SEQ ID NO: 783565 - DNA, 19 bp, Mus musculus
  siRNA target sequence for A930010E21Rik (NM_173418.1,1574-1592).
gcaaggataactctttcaa

SEQ ID NO: 783566 - DNA, 19 bp, Mus musculus
  siRNA target sequence for A930010E21Rik (NM_173418.1,1575-1593).
caaggataactctttcaaa

SEQ ID NO: 783567 - DNA, 19 bp, Mus musculus
  siRNA target sequence for A930010E21Rik (NM_173418.1,1657-1675).
gaaaaggagggtatcagtt

SEQ ID NO: 783568 - DNA, 19 bp, Mus musculus
  siRNA target sequence for BC038059 (NM_173419.1,442-460).
gaaggatagcgtggaattt

SEQ ID NO: 783569 - DNA, 19 bp, Mus musculus
  siRNA target sequence for BC038059 (NM_173419.1,445-463).
ggatagcgtggaatttaga

SEQ ID NO: 783570 - DNA, 19 bp, Mus musculus
  siRNA target sequence for BC038059 (NM_173419.1,446-464).
gatagcgtggaatttagaa

SEQ ID NO: 783571 - DNA, 19 bp, Mus musculus
  siRNA target sequence for BC038059 (NM_173419.1,527-545).
gctcaccagtgtctgaaaa

SEQ ID NO: 783572 - DNA, 19 bp, Mus musculus
  siRNA target sequence for BC038059 (NM_173419.1,537-555).
gtctgaaaaccatagtgaa

SEQ ID NO: 783573 - DNA, 19 bp, Mus musculus
  siRNA target sequence for BC038059 (NM_173419.1,546-564).
ccatagtgaagaagttgat

SEQ ID NO: 783574 - DNA, 19 bp, Mus musculus
  siRNA target sequence for BC038059 (NM_173419.1,562-580).
gatccagtcacttgctaat

SEQ ID NO: 783575 - DNA, 19 bp, Mus musculus
  siRNA target sequence for BC030476 (NM_173421.1,391-409).
gttcggcagcggagtaact

SEQ ID NO: 783576 - DNA, 19 bp, Mus musculus
  siRNA target sequence for BC030476 (NM_173421.1,401-419).
ggagtaacttcgaatgaga

SEQ ID NO: 783577 - DNA, 19 bp, Mus musculus
  siRNA target sequence for BC030476 (NM_173421.1,402-420).
gagtaacttcgaatgagaa

SEQ ID NO: 783578 - DNA, 19 bp, Mus musculus
  siRNA target sequence for BC030476 (NM_173421.1,404-422).
gtaacttcgaatgagaatt

SEQ ID NO: 783579 - DNA, 19 bp, Mus musculus
  siRNA target sequence for BC030476 (NM_173421.1,418-436).
gaattcttccactgtagaa

SEQ ID NO: 783580 - DNA, 19 bp, Mus musculus
  siRNA target sequence for BC030476 (NM_173421.1,423-441).
cttccactgtagaacataa

SEQ ID NO: 783581 - DNA, 19 bp, Mus musculus
  siRNA target sequence for BC030476 (NM_173421.1,448-466).
ctgtgtagaccaacctaaa

SEQ ID NO: 783582 - DNA, 19 bp, Mus musculus
  siRNA target sequence for BC030476 (NM_173421.1,457-475).
ccaacctaaaccatgtaca

SEQ ID NO: 783583 - DNA, 19 bp, Mus musculus
  siRNA target sequence for BC030476 (NM_173421.1,553-571).
ggtgcctacagcaaatggt

SEQ ID NO: 783584 - DNA, 19 bp, Mus musculus
  siRNA target sequence for BC030476 (NM_173421.1,563-581).
gcaaatggtgttaaatcct

SEQ ID NO: 783585 - DNA, 19 bp, Mus musculus
  siRNA target sequence for BC030476 (NM_173421.1,591-609).
catctctggcaaatgatga

SEQ ID NO: 783586 - DNA, 19 bp, Mus musculus
  siRNA target sequence for BC030476 (NM_173421.1,839-857).
caggctgggacgatgaagt

SEQ ID NO: 783587 - DNA, 19 bp, Mus musculus
  siRNA target sequence for BC030476 (NM_173421.1,841-859).
ggctgggacgatgaagttt

SEQ ID NO: 783588 - DNA, 19 bp, Mus musculus
  siRNA target sequence for BC030476 (NM_173421.1,843-861).
ctgggacgatgaagtttct

SEQ ID NO: 783589 - DNA, 19 bp, Mus musculus
  siRNA target sequence for BC030476 (NM_173421.1,847-865).
gacgatgaagtttctacaa

SEQ ID NO: 783590 - DNA, 19 bp, Mus musculus
  siRNA target sequence for BC030476 (NM_173421.1,901-919).
ggagctaccaccaaaagaa

SEQ ID NO: 783591 - DNA, 19 bp, Mus musculus
  siRNA target sequence for BC030476 (NM_173421.1,1014-1032).
gcggacagcagcaacttgt

SEQ ID NO: 783592 - DNA, 19 bp, Mus musculus
  siRNA target sequence for BC030476 (NM_173421.1,1015-1033).
cggacagcagcaacttgta

SEQ ID NO: 783593 - DNA, 19 bp, Mus musculus
  siRNA target sequence for BC030476 (NM_173421.1,1017-1035).
gacagcagcaacttgtaga

SEQ ID NO: 783594 - DNA, 19 bp, Mus musculus
  siRNA target sequence for BC030476 (NM_173421.1,1055-1073).
cagccccaagctctagaaa

SEQ ID NO: 783595 - DNA, 19 bp, Mus musculus
  siRNA target sequence for BC030476 (NM_173421.1,1057-1075).
gccccaagctctagaaaca

SEQ ID NO: 783596 - DNA, 19 bp, Mus musculus
  siRNA target sequence for BC030476 (NM_173421.1,1065-1083).
ctctagaaacagtactcaa

SEQ ID NO: 783597 - DNA, 19 bp, Mus musculus
  siRNA target sequence for BC030476 (NM_173421.1,1122-1140).
ccgtgccaacacctgtaat

SEQ ID NO: 783598 - DNA, 19 bp, Mus musculus
  siRNA target sequence for BC030476 (NM_173421.1,1239-1257).
cagcagcaaaggtggaaat

SEQ ID NO: 783599 - DNA, 19 bp, Mus musculus
  siRNA target sequence for Fem1c (NM_173423.1,624-642).
gcggaggtttcctccttaa

SEQ ID NO: 783600 - DNA, 19 bp, Mus musculus
  siRNA target sequence for Fem1c (NM_173423.1,625-643).
cggaggtttcctccttaat

SEQ ID NO: 783601 - DNA, 19 bp, Mus musculus
  siRNA target sequence for Fem1c (NM_173423.1,627-645).
gaggtttcctccttaatct

SEQ ID NO: 783602 - DNA, 19 bp, Mus musculus
  siRNA target sequence for Fem1c (NM_173423.1,661-679).
gggccaccccactcttgat

SEQ ID NO: 783603 - DNA, 19 bp, Mus musculus
  siRNA target sequence for Fem1c (NM_173423.1,674-692).
cttgatggctgctaggtat

SEQ ID NO: 783604 - DNA, 19 bp, Mus musculus
  siRNA target sequence for Fem1c (NM_173423.1,696-714).
cacctcgacatggtagaat

SEQ ID NO: 783605 - DNA, 19 bp, Mus musculus
  siRNA target sequence for Fem1c (NM_173423.1,701-719).
cgacatggtagaattcctt

SEQ ID NO: 783606 - DNA, 19 bp, Mus musculus
  siRNA target sequence for Fem1c (NM_173423.1,725-743).
gcagtgcagtgcttccata

SEQ ID NO: 783607 - DNA, 19 bp, Mus musculus
  siRNA target sequence for Fem1c (NM_173423.1,728-746).
gtgcagtgcttccatagaa

SEQ ID NO: 783608 - DNA, 19 bp, Mus musculus
  siRNA target sequence for Fem1c (NM_173423.1,730-748).
gcagtgcttccatagaagt

SEQ ID NO: 783609 - DNA, 19 bp, Mus musculus
  siRNA target sequence for Fem1c (NM_173423.1,864-882).
gtcaacaacacgactttaa

SEQ ID NO: 783610 - DNA, 19 bp, Mus musculus
  siRNA target sequence for Fem1c (NM_173423.1,910-928).
gcttcgatggccatttgga

SEQ ID NO: 783611 - DNA, 19 bp, Mus musculus
  siRNA target sequence for Fem1c (NM_173423.1,921-939).
catttggaaatagtgaaat

SEQ ID NO: 783612 - DNA, 19 bp, Mus musculus
  siRNA target sequence for Fem1c (NM_173423.1,984-1002).
gggcatacttgcttgatga

SEQ ID NO: 783613 - DNA, 19 bp, Mus musculus
  siRNA target sequence for Fem1c (NM_173423.1,985-1003).
ggcatacttgcttgatgat

SEQ ID NO: 783614 - DNA, 19 bp, Mus musculus
  siRNA target sequence for Fem1c (NM_173423.1,986-1004).
gcatacttgcttgatgatt

SEQ ID NO: 783615 - DNA, 19 bp, Mus musculus
  siRNA target sequence for Fem1c (NM_173423.1,1022-1040).
caaagaaatcgctcagtat

SEQ ID NO: 783616 - DNA, 19 bp, Mus musculus
  siRNA target sequence for Fem1c (NM_173423.1,1054-1072).
gggcagatgttaacagaaa

SEQ ID NO: 783617 - DNA, 19 bp, Mus musculus
  siRNA target sequence for Fem1c (NM_173423.1,1088-1106).
cactgcattgcatgattgt

SEQ ID NO: 783618 - DNA, 19 bp, Mus musculus
  siRNA target sequence for Fem1c (NM_173423.1,1117-1135).
gaagtttggacatcatgaa

SEQ ID NO: 783619 - DNA, 19 bp, Mus musculus
  siRNA target sequence for Fem1c (NM_173423.1,1206-1224).
gtgactggtcacactaata

SEQ ID NO: 783620 - DNA, 19 bp, Mus musculus
  siRNA target sequence for Fem1c (NM_173423.1,1217-1235).
cactaatattgtggatttt

SEQ ID NO: 783621 - DNA, 19 bp, Mus musculus
  siRNA target sequence for Fem1c (NM_173423.1,1255-1273).
caagcaagacagaacgtat

SEQ ID NO: 783622 - DNA, 19 bp, Mus musculus
  siRNA target sequence for Fem1c (NM_173423.1,1258-1276).
gcaagacagaacgtattaa

SEQ ID NO: 783623 - DNA, 19 bp, Mus musculus
  siRNA target sequence for Fem1c (NM_173423.1,1259-1277).
caagacagaacgtattaat

SEQ ID NO: 783624 - DNA, 19 bp, Mus musculus
  siRNA target sequence for Fem1c (NM_173423.1,1286-1304).
gcttctgggagctacgttt

SEQ ID NO: 783625 - DNA, 19 bp, Mus musculus
  siRNA target sequence for Fem1c (NM_173423.1,1292-1310).
gggagctacgtttgtagat

SEQ ID NO: 783626 - DNA, 19 bp, Mus musculus
  siRNA target sequence for Fem1c (NM_173423.1,1293-1311).
ggagctacgtttgtagata

SEQ ID NO: 783627 - DNA, 19 bp, Mus musculus
  siRNA target sequence for Fem1c (NM_173423.1,1296-1314).
gctacgtttgtagataaaa

SEQ ID NO: 783628 - DNA, 19 bp, Mus musculus
  siRNA target sequence for Fem1c (NM_173423.1,1370-1388).
cagtgataggactaatata

SEQ ID NO: 783629 - DNA, 19 bp, Mus musculus
  siRNA target sequence for Fem1c (NM_173423.1,1372-1390).
gtgataggactaatataat

SEQ ID NO: 783630 - DNA, 19 bp, Mus musculus
  siRNA target sequence for Fem1c (NM_173423.1,1374-1392).
gataggactaatataatta

SEQ ID NO: 783631 - DNA, 19 bp, Mus musculus
  siRNA target sequence for Fem1c (NM_173423.1,1415-1433).
gataatggcctatgactat

SEQ ID NO: 783632 - DNA, 19 bp, Mus musculus
  siRNA target sequence for Fem1c (NM_173423.1,1495-1513).
gaatgcaagcgctgttaat

SEQ ID NO: 783633 - DNA, 19 bp, Mus musculus
  siRNA target sequence for Fem1c (NM_173423.1,1499-1517).
gcaagcgctgttaattaga

SEQ ID NO: 783634 - DNA, 19 bp, Mus musculus
  siRNA target sequence for Fem1c (NM_173423.1,1539-1557).
catcccgatacctcttact

SEQ ID NO: 783635 - DNA, 19 bp, Mus musculus
  siRNA target sequence for Fem1c (NM_173423.1,1542-1560).
cccgatacctcttactaca

SEQ ID NO: 783636 - DNA, 19 bp, Mus musculus
  siRNA target sequence for Fem1c (NM_173423.1,1543-1561).
ccgatacctcttactacat

SEQ ID NO: 783637 - DNA, 19 bp, Mus musculus
  siRNA target sequence for Fem1c (NM_173423.1,1544-1562).
cgatacctcttactacatt

SEQ ID NO: 783638 - DNA, 19 bp, Mus musculus
  siRNA target sequence for Fem1c (NM_173423.1,1549-1567).
cctcttactacattagata

SEQ ID NO: 783639 - DNA, 19 bp, Mus musculus
  siRNA target sequence for Fem1c (NM_173423.1,1550-1568).
ctcttactacattagatat

SEQ ID NO: 783640 - DNA, 19 bp, Mus musculus
  siRNA target sequence for Fem1c (NM_173423.1,1609-1627).
gcatcaacctatggaaata

SEQ ID NO: 783641 - DNA, 19 bp, Mus musculus
  siRNA target sequence for Fem1c (NM_173423.1,1610-1628).
catcaacctatggaaatat

SEQ ID NO: 783642 - DNA, 19 bp, Mus musculus
  siRNA target sequence for Fem1c (NM_173423.1,1613-1631).
caacctatggaaatatgct

SEQ ID NO: 783643 - DNA, 19 bp, Mus musculus
  siRNA target sequence for Fem1c (NM_173423.1,1621-1639).
ggaaatatgctttggatat

SEQ ID NO: 783644 - DNA, 19 bp, Mus musculus
  siRNA target sequence for Fem1c (NM_173423.1,1658-1676).
ccctttaagcccaatgact

SEQ ID NO: 783645 - DNA, 19 bp, Mus musculus
  siRNA target sequence for Fem1c (NM_173423.1,1739-1757).
cttgctgggcactactgtt

SEQ ID NO: 783646 - DNA, 19 bp, Mus musculus
  siRNA target sequence for Fem1c (NM_173423.1,1742-1760).
gctgggcactactgttaca

SEQ ID NO: 783647 - DNA, 19 bp, Mus musculus
  siRNA target sequence for Fem1c (NM_173423.1,1743-1761).
ctgggcactactgttacat

SEQ ID NO: 783648 - DNA, 19 bp, Mus musculus
  siRNA target sequence for Fem1c (NM_173423.1,1745-1763).
gggcactactgttacattt

SEQ ID NO: 783649 - DNA, 19 bp, Mus musculus
  siRNA target sequence for Fem1c (NM_173423.1,1747-1765).
gcactactgttacatttga

SEQ ID NO: 783650 - DNA, 19 bp, Mus musculus
  siRNA target sequence for Fem1c (NM_173423.1,1750-1768).
ctactgttacatttgatga

SEQ ID NO: 783651 - DNA, 19 bp, Mus musculus
  siRNA target sequence for Fem1c (NM_173423.1,1753-1771).
ctgttacatttgatgatct

SEQ ID NO: 783652 - DNA, 19 bp, Mus musculus
  siRNA target sequence for Fem1c (NM_173423.1,1767-1785).
gatctcatgggcatactgt

SEQ ID NO: 783653 - DNA, 19 bp, Mus musculus
  siRNA target sequence for Fem1c (NM_173423.1,1806-1824).
gagcgagctatcaaacaaa

SEQ ID NO: 783654 - DNA, 19 bp, Mus musculus
  siRNA target sequence for Fem1c (NM_173423.1,1808-1826).
gcgagctatcaaacaaact

SEQ ID NO: 783655 - DNA, 19 bp, Mus musculus
  siRNA target sequence for Fem1c (NM_173423.1,1810-1828).
gagctatcaaacaaactca

SEQ ID NO: 783656 - DNA, 19 bp, Mus musculus
  siRNA target sequence for Fem1c (NM_173423.1,1836-1854).
gctgacccattgcagttaa

SEQ ID NO: 783657 - DNA, 19 bp, Mus musculus
  siRNA target sequence for Fem1c (NM_173423.1,1839-1857).
gacccattgcagttaaata

SEQ ID NO: 783658 - DNA, 19 bp, Mus musculus
  siRNA target sequence for Fem1c (NM_173423.1,1877-1895).
gcacttaatttgcttatta

SEQ ID NO: 783659 - DNA, 19 bp, Mus musculus
  siRNA target sequence for Fem1c (NM_173423.1,1914-1932).
gtagaacaggatcatttca

SEQ ID NO: 783660 - DNA, 19 bp, Mus musculus
  siRNA target sequence for Fem1c (NM_173423.1,2007-2025).
gtggacaagaatactacat

SEQ ID NO: 783661 - DNA, 19 bp, Mus musculus
  siRNA target sequence for Fem1c (NM_173423.1,2009-2027).
ggacaagaatactacatgt

SEQ ID NO: 783662 - DNA, 19 bp, Mus musculus
  siRNA target sequence for Fem1c (NM_173423.1,2034-2052).
cggtaccctgtttgtaagt

SEQ ID NO: 783663 - DNA, 19 bp, Mus musculus
  siRNA target sequence for Fem1c (NM_173423.1,2121-2139).
gacaacagtcccctacata

SEQ ID NO: 783664 - DNA, 19 bp, Mus musculus
  siRNA target sequence for Fem1c (NM_173423.1,2136-2154).
catatcgcggctctgaata

SEQ ID NO: 783665 - DNA, 19 bp, Mus musculus
  siRNA target sequence for Fem1c (NM_173423.1,2141-2159).
cgcggctctgaataaccat

SEQ ID NO: 783666 - DNA, 19 bp, Mus musculus
  siRNA target sequence for Fem1c (NM_173423.1,2168-2186).
catgaatctccttattaaa

SEQ ID NO: 783667 - DNA, 19 bp, Mus musculus
  siRNA target sequence for Fem1c (NM_173423.1,2171-2189).
gaatctccttattaaatca

SEQ ID NO: 783668 - DNA, 19 bp, Mus musculus
  siRNA target sequence for Fem1c (NM_173423.1,2246-2264).
cgagaaggagatagctaaa

SEQ ID NO: 783669 - DNA, 19 bp, Mus musculus
  siRNA target sequence for Fem1c (NM_173423.1,2255-2273).
gatagctaaaaatttgata

SEQ ID NO: 783670 - DNA, 19 bp, Mus musculus
  siRNA target sequence for Fem1c (NM_173423.1,2270-2288).
gatacagcccataaatcat

SEQ ID NO: 783671 - DNA, 19 bp, Mus musculus
  siRNA target sequence for Fem1c (NM_173423.1,2313-2331).
cgtgtcatcgtgaatcata

SEQ ID NO: 783672 - DNA, 19 bp, Mus musculus
  siRNA target sequence for Fem1c (NM_173423.1,2321-2339).
cgtgaatcatagaatctat

SEQ ID NO: 783673 - DNA, 19 bp, Mus musculus
  siRNA target sequence for Fem1c (NM_173423.1,2372-2390).
ctttgtttcacttcataga

SEQ ID NO: 783674 - DNA, 19 bp, Mus musculus
  siRNA target sequence for A830043J08 (NM_173425.1,332-350).
cactgggaacggtttgctt

SEQ ID NO: 783675 - DNA, 19 bp, Mus musculus
  siRNA target sequence for A830043J08 (NM_173425.1,365-383).
ggaccaactactagaatgt

SEQ ID NO: 783676 - DNA, 19 bp, Mus musculus
  siRNA target sequence for A830043J08 (NM_173425.1,421-439).
gtgccaggccagtgaacta

SEQ ID NO: 783677 - DNA, 19 bp, Mus musculus
  siRNA target sequence for A830043J08 (NM_173425.1,429-447).
ccagtgaactaccatgaaa

SEQ ID NO: 783678 - DNA, 19 bp, Mus musculus
  siRNA target sequence for A830043J08 (NM_173425.1,430-448).
cagtgaactaccatgaaaa

SEQ ID NO: 783679 - DNA, 19 bp, Mus musculus
  siRNA target sequence for A830043J08 (NM_173425.1,512-530).
gggacaagaacggttgttt

SEQ ID NO: 783680 - DNA, 19 bp, Mus musculus
  siRNA target sequence for A830043J08 (NM_173425.1,585-603).
gcacaggggaggtcttgtt

SEQ ID NO: 783681 - DNA, 19 bp, Mus musculus
  siRNA target sequence for A830043J08 (NM_173425.1,590-608).
ggggaggtcttgttcttat

SEQ ID NO: 783682 - DNA, 19 bp, Mus musculus
  siRNA target sequence for A830043J08 (NM_173425.1,592-610).
ggaggtcttgttcttatct

SEQ ID NO: 783683 - DNA, 19 bp, Mus musculus
  siRNA target sequence for A830043J08 (NM_173425.1,613-631).
ctgccaatcaggaattcta

SEQ ID NO: 783684 - DNA, 19 bp, Mus musculus
  siRNA target sequence for A830043J08 (NM_173425.1,659-677).
gggcatgaggccagtgaat

SEQ ID NO: 783685 - DNA, 19 bp, Mus musculus
  siRNA target sequence for A830043J08 (NM_173425.1,662-680).
catgaggccagtgaattgt

SEQ ID NO: 783686 - DNA, 19 bp, Mus musculus
  siRNA target sequence for A830043J08 (NM_173425.1,672-690).
gtgaattgtggcactgata

SEQ ID NO: 783687 - DNA, 19 bp, Mus musculus
  siRNA target sequence for A830043J08 (NM_173425.1,766-784).
gagacgccactgtgcaaaa

SEQ ID NO: 783688 - DNA, 19 bp, Mus musculus
  siRNA target sequence for A830043J08 (NM_173425.1,780-798).
caaaagagcgacttctgtt

SEQ ID NO: 783689 - DNA, 19 bp, Mus musculus
  siRNA target sequence for A830043J08 (NM_173425.1,785-803).
gagcgacttctgtttcttt

SEQ ID NO: 783690 - DNA, 19 bp, Mus musculus
  siRNA target sequence for A830043J08 (NM_173425.1,787-805).
gcgacttctgtttctttgt

SEQ ID NO: 783691 - DNA, 19 bp, Mus musculus
  siRNA target sequence for A830043J08 (NM_173425.1,920-938).
gcagctggtgcctcttcta

SEQ ID NO: 783692 - DNA, 19 bp, Mus musculus
  siRNA target sequence for A830043J08 (NM_173425.1,986-1004).
ctatgatggcaataagatt

SEQ ID NO: 783693 - DNA, 19 bp, Mus musculus
  siRNA target sequence for A830043J08 (NM_173425.1,1163-1181).
gagtcggaggttcaaagta

SEQ ID NO: 783694 - DNA, 19 bp, Mus musculus
  siRNA target sequence for A830043J08 (NM_173425.1,1165-1183).
gtcggaggttcaaagtaca

SEQ ID NO: 783695 - DNA, 19 bp, Mus musculus
  siRNA target sequence for A830043J08 (NM_173425.1,1167-1185).
cggaggttcaaagtacatt

SEQ ID NO: 783696 - DNA, 19 bp, Mus musculus
  siRNA target sequence for A830043J08 (NM_173425.1,1209-1227).
ggctcatgggaaaactcta

SEQ ID NO: 783697 - DNA, 19 bp, Mus musculus
  siRNA target sequence for A830043J08 (NM_173425.1,1334-1352).
gaacgttcttagagaagat

SEQ ID NO: 783698 - DNA, 19 bp, Mus musculus
  siRNA target sequence for A830043J08 (NM_173425.1,1367-1385).
cgaggcggagacaaatgtt

SEQ ID NO: 783699 - DNA, 19 bp, Mus musculus
  siRNA target sequence for A830043J08 (NM_173425.1,1411-1429).
ccgaacccaggcgatcttt

SEQ ID NO: 783700 - DNA, 19 bp, Mus musculus
  siRNA target sequence for A830043J08 (NM_173425.1,1412-1430).
cgaacccaggcgatctttt

SEQ ID NO: 783701 - DNA, 19 bp, Mus musculus
  siRNA target sequence for A830043J08 (NM_173425.1,1438-1456).
gatttcccagggattttca

SEQ ID NO: 783702 - DNA, 19 bp, Mus musculus
  siRNA target sequence for A830043J08 (NM_173425.1,1511-1529).
cccaaaccaaggagtcttt

SEQ ID NO: 783703 - DNA, 19 bp, Mus musculus
  siRNA target sequence for A830043J08 (NM_173425.1,1522-1540).
gagtctttaaggatagact

SEQ ID NO: 783704 - DNA, 19 bp, Mus musculus
  siRNA target sequence for A830043J08 (NM_173425.1,1583-1601).
gaaggtcatctcaaaatgt

SEQ ID NO: 783705 - DNA, 19 bp, Mus musculus
  siRNA target sequence for 1700012H17Rik (NM_173426.1,713-731).
cctgcgcatcctgaacaaa

SEQ ID NO: 783706 - DNA, 19 bp, Mus musculus
  siRNA target sequence for 1700012H17Rik (NM_173426.1,802-820).
ctgacaaggccaaatacgt

SEQ ID NO: 783707 - DNA, 19 bp, Mus musculus
  siRNA target sequence for 1700012H17Rik (NM_173426.1,1253-1271).
cagtgtgaagccccttaaa

SEQ ID NO: 783708 - DNA, 19 bp, Mus musculus
  siRNA target sequence for 1700012H17Rik (NM_173426.1,1517-1535).
ggctaattctgacatcata

SEQ ID NO: 783709 - DNA, 19 bp, Mus musculus
  siRNA target sequence for 1700012H17Rik (NM_173426.1,1518-1536).
gctaattctgacatcatat

SEQ ID NO: 783710 - DNA, 19 bp, Mus musculus
  siRNA target sequence for 1700012H17Rik (NM_173426.1,1548-1566).
cgcagcgcaagcatgatca

SEQ ID NO: 783711 - DNA, 19 bp, Mus musculus
  siRNA target sequence for 1700012H17Rik (NM_173426.1,1600-1618).
gtgaccttagaaatgatga

SEQ ID NO: 783712 - DNA, 19 bp, Mus musculus
  siRNA target sequence for 1700012H17Rik (NM_173426.1,1663-1681).
gaaatgctagaatcatcaa

SEQ ID NO: 783713 - DNA, 19 bp, Mus musculus
  siRNA target sequence for 1700012H17Rik (NM_173426.1,1682-1700).
gtggctatatagcatcaaa

SEQ ID NO: 783714 - DNA, 19 bp, Mus musculus
  siRNA target sequence for B230308G19Rik (NM_173427.1,63-81).
ctgcggcttacaaactcta

SEQ ID NO: 783715 - DNA, 19 bp, Mus musculus
  siRNA target sequence for B230308G19Rik (NM_173427.1,66-84).
cggcttacaaactctacaa

SEQ ID NO: 783716 - DNA, 19 bp, Mus musculus
  siRNA target sequence for B230308G19Rik (NM_173427.1,107-125).
caggcagggagaaacaaca

SEQ ID NO: 783717 - DNA, 19 bp, Mus musculus
  siRNA target sequence for B230308G19Rik (NM_173427.1,462-480).
gctcctcaggcagacttat

SEQ ID NO: 783718 - DNA, 19 bp, Mus musculus
  siRNA target sequence for B230308G19Rik (NM_173427.1,577-595).
caacggttggactgatctt

SEQ ID NO: 783719 - DNA, 19 bp, Mus musculus
  siRNA target sequence for B230308G19Rik (NM_173427.1,726-744).
ccaacgcctcccatacttt

SEQ ID NO: 783720 - DNA, 19 bp, Mus musculus
  siRNA target sequence for B230308G19Rik (NM_173427.1,770-788).
gaggagaatattatacaaa

SEQ ID NO: 783721 - DNA, 19 bp, Mus musculus
  siRNA target sequence for B230308G19Rik (NM_173427.1,811-829).
gggcagagtatatgactat

SEQ ID NO: 783722 - DNA, 19 bp, Mus musculus
  siRNA target sequence for B230308G19Rik (NM_173427.1,816-834).
gagtatatgactatttcgt

SEQ ID NO: 783723 - DNA, 19 bp, Mus musculus
  siRNA target sequence for B230308G19Rik (NM_173427.1,1175-1193).
cttgtagctgggaccaatt

SEQ ID NO: 783724 - DNA, 19 bp, Mus musculus
  siRNA target sequence for B230308G19Rik (NM_173427.1,1178-1196).
gtagctgggaccaatttct

SEQ ID NO: 783725 - DNA, 19 bp, Mus musculus
  siRNA target sequence for B230308G19Rik (NM_173427.1,1383-1401).
cagagcgggagctgattct

SEQ ID NO: 783726 - DNA, 19 bp, Mus musculus
  siRNA target sequence for B230308G19Rik (NM_173427.1,1469-1487).
cgcctctgttgctatgaca

SEQ ID NO: 783727 - DNA, 19 bp, Mus musculus
  siRNA target sequence for B230308G19Rik (NM_173427.1,1555-1573).
ctgtaccctattcaattat

SEQ ID NO: 783728 - DNA, 19 bp, Mus musculus
  siRNA target sequence for B230308G19Rik (NM_173427.1,1557-1575).
gtaccctattcaattatct

SEQ ID NO: 783729 - DNA, 19 bp, Mus musculus
  siRNA target sequence for B230308G19Rik (NM_173427.1,1728-1746).
ccattggaggtgagtgttt

SEQ ID NO: 783730 - DNA, 19 bp, Mus musculus
  siRNA target sequence for B230308G19Rik (NM_173427.1,1799-1817).
cctctcccaaacgatacat

SEQ ID NO: 783731 - DNA, 19 bp, Mus musculus
  siRNA target sequence for B230308G19Rik (NM_173427.1,1839-1857).
cggtgtgcgccaatgagat

SEQ ID NO: 783732 - DNA, 19 bp, Mus musculus
  siRNA target sequence for B230308G19Rik (NM_173427.1,1845-1863).
gcgccaatgagatctttgt

SEQ ID NO: 783733 - DNA, 19 bp, Mus musculus
  siRNA target sequence for C130032F08Rik (NM_173429.1,393-411).
ggtggtcgtccctgaagat

SEQ ID NO: 783734 - DNA, 19 bp, Mus musculus
  siRNA target sequence for C130032F08Rik (NM_173429.1,394-412).
gtggtcgtccctgaagatt

SEQ ID NO: 783735 - DNA, 19 bp, Mus musculus
  siRNA target sequence for C130032F08Rik (NM_173429.1,396-414).
ggtcgtccctgaagattca

SEQ ID NO: 783736 - DNA, 19 bp, Mus musculus
  siRNA target sequence for C130032F08Rik (NM_173429.1,1481-1499).
gactgcggtcgctgtttta

SEQ ID NO: 783737 - DNA, 19 bp, Mus musculus
  siRNA target sequence for C130032F08Rik (NM_173429.1,1572-1590).
gccgtggcttccgtcaaaa

SEQ ID NO: 783738 - DNA, 19 bp, Mus musculus
  siRNA target sequence for 1700047E16Rik (NM_173431.1,98-116).
gacctgccggtgaaagata

SEQ ID NO: 783739 - DNA, 19 bp, Mus musculus
  siRNA target sequence for 1700047E16Rik (NM_173431.1,100-118).
cctgccggtgaaagataca

SEQ ID NO: 783740 - DNA, 19 bp, Mus musculus
  siRNA target sequence for 1700047E16Rik (NM_173431.1,223-241).
cagatttttgcgtttgcat

SEQ ID NO: 783741 - DNA, 19 bp, Mus musculus
  siRNA target sequence for 1700047E16Rik (NM_173431.1,234-252).
gtttgcatgatgagaacat

SEQ ID NO: 783742 - DNA, 19 bp, Mus musculus
  siRNA target sequence for 1700047E16Rik (NM_173431.1,310-328).
gttaatacggctagttaat

SEQ ID NO: 783743 - DNA, 19 bp, Mus musculus
  siRNA target sequence for 1700047E16Rik (NM_173431.1,318-336).
ggctagttaatgacaagaa

SEQ ID NO: 783744 - DNA, 19 bp, Mus musculus
  siRNA target sequence for 1700047E16Rik (NM_173431.1,375-393).
gacgagatgtggaaatgga

SEQ ID NO: 783745 - DNA, 19 bp, Mus musculus
  siRNA target sequence for 1700047E16Rik (NM_173431.1,454-472).
caaaaacaggctgatatca

SEQ ID NO: 783746 - DNA, 19 bp, Mus musculus
  siRNA target sequence for 1700047E16Rik (NM_173431.1,586-604).
ccctgggaaaggtctaaga

SEQ ID NO: 783747 - DNA, 19 bp, Mus musculus
  siRNA target sequence for 1700047E16Rik (NM_173431.1,588-606).
ctgggaaaggtctaagatt

SEQ ID NO: 783748 - DNA, 19 bp, Mus musculus
  siRNA target sequence for 1700047E16Rik (NM_173431.1,635-653).
caacccacgctcacaaaat

SEQ ID NO: 783749 - DNA, 19 bp, Mus musculus
  siRNA target sequence for 1700047E16Rik (NM_173431.1,638-656).
cccacgctcacaaaataca

SEQ ID NO: 783750 - DNA, 19 bp, Mus musculus
  siRNA target sequence for 1700047E16Rik (NM_173431.1,723-741).
gaggccagatagaagagtt

SEQ ID NO: 783751 - DNA, 19 bp, Mus musculus
  siRNA target sequence for 1700047E16Rik (NM_173431.1,846-864).
caaatattcgggacaatgt

SEQ ID NO: 783752 - DNA, 19 bp, Mus musculus
  siRNA target sequence for 1700047E16Rik (NM_173431.1,857-875).
gacaatgtagaaacgatta

SEQ ID NO: 783753 - DNA, 19 bp, Mus musculus
  siRNA target sequence for 1700047E16Rik (NM_173431.1,866-884).
gaaacgattaagcttcata

SEQ ID NO: 783754 - DNA, 19 bp, Mus musculus
  siRNA target sequence for 1700047E16Rik (NM_173431.1,870-888).
cgattaagcttcataaaca

SEQ ID NO: 783755 - DNA, 19 bp, Mus musculus
  siRNA target sequence for 1700047E16Rik (NM_173431.1,887-905).
caactagtggagaaaagca

SEQ ID NO: 783756 - DNA, 19 bp, Mus musculus
  siRNA target sequence for 1700047E16Rik (NM_173431.1,904-922).
caatgctctttcagtcata

SEQ ID NO: 783757 - DNA, 19 bp, Mus musculus
  siRNA target sequence for 1700047E16Rik (NM_173431.1,1058-1076).
ctgcactcggtgaggtttt

SEQ ID NO: 783758 - DNA, 19 bp, Mus musculus
  siRNA target sequence for 1700047E16Rik (NM_173431.1,1060-1078).
gcactcggtgaggttttca

SEQ ID NO: 783759 - DNA, 19 bp, Mus musculus
  siRNA target sequence for 1700047E16Rik (NM_173431.1,1063-1081).
ctcggtgaggttttcagaa

SEQ ID NO: 783760 - DNA, 19 bp, Mus musculus
  siRNA target sequence for 1700047E16Rik (NM_173431.1,1093-1111).
ggagctgcaggatagaatt

SEQ ID NO: 783761 - DNA, 19 bp, Mus musculus
  siRNA target sequence for 1700047E16Rik (NM_173431.1,1096-1114).
gctgcaggatagaattaat

SEQ ID NO: 783762 - DNA, 19 bp, Mus musculus
  siRNA target sequence for 1700047E16Rik (NM_173431.1,1102-1120).
ggatagaattaatgattta

SEQ ID NO: 783763 - DNA, 19 bp, Mus musculus
  siRNA target sequence for 1700047E16Rik (NM_173431.1,1129-1147).
gcgggaactattaaaggaa

SEQ ID NO: 783764 - DNA, 19 bp, Mus musculus
  siRNA target sequence for 1700047E16Rik (NM_173431.1,1130-1148).
cgggaactattaaaggaaa

SEQ ID NO: 783765 - DNA, 19 bp, Mus musculus
  siRNA target sequence for 1700047E16Rik (NM_173431.1,1240-1258).
gctcgaaactgccttaaaa

SEQ ID NO: 783766 - DNA, 19 bp, Mus musculus
  siRNA target sequence for 1700047E16Rik (NM_173431.1,1243-1261).
cgaaactgccttaaaatct

SEQ ID NO: 783767 - DNA, 19 bp, Mus musculus
  siRNA target sequence for 1700047E16Rik (NM_173431.1,1278-1296).
ccgaagtccttgacaaact

SEQ ID NO: 783768 - DNA, 19 bp, Mus musculus
  siRNA target sequence for 1700047E16Rik (NM_173431.1,1279-1297).
cgaagtccttgacaaacta

SEQ ID NO: 783769 - DNA, 19 bp, Mus musculus
  siRNA target sequence for 1700047E16Rik (NM_173431.1,1300-1318).
gactgaaagagaccaaaat

SEQ ID NO: 783770 - DNA, 19 bp, Mus musculus
  siRNA target sequence for 1700047E16Rik (NM_173431.1,1414-1432).
ccaggagagtgacatcaat

SEQ ID NO: 783771 - DNA, 19 bp, Mus musculus
  siRNA target sequence for 1700047E16Rik (NM_173431.1,1448-1466).
gaagcactcctgcttataa

SEQ ID NO: 783772 - DNA, 19 bp, Mus musculus
  siRNA target sequence for 1700047E16Rik (NM_173431.1,1522-1540).
caaaatcaataaagatcta

SEQ ID NO: 783773 - DNA, 19 bp, Mus musculus
  siRNA target sequence for 1700047E16Rik (NM_173431.1,1642-1660).
ctatcagatggaagttgaa

SEQ ID NO: 783774 - DNA, 19 bp, Mus musculus
  siRNA target sequence for 1700047E16Rik (NM_173431.1,1763-1781).
gaagcccagttaaaggata

SEQ ID NO: 783775 - DNA, 19 bp, Mus musculus
  siRNA target sequence for 1700047E16Rik (NM_173431.1,1864-1882).
cctagaacgaggagaaaat

SEQ ID NO: 783776 - DNA, 19 bp, Mus musculus
  siRNA target sequence for 1700047E16Rik (NM_173431.1,1933-1951).
ggcatctggtgataaagaa

SEQ ID NO: 783777 - DNA, 19 bp, Mus musculus
  siRNA target sequence for 1700047E16Rik (NM_173431.1,1935-1953).
catctggtgataaagaact

SEQ ID NO: 783778 - DNA, 19 bp, Mus musculus
  siRNA target sequence for 1700047E16Rik (NM_173431.1,1938-1956).
ctggtgataaagaacttgt

SEQ ID NO: 783779 - DNA, 19 bp, Mus musculus
  siRNA target sequence for 1700047E16Rik (NM_173431.1,1963-1981).
ctgtacctacgctttctat

SEQ ID NO: 783780 - DNA, 19 bp, Mus musculus
  siRNA target sequence for 1700047E16Rik (NM_173431.1,1965-1983).
gtacctacgctttctatga

SEQ ID NO: 783781 - DNA, 19 bp, Mus musculus
  siRNA target sequence for 1700047E16Rik (NM_173431.1,1968-1986).
cctacgctttctatgactt

SEQ ID NO: 783782 - DNA, 19 bp, Mus musculus
  siRNA target sequence for 1700047E16Rik (NM_173431.1,2018-2036).
ctttacccggagtataact

SEQ ID NO: 783783 - DNA, 19 bp, Mus musculus
  siRNA target sequence for 1700047E16Rik (NM_173431.1,2053-2071).
ggtccacgtcaatgactta

SEQ ID NO: 783784 - DNA, 19 bp, Mus musculus
  siRNA target sequence for 1700047E16Rik (NM_173431.1,2054-2072).
gtccacgtcaatgacttat

SEQ ID NO: 783785 - DNA, 19 bp, Mus musculus
  siRNA target sequence for 1700047E16Rik (NM_173431.1,2056-2074).
ccacgtcaatgacttattt

SEQ ID NO: 783786 - DNA, 19 bp, Mus musculus
  siRNA target sequence for 1700047E16Rik (NM_173431.1,2121-2139).
cccacagcacagattacga

SEQ ID NO: 783787 - DNA, 19 bp, Mus musculus
  siRNA target sequence for 1700047E16Rik (NM_173431.1,2122-2140).
ccacagcacagattacgaa

SEQ ID NO: 783788 - DNA, 19 bp, Mus musculus
  siRNA target sequence for 1700047E16Rik (NM_173431.1,2148-2166).
cagcgtgtcagttgagatt

SEQ ID NO: 783789 - DNA, 19 bp, Mus musculus
  siRNA target sequence for 1700047E16Rik (NM_173431.1,2158-2176).
gttgagattccatgagatt

SEQ ID NO: 783790 - DNA, 19 bp, Mus musculus
  siRNA target sequence for 1700047E16Rik (NM_173431.1,2161-2179).
gagattccatgagattcta

SEQ ID NO: 783791 - DNA, 19 bp, Mus musculus
  siRNA target sequence for 1700047E16Rik (NM_173431.1,2163-2181).
gattccatgagattctaga

SEQ ID NO: 783792 - DNA, 19 bp, Mus musculus
  siRNA target sequence for 1700047E16Rik (NM_173431.1,2208-2226).
caagcttagttggaactaa

SEQ ID NO: 783793 - DNA, 19 bp, Mus musculus
  siRNA target sequence for 1700047E16Rik (NM_173431.1,2212-2230).
cttagttggaactaaagga

SEQ ID NO: 783794 - DNA, 19 bp, Mus musculus
  siRNA target sequence for 1700047E16Rik (NM_173431.1,2255-2273).
gaatactggttccgattaa

SEQ ID NO: 783795 - DNA, 19 bp, Mus musculus
  siRNA target sequence for 1700047E16Rik (NM_173431.1,2281-2299).
catggatcaagctattcga

SEQ ID NO: 783796 - DNA, 19 bp, Mus musculus
  siRNA target sequence for 1700047E16Rik (NM_173431.1,2313-2331).
gggcaaaggcattaggata

SEQ ID NO: 783797 - DNA, 19 bp, Mus musculus
  siRNA target sequence for 1700047E16Rik (NM_173431.1,2316-2334).
caaaggcattaggatacat

SEQ ID NO: 783798 - DNA, 19 bp, Mus musculus
  siRNA target sequence for 1700047E16Rik (NM_173431.1,2418-2436).
ccacagacggcaacttgaa

SEQ ID NO: 783799 - DNA, 19 bp, Mus musculus
  siRNA target sequence for 1700047E16Rik (NM_173431.1,2419-2437).
cacagacggcaacttgaat

SEQ ID NO: 783800 - DNA, 19 bp, Mus musculus
  siRNA target sequence for 1700047E16Rik (NM_173431.1,2421-2439).
cagacggcaacttgaatga

SEQ ID NO: 783801 - DNA, 19 bp, Mus musculus
  siRNA target sequence for 1700047E16Rik (NM_173431.1,2425-2443).
cggcaacttgaatgaactt

SEQ ID NO: 783802 - DNA, 19 bp, Mus musculus
  siRNA target sequence for 1700047E16Rik (NM_173431.1,2438-2456).
gaacttcatgttacagtaa

SEQ ID NO: 783803 - DNA, 19 bp, Mus musculus
  siRNA target sequence for 1700047E16Rik (NM_173431.1,2499-2517).
cacacgcatatgtggtata

SEQ ID NO: 783804 - DNA, 19 bp, Mus musculus
  siRNA target sequence for 1700047E16Rik (NM_173431.1,2504-2522).
gcatatgtggtatacaagt

SEQ ID NO: 783805 - DNA, 19 bp, Mus musculus
  siRNA target sequence for 1700047E16Rik (NM_173431.1,2505-2523).
catatgtggtatacaagtt

SEQ ID NO: 783806 - DNA, 19 bp, Mus musculus
  siRNA target sequence for 1700047E16Rik (NM_173431.1,2601-2619).
cagtgccgatgaatatgga

SEQ ID NO: 783807 - DNA, 19 bp, Mus musculus
  siRNA target sequence for 1700047E16Rik (NM_173431.1,2603-2621).
gtgccgatgaatatggatt

SEQ ID NO: 783808 - DNA, 19 bp, Mus musculus
  siRNA target sequence for 1700047E16Rik (NM_173431.1,2607-2625).
cgatgaatatggatttgga

SEQ ID NO: 783809 - DNA, 19 bp, Mus musculus
  siRNA target sequence for 1700047E16Rik (NM_173431.1,2618-2636).
gatttggatcgctacctta

SEQ ID NO: 783810 - DNA, 19 bp, Mus musculus
  siRNA target sequence for 1700047E16Rik (NM_173431.1,2623-2641).
ggatcgctaccttaagtca

SEQ ID NO: 783811 - DNA, 19 bp, Mus musculus
  siRNA target sequence for 1700047E16Rik (NM_173431.1,2656-2674).
ctatgtttttgatgatagt

SEQ ID NO: 783812 - DNA, 19 bp, Mus musculus
  siRNA target sequence for 1700047E16Rik (NM_173431.1,2673-2691).
gtgatacccaggagaatat

SEQ ID NO: 783813 - DNA, 19 bp, Mus musculus
  siRNA target sequence for 1700047E16Rik (NM_173431.1,2726-2744).
ctggcacatgacaagtgta

SEQ ID NO: 783814 - DNA, 19 bp, Mus musculus
  siRNA target sequence for 1700047E16Rik (NM_173431.1,2729-2747).
gcacatgacaagtgtatct

SEQ ID NO: 783815 - DNA, 19 bp, Mus musculus
  siRNA target sequence for 1700047E16Rik (NM_173431.1,2737-2755).
caagtgtatctcaggaata

SEQ ID NO: 783816 - DNA, 19 bp, Mus musculus
  siRNA target sequence for 1700047E16Rik (NM_173431.1,2740-2758).
gtgtatctcaggaatattt

SEQ ID NO: 783817 - DNA, 19 bp, Mus musculus
  siRNA target sequence for 1700047E16Rik (NM_173431.1,2742-2760).
gtatctcaggaatatttga

SEQ ID NO: 783818 - DNA, 19 bp, Mus musculus
  siRNA target sequence for 1700047E16Rik (NM_173431.1,2748-2766).
caggaatatttgagttgat

SEQ ID NO: 783819 - DNA, 19 bp, Mus musculus
  siRNA target sequence for 1700047E16Rik (NM_173431.1,2786-2804).
gcaggaactatccaagtta

SEQ ID NO: 783820 - DNA, 19 bp, Mus musculus
  siRNA target sequence for 1700047E16Rik (NM_173431.1,2787-2805).
caggaactatccaagttat

SEQ ID NO: 783821 - DNA, 19 bp, Mus musculus
  siRNA target sequence for 1700047E16Rik (NM_173431.1,2789-2807).
ggaactatccaagttatat

SEQ ID NO: 783822 - DNA, 19 bp, Mus musculus
  siRNA target sequence for 1700047E16Rik (NM_173431.1,2790-2808).
gaactatccaagttatatt

SEQ ID NO: 783823 - DNA, 19 bp, Mus musculus
  siRNA target sequence for 1700047E16Rik (NM_173431.1,2793-2811).
ctatccaagttatattgaa

SEQ ID NO: 783824 - DNA, 19 bp, Mus musculus
  siRNA target sequence for 1700047E16Rik (NM_173431.1,2912-2930).
ccaaagtcctcagatgtta

SEQ ID NO: 783825 - DNA, 19 bp, Mus musculus
  siRNA target sequence for 1700047E16Rik (NM_173431.1,2936-2954).
gttgtagcaccaaaaccta

SEQ ID NO: 783826 - DNA, 19 bp, Mus musculus
  siRNA target sequence for 1700047E16Rik (NM_173431.1,2952-2970).
ctaaaccaagacaacgttt

SEQ ID NO: 783827 - DNA, 19 bp, Mus musculus
  siRNA target sequence for 1700047E16Rik (NM_173431.1,2957-2975).
ccaagacaacgtttaacat

SEQ ID NO: 783828 - DNA, 19 bp, Mus musculus
  siRNA target sequence for 1700047E16Rik (NM_173431.1,2961-2979).
gacaacgtttaacatttgt

SEQ ID NO: 783829 - DNA, 19 bp, Mus musculus
  siRNA target sequence for 1700047E16Rik (NM_173431.1,2973-2991).
catttgtggacaaaaaggt

SEQ ID NO: 783830 - DNA, 19 bp, Mus musculus
  siRNA target sequence for 1700047E16Rik (NM_173431.1,2983-3001).
caaaaaggtctcttttgca

SEQ ID NO: 783831 - DNA, 19 bp, Mus musculus
  siRNA target sequence for 1700047E16Rik (NM_173431.1,3041-3059).
cctaaagatataaaagaca

SEQ ID NO: 783832 - DNA, 19 bp, Mus musculus
  siRNA target sequence for 1700047E16Rik (NM_173431.1,3179-3197).
gacgacatctctttcttat

SEQ ID NO: 783833 - DNA, 19 bp, Mus musculus
  siRNA target sequence for 1700047E16Rik (NM_173431.1,3302-3320).
gatgactgtatcattccaa

SEQ ID NO: 783834 - DNA, 19 bp, Mus musculus
  siRNA target sequence for 1700047E16Rik (NM_173431.1,3307-3325).
ctgtatcattccaagttct

SEQ ID NO: 783835 - DNA, 19 bp, Mus musculus
  siRNA target sequence for 1700047E16Rik (NM_173431.1,3353-3371).
gaagaaattcggattgaga

SEQ ID NO: 783836 - DNA, 19 bp, Mus musculus
  siRNA target sequence for 1700047E16Rik (NM_173431.1,3377-3395).
gctctgaaccttaatgatt

SEQ ID NO: 783837 - DNA, 19 bp, Mus musculus
  siRNA target sequence for 1700047E16Rik (NM_173431.1,3417-3435).
ctattcagcgactcttcat

SEQ ID NO: 783838 - DNA, 19 bp, Mus musculus
  siRNA target sequence for 1700047E16Rik (NM_173431.1,3422-3440).
cagcgactcttcattgagt

SEQ ID NO: 783839 - DNA, 19 bp, Mus musculus
  siRNA target sequence for 1700047E16Rik (NM_173431.1,3503-3521).
cagtgggtctactataact

SEQ ID NO: 783840 - DNA, 19 bp, Mus musculus
  siRNA target sequence for 1700047E16Rik (NM_173431.1,3505-3523).
gtgggtctactataactat

SEQ ID NO: 783841 - DNA, 19 bp, Mus musculus
  siRNA target sequence for 1700047E16Rik (NM_173431.1,3560-3578).
gcggtgagagacatcttaa

SEQ ID NO: 783842 - DNA, 19 bp, Mus musculus
  siRNA target sequence for 1700047E16Rik (NM_173431.1,3561-3579).
cggtgagagacatcttaaa

SEQ ID NO: 783843 - DNA, 19 bp, Mus musculus
  siRNA target sequence for 1700047E16Rik (NM_173431.1,3650-3668).
gacgagcaggacctagaat

SEQ ID NO: 783844 - DNA, 19 bp, Mus musculus
  siRNA target sequence for 1700047E16Rik (NM_173431.1,3796-3814).
gactgtggaagcacttcat

SEQ ID NO: 783845 - DNA, 19 bp, Mus musculus
  siRNA target sequence for 1700047E16Rik (NM_173431.1,3827-3845).
gtctacgagcaaaatagaa

SEQ ID NO: 783846 - DNA, 19 bp, Mus musculus
  siRNA target sequence for 4932416A15 (NM_173433.1,1563-1581).
ccccaaggtggattgacta

SEQ ID NO: 783847 - DNA, 19 bp, Mus musculus
  siRNA target sequence for 4932416A15 (NM_173433.1,1564-1582).
cccaaggtggattgactat

SEQ ID NO: 783848 - DNA, 19 bp, Mus musculus
  siRNA target sequence for 4932416A15 (NM_173433.1,1832-1850).
cctatagccacggtaagta

SEQ ID NO: 783849 - DNA, 19 bp, Mus musculus
  siRNA target sequence for 4932416A15 (NM_173433.1,1833-1851).
ctatagccacggtaagtaa

SEQ ID NO: 783850 - DNA, 19 bp, Mus musculus
  siRNA target sequence for 4932416A15 (NM_173433.1,1888-1906).
gcaaccatcagatgtgaaa

SEQ ID NO: 783851 - DNA, 19 bp, Mus musculus
  siRNA target sequence for 4932416A15 (NM_173433.1,1973-1991).
ggtcacatgtcaactagaa

SEQ ID NO: 783852 - DNA, 19 bp, Mus musculus
  siRNA target sequence for 4932416A15 (NM_173433.1,1978-1996).
catgtcaactagaagatgt

SEQ ID NO: 783853 - DNA, 19 bp, Mus musculus
  siRNA target sequence for 4932416A15 (NM_173433.1,1981-1999).
gtcaactagaagatgtagt

SEQ ID NO: 783854 - DNA, 19 bp, Mus musculus
  siRNA target sequence for 4932416A15 (NM_173433.1,2116-2134).
ggctgtgagtggagactta

SEQ ID NO: 783855 - DNA, 19 bp, Mus musculus
  siRNA target sequence for 4932416A15 (NM_173433.1,2160-2178).
ctggcccacagcatcttat

SEQ ID NO: 783856 - DNA, 19 bp, Mus musculus
  siRNA target sequence for 9930111J21 (NM_173434.1,894-912).
gcagattcgacataccatt

SEQ ID NO: 783857 - DNA, 19 bp, Mus musculus
  siRNA target sequence for 9930111J21 (NM_173434.1,895-913).
cagattcgacataccattt

SEQ ID NO: 783858 - DNA, 19 bp, Mus musculus
  siRNA target sequence for 9930111J21 (NM_173434.1,897-915).
gattcgacataccatttca

SEQ ID NO: 783859 - DNA, 19 bp, Mus musculus
  siRNA target sequence for 9930111J21 (NM_173434.1,901-919).
cgacataccatttcaagta

SEQ ID NO: 783860 - DNA, 19 bp, Mus musculus
  siRNA target sequence for 9930111J21 (NM_173434.1,902-920).
gacataccatttcaagtat

SEQ ID NO: 783861 - DNA, 19 bp, Mus musculus
  siRNA target sequence for 9930111J21 (NM_173434.1,908-926).
ccatttcaagtatgcttaa

SEQ ID NO: 783862 - DNA, 19 bp, Mus musculus
  siRNA target sequence for BC026799 (NM_173439.1,601-619).
caaggtgcgtgctttccaa

SEQ ID NO: 783863 - DNA, 19 bp, Mus musculus
  siRNA target sequence for BC026799 (NM_173439.1,642-660).
gctccaggaatgtctatat

SEQ ID NO: 783864 - DNA, 19 bp, Mus musculus
  siRNA target sequence for BC026799 (NM_173439.1,645-663).
ccaggaatgtctatatcaa

SEQ ID NO: 783865 - DNA, 19 bp, Mus musculus
  siRNA target sequence for BC026799 (NM_173439.1,721-739).
gaccaagattggtttcagt

SEQ ID NO: 783866 - DNA, 19 bp, Mus musculus
  siRNA target sequence for BC026799 (NM_173439.1,791-809).
gcagtgattgggattgcta

SEQ ID NO: 783867 - DNA, 19 bp, Mus musculus
  siRNA target sequence for BC026799 (NM_173439.1,796-814).
gattgggattgctacgaaa

SEQ ID NO: 783868 - DNA, 19 bp, Mus musculus
  siRNA target sequence for BC026799 (NM_173439.1,886-904).
ggtggacaataatctacta

SEQ ID NO: 783869 - DNA, 19 bp, Mus musculus
  siRNA target sequence for BC026799 (NM_173439.1,889-907).
ggacaataatctactacat

SEQ ID NO: 783870 - DNA, 19 bp, Mus musculus
  siRNA target sequence for BC026799 (NM_173439.1,939-957).
gcaacaacgcaccaaagta

SEQ ID NO: 783871 - DNA, 19 bp, Mus musculus
  siRNA target sequence for BC026799 (NM_173439.1,940-958).
caacaacgcaccaaagtat

SEQ ID NO: 783872 - DNA, 19 bp, Mus musculus
  siRNA target sequence for BC026799 (NM_173439.1,995-1013).
gaggataagactttagctt

SEQ ID NO: 783873 - DNA, 19 bp, Mus musculus
  siRNA target sequence for BC026799 (NM_173439.1,1044-1062).
cctttcgaggacttccaaa

SEQ ID NO: 783874 - DNA, 19 bp, Mus musculus
  siRNA target sequence for BC026799 (NM_173439.1,1055-1073).
cttccaaaagcctgcttat

SEQ ID NO: 783875 - DNA, 19 bp, Mus musculus
  siRNA target sequence for BC026799 (NM_173439.1,1117-1135).
ggtttatcttggaaaacct

SEQ ID NO: 783876 - DNA, 19 bp, Mus musculus
  siRNA target sequence for 5730538E15Rik (NM_173443.1,573-591).
caactaccactgcaaatta

SEQ ID NO: 783877 - DNA, 19 bp, Mus musculus
  siRNA target sequence for 5730538E15Rik (NM_173443.1,611-629).
gctatggaatggacaaaca

SEQ ID NO: 783878 - DNA, 19 bp, Mus musculus
  siRNA target sequence for 5730538E15Rik (NM_173443.1,664-682).
caaggcgaactgttcgatt

SEQ ID NO: 783879 - DNA, 19 bp, Mus musculus
  siRNA target sequence for 5730538E15Rik (NM_173443.1,675-693).
gttcgattgcgcgttactt

SEQ ID NO: 783880 - DNA, 19 bp, Mus musculus
  siRNA target sequence for 5730538E15Rik (NM_173443.1,761-779).
gaagcctcctgtatttgca

SEQ ID NO: 783881 - DNA, 19 bp, Mus musculus
  siRNA target sequence for 5730538E15Rik (NM_173443.1,781-799).
gacacgctcgaggatatca

SEQ ID NO: 783882 - DNA, 19 bp, Mus musculus
  siRNA target sequence for 5730538E15Rik (NM_173443.1,783-801).
cacgctcgaggatatcaaa

SEQ ID NO: 783883 - DNA, 19 bp, Mus musculus
  siRNA target sequence for 5730538E15Rik (NM_173443.1,798-816).
caaacgggctaataaaagt

SEQ ID NO: 783884 - DNA, 19 bp, Mus musculus
  siRNA target sequence for 5730538E15Rik (NM_173443.1,914-932).
ctctgagggagaatcttaa

SEQ ID NO: 783885 - DNA, 19 bp, Mus musculus
  siRNA target sequence for 5730538E15Rik (NM_173443.1,948-966).
gcacctagcccgatatcaa

SEQ ID NO: 783886 - DNA, 19 bp, Mus musculus
  siRNA target sequence for 5730538E15Rik (NM_173443.1,994-1012).
gccgagtgggaggacatta

SEQ ID NO: 783887 - DNA, 19 bp, Mus musculus
  siRNA target sequence for 5730538E15Rik (NM_173443.1,995-1013).
ccgagtgggaggacattat

SEQ ID NO: 783888 - DNA, 19 bp, Mus musculus
  siRNA target sequence for 5730538E15Rik (NM_173443.1,999-1017).
gtgggaggacattatcaat

SEQ ID NO: 783889 - DNA, 19 bp, Mus musculus
  siRNA target sequence for 5730538E15Rik (NM_173443.1,1003-1021).
gaggacattatcaatgaat

SEQ ID NO: 783890 - DNA, 19 bp, Mus musculus
  siRNA target sequence for 5730538E15Rik (NM_173443.1,1005-1023).
ggacattatcaatgaatgt

SEQ ID NO: 783891 - DNA, 19 bp, Mus musculus
  siRNA target sequence for 5730538E15Rik (NM_173443.1,1083-1101).
cggccttgccaatgtgtta

SEQ ID NO: 783892 - DNA, 19 bp, Mus musculus
  siRNA target sequence for 5730538E15Rik (NM_173443.1,1085-1103).
gccttgccaatgtgttaca

SEQ ID NO: 783893 - DNA, 19 bp, Mus musculus
  siRNA target sequence for 5730538E15Rik (NM_173443.1,1086-1104).
ccttgccaatgtgttacat

SEQ ID NO: 783894 - DNA, 19 bp, Mus musculus
  siRNA target sequence for 5730538E15Rik (NM_173443.1,1098-1116).
gttacatcgtcccataatt

SEQ ID NO: 783895 - DNA, 19 bp, Mus musculus
  siRNA target sequence for 5730538E15Rik (NM_173443.1,1102-1120).
catcgtcccataattcttt

SEQ ID NO: 783896 - DNA, 19 bp, Mus musculus
  siRNA target sequence for 5730538E15Rik (NM_173443.1,1205-1223).
ggagagatggtcatttgaa

SEQ ID NO: 783897 - DNA, 19 bp, Mus musculus
  siRNA target sequence for 5730538E15Rik (NM_173443.1,1208-1226).
gagatggtcatttgaacaa

SEQ ID NO: 783898 - DNA, 19 bp, Mus musculus
  siRNA target sequence for 5730538E15Rik (NM_173443.1,1244-1262).
ggagtagctctggtagaaa

SEQ ID NO: 783899 - DNA, 19 bp, Mus musculus
  siRNA target sequence for 5730538E15Rik (NM_173443.1,1253-1271).
ctggtagaaaccattatat

SEQ ID NO: 783900 - DNA, 19 bp, Mus musculus
  siRNA target sequence for 5730538E15Rik (NM_173443.1,1303-1321).
cccaaactacccatgaatt

SEQ ID NO: 783901 - DNA, 19 bp, Mus musculus
  siRNA target sequence for 5730538E15Rik (NM_173443.1,1304-1322).
ccaaactacccatgaattt

SEQ ID NO: 783902 - DNA, 19 bp, Mus musculus
  siRNA target sequence for 5730538E15Rik (NM_173443.1,1312-1330).
cccatgaatttgttaccta

SEQ ID NO: 783903 - DNA, 19 bp, Mus musculus
  siRNA target sequence for 5730538E15Rik (NM_173443.1,1313-1331).
ccatgaatttgttacctaa

SEQ ID NO: 783904 - DNA, 19 bp, Mus musculus
  siRNA target sequence for 5730538E15Rik (NM_173443.1,1348-1366).
caggaccttattaaaaagt

SEQ ID NO: 783905 - DNA, 19 bp, Mus musculus
  siRNA target sequence for 5730538E15Rik (NM_173443.1,1419-1437).
gcaggataagtacttactt

SEQ ID NO: 783906 - DNA, 19 bp, Mus musculus
  siRNA target sequence for 5730538E15Rik (NM_173443.1,1420-1438).
caggataagtacttactta

SEQ ID NO: 783907 - DNA, 19 bp, Mus musculus
  siRNA target sequence for 5730538E15Rik (NM_173443.1,1493-1511).
gtttggttgctgatgtaca

SEQ ID NO: 783908 - DNA, 19 bp, Mus musculus
  siRNA target sequence for 5730538E15Rik (NM_173443.1,1501-1519).
gctgatgtacatcagtatt

SEQ ID NO: 783909 - DNA, 19 bp, Mus musculus
  siRNA target sequence for 5730538E15Rik (NM_173443.1,1502-1520).
ctgatgtacatcagtattt

SEQ ID NO: 783910 - DNA, 19 bp, Mus musculus
  siRNA target sequence for 5730538E15Rik (NM_173443.1,1546-1564).
gttcagcctgaggaagtta

SEQ ID NO: 783911 - DNA, 19 bp, Mus musculus
  siRNA target sequence for 5730538E15Rik (NM_173443.1,1666-1684).
ggagggaaactgtataact

SEQ ID NO: 783912 - DNA, 19 bp, Mus musculus
  siRNA target sequence for 5730538E15Rik (NM_173443.1,1704-1722).
gcagttgaggcctgacaaa

SEQ ID NO: 783913 - DNA, 19 bp, Mus musculus
  siRNA target sequence for 5730538E15Rik (NM_173443.1,1705-1723).
cagttgaggcctgacaaaa

SEQ ID NO: 783914 - DNA, 19 bp, Mus musculus
  siRNA target sequence for 5730538E15Rik (NM_173443.1,1707-1725).
gttgaggcctgacaaaaat

SEQ ID NO: 783915 - DNA, 19 bp, Mus musculus
  siRNA target sequence for 5730538E15Rik (NM_173443.1,1735-1753).
cccttaaacaatttggttt

SEQ ID NO: 783916 - DNA, 19 bp, Mus musculus
  siRNA target sequence for 5730538E15Rik (NM_173443.1,1754-1772).
gttcatatgatccagtaaa

SEQ ID NO: 783917 - DNA, 19 bp, Mus musculus
  siRNA target sequence for 5730538E15Rik (NM_173443.1,1757-1775).
catatgatccagtaaaaga

SEQ ID NO: 783918 - DNA, 19 bp, Mus musculus
  siRNA target sequence for 5730538E15Rik (NM_173443.1,1787-1805).
cagactatggattgagtaa

SEQ ID NO: 783919 - DNA, 19 bp, Mus musculus
  siRNA target sequence for 5730538E15Rik (NM_173443.1,1807-1825).
ctaacagcttgtaattggt

SEQ ID NO: 783920 - DNA, 19 bp, Mus musculus
  siRNA target sequence for 5730538E15Rik (NM_173443.1,1862-1880).
gctctattgtgtatttgga

SEQ ID NO: 783921 - DNA, 19 bp, Mus musculus
  siRNA target sequence for 5730538E15Rik (NM_173443.1,1878-1896).
ggatggagacagaactaat

SEQ ID NO: 783922 - DNA, 19 bp, Mus musculus
  siRNA target sequence for 5730538E15Rik (NM_173443.1,1949-1967).
gtaaagagtatgacaatct

SEQ ID NO: 783923 - DNA, 19 bp, Mus musculus
  siRNA target sequence for 5730538E15Rik (NM_173443.1,1972-1990).
gaagcttttcctatcactt

SEQ ID NO: 783924 - DNA, 19 bp, Mus musculus
  siRNA target sequence for 5730538E15Rik (NM_173443.1,2011-2029).
gtcagagaaacagtatatt

SEQ ID NO: 783925 - DNA, 19 bp, Mus musculus
  siRNA target sequence for 5730538E15Rik (NM_173443.1,2015-2033).
gagaaacagtatattggtt

SEQ ID NO: 783926 - DNA, 19 bp, Mus musculus
  siRNA target sequence for 5730538E15Rik (NM_173443.1,2041-2059).
gaaagcgatccatctttga

SEQ ID NO: 783927 - DNA, 19 bp, Mus musculus
  siRNA target sequence for 5730538E15Rik (NM_173443.1,2046-2064).
cgatccatctttgaatagt

SEQ ID NO: 783928 - DNA, 19 bp, Mus musculus
  siRNA target sequence for 5730538E15Rik (NM_173443.1,2047-2065).
gatccatctttgaatagta

SEQ ID NO: 783929 - DNA, 19 bp, Mus musculus
  siRNA target sequence for 5730538E15Rik (NM_173443.1,2120-2138).
ggagtgagatcctagttca

SEQ ID NO: 783930 - DNA, 19 bp, Mus musculus
  siRNA target sequence for 5730538E15Rik (NM_173443.1,2187-2205).
cgattacactcctgtaaat

SEQ ID NO: 783931 - DNA, 19 bp, Mus musculus
  siRNA target sequence for 5730538E15Rik (NM_173443.1,2188-2206).
gattacactcctgtaaata

SEQ ID NO: 783932 - DNA, 19 bp, Mus musculus
  siRNA target sequence for 5730538E15Rik (NM_173443.1,2259-2277).
gtcgcagctaccaactaaa

SEQ ID NO: 783933 - DNA, 19 bp, Mus musculus
  siRNA target sequence for 5730538E15Rik (NM_173443.1,2262-2280).
gcagctaccaactaaaatt

SEQ ID NO: 783934 - DNA, 19 bp, Mus musculus
  siRNA target sequence for 5730538E15Rik (NM_173443.1,2311-2329).
cataaggaagaattaaaca

SEQ ID NO: 783935 - DNA, 19 bp, Mus musculus
  siRNA target sequence for 5730538E15Rik (NM_173443.1,2345-2363).
gaactattcaacagaacat

SEQ ID NO: 783936 - DNA, 19 bp, Mus musculus
  siRNA target sequence for 5730538E15Rik (NM_173443.1,2529-2547).
gaagattcgaataacaact

SEQ ID NO: 783937 - DNA, 19 bp, Mus musculus
  siRNA target sequence for 5730538E15Rik (NM_173443.1,2554-2572).
ggacggcagtctatggtta

SEQ ID NO: 783938 - DNA, 19 bp, Mus musculus
  siRNA target sequence for 5730538E15Rik (NM_173443.1,2612-2630).
gtatagccagagagttcaa

SEQ ID NO: 783939 - DNA, 19 bp, Mus musculus
  siRNA target sequence for 5730538E15Rik (NM_173443.1,2625-2643).
gttcaacattcctccatat

SEQ ID NO: 783940 - DNA, 19 bp, Mus musculus
  siRNA target sequence for 5730538E15Rik (NM_173443.1,2662-2680).
ggctttcctcctaaagagt

SEQ ID NO: 783941 - DNA, 19 bp, Mus musculus
  siRNA target sequence for 5730538E15Rik (NM_173443.1,2728-2746).
cacggtgacagaattacaa

SEQ ID NO: 783942 - DNA, 19 bp, Mus musculus
  siRNA target sequence for 5730538E15Rik (NM_173443.1,2730-2748).
cggtgacagaattacaata

SEQ ID NO: 783943 - DNA, 19 bp, Mus musculus
  siRNA target sequence for 5730538E15Rik (NM_173443.1,2732-2750).
gtgacagaattacaataga

SEQ ID NO: 783944 - DNA, 19 bp, Mus musculus
  siRNA target sequence for 5730538E15Rik (NM_173443.1,2738-2756).
gaattacaatagagatctt

SEQ ID NO: 783945 - DNA, 19 bp, Mus musculus
  siRNA target sequence for 5730538E15Rik (NM_173443.1,2823-2841).
gattgctgttactggtaaa

SEQ ID NO: 783946 - DNA, 19 bp, Mus musculus
  siRNA target sequence for 5730538E15Rik (NM_173443.1,2834-2852).
ctggtaaactgtcatctaa

SEQ ID NO: 783947 - DNA, 19 bp, Mus musculus
  siRNA target sequence for 5730538E15Rik (NM_173443.1,2866-2884).
caagctgacaaagaaatgt

SEQ ID NO: 783948 - DNA, 19 bp, Mus musculus
  siRNA target sequence for 5730538E15Rik (NM_173443.1,2869-2887).
gctgacaaagaaatgtact

SEQ ID NO: 783949 - DNA, 19 bp, Mus musculus
  siRNA target sequence for 5730538E15Rik (NM_173443.1,2920-2938).
gacgtgtggtcttatgcaa

SEQ ID NO: 783950 - DNA, 19 bp, Mus musculus
  siRNA target sequence for 5730538E15Rik (NM_173443.1,2969-2987).
gtgtattctacaatattat

SEQ ID NO: 783951 - DNA, 19 bp, Mus musculus
  siRNA target sequence for 5730538E15Rik (NM_173443.1,2971-2989).
gtattctacaatattatga

SEQ ID NO: 783952 - DNA, 19 bp, Mus musculus
  siRNA target sequence for 5730538E15Rik (NM_173443.1,3034-3052).
catctacctggcaaaacct

SEQ ID NO: 783953 - DNA, 19 bp, Mus musculus
  siRNA target sequence for 5730538E15Rik (NM_173443.1,3041-3059).
ctggcaaaacctttgttta

SEQ ID NO: 783954 - DNA, 19 bp, Mus musculus
  siRNA target sequence for 5730538E15Rik (NM_173443.1,3043-3061).
ggcaaaacctttgtttata

SEQ ID NO: 783955 - DNA, 19 bp, Mus musculus
  siRNA target sequence for 5730538E15Rik (NM_173443.1,3162-3180).
gcgagcagaggctactaca

SEQ ID NO: 783956 - DNA, 19 bp, Mus musculus
  siRNA target sequence for 5730538E15Rik (NM_173443.1,3189-3207).
ggaatcaagcccttcacat

SEQ ID NO: 783957 - DNA, 19 bp, Mus musculus
  siRNA target sequence for 5730538E15Rik (NM_173443.1,3197-3215).
gcccttcacatgggttatt

SEQ ID NO: 783958 - DNA, 19 bp, Mus musculus
  siRNA target sequence for 5730538E15Rik (NM_173443.1,3224-3242).
gtagtggtggagtagtgaa

SEQ ID NO: 783959 - DNA, 19 bp, Mus musculus
  siRNA target sequence for 5730538E15Rik (NM_173443.1,3282-3300).
ggggaagggccattctcta

SEQ ID NO: 783960 - DNA, 19 bp, Mus musculus
  siRNA target sequence for 5730538E15Rik (NM_173443.1,3311-3329).
ctagtcacccgcacattga

SEQ ID NO: 783961 - DNA, 19 bp, Mus musculus
  siRNA target sequence for 5730538E15Rik (NM_173443.1,3431-3449).
ctagtaatagtgagcttat

SEQ ID NO: 783962 - DNA, 19 bp, Mus musculus
  siRNA target sequence for 5730538E15Rik (NM_173443.1,3479-3497).
gagacggtaggcagattga

SEQ ID NO: 783963 - DNA, 19 bp, Mus musculus
  siRNA target sequence for 5730538E15Rik (NM_173443.1,3511-3529).
gaggcccagcggaaaaaat

SEQ ID NO: 783964 - DNA, 19 bp, Mus musculus
  siRNA target sequence for 5730538E15Rik (NM_173443.1,3570-3588).
gcacttgcgggatcaaagt

SEQ ID NO: 783965 - DNA, 19 bp, Mus musculus
  siRNA target sequence for 5730538E15Rik (NM_173443.1,3594-3612).
gcaagcaccatctgatctt

SEQ ID NO: 783966 - DNA, 19 bp, Mus musculus
  siRNA target sequence for 5730538E15Rik (NM_173443.1,3595-3613).
caagcaccatctgatcttt

SEQ ID NO: 783967 - DNA, 19 bp, Mus musculus
  siRNA target sequence for 5730538E15Rik (NM_173443.1,3672-3690).
gcctgaaccgttttcttta

SEQ ID NO: 783968 - DNA, 19 bp, Mus musculus
  siRNA target sequence for 5730538E15Rik (NM_173443.1,3694-3712).
ggtggcactgagaatttga

SEQ ID NO: 783969 - DNA, 19 bp, Mus musculus
  siRNA target sequence for 5730538E15Rik (NM_173443.1,3731-3749).
gtcatgtagcagatgtact

SEQ ID NO: 783970 - DNA, 19 bp, Mus musculus
  siRNA target sequence for A530083I02Rik (NM_173444.1,91-109).
catatgatgttaaagaact

SEQ ID NO: 783971 - DNA, 19 bp, Mus musculus
  siRNA target sequence for A530083I02Rik (NM_173444.1,189-207).
gaactggttaacgatgtta

SEQ ID NO: 783972 - DNA, 19 bp, Mus musculus
  siRNA target sequence for A530083I02Rik (NM_173444.1,194-212).
ggttaacgatgttattctt

SEQ ID NO: 783973 - DNA, 19 bp, Mus musculus
  siRNA target sequence for A530083I02Rik (NM_173444.1,343-361).
cggtggaggcactcaatgt

SEQ ID NO: 783974 - DNA, 19 bp, Mus musculus
  siRNA target sequence for A530083I02Rik (NM_173444.1,362-380).
cttctattactgtagttat

SEQ ID NO: 783975 - DNA, 19 bp, Mus musculus
  siRNA target sequence for A530083I02Rik (NM_173444.1,431-449).
cttagaagggatgattaat

SEQ ID NO: 783976 - DNA, 19 bp, Mus musculus
  siRNA target sequence for A530083I02Rik (NM_173444.1,486-504).
ccacaccctccaagattat

SEQ ID NO: 783977 - DNA, 19 bp, Mus musculus
  siRNA target sequence for A530083I02Rik (NM_173444.1,547-565).
caaccctaaacctctttca

SEQ ID NO: 783978 - DNA, 19 bp, Mus musculus
  siRNA target sequence for A530083I02Rik (NM_173444.1,550-568).
ccctaaacctctttcaaca

SEQ ID NO: 783979 - DNA, 19 bp, Mus musculus
  siRNA target sequence for A530083I02Rik (NM_173444.1,574-592).
ctgaactgaagtcattttt

SEQ ID NO: 783980 - DNA, 19 bp, Mus musculus
  siRNA target sequence for A530083I02Rik (NM_173444.1,607-625).
gtgatggtattccactatt

SEQ ID NO: 783981 - DNA, 19 bp, Mus musculus
  siRNA target sequence for A530083I02Rik (NM_173444.1,609-627).
gatggtattccactattaa

SEQ ID NO: 783982 - DNA, 19 bp, Mus musculus
  siRNA target sequence for A530083I02Rik (NM_173444.1,650-668).
gtctcgttcttttatgtct

SEQ ID NO: 783983 - DNA, 19 bp, Mus musculus
  siRNA target sequence for A530083I02Rik (NM_173444.1,673-691).
gcagccctgagttactgat

SEQ ID NO: 783984 - DNA, 19 bp, Mus musculus
  siRNA target sequence for A530083I02Rik (NM_173444.1,674-692).
cagccctgagttactgata

SEQ ID NO: 783985 - DNA, 19 bp, Mus musculus
  siRNA target sequence for A530083I02Rik (NM_173444.1,677-695).
ccctgagttactgataaca

SEQ ID NO: 783986 - DNA, 19 bp, Mus musculus
  siRNA target sequence for A530083I02Rik (NM_173444.1,681-699).
gagttactgataacagtaa

SEQ ID NO: 783987 - DNA, 19 bp, Mus musculus
  siRNA target sequence for A530083I02Rik (NM_173444.1,689-707).
gataacagtaagcatgaat

SEQ ID NO: 783988 - DNA, 19 bp, Mus musculus
  siRNA target sequence for A530083I02Rik (NM_173444.1,726-744).
ggatggctaccatatgaca

SEQ ID NO: 783989 - DNA, 19 bp, Mus musculus
  siRNA target sequence for A530083I02Rik (NM_173444.1,732-750).
ctaccatatgacagaaata

SEQ ID NO: 783990 - DNA, 19 bp, Mus musculus
  siRNA target sequence for A530083I02Rik (NM_173444.1,809-827).
caccattagtggtcctttt

SEQ ID NO: 783991 - DNA, 19 bp, Mus musculus
  siRNA target sequence for A530083I02Rik (NM_173444.1,898-916).
gacactgggataatagtat

SEQ ID NO: 783992 - DNA, 19 bp, Mus musculus
  siRNA target sequence for A530083I02Rik (NM_173444.1,902-920).
ctgggataatagtatccaa

SEQ ID NO: 783993 - DNA, 19 bp, Mus musculus
  siRNA target sequence for A530083I02Rik (NM_173444.1,959-977).
catccgacatatagatatt

SEQ ID NO: 783994 - DNA, 19 bp, Mus musculus
  siRNA target sequence for A530083I02Rik (NM_173444.1,963-981).
cgacatatagatattgtga

SEQ ID NO: 783995 - DNA, 19 bp, Mus musculus
  siRNA target sequence for A530083I02Rik (NM_173444.1,1043-1061).
catgatatggcaaataaca

SEQ ID NO: 783996 - DNA, 19 bp, Mus musculus
  siRNA target sequence for A530083I02Rik (NM_173444.1,1117-1135).
gacacactgatgagatact

SEQ ID NO: 783997 - DNA, 19 bp, Mus musculus
  siRNA target sequence for A530083I02Rik (NM_173444.1,1294-1312).
gggaaggacacattgttgt

SEQ ID NO: 783998 - DNA, 19 bp, Mus musculus
  siRNA target sequence for A530083I02Rik (NM_173444.1,1299-1317).
ggacacattgttgtctatt

SEQ ID NO: 783999 - DNA, 19 bp, Mus musculus
  siRNA target sequence for A530083I02Rik (NM_173444.1,1302-1320).
cacattgttgtctattcca

SEQ ID NO: 784000 - DNA, 19 bp, Mus musculus
  siRNA target sequence for A530083I02Rik (NM_173444.1,1401-1419).
gtcctgagtgaacaaatat

SEQ ID NO: 784001 - DNA, 19 bp, Mus musculus
  siRNA target sequence for A530083I02Rik (NM_173444.1,1403-1421).
cctgagtgaacaaatatca

SEQ ID NO: 784002 - DNA, 19 bp, Mus musculus
  siRNA target sequence for A530083I02Rik (NM_173444.1,1468-1486).
ggctcctgtctataagaga

SEQ ID NO: 784003 - DNA, 19 bp, Mus musculus
  siRNA target sequence for A530083I02Rik (NM_173444.1,1533-1551).
cctatccactgtgtttcta

SEQ ID NO: 784004 - DNA, 19 bp, Mus musculus
  siRNA target sequence for A530083I02Rik (NM_173444.1,1545-1563).
gtttctataaccaaagaat

SEQ ID NO: 784005 - DNA, 19 bp, Mus musculus
  siRNA target sequence for A530083I02Rik (NM_173444.1,1640-1658).
gggtcagctttctcgaaaa

SEQ ID NO: 784006 - DNA, 19 bp, Mus musculus
  siRNA target sequence for A530083I02Rik (NM_173444.1,1641-1659).
ggtcagctttctcgaaaat

SEQ ID NO: 784007 - DNA, 19 bp, Mus musculus
  siRNA target sequence for A530083I02Rik (NM_173444.1,1676-1694).
gaggctcagccagatttca

SEQ ID NO: 784008 - DNA, 19 bp, Mus musculus
  siRNA target sequence for A530083I02Rik (NM_173444.1,1695-1713).
gctggagaaacggaatata

SEQ ID NO: 784009 - DNA, 19 bp, Mus musculus
  siRNA target sequence for A530083I02Rik (NM_173444.1,1698-1716).
ggagaaacggaatataata

SEQ ID NO: 784010 - DNA, 19 bp, Mus musculus
  siRNA target sequence for E430018M08Rik (NM_173445.1,965-983).
ggaacagccaccattcagt

SEQ ID NO: 784011 - DNA, 19 bp, Mus musculus
  siRNA target sequence for E430018M08Rik (NM_173445.1,1002-1020).
gcatgccagtgatgatatt

SEQ ID NO: 784012 - DNA, 19 bp, Mus musculus
  siRNA target sequence for E430018M08Rik (NM_173445.1,1003-1021).
catgccagtgatgatattt

SEQ ID NO: 784013 - DNA, 19 bp, Mus musculus
  siRNA target sequence for E430018M08Rik (NM_173445.1,1578-1596).
gagtgaaacgggggatatt

SEQ ID NO: 784014 - DNA, 19 bp, Mus musculus
  siRNA target sequence for E430018M08Rik (NM_173445.1,1580-1598).
gtgaaacgggggatattta

SEQ ID NO: 784015 - DNA, 19 bp, Mus musculus
  siRNA target sequence for E430018M08Rik (NM_173445.1,1925-1943).
cctgctgtgtggagtactt

SEQ ID NO: 784016 - DNA, 19 bp, Mus musculus
  siRNA target sequence for E430018M08Rik (NM_173445.1,1985-2003).
cctggaatacctatgtcta

SEQ ID NO: 784017 - DNA, 19 bp, Mus musculus
  siRNA target sequence for E430018M08Rik (NM_173445.1,1986-2004).
ctggaatacctatgtctat

SEQ ID NO: 784018 - DNA, 19 bp, Mus musculus
  siRNA target sequence for AW121567 (NM_173446.1,22-40).
ggatgtgtcggcagtatga

SEQ ID NO: 784019 - DNA, 19 bp, Mus musculus
  siRNA target sequence for AW121567 (NM_173446.1,35-53).
gtatgacgacggcttaaaa

SEQ ID NO: 784020 - DNA, 19 bp, Mus musculus
  siRNA target sequence for AW121567 (NM_173446.1,39-57).
gacgacggcttaaaaatct

SEQ ID NO: 784021 - DNA, 19 bp, Mus musculus
  siRNA target sequence for AW121567 (NM_173446.1,529-547).
ggcgcctagagacttgtta

SEQ ID NO: 784022 - DNA, 19 bp, Mus musculus
  siRNA target sequence for AW121567 (NM_173446.1,677-695).
gtggaacttgtcggatttt

SEQ ID NO: 784023 - DNA, 19 bp, Mus musculus
  siRNA target sequence for AW121567 (NM_173446.1,679-697).
ggaacttgtcggattttta

SEQ ID NO: 784024 - DNA, 19 bp, Mus musculus
  siRNA target sequence for AW121567 (NM_173446.1,719-737).
cacactttgggagttgttt

SEQ ID NO: 784025 - DNA, 19 bp, Mus musculus
  siRNA target sequence for AW121567 (NM_173446.1,860-878).
ggagaagtacgaagagttt

SEQ ID NO: 784026 - DNA, 19 bp, Mus musculus
  siRNA target sequence for AW121567 (NM_173446.1,879-897).
gaaagcgtgctgcataagt

SEQ ID NO: 784027 - DNA, 19 bp, Mus musculus
  siRNA target sequence for AW121567 (NM_173446.1,883-901).
gcgtgctgcataagtactt

SEQ ID NO: 784028 - DNA, 19 bp, Mus musculus
  siRNA target sequence for AW121567 (NM_173446.1,884-902).
cgtgctgcataagtactta

SEQ ID NO: 784029 - DNA, 19 bp, Mus musculus
  siRNA target sequence for AW121567 (NM_173446.1,1012-1030).
ccattccttgcaagcaata

SEQ ID NO: 784030 - DNA, 19 bp, Mus musculus
  siRNA target sequence for AW121567 (NM_173446.1,1046-1064).
gacaaggtgtccattcata

SEQ ID NO: 784031 - DNA, 19 bp, Mus musculus
  siRNA target sequence for AW121567 (NM_173446.1,1071-1089).
gacaatgacgaagtcattt

SEQ ID NO: 784032 - DNA, 19 bp, Mus musculus
  siRNA target sequence for AW121567 (NM_173446.1,1122-1140).
ctctacgaaaccttcctaa

SEQ ID NO: 784033 - DNA, 19 bp, Mus musculus
  siRNA target sequence for AW121567 (NM_173446.1,1127-1145).
cgaaaccttcctaaccaat

SEQ ID NO: 784034 - DNA, 19 bp, Mus musculus
  siRNA target sequence for AW121567 (NM_173446.1,1132-1150).
ccttcctaaccaatgatga

SEQ ID NO: 784035 - DNA, 19 bp, Mus musculus
  siRNA target sequence for AW121567 (NM_173446.1,1291-1309).
gtgtactcgtcctcattct

SEQ ID NO: 784036 - DNA, 19 bp, Mus musculus
  siRNA target sequence for 5730466P16Rik (NM_173453.1,337-355).
ctacagactgctacattgt

SEQ ID NO: 784037 - DNA, 19 bp, Mus musculus
  siRNA target sequence for 5730466P16Rik (NM_173453.1,346-364).
gctacattgtgcacgaaat

SEQ ID NO: 784038 - DNA, 19 bp, Mus musculus
  siRNA target sequence for 5730466P16Rik (NM_173453.1,382-400).
cccaggaccagtttgagta

SEQ ID NO: 784039 - DNA, 19 bp, Mus musculus
  siRNA target sequence for 5730466P16Rik (NM_173453.1,383-401).
ccaggaccagtttgagtat

SEQ ID NO: 784040 - DNA, 19 bp, Mus musculus
  siRNA target sequence for 5730466P16Rik (NM_173453.1,424-442).
cccagtacaagtacattgt

SEQ ID NO: 784041 - DNA, 19 bp, Mus musculus
  siRNA target sequence for 5730466P16Rik (NM_173453.1,428-446).
gtacaagtacattgtgata

SEQ ID NO: 784042 - DNA, 19 bp, Mus musculus
  siRNA target sequence for 5730466P16Rik (NM_173453.1,803-821).
ctgtgtaaagaaggtttat

SEQ ID NO: 784043 - DNA, 19 bp, Mus musculus
  siRNA target sequence for BC030440 (NM_173732.2,48-66).
gcgggaggaatcaaagtgt

SEQ ID NO: 784044 - DNA, 19 bp, Mus musculus
  siRNA target sequence for BC030440 (NM_173732.2,164-182).
ctgcggctcagctgatgta

SEQ ID NO: 784045 - DNA, 19 bp, Mus musculus
  siRNA target sequence for BC030440 (NM_173732.2,167-185).
cggctcagctgatgtaaat

SEQ ID NO: 784046 - DNA, 19 bp, Mus musculus
  siRNA target sequence for BC030440 (NM_173732.2,169-187).
gctcagctgatgtaaatgt

SEQ ID NO: 784047 - DNA, 19 bp, Mus musculus
  siRNA target sequence for BC030440 (NM_173732.2,198-216).
caggaatcccaagttgata

SEQ ID NO: 784048 - DNA, 19 bp, Mus musculus
  siRNA target sequence for BC030440 (NM_173732.2,201-219).
gaatcccaagttgatatga

SEQ ID NO: 784049 - DNA, 19 bp, Mus musculus
  siRNA target sequence for BC030440 (NM_173732.2,224-242).
cagtcaacaattctgttat

SEQ ID NO: 784050 - DNA, 19 bp, Mus musculus
  siRNA target sequence for BC030440 (NM_173732.2,284-302).
gatacaggttcgggtaaat

SEQ ID NO: 784051 - DNA, 19 bp, Mus musculus
  siRNA target sequence for BC030440 (NM_173732.2,288-306).
caggttcgggtaaatagtt

SEQ ID NO: 784052 - DNA, 19 bp, Mus musculus
  siRNA target sequence for BC030440 (NM_173732.2,354-372).
gagctagagcagtttagta

SEQ ID NO: 784053 - DNA, 19 bp, Mus musculus
  siRNA target sequence for BC030440 (NM_173732.2,431-449).
gggtctgtacagcactaaa

SEQ ID NO: 784054 - DNA, 19 bp, Mus musculus
  siRNA target sequence for BC030440 (NM_173732.2,432-450).
ggtctgtacagcactaaaa

SEQ ID NO: 784055 - DNA, 19 bp, Mus musculus
  siRNA target sequence for BC030440 (NM_173732.2,454-472).
gcctcaaggttgagatgat

SEQ ID NO: 784056 - DNA, 19 bp, Mus musculus
  siRNA target sequence for BC030440 (NM_173732.2,497-515).
cactgtgacccggagattt

SEQ ID NO: 784057 - DNA, 19 bp, Mus musculus
  siRNA target sequence for BC030440 (NM_173732.2,499-517).
ctgtgacccggagatttga

SEQ ID NO: 784058 - DNA, 19 bp, Mus musculus
  siRNA target sequence for BC030440 (NM_173732.2,511-529).
gatttgaccccaaactctt

SEQ ID NO: 784059 - DNA, 19 bp, Mus musculus
  siRNA target sequence for BC030440 (NM_173732.2,545-563).
cggactgacactgtttttt

SEQ ID NO: 784060 - DNA, 19 bp, Mus musculus
  siRNA target sequence for BC030440 (NM_173732.2,575-593).
gttgagcaggagtcaaatt

SEQ ID NO: 784061 - DNA, 19 bp, Mus musculus
  siRNA target sequence for BC030440 (NM_173732.2,584-602).
gagtcaaattttctactat

SEQ ID NO: 784062 - DNA, 19 bp, Mus musculus
  siRNA target sequence for BC030440 (NM_173732.2,588-606).
caaattttctactattcca

SEQ ID NO: 784063 - DNA, 19 bp, Mus musculus
  siRNA target sequence for BC030440 (NM_173732.2,634-652).
ctctcttaatcgtcatttt

SEQ ID NO: 784064 - DNA, 19 bp, Mus musculus
  siRNA target sequence for BC030440 (NM_173732.2,636-654).
ctcttaatcgtcattttta

SEQ ID NO: 784065 - DNA, 19 bp, Mus musculus
  siRNA target sequence for BC030440 (NM_173732.2,735-753).
cagctagtttttaagaatt

SEQ ID NO: 784066 - DNA, 19 bp, Mus musculus
  siRNA target sequence for BC030440 (NM_173732.2,767-785).
gaggagttactggcattat

SEQ ID NO: 784067 - DNA, 19 bp, Mus musculus
  siRNA target sequence for BC030440 (NM_173732.2,769-787).
ggagttactggcattatct

SEQ ID NO: 784068 - DNA, 19 bp, Mus musculus
  siRNA target sequence for BC030440 (NM_173732.2,770-788).
gagttactggcattatctt

SEQ ID NO: 784069 - DNA, 19 bp, Mus musculus
  siRNA target sequence for BC030440 (NM_173732.2,778-796).
ggcattatcttctaagcta

SEQ ID NO: 784070 - DNA, 19 bp, Mus musculus
  siRNA target sequence for BC030440 (NM_173732.2,852-870).
gaaaatgaacgaagcatta

SEQ ID NO: 784071 - DNA, 19 bp, Mus musculus
  siRNA target sequence for A930025J12Rik (NM_173734.2,96-114).
gcgcagccgttcccattat

SEQ ID NO: 784072 - DNA, 19 bp, Mus musculus
  siRNA target sequence for A930025J12Rik (NM_173734.2,99-117).
cagccgttcccattatcgt

SEQ ID NO: 784073 - DNA, 19 bp, Mus musculus
  siRNA target sequence for A930025J12Rik (NM_173734.2,101-119).
gccgttcccattatcgttt

SEQ ID NO: 784074 - DNA, 19 bp, Mus musculus
  siRNA target sequence for A930025J12Rik (NM_173734.2,181-199).
cgtcggggaaaggttattt

SEQ ID NO: 784075 - DNA, 19 bp, Mus musculus
  siRNA target sequence for A930025J12Rik (NM_173734.2,182-200).
gtcggggaaaggttatttt

SEQ ID NO: 784076 - DNA, 19 bp, Mus musculus
  siRNA target sequence for A930025J12Rik (NM_173734.2,184-202).
cggggaaaggttattttaa

SEQ ID NO: 784077 - DNA, 19 bp, Mus musculus
  siRNA target sequence for A930025J12Rik (NM_173734.2,229-247).
ctaccatcttactgaaatt

SEQ ID NO: 784078 - DNA, 19 bp, Mus musculus
  siRNA target sequence for A930025J12Rik (NM_173734.2,257-275).
gccttgtgaccagtcttta

SEQ ID NO: 784079 - DNA, 19 bp, Mus musculus
  siRNA target sequence for A930025J12Rik (NM_173734.2,262-280).
gtgaccagtctttaaatat

SEQ ID NO: 784080 - DNA, 19 bp, Mus musculus
  siRNA target sequence for A930025J12Rik (NM_173734.2,267-285).
cagtctttaaatataacct

SEQ ID NO: 784081 - DNA, 19 bp, Mus musculus
  siRNA target sequence for A930025J12Rik (NM_173734.2,298-316).
gtgctgattgctacaatga

SEQ ID NO: 784082 - DNA, 19 bp, Mus musculus
  siRNA target sequence for A930025J12Rik (NM_173734.2,380-398).
cttgtctgggagataccaa

SEQ ID NO: 784083 - DNA, 19 bp, Mus musculus
  siRNA target sequence for A930025J12Rik (NM_173734.2,389-407).
gagataccaaacatcatca

SEQ ID NO: 784084 - DNA, 19 bp, Mus musculus
  siRNA target sequence for A930025J12Rik (NM_173734.2,571-589).
ggcaagatgctccatacat

SEQ ID NO: 784085 - DNA, 19 bp, Mus musculus
  siRNA target sequence for A930025J12Rik (NM_173734.2,572-590).
gcaagatgctccatacatt

SEQ ID NO: 784086 - DNA, 19 bp, Mus musculus
  siRNA target sequence for A930025J12Rik (NM_173734.2,576-594).
gatgctccatacattttta

SEQ ID NO: 784087 - DNA, 19 bp, Mus musculus
  siRNA target sequence for A930025J12Rik (NM_173734.2,580-598).
ctccatacatttttatcgt

SEQ ID NO: 784088 - DNA, 19 bp, Mus musculus
  siRNA target sequence for A930025J12Rik (NM_173734.2,617-635).
ctcaaaggaatcaccaaaa

SEQ ID NO: 784089 - DNA, 19 bp, Mus musculus
  siRNA target sequence for A930025J12Rik (NM_173734.2,642-660).
gcactaagtaaccttttta

SEQ ID NO: 784090 - DNA, 19 bp, Mus musculus
  siRNA target sequence for A930025J12Rik (NM_173734.2,645-663).
ctaagtaacctttttacca

SEQ ID NO: 784091 - DNA, 19 bp, Mus musculus
  siRNA target sequence for A930025J12Rik (NM_173734.2,661-679).
ccatgactgttgaagtaaa

SEQ ID NO: 784092 - DNA, 19 bp, Mus musculus
  siRNA target sequence for A930025J12Rik (NM_173734.2,680-698).
gggtccctatgaatacctt

SEQ ID NO: 784093 - DNA, 19 bp, Mus musculus
  siRNA target sequence for A930025J12Rik (NM_173734.2,681-699).
ggtccctatgaatacctta

SEQ ID NO: 784094 - DNA, 19 bp, Mus musculus
  siRNA target sequence for A930025J12Rik (NM_173734.2,708-726).
gactacccactgatgattt

SEQ ID NO: 784095 - DNA, 19 bp, Mus musculus
  siRNA target sequence for A930025J12Rik (NM_173734.2,742-760).
gtattgtgtacgtactatt

SEQ ID NO: 784096 - DNA, 19 bp, Mus musculus
  siRNA target sequence for A930025J12Rik (NM_173734.2,796-814).
ggagagatctcctgagaat

SEQ ID NO: 784097 - DNA, 19 bp, Mus musculus
  siRNA target sequence for A930025J12Rik (NM_173734.2,807-825).
ctgagaattcaattttgga

SEQ ID NO: 784098 - DNA, 19 bp, Mus musculus
  siRNA target sequence for A930025J12Rik (NM_173734.2,823-841).
ggattggtgctgtcatctt

SEQ ID NO: 784099 - DNA, 19 bp, Mus musculus
  siRNA target sequence for A930025J12Rik (NM_173734.2,857-875).
gaaagctgtgttttatgca

SEQ ID NO: 784100 - DNA, 19 bp, Mus musculus
  siRNA target sequence for A930025J12Rik (NM_173734.2,890-908).
ccgatacaaaggagaatct

SEQ ID NO: 784101 - DNA, 19 bp, Mus musculus
  siRNA target sequence for A930025J12Rik (NM_173734.2,964-982).
ctcgaaccctggtcatcat

SEQ ID NO: 784102 - DNA, 19 bp, Mus musculus
  siRNA target sequence for A930025J12Rik (NM_173734.2,967-985).
gaaccctggtcatcatagt

SEQ ID NO: 784103 - DNA, 19 bp, Mus musculus
  siRNA target sequence for A930025J12Rik (NM_173734.2,990-1008).
ctgggatacggcatagtca

SEQ ID NO: 784104 - DNA, 19 bp, Mus musculus
  siRNA target sequence for A930025J12Rik (NM_173734.2,1047-1065).
gcaggggcactttatcttt

SEQ ID NO: 784105 - DNA, 19 bp, Mus musculus
  siRNA target sequence for A930025J12Rik (NM_173734.2,1136-1154).
cctggccctctctgcaatt

SEQ ID NO: 784106 - DNA, 19 bp, Mus musculus
  siRNA target sequence for A930025J12Rik (NM_173734.2,1150-1168).
caattgatgcctgtattat

SEQ ID NO: 784107 - DNA, 19 bp, Mus musculus
  siRNA target sequence for A930025J12Rik (NM_173734.2,1175-1193).
gatattcattagcttaact

SEQ ID NO: 784108 - DNA, 19 bp, Mus musculus
  siRNA target sequence for A930025J12Rik (NM_173734.2,1194-1212).
caaaccatgaagctattaa

SEQ ID NO: 784109 - DNA, 19 bp, Mus musculus
  siRNA target sequence for A930025J12Rik (NM_173734.2,1198-1216).
ccatgaagctattaaaact

SEQ ID NO: 784110 - DNA, 19 bp, Mus musculus
  siRNA target sequence for A930025J12Rik (NM_173734.2,1219-1237).
ggaggaacattgtaaagct

SEQ ID NO: 784111 - DNA, 19 bp, Mus musculus
  siRNA target sequence for A930025J12Rik (NM_173734.2,1276-1294).
cagtggcagcgtctattgt

SEQ ID NO: 784112 - DNA, 19 bp, Mus musculus
  siRNA target sequence for A930025J12Rik (NM_173734.2,1278-1296).
gtggcagcgtctattgtgt

SEQ ID NO: 784113 - DNA, 19 bp, Mus musculus
  siRNA target sequence for A930025J12Rik (NM_173734.2,1282-1300).
cagcgtctattgtgttcat

SEQ ID NO: 784114 - DNA, 19 bp, Mus musculus
  siRNA target sequence for A930025J12Rik (NM_173734.2,1284-1302).
gcgtctattgtgttcatca

SEQ ID NO: 784115 - DNA, 19 bp, Mus musculus
  siRNA target sequence for A930025J12Rik (NM_173734.2,1285-1303).
cgtctattgtgttcatcat

SEQ ID NO: 784116 - DNA, 19 bp, Mus musculus
  siRNA target sequence for A930025J12Rik (NM_173734.2,1312-1330).
ccatgaagttcagaatagt

SEQ ID NO: 784117 - DNA, 19 bp, Mus musculus
  siRNA target sequence for A930025J12Rik (NM_173734.2,1497-1515).
gagccgatgctgaaggaaa

SEQ ID NO: 784118 - DNA, 19 bp, Mus musculus
  siRNA target sequence for A930025J12Rik (NM_173734.2,1501-1519).
cgatgctgaaggaaagctt

SEQ ID NO: 784119 - DNA, 19 bp, Mus musculus
  siRNA target sequence for A930025J12Rik (NM_173734.2,1540-1558).
gtaccaagcaggaaccaaa

SEQ ID NO: 784120 - DNA, 19 bp, Mus musculus
  siRNA target sequence for A930025J12Rik (NM_173734.2,1555-1573).
caaatgggactagtaaagt

SEQ ID NO: 784121 - DNA, 19 bp, Mus musculus
  siRNA target sequence for A930025J12Rik (NM_173734.2,1663-1681).
cagacgaggaacgaatgat

SEQ ID NO: 784122 - DNA, 19 bp, Mus musculus
  siRNA target sequence for A930025J12Rik (NM_173734.2,1665-1683).
gacgaggaacgaatgatca

SEQ ID NO: 784123 - DNA, 19 bp, Mus musculus
  siRNA target sequence for 2310044G17Rik (NM_173735.2,199-217).
cgaggcacggagatgaaga

SEQ ID NO: 784124 - DNA, 19 bp, Mus musculus
  siRNA target sequence for 2310044G17Rik (NM_173735.2,410-428).
cccctatggtcgtcatgaa

SEQ ID NO: 784125 - DNA, 19 bp, Mus musculus
  siRNA target sequence for 2310044G17Rik (NM_173735.2,597-615).
ctacttgcccattctaaat

SEQ ID NO: 784126 - DNA, 19 bp, Mus musculus
  siRNA target sequence for 2310044G17Rik (NM_173735.2,604-622).
cccattctaaattcttata

SEQ ID NO: 784127 - DNA, 19 bp, Mus musculus
  siRNA target sequence for 2310044G17Rik (NM_173735.2,674-692).
gaacaagtggggtatcgaa

SEQ ID NO: 784128 - DNA, 19 bp, Mus musculus
  siRNA target sequence for 2310044G17Rik (NM_173735.2,680-698).
gtggggtatcgaagaaact

SEQ ID NO: 784129 - DNA, 19 bp, Mus musculus
  siRNA target sequence for 2310044G17Rik (NM_173735.2,682-700).
ggggtatcgaagaaactct

SEQ ID NO: 784130 - DNA, 19 bp, Mus musculus
  siRNA target sequence for 2310044G17Rik (NM_173735.2,743-761).
ccaagactggccgagtatt

SEQ ID NO: 784131 - DNA, 19 bp, Mus musculus
  siRNA target sequence for 2310044G17Rik (NM_173735.2,744-762).
caagactggccgagtatta

SEQ ID NO: 784132 - DNA, 19 bp, Mus musculus
  siRNA target sequence for 2310044G17Rik (NM_173735.2,988-1006).
ctgtcagccagttacactt

SEQ ID NO: 784133 - DNA, 19 bp, Mus musculus
  siRNA target sequence for 2310044G17Rik (NM_173735.2,1074-1092).
gcataggcgctttcagaat

SEQ ID NO: 784134 - DNA, 19 bp, Mus musculus
  siRNA target sequence for 2310044G17Rik (NM_173735.2,1075-1093).
cataggcgctttcagaata

SEQ ID NO: 784135 - DNA, 19 bp, Mus musculus
  siRNA target sequence for 2310044G17Rik (NM_173735.2,1080-1098).
gcgctttcagaatacctta

SEQ ID NO: 784136 - DNA, 19 bp, Mus musculus
  siRNA target sequence for 2310044G17Rik (NM_173735.2,1122-1140).
gctggagatcactctgaaa

SEQ ID NO: 784137 - DNA, 19 bp, Mus musculus
  siRNA target sequence for 2310044G17Rik (NM_173735.2,1197-1215).
ggagcaaacccagatgttt

SEQ ID NO: 784138 - DNA, 19 bp, Mus musculus
  siRNA target sequence for 2310044G17Rik (NM_173735.2,1254-1272).
caagttgcaggcatcacta

SEQ ID NO: 784139 - DNA, 19 bp, Mus musculus
  siRNA target sequence for 2310044G17Rik (NM_173735.2,1257-1275).
gttgcaggcatcactaaca

SEQ ID NO: 784140 - DNA, 19 bp, Mus musculus
  siRNA target sequence for BC026991 (NM_173736.2,782-800).
cgcccaggctgagatgtta

SEQ ID NO: 784141 - DNA, 19 bp, Mus musculus
  siRNA target sequence for BC026991 (NM_173736.2,836-854).
ggctcggctggaaatgtca

SEQ ID NO: 784142 - DNA, 19 bp, Mus musculus
  siRNA target sequence for BC026991 (NM_173736.2,857-875).
gttgcttaggcagaaagaa

SEQ ID NO: 784143 - DNA, 19 bp, Mus musculus
  siRNA target sequence for BC026991 (NM_173736.2,961-979).
gctccatgctggttttgaa

SEQ ID NO: 784144 - DNA, 19 bp, Mus musculus
  siRNA target sequence for 8430410A17Rik (NM_173737.2,250-268).
ctcatcagatcggataatt

SEQ ID NO: 784145 - DNA, 19 bp, Mus musculus
  siRNA target sequence for 8430410A17Rik (NM_173737.2,252-270).
catcagatcggataattat

SEQ ID NO: 784146 - DNA, 19 bp, Mus musculus
  siRNA target sequence for 8430410A17Rik (NM_173737.2,346-364).
ctgtcgtagtgataccata

SEQ ID NO: 784147 - DNA, 19 bp, Mus musculus
  siRNA target sequence for 8430410A17Rik (NM_173737.2,348-366).
gtcgtagtgataccataat

SEQ ID NO: 784148 - DNA, 19 bp, Mus musculus
  siRNA target sequence for 8430410A17Rik (NM_173737.2,468-486).
ggcaaccatacttcatcta

SEQ ID NO: 784149 - DNA, 19 bp, Mus musculus
  siRNA target sequence for 8430410A17Rik (NM_173737.2,469-487).
gcaaccatacttcatctat

SEQ ID NO: 784150 - DNA, 19 bp, Mus musculus
  siRNA target sequence for 8430410A17Rik (NM_173737.2,470-488).
caaccatacttcatctatt

SEQ ID NO: 784151 - DNA, 19 bp, Mus musculus
  siRNA target sequence for 8430410A17Rik (NM_173737.2,531-549).
cagacagctctgacaacaa

SEQ ID NO: 784152 - DNA, 19 bp, Mus musculus
  siRNA target sequence for 8430410A17Rik (NM_173737.2,779-797).
caccccatagacaatatca

SEQ ID NO: 784153 - DNA, 19 bp, Mus musculus
  siRNA target sequence for 8430410A17Rik (NM_173737.2,796-814).
caccttccatccagtttct

SEQ ID NO: 784154 - DNA, 19 bp, Mus musculus
  siRNA target sequence for 8430410A17Rik (NM_173737.2,864-882).
ctgacttgctggttaagaa

SEQ ID NO: 784155 - DNA, 19 bp, Mus musculus
  siRNA target sequence for 8430410A17Rik (NM_173737.2,1018-1036).
gagcccattgcctgctaaa

SEQ ID NO: 784156 - DNA, 19 bp, Mus musculus
  siRNA target sequence for BC024988 (NM_173739.3,1020-1038).
gcaacgaggagctcaaaga

SEQ ID NO: 784157 - DNA, 19 bp, Mus musculus
  siRNA target sequence for BC024988 (NM_173739.3,1080-1098).
caggcttcatcaaagttgt

SEQ ID NO: 784158 - DNA, 19 bp, Mus musculus
  siRNA target sequence for BC024988 (NM_173739.3,1185-1203).
cccacgtggagttcaatgt

SEQ ID NO: 784159 - DNA, 19 bp, Mus musculus
  siRNA target sequence for BC024988 (NM_173739.3,1223-1241).
ctcacccgcatcaaggaaa

SEQ ID NO: 784160 - DNA, 19 bp, Mus musculus
  siRNA target sequence for BC024988 (NM_173739.3,1243-1261).
ccggaaacggatcatttca

SEQ ID NO: 784161 - DNA, 19 bp, Mus musculus
  siRNA target sequence for BC024988 (NM_173739.3,1262-1280).
ccatcttttgataacatca

SEQ ID NO: 784162 - DNA, 19 bp, Mus musculus
  siRNA target sequence for BC024988 (NM_173739.3,1340-1358).
ctgtggtgccgctacctaa

SEQ ID NO: 784163 - DNA, 19 bp, Mus musculus
  siRNA target sequence for BC024988 (NM_173739.3,1858-1876).
gaggatgtactctgacatt

SEQ ID NO: 784164 - DNA, 19 bp, Mus musculus
  siRNA target sequence for BC024988 (NM_173739.3,1860-1878).
ggatgtactctgacattat

SEQ ID NO: 784165 - DNA, 19 bp, Mus musculus
  siRNA target sequence for BC024988 (NM_173739.3,1949-1967).
gtccccatcgtgtacatat

SEQ ID NO: 784166 - DNA, 19 bp, Mus musculus
  siRNA target sequence for BC024988 (NM_173739.3,1980-1998).
caccccagaatgtgtacta

SEQ ID NO: 784167 - DNA, 19 bp, Mus musculus
  siRNA target sequence for BC024988 (NM_173739.3,1982-2000).
ccccagaatgtgtactaca

SEQ ID NO: 784168 - DNA, 19 bp, Mus musculus
  siRNA target sequence for 2310016F22Rik (NM_173743.2,658-676).
ctaggattgtcaacaagat

SEQ ID NO: 784169 - DNA, 19 bp, Mus musculus
  siRNA target sequence for 2610019F03Rik (NM_173744.2,180-198).
caacttctctgtttaataa

SEQ ID NO: 784170 - DNA, 19 bp, Mus musculus
  siRNA target sequence for 2610019F03Rik (NM_173744.2,323-341).
cagaatgcccagcctaaaa

SEQ ID NO: 784171 - DNA, 19 bp, Mus musculus
  siRNA target sequence for 2610019F03Rik (NM_173744.2,325-343).
gaatgcccagcctaaaaaa

SEQ ID NO: 784172 - DNA, 19 bp, Mus musculus
  siRNA target sequence for 2610019F03Rik (NM_173744.2,364-382).
ggagcctcccaaacttact

SEQ ID NO: 784173 - DNA, 19 bp, Mus musculus
  siRNA target sequence for 2610019F03Rik (NM_173744.2,401-419).
gaccataccgaggatgata

SEQ ID NO: 784174 - DNA, 19 bp, Mus musculus
  siRNA target sequence for BC024322 (NM_173748.2,216-234).
ctgcaggtctttaaaacat

SEQ ID NO: 784175 - DNA, 19 bp, Mus musculus
  siRNA target sequence for BC024322 (NM_173748.2,249-267).
cgccaggatgatgagaaaa

SEQ ID NO: 784176 - DNA, 19 bp, Mus musculus
  siRNA target sequence for BC024322 (NM_173748.2,320-338).
cttgccagctgctgaaact

SEQ ID NO: 784177 - DNA, 19 bp, Mus musculus
  siRNA target sequence for BC024322 (NM_173748.2,400-418).
gtgggcctcaggaagtaga

SEQ ID NO: 784178 - DNA, 19 bp, Mus musculus
  siRNA target sequence for BC024322 (NM_173748.2,880-898).
ccatcgacatcgacaagat

SEQ ID NO: 784179 - DNA, 19 bp, Mus musculus
  siRNA target sequence for 2700007P21Rik (NM_173750.1,182-200).
cacacacgactgccataaa

SEQ ID NO: 784180 - DNA, 19 bp, Mus musculus
  siRNA target sequence for 2700007P21Rik (NM_173750.1,211-229).
ctcggcacacaggtttcaa

SEQ ID NO: 784181 - DNA, 19 bp, Mus musculus
  siRNA target sequence for 2700007P21Rik (NM_173750.1,216-234).
cacacaggtttcaagacat

SEQ ID NO: 784182 - DNA, 19 bp, Mus musculus
  siRNA target sequence for 2700007P21Rik (NM_173750.1,287-305).
gacactttctgggaataat

SEQ ID NO: 784183 - DNA, 19 bp, Mus musculus
  siRNA target sequence for 2700007P21Rik (NM_173750.1,313-331).
gtctccatcacgtaaaaat

SEQ ID NO: 784184 - DNA, 19 bp, Mus musculus
  siRNA target sequence for 2700007P21Rik (NM_173750.1,317-335).
ccatcacgtaaaaatttat

SEQ ID NO: 784185 - DNA, 19 bp, Mus musculus
  siRNA target sequence for 2700007P21Rik (NM_173750.1,324-342).
gtaaaaatttatattgaca

SEQ ID NO: 784186 - DNA, 19 bp, Mus musculus
  siRNA target sequence for 2700007P21Rik (NM_173750.1,364-382).
cgtgttgtgacccatttaa

SEQ ID NO: 784187 - DNA, 19 bp, Mus musculus
  siRNA target sequence for 2700007P21Rik (NM_173750.1,413-431).
gcacgtcattgacttagat

SEQ ID NO: 784188 - DNA, 19 bp, Mus musculus
  siRNA target sequence for 2700007P21Rik (NM_173750.1,425-443).
cttagatgatgccactttt

SEQ ID NO: 784189 - DNA, 19 bp, Mus musculus
  siRNA target sequence for 2700007P21Rik (NM_173750.1,482-500).
gaagctttgccccaaatgt

SEQ ID NO: 784190 - DNA, 19 bp, Mus musculus
  siRNA target sequence for 2700007P21Rik (NM_173750.1,493-511).
ccaaatgtacccagatcat

SEQ ID NO: 784191 - DNA, 19 bp, Mus musculus
  siRNA target sequence for 2700007P21Rik (NM_173750.1,943-961).
ctccctgtcacccatatga

SEQ ID NO: 784192 - DNA, 19 bp, Mus musculus
  siRNA target sequence for 2700007P21Rik (NM_173750.1,946-964).
cctgtcacccatatgatat

SEQ ID NO: 784193 - DNA, 19 bp, Mus musculus
  siRNA target sequence for Ilvbl (NM_173751.2,152-170).
cagactggggctcttctat

SEQ ID NO: 784194 - DNA, 19 bp, Mus musculus
  siRNA target sequence for Ilvbl (NM_173751.2,243-261).
catggtgtacgctttgtct

SEQ ID NO: 784195 - DNA, 19 bp, Mus musculus
  siRNA target sequence for Ilvbl (NM_173751.2,560-578).
gccactctgcaagttttgt

SEQ ID NO: 784196 - DNA, 19 bp, Mus musculus
  siRNA target sequence for Ilvbl (NM_173751.2,589-607).
gaagggtacgggacattgt

SEQ ID NO: 784197 - DNA, 19 bp, Mus musculus
  siRNA target sequence for Ilvbl (NM_173751.2,614-632).
cctgaggactgcaatagct

SEQ ID NO: 784198 - DNA, 19 bp, Mus musculus
  siRNA target sequence for Ilvbl (NM_173751.2,671-689).
gctgcctcttgatgtacta

SEQ ID NO: 784199 - DNA, 19 bp, Mus musculus
  siRNA target sequence for Ilvbl (NM_173751.2,672-690).
ctgcctcttgatgtactat

SEQ ID NO: 784200 - DNA, 19 bp, Mus musculus
  siRNA target sequence for Ilvbl (NM_173751.2,674-692).
gcctcttgatgtactatat

SEQ ID NO: 784201 - DNA, 19 bp, Mus musculus
  siRNA target sequence for Ilvbl (NM_173751.2,678-696).
cttgatgtactatatcctt

SEQ ID NO: 784202 - DNA, 19 bp, Mus musculus
  siRNA target sequence for Ilvbl (NM_173751.2,684-702).
gtactatatccttacttca

SEQ ID NO: 784203 - DNA, 19 bp, Mus musculus
  siRNA target sequence for Ilvbl (NM_173751.2,708-726).
gagaaggagatgataccaa

SEQ ID NO: 784204 - DNA, 19 bp, Mus musculus
  siRNA target sequence for Ilvbl (NM_173751.2,1111-1129).
gtgatttccgcctgtctta

SEQ ID NO: 784205 - DNA, 19 bp, Mus musculus
  siRNA target sequence for Ilvbl (NM_173751.2,1194-1212).
ctcaactcggacatcttct

SEQ ID NO: 784206 - DNA, 19 bp, Mus musculus
  siRNA target sequence for Ilvbl (NM_173751.2,1239-1257).
gatgtgggctccttcatga

SEQ ID NO: 784207 - DNA, 19 bp, Mus musculus
  siRNA target sequence for Ilvbl (NM_173751.2,1242-1260).
gtgggctccttcatgataa

SEQ ID NO: 784208 - DNA, 19 bp, Mus musculus
  siRNA target sequence for Ilvbl (NM_173751.2,1244-1262).
gggctccttcatgataaaa

SEQ ID NO: 784209 - DNA, 19 bp, Mus musculus
  siRNA target sequence for Ilvbl (NM_173751.2,1246-1264).
gctccttcatgataaaact

SEQ ID NO: 784210 - DNA, 19 bp, Mus musculus
  siRNA target sequence for Ilvbl (NM_173751.2,1284-1302).
cagatgtggtcttcagatt

SEQ ID NO: 784211 - DNA, 19 bp, Mus musculus
  siRNA target sequence for Ilvbl (NM_173751.2,1360-1378).
ctttaatgcctgtattaca

SEQ ID NO: 784212 - DNA, 19 bp, Mus musculus
  siRNA target sequence for Ilvbl (NM_173751.2,1415-1433).
ggaaactctgcctgacaat

SEQ ID NO: 784213 - DNA, 19 bp, Mus musculus
  siRNA target sequence for Ilvbl (NM_173751.2,1424-1442).
gcctgacaatgcacttctt

SEQ ID NO: 784214 - DNA, 19 bp, Mus musculus
  siRNA target sequence for Ilvbl (NM_173751.2,1538-1556).
gggagttggcgcaggtttt

SEQ ID NO: 784215 - DNA, 19 bp, Mus musculus
  siRNA target sequence for Ilvbl (NM_173751.2,1625-1643).
ctacagcctcattgagttt

SEQ ID NO: 784216 - DNA, 19 bp, Mus musculus
  siRNA target sequence for Ilvbl (NM_173751.2,1648-1666).
cgttcgtcagacataaggt

SEQ ID NO: 784217 - DNA, 19 bp, Mus musculus
  siRNA target sequence for Ilvbl (NM_173751.2,1649-1667).
gttcgtcagacataaggta

SEQ ID NO: 784218 - DNA, 19 bp, Mus musculus
  siRNA target sequence for Ilvbl (NM_173751.2,1730-1748).
caggttgggcagtgatgta

SEQ ID NO: 784219 - DNA, 19 bp, Mus musculus
  siRNA target sequence for Ilvbl (NM_173751.2,1756-1774).
gcctggcttacactgatta

SEQ ID NO: 784220 - DNA, 19 bp, Mus musculus
  siRNA target sequence for Ilvbl (NM_173751.2,1800-1818).
gcccagggattgatactct

SEQ ID NO: 784221 - DNA, 19 bp, Mus musculus
  siRNA target sequence for Ilvbl (NM_173751.2,1817-1835).
ctcacgggacaataaggat

SEQ ID NO: 784222 - DNA, 19 bp, Mus musculus
  siRNA target sequence for 1110067D22Rik (NM_173752.1,94-112).
cgacgccgtggtgaaactt

SEQ ID NO: 784223 - DNA, 19 bp, Mus musculus
  siRNA target sequence for 1110067D22Rik (NM_173752.1,97-115).
cgccgtggtgaaacttgat

SEQ ID NO: 784224 - DNA, 19 bp, Mus musculus
  siRNA target sequence for 1110067D22Rik (NM_173752.1,163-181).
gtacttcccacgactgata

SEQ ID NO: 784225 - DNA, 19 bp, Mus musculus
  siRNA target sequence for 1110067D22Rik (NM_173752.1,171-189).
cacgactgatagttccatt

SEQ ID NO: 784226 - DNA, 19 bp, Mus musculus
  siRNA target sequence for 1110067D22Rik (NM_173752.1,173-191).
cgactgatagttccatttt

SEQ ID NO: 784227 - DNA, 19 bp, Mus musculus
  siRNA target sequence for 1110067D22Rik (NM_173752.1,400-418).
gtcggcaatcccttacttt

SEQ ID NO: 784228 - DNA, 19 bp, Mus musculus
  siRNA target sequence for 1110067D22Rik (NM_173752.1,438-456).
cgttcagggtggagattct

SEQ ID NO: 784229 - DNA, 19 bp, Mus musculus
  siRNA target sequence for 1110067D22Rik (NM_173752.1,439-457).
gttcagggtggagattctt

SEQ ID NO: 784230 - DNA, 19 bp, Mus musculus
  siRNA target sequence for 1110067D22Rik (NM_173752.1,460-478).
cgagcacccacgtttcaga

SEQ ID NO: 784231 - DNA, 19 bp, Mus musculus
  siRNA target sequence for 1110067D22Rik (NM_173752.1,468-486).
cacgtttcagagtgtttgt

SEQ ID NO: 784232 - DNA, 19 bp, Mus musculus
  siRNA target sequence for 5830457H20 (NM_173756.2,32-50).
cagacgggacggatttgga

SEQ ID NO: 784233 - DNA, 19 bp, Mus musculus
  siRNA target sequence for 5830457H20 (NM_173756.2,307-325).
gagatgacaaggggaaaat

SEQ ID NO: 784234 - DNA, 19 bp, Mus musculus
  siRNA target sequence for 2610028H14Rik (NM_173757.2,76-94).
cctttgcctcgcaggtaaa

SEQ ID NO: 784235 - DNA, 19 bp, Mus musculus
  siRNA target sequence for 2610028H14Rik (NM_173757.2,77-95).
ctttgcctcgcaggtaaaa

SEQ ID NO: 784236 - DNA, 19 bp, Mus musculus
  siRNA target sequence for 2610028H14Rik (NM_173757.2,166-184).
ggctgatcttgcatcctta

SEQ ID NO: 784237 - DNA, 19 bp, Mus musculus
  siRNA target sequence for 2610028H14Rik (NM_173757.2,167-185).
gctgatcttgcatccttaa

SEQ ID NO: 784238 - DNA, 19 bp, Mus musculus
  siRNA target sequence for 2610028H14Rik (NM_173757.2,187-205).
ggacaaagcgtatgaaaga

SEQ ID NO: 784239 - DNA, 19 bp, Mus musculus
  siRNA target sequence for 2610028H14Rik (NM_173757.2,188-206).
gacaaagcgtatgaaagaa

SEQ ID NO: 784240 - DNA, 19 bp, Mus musculus
  siRNA target sequence for 2610028H14Rik (NM_173757.2,211-229).
gcctgttagttctttatca

SEQ ID NO: 784241 - DNA, 19 bp, Mus musculus
  siRNA target sequence for 2610028H14Rik (NM_173757.2,215-233).
gttagttctttatcaatat

SEQ ID NO: 784242 - DNA, 19 bp, Mus musculus
  siRNA target sequence for 2610028H14Rik (NM_173757.2,234-252).
cacggtttgtggacaacat

SEQ ID NO: 784243 - DNA, 19 bp, Mus musculus
  siRNA target sequence for 2610028H14Rik (NM_173757.2,276-294).
ctgcagagtactatcttta

SEQ ID NO: 784244 - DNA, 19 bp, Mus musculus
  siRNA target sequence for 2610028H14Rik (NM_173757.2,311-329).
cccaactgctggtacctaa

SEQ ID NO: 784245 - DNA, 19 bp, Mus musculus
  siRNA target sequence for 2610028H14Rik (NM_173757.2,431-449).
ccagataactttacattca

SEQ ID NO: 784246 - DNA, 19 bp, Mus musculus
  siRNA target sequence for 2610028H14Rik (NM_173757.2,434-452).
gataactttacattcaact

SEQ ID NO: 784247 - DNA, 19 bp, Mus musculus
  siRNA target sequence for 2610028H14Rik (NM_173757.2,648-666).
ctggcctgaaacaaaggaa

SEQ ID NO: 784248 - DNA, 19 bp, Mus musculus
  siRNA target sequence for 2610028H14Rik (NM_173757.2,732-750).
gggtgcgggctgtatacca

SEQ ID NO: 784249 - DNA, 19 bp, Mus musculus
  siRNA target sequence for 2610028H14Rik (NM_173757.2,1058-1076).
gttgagtctgaaagtcttt

SEQ ID NO: 784250 - DNA, 19 bp, Mus musculus
  siRNA target sequence for 2610028H14Rik (NM_173757.2,1061-1079).
gagtctgaaagtcttttga

SEQ ID NO: 784251 - DNA, 19 bp, Mus musculus
  siRNA target sequence for 2610028H14Rik (NM_173757.2,1063-1081).
gtctgaaagtcttttgact

SEQ ID NO: 784252 - DNA, 19 bp, Mus musculus
  siRNA target sequence for 2610028H14Rik (NM_173757.2,1082-1100).
ctgaccacccagcttgtaa

SEQ ID NO: 784253 - DNA, 19 bp, Mus musculus
  siRNA target sequence for 2610028H14Rik (NM_173757.2,1084-1102).
gaccacccagcttgtaaaa

SEQ ID NO: 784254 - DNA, 19 bp, Mus musculus
  siRNA target sequence for 2610028H14Rik (NM_173757.2,1086-1104).
ccacccagcttgtaaaaga

SEQ ID NO: 784255 - DNA, 19 bp, Mus musculus
  siRNA target sequence for 2610028H14Rik (NM_173757.2,1087-1105).
cacccagcttgtaaaagaa

SEQ ID NO: 784256 - DNA, 19 bp, Mus musculus
  siRNA target sequence for 2610028H14Rik (NM_173757.2,1237-1255).
gctgagtgcggcagagaaa

SEQ ID NO: 784257 - DNA, 19 bp, Mus musculus
  siRNA target sequence for AW555814 (NM_173760.3,55-73).
ccgaagatgcggaaatcaa

SEQ ID NO: 784258 - DNA, 19 bp, Mus musculus
  siRNA target sequence for AW555814 (NM_173760.3,56-74).
cgaagatgcggaaatcaat

SEQ ID NO: 784259 - DNA, 19 bp, Mus musculus
  siRNA target sequence for AW555814 (NM_173760.3,152-170).
gattgtggttggaatatgt

SEQ ID NO: 784260 - DNA, 19 bp, Mus musculus
  siRNA target sequence for AW555814 (NM_173760.3,215-233).
ggaacggatctccttgttt

SEQ ID NO: 784261 - DNA, 19 bp, Mus musculus
  siRNA target sequence for AW555814 (NM_173760.3,216-234).
gaacggatctccttgttta

SEQ ID NO: 784262 - DNA, 19 bp, Mus musculus
  siRNA target sequence for AW555814 (NM_173760.3,378-396).
ccatttgtaatcaatgact

SEQ ID NO: 784263 - DNA, 19 bp, Mus musculus
  siRNA target sequence for AW555814 (NM_173760.3,379-397).
catttgtaatcaatgactt

SEQ ID NO: 784264 - DNA, 19 bp, Mus musculus
  siRNA target sequence for AW555814 (NM_173760.3,384-402).
gtaatcaatgacttgaata

SEQ ID NO: 784265 - DNA, 19 bp, Mus musculus
  siRNA target sequence for AW555814 (NM_173760.3,407-425).
gtatctcatacaagataga

SEQ ID NO: 784266 - DNA, 19 bp, Mus musculus
  siRNA target sequence for AW555814 (NM_173760.3,420-438).
gatagaagagacgtgtata

SEQ ID NO: 784267 - DNA, 19 bp, Mus musculus
  siRNA target sequence for AW555814 (NM_173760.3,462-480).
ctacttcctcggtatgcaa

SEQ ID NO: 784268 - DNA, 19 bp, Mus musculus
  siRNA target sequence for AW555814 (NM_173760.3,482-500).
cctgaaccgtgatccaaat

SEQ ID NO: 784269 - DNA, 19 bp, Mus musculus
  siRNA target sequence for AW555814 (NM_173760.3,495-513).
ccaaataacccgaaagaat

SEQ ID NO: 784270 - DNA, 19 bp, Mus musculus
  siRNA target sequence for AW555814 (NM_173760.3,521-539).
gattgaaggagaagatcat

SEQ ID NO: 784271 - DNA, 19 bp, Mus musculus
  siRNA target sequence for AW555814 (NM_173760.3,543-561).
gaagtgaatggggaagttt

SEQ ID NO: 784272 - DNA, 19 bp, Mus musculus
  siRNA target sequence for AW555814 (NM_173760.3,660-678).
cggaagattggcagtagaa

SEQ ID NO: 784273 - DNA, 19 bp, Mus musculus
  siRNA target sequence for AW555814 (NM_173760.3,694-712).
cagagagcaacgttcgaaa

SEQ ID NO: 784274 - DNA, 19 bp, Mus musculus
  siRNA target sequence for AW555814 (NM_173760.3,708-726).
cgaaaaacggggtcatata

SEQ ID NO: 784275 - DNA, 19 bp, Mus musculus
  siRNA target sequence for AW555814 (NM_173760.3,715-733).
cggggtcatatatatatga

SEQ ID NO: 784276 - DNA, 19 bp, Mus musculus
  siRNA target sequence for AW555814 (NM_173760.3,716-734).
ggggtcatatatatatgaa

SEQ ID NO: 784277 - DNA, 19 bp, Mus musculus
  siRNA target sequence for AW555814 (NM_173760.3,721-739).
catatatatatgaagagtt

SEQ ID NO: 784278 - DNA, 19 bp, Mus musculus
  siRNA target sequence for AW555814 (NM_173760.3,743-761).
gcctacagatggtactgat

SEQ ID NO: 784279 - DNA, 19 bp, Mus musculus
  siRNA target sequence for AW555814 (NM_173760.3,753-771).
ggtactgatgttaaggttt

SEQ ID NO: 784280 - DNA, 19 bp, Mus musculus
  siRNA target sequence for AW555814 (NM_173760.3,897-915).
ctgattgcgtggaaagtct

SEQ ID NO: 784281 - DNA, 19 bp, Mus musculus
  siRNA target sequence for AW555814 (NM_173760.3,974-992).
ctatgtatgcgatgtcaat

SEQ ID NO: 784282 - DNA, 19 bp, Mus musculus
  siRNA target sequence for AW555814 (NM_173760.3,1070-1088).
gcttgcaccacagtttcat

SEQ ID NO: 784283 - DNA, 19 bp, Mus musculus
  siRNA target sequence for AW555814 (NM_173760.3,1093-1111).
cgtggtcaataccattaga

SEQ ID NO: 784284 - DNA, 19 bp, Mus musculus
  siRNA target sequence for AW555814 (NM_173760.3,1094-1112).
gtggtcaataccattagaa

SEQ ID NO: 784285 - DNA, 19 bp, Mus musculus
  siRNA target sequence for AW555814 (NM_173760.3,1138-1156).
ctacctctggaactatgat

SEQ ID NO: 784286 - DNA, 19 bp, Mus musculus
  siRNA target sequence for AW555814 (NM_173760.3,1194-1212).
gatcgaacaccgaaacaga

SEQ ID NO: 784287 - DNA, 19 bp, Mus musculus
  siRNA target sequence for AW555814 (NM_173760.3,1197-1215).
cgaacaccgaaacagaaaa

SEQ ID NO: 784288 - DNA, 19 bp, Mus musculus
  siRNA target sequence for AW555814 (NM_173760.3,1229-1247).
gaggcatcagaagtttttt

SEQ ID NO: 784289 - DNA, 19 bp, Mus musculus
  siRNA target sequence for AW555814 (NM_173760.3,1231-1249).
ggcatcagaagttttttga

SEQ ID NO: 784290 - DNA, 19 bp, Mus musculus
  siRNA target sequence for AW555814 (NM_173760.3,1262-1280).
gtgtgatggatataaatca

SEQ ID NO: 784291 - DNA, 19 bp, Mus musculus
  siRNA target sequence for AW555814 (NM_173760.3,1316-1334).
ggaagtcctggatattgca

SEQ ID NO: 784292 - DNA, 19 bp, Mus musculus
  siRNA target sequence for AW555814 (NM_173760.3,1333-1351).
caaggcagcttcttatgga

SEQ ID NO: 784293 - DNA, 19 bp, Mus musculus
  siRNA target sequence for AW555814 (NM_173760.3,1388-1406).
caagtcaaaacttgaacaa

SEQ ID NO: 784294 - DNA, 19 bp, Mus musculus
  siRNA target sequence for AW555814 (NM_173760.3,1412-1430).
gactgtgttagagatgtat

SEQ ID NO: 784295 - DNA, 19 bp, Mus musculus
  siRNA target sequence for AW555814 (NM_173760.3,1452-1470).
cgtaaggtccaattaacct

SEQ ID NO: 784296 - DNA, 19 bp, Mus musculus
  siRNA target sequence for AW555814 (NM_173760.3,1457-1475).
ggtccaattaacctatctt

SEQ ID NO: 784297 - DNA, 19 bp, Mus musculus
  siRNA target sequence for AW555814 (NM_173760.3,1479-1497).
catggctgtccgaaaacat

SEQ ID NO: 784298 - DNA, 19 bp, Mus musculus
  siRNA target sequence for AW555814 (NM_173760.3,1524-1542).
gaggagccgtccttacttt

SEQ ID NO: 784299 - DNA, 19 bp, Mus musculus
  siRNA target sequence for AW555814 (NM_173760.3,1529-1547).
gccgtccttacttttggtt

SEQ ID NO: 784300 - DNA, 19 bp, Mus musculus
  siRNA target sequence for AW555814 (NM_173760.3,1665-1683).
ggtttactccgactacata

SEQ ID NO: 784301 - DNA, 19 bp, Mus musculus
  siRNA target sequence for AW555814 (NM_173760.3,1693-1711).
ggcatgacctcaaaatata

SEQ ID NO: 784302 - DNA, 19 bp, Mus musculus
  siRNA target sequence for AW555814 (NM_173760.3,1694-1712).
gcatgacctcaaaatatat

SEQ ID NO: 784303 - DNA, 19 bp, Mus musculus
  siRNA target sequence for AW555814 (NM_173760.3,1784-1802).
gcttacccccattcttgtt

SEQ ID NO: 784304 - DNA, 19 bp, Mus musculus
  siRNA target sequence for AW555814 (NM_173760.3,1829-1847).
cggccttttggatagtgat

SEQ ID NO: 784305 - DNA, 19 bp, Mus musculus
  siRNA target sequence for AW555814 (NM_173760.3,1880-1898).
gaaagcgaggcttcatgaa

SEQ ID NO: 784306 - DNA, 19 bp, Mus musculus
  siRNA target sequence for AW555814 (NM_173760.3,1957-1975).
gaagcatttctgttatcaa

SEQ ID NO: 784307 - DNA, 19 bp, Mus musculus
  siRNA target sequence for AW555814 (NM_173760.3,1988-2006).
gattaaaaatccagtgaaa

SEQ ID NO: 784308 - DNA, 19 bp, Mus musculus
  siRNA target sequence for AW555814 (NM_173760.3,2015-2033).
caaagtgtattccttgatt

SEQ ID NO: 784309 - DNA, 19 bp, Mus musculus
  siRNA target sequence for AW555814 (NM_173760.3,2019-2037).
gtgtattccttgattcaaa

SEQ ID NO: 784310 - DNA, 19 bp, Mus musculus
  siRNA target sequence for AW555814 (NM_173760.3,2027-2045).
cttgattcaaagtttgact

SEQ ID NO: 784311 - DNA, 19 bp, Mus musculus
  siRNA target sequence for AW555814 (NM_173760.3,2074-2092).
ccaaatcagctgatattca

SEQ ID NO: 784312 - DNA, 19 bp, Mus musculus
  siRNA target sequence for AW555814 (NM_173760.3,2104-2122).
gtgagaccctggaacttat

SEQ ID NO: 784313 - DNA, 19 bp, Mus musculus
  siRNA target sequence for AW555814 (NM_173760.3,2169-2187).
ggaagatatgatattagca

SEQ ID NO: 784314 - DNA, 19 bp, Mus musculus
  siRNA target sequence for AW555814 (NM_173760.3,2170-2188).
gaagatatgatattagcaa

SEQ ID NO: 784315 - DNA, 19 bp, Mus musculus
  siRNA target sequence for AW555814 (NM_173760.3,2229-2247).
cataacggttccttgaagt

SEQ ID NO: 784316 - DNA, 19 bp, Mus musculus
  siRNA target sequence for AW555814 (NM_173760.3,2234-2252).
cggttccttgaagttagaa

SEQ ID NO: 784317 - DNA, 19 bp, Mus musculus
  siRNA target sequence for AW555814 (NM_173760.3,2235-2253).
ggttccttgaagttagaaa

SEQ ID NO: 784318 - DNA, 19 bp, Mus musculus
  siRNA target sequence for AW555814 (NM_173760.3,2278-2296).
caaaggcattagcagatat

SEQ ID NO: 784319 - DNA, 19 bp, Mus musculus
  siRNA target sequence for AW555814 (NM_173760.3,2283-2301).
gcattagcagatattgtta

SEQ ID NO: 784320 - DNA, 19 bp, Mus musculus
  siRNA target sequence for AW555814 (NM_173760.3,2399-2417).
gacacaagatgatgatact

SEQ ID NO: 784321 - DNA, 19 bp, Mus musculus
  siRNA target sequence for AW555814 (NM_173760.3,2401-2419).
cacaagatgatgatactgt

SEQ ID NO: 784322 - DNA, 19 bp, Mus musculus
  siRNA target sequence for AW555814 (NM_173760.3,2468-2486).
gcacgtccgcaccagatta

SEQ ID NO: 784323 - DNA, 19 bp, Mus musculus
  siRNA target sequence for AW555814 (NM_173760.3,2469-2487).
cacgtccgcaccagattat

SEQ ID NO: 784324 - DNA, 19 bp, Mus musculus
  siRNA target sequence for AW555814 (NM_173760.3,2472-2490).
gtccgcaccagattatatt

SEQ ID NO: 784325 - DNA, 19 bp, Mus musculus
  siRNA target sequence for AW555814 (NM_173760.3,2475-2493).
cgcaccagattatatttta

SEQ ID NO: 784326 - DNA, 19 bp, Mus musculus
  siRNA target sequence for AW555814 (NM_173760.3,2510-2528).
gcattctttactatccatt

SEQ ID NO: 784327 - DNA, 19 bp, Mus musculus
  siRNA target sequence for AW555814 (NM_173760.3,2542-2560).
ccttatgcgatgactcaaa

SEQ ID NO: 784328 - DNA, 19 bp, Mus musculus
  siRNA target sequence for AW555814 (NM_173760.3,2570-2588).
gtggaaacgagctatggat

SEQ ID NO: 784329 - DNA, 19 bp, Mus musculus
  siRNA target sequence for AW555814 (NM_173760.3,2572-2590).
ggaaacgagctatggatta

SEQ ID NO: 784330 - DNA, 19 bp, Mus musculus
  siRNA target sequence for AW555814 (NM_173760.3,2573-2591).
gaaacgagctatggattat

SEQ ID NO: 784331 - DNA, 19 bp, Mus musculus
  siRNA target sequence for AW555814 (NM_173760.3,2581-2599).
ctatggattatctaaacgt

SEQ ID NO: 784332 - DNA, 19 bp, Mus musculus
  siRNA target sequence for AW555814 (NM_173760.3,2601-2619).
gtcaatgagctcaactaca

SEQ ID NO: 784333 - DNA, 19 bp, Mus musculus
  siRNA target sequence for AW555814 (NM_173760.3,2671-2689).
cagaggaacgctttcatgt

SEQ ID NO: 784334 - DNA, 19 bp, Mus musculus
  siRNA target sequence for AW555814 (NM_173760.3,2784-2802).
ggcagaaggtctcttaaaa

SEQ ID NO: 784335 - DNA, 19 bp, Mus musculus
  siRNA target sequence for AW555814 (NM_173760.3,2824-2842).
cttctaaacgagatgaagt

SEQ ID NO: 784336 - DNA, 19 bp, Mus musculus
  siRNA target sequence for AW555814 (NM_173760.3,2852-2870).
cgtgatgttgtttaaacca

SEQ ID NO: 784337 - DNA, 19 bp, Mus musculus
  siRNA target sequence for AW555814 (NM_173760.3,2873-2891).
ggtgtctgagccaattcat

SEQ ID NO: 784338 - DNA, 19 bp, Mus musculus
  siRNA target sequence for AW555814 (NM_173760.3,2878-2896).
ctgagccaattcatataca

SEQ ID NO: 784339 - DNA, 19 bp, Mus musculus
  siRNA target sequence for AW555814 (NM_173760.3,2913-2931).
ccgaggtccaggaagatta

SEQ ID NO: 784340 - DNA, 19 bp, Mus musculus
  siRNA target sequence for AW555814 (NM_173760.3,2950-2968).
ctgagaatgccaactatct

SEQ ID NO: 784341 - DNA, 19 bp, Mus musculus
  siRNA target sequence for AW555814 (NM_173760.3,2969-2987).
ccgaacaccaagaaatctt

SEQ ID NO: 784342 - DNA, 19 bp, Mus musculus
  siRNA target sequence for AW555814 (NM_173760.3,2980-2998).
gaaatcttgtggaacagaa

SEQ ID NO: 784343 - DNA, 19 bp, Mus musculus
  siRNA target sequence for AW555814 (NM_173760.3,3012-3030).
gtaggcttcgagctgtatt

SEQ ID NO: 784344 - DNA, 19 bp, Mus musculus
  siRNA target sequence for AW555814 (NM_173760.3,3016-3034).
gcttcgagctgtattccat

SEQ ID NO: 784345 - DNA, 19 bp, Mus musculus
  siRNA target sequence for AW555814 (NM_173760.3,3066-3084).
cacaatgccctgtttttaa

SEQ ID NO: 784346 - DNA, 19 bp, Mus musculus
  siRNA target sequence for AW555814 (NM_173760.3,3138-3156).
cgcaaggtccccgaaatgt

SEQ ID NO: 784347 - DNA, 19 bp, Mus musculus
  siRNA target sequence for AW555814 (NM_173760.3,3332-3350).
gaagagcataaatagcaaa

SEQ ID NO: 784348 - DNA, 19 bp, Mus musculus
  siRNA target sequence for AW555814 (NM_173760.3,3360-3378).
catgaacccaagaaaagca

SEQ ID NO: 784349 - DNA, 19 bp, Mus musculus
  siRNA target sequence for 2210410K23Rik (NM_173761.3,347-365).
cagtccaatccgagtaaca

SEQ ID NO: 784350 - DNA, 19 bp, Mus musculus
  siRNA target sequence for 2210410K23Rik (NM_173761.3,349-367).
gtccaatccgagtaacagt

SEQ ID NO: 784351 - DNA, 19 bp, Mus musculus
  siRNA target sequence for 2210410K23Rik (NM_173761.3,351-369).
ccaatccgagtaacagtta

SEQ ID NO: 784352 - DNA, 19 bp, Mus musculus
  siRNA target sequence for 2210410K23Rik (NM_173761.3,372-390).
cctcgatgagtgatcctta

SEQ ID NO: 784353 - DNA, 19 bp, Mus musculus
  siRNA target sequence for 2210410K23Rik (NM_173761.3,387-405).
cttacctgtccagttacta

SEQ ID NO: 784354 - DNA, 19 bp, Mus musculus
  siRNA target sequence for 2210410K23Rik (NM_173761.3,475-493).
cccgtatctcactacctat

SEQ ID NO: 784355 - DNA, 19 bp, Mus musculus
  siRNA target sequence for 2210410K23Rik (NM_173761.3,484-502).
cactacctatggacaactt

SEQ ID NO: 784356 - DNA, 19 bp, Mus musculus
  siRNA target sequence for 2210410K23Rik (NM_173761.3,554-572).
ggtctggggaacaacattt

SEQ ID NO: 784357 - DNA, 19 bp, Mus musculus
  siRNA target sequence for 2210410K23Rik (NM_173761.3,784-802).
catggttggcctgaagatt

SEQ ID NO: 784358 - DNA, 19 bp, Mus musculus
  siRNA target sequence for 2210410K23Rik (NM_173761.3,880-898).
caatggtgggacaaatgta

SEQ ID NO: 784359 - DNA, 19 bp, Mus musculus
  siRNA target sequence for 2210410K23Rik (NM_173761.3,884-902).
ggtgggacaaatgtaaaca

SEQ ID NO: 784360 - DNA, 19 bp, Mus musculus
  siRNA target sequence for 2210410K23Rik (NM_173761.3,896-914).
gtaaacatgccagtttcaa

SEQ ID NO: 784361 - DNA, 19 bp, Mus musculus
  siRNA target sequence for 2210410K23Rik (NM_173761.3,1213-1231).
ggctcctcgaaacagaaat

SEQ ID NO: 784362 - DNA, 19 bp, Mus musculus
  siRNA target sequence for 2210410K23Rik (NM_173761.3,1267-1285).
cagtaactctgttggaaat

SEQ ID NO: 784363 - DNA, 19 bp, Mus musculus
  siRNA target sequence for 2210410K23Rik (NM_173761.3,1372-1390).
cgactggaatcttaagagt

SEQ ID NO: 784364 - DNA, 19 bp, Mus musculus
  siRNA target sequence for 2210410K23Rik (NM_173761.3,1512-1530).
gcagcaaggggcctgttta

SEQ ID NO: 784365 - DNA, 19 bp, Mus musculus
  siRNA target sequence for 2210410K23Rik (NM_173761.3,1513-1531).
cagcaaggggcctgtttat

SEQ ID NO: 784366 - DNA, 19 bp, Mus musculus
  siRNA target sequence for 2210410K23Rik (NM_173761.3,1652-1670).
gtgaagtggatttttgtga

SEQ ID NO: 784367 - DNA, 19 bp, Mus musculus
  siRNA target sequence for 2210410K23Rik (NM_173761.3,1732-1750).
cacaaactcccgtgataca

SEQ ID NO: 784368 - DNA, 19 bp, Mus musculus
  siRNA target sequence for 2210410K23Rik (NM_173761.3,1734-1752).
caaactcccgtgatacaca

SEQ ID NO: 784369 - DNA, 19 bp, Mus musculus
  siRNA target sequence for 2210410K23Rik (NM_173761.3,1751-1769).
caggaggtgcccttagaaa

SEQ ID NO: 784370 - DNA, 19 bp, Mus musculus
  siRNA target sequence for 2210410K23Rik (NM_173761.3,1753-1771).
ggaggtgcccttagaaaaa

SEQ ID NO: 784371 - DNA, 19 bp, Mus musculus
  siRNA target sequence for 2210410K23Rik (NM_173761.3,1786-1804).
gaagattatcgcttcctat

SEQ ID NO: 784372 - DNA, 19 bp, Mus musculus
  siRNA target sequence for 2210410K23Rik (NM_173761.3,1807-1825).
gcacacaacctctatcttt

SEQ ID NO: 784373 - DNA, 19 bp, Mus musculus
  siRNA target sequence for 2210410K23Rik (NM_173761.3,1865-1883).
gaggtggtgcgtaaggaaa

SEQ ID NO: 784374 - DNA, 19 bp, Mus musculus
  siRNA target sequence for 2210410K23Rik (NM_173761.3,1884-1902).
gacagaatcgaaacaaaca

SEQ ID NO: 784375 - DNA, 19 bp, Mus musculus
  siRNA target sequence for 4932414K18Rik (NM_173764.2,21-39).
ctctcaatgtagcttttaa

SEQ ID NO: 784376 - DNA, 19 bp, Mus musculus
  siRNA target sequence for 4932414K18Rik (NM_173764.2,98-116).
ggaagtgtattcaagaagt

SEQ ID NO: 784377 - DNA, 19 bp, Mus musculus
  siRNA target sequence for 4932414K18Rik (NM_173764.2,102-120).
gtgtattcaagaagtttga

SEQ ID NO: 784378 - DNA, 19 bp, Mus musculus
  siRNA target sequence for 4932414K18Rik (NM_173764.2,137-155).
cagatgtcaaatagtgata

SEQ ID NO: 784379 - DNA, 19 bp, Mus musculus
  siRNA target sequence for 4932414K18Rik (NM_173764.2,139-157).
gatgtcaaatagtgatatt

SEQ ID NO: 784380 - DNA, 19 bp, Mus musculus
  siRNA target sequence for 4932414K18Rik (NM_173764.2,144-162).
caaatagtgatattaagga

SEQ ID NO: 784381 - DNA, 19 bp, Mus musculus
  siRNA target sequence for 4932414K18Rik (NM_173764.2,171-189).
caaattacgtgcttttgtt

SEQ ID NO: 784382 - DNA, 19 bp, Mus musculus
  siRNA target sequence for 4932414K18Rik (NM_173764.2,260-278).
gtctgtatggtgattgcat

SEQ ID NO: 784383 - DNA, 19 bp, Mus musculus
  siRNA target sequence for 4932414K18Rik (NM_173764.2,271-289).
gattgcatccgaaattgct

SEQ ID NO: 784384 - DNA, 19 bp, Mus musculus
  siRNA target sequence for 4932414K18Rik (NM_173764.2,299-317).
gtaaagcatgcctttatca

SEQ ID NO: 784385 - DNA, 19 bp, Mus musculus
  siRNA target sequence for 4932414K18Rik (NM_173764.2,390-408).
gccgacagaaaaatgcata

SEQ ID NO: 784386 - DNA, 19 bp, Mus musculus
  siRNA target sequence for 4932414K18Rik (NM_173764.2,459-477).
cgctagctgtcttactcat

SEQ ID NO: 784387 - DNA, 19 bp, Mus musculus
  siRNA target sequence for 4932414K18Rik (NM_173764.2,469-487).
cttactcatcagagttgta

SEQ ID NO: 784388 - DNA, 19 bp, Mus musculus
  siRNA target sequence for 4932414K18Rik (NM_173764.2,482-500).
gttgtaacaagctcaatta

SEQ ID NO: 784389 - DNA, 19 bp, Mus musculus
  siRNA target sequence for 4932414K18Rik (NM_173764.2,517-535).
gtcctacgcctgtgtcata

SEQ ID NO: 784390 - DNA, 19 bp, Mus musculus
  siRNA target sequence for 4932414K18Rik (NM_173764.2,519-537).
cctacgcctgtgtcatact

SEQ ID NO: 784391 - DNA, 19 bp, Mus musculus
  siRNA target sequence for 4932414K18Rik (NM_173764.2,553-571).
gatctccttgaaaatactt

SEQ ID NO: 784392 - DNA, 19 bp, Mus musculus
  siRNA target sequence for 4932414K18Rik (NM_173764.2,556-574).
ctccttgaaaatacttaat

SEQ ID NO: 784393 - DNA, 19 bp, Mus musculus
  siRNA target sequence for 4932414K18Rik (NM_173764.2,591-609).
gaaagtcctgtcaatacgt

SEQ ID NO: 784394 - DNA, 19 bp, Mus musculus
  siRNA target sequence for 4932414K18Rik (NM_173764.2,790-808).
cgtgactagcaattctgat

SEQ ID NO: 784395 - DNA, 19 bp, Mus musculus
  siRNA target sequence for 4932414K18Rik (NM_173764.2,795-813).
ctagcaattctgatcagtt

SEQ ID NO: 784396 - DNA, 19 bp, Mus musculus
  siRNA target sequence for 4932414K18Rik (NM_173764.2,842-860).
gacataacacaggaaaatt

SEQ ID NO: 784397 - DNA, 19 bp, Mus musculus
  siRNA target sequence for 4932414K18Rik (NM_173764.2,890-908).
gacttgttagaaatagaca

SEQ ID NO: 784398 - DNA, 19 bp, Mus musculus
  siRNA target sequence for 4932414K18Rik (NM_173764.2,899-917).
gaaatagacaggttcacaa

SEQ ID NO: 784399 - DNA, 19 bp, Mus musculus
  siRNA target sequence for A630023P12Rik (NM_173766.2,192-210).
ccccgttctcagttccaaa

SEQ ID NO: 784400 - DNA, 19 bp, Mus musculus
  siRNA target sequence for A630023P12Rik (NM_173766.2,196-214).
gttctcagttccaaagcta

SEQ ID NO: 784401 - DNA, 19 bp, Mus musculus
  siRNA target sequence for A630023P12Rik (NM_173766.2,212-230).
ctagggtctttgttatata

SEQ ID NO: 784402 - DNA, 19 bp, Mus musculus
  siRNA target sequence for A630023P12Rik (NM_173766.2,215-233).
gggtctttgttatatagta

SEQ ID NO: 784403 - DNA, 19 bp, Mus musculus
  siRNA target sequence for A630023P12Rik (NM_173766.2,242-260).
ccattgcaccccactaaca

SEQ ID NO: 784404 - DNA, 19 bp, Mus musculus
  siRNA target sequence for A630023P12Rik (NM_173766.2,250-268).
ccccactaacagtgcaaat

SEQ ID NO: 784405 - DNA, 19 bp, Mus musculus
  siRNA target sequence for A630023P12Rik (NM_173766.2,274-292).
ggacagaggaccaactagt

SEQ ID NO: 784406 - DNA, 19 bp, Mus musculus
  siRNA target sequence for A630023P12Rik (NM_173766.2,461-479).
ccaggcaccagtacagaaa

SEQ ID NO: 784407 - DNA, 19 bp, Mus musculus
  siRNA target sequence for A630023P12Rik (NM_173766.2,492-510).
gcggcaccagaacatatga

SEQ ID NO: 784408 - DNA, 19 bp, Mus musculus
  siRNA target sequence for A630023P12Rik (NM_173766.2,493-511).
cggcaccagaacatatgaa

SEQ ID NO: 784409 - DNA, 19 bp, Mus musculus
  siRNA target sequence for 3830422K02Rik (NM_173767.2,358-376).
gcaggcacttgtgagaaaa

SEQ ID NO: 784410 - DNA, 19 bp, Mus musculus
  siRNA target sequence for 3830422K02Rik (NM_173767.2,359-377).
caggcacttgtgagaaaaa

SEQ ID NO: 784411 - DNA, 19 bp, Mus musculus
  siRNA target sequence for 3830422K02Rik (NM_173767.2,363-381).
cacttgtgagaaaaatcga

SEQ ID NO: 784412 - DNA, 19 bp, Mus musculus
  siRNA target sequence for 3830422K02Rik (NM_173767.2,365-383).
cttgtgagaaaaatcgata

SEQ ID NO: 784413 - DNA, 19 bp, Mus musculus
  siRNA target sequence for 3830422K02Rik (NM_173767.2,380-398).
gatacctcagacaatatct

SEQ ID NO: 784414 - DNA, 19 bp, Mus musculus
  siRNA target sequence for 3830422K02Rik (NM_173767.2,483-501).
gggttgtagccctcttcaa

SEQ ID NO: 784415 - DNA, 19 bp, Mus musculus
  siRNA target sequence for 3830422K02Rik (NM_173767.2,548-566).
cgcacactggcctctatct

SEQ ID NO: 784416 - DNA, 19 bp, Mus musculus
  siRNA target sequence for 3830422K02Rik (NM_173767.2,861-879).
gtgagatgcttctacagtt

SEQ ID NO: 784417 - DNA, 19 bp, Mus musculus
  siRNA target sequence for 3830422K02Rik (NM_173767.2,865-883).
gatgcttctacagttgaat

SEQ ID NO: 784418 - DNA, 19 bp, Mus musculus
  siRNA target sequence for 3830422K02Rik (NM_173767.2,1163-1181).
gttcggctcagctgtatgt

SEQ ID NO: 784419 - DNA, 19 bp, Mus musculus
  siRNA target sequence for 3830422K02Rik (NM_173767.2,1176-1194).
gtatgtctcgcctgattga

SEQ ID NO: 784420 - DNA, 19 bp, Mus musculus
  siRNA target sequence for 3830422K02Rik (NM_173767.2,1356-1374).
gcaatatggaggagagttt

SEQ ID NO: 784421 - DNA, 19 bp, Mus musculus
  siRNA target sequence for B230399E16 (NM_173770.2,640-658).
caggaggaatacgtatact

SEQ ID NO: 784422 - DNA, 19 bp, Mus musculus
  siRNA target sequence for B230399E16 (NM_173770.2,702-720).
gggatcctgcggtcacttt

SEQ ID NO: 784423 - DNA, 19 bp, Mus musculus
  siRNA target sequence for B230399E16 (NM_173770.2,703-721).
ggatcctgcggtcactttt

SEQ ID NO: 784424 - DNA, 19 bp, Mus musculus
  siRNA target sequence for B230399E16 (NM_173770.2,704-722).
gatcctgcggtcactttta

SEQ ID NO: 784425 - DNA, 19 bp, Mus musculus
  siRNA target sequence for B230399E16 (NM_173770.2,708-726).
ctgcggtcacttttatgca

SEQ ID NO: 784426 - DNA, 19 bp, Mus musculus
  siRNA target sequence for B230399E16 (NM_173770.2,915-933).
ctttacggtggtagctatt

SEQ ID NO: 784427 - DNA, 19 bp, Mus musculus
  siRNA target sequence for B230399E16 (NM_173770.2,947-965).
ccttttttgagcctaaaat

SEQ ID NO: 784428 - DNA, 19 bp, Mus musculus
  siRNA target sequence for B230399E16 (NM_173770.2,959-977).
ctaaaatgagggaaatcct

SEQ ID NO: 784429 - DNA, 19 bp, Mus musculus
  siRNA target sequence for B230399E16 (NM_173770.2,984-1002).
gaactgcacgggagatgaa

SEQ ID NO: 784430 - DNA, 19 bp, Mus musculus
  siRNA target sequence for B230399E16 (NM_173770.2,992-1010).
cgggagatgaagattgcaa

SEQ ID NO: 784431 - DNA, 19 bp, Mus musculus
  siRNA target sequence for B230399E16 (NM_173770.2,995-1013).
gagatgaagattgcaattt

SEQ ID NO: 784432 - DNA, 19 bp, Mus musculus
  siRNA target sequence for B230399E16 (NM_173770.2,1003-1021).
gattgcaatttcttcgatt

SEQ ID NO: 784433 - DNA, 19 bp, Mus musculus
  siRNA target sequence for B230399E16 (NM_173770.2,1081-1099).
ctgcaagtcatctgtgata

SEQ ID NO: 784434 - DNA, 19 bp, Mus musculus
  siRNA target sequence for B230399E16 (NM_173770.2,1087-1105).
gtcatctgtgataaaatat

SEQ ID NO: 784435 - DNA, 19 bp, Mus musculus
  siRNA target sequence for B230399E16 (NM_173770.2,1263-1281).
cttgcaggccactctgaaa

SEQ ID NO: 784436 - DNA, 19 bp, Mus musculus
  siRNA target sequence for Neu4 (NM_173772.2,365-383).
gaggagcacaggtctatga

SEQ ID NO: 784437 - DNA, 19 bp, Mus musculus
  siRNA target sequence for Neu4 (NM_173772.2,453-471).
caccggaggccgtgcaaat

SEQ ID NO: 784438 - DNA, 19 bp, Mus musculus
  siRNA target sequence for Neu4 (NM_173772.2,651-669).
ctgcttacacctatcatgt

SEQ ID NO: 784439 - DNA, 19 bp, Mus musculus
  siRNA target sequence for Neu4 (NM_173772.2,668-686).
gtggaccgacgggaatgtt

SEQ ID NO: 784440 - DNA, 19 bp, Mus musculus
  siRNA target sequence for Neu4 (NM_173772.2,721-739).
ggcattctacagtgatgat

SEQ ID NO: 784441 - DNA, 19 bp, Mus musculus
  siRNA target sequence for Neu4 (NM_173772.2,815-833).
ggagactttctctactgta

SEQ ID NO: 784442 - DNA, 19 bp, Mus musculus
  siRNA target sequence for Neu4 (NM_173772.2,816-834).
gagactttctctactgtaa

SEQ ID NO: 784443 - DNA, 19 bp, Mus musculus
  siRNA target sequence for Neu4 (NM_173772.2,820-838).
ctttctctactgtaatgct

SEQ ID NO: 784444 - DNA, 19 bp, Mus musculus
  siRNA target sequence for Neu4 (NM_173772.2,1074-1092).
gtgccagaggtcttcttga

SEQ ID NO: 784445 - DNA, 19 bp, Mus musculus
  siRNA target sequence for Neu4 (NM_173772.2,1230-1248).
gccccacatggctactata

SEQ ID NO: 784446 - DNA, 19 bp, Mus musculus
  siRNA target sequence for Neu4 (NM_173772.2,1231-1249).
ccccacatggctactatat

SEQ ID NO: 784447 - DNA, 19 bp, Mus musculus
  siRNA target sequence for Dnb5 (NM_173774.2,904-922).
gtggtcggaggcatccatt

SEQ ID NO: 784448 - DNA, 19 bp, Mus musculus
  siRNA target sequence for Dnb5 (NM_173774.2,1009-1027).
gtgctcaccctgattagca

SEQ ID NO: 784449 - DNA, 19 bp, Mus musculus
  siRNA target sequence for Dnb5 (NM_173774.2,1137-1155).
cgcccttccctctactaca

SEQ ID NO: 784450 - DNA, 19 bp, Mus musculus
  siRNA target sequence for Dnb5 (NM_173774.2,1203-1221).
cccgctcacccccaagtat

SEQ ID NO: 784451 - DNA, 19 bp, Mus musculus
  siRNA target sequence for Dnb5 (NM_173774.2,1278-1296).
ctttggcacctccaacata

SEQ ID NO: 784452 - DNA, 19 bp, Mus musculus
  siRNA target sequence for Dnb5 (NM_173774.2,1301-1319).
gcgtgctcattgactgttt

SEQ ID NO: 784453 - DNA, 19 bp, Mus musculus
  siRNA target sequence for Dnb5 (NM_173774.2,1610-1628).
gccaacaggtcgcaaacat

SEQ ID NO: 784454 - DNA, 19 bp, Mus musculus
  siRNA target sequence for Dnb5 (NM_173774.2,1632-1650).
cctgaacggtgtgaaatat

SEQ ID NO: 784455 - DNA, 19 bp, Mus musculus
  siRNA target sequence for Dnb5 (NM_173774.2,1743-1761).
gcgcaatctctgtgtcaat

SEQ ID NO: 784456 - DNA, 19 bp, Mus musculus
  siRNA target sequence for Dnb5 (NM_173774.2,1853-1871).
cgcacacgtcggaagcata

SEQ ID NO: 784457 - DNA, 19 bp, Mus musculus
  siRNA target sequence for Dnb5 (NM_173774.2,1854-1872).
gcacacgtcggaagcatat

SEQ ID NO: 784458 - DNA, 19 bp, Mus musculus
  siRNA target sequence for Dnb5 (NM_173774.2,1859-1877).
cgtcggaagcatatcagaa

SEQ ID NO: 784459 - DNA, 19 bp, Mus musculus
  siRNA target sequence for Dnb5 (NM_173774.2,1862-1880).
cggaagcatatcagaagta

SEQ ID NO: 784460 - DNA, 19 bp, Mus musculus
  siRNA target sequence for Dnb5 (NM_173774.2,1867-1885).
gcatatcagaagtacaaca

SEQ ID NO: 784461 - DNA, 19 bp, Mus musculus
  siRNA target sequence for Dnb5 (NM_173774.2,1979-1997).
gcgtccgcaccctctactt

SEQ ID NO: 784462 - DNA, 19 bp, Mus musculus
  siRNA target sequence for Dnb5 (NM_173774.2,1981-1999).
gtccgcaccctctacttca

SEQ ID NO: 784463 - DNA, 19 bp, Mus musculus
  siRNA target sequence for Dnb5 (NM_173774.2,2132-2150).
gtgattactaccagagtaa

SEQ ID NO: 784464 - DNA, 19 bp, Mus musculus
  siRNA target sequence for Dnb5 (NM_173774.2,2134-2152).
gattactaccagagtaaga

SEQ ID NO: 784465 - DNA, 19 bp, Mus musculus
  siRNA target sequence for Dnb5 (NM_173774.2,2139-2157).
ctaccagagtaagaagttt

SEQ ID NO: 784466 - DNA, 19 bp, Mus musculus
  siRNA target sequence for Dnb5 (NM_173774.2,2186-2204).
gtggcatgggcgtagacat

SEQ ID NO: 784467 - DNA, 19 bp, Mus musculus
  siRNA target sequence for Dnb5 (NM_173774.2,2285-2303).
gtgccaatggtgtgatgta

SEQ ID NO: 784468 - DNA, 19 bp, Mus musculus
  siRNA target sequence for Dnb5 (NM_173774.2,2288-2306).
ccaatggtgtgatgtactt

SEQ ID NO: 784469 - DNA, 19 bp, Mus musculus
  siRNA target sequence for Dnb5 (NM_173774.2,2347-2365).
ctgtgtgtcacctacgaaa

SEQ ID NO: 784470 - DNA, 19 bp, Mus musculus
  siRNA target sequence for Dnb5 (NM_173774.2,2349-2367).
gtgtgtcacctacgaaatt

SEQ ID NO: 784471 - DNA, 19 bp, Mus musculus
  siRNA target sequence for Dnb5 (NM_173774.2,2353-2371).
gtcacctacgaaattcctt

SEQ ID NO: 784472 - DNA, 19 bp, Mus musculus
  siRNA target sequence for Dnb5 (NM_173774.2,2358-2376).
ctacgaaattccttctgtt

SEQ ID NO: 784473 - DNA, 19 bp, Mus musculus
  siRNA target sequence for Dnb5 (NM_173774.2,2396-2414).
gccagcccctcctgttgaa

SEQ ID NO: 784474 - DNA, 19 bp, Mus musculus
  siRNA target sequence for C230069K22Rik (NM_173775.2,2078-2096).
gcctccatgatgatatcaa

SEQ ID NO: 784475 - DNA, 19 bp, Mus musculus
  siRNA target sequence for C230069K22Rik (NM_173775.2,2215-2233).
ggaagtctaccggaaatgt

SEQ ID NO: 784476 - DNA, 19 bp, Mus musculus
  siRNA target sequence for C230069K22Rik (NM_173775.2,2506-2524).
ccatccaccagtcatcaaa

SEQ ID NO: 784477 - DNA, 19 bp, Mus musculus
  siRNA target sequence for C230069K22Rik (NM_173775.2,2538-2556).
gtgaacagacgctgatcaa

SEQ ID NO: 784478 - DNA, 19 bp, Mus musculus
  siRNA target sequence for C230069K22Rik (NM_173775.2,2540-2558).
gaacagacgctgatcaaca

SEQ ID NO: 784479 - DNA, 19 bp, Mus musculus
  siRNA target sequence for C230069K22Rik (NM_173775.2,2570-2588).
gagatgctcttcttcttca

SEQ ID NO: 784480 - DNA, 19 bp, Mus musculus
  siRNA target sequence for A030009A06 (NM_173777.2,84-102).
gagacagaccggaacaact

SEQ ID NO: 784481 - DNA, 19 bp, Mus musculus
  siRNA target sequence for A030009A06 (NM_173777.2,86-104).
gacagaccggaacaactat

SEQ ID NO: 784482 - DNA, 19 bp, Mus musculus
  siRNA target sequence for A030009A06 (NM_173777.2,90-108).
gaccggaacaactattgct

SEQ ID NO: 784483 - DNA, 19 bp, Mus musculus
  siRNA target sequence for A030009A06 (NM_173777.2,139-157).
gagggctggcagctttata

SEQ ID NO: 784484 - DNA, 19 bp, Mus musculus
  siRNA target sequence for A030009A06 (NM_173777.2,142-160).
ggctggcagctttatacgt

SEQ ID NO: 784485 - DNA, 19 bp, Mus musculus
  siRNA target sequence for A030009A06 (NM_173777.2,652-670).
ggcgtcagtaaccctatta

SEQ ID NO: 784486 - DNA, 19 bp, Mus musculus
  siRNA target sequence for A030009A06 (NM_173777.2,884-902).
ctctcttctacaataagta

SEQ ID NO: 784487 - DNA, 19 bp, Mus musculus
  siRNA target sequence for A030009A06 (NM_173777.2,1218-1236).
cggagccaaggtctacttt

SEQ ID NO: 784488 - DNA, 19 bp, Mus musculus
  siRNA target sequence for A030009A06 (NM_173777.2,1228-1246).
gtctactttgcgtacttca

SEQ ID NO: 784489 - DNA, 19 bp, Mus musculus
  siRNA target sequence for 4933412E14Rik (NM_173778.2,275-293).
caaagccccaggtctcttt

SEQ ID NO: 784490 - DNA, 19 bp, Mus musculus
  siRNA target sequence for 4933412E14Rik (NM_173778.2,326-344).
ggtctgtctcggatgaagt

SEQ ID NO: 784491 - DNA, 19 bp, Mus musculus
  siRNA target sequence for 4933412E14Rik (NM_173778.2,419-437).
gccccagtgacgtcatcta

SEQ ID NO: 784492 - DNA, 19 bp, Mus musculus
  siRNA target sequence for 4933412E14Rik (NM_173778.2,544-562).
gagccctcagggaaactct

SEQ ID NO: 784493 - DNA, 19 bp, Mus musculus
  siRNA target sequence for 4933412E14Rik (NM_173778.2,559-577).
ctctcagatgaagatcaaa

SEQ ID NO: 784494 - DNA, 19 bp, Mus musculus
  siRNA target sequence for 4933412E14Rik (NM_173778.2,687-705).
gggatcccaggctactact

SEQ ID NO: 784495 - DNA, 19 bp, Mus musculus
  siRNA target sequence for 4933412E14Rik (NM_173778.2,688-706).
ggatcccaggctactactt

SEQ ID NO: 784496 - DNA, 19 bp, Mus musculus
  siRNA target sequence for 4933412E14Rik (NM_173778.2,707-725).
ggaggcaggggtttctgaa

SEQ ID NO: 784497 - DNA, 19 bp, Mus musculus
  siRNA target sequence for 4933412E14Rik (NM_173778.2,841-859).
ccttacgagcagattccaa

SEQ ID NO: 784498 - DNA, 19 bp, Mus musculus
  siRNA target sequence for 4933412E14Rik (NM_173778.2,885-903).
ctcataccctggagttagt

SEQ ID NO: 784499 - DNA, 19 bp, Mus musculus
  siRNA target sequence for 4933412E14Rik (NM_173778.2,895-913).
ggagttagtcccacataca

SEQ ID NO: 784500 - DNA, 19 bp, Mus musculus
  siRNA target sequence for 4933412E14Rik (NM_173778.2,936-954).
ctatggctatgagaagatt

SEQ ID NO: 784501 - DNA, 19 bp, Mus musculus
  siRNA target sequence for A630014H24 (NM_173779.2,182-200).
ccttggcaggtacaaagta

SEQ ID NO: 784502 - DNA, 19 bp, Mus musculus
  siRNA target sequence for A630014H24 (NM_173779.2,451-469).
ctgccgagtgccgttttga

SEQ ID NO: 784503 - DNA, 19 bp, Mus musculus
  siRNA target sequence for A630014H24 (NM_173779.2,512-530).
gcgggaggaccctatcaca

SEQ ID NO: 784504 - DNA, 19 bp, Mus musculus
  siRNA target sequence for A630014H24 (NM_173779.2,610-628).
ggggactgccgtttgatgt

SEQ ID NO: 784505 - DNA, 19 bp, Mus musculus
  siRNA target sequence for A630014H24 (NM_173779.2,682-700).
gccatgatatggtcatcaa

SEQ ID NO: 784506 - DNA, 19 bp, Mus musculus
  siRNA target sequence for A630014H24 (NM_173779.2,846-864).
cgcgaaaacgctaacaaca

SEQ ID NO: 784507 - DNA, 19 bp, Mus musculus
  siRNA target sequence for A630014H24 (NM_173779.2,847-865).
gcgaaaacgctaacaacaa

SEQ ID NO: 784508 - DNA, 19 bp, Mus musculus
  siRNA target sequence for A630014H24 (NM_173779.2,943-961).
ccacgggagtacactacaa

SEQ ID NO: 784509 - DNA, 19 bp, Mus musculus
  siRNA target sequence for A630014H24 (NM_173779.2,944-962).
cacgggagtacactacaaa

SEQ ID NO: 784510 - DNA, 19 bp, Mus musculus
  siRNA target sequence for A630014H24 (NM_173779.2,946-964).
cgggagtacactacaaaga

SEQ ID NO: 784511 - DNA, 19 bp, Mus musculus
  siRNA target sequence for A630014H24 (NM_173779.2,970-988).
ctcagcccgtcaaagagaa

SEQ ID NO: 784512 - DNA, 19 bp, Mus musculus
  siRNA target sequence for A830097P10Rik (NM_173780.2,145-163).
catggatgtccgaattaaa

SEQ ID NO: 784513 - DNA, 19 bp, Mus musculus
  siRNA target sequence for A830097P10Rik (NM_173780.2,148-166).
ggatgtccgaattaaatca

SEQ ID NO: 784514 - DNA, 19 bp, Mus musculus
  siRNA target sequence for A830097P10Rik (NM_173780.2,152-170).
gtccgaattaaatcagaaa

SEQ ID NO: 784515 - DNA, 19 bp, Mus musculus
  siRNA target sequence for A830097P10Rik (NM_173780.2,171-189).
gtggttcgatgcaggtatt

SEQ ID NO: 784516 - DNA, 19 bp, Mus musculus
  siRNA target sequence for A830097P10Rik (NM_173780.2,174-192).
gttcgatgcaggtattcaa

SEQ ID NO: 784517 - DNA, 19 bp, Mus musculus
  siRNA target sequence for A830097P10Rik (NM_173780.2,177-195).
cgatgcaggtattcaaaca

SEQ ID NO: 784518 - DNA, 19 bp, Mus musculus
  siRNA target sequence for A830097P10Rik (NM_173780.2,289-307).
gaacccagctctgtttaat

SEQ ID NO: 784519 - DNA, 19 bp, Mus musculus
  siRNA target sequence for A830097P10Rik (NM_173780.2,296-314).
gctctgtttaatgatatca

SEQ ID NO: 784520 - DNA, 19 bp, Mus musculus
  siRNA target sequence for A830097P10Rik (NM_173780.2,472-490).
cattatggtgcctacttca

SEQ ID NO: 784521 - DNA, 19 bp, Mus musculus
  siRNA target sequence for A830097P10Rik (NM_173780.2,564-582).
ccggtggccagccgatttt

SEQ ID NO: 784522 - DNA, 19 bp, Mus musculus
  siRNA target sequence for A830097P10Rik (NM_173780.2,565-583).
cggtggccagccgatttta

SEQ ID NO: 784523 - DNA, 19 bp, Mus musculus
  siRNA target sequence for A830097P10Rik (NM_173780.2,567-585).
gtggccagccgattttaca

SEQ ID NO: 784524 - DNA, 19 bp, Mus musculus
  siRNA target sequence for A830097P10Rik (NM_173780.2,570-588).
gccagccgattttacatgt

SEQ ID NO: 784525 - DNA, 19 bp, Mus musculus
  siRNA target sequence for A830097P10Rik (NM_173780.2,597-615).
ccatcccctcagtcagttt

SEQ ID NO: 784526 - DNA, 19 bp, Mus musculus
  siRNA target sequence for A830097P10Rik (NM_173780.2,606-624).
cagtcagtttgccaaataa

SEQ ID NO: 784527 - DNA, 19 bp, Mus musculus
  siRNA target sequence for A830097P10Rik (NM_173780.2,608-626).
gtcagtttgccaaataaga

SEQ ID NO: 784528 - DNA, 19 bp, Mus musculus
  siRNA target sequence for A830097P10Rik (NM_173780.2,625-643).
gatgagtggactaaagaca

SEQ ID NO: 784529 - DNA, 19 bp, Mus musculus
  siRNA target sequence for A830097P10Rik (NM_173780.2,712-730).
cattactgtcccactcatt

SEQ ID NO: 784530 - DNA, 19 bp, Mus musculus
  siRNA target sequence for A830097P10Rik (NM_173780.2,750-768).
ctggatcggtcaaagttga

SEQ ID NO: 784531 - DNA, 19 bp, Mus musculus
  siRNA target sequence for A830097P10Rik (NM_173780.2,790-808).
ggagtttccaagtgatagt

SEQ ID NO: 784532 - DNA, 19 bp, Mus musculus
  siRNA target sequence for A830097P10Rik (NM_173780.2,847-865).
gagtctccagggatttcat

SEQ ID NO: 784533 - DNA, 19 bp, Mus musculus
  siRNA target sequence for A830097P10Rik (NM_173780.2,849-867).
gtctccagggatttcatca

SEQ ID NO: 784534 - DNA, 19 bp, Mus musculus
  siRNA target sequence for A830097P10Rik (NM_173780.2,899-917).
gaagagtctcttgacttaa

SEQ ID NO: 784535 - DNA, 19 bp, Mus musculus
  siRNA target sequence for A830097P10Rik (NM_173780.2,902-920).
gagtctcttgacttaaaga

SEQ ID NO: 784536 - DNA, 19 bp, Mus musculus
  siRNA target sequence for A830097P10Rik (NM_173780.2,1124-1142).
gactgcaaccgcagttttt

SEQ ID NO: 784537 - DNA, 19 bp, Mus musculus
  siRNA target sequence for A830097P10Rik (NM_173780.2,1126-1144).
ctgcaaccgcagtttttct

SEQ ID NO: 784538 - DNA, 19 bp, Mus musculus
  siRNA target sequence for D9Bwg0185e (NM_173781.3,105-123).
gggaacccgctgcgaaaat

SEQ ID NO: 784539 - DNA, 19 bp, Mus musculus
  siRNA target sequence for D9Bwg0185e (NM_173781.3,111-129).
ccgctgcgaaaattcaagt

SEQ ID NO: 784540 - DNA, 19 bp, Mus musculus
  siRNA target sequence for D9Bwg0185e (NM_173781.3,112-130).
cgctgcgaaaattcaagtt

SEQ ID NO: 784541 - DNA, 19 bp, Mus musculus
  siRNA target sequence for D9Bwg0185e (NM_173781.3,168-186).
ctgatcacgaggttcatgt

SEQ ID NO: 784542 - DNA, 19 bp, Mus musculus
  siRNA target sequence for D9Bwg0185e (NM_173781.3,170-188).
gatcacgaggttcatgtat

SEQ ID NO: 784543 - DNA, 19 bp, Mus musculus
  siRNA target sequence for D9Bwg0185e (NM_173781.3,217-235).
ccatcgggattgacttctt

SEQ ID NO: 784544 - DNA, 19 bp, Mus musculus
  siRNA target sequence for D9Bwg0185e (NM_173781.3,353-371).
ggtggtatatgacattact

SEQ ID NO: 784545 - DNA, 19 bp, Mus musculus
  siRNA target sequence for D9Bwg0185e (NM_173781.3,474-492).
gctgataagaggcagataa

SEQ ID NO: 784546 - DNA, 19 bp, Mus musculus
  siRNA target sequence for D9Bwg0185e (NM_173781.3,477-495).
gataagaggcagataacca

SEQ ID NO: 784547 - DNA, 19 bp, Mus musculus
  siRNA target sequence for D9Bwg0185e (NM_173781.3,522-540).
gaactgagcgtcatgttca

SEQ ID NO: 784548 - DNA, 19 bp, Mus musculus
  siRNA target sequence for 4631402N15Rik (NM_173782.2,1045-1063).
cagcagccacatttatcga

SEQ ID NO: 784549 - DNA, 19 bp, Mus musculus
  siRNA target sequence for 4631402N15Rik (NM_173782.2,1282-1300).
cgggtgggcagttaaaagt

SEQ ID NO: 784550 - DNA, 19 bp, Mus musculus
  siRNA target sequence for B430216B18 (NM_173783.2,452-470).
cgccaggcccgtgctaaaa

SEQ ID NO: 784551 - DNA, 19 bp, Mus musculus
  siRNA target sequence for B430216B18 (NM_173783.2,453-471).
gccaggcccgtgctaaaaa

SEQ ID NO: 784552 - DNA, 19 bp, Mus musculus
  siRNA target sequence for B430216B18 (NM_173783.2,568-586).
gggagagcagtctaccttt

SEQ ID NO: 784553 - DNA, 19 bp, Mus musculus
  siRNA target sequence for B430216B18 (NM_173783.2,569-587).
ggagagcagtctacctttt

SEQ ID NO: 784554 - DNA, 19 bp, Mus musculus
  siRNA target sequence for B430216B18 (NM_173783.2,583-601).
cttttcacactcatataca

SEQ ID NO: 784555 - DNA, 19 bp, Mus musculus
  siRNA target sequence for B430216B18 (NM_173783.2,590-608).
cactcatatacaagtacaa

SEQ ID NO: 784556 - DNA, 19 bp, Mus musculus
  siRNA target sequence for B430216B18 (NM_173783.2,592-610).
ctcatatacaagtacaagt

SEQ ID NO: 784557 - DNA, 19 bp, Mus musculus
  siRNA target sequence for B430216B18 (NM_173783.2,600-618).
caagtacaagtgaccaaaa

SEQ ID NO: 784558 - DNA, 19 bp, Mus musculus
  siRNA target sequence for B430216B18 (NM_173783.2,603-621).
gtacaagtgaccaaaacct

SEQ ID NO: 784559 - DNA, 19 bp, Mus musculus
  siRNA target sequence for B430216B18 (NM_173783.2,609-627).
gtgaccaaaacctagatga

SEQ ID NO: 784560 - DNA, 19 bp, Mus musculus
  siRNA target sequence for B430216B18 (NM_173783.2,613-631).
ccaaaacctagatgagaaa

SEQ ID NO: 784561 - DNA, 19 bp, Mus musculus
  siRNA target sequence for B430216B18 (NM_173783.2,654-672).
ctgaggactggtgtaaaga

SEQ ID NO: 784562 - DNA, 19 bp, Mus musculus
  siRNA target sequence for B430216B18 (NM_173783.2,666-684).
gtaaagatcctattaacca

SEQ ID NO: 784563 - DNA, 19 bp, Mus musculus
  siRNA target sequence for B430216B18 (NM_173783.2,752-770).
gatatgctgaagtatgtta

SEQ ID NO: 784564 - DNA, 19 bp, Mus musculus
  siRNA target sequence for B430216B18 (NM_173783.2,763-781).
gtatgttatcaaaacatct

SEQ ID NO: 784565 - DNA, 19 bp, Mus musculus
  siRNA target sequence for B430216B18 (NM_173783.2,823-841).
catggaactggcatttggt

SEQ ID NO: 784566 - DNA, 19 bp, Mus musculus
  siRNA target sequence for B430216B18 (NM_173783.2,834-852).
catttggtattgatctgaa

SEQ ID NO: 784567 - DNA, 19 bp, Mus musculus
  siRNA target sequence for B430216B18 (NM_173783.2,874-892).
ctgctatgccctttttaat

SEQ ID NO: 784568 - DNA, 19 bp, Mus musculus
  siRNA target sequence for B430216B18 (NM_173783.2,967-985).
gggtgtgatattcatgaat

SEQ ID NO: 784569 - DNA, 19 bp, Mus musculus
  siRNA target sequence for B430216B18 (NM_173783.2,969-987).
gtgtgatattcatgaatga

SEQ ID NO: 784570 - DNA, 19 bp, Mus musculus
  siRNA target sequence for B430216B18 (NM_173783.2,971-989).
gtgatattcatgaatgata

SEQ ID NO: 784571 - DNA, 19 bp, Mus musculus
  siRNA target sequence for B430216B18 (NM_173783.2,986-1004).
gataactgtgtctctgaaa

SEQ ID NO: 784572 - DNA, 19 bp, Mus musculus
  siRNA target sequence for B430216B18 (NM_173783.2,1033-1051).
gggtgtatatgctaataga

SEQ ID NO: 784573 - DNA, 19 bp, Mus musculus
  siRNA target sequence for B430216B18 (NM_173783.2,1141-1159).
caatcctccatcctttgaa

SEQ ID NO: 784574 - DNA, 19 bp, Mus musculus
  siRNA target sequence for B430216B18 (NM_173783.2,1220-1238).
gccaagatccatgatacta

SEQ ID NO: 784575 - DNA, 19 bp, Mus musculus
  siRNA target sequence for B430216B18 (NM_173783.2,1222-1240).
caagatccatgatactaca

SEQ ID NO: 784576 - DNA, 19 bp, Mus musculus
  siRNA target sequence for B430216B18 (NM_173783.2,1336-1354).
ggccagtccatattcaaga

SEQ ID NO: 784577 - DNA, 19 bp, Mus musculus
  siRNA target sequence for B430216B18 (NM_173783.2,1368-1386).
gctcctcccatactaatat

SEQ ID NO: 784578 - DNA, 19 bp, Mus musculus
  siRNA target sequence for AI645720 (NM_173784.3,185-203).
gtcgtaaccagcctttgaa

SEQ ID NO: 784579 - DNA, 19 bp, Mus musculus
  siRNA target sequence for AI645720 (NM_173784.3,187-205).
cgtaaccagcctttgaaaa

SEQ ID NO: 784580 - DNA, 19 bp, Mus musculus
  siRNA target sequence for AI645720 (NM_173784.3,256-274).
cgcagcaagagggatgaat

SEQ ID NO: 784581 - DNA, 19 bp, Mus musculus
  siRNA target sequence for AI645720 (NM_173784.3,257-275).
gcagcaagagggatgaatt

SEQ ID NO: 784582 - DNA, 19 bp, Mus musculus
  siRNA target sequence for AI645720 (NM_173784.3,330-348).
ggccgctgcacatgctttt

SEQ ID NO: 784583 - DNA, 19 bp, Mus musculus
  siRNA target sequence for AI645720 (NM_173784.3,332-350).
ccgctgcacatgcttttga

SEQ ID NO: 784584 - DNA, 19 bp, Mus musculus
  siRNA target sequence for AI645720 (NM_173784.3,333-351).
cgctgcacatgcttttgaa

SEQ ID NO: 784585 - DNA, 19 bp, Mus musculus
  siRNA target sequence for AI645720 (NM_173784.3,387-405).
cggtgcaaacataacacta

SEQ ID NO: 784586 - DNA, 19 bp, Mus musculus
  siRNA target sequence for AI645720 (NM_173784.3,472-490).
ctggcaccaccaatcaaca

SEQ ID NO: 784587 - DNA, 19 bp, Mus musculus
  siRNA target sequence for AI645720 (NM_173784.3,475-493).
gcaccaccaatcaacatga

SEQ ID NO: 784588 - DNA, 19 bp, Mus musculus
  siRNA target sequence for AI645720 (NM_173784.3,479-497).
caccaatcaacatgataga

SEQ ID NO: 784589 - DNA, 19 bp, Mus musculus
  siRNA target sequence for AI645720 (NM_173784.3,703-721).
cctctcacggataagatga

SEQ ID NO: 784590 - DNA, 19 bp, Mus musculus
  siRNA target sequence for AI645720 (NM_173784.3,750-768).
ctatgtggtgcaggttata

SEQ ID NO: 784591 - DNA, 19 bp, Mus musculus
  siRNA target sequence for AI504432 (NM_173787.2,72-90).
ccttaagagccccacataa

SEQ ID NO: 784592 - DNA, 19 bp, Mus musculus
  siRNA target sequence for AI504432 (NM_173787.2,149-167).
gtgcagtggcagttacata

SEQ ID NO: 784593 - DNA, 19 bp, Mus musculus
  siRNA target sequence for AI504432 (NM_173787.2,182-200).
catattcggggatacatct

SEQ ID NO: 784594 - DNA, 19 bp, Mus musculus
  siRNA target sequence for AI504432 (NM_173787.2,199-217).
ctcaaccgatgcttcatat

SEQ ID NO: 784595 - DNA, 19 bp, Mus musculus
  siRNA target sequence for AI504432 (NM_173787.2,235-253).
gctggagggtactcttcat

SEQ ID NO: 784596 - DNA, 19 bp, Mus musculus
  siRNA target sequence for AI504432 (NM_173787.2,236-254).
ctggagggtactcttcata

SEQ ID NO: 784597 - DNA, 19 bp, Mus musculus
  siRNA target sequence for AI504432 (NM_173787.2,238-256).
ggagggtactcttcatatt

SEQ ID NO: 784598 - DNA, 19 bp, Mus musculus
  siRNA target sequence for AI504432 (NM_173787.2,242-260).
ggtactcttcatattacga

SEQ ID NO: 784599 - DNA, 19 bp, Mus musculus
  siRNA target sequence for AI504432 (NM_173787.2,258-276).
cgagtggtacaaatgaaat

SEQ ID NO: 784600 - DNA, 19 bp, Mus musculus
  siRNA target sequence for AI504432 (NM_173787.2,284-302).
gagataaagaggaacatta

SEQ ID NO: 784601 - DNA, 19 bp, Mus musculus
  siRNA target sequence for AI504432 (NM_173787.2,336-354).
gtcaacctatcgacattct

SEQ ID NO: 784602 - DNA, 19 bp, Mus musculus
  siRNA target sequence for AI504432 (NM_173787.2,349-367).
cattctggtagagtcaaat

SEQ ID NO: 784603 - DNA, 19 bp, Mus musculus
  siRNA target sequence for AI504432 (NM_173787.2,363-381).
caaattgtccaaaagcaat

SEQ ID NO: 784604 - DNA, 19 bp, Mus musculus
  siRNA target sequence for AI504432 (NM_173787.2,427-445).
gccaactactgttgtagta

SEQ ID NO: 784605 - DNA, 19 bp, Mus musculus
  siRNA target sequence for AI504432 (NM_173787.2,428-446).
ccaactactgttgtagtat

SEQ ID NO: 784606 - DNA, 19 bp, Mus musculus
  siRNA target sequence for AI504432 (NM_173787.2,429-447).
caactactgttgtagtatt

SEQ ID NO: 784607 - DNA, 19 bp, Mus musculus
  siRNA target sequence for AI504432 (NM_173787.2,437-455).
gttgtagtattttttcact

SEQ ID NO: 784608 - DNA, 19 bp, Mus musculus
  siRNA target sequence for A830086M02 (NM_173789.3,101-119).
gaaccccggtttctcataa

SEQ ID NO: 784609 - DNA, 19 bp, Mus musculus
  siRNA target sequence for A830086M02 (NM_173789.3,104-122).
ccccggtttctcataaagt

SEQ ID NO: 784610 - DNA, 19 bp, Mus musculus
  siRNA target sequence for A830086M02 (NM_173789.3,106-124).
ccggtttctcataaagtga

SEQ ID NO: 784611 - DNA, 19 bp, Mus musculus
  siRNA target sequence for A830086M02 (NM_173789.3,113-131).
ctcataaagtgatagaaaa

SEQ ID NO: 784612 - DNA, 19 bp, Mus musculus
  siRNA target sequence for A830086M02 (NM_173789.3,134-152).
gaaggagggaccgaattaa

SEQ ID NO: 784613 - DNA, 19 bp, Mus musculus
  siRNA target sequence for A830086M02 (NM_173789.3,388-406).
cggatggagaccaaagaca

SEQ ID NO: 784614 - DNA, 19 bp, Mus musculus
  siRNA target sequence for A830086M02 (NM_173789.3,482-500).
cgcttccggagccagattt

SEQ ID NO: 784615 - DNA, 19 bp, Mus musculus
  siRNA target sequence for A830086M02 (NM_173789.3,484-502).
cttccggagccagatttct

SEQ ID NO: 784616 - DNA, 19 bp, Mus musculus
  siRNA target sequence for A830086M02 (NM_173789.3,705-723).
gggcctggaccggcattat

SEQ ID NO: 784617 - DNA, 19 bp, Mus musculus
  siRNA target sequence for A830086M02 (NM_173789.3,709-727).
ctggaccggcattatctca

SEQ ID NO: 784618 - DNA, 19 bp, Mus musculus
  siRNA target sequence for A830086M02 (NM_173789.3,711-729).
ggaccggcattatctcaat

SEQ ID NO: 784619 - DNA, 19 bp, Mus musculus
  siRNA target sequence for A830086M02 (NM_173789.3,715-733).
cggcattatctcaatctga

SEQ ID NO: 784620 - DNA, 19 bp, Mus musculus
  siRNA target sequence for A830086M02 (NM_173789.3,716-734).
ggcattatctcaatctgat

SEQ ID NO: 784621 - DNA, 19 bp, Mus musculus
  siRNA target sequence for BC028450 (NM_173790.3,22-40).
cccaagctccggattaaaa

SEQ ID NO: 784622 - DNA, 19 bp, Mus musculus
  siRNA target sequence for BC028450 (NM_173790.3,23-41).
ccaagctccggattaaaaa

SEQ ID NO: 784623 - DNA, 19 bp, Mus musculus
  siRNA target sequence for BC028450 (NM_173790.3,27-45).
gctccggattaaaaaaata

SEQ ID NO: 784624 - DNA, 19 bp, Mus musculus
  siRNA target sequence for BC028450 (NM_173790.3,234-252).
catctgccaatcttgtact

SEQ ID NO: 784625 - DNA, 19 bp, Mus musculus
  siRNA target sequence for BC028450 (NM_173790.3,270-288).
cagtaccccctctccattt

SEQ ID NO: 784626 - DNA, 19 bp, Mus musculus
  siRNA target sequence for BC028450 (NM_173790.3,341-359).
ccactcctgaaattatcaa

SEQ ID NO: 784627 - DNA, 19 bp, Mus musculus
  siRNA target sequence for BC028450 (NM_173790.3,480-498).
ggagcgaagccttgaacaa

SEQ ID NO: 784628 - DNA, 19 bp, Mus musculus
  siRNA target sequence for BC028450 (NM_173790.3,640-658).
ctgtccgccaaggaagaat

SEQ ID NO: 784629 - DNA, 19 bp, Mus musculus
  siRNA target sequence for BC028450 (NM_173790.3,642-660).
gtccgccaaggaagaatct

SEQ ID NO: 784630 - DNA, 19 bp, Mus musculus
  siRNA target sequence for BC028450 (NM_173790.3,655-673).
gaatctgaatacaaagtca

SEQ ID NO: 784631 - DNA, 19 bp, Mus musculus
  siRNA target sequence for BC028450 (NM_173790.3,709-727).
gctagcaagcagaaagagt

SEQ ID NO: 784632 - DNA, 19 bp, Mus musculus
  siRNA target sequence for BC028450 (NM_173790.3,771-789).
cgacgaggtgtttgtttct

SEQ ID NO: 784633 - DNA, 19 bp, Mus musculus
  siRNA target sequence for BC028450 (NM_173790.3,995-1013).
gaacctacacgagaaagaa

SEQ ID NO: 784634 - DNA, 19 bp, Mus musculus
  siRNA target sequence for Ckt2 (NM_173861.1,576-594).
gtgtgcttccgccataaaa

SEQ ID NO: 784635 - DNA, 19 bp, Mus musculus
  siRNA target sequence for Ckt2 (NM_173861.1,587-605).
ccataaaatcccagtgtaa

SEQ ID NO: 784636 - DNA, 19 bp, Mus musculus
  siRNA target sequence for Ckt2 (NM_173861.1,632-650).
gatgcgcaaccctctttgt

SEQ ID NO: 784637 - DNA, 19 bp, Mus musculus
  siRNA target sequence for Ckt2 (NM_173861.1,635-653).
gcgcaaccctctttgtcat

SEQ ID NO: 784638 - DNA, 19 bp, Mus musculus
  siRNA target sequence for Ckt2 (NM_173861.1,636-654).
cgcaaccctctttgtcata

SEQ ID NO: 784639 - DNA, 19 bp, Mus musculus
  siRNA target sequence for Ckt2 (NM_173861.1,669-687).
cagcaccgatgggaaagta

SEQ ID NO: 784640 - DNA, 19 bp, Mus musculus
  siRNA target sequence for Ckt2 (NM_173861.1,674-692).
ccgatgggaaagtagatgt

SEQ ID NO: 784641 - DNA, 19 bp, Mus musculus
  siRNA target sequence for Ckt2 (NM_173861.1,693-711).
gaaaataatccttatcctt

SEQ ID NO: 784642 - DNA, 19 bp, Mus musculus
  siRNA target sequence for Ckt2 (NM_173861.1,807-825).
cgtattagagaagattaca

SEQ ID NO: 784643 - DNA, 19 bp, Mus musculus
  siRNA target sequence for Ckt2 (NM_173861.1,835-853).
cctgcatccgaatctgatt

SEQ ID NO: 784644 - DNA, 19 bp, Mus musculus
  siRNA target sequence for Ckt2 (NM_173861.1,838-856).
gcatccgaatctgatttta

SEQ ID NO: 784645 - DNA, 19 bp, Mus musculus
  siRNA target sequence for Ckt2 (NM_173861.1,839-857).
catccgaatctgattttat

SEQ ID NO: 784646 - DNA, 19 bp, Mus musculus
  siRNA target sequence for Ckt2 (NM_173861.1,896-914).
cctccgagagcaaagattt

SEQ ID NO: 784647 - DNA, 19 bp, Mus musculus
  siRNA target sequence for Ckt2 (NM_173861.1,897-915).
ctccgagagcaaagattta

SEQ ID NO: 784648 - DNA, 19 bp, Mus musculus
  siRNA target sequence for Ckt2 (NM_173861.1,917-935).
gccaagagccccagtctat

SEQ ID NO: 784649 - DNA, 19 bp, Mus musculus
  siRNA target sequence for Ckt2 (NM_173861.1,918-936).
ccaagagccccagtctatt

SEQ ID NO: 784650 - DNA, 19 bp, Mus musculus
  siRNA target sequence for Ckt2 (NM_173861.1,937-955).
gactggctgctgtatgtta

SEQ ID NO: 784651 - DNA, 19 bp, Mus musculus
  siRNA target sequence for Ckt2 (NM_173861.1,1101-1119).
ggttccggtttcaggatat

SEQ ID NO: 784652 - DNA, 19 bp, Mus musculus
  siRNA target sequence for Ckt2 (NM_173861.1,1106-1124).
cggtttcaggatatgttct

SEQ ID NO: 784653 - DNA, 19 bp, Mus musculus
  siRNA target sequence for Ckt2 (NM_173861.1,1193-1211).
gttctgacaccatcaaact

SEQ ID NO: 784654 - DNA, 19 bp, Mus musculus
  siRNA target sequence for Ckt2 (NM_173861.1,1200-1218).
caccatcaaactaagacaa

SEQ ID NO: 784655 - DNA, 19 bp, Mus musculus
  siRNA target sequence for Ckt2 (NM_173861.1,1250-1268).
ctcacaactcgaaatgctt

SEQ ID NO: 784656 - DNA, 19 bp, Mus musculus
  siRNA target sequence for Ckt2 (NM_173861.1,1289-1307).
ccagtgcgctgctcagata

SEQ ID NO: 784657 - DNA, 19 bp, Mus musculus
  siRNA target sequence for Ckt2 (NM_173861.1,1295-1313).
cgctgctcagatatttcca

SEQ ID NO: 784658 - DNA, 19 bp, Mus musculus
  siRNA target sequence for Ckt2 (NM_173861.1,1300-1318).
ctcagatatttccaaacaa

SEQ ID NO: 784659 - DNA, 19 bp, Mus musculus
  siRNA target sequence for BC030396 (NM_173862.1,239-257).
gagctgacttcagtgataa

SEQ ID NO: 784660 - DNA, 19 bp, Mus musculus
  siRNA target sequence for BC030396 (NM_173862.1,242-260).
ctgacttcagtgataatga

SEQ ID NO: 784661 - DNA, 19 bp, Mus musculus
  siRNA target sequence for BC030396 (NM_173862.1,592-610).
cacaacaacatcagagatt

SEQ ID NO: 784662 - DNA, 19 bp, Mus musculus
  siRNA target sequence for BC030396 (NM_173862.1,681-699).
gatcctttgtgacattcta

SEQ ID NO: 784663 - DNA, 19 bp, Mus musculus
  siRNA target sequence for BC030396 (NM_173862.1,786-804).
ccagatctctgatattcat

SEQ ID NO: 784664 - DNA, 19 bp, Mus musculus
  siRNA target sequence for BC030396 (NM_173862.1,794-812).
ctgatattcatctcaagaa

SEQ ID NO: 784665 - DNA, 19 bp, Mus musculus
  siRNA target sequence for BC030396 (NM_173862.1,796-814).
gatattcatctcaagaaca

SEQ ID NO: 784666 - DNA, 19 bp, Mus musculus
  siRNA target sequence for BC030396 (NM_173862.1,850-868).
gccaagtcaggcaggaaat

SEQ ID NO: 784667 - DNA, 19 bp, Mus musculus
  siRNA target sequence for BC030396 (NM_173862.1,851-869).
ccaagtcaggcaggaaatt

SEQ ID NO: 784668 - DNA, 19 bp, Mus musculus
  siRNA target sequence for BC030396 (NM_173862.1,875-893).
gccaaatccaagagaagtt

SEQ ID NO: 784669 - DNA, 19 bp, Mus musculus
  siRNA target sequence for BC030396 (NM_173862.1,877-895).
caaatccaagagaagttca

SEQ ID NO: 784670 - DNA, 19 bp, Mus musculus
  siRNA target sequence for BC030396 (NM_173862.1,902-920).
cagactggaggtttgtctt

SEQ ID NO: 784671 - DNA, 19 bp, Mus musculus
  siRNA target sequence for BC030396 (NM_173862.1,916-934).
gtcttatccggatcataca

SEQ ID NO: 784672 - DNA, 19 bp, Mus musculus
  siRNA target sequence for BC011210 (NM_173863.1,1083-1101).
cttagcaacccgtctcttt

SEQ ID NO: 784673 - DNA, 19 bp, Mus musculus
  siRNA target sequence for BC011210 (NM_173863.1,1552-1570).
gagaaccacaggactcatt

SEQ ID NO: 784674 - DNA, 19 bp, Mus musculus
  siRNA target sequence for BC011210 (NM_173863.1,1750-1768).
gcctcgatggactcaacat

SEQ ID NO: 784675 - DNA, 19 bp, Mus musculus
  siRNA target sequence for BC011210 (NM_173863.1,1755-1773).
gatggactcaacatgctaa

SEQ ID NO: 784676 - DNA, 19 bp, Mus musculus
  siRNA target sequence for BC011210 (NM_173863.1,1759-1777).
gactcaacatgctaagtga

SEQ ID NO: 784677 - DNA, 19 bp, Mus musculus
  siRNA target sequence for 2610510H01Rik (NM_173867.1,385-403).
cgaaggagcgcgtcaaact

SEQ ID NO: 784678 - DNA, 19 bp, Mus musculus
  siRNA target sequence for 2610510H01Rik (NM_173867.1,386-404).
gaaggagcgcgtcaaactt

SEQ ID NO: 784679 - DNA, 19 bp, Mus musculus
  siRNA target sequence for 2610510H01Rik (NM_173867.1,469-487).
ggaaggaagtgcctaaaca

SEQ ID NO: 784680 - DNA, 19 bp, Mus musculus
  siRNA target sequence for 2610510H01Rik (NM_173867.1,500-518).
ccgcaaccttggtcagaat

SEQ ID NO: 784681 - DNA, 19 bp, Mus musculus
  siRNA target sequence for 2610510H01Rik (NM_173867.1,501-519).
cgcaaccttggtcagaatt

SEQ ID NO: 784682 - DNA, 19 bp, Mus musculus
  siRNA target sequence for 2610510H01Rik (NM_173867.1,502-520).
gcaaccttggtcagaattt

SEQ ID NO: 784683 - DNA, 19 bp, Mus musculus
  siRNA target sequence for 2610510H01Rik (NM_173867.1,782-800).
gtttgccttcggagagaat

SEQ ID NO: 784684 - DNA, 19 bp, Mus musculus
  siRNA target sequence for 2610510H01Rik (NM_173867.1,843-861).
ccaagtcctgctcagataa

SEQ ID NO: 784685 - DNA, 19 bp, Mus musculus
  siRNA target sequence for 2610510H01Rik (NM_173867.1,844-862).
caagtcctgctcagataat

SEQ ID NO: 784686 - DNA, 19 bp, Mus musculus
  siRNA target sequence for 2610510H01Rik (NM_173867.1,847-865).
gtcctgctcagataatgta

SEQ ID NO: 784687 - DNA, 19 bp, Mus musculus
  siRNA target sequence for 2610510H01Rik (NM_173867.1,849-867).
cctgctcagataatgtaca

SEQ ID NO: 784688 - DNA, 19 bp, Mus musculus
  siRNA target sequence for 2610510H01Rik (NM_173867.1,850-868).
ctgctcagataatgtacaa

SEQ ID NO: 784689 - DNA, 19 bp, Mus musculus
  siRNA target sequence for 2610510H01Rik (NM_173867.1,910-928).
gcatgctgatggactgtaa

SEQ ID NO: 784690 - DNA, 19 bp, Mus musculus
  siRNA target sequence for 2610510H01Rik (NM_173867.1,911-929).
catgctgatggactgtaaa

SEQ ID NO: 784691 - DNA, 19 bp, Mus musculus
  siRNA target sequence for 2610510H01Rik (NM_173867.1,914-932).
gctgatggactgtaaagga

SEQ ID NO: 784692 - DNA, 19 bp, Mus musculus
  siRNA target sequence for 2610510H01Rik (NM_173867.1,944-962).
ctttgggtgccctgagtat

SEQ ID NO: 784693 - DNA, 19 bp, Mus musculus
  siRNA target sequence for 2610510H01Rik (NM_173867.1,1008-1026).
cagaggatagaatatgatt

SEQ ID NO: 784694 - DNA, 19 bp, Mus musculus
  siRNA target sequence for 2610510H01Rik (NM_173867.1,1010-1028).
gaggatagaatatgattgt

SEQ ID NO: 784695 - DNA, 19 bp, Mus musculus
  siRNA target sequence for 2610510H01Rik (NM_173867.1,1012-1030).
ggatagaatatgattgtga

SEQ ID NO: 784696 - DNA, 19 bp, Mus musculus
  siRNA target sequence for 2610510H01Rik (NM_173867.1,1041-1059).
cgcagagtggccatcttca

SEQ ID NO: 784697 - DNA, 19 bp, Mus musculus
  siRNA target sequence for 2610510H01Rik (NM_173867.1,1042-1060).
gcagagtggccatcttcat

SEQ ID NO: 784698 - DNA, 19 bp, Mus musculus
  siRNA target sequence for 2610510H01Rik (NM_173867.1,1100-1118).
cgtggtggttcgagatgta

SEQ ID NO: 784699 - DNA, 19 bp, Mus musculus
  siRNA target sequence for 2610510H01Rik (NM_173867.1,1264-1282).
gtggtgcaacccagatcta

SEQ ID NO: 784700 - DNA, 19 bp, Mus musculus
  siRNA target sequence for 2610510H01Rik (NM_173867.1,1314-1332).
gaagtgggtggcctgtttt

SEQ ID NO: 784701 - DNA, 19 bp, Mus musculus
  siRNA target sequence for 2610510H01Rik (NM_173867.1,1446-1464).
gctgcggacgagagtacta

SEQ ID NO: 784702 - DNA, 19 bp, Mus musculus
  siRNA target sequence for 2610510H01Rik (NM_173867.1,1447-1465).
ctgcggacgagagtactat

SEQ ID NO: 784703 - DNA, 19 bp, Mus musculus
  siRNA target sequence for 2610510H01Rik (NM_173867.1,1449-1467).
gcggacgagagtactatca

SEQ ID NO: 784704 - DNA, 19 bp, Mus musculus
  siRNA target sequence for 2610510H01Rik (NM_173867.1,1451-1469).
ggacgagagtactatcagt

SEQ ID NO: 784705 - DNA, 19 bp, Mus musculus
  siRNA target sequence for 2610510H01Rik (NM_173867.1,1452-1470).
gacgagagtactatcagtt

SEQ ID NO: 784706 - DNA, 19 bp, Mus musculus
  siRNA target sequence for 2610510H01Rik (NM_173867.1,1509-1527).
gaccacaagcccaagtctt

SEQ ID NO: 784707 - DNA, 19 bp, Mus musculus
  siRNA target sequence for 2610510H01Rik (NM_173867.1,1514-1532).
caagcccaagtcttctact

SEQ ID NO: 784708 - DNA, 19 bp, Mus musculus
  siRNA target sequence for 6230410P16Rik (NM_174846.3,346-364).
gcacggcagctgtttgata

SEQ ID NO: 784709 - DNA, 19 bp, Mus musculus
  siRNA target sequence for 6230410P16Rik (NM_174846.3,579-597).
gatccgagccgctatggaa

SEQ ID NO: 784710 - DNA, 19 bp, Mus musculus
  siRNA target sequence for 6230410P16Rik (NM_174846.3,971-989).
gggaccctttggaagtgat

SEQ ID NO: 784711 - DNA, 19 bp, Mus musculus
  siRNA target sequence for 6230410P16Rik (NM_174846.3,1136-1154).
gtggccacgtcctcaatgt

SEQ ID NO: 784712 - DNA, 19 bp, Mus musculus
  siRNA target sequence for 6230410P16Rik (NM_174846.3,1138-1156).
ggccacgtcctcaatgtga

SEQ ID NO: 784713 - DNA, 19 bp, Mus musculus
  siRNA target sequence for 6230410P16Rik (NM_174846.3,1139-1157).
gccacgtcctcaatgtgat

SEQ ID NO: 784714 - DNA, 19 bp, Mus musculus
  siRNA target sequence for 6230410P16Rik (NM_174846.3,1153-1171).
gtgatcatcggctctaact

SEQ ID NO: 784715 - DNA, 19 bp, Mus musculus
  siRNA target sequence for 6230410P16Rik (NM_174846.3,1493-1511).
gcggtcggaaccaagaact

SEQ ID NO: 784716 - DNA, 19 bp, Mus musculus
  siRNA target sequence for 6230410P16Rik (NM_174846.3,1542-1560).
gcagccactgggacctatt

SEQ ID NO: 784717 - DNA, 19 bp, Mus musculus
  siRNA target sequence for 6230410P16Rik (NM_174846.3,1592-1610).
ggcaggatgggcctacaaa

SEQ ID NO: 784718 - DNA, 19 bp, Mus musculus
  siRNA target sequence for 6230410P16Rik (NM_174846.3,1625-1643).
gggtcatgtctgatctcat

SEQ ID NO: 784719 - DNA, 19 bp, Mus musculus
  siRNA target sequence for 6230410P16Rik (NM_174846.3,1695-1713).
cgactcatacactttcttt

SEQ ID NO: 784720 - DNA, 19 bp, Mus musculus
  siRNA target sequence for 6230410P16Rik (NM_174846.3,1719-1737).
cttccggggaggaacacat

SEQ ID NO: 784721 - DNA, 19 bp, Mus musculus
  siRNA target sequence for 6230410P16Rik (NM_174846.3,1724-1742).
ggggaggaacacatttgct

SEQ ID NO: 784722 - DNA, 19 bp, Mus musculus
  siRNA target sequence for 6230410P16Rik (NM_174846.3,1752-1770).
gttgacagggaccaatgtt

SEQ ID NO: 784723 - DNA, 19 bp, Mus musculus
  siRNA target sequence for 6230410P16Rik (NM_174846.3,1757-1775).
cagggaccaatgttatgga

SEQ ID NO: 784724 - DNA, 19 bp, Mus musculus
  siRNA target sequence for 5830404H04Rik (NM_174847.1,503-521).
gggtgaccgccctgaacta

SEQ ID NO: 784725 - DNA, 19 bp, Mus musculus
  siRNA target sequence for 5830404H04Rik (NM_174847.1,519-537).
ctatgaggccgaaaagaga

SEQ ID NO: 784726 - DNA, 19 bp, Mus musculus
  siRNA target sequence for 5830404H04Rik (NM_174847.1,542-560).
gtccactgcgtctctcttt

SEQ ID NO: 784727 - DNA, 19 bp, Mus musculus
  siRNA target sequence for 5830404H04Rik (NM_174847.1,662-680).
gtgagacccttcagttctt

SEQ ID NO: 784728 - DNA, 19 bp, Mus musculus
  siRNA target sequence for 5830404H04Rik (NM_174847.1,713-731).
cggagtgccagctgtatga

SEQ ID NO: 784729 - DNA, 19 bp, Mus musculus
  siRNA target sequence for 5830404H04Rik (NM_174847.1,724-742).
ctgtatgatgtccatcttt

SEQ ID NO: 784730 - DNA, 19 bp, Mus musculus
  siRNA target sequence for 5830404H04Rik (NM_174847.1,743-761).
ccccatttcatttaaaggt

SEQ ID NO: 784731 - DNA, 19 bp, Mus musculus
  siRNA target sequence for 5830404H04Rik (NM_174847.1,796-814).
caaatcaggtggtctttca

SEQ ID NO: 784732 - DNA, 19 bp, Mus musculus
  siRNA target sequence for 5830404H04Rik (NM_174847.1,874-892).
ctcggggtaaacatgcttt

SEQ ID NO: 784733 - DNA, 19 bp, Mus musculus
  siRNA target sequence for 5830404H04Rik (NM_174847.1,898-916).
gcccttgaggatcttttca

SEQ ID NO: 784734 - DNA, 19 bp, Mus musculus
  siRNA target sequence for 5830404H04Rik (NM_174847.1,915-933).
caagcacctagttaatgct

SEQ ID NO: 784735 - DNA, 19 bp, Mus musculus
  siRNA target sequence for 5830404H04Rik (NM_174847.1,1046-1064).
ctcatgaactaaaattgca

SEQ ID NO: 784736 - DNA, 19 bp, Mus musculus
  siRNA target sequence for 5830404H04Rik (NM_174847.1,1147-1165).
cctgaacagagattcatca

SEQ ID NO: 784737 - DNA, 19 bp, Mus musculus
  siRNA target sequence for 5830404H04Rik (NM_174847.1,1167-1185).
caccctagtgagaaacact

SEQ ID NO: 784738 - DNA, 19 bp, Mus musculus
  siRNA target sequence for 5830404H04Rik (NM_174847.1,1219-1237).
gaactgaacgccaaatcca

SEQ ID NO: 784739 - DNA, 19 bp, Mus musculus
  siRNA target sequence for 5830404H04Rik (NM_174847.1,1282-1300).
ggtctgttggggatagcaa

SEQ ID NO: 784740 - DNA, 19 bp, Mus musculus
  siRNA target sequence for 5830404H04Rik (NM_174847.1,1301-1319).
ccattcacctggacctatt

SEQ ID NO: 784741 - DNA, 19 bp, Mus musculus
  siRNA target sequence for 5830404H04Rik (NM_174847.1,1302-1320).
cattcacctggacctattt

SEQ ID NO: 784742 - DNA, 19 bp, Mus musculus
  siRNA target sequence for 5830404H04Rik (NM_174847.1,1306-1324).
cacctggacctatttagga

SEQ ID NO: 784743 - DNA, 19 bp, Mus musculus
  siRNA target sequence for 5830404H04Rik (NM_174847.1,1420-1438).
gaacctggggagctgaaat

SEQ ID NO: 784744 - DNA, 19 bp, Mus musculus
  siRNA target sequence for 5830404H04Rik (NM_174847.1,1463-1481).
ctgctgcaaagatagaaaa

SEQ ID NO: 784745 - DNA, 19 bp, Mus musculus
  siRNA target sequence for 5830404H04Rik (NM_174847.1,1632-1650).
ctctgtccaggccatttct

SEQ ID NO: 784746 - DNA, 19 bp, Mus musculus
  siRNA target sequence for 5830404H04Rik (NM_174847.1,1663-1681).
cccgtcagcaagacattct

SEQ ID NO: 784747 - DNA, 19 bp, Mus musculus
  siRNA target sequence for 5830404H04Rik (NM_174847.1,1791-1809).
gaaaagcaccatcataatt

SEQ ID NO: 784748 - DNA, 19 bp, Mus musculus
  siRNA target sequence for 5830404H04Rik (NM_174847.1,2080-2098).
cctgacggtgatgaactat

SEQ ID NO: 784749 - DNA, 19 bp, Mus musculus
  siRNA target sequence for 5830404H04Rik (NM_174847.1,2120-2138).
cagagctaggagctatgaa

SEQ ID NO: 784750 - DNA, 19 bp, Mus musculus
  siRNA target sequence for 5830404H04Rik (NM_174847.1,2122-2140).
gagctaggagctatgaaga

SEQ ID NO: 784751 - DNA, 19 bp, Mus musculus
  siRNA target sequence for 5830404H04Rik (NM_174847.1,2128-2146).
ggagctatgaagaagcata

SEQ ID NO: 784752 - DNA, 19 bp, Mus musculus
  siRNA target sequence for 5830404H04Rik (NM_174847.1,2129-2147).
gagctatgaagaagcataa

SEQ ID NO: 784753 - DNA, 19 bp, Mus musculus
  siRNA target sequence for 5830404H04Rik (NM_174847.1,2189-2207).
ggcgacaccaacagaaaga

SEQ ID NO: 784754 - DNA, 19 bp, Mus musculus
  siRNA target sequence for 5830404H04Rik (NM_174847.1,2213-2231).
gcttgagccagtcacataa

SEQ ID NO: 784755 - DNA, 19 bp, Mus musculus
  siRNA target sequence for 5830404H04Rik (NM_174847.1,2214-2232).
cttgagccagtcacataat

SEQ ID NO: 784756 - DNA, 19 bp, Mus musculus
  siRNA target sequence for 5830404H04Rik (NM_174847.1,2225-2243).
cacataatgacctggtatt

SEQ ID NO: 784757 - DNA, 19 bp, Mus musculus
  siRNA target sequence for BC043118 (NM_174848.2,419-437).
gcgcaccaatggaacaaca

SEQ ID NO: 784758 - DNA, 19 bp, Mus musculus
  siRNA target sequence for BC043118 (NM_174848.2,441-459).
ggggtgaccattatgcaaa

SEQ ID NO: 784759 - DNA, 19 bp, Mus musculus
  siRNA target sequence for BC043118 (NM_174848.2,471-489).
ggtcctgcctttgaaaata

SEQ ID NO: 784760 - DNA, 19 bp, Mus musculus
  siRNA target sequence for BC043118 (NM_174848.2,540-558).
ccgcctggtgaggtaaaaa

SEQ ID NO: 784761 - DNA, 19 bp, Mus musculus
  siRNA target sequence for BC043118 (NM_174848.2,605-623).
ctatgagtcgcctacatta

SEQ ID NO: 784762 - DNA, 19 bp, Mus musculus
  siRNA target sequence for BC043118 (NM_174848.2,614-632).
gcctacattaagtaaggat

SEQ ID NO: 784763 - DNA, 19 bp, Mus musculus
  siRNA target sequence for BC043118 (NM_174848.2,615-633).
cctacattaagtaaggatt

SEQ ID NO: 784764 - DNA, 19 bp, Mus musculus
  siRNA target sequence for BC043118 (NM_174848.2,616-634).
ctacattaagtaaggatta

SEQ ID NO: 784765 - DNA, 19 bp, Mus musculus
  siRNA target sequence for BC043118 (NM_174848.2,707-725).
gtctgtccctgtagtatat

SEQ ID NO: 784766 - DNA, 19 bp, Mus musculus
  siRNA target sequence for BC043118 (NM_174848.2,709-727).
ctgtccctgtagtatatga

SEQ ID NO: 784767 - DNA, 19 bp, Mus musculus
  siRNA target sequence for BC043118 (NM_174848.2,711-729).
gtccctgtagtatatgaca

SEQ ID NO: 784768 - DNA, 19 bp, Mus musculus
  siRNA target sequence for BC043118 (NM_174848.2,808-826).
cttcctttaccatattgta

SEQ ID NO: 784769 - DNA, 19 bp, Mus musculus
  siRNA target sequence for BC043118 (NM_174848.2,811-829).
cctttaccatattgtatga

SEQ ID NO: 784770 - DNA, 19 bp, Mus musculus
  siRNA target sequence for BC043118 (NM_174848.2,854-872).
gtacacctctgcagagtta

SEQ ID NO: 784771 - DNA, 19 bp, Mus musculus
  siRNA target sequence for BC043118 (NM_174848.2,949-967).
ctgacctggtccatcattt

SEQ ID NO: 784772 - DNA, 19 bp, Mus musculus
  siRNA target sequence for BC043118 (NM_174848.2,1031-1049).
ggaagccaagaggtacaaa

SEQ ID NO: 784773 - DNA, 19 bp, Mus musculus
  siRNA target sequence for BC043118 (NM_174848.2,1032-1050).
gaagccaagaggtacaaaa

SEQ ID NO: 784774 - DNA, 19 bp, Mus musculus
  siRNA target sequence for BC043118 (NM_174848.2,1090-1108).
gttcgcaggaggatgttct

SEQ ID NO: 784775 - DNA, 19 bp, Mus musculus
  siRNA target sequence for BC043118 (NM_174848.2,1206-1224).
gagcgcttacagagaaact

SEQ ID NO: 784776 - DNA, 19 bp, Mus musculus
  siRNA target sequence for BC043118 (NM_174848.2,1272-1290).
gtagcttcgggcaaagatt

SEQ ID NO: 784777 - DNA, 19 bp, Mus musculus
  siRNA target sequence for BC043118 (NM_174848.2,1299-1317).
gaaaagagggagcatgtta

SEQ ID NO: 784778 - DNA, 19 bp, Mus musculus
  siRNA target sequence for BC043118 (NM_174848.2,1368-1386).
gaacacgctggaattttca

SEQ ID NO: 784779 - DNA, 19 bp, Mus musculus
  siRNA target sequence for BC043118 (NM_174848.2,1371-1389).
cacgctggaattttcaagt

SEQ ID NO: 784780 - DNA, 19 bp, Mus musculus
  siRNA target sequence for BC043118 (NM_174848.2,1451-1469).
ggagttgtttctccaaaaa

SEQ ID NO: 784781 - DNA, 19 bp, Mus musculus
  siRNA target sequence for BC043118 (NM_174848.2,1461-1479).
ctccaaaaatccgatatga

SEQ ID NO: 784782 - DNA, 19 bp, Mus musculus
  siRNA target sequence for BC043118 (NM_174848.2,1463-1481).
ccaaaaatccgatatgact

SEQ ID NO: 784783 - DNA, 19 bp, Mus musculus
  siRNA target sequence for BC043118 (NM_174848.2,1464-1482).
caaaaatccgatatgactt

SEQ ID NO: 784784 - DNA, 19 bp, Mus musculus
  siRNA target sequence for BC043118 (NM_174848.2,1471-1489).
ccgatatgacttctaagtt

SEQ ID NO: 784785 - DNA, 19 bp, Mus musculus
  siRNA target sequence for BC043118 (NM_174848.2,1553-1571).
gacggggaccagatttggt

SEQ ID NO: 784786 - DNA, 19 bp, Mus musculus
  siRNA target sequence for BC043118 (NM_174848.2,1583-1601).
ggaaccagtgtccaagtat

SEQ ID NO: 784787 - DNA, 19 bp, Mus musculus
  siRNA target sequence for BC043118 (NM_174848.2,1584-1602).
gaaccagtgtccaagtatt

SEQ ID NO: 784788 - DNA, 19 bp, Mus musculus
  siRNA target sequence for BC043118 (NM_174848.2,1643-1661).
ggagaacgttgacaaacaa

SEQ ID NO: 784789 - DNA, 19 bp, Mus musculus
  siRNA target sequence for BC043118 (NM_174848.2,1644-1662).
gagaacgttgacaaacaaa

SEQ ID NO: 784790 - DNA, 19 bp, Mus musculus
  siRNA target sequence for BC043118 (NM_174848.2,1646-1664).
gaacgttgacaaacaaact

SEQ ID NO: 784791 - DNA, 19 bp, Mus musculus
  siRNA target sequence for BC043118 (NM_174848.2,1681-1699).
ggcctggaaagatgataat

SEQ ID NO: 784792 - DNA, 19 bp, Mus musculus
  siRNA target sequence for BC043118 (NM_174848.2,1682-1700).
gcctggaaagatgataatt

SEQ ID NO: 784793 - DNA, 19 bp, Mus musculus
  siRNA target sequence for BC043118 (NM_174848.2,1728-1746).
caagaggtctactgtaaca

SEQ ID NO: 784794 - DNA, 19 bp, Mus musculus
  siRNA target sequence for BC043118 (NM_174848.2,1772-1790).
cccgaatggggcactgata

SEQ ID NO: 784795 - DNA, 19 bp, Mus musculus
  siRNA target sequence for BC043118 (NM_174848.2,1773-1791).
ccgaatggggcactgataa

SEQ ID NO: 784796 - DNA, 19 bp, Mus musculus
  siRNA target sequence for BC043118 (NM_174848.2,1774-1792).
cgaatggggcactgataaa

SEQ ID NO: 784797 - DNA, 19 bp, Mus musculus
  siRNA target sequence for BC043118 (NM_174848.2,1775-1793).
gaatggggcactgataaaa

SEQ ID NO: 784798 - DNA, 19 bp, Mus musculus
  siRNA target sequence for BC043118 (NM_174848.2,1782-1800).
gcactgataaaagttgtaa

SEQ ID NO: 784799 - DNA, 19 bp, Mus musculus
  siRNA target sequence for BC043118 (NM_174848.2,1934-1952).
ctctatcaaacgtgtctta

SEQ ID NO: 784800 - DNA, 19 bp, Mus musculus
  siRNA target sequence for BC043118 (NM_174848.2,1936-1954).
ctatcaaacgtgtcttaaa

SEQ ID NO: 784801 - DNA, 19 bp, Mus musculus
  siRNA target sequence for BC043118 (NM_174848.2,1940-1958).
caaacgtgtcttaaaggat

SEQ ID NO: 784802 - DNA, 19 bp, Mus musculus
  siRNA target sequence for BC043118 (NM_174848.2,1960-1978).
gcagcattccggtgataga

SEQ ID NO: 784803 - DNA, 19 bp, Mus musculus
  siRNA target sequence for BC043118 (NM_174848.2,2003-2021).
gtgcagccccatctacata

SEQ ID NO: 784804 - DNA, 19 bp, Mus musculus
  siRNA target sequence for BC043118 (NM_174848.2,2005-2023).
gcagccccatctacataca

SEQ ID NO: 784805 - DNA, 19 bp, Mus musculus
  siRNA target sequence for BC043118 (NM_174848.2,2049-2067).
ctgaacatccccaagtcta

SEQ ID NO: 784806 - DNA, 19 bp, Mus musculus
  siRNA target sequence for BC043118 (NM_174848.2,2125-2143).
ggcaagctacaattttgga

SEQ ID NO: 784807 - DNA, 19 bp, Mus musculus
  siRNA target sequence for BC043118 (NM_174848.2,2148-2166).
gaccaggggctctttgaga

SEQ ID NO: 784808 - DNA, 19 bp, Mus musculus
  siRNA target sequence for BC043118 (NM_174848.2,2151-2169).
caggggctctttgagattt

SEQ ID NO: 784809 - DNA, 19 bp, Mus musculus
  siRNA target sequence for BC043118 (NM_174848.2,2173-2191).
cagccgagatgaaatcact

SEQ ID NO: 784810 - DNA, 19 bp, Mus musculus
  siRNA target sequence for BC043118 (NM_174848.2,2188-2206).
cactgcatcctcttcaaat

SEQ ID NO: 784811 - DNA, 19 bp, Mus musculus
  siRNA target sequence for BC043118 (NM_174848.2,2220-2238).
gtggaaatgcctatgaact

SEQ ID NO: 784812 - DNA, 19 bp, Mus musculus
  siRNA target sequence for BC043118 (NM_174848.2,2223-2241).
gaaatgcctatgaacttaa

SEQ ID NO: 784813 - DNA, 19 bp, Mus musculus
  siRNA target sequence for BC043118 (NM_174848.2,2243-2261).
ggttatcctttatgagaaa

SEQ ID NO: 784814 - DNA, 19 bp, Mus musculus
  siRNA target sequence for BC043118 (NM_174848.2,2267-2285).
cttcctcggacataccaaa

SEQ ID NO: 784815 - DNA, 19 bp, Mus musculus
  siRNA target sequence for BC043118 (NM_174848.2,2271-2289).
ctcggacataccaaagagt

SEQ ID NO: 784816 - DNA, 19 bp, Mus musculus
  siRNA target sequence for BC043118 (NM_174848.2,2304-2322).
gattctgtccctacgtttt

SEQ ID NO: 784817 - DNA, 19 bp, Mus musculus
  siRNA target sequence for BC043118 (NM_174848.2,2342-2360).
ccatggcatcggatcgatt

SEQ ID NO: 784818 - DNA, 19 bp, Mus musculus
  siRNA target sequence for BC043118 (NM_174848.2,2351-2369).
cggatcgattcgtgtcatt

SEQ ID NO: 784819 - DNA, 19 bp, Mus musculus
  siRNA target sequence for BC043118 (NM_174848.2,2410-2428).
gccagcaattcctactaga

SEQ ID NO: 784820 - DNA, 19 bp, Mus musculus
  siRNA target sequence for BC043118 (NM_174848.2,2453-2471).
cgcttgtggggccttaagt

SEQ ID NO: 784821 - DNA, 19 bp, Mus musculus
  siRNA target sequence for BC043118 (NM_174848.2,2470-2488).
gtggacccatcatgtcttt

SEQ ID NO: 784822 - DNA, 19 bp, Mus musculus
  siRNA target sequence for BC043118 (NM_174848.2,2489-2507).
ccggtacctacaagctaat

SEQ ID NO: 784823 - DNA, 19 bp, Mus musculus
  siRNA target sequence for BC043118 (NM_174848.2,2490-2508).
cggtacctacaagctaatt

SEQ ID NO: 784824 - DNA, 19 bp, Mus musculus
  siRNA target sequence for BC043118 (NM_174848.2,2491-2509).
ggtacctacaagctaattt

SEQ ID NO: 784825 - DNA, 19 bp, Mus musculus
  siRNA target sequence for BC043118 (NM_174848.2,2518-2536).
cttcgatcacactgtttga

SEQ ID NO: 784826 - DNA, 19 bp, Mus musculus
  siRNA target sequence for BC043118 (NM_174848.2,2525-2543).
cacactgtttgaatcatct

SEQ ID NO: 784827 - DNA, 19 bp, Mus musculus
  siRNA target sequence for BC043118 (NM_174848.2,2554-2572).
gtgggaagtttattgacat

SEQ ID NO: 784828 - DNA, 19 bp, Mus musculus
  siRNA target sequence for BC043118 (NM_174848.2,2573-2591).
cacgaatcaggaaatttct

SEQ ID NO: 784829 - DNA, 19 bp, Mus musculus
  siRNA target sequence for BC043118 (NM_174848.2,2575-2593).
cgaatcaggaaatttctga

SEQ ID NO: 784830 - DNA, 19 bp, Mus musculus
  siRNA target sequence for BC043118 (NM_174848.2,2678-2696).
ctgcggcgatcagtacatt

SEQ ID NO: 784831 - DNA, 19 bp, Mus musculus
  siRNA target sequence for BC043118 (NM_174848.2,2680-2698).
gcggcgatcagtacatttt

SEQ ID NO: 784832 - DNA, 19 bp, Mus musculus
  siRNA target sequence for BC043118 (NM_174848.2,2681-2699).
cggcgatcagtacatttta

SEQ ID NO: 784833 - DNA, 19 bp, Mus musculus
  siRNA target sequence for BC043118 (NM_174848.2,2683-2701).
gcgatcagtacattttaga

SEQ ID NO: 784834 - DNA, 19 bp, Mus musculus
  siRNA target sequence for BC043118 (NM_174848.2,2685-2703).
gatcagtacattttagaga

SEQ ID NO: 784835 - DNA, 19 bp, Mus musculus
  siRNA target sequence for BC043118 (NM_174848.2,2727-2745).
gattggggaggatcaagta

SEQ ID NO: 784836 - DNA, 19 bp, Mus musculus
  siRNA target sequence for BC043118 (NM_174848.2,2732-2750).
gggaggatcaagtaataca

SEQ ID NO: 784837 - DNA, 19 bp, Mus musculus
  siRNA target sequence for BC043118 (NM_174848.2,2733-2751).
ggaggatcaagtaatacaa

SEQ ID NO: 784838 - DNA, 19 bp, Mus musculus
  siRNA target sequence for BC043118 (NM_174848.2,2736-2754).
ggatcaagtaatacaatct

SEQ ID NO: 784839 - DNA, 19 bp, Mus musculus
  siRNA target sequence for BC043118 (NM_174848.2,2737-2755).
gatcaagtaatacaatctt

SEQ ID NO: 784840 - DNA, 19 bp, Mus musculus
  siRNA target sequence for BC043118 (NM_174848.2,2743-2761).
gtaatacaatcttgtctat

SEQ ID NO: 784841 - DNA, 19 bp, Mus musculus
  siRNA target sequence for BC043118 (NM_174848.2,2758-2776).
ctatccgaccaatccaatt

SEQ ID NO: 784842 - DNA, 19 bp, Mus musculus
  siRNA target sequence for BC043118 (NM_174848.2,2762-2780).
ccgaccaatccaattggaa

SEQ ID NO: 784843 - DNA, 19 bp, Mus musculus
  siRNA target sequence for BC043118 (NM_174848.2,2777-2795).
ggaaccactcgggataaat

SEQ ID NO: 784844 - DNA, 19 bp, Mus musculus
  siRNA target sequence for BC043118 (NM_174848.2,2803-2821).
cacacttgctcaaagcatt

SEQ ID NO: 784845 - DNA, 19 bp, Mus musculus
  siRNA target sequence for BC043118 (NM_174848.2,2810-2828).
gctcaaagcattcagtaaa

SEQ ID NO: 784846 - DNA, 19 bp, Mus musculus
  siRNA target sequence for BC043118 (NM_174848.2,2837-2855).
ccaaggagagtgtatcgat

SEQ ID NO: 784847 - DNA, 19 bp, Mus musculus
  siRNA target sequence for BC043118 (NM_174848.2,2838-2856).
caaggagagtgtatcgatt

SEQ ID NO: 784848 - DNA, 19 bp, Mus musculus
  siRNA target sequence for BC043118 (NM_174848.2,2842-2860).
gagagtgtatcgatttcgt

SEQ ID NO: 784849 - DNA, 19 bp, Mus musculus
  siRNA target sequence for BC043118 (NM_174848.2,2844-2862).
gagtgtatcgatttcgtaa

SEQ ID NO: 784850 - DNA, 19 bp, Mus musculus
  siRNA target sequence for BC043118 (NM_174848.2,2846-2864).
gtgtatcgatttcgtaaaa

SEQ ID NO: 784851 - DNA, 19 bp, Mus musculus
  siRNA target sequence for BC043118 (NM_174848.2,2848-2866).
gtatcgatttcgtaaaaga

SEQ ID NO: 784852 - DNA, 19 bp, Mus musculus
  siRNA target sequence for BC043118 (NM_174848.2,2852-2870).
cgatttcgtaaaagaatgt

SEQ ID NO: 784853 - DNA, 19 bp, Mus musculus
  siRNA target sequence for BC043118 (NM_174848.2,2924-2942).
gctcctcctgtattaccaa

SEQ ID NO: 784854 - DNA, 19 bp, Mus musculus
  siRNA target sequence for BC043118 (NM_174848.2,2939-2957).
ccaagaagacggtttctat

SEQ ID NO: 784855 - DNA, 19 bp, Mus musculus
  siRNA target sequence for BC043118 (NM_174848.2,3007-3025).
gctgcccatcagctagaat

SEQ ID NO: 784856 - DNA, 19 bp, Mus musculus
  siRNA target sequence for BC043118 (NM_174848.2,3036-3054).
cagcccatcgactatgttt

SEQ ID NO: 784857 - DNA, 19 bp, Mus musculus
  siRNA target sequence for BC043118 (NM_174848.2,3040-3058).
ccatcgactatgtttttga

SEQ ID NO: 784858 - DNA, 19 bp, Mus musculus
  siRNA target sequence for BC043118 (NM_174848.2,3041-3059).
catcgactatgtttttgaa

SEQ ID NO: 784859 - DNA, 19 bp, Mus musculus
  siRNA target sequence for BC043118 (NM_174848.2,3044-3062).
cgactatgtttttgaagaa

SEQ ID NO: 784860 - DNA, 19 bp, Mus musculus
  siRNA target sequence for BC043118 (NM_174848.2,3075-3093).
ctttttgctctggaacatt

SEQ ID NO: 784861 - DNA, 19 bp, Mus musculus
  siRNA target sequence for BC043118 (NM_174848.2,3100-3118).
gaagagaactacatcttga

SEQ ID NO: 784862 - DNA, 19 bp, Mus musculus
  siRNA target sequence for BC043118 (NM_174848.2,3114-3132).
cttgaagacgccgtgaatt

SEQ ID NO: 784863 - DNA, 19 bp, Mus musculus
  siRNA target sequence for BC043118 (NM_174848.2,3123-3141).
gccgtgaattccgttttga

SEQ ID NO: 784864 - DNA, 19 bp, Mus musculus
  siRNA target sequence for BC043118 (NM_174848.2,3124-3142).
ccgtgaattccgttttgaa

SEQ ID NO: 784865 - DNA, 19 bp, Mus musculus
  siRNA target sequence for BC043118 (NM_174848.2,3126-3144).
gtgaattccgttttgaaca

SEQ ID NO: 784866 - DNA, 19 bp, Mus musculus
  siRNA target sequence for BC043118 (NM_174848.2,3165-3183).
cagtctgtgtggataaaga

SEQ ID NO: 784867 - DNA, 19 bp, Mus musculus
  siRNA target sequence for BC043118 (NM_174848.2,3187-3205).
gcttatggatcgcttatga

SEQ ID NO: 784868 - DNA, 19 bp, Mus musculus
  siRNA target sequence for BC043118 (NM_174848.2,3188-3206).
cttatggatcgcttatgaa

SEQ ID NO: 784869 - DNA, 19 bp, Mus musculus
  siRNA target sequence for BC043118 (NM_174848.2,3197-3215).
cgcttatgaaggttccaat

SEQ ID NO: 784870 - DNA, 19 bp, Mus musculus
  siRNA target sequence for BC043118 (NM_174848.2,3198-3216).
gcttatgaaggttccaatt

SEQ ID NO: 784871 - DNA, 19 bp, Mus musculus
  siRNA target sequence for BC043118 (NM_174848.2,3199-3217).
cttatgaaggttccaattt

SEQ ID NO: 784872 - DNA, 19 bp, Mus musculus
  siRNA target sequence for BC043118 (NM_174848.2,3241-3259).
cgcctaaggagattccaaa

SEQ ID NO: 784873 - DNA, 19 bp, Mus musculus
  siRNA target sequence for BC043118 (NM_174848.2,3242-3260).
gcctaaggagattccaaat

SEQ ID NO: 784874 - DNA, 19 bp, Mus musculus
  siRNA target sequence for BC043118 (NM_174848.2,3312-3330).
cagcctgcagtgtacatca

SEQ ID NO: 784875 - DNA, 19 bp, Mus musculus
  siRNA target sequence for BC043118 (NM_174848.2,3321-3339).
gtgtacatcagaataagga

SEQ ID NO: 784876 - DNA, 19 bp, Mus musculus
  siRNA target sequence for BC043118 (NM_174848.2,3342-3360).
cgagcccaggatgaatact

SEQ ID NO: 784877 - DNA, 19 bp, Mus musculus
  siRNA target sequence for BC043118 (NM_174848.2,3343-3361).
gagcccaggatgaatactt

SEQ ID NO: 784878 - DNA, 19 bp, Mus musculus
  siRNA target sequence for BC043118 (NM_174848.2,3381-3399).
gcagatgcacggacaatgt

SEQ ID NO: 784879 - DNA, 19 bp, Mus musculus
  siRNA target sequence for BC043118 (NM_174848.2,3446-3464).
ctactgccgaggactcttt

SEQ ID NO: 784880 - DNA, 19 bp, Mus musculus
  siRNA target sequence for BC043118 (NM_174848.2,3449-3467).
ctgccgaggactctttaaa

SEQ ID NO: 784881 - DNA, 19 bp, Mus musculus
  siRNA target sequence for BC043118 (NM_174848.2,3473-3491).
ggccagtcatacatgtctt

SEQ ID NO: 784882 - DNA, 19 bp, Mus musculus
  siRNA target sequence for BC043118 (NM_174848.2,3584-3602).
cggaaccatcagctcttat

SEQ ID NO: 784883 - DNA, 19 bp, Mus musculus
  siRNA target sequence for BC043118 (NM_174848.2,3612-3630).
gaactcgtcctggatgtta

SEQ ID NO: 784884 - DNA, 19 bp, Mus musculus
  siRNA target sequence for BC043118 (NM_174848.2,3617-3635).
cgtcctggatgttaaagga

SEQ ID NO: 784885 - DNA, 19 bp, Mus musculus
  siRNA target sequence for BC043118 (NM_174848.2,3696-3714).
cagaagtgggacattgaaa

SEQ ID NO: 784886 - DNA, 19 bp, Mus musculus
  siRNA target sequence for A930021H16Rik (NM_174850.2,355-373).
ccgattcgaccgaagaact

SEQ ID NO: 784887 - DNA, 19 bp, Mus musculus
  siRNA target sequence for A930021H16Rik (NM_174850.2,356-374).
cgattcgaccgaagaactt

SEQ ID NO: 784888 - DNA, 19 bp, Mus musculus
  siRNA target sequence for A930021H16Rik (NM_174850.2,357-375).
gattcgaccgaagaacttt

SEQ ID NO: 784889 - DNA, 19 bp, Mus musculus
  siRNA target sequence for A930021H16Rik (NM_174850.2,554-572).
ggtctgtggcaaacatgtt

SEQ ID NO: 784890 - DNA, 19 bp, Mus musculus
  siRNA target sequence for A930021H16Rik (NM_174850.2,619-637).
gctgcttcaggtgtaaaca

SEQ ID NO: 784891 - DNA, 19 bp, Mus musculus
  siRNA target sequence for A930021H16Rik (NM_174850.2,870-888).
cacgctggaggaaacacaa

SEQ ID NO: 784892 - DNA, 19 bp, Mus musculus
  siRNA target sequence for A930021H16Rik (NM_174850.2,884-902).
cacaaccgccaaaggtttt

SEQ ID NO: 784893 - DNA, 19 bp, Mus musculus
  siRNA target sequence for A930021H16Rik (NM_174850.2,1014-1032).
ctcacccatgtgacgaata

SEQ ID NO: 784894 - DNA, 19 bp, Mus musculus
  siRNA target sequence for A930021H16Rik (NM_174850.2,1066-1084).
gcagcccagcgaacttcaa

SEQ ID NO: 784895 - DNA, 19 bp, Mus musculus
  siRNA target sequence for A930021H16Rik (NM_174850.2,1142-1160).
gcagacagcctcaaaaggt

SEQ ID NO: 784896 - DNA, 19 bp, Mus musculus
  siRNA target sequence for A930021H16Rik (NM_174850.2,1149-1167).
gcctcaaaaggtgttaaga

SEQ ID NO: 784897 - DNA, 19 bp, Mus musculus
  siRNA target sequence for A930021H16Rik (NM_174850.2,1151-1169).
ctcaaaaggtgttaagact

SEQ ID NO: 784898 - DNA, 19 bp, Mus musculus
  siRNA target sequence for A930021H16Rik (NM_174850.2,1242-1260).
cagcaggcccgagagaaat

SEQ ID NO: 784899 - DNA, 19 bp, Mus musculus
  siRNA target sequence for A930021H16Rik (NM_174850.2,1500-1518).
gtggtgaattccactaata

SEQ ID NO: 784900 - DNA, 19 bp, Mus musculus
  siRNA target sequence for A930021H16Rik (NM_174850.2,1503-1521).
gtgaattccactaatagca

SEQ ID NO: 784901 - DNA, 19 bp, Mus musculus
  siRNA target sequence for A930021H16Rik (NM_174850.2,1522-1540).
gggtcaccacggtagtaaa

SEQ ID NO: 784902 - DNA, 19 bp, Mus musculus
  siRNA target sequence for A930021H16Rik (NM_174850.2,1523-1541).
ggtcaccacggtagtaaat

SEQ ID NO: 784903 - DNA, 19 bp, Mus musculus
  siRNA target sequence for A930021H16Rik (NM_174850.2,1621-1639).
gggtccctgctgtgatgaa

SEQ ID NO: 784904 - DNA, 19 bp, Mus musculus
  siRNA target sequence for A930021H16Rik (NM_174850.2,1622-1640).
ggtccctgctgtgatgaat

SEQ ID NO: 784905 - DNA, 19 bp, Mus musculus
  siRNA target sequence for A930021H16Rik (NM_174850.2,1690-1708).
gcagccgggagcaagcatt

SEQ ID NO: 784906 - DNA, 19 bp, Mus musculus
  siRNA target sequence for A930021H16Rik (NM_174850.2,1691-1709).
cagccgggagcaagcatta

SEQ ID NO: 784907 - DNA, 19 bp, Mus musculus
  siRNA target sequence for A930021H16Rik (NM_174850.2,1705-1723).
cattaagtgtccttaggaa

SEQ ID NO: 784908 - DNA, 19 bp, Mus musculus
  siRNA target sequence for A930021H16Rik (NM_174850.2,1796-1814).
ggtaacccttcccaagaat

SEQ ID NO: 784909 - DNA, 19 bp, Mus musculus
  siRNA target sequence for A930021H16Rik (NM_174850.2,1858-1876).
ccacccagactcctaattt

SEQ ID NO: 784910 - DNA, 19 bp, Mus musculus
  siRNA target sequence for A930021H16Rik (NM_174850.2,1862-1880).
ccagactcctaatttcact

SEQ ID NO: 784911 - DNA, 19 bp, Mus musculus
  siRNA target sequence for A930021H16Rik (NM_174850.2,1863-1881).
cagactcctaatttcacta

SEQ ID NO: 784912 - DNA, 19 bp, Mus musculus
  siRNA target sequence for A930021H16Rik (NM_174850.2,1913-1931).
gggcaataccgctgtattt

SEQ ID NO: 784913 - DNA, 19 bp, Mus musculus
  siRNA target sequence for A930021H16Rik (NM_174850.2,1915-1933).
gcaataccgctgtatttct

SEQ ID NO: 784914 - DNA, 19 bp, Mus musculus
  siRNA target sequence for A930021H16Rik (NM_174850.2,1943-1961).
caaaaagagcccgagtatt

SEQ ID NO: 784915 - DNA, 19 bp, Mus musculus
  siRNA target sequence for A930021H16Rik (NM_174850.2,2194-2212).
ctgactccagcgtccatat

SEQ ID NO: 784916 - DNA, 19 bp, Mus musculus
  siRNA target sequence for A930021H16Rik (NM_174850.2,2196-2214).
gactccagcgtccatatca

SEQ ID NO: 784917 - DNA, 19 bp, Mus musculus
  siRNA target sequence for A930021H16Rik (NM_174850.2,2208-2226).
catatcaccttgacttcta

SEQ ID NO: 784918 - DNA, 19 bp, Mus musculus
  siRNA target sequence for A930021H16Rik (NM_174850.2,2642-2660).
ggactggttccggcttatt

SEQ ID NO: 784919 - DNA, 19 bp, Mus musculus
  siRNA target sequence for A930021H16Rik (NM_174850.2,2645-2663).
ctggttccggcttattcat

SEQ ID NO: 784920 - DNA, 19 bp, Mus musculus
  siRNA target sequence for A930021H16Rik (NM_174850.2,2647-2665).
ggttccggcttattcatga

SEQ ID NO: 784921 - DNA, 19 bp, Mus musculus
  siRNA target sequence for A930021H16Rik (NM_174850.2,2688-2706).
gaatcggaactcatgtaca

SEQ ID NO: 784922 - DNA, 19 bp, Mus musculus
  siRNA target sequence for A930021H16Rik (NM_174850.2,2857-2875).
gaagtgacatcgttgactt

SEQ ID NO: 784923 - DNA, 19 bp, Mus musculus
  siRNA target sequence for A930021H16Rik (NM_174850.2,2910-2928).
gaccaaatgctggagaata

SEQ ID NO: 784924 - DNA, 19 bp, Mus musculus
  siRNA target sequence for C030011O14Rik (NM_174868.2,445-463).
ccctgtgtcttggtattat

SEQ ID NO: 784925 - DNA, 19 bp, Mus musculus
  siRNA target sequence for C030011O14Rik (NM_174868.2,469-487).
ctcccagatcaaattttca

SEQ ID NO: 784926 - DNA, 19 bp, Mus musculus
  siRNA target sequence for C030011O14Rik (NM_174868.2,545-563).
ctggcccatcactttaaaa

SEQ ID NO: 784927 - DNA, 19 bp, Mus musculus
  siRNA target sequence for C030011O14Rik (NM_174868.2,548-566).
gcccatcactttaaaagaa

SEQ ID NO: 784928 - DNA, 19 bp, Mus musculus
  siRNA target sequence for C030011O14Rik (NM_174868.2,638-656).
gctgcatcagaaaaaggtt

SEQ ID NO: 784929 - DNA, 19 bp, Mus musculus
  siRNA target sequence for C030011O14Rik (NM_174868.2,683-701).
ctgaccttgtcgttaagct

SEQ ID NO: 784930 - DNA, 19 bp, Mus musculus
  siRNA target sequence for C030011O14Rik (NM_174868.2,785-803).
ggctccgtccagagtgtta

SEQ ID NO: 784931 - DNA, 19 bp, Mus musculus
  siRNA target sequence for C030011O14Rik (NM_174868.2,1046-1064).
gtggatgatattattagtt

SEQ ID NO: 784932 - DNA, 19 bp, Mus musculus
  siRNA target sequence for C030011O14Rik (NM_174868.2,1062-1080).
gttcagaattcatccataa

SEQ ID NO: 784933 - DNA, 19 bp, Mus musculus
  siRNA target sequence for C030011O14Rik (NM_174868.2,1065-1083).
cagaattcatccataaact

SEQ ID NO: 784934 - DNA, 19 bp, Mus musculus
  siRNA target sequence for C030011O14Rik (NM_174868.2,1139-1157).
gggggatctgaccctaatt

SEQ ID NO: 784935 - DNA, 19 bp, Mus musculus
  siRNA target sequence for C030011O14Rik (NM_174868.2,1142-1160).
ggatctgaccctaattcca

SEQ ID NO: 784936 - DNA, 19 bp, Mus musculus
  siRNA target sequence for C030011O14Rik (NM_174868.2,1152-1170).
ctaattccattgcaaatga

SEQ ID NO: 784937 - DNA, 19 bp, Mus musculus
  siRNA target sequence for C030011O14Rik (NM_174868.2,1158-1176).
ccattgcaaatgatactga

SEQ ID NO: 784938 - DNA, 19 bp, Mus musculus
  siRNA target sequence for C030011O14Rik (NM_174868.2,1195-1213).
cttgagggagactatggat

SEQ ID NO: 784939 - DNA, 19 bp, Mus musculus
  siRNA target sequence for C030011O14Rik (NM_174868.2,1326-1344).
gtccctgccctttatacga

SEQ ID NO: 784940 - DNA, 19 bp, Mus musculus
  siRNA target sequence for C030011O14Rik (NM_174868.2,1449-1467).
gtatccggcaggcttttca

SEQ ID NO: 784941 - DNA, 19 bp, Mus musculus
  siRNA target sequence for C030011O14Rik (NM_174868.2,1455-1473).
ggcaggcttttcagctaat

SEQ ID NO: 784942 - DNA, 19 bp, Mus musculus
  siRNA target sequence for C030011O14Rik (NM_174868.2,1495-1513).
gtcattccttgctgaaagt

SEQ ID NO: 784943 - DNA, 19 bp, Mus musculus
  siRNA target sequence for C030011O14Rik (NM_174868.2,1528-1546).
gtcagctttaattgtgaaa

SEQ ID NO: 784944 - DNA, 19 bp, Mus musculus
  siRNA target sequence for C030011O14Rik (NM_174868.2,1647-1665).
ccagaggggtgaaaaattt

SEQ ID NO: 784945 - DNA, 19 bp, Mus musculus
  siRNA target sequence for C030011O14Rik (NM_174868.2,1676-1694).
gacgtggttctggatttta

SEQ ID NO: 784946 - DNA, 19 bp, Mus musculus
  siRNA target sequence for C030011O14Rik (NM_174868.2,1809-1827).
ggtcagtgctgaaacagaa

SEQ ID NO: 784947 - DNA, 19 bp, Mus musculus
  siRNA target sequence for C030011O14Rik (NM_174868.2,1810-1828).
gtcagtgctgaaacagaaa

SEQ ID NO: 784948 - DNA, 19 bp, Mus musculus
  siRNA target sequence for C030011O14Rik (NM_174868.2,1853-1871).
ggatttttcgctcattttt

SEQ ID NO: 784949 - DNA, 19 bp, Mus musculus
  siRNA target sequence for C030011O14Rik (NM_174868.2,1911-1929).
gcttcttgggtcctagaaa

SEQ ID NO: 784950 - DNA, 19 bp, Mus musculus
  siRNA target sequence for C030011O14Rik (NM_174868.2,1915-1933).
cttgggtcctagaaattct

SEQ ID NO: 784951 - DNA, 19 bp, Mus musculus
  siRNA target sequence for C030011O14Rik (NM_174868.2,1947-1965).
gttgcttctttaagaatca

SEQ ID NO: 784952 - DNA, 19 bp, Mus musculus
  siRNA target sequence for C030011O14Rik (NM_174868.2,2000-2018).
gagaaggtgcgctattcga

SEQ ID NO: 784953 - DNA, 19 bp, Mus musculus
  siRNA target sequence for C030011O14Rik (NM_174868.2,2009-2027).
cgctattcgagcatagaca

SEQ ID NO: 784954 - DNA, 19 bp, Mus musculus
  siRNA target sequence for 2510009N07Rik (NM_174874.1,21-39).
cagccactttgacatatga

SEQ ID NO: 784955 - DNA, 19 bp, Mus musculus
  siRNA target sequence for 2510009N07Rik (NM_174874.1,23-41).
gccactttgacatatgata

SEQ ID NO: 784956 - DNA, 19 bp, Mus musculus
  siRNA target sequence for 2510009N07Rik (NM_174874.1,25-43).
cactttgacatatgatact

SEQ ID NO: 784957 - DNA, 19 bp, Mus musculus
  siRNA target sequence for 2510009N07Rik (NM_174874.1,42-60).
ctctccggtttgctgaatt

SEQ ID NO: 784958 - DNA, 19 bp, Mus musculus
  siRNA target sequence for 2510009N07Rik (NM_174874.1,125-143).
gagaaggacgaaatcttgt

SEQ ID NO: 784959 - DNA, 19 bp, Mus musculus
  siRNA target sequence for 2510009N07Rik (NM_174874.1,133-151).
cgaaatcttgtctgatgtt

SEQ ID NO: 784960 - DNA, 19 bp, Mus musculus
  siRNA target sequence for 2510009N07Rik (NM_174874.1,152-170).
gcatccagactttggttta

SEQ ID NO: 784961 - DNA, 19 bp, Mus musculus
  siRNA target sequence for 2510009N07Rik (NM_174874.1,325-343).
gcctgacagctactttaat

SEQ ID NO: 784962 - DNA, 19 bp, Mus musculus
  siRNA target sequence for 2510009N07Rik (NM_174874.1,410-428).
gttggcgaaggcaagtcta

SEQ ID NO: 784963 - DNA, 19 bp, Mus musculus
  siRNA target sequence for 2510009N07Rik (NM_174874.1,766-784).
gtccctgggtgttattgga

SEQ ID NO: 784964 - DNA, 19 bp, Mus musculus
  siRNA target sequence for 2510009N07Rik (NM_174874.1,965-983).
gctgtggggtttttctgta

SEQ ID NO: 784965 - DNA, 19 bp, Mus musculus
  siRNA target sequence for 2510009N07Rik (NM_174874.1,966-984).
ctgtggggtttttctgtaa

SEQ ID NO: 784966 - DNA, 19 bp, Mus musculus
  siRNA target sequence for 2510009N07Rik (NM_174874.1,968-986).
gtggggtttttctgtaaga

SEQ ID NO: 784967 - DNA, 19 bp, Mus musculus
  siRNA target sequence for 2510009N07Rik (NM_174874.1,1006-1024).
ctggtgtcagcaagtcaaa

SEQ ID NO: 784968 - DNA, 19 bp, Mus musculus
  siRNA target sequence for 2510009N07Rik (NM_174874.1,1044-1062).
gtgccctgcccatgtttga

SEQ ID NO: 784969 - DNA, 19 bp, Mus musculus
  siRNA target sequence for 2510009N07Rik (NM_174874.1,1114-1132).
gtccctagactcttctgat

SEQ ID NO: 784970 - DNA, 19 bp, Mus musculus
  siRNA target sequence for 2510009N07Rik (NM_174874.1,1117-1135).
cctagactcttctgatgta

SEQ ID NO: 784971 - DNA, 19 bp, Mus musculus
  siRNA target sequence for 2510009N07Rik (NM_174874.1,1140-1158).
gactggagaggttttttga

SEQ ID NO: 784972 - DNA, 19 bp, Mus musculus
  siRNA target sequence for 2510009N07Rik (NM_174874.1,1142-1160).
ctggagaggttttttgact

SEQ ID NO: 784973 - DNA, 19 bp, Mus musculus
  siRNA target sequence for Autl2 (NM_174875.2,54-72).
gttatgtccaagtatgaaa

SEQ ID NO: 784974 - DNA, 19 bp, Mus musculus
  siRNA target sequence for Autl2 (NM_174875.2,65-83).
gtatgaaaaccagattctt

SEQ ID NO: 784975 - DNA, 19 bp, Mus musculus
  siRNA target sequence for Autl2 (NM_174875.2,118-136).
cagatgagctggtatggat

SEQ ID NO: 784976 - DNA, 19 bp, Mus musculus
  siRNA target sequence for Autl2 (NM_174875.2,389-407).
gcagtgtttcctagataga

SEQ ID NO: 784977 - DNA, 19 bp, Mus musculus
  siRNA target sequence for Autl2 (NM_174875.2,573-591).
gtggtcattgaagatatca

SEQ ID NO: 784978 - DNA, 19 bp, Mus musculus
  siRNA target sequence for Autl2 (NM_174875.2,728-746).
gggcataaaccaaatcaat

SEQ ID NO: 784979 - DNA, 19 bp, Mus musculus
  siRNA target sequence for Autl2 (NM_174875.2,737-755).
ccaaatcaatcctgtgtat

SEQ ID NO: 784980 - DNA, 19 bp, Mus musculus
  siRNA target sequence for Autl2 (NM_174875.2,815-833).
gccaaataacgcctattat

SEQ ID NO: 784981 - DNA, 19 bp, Mus musculus
  siRNA target sequence for Autl2 (NM_174875.2,816-834).
ccaaataacgcctattatt

SEQ ID NO: 784982 - DNA, 19 bp, Mus musculus
  siRNA target sequence for Autl2 (NM_174875.2,817-835).
caaataacgcctattattt

SEQ ID NO: 784983 - DNA, 19 bp, Mus musculus
  siRNA target sequence for Autl2 (NM_174875.2,826-844).
cctattatttcataggatt

SEQ ID NO: 784984 - DNA, 19 bp, Mus musculus
  siRNA target sequence for Autl2 (NM_174875.2,880-898).
caacccagacttttgttga

SEQ ID NO: 784985 - DNA, 19 bp, Mus musculus
  siRNA target sequence for Autl2 (NM_174875.2,883-901).
cccagacttttgttgacat

SEQ ID NO: 784986 - DNA, 19 bp, Mus musculus
  siRNA target sequence for Autl2 (NM_174875.2,1033-1051).
ggtgtagccttgttcagaa

SEQ ID NO: 784987 - DNA, 19 bp, Mus musculus
  siRNA target sequence for Autl2 (NM_174875.2,1150-1168).
ccacaggggcagaattcat

SEQ ID NO: 784988 - DNA, 19 bp, Mus musculus
  siRNA target sequence for Autl2 (NM_174875.2,1166-1184).
catagagtcgactgaacaa

SEQ ID NO: 784989 - DNA, 19 bp, Mus musculus
  siRNA target sequence for SPACRCAN (NM_174876.2,249-267).
gtctctgggcattttgata

SEQ ID NO: 784990 - DNA, 19 bp, Mus musculus
  siRNA target sequence for SPACRCAN (NM_174876.2,450-468).
gttcccaaatggagtaaaa

SEQ ID NO: 784991 - DNA, 19 bp, Mus musculus
  siRNA target sequence for SPACRCAN (NM_174876.2,453-471).
cccaaatggagtaaaaatt

SEQ ID NO: 784992 - DNA, 19 bp, Mus musculus
  siRNA target sequence for SPACRCAN (NM_174876.2,501-519).
ggcaaaccatgtgaagtat

SEQ ID NO: 784993 - DNA, 19 bp, Mus musculus
  siRNA target sequence for SPACRCAN (NM_174876.2,624-642).
ggatggagtcacaagtgta

SEQ ID NO: 784994 - DNA, 19 bp, Mus musculus
  siRNA target sequence for SPACRCAN (NM_174876.2,625-643).
gatggagtcacaagtgtat

SEQ ID NO: 784995 - DNA, 19 bp, Mus musculus
  siRNA target sequence for SPACRCAN (NM_174876.2,629-647).
gagtcacaagtgtatttga

SEQ ID NO: 784996 - DNA, 19 bp, Mus musculus
  siRNA target sequence for SPACRCAN (NM_174876.2,679-697).
catagaaacctaatcatga

SEQ ID NO: 784997 - DNA, 19 bp, Mus musculus
  siRNA target sequence for SPACRCAN (NM_174876.2,683-701).
gaaacctaatcatgaagaa

SEQ ID NO: 784998 - DNA, 19 bp, Mus musculus
  siRNA target sequence for SPACRCAN (NM_174876.2,857-875).
cgtcaccgcaggagagtat

SEQ ID NO: 784999 - DNA, 19 bp, Mus musculus
  siRNA target sequence for SPACRCAN (NM_174876.2,867-885).
ggagagtatcagcaatgaa

SEQ ID NO: 785000 - DNA, 19 bp, Mus musculus
  siRNA target sequence for SPACRCAN (NM_174876.2,868-886).
gagagtatcagcaatgaaa

SEQ ID NO: 785001 - DNA, 19 bp, Mus musculus
  siRNA target sequence for SPACRCAN (NM_174876.2,878-896).
gcaatgaaattgagaatgt

SEQ ID NO: 785002 - DNA, 19 bp, Mus musculus
  siRNA target sequence for SPACRCAN (NM_174876.2,1008-1026).
gctcctcgtggaagagttt

SEQ ID NO: 785003 - DNA, 19 bp, Mus musculus
  siRNA target sequence for SPACRCAN (NM_174876.2,1035-1053).
ggttgaaaaagcattcaca

SEQ ID NO: 785004 - DNA, 19 bp, Mus musculus
  siRNA target sequence for SPACRCAN (NM_174876.2,1115-1133).
gtgggatagatgttcacta

SEQ ID NO: 785005 - DNA, 19 bp, Mus musculus
  siRNA target sequence for SPACRCAN (NM_174876.2,1150-1168).
ggcgaagccatcagcaata

SEQ ID NO: 785006 - DNA, 19 bp, Mus musculus
  siRNA target sequence for SPACRCAN (NM_174876.2,1197-1215).
caacaaggtagaaaaccat

SEQ ID NO: 785007 - DNA, 19 bp, Mus musculus
  siRNA target sequence for SPACRCAN (NM_174876.2,1246-1264).
gctgtctatacaattagta

SEQ ID NO: 785008 - DNA, 19 bp, Mus musculus
  siRNA target sequence for SPACRCAN (NM_174876.2,1249-1267).
gtctatacaattagtaact

SEQ ID NO: 785009 - DNA, 19 bp, Mus musculus
  siRNA target sequence for SPACRCAN (NM_174876.2,1262-1280).
gtaacttcagagattatat

SEQ ID NO: 785010 - DNA, 19 bp, Mus musculus
  siRNA target sequence for SPACRCAN (NM_174876.2,1287-1305).
gacgctgcaccagaacttt

SEQ ID NO: 785011 - DNA, 19 bp, Mus musculus
  siRNA target sequence for SPACRCAN (NM_174876.2,1291-1309).
ctgcaccagaactttttga

SEQ ID NO: 785012 - DNA, 19 bp, Mus musculus
  siRNA target sequence for SPACRCAN (NM_174876.2,1401-1419).
gacttctggatcgttcata

SEQ ID NO: 785013 - DNA, 19 bp, Mus musculus
  siRNA target sequence for SPACRCAN (NM_174876.2,1406-1424).
ctggatcgttcatattaga

SEQ ID NO: 785014 - DNA, 19 bp, Mus musculus
  siRNA target sequence for SPACRCAN (NM_174876.2,1409-1427).
gatcgttcatattagaaga

SEQ ID NO: 785015 - DNA, 19 bp, Mus musculus
  siRNA target sequence for SPACRCAN (NM_174876.2,1499-1517).
ctgtgccaaaagaaacagt

SEQ ID NO: 785016 - DNA, 19 bp, Mus musculus
  siRNA target sequence for SPACRCAN (NM_174876.2,1566-1584).
gacctcttctgctatagaa

SEQ ID NO: 785017 - DNA, 19 bp, Mus musculus
  siRNA target sequence for SPACRCAN (NM_174876.2,1576-1594).
gctatagaagaccttacta

SEQ ID NO: 785018 - DNA, 19 bp, Mus musculus
  siRNA target sequence for SPACRCAN (NM_174876.2,1653-1671).
ggaagtgatcccatggttt

SEQ ID NO: 785019 - DNA, 19 bp, Mus musculus
  siRNA target sequence for SPACRCAN (NM_174876.2,1730-1748).
ggaaagatgtagatgtgat

SEQ ID NO: 785020 - DNA, 19 bp, Mus musculus
  siRNA target sequence for SPACRCAN (NM_174876.2,1819-1837).
caggatgcactattaccaa

SEQ ID NO: 785021 - DNA, 19 bp, Mus musculus
  siRNA target sequence for SPACRCAN (NM_174876.2,1838-1856).
ctgagggtagagaaaaatt

SEQ ID NO: 785022 - DNA, 19 bp, Mus musculus
  siRNA target sequence for SPACRCAN (NM_174876.2,1921-1939).
gataggcccatacatttta

SEQ ID NO: 785023 - DNA, 19 bp, Mus musculus
  siRNA target sequence for SPACRCAN (NM_174876.2,1942-1960).
gaggaagaatcccatgtta

SEQ ID NO: 785024 - DNA, 19 bp, Mus musculus
  siRNA target sequence for SPACRCAN (NM_174876.2,1952-1970).
cccatgttagatctactat

SEQ ID NO: 785025 - DNA, 19 bp, Mus musculus
  siRNA target sequence for SPACRCAN (NM_174876.2,1964-1982).
ctactatacccatctttgt

SEQ ID NO: 785026 - DNA, 19 bp, Mus musculus
  siRNA target sequence for SPACRCAN (NM_174876.2,1989-2007).
cgcaactccacctacatct

SEQ ID NO: 785027 - DNA, 19 bp, Mus musculus
  siRNA target sequence for SPACRCAN (NM_174876.2,2035-2053).
gtaccagacattgattctt

SEQ ID NO: 785028 - DNA, 19 bp, Mus musculus
  siRNA target sequence for SPACRCAN (NM_174876.2,2038-2056).
ccagacattgattcttact

SEQ ID NO: 785029 - DNA, 19 bp, Mus musculus
  siRNA target sequence for SPACRCAN (NM_174876.2,2071-2089).
cccttcttaccggtaacta

SEQ ID NO: 785030 - DNA, 19 bp, Mus musculus
  siRNA target sequence for SPACRCAN (NM_174876.2,2072-2090).
ccttcttaccggtaactat

SEQ ID NO: 785031 - DNA, 19 bp, Mus musculus
  siRNA target sequence for SPACRCAN (NM_174876.2,2073-2091).
cttcttaccggtaactata

SEQ ID NO: 785032 - DNA, 19 bp, Mus musculus
  siRNA target sequence for SPACRCAN (NM_174876.2,2076-2094).
cttaccggtaactatagca

SEQ ID NO: 785033 - DNA, 19 bp, Mus musculus
  siRNA target sequence for SPACRCAN (NM_174876.2,2122-2140).
gaggtactcaaggaagata

SEQ ID NO: 785034 - DNA, 19 bp, Mus musculus
  siRNA target sequence for SPACRCAN (NM_174876.2,2159-2177).
ccagtcacaaagaacttga

SEQ ID NO: 785035 - DNA, 19 bp, Mus musculus
  siRNA target sequence for SPACRCAN (NM_174876.2,2229-2247).
gccagaatcagatacagtt

SEQ ID NO: 785036 - DNA, 19 bp, Mus musculus
  siRNA target sequence for SPACRCAN (NM_174876.2,2245-2263).
gtttggacaagaacttctt

SEQ ID NO: 785037 - DNA, 19 bp, Mus musculus
  siRNA target sequence for SPACRCAN (NM_174876.2,2403-2421).
ggcggtccaggatatttca

SEQ ID NO: 785038 - DNA, 19 bp, Mus musculus
  siRNA target sequence for SPACRCAN (NM_174876.2,2405-2423).
cggtccaggatatttcatt

SEQ ID NO: 785039 - DNA, 19 bp, Mus musculus
  siRNA target sequence for SPACRCAN (NM_174876.2,2431-2449).
gatcaggtaggcacagatt

SEQ ID NO: 785040 - DNA, 19 bp, Mus musculus
  siRNA target sequence for SPACRCAN (NM_174876.2,2434-2452).
caggtaggcacagattatt

SEQ ID NO: 785041 - DNA, 19 bp, Mus musculus
  siRNA target sequence for SPACRCAN (NM_174876.2,2436-2454).
ggtaggcacagattattat

SEQ ID NO: 785042 - DNA, 19 bp, Mus musculus
  siRNA target sequence for SPACRCAN (NM_174876.2,2440-2458).
ggcacagattattatcagt

SEQ ID NO: 785043 - DNA, 19 bp, Mus musculus
  siRNA target sequence for SPACRCAN (NM_174876.2,2612-2630).
gcctccgcgtgacaaacat

SEQ ID NO: 785044 - DNA, 19 bp, Mus musculus
  siRNA target sequence for SPACRCAN (NM_174876.2,2614-2632).
ctccgcgtgacaaacatgt

SEQ ID NO: 785045 - DNA, 19 bp, Mus musculus
  siRNA target sequence for SPACRCAN (NM_174876.2,2617-2635).
cgcgtgacaaacatgttgt

SEQ ID NO: 785046 - DNA, 19 bp, Mus musculus
  siRNA target sequence for SPACRCAN (NM_174876.2,2618-2636).
gcgtgacaaacatgttgtt

SEQ ID NO: 785047 - DNA, 19 bp, Mus musculus
  siRNA target sequence for SPACRCAN (NM_174876.2,2619-2637).
cgtgacaaacatgttgttt

SEQ ID NO: 785048 - DNA, 19 bp, Mus musculus
  siRNA target sequence for SPACRCAN (NM_174876.2,2620-2638).
gtgacaaacatgttgtttt

SEQ ID NO: 785049 - DNA, 19 bp, Mus musculus
  siRNA target sequence for SPACRCAN (NM_174876.2,2622-2640).
gacaaacatgttgttttca

SEQ ID NO: 785050 - DNA, 19 bp, Mus musculus
  siRNA target sequence for SPACRCAN (NM_174876.2,2639-2657).
cagaagacttgtttaacaa

SEQ ID NO: 785051 - DNA, 19 bp, Mus musculus
  siRNA target sequence for SPACRCAN (NM_174876.2,2644-2662).
gacttgtttaacaaaaact

SEQ ID NO: 785052 - DNA, 19 bp, Mus musculus
  siRNA target sequence for SPACRCAN (NM_174876.2,2679-2697).
cctggaacaaagattctta

SEQ ID NO: 785053 - DNA, 19 bp, Mus musculus
  siRNA target sequence for SPACRCAN (NM_174876.2,2734-2752).
gggttccagaacctagaaa

SEQ ID NO: 785054 - DNA, 19 bp, Mus musculus
  siRNA target sequence for SPACRCAN (NM_174876.2,2735-2753).
ggttccagaacctagaaat

SEQ ID NO: 785055 - DNA, 19 bp, Mus musculus
  siRNA target sequence for SPACRCAN (NM_174876.2,2813-2831).
cccctcctaatgtcaacaa

SEQ ID NO: 785056 - DNA, 19 bp, Mus musculus
  siRNA target sequence for SPACRCAN (NM_174876.2,2824-2842).
gtcaacaaggccatgtata

SEQ ID NO: 785057 - DNA, 19 bp, Mus musculus
  siRNA target sequence for SPACRCAN (NM_174876.2,2829-2847).
caaggccatgtataggatt

SEQ ID NO: 785058 - DNA, 19 bp, Mus musculus
  siRNA target sequence for SPACRCAN (NM_174876.2,2879-2897).
ccatgaacttggatatcga

SEQ ID NO: 785059 - DNA, 19 bp, Mus musculus
  siRNA target sequence for SPACRCAN (NM_174876.2,2880-2898).
catgaacttggatatcgat

SEQ ID NO: 785060 - DNA, 19 bp, Mus musculus
  siRNA target sequence for SPACRCAN (NM_174876.2,2931-2949).
ggccaacccttgcaagttt

SEQ ID NO: 785061 - DNA, 19 bp, Mus musculus
  siRNA target sequence for SPACRCAN (NM_174876.2,2946-2964).
gtttcaggcctgtaatgaa

SEQ ID NO: 785062 - DNA, 19 bp, Mus musculus
  siRNA target sequence for SPACRCAN (NM_174876.2,2952-2970).
ggcctgtaatgaattttct

SEQ ID NO: 785063 - DNA, 19 bp, Mus musculus
  siRNA target sequence for SPACRCAN (NM_174876.2,2971-2989).
gagtgtttggtaaatccat

SEQ ID NO: 785064 - DNA, 19 bp, Mus musculus
  siRNA target sequence for SPACRCAN (NM_174876.2,3036-3054).
ggatgaactgccttgtcaa

SEQ ID NO: 785065 - DNA, 19 bp, Mus musculus
  siRNA target sequence for SPACRCAN (NM_174876.2,3084-3102).
cttgaacgatggaaagtgt

SEQ ID NO: 785066 - DNA, 19 bp, Mus musculus
  siRNA target sequence for SPACRCAN (NM_174876.2,3090-3108).
cgatggaaagtgtgacatt

SEQ ID NO: 785067 - DNA, 19 bp, Mus musculus
  siRNA target sequence for SPACRCAN (NM_174876.2,3091-3109).
gatggaaagtgtgacatta

SEQ ID NO: 785068 - DNA, 19 bp, Mus musculus
  siRNA target sequence for SPACRCAN (NM_174876.2,3115-3133).
gggcatggagccatttgta

SEQ ID NO: 785069 - DNA, 19 bp, Mus musculus
  siRNA target sequence for SPACRCAN (NM_174876.2,3134-3152).
gatgccgggttggttcaaa

SEQ ID NO: 785070 - DNA, 19 bp, Mus musculus
  siRNA target sequence for SPACRCAN (NM_174876.2,3344-3362).
gtctgtcatctgttgagaa

SEQ ID NO: 785071 - DNA, 19 bp, Mus musculus
  siRNA target sequence for SPACRCAN (NM_174876.2,3369-3387).
gaagtataaccctgcatat

SEQ ID NO: 785072 - DNA, 19 bp, Mus musculus
  siRNA target sequence for SPACRCAN (NM_174876.2,3393-3411).
ccacttggctggatgtgaa

SEQ ID NO: 785073 - DNA, 19 bp, Mus musculus
  siRNA target sequence for SPACRCAN (NM_174876.2,3399-3417).
ggctggatgtgaactgtat

SEQ ID NO: 785074 - DNA, 19 bp, Mus musculus
  siRNA target sequence for SPACRCAN (NM_174876.2,3412-3430).
ctgtatgagaaatcctata

SEQ ID NO: 785075 - DNA, 19 bp, Mus musculus
  siRNA target sequence for SPACRCAN (NM_174876.2,3444-3462).
ctatagctctgctagtgaa

SEQ ID NO: 785076 - DNA, 19 bp, Mus musculus
  siRNA target sequence for SPACRCAN (NM_174876.2,3475-3493).
ggtctgagcagagaagaaa

SEQ ID NO: 785077 - DNA, 19 bp, Mus musculus
  siRNA target sequence for SPACRCAN (NM_174876.2,3549-3567).
gaggattttggaactctat

SEQ ID NO: 785078 - DNA, 19 bp, Mus musculus
  siRNA target sequence for Zar1 (NM_174877.2,51-69).
cccctgcccgcatccttat

SEQ ID NO: 785079 - DNA, 19 bp, Mus musculus
  siRNA target sequence for Zar1 (NM_174877.2,916-934).
cgagtgtgtgagaaatcct

SEQ ID NO: 785080 - DNA, 19 bp, Mus musculus
  siRNA target sequence for Zar1 (NM_174877.2,917-935).
gagtgtgtgagaaatccta

SEQ ID NO: 785081 - DNA, 19 bp, Mus musculus
  siRNA target sequence for Zar1 (NM_174877.2,955-973).
gacatcacctgtcaaagtt

SEQ ID NO: 785082 - DNA, 19 bp, Mus musculus
  siRNA target sequence for Zar1 (NM_174877.2,1092-1110).
cagcttcaaatacatcatt

SEQ ID NO: 785083 - DNA, 19 bp, Mus musculus
  siRNA target sequence for A630002K24 (NM_174960.1,587-605).
gtgatgcgggtgaaaagct

SEQ ID NO: 785084 - DNA, 19 bp, Mus musculus
  siRNA target sequence for A630002K24 (NM_174960.1,592-610).
gcgggtgaaaagctcaata

SEQ ID NO: 785085 - DNA, 19 bp, Mus musculus
  siRNA target sequence for A630002K24 (NM_174960.1,593-611).
cgggtgaaaagctcaataa

SEQ ID NO: 785086 - DNA, 19 bp, Mus musculus
  siRNA target sequence for A630002K24 (NM_174960.1,594-612).
gggtgaaaagctcaataat

SEQ ID NO: 785087 - DNA, 19 bp, Mus musculus
  siRNA target sequence for A630002K24 (NM_174960.1,633-651).
gcgttacttggcctttaat

SEQ ID NO: 785088 - DNA, 19 bp, Mus musculus
  siRNA target sequence for A630002K24 (NM_174960.1,634-652).
cgttacttggcctttaata

SEQ ID NO: 785089 - DNA, 19 bp, Mus musculus
  siRNA target sequence for A630002K24 (NM_174960.1,731-749).
gcggatcctacttttctga

SEQ ID NO: 785090 - DNA, 19 bp, Mus musculus
  siRNA target sequence for A630002K24 (NM_174960.1,746-764).
ctgacaagatatataagga

SEQ ID NO: 785091 - DNA, 19 bp, Mus musculus
  siRNA target sequence for A630002K24 (NM_174960.1,823-841).
ctcactagtgaaatcgaaa

SEQ ID NO: 785092 - DNA, 19 bp, Mus musculus
  siRNA target sequence for A630002K24 (NM_174960.1,830-848).
gtgaaatcgaaagaataga

SEQ ID NO: 785093 - DNA, 19 bp, Mus musculus
  siRNA target sequence for A630002K24 (NM_174960.1,882-900).
ggcggcacaaattgttttt

SEQ ID NO: 785094 - DNA, 19 bp, Mus musculus
  siRNA target sequence for A630002K24 (NM_174960.1,885-903).
ggcacaaattgtttttgca

SEQ ID NO: 785095 - DNA, 19 bp, Mus musculus
  siRNA target sequence for A630002K24 (NM_174960.1,946-964).
gctgaagagactgtattta

SEQ ID NO: 785096 - DNA, 19 bp, Mus musculus
  siRNA target sequence for 1810063B05Rik (NM_174987.2,298-316).
gcagtggataaaatatttt

SEQ ID NO: 785097 - DNA, 19 bp, Mus musculus
  siRNA target sequence for 1810063B05Rik (NM_174987.2,375-393).
cttcacagtcgactgaaaa

SEQ ID NO: 785098 - DNA, 19 bp, Mus musculus
  siRNA target sequence for 1810063B05Rik (NM_174987.2,380-398).
cagtcgactgaaaattcct

SEQ ID NO: 785099 - DNA, 19 bp, Mus musculus
  siRNA target sequence for AW046014 (NM_174989.1,488-506).
ggatcggtgcagttcagat

SEQ ID NO: 785100 - DNA, 19 bp, Mus musculus
  siRNA target sequence for AW046014 (NM_174989.1,489-507).
gatcggtgcagttcagata

SEQ ID NO: 785101 - DNA, 19 bp, Mus musculus
  siRNA target sequence for AW046014 (NM_174989.1,492-510).
cggtgcagttcagatatca

SEQ ID NO: 785102 - DNA, 19 bp, Mus musculus
  siRNA target sequence for AW046014 (NM_174989.1,530-548).
ccagccactccattctcat

SEQ ID NO: 785103 - DNA, 19 bp, Mus musculus
  siRNA target sequence for AW046014 (NM_174989.1,626-644).
gagttggggacatacgtta

SEQ ID NO: 785104 - DNA, 19 bp, Mus musculus
  siRNA target sequence for AW046014 (NM_174989.1,735-753).
catgggcccagcaagctat

SEQ ID NO: 785105 - DNA, 19 bp, Mus musculus
  siRNA target sequence for AW046014 (NM_174989.1,738-756).
gggcccagcaagctatgta

SEQ ID NO: 785106 - DNA, 19 bp, Mus musculus
  siRNA target sequence for AW046014 (NM_174989.1,739-757).
ggcccagcaagctatgtaa

SEQ ID NO: 785107 - DNA, 19 bp, Mus musculus
  siRNA target sequence for AW046014 (NM_174989.1,741-759).
cccagcaagctatgtaaca

SEQ ID NO: 785108 - DNA, 19 bp, Mus musculus
  siRNA target sequence for AW046014 (NM_174989.1,858-876).
gggttaccacacgaaatta

SEQ ID NO: 785109 - DNA, 19 bp, Mus musculus
  siRNA target sequence for AW046014 (NM_174989.1,948-966).
gtccactgtcccattgaat

SEQ ID NO: 785110 - DNA, 19 bp, Mus musculus
  siRNA target sequence for AW046014 (NM_174989.1,999-1017).
ctgacgtccaccacagaaa

SEQ ID NO: 785111 - DNA, 19 bp, Mus musculus
  siRNA target sequence for AW046014 (NM_174989.1,1028-1046).
gcagtggcctattacaagt

SEQ ID NO: 785112 - DNA, 19 bp, Mus musculus
  siRNA target sequence for AW046014 (NM_174989.1,1062-1080).
gttcctgtaggagatgatt

SEQ ID NO: 785113 - DNA, 19 bp, Mus musculus
  siRNA target sequence for AW046014 (NM_174989.1,1461-1479).
ctgagcctgcatcaaatca

SEQ ID NO: 785114 - DNA, 19 bp, Mus musculus
  siRNA target sequence for AW046014 (NM_174989.1,1679-1697).
gcgggtacgctggaagaaa

SEQ ID NO: 785115 - DNA, 19 bp, Mus musculus
  siRNA target sequence for AW046014 (NM_174989.1,1785-1803).
gcctatgtccatagctata

SEQ ID NO: 785116 - DNA, 19 bp, Mus musculus
  siRNA target sequence for AW046014 (NM_174989.1,2038-2056).
ccccacagtcccaatcctt

SEQ ID NO: 785117 - DNA, 19 bp, Mus musculus
  siRNA target sequence for AW046014 (NM_174989.1,2043-2061).
cagtcccaatcctttccat

SEQ ID NO: 785118 - DNA, 19 bp, Mus musculus
  siRNA target sequence for Ian1 (NM_174990.2,87-105).
gttcatcccagaaagttca

SEQ ID NO: 785119 - DNA, 19 bp, Mus musculus
  siRNA target sequence for Ian1 (NM_174990.2,309-327).
cgtggatacacctggtatt

SEQ ID NO: 785120 - DNA, 19 bp, Mus musculus
  siRNA target sequence for Ian1 (NM_174990.2,310-328).
gtggatacacctggtattt

SEQ ID NO: 785121 - DNA, 19 bp, Mus musculus
  siRNA target sequence for Ian1 (NM_174990.2,613-631).
cgctactgtttgttcaaca

SEQ ID NO: 785122 - DNA, 19 bp, Mus musculus
  siRNA target sequence for Ian1 (NM_174990.2,716-734).
gatgctttactaataagat

SEQ ID NO: 785123 - DNA, 19 bp, Mus musculus
  siRNA target sequence for Ian1 (NM_174990.2,719-737).
gctttactaataagatgta

SEQ ID NO: 785124 - DNA, 19 bp, Mus musculus
  siRNA target sequence for Ian1 (NM_174990.2,770-788).
ccttgaggatgcaagaatt

SEQ ID NO: 785125 - DNA, 19 bp, Mus musculus
  siRNA target sequence for Ian1 (NM_174990.2,892-910).
cgtatggagagggaattca

SEQ ID NO: 785126 - DNA, 19 bp, Mus musculus
  siRNA target sequence for Ian1 (NM_174990.2,893-911).
gtatggagagggaattcaa

SEQ ID NO: 785127 - DNA, 19 bp, Mus musculus
  siRNA target sequence for Ian1 (NM_174990.2,917-935).
gggaggctatctttacaaa

SEQ ID NO: 785128 - DNA, 19 bp, Mus musculus
  siRNA target sequence for Ian1 (NM_174990.2,919-937).
gaggctatctttacaaaga

SEQ ID NO: 785129 - DNA, 19 bp, Mus musculus
  siRNA target sequence for Ian1 (NM_174990.2,966-984).
gaacacaagtatgatactt

SEQ ID NO: 785130 - DNA, 19 bp, Mus musculus
  siRNA target sequence for BC004728 (NM_174992.2,498-516).
gagtacttcatctaatgct

SEQ ID NO: 785131 - DNA, 19 bp, Mus musculus
  siRNA target sequence for 3830422N12Rik (NM_174993.1,19-37).
ccaagtcagagaaggaata

SEQ ID NO: 785132 - DNA, 19 bp, Mus musculus
  siRNA target sequence for 3830422N12Rik (NM_174993.1,25-43).
cagagaaggaatagatcta

SEQ ID NO: 785133 - DNA, 19 bp, Mus musculus
  siRNA target sequence for 3830422N12Rik (NM_174993.1,38-56).
gatctaagagccgtgatta

SEQ ID NO: 785134 - DNA, 19 bp, Mus musculus
  siRNA target sequence for 3830422N12Rik (NM_174993.1,61-79).
ggtgcacggtcaaaggtaa

SEQ ID NO: 785135 - DNA, 19 bp, Mus musculus
  siRNA target sequence for 3830422N12Rik (NM_174993.1,64-82).
gcacggtcaaaggtaacaa

SEQ ID NO: 785136 - DNA, 19 bp, Mus musculus
  siRNA target sequence for 3830422N12Rik (NM_174993.1,95-113).
ggaacagagacgatactct

SEQ ID NO: 785137 - DNA, 19 bp, Mus musculus
  siRNA target sequence for 3830422N12Rik (NM_174993.1,96-114).
gaacagagacgatactctt

SEQ ID NO: 785138 - DNA, 19 bp, Mus musculus
  siRNA target sequence for 3830422N12Rik (NM_174993.1,145-163).
gccgaccaggggaacaaca

SEQ ID NO: 785139 - DNA, 19 bp, Mus musculus
  siRNA target sequence for 3830422N12Rik (NM_174993.1,146-164).
ccgaccaggggaacaacat

SEQ ID NO: 785140 - DNA, 19 bp, Mus musculus
  siRNA target sequence for 3830422N12Rik (NM_174993.1,287-305).
ctgtgaacactgcgaaatt

SEQ ID NO: 785141 - DNA, 19 bp, Mus musculus
  siRNA target sequence for 3830422N12Rik (NM_174993.1,334-352).
gaaccccctttgggaaata

SEQ ID NO: 785142 - DNA, 19 bp, Mus musculus
  siRNA target sequence for 3830422N12Rik (NM_174993.1,370-388).
ccaacagcctgcatcataa

SEQ ID NO: 785143 - DNA, 19 bp, Mus musculus
  siRNA target sequence for 3830422N12Rik (NM_174993.1,430-448).
cttagcgagagtgaatgtt

SEQ ID NO: 785144 - DNA, 19 bp, Mus musculus
  siRNA target sequence for 3830422N12Rik (NM_174993.1,434-452).
gcgagagtgaatgtttaaa

SEQ ID NO: 785145 - DNA, 19 bp, Mus musculus
  siRNA target sequence for 3830422N12Rik (NM_174993.1,459-477).
gtgctgttcttcaacatct

SEQ ID NO: 785146 - DNA, 19 bp, Mus musculus
  siRNA target sequence for BC016548 (NM_174994.1,399-417).
cccctaaggggatagaact

SEQ ID NO: 785147 - DNA, 19 bp, Mus musculus
  siRNA target sequence for BC016548 (NM_174994.1,544-562).
cggtcttcatcccaaacaa

SEQ ID NO: 785148 - DNA, 19 bp, Mus musculus
  siRNA target sequence for BC016548 (NM_174994.1,546-564).
gtcttcatcccaaacaact

SEQ ID NO: 785149 - DNA, 19 bp, Mus musculus
  siRNA target sequence for BC016548 (NM_174994.1,596-614).
gtatgtgagatatgttcta

SEQ ID NO: 785150 - DNA, 19 bp, Mus musculus
  siRNA target sequence for BC016548 (NM_174994.1,600-618).
gtgagatatgttctataat

SEQ ID NO: 785151 - DNA, 19 bp, Mus musculus
  siRNA target sequence for D4Ertd22e (NM_174996.1,64-82).
gcgggcaggaaatccaaat

SEQ ID NO: 785152 - DNA, 19 bp, Mus musculus
  siRNA target sequence for D4Ertd22e (NM_174996.1,66-84).
gggcaggaaatccaaatct

SEQ ID NO: 785153 - DNA, 19 bp, Mus musculus
  siRNA target sequence for BC043098 (NM_174997.1,187-205).
ctggcgttccctatgcaaa

SEQ ID NO: 785154 - DNA, 19 bp, Mus musculus
  siRNA target sequence for BC043098 (NM_174997.1,261-279).
gcctattctcctaacatgt

SEQ ID NO: 785155 - DNA, 19 bp, Mus musculus
  siRNA target sequence for BC043098 (NM_174997.1,288-306).
gcgaatcctaccttccaaa

SEQ ID NO: 785156 - DNA, 19 bp, Mus musculus
  siRNA target sequence for BC043098 (NM_174997.1,487-505).
cacctcctcacgtcattca

SEQ ID NO: 785157 - DNA, 19 bp, Mus musculus
  siRNA target sequence for E130012K09 (NM_174999.1,158-176).
gcaggccctgactgtttca

SEQ ID NO: 785158 - DNA, 19 bp, Mus musculus
  siRNA target sequence for E130012K09 (NM_174999.1,217-235).
cgtccattcgtctgctttt

SEQ ID NO: 785159 - DNA, 19 bp, Mus musculus
  siRNA target sequence for E130012K09 (NM_174999.1,333-351).
caggattcctgcctaacta

SEQ ID NO: 785160 - DNA, 19 bp, Mus musculus
  siRNA target sequence for E130012K09 (NM_174999.1,335-353).
ggattcctgcctaactata

SEQ ID NO: 785161 - DNA, 19 bp, Mus musculus
  siRNA target sequence for E130012K09 (NM_174999.1,336-354).
gattcctgcctaactatat

SEQ ID NO: 785162 - DNA, 19 bp, Mus musculus
  siRNA target sequence for E130012K09 (NM_174999.1,406-424).
caagacgaggtgtaccttt

SEQ ID NO: 785163 - DNA, 19 bp, Mus musculus
  siRNA target sequence for E130012K09 (NM_174999.1,409-427).
gacgaggtgtacctttgat

SEQ ID NO: 785164 - DNA, 19 bp, Mus musculus
  siRNA target sequence for E130012K09 (NM_174999.1,411-429).
cgaggtgtacctttgatat

SEQ ID NO: 785165 - DNA, 19 bp, Mus musculus
  siRNA target sequence for E130012K09 (NM_174999.1,412-430).
gaggtgtacctttgatata

SEQ ID NO: 785166 - DNA, 19 bp, Mus musculus
  siRNA target sequence for E130012K09 (NM_174999.1,417-435).
gtacctttgatatatgtat

SEQ ID NO: 785167 - DNA, 19 bp, Mus musculus
  siRNA target sequence for E130012K09 (NM_174999.1,432-450).
gtatccacgtaattgataa

SEQ ID NO: 785168 - DNA, 19 bp, Mus musculus
  siRNA target sequence for E130012K09 (NM_174999.1,446-464).
gataaaacgggaaagatca

SEQ ID NO: 785169 - DNA, 19 bp, Mus musculus
  siRNA target sequence for E130012K09 (NM_174999.1,508-526).
ggcgggttcaggaatcagt

SEQ ID NO: 785170 - DNA, 19 bp, Mus musculus
  siRNA target sequence for E130012K09 (NM_174999.1,518-536).
ggaatcagtcgcatcactt

SEQ ID NO: 785171 - DNA, 19 bp, Mus musculus
  siRNA target sequence for E130012K09 (NM_174999.1,645-663).
ctcctccactagactataa

SEQ ID NO: 785172 - DNA, 19 bp, Mus musculus
  siRNA target sequence for E130012K09 (NM_174999.1,648-666).
ctccactagactataagct

SEQ ID NO: 785173 - DNA, 19 bp, Mus musculus
  siRNA target sequence for E130012K09 (NM_174999.1,653-671).
ctagactataagcttgttt

SEQ ID NO: 785174 - DNA, 19 bp, Mus musculus
  siRNA target sequence for BC025076 (NM_175002.1,210-228).
catgcgcgactgacagaaa

SEQ ID NO: 785175 - DNA, 19 bp, Mus musculus
  siRNA target sequence for BC025076 (NM_175002.1,213-231).
gcgcgactgacagaaaaga

SEQ ID NO: 785176 - DNA, 19 bp, Mus musculus
  siRNA target sequence for BC025076 (NM_175002.1,306-324).
catactgcaggggacttta

SEQ ID NO: 785177 - DNA, 19 bp, Mus musculus
  siRNA target sequence for BC025076 (NM_175002.1,344-362).
ggaactaaaggatatgaca

SEQ ID NO: 785178 - DNA, 19 bp, Mus musculus
  siRNA target sequence for BC025076 (NM_175002.1,385-403).
cgtctttttacgtgtttca

SEQ ID NO: 785179 - DNA, 19 bp, Mus musculus
  siRNA target sequence for BC025076 (NM_175002.1,455-473).
cctcagcgcgtcatcttct

SEQ ID NO: 785180 - DNA, 19 bp, Mus musculus
  siRNA target sequence for BC025076 (NM_175002.1,461-479).
cgcgtcatcttctgactta

SEQ ID NO: 785181 - DNA, 19 bp, Mus musculus
  siRNA target sequence for BC025076 (NM_175002.1,474-492).
gacttaccgttgaagtttt

SEQ ID NO: 785182 - DNA, 19 bp, Mus musculus
  siRNA target sequence for AU040829 (NM_175003.2,367-385).
cggtgggcagggcagaaaa

SEQ ID NO: 785183 - DNA, 19 bp, Mus musculus
  siRNA target sequence for AU040829 (NM_175003.2,506-524).
ggccgacaagcgatcaaaa

SEQ ID NO: 785184 - DNA, 19 bp, Mus musculus
  siRNA target sequence for AU040829 (NM_175003.2,508-526).
ccgacaagcgatcaaaaaa

SEQ ID NO: 785185 - DNA, 19 bp, Mus musculus
  siRNA target sequence for AU040829 (NM_175003.2,704-722).
cgctgaggtggaaattcca

SEQ ID NO: 785186 - DNA, 19 bp, Mus musculus
  siRNA target sequence for AU040829 (NM_175003.2,705-723).
gctgaggtggaaattccaa

SEQ ID NO: 785187 - DNA, 19 bp, Mus musculus
  siRNA target sequence for AU040829 (NM_175003.2,953-971).
ctatgcaaactactttcaa

SEQ ID NO: 785188 - DNA, 19 bp, Mus musculus
  siRNA target sequence for AU040829 (NM_175003.2,962-980).
ctactttcaaacgctaata

SEQ ID NO: 785189 - DNA, 19 bp, Mus musculus
  siRNA target sequence for AU040829 (NM_175003.2,965-983).
ctttcaaacgctaatagaa

SEQ ID NO: 785190 - DNA, 19 bp, Mus musculus
  siRNA target sequence for AU040829 (NM_175003.2,1489-1507).
ctgaatatcaggatgtaaa

SEQ ID NO: 785191 - DNA, 19 bp, Mus musculus
  siRNA target sequence for AU040829 (NM_175003.2,1519-1537).
ccagtaacatggcaattgt

SEQ ID NO: 785192 - DNA, 19 bp, Mus musculus
  siRNA target sequence for AU040829 (NM_175003.2,1563-1581).
cagtcagaggggaacatca

SEQ ID NO: 785193 - DNA, 19 bp, Mus musculus
  siRNA target sequence for AU040829 (NM_175003.2,2070-2088).
cccagtgtgtctaaaagca

SEQ ID NO: 785194 - DNA, 19 bp, Mus musculus
  siRNA target sequence for AU040829 (NM_175003.2,2219-2237).
caccctccggaaagtttca

SEQ ID NO: 785195 - DNA, 19 bp, Mus musculus
  siRNA target sequence for AU040829 (NM_175003.2,2221-2239).
ccctccggaaagtttcaaa

SEQ ID NO: 785196 - DNA, 19 bp, Mus musculus
  siRNA target sequence for AU040829 (NM_175003.2,2240-2258).
gaaggtggcaccaattcct

SEQ ID NO: 785197 - DNA, 19 bp, Mus musculus
  siRNA target sequence for AU040829 (NM_175003.2,2531-2549).
cagcctgtcggcttcaagt

SEQ ID NO: 785198 - DNA, 19 bp, Mus musculus
  siRNA target sequence for A230072I16Rik (NM_175004.1,354-372).
cccccagaactcaacaagt

SEQ ID NO: 785199 - DNA, 19 bp, Mus musculus
  siRNA target sequence for A230072I16Rik (NM_175004.1,450-468).
ggttcgaactgaccttaaa

SEQ ID NO: 785200 - DNA, 19 bp, Mus musculus
  siRNA target sequence for A230072I16Rik (NM_175004.1,451-469).
gttcgaactgaccttaaaa

SEQ ID NO: 785201 - DNA, 19 bp, Mus musculus
  siRNA target sequence for A230072I16Rik (NM_175004.1,517-535).
gcctacaagcagactcaaa

SEQ ID NO: 785202 - DNA, 19 bp, Mus musculus
  siRNA target sequence for A230072I16Rik (NM_175004.1,542-560).
gccctcaagtgctcaaaga

SEQ ID NO: 785203 - DNA, 19 bp, Mus musculus
  siRNA target sequence for A230072I16Rik (NM_175004.1,544-562).
cctcaagtgctcaaagagt

SEQ ID NO: 785204 - DNA, 19 bp, Mus musculus
  siRNA target sequence for A230072I16Rik (NM_175004.1,677-695).
ctggacgtactcagattga

SEQ ID NO: 785205 - DNA, 19 bp, Mus musculus
  siRNA target sequence for A230072I16Rik (NM_175004.1,726-744).
gccaggaccagtagaacta

SEQ ID NO: 785206 - DNA, 19 bp, Mus musculus
  siRNA target sequence for A230072I16Rik (NM_175004.1,727-745).
ccaggaccagtagaactaa

SEQ ID NO: 785207 - DNA, 19 bp, Mus musculus
  siRNA target sequence for A230072I16Rik (NM_175004.1,731-749).
gaccagtagaactaattga

SEQ ID NO: 785208 - DNA, 19 bp, Mus musculus
  siRNA target sequence for A230072I16Rik (NM_175004.1,734-752).
cagtagaactaattgatga

SEQ ID NO: 785209 - DNA, 19 bp, Mus musculus
  siRNA target sequence for A230072I16Rik (NM_175004.1,760-778).
ggccacctaaaactttact

SEQ ID NO: 785210 - DNA, 19 bp, Mus musculus
  siRNA target sequence for B130050K08 (NM_175010.1,151-169).
gacgcagagatccattact

SEQ ID NO: 785211 - DNA, 19 bp, Mus musculus
  siRNA target sequence for B130050K08 (NM_175010.1,366-384).
gcaatcgaccgcatcctaa

SEQ ID NO: 785212 - DNA, 19 bp, Mus musculus
  siRNA target sequence for B130050K08 (NM_175010.1,371-389).
cgaccgcatcctaagtttt

SEQ ID NO: 785213 - DNA, 19 bp, Mus musculus
  siRNA target sequence for E330017A01 (NM_175011.1,100-118).
gcacacctcccatgtgtat

SEQ ID NO: 785214 - DNA, 19 bp, Mus musculus
  siRNA target sequence for E330017A01 (NM_175011.1,106-124).
ctcccatgtgtattttgca

SEQ ID NO: 785215 - DNA, 19 bp, Mus musculus
  siRNA target sequence for E330017A01 (NM_175011.1,182-200).
gaaaccctggctgattcaa

SEQ ID NO: 785216 - DNA, 19 bp, Mus musculus
  siRNA target sequence for E330017A01 (NM_175011.1,213-231).
caaatagattcctaaacca

SEQ ID NO: 785217 - DNA, 19 bp, Mus musculus
  siRNA target sequence for E330017A01 (NM_175011.1,233-251).
ctatggacccgtaacaaaa

SEQ ID NO: 785218 - DNA, 19 bp, Mus musculus
  siRNA target sequence for E330017A01 (NM_175011.1,237-255).
ggacccgtaacaaaaagat

SEQ ID NO: 785219 - DNA, 19 bp, Mus musculus
  siRNA target sequence for E330017A01 (NM_175011.1,260-278).
cctcctccaacgtatgaga

SEQ ID NO: 785220 - DNA, 19 bp, Mus musculus
  siRNA target sequence for E330017A01 (NM_175011.1,284-302).
gatatgaaggaaataacta

SEQ ID NO: 785221 - DNA, 19 bp, Mus musculus
  siRNA target sequence for E330017A01 (NM_175011.1,305-323).
cctaaaagtgccttactaa

SEQ ID NO: 785222 - DNA, 19 bp, Mus musculus
  siRNA target sequence for E330017A01 (NM_175011.1,306-324).
ctaaaagtgccttactaat

SEQ ID NO: 785223 - DNA, 19 bp, Mus musculus
  siRNA target sequence for E330017A01 (NM_175011.1,331-349).
gaatatggaagagacatta

SEQ ID NO: 785224 - DNA, 19 bp, Mus musculus
  siRNA target sequence for E330017A01 (NM_175011.1,378-396).
ctgcacgtcgtgaatcaga

SEQ ID NO: 785225 - DNA, 19 bp, Mus musculus
  siRNA target sequence for E330017A01 (NM_175011.1,384-402).
gtcgtgaatcagatctctt

SEQ ID NO: 785226 - DNA, 19 bp, Mus musculus
  siRNA target sequence for E330017A01 (NM_175011.1,386-404).
cgtgaatcagatctcttaa

SEQ ID NO: 785227 - DNA, 19 bp, Mus musculus
  siRNA target sequence for E330017A01 (NM_175011.1,389-407).
gaatcagatctcttaaaat

SEQ ID NO: 785228 - DNA, 19 bp, Mus musculus
  siRNA target sequence for E330017A01 (NM_175011.1,426-444).
gtaaacaaagagagtttaa

SEQ ID NO: 785229 - DNA, 19 bp, Mus musculus
  siRNA target sequence for E330017A01 (NM_175011.1,468-486).
ctcctccgcaaaaaggtaa

SEQ ID NO: 785230 - DNA, 19 bp, Mus musculus
  siRNA target sequence for E330017A01 (NM_175011.1,545-563).
gggtacctcagtagcaaaa

SEQ ID NO: 785231 - DNA, 19 bp, Mus musculus
  siRNA target sequence for E330017A01 (NM_175011.1,567-585).
gcaagcctggagatcataa

SEQ ID NO: 785232 - DNA, 19 bp, Mus musculus
  siRNA target sequence for E330017A01 (NM_175011.1,568-586).
caagcctggagatcataaa

SEQ ID NO: 785233 - DNA, 19 bp, Mus musculus
  siRNA target sequence for 9530023G02 (NM_175016.1,289-307).
gaaggtctgagctgtgatt

SEQ ID NO: 785234 - DNA, 19 bp, Mus musculus
  siRNA target sequence for 9530023G02 (NM_175016.1,302-320).
gtgattacaccgtcctatt

SEQ ID NO: 785235 - DNA, 19 bp, Mus musculus
  siRNA target sequence for 9530023G02 (NM_175016.1,358-376).
gagcaagaagtggagtatt

SEQ ID NO: 785236 - DNA, 19 bp, Mus musculus
  siRNA target sequence for 9530023G02 (NM_175016.1,360-378).
gcaagaagtggagtatttt

SEQ ID NO: 785237 - DNA, 19 bp, Mus musculus
  siRNA target sequence for 9530023G02 (NM_175016.1,457-475).
ggcctcacgtacacgtttt

SEQ ID NO: 785238 - DNA, 19 bp, Mus musculus
  siRNA target sequence for 9530023G02 (NM_175016.1,459-477).
cctcacgtacacgttttct

SEQ ID NO: 785239 - DNA, 19 bp, Mus musculus
  siRNA target sequence for 9530023G02 (NM_175016.1,573-591).
cgtgaacaggtacaaagat

SEQ ID NO: 785240 - DNA, 19 bp, Mus musculus
  siRNA target sequence for 4933427D06 (NM_175017.2,172-190).
ctgagatgcccgatcaaga

SEQ ID NO: 785241 - DNA, 19 bp, Mus musculus
  siRNA target sequence for 4933427D06 (NM_175017.2,252-270).
gtagacgagcctaaagagt

SEQ ID NO: 785242 - DNA, 19 bp, Mus musculus
  siRNA target sequence for 4933427D06 (NM_175017.2,279-297).
cctgccagacccattgctt

SEQ ID NO: 785243 - DNA, 19 bp, Mus musculus
  siRNA target sequence for 4933427D06 (NM_175017.2,280-298).
ctgccagacccattgctta

SEQ ID NO: 785244 - DNA, 19 bp, Mus musculus
  siRNA target sequence for 4933427D06 (NM_175017.2,284-302).
cagacccattgcttatgta

SEQ ID NO: 785245 - DNA, 19 bp, Mus musculus
  siRNA target sequence for 4933427D06 (NM_175017.2,513-531).
gttctacagacatacttca

SEQ ID NO: 785246 - DNA, 19 bp, Mus musculus
  siRNA target sequence for 4933427D06 (NM_175017.2,611-629).
ccagtggccacctatagtt

SEQ ID NO: 785247 - DNA, 19 bp, Mus musculus
  siRNA target sequence for 4933427D06 (NM_175017.2,614-632).
gtggccacctatagtttat

SEQ ID NO: 785248 - DNA, 19 bp, Mus musculus
  siRNA target sequence for 4933427D06 (NM_175017.2,693-711).
gtcccgtgcttcatgtcat

SEQ ID NO: 785249 - DNA, 19 bp, Mus musculus
  siRNA target sequence for 4933427D06 (NM_175017.2,696-714).
ccgtgcttcatgtcattca

SEQ ID NO: 785250 - DNA, 19 bp, Mus musculus
  siRNA target sequence for BC042901 (NM_175021.1,431-449).
ctggcggactgcaatgata

SEQ ID NO: 785251 - DNA, 19 bp, Mus musculus
  siRNA target sequence for BC042901 (NM_175021.1,575-593).
gccaagtccgagtacatga

SEQ ID NO: 785252 - DNA, 19 bp, Mus musculus
  siRNA target sequence for BC042901 (NM_175021.1,770-788).
ccagagccctcctaccatt

SEQ ID NO: 785253 - DNA, 19 bp, Mus musculus
  siRNA target sequence for BC042901 (NM_175021.1,954-972).
gtctcccctgccaaatcca

SEQ ID NO: 785254 - DNA, 19 bp, Mus musculus
  siRNA target sequence for BC042901 (NM_175021.1,1174-1192).
ggatggcagcgggatgaaa

SEQ ID NO: 785255 - DNA, 19 bp, Mus musculus
  siRNA target sequence for BC042901 (NM_175021.1,1179-1197).
gcagcgggatgaaagatgt

SEQ ID NO: 785256 - DNA, 19 bp, Mus musculus
  siRNA target sequence for BC042901 (NM_175021.1,1619-1637).
gctccagccccctctgata

SEQ ID NO: 785257 - DNA, 19 bp, Mus musculus
  siRNA target sequence for BC042901 (NM_175021.1,1694-1712).
cgggtgatgggcaaagtat

SEQ ID NO: 785258 - DNA, 19 bp, Mus musculus
  siRNA target sequence for BC042901 (NM_175021.1,1736-1754).
ccagacgaggagaacatca

SEQ ID NO: 785259 - DNA, 19 bp, Mus musculus
  siRNA target sequence for BC042901 (NM_175021.1,1763-1781).
ctccagctcatcgaaaagt

SEQ ID NO: 785260 - DNA, 19 bp, Mus musculus
  siRNA target sequence for BC042901 (NM_175021.1,1999-2017).
gcctcctcgggcattacca

SEQ ID NO: 785261 - DNA, 19 bp, Mus musculus
  siRNA target sequence for BC042901 (NM_175021.1,2205-2223).
cgtcaccccaggctattct

SEQ ID NO: 785262 - DNA, 19 bp, Mus musculus
  siRNA target sequence for BC042901 (NM_175021.1,2253-2271).
ggcctgacctggagatcaa

SEQ ID NO: 785263 - DNA, 19 bp, Mus musculus
  siRNA target sequence for BC042901 (NM_175021.1,2254-2272).
gcctgacctggagatcaat

SEQ ID NO: 785264 - DNA, 19 bp, Mus musculus
  siRNA target sequence for BC042901 (NM_175021.1,2258-2276).
gacctggagatcaatccta

SEQ ID NO: 785265 - DNA, 19 bp, Mus musculus
  siRNA target sequence for C030034J04Rik (NM_175023.1,290-308).
caacgcacagacgaaagaa

SEQ ID NO: 785266 - DNA, 19 bp, Mus musculus
  siRNA target sequence for C030034J04Rik (NM_175023.1,293-311).
cgcacagacgaaagaagaa

SEQ ID NO: 785267 - DNA, 19 bp, Mus musculus
  siRNA target sequence for C030034J04Rik (NM_175023.1,297-315).
cagacgaaagaagaataca

SEQ ID NO: 785268 - DNA, 19 bp, Mus musculus
  siRNA target sequence for C030034J04Rik (NM_175023.1,391-409).
caagcaagacatatgttat

SEQ ID NO: 785269 - DNA, 19 bp, Mus musculus
  siRNA target sequence for C030034J04Rik (NM_175023.1,447-465).
gtatgtaaaaacacaatca

SEQ ID NO: 785270 - DNA, 19 bp, Mus musculus
  siRNA target sequence for C030034J04Rik (NM_175023.1,458-476).
cacaatcaccctttttcta

SEQ ID NO: 785271 - DNA, 19 bp, Mus musculus
  siRNA target sequence for C030034J04Rik (NM_175023.1,464-482).
caccctttttctacacaat

SEQ ID NO: 785272 - DNA, 19 bp, Mus musculus
  siRNA target sequence for C030034J04Rik (NM_175023.1,477-495).
cacaattgcttttaccttt

SEQ ID NO: 785273 - DNA, 19 bp, Mus musculus
  siRNA target sequence for G630049C14Rik (NM_175024.2,114-132).
ggcccaaaccgctgtgata

SEQ ID NO: 785274 - DNA, 19 bp, Mus musculus
  siRNA target sequence for G630049C14Rik (NM_175024.2,118-136).
caaaccgctgtgataccat

SEQ ID NO: 785275 - DNA, 19 bp, Mus musculus
  siRNA target sequence for G630049C14Rik (NM_175024.2,319-337).
cacacccagataatttgca

SEQ ID NO: 785276 - DNA, 19 bp, Mus musculus
  siRNA target sequence for AI447904 (NM_175026.1,852-870).
gaccgtccagcagtattct

SEQ ID NO: 785277 - DNA, 19 bp, Mus musculus
  siRNA target sequence for AI447904 (NM_175026.1,1364-1382).
gaagaaaagtggaactaca

SEQ ID NO: 785278 - DNA, 19 bp, Mus musculus
  siRNA target sequence for AI447904 (NM_175026.1,1478-1496).
ctcatatgctttaaactga

SEQ ID NO: 785279 - DNA, 19 bp, Mus musculus
  siRNA target sequence for AI447904 (NM_175026.1,1549-1567).
ggttatcaaagctaagaat

SEQ ID NO: 785280 - DNA, 19 bp, Mus musculus
  siRNA target sequence for BC022692 (NM_175027.2,487-505).
cgcaaagttcagagagaaa

SEQ ID NO: 785281 - DNA, 19 bp, Mus musculus
  siRNA target sequence for BC022692 (NM_175027.2,507-525).
gatactgaagcaccttaat

SEQ ID NO: 785282 - DNA, 19 bp, Mus musculus
  siRNA target sequence for BC022692 (NM_175027.2,517-535).
caccttaatatgacagtaa

SEQ ID NO: 785283 - DNA, 19 bp, Mus musculus
  siRNA target sequence for BC022692 (NM_175027.2,545-563).
gctatgcggagatgacttt

SEQ ID NO: 785284 - DNA, 19 bp, Mus musculus
  siRNA target sequence for BC022692 (NM_175027.2,565-583).
gcgttggctgagattcagt

SEQ ID NO: 785285 - DNA, 19 bp, Mus musculus
  siRNA target sequence for BC022692 (NM_175027.2,566-584).
cgttggctgagattcagtt

SEQ ID NO: 785286 - DNA, 19 bp, Mus musculus
  siRNA target sequence for BC022692 (NM_175027.2,570-588).
ggctgagattcagttgaaa

SEQ ID NO: 785287 - DNA, 19 bp, Mus musculus
  siRNA target sequence for BC022692 (NM_175027.2,606-624).
gacactggccaattttgta

SEQ ID NO: 785288 - DNA, 19 bp, Mus musculus
  siRNA target sequence for BC022692 (NM_175027.2,612-630).
ggccaattttgtaattgca

SEQ ID NO: 785289 - DNA, 19 bp, Mus musculus
  siRNA target sequence for Autl1 (NM_175029.2,600-618).
gaagttgacaagctaaaaa

SEQ ID NO: 785290 - DNA, 19 bp, Mus musculus
  siRNA target sequence for Autl1 (NM_175029.2,633-651).
gcttggaacaatatgaaat

SEQ ID NO: 785291 - DNA, 19 bp, Mus musculus
  siRNA target sequence for Autl1 (NM_175029.2,634-652).
cttggaacaatatgaaata

SEQ ID NO: 785292 - DNA, 19 bp, Mus musculus
  siRNA target sequence for Autl1 (NM_175029.2,655-673).
gttgggtgttgaaaacaaa

SEQ ID NO: 785293 - DNA, 19 bp, Mus musculus
  siRNA target sequence for Autl1 (NM_175029.2,662-680).
gttgaaaacaaagacatat

SEQ ID NO: 785294 - DNA, 19 bp, Mus musculus
  siRNA target sequence for Autl1 (NM_175029.2,718-736).
gttatcattttaaatatga

SEQ ID NO: 785295 - DNA, 19 bp, Mus musculus
  siRNA target sequence for Autl1 (NM_175029.2,774-792).
gccattgaagatcatgtaa

SEQ ID NO: 785296 - DNA, 19 bp, Mus musculus
  siRNA target sequence for Autl1 (NM_175029.2,812-830).
gttccgtaaggatttcatt

SEQ ID NO: 785297 - DNA, 19 bp, Mus musculus
  siRNA target sequence for Autl1 (NM_175029.2,815-833).
ccgtaaggatttcatttct

SEQ ID NO: 785298 - DNA, 19 bp, Mus musculus
  siRNA target sequence for Autl1 (NM_175029.2,816-834).
cgtaaggatttcatttcta

SEQ ID NO: 785299 - DNA, 19 bp, Mus musculus
  siRNA target sequence for Autl1 (NM_175029.2,944-962).
gggactcatactccatttt

SEQ ID NO: 785300 - DNA, 19 bp, Mus musculus
  siRNA target sequence for Autl1 (NM_175029.2,1046-1064).
gtttactgcatcgtttgaa

SEQ ID NO: 785301 - DNA, 19 bp, Mus musculus
  siRNA target sequence for Autl1 (NM_175029.2,1152-1170).
cggaatgaggcttatcaca

SEQ ID NO: 785302 - DNA, 19 bp, Mus musculus
  siRNA target sequence for Autl1 (NM_175029.2,1161-1179).
gcttatcacaggaagatca

SEQ ID NO: 785303 - DNA, 19 bp, Mus musculus
  siRNA target sequence for Autl1 (NM_175029.2,1162-1180).
cttatcacaggaagatcat

SEQ ID NO: 785304 - DNA, 19 bp, Mus musculus
  siRNA target sequence for Autl1 (NM_175029.2,1216-1234).
gcttacatcgtctgataga

SEQ ID NO: 785305 - DNA, 19 bp, Mus musculus
  siRNA target sequence for Autl1 (NM_175029.2,1281-1299).
gcggtggttgctcacattt

SEQ ID NO: 785306 - DNA, 19 bp, Mus musculus
  siRNA target sequence for Autl1 (NM_175029.2,1282-1300).
cggtggttgctcacatttt

SEQ ID NO: 785307 - DNA, 19 bp, Mus musculus
  siRNA target sequence for Autl1 (NM_175029.2,1287-1305).
gttgctcacattttaagaa

SEQ ID NO: 785308 - DNA, 19 bp, Mus musculus
  siRNA target sequence for Autl1 (NM_175029.2,1332-1350).
gatttgcaagggctaacta

SEQ ID NO: 785309 - DNA, 19 bp, Mus musculus
  siRNA target sequence for Autl1 (NM_175029.2,1337-1355).
gcaagggctaactatttat

SEQ ID NO: 785310 - DNA, 19 bp, Mus musculus
  siRNA target sequence for Autl1 (NM_175029.2,1359-1377).
gcccaggactgtacagttt

SEQ ID NO: 785311 - DNA, 19 bp, Mus musculus
  siRNA target sequence for Autl1 (NM_175029.2,1365-1383).
gactgtacagtttacaatt

SEQ ID NO: 785312 - DNA, 19 bp, Mus musculus
  siRNA target sequence for Autl1 (NM_175029.2,1367-1385).
ctgtacagtttacaattct

SEQ ID NO: 785313 - DNA, 19 bp, Mus musculus
  siRNA target sequence for Autl1 (NM_175029.2,1369-1387).
gtacagtttacaattctga

SEQ ID NO: 785314 - DNA, 19 bp, Mus musculus
  siRNA target sequence for Autl1 (NM_175029.2,1379-1397).
caattctgacgtgattgat

SEQ ID NO: 785315 - DNA, 19 bp, Mus musculus
  siRNA target sequence for Autl1 (NM_175029.2,1384-1402).
ctgacgtgattgataagca

SEQ ID NO: 785316 - DNA, 19 bp, Mus musculus
  siRNA target sequence for Autl1 (NM_175029.2,1431-1449).
cgtgacaaggctgtcatta

SEQ ID NO: 785317 - DNA, 19 bp, Mus musculus
  siRNA target sequence for Autl1 (NM_175029.2,1434-1452).
gacaaggctgtcattattt

SEQ ID NO: 785318 - DNA, 19 bp, Mus musculus
  siRNA target sequence for Autl1 (NM_175029.2,1436-1454).
caaggctgtcattatttta

SEQ ID NO: 785319 - DNA, 19 bp, Mus musculus
  siRNA target sequence for Autl1 (NM_175029.2,1470-1488).
ggtggagaaaggaccaata

SEQ ID NO: 785320 - DNA, 19 bp, Mus musculus
  siRNA target sequence for Autl1 (NM_175029.2,1480-1498).
ggaccaataccgactatct

SEQ ID NO: 785321 - DNA, 19 bp, Mus musculus
  siRNA target sequence for Autl1 (NM_175029.2,1489-1507).
ccgactatctggagtttgt

SEQ ID NO: 785322 - DNA, 19 bp, Mus musculus
  siRNA target sequence for Autl1 (NM_175029.2,1544-1562).
cattggcggcaaacctaaa

SEQ ID NO: 785323 - DNA, 19 bp, Mus musculus
  siRNA target sequence for Autl1 (NM_175029.2,1552-1570).
gcaaacctaaacagtcata

SEQ ID NO: 785324 - DNA, 19 bp, Mus musculus
  siRNA target sequence for Autl1 (NM_175029.2,1553-1571).
caaacctaaacagtcatat

SEQ ID NO: 785325 - DNA, 19 bp, Mus musculus
  siRNA target sequence for Autl1 (NM_175029.2,1624-1642).
gccagtcttttgtagatgt

SEQ ID NO: 785326 - DNA, 19 bp, Mus musculus
  siRNA target sequence for Autl1 (NM_175029.2,1716-1734).
cctagttgtacgataggat

SEQ ID NO: 785327 - DNA, 19 bp, Mus musculus
  siRNA target sequence for Autl1 (NM_175029.2,1717-1735).
ctagttgtacgataggatt

SEQ ID NO: 785328 - DNA, 19 bp, Mus musculus
  siRNA target sequence for Autl1 (NM_175029.2,1720-1738).
gttgtacgataggatttta

SEQ ID NO: 785329 - DNA, 19 bp, Mus musculus
  siRNA target sequence for Autl1 (NM_175029.2,1732-1750).
gattttactgtcgaaatgt

SEQ ID NO: 785330 - DNA, 19 bp, Mus musculus
  siRNA target sequence for Autl1 (NM_175029.2,1776-1794).
gaaatcactaagatgttga

SEQ ID NO: 785331 - DNA, 19 bp, Mus musculus
  siRNA target sequence for Autl1 (NM_175029.2,1802-1820).
ctctaaggagaaatatcca

SEQ ID NO: 785332 - DNA, 19 bp, Mus musculus
  siRNA target sequence for Autl1 (NM_175029.2,1809-1827).
gagaaatatccactattta

SEQ ID NO: 785333 - DNA, 19 bp, Mus musculus
  siRNA target sequence for Autl1 (NM_175029.2,1811-1829).
gaaatatccactatttact

SEQ ID NO: 785334 - DNA, 19 bp, Mus musculus
  siRNA target sequence for Autl1 (NM_175029.2,1924-1942).
gatttagcacagaagagtt

SEQ ID NO: 785335 - DNA, 19 bp, Mus musculus
  siRNA target sequence for 4833401D15 (NM_175030.1,487-505).
ctaggttcacgagttagtt

SEQ ID NO: 785336 - DNA, 19 bp, Mus musculus
  siRNA target sequence for 4833401D15 (NM_175030.1,490-508).
ggttcacgagttagttttt

SEQ ID NO: 785337 - DNA, 19 bp, Mus musculus
  siRNA target sequence for 4833401D15 (NM_175030.1,672-690).
ggtgcaggcactatgtgaa

SEQ ID NO: 785338 - DNA, 19 bp, Mus musculus
  siRNA target sequence for 4833401D15 (NM_175030.1,717-735).
caacctaccccgctacaaa

SEQ ID NO: 785339 - DNA, 19 bp, Mus musculus
  siRNA target sequence for A830023L05 (NM_175032.1,173-191).
ggtttctgcaaatgacttt

SEQ ID NO: 785340 - DNA, 19 bp, Mus musculus
  siRNA target sequence for A830023L05 (NM_175032.1,229-247).
ggtctctggtctttgtaca

SEQ ID NO: 785341 - DNA, 19 bp, Mus musculus
  siRNA target sequence for A830023L05 (NM_175032.1,230-248).
gtctctggtctttgtacaa

SEQ ID NO: 785342 - DNA, 19 bp, Mus musculus
  siRNA target sequence for A830023L05 (NM_175032.1,236-254).
ggtctttgtacaaggataa

SEQ ID NO: 785343 - DNA, 19 bp, Mus musculus
  siRNA target sequence for A830023L05 (NM_175032.1,237-255).
gtctttgtacaaggataaa

SEQ ID NO: 785344 - DNA, 19 bp, Mus musculus
  siRNA target sequence for A830023L05 (NM_175032.1,250-268).
gataaacacctggtgaaat

SEQ ID NO: 785345 - DNA, 19 bp, Mus musculus
  siRNA target sequence for A830023L05 (NM_175032.1,282-300).
ggagcatcagacatttcca

SEQ ID NO: 785346 - DNA, 19 bp, Mus musculus
  siRNA target sequence for A830023L05 (NM_175032.1,401-419).
ggaaaggtgaacatggaaa

SEQ ID NO: 785347 - DNA, 19 bp, Mus musculus
  siRNA target sequence for A830023L05 (NM_175032.1,406-424).
ggtgaacatggaaaaccat

SEQ ID NO: 785348 - DNA, 19 bp, Mus musculus
  siRNA target sequence for A830023L05 (NM_175032.1,472-490).
ggcttcaacatttttgtca

SEQ ID NO: 785349 - DNA, 19 bp, Mus musculus
  siRNA target sequence for A830023L05 (NM_175032.1,581-599).
gcatcattatcccatttca

SEQ ID NO: 785350 - DNA, 19 bp, Mus musculus
  siRNA target sequence for A830023L05 (NM_175032.1,624-642).
gcggaccatacacagtata

SEQ ID NO: 785351 - DNA, 19 bp, Mus musculus
  siRNA target sequence for A830023L05 (NM_175032.1,625-643).
cggaccatacacagtataa

SEQ ID NO: 785352 - DNA, 19 bp, Mus musculus
  siRNA target sequence for A830023L05 (NM_175032.1,626-644).
ggaccatacacagtataat

SEQ ID NO: 785353 - DNA, 19 bp, Mus musculus
  siRNA target sequence for A830023L05 (NM_175032.1,629-647).
ccatacacagtataatcaa

SEQ ID NO: 785354 - DNA, 19 bp, Mus musculus
  siRNA target sequence for LOC280621 (NM_175033.1,408-426).
ctaggtcgggtctttccta

SEQ ID NO: 785355 - DNA, 19 bp, Mus musculus
  siRNA target sequence for LOC280621 (NM_175033.1,412-430).
gtcgggtctttcctaagat

SEQ ID NO: 785356 - DNA, 19 bp, Mus musculus
  siRNA target sequence for LOC280621 (NM_175033.1,414-432).
cgggtctttcctaagatct

SEQ ID NO: 785357 - DNA, 19 bp, Mus musculus
  siRNA target sequence for LOC280621 (NM_175033.1,667-685).
ccatggcctccagtacatt

SEQ ID NO: 785358 - DNA, 19 bp, Mus musculus
  siRNA target sequence for LOC280621 (NM_175033.1,703-721).
ccaaccctacactagagtt

SEQ ID NO: 785359 - DNA, 19 bp, Mus musculus
  siRNA target sequence for LOC280621 (NM_175033.1,756-774).
ggtaagctctccacgattt

SEQ ID NO: 785360 - DNA, 19 bp, Mus musculus
  siRNA target sequence for LOC280621 (NM_175033.1,832-850).
caacgcccaacagaatctt

SEQ ID NO: 785361 - DNA, 19 bp, Mus musculus
  siRNA target sequence for LOC280621 (NM_175033.1,835-853).
cgcccaacagaatcttgat

SEQ ID NO: 785362 - DNA, 19 bp, Mus musculus
  siRNA target sequence for LOC280621 (NM_175033.1,881-899).
ctatggccttcggtacatt

SEQ ID NO: 785363 - DNA, 19 bp, Mus musculus
  siRNA target sequence for LOC280621 (NM_175033.1,886-904).
gccttcggtacattatact

SEQ ID NO: 785364 - DNA, 19 bp, Mus musculus
  siRNA target sequence for LOC280621 (NM_175033.1,888-906).
cttcggtacattatactga

SEQ ID NO: 785365 - DNA, 19 bp, Mus musculus
  siRNA target sequence for LOC280621 (NM_175033.1,891-909).
cggtacattatactgaaaa

SEQ ID NO: 785366 - DNA, 19 bp, Mus musculus
  siRNA target sequence for LOC280621 (NM_175033.1,920-938).
gcatcaattcccaaacctt

SEQ ID NO: 785367 - DNA, 19 bp, Mus musculus
  siRNA target sequence for LOC280621 (NM_175033.1,996-1014).
gatgggaagctgatccatt

SEQ ID NO: 785368 - DNA, 19 bp, Mus musculus
  siRNA target sequence for LOC280621 (NM_175033.1,1048-1066).
ccggtctgaagaaacttgt

SEQ ID NO: 785369 - DNA, 19 bp, Mus musculus
  siRNA target sequence for LOC280621 (NM_175033.1,1058-1076).
gaaacttgtgggtgctatt

SEQ ID NO: 785370 - DNA, 19 bp, Mus musculus
  siRNA target sequence for LOC280621 (NM_175033.1,1069-1087).
gtgctattgacgaagagat

SEQ ID NO: 785371 - DNA, 19 bp, Mus musculus
  siRNA target sequence for LOC280621 (NM_175033.1,1072-1090).
ctattgacgaagagatcaa

SEQ ID NO: 785372 - DNA, 19 bp, Mus musculus
  siRNA target sequence for E230026N22Rik (NM_175035.3,208-226).
ccttcagaagagcacatat

SEQ ID NO: 785373 - DNA, 19 bp, Mus musculus
  siRNA target sequence for E230026N22Rik (NM_175035.3,217-235).
gagcacatatggaactata

SEQ ID NO: 785374 - DNA, 19 bp, Mus musculus
  siRNA target sequence for E230026N22Rik (NM_175035.3,219-237).
gcacatatggaactatagt

SEQ ID NO: 785375 - DNA, 19 bp, Mus musculus
  siRNA target sequence for E230026N22Rik (NM_175035.3,220-238).
cacatatggaactatagtt

SEQ ID NO: 785376 - DNA, 19 bp, Mus musculus
  siRNA target sequence for E230026N22Rik (NM_175035.3,222-240).
catatggaactatagttca

SEQ ID NO: 785377 - DNA, 19 bp, Mus musculus
  siRNA target sequence for E230026N22Rik (NM_175035.3,988-1006).
gggcagctggatagctaaa

SEQ ID NO: 785378 - DNA, 19 bp, Mus musculus
  siRNA target sequence for E230026N22Rik (NM_175035.3,994-1012).
ctggatagctaaaatgatt

SEQ ID NO: 785379 - DNA, 19 bp, Mus musculus
  siRNA target sequence for E230026N22Rik (NM_175035.3,1105-1123).
gtgtattagcaggtgtaaa

SEQ ID NO: 785380 - DNA, 19 bp, Mus musculus
  siRNA target sequence for Kdt1 (NM_175088.2,416-434).
cccacgaagcatgtaatga

SEQ ID NO: 785381 - DNA, 19 bp, Mus musculus
  siRNA target sequence for Kdt1 (NM_175088.2,424-442).
gcatgtaatgaggacaata

SEQ ID NO: 785382 - DNA, 19 bp, Mus musculus
  siRNA target sequence for Kdt1 (NM_175088.2,435-453).
ggacaatacggagaaagat

SEQ ID NO: 785383 - DNA, 19 bp, Mus musculus
  siRNA target sequence for Kdt1 (NM_175088.2,436-454).
gacaatacggagaaagata

SEQ ID NO: 785384 - DNA, 19 bp, Mus musculus
  siRNA target sequence for Kdt1 (NM_175088.2,504-522).
gtccatttggccaaatcct

SEQ ID NO: 785385 - DNA, 19 bp, Mus musculus
  siRNA target sequence for Kdt1 (NM_175088.2,597-615).
ggaggaaacaggcaagata

SEQ ID NO: 785386 - DNA, 19 bp, Mus musculus
  siRNA target sequence for Kdt1 (NM_175088.2,642-660).
caatgggaatggaattcct

SEQ ID NO: 785387 - DNA, 19 bp, Mus musculus
  siRNA target sequence for Kdt1 (NM_175088.2,676-694).
gtgtccgtggagaatcaca

SEQ ID NO: 785388 - DNA, 19 bp, Mus musculus
  siRNA target sequence for Kdt1 (NM_175088.2,681-699).
cgtggagaatcacaagata

SEQ ID NO: 785389 - DNA, 19 bp, Mus musculus
  siRNA target sequence for Kdt1 (NM_175088.2,682-700).
gtggagaatcacaagatat

SEQ ID NO: 785390 - DNA, 19 bp, Mus musculus
  siRNA target sequence for Kdt1 (NM_175088.2,684-702).
ggagaatcacaagatatca

SEQ ID NO: 785391 - DNA, 19 bp, Mus musculus
  siRNA target sequence for Kdt1 (NM_175088.2,743-761).
gcttgtctgtaaacaatga

SEQ ID NO: 785392 - DNA, 19 bp, Mus musculus
  siRNA target sequence for Kdt1 (NM_175088.2,751-769).
gtaaacaatgacatcagta

SEQ ID NO: 785393 - DNA, 19 bp, Mus musculus
  siRNA target sequence for Kdt1 (NM_175088.2,935-953).
gttgctgtggcgatgagat

SEQ ID NO: 785394 - DNA, 19 bp, Mus musculus
  siRNA target sequence for Kdt1 (NM_175088.2,1042-1060).
gaatgctgtggcatctgtt

SEQ ID NO: 785395 - DNA, 19 bp, Mus musculus
  siRNA target sequence for Slc31a1 (NM_175090.2,195-213).
cggacgacaacattaccat

SEQ ID NO: 785396 - DNA, 19 bp, Mus musculus
  siRNA target sequence for Slc31a1 (NM_175090.2,263-281).
ggggacagcatgatgatga

SEQ ID NO: 785397 - DNA, 19 bp, Mus musculus
  siRNA target sequence for Slc31a1 (NM_175090.2,331-349).
cggtttggtaatcaataca

SEQ ID NO: 785398 - DNA, 19 bp, Mus musculus
  siRNA target sequence for Slc31a1 (NM_175090.2,369-387).
ccttcgtggcagtgttttt

SEQ ID NO: 785399 - DNA, 19 bp, Mus musculus
  siRNA target sequence for Slc31a1 (NM_175090.2,370-388).
cttcgtggcagtgttttta

SEQ ID NO: 785400 - DNA, 19 bp, Mus musculus
  siRNA target sequence for Slc31a1 (NM_175090.2,373-391).
cgtggcagtgtttttacta

SEQ ID NO: 785401 - DNA, 19 bp, Mus musculus
  siRNA target sequence for Slc31a1 (NM_175090.2,378-396).
cagtgtttttactagcaat

SEQ ID NO: 785402 - DNA, 19 bp, Mus musculus
  siRNA target sequence for Slc31a1 (NM_175090.2,453-471).
gcattcgctacaattccat

SEQ ID NO: 785403 - DNA, 19 bp, Mus musculus
  siRNA target sequence for Slc31a1 (NM_175090.2,486-504).
caaatggaaccatcctaat

SEQ ID NO: 785404 - DNA, 19 bp, Mus musculus
  siRNA target sequence for Slc31a1 (NM_175090.2,499-517).
cctaatggagacacacaaa

SEQ ID NO: 785405 - DNA, 19 bp, Mus musculus
  siRNA target sequence for Slc31a1 (NM_175090.2,500-518).
ctaatggagacacacaaaa

SEQ ID NO: 785406 - DNA, 19 bp, Mus musculus
  siRNA target sequence for Slc31a1 (NM_175090.2,505-523).
ggagacacacaaaactgtt

SEQ ID NO: 785407 - DNA, 19 bp, Mus musculus
  siRNA target sequence for Slc31a1 (NM_175090.2,622-640).
caatgggtacctatgcatt

SEQ ID NO: 785408 - DNA, 19 bp, Mus musculus
  siRNA target sequence for Slc31a1 (NM_175090.2,654-672).
gggctgggacgggatactt

SEQ ID NO: 785409 - DNA, 19 bp, Mus musculus
  siRNA target sequence for D3Ertd176e (NM_175095.2,152-170).
gctcaaacccgaagatcta

SEQ ID NO: 785410 - DNA, 19 bp, Mus musculus
  siRNA target sequence for D3Ertd176e (NM_175095.2,216-234).
gcatggtgtggaaggatta

SEQ ID NO: 785411 - DNA, 19 bp, Mus musculus
  siRNA target sequence for D3Ertd176e (NM_175095.2,217-235).
catggtgtggaaggattaa

SEQ ID NO: 785412 - DNA, 19 bp, Mus musculus
  siRNA target sequence for D3Ertd176e (NM_175095.2,220-238).
ggtgtggaaggattaacgt

SEQ ID NO: 785413 - DNA, 19 bp, Mus musculus
  siRNA target sequence for D3Ertd176e (NM_175095.2,221-239).
gtgtggaaggattaacgta

SEQ ID NO: 785414 - DNA, 19 bp, Mus musculus
  siRNA target sequence for D3Ertd176e (NM_175095.2,252-270).
gagctcaaagcttatgatt

SEQ ID NO: 785415 - DNA, 19 bp, Mus musculus
  siRNA target sequence for D3Ertd176e (NM_175095.2,397-415).
cgtcttcccagttaccata

SEQ ID NO: 785416 - DNA, 19 bp, Mus musculus
  siRNA target sequence for D3Ertd176e (NM_175095.2,452-470).
gaagtctccggcaacagat

SEQ ID NO: 785417 - DNA, 19 bp, Mus musculus
  siRNA target sequence for D3Ertd176e (NM_175095.2,455-473).
gtctccggcaacagattaa

SEQ ID NO: 785418 - DNA, 19 bp, Mus musculus
  siRNA target sequence for D3Ertd176e (NM_175095.2,511-529).
ggcgaccacagcactcatt

SEQ ID NO: 785419 - DNA, 19 bp, Mus musculus
  siRNA target sequence for D3Ertd176e (NM_175095.2,512-530).
gcgaccacagcactcattt

SEQ ID NO: 785420 - DNA, 19 bp, Mus musculus
  siRNA target sequence for D3Ertd176e (NM_175095.2,548-566).
ctaccctgcttcatttggt

SEQ ID NO: 785421 - DNA, 19 bp, Mus musculus
  siRNA target sequence for D3Ertd176e (NM_175095.2,583-601).
gcgttagaggaaatgaaaa

SEQ ID NO: 785422 - DNA, 19 bp, Mus musculus
  siRNA target sequence for D3Ertd176e (NM_175095.2,619-637).
gtagtccgcagcatcaagt

SEQ ID NO: 785423 - DNA, 19 bp, Mus musculus
  siRNA target sequence for Lmo6 (NM_175097.2,354-372).
gagcaggtttaccagtttt

SEQ ID NO: 785424 - DNA, 19 bp, Mus musculus
  siRNA target sequence for Lmo6 (NM_175097.2,359-377).
ggtttaccagtttttcagt

SEQ ID NO: 785425 - DNA, 19 bp, Mus musculus
  siRNA target sequence for Lmo6 (NM_175097.2,556-574).
gacgagccaccgttcgaat

SEQ ID NO: 785426 - DNA, 19 bp, Mus musculus
  siRNA target sequence for Lmo6 (NM_175097.2,575-593).
cttcccagtgaccattact

SEQ ID NO: 785427 - DNA, 19 bp, Mus musculus
  siRNA target sequence for Lmo6 (NM_175097.2,799-817).
gccaagcgtgtgatgagat

SEQ ID NO: 785428 - DNA, 19 bp, Mus musculus
  siRNA target sequence for Lmo6 (NM_175097.2,884-902).
cgagtgtgaagcttcgtta

SEQ ID NO: 785429 - DNA, 19 bp, Mus musculus
  siRNA target sequence for Lmo6 (NM_175097.2,903-921).
ggagggcagcgctatgtca

SEQ ID NO: 785430 - DNA, 19 bp, Mus musculus
  siRNA target sequence for Lmo6 (NM_175097.2,904-922).
gagggcagcgctatgtcat

SEQ ID NO: 785431 - DNA, 19 bp, Mus musculus
  siRNA target sequence for Lmo6 (NM_175097.2,1111-1129).
cacgccgaggcctgatctt

SEQ ID NO: 785432 - DNA, 19 bp, Mus musculus
  siRNA target sequence for Lmo6 (NM_175097.2,1211-1229).
cacaccgctcacaacttct

SEQ ID NO: 785433 - DNA, 19 bp, Mus musculus
  siRNA target sequence for Lmo6 (NM_175097.2,1440-1458).
gcctttggtcgccaaagta

SEQ ID NO: 785434 - DNA, 19 bp, Mus musculus
  siRNA target sequence for Lmo6 (NM_175097.2,1442-1460).
ctttggtcgccaaagtaca

SEQ ID NO: 785435 - DNA, 19 bp, Mus musculus
  siRNA target sequence for Lmo6 (NM_175097.2,1820-1838).
cacctcaaccgaaaccttt

SEQ ID NO: 785436 - DNA, 19 bp, Mus musculus
  siRNA target sequence for 6330407D12Rik (NM_175098.2,355-373).
ggctgatgctacttcacta

SEQ ID NO: 785437 - DNA, 19 bp, Mus musculus
  siRNA target sequence for 6330407D12Rik (NM_175098.2,410-428).
gcttcgtgagcaaatccta

SEQ ID NO: 785438 - DNA, 19 bp, Mus musculus
  siRNA target sequence for 6330407D12Rik (NM_175098.2,414-432).
cgtgagcaaatcctagatt

SEQ ID NO: 785439 - DNA, 19 bp, Mus musculus
  siRNA target sequence for 6330407D12Rik (NM_175098.2,415-433).
gtgagcaaatcctagattt

SEQ ID NO: 785440 - DNA, 19 bp, Mus musculus
  siRNA target sequence for 6330407D12Rik (NM_175098.2,417-435).
gagcaaatcctagatttaa

SEQ ID NO: 785441 - DNA, 19 bp, Mus musculus
  siRNA target sequence for 6330407D12Rik (NM_175098.2,425-443).
cctagatttaagcaaaaga

SEQ ID NO: 785442 - DNA, 19 bp, Mus musculus
  siRNA target sequence for 6330407D12Rik (NM_175098.2,426-444).
ctagatttaagcaaaagat

SEQ ID NO: 785443 - DNA, 19 bp, Mus musculus
  siRNA target sequence for 6330407D12Rik (NM_175098.2,532-550).
cgattgcagtcctcttaga

SEQ ID NO: 785444 - DNA, 19 bp, Mus musculus
  siRNA target sequence for 6330407D12Rik (NM_175098.2,533-551).
gattgcagtcctcttagat

SEQ ID NO: 785445 - DNA, 19 bp, Mus musculus
  siRNA target sequence for 6330407D12Rik (NM_175098.2,579-597).
gagagcaaagtcgactata

SEQ ID NO: 785446 - DNA, 19 bp, Mus musculus
  siRNA target sequence for 6330407D12Rik (NM_175098.2,581-599).
gagcaaagtcgactatatt

SEQ ID NO: 785447 - DNA, 19 bp, Mus musculus
  siRNA target sequence for 6330407D12Rik (NM_175098.2,583-601).
gcaaagtcgactatattgt

SEQ ID NO: 785448 - DNA, 19 bp, Mus musculus
  siRNA target sequence for 6330407D12Rik (NM_175098.2,584-602).
caaagtcgactatattgtt

SEQ ID NO: 785449 - DNA, 19 bp, Mus musculus
  siRNA target sequence for 6330407D12Rik (NM_175098.2,609-627).
ggttcagccaccaacacta

SEQ ID NO: 785450 - DNA, 19 bp, Mus musculus
  siRNA target sequence for 6330407D12Rik (NM_175098.2,634-652).
gcaccaatgggaatttggt

SEQ ID NO: 785451 - DNA, 19 bp, Mus musculus
  siRNA target sequence for 6330407D12Rik (NM_175098.2,653-671).
gccggtaacgaccaacaaa

SEQ ID NO: 785452 - DNA, 19 bp, Mus musculus
  siRNA target sequence for 6330407D12Rik (NM_175098.2,654-672).
ccggtaacgaccaacaaaa

SEQ ID NO: 785453 - DNA, 19 bp, Mus musculus
  siRNA target sequence for 6330407D12Rik (NM_175098.2,657-675).
gtaacgaccaacaaaagga

SEQ ID NO: 785454 - DNA, 19 bp, Mus musculus
  siRNA target sequence for Repin1 (NM_175099.2,363-381).
cctctgccctgccatgaat

SEQ ID NO: 785455 - DNA, 19 bp, Mus musculus
  siRNA target sequence for Repin1 (NM_175099.2,447-465).
cccgacctgggtttcatct

SEQ ID NO: 785456 - DNA, 19 bp, Mus musculus
  siRNA target sequence for Repin1 (NM_175099.2,568-586).
gacgcttctggcgacaaaa

SEQ ID NO: 785457 - DNA, 19 bp, Mus musculus
  siRNA target sequence for Repin1 (NM_175099.2,679-697).
gggaccaactggttgttca

SEQ ID NO: 785458 - DNA, 19 bp, Mus musculus
  siRNA target sequence for Repin1 (NM_175099.2,1367-1385).
gtgtggtcgccgtttctca

SEQ ID NO: 785459 - DNA, 19 bp, Mus musculus
  siRNA target sequence for 0610039A15Rik (NM_175101.2,212-230).
cccatcgttatcatcactt

SEQ ID NO: 785460 - DNA, 19 bp, Mus musculus
  siRNA target sequence for 0610039A15Rik (NM_175101.2,213-231).
ccatcgttatcatcacttt

SEQ ID NO: 785461 - DNA, 19 bp, Mus musculus
  siRNA target sequence for 0610039A15Rik (NM_175101.2,250-268).
ccactacgtgtcaatccta

SEQ ID NO: 785462 - DNA, 19 bp, Mus musculus
  siRNA target sequence for 0610039A15Rik (NM_175101.2,310-328).
cagtcaggtcctaattcga

SEQ ID NO: 785463 - DNA, 19 bp, Mus musculus
  siRNA target sequence for 0610039A15Rik (NM_175101.2,370-388).
gtctttcttaacacgaaaa

SEQ ID NO: 785464 - DNA, 19 bp, Mus musculus
  siRNA target sequence for 0610039A15Rik (NM_175101.2,381-399).
cacgaaaatattacttcaa

SEQ ID NO: 785465 - DNA, 19 bp, Mus musculus
  siRNA target sequence for 0610039A15Rik (NM_175101.2,504-522).
caaatgtcctcccaatgat

SEQ ID NO: 785466 - DNA, 19 bp, Mus musculus
  siRNA target sequence for 0610039A15Rik (NM_175101.2,509-527).
gtcctcccaatgattctta

SEQ ID NO: 785467 - DNA, 19 bp, Mus musculus
  siRNA target sequence for 0610039A15Rik (NM_175101.2,530-548).
ggcggatggatcaacatga

SEQ ID NO: 785468 - DNA, 19 bp, Mus musculus
  siRNA target sequence for 0610039A15Rik (NM_175101.2,606-624).
ctatgcttcagcaaggaat

SEQ ID NO: 785469 - DNA, 19 bp, Mus musculus
  siRNA target sequence for 0610039A15Rik (NM_175101.2,666-684).
cctggtacttcctcaatgt

SEQ ID NO: 785470 - DNA, 19 bp, Mus musculus
  siRNA target sequence for 0610039A15Rik (NM_175101.2,669-687).
ggtacttcctcaatgtgtt

SEQ ID NO: 785471 - DNA, 19 bp, Mus musculus
  siRNA target sequence for 0610039A15Rik (NM_175101.2,689-707).
gggctccggagcatttact

SEQ ID NO: 785472 - DNA, 19 bp, Mus musculus
  siRNA target sequence for 0610039A15Rik (NM_175101.2,691-709).
gctccggagcatttactct

SEQ ID NO: 785473 - DNA, 19 bp, Mus musculus
  siRNA target sequence for 0610039A15Rik (NM_175101.2,695-713).
cggagcatttactctctaa

SEQ ID NO: 785474 - DNA, 19 bp, Mus musculus
  siRNA target sequence for 0610039A15Rik (NM_175101.2,710-728).
ctaatcctgggccaagata

SEQ ID NO: 785475 - DNA, 19 bp, Mus musculus
  siRNA target sequence for 0610039A15Rik (NM_175101.2,735-753).
ccgaccagtcacgaatgat

SEQ ID NO: 785476 - DNA, 19 bp, Mus musculus
  siRNA target sequence for 0610039A15Rik (NM_175101.2,792-810).
cagacaccaacaaagcttt

SEQ ID NO: 785477 - DNA, 19 bp, Mus musculus
  siRNA target sequence for 0610039A15Rik (NM_175101.2,920-938).
gaactacagacgtccatat

SEQ ID NO: 785478 - DNA, 19 bp, Mus musculus
  siRNA target sequence for 0610039A15Rik (NM_175101.2,923-941).
ctacagacgtccatattct

SEQ ID NO: 785479 - DNA, 19 bp, Mus musculus
  siRNA target sequence for 2810012G03Rik (NM_175104.3,1177-1195).
ccgaggtctccgaaacctt

SEQ ID NO: 785480 - DNA, 19 bp, Mus musculus
  siRNA target sequence for 2300008B03Rik (NM_175106.2,266-284).
ggagggctgcagcctttat

SEQ ID NO: 785481 - DNA, 19 bp, Mus musculus
  siRNA target sequence for 2300008B03Rik (NM_175106.2,269-287).
gggctgcagcctttataca

SEQ ID NO: 785482 - DNA, 19 bp, Mus musculus
  siRNA target sequence for 2300008B03Rik (NM_175106.2,335-353).
gggttcaaatctcatttca

SEQ ID NO: 785483 - DNA, 19 bp, Mus musculus
  siRNA target sequence for 2300008B03Rik (NM_175106.2,587-605).
gccctgtgaccaacattga

SEQ ID NO: 785484 - DNA, 19 bp, Mus musculus
  siRNA target sequence for 2300008B03Rik (NM_175106.2,686-704).
ctcataatgcccagaagtt

SEQ ID NO: 785485 - DNA, 19 bp, Mus musculus
  siRNA target sequence for 2300008B03Rik (NM_175106.2,885-903).
ctatgtagcctataccttt

SEQ ID NO: 785486 - DNA, 19 bp, Mus musculus
  siRNA target sequence for 2300008B03Rik (NM_175106.2,889-907).
gtagcctataccttttcca

SEQ ID NO: 785487 - DNA, 19 bp, Mus musculus
  siRNA target sequence for 2300008B03Rik (NM_175106.2,986-1004).
gagtggaattctatgagaa

SEQ ID NO: 785488 - DNA, 19 bp, Mus musculus
  siRNA target sequence for 2300008B03Rik (NM_175106.2,1048-1066).
caaggagaaaagctgtata

SEQ ID NO: 785489 - DNA, 19 bp, Mus musculus
  siRNA target sequence for 2300008B03Rik (NM_175106.2,1097-1115).
ggtttcgcatcaaccattt

SEQ ID NO: 785490 - DNA, 19 bp, Mus musculus
  siRNA target sequence for 2300008B03Rik (NM_175106.2,1133-1151).
gggactctctacaacagat

SEQ ID NO: 785491 - DNA, 19 bp, Mus musculus
  siRNA target sequence for 2310022A10Rik (NM_175107.3,223-241).
ccgagtggatccagttctt

SEQ ID NO: 785492 - DNA, 19 bp, Mus musculus
  siRNA target sequence for 2310022A10Rik (NM_175107.3,320-338).
gctgctagatcttaataaa

SEQ ID NO: 785493 - DNA, 19 bp, Mus musculus
  siRNA target sequence for 2310022A10Rik (NM_175107.3,323-341).
gctagatcttaataaagaa

SEQ ID NO: 785494 - DNA, 19 bp, Mus musculus
  siRNA target sequence for 2310022A10Rik (NM_175107.3,324-342).
ctagatcttaataaagaaa

SEQ ID NO: 785495 - DNA, 19 bp, Mus musculus
  siRNA target sequence for 2310022A10Rik (NM_175107.3,364-382).
ccgtcgtgggtgatatcat

SEQ ID NO: 785496 - DNA, 19 bp, Mus musculus
  siRNA target sequence for 2310022A10Rik (NM_175107.3,365-383).
cgtcgtgggtgatatcatt

SEQ ID NO: 785497 - DNA, 19 bp, Mus musculus
  siRNA target sequence for 2310022A10Rik (NM_175107.3,499-517).
gtgccgcttctcgaatgat

SEQ ID NO: 785498 - DNA, 19 bp, Mus musculus
  siRNA target sequence for 2310022A10Rik (NM_175107.3,1222-1240).
cctcagctgaggtcaagtt

SEQ ID NO: 785499 - DNA, 19 bp, Mus musculus
  siRNA target sequence for 2310022A10Rik (NM_175107.3,1232-1250).
ggtcaagttcgccattaaa

SEQ ID NO: 785500 - DNA, 19 bp, Mus musculus
  siRNA target sequence for 2310022A10Rik (NM_175107.3,1341-1359).
ctgggccaaaggactttct

SEQ ID NO: 785501 - DNA, 19 bp, Mus musculus
  siRNA target sequence for 2510038A11Rik (NM_175109.2,137-155).
cctcccaggctctgaaact

SEQ ID NO: 785502 - DNA, 19 bp, Mus musculus
  siRNA target sequence for 2510038A11Rik (NM_175109.2,414-432).
gttccagagggaatatttt

SEQ ID NO: 785503 - DNA, 19 bp, Mus musculus
  siRNA target sequence for 5730577I03Rik (NM_175110.2,513-531).
gttctgcctatcaaatgta
